United States Patent Application Publication US 2007/0009899 A1 - sequence listing, part 7

SEQ ID NO: 127968 - DNA, 25 bp, Canis familiaris
gatcagcgcatcagcatctggtcgc

SEQ ID NO: 127969 - DNA, 25 bp, Canis familiaris
gatcacagctcaggaagcagtggct

SEQ ID NO: 127970 - DNA, 25 bp, Canis familiaris
gatcgcagcgagggagctgctctgc

SEQ ID NO: 127971 - DNA, 25 bp, Canis familiaris
gatcgcaggagctgactgcactttc

SEQ ID NO: 127972 - DNA, 25 bp, Canis familiaris
gatctgcatacacatgacaactttc

SEQ ID NO: 127973 - DNA, 25 bp, Canis familiaris
gatctgtagagcacacacaatcttt

SEQ ID NO: 127974 - DNA, 25 bp, Canis familiaris
gatcttgtccatgccaaatctattg

SEQ ID NO: 127975 - DNA, 25 bp, Canis familiaris
gatcgttccacctaaactggatcct

SEQ ID NO: 127976 - DNA, 25 bp, Canis familiaris
gatagcgtggagccaaagggttgcc

SEQ ID NO: 127977 - DNA, 25 bp, Canis familiaris
gatcgcggcgagactaggggggcgt

SEQ ID NO: 127978 - DNA, 25 bp, Canis familiaris
gatcatcgccgactgcggggagtac

SEQ ID NO: 127979 - DNA, 25 bp, Canis familiaris
gatcctggggtcttgggattaggcc

SEQ ID NO: 127980 - DNA, 25 bp, Canis familiaris
gatcctggggtcgtgggatggagtc

SEQ ID NO: 127981 - DNA, 25 bp, Canis familiaris
gatcctggggacccggatggagtcc

SEQ ID NO: 127982 - DNA, 25 bp, Canis familiaris
gatcctgggggtccccaggtgccac

SEQ ID NO: 127983 - DNA, 25 bp, Canis familiaris
gataggggaggaaccctggtcttgc

SEQ ID NO: 127984 - DNA, 25 bp, Canis familiaris
gtccgggaggacatgtcggtcgggg

SEQ ID NO: 127985 - DNA, 25 bp, Canis familiaris
gatcctggggtactggactgagtcc

SEQ ID NO: 127986 - DNA, 25 bp, Canis familiaris
gatcctggaggtgctgtactgtgtc

SEQ ID NO: 127987 - DNA, 25 bp, Canis familiaris
gatctatgtggggtggtactctggt

SEQ ID NO: 127988 - DNA, 25 bp, Canis familiaris
gatttggggtccctattctgtttcg

SEQ ID NO: 127989 - DNA, 25 bp, Canis familiaris
gatctctagggcaccatgaatcctg

SEQ ID NO: 127990 - DNA, 25 bp, Canis familiaris
gatttagccgaacgtaattctgggt

SEQ ID NO: 127991 - DNA, 25 bp, Canis familiaris
gattacccggtgcatactccggggc

SEQ ID NO: 127992 - DNA, 25 bp, Canis familiaris
gattagtccagactggttcaccaca

SEQ ID NO: 127993 - DNA, 25 bp, Canis familiaris
gatctagttccaaatttcactcaag

SEQ ID NO: 127994 - DNA, 25 bp, Canis familiaris
gatcccttacaatgattaccagcac

SEQ ID NO: 127995 - DNA, 25 bp, Canis familiaris
gatccctatgagaaagcttgcccaa

SEQ ID NO: 127996 - DNA, 25 bp, Canis familiaris
gatccctatgagaaagcttgccaaa

SEQ ID NO: 127997 - DNA, 25 bp, Canis familiaris
gatccgaatggccaagcttctggga

SEQ ID NO: 127998 - DNA, 25 bp, Canis familiaris
gatccgagaatggctactcctcggt

SEQ ID NO: 127999 - DNA, 25 bp, Canis familiaris
gatcccaggacgcacatcgatctgg

SEQ ID NO: 128000 - DNA, 25 bp, Canis familiaris
gatccctggacttagatgcaggtgg

SEQ ID NO: 128001 - DNA, 25 bp, Canis familiaris
gatccctcccttagatggtgatggt

SEQ ID NO: 128002 - DNA, 25 bp, Canis familiaris
gatctgaccagtctggggtgtgtgt

SEQ ID NO: 128003 - DNA, 25 bp, Canis familiaris
gatctcgccaggtgggtttgttctg

SEQ ID NO: 128004 - DNA, 25 bp, Canis familiaris
gtcacctaagggcttctgatttcgg

SEQ ID NO: 128005 - DNA, 25 bp, Canis familiaris
gtgacccaacgctggacttttgggg

SEQ ID NO: 128006 - DNA, 25 bp, Canis familiaris
gatacacgaccccggagttgttgtc

SEQ ID NO: 128007 - DNA, 25 bp, Canis familiaris
gatcacacgactacatcgggttata

SEQ ID NO: 128008 - DNA, 25 bp, Canis familiaris
gatcaagggcttacgggcattgggc

SEQ ID NO: 128009 - DNA, 25 bp, Canis familiaris
gatcaaggcagccctggagtcggtg

SEQ ID NO: 128010 - DNA, 25 bp, Canis familiaris
gatcataggaggtttagtctcgtta

SEQ ID NO: 128011 - DNA, 25 bp, Canis familiaris
gatcttcgggtaatagctgctctat

SEQ ID NO: 128012 - DNA, 25 bp, Canis familiaris
gatcttcaacgtaaagggctatcga

SEQ ID NO: 128013 - DNA, 25 bp, Canis familiaris
gatcgtatatcacatacaggactct

SEQ ID NO: 128014 - DNA, 25 bp, Canis familiaris
gatccctgtgatttacaggagccta

SEQ ID NO: 128015 - DNA, 25 bp, Canis familiaris
gatctactgtttttcaggaatccat

SEQ ID NO: 128016 - DNA, 25 bp, Canis familiaris
gatctactgttgaataaggagtatt

SEQ ID NO: 128017 - DNA, 25 bp, Canis familiaris
gatctaccttgtaatctaggttacc

SEQ ID NO: 128018 - DNA, 25 bp, Canis familiaris
gatcgaccttttaaaaatgtacaca

SEQ ID NO: 128019 - DNA, 25 bp, Canis familiaris
gatcgatccctgcttaaaactatca

SEQ ID NO: 128020 - DNA, 25 bp, Canis familiaris
gatcaatgccctcattaaagcagcg

SEQ ID NO: 128021 - DNA, 25 bp, Canis familiaris
gatcagaccgtgaactggaagatgg

SEQ ID NO: 128022 - DNA, 25 bp, Canis familiaris
gataaagcctgaacctgaagacggt

SEQ ID NO: 128023 - DNA, 25 bp, Canis familiaris
gataaacctagactccagcagaatt

SEQ ID NO: 128024 - DNA, 25 bp, Canis familiaris
gtacgcccatttctcagaaataaag

SEQ ID NO: 128025 - DNA, 25 bp, Canis familiaris
gataaccagtttttgcagaaaaacg

SEQ ID NO: 128026 - DNA, 25 bp, Canis familiaris
gataaagcagtccttgtagcaacaa

SEQ ID NO: 128027 - DNA, 25 bp, Canis familiaris
gatccccagagcctttcagaaaagg

SEQ ID NO: 128028 - DNA, 25 bp, Canis familiaris
gatcctccaggacttaagacaccag

SEQ ID NO: 128029 - DNA, 25 bp, Canis familiaris
gatcctccagtacttggtgtattcg

SEQ ID NO: 128030 - DNA, 25 bp, Canis familiaris
gatcctgccatctgtatatttttgg

SEQ ID NO: 128031 - DNA, 25 bp, Canis familiaris
gatcctgctataacttattattaga

SEQ ID NO: 128032 - DNA, 25 bp, Canis familiaris
gatcgctgattaatgtcgttgttgt

SEQ ID NO: 128033 - DNA, 25 bp, Canis familiaris
gatctgctgcaggggttttgttgtt

SEQ ID NO: 128034 - DNA, 25 bp, Canis familiaris
gatcatggaactcgtttttttagga

SEQ ID NO: 128035 - DNA, 25 bp, Canis familiaris
gatctacttacactttcttggggga

SEQ ID NO: 128036 - DNA, 25 bp, Canis familiaris
gatctggtttcagaaccggaggatg

SEQ ID NO: 128037 - DNA, 25 bp, Canis familiaris
gatcggtttcagtactttgtgaggg

SEQ ID NO: 128038 - DNA, 25 bp, Canis familiaris
gatctgtgtgttatactctttgaaa

SEQ ID NO: 128039 - DNA, 25 bp, Canis familiaris
gatcttccccattcactaattataa

SEQ ID NO: 128040 - DNA, 25 bp, Canis familiaris
gatcttccagtcacgtaatgtcttg

SEQ ID NO: 128041 - DNA, 25 bp, Canis familiaris
gatcttcagcgtatcgaactaatgc

SEQ ID NO: 128042 - DNA, 25 bp, Canis familiaris
gatcttaggcttaataacaggtcgc

SEQ ID NO: 128043 - DNA, 25 bp, Canis familiaris
gatcttgaggtctgggatgaagtcc

SEQ ID NO: 128044 - DNA, 25 bp, Canis familiaris
gatactgagttctggtgcggagtcc

SEQ ID NO: 128045 - DNA, 25 bp, Canis familiaris
gatacgtgttcagtgtgctgggggg

SEQ ID NO: 128046 - DNA, 25 bp, Canis familiaris
gatctcaggttcggtgtaggcgtcg

SEQ ID NO: 128047 - DNA, 25 bp, Canis familiaris
gatctaggtatactgctttgggtct

SEQ ID NO: 128048 - DNA, 25 bp, Canis familiaris
gatcttaggaggttttgcagaggct

SEQ ID NO: 128049 - DNA, 25 bp, Canis familiaris
gatctatcgggggcatatcagcata

SEQ ID NO: 128050 - DNA, 25 bp, Canis familiaris
gatctgacagtgaggaatcagtacc

SEQ ID NO: 128051 - DNA, 25 bp, Canis familiaris
gatcgacagctaggaccatcgtcac

SEQ ID NO: 128052 - DNA, 25 bp, Canis familiaris
gatcagatagcaagacccaaccaca

SEQ ID NO: 128053 - DNA, 25 bp, Canis familiaris
gatcatagcacatagcagccacctc

SEQ ID NO: 128054 - DNA, 25 bp, Canis familiaris
gatctgatgcacaaaatgccctccc

SEQ ID NO: 128055 - DNA, 25 bp, Canis familiaris
gatcatgtgactcaatgtgcattca

SEQ ID NO: 128056 - DNA, 25 bp, Canis familiaris
gataatggtccagttcatatacgtc

SEQ ID NO: 128057 - DNA, 25 bp, Canis familiaris
gatcgaggcccagggcagcaaggac

SEQ ID NO: 128058 - DNA, 25 bp, Canis familiaris
gatcctgtcccagacagctgacgac

SEQ ID NO: 128059 - DNA, 25 bp, Canis familiaris
gatccggtcgactaatctgacgcac

SEQ ID NO: 128060 - DNA, 25 bp, Canis familiaris
gatccgctattgtatttcgaccaac

SEQ ID NO: 128061 - DNA, 25 bp, Canis familiaris
gatccgcttttgtattttctaacca

SEQ ID NO: 128062 - DNA, 25 bp, Canis familiaris
gatctctgtttttttggtggtgacc

SEQ ID NO: 128063 - DNA, 25 bp, Canis familiaris
gatctcgtaacttttactagttgga

SEQ ID NO: 128064 - DNA, 25 bp, Canis familiaris
gatctcgttccaattaacttttact

SEQ ID NO: 128065 - DNA, 25 bp, Canis familiaris
gatctctgactgactttaagtgttt

SEQ ID NO: 128066 - DNA, 25 bp, Canis familiaris
gatctctcctggacttttggttttg

SEQ ID NO: 128067 - DNA, 25 bp, Canis familiaris
gatctccttggagtcttttcttttc

SEQ ID NO: 128068 - DNA, 25 bp, Canis familiaris
gatcccaggaatgcgtggctttttc

SEQ ID NO: 128069 - DNA, 25 bp, Canis familiaris
gatcccaggactgttatttgtgtca

SEQ ID NO: 128070 - DNA, 25 bp, Canis familiaris
gatcccagggggttattcttgttca

SEQ ID NO: 128071 - DNA, 25 bp, Canis familiaris
gatcccgttggtggtgattctgttt

SEQ ID NO: 128072 - DNA, 25 bp, Canis familiaris
gatccgggttgtgtacatcagtttc

SEQ ID NO: 128073 - DNA, 25 bp, Canis familiaris
gataaaggggtgtgaccagtttcct

SEQ ID NO: 128074 - DNA, 25 bp, Canis familiaris
gattaacgggtgcaagggcttatcc

SEQ ID NO: 128075 - DNA, 25 bp, Canis familiaris
gatctcccgggaagcaaggtgtcat

SEQ ID NO: 128076 - DNA, 25 bp, Canis familiaris
gatcccccgagaagctgtatttctt

SEQ ID NO: 128077 - DNA, 25 bp, Canis familiaris
gatcccttcaggaactgtttctgga

SEQ ID NO: 128078 - DNA, 25 bp, Canis familiaris
gatccctctcatctgatgtttttta

SEQ ID NO: 128079 - DNA, 25 bp, Canis familiaris
gatcgcttttgctatgagtttgctt

SEQ ID NO: 128080 - DNA, 25 bp, Canis familiaris
gatcgtctgatttctaatatctttc

SEQ ID NO: 128081 - DNA, 25 bp, Canis familiaris
gatccctcattcttaaacatgaaca

SEQ ID NO: 128082 - DNA, 25 bp, Canis familiaris
gatccctttcacaatatcacaggac

SEQ ID NO: 128083 - DNA, 25 bp, Canis familiaris
gatcttcctcatgctgttcaggaga

SEQ ID NO: 128084 - DNA, 25 bp, Canis familiaris
gatcttgacagagctgggcctgcac

SEQ ID NO: 128085 - DNA, 25 bp, Canis familiaris
gatcttggagcaggagcgggcttcg

SEQ ID NO: 128086 - DNA, 25 bp, Canis familiaris
gatcttggagcaggagcgggcagag

SEQ ID NO: 128087 - DNA, 25 bp, Canis familiaris
gatctatacagagaggggaaacggg

SEQ ID NO: 128088 - DNA, 25 bp, Canis familiaris
gatcacataagcacgtgggaaatgc

SEQ ID NO: 128089 - DNA, 25 bp, Canis familiaris
gataacccggagtgcgaaatgccaa

SEQ ID NO: 128090 - DNA, 25 bp, Canis familiaris
gataccccgggatttggagatgcag

SEQ ID NO: 128091 - DNA, 25 bp, Canis familiaris
gataccccctgtgaagaggttgggt

SEQ ID NO: 128092 - DNA, 25 bp, Canis familiaris
gataccccctgggaggagtgtcaca

SEQ ID NO: 128093 - DNA, 25 bp, Canis familiaris
gataatcctgcctgggaaggagaca

SEQ ID NO: 128094 - DNA, 25 bp, Canis familiaris
gatcataccctctcgtggaagaaga

SEQ ID NO: 128095 - DNA, 25 bp, Canis familiaris
gataaccaagcatctgttaaaccct

SEQ ID NO: 128096 - DNA, 25 bp, Canis familiaris
gatctgtccaaactctgttcacaac

SEQ ID NO: 128097 - DNA, 25 bp, Canis familiaris
gatctgtccctaatctgttgtgcat

SEQ ID NO: 128098 - DNA, 25 bp, Canis familiaris
gatctctccctcacattattggggg

SEQ ID NO: 128099 - DNA, 25 bp, Canis familiaris
gatcatgcccctgcaacgtggggca

SEQ ID NO: 128100 - DNA, 25 bp, Canis familiaris
gatcagtccctggctagggcaggag

SEQ ID NO: 128101 - DNA, 25 bp, Canis familiaris
gatcacgcccgggactgaaggcggc

SEQ ID NO: 128102 - DNA, 25 bp, Canis familiaris
gatcacgcccggagtagaagcgcat

SEQ ID NO: 128103 - DNA, 25 bp, Canis familiaris
gatcaccccagggagttgaactgca

SEQ ID NO: 128104 - DNA, 25 bp, Canis familiaris
gatccccacgtcaaattgcaacttc

SEQ ID NO: 128105 - DNA, 25 bp, Canis familiaris
gatccccactttcaacaatattcaa

SEQ ID NO: 128106 - DNA, 25 bp, Canis familiaris
gatcgtggatcagtctaaaacatat

SEQ ID NO: 128107 - DNA, 25 bp, Canis familiaris
gatcattggatccttgaaacctaca

SEQ ID NO: 128108 - DNA, 25 bp, Canis familiaris
gatcacggactagtgacaagctctg

SEQ ID NO: 128109 - DNA, 25 bp, Canis familiaris
gatcttgggcaaatcaaagtgctgg

SEQ ID NO: 128110 - DNA, 25 bp, Canis familiaris
gatcttttgataatctgcaacctgg

SEQ ID NO: 128111 - DNA, 25 bp, Canis familiaris
gatctcttgatgtgtctcacatggt

SEQ ID NO: 128112 - DNA, 25 bp, Canis familiaris
gatctcgaatgagtgctccagcagc

SEQ ID NO: 128113 - DNA, 25 bp, Canis familiaris
gatcatcagcaatgcctcctgcacc

SEQ ID NO: 128114 - DNA, 25 bp, Canis familiaris
gatctgctgcattcatgtacctgca

SEQ ID NO: 128115 - DNA, 25 bp, Canis familiaris
gatcatggatgaggccactgctgcg

SEQ ID NO: 128116 - DNA, 25 bp, Canis familiaris
gatcatgaatcaagccctggaacag

SEQ ID NO: 128117 - DNA, 25 bp, Canis familiaris
gatcaaattggggggattctggtga

SEQ ID NO: 128118 - DNA, 25 bp, Canis familiaris
gatcaaaggggggggtatgcaacaa

SEQ ID NO: 128119 - DNA, 25 bp, Canis familiaris
gatcaagctccagtggggagtctgc

SEQ ID NO: 128120 - DNA, 25 bp, Canis familiaris
gatcaagcccctgggctgaagcagc

SEQ ID NO: 128121 - DNA, 25 bp, Canis familiaris
gatcaaggcccaagggactgaccgc

SEQ ID NO: 128122 - DNA, 25 bp, Canis familiaris
gatctctagcttgaaggcaatgacc

SEQ ID NO: 128123 - DNA, 25 bp, Canis familiaris
gatctctggcagtggaggaagtctc

SEQ ID NO: 128124 - DNA, 25 bp, Canis familiaris
gatctctggcagtggaggaagtctc

SEQ ID NO: 128125 - DNA, 25 bp, Canis familiaris
gatctgcttcagaggaaactatacc

SEQ ID NO: 128126 - DNA, 25 bp, Canis familiaris
gatctgttcagtgtaacgctaggcg

SEQ ID NO: 128127 - DNA, 25 bp, Canis familiaris
gatcgttacccgaactgcatcaggc

SEQ ID NO: 128128 - DNA, 25 bp, Canis familiaris
gatcgtccaacatgagcactcagag

SEQ ID NO: 128129 - DNA, 25 bp, Canis familiaris
gatctttaatgacatcactgaacca

SEQ ID NO: 128130 - DNA, 25 bp, Canis familiaris
gatctttacaggttactatctgcta

SEQ ID NO: 128131 - DNA, 25 bp, Canis familiaris
gatcttcctggtctactatcattag

SEQ ID NO: 128132 - DNA, 25 bp, Canis familiaris
gatcttcgtgttcttttactgaggc

SEQ ID NO: 128133 - DNA, 25 bp, Canis familiaris
gatttcctggatctctttggggacc

SEQ ID NO: 128134 - DNA, 25 bp, Canis familiaris
gattccccgactactggtgggagct

SEQ ID NO: 128135 - DNA, 25 bp, Canis familiaris
gtatccccgaccggaagtcatatct

SEQ ID NO: 128136 - DNA, 25 bp, Canis familiaris
gatacaacacccacaaagtgcttct

SEQ ID NO: 128137 - DNA, 25 bp, Canis familiaris
gatacccatgcatcgtgaaaccttc

SEQ ID NO: 128138 - DNA, 25 bp, Canis familiaris
gataagcccatcaaaggtactcttc

SEQ ID NO: 128139 - DNA, 25 bp, Canis familiaris
gataccccatgaactggttgtcttc

SEQ ID NO: 128140 - DNA, 25 bp, Canis familiaris
gataaatcccatctgtgaatttgtc

SEQ ID NO: 128141 - DNA, 25 bp, Canis familiaris
gttcaatccgtttgtgacttctgac

SEQ ID NO: 128142 - DNA, 25 bp, Canis familiaris
gttgaaccaggttgcttaattatgc

SEQ ID NO: 128143 - DNA, 25 bp, Canis familiaris
gataaaccaggtggtccctttgagc

SEQ ID NO: 128144 - DNA, 25 bp, Canis familiaris
gataaatccgcttggttgggttggg

SEQ ID NO: 128145 - DNA, 25 bp, Canis familiaris
gatagtcccgtgtggggactcgggt

SEQ ID NO: 128146 - DNA, 25 bp, Canis familiaris
gatagtgccttgtctaggggacttg

SEQ ID NO: 128147 - DNA, 25 bp, Canis familiaris
gataatgctgtgggagggggactct

SEQ ID NO: 128148 - DNA, 25 bp, Canis familiaris
gataatcagattcgggtagacttct

SEQ ID NO: 128149 - DNA, 25 bp, Canis familiaris
gataccgattggcaccagagatgtc

SEQ ID NO: 128150 - DNA, 25 bp, Canis familiaris
gatcgccaaagtgggccagatattc

SEQ ID NO: 128151 - DNA, 25 bp, Canis familiaris
gatcagcagaatttggggcctcttc

SEQ ID NO: 128152 - DNA, 25 bp, Canis familiaris
gatcacaaatgctgagaggctgcga

SEQ ID NO: 128153 - DNA, 25 bp, Canis familiaris
gatcaggattgctagaagacgaaac

SEQ ID NO: 128154 - DNA, 25 bp, Canis familiaris
gatctggatggctaggaacgtcgac

SEQ ID NO: 128155 - DNA, 25 bp, Canis familiaris
gatcgttgtgcaaagtacttgagaa

SEQ ID NO: 128156 - DNA, 25 bp, Canis familiaris
gatcgtatatgaaagaatgcttcgc

SEQ ID NO: 128157 - DNA, 25 bp, Canis familiaris
gatcccatagatcagagtctacctt

SEQ ID NO: 128158 - DNA, 25 bp, Canis familiaris
gatcccattgagctggttgtcttcc

SEQ ID NO: 128159 - DNA, 25 bp, Canis familiaris
gatcccattgagctggttgtcttcc

SEQ ID NO: 128160 - DNA, 25 bp, Canis familiaris
gatcccattgagctggttgtcttcc

SEQ ID NO: 128161 - DNA, 25 bp, Canis familiaris
gatcccttgaggctctaagtcgcac

SEQ ID NO: 128162 - DNA, 25 bp, Canis familiaris
gatcaccaggaacttctacgtggac

SEQ ID NO: 128163 - DNA, 25 bp, Canis familiaris
gatcccagaagcagtctccaggaac

SEQ ID NO: 128164 - DNA, 25 bp, Canis familiaris
gatacaagtcacagttcccgttctg

SEQ ID NO: 128165 - DNA, 25 bp, Canis familiaris
gataaagtcagtggccatcaacgaa

SEQ ID NO: 128166 - DNA, 25 bp, Canis familiaris
gatacaagagggactcagcacggac

SEQ ID NO: 128167 - DNA, 25 bp, Canis familiaris
gatctcgagaggcacatccaaggac

SEQ ID NO: 128168 - DNA, 25 bp, Canis familiaris
gatctcgatgggctcagaaaaagct

SEQ ID NO: 128169 - DNA, 25 bp, Canis familiaris
gatatctgtgtactccgaaaagggg

SEQ ID NO: 128170 - DNA, 25 bp, Canis familiaris
gatcttttaccccagaattgactag

SEQ ID NO: 128171 - DNA, 25 bp, Canis familiaris
gatttcttgaacgcgacttttagta

SEQ ID NO: 128172 - DNA, 25 bp, Canis familiaris
gatatattaaccacgttttaagaag

SEQ ID NO: 128173 - DNA, 25 bp, Canis familiaris
gataagactcagccttcgttttaaa

SEQ ID NO: 128174 - DNA, 25 bp, Canis familiaris
gatcagataccgtcgtagttccgac

SEQ ID NO: 128175 - DNA, 25 bp, Canis familiaris
gatcaaggctggtgtagcaatccgg

SEQ ID NO: 128176 - DNA, 25 bp, Canis familiaris
gataagctgttgtgagcagccccgc

SEQ ID NO: 128177 - DNA, 25 bp, Canis familiaris
gatcatcgtggtcatgaactctccc

SEQ ID NO: 128178 - DNA, 25 bp, Canis familiaris
gatcaccaggcctagtactatgccc

SEQ ID NO: 128179 - DNA, 25 bp, Canis familiaris
gatctacaggctgtggttatgccca

SEQ ID NO: 128180 - DNA, 25 bp, Canis familiaris
gatctacagtccctttttgtgaacc

SEQ ID NO: 128181 - DNA, 25 bp, Canis familiaris
gatctgatcagagcggttgttgagc

SEQ ID NO: 128182 - DNA, 25 bp, Canis familiaris
gatctgaaattatgtgctgcctgga

SEQ ID NO: 128183 - DNA, 25 bp, Canis familiaris
gatctgcaaatataatatctcggtg

SEQ ID NO: 128184 - DNA, 25 bp, Canis familiaris
gatactgcaaatgaagctctggagg

SEQ ID NO: 128185 - DNA, 25 bp, Canis familiaris
gatcccaagtcaaacagtgtggctt

SEQ ID NO: 128186 - DNA, 25 bp, Canis familiaris
gatcccagactgaaaaggacttctc

SEQ ID NO: 128187 - DNA, 25 bp, Canis familiaris
gatcccagagatcaagacagacctc

SEQ ID NO: 128188 - DNA, 25 bp, Canis familiaris
gatcccaatgatcaggtggcccatg

SEQ ID NO: 128189 - DNA, 25 bp, Canis familiaris
gatctcaattcagaggctggccagc

SEQ ID NO: 128190 - DNA, 25 bp, Canis familiaris
gatctgcttccagaccatgagcaca

SEQ ID NO: 128191 - DNA, 25 bp, Canis familiaris
gatctgtacccctacatgaagcaag

SEQ ID NO: 128192 - DNA, 25 bp, Canis familiaris
gatctcttccgggaatggctgaagg

SEQ ID NO: 128193 - DNA, 25 bp, Canis familiaris
gatcatccttcccaaatggctgtat

SEQ ID NO: 128194 - DNA, 25 bp, Canis familiaris
gatcatccccttcaaatgctgtaat

SEQ ID NO: 128195 - DNA, 25 bp, Canis familiaris
gatctccaatttcaaatgttcagat

SEQ ID NO: 128196 - DNA, 25 bp, Canis familiaris
gatcccaaattgcaaatgaacattc

SEQ ID NO: 128197 - DNA, 25 bp, Canis familiaris
gatcccaaattccattaactgcttt

SEQ ID NO: 128198 - DNA, 25 bp, Canis familiaris
gatcccaaatttattttcatgaatc

SEQ ID NO: 128199 - DNA, 25 bp, Canis familiaris
gttccgactttttattgaatctatt

SEQ ID NO: 128200 - DNA, 25 bp, Canis familiaris
ggtccggtgtcatatttaactttct

SEQ ID NO: 128201 - DNA, 25 bp, Canis familiaris
ggtccctattctgtttcggaccatc

SEQ ID NO: 128202 - DNA, 25 bp, Canis familiaris
ggactccgtcttatttatcgtcctc

SEQ ID NO: 128203 - DNA, 25 bp, Canis familiaris
ggagcctagtttctttgaggcccca

SEQ ID NO: 128204 - DNA, 25 bp, Canis familiaris
gataaccagttttgtcttaggccac

SEQ ID NO: 128205 - DNA, 25 bp, Canis familiaris
gataactactttagtagcctcctca

SEQ ID NO: 128206 - DNA, 25 bp, Canis familiaris
gataaatcctacagttccattccag

SEQ ID NO: 128207 - DNA, 25 bp, Canis familiaris
gtaggattttatcttaaatctcaaa

SEQ ID NO: 128208 - DNA, 25 bp, Canis familiaris
gatcacgttttccagttaaagccaa

SEQ ID NO: 128209 - DNA, 25 bp, Canis familiaris
gatactggtagttggtgtgaaactc

SEQ ID NO: 128210 - DNA, 25 bp, Canis familiaris
gatcttttagtgctttgaaactgct

SEQ ID NO: 128211 - DNA, 25 bp, Canis familiaris
gatctatctataccttttattttcc

SEQ ID NO: 128212 - DNA, 25 bp, Canis familiaris
gatcgtcatacctttttatcgttta

SEQ ID NO: 128213 - DNA, 25 bp, Canis familiaris
gatcttattttttatttcactttat

SEQ ID NO: 128214 - DNA, 25 bp, Canis familiaris
gatctgctctttagctttagtcctt

SEQ ID NO: 128215 - DNA, 25 bp, Canis familiaris
gatctccgctgtacatttatgacac

SEQ ID NO: 128216 - DNA, 25 bp, Canis familiaris
gatcatcatcctgacaaagctgata

SEQ ID NO: 128217 - DNA, 25 bp, Canis familiaris
gatctatcctgcccaagggtcaggt

SEQ ID NO: 128218 - DNA, 25 bp, Canis familiaris
gatcaatccacccaaggtgtttgat

SEQ ID NO: 128219 - DNA, 25 bp, Canis familiaris
gatcaattccaccagaaggacttca

SEQ ID NO: 128220 - DNA, 25 bp, Canis familiaris
gatcagatttaccaagcttacttca

SEQ ID NO: 128221 - DNA, 25 bp, Canis familiaris
gatcgttttctaatctgtatgcttc

SEQ ID NO: 128222 - DNA, 25 bp, Canis familiaris
gatctgttatttttcttgttctagg

SEQ ID NO: 128223 - DNA, 25 bp, Canis familiaris
gatcttgatttacatttgattcatc

SEQ ID NO: 128224 - DNA, 25 bp, Canis familiaris
gatcttatttgcccttgtggttggt

SEQ ID NO: 128225 - DNA, 25 bp, Canis familiaris
gatcttatcttctctattacattcg

SEQ ID NO: 128226 - DNA, 25 bp, Canis familiaris
gatcatgtagtttcctatttatatg

SEQ ID NO: 128227 - DNA, 25 bp, Canis familiaris
gatctgaactttttcagtttatatg

SEQ ID NO: 128228 - DNA, 25 bp, Canis familiaris
gatcgtcagttttatcattgcttta

SEQ ID NO: 128229 - DNA, 25 bp, Canis familiaris
gatctcacgtgtttcattcatttta

SEQ ID NO: 128230 - DNA, 25 bp, Canis familiaris
gatagcaactggttcatggttagta

SEQ ID NO: 128231 - DNA, 25 bp, Canis familiaris
gataccgttgaggcatagttgacta

SEQ ID NO: 128232 - DNA, 25 bp, Canis familiaris
gatatagctgggcaatggttactac

SEQ ID NO: 128233 - DNA, 25 bp, Canis familiaris
gatatccgagggaagggctttgact

SEQ ID NO: 128234 - DNA, 25 bp, Canis familiaris
gatcagctgcggcggagggattaat

SEQ ID NO: 128235 - DNA, 25 bp, Canis familiaris
gatcatcatggacagcggggtgcta

SEQ ID NO: 128236 - DNA, 25 bp, Canis familiaris
gatcttggacctggagcctgatgaa

SEQ ID NO: 128237 - DNA, 25 bp, Canis familiaris
gatctgcgtcacacaggccatataa

SEQ ID NO: 128238 - DNA, 25 bp, Canis familiaris
gatcgcttcctccaggaatcattta

SEQ ID NO: 128239 - DNA, 25 bp, Canis familiaris
gatctcctcccagggtacattgtta

SEQ ID NO: 128240 - DNA, 25 bp, Canis familiaris
gatctcttagctgttataatctgtt

SEQ ID NO: 128241 - DNA, 25 bp, Canis familiaris
gatcagttactgacttagataatgt

SEQ ID NO: 128242 - DNA, 25 bp, Canis familiaris
gatcaggctatcccttagctagtta

SEQ ID NO: 128243 - DNA, 25 bp, Canis familiaris
gatcaaagacatccttatccagtac

SEQ ID NO: 128244 - DNA, 25 bp, Canis familiaris
gatcaacaacaatctcaccaaactg

SEQ ID NO: 128245 - DNA, 25 bp, Canis familiaris
gatcaacaactacccatctataata

SEQ ID NO: 128246 - DNA, 25 bp, Canis familiaris
gatcacaaattgcccaacaccaaga

SEQ ID NO: 128247 - DNA, 25 bp, Canis familiaris
gatacagataggcagagacaccagg

SEQ ID NO: 128248 - DNA, 25 bp, Canis familiaris
gatcatcgtacggaggacaccaact

SEQ ID NO: 128249 - DNA, 25 bp, Canis familiaris
gatcatcatttcgagtgcagaccca

SEQ ID NO: 128250 - DNA, 25 bp, Canis familiaris
gatctgattcatgctgaggccacta

SEQ ID NO: 128251 - DNA, 25 bp, Canis familiaris
gatcagattgagcctcagactccta

SEQ ID NO: 128252 - DNA, 25 bp, Canis familiaris
gatctgagtgggacatacttctgaa

SEQ ID NO: 128253 - DNA, 25 bp, Canis familiaris
gatctcgagaaggcacaattctcaa

SEQ ID NO: 128254 - DNA, 25 bp, Canis familiaris
gatctgggaagcctttgcatccaaa

SEQ ID NO: 128255 - DNA, 25 bp, Canis familiaris
gatctgagctcaggttttgatctca

SEQ ID NO: 128256 - DNA, 25 bp, Canis familiaris
gatctcctcaggatatctgtgctcc

SEQ ID NO: 128257 - DNA, 25 bp, Canis familiaris
gatcgaccagaagtacatagacctt

SEQ ID NO: 128258 - DNA, 25 bp, Canis familiaris
gatcataccaaagactaatccttaa

SEQ ID NO: 128259 - DNA, 25 bp, Canis familiaris
gataacacagaaccattcagatggc

SEQ ID NO: 128260 - DNA, 25 bp, Canis familiaris
gataaagccatcacatctctcatga

SEQ ID NO: 128261 - DNA, 25 bp, Canis familiaris
gatcaagagctaatctccctcatat

SEQ ID NO: 128262 - DNA, 25 bp, Canis familiaris
gatcaagacgggtgcaccatgcaga

SEQ ID NO: 128263 - DNA, 25 bp, Canis familiaris
gatcgtggggagtgaccagctcatg

SEQ ID NO: 128264 - DNA, 25 bp, Canis familiaris
gatcgtgagagctgttgaacacttg

SEQ ID NO: 128265 - DNA, 25 bp, Canis familiaris
gatcgtaagccgtgtgtcgaagcga

SEQ ID NO: 128266 - DNA, 25 bp, Canis familiaris
gatactaacccttggtggacggatg

SEQ ID NO: 128267 - DNA, 25 bp, Canis familiaris
gatagataaaccttcgtaacttctg

SEQ ID NO: 128268 - DNA, 25 bp, Canis familiaris
gtaggtaacctatttatatactgct

SEQ ID NO: 128269 - DNA, 25 bp, Canis familiaris
gttgggatccctgtttagattgtga

SEQ ID NO: 128270 - DNA, 25 bp, Canis familiaris
gatacggagggggttataattgata

SEQ ID NO: 128271 - DNA, 25 bp, Canis familiaris
gtaggggaagactctcaacttacaa

SEQ ID NO: 128272 - DNA, 25 bp, Canis familiaris
gtatggggaacataaaagtaggcaa

SEQ ID NO: 128273 - DNA, 25 bp, Canis familiaris
gttgtgggacaatatccaccgagga

SEQ ID NO: 128274 - DNA, 25 bp, Canis familiaris
gtaggggaaaacatcgcaaaggaga

SEQ ID NO: 128275 - DNA, 25 bp, Canis familiaris
gtagattggaaatcgtcccaaacta

SEQ ID NO: 128276 - DNA, 25 bp, Canis familiaris
gataatctggaacagcaggaccaac

SEQ ID NO: 128277 - DNA, 25 bp, Canis familiaris
gatcatatggatacccactggactc

SEQ ID NO: 128278 - DNA, 25 bp, Canis familiaris
gatcttggtacccctaattctttat

SEQ ID NO: 128279 - DNA, 25 bp, Canis familiaris
gatctttttcccaccatgatgttat

SEQ ID NO: 128280 - DNA, 25 bp, Canis familiaris
gatcttgttcttctcaacttgttca

SEQ ID NO: 128281 - DNA, 25 bp, Canis familiaris
gttggtgtgtaattaatttgttcaa

SEQ ID NO: 128282 - DNA, 25 bp, Canis familiaris
gatctttgtaagatttttgcttcaa

SEQ ID NO: 128283 - DNA, 25 bp, Canis familiaris
gatctttcaataactttcttgcctc

SEQ ID NO: 128284 - DNA, 25 bp, Canis familiaris
gatctactctcaaactttactactc

SEQ ID NO: 128285 - DNA, 25 bp, Canis familiaris
gatctctcccgattctttaagtatc

SEQ ID NO: 128286 - DNA, 25 bp, Canis familiaris
gatctcccagaatatttcaagcgcc

SEQ ID NO: 128287 - DNA, 25 bp, Canis familiaris
gttccaaaccaattctaaggccaat

SEQ ID NO: 128288 - DNA, 25 bp, Canis familiaris
gattctgagaactcttccggggaat

SEQ ID NO: 128289 - DNA, 25 bp, Canis familiaris
gatttgataacagctccgggaggaa

SEQ ID NO: 128290 - DNA, 25 bp, Canis familiaris
gatagaaaacaaatgccaggtgggg

SEQ ID NO: 128291 - DNA, 25 bp, Canis familiaris
gataattaaccaaccgactgagcca

SEQ ID NO: 128292 - DNA, 25 bp, Canis familiaris
gataactcggtctcagtgattggtc

SEQ ID NO: 128293 - DNA, 25 bp, Canis familiaris
gataaccaaatctcgatgctactac

SEQ ID NO: 128294 - DNA, 25 bp, Canis familiaris
gataaacaaatctcactgcccttga

SEQ ID NO: 128295 - DNA, 25 bp, Canis familiaris
gatcaagatccataacactgctttc

SEQ ID NO: 128296 - DNA, 25 bp, Canis familiaris
gatcaagaccattgagacccgggat

SEQ ID NO: 128297 - DNA, 25 bp, Canis familiaris
gattaggtcatatacccagggtcta

SEQ ID NO: 128298 - DNA, 25 bp, Canis familiaris
gatattggtagcaccggctgggatt

SEQ ID NO: 128299 - DNA, 25 bp, Canis familiaris
gatatcgaattcggcacgagctggg

SEQ ID NO: 128300 - DNA, 25 bp, Canis familiaris
gatcatcgaagttgcaccgcaggtg

SEQ ID NO: 128301 - DNA, 25 bp, Canis familiaris
gatctctgactattgcttctgaggc

SEQ ID NO: 128302 - DNA, 25 bp, Canis familiaris
gatcattgactttttcttgggggcg

SEQ ID NO: 128303 - DNA, 25 bp, Canis familiaris
gatttacctggattcattagggtgg

SEQ ID NO: 128304 - DNA, 25 bp, Canis familiaris
gttcttcccacaccaaagggtggtg

SEQ ID NO: 128305 - DNA, 25 bp, Canis familiaris
gattttagcaccccaaggagcatct

SEQ ID NO: 128306 - DNA, 25 bp, Canis familiaris
gattgagttcagtcaccaaaggcca

SEQ ID NO: 128307 - DNA, 25 bp, Canis familiaris
gatctaaatctgtccaaacaagcct

SEQ ID NO: 128308 - DNA, 25 bp, Canis familiaris
gataacacctaccattacaaggcta

SEQ ID NO: 128309 - DNA, 25 bp, Canis familiaris
gataaaccatactataaactgattt

SEQ ID NO: 128310 - DNA, 25 bp, Canis familiaris
gataaatccacacccaagaagactt

SEQ ID NO: 128311 - DNA, 25 bp, Canis familiaris
gataaagacacaccactagcaacac

SEQ ID NO: 128312 - DNA, 25 bp, Canis familiaris
gatctgacaaccagcctacagagac

SEQ ID NO: 128313 - DNA, 25 bp, Canis familiaris
gatctagaacaatgcctcaacgacg

SEQ ID NO: 128314 - DNA, 25 bp, Canis familiaris
gatctggagacacagcgccaggtcc

SEQ ID NO: 128315 - DNA, 25 bp, Canis familiaris
gatcaggaacatgggcagccttccc

SEQ ID NO: 128316 - DNA, 25 bp, Canis familiaris
gatcatggaaagaccagctcctcct

SEQ ID NO: 128317 - DNA, 25 bp, Canis familiaris
gatcatggaaactcacctatatgtt

SEQ ID NO: 128318 - DNA, 25 bp, Canis familiaris
gatcatgctaatatccacggtttta

SEQ ID NO: 128319 - DNA, 25 bp, Canis familiaris
gatctttatttccctttgtattcat

SEQ ID NO: 128320 - DNA, 25 bp, Canis familiaris
gatcttttggcttctgcttgttatt

SEQ ID NO: 128321 - DNA, 25 bp, Canis familiaris
gatctctttgagtagcttctgctat

SEQ ID NO: 128322 - DNA, 25 bp, Canis familiaris
gatctcttctggtgtggtgcaatat

SEQ ID NO: 128323 - DNA, 25 bp, Canis familiaris
gatcatccttggtttggtcttcatc

SEQ ID NO: 128324 - DNA, 25 bp, Canis familiaris
gatctcatttcattctggttcttca

SEQ ID NO: 128325 - DNA, 25 bp, Canis familiaris
gatctatttgcatttttagcttctt

SEQ ID NO: 128326 - DNA, 25 bp, Canis familiaris
gatcatttctctttatttgttacta

SEQ ID NO: 128327 - DNA, 25 bp, Canis familiaris
gatctttgtcttttgtcatgaccaa

SEQ ID NO: 128328 - DNA, 25 bp, Canis familiaris
gatctctggtcatgagttcgagctc

SEQ ID NO: 128329 - DNA, 25 bp, Canis familiaris
gatctgctggctgaagtctaggcat

SEQ ID NO: 128330 - DNA, 25 bp, Canis familiaris
gtcattcgctgccagcaattagcgc

SEQ ID NO: 128331 - DNA, 25 bp, Canis familiaris
gatcatgtccagcatcaagctgaga

SEQ ID NO: 128332 - DNA, 25 bp, Canis familiaris
gatcggctgatgggccagctgagac

SEQ ID NO: 128333 - DNA, 25 bp, Canis familiaris
gatctcagctgtggtccagacaaga

SEQ ID NO: 128334 - DNA, 25 bp, Canis familiaris
gatcaagcatgagttacaagcaaac

SEQ ID NO: 128335 - DNA, 25 bp, Canis familiaris
gatcatcctgtgcttcatagagaac

SEQ ID NO: 128336 - DNA, 25 bp, Canis familiaris
gatctccatgtgcatacaataaact

SEQ ID NO: 128337 - DNA, 25 bp, Canis familiaris
gatctctcgtgacacttaaatcaag

SEQ ID NO: 128338 - DNA, 25 bp, Canis familiaris
gatctctcgagaaactccaacaccc

SEQ ID NO: 128339 - DNA, 25 bp, Canis familiaris
gatcatcctgacactatctaacctg

SEQ ID NO: 128340 - DNA, 25 bp, Canis familiaris
gatcagagcttcactactgacctgt

SEQ ID NO: 128341 - DNA, 25 bp, Canis familiaris
gataacactgtagactgatgccgtt

SEQ ID NO: 128342 - DNA, 25 bp, Canis familiaris
gataaacagttgtagcggtggcatc

SEQ ID NO: 128343 - DNA, 25 bp, Canis familiaris
gatcatttcatgagaagcctggcct

SEQ ID NO: 128344 - DNA, 25 bp, Canis familiaris
gattttagggtacctgggtggctca

SEQ ID NO: 128345 - DNA, 25 bp, Canis familiaris
gattttagggtacctgggtggctca

SEQ ID NO: 128346 - DNA, 25 bp, Canis familiaris
gtttctagggtaaagctgggtccat

SEQ ID NO: 128347 - DNA, 25 bp, Canis familiaris
gttttcggtggaaagttagagcgag

SEQ ID NO: 128348 - DNA, 25 bp, Canis familiaris
gatttgtggttgccagggtttgggg

SEQ ID NO: 128349 - DNA, 25 bp, Canis familiaris
gataagggttccatacctgggggat

SEQ ID NO: 128350 - DNA, 25 bp, Canis familiaris
gatactggaggggagttcctggggg

SEQ ID NO: 128351 - DNA, 25 bp, Canis familiaris
gatacttggaaggatttcttggtgt

SEQ ID NO: 128352 - DNA, 25 bp, Canis familiaris
gataatgggaagtttttttgtctgt

SEQ ID NO: 128353 - DNA, 25 bp, Canis familiaris
gatagtgggagggtttttcttagat

SEQ ID NO: 128354 - DNA, 25 bp, Canis familiaris
gataaatggggcccttttcctagag

SEQ ID NO: 128355 - DNA, 25 bp, Canis familiaris
gataaatggtaggcccagttctgta

SEQ ID NO: 128356 - DNA, 25 bp, Canis familiaris
gataacatggatggacctagagggt

SEQ ID NO: 128357 - DNA, 25 bp, Canis familiaris
gataccatgctgtgccctaaagtgt

SEQ ID NO: 128358 - DNA, 25 bp, Canis familiaris
gatcaccatgctgtcccaagggtgt

SEQ ID NO: 128359 - DNA, 25 bp, Canis familiaris
gatcaaggggtcgacagggctgtgt

SEQ ID NO: 128360 - DNA, 25 bp, Canis familiaris
gataaggtcctataggtcattctga

SEQ ID NO: 128361 - DNA, 25 bp, Canis familiaris
gataaatcccaatacttcatcattc

SEQ ID NO: 128362 - DNA, 25 bp, Canis familiaris
gatcatttcccttgaagcttacact

SEQ ID NO: 128363 - DNA, 25 bp, Canis familiaris
gatagattccgtatactgtagcact

SEQ ID NO: 128364 - DNA, 25 bp, Canis familiaris
gataatggccgaaaactatccctaa

SEQ ID NO: 128365 - DNA, 25 bp, Canis familiaris
gatcaagagtcgcacaactactgac

SEQ ID NO: 128366 - DNA, 25 bp, Canis familiaris
gatctatgtgtctgaagatatttgc

SEQ ID NO: 128367 - DNA, 25 bp, Canis familiaris
gatctatgtgtctgtttttgtgcca

SEQ ID NO: 128368 - DNA, 25 bp, Canis familiaris
gatctatgtgtctgtgttcatctgt

SEQ ID NO: 128369 - DNA, 25 bp, Canis familiaris
gatctgatgtgctataattgcttta

SEQ ID NO: 128370 - DNA, 25 bp, Canis familiaris
gatctattgcattcagcactatttt

SEQ ID NO: 128371 - DNA, 25 bp, Canis familiaris
gatacatgatgctaccttgactttg

SEQ ID NO: 128372 - DNA, 25 bp, Canis familiaris
gataatgtgctttttgacacgtacc

SEQ ID NO: 128373 - DNA, 25 bp, Canis familiaris
gataatatgttaactagacttacta

SEQ ID NO: 128374 - DNA, 25 bp, Canis familiaris
gataattttccctcagtttattcct

SEQ ID NO: 128375 - DNA, 25 bp, Canis familiaris
gataattttcccttctctaggcaat

SEQ ID NO: 128376 - DNA, 25 bp, Canis familiaris
gataatccttctgaacgccaacaag

SEQ ID NO: 128377 - DNA, 25 bp, Canis familiaris
gatcatttttcagacctgccataaa

SEQ ID NO: 128378 - DNA, 25 bp, Canis familiaris
gatctatttatacatctgcatccat

SEQ ID NO: 128379 - DNA, 25 bp, Canis familiaris
gatcttctgctttgttcataccaat

SEQ ID NO: 128380 - DNA, 25 bp, Canis familiaris
gatcttgcagtttattttctcattg

SEQ ID NO: 128381 - DNA, 25 bp, Canis familiaris
gatctgagttattcaatttccttgt

SEQ ID NO: 128382 - DNA, 25 bp, Canis familiaris
gatctagattattttcctctttttc

SEQ ID NO: 128383 - DNA, 25 bp, Canis familiaris
gatacagttacgctcctgtttcatg

SEQ ID NO: 128384 - DNA, 25 bp, Canis familiaris
gatcacagtaaccgtgtagcctctt

SEQ ID NO: 128385 - DNA, 25 bp, Canis familiaris
gatacattcaaccacttgacaacct

SEQ ID NO: 128386 - DNA, 25 bp, Canis familiaris
gattcagtcgaccatagctgccaac

SEQ ID NO: 128387 - DNA, 25 bp, Canis familiaris
gatcatcagatcatcgcttgtgctg

SEQ ID NO: 128388 - DNA, 25 bp, Canis familiaris
gatcatgcgacgtgtttcgccacta

SEQ ID NO: 128389 - DNA, 25 bp, Canis familiaris
gatcattgaccttgtcttggaccga

SEQ ID NO: 128390 - DNA, 25 bp, Canis familiaris
gatcattgaccttgtcttggaccga

SEQ ID NO: 128391 - DNA, 25 bp, Canis familiaris
gatcattgaccttgtcttggaccga

SEQ ID NO: 128392 - DNA, 25 bp, Canis familiaris
gatcattgaccttgtcttggaccga

SEQ ID NO: 128393 - DNA, 25 bp, Canis familiaris
gatctatgagaatttttgttccatg

SEQ ID NO: 128394 - DNA, 25 bp, Canis familiaris
gatctagagaattttgtgtttccat

SEQ ID NO: 128395 - DNA, 25 bp, Canis familiaris
gatctatctcaaaatgtgtgtttca

SEQ ID NO: 128396 - DNA, 25 bp, Canis familiaris
gatcttctggatgtgtgtgtggtca

SEQ ID NO: 128397 - DNA, 25 bp, Canis familiaris
gatctttgctattttgtctgcttat

SEQ ID NO: 128398 - DNA, 25 bp, Canis familiaris
gatctatctgatattgcttctctaa

SEQ ID NO: 128399 - DNA, 25 bp, Canis familiaris
gatcatgtccaagtgtgtctttcaa

SEQ ID NO: 128400 - DNA, 25 bp, Canis familiaris
gatcatccagcctggtattgccaag

SEQ ID NO: 128401 - DNA, 25 bp, Canis familiaris
gataaaactcagatttggcaaggat

SEQ ID NO: 128402 - DNA, 25 bp, Canis familiaris
gataaacttagaatactggcacagc

SEQ ID NO: 128403 - DNA, 25 bp, Canis familiaris
gataaatcttgaaaacacagttgca

SEQ ID NO: 128404 - DNA, 25 bp, Canis familiaris
gatcagatgcacagaaccaagcagt

SEQ ID NO: 128405 - DNA, 25 bp, Canis familiaris
gatcagatcctgaatcacctatcaa

SEQ ID NO: 128406 - DNA, 25 bp, Canis familiaris
gatctctcctcagtcagactatcac

SEQ ID NO: 128407 - DNA, 25 bp, Canis familiaris
gatttccatacttgacttgaccagg

SEQ ID NO: 128408 - DNA, 25 bp, Canis familiaris
gatctaccatagggtcttggctctg

SEQ ID NO: 128409 - DNA, 25 bp, Canis familiaris
gataacacattgattgctcggtctc

SEQ ID NO: 128410 - DNA, 25 bp, Canis familiaris
gataaccttattccttggtgggctg

SEQ ID NO: 128411 - DNA, 25 bp, Canis familiaris
gataagccatcttcaacttgtctgg

SEQ ID NO: 128412 - DNA, 25 bp, Canis familiaris
gatagggcactgagactctccatga

SEQ ID NO: 128413 - DNA, 25 bp, Canis familiaris
gatcatggaaccacgctgtccatgc

SEQ ID NO: 128414 - DNA, 25 bp, Canis familiaris
gatcagcaaatctaaccgaccagcc

SEQ ID NO: 128415 - DNA, 25 bp, Canis familiaris
gatcaaacctcatcaaggccagcac

SEQ ID NO: 128416 - DNA, 25 bp, Canis familiaris
gataattcctcacaggaggaccttt

SEQ ID NO: 128417 - DNA, 25 bp, Canis familiaris
gatctattcctccaattcaggaccc

SEQ ID NO: 128418 - DNA, 25 bp, Canis familiaris
gatctaccactccaggataggccac

SEQ ID NO: 128419 - DNA, 25 bp, Canis familiaris
gatatgagcatctaaaggaaggccc

SEQ ID NO: 128420 - DNA, 25 bp, Canis familiaris
gattgaatcccagggagggccaagt

SEQ ID NO: 128421 - DNA, 25 bp, Canis familiaris
gattgagttcccttggggtctttgg

SEQ ID NO: 128422 - DNA, 25 bp, Canis familiaris
gatctagggctccgtggggttatat

SEQ ID NO: 128423 - DNA, 25 bp, Canis familiaris
gatcttggttcgctgttatttaatg

SEQ ID NO: 128424 - DNA, 25 bp, Canis familiaris
gatcttggtgtccccatgatattta

SEQ ID NO: 128425 - DNA, 25 bp, Canis familiaris
gatcttttgtcattcatcatgtggc

SEQ ID NO: 128426 - DNA, 25 bp, Canis familiaris
gatctttcttgttgatgctgggctc

SEQ ID NO: 128427 - DNA, 25 bp, Canis familiaris
gatcttgtctggtcaagctgctgac

SEQ ID NO: 128428 - DNA, 25 bp, Canis familiaris
gatctttctggagggtcataacaag

SEQ ID NO: 128429 - DNA, 25 bp, Canis familiaris
gatcttcctggagggtcatcagcag

SEQ ID NO: 128430 - DNA, 25 bp, Canis familiaris
gatcttcgttcagggtgtcatctgg

SEQ ID NO: 128431 - DNA, 25 bp, Canis familiaris
gatcatttcttctggtttcgtagtc

SEQ ID NO: 128432 - DNA, 25 bp, Canis familiaris
gatcatgttttctgtgtgttggtat

SEQ ID NO: 128433 - DNA, 25 bp, Canis familiaris
gatcaattttaggagctttatttgg

SEQ ID NO: 128434 - DNA, 25 bp, Canis familiaris
gatcatatttgttcaagtctttttg

SEQ ID NO: 128435 - DNA, 25 bp, Canis familiaris
gatcattttttcggtctctgaggtg

SEQ ID NO: 128436 - DNA, 25 bp, Canis familiaris
gatcttcattttattgcattagttc

SEQ ID NO: 128437 - DNA, 25 bp, Canis familiaris
gatctatgctttactttctttgttt

SEQ ID NO: 128438 - DNA, 25 bp, Canis familiaris
gatcttctttgttctagttctatgt

SEQ ID NO: 128439 - DNA, 25 bp, Canis familiaris
gatctttctgtgattatgttttttc

SEQ ID NO: 128440 - DNA, 25 bp, Canis familiaris
gatctttagcttttattccttattt

SEQ ID NO: 128441 - DNA, 25 bp, Canis familiaris
gatcatcttcagctttttgacactt

SEQ ID NO: 128442 - DNA, 25 bp, Canis familiaris
gatcattctccgggaagtacagctg

SEQ ID NO: 128443 - DNA, 25 bp, Canis familiaris
gatactatccgtgcttgtcaagctg

SEQ ID NO: 128444 - DNA, 25 bp, Canis familiaris
gatacctggcctggtctggacacag

SEQ ID NO: 128445 - DNA, 25 bp, Canis familiaris
gataacggctccggtatgtgcaagg

SEQ ID NO: 128446 - DNA, 25 bp, Canis familiaris
gataaacacgcctgtttgatggcga

SEQ ID NO: 128447 - DNA, 25 bp, Canis familiaris
gatcaaacggtctcttgtctgtcaa

SEQ ID NO: 128448 - DNA, 25 bp, Canis familiaris
gataatgctcggaatttttttcaac

SEQ ID NO: 128449 - DNA, 25 bp, Canis familiaris
gataattccgagatctagactttac

SEQ ID NO: 128450 - DNA, 25 bp, Canis familiaris
gatacattcagacacctagacctca

SEQ ID NO: 128451 - DNA, 25 bp, Canis familiaris
gataatggcaagcatctacaccctg

SEQ ID NO: 128452 - DNA, 25 bp, Canis familiaris
gatctatgtaacttattcactctgt

SEQ ID NO: 128453 - DNA, 25 bp, Canis familiaris
gatcatcttcaccatatatatattc

SEQ ID NO: 128454 - DNA, 25 bp, Canis familiaris
gatcatgctttcacattatctgtct

SEQ ID NO: 128455 - DNA, 25 bp, Canis familiaris
gatcatcttagtccaagcacagcct

SEQ ID NO: 128456 - DNA, 25 bp, Canis familiaris
gatcatcaaatcccaattcatcctg

SEQ ID NO: 128457 - DNA, 25 bp, Canis familiaris
gataacagtcatccgtgtcatccat

SEQ ID NO: 128458 - DNA, 25 bp, Canis familiaris
gataacagtcatgtggagatgaaac

SEQ ID NO: 128459 - DNA, 25 bp, Canis familiaris
gatacagcagtcctcatgtgagtca

SEQ ID NO: 128460 - DNA, 25 bp, Canis familiaris
gatacatatgctagtgaggccatga

SEQ ID NO: 128461 - DNA, 25 bp, Canis familiaris
gatcacaggatcagagagctcacag

SEQ ID NO: 128462 - DNA, 25 bp, Canis familiaris
gatcaagatctcagacagcttcatg

SEQ ID NO: 128463 - DNA, 25 bp, Canis familiaris
gatctagcactcaaaatgtactgtc

SEQ ID NO: 128464 - DNA, 25 bp, Canis familiaris
gatcttgccctattataactgtcat

SEQ ID NO: 128465 - DNA, 25 bp, Canis familiaris
gatcatctgcctaacaagaactggg

SEQ ID NO: 128466 - DNA, 25 bp, Canis familiaris
gatcacatatcgaagaggaagggga

SEQ ID NO: 128467 - DNA, 25 bp, Canis familiaris
gatctaatcctgggctaatgaagga

SEQ ID NO: 128468 - DNA, 25 bp, Canis familiaris
gattcgtccatatctcacagacgga

SEQ ID NO: 128469 - DNA, 25 bp, Canis familiaris
gatacttcctagcctcagatgggga

SEQ ID NO: 128470 - DNA, 25 bp, Canis familiaris
gatcagaatcctatccagaagcgga

SEQ ID NO: 128471 - DNA, 25 bp, Canis familiaris
gatcatgtacctggcatctaaaggc

SEQ ID NO: 128472 - DNA, 25 bp, Canis familiaris
gatcatgtacatgcatctttgttgt

SEQ ID NO: 128473 - DNA, 25 bp, Canis familiaris
gatcatgtgaatgcttttccagccc

SEQ ID NO: 128474 - DNA, 25 bp, Canis familiaris
gatcagaaaggtgtgtctctcccct

SEQ ID NO: 128475 - DNA, 25 bp, Canis familiaris
gatcaaaagcttgctggttttcctt

SEQ ID NO: 128476 - DNA, 25 bp, Canis familiaris
gatcaggaacttgtcatggtttcct

SEQ ID NO: 128477 - DNA, 25 bp, Canis familiaris
gatctagaacttgtgctgtggaccc

SEQ ID NO: 128478 - DNA, 25 bp, Canis familiaris
gattaaagcctctgtgaggtccccc

SEQ ID NO: 128479 - DNA, 25 bp, Canis familiaris
gattcaagcctttagtcgggctccc

SEQ ID NO: 128480 - DNA, 25 bp, Canis familiaris
gttaggtctttcacgatggttccct

SEQ ID NO: 128481 - DNA, 25 bp, Canis familiaris
gttaggttttcgtgtcagacttgct

SEQ ID NO: 128482 - DNA, 25 bp, Canis familiaris
gattaggttaacccgacctgttgca

SEQ ID NO: 128483 - DNA, 25 bp, Canis familiaris
gatattaagaaacccgacctgacga

SEQ ID NO: 128484 - DNA, 25 bp, Canis familiaris
gatcttaatgtagccctagccagag

SEQ ID NO: 128485 - DNA, 25 bp, Canis familiaris
gatcttcattggagccttcactagg

SEQ ID NO: 128486 - DNA, 25 bp, Canis familiaris
gatcaacaggttcatgcaggcagtg

SEQ ID NO: 128487 - DNA, 25 bp, Canis familiaris
gatcaccaagttcgaacagctgtgt

SEQ ID NO: 128488 - DNA, 25 bp, Canis familiaris
gataccaaattagagagtgttagcc

SEQ ID NO: 128489 - DNA, 25 bp, Canis familiaris
gataaccaagtactcaagcatttag

SEQ ID NO: 128490 - DNA, 25 bp, Canis familiaris
gatcattccagagagtcacagcttt

SEQ ID NO: 128491 - DNA, 25 bp, Canis familiaris
gatcattccaccaagttcagagtct

SEQ ID NO: 128492 - DNA, 25 bp, Canis familiaris
gataatgaaccatgtacagtggcat

SEQ ID NO: 128493 - DNA, 25 bp, Canis familiaris
gataagagacctgtccacatggatc

SEQ ID NO: 128494 - DNA, 25 bp, Canis familiaris
gatcataggaccacttagggctcag

SEQ ID NO: 128495 - DNA, 25 bp, Canis familiaris
gatcttgggcttgtagagacctcag

SEQ ID NO: 128496 - DNA, 25 bp, Canis familiaris
gatcttatggctatgtagaacatct

SEQ ID NO: 128497 - DNA, 25 bp, Canis familiaris
gatcttatggctatgaagagacatc

SEQ ID NO: 128498 - DNA, 25 bp, Canis familiaris
gatcttcagcctatcaggagcacag

SEQ ID NO: 128499 - DNA, 25 bp, Canis familiaris
gatcttgctgccattcagtacaaat

SEQ ID NO: 128500 - DNA, 25 bp, Canis familiaris
gatcattctttcctatggacaaata

SEQ ID NO: 128501 - DNA, 25 bp, Canis familiaris
gatcattgttctctctagaaaatcc

SEQ ID NO: 128502 - DNA, 25 bp, Canis familiaris
gatcacagtttcttctaataataag

SEQ ID NO: 128503 - DNA, 25 bp, Canis familiaris
gatcaagatgtgtgttttaaactgg

SEQ ID NO: 128504 - DNA, 25 bp, Canis familiaris
gatcagcttgtgtatggtttagaaa

SEQ ID NO: 128505 - DNA, 25 bp, Canis familiaris
gatcactcactcctttcttaaaagt

SEQ ID NO: 128506 - DNA, 25 bp, Canis familiaris
gataatcttcgggatggtcatgaaa

SEQ ID NO: 128507 - DNA, 25 bp, Canis familiaris
gatcaacttcttgaatgtgattcca

SEQ ID NO: 128508 - DNA, 25 bp, Canis familiaris
gatcacagtttagactatctcctca

SEQ ID NO: 128509 - DNA, 25 bp, Canis familiaris
gatcacgatttacacttgtccaaca

SEQ ID NO: 128510 - DNA, 25 bp, Canis familiaris
gatacgttggacgcatagcctcagc

SEQ ID NO: 128511 - DNA, 25 bp, Canis familiaris
gatacgtaagaggccacctcatacc

SEQ ID NO: 128512 - DNA, 25 bp, Canis familiaris
gatcagggaatatccacctatcact

SEQ ID NO: 128513 - DNA, 25 bp, Canis familiaris
gatcaggtattgacaaacccaatct

SEQ ID NO: 128514 - DNA, 25 bp, Canis familiaris
gatcatgtgttagacaacaccacac

SEQ ID NO: 128515 - DNA, 25 bp, Canis familiaris
gatcacatattagtccagagaaaga

SEQ ID NO: 128516 - DNA, 25 bp, Canis familiaris
gataatcattagcccacataccagt

SEQ ID NO: 128517 - DNA, 25 bp, Canis familiaris
gataacttcagcaccatgtccatgc

SEQ ID NO: 128518 - DNA, 25 bp, Canis familiaris
gataaggctcagaacattgtccatt

SEQ ID NO: 128519 - DNA, 25 bp, Canis familiaris
gatcatatggtaaacattgtctcag

SEQ ID NO: 128520 - DNA, 25 bp, Canis familiaris
gatcagtcctgaaacaggccagagc

SEQ ID NO: 128521 - DNA, 25 bp, Canis familiaris
gatcatccctgaaacaggcccagac

SEQ ID NO: 128522 - DNA, 25 bp, Canis familiaris
gatcatcaccaaagtgggcagagag

SEQ ID NO: 128523 - DNA, 25 bp, Canis familiaris
gatcacacccagcttgaggaggggc

SEQ ID NO: 128524 - DNA, 25 bp, Canis familiaris
gatcacacccagcttgaggaggggc

SEQ ID NO: 128525 - DNA, 25 bp, Canis familiaris
gatcacacccagcttgaggaggggc

SEQ ID NO: 128526 - DNA, 25 bp, Canis familiaris
gatcacacccagcttgaggaggggc

SEQ ID NO: 128527 - DNA, 25 bp, Canis familiaris
gatcacacccagcttgaggaggggc

SEQ ID NO: 128528 - DNA, 25 bp, Canis familiaris
gatcacacccagcttgaggaggggc

SEQ ID NO: 128529 - DNA, 25 bp, Canis familiaris
gatcacacccagcttgaggaggggc

SEQ ID NO: 128530 - DNA, 25 bp, Canis familiaris
gatcacacccagcttgaggaggggc

SEQ ID NO: 128531 - DNA, 25 bp, Canis familiaris
gatcacacccagcttgaggaggggc

SEQ ID NO: 128532 - DNA, 25 bp, Canis familiaris
gatcacacccagcttgaggaggggc

SEQ ID NO: 128533 - DNA, 25 bp, Canis familiaris
gatcacacccagcttgaggaggggc

SEQ ID NO: 128534 - DNA, 25 bp, Canis familiaris
gatcacacccagcttgaggaggggc

SEQ ID NO: 128535 - DNA, 25 bp, Canis familiaris
gatcacacccagcttgaggaggggc

SEQ ID NO: 128536 - DNA, 25 bp, Canis familiaris
gatcacacccagcttgaggaggggc

SEQ ID NO: 128537 - DNA, 25 bp, Canis familiaris
gataacccatcctgggatggtgaga

SEQ ID NO: 128538 - DNA, 25 bp, Canis familiaris
gatagacccctgtgggttagatgat

SEQ ID NO: 128539 - DNA, 25 bp, Canis familiaris
gataaatccttgttggtttcaatat

SEQ ID NO: 128540 - DNA, 25 bp, Canis familiaris
gataaactttgattttcttcctttg

SEQ ID NO: 128541 - DNA, 25 bp, Canis familiaris
gataacagttatttttttctacatt

SEQ ID NO: 128542 - DNA, 25 bp, Canis familiaris
gatacacgtttgtgaacatcctttg

SEQ ID NO: 128543 - DNA, 25 bp, Canis familiaris
gatcaacttttgcaaaatccgcttt

SEQ ID NO: 128544 - DNA, 25 bp, Canis familiaris
gatcatgacctaagccaaaaccaaa

SEQ ID NO: 128545 - DNA, 25 bp, Canis familiaris
gatcacacaataacaaaaacacaac

SEQ ID NO: 128546 - DNA, 25 bp, Canis familiaris
gatcttcataacggacaaactgaac

SEQ ID NO: 128547 - DNA, 25 bp, Canis familiaris
gatcattctctctgtgtattactaa

SEQ ID NO: 128548 - DNA, 25 bp, Canis familiaris
gatcatttgcacaacactttaaaaa

SEQ ID NO: 128549 - DNA, 25 bp, Canis familiaris
gatacttcccaatcatggaaaagca

SEQ ID NO: 128550 - DNA, 25 bp, Canis familiaris
gatactctaccatgaatataaaaac

SEQ ID NO: 128551 - DNA, 25 bp, Canis familiaris
gatcagctgtcattctctgaataag

SEQ ID NO: 128552 - DNA, 25 bp, Canis familiaris
gatcactgaccacctgaatgtcgtc

SEQ ID NO: 128553 - DNA, 25 bp, Canis familiaris
gatactcaccacctcaagacaaagg

SEQ ID NO: 128554 - DNA, 25 bp, Canis familiaris
gatactagacaacaactcaaagcca

SEQ ID NO: 128555 - DNA, 25 bp, Canis familiaris
gataagacacgtcctaaagaggcca

SEQ ID NO: 128556 - DNA, 25 bp, Canis familiaris
gatcaaacacttcctatgtggaggc

SEQ ID NO: 128557 - DNA, 25 bp, Canis familiaris
gataaacatcagtctctgggaggtc

SEQ ID NO: 128558 - DNA, 25 bp, Canis familiaris
gataaagctctgtcctgaagtacta

SEQ ID NO: 128559 - DNA, 25 bp, Canis familiaris
gatcaaagtctgttctggcggcatt

SEQ ID NO: 128560 - DNA, 25 bp, Canis familiaris
gataaagccttgatgagagccattc

SEQ ID NO: 128561 - DNA, 25 bp, Canis familiaris
gataaagcactgctcttgactctgc

SEQ ID NO: 128562 - DNA, 25 bp, Canis familiaris
gatcaaaagctccatcttcctattt

SEQ ID NO: 128563 - DNA, 25 bp, Canis familiaris
gatcagcaaggctctttcgttcttc

SEQ ID NO: 128564 - DNA, 25 bp, Canis familiaris
gatcaggggcattgcttggtgtggc

SEQ ID NO: 128565 - DNA, 25 bp, Canis familiaris
gatcatcgcttgtgctgtgggaggc

SEQ ID NO: 128566 - DNA, 25 bp, Canis familiaris
gatcatcgtctccgctatgaagagc

SEQ ID NO: 128567 - DNA, 25 bp, Canis familiaris
gatcatcgagtccgtctaacacgtc

SEQ ID NO: 128568 - DNA, 25 bp, Canis familiaris
gatcagcgagctactttgaatccaa

SEQ ID NO: 128569 - DNA, 25 bp, Canis familiaris
gataggcagcatccttcgaactgac

SEQ ID NO: 128570 - DNA, 25 bp, Canis familiaris
gatcaggcagcaggttaatcctatc

SEQ ID NO: 128571 - DNA, 25 bp, Canis familiaris
gatcagttcagtatattgcactaat

SEQ ID NO: 128572 - DNA, 25 bp, Canis familiaris
gatcatctatcagtaaattccataa

SEQ ID NO: 128573 - DNA, 25 bp, Canis familiaris
gatagtcatggcagaactccaaagt

SEQ ID NO: 128574 - DNA, 25 bp, Canis familiaris
gatcagtgctccaagataataaaaa

SEQ ID NO: 128575 - DNA, 25 bp, Canis familiaris
gatcagtctaaaacatatgaaactc

SEQ ID NO: 128576 - DNA, 25 bp, Canis familiaris
gatcagcctgaaagactaggaccct

SEQ ID NO: 128577 - DNA, 25 bp, Canis familiaris
gatcagccggaaaccactgacagcc

SEQ ID NO: 128578 - DNA, 25 bp, Canis familiaris
gatcacctgctgtacacgatatacc

SEQ ID NO: 128579 - DNA, 25 bp, Canis familiaris
gatcattctcaggctcctgattcac

SEQ ID NO: 128580 - DNA, 25 bp, Canis familiaris
gatcattcatcggtgccagaagcgc

SEQ ID NO: 128581 - DNA, 25 bp, Canis familiaris
gatcatgtgaagcttcagccaggca

SEQ ID NO: 128582 - DNA, 25 bp, Canis familiaris
gatcatggtgggatgtggcagagct

SEQ ID NO: 128583 - DNA, 25 bp, Canis familiaris
gatcatgggactctcaaggatgcta

SEQ ID NO: 128584 - DNA, 25 bp, Canis familiaris
gatcagggaccacgaaaagaaactc

SEQ ID NO: 128585 - DNA, 25 bp, Canis familiaris
gatagggataccgacctcagaaaac

SEQ ID NO: 128586 - DNA, 25 bp, Canis familiaris
gataccgataccgcttacgggatca

SEQ ID NO: 128587 - DNA, 25 bp, Canis familiaris
gtacacgtaacacttccacgggaat

SEQ ID NO: 128588 - DNA, 25 bp, Canis familiaris
gatagacggaagttaacacaggata

SEQ ID NO: 128589 - DNA, 25 bp, Canis familiaris
gataccaggaaatccaatccaaagg

SEQ ID NO: 128590 - DNA, 25 bp, Canis familiaris
gataccactgatttcctactaaaag

SEQ ID NO: 128591 - DNA, 25 bp, Canis familiaris
gataccactgtttgtacctgaaatt

SEQ ID NO: 128592 - DNA, 25 bp, Canis familiaris
gataccagccagaagttgttaaact

SEQ ID NO: 128593 - DNA, 25 bp, Canis familiaris
gataccaaaatgcacttgtaaactc

SEQ ID NO: 128594 - DNA, 25 bp, Canis familiaris
gatacttgtacagatcttataaacc

SEQ ID NO: 128595 - DNA, 25 bp, Canis familiaris
gtatcttggacgatggtacgaaatt

SEQ ID NO: 128596 - DNA, 25 bp, Canis familiaris
gatagctgggacatgtgggctcaga

SEQ ID NO: 128597 - DNA, 25 bp, Canis familiaris
gatcactgccagtttgtggactcgt

SEQ ID NO: 128598 - DNA, 25 bp, Canis familiaris
gatcactccagaaaagagatccaag

SEQ ID NO: 128599 - DNA, 25 bp, Canis familiaris
gatactccagaagaccattcaggca

SEQ ID NO: 128600 - DNA, 25 bp, Canis familiaris
gatacttcacagagaccactggtct

SEQ ID NO: 128601 - DNA, 25 bp, Canis familiaris
gatagcttccaaagcctcaagcaat

SEQ ID NO: 128602 - DNA, 25 bp, Canis familiaris
gatagacttcactgctgaccagatt

SEQ ID NO: 128603 - DNA, 25 bp, Canis familiaris
gatcagccttaaagtattagcatgt

SEQ ID NO: 128604 - DNA, 25 bp, Canis familiaris
gatcagccactaagagctaacattt

SEQ ID NO: 128605 - DNA, 25 bp, Canis familiaris
gatcaggcagctagaggttgtcatt

SEQ ID NO: 128606 - DNA, 25 bp, Canis familiaris
gatcaagatggccaagatgtgtcaa

SEQ ID NO: 128607 - DNA, 25 bp, Canis familiaris
gatcacatctgaccaagctgctgtc

SEQ ID NO: 128608 - DNA, 25 bp, Canis familiaris
gatacatgttgcaaagtcgcctcat

SEQ ID NO: 128609 - DNA, 25 bp, Canis familiaris
gatacaggcttcatgctggcttcat

SEQ ID NO: 128610 - DNA, 25 bp, Canis familiaris
gatcaagatcttaactgagtgagct

SEQ ID NO: 128611 - DNA, 25 bp, Canis familiaris
gatcttgatctacacatcagagact

SEQ ID NO: 128612 - DNA, 25 bp, Canis familiaris
gatagtactgcacacacacaagttg

SEQ ID NO: 128613 - DNA, 25 bp, Canis familiaris
gtcatgtaccatcaataaagtaccc

SEQ ID NO: 128614 - DNA, 25 bp, Canis familiaris
gatcaggaccacggaaaggaactcg

SEQ ID NO: 128615 - DNA, 25 bp, Canis familiaris
gatcacaacgcacttacagggaact

SEQ ID NO: 128616 - DNA, 25 bp, Canis familiaris
gataactctgaatacgtggagacta

SEQ ID NO: 128617 - DNA, 25 bp, Canis familiaris
gatcaactcggtgacgtgtgaggtg

SEQ ID NO: 128618 - DNA, 25 bp, Canis familiaris
gatcaggccggtcagttggtcgatc

SEQ ID NO: 128619 - DNA, 25 bp, Canis familiaris
gatatggagggcctacttgtgggac

SEQ ID NO: 128620 - DNA, 25 bp, Canis familiaris
gataccgggaggacctgatggcagg

SEQ ID NO: 128621 - DNA, 25 bp, Canis familiaris
gataagtggtgagcccttggcctgt

SEQ ID NO: 128622 - DNA, 25 bp, Canis familiaris
gataaggtatggtcttttggccgtg

SEQ ID NO: 128623 - DNA, 25 bp, Canis familiaris
gataattttgcttttaaggcctttg

SEQ ID NO: 128624 - DNA, 25 bp, Canis familiaris
gatcaaccgtgtcttacggctttcc

SEQ ID NO: 128625 - DNA, 25 bp, Canis familiaris
gatagaccgtcactgttacagtctt

SEQ ID NO: 128626 - DNA, 25 bp, Canis familiaris
gatagatctcttttcgtactttttc

SEQ ID NO: 128627 - DNA, 25 bp, Canis familiaris
gtaccaattttgttagtcctgttcg

SEQ ID NO: 128628 - DNA, 25 bp, Canis familiaris
gataccacttttgtacatcacgttt

SEQ ID NO: 128629 - DNA, 25 bp, Canis familiaris
gatactcccgttgtaaccgttgagc

SEQ ID NO: 128630 - DNA, 25 bp, Canis familiaris
gataagacggttgtaactagggatg

SEQ ID NO: 128631 - DNA, 25 bp, Canis familiaris
gataaacgtcttgttcctggaggtg

SEQ ID NO: 128632 - DNA, 25 bp, Canis familiaris
gatacccaagtagctcttctatgca

SEQ ID NO: 128633 - DNA, 25 bp, Canis familiaris
gatcacctgaggtcaggagttcaag

SEQ ID NO: 128634 - DNA, 25 bp, Canis familiaris
gatacctgggtcaagaatgtgggca

SEQ ID NO: 128635 - DNA, 25 bp, Canis familiaris
gataggtggcttgtgcaaggggatt

SEQ ID NO: 128636 - DNA, 25 bp, Canis familiaris
gatagcggtgtggcgtcaaacaggt

SEQ ID NO: 128637 - DNA, 25 bp, Canis familiaris
gatactgtaggtgctaatactggat

SEQ ID NO: 128638 - DNA, 25 bp, Canis familiaris
gatacattccttggtagtacatggt

SEQ ID NO: 128639 - DNA, 25 bp, Canis familiaris
gatacatggctcgtttagtaatgtt

SEQ ID NO: 128640 - DNA, 25 bp, Canis familiaris
gatacacgctgaggattggtttttg

SEQ ID NO: 128641 - DNA, 25 bp, Canis familiaris
gatcacaccaggcatggttttcttc

SEQ ID NO: 128642 - DNA, 25 bp, Canis familiaris
gatactccagggtgctagtgtgttt

SEQ ID NO: 128643 - DNA, 25 bp, Canis familiaris
gataccctgggtggtgcagcagttt

SEQ ID NO: 128644 - DNA, 25 bp, Canis familiaris
gatacccagtactttgtcagatatg

SEQ ID NO: 128645 - DNA, 25 bp, Canis familiaris
gatcaccttgtacctttgctaatgg

SEQ ID NO: 128646 - DNA, 25 bp, Canis familiaris
gatcaggttgtttgtttcaattggc

SEQ ID NO: 128647 - DNA, 25 bp, Canis familiaris
gatcaggttgttttctgttgcttct

SEQ ID NO: 128648 - DNA, 25 bp, Canis familiaris
gatcagggttttaatgctgtctctt

SEQ ID NO: 128649 - DNA, 25 bp, Canis familiaris
gatcaggtctcctttgattgttcta

SEQ ID NO: 128650 - DNA, 25 bp, Canis familiaris
gatcagttaccttatgacttgttaa

SEQ ID NO: 128651 - DNA, 25 bp, Canis familiaris
gatcagttccgagagatcatcgttc

SEQ ID NO: 128652 - DNA, 25 bp, Canis familiaris
gtcagccctatagagactagtctcc

SEQ ID NO: 128653 - DNA, 25 bp, Canis familiaris
gatacccattaaaaggatgaccccg

SEQ ID NO: 128654 - DNA, 25 bp, Canis familiaris
gatacacaatatccagaaggagtcc

SEQ ID NO: 128655 - DNA, 25 bp, Canis familiaris
gatactagtcattctgacaggcatg

SEQ ID NO: 128656 - DNA, 25 bp, Canis familiaris
gatacatagcggcctcagcatgaat

SEQ ID NO: 128657 - DNA, 25 bp, Canis familiaris
gatcacatgtgccatcctcatggaa

SEQ ID NO: 128658 - DNA, 25 bp, Canis familiaris
gatcagatgtcgtcgtcgtggaggt

SEQ ID NO: 128659 - DNA, 25 bp, Canis familiaris
gatcaggtcaccagcagtggagtgt

SEQ ID NO: 128660 - DNA, 25 bp, Canis familiaris
gatcaagtcccagcagagcgagggt

SEQ ID NO: 128661 - DNA, 25 bp, Canis familiaris
gatatactcctggggacgagacagt

SEQ ID NO: 128662 - DNA, 25 bp, Canis familiaris
gataaccacgcacgctgatcagaaa

SEQ ID NO: 128663 - DNA, 25 bp, Canis familiaris
gatcaagcccgcagatgatcggcca

SEQ ID NO: 128664 - DNA, 25 bp, Canis familiaris
gataatccggctctgaatgcccagg

SEQ ID NO: 128665 - DNA, 25 bp, Canis familiaris
gataatcggctgaatgtaacaaagg

SEQ ID NO: 128666 - DNA, 25 bp, Canis familiaris
gataattgcgctacaatgaaggaga

SEQ ID NO: 128667 - DNA, 25 bp, Canis familiaris
gatacattctgcaagttgagtggaa

SEQ ID NO: 128668 - DNA, 25 bp, Canis familiaris
gataaatgccaaattatcggaaatt

SEQ ID NO: 128669 - DNA, 25 bp, Canis familiaris
gatagccctaacatatggaatacat

SEQ ID NO: 128670 - DNA, 25 bp, Canis familiaris
gatagactcatctcttatagactga

SEQ ID NO: 128671 - DNA, 25 bp, Canis familiaris
gatcacacataagctttagactgta

SEQ ID NO: 128672 - DNA, 25 bp, Canis familiaris
gatcagcataacatgttctaattta

SEQ ID NO: 128673 - DNA, 25 bp, Canis familiaris
gatcagcaataaagtcttctagctc

SEQ ID NO: 128674 - DNA, 25 bp, Canis familiaris
gatcacagtaaaacttctcctaaga

SEQ ID NO: 128675 - DNA, 25 bp, Canis familiaris
gatcacgtatacacctattatggga

SEQ ID NO: 128676 - DNA, 25 bp, Canis familiaris
gatagatgtgaacttcctaggggga

SEQ ID NO: 128677 - DNA, 25 bp, Canis familiaris
gatagaggcgaattcccagtggtag

SEQ ID NO: 128678 - DNA, 25 bp, Canis familiaris
gataacctgatctaccaagtggcta

SEQ ID NO: 128679 - DNA, 25 bp, Canis familiaris
gatcaacccttgtccaagtgctgat

SEQ ID NO: 128680 - DNA, 25 bp, Canis familiaris
gatcacccgcttgatcacagatctt

SEQ ID NO: 128681 - DNA, 25 bp, Canis familiaris
gatcacctcgttgcatatgctgtct

SEQ ID NO: 128682 - DNA, 25 bp, Canis familiaris
gatcaccattgatgtgcaagcccta

SEQ ID NO: 128683 - DNA, 25 bp, Canis familiaris
gatcaagcaagatgatgcctgcctt

SEQ ID NO: 128684 - DNA, 25 bp, Canis familiaris
gataaccagacactgcactcatttt

SEQ ID NO: 128685 - DNA, 25 bp, Canis familiaris
gataagaatactggcctgaatgtta

SEQ ID NO: 128686 - DNA, 25 bp, Canis familiaris
gatacagaagactcgtggcagtggt

SEQ ID NO: 128687 - DNA, 25 bp, Canis familiaris
gatcacaggagaatctggtgccggg

SEQ ID NO: 128688 - DNA, 25 bp, Canis familiaris
gatcacggcaatgcggctgcactgg

SEQ ID NO: 128689 - DNA, 25 bp, Canis familiaris
gataccgcaatggagacgcctacac

SEQ ID NO: 128690 - DNA, 25 bp, Canis familiaris
gatacaacatatgcagtcccaacaa

SEQ ID NO: 128691 - DNA, 25 bp, Canis familiaris
gatacacaattaaatcccataagca

SEQ ID NO: 128692 - DNA, 25 bp, Canis familiaris
gatagtaatgaaaatctgccatgca

SEQ ID NO: 128693 - DNA, 25 bp, Canis familiaris
gatagtgacgactgaactgcacaga

SEQ ID NO: 128694 - DNA, 25 bp, Canis familiaris
gataatagaacatccgtcacgacga

SEQ ID NO: 128695 - DNA, 25 bp, Canis familiaris
gatataaacaaaccagtgaggcaaa

SEQ ID NO: 128696 - DNA, 25 bp, Canis familiaris
gataattgatactaacaggtctgaa

SEQ ID NO: 128697 - DNA, 25 bp, Canis familiaris
gatcacgtgcttaaaatctgttgaa

SEQ ID NO: 128698 - DNA, 25 bp, Canis familiaris
gatcagcttttcaaattccattaga

SEQ ID NO: 128699 - DNA, 25 bp, Canis familiaris
gataattcctcgtagtctttcagac

SEQ ID NO: 128700 - DNA, 25 bp, Canis familiaris
gatcagcttccttaattatttgaac

SEQ ID NO: 128701 - DNA, 25 bp, Canis familiaris
gatcaggatccctgtctattagact

SEQ ID NO: 128702 - DNA, 25 bp, Canis familiaris
gatactgcctccagttactgaactt

SEQ ID NO: 128703 - DNA, 25 bp, Canis familiaris
gatcactggattctgcttactttta

SEQ ID NO: 128704 - DNA, 25 bp, Canis familiaris
gatcactgtgattgtcctttttttt

SEQ ID NO: 128705 - DNA, 25 bp, Canis familiaris
gataattatatgtcctttgtgtgtt

SEQ ID NO: 128706 - DNA, 25 bp, Canis familiaris
gatagaagtaatccgttggtcttag

SEQ ID NO: 128707 - DNA, 25 bp, Canis familiaris
gataaagttacgtttgttgcttcct

SEQ ID NO: 128708 - DNA, 25 bp, Canis familiaris
gtaaatgaaaccaccttcttccatg

SEQ ID NO: 128709 - DNA, 25 bp, Canis familiaris
gtaactaagacctccacatttcatt

SEQ ID NO: 128710 - DNA, 25 bp, Canis familiaris
gtacctaaatcctctgcaatttatc

SEQ ID NO: 128711 - DNA, 25 bp, Canis familiaris
gataagcgaagtgccactgggttct

SEQ ID NO: 128712 - DNA, 25 bp, Canis familiaris
gataaacagaggaccggggcctctt

SEQ ID NO: 128713 - DNA, 25 bp, Canis familiaris
gatagcacaggggtccaggggagtt

SEQ ID NO: 128714 - DNA, 25 bp, Canis familiaris
gatacaagcgggtcctggctttgtc

SEQ ID NO: 128715 - DNA, 25 bp, Canis familiaris
gatacaagcgggtcctggctttgtc

SEQ ID NO: 128716 - DNA, 25 bp, Canis familiaris
gatacaagcgggtcctggctttgtc

SEQ ID NO: 128717 - DNA, 25 bp, Canis familiaris
gataaagggaatagttctgcttgtt

SEQ ID NO: 128718 - DNA, 25 bp, Canis familiaris
gatagggttactagttcccgtgtgg

SEQ ID NO: 128719 - DNA, 25 bp, Canis familiaris
gatacttttactatacaagggtgct

SEQ ID NO: 128720 - DNA, 25 bp, Canis familiaris
gatacttttgaccttcaaagaattg

SEQ ID NO: 128721 - DNA, 25 bp, Canis familiaris
gatagttttctctccagaagaagca

SEQ ID NO: 128722 - DNA, 25 bp, Canis familiaris
gatatggtccaccattccagtaaag

SEQ ID NO: 128723 - DNA, 25 bp, Canis familiaris
gatagagtccttatgtctgtaaagt

SEQ ID NO: 128724 - DNA, 25 bp, Canis familiaris
gataagtgaatctagtgttggaata

SEQ ID NO: 128725 - DNA, 25 bp, Canis familiaris
gatcactgtagtgggtgttggacaa

SEQ ID NO: 128726 - DNA, 25 bp, Canis familiaris
gatactgtggtggtcattgggaata

SEQ ID NO: 128727 - DNA, 25 bp, Canis familiaris
gatagcggctgcggtaatggccacc

SEQ ID NO: 128728 - DNA, 25 bp, Canis familiaris
gatacaccaccgaaaggctactcat

SEQ ID NO: 128729 - DNA, 25 bp, Canis familiaris
gatcactcctccgtaaggtcaggaa

SEQ ID NO: 128730 - DNA, 25 bp, Canis familiaris
gatattccacctttagggaggaaat

SEQ ID NO: 128731 - DNA, 25 bp, Canis familiaris
gatacccacccagttgaaggaagag

SEQ ID NO: 128732 - DNA, 25 bp, Canis familiaris
gatagcccccaactggaaacaacca

SEQ ID NO: 128733 - DNA, 25 bp, Canis familiaris
gatacctccaatctgtgaaacacaa

SEQ ID NO: 128734 - DNA, 25 bp, Canis familiaris
gatactcacgacaggggaactcaaa

SEQ ID NO: 128735 - DNA, 25 bp, Canis familiaris
gatcactactgacttggttggcttc

SEQ ID NO: 128736 - DNA, 25 bp, Canis familiaris
gatcagatcaggtctttgtttgttg

SEQ ID NO: 128737 - DNA, 25 bp, Canis familiaris
gatcagtggatggctctttttccgt

SEQ ID NO: 128738 - DNA, 25 bp, Canis familiaris
gatcagtggtctcctgtgtttggac

SEQ ID NO: 128739 - DNA, 25 bp, Canis familiaris
gatagttgactggttgggtggtccc

SEQ ID NO: 128740 - DNA, 25 bp, Canis familiaris
gatagttacacgtgaaggttgcctg

SEQ ID NO: 128741 - DNA, 25 bp, Canis familiaris
gatagttacaactggggttcttttg

SEQ ID NO: 128742 - DNA, 25 bp, Canis familiaris
gtcacccccattctggaaggttttg

SEQ ID NO: 128743 - DNA, 25 bp, Canis familiaris
gatacccactttctgatataagcct

SEQ ID NO: 128744 - DNA, 25 bp, Canis familiaris
gatacccatagcttccatgagaaca

SEQ ID NO: 128745 - DNA, 25 bp, Canis familiaris
gatagcccacagctcgttaacaatg

SEQ ID NO: 128746 - DNA, 25 bp, Canis familiaris
gatacttcaggacccaatacacaat

SEQ ID NO: 128747 - DNA, 25 bp, Canis familiaris
gatacttcagtgtgaattgccactt

SEQ ID NO: 128748 - DNA, 25 bp, Canis familiaris
gataagtctgatttgtaaccattca

SEQ ID NO: 128749 - DNA, 25 bp, Canis familiaris
gatacatgtctgttgttcaagccct

SEQ ID NO: 128750 - DNA, 25 bp, Canis familiaris
gatagcaatatgtctgtgccatctg

SEQ ID NO: 128751 - DNA, 25 bp, Canis familiaris
gatcactgaatgtctatcatatctc

SEQ ID NO: 128752 - DNA, 25 bp, Canis familiaris
gatcagtgatattgaacatctctcc

SEQ ID NO: 128753 - DNA, 25 bp, Canis familiaris
gatcaagatcattgctcctcctgag

SEQ ID NO: 128754 - DNA, 25 bp, Canis familiaris
gatcaagatcattgctcctcctgag

SEQ ID NO: 128755 - DNA, 25 bp, Canis familiaris
gatcagatgatctttccttctctgt

SEQ ID NO: 128756 - DNA, 25 bp, Canis familiaris
gataaaatttcctttgtgataccaa

SEQ ID NO: 128757 - DNA, 25 bp, Canis familiaris
gataaacatttcacttggtctccat

SEQ ID NO: 128758 - DNA, 25 bp, Canis familiaris
gattaccttagagctaatgtcccat

SEQ ID NO: 128759 - DNA, 25 bp, Canis familiaris
gattaagtgtgatgcggactgtctc

SEQ ID NO: 128760 - DNA, 25 bp, Canis familiaris
gataaagatatatgtggaccactgt

SEQ ID NO: 128761 - DNA, 25 bp, Canis familiaris
gatactgaataaaggagtccactat

SEQ ID NO: 128762 - DNA, 25 bp, Canis familiaris
gattctgaaaatggggcaacgtact

SEQ ID NO: 128763 - DNA, 25 bp, Canis familiaris
gatattttgaggccgctgaacgacc

SEQ ID NO: 128764 - DNA, 25 bp, Canis familiaris
gattctttaagaccttccggcttat

SEQ ID NO: 128765 - DNA, 25 bp, Canis familiaris
gattcttcctacacttgataggatt

SEQ ID NO: 128766 - DNA, 25 bp, Canis familiaris
gatacttgcaacacgcttctgagga

SEQ ID NO: 128767 - DNA, 25 bp, Canis familiaris
gatacttcaaaggcttcctgatcga

SEQ ID NO: 128768 - DNA, 25 bp, Canis familiaris
gatcactgtcaatgatttgcctgtg

SEQ ID NO: 128769 - DNA, 25 bp, Canis familiaris
gatactgccaatttcttctgcatag

SEQ ID NO: 128770 - DNA, 25 bp, Canis familiaris
gataatcacacatgcttttgtattg

SEQ ID NO: 128771 - DNA, 25 bp, Canis familiaris
gataaccacaatgcattcgtaaaac

SEQ ID NO: 128772 - DNA, 25 bp, Canis familiaris
gataacatctaatgatctggtagta

SEQ ID NO: 128773 - DNA, 25 bp, Canis familiaris
gatatgacaccaaggcctggttgag

SEQ ID NO: 128774 - DNA, 25 bp, Canis familiaris
gataagcacatcaccctggaggagt

SEQ ID NO: 128775 - DNA, 25 bp, Canis familiaris
gatacatccataaccgggaggagcc

SEQ ID NO: 128776 - DNA, 25 bp, Canis familiaris
gatacatccataaccaggagtacgt

SEQ ID NO: 128777 - DNA, 25 bp, Canis familiaris
gatcagccccaatcagagatgctac

SEQ ID NO: 128778 - DNA, 25 bp, Canis familiaris
gatagctctaaaggcagatgctgta

SEQ ID NO: 128779 - DNA, 25 bp, Canis familiaris
gatagcacggacacaggcgtacacc

SEQ ID NO: 128780 - DNA, 25 bp, Canis familiaris
gatagcaagctgaacgagcacgtta

SEQ ID NO: 128781 - DNA, 25 bp, Canis familiaris
gatagattagattcggtcgttctgg

SEQ ID NO: 128782 - DNA, 25 bp, Canis familiaris
gatatttgaagctgaccgtctttga

SEQ ID NO: 128783 - DNA, 25 bp, Canis familiaris
gatatggtacagggcccaagacttg

SEQ ID NO: 128784 - DNA, 25 bp, Canis familiaris
gatagctgtaagagcaccaggactt

SEQ ID NO: 128785 - DNA, 25 bp, Canis familiaris
gatagctttgaaggttcataacttt

SEQ ID NO: 128786 - DNA, 25 bp, Canis familiaris
gattatttgaagttttacacgtgct

SEQ ID NO: 128787 - DNA, 25 bp, Canis familiaris
gttacgatacggatccagacggctg

SEQ ID NO: 128788 - DNA, 25 bp, Canis familiaris
gatatcactgaagggacccagtccc

SEQ ID NO: 128789 - DNA, 25 bp, Canis familiaris
gataatcaagagttgtccccatccc

SEQ ID NO: 128790 - DNA, 25 bp, Canis familiaris
gataaactgcaccatgtactccatc

SEQ ID NO: 128791 - DNA, 25 bp, Canis familiaris
gatcaaagcagcagatggaccaagc

SEQ ID NO: 128792 - DNA, 25 bp, Canis familiaris
gatcagaggagcagcgagacccaga

SEQ ID NO: 128793 - DNA, 25 bp, Canis familiaris
gatcaaggagcaggaggtcgtggac

SEQ ID NO: 128794 - DNA, 25 bp, Canis familiaris
gatagcacaagacaggtcgctggac

SEQ ID NO: 128795 - DNA, 25 bp, Canis familiaris
gataccataatcaaggtgccctact

SEQ ID NO: 128796 - DNA, 25 bp, Canis familiaris
gatatccatgttcaggttacacctc

SEQ ID NO: 128797 - DNA, 25 bp, Canis familiaris
gatcacgcttagtggtctcacactc

SEQ ID NO: 128798 - DNA, 25 bp, Canis familiaris
gatcaccattcaatttgattgcccc

SEQ ID NO: 128799 - DNA, 25 bp, Canis familiaris
gatcaccttcatttgatttcacccc

SEQ ID NO: 128800 - DNA, 25 bp, Canis familiaris
gatcacctttgatgactacatcgcc

SEQ ID NO: 128801 - DNA, 25 bp, Canis familiaris
gatcactcatttttgctctcaagtt

SEQ ID NO: 128802 - DNA, 25 bp, Canis familiaris
gataccgtttagactcacggggatt

SEQ ID NO: 128803 - DNA, 25 bp, Canis familiaris
gatatcggtcttagctcacacgagc

SEQ ID NO: 128804 - DNA, 25 bp, Canis familiaris
gatacaattgatgtgttccagcagc

SEQ ID NO: 128805 - DNA, 25 bp, Canis familiaris
gataaaatgccttcttccagcaatt

SEQ ID NO: 128806 - DNA, 25 bp, Canis familiaris
gattatgaaccgtagtcccaattta

SEQ ID NO: 128807 - DNA, 25 bp, Canis familiaris
gataatgaaaccagacccagtgttc

SEQ ID NO: 128808 - DNA, 25 bp, Canis familiaris
gatcaacacacaccaagaacaaggt

SEQ ID NO: 128809 - DNA, 25 bp, Canis familiaris
gataatccatgtccaaaagtatttc

SEQ ID NO: 128810 - DNA, 25 bp, Canis familiaris
gataacacattccctgcaattaatt

SEQ ID NO: 128811 - DNA, 25 bp, Canis familiaris
gatcaaatctaccttcagttccatg

SEQ ID NO: 128812 - DNA, 25 bp, Canis familiaris
gataaattcatccttactgtacaga

SEQ ID NO: 128813 - DNA, 25 bp, Canis familiaris
gataagttccatatactgatgcatc

SEQ ID NO: 128814 - DNA, 25 bp, Canis familiaris
gataagtatgccgtacgcttcatcc

SEQ ID NO: 128815 - DNA, 25 bp, Canis familiaris
gatatcgaatccctgccgttagcga

SEQ ID NO: 128816 - DNA, 25 bp, Canis familiaris
gatatccagtccgtgacgattggga

SEQ ID NO: 128817 - DNA, 25 bp, Canis familiaris
gatatcaaagccctgagttgggttc

SEQ ID NO: 128818 - DNA, 25 bp, Canis familiaris
gatagacttgtcttatttaggttct

SEQ ID NO: 128819 - DNA, 25 bp, Canis familiaris
gatagacatttcgtactttgcagta

SEQ ID NO: 128820 - DNA, 25 bp, Canis familiaris
gataacatttattttcctgcgtgaa

SEQ ID NO: 128821 - DNA, 25 bp, Canis familiaris
gataatacattttcattactggaga

SEQ ID NO: 128822 - DNA, 25 bp, Canis familiaris
gatactagaatttcctccttggttc

SEQ ID NO: 128823 - DNA, 25 bp, Canis familiaris
gatactaactactcattctgggtac

SEQ ID NO: 128824 - DNA, 25 bp, Canis familiaris
gataaaactacatgcaactaaatac

SEQ ID NO: 128825 - DNA, 25 bp, Canis familiaris
gataaaatcttcagcacatcaaaag

SEQ ID NO: 128826 - DNA, 25 bp, Canis familiaris
gatacatcccttaagatcagcccaa

SEQ ID NO: 128827 - DNA, 25 bp, Canis familiaris
gatacctgtaatgcattgagcccaa

SEQ ID NO: 128828 - DNA, 25 bp, Canis familiaris
gatacaattcctgatctgagaacga

SEQ ID NO: 128829 - DNA, 25 bp, Canis familiaris
gataattttcaccatcagaagacac

SEQ ID NO: 128830 - DNA, 25 bp, Canis familiaris
gatagtccccagggcaacagacagc

SEQ ID NO: 128831 - DNA, 25 bp, Canis familiaris
gatatagccccaggacagcaagtcc

SEQ ID NO: 128832 - DNA, 25 bp, Canis familiaris
gatatacctccgcaataatctcagt

SEQ ID NO: 128833 - DNA, 25 bp, Canis familiaris
gataagccccctattttttatctct

SEQ ID NO: 128834 - DNA, 25 bp, Canis familiaris
gataaggcccgtatatatatttgta

SEQ ID NO: 128835 - DNA, 25 bp, Canis familiaris
gataattggcatctttataaattta

SEQ ID NO: 128836 - DNA, 25 bp, Canis familiaris
gatcaagcatacattttatagcaat

SEQ ID NO: 128837 - DNA, 25 bp, Canis familiaris
gataagcattcagttcatatttaat

SEQ ID NO: 128838 - DNA, 25 bp, Canis familiaris
gatattggtcttaaattctagaatt

SEQ ID NO: 128839 - DNA, 25 bp, Canis familiaris
gattcaggtttcatttccaggggcc

SEQ ID NO: 128840 - DNA, 25 bp, Canis familiaris
gttagtttgcctattctagttccct

SEQ ID NO: 128841 - DNA, 25 bp, Canis familiaris
gttggcttatttgtttgtttccctg

SEQ ID NO: 128842 - DNA, 25 bp, Canis familiaris
gatattttttttcttgattcccctg

SEQ ID NO: 128843 - DNA, 25 bp, Canis familiaris
gataactttctgttggattaatccc

SEQ ID NO: 128844 - DNA, 25 bp, Canis familiaris
gataattttccatgctgtcttttcc

SEQ ID NO: 128845 - DNA, 25 bp, Canis familiaris
gatcaagatttccatatcttctctt

SEQ ID NO: 128846 - DNA, 25 bp, Canis familiaris
gatcaagatttgctagtaaccgtta

SEQ ID NO: 128847 - DNA, 25 bp, Canis familiaris
gataatttggtttggacaccgtaag

SEQ ID NO: 128848 - DNA, 25 bp, Canis familiaris
gataatgttttatttccaacaggaa

SEQ ID NO: 128849 - DNA, 25 bp, Canis familiaris
gatcaatctttttatctacattttg

SEQ ID NO: 128850 - DNA, 25 bp, Canis familiaris
gatttctagttattcgtacgttgta

SEQ ID NO: 128851 - DNA, 25 bp, Canis familiaris
gataggtagtaatccctcctttata

SEQ ID NO: 128852 - DNA, 25 bp, Canis familiaris
gataggtgttaatctacccttctag

SEQ ID NO: 128853 - DNA, 25 bp, Canis familiaris
gataggtgttaatctacccttctag

SEQ ID NO: 128854 - DNA, 25 bp, Canis familiaris
gatcacttgtaataaatcccattta

SEQ ID NO: 128855 - DNA, 25 bp, Canis familiaris
gatactgttggagaggaccttcttg

SEQ ID NO: 128856 - DNA, 25 bp, Canis familiaris
gatcacttctgttggggttttgttg

SEQ ID NO: 128857 - DNA, 25 bp, Canis familiaris
gatactatatccatgaagtgctttg

SEQ ID NO: 128858 - DNA, 25 bp, Canis familiaris
gatagtactactaccagtctttgca

SEQ ID NO: 128859 - DNA, 25 bp, Canis familiaris
gatacactctttagtcatgttttgc

SEQ ID NO: 128860 - DNA, 25 bp, Canis familiaris
gataactgattctcacatgtgtgat

SEQ ID NO: 128861 - DNA, 25 bp, Canis familiaris
gataacattgtcacacagggaacag

SEQ ID NO: 128862 - DNA, 25 bp, Canis familiaris
gatcaacttgacacatgctggggga

SEQ ID NO: 128863 - DNA, 25 bp, Canis familiaris
gatatactagtttctgatggaggga

SEQ ID NO: 128864 - DNA, 25 bp, Canis familiaris
gataaggcgttcttgatcttggtga

SEQ ID NO: 128865 - DNA, 25 bp, Canis familiaris
gataagggattcatactcggacaca

SEQ ID NO: 128866 - DNA, 25 bp, Canis familiaris
gataacgatttcacaccaggaacag

SEQ ID NO: 128867 - DNA, 25 bp, Canis familiaris
gatagacagattatatacgggaagt

SEQ ID NO: 128868 - DNA, 25 bp, Canis familiaris
gatacaagttgttaacatgtggaat

SEQ ID NO: 128869 - DNA, 25 bp, Canis familiaris
gatagcagaattgaacacattggcc

SEQ ID NO: 128870 - DNA, 25 bp, Canis familiaris
gatatgcctgttgatgatgtcattg

SEQ ID NO: 128871 - DNA, 25 bp, Canis familiaris
gatatgccttgggtatgattcttag

SEQ ID NO: 128872 - DNA, 25 bp, Canis familiaris
gatatgctatatgttggtgaattga

SEQ ID NO: 128873 - DNA, 25 bp, Canis familiaris
gataaggatggcaatggctatatta

SEQ ID NO: 128874 - DNA, 25 bp, Canis familiaris
gatacaggggcttgccgcatttgtg

SEQ ID NO: 128875 - DNA, 25 bp, Canis familiaris
gataggtgtcagaatgccgcatttg

SEQ ID NO: 128876 - DNA, 25 bp, Canis familiaris
gatagagtgctctgggcatttagaa

SEQ ID NO: 128877 - DNA, 25 bp, Canis familiaris
gataggtcctacagctgtcataaat

SEQ ID NO: 128878 - DNA, 25 bp, Canis familiaris
gatagccccttttgatgttaatata

SEQ ID NO: 128879 - DNA, 25 bp, Canis familiaris
gatatcctccttcagcagttaaaac

SEQ ID NO: 128880 - DNA, 25 bp, Canis familiaris
gataccttgattcctttgggaagac

SEQ ID NO: 128881 - DNA, 25 bp, Canis familiaris
gatacatctgatctgtttttggaag

SEQ ID NO: 128882 - DNA, 25 bp, Canis familiaris
gatagtcatactatttatttaaaaa

SEQ ID NO: 128883 - DNA, 25 bp, Canis familiaris
gataaatattttctcttttaggcaa

SEQ ID NO: 128884 - DNA, 25 bp, Canis familiaris
gatcaagtcattttcaatctttcta

SEQ ID NO: 128885 - DNA, 25 bp, Canis familiaris
gatatactcaatgcagagactcttc

SEQ ID NO: 128886 - DNA, 25 bp, Canis familiaris
gataactatcatgcaatttcactca

SEQ ID NO: 128887 - DNA, 25 bp, Canis familiaris
gatacatctataaccagtacgtacg

SEQ ID NO: 128888 - DNA, 25 bp, Canis familiaris
gatacattatcaactagtgtcagat

SEQ ID NO: 128889 - DNA, 25 bp, Canis familiaris
gataaatctttgtagctgctcagcc

SEQ ID NO: 128890 - DNA, 25 bp, Canis familiaris
gatagaggtttggagctcatcagca

SEQ ID NO: 128891 - DNA, 25 bp, Canis familiaris
gatactggtatcaagagacacacga

SEQ ID NO: 128892 - DNA, 25 bp, Canis familiaris
gatacgtttgcacgggccaagaact

SEQ ID NO: 128893 - DNA, 25 bp, Canis familiaris
gatattgattggtgatgggcaagta

SEQ ID NO: 128894 - DNA, 25 bp, Canis familiaris
gatcaacgtggctgatgttccagtc

SEQ ID NO: 128895 - DNA, 25 bp, Canis familiaris
gatcaacgttgcttattttcctcag

SEQ ID NO: 128896 - DNA, 25 bp, Canis familiaris
gatactctgtagatgcttttcccaa

SEQ ID NO: 128897 - DNA, 25 bp, Canis familiaris
gatagttctgatatctttctgcctg

SEQ ID NO: 128898 - DNA, 25 bp, Canis familiaris
gatactagttttccattcgcactgt

SEQ ID NO: 128899 - DNA, 25 bp, Canis familiaris
gatactagtgtttgccgttagctgg

SEQ ID NO: 128900 - DNA, 25 bp, Canis familiaris
gatactcaatgtggtggccttcatc

SEQ ID NO: 128901 - DNA, 25 bp, Canis familiaris
gataatggatatgctgtgctccccc

SEQ ID NO: 128902 - DNA, 25 bp, Canis familiaris
gatagagccagtggtgtgcacaccc

SEQ ID NO: 128903 - DNA, 25 bp, Canis familiaris
gataggtcagcagggtcactggcca

SEQ ID NO: 128904 - DNA, 25 bp, Canis familiaris
gatagccacgcagagtatctggata

SEQ ID NO: 128905 - DNA, 25 bp, Canis familiaris
gataccaatgagcagtcgctggagc

SEQ ID NO: 128906 - DNA, 25 bp, Canis familiaris
gataataaagcgcttgtttgcagat

SEQ ID NO: 128907 - DNA, 25 bp, Canis familiaris
gattcagaactgccaatggtttagt

SEQ ID NO: 128908 - DNA, 25 bp, Canis familiaris
gatataaactggccttttccagggg

SEQ ID NO: 128909 - DNA, 25 bp, Canis familiaris
gataccataaagcttttcatcagag

SEQ ID NO: 128910 - DNA, 25 bp, Canis familiaris
gataccaataactgttcttctagtg

SEQ ID NO: 128911 - DNA, 25 bp, Canis familiaris
gatacttctaaatgtttgctgctac

SEQ ID NO: 128912 - DNA, 25 bp, Canis familiaris
gtaggttaaaagtgcggctggccgt

SEQ ID NO: 128913 - DNA, 25 bp, Canis familiaris
gatatggttaaaaatgtgcgctgtt

SEQ ID NO: 128914 - DNA, 25 bp, Canis familiaris
gataatgtaaagaaatcgcaagaac

SEQ ID NO: 128915 - DNA, 25 bp, Canis familiaris
gatcaatgggacagaattcagaacc

SEQ ID NO: 128916 - DNA, 25 bp, Canis familiaris
gatcaatggggcagtcattagattt

SEQ ID NO: 128917 - DNA, 25 bp, Canis familiaris
gatcaataggtccctgtttgtcatc

SEQ ID NO: 128918 - DNA, 25 bp, Canis familiaris
gataatggtgttcctttcgttcgta

SEQ ID NO: 128919 - DNA, 25 bp, Canis familiaris
gatcaagtggttactttgtttcttt

SEQ ID NO: 128920 - DNA, 25 bp, Canis familiaris
gatcaagttgtcagcatttgttggt

SEQ ID NO: 128921 - DNA, 25 bp, Canis familiaris
gataatgttctccgttgtgttacta

SEQ ID NO: 128922 - DNA, 25 bp, Canis familiaris
gataatcttcttcattggtaacctg

SEQ ID NO: 128923 - DNA, 25 bp, Canis familiaris
gataatctctctttttttagaactt

SEQ ID NO: 128924 - DNA, 25 bp, Canis familiaris
gataaattaataattcttggaccca

SEQ ID NO: 128925 - DNA, 25 bp, Canis familiaris
gataactcaaaaattcttaagctaa

SEQ ID NO: 128926 - DNA, 25 bp, Canis familiaris
gataacatcaatataccctctacta

SEQ ID NO: 128927 - DNA, 25 bp, Canis familiaris
gataatgtatatattccccttccac

SEQ ID NO: 128928 - DNA, 25 bp, Canis familiaris
gtaacttatttgtccggttcaagat

SEQ ID NO: 128929 - DNA, 25 bp, Canis familiaris
gataatttgtaatccagccttaatg

SEQ ID NO: 128930 - DNA, 25 bp, Canis familiaris
gataatttgtaatctagccttgatg

SEQ ID NO: 128931 - DNA, 25 bp, Canis familiaris
gataattacagattcctatgctgtt

SEQ ID NO: 128932 - DNA, 25 bp, Canis familiaris
gataaccacagttttcagtccttta

SEQ ID NO: 128933 - DNA, 25 bp, Canis familiaris
gatacccaagttctcatttcatttg

SEQ ID NO: 128934 - DNA, 25 bp, Canis familiaris
gatatcccaagaatcccagtgtttg

SEQ ID NO: 128935 - DNA, 25 bp, Canis familiaris
gataaggcacaaaccaaattttgat

SEQ ID NO: 128936 - DNA, 25 bp, Canis familiaris
gatacatgttaaaccttttttgata

SEQ ID NO: 128937 - DNA, 25 bp, Canis familiaris
gatacgttaaggcctcttggttcta

SEQ ID NO: 128938 - DNA, 25 bp, Canis familiaris
gatattgtttatccccaaggtttat

SEQ ID NO: 128939 - DNA, 25 bp, Canis familiaris
gatttgtcttctgcctaggggttaa

SEQ ID NO: 128940 - DNA, 25 bp, Canis familiaris
gataatgtgttcaacctctggaggt

SEQ ID NO: 128941 - DNA, 25 bp, Canis familiaris
gatagatttctcacacagctaagga

SEQ ID NO: 128942 - DNA, 25 bp, Canis familiaris
gatactccctcaagcccaagaggag

SEQ ID NO: 128943 - DNA, 25 bp, Canis familiaris
gatactctagcgccccaaagagtga

SEQ ID NO: 128944 - DNA, 25 bp, Canis familiaris
gtagattcaggtcaaccaggcgggg

SEQ ID NO: 128945 - DNA, 25 bp, Canis familiaris
gatagactgacagataaacaggcag

SEQ ID NO: 128946 - DNA, 25 bp, Canis familiaris
gataactggtggtaaatcctagagc

SEQ ID NO: 128947 - DNA, 25 bp, Canis familiaris
gataaatggttttcatcagccggat

SEQ ID NO: 128948 - DNA, 25 bp, Canis familiaris
gataaatgttctcacaacttggttg

SEQ ID NO: 128949 - DNA, 25 bp, Canis familiaris
gataaatatcttccactgattagtg

SEQ ID NO: 128950 - DNA, 25 bp, Canis familiaris
gatatacatgctcaaccttcatcgg

SEQ ID NO: 128951 - DNA, 25 bp, Canis familiaris
gataatgagagctaaccttagctgc

SEQ ID NO: 128952 - DNA, 25 bp, Canis familiaris
gataagtgatcagacctttgctcat

SEQ ID NO: 128953 - DNA, 25 bp, Canis familiaris
gataatgatatcctcctgcttttca

SEQ ID NO: 128954 - DNA, 25 bp, Canis familiaris
gataatattcaggtatgtgctttct

SEQ ID NO: 128955 - DNA, 25 bp, Canis familiaris
gataaatctatgctgcaggcttttt

SEQ ID NO: 128956 - DNA, 25 bp, Canis familiaris
gataagtatattcatcagtttttaa

SEQ ID NO: 128957 - DNA, 25 bp, Canis familiaris
gataattatgatttacgtgatttta

SEQ ID NO: 128958 - DNA, 25 bp, Canis familiaris
gatacttcagtttcccattgtttac

SEQ ID NO: 128959 - DNA, 25 bp, Canis familiaris
gatactaagttctgttcttttcgaa

SEQ ID NO: 128960 - DNA, 25 bp, Canis familiaris
gatactgaagtatttgctttaattc

SEQ ID NO: 128961 - DNA, 25 bp, Canis familiaris
gatacgaatgtgtttcttcttttta

SEQ ID NO: 128962 - DNA, 25 bp, Canis familiaris
gataagttcatttatcttctttttt

SEQ ID NO: 128963 - DNA, 25 bp, Canis familiaris
gataatttatctttctactcataat

SEQ ID NO: 128964 - DNA, 25 bp, Canis familiaris
gataacttttgctatctttgaacta

SEQ ID NO: 128965 - DNA, 25 bp, Canis familiaris
gataactttgtgatctgagcgagaa

SEQ ID NO: 128966 - DNA, 25 bp, Canis familiaris
gataaagattagatcatgtgctgaa

SEQ ID NO: 128967 - DNA, 25 bp, Canis familiaris
gataccgactagatgcatgcagatg

SEQ ID NO: 128968 - DNA, 25 bp, Canis familiaris
gataccgcagctaggaataatggaa

SEQ ID NO: 128969 - DNA, 25 bp, Canis familiaris
gataccgcagctaggaataatggaa

SEQ ID NO: 128970 - DNA, 25 bp, Canis familiaris
gatagccgatatagacacatcaatc

SEQ ID NO: 128971 - DNA, 25 bp, Canis familiaris
gatagctctttcaagcagcagcaat

SEQ ID NO: 128972 - DNA, 25 bp, Canis familiaris
gatagcatgctttatcatcaaggca

SEQ ID NO: 128973 - DNA, 25 bp, Canis familiaris
gatatgtcaaaattaagcgcaactg

SEQ ID NO: 128974 - DNA, 25 bp, Canis familiaris
gatagccatgactcaagggaacttg

SEQ ID NO: 128975 - DNA, 25 bp, Canis familiaris
gatagctcgtcaacatgttagacct

SEQ ID NO: 128976 - DNA, 25 bp, Canis familiaris
gatactcatgaagacagccagacct

SEQ ID NO: 128977 - DNA, 25 bp, Canis familiaris
gatagctctgacgtacccagatgca

SEQ ID NO: 128978 - DNA, 25 bp, Canis familiaris
gatacttgatgtgcactctcatgtc

SEQ ID NO: 128979 - DNA, 25 bp, Canis familiaris
gataatatgttatgtccatgtccat

SEQ ID NO: 128980 - DNA, 25 bp, Canis familiaris
gataatggtgtatgactgctttgca

SEQ ID NO: 128981 - DNA, 25 bp, Canis familiaris
gatagggtgtagatgcatcctctgg

SEQ ID NO: 128982 - DNA, 25 bp, Canis familiaris
gataggagttggtttcctagttctt

SEQ ID NO: 128983 - DNA, 25 bp, Canis familiaris
gatagccagtgggtttcttaaagtt

SEQ ID NO: 128984 - DNA, 25 bp, Canis familiaris
gataccaagggtaccagctacaagt

SEQ ID NO: 128985 - DNA, 25 bp, Canis familiaris
gattcccggaatgtgcgtacaagta

SEQ ID NO: 128986 - DNA, 25 bp, Canis familiaris
gattccccggaactggtacatgtgc

SEQ ID NO: 128987 - DNA, 25 bp, Canis familiaris
gatacccttcagattgagtttggag

SEQ ID NO: 128988 - DNA, 25 bp, Canis familiaris
gataccctggagatgcgggtccgag

SEQ ID NO: 128989 - DNA, 25 bp, Canis familiaris
gataccttgggttgtggactcgggc

SEQ ID NO: 128990 - DNA, 25 bp, Canis familiaris
gatactttggtggtcggtttgggtg

SEQ ID NO: 128991 - DNA, 25 bp, Canis familiaris
gatacttttgtcatttttaggagga

SEQ ID NO: 128992 - DNA, 25 bp, Canis familiaris
gataatccttttttgttagttgaca

SEQ ID NO: 128993 - DNA, 25 bp, Canis familiaris
gataactgttgactttgtgtagtgt

SEQ ID NO: 128994 - DNA, 25 bp, Canis familiaris
gatactctttttttcttcagtgttg

SEQ ID NO: 128995 - DNA, 25 bp, Canis familiaris
gatacttactccagtttacatttca

SEQ ID NO: 128996 - DNA, 25 bp, Canis familiaris
gatacttccttgggagatgtacttt

SEQ ID NO: 128997 - DNA, 25 bp, Canis familiaris
gatagttggtctcaaattggtctta

SEQ ID NO: 128998 - DNA, 25 bp, Canis familiaris
gatagattgtttagaaattgtttga

SEQ ID NO: 128999 - DNA, 25 bp, Canis familiaris
gatagttttgtgatacttcattatg

SEQ ID NO: 129000 - DNA, 25 bp, Canis familiaris
gataatgttttgctactcttgtcag

SEQ ID NO: 129001 - DNA, 25 bp, Canis familiaris
gataatgtatctcttactttccaga

SEQ ID NO: 129002 - DNA, 25 bp, Canis familiaris
gataaagacctgcaactgttccgca

SEQ ID NO: 129003 - DNA, 25 bp, Canis familiaris
gatagagaatccccaagctgactcc

SEQ ID NO: 129004 - DNA, 25 bp, Canis familiaris
gatagagaagcagccgcagtctccc

SEQ ID NO: 129005 - DNA, 25 bp, Canis familiaris
gatatggaagcagcgacctgcccgt

SEQ ID NO: 129006 - DNA, 25 bp, Canis familiaris
gatagtagacacgcattcagccctt

SEQ ID NO: 129007 - DNA, 25 bp, Canis familiaris
gatatgctctgaacccagtcttact

SEQ ID NO: 129008 - DNA, 25 bp, Canis familiaris
gatacttgatttacagattactctc

SEQ ID NO: 129009 - DNA, 25 bp, Canis familiaris
gatagcttgagcaaagagttcactt

SEQ ID NO: 129010 - DNA, 25 bp, Canis familiaris
gatactaatatacatgcttcagctt

SEQ ID NO: 129011 - DNA, 25 bp, Canis familiaris
gatacaatattatcttgtagctcat

SEQ ID NO: 129012 - DNA, 25 bp, Canis familiaris
gatacactattactctaggactgtt

SEQ ID NO: 129013 - DNA, 25 bp, Canis familiaris
gatacatttttctgggactgagagt

SEQ ID NO: 129014 - DNA, 25 bp, Canis familiaris
gatagattttataaggccctgcaac

SEQ ID NO: 129015 - DNA, 25 bp, Canis familiaris
gataactcttcaaaacccatctctt

SEQ ID NO: 129016 - DNA, 25 bp, Canis familiaris
gatacagttgtttaacacacatttt

SEQ ID NO: 129017 - DNA, 25 bp, Canis familiaris
gatacagtttaatcatccctatact

SEQ ID NO: 129018 - DNA, 25 bp, Canis familiaris
gatactttttatttaccttactgat

SEQ ID NO: 129019 - DNA, 25 bp, Canis familiaris
taatttgtattccggaccttgtcca

SEQ ID NO: 129020 - DNA, 25 bp, Canis familiaris
tagtttgtaaaatgtctttaccgtg

SEQ ID NO: 129021 - DNA, 25 bp, Canis familiaris
tattaattggaacagttttactttg

SEQ ID NO: 129022 - DNA, 25 bp, Canis familiaris
tattttgggaactggcctttcttgg

SEQ ID NO: 129023 - DNA, 25 bp, Canis familiaris
gtttttggcctctgacctaatttgt

SEQ ID NO: 129024 - DNA, 25 bp, Canis familiaris
gttttcataggataacaatttttgt

SEQ ID NO: 129025 - DNA, 25 bp, Canis familiaris
gttttatccgtaagcaatattttca

SEQ ID NO: 129026 - DNA, 25 bp, Canis familiaris
gatagtctatgcaggatagcaaact

SEQ ID NO: 129027 - DNA, 25 bp, Canis familiaris
gataggctctgattgcagtaggcag

SEQ ID NO: 129028 - DNA, 25 bp, Canis familiaris
gatagagatggctatggtcgtgatc

SEQ ID NO: 129029 - DNA, 25 bp, Canis familiaris
gataaagccaggctcggatcgcgac

SEQ ID NO: 129030 - DNA, 25 bp, Canis familiaris
gataaggaacgggtggcagccgccc

SEQ ID NO: 129031 - DNA, 25 bp, Canis familiaris
gatagcagggacaggagcaggccgc

SEQ ID NO: 129032 - DNA, 25 bp, Canis familiaris
gatacagcaggactcgtggggacac

SEQ ID NO: 129033 - DNA, 25 bp, Canis familiaris
gatacgggatgccgtgtggggcaga

SEQ ID NO: 129034 - DNA, 25 bp, Canis familiaris
gataccgagagcaaggctggagcgg

SEQ ID NO: 129035 - DNA, 25 bp, Canis familiaris
gatagtggcaggaggcatttgggga

SEQ ID NO: 129036 - DNA, 25 bp, Canis familiaris
gatatggccagggtcgtttcaggga

SEQ ID NO: 129037 - DNA, 25 bp, Canis familiaris
gataggccataggtcatgtgttgca

SEQ ID NO: 129038 - DNA, 25 bp, Canis familiaris
gataggccacagagctgcatctacc

SEQ ID NO: 129039 - DNA, 25 bp, Canis familiaris
gatacgtacagaacattctatccaa

SEQ ID NO: 129040 - DNA, 25 bp, Canis familiaris
gatacctacaaattaccgcacagat

SEQ ID NO: 129041 - DNA, 25 bp, Canis familiaris
gataacttacactatacaacctgaa

SEQ ID NO: 129042 - DNA, 25 bp, Canis familiaris
gatacactttcacacacaagctcaa

SEQ ID NO: 129043 - DNA, 25 bp, Canis familiaris
gatacactttcaaaatctgatgact

SEQ ID NO: 129044 - DNA, 25 bp, Canis familiaris
gatacatatttaaatattccactca

SEQ ID NO: 129045 - DNA, 25 bp, Canis familiaris
gatacagtctaaaattactcagcat

SEQ ID NO: 129046 - DNA, 25 bp, Canis familiaris
gatacagctctacaatgctttccct

SEQ ID NO: 129047 - DNA, 25 bp, Canis familiaris
gatacaccatattttgctttctctt

SEQ ID NO: 129048 - DNA, 25 bp, Canis familiaris
gataactctcatttgcgtgttttct

SEQ ID NO: 129049 - DNA, 25 bp, Canis familiaris
gataacctgctttgttgttctttct

SEQ ID NO: 129050 - DNA, 25 bp, Canis familiaris
gataaccgctgtggaatgtaccatt

SEQ ID NO: 129051 - DNA, 25 bp, Canis familiaris
gataaccactgtcactgttagcctg

SEQ ID NO: 129052 - DNA, 25 bp, Canis familiaris
gatacacaagtacactactccctgg

SEQ ID NO: 129053 - DNA, 25 bp, Canis familiaris
gatacatcgagttcaaactccccaa

SEQ ID NO: 129054 - DNA, 25 bp, Canis familiaris
gatacattaattcaagtgcccccag

SEQ ID NO: 129055 - DNA, 25 bp, Canis familiaris
gatacttagctgattgaaccaccca

SEQ ID NO: 129056 - DNA, 25 bp, Canis familiaris
gatactaagtgtctgaatgtctgcc

SEQ ID NO: 129057 - DNA, 25 bp, Canis familiaris
gataccaaggccctaaggcccagga

SEQ ID NO: 129058 - DNA, 25 bp, Canis familiaris
gatacgtataccttggatggcccag

SEQ ID NO: 129059 - DNA, 25 bp, Canis familiaris
gatatcagcttactttggggccagg

SEQ ID NO: 129060 - DNA, 25 bp, Canis familiaris
gatacactgtcactttgtggagttc

SEQ ID NO: 129061 - DNA, 25 bp, Canis familiaris
gatagatgctgtttttgtaaagtgc

SEQ ID NO: 129062 - DNA, 25 bp, Canis familiaris
gatagagctgttctgggaattgata

SEQ ID NO: 129063 - DNA, 25 bp, Canis familiaris
gatagcctgttaccagctgattctg

SEQ ID NO: 129064 - DNA, 25 bp, Canis familiaris
gatactttctgtccatgtgtgtcat

SEQ ID NO: 129065 - DNA, 25 bp, Canis familiaris
gatactgctaagtctatgctagctc

SEQ ID NO: 129066 - DNA, 25 bp, Canis familiaris
gatacccaatgaatatctatctcat

SEQ ID NO: 129067 - DNA, 25 bp, Canis familiaris
gatacacctgaaagatcttgtcaca

SEQ ID NO: 129068 - DNA, 25 bp, Canis familiaris
gatacactgcgatctgaatttcaca

SEQ ID NO: 129069 - DNA, 25 bp, Canis familiaris
gatacactctgactgtgaatgttgc

SEQ ID NO: 129070 - DNA, 25 bp, Canis familiaris
gatactgcctcctgatcatgttggc

SEQ ID NO: 129071 - DNA, 25 bp, Canis familiaris
gatacatctctcatacagtttgggg

SEQ ID NO: 129072 - DNA, 25 bp, Canis familiaris
gatacagcttttcagttgtggaatg

SEQ ID NO: 129073 - DNA, 25 bp, Canis familiaris
gatacacttttctgttgctgctagt

SEQ ID NO: 129074 - DNA, 25 bp, Canis familiaris
gataacttttctgttctcatgtgtc

SEQ ID NO: 129075 - DNA, 25 bp, Canis familiaris
gataacattttctttcatcttttta

SEQ ID NO: 129076 - DNA, 25 bp, Canis familiaris
gataacttttcacattgtcttttac

SEQ ID NO: 129077 - DNA, 25 bp, Canis familiaris
gataaatctttactttgacttccca

SEQ ID NO: 129078 - DNA, 25 bp, Canis familiaris
gataaactctgtagtttccttccta

SEQ ID NO: 129079 - DNA, 25 bp, Canis familiaris
gatacctatcgtatattccttttag

SEQ ID NO: 129080 - DNA, 25 bp, Canis familiaris
gatactttcagcgtatattcctcta

SEQ ID NO: 129081 - DNA, 25 bp, Canis familiaris
gatagcttttccctttgaatccaat

SEQ ID NO: 129082 - DNA, 25 bp, Canis familiaris
gatactctttccgtatgtacataca

SEQ ID NO: 129083 - DNA, 25 bp, Canis familiaris
gataccctgatccctgatgggaagc

SEQ ID NO: 129084 - DNA, 25 bp, Canis familiaris
gatacacctactccgaatggcataa

SEQ ID NO: 129085 - DNA, 25 bp, Canis familiaris
gatacccataggaaattgtcataat

SEQ ID NO: 129086 - DNA, 25 bp, Canis familiaris
gatagcccactggatggcattttaa

SEQ ID NO: 129087 - DNA, 25 bp, Canis familiaris
gatacccactggtgaatgactttca

SEQ ID NO: 129088 - DNA, 25 bp, Canis familiaris
gatacggaggggcaagcaccaccca

SEQ ID NO: 129089 - DNA, 25 bp, Canis familiaris
gatacggaatggaagacacccgccc

SEQ ID NO: 129090 - DNA, 25 bp, Canis familiaris
gatacggacctgtatgtcctttgcc

SEQ ID NO: 129091 - DNA, 25 bp, Canis familiaris
gatagcggatgcgtttctttggtgc

SEQ ID NO: 129092 - DNA, 25 bp, Canis familiaris
gatagcgagcatgatttgatctgat

SEQ ID NO: 129093 - DNA, 25 bp, Canis familiaris
gatactgacatggatcctgccaact

SEQ ID NO: 129094 - DNA, 25 bp, Canis familiaris
gatacatgcacagacatacacacac

SEQ ID NO: 129095 - DNA, 25 bp, Canis familiaris
gatactcgctgttcatgaatacact

SEQ ID NO: 129096 - DNA, 25 bp, Canis familiaris
gatacatcgtgctacatacttgagt

SEQ ID NO: 129097 - DNA, 25 bp, Canis familiaris
gatacagcatgttacatggccctga

SEQ ID NO: 129098 - DNA, 25 bp, Canis familiaris
gatacagctgctttgagctccagga

SEQ ID NO: 129099 - DNA, 25 bp, Canis familiaris
gatacaggctgaggacatcaatgga

SEQ ID NO: 129100 - DNA, 25 bp, Canis familiaris
gatatcagacaagcacatcagtgat

SEQ ID NO: 129101 - DNA, 25 bp, Canis familiaris
gatatagacacatcaatcaagcagt

SEQ ID NO: 129102 - DNA, 25 bp, Canis familiaris
gatatggccagctgatgctaagtct

SEQ ID NO: 129103 - DNA, 25 bp, Canis familiaris
gatatcctcagtaatagcaagcttt

SEQ ID NO: 129104 - DNA, 25 bp, Canis familiaris
gataccatcacgaaagaagccaaga

SEQ ID NO: 129105 - DNA, 25 bp, Canis familiaris
gatacttctctgtagaagaccagag

SEQ ID NO: 129106 - DNA, 25 bp, Canis familiaris
gatactaatctgtgtgccatccacg

SEQ ID NO: 129107 - DNA, 25 bp, Canis familiaris
gatactgtatcgtgctcactagaca

SEQ ID NO: 129108 - DNA, 25 bp, Canis familiaris
gatagttgcatcattgccctaggcc

SEQ ID NO: 129109 - DNA, 25 bp, Canis familiaris
gtaggaacttatgcaaaggccccta

SEQ ID NO: 129110 - DNA, 25 bp, Canis familiaris
gataggacctctttcaatgacgact

SEQ ID NO: 129111 - DNA, 25 bp, Canis familiaris
gataggggcatcttttatgaccaag

SEQ ID NO: 129112 - DNA, 25 bp, Canis familiaris
gatagggagatgcttacgaggacga

SEQ ID NO: 129113 - DNA, 25 bp, Canis familiaris
gatacggtagcgttacaaagctcca

SEQ ID NO: 129114 - DNA, 25 bp, Canis familiaris
gataggtggaaaaacagaacccgag

SEQ ID NO: 129115 - DNA, 25 bp, Canis familiaris
gatagtgtcaggtagtacaggacct

SEQ ID NO: 129116 - DNA, 25 bp, Canis familiaris
gatatcttcaggtgtaaagtttgca

SEQ ID NO: 129117 - DNA, 25 bp, Canis familiaris
gatatcttcggatggtcatgagttc

SEQ ID NO: 129118 - DNA, 25 bp, Canis familiaris
gatagtacgtattggccgaggtcat

SEQ ID NO: 129119 - DNA, 25 bp, Canis familiaris
gatttcacttctttggggaatctaa

SEQ ID NO: 129120 - DNA, 25 bp, Canis familiaris
gatttcctgtgttggggacttgtca

SEQ ID NO: 129121 - DNA, 25 bp, Canis familiaris
gattaggcagcgacagcgggactta

SEQ ID NO: 129122 - DNA, 25 bp, Canis familiaris
gattaaggggctgagtcactatgca

SEQ ID NO: 129123 - DNA, 25 bp, Canis familiaris
gatttcagggtacagtccaatgagc

SEQ ID NO: 129124 - DNA, 25 bp, Canis familiaris
gtagtattggtttcaggggtagaat

SEQ ID NO: 129125 - DNA, 25 bp, Canis familiaris
gtagtcatacagttaaaggctttaa

SEQ ID NO: 129126 - DNA, 25 bp, Canis familiaris
gatactacacagttacagggctgga

SEQ ID NO: 129127 - DNA, 25 bp, Canis familiaris
gatactacacatgcatttgacctgg

SEQ ID NO: 129128 - DNA, 25 bp, Canis familiaris
gatactagacagtcacttgaatcga

SEQ ID NO: 129129 - DNA, 25 bp, Canis familiaris
gatacctacaacagatgaacgatgg

SEQ ID NO: 129130 - DNA, 25 bp, Canis familiaris
gatacctacaacagatgaacgatgg

SEQ ID NO: 129131 - DNA, 25 bp, Canis familiaris
gataccttcaccccagaaagatagt

SEQ ID NO: 129132 - DNA, 25 bp, Canis familiaris
gatacactaacccccagaaatgacc

SEQ ID NO: 129133 - DNA, 25 bp, Canis familiaris
gattacgggactgcagcgaaatgac

SEQ ID NO: 129134 - DNA, 25 bp, Canis familiaris
gatatcacgggactttccagaatgt

SEQ ID NO: 129135 - DNA, 25 bp, Canis familiaris
gatactctggtgttttacagctttc

SEQ ID NO: 129136 - DNA, 25 bp, Canis familiaris
gataccaggattattagcagtttta

SEQ ID NO: 129137 - DNA, 25 bp, Canis familiaris
gatatccaactgtattttagaattt

SEQ ID NO: 129138 - DNA, 25 bp, Canis familiaris
gataccaactattttctgcagaagc

SEQ ID NO: 129139 - DNA, 25 bp, Canis familiaris
gataccaactgtttttgataatcaa

SEQ ID NO: 129140 - DNA, 25 bp, Canis familiaris
gatatccatgcctgttttacagaaa

SEQ ID NO: 129141 - DNA, 25 bp, Canis familiaris
gatatccatgcctgttttacagaaa

SEQ ID NO: 129142 - DNA, 25 bp, Canis familiaris
gatagtagccagattttgcactaat

SEQ ID NO: 129143 - DNA, 25 bp, Canis familiaris
gatagataccagattcttaatacag

SEQ ID NO: 129144 - DNA, 25 bp, Canis familiaris
gataaaccaggtaatctctatgaga

SEQ ID NO: 129145 - DNA, 25 bp, Canis familiaris
gatacatgcacccctatatttatag

SEQ ID NO: 129146 - DNA, 25 bp, Canis familiaris
gatacatagccatctttgtttagtg

SEQ ID NO: 129147 - DNA, 25 bp, Canis familiaris
gatatctttcaagtggcctttagga

SEQ ID NO: 129148 - DNA, 25 bp, Canis familiaris
gatacattattattccctttaaatc

SEQ ID NO: 129149 - DNA, 25 bp, Canis familiaris
gatagatgtagtctccactttccaa

SEQ ID NO: 129150 - DNA, 25 bp, Canis familiaris
gatagtgagagtctaagccttatgg

SEQ ID NO: 129151 - DNA, 25 bp, Canis familiaris
gatagagtgagatataccccttagc

SEQ ID NO: 129152 - DNA, 25 bp, Canis familiaris
gataggtagaaaatctcccaacact

SEQ ID NO: 129153 - DNA, 25 bp, Canis familiaris
gatactatatcacatttccaaaact

SEQ ID NO: 129154 - DNA, 25 bp, Canis familiaris
gatttgattcacgagatttaaaccc

SEQ ID NO: 129155 - DNA, 25 bp, Canis familiaris
gatttattcgactctgttcattcca

SEQ ID NO: 129156 - DNA, 25 bp, Canis familiaris
gatttagtcgtatctctttgaaaaa

SEQ ID NO: 129157 - DNA, 25 bp, Canis familiaris
gatttagtcaaaattcctagacgga

SEQ ID NO: 129158 - DNA, 25 bp, Canis familiaris
gatagtttagaaatatccccacgtg

SEQ ID NO: 129159 - DNA, 25 bp, Canis familiaris
gatatttaaaatatgccaccacgtg

SEQ ID NO: 129160 - DNA, 25 bp, Canis familiaris
gatatttgaggttcccctaacgtga

SEQ ID NO: 129161 - DNA, 25 bp, Canis familiaris
gatagatatgaggtatcccctggag

SEQ ID NO: 129162 - DNA, 25 bp, Canis familiaris
gatagtattgcattgtcacaccagg

SEQ ID NO: 129163 - DNA, 25 bp, Canis familiaris
gatagccatgtctaccatgcacaca

SEQ ID NO: 129164 - DNA, 25 bp, Canis familiaris
gatattcatgcattagcactgagag

SEQ ID NO: 129165 - DNA, 25 bp, Canis familiaris
gatattgcatatggcacaccagatg

SEQ ID NO: 129166 - DNA, 25 bp, Canis familiaris
gatagtggaccggctcaggaagttt

SEQ ID NO: 129167 - DNA, 25 bp, Canis familiaris
gatagtaacactggctcagagagca

SEQ ID NO: 129168 - DNA, 25 bp, Canis familiaris
gatatgatcgtgtctgcttcgaagc

SEQ ID NO: 129169 - DNA, 25 bp, Canis familiaris
gatatacccggcatcgaagcctgga

SEQ ID NO: 129170 - DNA, 25 bp, Canis familiaris
caaggagaatggctggcgtgcccgc

SEQ ID NO: 129171 - DNA, 25 bp, Canis familiaris
gatagaaaaagacgtgtccagcagg

SEQ ID NO: 129172 - DNA, 25 bp, Canis familiaris
gatagccggagacgggaccgaagac

SEQ ID NO: 129173 - DNA, 25 bp, Canis familiaris
gtagtcgagaaacggactcacagga

SEQ ID NO: 129174 - DNA, 25 bp, Canis familiaris
gatacctgagaatgggcactgcggg

SEQ ID NO: 129175 - DNA, 25 bp, Canis familiaris
gatacagaagtaggcggcgccgctg

SEQ ID NO: 129176 - DNA, 25 bp, Canis familiaris
gatacttggtagcctggcagcctgt

SEQ ID NO: 129177 - DNA, 25 bp, Canis familiaris
gatactttgatccacttgagccatt

SEQ ID NO: 129178 - DNA, 25 bp, Canis familiaris
gatacctttcatctttgcatttaaa

SEQ ID NO: 129179 - DNA, 25 bp, Canis familiaris
gataccttctattttagttgctaat

SEQ ID NO: 129180 - DNA, 25 bp, Canis familiaris
gatactgtgttttttatttctagca

SEQ ID NO: 129181 - DNA, 25 bp, Canis familiaris
gatacttttttcacatatttgagct

SEQ ID NO: 129182 - DNA, 25 bp, Canis familiaris
gatactttcattaaaaattcttcat

SEQ ID NO: 129183 - DNA, 25 bp, Canis familiaris
gatacttttgccacatgaactcttt

SEQ ID NO: 129184 - DNA, 25 bp, Canis familiaris
gatactgctaacctagaaacttttt

SEQ ID NO: 129185 - DNA, 25 bp, Canis familiaris
gatacattagcccttaaactataag

SEQ ID NO: 129186 - DNA, 25 bp, Canis familiaris
gatacttaccgagcatatatgaata

SEQ ID NO: 129187 - DNA, 25 bp, Canis familiaris
gatacctacctcacatgtgtgttat

SEQ ID NO: 129188 - DNA, 25 bp, Canis familiaris
gatagtgtaagtaacattggaacaa

SEQ ID NO: 129189 - DNA, 25 bp, Canis familiaris
gatagtgaccagaataatagtacca

SEQ ID NO: 129190 - DNA, 25 bp, Canis familiaris
gatactgacctttcaagtagtccac

SEQ ID NO: 129191 - DNA, 25 bp, Canis familiaris
gatactagaacttagaacaggccac

SEQ ID NO: 129192 - DNA, 25 bp, Canis familiaris
gatactagaactttcctgaatccac

SEQ ID NO: 129193 - DNA, 25 bp, Canis familiaris
gatttaggcactcggcttagtcgaa

SEQ ID NO: 129194 - DNA, 25 bp, Canis familiaris
gatataaccttctgatgtaaccatt

SEQ ID NO: 129195 - DNA, 25 bp, Canis familiaris
gatagacccaactgtgaacctcagg

SEQ ID NO: 129196 - DNA, 25 bp, Canis familiaris
gatagaatcctctctgtgaacctac

SEQ ID NO: 129197 - DNA, 25 bp, Canis familiaris
gatacagagttaacactggacctac

SEQ ID NO: 129198 - DNA, 25 bp, Canis familiaris
gatagaacttttccagtgatctgta

SEQ ID NO: 129199 - DNA, 25 bp, Canis familiaris
gatatgaaccttttgcagaccattg

SEQ ID NO: 129200 - DNA, 25 bp, Canis familiaris
gatagaacactgtatactgacttcc

SEQ ID NO: 129201 - DNA, 25 bp, Canis familiaris
gatagcaagacttttctcagtcgtc

SEQ ID NO: 129202 - DNA, 25 bp, Canis familiaris
gatagcagtacttttctatgcccca

SEQ ID NO: 129203 - DNA, 25 bp, Canis familiaris
gatatgcagtatctatgttaggccc

SEQ ID NO: 129204 - DNA, 25 bp, Canis familiaris
gttagttcctgtatacgacacgtat

SEQ ID NO: 129205 - DNA, 25 bp, Canis familiaris
gttaatccggtaatccaccaagaat

SEQ ID NO: 129206 - DNA, 25 bp, Canis familiaris
gattaaccaattttcacaccaggaa

SEQ ID NO: 129207 - DNA, 25 bp, Canis familiaris
gtataaggcaaatgtccccaaagat

SEQ ID NO: 129208 - DNA, 25 bp, Canis familiaris
gatatagagctcagacagtcaccac

SEQ ID NO: 129209 - DNA, 25 bp, Canis familiaris
gatatggcgctgagacactcacaca

SEQ ID NO: 129210 - DNA, 25 bp, Canis familiaris
gttccagctgctgaaatgcccaagc

SEQ ID NO: 129211 - DNA, 25 bp, Canis familiaris
gataccaggtgaaagtcccatgaca

SEQ ID NO: 129212 - DNA, 25 bp, Canis familiaris
gataccatggtgaatgacttcaagg

SEQ ID NO: 129213 - DNA, 25 bp, Canis familiaris
gataccaagtgatgcattgtgattg

SEQ ID NO: 129214 - DNA, 25 bp, Canis familiaris
gatagcagtagttagcgtgtgtgtg

SEQ ID NO: 129215 - DNA, 25 bp, Canis familiaris
gatagcgtcagttagttctgtgctg

SEQ ID NO: 129216 - DNA, 25 bp, Canis familiaris
gatagcctcactagaggtctggcag

SEQ ID NO: 129217 - DNA, 25 bp, Canis familiaris
gatagtctgcagcacaggcttggct

SEQ ID NO: 129218 - DNA, 25 bp, Canis familiaris
gatagatcgcagcgagggagctgct

SEQ ID NO: 129219 - DNA, 25 bp, Canis familiaris
gatagtcagggtagaggggctgcta

SEQ ID NO: 129220 - DNA, 25 bp, Canis familiaris
gatagtttagatgggcggagcctca

SEQ ID NO: 129221 - DNA, 25 bp, Canis familiaris
gatatttgaaattcctggtgcccct

SEQ ID NO: 129222 - DNA, 25 bp, Canis familiaris
gatttggaggattccaccagaccct

SEQ ID NO: 129223 - DNA, 25 bp, Canis familiaris
gatatttgagacattcaccataacc

SEQ ID NO: 129224 - DNA, 25 bp, Canis familiaris
gatatcgttgcattgcttccgcaaa

SEQ ID NO: 129225 - DNA, 25 bp, Canis familiaris
gatacatggcatatgctgttccacc

SEQ ID NO: 129226 - DNA, 25 bp, Canis familiaris
gatacagtgatgagtcttccagcag

SEQ ID NO: 129227 - DNA, 25 bp, Canis familiaris
gatacgcatgtggagatattcagac

SEQ ID NO: 129228 - DNA, 25 bp, Canis familiaris
gatatcgatgtgtgtcagagagatc

SEQ ID NO: 129229 - DNA, 25 bp, Canis familiaris
gatacgacgttgacagacacaccac

SEQ ID NO: 129230 - DNA, 25 bp, Canis familiaris
gatacgacataaatcaagccattga

SEQ ID NO: 129231 - DNA, 25 bp, Canis familiaris
gatactacttaaaaccattagactt

SEQ ID NO: 129232 - DNA, 25 bp, Canis familiaris
gatactactgaagtaacatctaaga

SEQ ID NO: 129233 - DNA, 25 bp, Canis familiaris
gatactctctgatctatttaaggaa

SEQ ID NO: 129234 - DNA, 25 bp, Canis familiaris
gatacttctgagttttgtcaaatgc

SEQ ID NO: 129235 - DNA, 25 bp, Canis familiaris
gatactgtagctttttgtgaatgtg

SEQ ID NO: 129236 - DNA, 25 bp, Canis familiaris
gatacatgttcttgaattgctaacc

SEQ ID NO: 129237 - DNA, 25 bp, Canis familiaris
gatacatgccctagatcagaccaac

SEQ ID NO: 129238 - DNA, 25 bp, Canis familiaris
gatactcacatctgatcaacgtcct

SEQ ID NO: 129239 - DNA, 25 bp, Canis familiaris
gatagtcatctctgagctccttaat

SEQ ID NO: 129240 - DNA, 25 bp, Canis familiaris
gatatgaatcattaaccccacacat

SEQ ID NO: 129241 - DNA, 25 bp, Canis familiaris
gatagactataaagtcctccatggg

SEQ ID NO: 129242 - DNA, 25 bp, Canis familiaris
gatagcgatttaagtacagggaggt

SEQ ID NO: 129243 - DNA, 25 bp, Canis familiaris
gataggacttatggctgtaggtaga

SEQ ID NO: 129244 - DNA, 25 bp, Canis familiaris
gataggcttgtgactcttcgagata

SEQ ID NO: 129245 - DNA, 25 bp, Canis familiaris
gatactgcattgccattcttctatg

SEQ ID NO: 129246 - DNA, 25 bp, Canis familiaris
gatacttcattaatctccatcatgt

SEQ ID NO: 129247 - DNA, 25 bp, Canis familiaris
gatactcgattcattcacttgatta

SEQ ID NO: 129248 - DNA, 25 bp, Canis familiaris
gatactagcccaattgcactgacta

SEQ ID NO: 129249 - DNA, 25 bp, Canis familiaris
gatactgagccacactgagtcactc

SEQ ID NO: 129250 - DNA, 25 bp, Canis familiaris
gattcattcatacagcatgttagtg

SEQ ID NO: 129251 - DNA, 25 bp, Canis familiaris
gattgctgcagtactagctgtctag

SEQ ID NO: 129252 - DNA, 25 bp, Canis familiaris
gatatctgcagtaatctgattaggg

SEQ ID NO: 129253 - DNA, 25 bp, Canis familiaris
gatatctcggatacaatagaggcaa

SEQ ID NO: 129254 - DNA, 25 bp, Canis familiaris
gatacttggaatccatcagtggacc

SEQ ID NO: 129255 - DNA, 25 bp, Canis familiaris
gataccttgagcccaagattcacct

SEQ ID NO: 129256 - DNA, 25 bp, Canis familiaris
gataccagggtctaatcttcccata

SEQ ID NO: 129257 - DNA, 25 bp, Canis familiaris
gatagctagggacacatttccgaaa

SEQ ID NO: 129258 - DNA, 25 bp, Canis familiaris
gatagtcgtggaccagttgtcacag

SEQ ID NO: 129259 - DNA, 25 bp, Canis familiaris
gatatagtatgtcacacttgtcaag

SEQ ID NO: 129260 - DNA, 25 bp, Canis familiaris
gattagttgtccagtttgccaggta

SEQ ID NO: 129261 - DNA, 25 bp, Canis familiaris
gataggtattttttataacaggata

SEQ ID NO: 129262 - DNA, 25 bp, Canis familiaris
gatagtgctagttctttttcaaggt

SEQ ID NO: 129263 - DNA, 25 bp, Canis familiaris
gatagacatagtgctttgttcatac

SEQ ID NO: 129264 - DNA, 25 bp, Canis familiaris
gatagagatggttcttttctgatat

SEQ ID NO: 129265 - DNA, 25 bp, Canis familiaris
gatataaggtttgtacatattatca

SEQ ID NO: 129266 - DNA, 25 bp, Canis familiaris
gatattgaagtctcctactgttact

SEQ ID NO: 129267 - DNA, 25 bp, Canis familiaris
gatttaagtcttcagagtcctactc

SEQ ID NO: 129268 - DNA, 25 bp, Canis familiaris
gttaaatggcttctagaccgtttca

SEQ ID NO: 129269 - DNA, 25 bp, Canis familiaris
gattaaagtcttctacctggctttg

SEQ ID NO: 129270 - DNA, 25 bp, Canis familiaris
gtagaaaagtctctccctgagcttc

SEQ ID NO: 129271 - DNA, 25 bp, Canis familiaris
gtagtagaagtcactgccctaaaca

SEQ ID NO: 129272 - DNA, 25 bp, Canis familiaris
gatagtgagaagtttacccccacac

SEQ ID NO: 129273 - DNA, 25 bp, Canis familiaris
gatagcatttatacttaaccccctc

SEQ ID NO: 129274 - DNA, 25 bp, Canis familiaris
gatagctttttcataccagtcacac

SEQ ID NO: 129275 - DNA, 25 bp, Canis familiaris
gatactatcacttcctaccagtgga

SEQ ID NO: 129276 - DNA, 25 bp, Canis familiaris
gatacctcaggctactaccagagga

SEQ ID NO: 129277 - DNA, 25 bp, Canis familiaris
gatattttggcttctaggcaaggac

SEQ ID NO: 129278 - DNA, 25 bp, Canis familiaris
gataccctgggggacgcacagatac

SEQ ID NO: 129279 - DNA, 25 bp, Canis familiaris
gatactctctgaagggagcccatgg

SEQ ID NO: 129280 - DNA, 25 bp, Canis familiaris
gatactttgatctgttctgtgcatg

SEQ ID NO: 129281 - DNA, 25 bp, Canis familiaris
gataccttagagattgctgctgttc

SEQ ID NO: 129282 - DNA, 25 bp, Canis familiaris
gatactcctagtcttgtctattcac

SEQ ID NO: 129283 - DNA, 25 bp, Canis familiaris
gatagttctggtcatttcattattt

SEQ ID NO: 129284 - DNA, 25 bp, Canis familiaris
gatactgaccttgttgctatatttt

SEQ ID NO: 129285 - DNA, 25 bp, Canis familiaris
gataggcccttgtttgagagagata

SEQ ID NO: 129286 - DNA, 25 bp, Canis familiaris
gataggccctttaaacatgatatat

SEQ ID NO: 129287 - DNA, 25 bp, Canis familiaris
gatagctgcccattgttgaaatggt

SEQ ID NO: 129288 - DNA, 25 bp, Canis familiaris
gatagtgcccaaaatgtgcaggtgg

SEQ ID NO: 129289 - DNA, 25 bp, Canis familiaris
gatatggcccagagacatggggttt

SEQ ID NO: 129290 - DNA, 25 bp, Canis familiaris
gataggcctcaagactctggtgttt

SEQ ID NO: 129291 - DNA, 25 bp, Canis familiaris
gatagccctgaaaactggcgtgcct

SEQ ID NO: 129292 - DNA, 25 bp, Canis familiaris
gatacccttggatcatgggaccttg

SEQ ID NO: 129293 - DNA, 25 bp, Canis familiaris
gataccaattacaacatgtggacat

SEQ ID NO: 129294 - DNA, 25 bp, Canis familiaris
gatactccatgtcgtagctgggcaa

SEQ ID NO: 129295 - DNA, 25 bp, Canis familiaris
gatagcacctggctgggatgtcaca

SEQ ID NO: 129296 - DNA, 25 bp, Canis familiaris
gataggcaccgcgagggagacacac

SEQ ID NO: 129297 - DNA, 25 bp, Canis familiaris
gatatgtgcccctgggagagaaacg

SEQ ID NO: 129298 - DNA, 25 bp, Canis familiaris
gatatggagcctttcatgggaatga

SEQ ID NO: 129299 - DNA, 25 bp, Canis familiaris
gatatggatctctttcgggatctga

SEQ ID NO: 129300 - DNA, 25 bp, Canis familiaris
gatagtgtctcagtgtgagggtcaa

SEQ ID NO: 129301 - DNA, 25 bp, Canis familiaris
gatattactcacttggatggccaca

SEQ ID NO: 129302 - DNA, 25 bp, Canis familiaris
gatttgtgccgctggaagcttcatc

SEQ ID NO: 129303 - DNA, 25 bp, Canis familiaris
gatacctgcttgtgtaactattcca

SEQ ID NO: 129304 - DNA, 25 bp, Canis familiaris
gatactccttgttcatgacctatct

SEQ ID NO: 129305 - DNA, 25 bp, Canis familiaris
gatatcctcattctcatgatccaac

SEQ ID NO: 129306 - DNA, 25 bp, Canis familiaris
gatatggcatgtaccatctatccta

SEQ ID NO: 129307 - DNA, 25 bp, Canis familiaris
gatatggcagcttctacatacgaat

SEQ ID NO: 129308 - DNA, 25 bp, Canis familiaris
gatattctacacacatacaaattga

SEQ ID NO: 129309 - DNA, 25 bp, Canis familiaris
gatatctccaccaagcattctgaat

SEQ ID NO: 129310 - DNA, 25 bp, Canis familiaris
gatactcacctcaaactctttgcat

SEQ ID NO: 129311 - DNA, 25 bp, Canis familiaris
gatagatactaactactcattctgg

SEQ ID NO: 129312 - DNA, 25 bp, Canis familiaris
gatagagatctatttttattctgaa

SEQ ID NO: 129313 - DNA, 25 bp, Canis familiaris
gatagcatttagcctttattctcac

SEQ ID NO: 129314 - DNA, 25 bp, Canis familiaris
gatactagcatcctgtttttacact

SEQ ID NO: 129315 - DNA, 25 bp, Canis familiaris
gatagttctacagcttttgacattc

SEQ ID NO: 129316 - DNA, 25 bp, Canis familiaris
gatagtttactagtctttctgttat

SEQ ID NO: 129317 - DNA, 25 bp, Canis familiaris
gatagctttacgattattctgttgt

SEQ ID NO: 129318 - DNA, 25 bp, Canis familiaris
gatacgttagatatgttttgttttc

SEQ ID NO: 129319 - DNA, 25 bp, Canis familiaris
gatagcagttaacctgattcttttt

SEQ ID NO: 129320 - DNA, 25 bp, Canis familiaris
gatacggtacacgtgacttttactt

SEQ ID NO: 129321 - DNA, 25 bp, Canis familiaris
gatacggaatagttcgttttgatcg

SEQ ID NO: 129322 - DNA, 25 bp, Canis familiaris
gattccggaatagttcttttgatcg

SEQ ID NO: 129323 - DNA, 25 bp, Canis familiaris
gatacggagacatcctcttttgggg

SEQ ID NO: 129324 - DNA, 25 bp, Canis familiaris
gataggaggacatatttgtgttgcg

SEQ ID NO: 129325 - DNA, 25 bp, Canis familiaris
gataggatatactgtctagatgtag

SEQ ID NO: 129326 - DNA, 25 bp, Canis familiaris
gatactgttacatctctgagagtgt

SEQ ID NO: 129327 - DNA, 25 bp, Canis familiaris
gatactcttcacagcagtggggaca

SEQ ID NO: 129328 - DNA, 25 bp, Canis familiaris
gatactcatgccacgagtctcagtg

SEQ ID NO: 129329 - DNA, 25 bp, Canis familiaris
gatactcacggagcacactctgata

SEQ ID NO: 129330 - DNA, 25 bp, Canis familiaris
gatagtccgtatgcatggctctgct

SEQ ID NO: 129331 - DNA, 25 bp, Canis familiaris
gatagtacgtataatggtgactgta

SEQ ID NO: 129332 - DNA, 25 bp, Canis familiaris
gatatgaatgcgatttttacttaaa

SEQ ID NO: 129333 - DNA, 25 bp, Canis familiaris
gttgaatgaaaagtcctaggctata

SEQ ID NO: 129334 - DNA, 25 bp, Canis familiaris
gttgattaagaagcccatgctaata

SEQ ID NO: 129335 - DNA, 25 bp, Canis familiaris
gatatgttggaatcaaacttctgaa

SEQ ID NO: 129336 - DNA, 25 bp, Canis familiaris
gatagtcattgtctagaactaggac

SEQ ID NO: 129337 - DNA, 25 bp, Canis familiaris
gtagatattccgtggactatgaact

SEQ ID NO: 129338 - DNA, 25 bp, Canis familiaris
gtagattacagacaggatttagcac

SEQ ID NO: 129339 - DNA, 25 bp, Canis familiaris
gattcactaccatagttttacccct

SEQ ID NO: 129340 - DNA, 25 bp, Canis familiaris
gatatccacccatatttgtgagagc

SEQ ID NO: 129341 - DNA, 25 bp, Canis familiaris
gatagcccctattaattgggcagtt

SEQ ID NO: 129342 - DNA, 25 bp, Canis familiaris
gatttctcttttcaggggcagttgc

SEQ ID NO: 129343 - DNA, 25 bp, Canis familiaris
gatttattgtgcccggtgtgggtac

SEQ ID NO: 129344 - DNA, 25 bp, Canis familiaris
gatttaggtagtcttgtgttctgag

SEQ ID NO: 129345 - DNA, 25 bp, Canis familiaris
gattttggtttatctgttcccagcc

SEQ ID NO: 129346 - DNA, 25 bp, Canis familiaris
gtttttgccgttgtttccagaggat

SEQ ID NO: 129347 - DNA, 25 bp, Canis familiaris
ttccttccctttgtaaccatgtagt

SEQ ID NO: 129348 - DNA, 25 bp, Canis familiaris
ttcccccaaaatgtaacttctcctg

SEQ ID NO: 129349 - DNA, 25 bp, Canis familiaris
tttcccctaagctctgggtttcttg

SEQ ID NO: 129350 - DNA, 25 bp, Canis familiaris
gtgtccctaaacaccggctttatgt

SEQ ID NO: 129351 - DNA, 25 bp, Canis familiaris
gttgaccaacaacaaaggctttgaa

SEQ ID NO: 129352 - DNA, 25 bp, Canis familiaris
gattaccgagcagcgcaaaggttga

SEQ ID NO: 129353 - DNA, 25 bp, Canis familiaris
gttaatgggcatccgccagggtact

SEQ ID NO: 129354 - DNA, 25 bp, Canis familiaris
gttgaatgagttccccacttaatgt

SEQ ID NO: 129355 - DNA, 25 bp, Canis familiaris
gttgaagagatcgggccacgttgtc

SEQ ID NO: 129356 - DNA, 25 bp, Canis familiaris
gttgaaaatgtgtgtccccattcag

SEQ ID NO: 129357 - DNA, 25 bp, Canis familiaris
gattcaaatttgttgctcagtccaa

SEQ ID NO: 129358 - DNA, 25 bp, Canis familiaris
gatatttttgtctgtcaggcccaaa

SEQ ID NO: 129359 - DNA, 25 bp, Canis familiaris
gatattgttataacgtggtacccaa

SEQ ID NO: 129360 - DNA, 25 bp, Canis familiaris
gatagctttataacgtcagtggaca

SEQ ID NO: 129361 - DNA, 25 bp, Canis familiaris
gatagttttcagtgcttgattgaga

SEQ ID NO: 129362 - DNA, 25 bp, Canis familiaris
gatatttactatttgcttgggtcag

SEQ ID NO: 129363 - DNA, 25 bp, Canis familiaris
gatttgtacgcttccttgctggaag

SEQ ID NO: 129364 - DNA, 25 bp, Canis familiaris
gattcggactgggtttcgaagagag

SEQ ID NO: 129365 - DNA, 25 bp, Canis familiaris
gattctggcactatctacccaaaga

SEQ ID NO: 129366 - DNA, 25 bp, Canis familiaris
gattcacgagatctataccgttgga

SEQ ID NO: 129367 - DNA, 25 bp, Canis familiaris
gatatccgtgccctataggcgtttc

SEQ ID NO: 129368 - DNA, 25 bp, Canis familiaris
gatttcactgcctacagatggcgtc

SEQ ID NO: 129369 - DNA, 25 bp, Canis familiaris
gatttcccctacgatcacgtataca

SEQ ID NO: 129370 - DNA, 25 bp, Canis familiaris
gatattccccacaggcacattaact

SEQ ID NO: 129371 - DNA, 25 bp, Canis familiaris
gatttccactcatcaggactcaaac

SEQ ID NO: 129372 - DNA, 25 bp, Canis familiaris
gatagtcctgtctggtacacatcta

SEQ ID NO: 129373 - DNA, 25 bp, Canis familiaris
gatagctcacgacgtggatcccatt

SEQ ID NO: 129374 - DNA, 25 bp, Canis familiaris
gatagctcacgacgtggatcccatt

SEQ ID NO: 129375 - DNA, 25 bp, Canis familiaris
gatagtcaatgacccaatcccatgc

SEQ ID NO: 129376 - DNA, 25 bp, Canis familiaris
gatagatcagatttcacgtcctcat

SEQ ID NO: 129377 - DNA, 25 bp, Canis familiaris
gattacatactttcagtgctgctat

SEQ ID NO: 129378 - DNA, 25 bp, Canis familiaris
gatatgatctacactggttgtcatg

SEQ ID NO: 129379 - DNA, 25 bp, Canis familiaris
gatatgattagaggtggggtttttt

SEQ ID NO: 129380 - DNA, 25 bp, Canis familiaris
gattttcactttgtggattttggtt

SEQ ID NO: 129381 - DNA, 25 bp, Canis familiaris
gatattttctcttggtaatttggtg

SEQ ID NO: 129382 - DNA, 25 bp, Canis familiaris
gatattcttcagctttaattatttt

SEQ ID NO: 129383 - DNA, 25 bp, Canis familiaris
gatttcccacgtactctggattttt

SEQ ID NO: 129384 - DNA, 25 bp, Canis familiaris
gatttggccaggagcttacctttat

SEQ ID NO: 129385 - DNA, 25 bp, Canis familiaris
gatatgttccgtcggttaccttaca

SEQ ID NO: 129386 - DNA, 25 bp, Canis familiaris
gatagttcctgctgtgaggacttta

SEQ ID NO: 129387 - DNA, 25 bp, Canis familiaris
gatatgtctccaagagtcaggactc

SEQ ID NO: 129388 - DNA, 25 bp, Canis familiaris
gatatggaccatcactcggtgcatc

SEQ ID NO: 129389 - DNA, 25 bp, Canis familiaris
gatatagatccaacatcccttcatg

SEQ ID NO: 129390 - DNA, 25 bp, Canis familiaris
gatatgtgtcatgaaccatcatctt

SEQ ID NO: 129391 - DNA, 25 bp, Canis familiaris
gatatttcatgctagtgcctcacat

SEQ ID NO: 129392 - DNA, 25 bp, Canis familiaris
gatatgcttgaattggatcacatca

SEQ ID NO: 129393 - DNA, 25 bp, Canis familiaris
gattgctgcatatagaagagctcag

SEQ ID NO: 129394 - DNA, 25 bp, Canis familiaris
gatttcatagatctcaattcggtaa

SEQ ID NO: 129395 - DNA, 25 bp, Canis familiaris
gatataagctatctctatttgttta

SEQ ID NO: 129396 - DNA, 25 bp, Canis familiaris
gatatgagagttaccctgatagttc

SEQ ID NO: 129397 - DNA, 25 bp, Canis familiaris
gttgtgaattcctgtaagttccctt

SEQ ID NO: 129398 - DNA, 25 bp, Canis familiaris
gttgcaaaccactggaagttttcca

SEQ ID NO: 129399 - DNA, 25 bp, Canis familiaris
gttccaaaacagggataattttgtg

SEQ ID NO: 129400 - DNA, 25 bp, Canis familiaris
gtttaaaaagtgcctcagttggttg

SEQ ID NO: 129401 - DNA, 25 bp, Canis familiaris
gatttgtaacgggttcacttccttg

SEQ ID NO: 129402 - DNA, 25 bp, Canis familiaris
gattttccctgagtttattactttg

SEQ ID NO: 129403 - DNA, 25 bp, Canis familiaris
gttttcccatcttttactagcttga

SEQ ID NO: 129404 - DNA, 25 bp, Canis familiaris
gtttacgtagttgttcctgactgat

SEQ ID NO: 129405 - DNA, 25 bp, Canis familiaris
gtttccaattttgcattccgttgca

SEQ ID NO: 129406 - DNA, 25 bp, Canis familiaris
gatttgccaatatttttgtcccgtc

SEQ ID NO: 129407 - DNA, 25 bp, Canis familiaris
gatattgccaaatcgttttctcagt

SEQ ID NO: 129408 - DNA, 25 bp, Canis familiaris
gatattccacgatatttctttaaga

SEQ ID NO: 129409 - DNA, 25 bp, Canis familiaris
gatttccaaatttccctttaatgct

SEQ ID NO: 129410 - DNA, 25 bp, Canis familiaris
gatttaatttattccctcgtagtct

SEQ ID NO: 129411 - DNA, 25 bp, Canis familiaris
gatttcaaataacacttcgtagtag

SEQ ID NO: 129412 - DNA, 25 bp, Canis familiaris
gatatgtaaaagacacaccctgata

SEQ ID NO: 129413 - DNA, 25 bp, Canis familiaris
gatagcatacattagaaactccttg

SEQ ID NO: 129414 - DNA, 25 bp, Canis familiaris
gatagcaagatttgagaggcctcct

SEQ ID NO: 129415 - DNA, 25 bp, Canis familiaris
gattcgagatgccagcgaggagccc

SEQ ID NO: 129416 - DNA, 25 bp, Canis familiaris
gatatgcaagatcagcgacggctat

SEQ ID NO: 129417 - DNA, 25 bp, Canis familiaris
gattcacagctgcataagccgtcat

SEQ ID NO: 129418 - DNA, 25 bp, Canis familiaris
gattcatgtctgcacagggagttag

SEQ ID NO: 129419 - DNA, 25 bp, Canis familiaris
gatttggggagctgcatggctgttg

SEQ ID NO: 129420 - DNA, 25 bp, Canis familiaris
gattttgaggtttccgtgtgtgcag

SEQ ID NO: 129421 - DNA, 25 bp, Canis familiaris
gatattggactgtttcccgatgtta

SEQ ID NO: 129422 - DNA, 25 bp, Canis familiaris
gatattgtagatgtacccatgttta

SEQ ID NO: 129423 - DNA, 25 bp, Canis familiaris
gatagttagtgctttcctactcatc

SEQ ID NO: 129424 - DNA, 25 bp, Canis familiaris
gatatgattttccaatctctacccc

SEQ ID NO: 129425 - DNA, 25 bp, Canis familiaris
gatataaatttgttcccacatccct

SEQ ID NO: 129426 - DNA, 25 bp, Canis familiaris
gttccaagtgaggtcaccaaccctt

SEQ ID NO: 129427 - DNA, 25 bp, Canis familiaris
gattctaagaatgttccccactttg

SEQ ID NO: 129428 - DNA, 25 bp, Canis familiaris
gatttcaaaatagagcctgcccttt

SEQ ID NO: 129429 - DNA, 25 bp, Canis familiaris
tgatttagtaatcgaaccctccttt

SEQ ID NO: 129430 - DNA, 25 bp, Canis familiaris
gatttagccgatgagaccctcttga

SEQ ID NO: 129431 - DNA, 25 bp, Canis familiaris
gatttaccataaaggcctcatttca

SEQ ID NO: 129432 - DNA, 25 bp, Canis familiaris
gatttcccatcatcagtggcatctg

SEQ ID NO: 129433 - DNA, 25 bp, Canis familiaris
gattactccatgattatggcctgca

SEQ ID NO: 129434 - DNA, 25 bp, Canis familiaris
gttgactttagcctgcatggacacc

SEQ ID NO: 129435 - DNA, 25 bp, Canis familiaris
gattgtcttaagcagcagcccagct

SEQ ID NO: 129436 - DNA, 25 bp, Canis familiaris
gatatgccaatttgtaatcccagct

SEQ ID NO: 129437 - DNA, 25 bp, Canis familiaris
gatatgctcatttaatttctacagg

SEQ ID NO: 129438 - DNA, 25 bp, Canis familiaris
gataccattctgacacttcaactcc

SEQ ID NO: 129439 - DNA, 25 bp, Canis familiaris
gatacctagtattgttcaacatcca

SEQ ID NO: 129440 - DNA, 25 bp, Canis familiaris
gatacctggtatgctgctattgatc

SEQ ID NO: 129441 - DNA, 25 bp, Canis familiaris
gatttctttgattctgcaagctatc

SEQ ID NO: 129442 - DNA, 25 bp, Canis familiaris
gatattttatgttccctgagacgta

SEQ ID NO: 129443 - DNA, 25 bp, Canis familiaris
gatttgattcctaactccatcacgt

SEQ ID NO: 129444 - DNA, 25 bp, Canis familiaris
gattaaatcaccacggcataaatta

SEQ ID NO: 129445 - DNA, 25 bp, Canis familiaris
gatttaacacacagaggcatagcga

SEQ ID NO: 129446 - DNA, 25 bp, Canis familiaris
gatttgtacacagaaacaaggttgt

SEQ ID NO: 129447 - DNA, 25 bp, Canis familiaris
gatattccttgacaaaaatggtgtg

SEQ ID NO: 129448 - DNA, 25 bp, Canis familiaris
gatattccctgcccacaaaaggaga

SEQ ID NO: 129449 - DNA, 25 bp, Canis familiaris
gatttcagtgctcaatcaataggaa

SEQ ID NO: 129450 - DNA, 25 bp, Canis familiaris
gatttagtctatgatccaactcaaa

SEQ ID NO: 129451 - DNA, 25 bp, Canis familiaris
gatttcgtgcacattccatcacata

SEQ ID NO: 129452 - DNA, 25 bp, Canis familiaris
gatagtgtctgaatctttgcaccat

SEQ ID NO: 129453 - DNA, 25 bp, Canis familiaris
gatatcttccagacatattgaacat

SEQ ID NO: 129454 - DNA, 25 bp, Canis familiaris
gatatgccttcacctcagtgagagc

SEQ ID NO: 129455 - DNA, 25 bp, Canis familiaris
gatatatcttcacctcagtctgaga

SEQ ID NO: 129456 - DNA, 25 bp, Canis familiaris
gatatgatatatttccttatgatag

SEQ ID NO: 129457 - DNA, 25 bp, Canis familiaris
gatatgaatatcttgctatttgcag

SEQ ID NO: 129458 - DNA, 25 bp, Canis familiaris
gataccatatgctcttttggatgta

SEQ ID NO: 129459 - DNA, 25 bp, Canis familiaris
gataccatatgttccatttatataa

SEQ ID NO: 129460 - DNA, 25 bp, Canis familiaris
gatattcgttagttatgtattacaa

SEQ ID NO: 129461 - DNA, 25 bp, Canis familiaris
gatttcgttcctttctatgactgaa

SEQ ID NO: 129462 - DNA, 25 bp, Canis familiaris
gatttggttggctttagtttatatt

SEQ ID NO: 129463 - DNA, 25 bp, Canis familiaris
gataggagatctgcttataatttag

SEQ ID NO: 129464 - DNA, 25 bp, Canis familiaris
gatagtgacactttaatgattttag

SEQ ID NO: 129465 - DNA, 25 bp, Canis familiaris
gatagctgctattattattttctta

SEQ ID NO: 129466 - DNA, 25 bp, Canis familiaris
gatatgctattcatgtttttccatt

SEQ ID NO: 129467 - DNA, 25 bp, Canis familiaris
gatattcttttgtcactattactta

SEQ ID NO: 129468 - DNA, 25 bp, Canis familiaris
gatatttccaagtattattcgccta

SEQ ID NO: 129469 - DNA, 25 bp, Canis familiaris
gattacctccatcagtattgagcct

SEQ ID NO: 129470 - DNA, 25 bp, Canis familiaris
gattatctctccacgttatcatcgt

SEQ ID NO: 129471 - DNA, 25 bp, Canis familiaris
gatttaccatcaatcatcttgactc

SEQ ID NO: 129472 - DNA, 25 bp, Canis familiaris
gattaggcactgatctcgtaacttt

SEQ ID NO: 129473 - DNA, 25 bp, Canis familiaris
gattttgcactggttcataacactg

SEQ ID NO: 129474 - DNA, 25 bp, Canis familiaris
gatagcttaagaataaatacacatg

SEQ ID NO: 129475 - DNA, 25 bp, Canis familiaris
gatattctgaagctgcaattacaat

SEQ ID NO: 129476 - DNA, 25 bp, Canis familiaris
gatattcagaacttcctttagacta

SEQ ID NO: 129477 - DNA, 25 bp, Canis familiaris
gatattcagtcagatttattaggct

SEQ ID NO: 129478 - DNA, 25 bp, Canis familiaris
gatatgttgttcatttcacgggctg

SEQ ID NO: 129479 - DNA, 25 bp, Canis familiaris
gatattctgatcactttcacgggga

SEQ ID NO: 129480 - DNA, 25 bp, Canis familiaris
gatttcagtatttttccaaggacat

SEQ ID NO: 129481 - DNA, 25 bp, Canis familiaris
gatttctgtcctttccaaaggtcag

SEQ ID NO: 129482 - DNA, 25 bp, Canis familiaris
gatatttgtcctgtccttaattcaa

SEQ ID NO: 129483 - DNA, 25 bp, Canis familiaris
gatatggggtctgaccttatctatc

SEQ ID NO: 129484 - DNA, 25 bp, Canis familiaris
gatagggcgttggacatcggtcagc

SEQ ID NO: 129485 - DNA, 25 bp, Canis familiaris
gatttggtcgtggacgtggtcagcc

SEQ ID NO: 129486 - DNA, 25 bp, Canis familiaris
gattagtctattctcgtggtcggaa

SEQ ID NO: 129487 - DNA, 25 bp, Canis familiaris
gattttcttttaagactgtccgaat

SEQ ID NO: 129488 - DNA, 25 bp, Canis familiaris
gatttgactttaaatggtccttgta

SEQ ID NO: 129489 - DNA, 25 bp, Canis familiaris
gatattttttgctgagaggcctttg

SEQ ID NO: 129490 - DNA, 25 bp, Canis familiaris
gatatattctctggcaaagacgatc

SEQ ID NO: 129491 - DNA, 25 bp, Canis familiaris
gattatgtctcaaagaaaccccaac

SEQ ID NO: 129492 - DNA, 25 bp, Canis familiaris
gatttttcatggaagtgcccccttc

SEQ ID NO: 129493 - DNA, 25 bp, Canis familiaris
gatttttgagcgaggccttgcctcc

SEQ ID NO: 129494 - DNA, 25 bp, Canis familiaris
gatattatctgaggtgggtcttggt

SEQ ID NO: 129495 - DNA, 25 bp, Canis familiaris
gatattcctgttgtggtcttggtgg

SEQ ID NO: 129496 - DNA, 25 bp, Canis familiaris
gatttgcctttgtctgaactatggg

SEQ ID NO: 129497 - DNA, 25 bp, Canis familiaris
gatatcctattttcataactttggg

SEQ ID NO: 129498 - DNA, 25 bp, Canis familiaris
gatatctcttctacacttagtgctt

SEQ ID NO: 129499 - DNA, 25 bp, Canis familiaris
gatatctcccacatctagagagccc

SEQ ID NO: 129500 - DNA, 25 bp, Canis familiaris
gatattgttgccatcaatgacccct

SEQ ID NO: 129501 - DNA, 25 bp, Canis familiaris
gatatttctgctgcccatgaactaa

SEQ ID NO: 129502 - DNA, 25 bp, Canis familiaris
gatatattctgcgtttggtactgat

SEQ ID NO: 129503 - DNA, 25 bp, Canis familiaris
gatattgtgatgttcctcgttgtga

SEQ ID NO: 129504 - DNA, 25 bp, Canis familiaris
gatatgggatttggtctctttgact

SEQ ID NO: 129505 - DNA, 25 bp, Canis familiaris
gatatgggatttggtctctttgact

SEQ ID NO: 129506 - DNA, 25 bp, Canis familiaris
gatatgggatttggtctctttgact

SEQ ID NO: 129507 - DNA, 25 bp, Canis familiaris
gatatgggatttggtctctttgact

SEQ ID NO: 129508 - DNA, 25 bp, Canis familiaris
gatatctggcagtggttcttgaact

SEQ ID NO: 129509 - DNA, 25 bp, Canis familiaris
gatatctggctgtcctgttttataa

SEQ ID NO: 129510 - DNA, 25 bp, Canis familiaris
gatagtaggactttgttttacaata

SEQ ID NO: 129511 - DNA, 25 bp, Canis familiaris
gatagtacactccaggtttttcaat

SEQ ID NO: 129512 - DNA, 25 bp, Canis familiaris
gatagctgtcacaagaggtctttcc

SEQ ID NO: 129513 - DNA, 25 bp, Canis familiaris
gttgtggtcagaaggcttttcccca

SEQ ID NO: 129514 - DNA, 25 bp, Canis familiaris
gatagtttcgttacaatttcccaca

SEQ ID NO: 129515 - DNA, 25 bp, Canis familiaris
gataggtttttgacagtcaccacca

SEQ ID NO: 129516 - DNA, 25 bp, Canis familiaris
gattggttttcgacctaagctcaac

SEQ ID NO: 129517 - DNA, 25 bp, Canis familiaris
gattgcgcctttgtacttactaaca

SEQ ID NO: 129518 - DNA, 25 bp, Canis familiaris
gatattgcctgtagttacattaata

SEQ ID NO: 129519 - DNA, 25 bp, Canis familiaris
gatttgagcatatgtttctttgtaa

SEQ ID NO: 129520 - DNA, 25 bp, Canis familiaris
gatattggtttgtttctgagtgata

SEQ ID NO: 129521 - DNA, 25 bp, Canis familiaris
gatttggcttttcttgggctatcaa

SEQ ID NO: 129522 - DNA, 25 bp, Canis familiaris
gatatgggtaatttttttcttcaca

SEQ ID NO: 129523 - DNA, 25 bp, Canis familiaris
gatatgcgtgtattcaaaattatgc

SEQ ID NO: 129524 - DNA, 25 bp, Canis familiaris
gataggatgtcatttacaatcttca

SEQ ID NO: 129525 - DNA, 25 bp, Canis familiaris
gataggttctattcagattctcaat

SEQ ID NO: 129526 - DNA, 25 bp, Canis familiaris
gatagattactattttgtcacatat

SEQ ID NO: 129527 - DNA, 25 bp, Canis familiaris
gatatattactactgcatcttcctt

SEQ ID NO: 129528 - DNA, 25 bp, Canis familiaris
gatagatcttattccatattccttt

SEQ ID NO: 129529 - DNA, 25 bp, Canis familiaris
gatagctctttctcgattccgtggg

SEQ ID NO: 129530 - DNA, 25 bp, Canis familiaris
gattcttttgcagaaccctgggttt

SEQ ID NO: 129531 - DNA, 25 bp, Canis familiaris
gatttcaattgaggaaccacttgac

SEQ ID NO: 129532 - DNA, 25 bp, Canis familiaris
gattttattgggtcaggcagtgcta

SEQ ID NO: 129533 - DNA, 25 bp, Canis familiaris
gatagtttctcattgtctggtagct

SEQ ID NO: 129534 - DNA, 25 bp, Canis familiaris
gatagttgtcactgcattgttttat

SEQ ID NO: 129535 - DNA, 25 bp, Canis familiaris
gatagtgtggcattttgttttgttt

SEQ ID NO: 129536 - DNA, 25 bp, Canis familiaris
gatagtggatctgtagatttttttt

SEQ ID NO: 129537 - DNA, 25 bp, Canis familiaris
gatagcttttacagattttatgttt

SEQ ID NO: 129538 - DNA, 25 bp, Canis familiaris
gatagcttcttcgttgttttgcact

SEQ ID NO: 129539 - DNA, 25 bp, Canis familiaris
gatatttcatatctgtggttatact

SEQ ID NO: 129540 - DNA, 25 bp, Canis familiaris
gatatttgtatccgtcagtttagta

SEQ ID NO: 129541 - DNA, 25 bp, Canis familiaris
gatatagttatccagtcatgttgaa

SEQ ID NO: 129542 - DNA, 25 bp, Canis familiaris
gatatagtcttaagtcatgctgtaa

SEQ ID NO: 129543 - DNA, 25 bp, Canis familiaris
gatatggatatgatagtctctgtga

SEQ ID NO: 129544 - DNA, 25 bp, Canis familiaris
gatattaatagcaaatgcatcttga

SEQ ID NO: 129545 - DNA, 25 bp, Canis familiaris
gatatcatatactcaatgtcttcag

SEQ ID NO: 129546 - DNA, 25 bp, Canis familiaris
gatatagcacaccgcgattttgcct

SEQ ID NO: 129547 - DNA, 25 bp, Canis familiaris
gatataaacccgtaattctcattga

SEQ ID NO: 129548 - DNA, 25 bp, Canis familiaris
gattgggaaccactagttctttcag

SEQ ID NO: 129549 - DNA, 25 bp, Canis familiaris
gatttggttcacagagtacttcagt

SEQ ID NO: 129550 - DNA, 25 bp, Canis familiaris
gatttggtcaaactgaccctgccgt

SEQ ID NO: 129551 - DNA, 25 bp, Canis familiaris
gatttgtggaaatatacctgcattg

SEQ ID NO: 129552 - DNA, 25 bp, Canis familiaris
gatttggaaaatcctcctctcatag

SEQ ID NO: 129553 - DNA, 25 bp, Canis familiaris
gatatcagggacatccatagctttc

SEQ ID NO: 129554 - DNA, 25 bp, Canis familiaris
gatttgggccttgtagagtgtcgtg

SEQ ID NO: 129555 - DNA, 25 bp, Canis familiaris
gatttgggtcttcatcgtagaaggt

SEQ ID NO: 129556 - DNA, 25 bp, Canis familiaris
gatttcaggtatctacttagactgg

SEQ ID NO: 129557 - DNA, 25 bp, Canis familiaris
gatttgctagttcttccttgtagag

SEQ ID NO: 129558 - DNA, 25 bp, Canis familiaris
gatattgttgttgttttggccctgt

SEQ ID NO: 129559 - DNA, 25 bp, Canis familiaris
gatattgtctttgtatttgcctcca

SEQ ID NO: 129560 - DNA, 25 bp, Canis familiaris
gatttactgttgggttccagctcac

SEQ ID NO: 129561 - DNA, 25 bp, Canis familiaris
gatattactgcttcctttaagtttt

SEQ ID NO: 129562 - DNA, 25 bp, Canis familiaris
gatttacagtccattatagccttac

SEQ ID NO: 129563 - DNA, 25 bp, Canis familiaris
gatttacgtgcgattcaaaattcaa

SEQ ID NO: 129564 - DNA, 25 bp, Canis familiaris
gatttgccagatgtttacaccagta

SEQ ID NO: 129565 - DNA, 25 bp, Canis familiaris
gatattctagtttcttcacaacgta

SEQ ID NO: 129566 - DNA, 25 bp, Canis familiaris
gttcctgaatttgtccaagttggaa

SEQ ID NO: 129567 - DNA, 25 bp, Canis familiaris
gatttctaatattactcccagattg

SEQ ID NO: 129568 - DNA, 25 bp, Canis familiaris
gatatttttataacctccctgatgc

SEQ ID NO: 129569 - DNA, 25 bp, Canis familiaris
gatattttgtaaacttctcttccca

SEQ ID NO: 129570 - DNA, 25 bp, Canis familiaris
gattttcgataacttttctgttctc

SEQ ID NO: 129571 - DNA, 25 bp, Canis familiaris
gatttttacagtgcttttattccca

SEQ ID NO: 129572 - DNA, 25 bp, Canis familiaris
gatatcagttaatccttctccattc

SEQ ID NO: 129573 - DNA, 25 bp, Canis familiaris
gatatcagtgacttacctgttccta

SEQ ID NO: 129574 - DNA, 25 bp, Canis familiaris
gatattgtacacatcttgttccatg

SEQ ID NO: 129575 - DNA, 25 bp, Canis familiaris
gatatgtgtataatcttattctctg

SEQ ID NO: 129576 - DNA, 25 bp, Canis familiaris
gatattgtcaattcttgctcatcgg

SEQ ID NO: 129577 - DNA, 25 bp, Canis familiaris
gatattgtcaattcttgctcatcgg

SEQ ID NO: 129578 - DNA, 25 bp, Canis familiaris
gatttgtaatagatatccagtgaat

SEQ ID NO: 129579 - DNA, 25 bp, Canis familiaris
gattttttaacaaccatggactcca

SEQ ID NO: 129580 - DNA, 25 bp, Canis familiaris
gatttgtcttgaccccaaggatcct

SEQ ID NO: 129581 - DNA, 25 bp, Canis familiaris
gatatcgtaggacccaaaggacctc

SEQ ID NO: 129582 - DNA, 25 bp, Canis familiaris
gatatctggcatggaggaaagggga

SEQ ID NO: 129583 - DNA, 25 bp, Canis familiaris
gttcagctgcatacacgaatacggt

SEQ ID NO: 129584 - DNA, 25 bp, Canis familiaris
gattacgcaacagtaaatccttaca

SEQ ID NO: 129585 - DNA, 25 bp, Canis familiaris
gattactacaaccacaacctggaca

SEQ ID NO: 129586 - DNA, 25 bp, Canis familiaris
gattattacatagacagacctggct

SEQ ID NO: 129587 - DNA, 25 bp, Canis familiaris
gatataattatagcagccatttggc

SEQ ID NO: 129588 - DNA, 25 bp, Canis familiaris
gatataagcgaagcagccttgaagg

SEQ ID NO: 129589 - DNA, 25 bp, Canis familiaris
gatttggctagagcagcactttcgg

SEQ ID NO: 129590 - DNA, 25 bp, Canis familiaris
gatatgttgtagtctctcactttct

SEQ ID NO: 129591 - DNA, 25 bp, Canis familiaris
gatattttctgattcgcctatgtct

SEQ ID NO: 129592 - DNA, 25 bp, Canis familiaris
gatagtgtctcgttcacgcatttct

SEQ ID NO: 129593 - DNA, 25 bp, Canis familiaris
gataggcactagttcaacatcgttt

SEQ ID NO: 129594 - DNA, 25 bp, Canis familiaris
gatattcacctatacacattttgat

SEQ ID NO: 129595 - DNA, 25 bp, Canis familiaris
gatattctatcacagacacttttat

SEQ ID NO: 129596 - DNA, 25 bp, Canis familiaris
gatattatcagtcaactctggtttt

SEQ ID NO: 129597 - DNA, 25 bp, Canis familiaris
gatatttcaagccttttgtctttta

SEQ ID NO: 129598 - DNA, 25 bp, Canis familiaris
gatatcagatccctgcgtttttttt

SEQ ID NO: 129599 - DNA, 25 bp, Canis familiaris
gatatccagcctacatgactttctt

SEQ ID NO: 129600 - DNA, 25 bp, Canis familiaris
gatagtcatgctgctagatctttat

SEQ ID NO: 129601 - DNA, 25 bp, Canis familiaris
gatatgcttgtttagctctaataaa

SEQ ID NO: 129602 - DNA, 25 bp, Canis familiaris
gatatcttttgagcatctatggaac

SEQ ID NO: 129603 - DNA, 25 bp, Canis familiaris
gatattgttgtggccatctgtagaa

SEQ ID NO: 129604 - DNA, 25 bp, Canis familiaris
gatattattcatgacagctttgtac

SEQ ID NO: 129605 - DNA, 25 bp, Canis familiaris
gatatgaaatctgccatgactttat

SEQ ID NO: 129606 - DNA, 25 bp, Canis familiaris
gatataaatcaatcattcctccatc

SEQ ID NO: 129607 - DNA, 25 bp, Canis familiaris
gatatcccatagtgattaatccctc

SEQ ID NO: 129608 - DNA, 25 bp, Canis familiaris
gattcacctgatcctgaaagtcccg

SEQ ID NO: 129609 - DNA, 25 bp, Canis familiaris
gattacccacttagaagatcaaagt

SEQ ID NO: 129610 - DNA, 25 bp, Canis familiaris
gattagcctaatttgggtcacaagt

SEQ ID NO: 129611 - DNA, 25 bp, Canis familiaris
gatatgggtaaaagggatcaccctt

SEQ ID NO: 129612 - DNA, 25 bp, Canis familiaris
gttgggacaccacagagtacccttc

SEQ ID NO: 129613 - DNA, 25 bp, Canis familiaris
gttgtggtctcctaaagtatcccct

SEQ ID NO: 129614 - DNA, 25 bp, Canis familiaris
gattttgtcccataaggtccatacc

SEQ ID NO: 129615 - DNA, 25 bp, Canis familiaris
gatttggtcccattaagttgtgaac

SEQ ID NO: 129616 - DNA, 25 bp, Canis familiaris
gatatttgttccttatggtcttgaa

SEQ ID NO: 129617 - DNA, 25 bp, Canis familiaris
gatattattaccctgatagtctatg

SEQ ID NO: 129618 - DNA, 25 bp, Canis familiaris
gatatatgttgaacggttattgatt

SEQ ID NO: 129619 - DNA, 25 bp, Canis familiaris
gatattggtacctgatatactgtta

SEQ ID NO: 129620 - DNA, 25 bp, Canis familiaris
gatattttactacagacaagttaat

SEQ ID NO: 129621 - DNA, 25 bp, Canis familiaris
gatttcaccacatttaaaagttaat

SEQ ID NO: 129622 - DNA, 25 bp, Canis familiaris
gatttcgagcggttacagagaggtt

SEQ ID NO: 129623 - DNA, 25 bp, Canis familiaris
gatttccggttttcaaagctgtgtg

SEQ ID NO: 129624 - DNA, 25 bp, Canis familiaris
gatttccaggaaagtcccctgagct

SEQ ID NO: 129625 - DNA, 25 bp, Canis familiaris
gattcccaaaatagtccgattggcc

SEQ ID NO: 129626 - DNA, 25 bp, Canis familiaris
gattcttaaatagctcactttgggc

SEQ ID NO: 129627 - DNA, 25 bp, Canis familiaris
gattttaatgtttctgacccggagc

SEQ ID NO: 129628 - DNA, 25 bp, Canis familiaris
gattattttttgtaacccggagatg

SEQ ID NO: 129629 - DNA, 25 bp, Canis familiaris
gattttttggcttttccttggaatg

SEQ ID NO: 129630 - DNA, 25 bp, Canis familiaris
gatttggttgttttgttgctgtggc

SEQ ID NO: 129631 - DNA, 25 bp, Canis familiaris
gatttggctatattttggctttgtg

SEQ ID NO: 129632 - DNA, 25 bp, Canis familiaris
gatttgtgttgatattcctggctgt

SEQ ID NO: 129633 - DNA, 25 bp, Canis familiaris
gatttgtggtctttcattttgcttt

SEQ ID NO: 129634 - DNA, 25 bp, Canis familiaris
gattttggcttagacagtagcttct

SEQ ID NO: 129635 - DNA, 25 bp, Canis familiaris
gatatcttttttcaagctagtcatt

SEQ ID NO: 129636 - DNA, 25 bp, Canis familiaris
gattttttttcctctgaactctaca

SEQ ID NO: 129637 - DNA, 25 bp, Canis familiaris
gattttttctccattttagcttcct

SEQ ID NO: 129638 - DNA, 25 bp, Canis familiaris
gatttcagcttctcacctgattagt

SEQ ID NO: 129639 - DNA, 25 bp, Canis familiaris
gatttccttatttcttttagataga

SEQ ID NO: 129640 - DNA, 25 bp, Canis familiaris
gattttaattttatattcagtgaaa

SEQ ID NO: 129641 - DNA, 25 bp, Canis familiaris
gattttaattattcatgctaccaga

SEQ ID NO: 129642 - DNA, 25 bp, Canis familiaris
gatatattaataacattccatccta

SEQ ID NO: 129643 - DNA, 25 bp, Canis familiaris
gatataatagcaatagttccctcaa

SEQ ID NO: 129644 - DNA, 25 bp, Canis familiaris
gattataagctacattcacccagaa

SEQ ID NO: 129645 - DNA, 25 bp, Canis familiaris
gatttcgaccaggttcgttcactca

SEQ ID NO: 129646 - DNA, 25 bp, Canis familiaris
gattataaccaggccatcatgttca

SEQ ID NO: 129647 - DNA, 25 bp, Canis familiaris
gattgtaaaagtgtttctcttaatt

SEQ ID NO: 129648 - DNA, 25 bp, Canis familiaris
gatattaaatacagtttcctttgtt

SEQ ID NO: 129649 - DNA, 25 bp, Canis familiaris
gatattacttctattttctctgttt

SEQ ID NO: 129650 - DNA, 25 bp, Canis familiaris
gatattatattcatttagccttctg

SEQ ID NO: 129651 - DNA, 25 bp, Canis familiaris
gatatattttctttttgcgttgcgt

SEQ ID NO: 129652 - DNA, 25 bp, Canis familiaris
gatttttgatgtttgttgcccaggt

SEQ ID NO: 129653 - DNA, 25 bp, Canis familiaris
gatttttgttttctcagacagatgt

SEQ ID NO: 129654 - DNA, 25 bp, Canis familiaris
gatttttgtcttgtctcataccaat

SEQ ID NO: 129655 - DNA, 25 bp, Canis familiaris
gatttattgcccaccttttaaagtg

SEQ ID NO: 129656 - DNA, 25 bp, Canis familiaris
gatttctttctcacctctttgaaat

SEQ ID NO: 129657 - DNA, 25 bp, Canis familiaris
gatattatttactccactttacaga

SEQ ID NO: 129658 - DNA, 25 bp, Canis familiaris
gattttttaacaccacttcaactgt

SEQ ID NO: 129659 - DNA, 25 bp, Canis familiaris
gttcttttaccacaattctagtcaa

SEQ ID NO: 129660 - DNA, 25 bp, Canis familiaris
gttgcttttacctgggttgttgcag

SEQ ID NO: 129661 - DNA, 25 bp, Canis familiaris
gatttctttgacccgttgattgttc

SEQ ID NO: 129662 - DNA, 25 bp, Canis familiaris
gatttccttttgggtgtattttgct

SEQ ID NO: 129663 - DNA, 25 bp, Canis familiaris
gatttcttccggtgtttgtttgtca

SEQ ID NO: 129664 - DNA, 25 bp, Canis familiaris
gatatgtccttgggtatgatttctt

SEQ ID NO: 129665 - DNA, 25 bp, Canis familiaris
gatattgccttgtgtattccattta

SEQ ID NO: 129666 - DNA, 25 bp, Canis familiaris
gatatttctctattgttttcatgta

SEQ ID NO: 129667 - DNA, 25 bp, Canis familiaris
gatatatattctgggcttatactta

SEQ ID NO: 129668 - DNA, 25 bp, Canis familiaris
gattacattctgggcctgaagatcg

SEQ ID NO: 129669 - DNA, 25 bp, Canis familiaris
gatatgactgtttggagcgaagagg

SEQ ID NO: 129670 - DNA, 25 bp, Canis familiaris
gattacgatttcacaacgagtcctt

SEQ ID NO: 129671 - DNA, 25 bp, Canis familiaris
gattccgattcctgagggaaattgt

SEQ ID NO: 129672 - DNA, 25 bp, Canis familiaris
gattcgacagatgcgggtaggatat

SEQ ID NO: 129673 - DNA, 25 bp, Canis familiaris
gttccgcgtacgagtcaggtaatac

SEQ ID NO: 129674 - DNA, 25 bp, Canis familiaris
gattctgggtagaggtcggtcaaat

SEQ ID NO: 129675 - DNA, 25 bp, Canis familiaris
gattcccggaaatgtcggtcaacat

SEQ ID NO: 129676 - DNA, 25 bp, Canis familiaris
gattctcccgtagagacgggccacc

SEQ ID NO: 129677 - DNA, 25 bp, Canis familiaris
gttctgattcgtcaaatcctggaca

SEQ ID NO: 129678 - DNA, 25 bp, Canis familiaris
gattctgaacgttcaaaccaagctc

SEQ ID NO: 129679 - DNA, 25 bp, Canis familiaris
gatattaaatgctctcaacacacac

SEQ ID NO: 129680 - DNA, 25 bp, Canis familiaris
gatttttgatgctgccaaagcgccc

SEQ ID NO: 129681 - DNA, 25 bp, Canis familiaris
gatatacttgactagataaatccca

SEQ ID NO: 129682 - DNA, 25 bp, Canis familiaris
gatataccccaaagagatactcaca

SEQ ID NO: 129683 - DNA, 25 bp, Canis familiaris
gatatacttcagctatgatagaaca

SEQ ID NO: 129684 - DNA, 25 bp, Canis familiaris
gatatgccttatgaacatccaaata

SEQ ID NO: 129685 - DNA, 25 bp, Canis familiaris
gatatgacactaaaagcatgggcaa

SEQ ID NO: 129686 - DNA, 25 bp, Canis familiaris
gtaacctgcatgcaactgggaaatg

SEQ ID NO: 129687 - DNA, 25 bp, Canis familiaris
gattgaccatgctgaaagggaactg

SEQ ID NO: 129688 - DNA, 25 bp, Canis familiaris
gattaccgctggtggtggcgatctg

SEQ ID NO: 129689 - DNA, 25 bp, Canis familiaris
gatatagtacggagggctgcgccag

SEQ ID NO: 129690 - DNA, 25 bp, Canis familiaris
gattacaagcggaggcgctgccgcg

SEQ ID NO: 129691 - DNA, 25 bp, Canis familiaris
gatttgatacggagtccatgcccca

SEQ ID NO: 129692 - DNA, 25 bp, Canis familiaris
gattaaaatggagcctacccaattt

SEQ ID NO: 129693 - DNA, 25 bp, Canis familiaris
gatatcaaactgtcaacctacccaa

SEQ ID NO: 129694 - DNA, 25 bp, Canis familiaris
gatattaaggtactccttccacaac

SEQ ID NO: 129695 - DNA, 25 bp, Canis familiaris
gattccaaggacctttgatccacca

SEQ ID NO: 129696 - DNA, 25 bp, Canis familiaris
gattccaaaggactggggcgtctag

SEQ ID NO: 129697 - DNA, 25 bp, Canis familiaris
gatttataggactggggcttggaga

SEQ ID NO: 129698 - DNA, 25 bp, Canis familiaris
gtttccggacttcaagtctgcaggc

SEQ ID NO: 129699 - DNA, 25 bp, Canis familiaris
gttgttggccgttccaatttgaaga

SEQ ID NO: 129700 - DNA, 25 bp, Canis familiaris
gttttggagaggggaaatgtgaaat

SEQ ID NO: 129701 - DNA, 25 bp, Canis familiaris
gattttaggaggctgctgcttcgaa

SEQ ID NO: 129702 - DNA, 25 bp, Canis familiaris
gatttctatggtgctggctgcttat

SEQ ID NO: 129703 - DNA, 25 bp, Canis familiaris
gatattcatgagctatttgactata

SEQ ID NO: 129704 - DNA, 25 bp, Canis familiaris
gatatcatctgacttattagcactg

SEQ ID NO: 129705 - DNA, 25 bp, Canis familiaris
gatatcactaatgtattgcactcac

SEQ ID NO: 129706 - DNA, 25 bp, Canis familiaris
gatatcagccatagcaatatttttc

SEQ ID NO: 129707 - DNA, 25 bp, Canis familiaris
gatatcctctgacgtatcatctttt

SEQ ID NO: 129708 - DNA, 25 bp, Canis familiaris
gatatccctacttacattaggattc

SEQ ID NO: 129709 - DNA, 25 bp, Canis familiaris
gatatttctactcagcctggggatt

SEQ ID NO: 129710 - DNA, 25 bp, Canis familiaris
gatatgtttgtgcctaatcatgttg

SEQ ID NO: 129711 - DNA, 25 bp, Canis familiaris
gatattgttgtgcctgccattttca

SEQ ID NO: 129712 - DNA, 25 bp, Canis familiaris
gatattttgctttacaattgatcag

SEQ ID NO: 129713 - DNA, 25 bp, Canis familiaris
gatatttcatatactataattgtaa

SEQ ID NO: 129714 - DNA, 25 bp, Canis familiaris
gatatggtattttgtgaatgatctt

SEQ ID NO: 129715 - DNA, 25 bp, Canis familiaris
gatatggtgacagtggggatggcta

SEQ ID NO: 129716 - DNA, 25 bp, Canis familiaris
gatatggttcctggccaacctatgt

SEQ ID NO: 129717 - DNA, 25 bp, Canis familiaris
gatatgtttccaagtatccctttaa

SEQ ID NO: 129718 - DNA, 25 bp, Canis familiaris
gatttttcaggattagctccatttc

SEQ ID NO: 129719 - DNA, 25 bp, Canis familiaris
gatttctgtctgccaaagttttacg

SEQ ID NO: 129720 - DNA, 25 bp, Canis familiaris
gatttgtatttctgatgcttttaat

SEQ ID NO: 129721 - DNA, 25 bp, Canis familiaris
gattttatttagcagtgttaacttg

SEQ ID NO: 129722 - DNA, 25 bp, Canis familiaris
gatttcttaaacgaatttgacgtcg

SEQ ID NO: 129723 - DNA, 25 bp, Canis familiaris
gatttctctaaggcaactttaattc

SEQ ID NO: 129724 - DNA, 25 bp, Canis familiaris
gattcccacacggacttttaagtgc

SEQ ID NO: 129725 - DNA, 25 bp, Canis familiaris
gattcccacacgtggtgatgttaca

SEQ ID NO: 129726 - DNA, 25 bp, Canis familiaris
gatatcctaaaataatagactacag

SEQ ID NO: 129727 - DNA, 25 bp, Canis familiaris
gattcctacaaatatcatacccagc

SEQ ID NO: 129728 - DNA, 25 bp, Canis familiaris
gttctgtaaggaagacattcaaagc

SEQ ID NO: 129729 - DNA, 25 bp, Canis familiaris
gttgggaaggtctaatataagcaga

SEQ ID NO: 129730 - DNA, 25 bp, Canis familiaris
gttggaacctggtccattaaagaag

SEQ ID NO: 129731 - DNA, 25 bp, Canis familiaris
gatttgaccttgcaccattaatgga

SEQ ID NO: 129732 - DNA, 25 bp, Canis familiaris
gatttgatctccgtaggattttgga

SEQ ID NO: 129733 - DNA, 25 bp, Canis familiaris
gatattgccaccctaatgatgtttg

SEQ ID NO: 129734 - DNA, 25 bp, Canis familiaris
gatattgccgcaactcactaattgt

SEQ ID NO: 129735 - DNA, 25 bp, Canis familiaris
gattttgccaactgccaatcatgtt

SEQ ID NO: 129736 - DNA, 25 bp, Canis familiaris
gatttgttacagcagccaacttatt

SEQ ID NO: 129737 - DNA, 25 bp, Canis familiaris
gatttttgacttgggctgaatgtat

SEQ ID NO: 129738 - DNA, 25 bp, Canis familiaris
gattttccactttgactccagaagc

SEQ ID NO: 129739 - DNA, 25 bp, Canis familiaris
gatatcatgtccttaaaacaagaac

SEQ ID NO: 129740 - DNA, 25 bp, Canis familiaris
gattcagctcgctgaggaagaggga

SEQ ID NO: 129741 - DNA, 25 bp, Canis familiaris
gattcggcagcttgcaagaaggtgc

SEQ ID NO: 129742 - DNA, 25 bp, Canis familiaris
gttggccacgtgaagatgacggacg

SEQ ID NO: 129743 - DNA, 25 bp, Canis familiaris
gttgtgcctcggggatgagcacggc

SEQ ID NO: 129744 - DNA, 25 bp, Canis familiaris
gatttcattccagtggtgcagcaca

SEQ ID NO: 129745 - DNA, 25 bp, Canis familiaris
gatattctttgagtgatgtgcaagc

SEQ ID NO: 129746 - DNA, 25 bp, Canis familiaris
gatatatatttgtttctgataggcc

SEQ ID NO: 129747 - DNA, 25 bp, Canis familiaris
gatttagtctctttctgattggccc

SEQ ID NO: 129748 - DNA, 25 bp, Canis familiaris
gatttatgtctttgtaattccccga

SEQ ID NO: 129749 - DNA, 25 bp, Canis familiaris
gattttggttcatttttccgactgt

SEQ ID NO: 129750 - DNA, 25 bp, Canis familiaris
gattttggtggttattactgccctt

SEQ ID NO: 129751 - DNA, 25 bp, Canis familiaris
gattttggaggactgtaagacccct

SEQ ID NO: 129752 - DNA, 25 bp, Canis familiaris
gatatttggtcaattgtaagtcccc

SEQ ID NO: 129753 - DNA, 25 bp, Canis familiaris
gattttcctcagatagaactccagc

SEQ ID NO: 129754 - DNA, 25 bp, Canis familiaris
gatttgtgtttgatagttcctgctg

SEQ ID NO: 129755 - DNA, 25 bp, Canis familiaris
gatttgtttgtgctgctgcaactcc

SEQ ID NO: 129756 - DNA, 25 bp, Canis familiaris
gatttgtcgctgaggccatagtcaa

SEQ ID NO: 129757 - DNA, 25 bp, Canis familiaris
gatttgtcctttccaggagatcaca

SEQ ID NO: 129758 - DNA, 25 bp, Canis familiaris
gatttgtctgctttccagtgaggaa

SEQ ID NO: 129759 - DNA, 25 bp, Canis familiaris
gatattcctgctttcaaggaacatc

SEQ ID NO: 129760 - DNA, 25 bp, Canis familiaris
gatattcctggactcacggatacta

SEQ ID NO: 129761 - DNA, 25 bp, Canis familiaris
gatttcacgaggacagcgagcacac

SEQ ID NO: 129762 - DNA, 25 bp, Canis familiaris
gtagtagggctgcacacacacgaat

SEQ ID NO: 129763 - DNA, 25 bp, Canis familiaris
gatattttggcactaacaacacaat

SEQ ID NO: 129764 - DNA, 25 bp, Canis familiaris
gatatttgtggactaatgaactgga

SEQ ID NO: 129765 - DNA, 25 bp, Canis familiaris
gatattgtgaaacctgtgactcggc

SEQ ID NO: 129766 - DNA, 25 bp, Canis familiaris
gatttggagaatgttgacactggag

SEQ ID NO: 129767 - DNA, 25 bp, Canis familiaris
gatttggtagtggcctaaggataga

SEQ ID NO: 129768 - DNA, 25 bp, Canis familiaris
gattaattaatgagcgagagggaga

SEQ ID NO: 129769 - DNA, 25 bp, Canis familiaris
gatttataacggcctcagactggag

SEQ ID NO: 129770 - DNA, 25 bp, Canis familiaris
gattctatcaactgagcccaaggga

SEQ ID NO: 129771 - DNA, 25 bp, Canis familiaris
gattactcaaatttcccaaggtatt

SEQ ID NO: 129772 - DNA, 25 bp, Canis familiaris
gattttattttttccgagagttgct

SEQ ID NO: 129773 - DNA, 25 bp, Canis familiaris
gatttctatttttaacttcagttgg

SEQ ID NO: 129774 - DNA, 25 bp, Canis familiaris
gatttcgttttttcacattttgtag

SEQ ID NO: 129775 - DNA, 25 bp, Canis familiaris
gatttgtttttttgctcactttttg

SEQ ID NO: 129776 - DNA, 25 bp, Canis familiaris
gatttatttactaagctcctaccct

SEQ ID NO: 129777 - DNA, 25 bp, Canis familiaris
gttaattcgccaaaccattatacct

SEQ ID NO: 129778 - DNA, 25 bp, Canis familiaris
gatttaatcccataaagtgaacgtc

SEQ ID NO: 129779 - DNA, 25 bp, Canis familiaris
gatattactcaccatccaaagatga

SEQ ID NO: 129780 - DNA, 25 bp, Canis familiaris
gatatatatgcttccatctatcaaa

SEQ ID NO: 129781 - DNA, 25 bp, Canis familiaris
gtataacccctctttataccgtgag

SEQ ID NO: 129782 - DNA, 25 bp, Canis familiaris
gtgtcaaccccatattttacggatt

SEQ ID NO: 129783 - DNA, 25 bp, Canis familiaris
tgattaaccccacctgttaagcggt

SEQ ID NO: 129784 - DNA, 25 bp, Canis familiaris
gatttacccacgattttagcgtctt

SEQ ID NO: 129785 - DNA, 25 bp, Canis familiaris
gatttaaccaggaagcttccaggtt

SEQ ID NO: 129786 - DNA, 25 bp, Canis familiaris
gattgaaaaaggaacctctcccact

SEQ ID NO: 129787 - DNA, 25 bp, Canis familiaris
gattaaactgaggaacctctccaag

SEQ ID NO: 129788 - DNA, 25 bp, Canis familiaris
gatattcagacatgtgaacctgcat

SEQ ID NO: 129789 - DNA, 25 bp, Canis familiaris
gatattgcaactattgaccttagct

SEQ ID NO: 129790 - DNA, 25 bp, Canis familiaris
gatatatgatcctgtttgccttact

SEQ ID NO: 129791 - DNA, 25 bp, Canis familiaris
gatatacatcagggctttctcatta

SEQ ID NO: 129792 - DNA, 25 bp, Canis familiaris
gatttcataggtacatattcaagag

SEQ ID NO: 129793 - DNA, 25 bp, Canis familiaris
gattactagagcacatttccaggga

SEQ ID NO: 129794 - DNA, 25 bp, Canis familiaris
gatttcttagcacatttcttaggat

SEQ ID NO: 129795 - DNA, 25 bp, Canis familiaris
gattactacgcccttttctaggaat

SEQ ID NO: 129796 - DNA, 25 bp, Canis familiaris
gattccccgtttatgtctcagggta

SEQ ID NO: 129797 - DNA, 25 bp, Canis familiaris
gatttctaagtttttgtcaacacgt

SEQ ID NO: 129798 - DNA, 25 bp, Canis familiaris
gatattcaaagtattctcttaaggt

SEQ ID NO: 129799 - DNA, 25 bp, Canis familiaris
gatatataaattccttctctgtaat

SEQ ID NO: 129800 - DNA, 25 bp, Canis familiaris
gatttatgacaaccgtgctcctaat

SEQ ID NO: 129801 - DNA, 25 bp, Canis familiaris
gatttagaaatgcctgcgctccata

SEQ ID NO: 129802 - DNA, 25 bp, Canis familiaris
gatatacacagattggccagggcta

SEQ ID NO: 129803 - DNA, 25 bp, Canis familiaris
gatattcaatggaagcgcgggtata

SEQ ID NO: 129804 - DNA, 25 bp, Canis familiaris
gatttagaggtgactgggtgagata

SEQ ID NO: 129805 - DNA, 25 bp, Canis familiaris
gatttacattttcctgatgatcagt

SEQ ID NO: 129806 - DNA, 25 bp, Canis familiaris
gattaactggctctgtgtatagctg

SEQ ID NO: 129807 - DNA, 25 bp, Canis familiaris
gattcaacgggactcctgcaaggga

SEQ ID NO: 129808 - DNA, 25 bp, Canis familiaris
gatatacacacgaactcctagggca

SEQ ID NO: 129809 - DNA, 25 bp, Canis familiaris
gattggaaggaaggcttaaagccca

SEQ ID NO: 129810 - DNA, 25 bp, Canis familiaris
gatttagggagaaagtgttaccaca

SEQ ID NO: 129811 - DNA, 25 bp, Canis familiaris
gatttcggaagaacactcttacgct

SEQ ID NO: 129812 - DNA, 25 bp, Canis familiaris
gatttgtggaaaacctctcaagctg

SEQ ID NO: 129813 - DNA, 25 bp, Canis familiaris
gatttaggaaacacactgacatgca

SEQ ID NO: 129814 - DNA, 25 bp, Canis familiaris
gattatagagaacaacgctgcatta

SEQ ID NO: 129815 - DNA, 25 bp, Canis familiaris
gatttggctgatggcaacacctcat

SEQ ID NO: 129816 - DNA, 25 bp, Canis familiaris
gatttgactatatacattctctgaa

SEQ ID NO: 129817 - DNA, 25 bp, Canis familiaris
gattatgcacttgtagttctctgac

SEQ ID NO: 129818 - DNA, 25 bp, Canis familiaris
gatatctgcatttctatgttccttg

SEQ ID NO: 129819 - DNA, 25 bp, Canis familiaris
gatattattattatgctcactttat

SEQ ID NO: 129820 - DNA, 25 bp, Canis familiaris
gatattttttcacttcttgttttct

SEQ ID NO: 129821 - DNA, 25 bp, Canis familiaris
gatttctttccctacgtatggtttg

SEQ ID NO: 129822 - DNA, 25 bp, Canis familiaris
gattccttcccattaaaagttcgtg

SEQ ID NO: 129823 - DNA, 25 bp, Canis familiaris
gattatcttcccttacaactttagt

SEQ ID NO: 129824 - DNA, 25 bp, Canis familiaris
gatttttccccttcaacttgaatat

SEQ ID NO: 129825 - DNA, 25 bp, Canis familiaris
gatttttctccatagtacttattac

SEQ ID NO: 129826 - DNA, 25 bp, Canis familiaris
gattttaaattatctccactattac

SEQ ID NO: 129827 - DNA, 25 bp, Canis familiaris
gatttccaagaatttcttaatctta

SEQ ID NO: 129828 - DNA, 25 bp, Canis familiaris
gatttccaaaattttctcccatgtt

SEQ ID NO: 129829 - DNA, 25 bp, Canis familiaris
gattcgcaaaaatattctgacctat

SEQ ID NO: 129830 - DNA, 25 bp, Canis familiaris
gattcaaagaaaccctattccctgc

SEQ ID NO: 129831 - DNA, 25 bp, Canis familiaris
gatttaggagggtccaactcgttca

SEQ ID NO: 129832 - DNA, 25 bp, Canis familiaris
gattcaagggggccatttctctttt

SEQ ID NO: 129833 - DNA, 25 bp, Canis familiaris
gattcagagagcacccaacatcctg

SEQ ID NO: 129834 - DNA, 25 bp, Canis familiaris
gattatgtcagtgccaaaagccttc

SEQ ID NO: 129835 - DNA, 25 bp, Canis familiaris
gattaatgtttgaaaaagctctctc

SEQ ID NO: 129836 - DNA, 25 bp, Canis familiaris
gatttacttatttcacaggcttctc

SEQ ID NO: 129837 - DNA, 25 bp, Canis familiaris
gattaaccttctgcaattctatcat

SEQ ID NO: 129838 - DNA, 25 bp, Canis familiaris
gattaaccttctgtgattccatcat

SEQ ID NO: 129839 - DNA, 25 bp, Canis familiaris
gatatatacacttctgattgttttc

SEQ ID NO: 129840 - DNA, 25 bp, Canis familiaris
gatattgacactcttgttgatgcta

SEQ ID NO: 129841 - DNA, 25 bp, Canis familiaris
gatattgtgtgtcgtgtgtatgtgt

SEQ ID NO: 129842 - DNA, 25 bp, Canis familiaris
gatatttgtctggcttgtcactgta

SEQ ID NO: 129843 - DNA, 25 bp, Canis familiaris
gatatagctgttttgtgaccattaa

SEQ ID NO: 129844 - DNA, 25 bp, Canis familiaris
gatatacatttatttacatacgcaa

SEQ ID NO: 129845 - DNA, 25 bp, Canis familiaris
gatatacagttaattcccccattga

SEQ ID NO: 129846 - DNA, 25 bp, Canis familiaris
gattcacagttgtatgacctcacac

SEQ ID NO: 129847 - DNA, 25 bp, Canis familiaris
gatttagtggatgactcacacacac

SEQ ID NO: 129848 - DNA, 25 bp, Canis familiaris
gattcaacatggaaaccaccccagc

SEQ ID NO: 129849 - DNA, 25 bp, Canis familiaris
gattacagtgagaactgacccttca

SEQ ID NO: 129850 - DNA, 25 bp, Canis familiaris
gatatactgggcagctcccacatta

SEQ ID NO: 129851 - DNA, 25 bp, Canis familiaris
gatattcggaaggccctctatgctt

SEQ ID NO: 129852 - DNA, 25 bp, Canis familiaris
gatttctgtggagccctgtgatgtt

SEQ ID NO: 129853 - DNA, 25 bp, Canis familiaris
gatatactgatgaaaacctggggat

SEQ ID NO: 129854 - DNA, 25 bp, Canis familiaris
gattactctcaggaacactagcggt

SEQ ID NO: 129855 - DNA, 25 bp, Canis familiaris
gattcaccgcaagactgtgggcgtg

SEQ ID NO: 129856 - DNA, 25 bp, Canis familiaris
gattatccgaggcacagggcctggg

SEQ ID NO: 129857 - DNA, 25 bp, Canis familiaris
gattaccggggacgaagcgctgatt

SEQ ID NO: 129858 - DNA, 25 bp, Canis familiaris
gatttagctcagtggtagagcgctt

SEQ ID NO: 129859 - DNA, 25 bp, Canis familiaris
gattgtactaactgtaagcctgctg

SEQ ID NO: 129860 - DNA, 25 bp, Canis familiaris
gatttggtatactcacaagcctgca

SEQ ID NO: 129861 - DNA, 25 bp, Canis familiaris
gatattccaaacttcagcaacccaa

SEQ ID NO: 129862 - DNA, 25 bp, Canis familiaris
gattttccagactcacagaacacag

SEQ ID NO: 129863 - DNA, 25 bp, Canis familiaris
gatttacaggctggtgccagacaaa

SEQ ID NO: 129864 - DNA, 25 bp, Canis familiaris
gattctggaactggctggcaatgca

SEQ ID NO: 129865 - DNA, 25 bp, Canis familiaris
gattctgggtctatggaactcttta

SEQ ID NO: 129866 - DNA, 25 bp, Canis familiaris
gatttgacagaagcggaactctctt

SEQ ID NO: 129867 - DNA, 25 bp, Canis familiaris
gattcatgaatctctcggacatccc

SEQ ID NO: 129868 - DNA, 25 bp, Canis familiaris
gatttagatacccggacttactcat

SEQ ID NO: 129869 - DNA, 25 bp, Canis familiaris
gatttttaaataaacatctgactct

SEQ ID NO: 129870 - DNA, 25 bp, Canis familiaris
gatttgttactattgaagctccagt

SEQ ID NO: 129871 - DNA, 25 bp, Canis familiaris
gatttcgtattctagtagtcaatgt

SEQ ID NO: 129872 - DNA, 25 bp, Canis familiaris
gattttgtatttgtagctcagagcc

SEQ ID NO: 129873 - DNA, 25 bp, Canis familiaris
gattttgcctttttggtagcagttt

SEQ ID NO: 129874 - DNA, 25 bp, Canis familiaris
gattttcctcgtttgttgacgtcgt

SEQ ID NO: 129875 - DNA, 25 bp, Canis familiaris
gatttctccttgtactgtgtaccgg

SEQ ID NO: 129876 - DNA, 25 bp, Canis familiaris
gatttctctctggaacaatgtacgg

SEQ ID NO: 129877 - DNA, 25 bp, Canis familiaris
gatattctcatagtagacacaggaa

SEQ ID NO: 129878 - DNA, 25 bp, Canis familiaris
gatatttataattctacccacaacg

SEQ ID NO: 129879 - DNA, 25 bp, Canis familiaris
gattagccataatctttcctcgaag

SEQ ID NO: 129880 - DNA, 25 bp, Canis familiaris
gttcgactagacttttttgctgggt

SEQ ID NO: 129881 - DNA, 25 bp, Canis familiaris
gattcgagtactcgctcttgttcgg

SEQ ID NO: 129882 - DNA, 25 bp, Canis familiaris
gattccgtagctgacgctgatatcg

SEQ ID NO: 129883 - DNA, 25 bp, Canis familiaris
gattattgtgacttcactgtatata

SEQ ID NO: 129884 - DNA, 25 bp, Canis familiaris
gatttccacagctgctcagttgata

SEQ ID NO: 129885 - DNA, 25 bp, Canis familiaris
gattcctcaatctctacttgcagaa

SEQ ID NO: 129886 - DNA, 25 bp, Canis familiaris
gattagcatcaactactactccaaa

SEQ ID NO: 129887 - DNA, 25 bp, Canis familiaris
gatttgacacagtcacaactgccat

SEQ ID NO: 129888 - DNA, 25 bp, Canis familiaris
gatttacacagtacacatcacaaaa

SEQ ID NO: 129889 - DNA, 25 bp, Canis familiaris
gattcaacagcattacctcagctta

SEQ ID NO: 129890 - DNA, 25 bp, Canis familiaris
gattcactgcaggctccattaagta

SEQ ID NO: 129891 - DNA, 25 bp, Canis familiaris
gattcactccccatgagcaggatga

SEQ ID NO: 129892 - DNA, 25 bp, Canis familiaris
gattttggcccatgaggtgatctgt

SEQ ID NO: 129893 - DNA, 25 bp, Canis familiaris
gatttacggcgctaaggatgactct

SEQ ID NO: 129894 - DNA, 25 bp, Canis familiaris
gatttggggatgtttccatcctctt

SEQ ID NO: 129895 - DNA, 25 bp, Canis familiaris
gatttgctggtgactcttgtcatcc

SEQ ID NO: 129896 - DNA, 25 bp, Canis familiaris
gattctcgtatacctttacacacgt

SEQ ID NO: 129897 - DNA, 25 bp, Canis familiaris
gttgtggttaccataagccaggaca

SEQ ID NO: 129898 - DNA, 25 bp, Canis familiaris
gattccgttaccataagtcagtgaa

SEQ ID NO: 129899 - DNA, 25 bp, Canis familiaris
gattccttactcataagaccttgaa

SEQ ID NO: 129900 - DNA, 25 bp, Canis familiaris
gattaattaatcccaacacctgtga

SEQ ID NO: 129901 - DNA, 25 bp, Canis familiaris
gattaattaatcacccagacccatt

SEQ ID NO: 129902 - DNA, 25 bp, Canis familiaris
gattagcattaactaactaaaccat

SEQ ID NO: 129903 - DNA, 25 bp, Canis familiaris
gattaatctaacctatctaaaagct

SEQ ID NO: 129904 - DNA, 25 bp, Canis familiaris
gattacctttccattgacttactgt

SEQ ID NO: 129905 - DNA, 25 bp, Canis familiaris
gattacacgtaattattggctctac

SEQ ID NO: 129906 - DNA, 25 bp, Canis familiaris
gattacacgtaattattggctctac

SEQ ID NO: 129907 - DNA, 25 bp, Canis familiaris
gattacacgtaattagttggctcta

SEQ ID NO: 129908 - DNA, 25 bp, Canis familiaris
gattaaagtctgttatttgtgggaa

SEQ ID NO: 129909 - DNA, 25 bp, Canis familiaris
gttgaagcacttttttcggacacga

SEQ ID NO: 129910 - DNA, 25 bp, Canis familiaris
gttgaggtagttctcctggcaacca

SEQ ID NO: 129911 - DNA, 25 bp, Canis familiaris
gttcaggaagtttgcccaataccca

SEQ ID NO: 129912 - DNA, 25 bp, Canis familiaris
gttgaacaacttagccacaaccctc

SEQ ID NO: 129913 - DNA, 25 bp, Canis familiaris
gttaaaaatgtcacaaaggtgctgc

SEQ ID NO: 129914 - DNA, 25 bp, Canis familiaris
gattaaaaggcccccaaagctctgt

SEQ ID NO: 129915 - DNA, 25 bp, Canis familiaris
gatttttggtccaccaatcgtcatg

SEQ ID NO: 129916 - DNA, 25 bp, Canis familiaris
gattgttctggttcaaccctggatc

SEQ ID NO: 129917 - DNA, 25 bp, Canis familiaris
gatttcctgaagtcagaccctgaga

SEQ ID NO: 129918 - DNA, 25 bp, Canis familiaris
gatttcctgaaagctcttcgagaga

SEQ ID NO: 129919 - DNA, 25 bp, Canis familiaris
gatattctcatgtattttctttaaa

SEQ ID NO: 129920 - DNA, 25 bp, Canis familiaris
gatattctcatttgcatttgtcttt

SEQ ID NO: 129921 - DNA, 25 bp, Canis familiaris
gattttctggtgattttgttactga

SEQ ID NO: 129922 - DNA, 25 bp, Canis familiaris
gatttgtcttatgtatttgttttgt

SEQ ID NO: 129923 - DNA, 25 bp, Canis familiaris
gatttggtctgtgtctttttctagt

SEQ ID NO: 129924 - DNA, 25 bp, Canis familiaris
gatttagtcattcttttttatagct

SEQ ID NO: 129925 - DNA, 25 bp, Canis familiaris
gatattcgtcacttttgtatttttc

SEQ ID NO: 129926 - DNA, 25 bp, Canis familiaris
gatttccacctctagtgtttctttc

SEQ ID NO: 129927 - DNA, 25 bp, Canis familiaris
gattttcaccactatttctgtttct

SEQ ID NO: 129928 - DNA, 25 bp, Canis familiaris
gatttcctaactatttttctctggc

SEQ ID NO: 129929 - DNA, 25 bp, Canis familiaris
gatttctcttttatgatttccttgg

SEQ ID NO: 129930 - DNA, 25 bp, Canis familiaris
gattctccttttaatatccaacgtt

SEQ ID NO: 129931 - DNA, 25 bp, Canis familiaris
gattacgctttctatatacaacttg

SEQ ID NO: 129932 - DNA, 25 bp, Canis familiaris
gattactgctctggctcctagcacc

SEQ ID NO: 129933 - DNA, 25 bp, Canis familiaris
gttgcagcgctaggcgctgctccac

SEQ ID NO: 129934 - DNA, 25 bp, Canis familiaris
gttgacggacctcgtcgtcgtcaac

SEQ ID NO: 129935 - DNA, 25 bp, Canis familiaris
gatttccgactctgtcgtcaatcac

SEQ ID NO: 129936 - DNA, 25 bp, Canis familiaris
gattccaaaccaggtggccagacgc

SEQ ID NO: 129937 - DNA, 25 bp, Canis familiaris
gattttattgacgatctggccgacc

SEQ ID NO: 129938 - DNA, 25 bp, Canis familiaris
gatttatcataactgctcttcctac

SEQ ID NO: 129939 - DNA, 25 bp, Canis familiaris
gattctacagatactggcccatcta

SEQ ID NO: 129940 - DNA, 25 bp, Canis familiaris
gattcataatccaatggacctgcta

SEQ ID NO: 129941 - DNA, 25 bp, Canis familiaris
gattcaaatccttggaacgatctgc

SEQ ID NO: 129942 - DNA, 25 bp, Canis familiaris
gatttcatatcgttggagccttcgc

SEQ ID NO: 129943 - DNA, 25 bp, Canis familiaris
gatttcagattggtggaccttcccc

SEQ ID NO: 129944 - DNA, 25 bp, Canis familiaris
gattatcaattttttccattctccc

SEQ ID NO: 129945 - DNA, 25 bp, Canis familiaris
gatttcacttctaattaatttccat

SEQ ID NO: 129946 - DNA, 25 bp, Canis familiaris
gatttctgttctttattatttccat

SEQ ID NO: 129947 - DNA, 25 bp, Canis familiaris
gatttcctatctttgattgattcca

SEQ ID NO: 129948 - DNA, 25 bp, Canis familiaris
gatttcccatctatattttctcaga

SEQ ID NO: 129949 - DNA, 25 bp, Canis familiaris
gatttaaacgtttgtgttctcgaat

SEQ ID NO: 129950 - DNA, 25 bp, Canis familiaris
gattatgaaaggtttagttcccaga

SEQ ID NO: 129951 - DNA, 25 bp, Canis familiaris
gattataacaagcattatttcctca

SEQ ID NO: 129952 - DNA, 25 bp, Canis familiaris
gattctacacgtcaagtttcactta

SEQ ID NO: 129953 - DNA, 25 bp, Canis familiaris
gatttatgccccaaagtaccaatac

SEQ ID NO: 129954 - DNA, 25 bp, Canis familiaris
gtattgggcgcctggtcaccagggc

SEQ ID NO: 129955 - DNA, 25 bp, Canis familiaris
gttggtcagccctggaattcagagg

SEQ ID NO: 129956 - DNA, 25 bp, Canis familiaris
gattggtcccaagggtacctggctt

SEQ ID NO: 129957 - DNA, 25 bp, Canis familiaris
gtggtgggacacgggtaactggtag

SEQ ID NO: 129958 - DNA, 25 bp, Canis familiaris
gatattggtggcccgaaaagcggct

SEQ ID NO: 129959 - DNA, 25 bp, Canis familiaris
gatttctttccgggaaatggcctga

SEQ ID NO: 129960 - DNA, 25 bp, Canis familiaris
gatttcgtgttccagtgtaaggccg

SEQ ID NO: 129961 - DNA, 25 bp, Canis familiaris
gatttcatgtgtaaagcttttttgc

SEQ ID NO: 129962 - DNA, 25 bp, Canis familiaris
gattttatgtaaggttgtttctgtt

SEQ ID NO: 129963 - DNA, 25 bp, Canis familiaris
gattttttgacttcttgtttctgtt

SEQ ID NO: 129964 - DNA, 25 bp, Canis familiaris
gatttatctataacttggagtttgt

SEQ ID NO: 129965 - DNA, 25 bp, Canis familiaris
gattttgtcacttctcatggaggta

SEQ ID NO: 129966 - DNA, 25 bp, Canis familiaris
gatttctgcccttcagagtgcagga

SEQ ID NO: 129967 - DNA, 25 bp, Canis familiaris
gattttcacatggcaaaggcagtat

SEQ ID NO: 129968 - DNA, 25 bp, Canis familiaris
gattttagatgccagcctgtgccta

SEQ ID NO: 129969 - DNA, 25 bp, Canis familiaris
gattctctggtccagagccggctac

SEQ ID NO: 129970 - DNA, 25 bp, Canis familiaris
gatttcatggttggttcctctacta

SEQ ID NO: 129971 - DNA, 25 bp, Canis familiaris
gattgcctggttcttttacattcac

SEQ ID NO: 129972 - DNA, 25 bp, Canis familiaris
gttgttgggacccctatcaattcac

SEQ ID NO: 129973 - DNA, 25 bp, Canis familiaris
gttgactggcaaacaccaaacttca

SEQ ID NO: 129974 - DNA, 25 bp, Canis familiaris
gattacttcatagaccacaacacca

SEQ ID NO: 129975 - DNA, 25 bp, Canis familiaris
gattatctgcattaggaccctaccc

SEQ ID NO: 129976 - DNA, 25 bp, Canis familiaris
gattatagctaacaccatttggcac

SEQ ID NO: 129977 - DNA, 25 bp, Canis familiaris
gattcttcacaacagacactttccc

SEQ ID NO: 129978 - DNA, 25 bp, Canis familiaris
gatttgtctctaaaactctttccga

SEQ ID NO: 129979 - DNA, 25 bp, Canis familiaris
gatattgtctcattaaatcttcata

SEQ ID NO: 129980 - DNA, 25 bp, Canis familiaris
gattttttttacattcatatctact

SEQ ID NO: 129981 - DNA, 25 bp, Canis familiaris
gatttgtttttctttgttagtacat

SEQ ID NO: 129982 - DNA, 25 bp, Canis familiaris
gatttgttttctgtttatcctggaa

SEQ ID NO: 129983 - DNA, 25 bp, Canis familiaris
gatttcttttctttatgtgatgcca

SEQ ID NO: 129984 - DNA, 25 bp, Canis familiaris
gatttcctttcatttgatggtactg

SEQ ID NO: 129985 - DNA, 25 bp, Canis familiaris
gatttctctgttcatcgtattacat

SEQ ID NO: 129986 - DNA, 25 bp, Canis familiaris
gatttctctgttcatttagactatt

SEQ ID NO: 129987 - DNA, 25 bp, Canis familiaris
gattttcatctcggctttgagactt

SEQ ID NO: 129988 - DNA, 25 bp, Canis familiaris
gattaactcataggcttcaggactt

SEQ ID NO: 129989 - DNA, 25 bp, Canis familiaris
gttacgctcatcttgaaatgggatt

SEQ ID NO: 129990 - DNA, 25 bp, Canis familiaris
gattccggatcgcaacatgggttaa

SEQ ID NO: 129991 - DNA, 25 bp, Canis familiaris
gattctactgggcgacgagggccaa

SEQ ID NO: 129992 - DNA, 25 bp, Canis familiaris
gattttttggctgactggcgagaaa

SEQ ID NO: 129993 - DNA, 25 bp, Canis familiaris
gattttattcgcaccattgcggtcg

SEQ ID NO: 129994 - DNA, 25 bp, Canis familiaris
gattattttctcaccattacactgg

SEQ ID NO: 129995 - DNA, 25 bp, Canis familiaris
gattatatccttctgtttgacaatg

SEQ ID NO: 129996 - DNA, 25 bp, Canis familiaris
gatttatacttgctgtgcttgacaa

SEQ ID NO: 129997 - DNA, 25 bp, Canis familiaris
gatttctcttgttctgtgttaatga

SEQ ID NO: 129998 - DNA, 25 bp, Canis familiaris
gatttgttattttcatattgagatg

SEQ ID NO: 129999 - DNA, 25 bp, Canis familiaris
gatttgttaaggacatacttcataa

SEQ ID NO: 130000 - DNA, 25 bp, Canis familiaris
gattatgtaaatgggctttctggaa

SEQ ID NO: 130001 - DNA, 25 bp, Canis familiaris
gttgagaaactcactttagacaatg

SEQ ID NO: 130002 - DNA, 25 bp, Canis familiaris
gattaaatttctcttctggaaacca

SEQ ID NO: 130003 - DNA, 25 bp, Canis familiaris
gattcccatttcaacaccaggaaac

SEQ ID NO: 130004 - DNA, 25 bp, Canis familiaris
gattgcccttgtcaactcagtcaac

SEQ ID NO: 130005 - DNA, 25 bp, Canis familiaris
gattccctgttcctactagtatcag

SEQ ID NO: 130006 - DNA, 25 bp, Canis familiaris
gattacctgcttggctattattaaa

SEQ ID NO: 130007 - DNA, 25 bp, Canis familiaris
gatttgattttggtcattcttcaga

SEQ ID NO: 130008 - DNA, 25 bp, Canis familiaris
gattttattcatctattcacgagag

SEQ ID NO: 130009 - DNA, 25 bp, Canis familiaris
gattttcatatcaacattttctaac

SEQ ID NO: 130010 - DNA, 25 bp, Canis familiaris
gattattcttgctgctgttattaac

SEQ ID NO: 130011 - DNA, 25 bp, Canis familiaris
gatttgtctatattggttttatcca

SEQ ID NO: 130012 - DNA, 25 bp, Canis familiaris
gattcatggcttgtgggtttcttca

SEQ ID NO: 130013 - DNA, 25 bp, Canis familiaris
gattctgacttagaggcgttcagtc

SEQ ID NO: 130014 - DNA, 25 bp, Canis familiaris
gattgtgactgtgacatggcctcgg

SEQ ID NO: 130015 - DNA, 25 bp, Canis familiaris
gattctactgcttacattaccgtga

SEQ ID NO: 130016 - DNA, 25 bp, Canis familiaris
gatttcactgtattgattcagccag

SEQ ID NO: 130017 - DNA, 25 bp, Canis familiaris
gattatcttgattgtgttagttgta

SEQ ID NO: 130018 - DNA, 25 bp, Canis familiaris
gatttctcattttgttagttgtaac

SEQ ID NO: 130019 - DNA, 25 bp, Canis familiaris
gatttctatctttggtacacttttt

SEQ ID NO: 130020 - DNA, 25 bp, Canis familiaris
gatttgtactgtgggtgacgttgtc

SEQ ID NO: 130021 - DNA, 25 bp, Canis familiaris
gattcttgaatgtgtgctccgttct

SEQ ID NO: 130022 - DNA, 25 bp, Canis familiaris
gattttcatagctgttgtccattct

SEQ ID NO: 130023 - DNA, 25 bp, Canis familiaris
gattatgtccatttgtctgtccatt

SEQ ID NO: 130024 - DNA, 25 bp, Canis familiaris
gattagacctcatgtctctacattc

SEQ ID NO: 130025 - DNA, 25 bp, Canis familiaris
gattggcatactccgtcagttagtc

SEQ ID NO: 130026 - DNA, 25 bp, Canis familiaris
gatttgacagggcctgcacttcagt

SEQ ID NO: 130027 - DNA, 25 bp, Canis familiaris
gattcaacaaggctctctagctgtc

SEQ ID NO: 130028 - DNA, 25 bp, Canis familiaris
gattcagccagtagtgataaagcgt

SEQ ID NO: 130029 - DNA, 25 bp, Canis familiaris
gattatctcagaatgcattaagcga

SEQ ID NO: 130030 - DNA, 25 bp, Canis familiaris
gattgcattaattgatacacagata

SEQ ID NO: 130031 - DNA, 25 bp, Canis familiaris
gattcttcatgttgataggctgcac

SEQ ID NO: 130032 - DNA, 25 bp, Canis familiaris
gatttccttggatgatgctggcaaa

SEQ ID NO: 130033 - DNA, 25 bp, Canis familiaris
gattttctcaggaatttgaaatagg

SEQ ID NO: 130034 - DNA, 25 bp, Canis familiaris
gattcatttaggccattaacattca

SEQ ID NO: 130035 - DNA, 25 bp, Canis familiaris
gattagcatgtaacctgtaatatta

SEQ ID NO: 130036 - DNA, 25 bp, Canis familiaris
gattcaatttcagcttaattctttg

SEQ ID NO: 130037 - DNA, 25 bp, Canis familiaris
gattccatggtctgttaggttcttt

SEQ ID NO: 130038 - DNA, 25 bp, Canis familiaris
gatttcaagccaagtaatacatttt

SEQ ID NO: 130039 - DNA, 25 bp, Canis familiaris
gattttaggcaagttacacagtgtc

SEQ ID NO: 130040 - DNA, 25 bp, Canis familiaris
gttgattccccagttcacaattggc

SEQ ID NO: 130041 - DNA, 25 bp, Canis familiaris
gttggtgcccctaaacagttgtata

SEQ ID NO: 130042 - DNA, 25 bp, Canis familiaris
gattgagagccgtattcaccgattg

SEQ ID NO: 130043 - DNA, 25 bp, Canis familiaris
gattcgacttctttccaagtgtgat

SEQ ID NO: 130044 - DNA, 25 bp, Canis familiaris
gatttgcctttaaccagactgctat

SEQ ID NO: 130045 - DNA, 25 bp, Canis familiaris
gatttgacaactaagcctcactcta

SEQ ID NO: 130046 - DNA, 25 bp, Canis familiaris
gatttgaacctttgctttcactcgg

SEQ ID NO: 130047 - DNA, 25 bp, Canis familiaris
gatttaactttgttttcttcatgac

SEQ ID NO: 130048 - DNA, 25 bp, Canis familiaris
gatttgacgttatccttttatgaca

SEQ ID NO: 130049 - DNA, 25 bp, Canis familiaris
gatttacgataaactttggtatgtc

SEQ ID NO: 130050 - DNA, 25 bp, Canis familiaris
gatttcaggttaactctttgtatgt

SEQ ID NO: 130051 - DNA, 25 bp, Canis familiaris
gatttcagatggactaattttgttt

SEQ ID NO: 130052 - DNA, 25 bp, Canis familiaris
gttgataatgctcggaatttttttc

SEQ ID NO: 130053 - DNA, 25 bp, Canis familiaris
gattatgtgatggagtgaaagattt

SEQ ID NO: 130054 - DNA, 25 bp, Canis familiaris
gatttctgatgaccatgacacctat

SEQ ID NO: 130055 - DNA, 25 bp, Canis familiaris
gatttgcatgtgttttccctgagag

SEQ ID NO: 130056 - DNA, 25 bp, Canis familiaris
gatttcatgcttgttctggtgtcag

SEQ ID NO: 130057 - DNA, 25 bp, Canis familiaris
gatttgctgctgtaaggctggctgt

SEQ ID NO: 130058 - DNA, 25 bp, Canis familiaris
gatttcgatgtctgtgtggctgttg

SEQ ID NO: 130059 - DNA, 25 bp, Canis familiaris
gatttaatgctctatggttgctgtt

SEQ ID NO: 130060 - DNA, 25 bp, Canis familiaris
gatttttcatttctgtgcgttttct

SEQ ID NO: 130061 - DNA, 25 bp, Canis familiaris
gatttctttttcttgtttatgcttt

SEQ ID NO: 130062 - DNA, 25 bp, Canis familiaris
gatttcttttgctttgttttctatt

SEQ ID NO: 130063 - DNA, 25 bp, Canis familiaris
gattttctttgtaactgtcctctat

SEQ ID NO: 130064 - DNA, 25 bp, Canis familiaris
gatttatttatgatcagcctactaa

SEQ ID NO: 130065 - DNA, 25 bp, Canis familiaris
gatttatcggacacaccttctgagt

SEQ ID NO: 130066 - DNA, 25 bp, Canis familiaris
gatttactcttcacacgatgtaggt

SEQ ID NO: 130067 - DNA, 25 bp, Canis familiaris
gatttaatcattgccacagtgtttc

SEQ ID NO: 130068 - DNA, 25 bp, Canis familiaris
gatttgttcattgcgacactgtttg

SEQ ID NO: 130069 - DNA, 25 bp, Canis familiaris
gatttgctccaatttactctgtttt

SEQ ID NO: 130070 - DNA, 25 bp, Canis familiaris
gattttgccaatactatgctctatg

SEQ ID NO: 130071 - DNA, 25 bp, Canis familiaris
gattagcccagaactgtcctggact

SEQ ID NO: 130072 - DNA, 25 bp, Canis familiaris
gattcagacgagaggctaggcagac

SEQ ID NO: 130073 - DNA, 25 bp, Canis familiaris
gattatgattcgatgctctagccgt

SEQ ID NO: 130074 - DNA, 25 bp, Canis familiaris
gattatagattgagtccaccgtcat

SEQ ID NO: 130075 - DNA, 25 bp, Canis familiaris
gattatggtacttacccctgtgcag

SEQ ID NO: 130076 - DNA, 25 bp, Canis familiaris
gatttcggtctatccaagatcatgg

SEQ ID NO: 130077 - DNA, 25 bp, Canis familiaris
gatttcggtttcacaaatggcagac

SEQ ID NO: 130078 - DNA, 25 bp, Canis familiaris
gattactggcttctaaatgtgttac

SEQ ID NO: 130079 - DNA, 25 bp, Canis familiaris
gattactgaattgtaggatagctct

SEQ ID NO: 130080 - DNA, 25 bp, Canis familiaris
gattttgaagtcatagcctacctac

SEQ ID NO: 130081 - DNA, 25 bp, Canis familiaris
gattttagacctaatggctcccttc

SEQ ID NO: 130082 - DNA, 25 bp, Canis familiaris
gatttaaacattttagcacccctca

SEQ ID NO: 130083 - DNA, 25 bp, Canis familiaris
gattagacaaatttaggcctccact

SEQ ID NO: 130084 - DNA, 25 bp, Canis familiaris
gatttcaccaattaaccttgccatc

SEQ ID NO: 130085 - DNA, 25 bp, Canis familiaris
gatttatctcaccgaacctgtggac

SEQ ID NO: 130086 - DNA, 25 bp, Canis familiaris
gatttttcaccctaaatatgctagc

SEQ ID NO: 130087 - DNA, 25 bp, Canis familiaris
gatttctaccaggctatgaatcatg

SEQ ID NO: 130088 - DNA, 25 bp, Canis familiaris
gattttactcatccatgtgaccatg

SEQ ID NO: 130089 - DNA, 25 bp, Canis familiaris
gattttcagccatttatgacgcata

SEQ ID NO: 130090 - DNA, 25 bp, Canis familiaris
gattttaccttttgattgctgcaga

SEQ ID NO: 130091 - DNA, 25 bp, Canis familiaris
gattttgcactcaattttagccata

SEQ ID NO: 130092 - DNA, 25 bp, Canis familiaris
gattatgctctcttgatctgtatac

SEQ ID NO: 130093 - DNA, 25 bp, Canis familiaris
gattatgatgtgttccatgtatggc

SEQ ID NO: 130094 - DNA, 25 bp, Canis familiaris
gattaatgaagtagatgctgatgga

SEQ ID NO: 130095 - DNA, 25 bp, Canis familiaris
gattagaggcagtgttggcagcatt

SEQ ID NO: 130096 - DNA, 25 bp, Canis familiaris
gattatggagactgtattgtgctta

SEQ ID NO: 130097 - DNA, 25 bp, Canis familiaris
gattataagctccgcatagtgttaa

SEQ ID NO: 130098 - DNA, 25 bp, Canis familiaris
gattttgagctccctagtcttagaa

SEQ ID NO: 130099 - DNA, 25 bp, Canis familiaris
gatttttgtcccattgttgcagaag

SEQ ID NO: 130100 - DNA, 25 bp, Canis familiaris
gattttcttcctttgtgtgtgaaag

SEQ ID NO: 130101 - DNA, 25 bp, Canis familiaris
gattttattcctatggcattgtaga

SEQ ID NO: 130102 - DNA, 25 bp, Canis familiaris
gattttaaattcatgtgatcttcag

SEQ ID NO: 130103 - DNA, 25 bp, Canis familiaris
gattatgctaattttcttattctaa

SEQ ID NO: 130104 - DNA, 25 bp, Canis familiaris
gatttcatttttactttcttgcatg

SEQ ID NO: 130105 - DNA, 25 bp, Canis familiaris
gatttttattatatatacttgctct

SEQ ID NO: 130106 - DNA, 25 bp, Canis familiaris
gatttttgtcatatttctctcgtta

SEQ ID NO: 130107 - DNA, 25 bp, Canis familiaris
gatttcttgtctgtttcatgtgtct

SEQ ID NO: 130108 - DNA, 25 bp, Canis familiaris
gatttctgtttgttttcatgtcttc

SEQ ID NO: 130109 - DNA, 25 bp, Canis familiaris
gatttcattttgtctgctgtcagct

SEQ ID NO: 130110 - DNA, 25 bp, Canis familiaris
gatttcagaatgtcatctcttcaat

SEQ ID NO: 130111 - DNA, 25 bp, Canis familiaris
gatttcagcaattgcctctataggc

SEQ ID NO: 130112 - DNA, 25 bp, Canis familiaris
gatttcataatactgccaatactca

SEQ ID NO: 130113 - DNA, 25 bp, Canis familiaris
gattctcatatattgtctagttcta

SEQ ID NO: 130114 - DNA, 25 bp, Canis familiaris
gattctcagagcttccagaacttga

SEQ ID NO: 130115 - DNA, 25 bp, Canis familiaris
gttgtatgaaccttgagacttgggg

SEQ ID NO: 130116 - DNA, 25 bp, Canis familiaris
gttagataatatttggcaccggggg

SEQ ID NO: 130117 - DNA, 25 bp, Canis familiaris
gattagctttatttgctcaccgtga

SEQ ID NO: 130118 - DNA, 25 bp, Canis familiaris
gattatcttctatatcttcaggcgc

SEQ ID NO: 130119 - DNA, 25 bp, Canis familiaris
gatttttcaatgtatctcaaggatg

SEQ ID NO: 130120 - DNA, 25 bp, Canis familiaris
gatttcttcttctattcattggatt

SEQ ID NO: 130121 - DNA, 25 bp, Canis familiaris
gattttttcctgtacatttgatgtt

SEQ ID NO: 130122 - DNA, 25 bp, Canis familiaris
gattttcattctcgaacactgtata

SEQ ID NO: 130123 - DNA, 25 bp, Canis familiaris
gattttcagctgcatacccgtatac

SEQ ID NO: 130124 - DNA, 25 bp, Canis familiaris
gattttcctcagtacccctgagaaa

SEQ ID NO: 130125 - DNA, 25 bp, Canis familiaris
gatttttctagttaccctgcttaga

SEQ ID NO: 130126 - DNA, 25 bp, Canis familiaris
gattagtctctagtaaaccctatta

SEQ ID NO: 130127 - DNA, 25 bp, Canis familiaris
gtgcgattttatgaaggctccgagt

SEQ ID NO: 130128 - DNA, 25 bp, Canis familiaris
gattagttgtgtgaaggtcaaggaa

SEQ ID NO: 130129 - DNA, 25 bp, Canis familiaris
gattagctggaaagcacaggtctac

SEQ ID NO: 130130 - DNA, 25 bp, Canis familiaris
gattcagtggaaagtgcgtgatcaa

SEQ ID NO: 130131 - DNA, 25 bp, Canis familiaris
gattagtgagccgtatcgatgccac

SEQ ID NO: 130132 - DNA, 25 bp, Canis familiaris
gattgcaaagtggttcatgattcat

SEQ ID NO: 130133 - DNA, 25 bp, Canis familiaris
gattagactgaggtcatagttttag

SEQ ID NO: 130134 - DNA, 25 bp, Canis familiaris
gattatgacaatgactagtctctta

SEQ ID NO: 130135 - DNA, 25 bp, Canis familiaris
gattagataatctctgttcctttta

SEQ ID NO: 130136 - DNA, 25 bp, Canis familiaris
gattagtattgctcttactgttttt

SEQ ID NO: 130137 - DNA, 25 bp, Canis familiaris
gattatttggcatctaagcgttcat

SEQ ID NO: 130138 - DNA, 25 bp, Canis familiaris
gattatttggcatcaaaagccttca

SEQ ID NO: 130139 - DNA, 25 bp, Canis familiaris
gattttctgtgctacctgaagacat

SEQ ID NO: 130140 - DNA, 25 bp, Canis familiaris
gattatttgtcatcatcgaacatat

SEQ ID NO: 130141 - DNA, 25 bp, Canis familiaris
gattttgtgtatccagagatcagtt

SEQ ID NO: 130142 - DNA, 25 bp, Canis familiaris
gatttttgaagcaactcatcgattg

SEQ ID NO: 130143 - DNA, 25 bp, Canis familiaris
gattccttatcgaggacgattgcac

SEQ ID NO: 130144 - DNA, 25 bp, Canis familiaris
gatttttacagagggggctgtctcc

SEQ ID NO: 130145 - DNA, 25 bp, Canis familiaris
gatttttccacaggatggacgcctc

SEQ ID NO: 130146 - DNA, 25 bp, Canis familiaris
gatttttgacacgtgatgtacatcc

SEQ ID NO: 130147 - DNA, 25 bp, Canis familiaris
gattgattggacctgatggagaacc

SEQ ID NO: 130148 - DNA, 25 bp, Canis familiaris
gattcttgacacttcagtaaacctt

SEQ ID NO: 130149 - DNA, 25 bp, Canis familiaris
gttctaatacttggaaatgaccttc

SEQ ID NO: 130150 - DNA, 25 bp, Canis familiaris
gttataatcacaaggaatttcccat

SEQ ID NO: 130151 - DNA, 25 bp, Canis familiaris
gttctaatcacttgggatttaccag

SEQ ID NO: 130152 - DNA, 25 bp, Canis familiaris
gattccaatatcagggttttgcccc

SEQ ID NO: 130153 - DNA, 25 bp, Canis familiaris
gattcaccagtcagtggatccttgc

SEQ ID NO: 130154 - DNA, 25 bp, Canis familiaris
gattaccatgattgaggcagtcctg

SEQ ID NO: 130155 - DNA, 25 bp, Canis familiaris
gattacacctgaggaagtccagtaa

SEQ ID NO: 130156 - DNA, 25 bp, Canis familiaris
gattaactcattgacacacacagta

SEQ ID NO: 130157 - DNA, 25 bp, Canis familiaris
gatttaccagtggtgatctcagctg

SEQ ID NO: 130158 - DNA, 25 bp, Canis familiaris
gatttcatccagtgtgtcatgagcg

SEQ ID NO: 130159 - DNA, 25 bp, Canis familiaris
gattatctctagttgctgttgggct

SEQ ID NO: 130160 - DNA, 25 bp, Canis familiaris
gatttttagtagtcttggtcatctc

SEQ ID NO: 130161 - DNA, 25 bp, Canis familiaris
gattttggagcaaacttccacactg

SEQ ID NO: 130162 - DNA, 25 bp, Canis familiaris
gatttatggagaaatttcctcttcc

SEQ ID NO: 130163 - DNA, 25 bp, Canis familiaris
gatttcttgaattcatttccacatt

SEQ ID NO: 130164 - DNA, 25 bp, Canis familiaris
gatttcttgaatagtatacctgcac

SEQ ID NO: 130165 - DNA, 25 bp, Canis familiaris
gatttcttcaatgatatcaccttca

SEQ ID NO: 130166 - DNA, 25 bp, Canis familiaris
gatttcttcagtgggtatcttatgc

SEQ ID NO: 130167 - DNA, 25 bp, Canis familiaris
gatttcttccaccagatatgtctct

SEQ ID NO: 130168 - DNA, 25 bp, Canis familiaris
gattctccattgtccagaatgcctt

SEQ ID NO: 130169 - DNA, 25 bp, Canis familiaris
gattcctattggggacgactgctag

SEQ ID NO: 130170 - DNA, 25 bp, Canis familiaris
gattcctatgtgggcgacgaggccc

SEQ ID NO: 130171 - DNA, 25 bp, Canis familiaris
gattccatttgctgtacgaagtgcc

SEQ ID NO: 130172 - DNA, 25 bp, Canis familiaris
gattccagttgctgcgacagtacct

SEQ ID NO: 130173 - DNA, 25 bp, Canis familiaris
gattcctttctctgaagttgtcttc

SEQ ID NO: 130174 - DNA, 25 bp, Canis familiaris
gattctatacccaaggcactttttt

SEQ ID NO: 130175 - DNA, 25 bp, Canis familiaris
gattcaataccaaccagggtgtttt

SEQ ID NO: 130176 - DNA, 25 bp, Canis familiaris
gattacaaccaccaaggagtctcgt

SEQ ID NO: 130177 - DNA, 25 bp, Canis familiaris
gattccatcctagcagagggacttt

SEQ ID NO: 130178 - DNA, 25 bp, Canis familiaris
gattccaccattagcagagccaaca

SEQ ID NO: 130179 - DNA, 25 bp, Canis familiaris
gatttcactcatatgcagcatctaa

SEQ ID NO: 130180 - DNA, 25 bp, Canis familiaris
gatttcactcatatatactcttcag

SEQ ID NO: 130181 - DNA, 25 bp, Canis familiaris
gatttcatatgctgtattcttcaag

SEQ ID NO: 130182 - DNA, 25 bp, Canis familiaris
gatttacataccgatgtctccacag

SEQ ID NO: 130183 - DNA, 25 bp, Canis familiaris
gatttcaataccaatttgctaccaa

SEQ ID NO: 130184 - DNA, 25 bp, Canis familiaris
gattctaattgcagctgttgtacca

SEQ ID NO: 130185 - DNA, 25 bp, Canis familiaris
gattcggcaccagggattccagccg

SEQ ID NO: 130186 - DNA, 25 bp, Canis familiaris
gattgcggtacggtacccatgactg

SEQ ID NO: 130187 - DNA, 25 bp, Canis familiaris
gattaggttcctgactacatatatc

SEQ ID NO: 130188 - DNA, 25 bp, Canis familiaris
gattatggtccggaggaccagagac

SEQ ID NO: 130189 - DNA, 25 bp, Canis familiaris
gattctgagttagtagtgacccaaa

SEQ ID NO: 130190 - DNA, 25 bp, Canis familiaris
gattctggtataaccgaaccaagat

SEQ ID NO: 130191 - DNA, 25 bp, Canis familiaris
gattctgagtatcctccgaattccg

SEQ ID NO: 130192 - DNA, 25 bp, Canis familiaris
gattctggattcccgaaggactcgc

SEQ ID NO: 130193 - DNA, 25 bp, Canis familiaris
gattcttccccacatatgtgactca

SEQ ID NO: 130194 - DNA, 25 bp, Canis familiaris
gattttcctcatgtactgtgatgtc

SEQ ID NO: 130195 - DNA, 25 bp, Canis familiaris
gatttttgtcatattctctgttaaa

SEQ ID NO: 130196 - DNA, 25 bp, Canis familiaris
gattttattcatatgacattgttaa

SEQ ID NO: 130197 - DNA, 25 bp, Canis familiaris
gattttatattcatgaagttttcac

SEQ ID NO: 130198 - DNA, 25 bp, Canis familiaris
gattttgctttcatgacagccattt

SEQ ID NO: 130199 - DNA, 25 bp, Canis familiaris
gatttactcctcatacgtcaatatt

SEQ ID NO: 130200 - DNA, 25 bp, Canis familiaris
gatttactgactataagcaagacaa

SEQ ID NO: 130201 - DNA, 25 bp, Canis familiaris
gattttctactgtaacaaaagctaa

SEQ ID NO: 130202 - DNA, 25 bp, Canis familiaris
gatttactgcctgaacatctgaagt

SEQ ID NO: 130203 - DNA, 25 bp, Canis familiaris
gatttcacatgtgtcccacgaggtc

SEQ ID NO: 130204 - DNA, 25 bp, Canis familiaris
gatttacgatttcctacatgaccgc

SEQ ID NO: 130205 - DNA, 25 bp, Canis familiaris
gattatgaaatttctcctcaaactc

SEQ ID NO: 130206 - DNA, 25 bp, Canis familiaris
gatttcaaatctttcctgctcaagg

SEQ ID NO: 130207 - DNA, 25 bp, Canis familiaris
gattctcccttattcctgggagcca

SEQ ID NO: 130208 - DNA, 25 bp, Canis familiaris
gattatccggaagcctgttgactgt

SEQ ID NO: 130209 - DNA, 25 bp, Canis familiaris
gattccctgacaattcttttgcact

SEQ ID NO: 130210 - DNA, 25 bp, Canis familiaris
gattctaaactttgctgtatacact

SEQ ID NO: 130211 - DNA, 25 bp, Canis familiaris
gattctaaacttcctgtgactctaa

SEQ ID NO: 130212 - DNA, 25 bp, Canis familiaris
gattttaactgtcttcacctgattc

SEQ ID NO: 130213 - DNA, 25 bp, Canis familiaris
gattttaactggcatccacgcacat

SEQ ID NO: 130214 - DNA, 25 bp, Canis familiaris
gattgggtacatagcgttccgaccg

SEQ ID NO: 130215 - DNA, 25 bp, Canis familiaris
gattaggtgaaccctcatcggcacc

SEQ ID NO: 130216 - DNA, 25 bp, Canis familiaris
gattgagggggcttgtcatagtacg

SEQ ID NO: 130217 - DNA, 25 bp, Canis familiaris
gattcggtgcagcacattacttacc

SEQ ID NO: 130218 - DNA, 25 bp, Canis familiaris
gattcgttcgaactttcgtcacgtc

SEQ ID NO: 130219 - DNA, 25 bp, Canis familiaris
gattcttccgggcctgaagtacgtc

SEQ ID NO: 130220 - DNA, 25 bp, Canis familiaris
gattctgtgccaggggtaattaatg

SEQ ID NO: 130221 - DNA, 25 bp, Canis familiaris
gattgcattctggctgaggtgactg

SEQ ID NO: 130222 - DNA, 25 bp, Canis familiaris
gattactatcaccagcggtctacat

SEQ ID NO: 130223 - DNA, 25 bp, Canis familiaris
gattacttcagcctcatggactgta

SEQ ID NO: 130224 - DNA, 25 bp, Canis familiaris
gattactaccagcgtcactatgacg

SEQ ID NO: 130225 - DNA, 25 bp, Canis familiaris
gattactaccagcgtcactatgacg

SEQ ID NO: 130226 - DNA, 25 bp, Canis familiaris
gattactaccagcgtcactatgacg

SEQ ID NO: 130227 - DNA, 25 bp, Canis familiaris
gattaccccaggaatgccaaattga

SEQ ID NO: 130228 - DNA, 25 bp, Canis familiaris
gattagacccggaatgtttataagg

SEQ ID NO: 130229 - DNA, 25 bp, Canis familiaris
gattatactccatgttgttttccag

SEQ ID NO: 130230 - DNA, 25 bp, Canis familiaris
gattaacttattctgacttgctcca

SEQ ID NO: 130231 - DNA, 25 bp, Canis familiaris
gattagccttttatcacgctttcat

SEQ ID NO: 130232 - DNA, 25 bp, Canis familiaris
gatttatcctttatctttttctctc

SEQ ID NO: 130233 - DNA, 25 bp, Canis familiaris
gatttatttgtcagtcttcttcttt

SEQ ID NO: 130234 - DNA, 25 bp, Canis familiaris
gattctaaggtatcttttttatttg

SEQ ID NO: 130235 - DNA, 25 bp, Canis familiaris
gatttaccagattttagctttgtat

SEQ ID NO: 130236 - DNA, 25 bp, Canis familiaris
gattttggcagtttattttttgata

SEQ ID NO: 130237 - DNA, 25 bp, Canis familiaris
gattagtgcctttttatttttgtat

SEQ ID NO: 130238 - DNA, 25 bp, Canis familiaris
gatttatcccatatgctattgtttg

SEQ ID NO: 130239 - DNA, 25 bp, Canis familiaris
gattatatgtccacctatcttaagt

SEQ ID NO: 130240 - DNA, 25 bp, Canis familiaris
gattatttcccactctagggaagat

SEQ ID NO: 130241 - DNA, 25 bp, Canis familiaris
gattttctgcctctctttggagaga

SEQ ID NO: 130242 - DNA, 25 bp, Canis familiaris
gatttttgccggacctttgagcaca

SEQ ID NO: 130243 - DNA, 25 bp, Canis familiaris
gatttttctgcatgtgcctgttggc

SEQ ID NO: 130244 - DNA, 25 bp, Canis familiaris
gttgaattccaagtccgttatgccc

SEQ ID NO: 130245 - DNA, 25 bp, Canis familiaris
gattccttcaaagcaagaatactcc

SEQ ID NO: 130246 - DNA, 25 bp, Canis familiaris
gattctcctgaaattaagaaacggc

SEQ ID NO: 130247 - DNA, 25 bp, Canis familiaris
gattatccatgactttcagatgaaa

SEQ ID NO: 130248 - DNA, 25 bp, Canis familiaris
gattaccgactttcaggtgtctgtc

SEQ ID NO: 130249 - DNA, 25 bp, Canis familiaris
gattacaggcacatctcaggctgac

SEQ ID NO: 130250 - DNA, 25 bp, Canis familiaris
gattccagcccttgtcagtgctgaa

SEQ ID NO: 130251 - DNA, 25 bp, Canis familiaris
gattctgagcgctttctcagtggga

SEQ ID NO: 130252 - DNA, 25 bp, Canis familiaris
gattcgacgcaaacacaagttggtt

SEQ ID NO: 130253 - DNA, 25 bp, Canis familiaris
gattttccaatcaaagaactgggct

SEQ ID NO: 130254 - DNA, 25 bp, Canis familiaris
gattttccaatgttgaacccgagat

SEQ ID NO: 130255 - DNA, 25 bp, Canis familiaris
gattttgctcactggaactgccaac

SEQ ID NO: 130256 - DNA, 25 bp, Canis familiaris
gattcatggctcagggagtcggcat

SEQ ID NO: 130257 - DNA, 25 bp, Canis familiaris
gattctggcctcaggatggagcctt

SEQ ID NO: 130258 - DNA, 25 bp, Canis familiaris
gattatggccacttggatcacctct

SEQ ID NO: 130259 - DNA, 25 bp, Canis familiaris
gattatgccccaatggaaagtcttt

SEQ ID NO: 130260 - DNA, 25 bp, Canis familiaris
gattcatcccaactggaaaaatgtt

SEQ ID NO: 130261 - DNA, 25 bp, Canis familiaris
gattcatcccacctgggaaaatgtt

SEQ ID NO: 130262 - DNA, 25 bp, Canis familiaris
gattctctctagccatttgaaattg

SEQ ID NO: 130263 - DNA, 25 bp, Canis familiaris
gattttctcagaatttgaagtagga

SEQ ID NO: 130264 - DNA, 25 bp, Canis familiaris
gattatttgagatgttgagagtgag

SEQ ID NO: 130265 - DNA, 25 bp, Canis familiaris
gattttaatatccttgagcctgggc

SEQ ID NO: 130266 - DNA, 25 bp, Canis familiaris
gttgtccctccgttagtcatgggac

SEQ ID NO: 130267 - DNA, 25 bp, Canis familiaris
gattctttcccatttattctgggaa

SEQ ID NO: 130268 - DNA, 25 bp, Canis familiaris
gatttttcttttgttcatgtggaat

SEQ ID NO: 130269 - DNA, 25 bp, Canis familiaris
gattttgttcatctttgtatgtgga

SEQ ID NO: 130270 - DNA, 25 bp, Canis familiaris
gattttgttaaggacagtaggagga

SEQ ID NO: 130271 - DNA, 25 bp, Canis familiaris
gattttgttaggcagctgtggggtg

SEQ ID NO: 130272 - DNA, 25 bp, Canis familiaris
gatttttcttggcactgggttgatt

SEQ ID NO: 130273 - DNA, 25 bp, Canis familiaris
gttgctttgttgtgtagggtttcct

SEQ ID NO: 130274 - DNA, 25 bp, Canis familiaris
gattctctttttgaaaggtgtttct

SEQ ID NO: 130275 - DNA, 25 bp, Canis familiaris
gatttttttccctaagagattctct

SEQ ID NO: 130276 - DNA, 25 bp, Canis familiaris
gattttctctttatcaatggattcc

SEQ ID NO: 130277 - DNA, 25 bp, Canis familiaris
gattttcgcttctaacaatgtatat

SEQ ID NO: 130278 - DNA, 25 bp, Canis familiaris
gattcttcctgttaactagtcattt

SEQ ID NO: 130279 - DNA, 25 bp, Canis familiaris
gattcttccagttggactacgaatt

SEQ ID NO: 130280 - DNA, 25 bp, Canis familiaris
gattcgtcaacttgtgactttggtt

SEQ ID NO: 130281 - DNA, 25 bp, Canis familiaris
gattagacaaaggtcactgtgtttt

SEQ ID NO: 130282 - DNA, 25 bp, Canis familiaris
gattaaacaagttcctgctcctgtc

SEQ ID NO: 130283 - DNA, 25 bp, Canis familiaris
gattaagaccaattccccacagtgg

SEQ ID NO: 130284 - DNA, 25 bp, Canis familiaris
gattaagacctacccatggcaatgt

SEQ ID NO: 130285 - DNA, 25 bp, Canis familiaris
gattaagagattatccatgactttc

SEQ ID NO: 130286 - DNA, 25 bp, Canis familiaris
gattttgaatatcactgtatctttt

SEQ ID NO: 130287 - DNA, 25 bp, Canis familiaris
gatttttatatttcatgttcttagt

SEQ ID NO: 130288 - DNA, 25 bp, Canis familiaris
gattttctattttgcatctgttgta

SEQ ID NO: 130289 - DNA, 25 bp, Canis familiaris
gatttttacttatctgttgctacac

SEQ ID NO: 130290 - DNA, 25 bp, Canis familiaris
gatttttctttattcatttatacac

SEQ ID NO: 130291 - DNA, 25 bp, Canis familiaris
gattttttttgagtaattctagcct

SEQ ID NO: 130292 - DNA, 25 bp, Canis familiaris
gattttgtgtttgtctcatttcagt

SEQ ID NO: 130293 - DNA, 25 bp, Canis familiaris
gattttgtgctgagcccatagttca

SEQ ID NO: 130294 - DNA, 25 bp, Canis familiaris
gattttggtctagccagagacatca

SEQ ID NO: 130295 - DNA, 25 bp, Canis familiaris
gattcttggctcgtgactggagtaa

SEQ ID NO: 130296 - DNA, 25 bp, Canis familiaris
gattctatggattctagggataata

SEQ ID NO: 130297 - DNA, 25 bp, Canis familiaris
gttgctagcagaaccaaggaatttt

SEQ ID NO: 130298 - DNA, 25 bp, Canis familiaris
gttctacaatgtggccgaggacttt

SEQ ID NO: 130299 - DNA, 25 bp, Canis familiaris
gttccaaacatccggcggagtgttt

SEQ ID NO: 130300 - DNA, 25 bp, Canis familiaris
gattcacacgtgtggggttgtgttt

SEQ ID NO: 130301 - DNA, 25 bp, Canis familiaris
gattcccaggggaggcttatttgaa

SEQ ID NO: 130302 - DNA, 25 bp, Canis familiaris
gattccccagaagtggagcttttct

SEQ ID NO: 130303 - DNA, 25 bp, Canis familiaris
gattccccgaatgtgtcttactata

SEQ ID NO: 130304 - DNA, 25 bp, Canis familiaris
gattccccgaatggttccaacaaat

SEQ ID NO: 130305 - DNA, 25 bp, Canis familiaris
gattagattcggtcgttctggaaaa

SEQ ID NO: 130306 - DNA, 25 bp, Canis familiaris
gttgagattcaggggtcctgggatc

SEQ ID NO: 130307 - DNA, 25 bp, Canis familiaris
gattgacttcctgggcccaggagct

SEQ ID NO: 130308 - DNA, 25 bp, Canis familiaris
gattgcactgttattctcacagccc

SEQ ID NO: 130309 - DNA, 25 bp, Canis familiaris
gattccgatttgatgggcagccaat

SEQ ID NO: 130310 - DNA, 25 bp, Canis familiaris
gattcctggattctgggcacaaaat

SEQ ID NO: 130311 - DNA, 25 bp, Canis familiaris
gattcctgtggacatgctgtgcaaa

SEQ ID NO: 130312 - DNA, 25 bp, Canis familiaris
gattccctgggattcttcataagag

SEQ ID NO: 130313 - DNA, 25 bp, Canis familiaris
gattcccggtgtcttcaggagaaca

SEQ ID NO: 130314 - DNA, 25 bp, Canis familiaris
gattccccgtgttagagcagtttaa

SEQ ID NO: 130315 - DNA, 25 bp, Canis familiaris
gattccaacgcgtcatacaagtgta

SEQ ID NO: 130316 - DNA, 25 bp, Canis familiaris
gattctacaagcacactaaaatacc

SEQ ID NO: 130317 - DNA, 25 bp, Canis familiaris
gattcttcatactagcaaaacaaca

SEQ ID NO: 130318 - DNA, 25 bp, Canis familiaris
gattttatgatatgtagtaattgat

SEQ ID NO: 130319 - DNA, 25 bp, Canis familiaris
gattacggaatactagaactcagat

SEQ ID NO: 130320 - DNA, 25 bp, Canis familiaris
gattacagcctgaacaagaaccaca

SEQ ID NO: 130321 - DNA, 25 bp, Canis familiaris
gattacattcatataagaatccagc

SEQ ID NO: 130322 - DNA, 25 bp, Canis familiaris
gattcactatgtaaataccattcag

SEQ ID NO: 130323 - DNA, 25 bp, Canis familiaris
gattatgcggatcaaacctcatcaa

SEQ ID NO: 130324 - DNA, 25 bp, Canis familiaris
gattatggtgtggacaaccctgccc

SEQ ID NO: 130325 - DNA, 25 bp, Canis familiaris
gattcctgttgtgaagccagctgcc

SEQ ID NO: 130326 - DNA, 25 bp, Canis familiaris
gattcaccggatggcaacacggact

SEQ ID NO: 130327 - DNA, 25 bp, Canis familiaris
gattgagcggagtgcctccgaaccc

SEQ ID NO: 130328 - DNA, 25 bp, Canis familiaris
gattccagaggcttcctcgtaacca

SEQ ID NO: 130329 - DNA, 25 bp, Canis familiaris
gttcgatcaaggtctctagtaccca

SEQ ID NO: 130330 - DNA, 25 bp, Canis familiaris
gattctgaaacctaccagtgaccca

SEQ ID NO: 130331 - DNA, 25 bp, Canis familiaris
gattggaaacgaactcttccctgga

SEQ ID NO: 130332 - DNA, 25 bp, Canis familiaris
gttagaagggactcctgcccttgaa

SEQ ID NO: 130333 - DNA, 25 bp, Canis familiaris
gttccaggggagctactcccttgtc

SEQ ID NO: 130334 - DNA, 25 bp, Canis familiaris
gttccaggagggatgggcctttctt

SEQ ID NO: 130335 - DNA, 25 bp, Canis familiaris
gttgggaggaggtgggtttgacatt

SEQ ID NO: 130336 - DNA, 25 bp, Canis familiaris
gttgtgccgaggctgaccgttaact

SEQ ID NO: 130337 - DNA, 25 bp, Canis familiaris
gtttcccaggggcatctattgacct

SEQ ID NO: 130338 - DNA, 25 bp, Canis familiaris
gttttggaggggaagtaatgtcact

SEQ ID NO: 130339 - DNA, 25 bp, Canis familiaris
gttggtggatgcggcgggtaccata

SEQ ID NO: 130340 - DNA, 25 bp, Canis familiaris
gttgcctgatgatccggggaaataa

SEQ ID NO: 130341 - DNA, 25 bp, Canis familiaris
gattcagatgagtgccgctgcgtga

SEQ ID NO: 130342 - DNA, 25 bp, Canis familiaris
gattcagatagctctagcagtgagg

SEQ ID NO: 130343 - DNA, 25 bp, Canis familiaris
gattagcaatctctcatctgatcag

SEQ ID NO: 130344 - DNA, 25 bp, Canis familiaris
gattaggcatctcaactgtcaggga

SEQ ID NO: 130345 - DNA, 25 bp, Canis familiaris
gattagcctgtattctcttcagtgg

SEQ ID NO: 130346 - DNA, 25 bp, Canis familiaris
gattcactggtttcacttaggtctg

SEQ ID NO: 130347 - DNA, 25 bp, Canis familiaris
gattccttttcccctgagggatgtg

SEQ ID NO: 130348 - DNA, 25 bp, Canis familiaris
gattccatgtttgcggagggcaggg

SEQ ID NO: 130349 - DNA, 25 bp, Canis familiaris
gattcctggtgaagcactgtgggca

SEQ ID NO: 130350 - DNA, 25 bp, Canis familiaris
gattttgcgtcttgcagcagtggaa

SEQ ID NO: 130351 - DNA, 25 bp, Canis familiaris
gattttgcctctcccaatagaaata

SEQ ID NO: 130352 - DNA, 25 bp, Canis familiaris
gattattctcctcccaatatcaaat

SEQ ID NO: 130353 - DNA, 25 bp, Canis familiaris
gattttgtgcctgtgcagattgcaa

SEQ ID NO: 130354 - DNA, 25 bp, Canis familiaris
gattgtttgccggagacattacacg

SEQ ID NO: 130355 - DNA, 25 bp, Canis familiaris
gattttgtgcctggatatctctcct

SEQ ID NO: 130356 - DNA, 25 bp, Canis familiaris
gattttgtctgaagtactgccacta

SEQ ID NO: 130357 - DNA, 25 bp, Canis familiaris
gattgctcgtctaggtccttgaaac

SEQ ID NO: 130358 - DNA, 25 bp, Canis familiaris
gattgaagctcatgtgaatgttaaa

SEQ ID NO: 130359 - DNA, 25 bp, Canis familiaris
gattattgcttatttatgtgtaaca

SEQ ID NO: 130360 - DNA, 25 bp, Canis familiaris
gattattcttactggctgtctaccc

SEQ ID NO: 130361 - DNA, 25 bp, Canis familiaris
gattactctttggcagtggtcttcc

SEQ ID NO: 130362 - DNA, 25 bp, Canis familiaris
gattcactctttgcaggtttatatt

SEQ ID NO: 130363 - DNA, 25 bp, Canis familiaris
gattctcctttgtctaggtattttt

SEQ ID NO: 130364 - DNA, 25 bp, Canis familiaris
gattccttcttagagtttccatttc

SEQ ID NO: 130365 - DNA, 25 bp, Canis familiaris
gattccttccaagagatttacattt

SEQ ID NO: 130366 - DNA, 25 bp, Canis familiaris
gattgactttaacacttgtactcta

SEQ ID NO: 130367 - DNA, 25 bp, Canis familiaris
gattataataaacatgtctgaagtc

SEQ ID NO: 130368 - DNA, 25 bp, Canis familiaris
gattataattaggccttccatattg

SEQ ID NO: 130369 - DNA, 25 bp, Canis familiaris
gattcaactttggcttatctctgtt

SEQ ID NO: 130370 - DNA, 25 bp, Canis familiaris
gattcatgcagctgagcctttgttt

SEQ ID NO: 130371 - DNA, 25 bp, Canis familiaris
gattctccaggaccctgcagatatt

SEQ ID NO: 130372 - DNA, 25 bp, Canis familiaris
gattcttgaggcacctggatggctc

SEQ ID NO: 130373 - DNA, 25 bp, Canis familiaris
gattttgagagcatttttggacgtc

SEQ ID NO: 130374 - DNA, 25 bp, Canis familiaris
gattttgaactggagtcattttctg

SEQ ID NO: 130375 - DNA, 25 bp, Canis familiaris
gattcgtacctgggtctgatttcta

SEQ ID NO: 130376 - DNA, 25 bp, Canis familiaris
gattcatccaccaggttttgataat

SEQ ID NO: 130377 - DNA, 25 bp, Canis familiaris
gattcaacaactgggctactagata

SEQ ID NO: 130378 - DNA, 25 bp, Canis familiaris
gattcagtcgtcttgttactaccac

SEQ ID NO: 130379 - DNA, 25 bp, Canis familiaris
gattcaggagtattgctatgacaac

SEQ ID NO: 130380 - DNA, 25 bp, Canis familiaris
gattagctcagtatggtggcaggcc

SEQ ID NO: 130381 - DNA, 25 bp, Canis familiaris
gattgcccaaagcgtgacagcggtt

SEQ ID NO: 130382 - DNA, 25 bp, Canis familiaris
gattccctggagtgtgaagctgacc

SEQ ID NO: 130383 - DNA, 25 bp, Canis familiaris
gattccactttatatgaactttccc

SEQ ID NO: 130384 - DNA, 25 bp, Canis familiaris
gattctccttctttgagaagccctt

SEQ ID NO: 130385 - DNA, 25 bp, Canis familiaris
gattctctggtcattgagcacatcc

SEQ ID NO: 130386 - DNA, 25 bp, Canis familiaris
gattctctggtcattgagcacatcc

SEQ ID NO: 130387 - DNA, 25 bp, Canis familiaris
gattctctggtcattgagcacatcc

SEQ ID NO: 130388 - DNA, 25 bp, Canis familiaris
gattctctggtcattgagcacatcc

SEQ ID NO: 130389 - DNA, 25 bp, Canis familiaris
gattctctggtcattgagcacatcc

SEQ ID NO: 130390 - DNA, 25 bp, Canis familiaris
gattctctggtcattgagcacatcc

SEQ ID NO: 130391 - DNA, 25 bp, Canis familiaris
gattctctggtcattgagcacatcc

SEQ ID NO: 130392 - DNA, 25 bp, Canis familiaris
gattctgctggcttttaatatatac

SEQ ID NO: 130393 - DNA, 25 bp, Canis familiaris
gattctgctggctatgtgactccat

SEQ ID NO: 130394 - DNA, 25 bp, Canis familiaris
gattcatgatgcctagtactgtgct

SEQ ID NO: 130395 - DNA, 25 bp, Canis familiaris
gattcattcatcagcccagattgtc

SEQ ID NO: 130396 - DNA, 25 bp, Canis familiaris
gattcatgctctaacacttcattgt

SEQ ID NO: 130397 - DNA, 25 bp, Canis familiaris
gattcatccttagcatccaatacag

SEQ ID NO: 130398 - DNA, 25 bp, Canis familiaris
gattctcactatacaccagaaacta

SEQ ID NO: 130399 - DNA, 25 bp, Canis familiaris
gattccactgagaaccgagaagcgc

SEQ ID NO: 130400 - DNA, 25 bp, Canis familiaris
gattagcaggcgcagcaaattcaat

SEQ ID NO: 130401 - DNA, 25 bp, Canis familiaris
gattctgggcgggagtttgcaaacc

SEQ ID NO: 130402 - DNA, 25 bp, Canis familiaris
gattctggaggacataacacaaacc

SEQ ID NO: 130403 - DNA, 25 bp, Canis familiaris
gattctggaggacattaccccaacc

SEQ ID NO: 130404 - DNA, 25 bp, Canis familiaris
gattatgagaggtccctgaatcgcc

SEQ ID NO: 130405 - DNA, 25 bp, Canis familiaris
gattatgaagtggctcctcctgagt

SEQ ID NO: 130406 - DNA, 25 bp, Canis familiaris
gattatagcaattgtagtccatggt

SEQ ID NO: 130407 - DNA, 25 bp, Canis familiaris
gattctacacagctcagctctttgt

SEQ ID NO: 130408 - DNA, 25 bp, Canis familiaris
gattcactcatacctagctgtttgt

SEQ ID NO: 130409 - DNA, 25 bp, Canis familiaris
gattactgcatacatagctcctctc

SEQ ID NO: 130410 - DNA, 25 bp, Canis familiaris
gattattgttctaacctcctacttc

SEQ ID NO: 130411 - DNA, 25 bp, Canis familiaris
gattgaagattctctccttctaccc

SEQ ID NO: 130412 - DNA, 25 bp, Canis familiaris
gattcacagtttacccatttggcct

SEQ ID NO: 130413 - DNA, 25 bp, Canis familiaris
gattcacgtttacaatttatgtttg

SEQ ID NO: 130414 - DNA, 25 bp, Canis familiaris
gattatttatttcctgtttatttct

SEQ ID NO: 130415 - DNA, 25 bp, Canis familiaris
gattattttttgcagaattttctca

SEQ ID NO: 130416 - DNA, 25 bp, Canis familiaris
gattattttttatactgtatgtgcc

SEQ ID NO: 130417 - DNA, 25 bp, Canis familiaris
gattattttttatactgtatgtgcc

SEQ ID NO: 130418 - DNA, 25 bp, Canis familiaris
gattatctttgctattacaatgtga

SEQ ID NO: 130419 - DNA, 25 bp, Canis familiaris
gattgactgttcttatacctggtgt

SEQ ID NO: 130420 - DNA, 25 bp, Canis familiaris
gattgccgtctaagaaccgttgtcc

SEQ ID NO: 130421 - DNA, 25 bp, Canis familiaris
gattgagccctaagacctgcatttg

SEQ ID NO: 130422 - DNA, 25 bp, Canis familiaris
gattatccactttgatttgctccac

SEQ ID NO: 130423 - DNA, 25 bp, Canis familiaris
gattaacaccattgattgctccggt

SEQ ID NO: 130424 - DNA, 25 bp, Canis familiaris
gattaaagcttagtcctctcagagt

SEQ ID NO: 130425 - DNA, 25 bp, Canis familiaris
gattatgaggcttgatcccctctca

SEQ ID NO: 130426 - DNA, 25 bp, Canis familiaris
gattgtagagtatggcagccctcaa

SEQ ID NO: 130427 - DNA, 25 bp, Canis familiaris
gattatatagtcttggctccttcat

SEQ ID NO: 130428 - DNA, 25 bp, Canis familiaris
gattataatctccaattccttcatt

SEQ ID NO: 130429 - DNA, 25 bp, Canis familiaris
gattaacatcccttgtcatcttttt

SEQ ID NO: 130430 - DNA, 25 bp, Canis familiaris
gattaagctcatttagatttttttt

SEQ ID NO: 130431 - DNA, 25 bp, Canis familiaris
gattccagaatttagttttgccttt

SEQ ID NO: 130432 - DNA, 25 bp, Canis familiaris
gattatccatagtaagttttgccct

SEQ ID NO: 130433 - DNA, 25 bp, Canis familiaris
gattacacggtaaattattggcttt

SEQ ID NO: 130434 - DNA, 25 bp, Canis familiaris
gattggccgggatatcttggcgttt

SEQ ID NO: 130435 - DNA, 25 bp, Canis familiaris
gattgtccagggtgtccatgagctc

SEQ ID NO: 130436 - DNA, 25 bp, Canis familiaris
gattgatccaaactgggtcgtgctc

SEQ ID NO: 130437 - DNA, 25 bp, Canis familiaris
gattaccagagatttgtgttgctac

SEQ ID NO: 130438 - DNA, 25 bp, Canis familiaris
gattccgagagctctgtgactctgt

SEQ ID NO: 130439 - DNA, 25 bp, Canis familiaris
gattctggggatagcatgccacctg

SEQ ID NO: 130440 - DNA, 25 bp, Canis familiaris
gattaggatggatgccagcaccagg

SEQ ID NO: 130441 - DNA, 25 bp, Canis familiaris
gattaagagggacggccgggggcat

SEQ ID NO: 130442 - DNA, 25 bp, Canis familiaris
gattctagaagttggggtgggggat

SEQ ID NO: 130443 - DNA, 25 bp, Canis familiaris
gattctaaatcctctggctggggga

SEQ ID NO: 130444 - DNA, 25 bp, Canis familiaris
gattctaaatcctttgtgtgactgt

SEQ ID NO: 130445 - DNA, 25 bp, Canis familiaris
gattcaaccacctatgtgctggggc

SEQ ID NO: 130446 - DNA, 25 bp, Canis familiaris
gattacacacactatactggaggga

SEQ ID NO: 130447 - DNA, 25 bp, Canis familiaris
gttggcacatactagccgacagcag

SEQ ID NO: 130448 - DNA, 25 bp, Canis familiaris
gattatacaagccaccgttcatgaa

SEQ ID NO: 130449 - DNA, 25 bp, Canis familiaris
gattgatatggagcctttcatggga

SEQ ID NO: 130450 - DNA, 25 bp, Canis familiaris
gattaaggacctacccattgctgat

SEQ ID NO: 130451 - DNA, 25 bp, Canis familiaris
gattagggaccaaggacatatggaa

SEQ ID NO: 130452 - DNA, 25 bp, Canis familiaris
gattcaaggcaccagtaaccaggaa

SEQ ID NO: 130453 - DNA, 25 bp, Canis familiaris
gattcaaggtcgttgtgtccaggca

SEQ ID NO: 130454 - DNA, 25 bp, Canis familiaris
gattctaggtgattgtgtcccagga

SEQ ID NO: 130455 - DNA, 25 bp, Canis familiaris
gattcatattcatttgtatccaagg

SEQ ID NO: 130456 - DNA, 25 bp, Canis familiaris
gattcattatgctctttctcagttt

SEQ ID NO: 130457 - DNA, 25 bp, Canis familiaris
gattgtgatcatttcctacgtgttt

SEQ ID NO: 130458 - DNA, 25 bp, Canis familiaris
gattaacattgcaacttcattattt

SEQ ID NO: 130459 - DNA, 25 bp, Canis familiaris
gattacaattctctttgttatcttt

SEQ ID NO: 130460 - DNA, 25 bp, Canis familiaris
gattgtttcactcttggtaattttc

SEQ ID NO: 130461 - DNA, 25 bp, Canis familiaris
gattgtcttccgagtttttagttct

SEQ ID NO: 130462 - DNA, 25 bp, Canis familiaris
gtttttcgagatattccgtagtaca

SEQ ID NO: 130463 - DNA, 25 bp, Canis familiaris
gattgtttagaaattgtttgaaatg

SEQ ID NO: 130464 - DNA, 25 bp, Canis familiaris
gattctgttaggatttctgtgcata

SEQ ID NO: 130465 - DNA, 25 bp, Canis familiaris
gattctattaaaacttctgatgccg

SEQ ID NO: 130466 - DNA, 25 bp, Canis familiaris
gattcatgaattaatacctctggct

SEQ ID NO: 130467 - DNA, 25 bp, Canis familiaris
gattggaggttgtacctctgcacgg

SEQ ID NO: 130468 - DNA, 25 bp, Canis familiaris
gattgtcaaggttcaacttccttag

SEQ ID NO: 130469 - DNA, 25 bp, Canis familiaris
gattgtatagaacgacacctcctgt

SEQ ID NO: 130470 - DNA, 25 bp, Canis familiaris
gattaatcgaatcacagctgcctcc

SEQ ID NO: 130471 - DNA, 25 bp, Canis familiaris
gattcacaaggtcatgcagctgggc

SEQ ID NO: 130472 - DNA, 25 bp, Canis familiaris
gattaagtatgtctgcatctgggac

SEQ ID NO: 130473 - DNA, 25 bp, Canis familiaris
gattacagttgtacctcatcgaacg

SEQ ID NO: 130474 - DNA, 25 bp, Canis familiaris
gattaagtccttttatcgtatcagg

SEQ ID NO: 130475 - DNA, 25 bp, Canis familiaris
gattgaagcctcatgttgagcgtta

SEQ ID NO: 130476 - DNA, 25 bp, Canis familiaris
gattgcagactcatttctgagacct

SEQ ID NO: 130477 - DNA, 25 bp, Canis familiaris
gattcagattcccttgggagcgcac

SEQ ID NO: 130478 - DNA, 25 bp, Canis familiaris
gattcaatccctctggttggacact

SEQ ID NO: 130479 - DNA, 25 bp, Canis familiaris
gattcagcattcctggttttcaacc

SEQ ID NO: 130480 - DNA, 25 bp, Canis familiaris
gattacatatgtaggttcttcgaat

SEQ ID NO: 130481 - DNA, 25 bp, Canis familiaris
gattacatcattatgttgccttctt

SEQ ID NO: 130482 - DNA, 25 bp, Canis familiaris
gattcaagtcatatgattcctagtt

SEQ ID NO: 130483 - DNA, 25 bp, Canis familiaris
gattccgtttctactcctctgacga

SEQ ID NO: 130484 - DNA, 25 bp, Canis familiaris
gattcctgggtaacttcttccagca

SEQ ID NO: 130485 - DNA, 25 bp, Canis familiaris
gattccatgggagccttcaatcgaa

SEQ ID NO: 130486 - DNA, 25 bp, Canis familiaris
gttgcctgggggactaacaagaaag

SEQ ID NO: 130487 - DNA, 25 bp, Canis familiaris
gattccatggcacacctagacaaga

SEQ ID NO: 130488 - DNA, 25 bp, Canis familiaris
gattcatcatggggcaccctgacaa

SEQ ID NO: 130489 - DNA, 25 bp, Canis familiaris
gattcacatgtggatgaccctgtta

SEQ ID NO: 130490 - DNA, 25 bp, Canis familiaris
gattccatcatagtacatcactttt

SEQ ID NO: 130491 - DNA, 25 bp, Canis familiaris
gattcagcacatccatcaatactct

SEQ ID NO: 130492 - DNA, 25 bp, Canis familiaris
gattagccgacaaaactctttcctc

SEQ ID NO: 130493 - DNA, 25 bp, Canis familiaris
gattgaccggaggaacttcatccgt

SEQ ID NO: 130494 - DNA, 25 bp, Canis familiaris
gttgcgacggaggaacaatccccaa

SEQ ID NO: 130495 - DNA, 25 bp, Canis familiaris
gattccacgagacctaaaaccgcaa

SEQ ID NO: 130496 - DNA, 25 bp, Canis familiaris
gattcttctagaccaaggaaccgac

SEQ ID NO: 130497 - DNA, 25 bp, Canis familiaris
gattcatctctaccctagcagaaac

SEQ ID NO: 130498 - DNA, 25 bp, Canis familiaris
gattcatctctaccctagcagaaac

SEQ ID NO: 130499 - DNA, 25 bp, Canis familiaris
gattcatctctaccctagcagaaac

SEQ ID NO: 130500 - DNA, 25 bp, Canis familiaris
gattcatctctaccctagcagaaac

SEQ ID NO: 130501 - DNA, 25 bp, Canis familiaris
gattgatgccttctgggcaactcac

SEQ ID NO: 130502 - DNA, 25 bp, Canis familiaris
gattggctcagacatggaaacccct

SEQ ID NO: 130503 - DNA, 25 bp, Canis familiaris
gattggaaaccaaatgccacccctc

SEQ ID NO: 130504 - DNA, 25 bp, Canis familiaris
gttggaaacctgaataattcccagg

SEQ ID NO: 130505 - DNA, 25 bp, Canis familiaris
gttgtgaggtcagtaaaatcccctg

SEQ ID NO: 130506 - DNA, 25 bp, Canis familiaris
gattgtggaccagaacgatgccctc

SEQ ID NO: 130507 - DNA, 25 bp, Canis familiaris
gattgtgtacacggagtccaccatc

SEQ ID NO: 130508 - DNA, 25 bp, Canis familiaris
gattgtgtagaccacactcccaaac

SEQ ID NO: 130509 - DNA, 25 bp, Canis familiaris
gattctctgaggccaaaacatcaat

SEQ ID NO: 130510 - DNA, 25 bp, Canis familiaris
gattcctgcagcctcgagagattgc

SEQ ID NO: 130511 - DNA, 25 bp, Canis familiaris
gattcagctcactcaggatgtctgt

SEQ ID NO: 130512 - DNA, 25 bp, Canis familiaris
gattctgctcactgagctcatcagc

SEQ ID NO: 130513 - DNA, 25 bp, Canis familiaris
gattgctgtcagacatggcccatgg

SEQ ID NO: 130514 - DNA, 25 bp, Canis familiaris
gattcttcatttaccctgagacata

SEQ ID NO: 130515 - DNA, 25 bp, Canis familiaris
gattcatctagtaacttctacacat

SEQ ID NO: 130516 - DNA, 25 bp, Canis familiaris
gattcaacagtcactttcattatag

SEQ ID NO: 130517 - DNA, 25 bp, Canis familiaris
gattcaaacctagtattcctctcgc

SEQ ID NO: 130518 - DNA, 25 bp, Canis familiaris
gattcaaaattcaaaactctccgcc

SEQ ID NO: 130519 - DNA, 25 bp, Canis familiaris
gttgcagggaatgacgttccccgcc

SEQ ID NO: 130520 - DNA, 25 bp, Canis familiaris
gttggcgagtgagacgggggcaggc

SEQ ID NO: 130521 - DNA, 25 bp, Canis familiaris
gattggagaggagcctcgggccatt

SEQ ID NO: 130522 - DNA, 25 bp, Canis familiaris
gttggatggcaggcatcccagggca

SEQ ID NO: 130523 - DNA, 25 bp, Canis familiaris
gattctgtgtgcatatcccagcagc

SEQ ID NO: 130524 - DNA, 25 bp, Canis familiaris
gattcatcctcaacatcacaagcac

SEQ ID NO: 130525 - DNA, 25 bp, Canis familiaris
gattcatcacttaatacagcaccca

SEQ ID NO: 130526 - DNA, 25 bp, Canis familiaris
gattacatgcttatcagaatggcta

SEQ ID NO: 130527 - DNA, 25 bp, Canis familiaris
gattacatccatctatgagtggaaa

SEQ ID NO: 130528 - DNA, 25 bp, Canis familiaris
gattgcagtcctatcagggagaaga

SEQ ID NO: 130529 - DNA, 25 bp, Canis familiaris
gattgccaccctacagggaactgct

SEQ ID NO: 130530 - DNA, 25 bp, Canis familiaris
gattccagggctactgatacaacct

SEQ ID NO: 130531 - DNA, 25 bp, Canis familiaris
gattccgaggtgacaatgatactcc

SEQ ID NO: 130532 - DNA, 25 bp, Canis familiaris
gattctcgtttgtcatcatcatact

SEQ ID NO: 130533 - DNA, 25 bp, Canis familiaris
gattctcagattatgctgctgccca

SEQ ID NO: 130534 - DNA, 25 bp, Canis familiaris
gattctcagagtagctcatctcacc

SEQ ID NO: 130535 - DNA, 25 bp, Canis familiaris
gattccagtgaagatcatccctttc

SEQ ID NO: 130536 - DNA, 25 bp, Canis familiaris
gattacaggtgagatttcccttcaa

SEQ ID NO: 130537 - DNA, 25 bp, Canis familiaris
gttacagcgggtatccctattcaga

SEQ ID NO: 130538 - DNA, 25 bp, Canis familiaris
gttacggggtagaccaaattctctg

SEQ ID NO: 130539 - DNA, 25 bp, Canis familiaris
gattacctaggtttctcaaattctt

SEQ ID NO: 130540 - DNA, 25 bp, Canis familiaris
gattgaccttgtgttctggaaattt

SEQ ID NO: 130541 - DNA, 25 bp, Canis familiaris
gattactctctgtactttctgaaac

SEQ ID NO: 130542 - DNA, 25 bp, Canis familiaris
gattaacctcaaatgatccatgaca

SEQ ID NO: 130543 - DNA, 25 bp, Canis familiaris
gattaactgtcatatgattcgccca

SEQ ID NO: 130544 - DNA, 25 bp, Canis familiaris
gattaactgtcatctattttggagt

SEQ ID NO: 130545 - DNA, 25 bp, Canis familiaris
gattaacataagctgtacttggagc

SEQ ID NO: 130546 - DNA, 25 bp, Canis familiaris
gattgaaaaatgggtgatgttgaga

SEQ ID NO: 130547 - DNA, 25 bp, Canis familiaris
gattaaagaatacctgtgcctgcag

SEQ ID NO: 130548 - DNA, 25 bp, Canis familiaris
gattgaaaatcttgcctgctttgct

SEQ ID NO: 130549 - DNA, 25 bp, Canis familiaris
gattgaaaatcatctgcttcatgtg

SEQ ID NO: 130550 - DNA, 25 bp, Canis familiaris
gattcagagaaccatcaggccagat

SEQ ID NO: 130551 - DNA, 25 bp, Canis familiaris
gattcagatgaggcacagccccact

SEQ ID NO: 130552 - DNA, 25 bp, Canis familiaris
gattcagtagcagatgccgttcaaa

SEQ ID NO: 130553 - DNA, 25 bp, Canis familiaris
gattcaccagcacttgctcgtccat

SEQ ID NO: 130554 - DNA, 25 bp, Canis familiaris
gattacaatgtgactgcaatatctc

SEQ ID NO: 130555 - DNA, 25 bp, Canis familiaris
gtttgcattggagacttccttccgt

SEQ ID NO: 130556 - DNA, 25 bp, Canis familiaris
gattcagactggatactttcattgc

SEQ ID NO: 130557 - DNA, 25 bp, Canis familiaris
gattcaagtgtgtcaatattctatt

SEQ ID NO: 130558 - DNA, 25 bp, Canis familiaris
gattcaaggtatatttcctgctttc

SEQ ID NO: 130559 - DNA, 25 bp, Canis familiaris
gattcggcgatggttttcctttatt

SEQ ID NO: 130560 - DNA, 25 bp, Canis familiaris
gattgcccaactgtatttctttttt

SEQ ID NO: 130561 - DNA, 25 bp, Canis familiaris
gattccataactttcttctatttca

SEQ ID NO: 130562 - DNA, 25 bp, Canis familiaris
gattcggattagttctgtttattcg

SEQ ID NO: 130563 - DNA, 25 bp, Canis familiaris
gattcgtgttactttggctttttgt

SEQ ID NO: 130564 - DNA, 25 bp, Canis familiaris
gattcactgttaggttacaaaaatt

SEQ ID NO: 130565 - DNA, 25 bp, Canis familiaris
gattcagagttccaaaataaaaatt

SEQ ID NO: 130566 - DNA, 25 bp, Canis familiaris
gggaggcccaaacaacaaaatatct

SEQ ID NO: 130567 - DNA, 25 bp, Canis familiaris
gttggcccacgacacgaaaaattct

SEQ ID NO: 130568 - DNA, 25 bp, Canis familiaris
gttggtcgaccactacgtgaacatc

SEQ ID NO: 130569 - DNA, 25 bp, Canis familiaris
gttggcaccaactcggtgatacagc

SEQ ID NO: 130570 - DNA, 25 bp, Canis familiaris
gttgcccacaaacagggaaccctct

SEQ ID NO: 130571 - DNA, 25 bp, Canis familiaris
gttgtctgtaagatgggggtccctt

SEQ ID NO: 130572 - DNA, 25 bp, Canis familiaris
gattgtttgtgagcttttgttccct

SEQ ID NO: 130573 - DNA, 25 bp, Canis familiaris
gattacttgtgggcatattattatt

SEQ ID NO: 130574 - DNA, 25 bp, Canis familiaris
gattcctctgatgtatattttttct

SEQ ID NO: 130575 - DNA, 25 bp, Canis familiaris
gattcaccagaataaatggctgttg

SEQ ID NO: 130576 - DNA, 25 bp, Canis familiaris
gattcccacataccaaattctttga

SEQ ID NO: 130577 - DNA, 25 bp, Canis familiaris
gattcaccagcttggtaacttcatt

SEQ ID NO: 130578 - DNA, 25 bp, Canis familiaris
gattcacacagttgatgctcggtct

SEQ ID NO: 130579 - DNA, 25 bp, Canis familiaris
gattcagccgtgccatgtgcaatgt

SEQ ID NO: 130580 - DNA, 25 bp, Canis familiaris
gattcagtcctgcctgtgaggctgt

SEQ ID NO: 130581 - DNA, 25 bp, Canis familiaris
gattcagatcccttatgcactggct

SEQ ID NO: 130582 - DNA, 25 bp, Canis familiaris
gattcgacttcttatgcatttcctt

SEQ ID NO: 130583 - DNA, 25 bp, Canis familiaris
gattcaccttcagtagttatgccat

SEQ ID NO: 130584 - DNA, 25 bp, Canis familiaris
gattgacccacagtttagacatcag

SEQ ID NO: 130585 - DNA, 25 bp, Canis familiaris
gtatgaaaaagtaaactatcctttg

SEQ ID NO: 130586 - DNA, 25 bp, Canis familiaris
gttggaacaaaaattttctgctttg

SEQ ID NO: 130587 - DNA, 25 bp, Canis familiaris
gattgtatcaaataactttacttgc

SEQ ID NO: 130588 - DNA, 25 bp, Canis familiaris
gttgtacgcaaaggctttctattcg

SEQ ID NO: 130589 - DNA, 25 bp, Canis familiaris
gttggattcctaagttcttaatggg

SEQ ID NO: 130590 - DNA, 25 bp, Canis familiaris
gattggtcctttgtttaggcagggc

SEQ ID NO: 130591 - DNA, 25 bp, Canis familiaris
gttggtggcttaggttaactaggag

SEQ ID NO: 130592 - DNA, 25 bp, Canis familiaris
gttggggaggcaggattaacaactt

SEQ ID NO: 130593 - DNA, 25 bp, Canis familiaris
gtttgggggagacacaatattcagt

SEQ ID NO: 130594 - DNA, 25 bp, Canis familiaris
gttttgggtggggagaagatccagg

SEQ ID NO: 130595 - DNA, 25 bp, Canis familiaris
ttctttcggggcccaaagttcagtg

SEQ ID NO: 130596 - DNA, 25 bp, Canis familiaris
gttcttctagtgtaccgtagttagg

SEQ ID NO: 130597 - DNA, 25 bp, Canis familiaris
gattctttcagaaacctctttctac

SEQ ID NO: 130598 - DNA, 25 bp, Canis familiaris
gattcttttatattccattgtttgg

SEQ ID NO: 130599 - DNA, 25 bp, Canis familiaris
gattctagcctctttaattgcttct

SEQ ID NO: 130600 - DNA, 25 bp, Canis familiaris
gattctagaccatgtgagatctgcc

SEQ ID NO: 130601 - DNA, 25 bp, Canis familiaris
gattgctacacccaatagcttctct

SEQ ID NO: 130602 - DNA, 25 bp, Canis familiaris
gattcttatgcggaaatggctccaa

SEQ ID NO: 130603 - DNA, 25 bp, Canis familiaris
gattctcttgctgggccataaccag

SEQ ID NO: 130604 - DNA, 25 bp, Canis familiaris
gattctcattgggatgtcgacttag

SEQ ID NO: 130605 - DNA, 25 bp, Canis familiaris
gttgtcattggtgttcccttcaacg

SEQ ID NO: 130606 - DNA, 25 bp, Canis familiaris
gattggggcagtgttccccagctat

SEQ ID NO: 130607 - DNA, 25 bp, Canis familiaris
gttgtgggcagggtaggttccttct

SEQ ID NO: 130608 - DNA, 25 bp, Canis familiaris
gttggtttgtgaaagccttcctttg

SEQ ID NO: 130609 - DNA, 25 bp, Canis familiaris
gattgtttatgggtagctcttccgg

SEQ ID NO: 130610 - DNA, 25 bp, Canis familiaris
tactttgtaggcacgtattaccggt

SEQ ID NO: 130611 - DNA, 25 bp, Canis familiaris
tccttcgaactggggttaaccactg

SEQ ID NO: 130612 - DNA, 25 bp, Canis familiaris
tcttgtctccactggtttaacccag

SEQ ID NO: 130613 - DNA, 25 bp, Canis familiaris
gttggtcccaaagaacatcacctca

SEQ ID NO: 130614 - DNA, 25 bp, Canis familiaris
gttggcatttcataaaactaaccga

SEQ ID NO: 130615 - DNA, 25 bp, Canis familiaris
gattggcttttacattccaaaaaag

SEQ ID NO: 130616 - DNA, 25 bp, Canis familiaris
gttggcttttagctgacttacgaaa

SEQ ID NO: 130617 - DNA, 25 bp, Canis familiaris
gattgtttttcagtgtgagaccagc

SEQ ID NO: 130618 - DNA, 25 bp, Canis familiaris
gattcttgtttcatgtggtcggtcc

SEQ ID NO: 130619 - DNA, 25 bp, Canis familiaris
gattctgtttcttttgggtgactaa

SEQ ID NO: 130620 - DNA, 25 bp, Canis familiaris
gattctgattttttgcttaagcact

SEQ ID NO: 130621 - DNA, 25 bp, Canis familiaris
gattaatcttatatttacaccttgg

SEQ ID NO: 130622 - DNA, 25 bp, Canis familiaris
gattaacttcagactttacctttat

SEQ ID NO: 130623 - DNA, 25 bp, Canis familiaris
gttacagcttccactaaggctttaa

SEQ ID NO: 130624 - DNA, 25 bp, Canis familiaris
gtatcccttcgagctggggttaaca

SEQ ID NO: 130625 - DNA, 25 bp, Canis familiaris
gattccctgtaagtctcagggtaaa

SEQ ID NO: 130626 - DNA, 25 bp, Canis familiaris
gattccgatagttttcgtggtcaaa

SEQ ID NO: 130627 - DNA, 25 bp, Canis familiaris
gattcctatagtttcaccgagtctt

SEQ ID NO: 130628 - DNA, 25 bp, Canis familiaris
gattctttagcttctcaactttctt

SEQ ID NO: 130629 - DNA, 25 bp, Canis familiaris
gattcttaacatttctcagtcaact

SEQ ID NO: 130630 - DNA, 25 bp, Canis familiaris
gttgtctgacctattgcttcaacaa

SEQ ID NO: 130631 - DNA, 25 bp, Canis familiaris
gttgtctgacctattgcttcaacaa

SEQ ID NO: 130632 - DNA, 25 bp, Canis familiaris
gttggatgactttaatgttacgtta

SEQ ID NO: 130633 - DNA, 25 bp, Canis familiaris
gttggttaccttattatcgtgatac

SEQ ID NO: 130634 - DNA, 25 bp, Canis familiaris
gttgatcttaccgtctttctagaaa

SEQ ID NO: 130635 - DNA, 25 bp, Canis familiaris
gttccttgaccgacttcgtacaatg

SEQ ID NO: 130636 - DNA, 25 bp, Canis familiaris
gttacttgacggcttgggccaagcc

SEQ ID NO: 130637 - DNA, 25 bp, Canis familiaris
gttaatgtccgtcattggcgcaacg

SEQ ID NO: 130638 - DNA, 25 bp, Canis familiaris
gttaatggtctccaactactgcaac

SEQ ID NO: 130639 - DNA, 25 bp, Canis familiaris
gattcaatggatccgtgaaatctga

SEQ ID NO: 130640 - DNA, 25 bp, Canis familiaris
gattaagtgctgccctgagaattac

SEQ ID NO: 130641 - DNA, 25 bp, Canis familiaris
gattcattttcgacgataatataga

SEQ ID NO: 130642 - DNA, 25 bp, Canis familiaris
gattcttcttctgtatcttctggaa

SEQ ID NO: 130643 - DNA, 25 bp, Canis familiaris
gattcttcatatccttggtccgaaa

SEQ ID NO: 130644 - DNA, 25 bp, Canis familiaris
gattgctcctatccattttataaaa

SEQ ID NO: 130645 - DNA, 25 bp, Canis familiaris
gattcctcatcaaatctttaattat

SEQ ID NO: 130646 - DNA, 25 bp, Canis familiaris
gattccctgctgcagattttattct

SEQ ID NO: 130647 - DNA, 25 bp, Canis familiaris
gattccctggagcttttatcagttg

SEQ ID NO: 130648 - DNA, 25 bp, Canis familiaris
gattgccctggacaattgtatggcg

SEQ ID NO: 130649 - DNA, 25 bp, Canis familiaris
gattgggtggaccaattcccgtcaa

SEQ ID NO: 130650 - DNA, 25 bp, Canis familiaris
gattgagcgggaaataaccactgaa

SEQ ID NO: 130651 - DNA, 25 bp, Canis familiaris
gattgacgataatttagactttgag

SEQ ID NO: 130652 - DNA, 25 bp, Canis familiaris
gattcctgaagctttctaatttaga

SEQ ID NO: 130653 - DNA, 25 bp, Canis familiaris
gattcctgacactttacacacatct

SEQ ID NO: 130654 - DNA, 25 bp, Canis familiaris
gattcacgacttttgtctcaacttc

SEQ ID NO: 130655 - DNA, 25 bp, Canis familiaris
gattcacggtatcttctgagcagcc

SEQ ID NO: 130656 - DNA, 25 bp, Canis familiaris
gattcaaagtccagtcagagcaccc

SEQ ID NO: 130657 - DNA, 25 bp, Canis familiaris
gattctaagtactgctatggccccc

SEQ ID NO: 130658 - DNA, 25 bp, Canis familiaris
gattgaacagtcaggctttgccctc

SEQ ID NO: 130659 - DNA, 25 bp, Canis familiaris
gattgcaagactcagcctggatccc

SEQ ID NO: 130660 - DNA, 25 bp, Canis familiaris
gattcacacatggtttctggaaaca

SEQ ID NO: 130661 - DNA, 25 bp, Canis familiaris
gattcccatgcagtttcctggagaa

SEQ ID NO: 130662 - DNA, 25 bp, Canis familiaris
gattcatccataagcttcctgaagg

SEQ ID NO: 130663 - DNA, 25 bp, Canis familiaris
gattcaccaaacaagctctacacgc

SEQ ID NO: 130664 - DNA, 25 bp, Canis familiaris
gattcaccataaccagctctggaac

SEQ ID NO: 130665 - DNA, 25 bp, Canis familiaris
gattcacctcaaccacattgtaaac

SEQ ID NO: 130666 - DNA, 25 bp, Canis familiaris
gattcaagattgaccaattactaac

SEQ ID NO: 130667 - DNA, 25 bp, Canis familiaris
gattcactattgaccaataccgaat

SEQ ID NO: 130668 - DNA, 25 bp, Canis familiaris
gattgcacatttgaaaaccagtctt

SEQ ID NO: 130669 - DNA, 25 bp, Canis familiaris
gattgacaattcagaccagggttct

SEQ ID NO: 130670 - DNA, 25 bp, Canis familiaris
gattgacaagacagaccgggacatt

SEQ ID NO: 130671 - DNA, 25 bp, Canis familiaris
gattggaagcatggagaacaggggc

SEQ ID NO: 130672 - DNA, 25 bp, Canis familiaris
gattggcttgtttttacgtggcgcc

SEQ ID NO: 130673 - DNA, 25 bp, Canis familiaris
gtagtgttgtgtcttacctaggtgc

SEQ ID NO: 130674 - DNA, 25 bp, Canis familiaris
gtagggcggagaaccacttaggctt

SEQ ID NO: 130675 - DNA, 25 bp, Canis familiaris
gtcgaagggaagaccccatggccag

SEQ ID NO: 130676 - DNA, 25 bp, Canis familiaris
gttggaggcttaatcccgctgaaag

SEQ ID NO: 130677 - DNA, 25 bp, Canis familiaris
gttagctggaaaatcccctggggtg

SEQ ID NO: 130678 - DNA, 25 bp, Canis familiaris
gttggagaaataagccctctgggga

SEQ ID NO: 130679 - DNA, 25 bp, Canis familiaris
gttccacacctgaatttcctggggc

SEQ ID NO: 130680 - DNA, 25 bp, Canis familiaris
gttctaccccaagagcctggaggaa

SEQ ID NO: 130681 - DNA, 25 bp, Canis familiaris
gtttccttccgtgacgggaggagca

SEQ ID NO: 130682 - DNA, 25 bp, Canis familiaris
gttgtttccagggcaacgggagtag

SEQ ID NO: 130683 - DNA, 25 bp, Canis familiaris
gttggtgacacagaaatggtgggga

SEQ ID NO: 130684 - DNA, 25 bp, Canis familiaris
gttggaattgcagaattgcgttgcc

SEQ ID NO: 130685 - DNA, 25 bp, Canis familiaris
gattggtgattagaattcattattc

SEQ ID NO: 130686 - DNA, 25 bp, Canis familiaris
gattgatgtgataaatccatccatt

SEQ ID NO: 130687 - DNA, 25 bp, Canis familiaris
gattgctggaaattacatactctga

SEQ ID NO: 130688 - DNA, 25 bp, Canis familiaris
gattgctggattatgctctacttgc

SEQ ID NO: 130689 - DNA, 25 bp, Canis familiaris
gattgttgagtttgctccagtcatc

SEQ ID NO: 130690 - DNA, 25 bp, Canis familiaris
gattccgagatggagcctgagtatc

SEQ ID NO: 130691 - DNA, 25 bp, Canis familiaris
gattcttagctggagtctgcctgtt

SEQ ID NO: 130692 - DNA, 25 bp, Canis familiaris
gattcttgtctgtgtctggagagtt

SEQ ID NO: 130693 - DNA, 25 bp, Canis familiaris
gattctgattcagtacatctgtagg

SEQ ID NO: 130694 - DNA, 25 bp, Canis familiaris
gattctgcttctaagtcattgagag

SEQ ID NO: 130695 - DNA, 25 bp, Canis familiaris
gattctgcttgtattccatgggctt

SEQ ID NO: 130696 - DNA, 25 bp, Canis familiaris
gattggcttgtggttccagcctgaa

SEQ ID NO: 130697 - DNA, 25 bp, Canis familiaris
gttggtctgcagggtccctgtagga

SEQ ID NO: 130698 - DNA, 25 bp, Canis familiaris
gttcgtttagtgagcctgtaggatc

SEQ ID NO: 130699 - DNA, 25 bp, Canis familiaris
gttggatttaggtccctttggctat

SEQ ID NO: 130700 - DNA, 25 bp, Canis familiaris
gttgtgtttacggatcctttggcca

SEQ ID NO: 130701 - DNA, 25 bp, Canis familiaris
gattgttttgactggcatattggag

SEQ ID NO: 130702 - DNA, 25 bp, Canis familiaris
gattgttgtcgtgattctcattggg

SEQ ID NO: 130703 - DNA, 25 bp, Canis familiaris
gattgccggcgtgatttctggagat

SEQ ID NO: 130704 - DNA, 25 bp, Canis familiaris
gattctcgtggtggtggtggaaatt

SEQ ID NO: 130705 - DNA, 25 bp, Canis familiaris
gattctggggtcctgggacggagtc

SEQ ID NO: 130706 - DNA, 25 bp, Canis familiaris
gtccggggtcgggacatcggattgg

SEQ ID NO: 130707 - DNA, 25 bp, Canis familiaris
gtccaggggttagacctagcaggct

SEQ ID NO: 130708 - DNA, 25 bp, Canis familiaris
gtcggggtttcgtacgtagcagagc

SEQ ID NO: 130709 - DNA, 25 bp, Canis familiaris
gttgtggagtatacgtacaggccag

SEQ ID NO: 130710 - DNA, 25 bp, Canis familiaris
gattgggagtctgagtggggcacac

SEQ ID NO: 130711 - DNA, 25 bp, Canis familiaris
gttggtgagccgggatgggacactc

SEQ ID NO: 130712 - DNA, 25 bp, Canis familiaris
gttgttggcacttggaggtgatcct

SEQ ID NO: 130713 - DNA, 25 bp, Canis familiaris
gttcttggaatctggggattctccc

SEQ ID NO: 130714 - DNA, 25 bp, Canis familiaris
gggccgacattgtgggactttccac

SEQ ID NO: 130715 - DNA, 25 bp, Canis familiaris
gtacaagacctatgggacttcccta

SEQ ID NO: 130716 - DNA, 25 bp, Canis familiaris
gtaatatacgcatagggggtaccca

SEQ ID NO: 130717 - DNA, 25 bp, Canis familiaris
tgtatttaccgtagccgggtaacag

SEQ ID NO: 130718 - DNA, 25 bp, Canis familiaris
gtatgttgaccggaccgtggtacac

SEQ ID NO: 130719 - DNA, 25 bp, Canis familiaris
gattggtgaccaaaccccagtaact

SEQ ID NO: 130720 - DNA, 25 bp, Canis familiaris
gattggtgatctgaagcgccggtta

SEQ ID NO: 130721 - DNA, 25 bp, Canis familiaris
gattggtgattgggagctcacgtga

SEQ ID NO: 130722 - DNA, 25 bp, Canis familiaris
gattggctacttgggctattgtaaa

SEQ ID NO: 130723 - DNA, 25 bp, Canis familiaris
gattggaacttttaatatgctaatg

SEQ ID NO: 130724 - DNA, 25 bp, Canis familiaris
gttggaccgtttttgagcaaggcct

SEQ ID NO: 130725 - DNA, 25 bp, Canis familiaris
gttgggggcttagaaaatggcacaa

SEQ ID NO: 130726 - DNA, 25 bp, Canis familiaris
gttggggatttaagtgagaaacact

SEQ ID NO: 130727 - DNA, 25 bp, Canis familiaris
gttgaggcctttgggtggggccact

SEQ ID NO: 130728 - DNA, 25 bp, Canis familiaris
gttggtgaaactgaatcgtcgccct

SEQ ID NO: 130729 - DNA, 25 bp, Canis familiaris
gtcggtcaccacgtgacacgtgccc

SEQ ID NO: 130730 - DNA, 25 bp, Canis familiaris
gttgaacacacgatgaacggctatc

SEQ ID NO: 130731 - DNA, 25 bp, Canis familiaris
gttgatacaatgccatttactggat

SEQ ID NO: 130732 - DNA, 25 bp, Canis familiaris
gttgggacacgctgtagaggttttc

SEQ ID NO: 130733 - DNA, 25 bp, Canis familiaris
gttggtaccaattgtcatagtgtgt

SEQ ID NO: 130734 - DNA, 25 bp, Canis familiaris
gttgggcaaaatctatatgttatga

SEQ ID NO: 130735 - DNA, 25 bp, Canis familiaris
gattgtgtaatacttgatcttttaa

SEQ ID NO: 130736 - DNA, 25 bp, Canis familiaris
gattcttagtatattggcttctgta

SEQ ID NO: 130737 - DNA, 25 bp, Canis familiaris
gattctataggtttaagcacttgta

SEQ ID NO: 130738 - DNA, 25 bp, Canis familiaris
gattctttaggcttgttgcactagt

SEQ ID NO: 130739 - DNA, 25 bp, Canis familiaris
gattctttccttggttatgctcagt

SEQ ID NO: 130740 - DNA, 25 bp, Canis familiaris
gattgcttacctatgtacatgcctc

SEQ ID NO: 130741 - DNA, 25 bp, Canis familiaris
gattgctttccgtatgtggagctgt

SEQ ID NO: 130742 - DNA, 25 bp, Canis familiaris
gattgcgggagcccagaggggttcg

SEQ ID NO: 130743 - DNA, 25 bp, Canis familiaris
gattgcacagggtccatgtgggagg

SEQ ID NO: 130744 - DNA, 25 bp, Canis familiaris
gattgacaggcacgctcggtaggaa

SEQ ID NO: 130745 - DNA, 25 bp, Canis familiaris
gattggatgagaagtatagtacgag

SEQ ID NO: 130746 - DNA, 25 bp, Canis familiaris
gattcgaggagttaaccactgtgag

SEQ ID NO: 130747 - DNA, 25 bp, Canis familiaris
gattctggagagaaggccagccggg

SEQ ID NO: 130748 - DNA, 25 bp, Canis familiaris
gattcccgagaagggagcctgaggg

SEQ ID NO: 130749 - DNA, 25 bp, Canis familiaris
gattccggatgtagggagcctggag

SEQ ID NO: 130750 - DNA, 25 bp, Canis familiaris
gattccatggcgaggatggccgagg

SEQ ID NO: 130751 - DNA, 25 bp, Canis familiaris
gattgcacagggagggctcctgagg

SEQ ID NO: 130752 - DNA, 25 bp, Canis familiaris
gattgcacttggccggtgctttgat

SEQ ID NO: 130753 - DNA, 25 bp, Canis familiaris
gattgcacttggccggtgctttgat

SEQ ID NO: 130754 - DNA, 25 bp, Canis familiaris
gattcctgtggcagacactttgatt

SEQ ID NO: 130755 - DNA, 25 bp, Canis familiaris
gattgccctggcagatgacacgtga

SEQ ID NO: 130756 - DNA, 25 bp, Canis familiaris
gattccgctatgaggacgcagctgg

SEQ ID NO: 130757 - DNA, 25 bp, Canis familiaris
gattgccacctacaggaagctgctg

SEQ ID NO: 130758 - DNA, 25 bp, Canis familiaris
gttggggcatgacaggcacagcctg

SEQ ID NO: 130759 - DNA, 25 bp, Canis familiaris
gttgtggtctgacacacactgctgt

SEQ ID NO: 130760 - DNA, 25 bp, Canis familiaris
gttgggtctctttacaagacaggat

SEQ ID NO: 130761 - DNA, 25 bp, Canis familiaris
gattggcttcttaaatgacaaaggt

SEQ ID NO: 130762 - DNA, 25 bp, Canis familiaris
gattcgtttcttgcagaacataagt

SEQ ID NO: 130763 - DNA, 25 bp, Canis familiaris
gattcgtctgtctacaagatgacat

SEQ ID NO: 130764 - DNA, 25 bp, Canis familiaris
gattcctcagtgcatcaagagtgcg

SEQ ID NO: 130765 - DNA, 25 bp, Canis familiaris
gattgctgtaggcatcatattgtca

SEQ ID NO: 130766 - DNA, 25 bp, Canis familiaris
gattgaaattcttcttagccagtaa

SEQ ID NO: 130767 - DNA, 25 bp, Canis familiaris
gttgccttttatatactttagttgg

SEQ ID NO: 130768 - DNA, 25 bp, Canis familiaris
gattctattttaaaattctctagtt

SEQ ID NO: 130769 - DNA, 25 bp, Canis familiaris
gattctatttgtaagtttttctcgt

SEQ ID NO: 130770 - DNA, 25 bp, Canis familiaris
gattctatttgcaacatggattttt

SEQ ID NO: 130771 - DNA, 25 bp, Canis familiaris
gattcattcttgatcatgcaagttt

SEQ ID NO: 130772 - DNA, 25 bp, Canis familiaris
gattctgattcgatacaagtttggt

SEQ ID NO: 130773 - DNA, 25 bp, Canis familiaris
gattcgattctcaaattaggtcatg

SEQ ID NO: 130774 - DNA, 25 bp, Canis familiaris
gattcgttggacctatgcaagatca

SEQ ID NO: 130775 - DNA, 25 bp, Canis familiaris
gattctgtgagccccaggaaatccc

SEQ ID NO: 130776 - DNA, 25 bp, Canis familiaris
gattctctgcaccacctggtggtgc

SEQ ID NO: 130777 - DNA, 25 bp, Canis familiaris
gattctccacaggccatgctgtgag

SEQ ID NO: 130778 - DNA, 25 bp, Canis familiaris
gattctgcagcagggtcagcatggg

SEQ ID NO: 130779 - DNA, 25 bp, Canis familiaris
gattctgctgaagatctgcggtggc

SEQ ID NO: 130780 - DNA, 25 bp, Canis familiaris
gattctctcagagtaccttgagctc

SEQ ID NO: 130781 - DNA, 25 bp, Canis familiaris
gattctgtcagaagacctggtctcc

SEQ ID NO: 130782 - DNA, 25 bp, Canis familiaris
gattctgaatgctgagccaggtttg

SEQ ID NO: 130783 - DNA, 25 bp, Canis familiaris
gattgctcaagctcagtcaggtact

SEQ ID NO: 130784 - DNA, 25 bp, Canis familiaris
gattcctcatgctatcaggggttat

SEQ ID NO: 130785 - DNA, 25 bp, Canis familiaris
gattccttctacaatcaggtctatt

SEQ ID NO: 130786 - DNA, 25 bp, Canis familiaris
gattccttctaaacacagctatcta

SEQ ID NO: 130787 - DNA, 25 bp, Canis familiaris
gattctcaagctttatgaccttcaa

SEQ ID NO: 130788 - DNA, 25 bp, Canis familiaris
gattctcagtttctgattctctcca

SEQ ID NO: 130789 - DNA, 25 bp, Canis familiaris
gattctcactcttcatctgtattgt

SEQ ID NO: 130790 - DNA, 25 bp, Canis familiaris
gattctgcctatttctgttggtgtc

SEQ ID NO: 130791 - DNA, 25 bp, Canis familiaris
gattctcatcgactttgtgtggatc

SEQ ID NO: 130792 - DNA, 25 bp, Canis familiaris
gattccatcgatttatgcagtcggc

SEQ ID NO: 130793 - DNA, 25 bp, Canis familiaris
gattcgcatgcgaggatggtcgaga

SEQ ID NO: 130794 - DNA, 25 bp, Canis familiaris
gattcgcacgatgagtgtaaagaac

SEQ ID NO: 130795 - DNA, 25 bp, Canis familiaris
gattccaggagccagtgtcggtgaa

SEQ ID NO: 130796 - DNA, 25 bp, Canis familiaris
gattccatgggatgttatgatgtaa

SEQ ID NO: 130797 - DNA, 25 bp, Canis familiaris
gattcctgttcatgttggattcaac

SEQ ID NO: 130798 - DNA, 25 bp, Canis familiaris
gattccatttcatcagtaggtaccg

SEQ ID NO: 130799 - DNA, 25 bp, Canis familiaris
gattgccttattgaataggtcacta

SEQ ID NO: 130800 - DNA, 25 bp, Canis familiaris
gattgccattgaaccagaaggatca

SEQ ID NO: 130801 - DNA, 25 bp, Canis familiaris
gattccagtgaagctgacagtgaca

SEQ ID NO: 130802 - DNA, 25 bp, Canis familiaris
gattctatgcttgggctgaaggaca

SEQ ID NO: 130803 - DNA, 25 bp, Canis familiaris
gattcctgtttgcccaatggatcat

SEQ ID NO: 130804 - DNA, 25 bp, Canis familiaris
gattctctatttccgccatatatat

SEQ ID NO: 130805 - DNA, 25 bp, Canis familiaris
gattcccattatcattacatatttt

SEQ ID NO: 130806 - DNA, 25 bp, Canis familiaris
gattccacattatgactgagatctt

SEQ ID NO: 130807 - DNA, 25 bp, Canis familiaris
gattccaccataggagctgactttt

SEQ ID NO: 130808 - DNA, 25 bp, Canis familiaris
gattccctcatcaaggctacaattg

SEQ ID NO: 130809 - DNA, 25 bp, Canis familiaris
gattctcagctcggaggtaatttgc

SEQ ID NO: 130810 - DNA, 25 bp, Canis familiaris
gattccagctcggagtaatttgctc

SEQ ID NO: 130811 - DNA, 25 bp, Canis familiaris
gattccactgctgggtatttacccc

SEQ ID NO: 130812 - DNA, 25 bp, Canis familiaris
gattggactgggttatactcagact

SEQ ID NO: 130813 - DNA, 25 bp, Canis familiaris
gattgctaatggtttcttctgaggt

SEQ ID NO: 130814 - DNA, 25 bp, Canis familiaris
gattctgtatagttctttgtatcgt

SEQ ID NO: 130815 - DNA, 25 bp, Canis familiaris
gattcgggagcacctttgaacgttg

SEQ ID NO: 130816 - DNA, 25 bp, Canis familiaris
gattctggaatcccttctggaagtt

SEQ ID NO: 130817 - DNA, 25 bp, Canis familiaris
gattgggttcctctcggaatgacgc

SEQ ID NO: 130818 - DNA, 25 bp, Canis familiaris
gattgtggcccgtggcttaatagcc

SEQ ID NO: 130819 - DNA, 25 bp, Canis familiaris
gttgggccttgctgctgttaatggc

SEQ ID NO: 130820 - DNA, 25 bp, Canis familiaris
gttgcggctttctgtgggaaggacc

SEQ ID NO: 130821 - DNA, 25 bp, Canis familiaris
gttcggtattttccggatgacgtcg

SEQ ID NO: 130822 - DNA, 25 bp, Canis familiaris
gttcaggaactgagtcggtacgacg

SEQ ID NO: 130823 - DNA, 25 bp, Canis familiaris
gttcggcaaggtagtcggacacgga

SEQ ID NO: 130824 - DNA, 25 bp, Canis familiaris
gttcggcaatgccaagacggtccgg

SEQ ID NO: 130825 - DNA, 25 bp, Canis familiaris
gttggacaatctcagggtgaccaga

SEQ ID NO: 130826 - DNA, 25 bp, Canis familiaris
gattggctttcttaaatggaccagg

SEQ ID NO: 130827 - DNA, 25 bp, Canis familiaris
gttgtcccctcatagtgataaaagc

SEQ ID NO: 130828 - DNA, 25 bp, Canis familiaris
gttgtaccaccttacatgaagtatt

SEQ ID NO: 130829 - DNA, 25 bp, Canis familiaris
gattgaaccaccccattggtacatt

SEQ ID NO: 130830 - DNA, 25 bp, Canis familiaris
gttgggaacggccatcaggtcacaa

SEQ ID NO: 130831 - DNA, 25 bp, Canis familiaris
gttgggaaccatgactgttacataa

SEQ ID NO: 130832 - DNA, 25 bp, Canis familiaris
gttggaccacctcaactctaaaaag

SEQ ID NO: 130833 - DNA, 25 bp, Canis familiaris
gttccaacccaacatctcaagtaaa

SEQ ID NO: 130834 - DNA, 25 bp, Canis familiaris
gttcgaagtcctgtactgcgggaag

SEQ ID NO: 130835 - DNA, 25 bp, Canis familiaris
gttggaagaccataaccaccgcagc

SEQ ID NO: 130836 - DNA, 25 bp, Canis familiaris
gttgtgttaccataagccaacggac

SEQ ID NO: 130837 - DNA, 25 bp, Canis familiaris
gttgtttcttcatctacgaaccaaa

SEQ ID NO: 130838 - DNA, 25 bp, Canis familiaris
gttgttcctacatggctagaaccat

SEQ ID NO: 130839 - DNA, 25 bp, Canis familiaris
gttggccccagaggcctggagagtc

SEQ ID NO: 130840 - DNA, 25 bp, Canis familiaris
gttggctcccagtgaggagagagtg

SEQ ID NO: 130841 - DNA, 25 bp, Canis familiaris
gttgagccccagggggaaggtgcac

SEQ ID NO: 130842 - DNA, 25 bp, Canis familiaris
gttgttcccaggctggcagagggcc

SEQ ID NO: 130843 - DNA, 25 bp, Canis familiaris
gttgttcaaaggcacaaggcactgg

SEQ ID NO: 130844 - DNA, 25 bp, Canis familiaris
gttgttcaacggctacaggcagcgc

SEQ ID NO: 130845 - DNA, 25 bp, Canis familiaris
gattgatttacggcgctaaggatga

SEQ ID NO: 130846 - DNA, 25 bp, Canis familiaris
gattgtgagtgctgccctaagtaga

SEQ ID NO: 130847 - DNA, 25 bp, Canis familiaris
gattcgatgctctagccgtagcaga

SEQ ID NO: 130848 - DNA, 25 bp, Canis familiaris
gattggtcatcttggtgtcaggcaa

SEQ ID NO: 130849 - DNA, 25 bp, Canis familiaris
gttggatcagcccgatgacagagat

SEQ ID NO: 130850 - DNA, 25 bp, Canis familiaris
gttggcatgccacggttgctaatta

SEQ ID NO: 130851 - DNA, 25 bp, Canis familiaris
gattggtgcgactgggccatgatta

SEQ ID NO: 130852 - DNA, 25 bp, Canis familiaris
gattggccgaagcctggtcatcgat

SEQ ID NO: 130853 - DNA, 25 bp, Canis familiaris
gattggaatgaaggtggcactggaa

SEQ ID NO: 130854 - DNA, 25 bp, Canis familiaris
gattgtactaaccagccaagtgaga

SEQ ID NO: 130855 - DNA, 25 bp, Canis familiaris
gttgtgtcctactccaaggagaccc

SEQ ID NO: 130856 - DNA, 25 bp, Canis familiaris
gttggtcacccagtccagaggaaac

SEQ ID NO: 130857 - DNA, 25 bp, Canis familiaris
gttggctcccccatgaggggtatgg

SEQ ID NO: 130858 - DNA, 25 bp, Canis familiaris
gttgtcctttggcttggtgtgtatg

SEQ ID NO: 130859 - DNA, 25 bp, Canis familiaris
gttgtacctctacaccttgttgagg

SEQ ID NO: 130860 - DNA, 25 bp, Canis familiaris
gttgaacccttgaagccatctgaag

SEQ ID NO: 130861 - DNA, 25 bp, Canis familiaris
gttggcctcctgttacacattaaaa

SEQ ID NO: 130862 - DNA, 25 bp, Canis familiaris
gttggagtcctttactcttatttca

SEQ ID NO: 130863 - DNA, 25 bp, Canis familiaris
gttggtactgtttactttctgatcg

SEQ ID NO: 130864 - DNA, 25 bp, Canis familiaris
gttggcgagagttgaccttgttgtc

SEQ ID NO: 130865 - DNA, 25 bp, Canis familiaris
gattggcaggattgaggtgtctttg

SEQ ID NO: 130866 - DNA, 25 bp, Canis familiaris
gattctgtggtttcgctgttattaa

SEQ ID NO: 130867 - DNA, 25 bp, Canis familiaris
gattctgtgagtttggttttctttt

SEQ ID NO: 130868 - DNA, 25 bp, Canis familiaris
gattgtgattatttgggagtcttct

SEQ ID NO: 130869 - DNA, 25 bp, Canis familiaris
gttggaggcttccggagtctgaatc

SEQ ID NO: 130870 - DNA, 25 bp, Canis familiaris
gttgtgagttcaagctgcgagtcag

SEQ ID NO: 130871 - DNA, 25 bp, Canis familiaris
gattgatagctctttctcgattccg

SEQ ID NO: 130872 - DNA, 25 bp, Canis familiaris
gattgcaaggaaatctcccatcaat

SEQ ID NO: 130873 - DNA, 25 bp, Canis familiaris
gattccacgagaattccatatagaa

SEQ ID NO: 130874 - DNA, 25 bp, Canis familiaris
gattccagagagccattcctaacac

SEQ ID NO: 130875 - DNA, 25 bp, Canis familiaris
gattgcaactggcctggccgcaaca

SEQ ID NO: 130876 - DNA, 25 bp, Canis familiaris
gattgtcactagcgggcagcagaag

SEQ ID NO: 130877 - DNA, 25 bp, Canis familiaris
gttggccatcagttcagggagaaca

SEQ ID NO: 130878 - DNA, 25 bp, Canis familiaris
gttggcctggttggggtgagtgccc

SEQ ID NO: 130879 - DNA, 25 bp, Canis familiaris
gattgcgcgctgatgtgtgggggcg

SEQ ID NO: 130880 - DNA, 25 bp, Canis familiaris
gttggtgtggtgggctggaagcgtt

SEQ ID NO: 130881 - DNA, 25 bp, Canis familiaris
gattcccgagtctctgagtatcgtt

SEQ ID NO: 130882 - DNA, 25 bp, Canis familiaris
gattgccccgtgtaaacaccagtct

SEQ ID NO: 130883 - DNA, 25 bp, Canis familiaris
gattgtccctaataacacacatgct

SEQ ID NO: 130884 - DNA, 25 bp, Canis familiaris
gattggccgctaagaagccacctgc

SEQ ID NO: 130885 - DNA, 25 bp, Canis familiaris
gattctggggataatacatcacctc

SEQ ID NO: 130886 - DNA, 25 bp, Canis familiaris
gattgggcggatttgagccccttcc

SEQ ID NO: 130887 - DNA, 25 bp, Canis familiaris
gattgaacggactgtactcactccc

SEQ ID NO: 130888 - DNA, 25 bp, Canis familiaris
gttgaacggatctagggctacacta

SEQ ID NO: 130889 - DNA, 25 bp, Canis familiaris
gttaacctacagagtcgcacgtgag

SEQ ID NO: 130890 - DNA, 25 bp, Canis familiaris
gttggaccccatcagtaagctggat

SEQ ID NO: 130891 - DNA, 25 bp, Canis familiaris
gttggaccggcaaattggggagatc

SEQ ID NO: 130892 - DNA, 25 bp, Canis familiaris
gttgagacgggtgctgggcgaggag

SEQ ID NO: 130893 - DNA, 25 bp, Canis familiaris
gttggaagtttttttgctgtggcag

SEQ ID NO: 130894 - DNA, 25 bp, Canis familiaris
gttggactgtggctgtttcatgggc

SEQ ID NO: 130895 - DNA, 25 bp, Canis familiaris
gttgagatttcgagtttgtgagttt

SEQ ID NO: 130896 - DNA, 25 bp, Canis familiaris
gttggtgtccttgttaggtgttatt

SEQ ID NO: 130897 - DNA, 25 bp, Canis familiaris
gttgggtcctctgttgacaggtaca

SEQ ID NO: 130898 - DNA, 25 bp, Canis familiaris
gttgggatattctgttgaccgctaa

SEQ ID NO: 130899 - DNA, 25 bp, Canis familiaris
gttgggaattgtgggtcaacaagaa

SEQ ID NO: 130900 - DNA, 25 bp, Canis familiaris
gattgggtttgtggggggacatgaa

SEQ ID NO: 130901 - DNA, 25 bp, Canis familiaris
gattgtgtggtattggggggattgg

SEQ ID NO: 130902 - DNA, 25 bp, Canis familiaris
gattgtgtttaatccgagtttcgtt

SEQ ID NO: 130903 - DNA, 25 bp, Canis familiaris
gttggttttggagctagtgttcagt

SEQ ID NO: 130904 - DNA, 25 bp, Canis familiaris
gttggctattttttctattgtggca

SEQ ID NO: 130905 - DNA, 25 bp, Canis familiaris
gttggtggttgttggttgttggata

SEQ ID NO: 130906 - DNA, 25 bp, Canis familiaris
gttgggcaaagattggtttttcaca

SEQ ID NO: 130907 - DNA, 25 bp, Canis familiaris
gattgggccaaaaggctgttgagtc

SEQ ID NO: 130908 - DNA, 25 bp, Canis familiaris
gttgggccacacaggccaggacatc

SEQ ID NO: 130909 - DNA, 25 bp, Canis familiaris
gttggtcgcactctataaggaatta

SEQ ID NO: 130910 - DNA, 25 bp, Canis familiaris
gattggtcacacttattactcggat

SEQ ID NO: 130911 - DNA, 25 bp, Canis familiaris
gttggaagacttgtgacctgcagct

SEQ ID NO: 130912 - DNA, 25 bp, Canis familiaris
gttgggagttgatcgagccacactg

SEQ ID NO: 130913 - DNA, 25 bp, Canis familiaris
gattggggttagaccagcaccccgc

SEQ ID NO: 130914 - DNA, 25 bp, Canis familiaris
gttgtgagttgtcaacgcacacccg

SEQ ID NO: 130915 - DNA, 25 bp, Canis familiaris
gttggttttgtctgtctctcaactg

SEQ ID NO: 130916 - DNA, 25 bp, Canis familiaris
gttggttctttcactccaggaagag

SEQ ID NO: 130917 - DNA, 25 bp, Canis familiaris
gttgttgtctttcacattaaaagaa

SEQ ID NO: 130918 - DNA, 25 bp, Canis familiaris
gttgatctcgtgtgacaaaaaaaaa

SEQ ID NO: 130919 - DNA, 25 bp, Canis familiaris
gttgaccaacttgcaaaagaagcag

SEQ ID NO: 130920 - DNA, 25 bp, Canis familiaris
gttaacgtttcagaactcagatgga

SEQ ID NO: 130921 - DNA, 25 bp, Canis familiaris
gttgaacgtttcgcaagcgtagcgg

SEQ ID NO: 130922 - DNA, 25 bp, Canis familiaris
gttgagacgtttctgcaagcgtagc

SEQ ID NO: 130923 - DNA, 25 bp, Canis familiaris
gttggtcgtttttcagacttacact

SEQ ID NO: 130924 - DNA, 25 bp, Canis familiaris
gttgtgacgatacttctggtttccc

SEQ ID NO: 130925 - DNA, 25 bp, Canis familiaris
gttgctgaagaacttgaagctagtg

SEQ ID NO: 130926 - DNA, 25 bp, Canis familiaris
gttggacaagatctgacagtgagga

SEQ ID NO: 130927 - DNA, 25 bp, Canis familiaris
gttggacaactgtttctgtgaggga

SEQ ID NO: 130928 - DNA, 25 bp, Canis familiaris
gttggggtgctgccttaggaggtac

SEQ ID NO: 130929 - DNA, 25 bp, Canis familiaris
gattgctcggtctcttggtaaatat

SEQ ID NO: 130930 - DNA, 25 bp, Canis familiaris
gattgatcctactcattgactaaaa

SEQ ID NO: 130931 - DNA, 25 bp, Canis familiaris
gattgtcctttccctgagcaaaaaa

SEQ ID NO: 130932 - DNA, 25 bp, Canis familiaris
gattgttactacccttaaaagaatg

SEQ ID NO: 130933 - DNA, 25 bp, Canis familiaris
gattgttaccagcccaaataaagtt

SEQ ID NO: 130934 - DNA, 25 bp, Canis familiaris
gttggatgattctgcccgaaaaggt

SEQ ID NO: 130935 - DNA, 25 bp, Canis familiaris
gattgcaaatactgcccgcaaagct

SEQ ID NO: 130936 - DNA, 25 bp, Canis familiaris
gattgcaccaatgttcgtcagacgt

SEQ ID NO: 130937 - DNA, 25 bp, Canis familiaris
gattgcccaacctacaggaagcttg

SEQ ID NO: 130938 - DNA, 25 bp, Canis familiaris
gattgcccttccatcatggagcagt

SEQ ID NO: 130939 - DNA, 25 bp, Canis familiaris
gattcctcttgggttgaagcacgac

SEQ ID NO: 130940 - DNA, 25 bp, Canis familiaris
gattccttctgttgtatactcacgt

SEQ ID NO: 130941 - DNA, 25 bp, Canis familiaris
gattcctcagttttttgcctggtga

SEQ ID NO: 130942 - DNA, 25 bp, Canis familiaris
gattcctccttacaatcacttggac

SEQ ID NO: 130943 - DNA, 25 bp, Canis familiaris
gattcccctgttcatcatgattggg

SEQ ID NO: 130944 - DNA, 25 bp, Canis familiaris
gattcccctgcatcagaaataaacc

SEQ ID NO: 130945 - DNA, 25 bp, Canis familiaris
gattccctgccaccagaattagaga

SEQ ID NO: 130946 - DNA, 25 bp, Canis familiaris
gtcttgccttgacccaatctaatga

SEQ ID NO: 130947 - DNA, 25 bp, Canis familiaris
gattgagtctggtgtccatctaatg

SEQ ID NO: 130948 - DNA, 25 bp, Canis familiaris
gattgaatctggtcgcaccagcagc

SEQ ID NO: 130949 - DNA, 25 bp, Canis familiaris
gttgttcatgagtcgcaccaaccgg

SEQ ID NO: 130950 - DNA, 25 bp, Canis familiaris
gttgtctcatgagcacacgaaagct

SEQ ID NO: 130951 - DNA, 25 bp, Canis familiaris
gattgcttcaaggcaaaggcaccaa

SEQ ID NO: 130952 - DNA, 25 bp, Canis familiaris
gattgtggcaagcaaccagcacacc

SEQ ID NO: 130953 - DNA, 25 bp, Canis familiaris
gattgttggatgtaactgcacagat

SEQ ID NO: 130954 - DNA, 25 bp, Canis familiaris
gattgtatcggatcacagaagtgtg

SEQ ID NO: 130955 - DNA, 25 bp, Canis familiaris
gttgttctcagcaccgaggttggac

SEQ ID NO: 130956 - DNA, 25 bp, Canis familiaris
gttctagtctcacccagggaaggca

SEQ ID NO: 130957 - DNA, 25 bp, Canis familiaris
gttgcaatttccctcgggatggcgc

SEQ ID NO: 130958 - DNA, 25 bp, Canis familiaris
gttgctgattctgttccggaagccg

SEQ ID NO: 130959 - DNA, 25 bp, Canis familiaris
gttggacttgccacagtgctgaact

SEQ ID NO: 130960 - DNA, 25 bp, Canis familiaris
gttggaagggctacaggatgacaca

SEQ ID NO: 130961 - DNA, 25 bp, Canis familiaris
gttgccaatggattccggatcccac

SEQ ID NO: 130962 - DNA, 25 bp, Canis familiaris
gttgcaacaggagtcttggtactac

SEQ ID NO: 130963 - DNA, 25 bp, Canis familiaris
gttggtgggacagctggtatctaga

SEQ ID NO: 130964 - DNA, 25 bp, Canis familiaris
gttggttgaccagtgggtcttcagc

SEQ ID NO: 130965 - DNA, 25 bp, Canis familiaris
gttgggctgagtgctagtgccttac

SEQ ID NO: 130966 - DNA, 25 bp, Canis familiaris
gttggggaaggctttgcttttgctc

SEQ ID NO: 130967 - DNA, 25 bp, Canis familiaris
gttgggtgaacctggcttgttgccc

SEQ ID NO: 130968 - DNA, 25 bp, Canis familiaris
gttggtgtgaaactcggctgtatta

SEQ ID NO: 130969 - DNA, 25 bp, Canis familiaris
gattggtggataggaaggctggtga

SEQ ID NO: 130970 - DNA, 25 bp, Canis familiaris
gttgggggagtggatggggtgaagc

SEQ ID NO: 130971 - DNA, 25 bp, Canis familiaris
gttgggggagggttaatgcatgggc

SEQ ID NO: 130972 - DNA, 25 bp, Canis familiaris
gattgggggtgcagggagtctgtgg

SEQ ID NO: 130973 - DNA, 25 bp, Canis familiaris
gattgggggtcatcattgtgtggca

SEQ ID NO: 130974 - DNA, 25 bp, Canis familiaris
gattgggagtgttatatgtattgcg

SEQ ID NO: 130975 - DNA, 25 bp, Canis familiaris
gattgggatgttctgtgttcgtgct

SEQ ID NO: 130976 - DNA, 25 bp, Canis familiaris
gattgaagtttccttgtgtcaggaa

SEQ ID NO: 130977 - DNA, 25 bp, Canis familiaris
gattgcattaatagtccttgtcgaa

SEQ ID NO: 130978 - DNA, 25 bp, Canis familiaris
gttgtgggcgtgtcgtttcaaagtg

SEQ ID NO: 130979 - DNA, 25 bp, Canis familiaris
gattgcggggtatgggccacagagc

SEQ ID NO: 130980 - DNA, 25 bp, Canis familiaris
gttgtggggttgaagcccaacagcc

SEQ ID NO: 130981 - DNA, 25 bp, Canis familiaris
gttggagggtagtaccgccagcagc

SEQ ID NO: 130982 - DNA, 25 bp, Canis familiaris
gattggagggaagcacggccgagac

SEQ ID NO: 130983 - DNA, 25 bp, Canis familiaris
gattgctgatgtcaagatccggccg

SEQ ID NO: 130984 - DNA, 25 bp, Canis familiaris
gattgcatgtgactccgaagctgac

SEQ ID NO: 130985 - DNA, 25 bp, Canis familiaris
gattgtgctgagtcctacagtatgg

SEQ ID NO: 130986 - DNA, 25 bp, Canis familiaris
gattgatgtgtgtccggagaatgcc

SEQ ID NO: 130987 - DNA, 25 bp, Canis familiaris
gattgggatgcggctggaggtgctg

SEQ ID NO: 130988 - DNA, 25 bp, Canis familiaris
gattgatcgccgggagcgtgagtga

SEQ ID NO: 130989 - DNA, 25 bp, Canis familiaris
gttgtcccgaggtggcatgtatgct

SEQ ID NO: 130990 - DNA, 25 bp, Canis familiaris
gttgtcaaggcacaggcactggatg

SEQ ID NO: 130991 - DNA, 25 bp, Canis familiaris
gttggcttggcagcagaccagttgc

SEQ ID NO: 130992 - DNA, 25 bp, Canis familiaris
gttgtcttacaaatcaccagttccc

SEQ ID NO: 130993 - DNA, 25 bp, Canis familiaris
gttgatattaaaaagtcagtttcct

SEQ ID NO: 130994 - DNA, 25 bp, Canis familiaris
gttgataatagcatagagccgaata

SEQ ID NO: 130995 - DNA, 25 bp, Canis familiaris
gttgagaaagttcagagctagcatc

SEQ ID NO: 130996 - DNA, 25 bp, Canis familiaris
gattgagaaggtggccaacttggaa

SEQ ID NO: 130997 - DNA, 25 bp, Canis familiaris
gattgtgaagggcctccagaggtac

SEQ ID NO: 130998 - DNA, 25 bp, Canis familiaris
gttggaagacggcggagcgctacat

SEQ ID NO: 130999 - DNA, 25 bp, Canis familiaris
gttggaagactttttggctgtcctt

SEQ ID NO: 131000 - DNA, 25 bp, Canis familiaris
gttggtacacttaatctcaggtcct

SEQ ID NO: 131001 - DNA, 25 bp, Canis familiaris
gttggtgaccttgtgaatttctcgg

SEQ ID NO: 131002 - DNA, 25 bp, Canis familiaris
gttggatactctttgtgacttgtac

SEQ ID NO: 131003 - DNA, 25 bp, Canis familiaris
gttggctaactctttcctgagaacc

SEQ ID NO: 131004 - DNA, 25 bp, Canis familiaris
gattgggagactggcatgttctaaa

SEQ ID NO: 131005 - DNA, 25 bp, Canis familiaris
gattgaggagatagccaacctctac

SEQ ID NO: 131006 - DNA, 25 bp, Canis familiaris
gattgaggagatttcagatggacta

SEQ ID NO: 131007 - DNA, 25 bp, Canis familiaris
gattgcccagagaccagatgaacca

SEQ ID NO: 131008 - DNA, 25 bp, Canis familiaris
gattgcgccgaggcacgagatcacg

SEQ ID NO: 131009 - DNA, 25 bp, Canis familiaris
gattgcccaaggacaaattcttcag

SEQ ID NO: 131010 - DNA, 25 bp, Canis familiaris
gttgcccaaggacatagccaagctg

SEQ ID NO: 131011 - DNA, 25 bp, Canis familiaris
gttggcttagaacatcacctgcctc

SEQ ID NO: 131012 - DNA, 25 bp, Canis familiaris
gttggtttgagccaactctccagct

SEQ ID NO: 131013 - DNA, 25 bp, Canis familiaris
gattggtttcaaaacattccactta

SEQ ID NO: 131014 - DNA, 25 bp, Canis familiaris
gattgagtcctgcatggagcttccc

SEQ ID NO: 131015 - DNA, 25 bp, Canis familiaris
gattgcagttctgtgaggctcgagc

SEQ ID NO: 131016 - DNA, 25 bp, Canis familiaris
gattgcaccactttgagtgaccagc

SEQ ID NO: 131017 - DNA, 25 bp, Canis familiaris
gattgctccatcttgtgtatgaagc

SEQ ID NO: 131018 - DNA, 25 bp, Canis familiaris
gattgctgctggggttatgatcaca

SEQ ID NO: 131019 - DNA, 25 bp, Canis familiaris
gattgctcttggtccttgagcagca

SEQ ID NO: 131020 - DNA, 25 bp, Canis familiaris
gattgttggtggtcattggccactt

SEQ ID NO: 131021 - DNA, 25 bp, Canis familiaris
gattgactttagttggtcgcactct

SEQ ID NO: 131022 - DNA, 25 bp, Canis familiaris
gattgcctttaatgttatgatcctg

SEQ ID NO: 131023 - DNA, 25 bp, Canis familiaris
gattgctctgttaatacattgtaca

SEQ ID NO: 131024 - DNA, 25 bp, Canis familiaris
gattgccttctggagaaggtccaga

SEQ ID NO: 131025 - DNA, 25 bp, Canis familiaris
gattgccctcatgacaattgtcaag

SEQ ID NO: 131026 - DNA, 25 bp, Canis familiaris
gttgatccgggaccgtgttgaccaa

SEQ ID NO: 131027 - DNA, 25 bp, Canis familiaris
gttggcgtggtgtgcttggtaagca

SEQ ID NO: 131028 - DNA, 25 bp, Canis familiaris
gttgggtgtgcttttatgctgtaac

SEQ ID NO: 131029 - DNA, 25 bp, Canis familiaris
gttgtgggtcatgttatgcctcacc

SEQ ID NO: 131030 - DNA, 25 bp, Canis familiaris
gttgtgcggtctcgcatttcacatc

SEQ ID NO: 131031 - DNA, 25 bp, Canis familiaris
gattgaccgccacatgtatcatagc

SEQ ID NO: 131032 - DNA, 25 bp, Canis familiaris
gattgaccaaaccagttcataacgg

SEQ ID NO: 131033 - DNA, 25 bp, Canis familiaris
gttggccaatgacagcttttacgtg

SEQ ID NO: 131034 - DNA, 25 bp, Canis familiaris
gttggcctatcacagtattttttca

SEQ ID NO: 131035 - DNA, 25 bp, Canis familiaris
gattgaaataaatgtctctgtcttt

SEQ ID NO: 131036 - DNA, 25 bp, Canis familiaris
gattgatttgacgttatccttttat

SEQ ID NO: 131037 - DNA, 25 bp, Canis familiaris
gttgtttgaacttttcgtcattgcg

SEQ ID NO: 131038 - DNA, 25 bp, Canis familiaris
gattgtagatgttttttccttttga

SEQ ID NO: 131039 - DNA, 25 bp, Canis familiaris
gattgtcagatattttatacttttt

SEQ ID NO: 131040 - DNA, 25 bp, Canis familiaris
gttgaagagattttaactcctagta

SEQ ID NO: 131041 - DNA, 25 bp, Canis familiaris
gttggggaggttgacttcttggata

SEQ ID NO: 131042 - DNA, 25 bp, Canis familiaris
gttagggggttgttccatgggagat

SEQ ID NO: 131043 - DNA, 25 bp, Canis familiaris
gattggggtcttaacacgtgggagt

SEQ ID NO: 131044 - DNA, 25 bp, Canis familiaris
gattgggctctctgctcagcagagt

SEQ ID NO: 131045 - DNA, 25 bp, Canis familiaris
gattggtgcttctgtggattctcat

SEQ ID NO: 131046 - DNA, 25 bp, Canis familiaris
gattgacccatcaggagtttcatat

SEQ ID NO: 131047 - DNA, 25 bp, Canis familiaris
gattgaccactgagatagctatttt

SEQ ID NO: 131048 - DNA, 25 bp, Canis familiaris
gattgaccagcatgagatatttgtg

SEQ ID NO: 131049 - DNA, 25 bp, Canis familiaris
gttaatagaaggtatatcgcatgac

SEQ ID NO: 131050 - DNA, 25 bp, Canis familiaris
gttaaactagattgtatccatgact

SEQ ID NO: 131051 - DNA, 25 bp, Canis familiaris
gattgaatttagcttacctgatcta

SEQ ID NO: 131052 - DNA, 25 bp, Canis familiaris
gattgtttcctgggtacctacataa

SEQ ID NO: 131053 - DNA, 25 bp, Canis familiaris
gattgatataccatacaggcttaaa

SEQ ID NO: 131054 - DNA, 25 bp, Canis familiaris
gattgatgaactatgcgggcttcat

SEQ ID NO: 131055 - DNA, 25 bp, Canis familiaris
gattgaattttactggagctgtgca

SEQ ID NO: 131056 - DNA, 25 bp, Canis familiaris
gattgtatccatgactggtattgcc

SEQ ID NO: 131057 - DNA, 25 bp, Canis familiaris
gttgtaccagctgtggtttccttgc

SEQ ID NO: 131058 - DNA, 25 bp, Canis familiaris
gttgtccaagtcgggattgtcctac

SEQ ID NO: 131059 - DNA, 25 bp, Canis familiaris
gtggtctcaagtgtggattccgtag

SEQ ID NO: 131060 - DNA, 25 bp, Canis familiaris
gttgtccgagtcaatcgactccttc

SEQ ID NO: 131061 - DNA, 25 bp, Canis familiaris
gttgtcctggatcagctagtgcagt

SEQ ID NO: 131062 - DNA, 25 bp, Canis familiaris
gttgtcctgcaacatggtgctgagt

SEQ ID NO: 131063 - DNA, 25 bp, Canis familiaris
gattgattctaaattaggtcatgtg

SEQ ID NO: 131064 - DNA, 25 bp, Canis familiaris
gattgcttgctatttagtggacagt

SEQ ID NO: 131065 - DNA, 25 bp, Canis familiaris
gattgttgcaatttcagaacagcag

SEQ ID NO: 131066 - DNA, 25 bp, Canis familiaris
gattgagtgagaatctctgagacaa

SEQ ID NO: 131067 - DNA, 25 bp, Canis familiaris
gattgcagatctggatgctctagac

SEQ ID NO: 131068 - DNA, 25 bp, Canis familiaris
gattgaatgctggacatgatgtata

SEQ ID NO: 131069 - DNA, 25 bp, Canis familiaris
gattgcatctgcagacatggatttc

SEQ ID NO: 131070 - DNA, 25 bp, Canis familiaris
gattgcttgcaaccattattatgct

SEQ ID NO: 131071 - DNA, 25 bp, Canis familiaris
gattgctctctaactatgtacatgt

SEQ ID NO: 131072 - DNA, 25 bp, Canis familiaris
gattgtgccaaactatctccagtca

SEQ ID NO: 131073 - DNA, 25 bp, Canis familiaris
gttggccaagtttctcacatgtagc

SEQ ID NO: 131074 - DNA, 25 bp, Canis familiaris
gttgtccatacttcagcacttgtga

SEQ ID NO: 131075 - DNA, 25 bp, Canis familiaris
gattgtcctgccttagactgttgta

SEQ ID NO: 131076 - DNA, 25 bp, Canis familiaris
gattggccaacagtgtgactttgta

SEQ ID NO: 131077 - DNA, 25 bp, Canis familiaris
gattgaggcaatcttgacttctgaa

SEQ ID NO: 131078 - DNA, 25 bp, Canis familiaris
gattgatgccttttttttcatgaca

SEQ ID NO: 131079 - DNA, 25 bp, Canis familiaris
gttgtgcgcctggtagttctaggaa

SEQ ID NO: 131080 - DNA, 25 bp, Canis familiaris
gttgtcatcctggacctttgggaag

SEQ ID NO: 131081 - DNA, 25 bp, Canis familiaris
gattgtccctgtatttggaggagga

SEQ ID NO: 131082 - DNA, 25 bp, Canis familiaris
gattgtccctgtatttggaggagga

SEQ ID NO: 131083 - DNA, 25 bp, Canis familiaris
gattgtgtgcgcatatttgggggat

SEQ ID NO: 131084 - DNA, 25 bp, Canis familiaris
gattggttggcttttgtgcagggtc

SEQ ID NO: 131085 - DNA, 25 bp, Canis familiaris
gattgtgttagttgtaatggagggc

SEQ ID NO: 131086 - DNA, 25 bp, Canis familiaris
gattgttctcactgcgatattggga

SEQ ID NO: 131087 - DNA, 25 bp, Canis familiaris
gattgttgtatttcttttggagcat

SEQ ID NO: 131088 - DNA, 25 bp, Canis familiaris
gattgaattagttcttatctggttg

SEQ ID NO: 131089 - DNA, 25 bp, Canis familiaris
gttgaattggtgtgtactcattgga

SEQ ID NO: 131090 - DNA, 25 bp, Canis familiaris
gtcgcattttggtgtactcctagat

SEQ ID NO: 131091 - DNA, 25 bp, Canis familiaris
gattgcatttcttaggtgttttaat

SEQ ID NO: 131092 - DNA, 25 bp, Canis familiaris
gattgctttgctttgtatttttctg

SEQ ID NO: 131093 - DNA, 25 bp, Canis familiaris
gattgctattgttgtactcacttct

SEQ ID NO: 131094 - DNA, 25 bp, Canis familiaris
gttgtactattaacttcttctggta

SEQ ID NO: 131095 - DNA, 25 bp, Canis familiaris
gattgaagtttaccttgtgtcggga

SEQ ID NO: 131096 - DNA, 25 bp, Canis familiaris
gattgaagtggtaccttctgcctct

SEQ ID NO: 131097 - DNA, 25 bp, Canis familiaris
gattgaagtggtaccttctgcctct

SEQ ID NO: 131098 - DNA, 25 bp, Canis familiaris
gattgaagtggtaccttctgcctct

SEQ ID NO: 131099 - DNA, 25 bp, Canis familiaris
gattgaagtggtaccttctgcctct

SEQ ID NO: 131100 - DNA, 25 bp, Canis familiaris
gattgaagtggtaccttctgcctct

SEQ ID NO: 131101 - DNA, 25 bp, Canis familiaris
gattgaagtgggaccttcttgcctc

SEQ ID NO: 131102 - DNA, 25 bp, Canis familiaris
gattgagaggtccagtcttcttcct

SEQ ID NO: 131103 - DNA, 25 bp, Canis familiaris
gttgatgagacctattctcctgcta

SEQ ID NO: 131104 - DNA, 25 bp, Canis familiaris
gattgatgggaatttgctcgttcag

SEQ ID NO: 131105 - DNA, 25 bp, Canis familiaris
gattgtttgacatttctcggtgctt

SEQ ID NO: 131106 - DNA, 25 bp, Canis familiaris
gattgaattgacttttgtgtggttt

SEQ ID NO: 131107 - DNA, 25 bp, Canis familiaris
gttggctacaggcttgttggctatt

SEQ ID NO: 131108 - DNA, 25 bp, Canis familiaris
gttgtctaattgcttttagcttgct

SEQ ID NO: 131109 - DNA, 25 bp, Canis familiaris
gattgtctcaattttttctagttgt

SEQ ID NO: 131110 - DNA, 25 bp, Canis familiaris
gattggataatttctgttgtagtgt

SEQ ID NO: 131111 - DNA, 25 bp, Canis familiaris
gattgtgagtttttgagtgtgtgtg

SEQ ID NO: 131112 - DNA, 25 bp, Canis familiaris
gattgtcaggtttccagtcttttat

SEQ ID NO: 131113 - DNA, 25 bp, Canis familiaris
gattgttgctttgctctgtatttta

SEQ ID NO: 131114 - DNA, 25 bp, Canis familiaris
gttgtctgtagttgctttattttga

SEQ ID NO: 131115 - DNA, 25 bp, Canis familiaris
gttgttgtagctggccttcttagcc

SEQ ID NO: 131116 - DNA, 25 bp, Canis familiaris
gttgtgtgatcagtgcccattagtt

SEQ ID NO: 131117 - DNA, 25 bp, Canis familiaris
gttcgggcacagactcacatgtgat

SEQ ID NO: 131118 - DNA, 25 bp, Canis familiaris
gttggggacagagcacattaagttt

SEQ ID NO: 131119 - DNA, 25 bp, Canis familiaris
gttggccaacaaacacattatgagt

SEQ ID NO: 131120 - DNA, 25 bp, Canis familiaris
gttggaaatcaccagagtttgagtc

SEQ ID NO: 131121 - DNA, 25 bp, Canis familiaris
gttggccaaacccagttctggctca

SEQ ID NO: 131122 - DNA, 25 bp, Canis familiaris
gttggaccagatcaactcctgtcta

SEQ ID NO: 131123 - DNA, 25 bp, Canis familiaris
gttggacgagaggacagcctttgta

SEQ ID NO: 131124 - DNA, 25 bp, Canis familiaris
gttgtacaagaggaactttcagaga

SEQ ID NO: 131125 - DNA, 25 bp, Canis familiaris
gttgtatccggatagtctccagagt

SEQ ID NO: 131126 - DNA, 25 bp, Canis familiaris
gttggcccaagatcatgtttcagca

SEQ ID NO: 131127 - DNA, 25 bp, Canis familiaris
gattgtcctcaactgatttgtccac

SEQ ID NO: 131128 - DNA, 25 bp, Canis familiaris
gattggcaatagctcttgtgaagac

SEQ ID NO: 131129 - DNA, 25 bp, Canis familiaris
gattggccataccttaaagagccta

SEQ ID NO: 131130 - DNA, 25 bp, Canis familiaris
gttggcgaccatctgaatagcccgc

SEQ ID NO: 131131 - DNA, 25 bp, Canis familiaris
gtaggaaaatagcaataccacgtgc

SEQ ID NO: 131132 - DNA, 25 bp, Canis familiaris
gtaggaaaaactctgaccgtgagcg

SEQ ID NO: 131133 - DNA, 25 bp, Canis familiaris
ttagtaaaactctgggccttgccgg

SEQ ID NO: 131134 - DNA, 25 bp, Canis familiaris
gggtcaccaccgaggaccctgcacg

SEQ ID NO: 131135 - DNA, 25 bp, Canis familiaris
gtgcggcaaccagatcggagccaag

SEQ ID NO: 131136 - DNA, 25 bp, Canis familiaris
gttggctacacgaactgggccacag

SEQ ID NO: 131137 - DNA, 25 bp, Canis familiaris
gttggtgacggatcagtcgctgact

SEQ ID NO: 131138 - DNA, 25 bp, Canis familiaris
gttgcctcgcggaacatattcgact

SEQ ID NO: 131139 - DNA, 25 bp, Canis familiaris
gttgcctcagcggcacactattgaa

SEQ ID NO: 131140 - DNA, 25 bp, Canis familiaris
gttggctccgcagcacatatgtaac

SEQ ID NO: 131141 - DNA, 25 bp, Canis familiaris
gattgtgaacctgctctatgaactc

SEQ ID NO: 131142 - DNA, 25 bp, Canis familiaris
gattgtaaagatgctccatggactg

SEQ ID NO: 131143 - DNA, 25 bp, Canis familiaris
gattgttgaagatctcattgacaca

SEQ ID NO: 131144 - DNA, 25 bp, Canis familiaris
gattggtgagactcatttgcttccc

SEQ ID NO: 131145 - DNA, 25 bp, Canis familiaris
gattgttagcattaatttccctaca

SEQ ID NO: 131146 - DNA, 25 bp, Canis familiaris
gattgataaattttttgccctgccc

SEQ ID NO: 131147 - DNA, 25 bp, Canis familiaris
gttgacgaagtagtttgtccccgcg

SEQ ID NO: 131148 - DNA, 25 bp, Canis familiaris
gttggaaattctgttgtcccacagc

SEQ ID NO: 131149 - DNA, 25 bp, Canis familiaris
gttggatgcaattctcttgttcctc

SEQ ID NO: 131150 - DNA, 25 bp, Canis familiaris
gttggagaaggctgagcttcctctc

SEQ ID NO: 131151 - DNA, 25 bp, Canis familiaris
gttggcatcatgagaagcagctggc

SEQ ID NO: 131152 - DNA, 25 bp, Canis familiaris
gttggcatcagtgtacagtggctca

SEQ ID NO: 131153 - DNA, 25 bp, Canis familiaris
gttggcaatttttcactgacatgcg

SEQ ID NO: 131154 - DNA, 25 bp, Canis familiaris
gttggcattatcatctccatgtaac

SEQ ID NO: 131155 - DNA, 25 bp, Canis familiaris
gttggctactcttcctgagaaacca

SEQ ID NO: 131156 - DNA, 25 bp, Canis familiaris
gttgtgtaaccttgggcaaagccac

SEQ ID NO: 131157 - DNA, 25 bp, Canis familiaris
gttggggagccaagcggaaggccat

SEQ ID NO: 131158 - DNA, 25 bp, Canis familiaris
gttggagggctaaggtgggcgctaa

SEQ ID NO: 131159 - DNA, 25 bp, Canis familiaris
gttggaggccaacagttccactagg

SEQ ID NO: 131160 - DNA, 25 bp, Canis familiaris
gttgggacccaaattgatctccgag

SEQ ID NO: 131161 - DNA, 25 bp, Canis familiaris
gttggaatcccaattcttccagtgg

SEQ ID NO: 131162 - DNA, 25 bp, Canis familiaris
gttggaatctaccctgttctcaggg

SEQ ID NO: 131163 - DNA, 25 bp, Canis familiaris
gttggaattcactttgtttgtttga

SEQ ID NO: 131164 - DNA, 25 bp, Canis familiaris
gttggagtgttcgtgttttttctga

SEQ ID NO: 131165 - DNA, 25 bp, Canis familiaris
gttgtgtgttccctatttttatcca

SEQ ID NO: 131166 - DNA, 25 bp, Canis familiaris
gattgtgttttctattttcctttct

SEQ ID NO: 131167 - DNA, 25 bp, Canis familiaris
gattgtttatgtcatttccctgcat

SEQ ID NO: 131168 - DNA, 25 bp, Canis familiaris
gattgtgttggatgattctgcccga

SEQ ID NO: 131169 - DNA, 25 bp, Canis familiaris
gattgttcttgttttcgctcataga

SEQ ID NO: 131170 - DNA, 25 bp, Canis familiaris
gattgtatctcagtgatttcctaga

SEQ ID NO: 131171 - DNA, 25 bp, Canis familiaris
gttggtgctgcaaaattgcctcaca

SEQ ID NO: 131172 - DNA, 25 bp, Canis familiaris
gttggcctatgaactttctacccat

SEQ ID NO: 131173 - DNA, 25 bp, Canis familiaris
gattgtacattatctgttctacctc

SEQ ID NO: 131174 - DNA, 25 bp, Canis familiaris
gttgtggaatcatctggtctttctg

SEQ ID NO: 131175 - DNA, 25 bp, Canis familiaris
gattgtggaaaagtttcttctgcga

SEQ ID NO: 131176 - DNA, 25 bp, Canis familiaris
gattgtaaataagtctctttccttc

SEQ ID NO: 131177 - DNA, 25 bp, Canis familiaris
gttgtaaatggactcttattggttg

SEQ ID NO: 131178 - DNA, 25 bp, Canis familiaris
gttggaataggacttccagctttat

SEQ ID NO: 131179 - DNA, 25 bp, Canis familiaris
gttggacagcagcagcattctagct

SEQ ID NO: 131180 - DNA, 25 bp, Canis familiaris
gattggctctgagacatgtgctcaa

SEQ ID NO: 131181 - DNA, 25 bp, Canis familiaris
gttggctcagcagtggtgatgctca

SEQ ID NO: 131182 - DNA, 25 bp, Canis familiaris
gattgtgcagctggtgggatctcca

SEQ ID NO: 131183 - DNA, 25 bp, Canis familiaris
gattgtgcagctgtccaagatcatc

SEQ ID NO: 131184 - DNA, 25 bp, Canis familiaris
gattgaggctgttccaaccagctct

SEQ ID NO: 131185 - DNA, 25 bp, Canis familiaris
gttgaggtggactacttagcctggt

SEQ ID NO: 131186 - DNA, 25 bp, Canis familiaris
gttggggccaagacttatgatcgag

SEQ ID NO: 131187 - DNA, 25 bp, Canis familiaris
gattggggccaagtctgttgagtcg

SEQ ID NO: 131188 - DNA, 25 bp, Canis familiaris
gattgagggcctttgtgttgcagac

SEQ ID NO: 131189 - DNA, 25 bp, Canis familiaris
gattgatggctgacttcttctagaa

SEQ ID NO: 131190 - DNA, 25 bp, Canis familiaris
gattgtggccctaaattaactttct

SEQ ID NO: 131191 - DNA, 25 bp, Canis familiaris
gttccacagcctatttaagttatcg

SEQ ID NO: 131192 - DNA, 25 bp, Canis familiaris
gttcccctaaatttaatgctgcttg

SEQ ID NO: 131193 - DNA, 25 bp, Canis familiaris
gttgggttaactttgaatcttggct

SEQ ID NO: 131194 - DNA, 25 bp, Canis familiaris
gttggttttacttgaatgattcatg

SEQ ID NO: 131195 - DNA, 25 bp, Canis familiaris
gttgttttcgaagaagcatctgaac

SEQ ID NO: 131196 - DNA, 25 bp, Canis familiaris
gttggtcttggaaggaccaagacat

SEQ ID NO: 131197 - DNA, 25 bp, Canis familiaris
gttggtctccgaacacacagaagaa

SEQ ID NO: 131198 - DNA, 25 bp, Canis familiaris
gttggctgccccagaaggcacaaaa

SEQ ID NO: 131199 - DNA, 25 bp, Canis familiaris
gttgagctccccagatatggtcaag

SEQ ID NO: 131200 - DNA, 25 bp, Canis familiaris
gttggctaccaaaggtgcctcacac

SEQ ID NO: 131201 - DNA, 25 bp, Canis familiaris
gttggtaaatttcgtgccagccacc

SEQ ID NO: 131202 - DNA, 25 bp, Canis familiaris
gttggtttatttgacacacctcctt

SEQ ID NO: 131203 - DNA, 25 bp, Canis familiaris
gttggttttctgtagtacttcccat

SEQ ID NO: 131204 - DNA, 25 bp, Canis familiaris
gttggcttattttacattttcctat

SEQ ID NO: 131205 - DNA, 25 bp, Canis familiaris
gttggcaccagtaatacagtctccc

SEQ ID NO: 131206 - DNA, 25 bp, Canis familiaris
gttgtcaactataaacacttctgta

SEQ ID NO: 131207 - DNA, 25 bp, Canis familiaris
gttggccaaaagaaagcttcttcag

SEQ ID NO: 131208 - DNA, 25 bp, Canis familiaris
gttggccactaagagaattttcgaa

SEQ ID NO: 131209 - DNA, 25 bp, Canis familiaris
gttggccactgttgtaagttctctt

SEQ ID NO: 131210 - DNA, 25 bp, Canis familiaris
gattggtccatgccagtacgacctt

SEQ ID NO: 131211 - DNA, 25 bp, Canis familiaris
gattgtgtcctgccatagactggtt

SEQ ID NO: 131212 - DNA, 25 bp, Canis familiaris
gttggccctggctacttggactatt

SEQ ID NO: 131213 - DNA, 25 bp, Canis familiaris
gttggccttcatcgacttgagacga

SEQ ID NO: 131214 - DNA, 25 bp, Canis familiaris
gattgtgccttcatggtagacaatg

SEQ ID NO: 131215 - DNA, 25 bp, Canis familiaris
gttgatggccaaatgttaaaatgtt

SEQ ID NO: 131216 - DNA, 25 bp, Canis familiaris
gttggccacaacattatgattattc

SEQ ID NO: 131217 - DNA, 25 bp, Canis familiaris
gttggccaaaacacattcatcatct

SEQ ID NO: 131218 - DNA, 25 bp, Canis familiaris
gttggccacagcaacttcttgcaag

SEQ ID NO: 131219 - DNA, 25 bp, Canis familiaris
gattgtgcttccacgattgtgcaag

SEQ ID NO: 131220 - DNA, 25 bp, Canis familiaris
gattgttccacgtctgtgtgtcagc

SEQ ID NO: 131221 - DNA, 25 bp, Canis familiaris
gttgtgttatggtctgtgctccagc

SEQ ID NO: 131222 - DNA, 25 bp, Canis familiaris
gttgtgtgccagaactgcagtcgac

SEQ ID NO: 131223 - DNA, 25 bp, Canis familiaris
gttgtgtgggaggcggtgcagcacc

SEQ ID NO: 131224 - DNA, 25 bp, Canis familiaris
gttgtctggggaggattaccgctgg

SEQ ID NO: 131225 - DNA, 25 bp, Canis familiaris
gattgttcggtagttttagtgtggg

SEQ ID NO: 131226 - DNA, 25 bp, Canis familiaris
gttgcttcggttatattgtctttgg

SEQ ID NO: 131227 - DNA, 25 bp, Canis familiaris
attctagtcaaatggcacttctggg

SEQ ID NO: 131228 - DNA, 25 bp, Canis familiaris
gattgtttttgattgttcagttata

SEQ ID NO: 131229 - DNA, 25 bp, Canis familiaris
gttgttttagactaaagtcactagt

SEQ ID NO: 131230 - DNA, 25 bp, Canis familiaris
gttgttttaagttatcctcttgatt

SEQ ID NO: 131231 - DNA, 25 bp, Canis familiaris
gattgttttcactcagttcatctaa

SEQ ID NO: 131232 - DNA, 25 bp, Canis familiaris
gattgttttctagatgtctgcaaat

SEQ ID NO: 131233 - DNA, 25 bp, Canis familiaris
gattgtctcttgcagccagtatgct

SEQ ID NO: 131234 - DNA, 25 bp, Canis familiaris
gattgtcattcgctgccagcaatta

SEQ ID NO: 131235 - DNA, 25 bp, Canis familiaris
gattgtcatttgtttgctaattata

SEQ ID NO: 131236 - DNA, 25 bp, Canis familiaris
gattgtagtgttttgtctcattaga

SEQ ID NO: 131237 - DNA, 25 bp, Canis familiaris
gttggaggcatttctttgttatgaa

SEQ ID NO: 131238 - DNA, 25 bp, Canis familiaris
gttggtggttttccttctatcaagc

SEQ ID NO: 131239 - DNA, 25 bp, Canis familiaris
gttggtatttggaactttactatga

SEQ ID NO: 131240 - DNA, 25 bp, Canis familiaris
gttggcttttctaatttgtactgta

SEQ ID NO: 131241 - DNA, 25 bp, Canis familiaris
gttggcaacttgcagattcagaact

SEQ ID NO: 131242 - DNA, 25 bp, Canis familiaris
tctgtccaattgtgaattctaaacc

SEQ ID NO: 131243 - DNA, 25 bp, Canis familiaris
gttcgacatgtaaagtgttgaagac

SEQ ID NO: 131244 - DNA, 25 bp, Canis familiaris
gttggactgtgaaactgaccgagag

SEQ ID NO: 131245 - DNA, 25 bp, Canis familiaris
gttgtgcacttttacaagccgcaaa

SEQ ID NO: 131246 - DNA, 25 bp, Canis familiaris
gttgtgcctttaactacttagtagc

SEQ ID NO: 131247 - DNA, 25 bp, Canis familiaris
gattgtgttttatttacttgtctac

SEQ ID NO: 131248 - DNA, 25 bp, Canis familiaris
gattgtgttatttattcctctgtcc

SEQ ID NO: 131249 - DNA, 25 bp, Canis familiaris
gattgtgtcttttatattttaccat

SEQ ID NO: 131250 - DNA, 25 bp, Canis familiaris
gattgtgcctgtacagcagttttca

SEQ ID NO: 131251 - DNA, 25 bp, Canis familiaris
gattgtgacaattctagcttattct

SEQ ID NO: 131252 - DNA, 25 bp, Canis familiaris
gattgtgtcaattcttctattttct

SEQ ID NO: 131253 - DNA, 25 bp, Canis familiaris
gttgattcccatttcaatgattcct

SEQ ID NO: 131254 - DNA, 25 bp, Canis familiaris
gttgcatgactccatgtccatcagt

SEQ ID NO: 131255 - DNA, 25 bp, Canis familiaris
gttgatactgactacctactaggga

SEQ ID NO: 131256 - DNA, 25 bp, Canis familiaris
gttggagtgagcaccatagctacgg

SEQ ID NO: 131257 - DNA, 25 bp, Canis familiaris
gttgtagtggtgactgacacatcca

SEQ ID NO: 131258 - DNA, 25 bp, Canis familiaris
gattgtgcattaccattaactccat

SEQ ID NO: 131259 - DNA, 25 bp, Canis familiaris
gttgtgtataatttacctctcagta

SEQ ID NO: 131260 - DNA, 25 bp, Canis familiaris
gttgtgtcaaatatgtctgcccaga

SEQ ID NO: 131261 - DNA, 25 bp, Canis familiaris
gttgtctagatgttcggtgcccaaa

SEQ ID NO: 131262 - DNA, 25 bp, Canis familiaris
gttggcatactgttttgtgcccagg

SEQ ID NO: 131263 - DNA, 25 bp, Canis familiaris
gattggtttatgtctttcagtcagg

SEQ ID NO: 131264 - DNA, 25 bp, Canis familiaris
gattggtttgtatttcatagctcag

SEQ ID NO: 131265 - DNA, 25 bp, Canis familiaris
gttggcttatgttttaggcctaaat

SEQ ID NO: 131266 - DNA, 25 bp, Canis familiaris
gttggcttcatgaatcagtcagtgt

SEQ ID NO: 131267 - DNA, 25 bp, Canis familiaris
gttggtatctgaatgagtctgtccc

SEQ ID NO: 131268 - DNA, 25 bp, Canis familiaris
gttggcaggctttaggcatgaccac

SEQ ID NO: 131269 - DNA, 25 bp, Canis familiaris
gttgtagagcttctcgtgactgatc

SEQ ID NO: 131270 - DNA, 25 bp, Canis familiaris
gttgtgggtgtgctcggttgaagat

SEQ ID NO: 131271 - DNA, 25 bp, Canis familiaris
gattgtgtggtggtctcaggttata

SEQ ID NO: 131272 - DNA, 25 bp, Canis familiaris
gattgtgtcttgacctagagtatga

SEQ ID NO: 131273 - DNA, 25 bp, Canis familiaris
gattgtgttttcatagcaccagact

SEQ ID NO: 131274 - DNA, 25 bp, Canis familiaris
gattgtggattgtcctgccttagac

SEQ ID NO: 131275 - DNA, 25 bp, Canis familiaris
gattgggattgggctttaactctaa

SEQ ID NO: 131276 - DNA, 25 bp, Canis familiaris
gattggtgactgtcgctttgtttct

SEQ ID NO: 131277 - DNA, 25 bp, Canis familiaris
gattggtcgctatgctttgtatgat

SEQ ID NO: 131278 - DNA, 25 bp, Canis familiaris
gttgcgctagaagtggattggatat

SEQ ID NO: 131279 - DNA, 25 bp, Canis familiaris
gttggctggcaagggaatttctggt

SEQ ID NO: 131280 - DNA, 25 bp, Canis familiaris
gttgagctccagaagaaaagtctga

SEQ ID NO: 131281 - DNA, 25 bp, Canis familiaris
gttgacccagtgttaccatgtctga

SEQ ID NO: 131282 - DNA, 25 bp, Canis familiaris
gttccgacagagtagacagcttcat

SEQ ID NO: 131283 - DNA, 25 bp, Canis familiaris
gttccgtcacagctgaggaagccca

SEQ ID NO: 131284 - DNA, 25 bp, Canis familiaris
gtccctgacgtcagggaagccctcc

SEQ ID NO: 131285 - DNA, 25 bp, Canis familiaris
gttgcctggcctctggaaaggcctc

SEQ ID NO: 131286 - DNA, 25 bp, Canis familiaris
gttcctggccaaaggcaacatccct

SEQ ID NO: 131287 - DNA, 25 bp, Canis familiaris
gttccaggccagagccaaatccgag

SEQ ID NO: 131288 - DNA, 25 bp, Canis familiaris
gttgaagagacgtgcaaagtccggg

SEQ ID NO: 131289 - DNA, 25 bp, Canis familiaris
gttgaagaccaatccaaccatcggc

SEQ ID NO: 131290 - DNA, 25 bp, Canis familiaris
gttgtaagccattacttaacacagt

SEQ ID NO: 131291 - DNA, 25 bp, Canis familiaris
gttggaactgaactttctcatcaaa

SEQ ID NO: 131292 - DNA, 25 bp, Canis familiaris
gttggcatttgctgtattcatatta

SEQ ID NO: 131293 - DNA, 25 bp, Canis familiaris
gttggttgagcatctcactcttgat

SEQ ID NO: 131294 - DNA, 25 bp, Canis familiaris
gttgtccaagcatcatcagcagttt

SEQ ID NO: 131295 - DNA, 25 bp, Canis familiaris
gttgcagctcaagatctcacagaag

SEQ ID NO: 131296 - DNA, 25 bp, Canis familiaris
gttgactccaggatccagacgtgta

SEQ ID NO: 131297 - DNA, 25 bp, Canis familiaris
gttgacccaggtttagaaggtgcct

SEQ ID NO: 131298 - DNA, 25 bp, Canis familiaris
gttctacaaggtttacacggtcgtg

SEQ ID NO: 131299 - DNA, 25 bp, Canis familiaris
ggtcctaatcgttaaccgaattgcg

SEQ ID NO: 131300 - DNA, 25 bp, Canis familiaris
gtgtcactaacgacgaacccgagtc

SEQ ID NO: 131301 - DNA, 25 bp, Canis familiaris
gttaggagcctacattccttgagtc

SEQ ID NO: 131302 - DNA, 25 bp, Canis familiaris
gttggaacctagctacactgtgatt

SEQ ID NO: 131303 - DNA, 25 bp, Canis familiaris
gttggaacatgtcgaacaacgtggt

SEQ ID NO: 131304 - DNA, 25 bp, Canis familiaris
gttgggccagttcaaaattggtttg

SEQ ID NO: 131305 - DNA, 25 bp, Canis familiaris
gttgggtcgaatgtaccttgggcct

SEQ ID NO: 131306 - DNA, 25 bp, Canis familiaris
gttgggttggagggacctgggatgg

SEQ ID NO: 131307 - DNA, 25 bp, Canis familiaris
gttggggtaagggagcgcaggaagg

SEQ ID NO: 131308 - DNA, 25 bp, Canis familiaris
gttggggcaaagcattggctggaaa

SEQ ID NO: 131309 - DNA, 25 bp, Canis familiaris
gttgtggaaaatgtgctggtggtgg

SEQ ID NO: 131310 - DNA, 25 bp, Canis familiaris
gttgggaagtagcagtgtgtgggga

SEQ ID NO: 131311 - DNA, 25 bp, Canis familiaris
gttggcgggctttaatgtttgtgga

SEQ ID NO: 131312 - DNA, 25 bp, Canis familiaris
gttgctgcgggctttaattttggaa

SEQ ID NO: 131313 - DNA, 25 bp, Canis familiaris
gttgtgcgttctgtaacattcggga

SEQ ID NO: 131314 - DNA, 25 bp, Canis familiaris
gttgggctccatgcttagagtggag

SEQ ID NO: 131315 - DNA, 25 bp, Canis familiaris
gttgggctccaacagcagattcagg

SEQ ID NO: 131316 - DNA, 25 bp, Canis familiaris
gttggacttcaattgaggactccag

SEQ ID NO: 131317 - DNA, 25 bp, Canis familiaris
gttggtttacagcaatatccacaga

SEQ ID NO: 131318 - DNA, 25 bp, Canis familiaris
gttggatatttctctacattcctga

SEQ ID NO: 131319 - DNA, 25 bp, Canis familiaris
gttggtcagttctacttcttgatcc

SEQ ID NO: 131320 - DNA, 25 bp, Canis familiaris
gttgatgagcagaccacactttgtg

SEQ ID NO: 131321 - DNA, 25 bp, Canis familiaris
gttgatacagtccaatctagtccat

SEQ ID NO: 131322 - DNA, 25 bp, Canis familiaris
gttgtccagtggatgtcagtacaaa

SEQ ID NO: 131323 - DNA, 25 bp, Canis familiaris
gttgatctactggattggcaatgac

SEQ ID NO: 131324 - DNA, 25 bp, Canis familiaris
gttgaagacgatatagagagaccta

SEQ ID NO: 131325 - DNA, 25 bp, Canis familiaris
gttgtgaactgtaaccaggtgccta

SEQ ID NO: 131326 - DNA, 25 bp, Canis familiaris
gttgtgtacatttgacctgggagat

SEQ ID NO: 131327 - DNA, 25 bp, Canis familiaris
gttgtgtcttgggatcactttgata

SEQ ID NO: 131328 - DNA, 25 bp, Canis familiaris
gttgtaattgcagatcctgtgagaa

SEQ ID NO: 131329 - DNA, 25 bp, Canis familiaris
gttgcaagtctgtttcatctagtaa

SEQ ID NO: 131330 - DNA, 25 bp, Canis familiaris
gttggatgctgctgttttcagataa

SEQ ID NO: 131331 - DNA, 25 bp, Canis familiaris
gttggtgtggagttttcatgacaga

SEQ ID NO: 131332 - DNA, 25 bp, Canis familiaris
gttggtgtgaagggtctatttgatg

SEQ ID NO: 131333 - DNA, 25 bp, Canis familiaris
gttggtggaagggtctattgctgag

SEQ ID NO: 131334 - DNA, 25 bp, Canis familiaris
gattggtgggaccgatcttcaggca

SEQ ID NO: 131335 - DNA, 25 bp, Canis familiaris
gttggggtcttcgatttcaggatca

SEQ ID NO: 131336 - DNA, 25 bp, Canis familiaris
gattggtcattttatgccgatgggg

SEQ ID NO: 131337 - DNA, 25 bp, Canis familiaris
gttgcttaattatgccagaagggat

SEQ ID NO: 131338 - DNA, 25 bp, Canis familiaris
gttgtcagacatcatcccgaaaaga

SEQ ID NO: 131339 - DNA, 25 bp, Canis familiaris
gttgcagcaggctttccggcagaac

SEQ ID NO: 131340 - DNA, 25 bp, Canis familiaris
gttggcggcagcaccgctgagaaag

SEQ ID NO: 131341 - DNA, 25 bp, Canis familiaris
gttgggacatcagctgactaataga

SEQ ID NO: 131342 - DNA, 25 bp, Canis familiaris
gttgtccacagtgtgtccagatgaa

SEQ ID NO: 131343 - DNA, 25 bp, Canis familiaris
gttggacaagtggcttctctgtgaa

SEQ ID NO: 131344 - DNA, 25 bp, Canis familiaris
gttggagaaggggtatttgtcacac

SEQ ID NO: 131345 - DNA, 25 bp, Canis familiaris
gttggacttgtgtatgtattttact

SEQ ID NO: 131346 - DNA, 25 bp, Canis familiaris
gttggcactgtttggttttctattt

SEQ ID NO: 131347 - DNA, 25 bp, Canis familiaris
gttggccttcttggacttttattct

SEQ ID NO: 131348 - DNA, 25 bp, Canis familiaris
gttggccatctatatatcttttttt

SEQ ID NO: 131349 - DNA, 25 bp, Canis familiaris
gattggtagtgatgtctcttcttta

SEQ ID NO: 131350 - DNA, 25 bp, Canis familiaris
gttggtgaggacattcttctcataa

SEQ ID NO: 131351 - DNA, 25 bp, Canis familiaris
gttgggggtgatgattagctcagta

SEQ ID NO: 131352 - DNA, 25 bp, Canis familiaris
gttgtcggctggtttaagctcatgt

SEQ ID NO: 131353 - DNA, 25 bp, Canis familiaris
gttgctttgcgggttaatgtctact

SEQ ID NO: 131354 - DNA, 25 bp, Canis familiaris
gttggtctgcgtgtttggttccaga

SEQ ID NO: 131355 - DNA, 25 bp, Canis familiaris
gttgaggagcgtgcttgggattctc

SEQ ID NO: 131356 - DNA, 25 bp, Canis familiaris
gttgggcagcaggccttggaagtct

SEQ ID NO: 131357 - DNA, 25 bp, Canis familiaris
gttgggcatgggtctctggggaccc

SEQ ID NO: 131358 - DNA, 25 bp, Canis familiaris
gttgggagcgtgaaaggaggaggcc

SEQ ID NO: 131359 - DNA, 25 bp, Canis familiaris
gttggagccggcgataggcagagag

SEQ ID NO: 131360 - DNA, 25 bp, Canis familiaris
gttgtgagcgggactggtggagcag

SEQ ID NO: 131361 - DNA, 25 bp, Canis familiaris
gttggggtgaaggacatggcagcag

SEQ ID NO: 131362 - DNA, 25 bp, Canis familiaris
gttggtggagcatgtgatcttgggg

SEQ ID NO: 131363 - DNA, 25 bp, Canis familiaris
gttggtggatatggtgacagtgggg

SEQ ID NO: 131364 - DNA, 25 bp, Canis familiaris
gttggtggaaacacagtggcagagg

SEQ ID NO: 131365 - DNA, 25 bp, Canis familiaris
gtattggggcagccccaatggcgca

SEQ ID NO: 131366 - DNA, 25 bp, Canis familiaris
gtttgcaggcgaaaccaatggtaat

SEQ ID NO: 131367 - DNA, 25 bp, Canis familiaris
gttggcacgggtcgacgagtgttat

SEQ ID NO: 131368 - DNA, 25 bp, Canis familiaris
gttggcagctggttggactgtctat

SEQ ID NO: 131369 - DNA, 25 bp, Canis familiaris
gttggcactggctaaaatgtttgat

SEQ ID NO: 131370 - DNA, 25 bp, Canis familiaris
gttgggtggacaaatcatccttgat

SEQ ID NO: 131371 - DNA, 25 bp, Canis familiaris
gttggagtgtgagggatcattcgat

SEQ ID NO: 131372 - DNA, 25 bp, Canis familiaris
gttggcagttactgctcccaggagc

SEQ ID NO: 131373 - DNA, 25 bp, Canis familiaris
gttgcagcgattgcaactggcctgg

SEQ ID NO: 131374 - DNA, 25 bp, Canis familiaris
gttgcagtgttggacccgatatcgt

SEQ ID NO: 131375 - DNA, 25 bp, Canis familiaris
gttgtgtgatgtggcccatcagtat

SEQ ID NO: 131376 - DNA, 25 bp, Canis familiaris
gttgggtcaggccatatgatgcata

SEQ ID NO: 131377 - DNA, 25 bp, Canis familiaris
gttgctgtggcggcagaatgtgcta

SEQ ID NO: 131378 - DNA, 25 bp, Canis familiaris
gttgatgagctggctggatgctgtg

SEQ ID NO: 131379 - DNA, 25 bp, Canis familiaris
gttgtacatgcttgactgtgaccaa

SEQ ID NO: 131380 - DNA, 25 bp, Canis familiaris
gttggacattggagtggcatgcaaa

SEQ ID NO: 131381 - DNA, 25 bp, Canis familiaris
gttggccattggggtacatgtttga

SEQ ID NO: 131382 - DNA, 25 bp, Canis familiaris
gttggagattttctactgcatttca

SEQ ID NO: 131383 - DNA, 25 bp, Canis familiaris
gttgggctttgtgttctcttataag

SEQ ID NO: 131384 - DNA, 25 bp, Canis familiaris
gttgggaaatgtggcttctgttcat

SEQ ID NO: 131385 - DNA, 25 bp, Canis familiaris
gttggtgaatatgggtttgtttttg

SEQ ID NO: 131386 - DNA, 25 bp, Canis familiaris
gttgttttattgatctggttactgg

SEQ ID NO: 131387 - DNA, 25 bp, Canis familiaris
gttgtttctttgactcaggagcaga

SEQ ID NO: 131388 - DNA, 25 bp, Canis familiaris
gttgtgtgtgttagtcatgccgata

SEQ ID NO: 131389 - DNA, 25 bp, Canis familiaris
gttggctgagagttgactgcaaata

SEQ ID NO: 131390 - DNA, 25 bp, Canis familiaris
gttgtgtcaacactggctaacatca

SEQ ID NO: 131391 - DNA, 25 bp, Canis familiaris
gttgtgatgtaacagctacaagagc

SEQ ID NO: 131392 - DNA, 25 bp, Canis familiaris
gttgggctcatagagcatagctgga

SEQ ID NO: 131393 - DNA, 25 bp, Canis familiaris
gttgggcaaggttcatcctgagctg

SEQ ID NO: 131394 - DNA, 25 bp, Canis familiaris
gttggtgtgcaggtacaccacctgc

SEQ ID NO: 131395 - DNA, 25 bp, Canis familiaris
gttggtgcataagaaggccctacct

SEQ ID NO: 131396 - DNA, 25 bp, Canis familiaris
gttgaagctaaatagggcctgacca

SEQ ID NO: 131397 - DNA, 25 bp, Canis familiaris
gttgggtcacaaagcacgatactac

SEQ ID NO: 131398 - DNA, 25 bp, Canis familiaris
gttgtgttaaagcctggaagtatta

SEQ ID NO: 131399 - DNA, 25 bp, Canis familiaris
gttggttaagcattccgacttttga

SEQ ID NO: 131400 - DNA, 25 bp, Canis familiaris
gttggttgggcatccaattcttggt

SEQ ID NO: 131401 - DNA, 25 bp, Canis familiaris
gttgacttggagaaccctagcttgg

SEQ ID NO: 131402 - DNA, 25 bp, Canis familiaris
gttgacttccatgtcatctctactt

SEQ ID NO: 131403 - DNA, 25 bp, Canis familiaris
gttgactctcaccgttttaataatc

SEQ ID NO: 131404 - DNA, 25 bp, Canis familiaris
gttgtcctaaagtagcttaatagcc

SEQ ID NO: 131405 - DNA, 25 bp, Canis familiaris
gttcccgtacagtgtgttctatgtc

SEQ ID NO: 131406 - DNA, 25 bp, Canis familiaris
gttccggattccgggatctgctact

SEQ ID NO: 131407 - DNA, 25 bp, Canis familiaris
gtcttcggtaaagggctccttctag

SEQ ID NO: 131408 - DNA, 25 bp, Canis familiaris
gtacgcggaaactgacgccgtctag

SEQ ID NO: 131409 - DNA, 25 bp, Canis familiaris
gtaggggaaatctggcccactgtgg

SEQ ID NO: 131410 - DNA, 25 bp, Canis familiaris
gtaggtagaaatctggttccctgcc

SEQ ID NO: 131411 - DNA, 25 bp, Canis familiaris
gttgtgtcagtatggtggtgtcccg

SEQ ID NO: 131412 - DNA, 25 bp, Canis familiaris
gttggaggttgacgctgctgtgacc

SEQ ID NO: 131413 - DNA, 25 bp, Canis familiaris
gttggactagatctctcgtgacact

SEQ ID NO: 131414 - DNA, 25 bp, Canis familiaris
gttggacttctgatctctaggacta

SEQ ID NO: 131415 - DNA, 25 bp, Canis familiaris
gttggactattcattcattggcata

SEQ ID NO: 131416 - DNA, 25 bp, Canis familiaris
gttgggcatcactttgtcttagcaa

SEQ ID NO: 131417 - DNA, 25 bp, Canis familiaris
gttggcagcaattttgtctgaagct

SEQ ID NO: 131418 - DNA, 25 bp, Canis familiaris
gttgctgcaagctatttgcccaagt

SEQ ID NO: 131419 - DNA, 25 bp, Canis familiaris
gttgtggcatcttgttgacatcgat

SEQ ID NO: 131420 - DNA, 25 bp, Canis familiaris
gttggcagcattttatagttgatac

SEQ ID NO: 131421 - DNA, 25 bp, Canis familiaris
gttggctgccagtttttgctgatac

SEQ ID NO: 131422 - DNA, 25 bp, Canis familiaris
gttggctccaagacacttctgatat

SEQ ID NO: 131423 - DNA, 25 bp, Canis familiaris
gttggttcaagaagtgtgtgtgtgt

SEQ ID NO: 131424 - DNA, 25 bp, Canis familiaris
gttggtgtaactgtgtgtgtctggc

SEQ ID NO: 131425 - DNA, 25 bp, Canis familiaris
gttgaatcttaggcgtcttatctcc

SEQ ID NO: 131426 - DNA, 25 bp, Canis familiaris
gttgaactcagatcgacattccgca

SEQ ID NO: 131427 - DNA, 25 bp, Canis familiaris
gttgacaatgaatccacttcctggc

SEQ ID NO: 131428 - DNA, 25 bp, Canis familiaris
gttaaaacactctcttactgggtag

SEQ ID NO: 131429 - DNA, 25 bp, Canis familiaris
gtttagaccgtctcccattaaggag

SEQ ID NO: 131430 - DNA, 25 bp, Canis familiaris
gtttaacattgtctcctcatagggg

SEQ ID NO: 131431 - DNA, 25 bp, Canis familiaris
gttgtgataatccatgactcctaag

SEQ ID NO: 131432 - DNA, 25 bp, Canis familiaris
gttgtatcaacactcatctccaaag

SEQ ID NO: 131433 - DNA, 25 bp, Canis familiaris
gttgttcatagcctttgtagcttgg

SEQ ID NO: 131434 - DNA, 25 bp, Canis familiaris
gttggttggcttatgggctgtgggc

SEQ ID NO: 131435 - DNA, 25 bp, Canis familiaris
gttggtggtttaattgagcttgttg

SEQ ID NO: 131436 - DNA, 25 bp, Canis familiaris
gttggtggtgtgtattcttgtgtgt

SEQ ID NO: 131437 - DNA, 25 bp, Canis familiaris
gttgtgtgtcggtatctttgtcggt

SEQ ID NO: 131438 - DNA, 25 bp, Canis familiaris
gttggatcttgggatcggttcgggc

SEQ ID NO: 131439 - DNA, 25 bp, Canis familiaris
gttggactacgtacgttgacaccgc

SEQ ID NO: 131440 - DNA, 25 bp, Canis familiaris
gttgaactatctgaaattgacccgt

SEQ ID NO: 131441 - DNA, 25 bp, Canis familiaris
gttgacctttgaacaatgtggaact

SEQ ID NO: 131442 - DNA, 25 bp, Canis familiaris
gttgaaccattatactttatatctg

SEQ ID NO: 131443 - DNA, 25 bp, Canis familiaris
gttgaactctttccctatggatcat

SEQ ID NO: 131444 - DNA, 25 bp, Canis familiaris
gttgaaatcaaccctcctgatgata

SEQ ID NO: 131445 - DNA, 25 bp, Canis familiaris
gttgaaatatgactgaatcgggaaa

SEQ ID NO: 131446 - DNA, 25 bp, Canis familiaris
gttaaactggctgtcctggaatact

SEQ ID NO: 131447 - DNA, 25 bp, Canis familiaris
gttccaagggctgttccagacaact

SEQ ID NO: 131448 - DNA, 25 bp, Canis familiaris
gttccagaggttctatccagggcaa

SEQ ID NO: 131449 - DNA, 25 bp, Canis familiaris
gttgtagaggttcgtgcacacagtg

SEQ ID NO: 131450 - DNA, 25 bp, Canis familiaris
gttgatgagtagctcctgctgcaga

SEQ ID NO: 131451 - DNA, 25 bp, Canis familiaris
gttgatgcattacagcctggcttgc

SEQ ID NO: 131452 - DNA, 25 bp, Canis familiaris
gttgcatcactagagggtaatccct

SEQ ID NO: 131453 - DNA, 25 bp, Canis familiaris
gttgacactcatgaactgtacccca

SEQ ID NO: 131454 - DNA, 25 bp, Canis familiaris
gttgaatttgccatgcattacccaa

SEQ ID NO: 131455 - DNA, 25 bp, Canis familiaris
gttgtcatttcctgtatgagcggca

SEQ ID NO: 131456 - DNA, 25 bp, Canis familiaris
gttgtactatcgttgttgcagcagc

SEQ ID NO: 131457 - DNA, 25 bp, Canis familiaris
gttgtacatgaagattcagagcagc

SEQ ID NO: 131458 - DNA, 25 bp, Canis familiaris
gttggacgacatgaaccactgctac

SEQ ID NO: 131459 - DNA, 25 bp, Canis familiaris
gttggagcttctgaaccagctggat

SEQ ID NO: 131460 - DNA, 25 bp, Canis familiaris
gttggacttctgcagctgcaaggtg

SEQ ID NO: 131461 - DNA, 25 bp, Canis familiaris
gttgtgtccctgtcatgaaagagtg

SEQ ID NO: 131462 - DNA, 25 bp, Canis familiaris
gttggggctgcttctgaagagcatt

SEQ ID NO: 131463 - DNA, 25 bp, Canis familiaris
gttggattgtgatttgtgagagatg

SEQ ID NO: 131464 - DNA, 25 bp, Canis familiaris
gttgtttctgactcgacaatccacc

SEQ ID NO: 131465 - DNA, 25 bp, Canis familiaris
gttggtctggactggacatcaccac

SEQ ID NO: 131466 - DNA, 25 bp, Canis familiaris
gttggtcgacacgggatcccaacgg

SEQ ID NO: 131467 - DNA, 25 bp, Canis familiaris
gttggaagaaaggcgatctcccacg

SEQ ID NO: 131468 - DNA, 25 bp, Canis familiaris
gttggaagaaaggcgatctcccacg

SEQ ID NO: 131469 - DNA, 25 bp, Canis familiaris
gttgggaacaaggctgatctggaga

SEQ ID NO: 131470 - DNA, 25 bp, Canis familiaris
gttggtacagcagttctcttggaat

SEQ ID NO: 131471 - DNA, 25 bp, Canis familiaris
gttgcagtaccagatccatcggatg

SEQ ID NO: 131472 - DNA, 25 bp, Canis familiaris
gttgcaccattaagatgccagggtc

SEQ ID NO: 131473 - DNA, 25 bp, Canis familiaris
gttgctcagcaaaagtccacagtgt

SEQ ID NO: 131474 - DNA, 25 bp, Canis familiaris
gttgcatcgatacaggcaggtgctg

SEQ ID NO: 131475 - DNA, 25 bp, Canis familiaris
gttgcaggctgtcttgcaggtctac

SEQ ID NO: 131476 - DNA, 25 bp, Canis familiaris
gttggagtgtgcatctggctgttca

SEQ ID NO: 131477 - DNA, 25 bp, Canis familiaris
gttggactgctcatatggatttggt

SEQ ID NO: 131478 - DNA, 25 bp, Canis familiaris
gttggaggctctaaggtgtgtgtgt

SEQ ID NO: 131479 - DNA, 25 bp, Canis familiaris
gttgggtacatgcaggtctgtgtga

SEQ ID NO: 131480 - DNA, 25 bp, Canis familiaris
gttggaccaatactgcagttctgta

SEQ ID NO: 131481 - DNA, 25 bp, Canis familiaris
gttgtggccttagtgatttctgttt

SEQ ID NO: 131482 - DNA, 25 bp, Canis familiaris
gttgtctgctttggtgaaacttcct

SEQ ID NO: 131483 - DNA, 25 bp, Canis familiaris
gttgtctcctatcgtgagaccgtca

SEQ ID NO: 131484 - DNA, 25 bp, Canis familiaris
gttgtccttattggagattctggtg

SEQ ID NO: 131485 - DNA, 25 bp, Canis familiaris
gttgacctgcatttctgagttctga

SEQ ID NO: 131486 - DNA, 25 bp, Canis familiaris
gttgaaatagtgtctcagtttgaaa

SEQ ID NO: 131487 - DNA, 25 bp, Canis familiaris
gttgaaaatgtcccagatttgcaag

SEQ ID NO: 131488 - DNA, 25 bp, Canis familiaris
gttgcataaatcacctttgtagccc

SEQ ID NO: 131489 - DNA, 25 bp, Canis familiaris
gttgtataatttttcatgttgagcc

SEQ ID NO: 131490 - DNA, 25 bp, Canis familiaris
gttgtcctagtttctctgtgaagtc

SEQ ID NO: 131491 - DNA, 25 bp, Canis familiaris
gttgtttcgttgtctgcttaagctg

SEQ ID NO: 131492 - DNA, 25 bp, Canis familiaris
gttgttctagggactcttagggtga

SEQ ID NO: 131493 - DNA, 25 bp, Canis familiaris
gggccacgagggacaggaagggtat

SEQ ID NO: 131494 - DNA, 25 bp, Canis familiaris
gttgtcctggggtggatggggtaag

SEQ ID NO: 131495 - DNA, 25 bp, Canis familiaris
gttccctgtggcaggtcgggttaag

SEQ ID NO: 131496 - DNA, 25 bp, Canis familiaris
gttgtttgtgtcaggtcccagttac

SEQ ID NO: 131497 - DNA, 25 bp, Canis familiaris
gttgtctaggtcatgtgattccgtt

SEQ ID NO: 131498 - DNA, 25 bp, Canis familiaris
gttgtttgttacagttcctgccatc

SEQ ID NO: 131499 - DNA, 25 bp, Canis familiaris
gttggtctgtctatatttcctgcgt

SEQ ID NO: 131500 - DNA, 25 bp, Canis familiaris
gttgagagcttctctgactatcctc

SEQ ID NO: 131501 - DNA, 25 bp, Canis familiaris
gttgagagcttctctgactatcctc

SEQ ID NO: 131502 - DNA, 25 bp, Canis familiaris
gttgagagcttctctgactatcctc

SEQ ID NO: 131503 - DNA, 25 bp, Canis familiaris
gttgaagcttcaggatacgctccgc

SEQ ID NO: 131504 - DNA, 25 bp, Canis familiaris
gttgaacctatttaagtctctgcct

SEQ ID NO: 131505 - DNA, 25 bp, Canis familiaris
gttgcaaccttgttagttgctttca

SEQ ID NO: 131506 - DNA, 25 bp, Canis familiaris
gttctgaccctgaggttcacttgat

SEQ ID NO: 131507 - DNA, 25 bp, Canis familiaris
gttctacacgttccgtgtccgaagc

SEQ ID NO: 131508 - DNA, 25 bp, Canis familiaris
gtataactcgggtggtaggaagcaa

SEQ ID NO: 131509 - DNA, 25 bp, Canis familiaris
gtaaatctttatgtttggggacaat

SEQ ID NO: 131510 - DNA, 25 bp, Canis familiaris
gttaacgtcgttgttggaggagcaa

SEQ ID NO: 131511 - DNA, 25 bp, Canis familiaris
gtatgaaccttgagacttgggggca

SEQ ID NO: 131512 - DNA, 25 bp, Canis familiaris
gttgattcactggagaacttgggtc

SEQ ID NO: 131513 - DNA, 25 bp, Canis familiaris
gttgtgtgagcgtaacctatccttc

SEQ ID NO: 131514 - DNA, 25 bp, Canis familiaris
gttgtgtgctggtaaggggctcttc

SEQ ID NO: 131515 - DNA, 25 bp, Canis familiaris
gttgtgtgtgtataggtgaggttga

SEQ ID NO: 131516 - DNA, 25 bp, Canis familiaris
gttggggaacagagtgggctctaga

SEQ ID NO: 131517 - DNA, 25 bp, Canis familiaris
gttggggctacttagggctgcccta

SEQ ID NO: 131518 - DNA, 25 bp, Canis familiaris
gttgggtgccaggaaagggcctcca

SEQ ID NO: 131519 - DNA, 25 bp, Canis familiaris
gttgtttgtaggtcatagagggctc

SEQ ID NO: 131520 - DNA, 25 bp, Canis familiaris
gttgatctttcagaatggaccaggc

SEQ ID NO: 131521 - DNA, 25 bp, Canis familiaris
gtcttctactaggcaggtaccacgt

SEQ ID NO: 131522 - DNA, 25 bp, Canis familiaris
gttgatgctgatttgtgaggttcca

SEQ ID NO: 131523 - DNA, 25 bp, Canis familiaris
gttgagccactcatggggctccaca

SEQ ID NO: 131524 - DNA, 25 bp, Canis familiaris
gttgtcagcaccagagggagcggca

SEQ ID NO: 131525 - DNA, 25 bp, Canis familiaris
gttgtctccacaagaagaacccatt

SEQ ID NO: 131526 - DNA, 25 bp, Canis familiaris
gttgtgcctgccttgaaacaagcca

SEQ ID NO: 131527 - DNA, 25 bp, Canis familiaris
gttgtatgagccttccaacacaccg

SEQ ID NO: 131528 - DNA, 25 bp, Canis familiaris
gttgtatggccgctcacacaacagt

SEQ ID NO: 131529 - DNA, 25 bp, Canis familiaris
gttgttgccctggcagacatcaaca

SEQ ID NO: 131530 - DNA, 25 bp, Canis familiaris
gttgtggtctcagcacacagcacac

SEQ ID NO: 131531 - DNA, 25 bp, Canis familiaris
gttggtctccagacacaacactcac

SEQ ID NO: 131532 - DNA, 25 bp, Canis familiaris
gttgtgtctccagtcacagcactgg

SEQ ID NO: 131533 - DNA, 25 bp, Canis familiaris
gttgtgtctctgactcagagcagca

SEQ ID NO: 131534 - DNA, 25 bp, Canis familiaris
gttgatgtctgtaccaaagatctgg

SEQ ID NO: 131535 - DNA, 25 bp, Canis familiaris
gttgatcctaaccaaagcagaaact

SEQ ID NO: 131536 - DNA, 25 bp, Canis familiaris
gttgccctagcagagagagactaaa

SEQ ID NO: 131537 - DNA, 25 bp, Canis familiaris
gttgtcgcggcggaggaagtcagga

SEQ ID NO: 131538 - DNA, 25 bp, Canis familiaris
gttgccacgggtgcatgtagtcacg

SEQ ID NO: 131539 - DNA, 25 bp, Canis familiaris
gttgcaccgttggcatattagtata

SEQ ID NO: 131540 - DNA, 25 bp, Canis familiaris
gttgtctcgctaggccagtgattaa

SEQ ID NO: 131541 - DNA, 25 bp, Canis familiaris
gttgtgctcagtttgtagtgatgga

SEQ ID NO: 131542 - DNA, 25 bp, Canis familiaris
gttgtgctcaaaggtcatgggggga

SEQ ID NO: 131543 - DNA, 25 bp, Canis familiaris
gttgtggcacagtgttagtggtcca

SEQ ID NO: 131544 - DNA, 25 bp, Canis familiaris
gttgggaagatggctccctggggca

SEQ ID NO: 131545 - DNA, 25 bp, Canis familiaris
gtttggaacaccacgggttgcaggc

SEQ ID NO: 131546 - DNA, 25 bp, Canis familiaris
gttgtggaaggcttcacagggtaag

SEQ ID NO: 131547 - DNA, 25 bp, Canis familiaris
gttgccgacggctactcggagaaca

SEQ ID NO: 131548 - DNA, 25 bp, Canis familiaris
gttgttaccagatgctgcgaaaata

SEQ ID NO: 131549 - DNA, 25 bp, Canis familiaris
gttgttgaatcagggtgcagcataa

SEQ ID NO: 131550 - DNA, 25 bp, Canis familiaris
gttgaagaataggcactcagtcaca

SEQ ID NO: 131551 - DNA, 25 bp, Canis familiaris
gttgaaatcaatacatacacacata

SEQ ID NO: 131552 - DNA, 25 bp, Canis familiaris
gttgaactgaaatcacacacacaca

SEQ ID NO: 131553 - DNA, 25 bp, Canis familiaris
gttgtactagcaaacatcaaaatgc

SEQ ID NO: 131554 - DNA, 25 bp, Canis familiaris
gttgtactagccaacatcaaatgct

SEQ ID NO: 131555 - DNA, 25 bp, Canis familiaris
gttgttctctgccggatatctatcg

SEQ ID NO: 131556 - DNA, 25 bp, Canis familiaris
gttgcctagcgcaggaacctgctgt

SEQ ID NO: 131557 - DNA, 25 bp, Canis familiaris
gttcctagccttctgaccttggaac

SEQ ID NO: 131558 - DNA, 25 bp, Canis familiaris
gttccgacctgtatcaatttaaaga

SEQ ID NO: 131559 - DNA, 25 bp, Canis familiaris
gttgccggctttggcttttaggacg

SEQ ID NO: 131560 - DNA, 25 bp, Canis familiaris
gttgtcgcctctcggttattagagg

SEQ ID NO: 131561 - DNA, 25 bp, Canis familiaris
gttgtctcctagcttctcataagac

SEQ ID NO: 131562 - DNA, 25 bp, Canis familiaris
gttgttttcagcaaattctaattca

SEQ ID NO: 131563 - DNA, 25 bp, Canis familiaris
gttgttttccagcattgtatattca

SEQ ID NO: 131564 - DNA, 25 bp, Canis familiaris
gtttagggtaggagccatattctta

SEQ ID NO: 131565 - DNA, 25 bp, Canis familiaris
gttgtagctgtatagtgaccttttt

SEQ ID NO: 131566 - DNA, 25 bp, Canis familiaris
gttgtcctgaatcaaacctttatac

SEQ ID NO: 131567 - DNA, 25 bp, Canis familiaris
gttgtccatcacttgatagtccttt

SEQ ID NO: 131568 - DNA, 25 bp, Canis familiaris
gttgtcatcacatatcaactccctc

SEQ ID NO: 131569 - DNA, 25 bp, Canis familiaris
gttgtcatcactgagacaccaccac

SEQ ID NO: 131570 - DNA, 25 bp, Canis familiaris
gttgtctcaataaacagctccatct

SEQ ID NO: 131571 - DNA, 25 bp, Canis familiaris
gttgtttaatatactcactatctac

SEQ ID NO: 131572 - DNA, 25 bp, Canis familiaris
gttgtactataaaagcaggctgtac

SEQ ID NO: 131573 - DNA, 25 bp, Canis familiaris
gttgtgattcattataggcagtggg

SEQ ID NO: 131574 - DNA, 25 bp, Canis familiaris
gttgtgttccgattgggtggtgtgg

SEQ ID NO: 131575 - DNA, 25 bp, Canis familiaris
gtagggtgcctatctgtatggggtg

SEQ ID NO: 131576 - DNA, 25 bp, Canis familiaris
gttgaaccccattcgtgatggggat

SEQ ID NO: 131577 - DNA, 25 bp, Canis familiaris
gttgaccatcccttctggaggaatt

SEQ ID NO: 131578 - DNA, 25 bp, Canis familiaris
gttgctccatacgtcttgttggggt

SEQ ID NO: 131579 - DNA, 25 bp, Canis familiaris
gttgccagcaaaccttgtattcgag

SEQ ID NO: 131580 - DNA, 25 bp, Canis familiaris
gttaccaaacgtgtattcaagctgc

SEQ ID NO: 131581 - DNA, 25 bp, Canis familiaris
gttgtctaaccctaatattctcacg

SEQ ID NO: 131582 - DNA, 25 bp, Canis familiaris
gttgtctgaacctgtcataaccacc

SEQ ID NO: 131583 - DNA, 25 bp, Canis familiaris
gttgtcgtacctctcatcaacaacc

SEQ ID NO: 131584 - DNA, 25 bp, Canis familiaris
gttgccttattcatccctgaatacc

SEQ ID NO: 131585 - DNA, 25 bp, Canis familiaris
gttggtgtattttgacctaggccag

SEQ ID NO: 131586 - DNA, 25 bp, Canis familiaris
gtatggcgtcataccaaccaatggc

SEQ ID NO: 131587 - DNA, 25 bp, Canis familiaris
gttgcggttactacacacacagatc

SEQ ID NO: 131588 - DNA, 25 bp, Canis familiaris
gttgcaggttggttgacgacgttcg

SEQ ID NO: 131589 - DNA, 25 bp, Canis familiaris
gttgaggtttgtatcagactggatg

SEQ ID NO: 131590 - DNA, 25 bp, Canis familiaris
gttgagtttttagtgaatctgcaaa

SEQ ID NO: 131591 - DNA, 25 bp, Canis familiaris
gttgagtacatttggctgttctaca

SEQ ID NO: 131592 - DNA, 25 bp, Canis familiaris
gttgtgttgctatgttgtgtcaaaa

SEQ ID NO: 131593 - DNA, 25 bp, Canis familiaris
gttgtgttgctttccttgttgaaaa

SEQ ID NO: 131594 - DNA, 25 bp, Canis familiaris
gttgattctttgtgtctgcaatgaa

SEQ ID NO: 131595 - DNA, 25 bp, Canis familiaris
gttgtccctgagtcgtctatataag

SEQ ID NO: 131596 - DNA, 25 bp, Canis familiaris
gttgcccctgagtttaacagaagag

SEQ ID NO: 131597 - DNA, 25 bp, Canis familiaris
gttgcctttgaggttaccaggtcat

SEQ ID NO: 131598 - DNA, 25 bp, Canis familiaris
gttgctttctatgtatagctcccta

SEQ ID NO: 131599 - DNA, 25 bp, Canis familiaris
gttgggctcaattttagcctgctct

SEQ ID NO: 131600 - DNA, 25 bp, Canis familiaris
gttcgtcagaaacttgaggcgcctc

SEQ ID NO: 131601 - DNA, 25 bp, Canis familiaris
gttccctgaaagactactgcagcac

SEQ ID NO: 131602 - DNA, 25 bp, Canis familiaris
gttcttgctggaggcccagtgtacc

SEQ ID NO: 131603 - DNA, 25 bp, Canis familiaris
gttccctggccgccagaagatccac

SEQ ID NO: 131604 - DNA, 25 bp, Canis familiaris
gttccctggccgccagaagatccac

SEQ ID NO: 131605 - DNA, 25 bp, Canis familiaris
gttagttggccacagaggtctatgt

SEQ ID NO: 131606 - DNA, 25 bp, Canis familiaris
gttagcttggtctcagtttaggttg

SEQ ID NO: 131607 - DNA, 25 bp, Canis familiaris
gttgtcattcgttacatgtttcatg

SEQ ID NO: 131608 - DNA, 25 bp, Canis familiaris
gttgtctgtcggtagtccttatgta

SEQ ID NO: 131609 - DNA, 25 bp, Canis familiaris
gttgttttttcagtactatttacat

SEQ ID NO: 131610 - DNA, 25 bp, Canis familiaris
gttgttttgaatctccgtgttggca

SEQ ID NO: 131611 - DNA, 25 bp, Canis familiaris
gttgtgtttggatatctcgttgtaa

SEQ ID NO: 131612 - DNA, 25 bp, Canis familiaris
gttgttgttgggcaccagccatgta

SEQ ID NO: 131613 - DNA, 25 bp, Canis familiaris
gttgtagtcatttctaactggatta

SEQ ID NO: 131614 - DNA, 25 bp, Canis familiaris
gttgtggtgttgttcaacttggcta

SEQ ID NO: 131615 - DNA, 25 bp, Canis familiaris
gttgctggtgggttgggctttcaac

SEQ ID NO: 131616 - DNA, 25 bp, Canis familiaris
gttgctctggggctgggtttattta

SEQ ID NO: 131617 - DNA, 25 bp, Canis familiaris
gttgcttgagtacatgttccttatt

SEQ ID NO: 131618 - DNA, 25 bp, Canis familiaris
gttgtttgtcactttctcaagtcgt

SEQ ID NO: 131619 - DNA, 25 bp, Canis familiaris
gttgacttcaattttggaatgtcgt

SEQ ID NO: 131620 - DNA, 25 bp, Canis familiaris
gttgactatatatcttggacttaat

SEQ ID NO: 131621 - DNA, 25 bp, Canis familiaris
gttgcacatgattctacttacgtta

SEQ ID NO: 131622 - DNA, 25 bp, Canis familiaris
gtagcactgagtccagatgtctgcg

SEQ ID NO: 131623 - DNA, 25 bp, Canis familiaris
gtaggctgagcactagcagacggct

SEQ ID NO: 131624 - DNA, 25 bp, Canis familiaris
gtatagctgagctaatcagtaatca

SEQ ID NO: 131625 - DNA, 25 bp, Canis familiaris
gttgcagatagtcatcagtggctct

SEQ ID NO: 131626 - DNA, 25 bp, Canis familiaris
gttgcagcagcaacgatcggtgcgc

SEQ ID NO: 131627 - DNA, 25 bp, Canis familiaris
gttccacacatgcctgcaggttggc

SEQ ID NO: 131628 - DNA, 25 bp, Canis familiaris
gttcctcacagcggactgtacacgt

SEQ ID NO: 131629 - DNA, 25 bp, Canis familiaris
gttcctcacatgcagctctgaatca

SEQ ID NO: 131630 - DNA, 25 bp, Canis familiaris
gttgcccactgccatgaaaacaatg

SEQ ID NO: 131631 - DNA, 25 bp, Canis familiaris
gttctgtacccaaaacagcatcact

SEQ ID NO: 131632 - DNA, 25 bp, Canis familiaris
gttctgctatattcactaattcgac

SEQ ID NO: 131633 - DNA, 25 bp, Canis familiaris
gttcctaatgtgtatccttctgacc

SEQ ID NO: 131634 - DNA, 25 bp, Canis familiaris
gttcctccatgggattgctttgtcc

SEQ ID NO: 131635 - DNA, 25 bp, Canis familiaris
gttgccggagggtgattggtcgccc

SEQ ID NO: 131636 - DNA, 25 bp, Canis familiaris
gttccgtagctgtaaaatggtcatt

SEQ ID NO: 131637 - DNA, 25 bp, Canis familiaris
gttgcctgggtcacaacaggtgctc

SEQ ID NO: 131638 - DNA, 25 bp, Canis familiaris
gttgaatggttggcacttcgtgttc

SEQ ID NO: 131639 - DNA, 25 bp, Canis familiaris
gttgaagtgttatttctgccagtat

SEQ ID NO: 131640 - DNA, 25 bp, Canis familiaris
gttgaatttaattttccactgggag

SEQ ID NO: 131641 - DNA, 25 bp, Canis familiaris
gttgaatgttcaattgttactcggg

SEQ ID NO: 131642 - DNA, 25 bp, Canis familiaris
gttgacttgccaattttcactgagg

SEQ ID NO: 131643 - DNA, 25 bp, Canis familiaris
gtagcactctgatacatttccaagc

SEQ ID NO: 131644 - DNA, 25 bp, Canis familiaris
gacattgtcgcaagtcacagaatta

SEQ ID NO: 131645 - DNA, 25 bp, Canis familiaris
attgtcgcaagtcacagaattattt

SEQ ID NO: 131646 - DNA, 25 bp, Canis familiaris
gttgctggatctgctgtttgaagcg

SEQ ID NO: 131647 - DNA, 25 bp, Canis familiaris
ggatctgctgtttgaagcgcagcag

SEQ ID NO: 131648 - DNA, 25 bp, Canis familiaris
gcgcagcaggtgcatcgccagcatt

SEQ ID NO: 131649 - DNA, 25 bp, Canis familiaris
gcaggtgcatcgccagcatttcgat

SEQ ID NO: 131650 - DNA, 25 bp, Canis familiaris
gcatcgccagcatttcgatcctcgt

SEQ ID NO: 131651 - DNA, 25 bp, Canis familiaris
gcatttcgatcctcgtcaggtgcag

SEQ ID NO: 131652 - DNA, 25 bp, Canis familiaris
cgatcctcgtcaggtgcaggtcagc

SEQ ID NO: 131653 - DNA, 25 bp, Canis familiaris
tcgtcaggtgcaggtcagcacgttg

SEQ ID NO: 131654 - DNA, 25 bp, Canis familiaris
gcaggtcagcacgttgctgtcgatt

SEQ ID NO: 131655 - DNA, 25 bp, Canis familiaris
cagcacgttgctgtcgattaagacc

SEQ ID NO: 131656 - DNA, 25 bp, Canis familiaris
gctgtcgattaagaccggagcttgt

SEQ ID NO: 131657 - DNA, 25 bp, Canis familiaris
agcttgtccggaagattgcaaatac

SEQ ID NO: 131658 - DNA, 25 bp, Canis familiaris
agattgcaaatactgcccgcaaacg

SEQ ID NO: 131659 - DNA, 25 bp, Canis familiaris
caaatactgcccgcaaacgtcgcgc

SEQ ID NO: 131660 - DNA, 25 bp, Canis familiaris
tgaacaggtgctggagtcggcgcgc

SEQ ID NO: 131661 - DNA, 25 bp, Canis familiaris
ggagtcggcgcgcaaagcgaaagcg

SEQ ID NO: 131662 - DNA, 25 bp, Canis familiaris
gttgtcatttcattactccattacc

SEQ ID NO: 131663 - DNA, 25 bp, Canis familiaris
gttgtcttccataactcagtggacc

SEQ ID NO: 131664 - DNA, 25 bp, Canis familiaris
gttgtctgtcatgtactagtgtccc

SEQ ID NO: 131665 - DNA, 25 bp, Canis familiaris
gttgtcatgtatttcggactactcc

SEQ ID NO: 131666 - DNA, 25 bp, Canis familiaris
gttgtctgtatatgctaactccgtt

SEQ ID NO: 131667 - DNA, 25 bp, Canis familiaris
gttgtgcttctttagaatccagctt

SEQ ID NO: 131668 - DNA, 25 bp, Canis familiaris
gttgtctgattttaatgtccattct

SEQ ID NO: 131669 - DNA, 25 bp, Canis familiaris
gttgcggatatatagcgcccattct

SEQ ID NO: 131670 - DNA, 25 bp, Canis familiaris
gttgcagcgttcaggtctttgttaa

SEQ ID NO: 131671 - DNA, 25 bp, Canis familiaris
gttgaactgcacagtctcctttgtt

SEQ ID NO: 131672 - DNA, 25 bp, Canis familiaris
gttgtgttgaacttccgtctttatg

SEQ ID NO: 131673 - DNA, 25 bp, Canis familiaris
gttgtttaacacacattttatatgt

SEQ ID NO: 131674 - DNA, 25 bp, Canis familiaris
gttgatattgtttcggcaaattttt

SEQ ID NO: 131675 - DNA, 25 bp, Canis familiaris
gttgttcattttgctgaaattcatt

SEQ ID NO: 131676 - DNA, 25 bp, Canis familiaris
gttgttactttttaatcttctgaag

SEQ ID NO: 131677 - DNA, 25 bp, Canis familiaris
gttgttttgtttttcatttgggatg

SEQ ID NO: 131678 - DNA, 25 bp, Canis familiaris
gttgatggtgtggttaccgggggtg

SEQ ID NO: 131679 - DNA, 25 bp, Canis familiaris
gttagtggtcctcagggtggggtag

SEQ ID NO: 131680 - DNA, 25 bp, Canis familiaris
gttgagtgagtggcgctagggtgac

SEQ ID NO: 131681 - DNA, 25 bp, Canis familiaris
gttgactgaatgcccaggctttcac

SEQ ID NO: 131682 - DNA, 25 bp, Canis familiaris
gttgaccatagagaagtttcacttc

SEQ ID NO: 131683 - DNA, 25 bp, Canis familiaris
gttgacacatagagaaagtttcact

SEQ ID NO: 131684 - DNA, 25 bp, Canis familiaris
gttgcacacgagagagttttactta

SEQ ID NO: 131685 - DNA, 25 bp, Canis familiaris
gttgaactccatagagtttgctgac

SEQ ID NO: 131686 - DNA, 25 bp, Canis familiaris
gttgactctctgaatgtgttctgga

SEQ ID NO: 131687 - DNA, 25 bp, Canis familiaris
gttgattcttagttgttctgtgtct

SEQ ID NO: 131688 - DNA, 25 bp, Canis familiaris
gttgtttctagcttgctgatccttc

SEQ ID NO: 131689 - DNA, 25 bp, Canis familiaris
gttgtaatcaaacctgatgctttca

SEQ ID NO: 131690 - DNA, 25 bp, Canis familiaris
gttgtctcacaactggttgctctga

SEQ ID NO: 131691 - DNA, 25 bp, Canis familiaris
gttgtctcatattctggaggctaga

SEQ ID NO: 131692 - DNA, 25 bp, Canis familiaris
gttgtgtatttcactgtgtatgcac

SEQ ID NO: 131693 - DNA, 25 bp, Canis familiaris
gttgttgtttgttcgtggatgcttg

SEQ ID NO: 131694 - DNA, 25 bp, Canis familiaris
gttgtttctttctagtggtctttgt

SEQ ID NO: 131695 - DNA, 25 bp, Canis familiaris
gttgttactgtttgcttgtttttgt

SEQ ID NO: 131696 - DNA, 25 bp, Canis familiaris
gttttgtggtttgttctgattcgtc

SEQ ID NO: 131697 - DNA, 25 bp, Canis familiaris
gttttgtggtttgtcctggaaggca

SEQ ID NO: 131698 - DNA, 25 bp, Canis familiaris
gtgttccgttttgtccaagacgtga

SEQ ID NO: 131699 - DNA, 25 bp, Canis familiaris
gttgtactttttattcaattctgta

SEQ ID NO: 131700 - DNA, 25 bp, Canis familiaris
gttgtaattttctactatcattttg

SEQ ID NO: 131701 - DNA, 25 bp, Canis familiaris
gttgtagttgttgtagctgcatttg

SEQ ID NO: 131702 - DNA, 25 bp, Canis familiaris
gttgttggtgttgtgcagcacgtta

SEQ ID NO: 131703 - DNA, 25 bp, Canis familiaris
gttgtgattattttctgagccggga

SEQ ID NO: 131704 - DNA, 25 bp, Canis familiaris
gttgtgtgtgttttgtttgctggga

SEQ ID NO: 131705 - DNA, 25 bp, Canis familiaris
gttgttctagtactgtatttggctt

SEQ ID NO: 131706 - DNA, 25 bp, Canis familiaris
gttgctgtctagtacattcaaaggt

SEQ ID NO: 131707 - DNA, 25 bp, Canis familiaris
gttgtctcctgcgacttcaacagca

SEQ ID NO: 131708 - DNA, 25 bp, Canis familiaris
gttgaatacgtcttctaatatgcac

SEQ ID NO: 131709 - DNA, 25 bp, Canis familiaris
gttgtcaacttcttcatacttgctg

SEQ ID NO: 131710 - DNA, 25 bp, Canis familiaris
gttccatgcagcacctgatacttgt

SEQ ID NO: 131711 - DNA, 25 bp, Canis familiaris
gttcagagcagcactatcccttaat

SEQ ID NO: 131712 - DNA, 25 bp, Canis familiaris
gttgatgaggctgctgatgcccttc

SEQ ID NO: 131713 - DNA, 25 bp, Canis familiaris
gttgataagctaatagcctatcact

SEQ ID NO: 131714 - DNA, 25 bp, Canis familiaris
gttgtgcacttaatgactttaatct

SEQ ID NO: 131715 - DNA, 25 bp, Canis familiaris
gttgtcattgtcacactttcacatt

SEQ ID NO: 131716 - DNA, 25 bp, Canis familiaris
gttgtcatatgaacccagttcctca

SEQ ID NO: 131717 - DNA, 25 bp, Canis familiaris
gttgtataatacgcgtggccgtctg

SEQ ID NO: 131718 - DNA, 25 bp, Canis familiaris
gttgtactctactcttggactatat

SEQ ID NO: 131719 - DNA, 25 bp, Canis familiaris
gttgttcctattgttctgagctgtt

SEQ ID NO: 131720 - DNA, 25 bp, Canis familiaris
gttgtataccttgaatctgcagtta

SEQ ID NO: 131721 - DNA, 25 bp, Canis familiaris
gttaattgattagaatgtgcgttac

SEQ ID NO: 131722 - DNA, 25 bp, Canis familiaris
gttgcagttctaagccaattggtta

SEQ ID NO: 131723 - DNA, 25 bp, Canis familiaris
gttgtgtttcaccaacattggagta

SEQ ID NO: 131724 - DNA, 25 bp, Canis familiaris
gttgtttacatccacaatggcgctg

SEQ ID NO: 131725 - DNA, 25 bp, Canis familiaris
gttgaagtcacacagctgagccact

SEQ ID NO: 131726 - DNA, 25 bp, Canis familiaris
gttgaatgttgcctcagtacctcaa

SEQ ID NO: 131727 - DNA, 25 bp, Canis familiaris
gttgtatttgggactgacgctcgac

SEQ ID NO: 131728 - DNA, 25 bp, Canis familiaris
gttgttttgagtaattcgtcccgtg

SEQ ID NO: 131729 - DNA, 25 bp, Canis familiaris
gttctatttaacaattgcgtcacgc

SEQ ID NO: 131730 - DNA, 25 bp, Canis familiaris
gttgctcattcaagacctgtgggcc

SEQ ID NO: 131731 - DNA, 25 bp, Canis familiaris
gttgtcatgtgtcactggtggtctg

SEQ ID NO: 131732 - DNA, 25 bp, Canis familiaris
gttgacagttgtttggaggctcttg

SEQ ID NO: 131733 - DNA, 25 bp, Canis familiaris
gttgaggttgtagggagcggcgagc

SEQ ID NO: 131734 - DNA, 25 bp, Canis familiaris
gttgcaggttgccagggcacagcac

SEQ ID NO: 131735 - DNA, 25 bp, Canis familiaris
gttgcaaactggtggccacatctgg

SEQ ID NO: 131736 - DNA, 25 bp, Canis familiaris
gttgctgaagtgtggagctgcctct

SEQ ID NO: 131737 - DNA, 25 bp, Canis familiaris
gttgtgagagtgtcgtcgtttctgc

SEQ ID NO: 131738 - DNA, 25 bp, Canis familiaris
gttgctgacttaggttgtttcctcc

SEQ ID NO: 131739 - DNA, 25 bp, Canis familiaris
gttgtgcaattacttctgtttcttt

SEQ ID NO: 131740 - DNA, 25 bp, Canis familiaris
gttgtgaattcaaatctcgtgttgg

SEQ ID NO: 131741 - DNA, 25 bp, Canis familiaris
gttgtgtatggaagatttgtttgtt

SEQ ID NO: 131742 - DNA, 25 bp, Canis familiaris
gttgtttagagtgtgagattgtttt

SEQ ID NO: 131743 - DNA, 25 bp, Canis familiaris
gttgttataaagttgaattgtgaaa

SEQ ID NO: 131744 - DNA, 25 bp, Canis familiaris
gttgtctggacaagcactgaaagat

SEQ ID NO: 131745 - DNA, 25 bp, Canis familiaris
gttgtctataatggcatcccacgat

SEQ ID NO: 131746 - DNA, 25 bp, Canis familiaris
gttgttctatgtacagcttcctgat

SEQ ID NO: 131747 - DNA, 25 bp, Canis familiaris
gttgtgatctttacatgtgttcttt

SEQ ID NO: 131748 - DNA, 25 bp, Canis familiaris
gttgtactggccatgtgcttcagtt

SEQ ID NO: 131749 - DNA, 25 bp, Canis familiaris
gttgttctggcatttttctgcagct

SEQ ID NO: 131750 - DNA, 25 bp, Canis familiaris
gttgtttggattcgtgtgtggtggt

SEQ ID NO: 131751 - DNA, 25 bp, Canis familiaris
gttgtgttaattctgctgtttgctt

SEQ ID NO: 131752 - DNA, 25 bp, Canis familiaris
gttgtttatcttcattactgtttca

SEQ ID NO: 131753 - DNA, 25 bp, Canis familiaris
gttgttggtttttatactgggctca

SEQ ID NO: 131754 - DNA, 25 bp, Canis familiaris
gttgtagttttttattcatgctgga

SEQ ID NO: 131755 - DNA, 25 bp, Canis familiaris
gttgtcattcatattaattacggat

SEQ ID NO: 131756 - DNA, 25 bp, Canis familiaris
gttgaaatcattttgtagtatagaa

SEQ ID NO: 131757 - DNA, 25 bp, Canis familiaris
gttgaaatgaaaatgttgtctggac

SEQ ID NO: 131758 - DNA, 25 bp, Canis familiaris
gttgtaggtgtaactgtcactggac

SEQ ID NO: 131759 - DNA, 25 bp, Canis familiaris
gttgtaaaggcatcttcctcatgac

SEQ ID NO: 131760 - DNA, 25 bp, Canis familiaris
gttgtacacaggtttctggcacagc

SEQ ID NO: 131761 - DNA, 25 bp, Canis familiaris
gttgtcatcaagcagttggaccaga

SEQ ID NO: 131762 - DNA, 25 bp, Canis familiaris
gttgcatccagacagtgtgtttcag

SEQ ID NO: 131763 - DNA, 25 bp, Canis familiaris
gttgatccaactggagcttgctcct

SEQ ID NO: 131764 - DNA, 25 bp, Canis familiaris
gttgagctcaagtccttggctctct

SEQ ID NO: 131765 - DNA, 25 bp, Canis familiaris
gttgagcctcagtgctagagaatct

SEQ ID NO: 131766 - DNA, 25 bp, Canis familiaris
gttgagcctcacgtgctagagaact

SEQ ID NO: 131767 - DNA, 25 bp, Canis familiaris
gttgagcccaacctcagatgctaag

SEQ ID NO: 131768 - DNA, 25 bp, Canis familiaris
gttgacaccaaacaatgctggcatg

SEQ ID NO: 131769 - DNA, 25 bp, Canis familiaris
gttgtacaaaaatagcggctggacc

SEQ ID NO: 131770 - DNA, 25 bp, Canis familiaris
gttgtcctaaaatacacctggactc

SEQ ID NO: 131771 - DNA, 25 bp, Canis familiaris
gttgtgcttcaaagaaaacgccgac

SEQ ID NO: 131772 - DNA, 25 bp, Canis familiaris
gtttgctataaacaaggccaaggac

SEQ ID NO: 131773 - DNA, 25 bp, Canis familiaris
gttctgtccaaaacaaggccccaga

SEQ ID NO: 131774 - DNA, 25 bp, Canis familiaris
gttctgtctaggggaaggtcaccaa

SEQ ID NO: 131775 - DNA, 25 bp, Canis familiaris
gttgtcttacagcgacagtgctctc

SEQ ID NO: 131776 - DNA, 25 bp, Canis familiaris
gttgatcttccggcaacagctggaa

SEQ ID NO: 131777 - DNA, 25 bp, Canis familiaris
gttgttgttaccagatgctgcgaaa

SEQ ID NO: 131778 - DNA, 25 bp, Canis familiaris
gttgttgaatagtctcgtgggacac

SEQ ID NO: 131779 - DNA, 25 bp, Canis familiaris
gttgttcagagaactcagttggcag

SEQ ID NO: 131780 - DNA, 25 bp, Canis familiaris
gttgctggggaattctcattggagg

SEQ ID NO: 131781 - DNA, 25 bp, Canis familiaris
gttgctatagggtttatgttcttgg

SEQ ID NO: 131782 - DNA, 25 bp, Canis familiaris
gttgtcatagtattccattttttgg

SEQ ID NO: 131783 - DNA, 25 bp, Canis familiaris
gttgtcatgagcctatctattttga

SEQ ID NO: 131784 - DNA, 25 bp, Canis familiaris
gttgtcagcatggtatattttctcc

SEQ ID NO: 131785 - DNA, 25 bp, Canis familiaris
gttgtcagagtcacttgagctcccc

SEQ ID NO: 131786 - DNA, 25 bp, Canis familiaris
gttgtataggtcttatatccctccc

SEQ ID NO: 131787 - DNA, 25 bp, Canis familiaris
gttgttatggtcttagaggctgcat

SEQ ID NO: 131788 - DNA, 25 bp, Canis familiaris
gttgttatgtgtttcaggtgctctg

SEQ ID NO: 131789 - DNA, 25 bp, Canis familiaris
gttgtccatttccatagctggcatc

SEQ ID NO: 131790 - DNA, 25 bp, Canis familiaris
gttgtcttctctcgaagctgtcaga

SEQ ID NO: 131791 - DNA, 25 bp, Canis familiaris
gttgcactacctcggccatgtcatg

SEQ ID NO: 131792 - DNA, 25 bp, Canis familiaris
gttgcacgagcccgtgcgatctgaa

SEQ ID NO: 131793 - DNA, 25 bp, Canis familiaris
gttgccagtcacatgtagttagcat

SEQ ID NO: 131794 - DNA, 25 bp, Canis familiaris
gttgctgcagggtttgagtgctcca

SEQ ID NO: 131795 - DNA, 25 bp, Canis familiaris
gttcctgggtattagtccacaattc

SEQ ID NO: 131796 - DNA, 25 bp, Canis familiaris
gttgctttggtccaagacccacaag

SEQ ID NO: 131797 - DNA, 25 bp, Canis familiaris
gttgcaccggaccaatgtcccaaag

SEQ ID NO: 131798 - DNA, 25 bp, Canis familiaris
gttgataccgaagcatgtcccatca

SEQ ID NO: 131799 - DNA, 25 bp, Canis familiaris
gttgataccgtcgtcatttcatatt

SEQ ID NO: 131800 - DNA, 25 bp, Canis familiaris
gttgtactttcattattgtctagtt

SEQ ID NO: 131801 - DNA, 25 bp, Canis familiaris
gtagtccttccttaatttcaattca

SEQ ID NO: 131802 - DNA, 25 bp, Canis familiaris
gtatgtcccttttttcctaagatct

SEQ ID NO: 131803 - DNA, 25 bp, Canis familiaris
gtaccatggtttattccccagtatc

SEQ ID NO: 131804 - DNA, 25 bp, Canis familiaris
gtacgacgaatgatttccccaacaa

SEQ ID NO: 131805 - DNA, 25 bp, Canis familiaris
gtatcagtaaagtttctccagaaaa

SEQ ID NO: 131806 - DNA, 25 bp, Canis familiaris
gttgagtaatcaatattctctggaa

SEQ ID NO: 131807 - DNA, 25 bp, Canis familiaris
gttgatgattgctgatttcctggaa

SEQ ID NO: 131808 - DNA, 25 bp, Canis familiaris
gttgcatggttatatatcctgggat

SEQ ID NO: 131809 - DNA, 25 bp, Canis familiaris
gttgcatagaaatctgtcctaggtc

SEQ ID NO: 131810 - DNA, 25 bp, Canis familiaris
gttgtagataacggctccggtatgt

SEQ ID NO: 131811 - DNA, 25 bp, Canis familiaris
gttcaagagatagcccaccgtggtg

SEQ ID NO: 131812 - DNA, 25 bp, Canis familiaris
gttgtagcaaaccccgaagctgagg

SEQ ID NO: 131813 - DNA, 25 bp, Canis familiaris
gttgtcaaacagcccatttagctcc

SEQ ID NO: 131814 - DNA, 25 bp, Canis familiaris
gttgtatgaaacctttctttcctct

SEQ ID NO: 131815 - DNA, 25 bp, Canis familiaris
gttgcagacaaatgctttttttttt

SEQ ID NO: 131816 - DNA, 25 bp, Canis familiaris
gttgaacatccaactcttggttttg

SEQ ID NO: 131817 - DNA, 25 bp, Canis familiaris
gttgaacatcctgccatattattct

SEQ ID NO: 131818 - DNA, 25 bp, Canis familiaris
gttgaaatctcagaaaaagtcttga

SEQ ID NO: 131819 - DNA, 25 bp, Canis familiaris
gttgcaatatgccactaaatgaggt

SEQ ID NO: 131820 - DNA, 25 bp, Canis familiaris
gttaaatgtatctcagtgccatgtc

SEQ ID NO: 131821 - DNA, 25 bp, Canis familiaris
gtatattatgtgtcatacagctaat

SEQ ID NO: 131822 - DNA, 25 bp, Canis familiaris
gttatgtggcatgatatgcagtatc

SEQ ID NO: 131823 - DNA, 25 bp, Canis familiaris
gttgatggggaagtgagcatacacc

SEQ ID NO: 131824 - DNA, 25 bp, Canis familiaris
gttgagggtggactacttagctctg

SEQ ID NO: 131825 - DNA, 25 bp, Canis familiaris
gttaggcgtgcacctttaaaccata

SEQ ID NO: 131826 - DNA, 25 bp, Canis familiaris
gttgaggcctgcaggttgaacctta

SEQ ID NO: 131827 - DNA, 25 bp, Canis familiaris
gttgcaaggcagatgtttaacctat

SEQ ID NO: 131828 - DNA, 25 bp, Canis familiaris
gttgaattgtgaaatttaatggatt

SEQ ID NO: 131829 - DNA, 25 bp, Canis familiaris
gttgttttgataatacatgaactat

SEQ ID NO: 131830 - DNA, 25 bp, Canis familiaris
gttgtatttcaactataagaacatt

SEQ ID NO: 131831 - DNA, 25 bp, Canis familiaris
gttgtctttcacattaaaagaaaca

SEQ ID NO: 131832 - DNA, 25 bp, Canis familiaris
gttgacttctacattgataaggaca

SEQ ID NO: 131833 - DNA, 25 bp, Canis familiaris
gttcctccaaaccgacacaggacaa

SEQ ID NO: 131834 - DNA, 25 bp, Canis familiaris
gttcctctggactgttcaagcgaaa

SEQ ID NO: 131835 - DNA, 25 bp, Canis familiaris
gttgaccaggacttgatatatagaa

SEQ ID NO: 131836 - DNA, 25 bp, Canis familiaris
gttgacctaacttgcagaaagaagc

SEQ ID NO: 131837 - DNA, 25 bp, Canis familiaris
gttgccgtaccttctataagactga

SEQ ID NO: 131838 - DNA, 25 bp, Canis familiaris
gttacgtatgaacgctataaaccca

SEQ ID NO: 131839 - DNA, 25 bp, Canis familiaris
gttacctatcaatcggaatacccac

SEQ ID NO: 131840 - DNA, 25 bp, Canis familiaris
gttcctctatcaaaaggttacctca

SEQ ID NO: 131841 - DNA, 25 bp, Canis familiaris
gttgcagctccaaaaaggcttccag

SEQ ID NO: 131842 - DNA, 25 bp, Canis familiaris
gttgcatttagttaaatcttcaagt

SEQ ID NO: 131843 - DNA, 25 bp, Canis familiaris
gttgctcttagctttatttacaata

SEQ ID NO: 131844 - DNA, 25 bp, Canis familiaris
gttgcccttgaactactttaattag

SEQ ID NO: 131845 - DNA, 25 bp, Canis familiaris
gttgccatcaatgaccccttcattg

SEQ ID NO: 131846 - DNA, 25 bp, Canis familiaris
gttgcgatctgaagaggccggacat

SEQ ID NO: 131847 - DNA, 25 bp, Canis familiaris
gttgcttcgtagcacatgcggagca

SEQ ID NO: 131848 - DNA, 25 bp, Canis familiaris
gtggaccgtcaggaacgtacaaggg

SEQ ID NO: 131849 - DNA, 25 bp, Canis familiaris
gttgaccttagcaaagtgtatacag

SEQ ID NO: 131850 - DNA, 25 bp, Canis familiaris
gttgagcccattcacttctcaaaca

SEQ ID NO: 131851 - DNA, 25 bp, Canis familiaris
gttgagtccaatattgtccacaatg

SEQ ID NO: 131852 - DNA, 25 bp, Canis familiaris
gttgaccatcaatgctttccacatt

SEQ ID NO: 131853 - DNA, 25 bp, Canis familiaris
gttgttagcaaccatgtttcacata

SEQ ID NO: 131854 - DNA, 25 bp, Canis familiaris
gttgctgtagactgcatgtgtgtgc

SEQ ID NO: 131855 - DNA, 25 bp, Canis familiaris
gttgattatatcatctttggcacag

SEQ ID NO: 131856 - DNA, 25 bp, Canis familiaris
gttcaagaacattttcggcacccct

SEQ ID NO: 131857 - DNA, 25 bp, Canis familiaris
gttctagggtgttgggtcagcccac

SEQ ID NO: 131858 - DNA, 25 bp, Canis familiaris
gttctagcaggagctaggccccttg

SEQ ID NO: 131859 - DNA, 25 bp, Canis familiaris
gttcatacgtctgtggagcagccct

SEQ ID NO: 131860 - DNA, 25 bp, Canis familiaris
gttgtatcgagagcaggaagtcctg

SEQ ID NO: 131861 - DNA, 25 bp, Canis familiaris
gtttggcgcgtgaggaagttcgacc

SEQ ID NO: 131862 - DNA, 25 bp, Canis familiaris
gttgctggcagccatactgggtttc

SEQ ID NO: 131863 - DNA, 25 bp, Canis familiaris
gttgctggaggctgctgtggcataa

SEQ ID NO: 131864 - DNA, 25 bp, Canis familiaris
gttgctcaattctgtgtggcatctg

SEQ ID NO: 131865 - DNA, 25 bp, Canis familiaris
gttgatcattgtgttgtagattgca

SEQ ID NO: 131866 - DNA, 25 bp, Canis familiaris
gttgatttgtcattttagcattttt

SEQ ID NO: 131867 - DNA, 25 bp, Canis familiaris
gttgttgtccaattgtggtttatta

SEQ ID NO: 131868 - DNA, 25 bp, Canis familiaris
gttgcttgtccatatgatttttttt

SEQ ID NO: 131869 - DNA, 25 bp, Canis familiaris
gttgtttccaatcctttgctattaa

SEQ ID NO: 131870 - DNA, 25 bp, Canis familiaris
gttgttgtcacctatcctttaataa

SEQ ID NO: 131871 - DNA, 25 bp, Canis familiaris
gttgttttgccatgcttttcactat

SEQ ID NO: 131872 - DNA, 25 bp, Canis familiaris
gttgttgttgaaggttttctgttga

SEQ ID NO: 131873 - DNA, 25 bp, Canis familiaris
gttgaggtttattgtttttgcttgt

SEQ ID NO: 131874 - DNA, 25 bp, Canis familiaris
gttgagtatattaattttctccaga

SEQ ID NO: 131875 - DNA, 25 bp, Canis familiaris
gttaattagtgtcacttcccagaag

SEQ ID NO: 131876 - DNA, 25 bp, Canis familiaris
gttactttgcttcaagattcccaag

SEQ ID NO: 131877 - DNA, 25 bp, Canis familiaris
gttcctttgtgggattaggaccaag

SEQ ID NO: 131878 - DNA, 25 bp, Canis familiaris
gttctcttcggtgattagtagacaa

SEQ ID NO: 131879 - DNA, 25 bp, Canis familiaris
gttcttcctgttgtcttaaaatatc

SEQ ID NO: 131880 - DNA, 25 bp, Canis familiaris
gttcctccagtgactttggtaagtt

SEQ ID NO: 131881 - DNA, 25 bp, Canis familiaris
gttgctaccagtgtacgcagtaatt

SEQ ID NO: 131882 - DNA, 25 bp, Canis familiaris
gttgttcacattgaacgcttcaaga

SEQ ID NO: 131883 - DNA, 25 bp, Canis familiaris
gttgttcatgttgaccctgatatac

SEQ ID NO: 131884 - DNA, 25 bp, Canis familiaris
gttgttcagcagtgacacctgttac

SEQ ID NO: 131885 - DNA, 25 bp, Canis familiaris
gttgattcgtgatgactgcctttcg

SEQ ID NO: 131886 - DNA, 25 bp, Canis familiaris
gttgatgcactggaaagctgcttta

SEQ ID NO: 131887 - DNA, 25 bp, Canis familiaris
gttgctgcattcctgaagtctttat

SEQ ID NO: 131888 - DNA, 25 bp, Canis familiaris
gttgatgttcatttgattcatgtta

SEQ ID NO: 131889 - DNA, 25 bp, Canis familiaris
gttgcagtctcatattatcattttg

SEQ ID NO: 131890 - DNA, 25 bp, Canis familiaris
gttgcatccctaattcatcagtttg

SEQ ID NO: 131891 - DNA, 25 bp, Canis familiaris
gttgcagccctaacctgagttgaag

SEQ ID NO: 131892 - DNA, 25 bp, Canis familiaris
gttgcagggacagcactgggtgagg

SEQ ID NO: 131893 - DNA, 25 bp, Canis familiaris
gttgctgggaatgcaagctggtgca

SEQ ID NO: 131894 - DNA, 25 bp, Canis familiaris
gttgctgccgcaggaagcacagacc

SEQ ID NO: 131895 - DNA, 25 bp, Canis familiaris
gttgaggcccagttgaggaccagtg

SEQ ID NO: 131896 - DNA, 25 bp, Canis familiaris
gttgagaggacgtctgagggccagc

SEQ ID NO: 131897 - DNA, 25 bp, Canis familiaris
gttcaagagacgtgtgcaggccacc

SEQ ID NO: 131898 - DNA, 25 bp, Canis familiaris
gttgataatgggttctctggcacaa

SEQ ID NO: 131899 - DNA, 25 bp, Canis familiaris
gttaaatgctgtcttctggatgcgc

SEQ ID NO: 131900 - DNA, 25 bp, Canis familiaris
gttcctgattgctgttctggtcgga

SEQ ID NO: 131901 - DNA, 25 bp, Canis familiaris
gttccggacaacttctggtcggaca

SEQ ID NO: 131902 - DNA, 25 bp, Canis familiaris
gttccatctgacatcactgtggctc

SEQ ID NO: 131903 - DNA, 25 bp, Canis familiaris
gttgcagttcatagctctctgttca

SEQ ID NO: 131904 - DNA, 25 bp, Canis familiaris
gttgatattctactatctgctacca

SEQ ID NO: 131905 - DNA, 25 bp, Canis familiaris
gttgctcatgttcaacctacacaac

SEQ ID NO: 131906 - DNA, 25 bp, Canis familiaris
gttgctcctttaatactaccaaaca

SEQ ID NO: 131907 - DNA, 25 bp, Canis familiaris
gttgctggcttttataaactctaag

SEQ ID NO: 131908 - DNA, 25 bp, Canis familiaris
gttgctttcagttaagtgacttcaa

SEQ ID NO: 131909 - DNA, 25 bp, Canis familiaris
gttgatgttaactgagctacttgca

SEQ ID NO: 131910 - DNA, 25 bp, Canis familiaris
gttgaggtccacctgatgctaaaga

SEQ ID NO: 131911 - DNA, 25 bp, Canis familiaris
gttgactgtcacccattgtaaatgt

SEQ ID NO: 131912 - DNA, 25 bp, Canis familiaris
gttgaaccaaccttgtagattgtta

SEQ ID NO: 131913 - DNA, 25 bp, Canis familiaris
gttgcttccatagcttggctattgt

SEQ ID NO: 131914 - DNA, 25 bp, Canis familiaris
gttgcttccaaaggatttccatggg

SEQ ID NO: 131915 - DNA, 25 bp, Canis familiaris
gttttacacaaggcagctgtaccgg

SEQ ID NO: 131916 - DNA, 25 bp, Canis familiaris
gttgttcagaaaagcagctggtacc

SEQ ID NO: 131917 - DNA, 25 bp, Canis familiaris
gttcccgccagaagcactggtatga

SEQ ID NO: 131918 - DNA, 25 bp, Canis familiaris
gttgcacgagcccaaaatcttctga

SEQ ID NO: 131919 - DNA, 25 bp, Canis familiaris
gttgcctgaccccaagaatgtgcac

SEQ ID NO: 131920 - DNA, 25 bp, Canis familiaris
gttcccagctgcccaggaaggcagc

SEQ ID NO: 131921 - DNA, 25 bp, Canis familiaris
gttgcccaatgacaagaaaggctaa

SEQ ID NO: 131922 - DNA, 25 bp, Canis familiaris
gttgcccgattgaagtgaaactctg

SEQ ID NO: 131923 - DNA, 25 bp, Canis familiaris
gttcccatgaatgcatggtcaaatt

SEQ ID NO: 131924 - DNA, 25 bp, Canis familiaris
gttgcacatcagaaacatattcaaa

SEQ ID NO: 131925 - DNA, 25 bp, Canis familiaris
gttgcattaccaacaaataaataag

SEQ ID NO: 131926 - DNA, 25 bp, Canis familiaris
gttctttcctaataaaatctgtgtc

SEQ ID NO: 131927 - DNA, 25 bp, Canis familiaris
gttgcaattccaaaccccaatggtt

SEQ ID NO: 131928 - DNA, 25 bp, Canis familiaris
gttgcaatattcagattccacaatc

SEQ ID NO: 131929 - DNA, 25 bp, Canis familiaris
gttgcttatcgaagtcatccaccac

SEQ ID NO: 131930 - DNA, 25 bp, Canis familiaris
gttgccacaggaagatatggaccat

SEQ ID NO: 131931 - DNA, 25 bp, Canis familiaris
gttcgcaagaacctgatggacatgt

SEQ ID NO: 131932 - DNA, 25 bp, Canis familiaris
gttcgcacgatctgtagtcacgttc

SEQ ID NO: 131933 - DNA, 25 bp, Canis familiaris
gttcgaccccatcgagatcaagttc

SEQ ID NO: 131934 - DNA, 25 bp, Canis familiaris
gttcgagccccatattcggtgtata

SEQ ID NO: 131935 - DNA, 25 bp, Canis familiaris
gttcggtgcccaaaatgccgacttc

SEQ ID NO: 131936 - DNA, 25 bp, Canis familiaris
gttccagaacgagacaccaacgtca

SEQ ID NO: 131937 - DNA, 25 bp, Canis familiaris
gttctaacacgagatcacggggtct

SEQ ID NO: 131938 - DNA, 25 bp, Canis familiaris
gttcttgtagtaggtagcggggtat

SEQ ID NO: 131939 - DNA, 25 bp, Canis familiaris
gttcgtgtgcggagacagggggttc

SEQ ID NO: 131940 - DNA, 25 bp, Canis familiaris
gttcgagtcgttgggctacaaggta

SEQ ID NO: 131941 - DNA, 25 bp, Canis familiaris
gttcggtggttgtacgacaaggagc

SEQ ID NO: 131942 - DNA, 25 bp, Canis familiaris
gttcaggagattagtaagtcagagg

SEQ ID NO: 131943 - DNA, 25 bp, Canis familiaris
gttaggtgttccaaagccatagaaa

SEQ ID NO: 131944 - DNA, 25 bp, Canis familiaris
gttgcatgtgggtacgttggaagaa

SEQ ID NO: 131945 - DNA, 25 bp, Canis familiaris
gttctgggaagaagtctggggagat

SEQ ID NO: 131946 - DNA, 25 bp, Canis familiaris
gttcgggacatgaggcagagcggtt

SEQ ID NO: 131947 - DNA, 25 bp, Canis familiaris
gttccaggacatgagccagaagagt

SEQ ID NO: 131948 - DNA, 25 bp, Canis familiaris
gttgccagagatgcttcgaaaggca

SEQ ID NO: 131949 - DNA, 25 bp, Canis familiaris
gttgcggaactctttgacaataggc

SEQ ID NO: 131950 - DNA, 25 bp, Canis familiaris
gttcgcttcccctgaagataggcac

SEQ ID NO: 131951 - DNA, 25 bp, Canis familiaris
gttctcttccccagccaagaagaat

SEQ ID NO: 131952 - DNA, 25 bp, Canis familiaris
gttctgccttccaaaggaagaaggg

SEQ ID NO: 131953 - DNA, 25 bp, Canis familiaris
gttctctcttcctgagtaagccatg

SEQ ID NO: 131954 - DNA, 25 bp, Canis familiaris
gttgctcattttaccagaagaccag

SEQ ID NO: 131955 - DNA, 25 bp, Canis familiaris
gttgattcggtaacattgaactcac

SEQ ID NO: 131956 - DNA, 25 bp, Canis familiaris
gttcaagccctaccttgaactccac

SEQ ID NO: 131957 - DNA, 25 bp, Canis familiaris
gttaagatgtctctcggacacttga

SEQ ID NO: 131958 - DNA, 25 bp, Canis familiaris
gttgaatagtctcgtgggacacggg

SEQ ID NO: 131959 - DNA, 25 bp, Canis familiaris
gttgttgaatgtctgtggaacaggg

SEQ ID NO: 131960 - DNA, 25 bp, Canis familiaris
gttgttaagaccattgagacgcgag

SEQ ID NO: 131961 - DNA, 25 bp, Canis familiaris
gttgttaattctacattgggcactg

SEQ ID NO: 131962 - DNA, 25 bp, Canis familiaris
gttgttaattctacattgggcactg

SEQ ID NO: 131963 - DNA, 25 bp, Canis familiaris
gttgttgtatgaaccttgagacttg

SEQ ID NO: 131964 - DNA, 25 bp, Canis familiaris
gttgatttctgacgaccgagaggtg

SEQ ID NO: 131965 - DNA, 25 bp, Canis familiaris
gttgacttgtggtagctaggaggct

SEQ ID NO: 131966 - DNA, 25 bp, Canis familiaris
gttgagtttgtgttgccactagcac

SEQ ID NO: 131967 - DNA, 25 bp, Canis familiaris
gttgagtgtaggttttcttgcccgg

SEQ ID NO: 131968 - DNA, 25 bp, Canis familiaris
gttagtgggtagtttattctcctgg

SEQ ID NO: 131969 - DNA, 25 bp, Canis familiaris
gttcgtgggtgttgtaatctccgtt

SEQ ID NO: 131970 - DNA, 25 bp, Canis familiaris
gttcggtgggctgggctatcccaga

SEQ ID NO: 131971 - DNA, 25 bp, Canis familiaris
gttcggggttgccatgttggaatcc

SEQ ID NO: 131972 - DNA, 25 bp, Canis familiaris
gttgttgttggccttcatcaactcc

SEQ ID NO: 131973 - DNA, 25 bp, Canis familiaris
gttgctttagtgaccctacactcac

SEQ ID NO: 131974 - DNA, 25 bp, Canis familiaris
gttcttctacttccactacaaagct

SEQ ID NO: 131975 - DNA, 25 bp, Canis familiaris
gttcctccacgtacaagtgcaaggc

SEQ ID NO: 131976 - DNA, 25 bp, Canis familiaris
gttcaggccacagaccgagaagaga

SEQ ID NO: 131977 - DNA, 25 bp, Canis familiaris
gtctaacctcacacctaaaggaact

SEQ ID NO: 131978 - DNA, 25 bp, Canis familiaris
gttgacaactcacctccaaaagaaa

SEQ ID NO: 131979 - DNA, 25 bp, Canis familiaris
gttgcagaagcctctcttggacaaa

SEQ ID NO: 131980 - DNA, 25 bp, Canis familiaris
gttgctcaaagccccttataaaaca

SEQ ID NO: 131981 - DNA, 25 bp, Canis familiaris
gttccaagacggacagttccaattc

SEQ ID NO: 131982 - DNA, 25 bp, Canis familiaris
gttccacgaagagaattccaataat

SEQ ID NO: 131983 - DNA, 25 bp, Canis familiaris
gttccctgaaacaaataaacatctt

SEQ ID NO: 131984 - DNA, 25 bp, Canis familiaris
gttgcacgtgcctataaaaattttt

SEQ ID NO: 131985 - DNA, 25 bp, Canis familiaris
gttgacctccagaaatatttttatt

SEQ ID NO: 131986 - DNA, 25 bp, Canis familiaris
gttgattgatcccttttttattttg

SEQ ID NO: 131987 - DNA, 25 bp, Canis familiaris
gtattggtcggggattggaactttg

SEQ ID NO: 131988 - DNA, 25 bp, Canis familiaris
gttccgtctgggcttcaaacatgcc

SEQ ID NO: 131989 - DNA, 25 bp, Canis familiaris
gttcctttggtcgctcgctcctctc

SEQ ID NO: 131990 - DNA, 25 bp, Canis familiaris
gttgcactttgtacttaagtccttc

SEQ ID NO: 131991 - DNA, 25 bp, Canis familiaris
gttcccacgttaatagagccactgc

SEQ ID NO: 131992 - DNA, 25 bp, Canis familiaris
gttcccacgattcctaaagagcagc

SEQ ID NO: 131993 - DNA, 25 bp, Canis familiaris
gtacccatgtgaacctaacgagtct

SEQ ID NO: 131994 - DNA, 25 bp, Canis familiaris
gttcctattaacattgaagattgcc

SEQ ID NO: 131995 - DNA, 25 bp, Canis familiaris
gttcctctccaaagtgattaagtgt

SEQ ID NO: 131996 - DNA, 25 bp, Canis familiaris
gttcttaccatggctgtatggaagt

SEQ ID NO: 131997 - DNA, 25 bp, Canis familiaris
gttctccctcccaattggaaatacg

SEQ ID NO: 131998 - DNA, 25 bp, Canis familiaris
gttccctcttcaccagggaagaact

SEQ ID NO: 131999 - DNA, 25 bp, Canis familiaris
gttccgttatccaggtttgcgactt

SEQ ID NO: 132000 - DNA, 25 bp, Canis familiaris
gttccttttgcctggtatacagcag

SEQ ID NO: 132001 - DNA, 25 bp, Canis familiaris
gttccagaagctgccgagataacag

SEQ ID NO: 132002 - DNA, 25 bp, Canis familiaris
gttccagaagctccctagtgtgaaa

SEQ ID NO: 132003 - DNA, 25 bp, Canis familiaris
gttccagaagaaggcagtcgtgtaa

SEQ ID NO: 132004 - DNA, 25 bp, Canis familiaris
gttgccagcatttagagagtgttta

SEQ ID NO: 132005 - DNA, 25 bp, Canis familiaris
gttgcggctctgtacacatttttaa

SEQ ID NO: 132006 - DNA, 25 bp, Canis familiaris
gttcggtggtcacattttggagagt

SEQ ID NO: 132007 - DNA, 25 bp, Canis familiaris
gtgtcgagtgtacggatttcgggga

SEQ ID NO: 132008 - DNA, 25 bp, Canis familiaris
gttccatgtttaagttctcagtcgg

SEQ ID NO: 132009 - DNA, 25 bp, Canis familiaris
gttgcatatgttcaatgttccagct

SEQ ID NO: 132010 - DNA, 25 bp, Canis familiaris
gttgacctatgctaacttctgcact

SEQ ID NO: 132011 - DNA, 25 bp, Canis familiaris
gttgaatgtgatccatacctgtgca

SEQ ID NO: 132012 - DNA, 25 bp, Canis familiaris
gttgaatgtgcaacatacaggtagg

SEQ ID NO: 132013 - DNA, 25 bp, Canis familiaris
gttgcatgttgcacacacggagttg

SEQ ID NO: 132014 - DNA, 25 bp, Canis familiaris
gttgcagttggggagctggtttcag

SEQ ID NO: 132015 - DNA, 25 bp, Canis familiaris
gttgctcttggggaggagaactggg

SEQ ID NO: 132016 - DNA, 25 bp, Canis familiaris
gttgcaagaggaggagagagaaagg

SEQ ID NO: 132017 - DNA, 25 bp, Canis familiaris
gttgcggcggcgggatgaaagatgc

SEQ ID NO: 132018 - DNA, 25 bp, Canis familiaris
gttcgtgagtccggtgttcagattt

SEQ ID NO: 132019 - DNA, 25 bp, Canis familiaris
gttaagcgtctttggttcaagtcat

SEQ ID NO: 132020 - DNA, 25 bp, Canis familiaris
gttaaatggctttcgcttaagattt

SEQ ID NO: 132021 - DNA, 25 bp, Canis familiaris
gttatgtaatttatgtttaggctat

SEQ ID NO: 132022 - DNA, 25 bp, Canis familiaris
gttgctgtttattttttttggcctg

SEQ ID NO: 132023 - DNA, 25 bp, Canis familiaris
gttgcatgttgttttctttttaatt

SEQ ID NO: 132024 - DNA, 25 bp, Canis familiaris
gttgctggtcttggtttctgtaact

SEQ ID NO: 132025 - DNA, 25 bp, Canis familiaris
gttgcttgaattggatcttttcatc

SEQ ID NO: 132026 - DNA, 25 bp, Canis familiaris
gttgatctgcatatttctgtatatt

SEQ ID NO: 132027 - DNA, 25 bp, Canis familiaris
gttgcttgtactatgctgagaatgt

SEQ ID NO: 132028 - DNA, 25 bp, Canis familiaris
gttgctgcgtccaggctatgaagat

SEQ ID NO: 132029 - DNA, 25 bp, Canis familiaris
gttgcacaacatggtagcttaagac

SEQ ID NO: 132030 - DNA, 25 bp, Canis familiaris
gttgactgcacaggtaatacaacac

SEQ ID NO: 132031 - DNA, 25 bp, Canis familiaris
gttgagctccaacatgaatcaccca

SEQ ID NO: 132032 - DNA, 25 bp, Canis familiaris
gttgactctcaaaataggacctcac

SEQ ID NO: 132033 - DNA, 25 bp, Canis familiaris
gttccatatcagaagagggtcctac

SEQ ID NO: 132034 - DNA, 25 bp, Canis familiaris
gttcgattccgagatggagcctgag

SEQ ID NO: 132035 - DNA, 25 bp, Canis familiaris
gttgcagttaaggtgttggccatgg

SEQ ID NO: 132036 - DNA, 25 bp, Canis familiaris
gttgcagtggagtgatggggtgcct

SEQ ID NO: 132037 - DNA, 25 bp, Canis familiaris
gttgacgcgatgtgatggtctgccc

SEQ ID NO: 132038 - DNA, 25 bp, Canis familiaris
gttgactgtggtcattgctctcacc

SEQ ID NO: 132039 - DNA, 25 bp, Canis familiaris
gttgaatggcctcaatcttctttcc

SEQ ID NO: 132040 - DNA, 25 bp, Canis familiaris
gttactggacatcaccttttacagc

SEQ ID NO: 132041 - DNA, 25 bp, Canis familiaris
tgttccgagaccacctttgtaaagc

SEQ ID NO: 132042 - DNA, 25 bp, Canis familiaris
gttctcgaaccagagctttttcatt

SEQ ID NO: 132043 - DNA, 25 bp, Canis familiaris
gttccaaaccatgtgcttgcactac

SEQ ID NO: 132044 - DNA, 25 bp, Canis familiaris
gttccaacagccttgctcttaattt

SEQ ID NO: 132045 - DNA, 25 bp, Canis familiaris
gttccttctacattcctgtacaatt

SEQ ID NO: 132046 - DNA, 25 bp, Canis familiaris
gttgagtactaatctcttactatcc

SEQ ID NO: 132047 - DNA, 25 bp, Canis familiaris
gttgactactactcattgttttcac

SEQ ID NO: 132048 - DNA, 25 bp, Canis familiaris
gttgaaagtaacctgtgttgctcat

SEQ ID NO: 132049 - DNA, 25 bp, Canis familiaris
gttccactgacacctttgattgtat

SEQ ID NO: 132050 - DNA, 25 bp, Canis familiaris
gttccacgtatcgcgtgatggttca

SEQ ID NO: 132051 - DNA, 25 bp, Canis familiaris
gttccaagagtcttcgtgcattaat

SEQ ID NO: 132052 - DNA, 25 bp, Canis familiaris
gttgccaagcatattctgatagtaa

SEQ ID NO: 132053 - DNA, 25 bp, Canis familiaris
gttgcgcatcacacttctgtgattt

SEQ ID NO: 132054 - DNA, 25 bp, Canis familiaris
gttgcacatatgatttgcttgtcgt

SEQ ID NO: 132055 - DNA, 25 bp, Canis familiaris
gttgcatcgagtctctggatttgct

SEQ ID NO: 132056 - DNA, 25 bp, Canis familiaris
gttgctggagcaatttagctttgat

SEQ ID NO: 132057 - DNA, 25 bp, Canis familiaris
gttgcaggcgaagttgattttgctt

SEQ ID NO: 132058 - DNA, 25 bp, Canis familiaris
gttgcagtccaagtttgtgctgtgt

SEQ ID NO: 132059 - DNA, 25 bp, Canis familiaris
gttgcagtccaaggttgtggctgtt

SEQ ID NO: 132060 - DNA, 25 bp, Canis familiaris
gttgagtgtacacctttgggtctga

SEQ ID NO: 132061 - DNA, 25 bp, Canis familiaris
gttgagtgttcaactcttggtttca

SEQ ID NO: 132062 - DNA, 25 bp, Canis familiaris
gttgcaggatccacagttggtgtcc

SEQ ID NO: 132063 - DNA, 25 bp, Canis familiaris
gttgcaggtgccatcataatccttc

SEQ ID NO: 132064 - DNA, 25 bp, Canis familiaris
gttgagccatggcccaaatacctgt

SEQ ID NO: 132065 - DNA, 25 bp, Canis familiaris
gttccgatgagtgaccattcactgt

SEQ ID NO: 132066 - DNA, 25 bp, Canis familiaris
gttccaagattaccactctactgca

SEQ ID NO: 132067 - DNA, 25 bp, Canis familiaris
gttgccaagtcttccatattactag

SEQ ID NO: 132068 - DNA, 25 bp, Canis familiaris
gttgctataacttcaatgcctaata

SEQ ID NO: 132069 - DNA, 25 bp, Canis familiaris
gttgcttaactccatttcagatcat

SEQ ID NO: 132070 - DNA, 25 bp, Canis familiaris
gttgcagttacatctgtagcaatca

SEQ ID NO: 132071 - DNA, 25 bp, Canis familiaris
gttgcttttgcatcgtcaatacctt

SEQ ID NO: 132072 - DNA, 25 bp, Canis familiaris
gttgctaatttgtgtatctatggtg

SEQ ID NO: 132073 - DNA, 25 bp, Canis familiaris
gttgctttatttatttaggtttcat

SEQ ID NO: 132074 - DNA, 25 bp, Canis familiaris
gttgcttttggtatttctctgtccc

SEQ ID NO: 132075 - DNA, 25 bp, Canis familiaris
gttgcttgttttattatgacctcag

SEQ ID NO: 132076 - DNA, 25 bp, Canis familiaris
gtacctggtttaacctgggccagtg

SEQ ID NO: 132077 - DNA, 25 bp, Canis familiaris
gttccgtgttgattagggggccgag

SEQ ID NO: 132078 - DNA, 25 bp, Canis familiaris
gttcgcggtgtaaagattggaggga

SEQ ID NO: 132079 - DNA, 25 bp, Canis familiaris
gttcggtgtttctcttgaggcggat

SEQ ID NO: 132080 - DNA, 25 bp, Canis familiaris
gttccggaatgggtttgacacgtgt

SEQ ID NO: 132081 - DNA, 25 bp, Canis familiaris
gttcctctatatgggtttcgacgta

SEQ ID NO: 132082 - DNA, 25 bp, Canis familiaris
gttcctccctgctgtttggaggcga

SEQ ID NO: 132083 - DNA, 25 bp, Canis familiaris
gttcttcgactcttgcgttgacaag

SEQ ID NO: 132084 - DNA, 25 bp, Canis familiaris
gttctagtagactgcttcccaagac

SEQ ID NO: 132085 - DNA, 25 bp, Canis familiaris
gttctatagagattcttaccgtaac

SEQ ID NO: 132086 - DNA, 25 bp, Canis familiaris
gttgctttaggtatccgtgatccct

SEQ ID NO: 132087 - DNA, 25 bp, Canis familiaris
gttgctttatggaacacagccgacg

SEQ ID NO: 132088 - DNA, 25 bp, Canis familiaris
gttgcatgctttcgaaacgtctgac

SEQ ID NO: 132089 - DNA, 25 bp, Canis familiaris
gttgcagcactttaacagcgtaagc

SEQ ID NO: 132090 - DNA, 25 bp, Canis familiaris
gttgacactatatacagatgattaa

SEQ ID NO: 132091 - DNA, 25 bp, Canis familiaris
gttgccgaatacttcagagaccaag

SEQ ID NO: 132092 - DNA, 25 bp, Canis familiaris
gttcctgatgtatatagagcaagca

SEQ ID NO: 132093 - DNA, 25 bp, Canis familiaris
gttcctcaatattttcagcgacatc

SEQ ID NO: 132094 - DNA, 25 bp, Canis familiaris
gttcctatgatttcttggctctctt

SEQ ID NO: 132095 - DNA, 25 bp, Canis familiaris
gttcctcatgttaattccagtctgg

SEQ ID NO: 132096 - DNA, 25 bp, Canis familiaris
gttgccctattcaatgtctaggcac

SEQ ID NO: 132097 - DNA, 25 bp, Canis familiaris
gttctgccatcaacgaggtagtgac

SEQ ID NO: 132098 - DNA, 25 bp, Canis familiaris
gttctgattgtgtccaggggatgac

SEQ ID NO: 132099 - DNA, 25 bp, Canis familiaris
gttgcgaaggcattctggaagctga

SEQ ID NO: 132100 - DNA, 25 bp, Canis familiaris
gtctgcaagccctttggcaacgtga

SEQ ID NO: 132101 - DNA, 25 bp, Canis familiaris
gttgacacccacaggagataataaa

SEQ ID NO: 132102 - DNA, 25 bp, Canis familiaris
gttgaattcaacagtggacacaaat

SEQ ID NO: 132103 - DNA, 25 bp, Canis familiaris
gttgcaattatctgaatggacaaaa

SEQ ID NO: 132104 - DNA, 25 bp, Canis familiaris
gttgcagattatatgcgttacctaa

SEQ ID NO: 132105 - DNA, 25 bp, Canis familiaris
gttgctgacaaaagcggtcgggaac

SEQ ID NO: 132106 - DNA, 25 bp, Canis familiaris
gttgctgcttagagtggtcagagga

SEQ ID NO: 132107 - DNA, 25 bp, Canis familiaris
gttcgtgttgtcctggatcagctag

SEQ ID NO: 132108 - DNA, 25 bp, Canis familiaris
gttgaatgtctgtggaacagggagc

SEQ ID NO: 132109 - DNA, 25 bp, Canis familiaris
gttgaagatctcattgacacaggca

SEQ ID NO: 132110 - DNA, 25 bp, Canis familiaris
gttgcataacttttgcctgaggccc

SEQ ID NO: 132111 - DNA, 25 bp, Canis familiaris
gttgctgaacttttgccatcttgca

SEQ ID NO: 132112 - DNA, 25 bp, Canis familiaris
gttgctaattatttgtattgctgaa

SEQ ID NO: 132113 - DNA, 25 bp, Canis familiaris
gttgctgaattctttgtatatgcca

SEQ ID NO: 132114 - DNA, 25 bp, Canis familiaris
gttctggttctttagtgctgcatac

SEQ ID NO: 132115 - DNA, 25 bp, Canis familiaris
gttgcggttgcggacatgcttgaat

SEQ ID NO: 132116 - DNA, 25 bp, Canis familiaris
gttgcggttgcggagcatgtttgaa

SEQ ID NO: 132117 - DNA, 25 bp, Canis familiaris
gttctgaggtcaggagagtttgaga

SEQ ID NO: 132118 - DNA, 25 bp, Canis familiaris
gtttgatcctagggaccctggacgg

SEQ ID NO: 132119 - DNA, 25 bp, Canis familiaris
gtctagtccggagacccagaagagg

SEQ ID NO: 132120 - DNA, 25 bp, Canis familiaris
gttcccgccgccgaacaagaaggcg

SEQ ID NO: 132121 - DNA, 25 bp, Canis familiaris
gttccatccacgtcgaaccaaatgg

SEQ ID NO: 132122 - DNA, 25 bp, Canis familiaris
ggctcccgaggagcaccccgtgctg

SEQ ID NO: 132123 - DNA, 25 bp, Canis familiaris
gttgaacgaggagcagccctcgggc

SEQ ID NO: 132124 - DNA, 25 bp, Canis familiaris
gttcaaccaggaagaccttcggcgc

SEQ ID NO: 132125 - DNA, 25 bp, Canis familiaris
gttctgatgccaagtggtctttggg

SEQ ID NO: 132126 - DNA, 25 bp, Canis familiaris
gttcttccaattgggttatggtgaa

SEQ ID NO: 132127 - DNA, 25 bp, Canis familiaris
gttcttccttgtagagttataaacg

SEQ ID NO: 132128 - DNA, 25 bp, Canis familiaris
gttctggctttgtgctgtggaaact

SEQ ID NO: 132129 - DNA, 25 bp, Canis familiaris
gttctgggggcccgagaaagactct

SEQ ID NO: 132130 - DNA, 25 bp, Canis familiaris
gttctgcggtgggcgccaaaagggt

SEQ ID NO: 132131 - DNA, 25 bp, Canis familiaris
gttcttgggggctgctaacagtcga

SEQ ID NO: 132132 - DNA, 25 bp, Canis familiaris
gttcgagggccctgtaaattggaat

SEQ ID NO: 132133 - DNA, 25 bp, Canis familiaris
gttcgaaggccaatcttactttaga

SEQ ID NO: 132134 - DNA, 25 bp, Canis familiaris
gttcgatttctcaactaaagtacag

SEQ ID NO: 132135 - DNA, 25 bp, Canis familiaris
gttccctttcattctcagaagtgtt

SEQ ID NO: 132136 - DNA, 25 bp, Canis familiaris
gttcctctgttgctcaaataattct

SEQ ID NO: 132137 - DNA, 25 bp, Canis familiaris
gttcctcatttgctaaaagattttt

SEQ ID NO: 132138 - DNA, 25 bp, Canis familiaris
gttcccattagccataccaggactg

SEQ ID NO: 132139 - DNA, 25 bp, Canis familiaris
gttccagtatgactccactcacggc

SEQ ID NO: 132140 - DNA, 25 bp, Canis familiaris
gttgccaggagagcgacgactcggc

SEQ ID NO: 132141 - DNA, 25 bp, Canis familiaris
gttccttaggggccagacttgtgca

SEQ ID NO: 132142 - DNA, 25 bp, Canis familiaris
gttcccaagggggctcacttgtgat

SEQ ID NO: 132143 - DNA, 25 bp, Canis familiaris
gttccagacagggacgtgcgggtca

SEQ ID NO: 132144 - DNA, 25 bp, Canis familiaris
gttgaaacaggtgtcggaggtgcag

SEQ ID NO: 132145 - DNA, 25 bp, Canis familiaris
gttaataaatggcctttgggtagct

SEQ ID NO: 132146 - DNA, 25 bp, Canis familiaris
gttaacccgggtagtgcggtgcact

SEQ ID NO: 132147 - DNA, 25 bp, Canis familiaris
gtacaccccggtaagtggggcacag

SEQ ID NO: 132148 - DNA, 25 bp, Canis familiaris
ggaaccactaacacggtggtccagg

SEQ ID NO: 132149 - DNA, 25 bp, Canis familiaris
gtgaaacaggacgccggtttccagc

SEQ ID NO: 132150 - DNA, 25 bp, Canis familiaris
gtaaaactgaatcactggtttgtca

SEQ ID NO: 132151 - DNA, 25 bp, Canis familiaris
gtaggagtctaacacggtttgatag

SEQ ID NO: 132152 - DNA, 25 bp, Canis familiaris
gttcagggagaacaccgtattggag

SEQ ID NO: 132153 - DNA, 25 bp, Canis familiaris
gtattggggaagcccgggttgctca

SEQ ID NO: 132154 - DNA, 25 bp, Canis familiaris
gttcgggtgaaacagcggtggctca

SEQ ID NO: 132155 - DNA, 25 bp, Canis familiaris
gttccgggaatgagagggctgtgcc

SEQ ID NO: 132156 - DNA, 25 bp, Canis familiaris
gttcacggtaggaaactccaggtca

SEQ ID NO: 132157 - DNA, 25 bp, Canis familiaris
gttccagttatgctgaattccacag

SEQ ID NO: 132158 - DNA, 25 bp, Canis familiaris
gttccagttatgttatttgccaaaa

SEQ ID NO: 132159 - DNA, 25 bp, Canis familiaris
gttccacaacttattctgacacaaa

SEQ ID NO: 132160 - DNA, 25 bp, Canis familiaris
gttccccacttaatgtgggccaaca

SEQ ID NO: 132161 - DNA, 25 bp, Canis familiaris
gttcccatcacttacagagtcgatc

SEQ ID NO: 132162 - DNA, 25 bp, Canis familiaris
gttgcccaacactaaatctgcagac

SEQ ID NO: 132163 - DNA, 25 bp, Canis familiaris
gttgcctcgagcctgaaatcatgac

SEQ ID NO: 132164 - DNA, 25 bp, Canis familiaris
gttgctatccaggctgtgctatccc

SEQ ID NO: 132165 - DNA, 25 bp, Canis familiaris
gttgcttcacaggctggcaggagct

SEQ ID NO: 132166 - DNA, 25 bp, Canis familiaris
gttgccccagcttgagagctgagca

SEQ ID NO: 132167 - DNA, 25 bp, Canis familiaris
gttgctgtcaccaatggatgtgcac

SEQ ID NO: 132168 - DNA, 25 bp, Canis familiaris
gttgctgtcatcaaaggagtgaacg

SEQ ID NO: 132169 - DNA, 25 bp, Canis familiaris
gttgctggatctgctgtttgaagcg

SEQ ID NO: 132170 - DNA, 25 bp, Canis familiaris
gttgctgttgcttactctggaagga

SEQ ID NO: 132171 - DNA, 25 bp, Canis familiaris
gttgcttgccgatgtctggcgagta

SEQ ID NO: 132172 - DNA, 25 bp, Canis familiaris
gtatcgcatgccgtcggggtagtaa

SEQ ID NO: 132173 - DNA, 25 bp, Canis familiaris
gttctgcgctgcgccggttgaaaac

SEQ ID NO: 132174 - DNA, 25 bp, Canis familiaris
gttgcctcggcagctggtgcgaaaa

SEQ ID NO: 132175 - DNA, 25 bp, Canis familiaris
gttccctgtggcctggcaggaaaga

SEQ ID NO: 132176 - DNA, 25 bp, Canis familiaris
gttccctcggagggcagaggacaag

SEQ ID NO: 132177 - DNA, 25 bp, Canis familiaris
gttccaccaacgggcagtgtgacat

SEQ ID NO: 132178 - DNA, 25 bp, Canis familiaris
gttctcccaatggtggcgtgatggc

SEQ ID NO: 132179 - DNA, 25 bp, Canis familiaris
gttctggcccagggtctgtgggccc

SEQ ID NO: 132180 - DNA, 25 bp, Canis familiaris
gttgcagtggaacctgtcttagacc

SEQ ID NO: 132181 - DNA, 25 bp, Canis familiaris
gttccaggaaccccagtaactctgg

SEQ ID NO: 132182 - DNA, 25 bp, Canis familiaris
gttacaggaaaacagggtgccagtg

SEQ ID NO: 132183 - DNA, 25 bp, Canis familiaris
gttcacagaaagaagggaggctccg

SEQ ID NO: 132184 - DNA, 25 bp, Canis familiaris
gttccagtatcagaagcgagcgtta

SEQ ID NO: 132185 - DNA, 25 bp, Canis familiaris
gttccagttatcagtcagacttaaa

SEQ ID NO: 132186 - DNA, 25 bp, Canis familiaris
gttccagtatgatcctcagactatt

SEQ ID NO: 132187 - DNA, 25 bp, Canis familiaris
gttgccagataattcctattgcttt

SEQ ID NO: 132188 - DNA, 25 bp, Canis familiaris
gttccaaaatacgttcttctctcac

SEQ ID NO: 132189 - DNA, 25 bp, Canis familiaris
gttcgaccattaactctcgttatct

SEQ ID NO: 132190 - DNA, 25 bp, Canis familiaris
gttccactagaaatctccatgattt

SEQ ID NO: 132191 - DNA, 25 bp, Canis familiaris
gttgccatcttgttgatctactttg

SEQ ID NO: 132192 - DNA, 25 bp, Canis familiaris
gttgcctgctcacttttagtgttga

SEQ ID NO: 132193 - DNA, 25 bp, Canis familiaris
gttcctcatcacaatttactgctat

SEQ ID NO: 132194 - DNA, 25 bp, Canis familiaris
gttccttgcacattttacagttacc

SEQ ID NO: 132195 - DNA, 25 bp, Canis familiaris
gttctctcccattctctgaaataaa

SEQ ID NO: 132196 - DNA, 25 bp, Canis familiaris
gttccccacatggatgttagtaata

SEQ ID NO: 132197 - DNA, 25 bp, Canis familiaris
gttgcacccagacatgttgatcgaa

SEQ ID NO: 132198 - DNA, 25 bp, Canis familiaris
gttgccatctaccttgggatcaaac

SEQ ID NO: 132199 - DNA, 25 bp, Canis familiaris
gttgcaattaccagctttcaaacta

SEQ ID NO: 132200 - DNA, 25 bp, Canis familiaris
gttatagtacctcttgtaatgtcta

SEQ ID NO: 132201 - DNA, 25 bp, Canis familiaris
ggtaaataaatgcttggacttggat

SEQ ID NO: 132202 - DNA, 25 bp, Canis familiaris
gtttaacgagggatccacttggagg

SEQ ID NO: 132203 - DNA, 25 bp, Canis familiaris
gttcgacatctacgagttccacttc

SEQ ID NO: 132204 - DNA, 25 bp, Canis familiaris
gttgcagaactttgagaagcgcctt

SEQ ID NO: 132205 - DNA, 25 bp, Canis familiaris
gttgcaaactgctgaccacgccgaa

SEQ ID NO: 132206 - DNA, 25 bp, Canis familiaris
gttgcaatgacataacaatccctaa

SEQ ID NO: 132207 - DNA, 25 bp, Canis familiaris
gttgccttgcaaattcaacctgcta

SEQ ID NO: 132208 - DNA, 25 bp, Canis familiaris
gttgccattgaaaacccagctgatg

SEQ ID NO: 132209 - DNA, 25 bp, Canis familiaris
gttctcttgcagaaaccactgggtg

SEQ ID NO: 132210 - DNA, 25 bp, Canis familiaris
gttcctctcggatggactggcaatg

SEQ ID NO: 132211 - DNA, 25 bp, Canis familiaris
gttgccttcgtgtcagtggtggaag

SEQ ID NO: 132212 - DNA, 25 bp, Canis familiaris
gttgccaccgctcagtggggagatg

SEQ ID NO: 132213 - DNA, 25 bp, Canis familiaris
gttcctctcctgaatcggggatgac

SEQ ID NO: 132214 - DNA, 25 bp, Canis familiaris
gttgctgctactctttgggatatgg

SEQ ID NO: 132215 - DNA, 25 bp, Canis familiaris
gttgccatcacttttctgtggtcaa

SEQ ID NO: 132216 - DNA, 25 bp, Canis familiaris
gttcctctctgtgtcagtagtaagg

SEQ ID NO: 132217 - DNA, 25 bp, Canis familiaris
gttccttctggcacaattttagaga

SEQ ID NO: 132218 - DNA, 25 bp, Canis familiaris
gttcgttctccatacttattcaaat

SEQ ID NO: 132219 - DNA, 25 bp, Canis familiaris
gttcgaatatcctgtctaaacaaat

SEQ ID NO: 132220 - DNA, 25 bp, Canis familiaris
gttccaatttgctgctccaagtaaa

SEQ ID NO: 132221 - DNA, 25 bp, Canis familiaris
gttccctttgatggtccgagtacaa

SEQ ID NO: 132222 - DNA, 25 bp, Canis familiaris
gttgccacttgtcggttctatgaac

SEQ ID NO: 132223 - DNA, 25 bp, Canis familiaris
gttcctctgtgacccatttagaagt

SEQ ID NO: 132224 - DNA, 25 bp, Canis familiaris
gttccatgttggctcttgtagtata

SEQ ID NO: 132225 - DNA, 25 bp, Canis familiaris
gttccatgcctacatcttggtgttc

SEQ ID NO: 132226 - DNA, 25 bp, Canis familiaris
gttgcattctttctctttgtgtgct

SEQ ID NO: 132227 - DNA, 25 bp, Canis familiaris
gttgcattattttacttgtttctgt

SEQ ID NO: 132228 - DNA, 25 bp, Canis familiaris
gttgcatttggttttctgttttgtt

SEQ ID NO: 132229 - DNA, 25 bp, Canis familiaris
gttgctgttggtttttgttgttttg

SEQ ID NO: 132230 - DNA, 25 bp, Canis familiaris
gttgctatttttggagtttgcttta

SEQ ID NO: 132231 - DNA, 25 bp, Canis familiaris
gttgctactgttacacgtgtttttc

SEQ ID NO: 132232 - DNA, 25 bp, Canis familiaris
gttcctctgtgacacggtatttgac

SEQ ID NO: 132233 - DNA, 25 bp, Canis familiaris
gttgccctgatgttacgaggattct

SEQ ID NO: 132234 - DNA, 25 bp, Canis familiaris
gttcctttgtttggcagaattctgc

SEQ ID NO: 132235 - DNA, 25 bp, Canis familiaris
gttccttcattttgtcaggtgccat

SEQ ID NO: 132236 - DNA, 25 bp, Canis familiaris
gttcctaatatttcacgatggccta

SEQ ID NO: 132237 - DNA, 25 bp, Canis familiaris
gttcccaatgataaccactgtcact

SEQ ID NO: 132238 - DNA, 25 bp, Canis familiaris
gttcctgaaagagccctggcacatc

SEQ ID NO: 132239 - DNA, 25 bp, Canis familiaris
gttcgctgaaaggcagcaaccccct

SEQ ID NO: 132240 - DNA, 25 bp, Canis familiaris
gttcgctataaaccaaagctccttg

SEQ ID NO: 132241 - DNA, 25 bp, Canis familiaris
gttcgtagagggtaaggcttgcgtg

SEQ ID NO: 132242 - DNA, 25 bp, Canis familiaris
gttcccaggtagccaatggtggcgg

SEQ ID NO: 132243 - DNA, 25 bp, Canis familiaris
gttgcctcaggctggagggagggga

SEQ ID NO: 132244 - DNA, 25 bp, Canis familiaris
gttcctcagcctggggctggtgagc

SEQ ID NO: 132245 - DNA, 25 bp, Canis familiaris
gttgcctacttgctgctcagtagac

SEQ ID NO: 132246 - DNA, 25 bp, Canis familiaris
gttgcctattttctcatgtatgttg

SEQ ID NO: 132247 - DNA, 25 bp, Canis familiaris
gttgctgtttttaagtgtgtgtgtg

SEQ ID NO: 132248 - DNA, 25 bp, Canis familiaris
gttgctcttttaagggagcctggct

SEQ ID NO: 132249 - DNA, 25 bp, Canis familiaris
gttgcccttgtaaagagccactgtt

SEQ ID NO: 132250 - DNA, 25 bp, Canis familiaris
gttgccgtccattgaagacacaggc

SEQ ID NO: 132251 - DNA, 25 bp, Canis familiaris
gttgctcctccattaagagttggct

SEQ ID NO: 132252 - DNA, 25 bp, Canis familiaris
gttgccacggatcaaggttctgcat

SEQ ID NO: 132253 - DNA, 25 bp, Canis familiaris
gttctcaagaatcaaggctccttta

SEQ ID NO: 132254 - DNA, 25 bp, Canis familiaris
gttgctaagatactaaattggtttt

SEQ ID NO: 132255 - DNA, 25 bp, Canis familiaris
gttgcatgaagtaggatttgggtat

SEQ ID NO: 132256 - DNA, 25 bp, Canis familiaris
gttgcataattttgtttaactgaca

SEQ ID NO: 132257 - DNA, 25 bp, Canis familiaris
gttgcataacttactttgaatatca

SEQ ID NO: 132258 - DNA, 25 bp, Canis familiaris
gttgctgtaagtactttgaagctag

SEQ ID NO: 132259 - DNA, 25 bp, Canis familiaris
gttgctgtgaagtatatatctgacc

SEQ ID NO: 132260 - DNA, 25 bp, Canis familiaris
gttctgatacacttcagcagctgaa

SEQ ID NO: 132261 - DNA, 25 bp, Canis familiaris
gttgctttgcagttgaggcacagcc

SEQ ID NO: 132262 - DNA, 25 bp, Canis familiaris
gttgctggtgagactgggccagccc

SEQ ID NO: 132263 - DNA, 25 bp, Canis familiaris
gttgctggcagattctgaggctaca

SEQ ID NO: 132264 - DNA, 25 bp, Canis familiaris
gttcctggtttactgtagatgtcct

SEQ ID NO: 132265 - DNA, 25 bp, Canis familiaris
gttcctagactacctgcaagtattt

SEQ ID NO: 132266 - DNA, 25 bp, Canis familiaris
gttccaacattggcccaagtattca

SEQ ID NO: 132267 - DNA, 25 bp, Canis familiaris
gttcctccacctgaaaataatcatt

SEQ ID NO: 132268 - DNA, 25 bp, Canis familiaris
gttccatccatctactaaaattttt

SEQ ID NO: 132269 - DNA, 25 bp, Canis familiaris
gttccatgttctatatatgaatact

SEQ ID NO: 132270 - DNA, 25 bp, Canis familiaris
gttcctggttcagtttcagtacggc

SEQ ID NO: 132271 - DNA, 25 bp, Canis familiaris
gttccaatggacgttgctttacggg

SEQ ID NO: 132272 - DNA, 25 bp, Canis familiaris
gttccagggcaagagcactggaccg

SEQ ID NO: 132273 - DNA, 25 bp, Canis familiaris
gttccaggtgaaaagccagcagact

SEQ ID NO: 132274 - DNA, 25 bp, Canis familiaris
gttccaggtcgctctcaatgatgac

SEQ ID NO: 132275 - DNA, 25 bp, Canis familiaris
gttccagcttcggcctgcacagaac

SEQ ID NO: 132276 - DNA, 25 bp, Canis familiaris
ggtccacttgaggcttaaaaccctg

SEQ ID NO: 132277 - DNA, 25 bp, Canis familiaris
gttccacggatggcttaacaaccca

SEQ ID NO: 132278 - DNA, 25 bp, Canis familiaris
gttctctcggagtttgtatcgggcc

SEQ ID NO: 132279 - DNA, 25 bp, Canis familiaris
gttctgttggattgcatttactggc

SEQ ID NO: 132280 - DNA, 25 bp, Canis familiaris
caaagcgaaagcggcaggatcgacg

SEQ ID NO: 132281 - DNA, 25 bp, Canis familiaris
ggcaggatcgacgcgcttctgtatg

SEQ ID NO: 132282 - DNA, 25 bp, Canis familiaris
gccggagttttacggcaatatcatc

SEQ ID NO: 132283 - DNA, 25 bp, Canis familiaris
gttttacggcaatatcatcaccaca

SEQ ID NO: 132284 - DNA, 25 bp, Canis familiaris
gcaatatcatcaccacacgcactta

SEQ ID NO: 132285 - DNA, 25 bp, Canis familiaris
atcaccacacgcacttatcaggaac

SEQ ID NO: 132286 - DNA, 25 bp, Canis familiaris
acgcacttatcaggaacgcctcgat

SEQ ID NO: 132287 - DNA, 25 bp, Canis familiaris
atacgctggaaaaagtgcgcgatgc

SEQ ID NO: 132288 - DNA, 25 bp, Canis familiaris
ggaaaaagtgcgcgatgccgggatc

SEQ ID NO: 132289 - DNA, 25 bp, Canis familiaris
agtgcgcgatgccgggatcaaagtc

SEQ ID NO: 132290 - DNA, 25 bp, Canis familiaris
gccgggatcaaagtctgttctggcg

SEQ ID NO: 132291 - DNA, 25 bp, Canis familiaris
aagtctgttctggcggcattgtggg

SEQ ID NO: 132292 - DNA, 25 bp, Canis familiaris
aagatcgcgccggattattgctgca

SEQ ID NO: 132293 - DNA, 25 bp, Canis familiaris
gccggattattgctgcaactggcaa

SEQ ID NO: 132294 - DNA, 25 bp, Canis familiaris
attgctgcaactggcaaacctgccg

SEQ ID NO: 132295 - DNA, 25 bp, Canis familiaris
cgccggaaagcgtgccaatcaacat

SEQ ID NO: 132296 - DNA, 25 bp, Canis familiaris
aagcgtgccaatcaacatgctggtg

SEQ ID NO: 132297 - DNA, 25 bp, Canis familiaris
caatcaacatgctggtgaaggtgaa

SEQ ID NO: 132298 - DNA, 25 bp, Canis familiaris
gttgccggactactcgagcattgac

SEQ ID NO: 132299 - DNA, 25 bp, Canis familiaris
gttcctctagaactccagatggcaa

SEQ ID NO: 132300 - DNA, 25 bp, Canis familiaris
gttcctgctgagagtccagatgtgc

SEQ ID NO: 132301 - DNA, 25 bp, Canis familiaris
gttgcttggcagaacccagtgatct

SEQ ID NO: 132302 - DNA, 25 bp, Canis familiaris
gttgcattgtggaagccacatctca

SEQ ID NO: 132303 - DNA, 25 bp, Canis familiaris
gttgccttggaactacttaatagag

SEQ ID NO: 132304 - DNA, 25 bp, Canis familiaris
gttcctaggaagaagctccattcag

SEQ ID NO: 132305 - DNA, 25 bp, Canis familiaris
gttcctgaggacaatgcgcttttgc

SEQ ID NO: 132306 - DNA, 25 bp, Canis familiaris
gttccgtggttagcttttgtattca

SEQ ID NO: 132307 - DNA, 25 bp, Canis familiaris
gttccagggctgtcagcctttattt

SEQ ID NO: 132308 - DNA, 25 bp, Canis familiaris
gttgcccgatggtcaactttagatt

SEQ ID NO: 132309 - DNA, 25 bp, Canis familiaris
gtctctttaggctcctttaatttct

SEQ ID NO: 132310 - DNA, 25 bp, Canis familiaris
gttctgtgtaacctccattaaattt

SEQ ID NO: 132311 - DNA, 25 bp, Canis familiaris
gttgctgttcagcctccgaataaag

SEQ ID NO: 132312 - DNA, 25 bp, Canis familiaris
gttgctgctttttgcgaacaaacag

SEQ ID NO: 132313 - DNA, 25 bp, Canis familiaris
gttcgtttgtttctcataatgcact

SEQ ID NO: 132314 - DNA, 25 bp, Canis familiaris
gttctgtgggttgtccatcaaagca

SEQ ID NO: 132315 - DNA, 25 bp, Canis familiaris
gttcttgggtgtgataatagtgatg

SEQ ID NO: 132316 - DNA, 25 bp, Canis familiaris
gttcttgcgcgtctatcgcaggagt

SEQ ID NO: 132317 - DNA, 25 bp, Canis familiaris
gttgctgtcgattaagaccggagct

SEQ ID NO: 132318 - DNA, 25 bp, Canis familiaris
gttgcttcagtttatagctcgtagt

SEQ ID NO: 132319 - DNA, 25 bp, Canis familiaris
gttgctctcagactgataagcactt

SEQ ID NO: 132320 - DNA, 25 bp, Canis familiaris
gttctccacagttaacttttcgtca

SEQ ID NO: 132321 - DNA, 25 bp, Canis familiaris
gttcccaagattgtgcattttttct

SEQ ID NO: 132322 - DNA, 25 bp, Canis familiaris
gttcccagcgttggtcaacttactc

SEQ ID NO: 132323 - DNA, 25 bp, Canis familiaris
gttctcggaagtgtacagcttcctg

SEQ ID NO: 132324 - DNA, 25 bp, Canis familiaris
gttctgaccaaagctgaactgtgct

SEQ ID NO: 132325 - DNA, 25 bp, Canis familiaris
gttccagatcaaacctgacgggcat

SEQ ID NO: 132326 - DNA, 25 bp, Canis familiaris
gttcctgctcataacctcattgagg

SEQ ID NO: 132327 - DNA, 25 bp, Canis familiaris
gttctctgccatgttgctactgcag

SEQ ID NO: 132328 - DNA, 25 bp, Canis familiaris
gttcctgccatctttcagattaggg

SEQ ID NO: 132329 - DNA, 25 bp, Canis familiaris
gttcctggctggatcagttggtaaa

SEQ ID NO: 132330 - DNA, 25 bp, Canis familiaris
gttctccactgggtaatgtggaaaa

SEQ ID NO: 132331 - DNA, 25 bp, Canis familiaris
gttgctccaatactatttgttgaaa

SEQ ID NO: 132332 - DNA, 25 bp, Canis familiaris
gttgctcttatcaatattttctgaa

SEQ ID NO: 132333 - DNA, 25 bp, Canis familiaris
gttgctttgtctttgttttaattct

SEQ ID NO: 132334 - DNA, 25 bp, Canis familiaris
gttgccatcatgtctttgttttcaa

SEQ ID NO: 132335 - DNA, 25 bp, Canis familiaris
gttgctatcatgtttgtatatttac

SEQ ID NO: 132336 - DNA, 25 bp, Canis familiaris
gttgctaattttctgcatttctctt

SEQ ID NO: 132337 - DNA, 25 bp, Canis familiaris
gttgctgtttttctaattgctctga

SEQ ID NO: 132338 - DNA, 25 bp, Canis familiaris
gttcttggcttccttaagggtgagc

SEQ ID NO: 132339 - DNA, 25 bp, Canis familiaris
gttcttcttccctcaaggggagtga

SEQ ID NO: 132340 - DNA, 25 bp, Canis familiaris
gtttcctttactgtagcaggggcta

SEQ ID NO: 132341 - DNA, 25 bp, Canis familiaris
gttgcccttaaccattagcggtgtg

SEQ ID NO: 132342 - DNA, 25 bp, Canis familiaris
gttctcagcttcaacaaacctggtt

SEQ ID NO: 132343 - DNA, 25 bp, Canis familiaris
gttcctgcctcctaaaagcagagct

SEQ ID NO: 132344 - DNA, 25 bp, Canis familiaris
gttcgcatcacttcaacaacgcaac

SEQ ID NO: 132345 - DNA, 25 bp, Canis familiaris
gttccatgccagtcattaggctgaa

SEQ ID NO: 132346 - DNA, 25 bp, Canis familiaris
gttccagcagcagcttggggaggcc

SEQ ID NO: 132347 - DNA, 25 bp, Canis familiaris
gttctcagctgtgctggtggagccc

SEQ ID NO: 132348 - DNA, 25 bp, Canis familiaris
gttagcagagtcttggaacgccgct

SEQ ID NO: 132349 - DNA, 25 bp, Canis familiaris
gttccagagctcttcaaaactcagt

SEQ ID NO: 132350 - DNA, 25 bp, Canis familiaris
gttccaagtctttacatttgactgg

SEQ ID NO: 132351 - DNA, 25 bp, Canis familiaris
gttaccgttaagaattcatactggc

SEQ ID NO: 132352 - DNA, 25 bp, Canis familiaris
gttccctggtaaccttctgaagtct

SEQ ID NO: 132353 - DNA, 25 bp, Canis familiaris
gtttgaagaaacagttcgaactcta

SEQ ID NO: 132354 - DNA, 25 bp, Canis familiaris
gttctaggaaacagtgctcccacgc

SEQ ID NO: 132355 - DNA, 25 bp, Canis familiaris
gttctggcacaacacttgtaccaca

SEQ ID NO: 132356 - DNA, 25 bp, Canis familiaris
gttctggatcagcagcctattccga

SEQ ID NO: 132357 - DNA, 25 bp, Canis familiaris
gttcatggtagaaccaattcagggt

SEQ ID NO: 132358 - DNA, 25 bp, Canis familiaris
gttcattccagaaacatatttaggt

SEQ ID NO: 132359 - DNA, 25 bp, Canis familiaris
gttcagtctcctccaaaatggggat

SEQ ID NO: 132360 - DNA, 25 bp, Canis familiaris
gttccttcacatccaaattcctgga

SEQ ID NO: 132361 - DNA, 25 bp, Canis familiaris
gttccactccattgcagaatcacac

SEQ ID NO: 132362 - DNA, 25 bp, Canis familiaris
gttcgcagttgcagcgattgcaact

SEQ ID NO: 132363 - DNA, 25 bp, Canis familiaris
gttctagtcattggagctggcggct

SEQ ID NO: 132364 - DNA, 25 bp, Canis familiaris
gttcatagtgaaaggctctggtctg

SEQ ID NO: 132365 - DNA, 25 bp, Canis familiaris
gttctttgcaagcgttcttctgagc

SEQ ID NO: 132366 - DNA, 25 bp, Canis familiaris
gttccttcagagcgtcctggagaac

SEQ ID NO: 132367 - DNA, 25 bp, Canis familiaris
gttcctgggcaaccccagaggaact

SEQ ID NO: 132368 - DNA, 25 bp, Canis familiaris
gttcgtgggccactggacagggaag

SEQ ID NO: 132369 - DNA, 25 bp, Canis familiaris
gttctatggcccgtggccagggagc

SEQ ID NO: 132370 - DNA, 25 bp, Canis familiaris
gttcgtggcacacttggacatggga

SEQ ID NO: 132371 - DNA, 25 bp, Canis familiaris
gttcagcaggctgttggaagccaag

SEQ ID NO: 132372 - DNA, 25 bp, Canis familiaris
gttcagaattgctgtaaacacaatg

SEQ ID NO: 132373 - DNA, 25 bp, Canis familiaris
gttcagaattgctgtgacacccatg

SEQ ID NO: 132374 - DNA, 25 bp, Canis familiaris
gttctgcacatacagttactccagc

SEQ ID NO: 132375 - DNA, 25 bp, Canis familiaris
gttgctgcaatgtggatttcttagt

SEQ ID NO: 132376 - DNA, 25 bp, Canis familiaris
gttgctgagttatattcctgtgtgt

SEQ ID NO: 132377 - DNA, 25 bp, Canis familiaris
gttcgagaacattgttcgttctgtt

SEQ ID NO: 132378 - DNA, 25 bp, Canis familiaris
gttagaaactgtctgggtctgcctc

SEQ ID NO: 132379 - DNA, 25 bp, Canis familiaris
gtatagtaaaggttggtttgagcca

SEQ ID NO: 132380 - DNA, 25 bp, Canis familiaris
gttctggaaagggtgaatgtttgcc

SEQ ID NO: 132381 - DNA, 25 bp, Canis familiaris
gtgttggaaatggccgaagttctga

SEQ ID NO: 132382 - DNA, 25 bp, Canis familiaris
gttctagacacggccagactgttta

SEQ ID NO: 132383 - DNA, 25 bp, Canis familiaris
gttcaagactccctctggtttaaag

SEQ ID NO: 132384 - DNA, 25 bp, Canis familiaris
gttaagttccgtcaagatttaatga

SEQ ID NO: 132385 - DNA, 25 bp, Canis familiaris
gttaagggacttcaggtcattcaac

SEQ ID NO: 132386 - DNA, 25 bp, Canis familiaris
gttcggggacgatgggtatctctac

SEQ ID NO: 132387 - DNA, 25 bp, Canis familiaris
gtgtagggaacgttgggacagacca

SEQ ID NO: 132388 - DNA, 25 bp, Canis familiaris
gttaacgtcgtgttggagacaacca

SEQ ID NO: 132389 - DNA, 25 bp, Canis familiaris
gttcaacgtaatttctagtagtcca

SEQ ID NO: 132390 - DNA, 25 bp, Canis familiaris
gttcaatcgtaatcacctacactcc

SEQ ID NO: 132391 - DNA, 25 bp, Canis familiaris
tttccacgacatttacgtaccttct

SEQ ID NO: 132392 - DNA, 25 bp, Canis familiaris
gttccacagattttactgttccttc

SEQ ID NO: 132393 - DNA, 25 bp, Canis familiaris
gttcccagagatttcattttgccta

SEQ ID NO: 132394 - DNA, 25 bp, Canis familiaris
gttccaagctctttcttttcaaatt

SEQ ID NO: 132395 - DNA, 25 bp, Canis familiaris
gttccaaggtgaagctgttctcaaa

SEQ ID NO: 132396 - DNA, 25 bp, Canis familiaris
gttgccatcggaagactgtgtgaaa

SEQ ID NO: 132397 - DNA, 25 bp, Canis familiaris
gttccacgtgcacactgggaagaat

SEQ ID NO: 132398 - DNA, 25 bp, Canis familiaris
gttccagggacggatggctgaagaa

SEQ ID NO: 132399 - DNA, 25 bp, Canis familiaris
gttgccagcaactggaggtaagggc

SEQ ID NO: 132400 - DNA, 25 bp, Canis familiaris
tttacgcagacgggggttggcgccg

SEQ ID NO: 132401 - DNA, 25 bp, Canis familiaris
gttcctcagtcagtggggttgtggc

SEQ ID NO: 132402 - DNA, 25 bp, Canis familiaris
gttcgcctgctgctggaggcaggtg

SEQ ID NO: 132403 - DNA, 25 bp, Canis familiaris
gttcaccagggtggagacaagtgcc

SEQ ID NO: 132404 - DNA, 25 bp, Canis familiaris
gttccctagggacaaaagctccaga

SEQ ID NO: 132405 - DNA, 25 bp, Canis familiaris
gttccttaggaataacagcctccca

SEQ ID NO: 132406 - DNA, 25 bp, Canis familiaris
gtatcctttggataactacccagta

SEQ ID NO: 132407 - DNA, 25 bp, Canis familiaris
gttcctgttggtaagaaacgcggcg

SEQ ID NO: 132408 - DNA, 25 bp, Canis familiaris
gttgcctgggagacaagtccctcgg

SEQ ID NO: 132409 - DNA, 25 bp, Canis familiaris
gttctgtgcggaatcgagtccttcc

SEQ ID NO: 132410 - DNA, 25 bp, Canis familiaris
gttctgtaggagagattggtgtccc

SEQ ID NO: 132411 - DNA, 25 bp, Canis familiaris
gttcaataggagagacagccatccc

SEQ ID NO: 132412 - DNA, 25 bp, Canis familiaris
gttcaaaggtgaagatcccaagaaa

SEQ ID NO: 132413 - DNA, 25 bp, Canis familiaris
gttcgtgaggagctgctcccaggaa

SEQ ID NO: 132414 - DNA, 25 bp, Canis familiaris
gttctggaggagaagcccggtgaca

SEQ ID NO: 132415 - DNA, 25 bp, Canis familiaris
gttcttggtgataaggctcggagaa

SEQ ID NO: 132416 - DNA, 25 bp, Canis familiaris
gttcagtggatcagcactccggaag

SEQ ID NO: 132417 - DNA, 25 bp, Canis familiaris
gttctgtgagaattccgtgcggaag

SEQ ID NO: 132418 - DNA, 25 bp, Canis familiaris
gttgccatggtaatcctgctcagta

SEQ ID NO: 132419 - DNA, 25 bp, Canis familiaris
gttcctggacatagctcttcattcc

SEQ ID NO: 132420 - DNA, 25 bp, Canis familiaris
gttccatgtacatatttatctctcc

SEQ ID NO: 132421 - DNA, 25 bp, Canis familiaris
gttcctggacaggtgtgtactgccc

SEQ ID NO: 132422 - DNA, 25 bp, Canis familiaris
gttctgtggactcagttcaggctcc

SEQ ID NO: 132423 - DNA, 25 bp, Canis familiaris
gttcaggtatgccgtgtttggcctc

SEQ ID NO: 132424 - DNA, 25 bp, Canis familiaris
gttcagagtgtggttgcacttggca

SEQ ID NO: 132425 - DNA, 25 bp, Canis familiaris
gttcgagtgtgccatttcatgtgcc

SEQ ID NO: 132426 - DNA, 25 bp, Canis familiaris
gttctggatgtgtactctgctgtga

SEQ ID NO: 132427 - DNA, 25 bp, Canis familiaris
gttccatgtgtctccatgatgttac

SEQ ID NO: 132428 - DNA, 25 bp, Canis familiaris
gttcctagctcatcctatgtaacag

SEQ ID NO: 132429 - DNA, 25 bp, Canis familiaris
gttccagtcacatcctttcaaatgg

SEQ ID NO: 132430 - DNA, 25 bp, Canis familiaris
gttcctggccaaagtttgcacaagg

SEQ ID NO: 132431 - DNA, 25 bp, Canis familiaris
gttcccgctcagtatgtttaaagtg

SEQ ID NO: 132432 - DNA, 25 bp, Canis familiaris
gttcaccgtcacttgtttacttaga

SEQ ID NO: 132433 - DNA, 25 bp, Canis familiaris
gttcagtcgtagctgtctaatcaga

SEQ ID NO: 132434 - DNA, 25 bp, Canis familiaris
gttcatgggccgcagatctacaaac

SEQ ID NO: 132435 - DNA, 25 bp, Canis familiaris
gttcgccgccggctataatgtcaag

SEQ ID NO: 132436 - DNA, 25 bp, Canis familiaris
gttcccagaggggttgatgctggaa

SEQ ID NO: 132437 - DNA, 25 bp, Canis familiaris
gttcccaaggtaatttgccaaccat

SEQ ID NO: 132438 - DNA, 25 bp, Canis familiaris
gttcccaatgggacttactaacagt

SEQ ID NO: 132439 - DNA, 25 bp, Canis familiaris
gttccacattgttatttgactacca

SEQ ID NO: 132440 - DNA, 25 bp, Canis familiaris
gttccactattttcatttcatacta

SEQ ID NO: 132441 - DNA, 25 bp, Canis familiaris
gttccctatttttatccattacaat

SEQ ID NO: 132442 - DNA, 25 bp, Canis familiaris
gttccctcaatttttctcttataag

SEQ ID NO: 132443 - DNA, 25 bp, Canis familiaris
gttccaccagatgttcctattaaga

SEQ ID NO: 132444 - DNA, 25 bp, Canis familiaris
gttgccaggctgagtatcctacttg

SEQ ID NO: 132445 - DNA, 25 bp, Canis familiaris
gttcgaggtgacctacgtgagcctg

SEQ ID NO: 132446 - DNA, 25 bp, Canis familiaris
gttctgggtggcccagggagtctgt

SEQ ID NO: 132447 - DNA, 25 bp, Canis familiaris
gttcgggtaggccgagatgggtgcg

SEQ ID NO: 132448 - DNA, 25 bp, Canis familiaris
gttctgggagacggaggaggagtgg

SEQ ID NO: 132449 - DNA, 25 bp, Canis familiaris
gttccggcagcaacgaagtggtggc

SEQ ID NO: 132450 - DNA, 25 bp, Canis familiaris
gttccagagctgaggtaggttacag

SEQ ID NO: 132451 - DNA, 25 bp, Canis familiaris
gttgccaagattactgttggttgga

SEQ ID NO: 132452 - DNA, 25 bp, Canis familiaris
gttccagatgaggacaggggttggg

SEQ ID NO: 132453 - DNA, 25 bp, Canis familiaris
gttcacaatgtggccgaggactttg

SEQ ID NO: 132454 - DNA, 25 bp, Canis familiaris
gttccaagcttcgaagagaatattg

SEQ ID NO: 132455 - DNA, 25 bp, Canis familiaris
gttccactgctttcaaaagtctagt

SEQ ID NO: 132456 - DNA, 25 bp, Canis familiaris
gttccaagctgctaaacagagccta

SEQ ID NO: 132457 - DNA, 25 bp, Canis familiaris
gttcaagactgccaccagcaacaaa

SEQ ID NO: 132458 - DNA, 25 bp, Canis familiaris
gttcggacactgttcagaaagagac

SEQ ID NO: 132459 - DNA, 25 bp, Canis familiaris
gttccggagctgtccagaatgctgg

SEQ ID NO: 132460 - DNA, 25 bp, Canis familiaris
gttcctggtggagcgattctgttgc

SEQ ID NO: 132461 - DNA, 25 bp, Canis familiaris
gttcgcgagttaaatatactggtgc

SEQ ID NO: 132462 - DNA, 25 bp, Canis familiaris
gttctgggcatttagttactgtgtg

SEQ ID NO: 132463 - DNA, 25 bp, Canis familiaris
gttctgtccgtttttaactctgaag

SEQ ID NO: 132464 - DNA, 25 bp, Canis familiaris
gttaatcggtttgatgaagctcaga

SEQ ID NO: 132465 - DNA, 25 bp, Canis familiaris
gttccagggtgtctagcaactcaga

SEQ ID NO: 132466 - DNA, 25 bp, Canis familiaris
gttccaggctcagtgttagccctga

SEQ ID NO: 132467 - DNA, 25 bp, Canis familiaris
gttccatactacattttccatgact

SEQ ID NO: 132468 - DNA, 25 bp, Canis familiaris
gttgccattttatttttgactacat

SEQ ID NO: 132469 - DNA, 25 bp, Canis familiaris
gttccatatttaattctatcctata

SEQ ID NO: 132470 - DNA, 25 bp, Canis familiaris
gttccatcgtagaatgactatccat

SEQ ID NO: 132471 - DNA, 25 bp, Canis familiaris
gttcctgtgtcagttgtcattccac

SEQ ID NO: 132472 - DNA, 25 bp, Canis familiaris
gttcctgcatgctctgtgctataaa

SEQ ID NO: 132473 - DNA, 25 bp, Canis familiaris
gttcctgtgctcctgtgttataagg

SEQ ID NO: 132474 - DNA, 25 bp, Canis familiaris
gttcttgtatcccttttagagaaga

SEQ ID NO: 132475 - DNA, 25 bp, Canis familiaris
gttctattgactgtatctattggta

SEQ ID NO: 132476 - DNA, 25 bp, Canis familiaris
gttccacatgacagacacctttgta

SEQ ID NO: 132477 - DNA, 25 bp, Canis familiaris
gttcacagacaaagtacctagggac

SEQ ID NO: 132478 - DNA, 25 bp, Canis familiaris
gttgccaaagaaacagcccgcagga

SEQ ID NO: 132479 - DNA, 25 bp, Canis familiaris
gttcccaagaaaatcctcaagtgca

SEQ ID NO: 132480 - DNA, 25 bp, Canis familiaris
gttccctagaaaaacctttgctcag

SEQ ID NO: 132481 - DNA, 25 bp, Canis familiaris
gttccatttatataacttttcttga

SEQ ID NO: 132482 - DNA, 25 bp, Canis familiaris
gttcctcattaatacctgtctgtca

SEQ ID NO: 132483 - DNA, 25 bp, Canis familiaris
gttcctctctgagcgagcggacttc

SEQ ID NO: 132484 - DNA, 25 bp, Canis familiaris
gttcccttcaacgacaggacttggg

SEQ ID NO: 132485 - DNA, 25 bp, Canis familiaris
gttcccctagtcggctgaaactggg

SEQ ID NO: 132486 - DNA, 25 bp, Canis familiaris
gttccacctatgtccttgcaaatgg

SEQ ID NO: 132487 - DNA, 25 bp, Canis familiaris
gttccaccttgatctaatcctgggc

SEQ ID NO: 132488 - DNA, 25 bp, Canis familiaris
gttcccacgatattgctaatcacgt

SEQ ID NO: 132489 - DNA, 25 bp, Canis familiaris
gttctgtcacgatatgctctagacc

SEQ ID NO: 132490 - DNA, 25 bp, Canis familiaris
gttctgtcactatgtggtggtcccg

SEQ ID NO: 132491 - DNA, 25 bp, Canis familiaris
gttctttttcgtgtcgtcaatcggt

SEQ ID NO: 132492 - DNA, 25 bp, Canis familiaris
gttaagtattttgtcaaccatcctt

SEQ ID NO: 132493 - DNA, 25 bp, Canis familiaris
gttcaagtattgtgtgtcaacccac

SEQ ID NO: 132494 - DNA, 25 bp, Canis familiaris
gttcaaggagtgtctggtcaccgaa

SEQ ID NO: 132495 - DNA, 25 bp, Canis familiaris
gtataaagattgtggtcctgccata

SEQ ID NO: 132496 - DNA, 25 bp, Canis familiaris
gtagaaagtttcccaagtcctgatc

SEQ ID NO: 132497 - DNA, 25 bp, Canis familiaris
gttcaacgttaccaaagtgcctgac

SEQ ID NO: 132498 - DNA, 25 bp, Canis familiaris
gttcccacttcagaaggaccatatc

SEQ ID NO: 132499 - DNA, 25 bp, Canis familiaris
gttcccactcaaaagagagatccta

SEQ ID NO: 132500 - DNA, 25 bp, Canis familiaris
gttccacactcagcacagagtctgc

SEQ ID NO: 132501 - DNA, 25 bp, Canis familiaris
gttcccatgctggcaacaagctggc

SEQ ID NO: 132502 - DNA, 25 bp, Canis familiaris
gttccctctgagaagctgagtatct

SEQ ID NO: 132503 - DNA, 25 bp, Canis familiaris
gttccagctccaatagcgtatatta

SEQ ID NO: 132504 - DNA, 25 bp, Canis familiaris
gttctgtgtccaaagccatcactga

SEQ ID NO: 132505 - DNA, 25 bp, Canis familiaris
gttctgtgtccaaagccatcactga

SEQ ID NO: 132506 - DNA, 25 bp, Canis familiaris
gttcttattcacaacaccactgaag

SEQ ID NO: 132507 - DNA, 25 bp, Canis familiaris
gttctgtgaatctgccattcctaaa

SEQ ID NO: 132508 - DNA, 25 bp, Canis familiaris
gttctagttctacctttcttaactg

SEQ ID NO: 132509 - DNA, 25 bp, Canis familiaris
gttctagtgttagttttatttagct

SEQ ID NO: 132510 - DNA, 25 bp, Canis familiaris
gttctttagtctcttaatcttcgct

SEQ ID NO: 132511 - DNA, 25 bp, Canis familiaris
gttcttttcctccttgtatttggag

SEQ ID NO: 132512 - DNA, 25 bp, Canis familiaris
gttcttttcctttgctgtgttggga

SEQ ID NO: 132513 - DNA, 25 bp, Canis familiaris
gttcctctactttatagttgtggat

SEQ ID NO: 132514 - DNA, 25 bp, Canis familiaris
gttccttccatttatatgtttcagc

SEQ ID NO: 132515 - DNA, 25 bp, Canis familiaris
gttctttgctattttgagttccctt

SEQ ID NO: 132516 - DNA, 25 bp, Canis familiaris
gttctcttcgctcttatttagttta

SEQ ID NO: 132517 - DNA, 25 bp, Canis familiaris
gttcctccggaggtaatctaattgt

SEQ ID NO: 132518 - DNA, 25 bp, Canis familiaris
gttctgctccggtgtagacgcaaac

SEQ ID NO: 132519 - DNA, 25 bp, Canis familiaris
gttctgtttggaggccacaagacaa

SEQ ID NO: 132520 - DNA, 25 bp, Canis familiaris
gttctgtttgggctacaactcacgc

SEQ ID NO: 132521 - DNA, 25 bp, Canis familiaris
gttcctttgggaaccacagccaagg

SEQ ID NO: 132522 - DNA, 25 bp, Canis familiaris
gttctctcgtgggagacgcaggcac

SEQ ID NO: 132523 - DNA, 25 bp, Canis familiaris
gttcctctcggaatgacgcaagcat

SEQ ID NO: 132524 - DNA, 25 bp, Canis familiaris
gttcctcatctccagtagtcaagat

SEQ ID NO: 132525 - DNA, 25 bp, Canis familiaris
gttcctacatcatctcgcttatatt

SEQ ID NO: 132526 - DNA, 25 bp, Canis familiaris
gttccattctctctcctgtactttt

SEQ ID NO: 132527 - DNA, 25 bp, Canis familiaris
gttcagttctgcacagccagtatgc

SEQ ID NO: 132528 - DNA, 25 bp, Canis familiaris
gtataggtagatccagactgtatga

SEQ ID NO: 132529 - DNA, 25 bp, Canis familiaris
gttctgggagaccaggctgtctcag

SEQ ID NO: 132530 - DNA, 25 bp, Canis familiaris
gttcggacagtggcgatcatgaccg

SEQ ID NO: 132531 - DNA, 25 bp, Canis familiaris
gtatcggacaggagacatcgccgcg

SEQ ID NO: 132532 - DNA, 25 bp, Canis familiaris
gttcggccaggcagaatcagctgac

SEQ ID NO: 132533 - DNA, 25 bp, Canis familiaris
gttcgcctcggaagtgagcagctac

SEQ ID NO: 132534 - DNA, 25 bp, Canis familiaris
gttcgactgggtaggagccacaaac

SEQ ID NO: 132535 - DNA, 25 bp, Canis familiaris
gtacagacagggaacgaggccggag

SEQ ID NO: 132536 - DNA, 25 bp, Canis familiaris
gttcacggagtggacgaggccggac

SEQ ID NO: 132537 - DNA, 25 bp, Canis familiaris
gttcctgcggcggaaggtccgagaa

SEQ ID NO: 132538 - DNA, 25 bp, Canis familiaris
gttccatcagccgtaccgggcgatg

SEQ ID NO: 132539 - DNA, 25 bp, Canis familiaris
gttcactacccttctgggggtgaca

SEQ ID NO: 132540 - DNA, 25 bp, Canis familiaris
gttcacataccagtcgctgggggcc

SEQ ID NO: 132541 - DNA, 25 bp, Canis familiaris
gttcagagactcgaaggcggtgggc

SEQ ID NO: 132542 - DNA, 25 bp, Canis familiaris
gttctggtctcctattgcaagggac

SEQ ID NO: 132543 - DNA, 25 bp, Canis familiaris
gttcttgttcctttgctaggctagc

SEQ ID NO: 132544 - DNA, 25 bp, Canis familiaris
gttcctttcaccatgaattcatagc

SEQ ID NO: 132545 - DNA, 25 bp, Canis familiaris
gttctaaaacacacacattcacaca

SEQ ID NO: 132546 - DNA, 25 bp, Canis familiaris
gttctacaaccacgtgcagaagcgc

SEQ ID NO: 132547 - DNA, 25 bp, Canis familiaris
gttccatccacaccattgcaaatgg

SEQ ID NO: 132548 - DNA, 25 bp, Canis familiaris
gttcctctcacactcgatgaagatc

SEQ ID NO: 132549 - DNA, 25 bp, Canis familiaris
gttccatccaactggagtgatgtta

SEQ ID NO: 132550 - DNA, 25 bp, Canis familiaris
gttccccacactcgacagtagtgtt

SEQ ID NO: 132551 - DNA, 25 bp, Canis familiaris
gttcttctacctcatcgtaatgtgg

SEQ ID NO: 132552 - DNA, 25 bp, Canis familiaris
gttctttacctgagcttcaactgaa

SEQ ID NO: 132553 - DNA, 25 bp, Canis familiaris
gttcctggccctaacttgggccagc

SEQ ID NO: 132554 - DNA, 25 bp, Canis familiaris
gttcctggccagggaattggtaagg

SEQ ID NO: 132555 - DNA, 25 bp, Canis familiaris
gttcttggccaaggaatggttaagg

SEQ ID NO: 132556 - DNA, 25 bp, Canis familiaris
gttctcggccaaggacatcgatgga

SEQ ID NO: 132557 - DNA, 25 bp, Canis familiaris
gttcacgtgaaagatgccaatggca

SEQ ID NO: 132558 - DNA, 25 bp, Canis familiaris
gttccgtgacatagagaccagaccg

SEQ ID NO: 132559 - DNA, 25 bp, Canis familiaris
gttctcttgagacagtgccaaccta

SEQ ID NO: 132560 - DNA, 25 bp, Canis familiaris
gttccttgaaggttctacatgttat

SEQ ID NO: 132561 - DNA, 25 bp, Canis familiaris
gttcccccagtatatgacatattga

SEQ ID NO: 132562 - DNA, 25 bp, Canis familiaris
gttccccctgaataacgattgcaca

SEQ ID NO: 132563 - DNA, 25 bp, Canis familiaris
gttcccttctgtataacaatgtcac

SEQ ID NO: 132564 - DNA, 25 bp, Canis familiaris
gttcgcttctttagttgacagcagt

SEQ ID NO: 132565 - DNA, 25 bp, Canis familiaris
gttccttcagtaagcgtgcaacaga

SEQ ID NO: 132566 - DNA, 25 bp, Canis familiaris
gttccgctcagtatctgtaaatgaa

SEQ ID NO: 132567 - DNA, 25 bp, Canis familiaris
gttcttgctcagcctacatgtgaga

SEQ ID NO: 132568 - DNA, 25 bp, Canis familiaris
gttcctgtccctgcagatggagatc

SEQ ID NO: 132569 - DNA, 25 bp, Canis familiaris
gttctcttccacagcattgaggtct

SEQ ID NO: 132570 - DNA, 25 bp, Canis familiaris
gttcatagtcccactgttggtcttc

SEQ ID NO: 132571 - DNA, 25 bp, Canis familiaris
gttcatggctctttttatcggttac

SEQ ID NO: 132572 - DNA, 25 bp, Canis familiaris
gttctgtgcctcttaacacttgtat

SEQ ID NO: 132573 - DNA, 25 bp, Canis familiaris
gttcggcctcgtttcatccgaaata

SEQ ID NO: 132574 - DNA, 25 bp, Canis familiaris
gttcggcctggtttgccgggagatc

SEQ ID NO: 132575 - DNA, 25 bp, Canis familiaris
gttcctgcgcggtggcagggggagc

SEQ ID NO: 132576 - DNA, 25 bp, Canis familiaris
gttccgcacgtgtgcggtcggtgct

SEQ ID NO: 132577 - DNA, 25 bp, Canis familiaris
gttccgtgctgtttgtgagtcgcgg

SEQ ID NO: 132578 - DNA, 25 bp, Canis familiaris
gttccggcatttctgagtgcagcag

SEQ ID NO: 132579 - DNA, 25 bp, Canis familiaris
gttcggatgtttcaatggctcatga

SEQ ID NO: 132580 - DNA, 25 bp, Canis familiaris
gttcagttggcatttaattgcccaa

SEQ ID NO: 132581 - DNA, 25 bp, Canis familiaris
gttcgttggaatttttgcattcaga

SEQ ID NO: 132582 - DNA, 25 bp, Canis familiaris
gttccattacagtttttgcaggcat

SEQ ID NO: 132583 - DNA, 25 bp, Canis familiaris
gttccatccaatctatgtgaagaat

SEQ ID NO: 132584 - DNA, 25 bp, Canis familiaris
gttcgctgtaatctcagtaacatca

SEQ ID NO: 132585 - DNA, 25 bp, Canis familiaris
gttctcgtatctctagcaagcatct

SEQ ID NO: 132586 - DNA, 25 bp, Canis familiaris
gttcatgatgattatggtagaagat

SEQ ID NO: 132587 - DNA, 25 bp, Canis familiaris
gttcattatcagtgctaatagcaat

SEQ ID NO: 132588 - DNA, 25 bp, Canis familiaris
gttcacattcacctaaaagcaaagt

SEQ ID NO: 132589 - DNA, 25 bp, Canis familiaris
gttccattgtgcctactaaaatatg

SEQ ID NO: 132590 - DNA, 25 bp, Canis familiaris
gttcgtcttctctccaagaagatgg

SEQ ID NO: 132591 - DNA, 25 bp, Canis familiaris
gttcgtctctttggcatcaacaaat

SEQ ID NO: 132592 - DNA, 25 bp, Canis familiaris
gttctgcttccttggtataaatatc

SEQ ID NO: 132593 - DNA, 25 bp, Canis familiaris
gttctttccttgatagagaatcagc

SEQ ID NO: 132594 - DNA, 25 bp, Canis familiaris
gttctctccctcagtgaggaacaat

SEQ ID NO: 132595 - DNA, 25 bp, Canis familiaris
gttcattcacccgtggaccaaatga

SEQ ID NO: 132596 - DNA, 25 bp, Canis familiaris
gttcgtcacaacgttgatcaccgga

SEQ ID NO: 132597 - DNA, 25 bp, Canis familiaris
gttcgtaccacagtcttcacaactg

SEQ ID NO: 132598 - DNA, 25 bp, Canis familiaris
gttcttccaccactgattaacactg

SEQ ID NO: 132599 - DNA, 25 bp, Canis familiaris
gttcttgccaactgcatctgaaact

SEQ ID NO: 132600 - DNA, 25 bp, Canis familiaris
gttactgcctacggcctaaacttgg

SEQ ID NO: 132601 - DNA, 25 bp, Canis familiaris
gttcacgccttgggccaaaggtagg

SEQ ID NO: 132602 - DNA, 25 bp, Canis familiaris
gttccttctctttgccaaacggaat

SEQ ID NO: 132603 - DNA, 25 bp, Canis familiaris
gttcctttatagttacaccttgtat

SEQ ID NO: 132604 - DNA, 25 bp, Canis familiaris
gttcgaactctaaataacctttatg

SEQ ID NO: 132605 - DNA, 25 bp, Canis familiaris
gttcggtggtgcagtaactttacat

SEQ ID NO: 132606 - DNA, 25 bp, Canis familiaris
gttcggggacggttcacaccataat

SEQ ID NO: 132607 - DNA, 25 bp, Canis familiaris
gttcgggttcagggtctaggatcaa

SEQ ID NO: 132608 - DNA, 25 bp, Canis familiaris
gttctctggagttgttctcagtgcc

SEQ ID NO: 132609 - DNA, 25 bp, Canis familiaris
gttccgagagtccatttgcaacgac

SEQ ID NO: 132610 - DNA, 25 bp, Canis familiaris
gttctcgtggtcctaagacaaacag

SEQ ID NO: 132611 - DNA, 25 bp, Canis familiaris
gttctccagagcgttaggacatcag

SEQ ID NO: 132612 - DNA, 25 bp, Canis familiaris
gttctccatagcatctagcctgaaa

SEQ ID NO: 132613 - DNA, 25 bp, Canis familiaris
gtttacacaaccacctggagagcca

SEQ ID NO: 132614 - DNA, 25 bp, Canis familiaris
gttacaccaaccaggacagaaatca

SEQ ID NO: 132615 - DNA, 25 bp, Canis familiaris
gttcaacaagacaccggacaaacac

SEQ ID NO: 132616 - DNA, 25 bp, Canis familiaris
tgtctaacaaaacccgtgaaacacg

SEQ ID NO: 132617 - DNA, 25 bp, Canis familiaris
gttaagcctcgacacgtgtaacacg

SEQ ID NO: 132618 - DNA, 25 bp, Canis familiaris
gtataactgtaaaatctgtgaaata

SEQ ID NO: 132619 - DNA, 25 bp, Canis familiaris
gttaactggaatcactgcgggtctt

SEQ ID NO: 132620 - DNA, 25 bp, Canis familiaris
gttaatccagaataatcgtcctatt

SEQ ID NO: 132621 - DNA, 25 bp, Canis familiaris
gttaccgtagttatcagtcttatgt

SEQ ID NO: 132622 - DNA, 25 bp, Canis familiaris
gttactgtggagctttggttttgtt

SEQ ID NO: 132623 - DNA, 25 bp, Canis familiaris
gttctagtactgtatttggcttttt

SEQ ID NO: 132624 - DNA, 25 bp, Canis familiaris
gttccgtgcacctatttatattttt

SEQ ID NO: 132625 - DNA, 25 bp, Canis familiaris
gttcctgttacatctttattttttg

SEQ ID NO: 132626 - DNA, 25 bp, Canis familiaris
gttcctcttgacttttatttttcag

SEQ ID NO: 132627 - DNA, 25 bp, Canis familiaris
gttcgatgttagtttttacttccag

SEQ ID NO: 132628 - DNA, 25 bp, Canis familiaris
gttcgtttctatgttagagctctct

SEQ ID NO: 132629 - DNA, 25 bp, Canis familiaris
gttcgtttgttcctaacagtgtcga

SEQ ID NO: 132630 - DNA, 25 bp, Canis familiaris
gtcttttttggtcatacgtatcggt

SEQ ID NO: 132631 - DNA, 25 bp, Canis familiaris
gttctttgtctgtggaactgactct

SEQ ID NO: 132632 - DNA, 25 bp, Canis familiaris
gttcttagttggtggagcgatttgt

SEQ ID NO: 132633 - DNA, 25 bp, Canis familiaris
gttctttttgagtaccggacttgct

SEQ ID NO: 132634 - DNA, 25 bp, Canis familiaris
gttctacttcttgatccggaagcga

SEQ ID NO: 132635 - DNA, 25 bp, Canis familiaris
gttctacttgtttcccttggagata

SEQ ID NO: 132636 - DNA, 25 bp, Canis familiaris
gttctgtcttgggagcctgttaagt

SEQ ID NO: 132637 - DNA, 25 bp, Canis familiaris
gttcctcagttgggtctttcaagtc

SEQ ID NO: 132638 - DNA, 25 bp, Canis familiaris
gttcctggttgaagttgtgtcacac

SEQ ID NO: 132639 - DNA, 25 bp, Canis familiaris
gttcgtgagaggtcagattgctgtc

SEQ ID NO: 132640 - DNA, 25 bp, Canis familiaris
gttcttgatgaccacagctttgtag

SEQ ID NO: 132641 - DNA, 25 bp, Canis familiaris
gttcgtctgagatcaccttgaaccc

SEQ ID NO: 132642 - DNA, 25 bp, Canis familiaris
gtatcacacagaagcagcccttgag

SEQ ID NO: 132643 - DNA, 25 bp, Canis familiaris
gttcatgacagatggccaccatggc

SEQ ID NO: 132644 - DNA, 25 bp, Canis familiaris
gttcatgtgaggaagccacctgagg

SEQ ID NO: 132645 - DNA, 25 bp, Canis familiaris
gttctgtgactggagcaacctgcaa

SEQ ID NO: 132646 - DNA, 25 bp, Canis familiaris
gttcaggtcatgatcaagctctgcc

SEQ ID NO: 132647 - DNA, 25 bp, Canis familiaris
gttcacttgatcataaggacctgtc

SEQ ID NO: 132648 - DNA, 25 bp, Canis familiaris
gttcacattctccacaaggacggtc

SEQ ID NO: 132649 - DNA, 25 bp, Canis familiaris
gttcagtgtccgtcacgtgaaggat

SEQ ID NO: 132650 - DNA, 25 bp, Canis familiaris
gttcagacccagcacgaggctgtat

SEQ ID NO: 132651 - DNA, 25 bp, Canis familiaris
gttcacagtggagagcgaccttata

SEQ ID NO: 132652 - DNA, 25 bp, Canis familiaris
gttcacactggacaagagccttata

SEQ ID NO: 132653 - DNA, 25 bp, Canis familiaris
gttcgagggcatcagagcccctcag

SEQ ID NO: 132654 - DNA, 25 bp, Canis familiaris
gttcctggtggcagtggcccagggt

SEQ ID NO: 132655 - DNA, 25 bp, Canis familiaris
gttcttagtgtggtatctcccaggc

SEQ ID NO: 132656 - DNA, 25 bp, Canis familiaris
gttcaaagagcggatcgccgacgtc

SEQ ID NO: 132657 - DNA, 25 bp, Canis familiaris
gttacaaagtattctgcctatcagt

SEQ ID NO: 132658 - DNA, 25 bp, Canis familiaris
gttcccaggctaatgctccaaagtc

SEQ ID NO: 132659 - DNA, 25 bp, Canis familiaris
gttctgtctgaaatgtgcccaaatg

SEQ ID NO: 132660 - DNA, 25 bp, Canis familiaris
gttcgatctgcctgtgttcaatagc

SEQ ID NO: 132661 - DNA, 25 bp, Canis familiaris
gttctgattacttgtttctcagacc

SEQ ID NO: 132662 - DNA, 25 bp, Canis familiaris
gttctgatgctactatgatgttctc

SEQ ID NO: 132663 - DNA, 25 bp, Canis familiaris
gttcggctcagcgagtgtgtggcac

SEQ ID NO: 132664 - DNA, 25 bp, Canis familiaris
gttcgtgtcactggtgctgatgtcc

SEQ ID NO: 132665 - DNA, 25 bp, Canis familiaris
gttctctgacctggactgtgatatt

SEQ ID NO: 132666 - DNA, 25 bp, Canis familiaris
gttcactacacaggaaaatatttca

SEQ ID NO: 132667 - DNA, 25 bp, Canis familiaris
gttcactgactaggtaagcacttac

SEQ ID NO: 132668 - DNA, 25 bp, Canis familiaris
gttcctgtctctgtaattgtgtcac

SEQ ID NO: 132669 - DNA, 25 bp, Canis familiaris
gttcctgtcattctgcaactttcag

SEQ ID NO: 132670 - DNA, 25 bp, Canis familiaris
gttcactgtcaagaatacgctctag

SEQ ID NO: 132671 - DNA, 25 bp, Canis familiaris
gttcatttcaaatgtattgccatgg

SEQ ID NO: 132672 - DNA, 25 bp, Canis familiaris
gttctttgcagaagatgtgggctca

SEQ ID NO: 132673 - DNA, 25 bp, Canis familiaris
gttcgtgcctgtagggggcacctgg

SEQ ID NO: 132674 - DNA, 25 bp, Canis familiaris
gttcctgttgtgttagggcacctgg

SEQ ID NO: 132675 - DNA, 25 bp, Canis familiaris
gttcgctgtaggggagggttctggc

SEQ ID NO: 132676 - DNA, 25 bp, Canis familiaris
gttctctgtggatatgggtttcggc

SEQ ID NO: 132677 - DNA, 25 bp, Canis familiaris
gttcttgggctttggtgatttctag

SEQ ID NO: 132678 - DNA, 25 bp, Canis familiaris
gttcgtaccttttgtgcatcttgta

SEQ ID NO: 132679 - DNA, 25 bp, Canis familiaris
gttctgaactttacatggcacttga

SEQ ID NO: 132680 - DNA, 25 bp, Canis familiaris
gttctaatctttacatgaggactct

SEQ ID NO: 132681 - DNA, 25 bp, Canis familiaris
gttctcactctaatattgaaatctc

SEQ ID NO: 132682 - DNA, 25 bp, Canis familiaris
gttctcatcccattatgtttttcct

SEQ ID NO: 132683 - DNA, 25 bp, Canis familiaris
gttctctctctatagttgttttcac

SEQ ID NO: 132684 - DNA, 25 bp, Canis familiaris
gttctgtatgctaaagctttctcct

SEQ ID NO: 132685 - DNA, 25 bp, Canis familiaris
gttctcaagtaaatgcttttgctca

SEQ ID NO: 132686 - DNA, 25 bp, Canis familiaris
gttcccagctactgctggtttctcc

SEQ ID NO: 132687 - DNA, 25 bp, Canis familiaris
gttcccagtgacttcagtattttct

SEQ ID NO: 132688 - DNA, 25 bp, Canis familiaris
gttccggtcctgtgcatattagtgg

SEQ ID NO: 132689 - DNA, 25 bp, Canis familiaris
gttcggttcgtgttgaatgattggg

SEQ ID NO: 132690 - DNA, 25 bp, Canis familiaris
gttcaggttttgttgttcgtggcac

SEQ ID NO: 132691 - DNA, 25 bp, Canis familiaris
gtatcaggactttggttatgttgga

SEQ ID NO: 132692 - DNA, 25 bp, Canis familiaris
gtatcaggactttggttatgttgga

SEQ ID NO: 132693 - DNA, 25 bp, Canis familiaris
gttcaggccttccagtttactgaca

SEQ ID NO: 132694 - DNA, 25 bp, Canis familiaris
gttcgatgccatttgcgtttcaata

SEQ ID NO: 132695 - DNA, 25 bp, Canis familiaris
gttctggtgcatttgcgttgtttct

SEQ ID NO: 132696 - DNA, 25 bp, Canis familiaris
gttctgggtgcatttgcttgttttc

SEQ ID NO: 132697 - DNA, 25 bp, Canis familiaris
gttcgtgattctgtctgttttctca

SEQ ID NO: 132698 - DNA, 25 bp, Canis familiaris
gttcgcgattatcttctatatcttc

SEQ ID NO: 132699 - DNA, 25 bp, Canis familiaris
gttcgtggtttttaatatctcatct

SEQ ID NO: 132700 - DNA, 25 bp, Canis familiaris
gttctggtggctctaatactcgatt

SEQ ID NO: 132701 - DNA, 25 bp, Canis familiaris
gtttgggtgttacaatccgattcag

SEQ ID NO: 132702 - DNA, 25 bp, Canis familiaris
gttcacggtgtgagtaggcacgttc

SEQ ID NO: 132703 - DNA, 25 bp, Canis familiaris
gttcaataggtgaagctctggcctt

SEQ ID NO: 132704 - DNA, 25 bp, Canis familiaris
gttctcatacacaaactcgtgacat

SEQ ID NO: 132705 - DNA, 25 bp, Canis familiaris
gttttgaccccattcagaggcaagc

SEQ ID NO: 132706 - DNA, 25 bp, Canis familiaris
gttctcgtcagcacgtagaggcacg

SEQ ID NO: 132707 - DNA, 25 bp, Canis familiaris
gttcttttctacctaagacacgtct

SEQ ID NO: 132708 - DNA, 25 bp, Canis familiaris
gttctaatttagctgatcaagttgt

SEQ ID NO: 132709 - DNA, 25 bp, Canis familiaris
gttctggagatttcttgataagctt

SEQ ID NO: 132710 - DNA, 25 bp, Canis familiaris
gttctgggtttcttggatatgttcc

SEQ ID NO: 132711 - DNA, 25 bp, Canis familiaris
gttctgtggttgactttttggttgg

SEQ ID NO: 132712 - DNA, 25 bp, Canis familiaris
gttctgtgtgttccatatttcgtat

SEQ ID NO: 132713 - DNA, 25 bp, Canis familiaris
gttcactgtgttggatcaggttgga

SEQ ID NO: 132714 - DNA, 25 bp, Canis familiaris
gttcaagtcttggatccattgctgg

SEQ ID NO: 132715 - DNA, 25 bp, Canis familiaris
gttctcttctaggacctttgtggtt

SEQ ID NO: 132716 - DNA, 25 bp, Canis familiaris
gttctctgggggtacatctttaggt

SEQ ID NO: 132717 - DNA, 25 bp, Canis familiaris
gttactgggaggcacctcgatgagg

SEQ ID NO: 132718 - DNA, 25 bp, Canis familiaris
gttactagaagcatgacctggagag

SEQ ID NO: 132719 - DNA, 25 bp, Canis familiaris
gttttgagaccagacgggaaggtgg

SEQ ID NO: 132720 - DNA, 25 bp, Canis familiaris
gttttagcaccagagagcccaaggt

SEQ ID NO: 132721 - DNA, 25 bp, Canis familiaris
gttcttcagcaccagaacccgaaga

SEQ ID NO: 132722 - DNA, 25 bp, Canis familiaris
gttctctgtcactgttcccggaagc

SEQ ID NO: 132723 - DNA, 25 bp, Canis familiaris
gttctaatcacattttccatgccga

SEQ ID NO: 132724 - DNA, 25 bp, Canis familiaris
gttcgcaatcatgattccttctcaa

SEQ ID NO: 132725 - DNA, 25 bp, Canis familiaris
gttcacatcttgcatacctggctaa

SEQ ID NO: 132726 - DNA, 25 bp, Canis familiaris
gttcaacttcgtccacgtgatcatc

SEQ ID NO: 132727 - DNA, 25 bp, Canis familiaris
gttcaagttgccccaggatggagcc

SEQ ID NO: 132728 - DNA, 25 bp, Canis familiaris
gttctcgtggttccgatgagtgacc

SEQ ID NO: 132729 - DNA, 25 bp, Canis familiaris
gttccccttatgtcgaggtgaccac

SEQ ID NO: 132730 - DNA, 25 bp, Canis familiaris
gttccctttatctggatctatgcca

SEQ ID NO: 132731 - DNA, 25 bp, Canis familiaris
gttccctttatcttggcaatttaat

SEQ ID NO: 132732 - DNA, 25 bp, Canis familiaris
gttccctgattatttgatgccttct

SEQ ID NO: 132733 - DNA, 25 bp, Canis familiaris
gttcgcctcttgcatatgggctttt

SEQ ID NO: 132734 - DNA, 25 bp, Canis familiaris
gttcggcgtgtgcaatggtgcgcat

SEQ ID NO: 132735 - DNA, 25 bp, Canis familiaris
gttcgtcgtggcaatgtggctgtga

SEQ ID NO: 132736 - DNA, 25 bp, Canis familiaris
gttctgtgcagggttggcagctgtg

SEQ ID NO: 132737 - DNA, 25 bp, Canis familiaris
gttctgtgccatttctgagagcttt

SEQ ID NO: 132738 - DNA, 25 bp, Canis familiaris
gttctatgcccacctgggctatcac

SEQ ID NO: 132739 - DNA, 25 bp, Canis familiaris
gttcgtgctctcacgggaatatgcc

SEQ ID NO: 132740 - DNA, 25 bp, Canis familiaris
gttctgtttctacgtgtactcatgc

SEQ ID NO: 132741 - DNA, 25 bp, Canis familiaris
gttctcctacatactttcactgatg

SEQ ID NO: 132742 - DNA, 25 bp, Canis familiaris
gttctcctctgctgctatggagtgg

SEQ ID NO: 132743 - DNA, 25 bp, Canis familiaris
gttctggctctgtagctggcagacg

SEQ ID NO: 132744 - DNA, 25 bp, Canis familiaris
gttctgacctgaatgtagacatcgg

SEQ ID NO: 132745 - DNA, 25 bp, Canis familiaris
gttcgatcttgcatggagcaatctc

SEQ ID NO: 132746 - DNA, 25 bp, Canis familiaris
gttcacacattcctgtgctgaataa

SEQ ID NO: 132747 - DNA, 25 bp, Canis familiaris
gttcatgcctccttcaggcacaaat

SEQ ID NO: 132748 - DNA, 25 bp, Canis familiaris
gttcatcttctctaaccaaacatgg

SEQ ID NO: 132749 - DNA, 25 bp, Canis familiaris
gttctctttcatttgcctaagctga

SEQ ID NO: 132750 - DNA, 25 bp, Canis familiaris
gttctgttctcatttacttactagc

SEQ ID NO: 132751 - DNA, 25 bp, Canis familiaris
gttcgagtgctatttcaccaacggg

SEQ ID NO: 132752 - DNA, 25 bp, Canis familiaris
gttcgagtccgaatcactccagagg

SEQ ID NO: 132753 - DNA, 25 bp, Canis familiaris
gttcgcgctctcgaagcagatctaa

SEQ ID NO: 132754 - DNA, 25 bp, Canis familiaris
gttcagcacctagctcagtgcttag

SEQ ID NO: 132755 - DNA, 25 bp, Canis familiaris
gttagccctaacaaagctcttaagt

SEQ ID NO: 132756 - DNA, 25 bp, Canis familiaris
gttcccacaaaaacatcttaagtgt

SEQ ID NO: 132757 - DNA, 25 bp, Canis familiaris
gttcttctcatatcaacttaaatgt

SEQ ID NO: 132758 - DNA, 25 bp, Canis familiaris
gttcacctaaataacctaaatattg

SEQ ID NO: 132759 - DNA, 25 bp, Canis familiaris
gtccagaccaagcaacctagacctt

SEQ ID NO: 132760 - DNA, 25 bp, Canis familiaris
gttcaaccaggacaaccaagttcaa

SEQ ID NO: 132761 - DNA, 25 bp, Canis familiaris
gttaacacaggatactacagttgta

SEQ ID NO: 132762 - DNA, 25 bp, Canis familiaris
gttctacaaaaatctcacagctcgt

SEQ ID NO: 132763 - DNA, 25 bp, Canis familiaris
gttcaaccaagtcagtaatccaccg

SEQ ID NO: 132764 - DNA, 25 bp, Canis familiaris
gttcatagctaacaatgtccacaac

SEQ ID NO: 132765 - DNA, 25 bp, Canis familiaris
gttcaggtaatttatctctacaacg

SEQ ID NO: 132766 - DNA, 25 bp, Canis familiaris
gttctggaaactctgcacgatgcaa

SEQ ID NO: 132767 - DNA, 25 bp, Canis familiaris
gttctggaaaccttggcaccaaaga

SEQ ID NO: 132768 - DNA, 25 bp, Canis familiaris
gtatgtggaaacacaggccaaggag

SEQ ID NO: 132769 - DNA, 25 bp, Canis familiaris
gtataggaaccttcaacaactggaa

SEQ ID NO: 132770 - DNA, 25 bp, Canis familiaris
gttaagactcctccaaaattcaaga

SEQ ID NO: 132771 - DNA, 25 bp, Canis familiaris
gttacggcttacccagaattcaagt

SEQ ID NO: 132772 - DNA, 25 bp, Canis familiaris
gttctcgactttcccagagaagcaa

SEQ ID NO: 132773 - DNA, 25 bp, Canis familiaris
gttctccactaatcacaaggatatt

SEQ ID NO: 132774 - DNA, 25 bp, Canis familiaris
gttcccaaagagtcaaagctgccat

SEQ ID NO: 132775 - DNA, 25 bp, Canis familiaris
gttctacgagggtcctgagctggtg

SEQ ID NO: 132776 - DNA, 25 bp, Canis familiaris
gttctacgagggtcctgagctggtg

SEQ ID NO: 132777 - DNA, 25 bp, Canis familiaris
gttctacgagggtcctgagctggtg

SEQ ID NO: 132778 - DNA, 25 bp, Canis familiaris
gttctacgagggtcctgagctggtg

SEQ ID NO: 132779 - DNA, 25 bp, Canis familiaris
gttctacgagggtcctgagctggtg

SEQ ID NO: 132780 - DNA, 25 bp, Canis familiaris
gttctacgagggtcctgagctggtg

SEQ ID NO: 132781 - DNA, 25 bp, Canis familiaris
gttctacgagggtcctgagctggtg

SEQ ID NO: 132782 - DNA, 25 bp, Canis familiaris
gttctacgagggtcctgagctggtg

SEQ ID NO: 132783 - DNA, 25 bp, Canis familiaris
gtctctgaaacgctcaaggctgggc

SEQ ID NO: 132784 - DNA, 25 bp, Canis familiaris
gttcgacaaggacgccatggtggcc

SEQ ID NO: 132785 - DNA, 25 bp, Canis familiaris
gttagagcgaggactccgggacagt

SEQ ID NO: 132786 - DNA, 25 bp, Canis familiaris
gttaccggtaccagctgacaatgta

SEQ ID NO: 132787 - DNA, 25 bp, Canis familiaris
gtaaccgtaaccagtggacattctg

SEQ ID NO: 132788 - DNA, 25 bp, Canis familiaris
gttaccccaaccaagtgtactacag

SEQ ID NO: 132789 - DNA, 25 bp, Canis familiaris
gttaagcttcaaccaaggcttccaa

SEQ ID NO: 132790 - DNA, 25 bp, Canis familiaris
gttaacctgaggccatagcgtgccc

SEQ ID NO: 132791 - DNA, 25 bp, Canis familiaris
gttcaaggctgaggtgcggggcgcc

SEQ ID NO: 132792 - DNA, 25 bp, Canis familiaris
gttctccgctgagttggagggaggc

SEQ ID NO: 132793 - DNA, 25 bp, Canis familiaris
gttctcttggagttggtgggcacct

SEQ ID NO: 132794 - DNA, 25 bp, Canis familiaris
gttctcgtggagggaggttcagcca

SEQ ID NO: 132795 - DNA, 25 bp, Canis familiaris
gttctgccggcagaaagcttcagaa

SEQ ID NO: 132796 - DNA, 25 bp, Canis familiaris
gttctgcccctggaagtggtagcaa

SEQ ID NO: 132797 - DNA, 25 bp, Canis familiaris
gttcgccgcctggagagcagggaga

SEQ ID NO: 132798 - DNA, 25 bp, Canis familiaris
gtttcctcagctccagacggagtat

SEQ ID NO: 132799 - DNA, 25 bp, Canis familiaris
gttcatcctgagctgtacgggaagc

SEQ ID NO: 132800 - DNA, 25 bp, Canis familiaris
gtatctcttcagctgctgccaggaa

SEQ ID NO: 132801 - DNA, 25 bp, Canis familiaris
gttctctgtctgtgtgcactgacaa

SEQ ID NO: 132802 - DNA, 25 bp, Canis familiaris
gttctcctgctgcggattgatgaca

SEQ ID NO: 132803 - DNA, 25 bp, Canis familiaris
gttcacccatgcaggcatgctgagg

SEQ ID NO: 132804 - DNA, 25 bp, Canis familiaris
gttcacctcgcaagcatgttcatga

SEQ ID NO: 132805 - DNA, 25 bp, Canis familiaris
gttctcgcccattgaaatatgatca

SEQ ID NO: 132806 - DNA, 25 bp, Canis familiaris
gttctccccaagcattatgtcatga

SEQ ID NO: 132807 - DNA, 25 bp, Canis familiaris
gttcttcctaagcgtcatcttgagc

SEQ ID NO: 132808 - DNA, 25 bp, Canis familiaris
gttctcagcgactcggtcatttgac

SEQ ID NO: 132809 - DNA, 25 bp, Canis familiaris
gttctccggcacattgatgctgttg

SEQ ID NO: 132810 - DNA, 25 bp, Canis familiaris
gttctgccagctgttttctgaagtc

SEQ ID NO: 132811 - DNA, 25 bp, Canis familiaris
gttcgggtgtgtacttctaagctga

SEQ ID NO: 132812 - DNA, 25 bp, Canis familiaris
gttcaggtgcctacgctgttaactc

SEQ ID NO: 132813 - DNA, 25 bp, Canis familiaris
gttagcgtgcccaggagtaaacggg

SEQ ID NO: 132814 - DNA, 25 bp, Canis familiaris
gttcgtgtgtcctggagcgaacccg

SEQ ID NO: 132815 - DNA, 25 bp, Canis familiaris
gttcgtgttctgcggcagtaagccc

SEQ ID NO: 132816 - DNA, 25 bp, Canis familiaris
gttagctttgtgtgtggttacccat

SEQ ID NO: 132817 - DNA, 25 bp, Canis familiaris
gttaagtggtctcttgttacataat

SEQ ID NO: 132818 - DNA, 25 bp, Canis familiaris
gttaagcatggactctgggggaaat

SEQ ID NO: 132819 - DNA, 25 bp, Canis familiaris
gttaagcagctaccagggtggcctc

SEQ ID NO: 132820 - DNA, 25 bp, Canis familiaris
gttaatcagagaccagggaccctta

SEQ ID NO: 132821 - DNA, 25 bp, Canis familiaris
gttcaataaaacatggactcctaaa

SEQ ID NO: 132822 - DNA, 25 bp, Canis familiaris
gttaaggcaagacatgccccctgac

SEQ ID NO: 132823 - DNA, 25 bp, Canis familiaris
gttaataaagaccattcacccgctc

SEQ ID NO: 132824 - DNA, 25 bp, Canis familiaris
gttaaatagaatcccttcctcactc

SEQ ID NO: 132825 - DNA, 25 bp, Canis familiaris
gttaaaaattacatacctaccatga

SEQ ID NO: 132826 - DNA, 25 bp, Canis familiaris
gttacactaaaattttctcgttcat

SEQ ID NO: 132827 - DNA, 25 bp, Canis familiaris
gttacaccgtaattacttggcgtct

SEQ ID NO: 132828 - DNA, 25 bp, Canis familiaris
gttcacccttaatacatatctgttt

SEQ ID NO: 132829 - DNA, 25 bp, Canis familiaris
gttatccaactccatgaagtttttt

SEQ ID NO: 132830 - DNA, 25 bp, Canis familiaris
gttctcctcacacataaatggtttt

SEQ ID NO: 132831 - DNA, 25 bp, Canis familiaris
gttcatcccaatctcggattttttt

SEQ ID NO: 132832 - DNA, 25 bp, Canis familiaris
gttcagtccagtccttggtttatat

SEQ ID NO: 132833 - DNA, 25 bp, Canis familiaris
gttcacccacgcgttttaggatact

SEQ ID NO: 132834 - DNA, 25 bp, Canis familiaris
gttaccctctgtgtttactcaacaa

SEQ ID NO: 132835 - DNA, 25 bp, Canis familiaris
gttttaatcggcattctgacccaaa

SEQ ID NO: 132836 - DNA, 25 bp, Canis familiaris
gttttacacgtgcttcaaattaata

SEQ ID NO: 132837 - DNA, 25 bp, Canis familiaris
gttattaaactgctggagttttgga

SEQ ID NO: 132838 - DNA, 25 bp, Canis familiaris
gttaatagaactgttggttatttga

SEQ ID NO: 132839 - DNA, 25 bp, Canis familiaris
gttaaatcaactgttttcctgacaa

SEQ ID NO: 132840 - DNA, 25 bp, Canis familiaris
gttaagattactactcttctccggg

SEQ ID NO: 132841 - DNA, 25 bp, Canis familiaris
gttaagactacaaccccttagtgct

SEQ ID NO: 132842 - DNA, 25 bp, Canis familiaris
gttcagcaaaaaacacctgcttgag

SEQ ID NO: 132843 - DNA, 25 bp, Canis familiaris
gttacatataattctgcctctgctt

SEQ ID NO: 132844 - DNA, 25 bp, Canis familiaris
gttacacaatatacatgcctttgat

SEQ ID NO: 132845 - DNA, 25 bp, Canis familiaris
gttaacaattagactcctgagaaaa

SEQ ID NO: 132846 - DNA, 25 bp, Canis familiaris
gttaataacatctctacggcaatga

SEQ ID NO: 132847 - DNA, 25 bp, Canis familiaris
gttaacattcactttcagcgggaga

SEQ ID NO: 132848 - DNA, 25 bp, Canis familiaris
gttcataaattctaccggggcagtg

SEQ ID NO: 132849 - DNA, 25 bp, Canis familiaris
gttctcttcacctactggggaagct

SEQ ID NO: 132850 - DNA, 25 bp, Canis familiaris
gttcttctcgagttcgcggaggagc

SEQ ID NO: 132851 - DNA, 25 bp, Canis familiaris
gttctccgagaatttgctggccgac

SEQ ID NO: 132852 - DNA, 25 bp, Canis familiaris
gttctcccatgtgaatcaaccgcac

SEQ ID NO: 132853 - DNA, 25 bp, Canis familiaris
gttctcgaatgtcactatatctcac

SEQ ID NO: 132854 - DNA, 25 bp, Canis familiaris
gttctatggtgccaagtactctaca

SEQ ID NO: 132855 - DNA, 25 bp, Canis familiaris
gtatatcaggcacagtctacttacc

SEQ ID NO: 132856 - DNA, 25 bp, Canis familiaris
gtatgacgtggtgtcccttgagcat

SEQ ID NO: 132857 - DNA, 25 bp, Canis familiaris
gttacctggtgctcaacatggacct

SEQ ID NO: 132858 - DNA, 25 bp, Canis familiaris
gttcactctggttggatcacattgc

SEQ ID NO: 132859 - DNA, 25 bp, Canis familiaris
gttcaatcatctctcatatctcaag

SEQ ID NO: 132860 - DNA, 25 bp, Canis familiaris
gtatcacaactgttaattgaagctt

SEQ ID NO: 132861 - DNA, 25 bp, Canis familiaris
gttctacgccattatattccagtta

SEQ ID NO: 132862 - DNA, 25 bp, Canis familiaris
gttctacgcctttggtcgtgtattc

SEQ ID NO: 132863 - DNA, 25 bp, Canis familiaris
gttctgggattcaggcttgttatta

SEQ ID NO: 132864 - DNA, 25 bp, Canis familiaris
gttctaagcttcaggcctctttgaa

SEQ ID NO: 132865 - DNA, 25 bp, Canis familiaris
gttctaagcttcatatcttgtttta

SEQ ID NO: 132866 - DNA, 25 bp, Canis familiaris
gttctcaggattgccatttccttct

SEQ ID NO: 132867 - DNA, 25 bp, Canis familiaris
gttcataacagtgccattgtctttc

SEQ ID NO: 132868 - DNA, 25 bp, Canis familiaris
gttcatagattggttctgtggcttt

SEQ ID NO: 132869 - DNA, 25 bp, Canis familiaris
gttcattgagacattcgagcctttc

SEQ ID NO: 132870 - DNA, 25 bp, Canis familiaris
gttcattgtgacttacctactgttc

SEQ ID NO: 132871 - DNA, 25 bp, Canis familiaris
gttcactgcaacttagccttagtct

SEQ ID NO: 132872 - DNA, 25 bp, Canis familiaris
gtatcagctaaagggcctagagcct

SEQ ID NO: 132873 - DNA, 25 bp, Canis familiaris
gttcagttcgagcgccaagatcgtg

SEQ ID NO: 132874 - DNA, 25 bp, Canis familiaris
gttcagtcataatcccacagatggt

SEQ ID NO: 132875 - DNA, 25 bp, Canis familiaris
gttcttcaacccggatcggaggctg

SEQ ID NO: 132876 - DNA, 25 bp, Canis familiaris
gtctttaagcccaaaccttgctgtc

SEQ ID NO: 132877 - DNA, 25 bp, Canis familiaris
gtttaatacccggacaatatcgttg

SEQ ID NO: 132878 - DNA, 25 bp, Canis familiaris
gtactttgacctccaacgtagggct

SEQ ID NO: 132879 - DNA, 25 bp, Canis familiaris
gttctttgaccacagaggagggcca

SEQ ID NO: 132880 - DNA, 25 bp, Canis familiaris
gttctttccacagagcaggatgagc

SEQ ID NO: 132881 - DNA, 25 bp, Canis familiaris
gttctctttccggtgagtagatgca

SEQ ID NO: 132882 - DNA, 25 bp, Canis familiaris
gttctctgttcttggtgatgtctta

SEQ ID NO: 132883 - DNA, 25 bp, Canis familiaris
gttctctatctagtgggtctcgtga

SEQ ID NO: 132884 - DNA, 25 bp, Canis familiaris
gttctctttcgtgagtctctggagc

SEQ ID NO: 132885 - DNA, 25 bp, Canis familiaris
gttctctctttataaccagatggca

SEQ ID NO: 132886 - DNA, 25 bp, Canis familiaris
gttcttgtttcagcccgatatgtac

SEQ ID NO: 132887 - DNA, 25 bp, Canis familiaris
gttctctttgtcgacaacgtgcagt

SEQ ID NO: 132888 - DNA, 25 bp, Canis familiaris
gttcatctcttgccaaataagggtc

SEQ ID NO: 132889 - DNA, 25 bp, Canis familiaris
gttcttcagggctacaaatctcctc

SEQ ID NO: 132890 - DNA, 25 bp, Canis familiaris
gttcttccagggaccaatccctaga

SEQ ID NO: 132891 - DNA, 25 bp, Canis familiaris
gttcaaccgtggaaagatgccaatg

SEQ ID NO: 132892 - DNA, 25 bp, Canis familiaris
gttcaaggaataaaagaccaagcaa

SEQ ID NO: 132893 - DNA, 25 bp, Canis familiaris
gttctaaatagttaatggccggatt

SEQ ID NO: 132894 - DNA, 25 bp, Canis familiaris
gttctacaaagttgaaagccttcat

SEQ ID NO: 132895 - DNA, 25 bp, Canis familiaris
gttctaaaagatacaccagccccac

SEQ ID NO: 132896 - DNA, 25 bp, Canis familiaris
gttctcaaacattccaggaacaccc

SEQ ID NO: 132897 - DNA, 25 bp, Canis familiaris
gttctctgaacataatggaatcacg

SEQ ID NO: 132898 - DNA, 25 bp, Canis familiaris
gttctggcaacagggagaagcaagg

SEQ ID NO: 132899 - DNA, 25 bp, Canis familiaris
gttctggacagacggactcaaagga

SEQ ID NO: 132900 - DNA, 25 bp, Canis familiaris
gttctggagctgttggaccaatatc

SEQ ID NO: 132901 - DNA, 25 bp, Canis familiaris
gttctcagactgtctgactgccaat

SEQ ID NO: 132902 - DNA, 25 bp, Canis familiaris
gtaatcatggcattctgccccatgc

SEQ ID NO: 132903 - DNA, 25 bp, Canis familiaris
gttacatggcacatcaccacagtgg

SEQ ID NO: 132904 - DNA, 25 bp, Canis familiaris
gttacatagcatcagaaacgggtca

SEQ ID NO: 132905 - DNA, 25 bp, Canis familiaris
gttacattcctatgaagtaggtatg

SEQ ID NO: 132906 - DNA, 25 bp, Canis familiaris
gttacttctctgagttgaaactgac

SEQ ID NO: 132907 - DNA, 25 bp, Canis familiaris
gttaacttgtcttttgataatctgg

SEQ ID NO: 132908 - DNA, 25 bp, Canis familiaris
gttaactagttttcgtcgtcatcca

SEQ ID NO: 132909 - DNA, 25 bp, Canis familiaris
gtagaactggtttacctgattacta

SEQ ID NO: 132910 - DNA, 25 bp, Canis familiaris
gtaaactggtttgactggtatacaa

SEQ ID NO: 132911 - DNA, 25 bp, Canis familiaris
gtagaccagcctgtgaagggacaac

SEQ ID NO: 132912 - DNA, 25 bp, Canis familiaris
gttcaccaggccttgacggccaaac

SEQ ID NO: 132913 - DNA, 25 bp, Canis familiaris
gtatacgagagctttctaggaaaac

SEQ ID NO: 132914 - DNA, 25 bp, Canis familiaris
gtatacctggatgctcttcaaaaca

SEQ ID NO: 132915 - DNA, 25 bp, Canis familiaris
gttacctgagatcgtcttcaatggg

SEQ ID NO: 132916 - DNA, 25 bp, Canis familiaris
tggtgaaggtgaaaggcacgccgct

SEQ ID NO: 132917 - DNA, 25 bp, Canis familiaris
acgccgcttgccgataacgatgatg

SEQ ID NO: 132918 - DNA, 25 bp, Canis familiaris
ttgccgataacgatgatgtcgatgc

SEQ ID NO: 132919 - DNA, 25 bp, Canis familiaris
acgatgatgtcgatgcctttgattt

SEQ ID NO: 132920 - DNA, 25 bp, Canis familiaris
ggtcgcgcggatcatgatgccaacc

SEQ ID NO: 132921 - DNA, 25 bp, Canis familiaris
ggatcatgatgccaacctcttacgt

SEQ ID NO: 132922 - DNA, 25 bp, Canis familiaris
tgccaacctcttacgtgcgcctttc

SEQ ID NO: 132923 - DNA, 25 bp, Canis familiaris
gcgcctttctgccggacgcgagcag

SEQ ID NO: 132924 - DNA, 25 bp, Canis familiaris
gccggacgcgagcagatgaacgaac

SEQ ID NO: 132925 - DNA, 25 bp, Canis familiaris
cgagcagatgaacgaacagactcag

SEQ ID NO: 132926 - DNA, 25 bp, Canis familiaris
gatgaacgaacagactcaggcgatg

SEQ ID NO: 132927 - DNA, 25 bp, Canis familiaris
aacagactcaggcgatgtgctttat

SEQ ID NO: 132928 - DNA, 25 bp, Canis familiaris
tcaggcgatgtgctttatggcaggc

SEQ ID NO: 132929 - DNA, 25 bp, Canis familiaris
gtgctttatggcaggcgcaaactcg

SEQ ID NO: 132930 - DNA, 25 bp, Canis familiaris
atggcaggcgcaaactcgattttct

SEQ ID NO: 132931 - DNA, 25 bp, Canis familiaris
tacggttgcaaactgctgaccacgc

SEQ ID NO: 132932 - DNA, 25 bp, Canis familiaris
caaactgctgaccacgccgaatccg

SEQ ID NO: 132933 - DNA, 25 bp, Canis familiaris
gacctgcaactgttccgcaaactgg

SEQ ID NO: 132934 - DNA, 25 bp, Canis familiaris
gttcttggtgtttgggcaaagtcat

SEQ ID NO: 132935 - DNA, 25 bp, Canis familiaris
gttctttggtgttgggccaagtcta

SEQ ID NO: 132936 - DNA, 25 bp, Canis familiaris
gttcttgcttttggcgcccacagtg

SEQ ID NO: 132937 - DNA, 25 bp, Canis familiaris
gttcttgctaagaatagcccacgta

SEQ ID NO: 132938 - DNA, 25 bp, Canis familiaris
gttttggaggacaacatcactctta

SEQ ID NO: 132939 - DNA, 25 bp, Canis familiaris
gttcttaaccacacatgcatcttta

SEQ ID NO: 132940 - DNA, 25 bp, Canis familiaris
gttctctccaaaagagctcatctct

SEQ ID NO: 132941 - DNA, 25 bp, Canis familiaris
gttctgcatcactgtataccattct

SEQ ID NO: 132942 - DNA, 25 bp, Canis familiaris
gttctgcacagagggtaatattggt

SEQ ID NO: 132943 - DNA, 25 bp, Canis familiaris
gttctcacaggcagcaaactggatg

SEQ ID NO: 132944 - DNA, 25 bp, Canis familiaris
gttctgccaggcaaattcactgttt

SEQ ID NO: 132945 - DNA, 25 bp, Canis familiaris
gttcatgccagcagtttccatttta

SEQ ID NO: 132946 - DNA, 25 bp, Canis familiaris
gttctgctgcagagccattactaca

SEQ ID NO: 132947 - DNA, 25 bp, Canis familiaris
gttcagtcagagcccatcgtataat

SEQ ID NO: 132948 - DNA, 25 bp, Canis familiaris
gttcagctcactcacaggttaatag

SEQ ID NO: 132949 - DNA, 25 bp, Canis familiaris
gttcactcttgatctggttcagtca

SEQ ID NO: 132950 - DNA, 25 bp, Canis familiaris
gttctctgttgctcattttaccaga

SEQ ID NO: 132951 - DNA, 25 bp, Canis familiaris
gttctagctgtctatcatgtgttca

SEQ ID NO: 132952 - DNA, 25 bp, Canis familiaris
gttctatgcagtcatgctgagccat

SEQ ID NO: 132953 - DNA, 25 bp, Canis familiaris
gttcatcagcagggaatagccaggc

SEQ ID NO: 132954 - DNA, 25 bp, Canis familiaris
gttctcaccgaattatccagggtct

SEQ ID NO: 132955 - DNA, 25 bp, Canis familiaris
gttcttacgcttaatctagggatct

SEQ ID NO: 132956 - DNA, 25 bp, Canis familiaris
gttctagcaccttctaaagttgcac

SEQ ID NO: 132957 - DNA, 25 bp, Canis familiaris
gttctccagccttcttcatgaggct

SEQ ID NO: 132958 - DNA, 25 bp, Canis familiaris
gttctcgcgttgtgtcaggtgtaga

SEQ ID NO: 132959 - DNA, 25 bp, Canis familiaris
gttctcgacctgtcttatggttcga

SEQ ID NO: 132960 - DNA, 25 bp, Canis familiaris
gttctgcaggtacctttaattctgg

SEQ ID NO: 132961 - DNA, 25 bp, Canis familiaris
gttctgcagactattttcacatatt

SEQ ID NO: 132962 - DNA, 25 bp, Canis familiaris
gttctcatgtatttctttgccattc

SEQ ID NO: 132963 - DNA, 25 bp, Canis familiaris
gttctagatatattctctggcaaag

SEQ ID NO: 132964 - DNA, 25 bp, Canis familiaris
gttctctctatatttcccacatgag

SEQ ID NO: 132965 - DNA, 25 bp, Canis familiaris
gttcttcaaaattgccccatgtgaa

SEQ ID NO: 132966 - DNA, 25 bp, Canis familiaris
gttcttccaggattggcacactgta

SEQ ID NO: 132967 - DNA, 25 bp, Canis familiaris
gttcttcacatttttgtcactcaac

SEQ ID NO: 132968 - DNA, 25 bp, Canis familiaris
gttctctaaacaaaatcctctactt

SEQ ID NO: 132969 - DNA, 25 bp, Canis familiaris
gttcttagtagataattcacccttg

SEQ ID NO: 132970 - DNA, 25 bp, Canis familiaris
gtatcctatgtcctatttaaccctt

SEQ ID NO: 132971 - DNA, 25 bp, Canis familiaris
gttcatttgattcatgttaaactcc

SEQ ID NO: 132972 - DNA, 25 bp, Canis familiaris
gttcatttgtttatgtacccatcaa

SEQ ID NO: 132973 - DNA, 25 bp, Canis familiaris
gttctgtttattatgtatgaccaat

SEQ ID NO: 132974 - DNA, 25 bp, Canis familiaris
gttcttcttttcattgagactggaa

SEQ ID NO: 132975 - DNA, 25 bp, Canis familiaris
gttctctctttaaatctcaggccga

SEQ ID NO: 132976 - DNA, 25 bp, Canis familiaris
gttctcttttatcgtatcagtaagt

SEQ ID NO: 132977 - DNA, 25 bp, Canis familiaris
gttctcctttacttccattaattgg

SEQ ID NO: 132978 - DNA, 25 bp, Canis familiaris
gttatcgttaactcctcggactgag

SEQ ID NO: 132979 - DNA, 25 bp, Canis familiaris
gttcatctttaccaacctgagagac

SEQ ID NO: 132980 - DNA, 25 bp, Canis familiaris
gttcttctatacccaactgtatcag

SEQ ID NO: 132981 - DNA, 25 bp, Canis familiaris
gttcttggaagcccaggctgcgtac

SEQ ID NO: 132982 - DNA, 25 bp, Canis familiaris
gttctctgaaatctcggggatagct

SEQ ID NO: 132983 - DNA, 25 bp, Canis familiaris
gttctgcaggtccagttggggatga

SEQ ID NO: 132984 - DNA, 25 bp, Canis familiaris
gtatccaggaggcttgagcaggtct

SEQ ID NO: 132985 - DNA, 25 bp, Canis familiaris
gttcaaagcaggcccgagccgcctg

SEQ ID NO: 132986 - DNA, 25 bp, Canis familiaris
gttcaaaggccagcatatccgggac

SEQ ID NO: 132987 - DNA, 25 bp, Canis familiaris
gttacacgtgaaggttgcctgggtc

SEQ ID NO: 132988 - DNA, 25 bp, Canis familiaris
gttaacgggaaggtttctgtgactg

SEQ ID NO: 132989 - DNA, 25 bp, Canis familiaris
gttaagagtaggcagtttcttcact

SEQ ID NO: 132990 - DNA, 25 bp, Canis familiaris
gttcaaggaagcaggccttctctct

SEQ ID NO: 132991 - DNA, 25 bp, Canis familiaris
gttcaaggacacagcggattttcat

SEQ ID NO: 132992 - DNA, 25 bp, Canis familiaris
gttctcataaacactgtattttcag

SEQ ID NO: 132993 - DNA, 25 bp, Canis familiaris
gttcttgaacaatcaggtttctcag

SEQ ID NO: 132994 - DNA, 25 bp, Canis familiaris
gttctatcatactccaggttctgtt

SEQ ID NO: 132995 - DNA, 25 bp, Canis familiaris
gttctcattactgccagggctgtgc

SEQ ID NO: 132996 - DNA, 25 bp, Canis familiaris
gttcagattactgcacacatgcgtt

SEQ ID NO: 132997 - DNA, 25 bp, Canis familiaris
gttaggtagctggaaacagtttcta

SEQ ID NO: 132998 - DNA, 25 bp, Canis familiaris
gttagagtagctgaataccatgtaa

SEQ ID NO: 132999 - DNA, 25 bp, Canis familiaris
gttctagttcatttatacaatgtac

SEQ ID NO: 133000 - DNA, 25 bp, Canis familiaris
gttctagcgtctcttggtaatccaa

SEQ ID NO: 133001 - DNA, 25 bp, Canis familiaris
gttcatcggattgttggtacccgca

SEQ ID NO: 133002 - DNA, 25 bp, Canis familiaris
gttcacggtctgggtctgtgacaca

SEQ ID NO: 133003 - DNA, 25 bp, Canis familiaris
gttcactagcctatggctgggtcaa

SEQ ID NO: 133004 - DNA, 25 bp, Canis familiaris
gttcatcttgcctactgatgcagcg

SEQ ID NO: 133005 - DNA, 25 bp, Canis familiaris
gttcaatatcactcatcatcaggga

SEQ ID NO: 133006 - DNA, 25 bp, Canis familiaris
gttcttaacagttgtcagtggtcag

SEQ ID NO: 133007 - DNA, 25 bp, Canis familiaris
gttcaaaacagatatcagggatatg

SEQ ID NO: 133008 - DNA, 25 bp, Canis familiaris
gttcaaagctaatgatcacggatat

SEQ ID NO: 133009 - DNA, 25 bp, Canis familiaris
gttcaaaggcacaaggcactggatg

SEQ ID NO: 133010 - DNA, 25 bp, Canis familiaris
gttcaagaccagcctggccaacatg

SEQ ID NO: 133011 - DNA, 25 bp, Canis familiaris
gttcagcaagctggccatgctgcca

SEQ ID NO: 133012 - DNA, 25 bp, Canis familiaris
gttcagcagttgaccatctgccttc

SEQ ID NO: 133013 - DNA, 25 bp, Canis familiaris
gttcagcgttcaggacttaatgcgg

SEQ ID NO: 133014 - DNA, 25 bp, Canis familiaris
gttcaggtgccatgaggtagctgca

SEQ ID NO: 133015 - DNA, 25 bp, Canis familiaris
gttcatgtggaatgcagatgggtgc

SEQ ID NO: 133016 - DNA, 25 bp, Canis familiaris
gttatataatgctgaaggggaccac

SEQ ID NO: 133017 - DNA, 25 bp, Canis familiaris
gttagatgtatatacggggcccctt

SEQ ID NO: 133018 - DNA, 25 bp, Canis familiaris
gttagagtaatgcacgcaggttccc

SEQ ID NO: 133019 - DNA, 25 bp, Canis familiaris
gttcaggctcagtgcacgagctttc

SEQ ID NO: 133020 - DNA, 25 bp, Canis familiaris
gttcaggaagcatggagactctctc

SEQ ID NO: 133021 - DNA, 25 bp, Canis familiaris
gttcaggaggtggatgatggttatc

SEQ ID NO: 133022 - DNA, 25 bp, Canis familiaris
gttaggaggtctccatttctcagct

SEQ ID NO: 133023 - DNA, 25 bp, Canis familiaris
gttcagatgagagcacctatgtgtc

SEQ ID NO: 133024 - DNA, 25 bp, Canis familiaris
gttagggaagccctcatcaccaatc

SEQ ID NO: 133025 - DNA, 25 bp, Canis familiaris
gttagttgtaggtgcatcccattgc

SEQ ID NO: 133026 - DNA, 25 bp, Canis familiaris
gttagtactaagaccgaccatctcg

SEQ ID NO: 133027 - DNA, 25 bp, Canis familiaris
gttcagtaataaatgcgacaccttt

SEQ ID NO: 133028 - DNA, 25 bp, Canis familiaris
gttcactagataactcggcgtcttt

SEQ ID NO: 133029 - DNA, 25 bp, Canis familiaris
gttctctgaatgagcctttgtgctt

SEQ ID NO: 133030 - DNA, 25 bp, Canis familiaris
gttctctaggcaaccttttgattat

SEQ ID NO: 133031 - DNA, 25 bp, Canis familiaris
gttcatctagtttccttttgcaaaa

SEQ ID NO: 133032 - DNA, 25 bp, Canis familiaris
gttctatctttccagcattttgaat

SEQ ID NO: 133033 - DNA, 25 bp, Canis familiaris
gttctcgtgtgggagcatcttatga

SEQ ID NO: 133034 - DNA, 25 bp, Canis familiaris
gttctcagggaggaatcttgcacaa

SEQ ID NO: 133035 - DNA, 25 bp, Canis familiaris
gtttcacaaatggcagacttgaaga

SEQ ID NO: 133036 - DNA, 25 bp, Canis familiaris
gttaccacaagcaacatttccatgg

SEQ ID NO: 133037 - DNA, 25 bp, Canis familiaris
gttcaatcagtacatcgtgtgcctg

SEQ ID NO: 133038 - DNA, 25 bp, Canis familiaris
gttcttcgtagtggtgcgtgcatct

SEQ ID NO: 133039 - DNA, 25 bp, Canis familiaris
gttctctatgctggtcctgagtggt

SEQ ID NO: 133040 - DNA, 25 bp, Canis familiaris
gttctcttgatgctttactgtgatg

SEQ ID NO: 133041 - DNA, 25 bp, Canis familiaris
gttctttgtgagcttcaaggacatt

SEQ ID NO: 133042 - DNA, 25 bp, Canis familiaris
gttcttttcgaaatgatagtcacac

SEQ ID NO: 133043 - DNA, 25 bp, Canis familiaris
gttctctgttcccaatgataaccac

SEQ ID NO: 133044 - DNA, 25 bp, Canis familiaris
gttcatctgcgtataataataccag

SEQ ID NO: 133045 - DNA, 25 bp, Canis familiaris
gttcttggtattcgctattaccagt

SEQ ID NO: 133046 - DNA, 25 bp, Canis familiaris
gttcattttatgtcctttactactc

SEQ ID NO: 133047 - DNA, 25 bp, Canis familiaris
gttcaatgttgactacctgtaccct

SEQ ID NO: 133048 - DNA, 25 bp, Canis familiaris
gttcaaatgattaaccccacctgtt

SEQ ID NO: 133049 - DNA, 25 bp, Canis familiaris
gttacacggtatatgtccagttatt

SEQ ID NO: 133050 - DNA, 25 bp, Canis familiaris
gttaacaggttattgtccctaagct

SEQ ID NO: 133051 - DNA, 25 bp, Canis familiaris
gttcttaggttttgatctgcctcag

SEQ ID NO: 133052 - DNA, 25 bp, Canis familiaris
gttcttagaaatgcttctggctcag

SEQ ID NO: 133053 - DNA, 25 bp, Canis familiaris
gttcttagaacacgcactgcttgcc

SEQ ID NO: 133054 - DNA, 25 bp, Canis familiaris
gttctctagaactcatgcattgcca

SEQ ID NO: 133055 - DNA, 25 bp, Canis familiaris
gttctctcaatcttcaaatgatcca

SEQ ID NO: 133056 - DNA, 25 bp, Canis familiaris
gttcatgcataacttgaaagagcca

SEQ ID NO: 133057 - DNA, 25 bp, Canis familiaris
gttcagtacactgtttgtgctgctg

SEQ ID NO: 133058 - DNA, 25 bp, Canis familiaris
gttcagagacccatgttggacttct

SEQ ID NO: 133059 - DNA, 25 bp, Canis familiaris
gtataagatccctgactggtttttg

SEQ ID NO: 133060 - DNA, 25 bp, Canis familiaris
gttaaactccatggcctgtgagtct

SEQ ID NO: 133061 - DNA, 25 bp, Canis familiaris
gttaagtgccaaggttgtgaatgtt

SEQ ID NO: 133062 - DNA, 25 bp, Canis familiaris
gttaggatgtaagctctctgagagc

SEQ ID NO: 133063 - DNA, 25 bp, Canis familiaris
gttcagggataactctgccatgcga

SEQ ID NO: 133064 - DNA, 25 bp, Canis familiaris
gttaaggattacttggctgccatag

SEQ ID NO: 133065 - DNA, 25 bp, Canis familiaris
gttaagggctagtggtcgaggctac

SEQ ID NO: 133066 - DNA, 25 bp, Canis familiaris
gttaagcttgtactgggatcaagcc

SEQ ID NO: 133067 - DNA, 25 bp, Canis familiaris
gttaaccatgtaccagtgatgacga

SEQ ID NO: 133068 - DNA, 25 bp, Canis familiaris
gttacccagccacgatggatgacat

SEQ ID NO: 133069 - DNA, 25 bp, Canis familiaris
gttcagccacccgagattgagcaat

SEQ ID NO: 133070 - DNA, 25 bp, Canis familiaris
gttcagccacccgagattgagcaat

SEQ ID NO: 133071 - DNA, 25 bp, Canis familiaris
gttcagccacccgagattgagcaat

SEQ ID NO: 133072 - DNA, 25 bp, Canis familiaris
gttagtcagacagtgcctctacagt

SEQ ID NO: 133073 - DNA, 25 bp, Canis familiaris
gttaccagaagtccaccgagcttct

SEQ ID NO: 133074 - DNA, 25 bp, Canis familiaris
gtttcagcaagccttacctacaacc

SEQ ID NO: 133075 - DNA, 25 bp, Canis familiaris
gttaccctgagataccagacaaccc

SEQ ID NO: 133076 - DNA, 25 bp, Canis familiaris
gttctacctgaatatgctattaaca

SEQ ID NO: 133077 - DNA, 25 bp, Canis familiaris
gttctaatctgctcttctttaacac

SEQ ID NO: 133078 - DNA, 25 bp, Canis familiaris
gttcatctacgtattttgtaacatc

SEQ ID NO: 133079 - DNA, 25 bp, Canis familiaris
gttcttcaatatacttttctaccaa

SEQ ID NO: 133080 - DNA, 25 bp, Canis familiaris
gttcttcatcttattactaatccat

SEQ ID NO: 133081 - DNA, 25 bp, Canis familiaris
gttcattcctttcagccatcgtcct

SEQ ID NO: 133082 - DNA, 25 bp, Canis familiaris
gttctatctcggcaagcgatgtgct

SEQ ID NO: 133083 - DNA, 25 bp, Canis familiaris
gttcagaccaagcagaggctgtgtg

SEQ ID NO: 133084 - DNA, 25 bp, Canis familiaris
gttagagctgagacggggtgggggg

SEQ ID NO: 133085 - DNA, 25 bp, Canis familiaris
gtatacctgcagggggagtgcgtgc

SEQ ID NO: 133086 - DNA, 25 bp, Canis familiaris
gttcacgcatagagggaggcaaacc

SEQ ID NO: 133087 - DNA, 25 bp, Canis familiaris
gttagccaagatgtggattgttagg

SEQ ID NO: 133088 - DNA, 25 bp, Canis familiaris
gttcaggattgaaaggacttccagg

SEQ ID NO: 133089 - DNA, 25 bp, Canis familiaris
gttaggtgttattggaagtccggtg

SEQ ID NO: 133090 - DNA, 25 bp, Canis familiaris
gttaaggctttcttgaagttgccgg

SEQ ID NO: 133091 - DNA, 25 bp, Canis familiaris
gttaaggttactggtgagtctggca

SEQ ID NO: 133092 - DNA, 25 bp, Canis familiaris
gttaaatggtacagctactctacaa

SEQ ID NO: 133093 - DNA, 25 bp, Canis familiaris
gttaatttgttctcataaataaatc

SEQ ID NO: 133094 - DNA, 25 bp, Canis familiaris
gttaattctttctccagaacacaca

SEQ ID NO: 133095 - DNA, 25 bp, Canis familiaris
gttagggctgtgccaaccatgtaca

SEQ ID NO: 133096 - DNA, 25 bp, Canis familiaris
gttactgtggggcagccagttcatg

SEQ ID NO: 133097 - DNA, 25 bp, Canis familiaris
gttactggggcacagccagatcggc

SEQ ID NO: 133098 - DNA, 25 bp, Canis familiaris
gttagggtacaactgccagactgga

SEQ ID NO: 133099 - DNA, 25 bp, Canis familiaris
gttagacaagactacattagaagga

SEQ ID NO: 133100 - DNA, 25 bp, Canis familiaris
gttagatccaaccacaaaaagcaaa

SEQ ID NO: 133101 - DNA, 25 bp, Canis familiaris
gttcatatccaaggccaacagaaat

SEQ ID NO: 133102 - DNA, 25 bp, Canis familiaris
gttctcacccaggccaataagctgg

SEQ ID NO: 133103 - DNA, 25 bp, Canis familiaris
gtattgcaccaatccaaaccgacat

SEQ ID NO: 133104 - DNA, 25 bp, Canis familiaris
gtttcatgcaataaaaaggccgaac

SEQ ID NO: 133105 - DNA, 25 bp, Canis familiaris
gttagccatttacagcaatgcccaa

SEQ ID NO: 133106 - DNA, 25 bp, Canis familiaris
gttcagctcttctcgacaatgctgc

SEQ ID NO: 133107 - DNA, 25 bp, Canis familiaris
gttacttctcttggagtcatcgcag

SEQ ID NO: 133108 - DNA, 25 bp, Canis familiaris
gttacggaccattgatcttcgagaa

SEQ ID NO: 133109 - DNA, 25 bp, Canis familiaris
gttacggaccattgatcttcgagaa

SEQ ID NO: 133110 - DNA, 25 bp, Canis familiaris
gttacggaccattgatcttcgagaa

SEQ ID NO: 133111 - DNA, 25 bp, Canis familiaris
gttacttgagctagccatctttgaa

SEQ ID NO: 133112 - DNA, 25 bp, Canis familiaris
gttacttgaccagcacgctttttgt

SEQ ID NO: 133113 - DNA, 25 bp, Canis familiaris
gttacttgaaggcatcactttttaa

SEQ ID NO: 133114 - DNA, 25 bp, Canis familiaris
gttacttaaattagccttctgcctt

SEQ ID NO: 133115 - DNA, 25 bp, Canis familiaris
gttcacttagtaattggctcctaca

SEQ ID NO: 133116 - DNA, 25 bp, Canis familiaris
gttcacttgatgcattttttttgta

SEQ ID NO: 133117 - DNA, 25 bp, Canis familiaris
gtaaccattcgggtgtttttgctgt

SEQ ID NO: 133118 - DNA, 25 bp, Canis familiaris
gttacagattagtgatgcattttgg

SEQ ID NO: 133119 - DNA, 25 bp, Canis familiaris
gttcaggattactagagcacatttc

SEQ ID NO: 133120 - DNA, 25 bp, Canis familiaris
gttcatacatctactaaatttttcc

SEQ ID NO: 133121 - DNA, 25 bp, Canis familiaris
gttacacttcagcaaatctcttctc

SEQ ID NO: 133122 - DNA, 25 bp, Canis familiaris
gttcatcacctataatatccacctc

SEQ ID NO: 133123 - DNA, 25 bp, Canis familiaris
gttactcctaaattcattcactgtc

SEQ ID NO: 133124 - DNA, 25 bp, Canis familiaris
gttaatgcactgtggtttcagatgt

SEQ ID NO: 133125 - DNA, 25 bp, Canis familiaris
gttcttagtgcatgagttctgtgtt

SEQ ID NO: 133126 - DNA, 25 bp, Canis familiaris
gttctataattttgtttgtctgttt

SEQ ID NO: 133127 - DNA, 25 bp, Canis familiaris
gttcttactttactctggtatatgg

SEQ ID NO: 133128 - DNA, 25 bp, Canis familiaris
gtatttggctttttctttaatagat

SEQ ID NO: 133129 - DNA, 25 bp, Canis familiaris
gttatatggtctcatttggggaata

SEQ ID NO: 133130 - DNA, 25 bp, Canis familiaris
gttttgtctgtcgagtcggggacca

SEQ ID NO: 133131 - DNA, 25 bp, Canis familiaris
gttaattcaatcaagtgggacagac

SEQ ID NO: 133132 - DNA, 25 bp, Canis familiaris
gttaatccaccaagttcagctacaa

SEQ ID NO: 133133 - DNA, 25 bp, Canis familiaris
gttaatcccttaattagtccatcat

SEQ ID NO: 133134 - DNA, 25 bp, Canis familiaris
gttaaccctatgtttgttgcaatat

SEQ ID NO: 133135 - DNA, 25 bp, Canis familiaris
gttcagaccctcagtgttgtcctaa

SEQ ID NO: 133136 - DNA, 25 bp, Canis familiaris
gttagtgacctcaaatttaccaaat

SEQ ID NO: 133137 - DNA, 25 bp, Canis familiaris
gttaggctcccaaatctaagcaagt

SEQ ID NO: 133138 - DNA, 25 bp, Canis familiaris
gttagcagcttcgatcagtctagtt

SEQ ID NO: 133139 - DNA, 25 bp, Canis familiaris
gttagcctactgaaactagattcta

SEQ ID NO: 133140 - DNA, 25 bp, Canis familiaris
gttcagctctgattaccctaaatgc

SEQ ID NO: 133141 - DNA, 25 bp, Canis familiaris
gttcagttcttagcctcagaatgcc

SEQ ID NO: 133142 - DNA, 25 bp, Canis familiaris
gttctttgctaagcagccaatcact

SEQ ID NO: 133143 - DNA, 25 bp, Canis familiaris
gttctttccattcaccagaccattc

SEQ ID NO: 133144 - DNA, 25 bp, Canis familiaris
gttcatttggattaagcggactgtt

SEQ ID NO: 133145 - DNA, 25 bp, Canis familiaris
gttctatttatttacttgtcttcct

SEQ ID NO: 133146 - DNA, 25 bp, Canis familiaris
gttcttttatgtaagttttctctct

SEQ ID NO: 133147 - DNA, 25 bp, Canis familiaris
gttctatttatgttatgtgtcttcc

SEQ ID NO: 133148 - DNA, 25 bp, Canis familiaris
gttctatttatttattgtcttcctg

SEQ ID NO: 133149 - DNA, 25 bp, Canis familiaris
gttctatttatttattgtcttcctg

SEQ ID NO: 133150 - DNA, 25 bp, Canis familiaris
gttctatttatttattgtcttcctg

SEQ ID NO: 133151 - DNA, 25 bp, Canis familiaris
gttctatttatttattgtcttcctg

SEQ ID NO: 133152 - DNA, 25 bp, Canis familiaris
gttctatttatttattgtcttcctg

SEQ ID NO: 133153 - DNA, 25 bp, Canis familiaris
gttcttttgagtgtagttcacgctg

SEQ ID NO: 133154 - DNA, 25 bp, Canis familiaris
gttcttttgaatgtagttcaaccgt

SEQ ID NO: 133155 - DNA, 25 bp, Canis familiaris
gttcttttaactgacacacacacac

SEQ ID NO: 133156 - DNA, 25 bp, Canis familiaris
gttctttatatactttcgactcaca

SEQ ID NO: 133157 - DNA, 25 bp, Canis familiaris
gttcattcatatttctttacaccaa

SEQ ID NO: 133158 - DNA, 25 bp, Canis familiaris
gttcatcaatcattcattcttaagg

SEQ ID NO: 133159 - DNA, 25 bp, Canis familiaris
gttcatacactgtttctgtaagcac

SEQ ID NO: 133160 - DNA, 25 bp, Canis familiaris
gttcttcattttgcgtacagctctt

SEQ ID NO: 133161 - DNA, 25 bp, Canis familiaris
gttcttcatctttcggtatattctc

SEQ ID NO: 133162 - DNA, 25 bp, Canis familiaris
gttctatttctattgtttattcttt

SEQ ID NO: 133163 - DNA, 25 bp, Canis familiaris
gttctatagctgcactgatgttaat

SEQ ID NO: 133164 - DNA, 25 bp, Canis familiaris
gttacatggcatgactgacttcaag

SEQ ID NO: 133165 - DNA, 25 bp, Canis familiaris
gttacagcgcaacagcagcctgcag

SEQ ID NO: 133166 - DNA, 25 bp, Canis familiaris
gttcacgctgaaagatgccacatgg

SEQ ID NO: 133167 - DNA, 25 bp, Canis familiaris
gttcaagtagctaattctctgggtc

SEQ ID NO: 133168 - DNA, 25 bp, Canis familiaris
gttcaagtgaagaatgtctccagga

SEQ ID NO: 133169 - DNA, 25 bp, Canis familiaris
gttcatggctgaaattgtatgcaat

SEQ ID NO: 133170 - DNA, 25 bp, Canis familiaris
gttcatgtgctgttgcatggtcgcg

SEQ ID NO: 133171 - DNA, 25 bp, Canis familiaris
gttcatcgctgggatggtgtccacc

SEQ ID NO: 133172 - DNA, 25 bp, Canis familiaris
gttcaccttgggaagtagccacagg

SEQ ID NO: 133173 - DNA, 25 bp, Canis familiaris
gttcttctgaagcaaggatccacga

SEQ ID NO: 133174 - DNA, 25 bp, Canis familiaris
gttcttcccagtactggctaagcca

SEQ ID NO: 133175 - DNA, 25 bp, Canis familiaris
gttcttctcctgacctgaatacgaa

SEQ ID NO: 133176 - DNA, 25 bp, Canis familiaris
gttcttgcctggacctgaggggaac

SEQ ID NO: 133177 - DNA, 25 bp, Canis familiaris
gttatggccgggaaagggctgactg

SEQ ID NO: 133178 - DNA, 25 bp, Canis familiaris
gttattccccagagtggcagcaacg

SEQ ID NO: 133179 - DNA, 25 bp, Canis familiaris
gttaaccccaaatttgagcaagctg

SEQ ID NO: 133180 - DNA, 25 bp, Canis familiaris
gttaacccaccagcatctattgagc

SEQ ID NO: 133181 - DNA, 25 bp, Canis familiaris
gttaactgtacaggacactttcagg

SEQ ID NO: 133182 - DNA, 25 bp, Canis familiaris
gttaacagtccatatcaccattgcc

SEQ ID NO: 133183 - DNA, 25 bp, Canis familiaris
gttcagacagtcataatccttggga

SEQ ID NO: 133184 - DNA, 25 bp, Canis familiaris
gttcagttctcaaaatcacattatg

SEQ ID NO: 133185 - DNA, 25 bp, Canis familiaris
gttcagtcaccaactctggcaattt

SEQ ID NO: 133186 - DNA, 25 bp, Canis familiaris
gttcaggctcaaacttcacaagctt

SEQ ID NO: 133187 - DNA, 25 bp, Canis familiaris
gttcttctacatgctattaagtctg

SEQ ID NO: 133188 - DNA, 25 bp, Canis familiaris
gttctttacccatgttaccatgtct

SEQ ID NO: 133189 - DNA, 25 bp, Canis familiaris
gttcttgtacacttgtttttcatct

SEQ ID NO: 133190 - DNA, 25 bp, Canis familiaris
gtgttcgtagagcactttatacctt

SEQ ID NO: 133191 - DNA, 25 bp, Canis familiaris
gttactgtggctcactcttaaacat

SEQ ID NO: 133192 - DNA, 25 bp, Canis familiaris
gttaattcagagggtctctccaact

SEQ ID NO: 133193 - DNA, 25 bp, Canis familiaris
gttcatttcaagtgagctcgccaat

SEQ ID NO: 133194 - DNA, 25 bp, Canis familiaris
gttcttggcaaataccggcttcatc

SEQ ID NO: 133195 - DNA, 25 bp, Canis familiaris
gttttggataagtcccagagccgat

SEQ ID NO: 133196 - DNA, 25 bp, Canis familiaris
gttatttcaaagactcccacagctt

SEQ ID NO: 133197 - DNA, 25 bp, Canis familiaris
gtcatatccaaaggtcccaaactat

SEQ ID NO: 133198 - DNA, 25 bp, Canis familiaris
gttatgccaaatgtgaccaaaggac

SEQ ID NO: 133199 - DNA, 25 bp, Canis familiaris
gttatcctttggctaccaaggacag

SEQ ID NO: 133200 - DNA, 25 bp, Canis familiaris
gttcttccttgggttccaatggacg

SEQ ID NO: 133201 - DNA, 25 bp, Canis familiaris
gttcttcctctgatgattccagtga

SEQ ID NO: 133202 - DNA, 25 bp, Canis familiaris
gttcttgccttgatctttcattaga

SEQ ID NO: 133203 - DNA, 25 bp, Canis familiaris
gttcttgatcttcttttcctggatc

SEQ ID NO: 133204 - DNA, 25 bp, Canis familiaris
gttcttatgcttattacttctgtat

SEQ ID NO: 133205 - DNA, 25 bp, Canis familiaris
gtatcttatttatattttgtttttg

SEQ ID NO: 133206 - DNA, 25 bp, Canis familiaris
gttcttaccaatattttgtatttgc

SEQ ID NO: 133207 - DNA, 25 bp, Canis familiaris
gttcagttaaatattgttgtaccat

SEQ ID NO: 133208 - DNA, 25 bp, Canis familiaris
gttcagatctagttacattcattgt

SEQ ID NO: 133209 - DNA, 25 bp, Canis familiaris
gttcagatgcatccttgatactttt

SEQ ID NO: 133210 - DNA, 25 bp, Canis familiaris
gttatgagtatgttgaagcttttcg

SEQ ID NO: 133211 - DNA, 25 bp, Canis familiaris
gtttgagtggacgcgcggtacgcat

SEQ ID NO: 133212 - DNA, 25 bp, Canis familiaris
gttatggtggttggcagggggcgca

SEQ ID NO: 133213 - DNA, 25 bp, Canis familiaris
gttagcttgttgagcagggacttgc

SEQ ID NO: 133214 - DNA, 25 bp, Canis familiaris
gttcacattgttgtcatgggactgt

SEQ ID NO: 133215 - DNA, 25 bp, Canis familiaris
gttcattactttccagaagcctgat

SEQ ID NO: 133216 - DNA, 25 bp, Canis familiaris
gttcattactcaattctgtttctat

SEQ ID NO: 133217 - DNA, 25 bp, Canis familiaris
gttcattcctaattttgtatctgac

SEQ ID NO: 133218 - DNA, 25 bp, Canis familiaris
gttcatattatatttattgtcttcc

SEQ ID NO: 133219 - DNA, 25 bp, Canis familiaris
gtactggtaacatttgtctttcttg

SEQ ID NO: 133220 - DNA, 25 bp, Canis familiaris
gttcatgtgttaagtgttatagcaa

SEQ ID NO: 133221 - DNA, 25 bp, Canis familiaris
gttcacgatattaattgctagccaa

SEQ ID NO: 133222 - DNA, 25 bp, Canis familiaris
gttcatcgataatgttctgcaccag

SEQ ID NO: 133223 - DNA, 25 bp, Canis familiaris
gttcattgtctaggctgttgccctc

SEQ ID NO: 133224 - DNA, 25 bp, Canis familiaris
gttcaggaatagccaggtccatctc

SEQ ID NO: 133225 - DNA, 25 bp, Canis familiaris
gttcagacttgagcacaaccatctc

SEQ ID NO: 133226 - DNA, 25 bp, Canis familiaris
gttcaacttgaaaatggtcatttct

SEQ ID NO: 133227 - DNA, 25 bp, Canis familiaris
gttcagtcgttttattctcatactt

SEQ ID NO: 133228 - DNA, 25 bp, Canis familiaris
gttcttgtgttttgtttctcatcct

SEQ ID NO: 133229 - DNA, 25 bp, Canis familiaris
gttcttgtttttaagtttgcactcg

SEQ ID NO: 133230 - DNA, 25 bp, Canis familiaris
gtatggtttattctgaggttcctaa

SEQ ID NO: 133231 - DNA, 25 bp, Canis familiaris
gttagttaattctgatgggtcatga

SEQ ID NO: 133232 - DNA, 25 bp, Canis familiaris
gttaatataaactcatggtcctgcg

SEQ ID NO: 133233 - DNA, 25 bp, Canis familiaris
gttaattaaatcctcagactggtgc

SEQ ID NO: 133234 - DNA, 25 bp, Canis familiaris
gttacacctaatggccaactgtaat

SEQ ID NO: 133235 - DNA, 25 bp, Canis familiaris
gttaatccatattggcagaacgaaa

SEQ ID NO: 133236 - DNA, 25 bp, Canis familiaris
gttaatccatattggcagaacgaaa

SEQ ID NO: 133237 - DNA, 25 bp, Canis familiaris
gttcacaccaacttgcgcaaaaaca

SEQ ID NO: 133238 - DNA, 25 bp, Canis familiaris
gttcaaagcaactgcccaaagaaaa

SEQ ID NO: 133239 - DNA, 25 bp, Canis familiaris
gtctcaacaaacggaacaacggata

SEQ ID NO: 133240 - DNA, 25 bp, Canis familiaris
gttcaaccaccaggaaacaggttat

SEQ ID NO: 133241 - DNA, 25 bp, Canis familiaris
gttaaataggggcaacagctctaat

SEQ ID NO: 133242 - DNA, 25 bp, Canis familiaris
gttaatgtgggctgagaaaggctca

SEQ ID NO: 133243 - DNA, 25 bp, Canis familiaris
gttagggtggcagagcccggtaatt

SEQ ID NO: 133244 - DNA, 25 bp, Canis familiaris
gttcttgagactgtgttctcatgaa

SEQ ID NO: 133245 - DNA, 25 bp, Canis familiaris
gttcaagcagaggttctatccaaga

SEQ ID NO: 133246 - DNA, 25 bp, Canis familiaris
gttcatatgtgtgtgtccagctaaa

SEQ ID NO: 133247 - DNA, 25 bp, Canis familiaris
gttagtggtggcttctcagagtata

SEQ ID NO: 133248 - DNA, 25 bp, Canis familiaris
gttcactgcatggttcctctagata

SEQ ID NO: 133249 - DNA, 25 bp, Canis familiaris
gttcatacagcgttctctctgtgta

SEQ ID NO: 133250 - DNA, 25 bp, Canis familiaris
gttaagcatcagactctttggtaaa

SEQ ID NO: 133251 - DNA, 25 bp, Canis familiaris
gttagcacatagccttaatggtacc

SEQ ID NO: 133252 - DNA, 25 bp, Canis familiaris
gttagcaccgcactgtagatctgaa

SEQ ID NO: 133253 - DNA, 25 bp, Canis familiaris
gttaccttcctgacagctctggaaa

SEQ ID NO: 133254 - DNA, 25 bp, Canis familiaris
gttacagctgttaagccctgagata

SEQ ID NO: 133255 - DNA, 25 bp, Canis familiaris
gttagccgttcatgccgtgaagatt

SEQ ID NO: 133256 - DNA, 25 bp, Canis familiaris
gttagggagtcaggacctgaacttt

SEQ ID NO: 133257 - DNA, 25 bp, Canis familiaris
gtggaggtggttgtcccaaattttg

SEQ ID NO: 133258 - DNA, 25 bp, Canis familiaris
gttagcctgtttgtaccaacttttg

SEQ ID NO: 133259 - DNA, 25 bp, Canis familiaris
gttaccttgtagataattattttcg

SEQ ID NO: 133260 - DNA, 25 bp, Canis familiaris
gttagtattgtacaacttctttaca

SEQ ID NO: 133261 - DNA, 25 bp, Canis familiaris
gttttagtggatcagatttttaaat

SEQ ID NO: 133262 - DNA, 25 bp, Canis familiaris
gttactatctggagactattttaag

SEQ ID NO: 133263 - DNA, 25 bp, Canis familiaris
gttactttggcacatttccttaggg

SEQ ID NO: 133264 - DNA, 25 bp, Canis familiaris
gttactttacatgttcccttaagca

SEQ ID NO: 133265 - DNA, 25 bp, Canis familiaris
gttagcgttaatgtacccatgtaga

SEQ ID NO: 133266 - DNA, 25 bp, Canis familiaris
gtttggttactgtttgaccttggag

SEQ ID NO: 133267 - DNA, 25 bp, Canis familiaris
gttactttatctctctgagccagtg

SEQ ID NO: 133268 - DNA, 25 bp, Canis familiaris
gttactttaattttgatgtagactg

SEQ ID NO: 133269 - DNA, 25 bp, Canis familiaris
gttcattttagaattgccttagtgg

SEQ ID NO: 133270 - DNA, 25 bp, Canis familiaris
gttcattgtctcgattttcttgatg

SEQ ID NO: 133271 - DNA, 25 bp, Canis familiaris
gttagttttattcttgctgggaagg

SEQ ID NO: 133272 - DNA, 25 bp, Canis familiaris
gttcattttgctacccatttgggaa

SEQ ID NO: 133273 - DNA, 25 bp, Canis familiaris
gttattttccctggcgttgtgaaag

SEQ ID NO: 133274 - DNA, 25 bp, Canis familiaris
gttcattcttccagctggttgtgat

SEQ ID NO: 133275 - DNA, 25 bp, Canis familiaris
gttcatgctcttcacagggagtaga

SEQ ID NO: 133276 - DNA, 25 bp, Canis familiaris
gttcatgtggatcatcaggaaaagg

SEQ ID NO: 133277 - DNA, 25 bp, Canis familiaris
gttcatgtctgtcctcagggaaacc

SEQ ID NO: 133278 - DNA, 25 bp, Canis familiaris
gttagactgcctgcctgaaagcaca

SEQ ID NO: 133279 - DNA, 25 bp, Canis familiaris
gttatgatctcctgcctggagcagc

SEQ ID NO: 133280 - DNA, 25 bp, Canis familiaris
gttttcccaacctgagacctaacag

SEQ ID NO: 133281 - DNA, 25 bp, Canis familiaris
gttcattgccatcatctacggcaac

SEQ ID NO: 133282 - DNA, 25 bp, Canis familiaris
gttcaggtcattaccaagtgcatct

SEQ ID NO: 133283 - DNA, 25 bp, Canis familiaris
gtataggttctagatatgctgtttc

SEQ ID NO: 133284 - DNA, 25 bp, Canis familiaris
gttaggtgtgtgacgtatctgggat

SEQ ID NO: 133285 - DNA, 25 bp, Canis familiaris
gttaggttaggccctcttggatact

SEQ ID NO: 133286 - DNA, 25 bp, Canis familiaris
gttagagttacggccactgtgttgt

SEQ ID NO: 133287 - DNA, 25 bp, Canis familiaris
gttaacttgattgactcattgtttg

SEQ ID NO: 133288 - DNA, 25 bp, Canis familiaris
gttaatctaaaattctcttgcttct

SEQ ID NO: 133289 - DNA, 25 bp, Canis familiaris
gttcaacaagcatatgactcctctt

SEQ ID NO: 133290 - DNA, 25 bp, Canis familiaris
gttcactcagtagagtccactctgg

SEQ ID NO: 133291 - DNA, 25 bp, Canis familiaris
gttactcagtacctttcctaggaga

SEQ ID NO: 133292 - DNA, 25 bp, Canis familiaris
gttaatcaattgctgtgtcctcggt

SEQ ID NO: 133293 - DNA, 25 bp, Canis familiaris
gttataaccgtgatgtccttgctgt

SEQ ID NO: 133294 - DNA, 25 bp, Canis familiaris
gttaaccctttcctgcacaatggaa

SEQ ID NO: 133295 - DNA, 25 bp, Canis familiaris
gttttctcgccttgccgcaagaaga

SEQ ID NO: 133296 - DNA, 25 bp, Canis familiaris
gttatactcgcagatcccaagagga

SEQ ID NO: 133297 - DNA, 25 bp, Canis familiaris
gttaactcagacctccctgaatgga

SEQ ID NO: 133298 - DNA, 25 bp, Canis familiaris
gttaatctagaattctccgtatcaa

SEQ ID NO: 133299 - DNA, 25 bp, Canis familiaris
gttagattaggttttgacgatcaac

SEQ ID NO: 133300 - DNA, 25 bp, Canis familiaris
gttcatgttagcctgtttgtaccaa

SEQ ID NO: 133301 - DNA, 25 bp, Canis familiaris
gttcagctcagagctctgtttaccc

SEQ ID NO: 133302 - DNA, 25 bp, Canis familiaris
gttagctgcaagtctttggctgcca

SEQ ID NO: 133303 - DNA, 25 bp, Canis familiaris
gttactgaagagcttcactccctta

SEQ ID NO: 133304 - DNA, 25 bp, Canis familiaris
gttcacttttgctattacactttta

SEQ ID NO: 133305 - DNA, 25 bp, Canis familiaris
gttagttattattaaccttctgtat

SEQ ID NO: 133306 - DNA, 25 bp, Canis familiaris
gttactattctcaacaatcacctca

SEQ ID NO: 133307 - DNA, 25 bp, Canis familiaris
gttactatctgctaagagcattcca

SEQ ID NO: 133308 - DNA, 25 bp, Canis familiaris
gttcatcttcaatagatctctccat

SEQ ID NO: 133309 - DNA, 25 bp, Canis familiaris
gttcatgtactttgagttccctcag

SEQ ID NO: 133310 - DNA, 25 bp, Canis familiaris
gtgacggccttagatctctcgccgc

SEQ ID NO: 133311 - DNA, 25 bp, Canis familiaris
gtacgtgccctggaactttcacgaa

SEQ ID NO: 133312 - DNA, 25 bp, Canis familiaris
gttaatgcacctgtggtttcacgat

SEQ ID NO: 133313 - DNA, 25 bp, Canis familiaris
gttagtcacggtgggtcttcgttgt

SEQ ID NO: 133314 - DNA, 25 bp, Canis familiaris
gttagtgtcgtgttgttcttcgttc

SEQ ID NO: 133315 - DNA, 25 bp, Canis familiaris
gttcaaatgctttttgttctatttt

SEQ ID NO: 133316 - DNA, 25 bp, Canis familiaris
gttcatgaggccattctttgtttta

SEQ ID NO: 133317 - DNA, 25 bp, Canis familiaris
gttcatgaagacacattgctttttg

SEQ ID NO: 133318 - DNA, 25 bp, Canis familiaris
gttcatcatcaaaaattggtgttct

SEQ ID NO: 133319 - DNA, 25 bp, Canis familiaris
gttcatcgttcaaattgtggtcatc

SEQ ID NO: 133320 - DNA, 25 bp, Canis familiaris
gttcatcctgtatatatgtgtgcgt

SEQ ID NO: 133321 - DNA, 25 bp, Canis familiaris
gttcaccatgtgtttgtttgcagtc

SEQ ID NO: 133322 - DNA, 25 bp, Canis familiaris
gttcagcctgtattatcttattatt

SEQ ID NO: 133323 - DNA, 25 bp, Canis familiaris
gttagccataaccacatttttttag

SEQ ID NO: 133324 - DNA, 25 bp, Canis familiaris
gttactatctacagctgtattcctt

SEQ ID NO: 133325 - DNA, 25 bp, Canis familiaris
gttcaccatctggctgggctatatc

SEQ ID NO: 133326 - DNA, 25 bp, Canis familiaris
gttacacatctcagggtttctacag

SEQ ID NO: 133327 - DNA, 25 bp, Canis familiaris
gttaccactgcgtgtgcttttcaaa

SEQ ID NO: 133328 - DNA, 25 bp, Canis familiaris
gttcactcacttaggtcttcattaa

SEQ ID NO: 133329 - DNA, 25 bp, Canis familiaris
gttcacaaccttgactgtgcttgta

SEQ ID NO: 133330 - DNA, 25 bp, Canis familiaris
gttaactctgttgatgctggcttta

SEQ ID NO: 133331 - DNA, 25 bp, Canis familiaris
gttcacagactgactttgggtttga

SEQ ID NO: 133332 - DNA, 25 bp, Canis familiaris
gttacaaggactttcaggcctcgtg

SEQ ID NO: 133333 - DNA, 25 bp, Canis familiaris
gttacgggactttcatccgtctgac

SEQ ID NO: 133334 - DNA, 25 bp, Canis familiaris
gtttcgacgactgacaatccttacg

SEQ ID NO: 133335 - DNA, 25 bp, Canis familiaris
ggtttacagtcctcgatactattcg

SEQ ID NO: 133336 - DNA, 25 bp, Canis familiaris
gttttaggtcccaacagactattct

SEQ ID NO: 133337 - DNA, 25 bp, Canis familiaris
gttttcggaactgaggccatgatta

SEQ ID NO: 133338 - DNA, 25 bp, Canis familiaris
gtttctgcaggaacgctactgcctg

SEQ ID NO: 133339 - DNA, 25 bp, Canis familiaris
gttagatcaaatcccaactgccttg

SEQ ID NO: 133340 - DNA, 25 bp, Canis familiaris
gttcacatacacacctacatgcatt

SEQ ID NO: 133341 - DNA, 25 bp, Canis familiaris
gttcacataaacgtgtcacagcaca

SEQ ID NO: 133342 - DNA, 25 bp, Canis familiaris
gttacaggctaggctgtgatacaca

SEQ ID NO: 133343 - DNA, 25 bp, Canis familiaris
gttactggtctccatgtgaacacga

SEQ ID NO: 133344 - DNA, 25 bp, Canis familiaris
gttcacatttgtagattaagctgga

SEQ ID NO: 133345 - DNA, 25 bp, Canis familiaris
gttactgctatttcatgcataaatg

SEQ ID NO: 133346 - DNA, 25 bp, Canis familiaris
gttcactgtatttagcagacataac

SEQ ID NO: 133347 - DNA, 25 bp, Canis familiaris
gttcacatgctgtctgtacatttaa

SEQ ID NO: 133348 - DNA, 25 bp, Canis familiaris
gttcacatctgtggtatgtttacat

SEQ ID NO: 133349 - DNA, 25 bp, Canis familiaris
gttcacttgcttatgctgtttatac

SEQ ID NO: 133350 - DNA, 25 bp, Canis familiaris
gttcaattgtatttcccttgttact

SEQ ID NO: 133351 - DNA, 25 bp, Canis familiaris
gttacttgtacgatctgcttttgac

SEQ ID NO: 133352 - DNA, 25 bp, Canis familiaris
gttactgtgctagaaatgtgggatg

SEQ ID NO: 133353 - DNA, 25 bp, Canis familiaris
gttatctataacgaacagagctgtg

SEQ ID NO: 133354 - DNA, 25 bp, Canis familiaris
gttatctgaaatgaagctctgtcgc

SEQ ID NO: 133355 - DNA, 25 bp, Canis familiaris
gttcactgaaataccagcccactga

SEQ ID NO: 133356 - DNA, 25 bp, Canis familiaris
gttactatagcatccagtcaactgt

SEQ ID NO: 133357 - DNA, 25 bp, Canis familiaris
gttagctcacagggcaagtcagtta

SEQ ID NO: 133358 - DNA, 25 bp, Canis familiaris
gttactccagcagattgtcctgtca

SEQ ID NO: 133359 - DNA, 25 bp, Canis familiaris
gttaccgcagctttacacctgcgaa

SEQ ID NO: 133360 - DNA, 25 bp, Canis familiaris
gttcacttggctttaatctaagcac

SEQ ID NO: 133361 - DNA, 25 bp, Canis familiaris
gttactatatgttaaatgctaagca

SEQ ID NO: 133362 - DNA, 25 bp, Canis familiaris
gttacctatttccaagctgtgagct

SEQ ID NO: 133363 - DNA, 25 bp, Canis familiaris
gttaacttatctccaaagtggctga

SEQ ID NO: 133364 - DNA, 25 bp, Canis familiaris
gttaattctgtcttcagtaggccta

SEQ ID NO: 133365 - DNA, 25 bp, Canis familiaris
gttaaactgtcagtcgaacaagtca

SEQ ID NO: 133366 - DNA, 25 bp, Canis familiaris
gttaccctgctgatctggcagaagt

SEQ ID NO: 133367 - DNA, 25 bp, Canis familiaris
gttagccttggtttgcacagagtgg

SEQ ID NO: 133368 - DNA, 25 bp, Canis familiaris
gttactgcctacatggcgacagggg

SEQ ID NO: 133369 - DNA, 25 bp, Canis familiaris
gttagcagcacgtcgttcgactggg

SEQ ID NO: 133370 - DNA, 25 bp, Canis familiaris
gttaagccagagtatttatctgcag

SEQ ID NO: 133371 - DNA, 25 bp, Canis familiaris
gttcacactacggcatgtcgtctac

SEQ ID NO: 133372 - DNA, 25 bp, Canis familiaris
gttcaccaacacggtggttgaccgt

SEQ ID NO: 133373 - DNA, 25 bp, Canis familiaris
gttacgcaccttggctgagttaagc

SEQ ID NO: 133374 - DNA, 25 bp, Canis familiaris
gttttgagccctggttgtacaagac

SEQ ID NO: 133375 - DNA, 25 bp, Canis familiaris
gtatttatactctggtgcaactaac

SEQ ID NO: 133376 - DNA, 25 bp, Canis familiaris
gttaatatatccaggtgctcaccaa

SEQ ID NO: 133377 - DNA, 25 bp, Canis familiaris
gttaactacaactgctttcaaacag

SEQ ID NO: 133378 - DNA, 25 bp, Canis familiaris
gtttacccaacacaattctaatctc

SEQ ID NO: 133379 - DNA, 25 bp, Canis familiaris
gttttcccagtcccagattgggctt

SEQ ID NO: 133380 - DNA, 25 bp, Canis familiaris
gtttcccgtatggtcacacatgggt

SEQ ID NO: 133381 - DNA, 25 bp, Canis familiaris
gttacttgggtggctcaactggtta

SEQ ID NO: 133382 - DNA, 25 bp, Canis familiaris
gttaagttggtggctcagggatgct

SEQ ID NO: 133383 - DNA, 25 bp, Canis familiaris
gttcacgtgatgctccgagtgtgtg

SEQ ID NO: 133384 - DNA, 25 bp, Canis familiaris
gttatcaggcagctccatagttgct

SEQ ID NO: 133385 - DNA, 25 bp, Canis familiaris
gttacaatgcaagacttgttgccaa

SEQ ID NO: 133386 - DNA, 25 bp, Canis familiaris
gttaccctgatagttctttgcacaa

SEQ ID NO: 133387 - DNA, 25 bp, Canis familiaris
gttaccactgatttatctcgacgat

SEQ ID NO: 133388 - DNA, 25 bp, Canis familiaris
gttcacgaggagctattgccaagag

SEQ ID NO: 133389 - DNA, 25 bp, Canis familiaris
gttatcgacggtagagtccaagagt

SEQ ID NO: 133390 - DNA, 25 bp, Canis familiaris
gttatgccctagctgagtcggatag

SEQ ID NO: 133391 - DNA, 25 bp, Canis familiaris
gttatgccccagattgtaggatgaa

SEQ ID NO: 133392 - DNA, 25 bp, Canis familiaris
gttacctcaaggagccatggcatga

SEQ ID NO: 133393 - DNA, 25 bp, Canis familiaris
gttacctcagcagaagactagaatt

SEQ ID NO: 133394 - DNA, 25 bp, Canis familiaris
gttacctcacacggaacaggaacct

SEQ ID NO: 133395 - DNA, 25 bp, Canis familiaris
gttacccatagtacaaccagaacct

SEQ ID NO: 133396 - DNA, 25 bp, Canis familiaris
gttaccttatgaatttgccaagacc

SEQ ID NO: 133397 - DNA, 25 bp, Canis familiaris
gtttcctaatacaagcccaagacac

SEQ ID NO: 133398 - DNA, 25 bp, Canis familiaris
gtttcctataagaaccacgggcttg

SEQ ID NO: 133399 - DNA, 25 bp, Canis familiaris
gttaatcttaaaaccagttcacttg

SEQ ID NO: 133400 - DNA, 25 bp, Canis familiaris
gttaatcaaattactcccttccttg

SEQ ID NO: 133401 - DNA, 25 bp, Canis familiaris
gttaaaatcttcaatggccttccgg

SEQ ID NO: 133402 - DNA, 25 bp, Canis familiaris
gttaggaccttttgagactccagcg

SEQ ID NO: 133403 - DNA, 25 bp, Canis familiaris
gttacagaactgctttgacaaccag

SEQ ID NO: 133404 - DNA, 25 bp, Canis familiaris
gttacgcaatcaatgtttactcaaa

SEQ ID NO: 133405 - DNA, 25 bp, Canis familiaris
gttacccactctctgaagacaagct

SEQ ID NO: 133406 - DNA, 25 bp, Canis familiaris
ggtaccgacttcaggaatcaccagc

SEQ ID NO: 133407 - DNA, 25 bp, Canis familiaris
gttacccatctatttgcgaaccgag

SEQ ID NO: 133408 - DNA, 25 bp, Canis familiaris
gttagccttttactgctgacaacag

SEQ ID NO: 133409 - DNA, 25 bp, Canis familiaris
gttagccctttactgctgacaacag

SEQ ID NO: 133410 - DNA, 25 bp, Canis familiaris
gttagcccttaaccaagcatacatg

SEQ ID NO: 133411 - DNA, 25 bp, Canis familiaris
gttcagcctggctcggcaagtagat

SEQ ID NO: 133412 - DNA, 25 bp, Canis familiaris
gttatcgatgtacctagaagtatgt

SEQ ID NO: 133413 - DNA, 25 bp, Canis familiaris
gttatccgtatctatcaagatggtg

SEQ ID NO: 133414 - DNA, 25 bp, Canis familiaris
gttatctctaatctcaaagaggata

SEQ ID NO: 133415 - DNA, 25 bp, Canis familiaris
gttatcctgcttcctcaacaagaaa

SEQ ID NO: 133416 - DNA, 25 bp, Canis familiaris
gttaactgcattccaaccactaata

SEQ ID NO: 133417 - DNA, 25 bp, Canis familiaris
gttaatctgctgtgcaatttcttaa

SEQ ID NO: 133418 - DNA, 25 bp, Canis familiaris
gttcaacacagggatcttctcttac

SEQ ID NO: 133419 - DNA, 25 bp, Canis familiaris
gttcaaattgtggtcatcttttcac

SEQ ID NO: 133420 - DNA, 25 bp, Canis familiaris
gttaaatcttgagctctgtttgacc

SEQ ID NO: 133421 - DNA, 25 bp, Canis familiaris
gttaaagcttgcctgtcttagtgac

SEQ ID NO: 133422 - DNA, 25 bp, Canis familiaris
gttacaagactggttttatgatgac

SEQ ID NO: 133423 - DNA, 25 bp, Canis familiaris
gttaacagatgtcctttatttgtac

SEQ ID NO: 133424 - DNA, 25 bp, Canis familiaris
gttacacggaccaatgagattttca

SEQ ID NO: 133425 - DNA, 25 bp, Canis familiaris
gttaacctgacaagcatactttgaa

SEQ ID NO: 133426 - DNA, 25 bp, Canis familiaris
gtttaggcagactgtccttctgtgg

SEQ ID NO: 133427 - DNA, 25 bp, Canis familiaris
gtagataacggctccggtatgtgca

SEQ ID NO: 133428 - DNA, 25 bp, Canis familiaris
gttataggaggctatccagtggaga

SEQ ID NO: 133429 - DNA, 25 bp, Canis familiaris
gtttggtgttgattcgagcgggaag

SEQ ID NO: 133430 - DNA, 25 bp, Canis familiaris
gtttgggggactggcacagggtaag

SEQ ID NO: 133431 - DNA, 25 bp, Canis familiaris
tctttgggaaacgcaggactgggag

SEQ ID NO: 133432 - DNA, 25 bp, Canis familiaris
gtttgcgaagaagacggagtgcggg

SEQ ID NO: 133433 - DNA, 25 bp, Canis familiaris
gtttgcggagggcaggggtgcgagc

SEQ ID NO: 133434 - DNA, 25 bp, Canis familiaris
gtttgcctgacgggattgtggttag

SEQ ID NO: 133435 - DNA, 25 bp, Canis familiaris
gttagcctgggaggtctgtgatgtg

SEQ ID NO: 133436 - DNA, 25 bp, Canis familiaris
gttcactcgggagcccttgatgact

SEQ ID NO: 133437 - DNA, 25 bp, Canis familiaris
gttcacacgcagagcccttaatgaa

SEQ ID NO: 133438 - DNA, 25 bp, Canis familiaris
gttcaatcgaacactttagcagaaa

SEQ ID NO: 133439 - DNA, 25 bp, Canis familiaris
gttcaattataatctccaaggagaa

SEQ ID NO: 133440 - DNA, 25 bp, Canis familiaris
gttcacagtaaggccttcacaagga

SEQ ID NO: 133441 - DNA, 25 bp, Canis familiaris
gttcacatgctactaccattcacac

SEQ ID NO: 133442 - DNA, 25 bp, Canis familiaris
gttcaactacatctgcaaccacatc

SEQ ID NO: 133443 - DNA, 25 bp, Canis familiaris
gttaacgcactcatgacattcattc

SEQ ID NO: 133444 - DNA, 25 bp, Canis familiaris
gttaatcgcctcaggatatctcttt

SEQ ID NO: 133445 - DNA, 25 bp, Canis familiaris
gttacacctgccacgtatttgtgaa

SEQ ID NO: 133446 - DNA, 25 bp, Canis familiaris
gttagcacacggaacacttcattgt

SEQ ID NO: 133447 - DNA, 25 bp, Canis familiaris
gttagcccggatttcattagtgtgt

SEQ ID NO: 133448 - DNA, 25 bp, Canis familiaris
gttacccgatgtctgctattcgtgg

SEQ ID NO: 133449 - DNA, 25 bp, Canis familiaris
gttacccatggtttgatttagccga

SEQ ID NO: 133450 - DNA, 25 bp, Canis familiaris
gttaccctgactttgagtgtcccaa

SEQ ID NO: 133451 - DNA, 25 bp, Canis familiaris
gtttcctcggtggtggtgaatccaa

SEQ ID NO: 133452 - DNA, 25 bp, Canis familiaris
gtttcttgggagggctgtttctaat

SEQ ID NO: 133453 - DNA, 25 bp, Canis familiaris
gttagttggtagagtgttatgtata

SEQ ID NO: 133454 - DNA, 25 bp, Canis familiaris
gttaaatgtaaatgcgtagatggaa

SEQ ID NO: 133455 - DNA, 25 bp, Canis familiaris
gttaatattaaccacaatcgacgat

SEQ ID NO: 133456 - DNA, 25 bp, Canis familiaris
gtaaatattacctgacctgaagttt

SEQ ID NO: 133457 - DNA, 25 bp, Canis familiaris
gttaatattcaacctgagcaaaatt

SEQ ID NO: 133458 - DNA, 25 bp, Canis familiaris
gttaatattcacctgagccaaattt

SEQ ID NO: 133459 - DNA, 25 bp, Canis familiaris
gttaatttcccatcgcacaaatatg

SEQ ID NO: 133460 - DNA, 25 bp, Canis familiaris
gttaaatcccctctaagtattacag

SEQ ID NO: 133461 - DNA, 25 bp, Canis familiaris
gttaattccttgtctgtaactttag

SEQ ID NO: 133462 - DNA, 25 bp, Canis familiaris
gttcaagccctcattgtgatacttt

SEQ ID NO: 133463 - DNA, 25 bp, Canis familiaris
gttaacagctctattggatcctggg

SEQ ID NO: 133464 - DNA, 25 bp, Canis familiaris
gttaagcatctggttcttgatactg

SEQ ID NO: 133465 - DNA, 25 bp, Canis familiaris
gttaatgcaccgaacatggattatg

SEQ ID NO: 133466 - DNA, 25 bp, Canis familiaris
gttaagcaccaggcacagtttgacc

SEQ ID NO: 133467 - DNA, 25 bp, Canis familiaris
gttaactgccagtccattatttccc

SEQ ID NO: 133468 - DNA, 25 bp, Canis familiaris
gttcaatgctgcttggtataatttc

SEQ ID NO: 133469 - DNA, 25 bp, Canis familiaris
gttcacttcattattgtatttgcca

SEQ ID NO: 133470 - DNA, 25 bp, Canis familiaris
gttagctgtgctttggttttggcca

SEQ ID NO: 133471 - DNA, 25 bp, Canis familiaris
gttagtggctactgtactggacctt

SEQ ID NO: 133472 - DNA, 25 bp, Canis familiaris
gttagttccatggcgctccatggta

SEQ ID NO: 133473 - DNA, 25 bp, Canis familiaris
gttagattctcagctcggaggtaat

SEQ ID NO: 133474 - DNA, 25 bp, Canis familiaris
gttaatgtctagcccagagtttagt

SEQ ID NO: 133475 - DNA, 25 bp, Canis familiaris
gttagtacatacacaattttgagtt

SEQ ID NO: 133476 - DNA, 25 bp, Canis familiaris
gttaatgtattctcctattctagtt

SEQ ID NO: 133477 - DNA, 25 bp, Canis familiaris
gttatagtaacttgcctaccgatat

SEQ ID NO: 133478 - DNA, 25 bp, Canis familiaris
gttataggcacactggcctccatgc

SEQ ID NO: 133479 - DNA, 25 bp, Canis familiaris
gttttgcgcatgacagcgtcaccag

SEQ ID NO: 133480 - DNA, 25 bp, Canis familiaris
gtttggcagaatggcatgtcccggc

SEQ ID NO: 133481 - DNA, 25 bp, Canis familiaris
gtttgaagcgtgcatgctactcacc

SEQ ID NO: 133482 - DNA, 25 bp, Canis familiaris
gtttaacgtgcttgatacagcgact

SEQ ID NO: 133483 - DNA, 25 bp, Canis familiaris
gttaatacagacatgacacagggca

SEQ ID NO: 133484 - DNA, 25 bp, Canis familiaris
gttaataaacaagccattgcagcgg

SEQ ID NO: 133485 - DNA, 25 bp, Canis familiaris
gttacagataaaagtgccaatgaag

SEQ ID NO: 133486 - DNA, 25 bp, Canis familiaris
gttacatatctacattcagcaagaa

SEQ ID NO: 133487 - DNA, 25 bp, Canis familiaris
gttagccatctacattgtgtgacta

SEQ ID NO: 133488 - DNA, 25 bp, Canis familiaris
gttagcctatgaaatatattgtcct

SEQ ID NO: 133489 - DNA, 25 bp, Canis familiaris
gttatgaaattaatatttgctgtct

SEQ ID NO: 133490 - DNA, 25 bp, Canis familiaris
gtttagagggtatattctgtcgttt

SEQ ID NO: 133491 - DNA, 25 bp, Canis familiaris
gtttagagggatttttgtctccttg

SEQ ID NO: 133492 - DNA, 25 bp, Canis familiaris
gttaaatgggctttttctctctata

SEQ ID NO: 133493 - DNA, 25 bp, Canis familiaris
gttaatgatgtcctcccattttctt

SEQ ID NO: 133494 - DNA, 25 bp, Canis familiaris
gttaactgtgtcatcaacttatcct

SEQ ID NO: 133495 - DNA, 25 bp, Canis familiaris
gttagaattggtacaacttgtctta

SEQ ID NO: 133496 - DNA, 25 bp, Canis familiaris
gttaaactgcctaaaatgtgatttg

SEQ ID NO: 133497 - DNA, 25 bp, Canis familiaris
gttacacccttaacacttgatgttt

SEQ ID NO: 133498 - DNA, 25 bp, Canis familiaris
gttaaccctaattacttgcttgaag

SEQ ID NO: 133499 - DNA, 25 bp, Canis familiaris
gttaattcactcttcctttgtagaa

SEQ ID NO: 133500 - DNA, 25 bp, Canis familiaris
gttaatacctgtgccattcttagta

SEQ ID NO: 133501 - DNA, 25 bp, Canis familiaris
gttaatacctgtgcctttgatttgt

SEQ ID NO: 133502 - DNA, 25 bp, Canis familiaris
gttaaaaatgtgcgctgttttgtcc

SEQ ID NO: 133503 - DNA, 25 bp, Canis familiaris
gtttaaatgtggccttttctgtgtc

SEQ ID NO: 133504 - DNA, 25 bp, Canis familiaris
gttaaaatggtgtcttcctcgcttc

SEQ ID NO: 133505 - DNA, 25 bp, Canis familiaris
gtttaaagcgatcattccctttgcc

SEQ ID NO: 133506 - DNA, 25 bp, Canis familiaris
gtttctgaacgtgttgccgtcacgc

SEQ ID NO: 133507 - DNA, 25 bp, Canis familiaris
gttatccaacagggtagccactagc

SEQ ID NO: 133508 - DNA, 25 bp, Canis familiaris
gttaccaaagtgcctgacacattcc

SEQ ID NO: 133509 - DNA, 25 bp, Canis familiaris
gttaatacaatgttctaagcttctt

SEQ ID NO: 133510 - DNA, 25 bp, Canis familiaris
gttaacacactaccgaatgtgtctt

SEQ ID NO: 133511 - DNA, 25 bp, Canis familiaris
gttaacaacaaccgagaggctgctc

SEQ ID NO: 133512 - DNA, 25 bp, Canis familiaris
gttaccaacaacttgaaatctctgg

SEQ ID NO: 133513 - DNA, 25 bp, Canis familiaris
gttatccaaaaagatcacatatcga

SEQ ID NO: 133514 - DNA, 25 bp, Canis familiaris
gttaccgagacttttcactcacatg

SEQ ID NO: 133515 - DNA, 25 bp, Canis familiaris
gttacctgcaacgaaatgcccacag

SEQ ID NO: 133516 - DNA, 25 bp, Canis familiaris
gttacttctaaggaagctctgcaaa

SEQ ID NO: 133517 - DNA, 25 bp, Canis familiaris
gttattttaactcactgctcaagta

SEQ ID NO: 133518 - DNA, 25 bp, Canis familiaris
gttacatttcatttaaatctcaatt

SEQ ID NO: 133519 - DNA, 25 bp, Canis familiaris
gttaattttttatttctctcacagc

SEQ ID NO: 133520 - DNA, 25 bp, Canis familiaris
gttacttttgctctttgtataccag

SEQ ID NO: 133521 - DNA, 25 bp, Canis familiaris
gttactttcttacacgatttcacga

SEQ ID NO: 133522 - DNA, 25 bp, Canis familiaris
gttacttcatattgacccgtttaca

SEQ ID NO: 133523 - DNA, 25 bp, Canis familiaris
gttagatggctttgactccgtggga

SEQ ID NO: 133524 - DNA, 25 bp, Canis familiaris
gttacatcgtgttacaaccgtgtga

SEQ ID NO: 133525 - DNA, 25 bp, Canis familiaris
gttaatccgtatccaaccagatgtt

SEQ ID NO: 133526 - DNA, 25 bp, Canis familiaris
gttttccttggataacagtctatat

SEQ ID NO: 133527 - DNA, 25 bp, Canis familiaris
gttttccttggatagacagattata

SEQ ID NO: 133528 - DNA, 25 bp, Canis familiaris
gtttggggtgtttcagaacaatcaa

SEQ ID NO: 133529 - DNA, 25 bp, Canis familiaris
gtttgtcgacggaccaaccaacact

SEQ ID NO: 133530 - DNA, 25 bp, Canis familiaris
gtttgtcgacggaccaaccaacact

SEQ ID NO: 133531 - DNA, 25 bp, Canis familiaris
gtttgactacatgtccaaccaccac

SEQ ID NO: 133532 - DNA, 25 bp, Canis familiaris
gtttgtccaactatagagcccgacg

SEQ ID NO: 133533 - DNA, 25 bp, Canis familiaris
gtttatagcaaaatttagccacggg

SEQ ID NO: 133534 - DNA, 25 bp, Canis familiaris
gtttagcaccactttaagccgaggg

SEQ ID NO: 133535 - DNA, 25 bp, Canis familiaris
gtttcaagccaatgtcataaccatt

SEQ ID NO: 133536 - DNA, 25 bp, Canis familiaris
gtttaagataattgcgctacaatga

SEQ ID NO: 133537 - DNA, 25 bp, Canis familiaris
gttatacttcacgctgctgtcaaga

SEQ ID NO: 133538 - DNA, 25 bp, Canis familiaris
gttatagctgaatacctgtgcatga

SEQ ID NO: 133539 - DNA, 25 bp, Canis familiaris
gttacgtgaatctacacaaatgata

SEQ ID NO: 133540 - DNA, 25 bp, Canis familiaris
gttacgcagctatttcacaagtgga

SEQ ID NO: 133541 - DNA, 25 bp, Canis familiaris
gttacagctcattcttgaaatggga

SEQ ID NO: 133542 - DNA, 25 bp, Canis familiaris
gttacctatctttgaaaggcaatta

SEQ ID NO: 133543 - DNA, 25 bp, Canis familiaris
gttaaccattcttggggtgcctgga

SEQ ID NO: 133544 - DNA, 25 bp, Canis familiaris
gttaaccagtattgatggctgtggc

SEQ ID NO: 133545 - DNA, 25 bp, Canis familiaris
gttaggggctaatgcagctggtgac

SEQ ID NO: 133546 - DNA, 25 bp, Canis familiaris
gttaaggtcatatggcactgggtta

SEQ ID NO: 133547 - DNA, 25 bp, Canis familiaris
gttacaggtacataggggcagttgc

SEQ ID NO: 133548 - DNA, 25 bp, Canis familiaris
gttaccggatacagggtgcagtccc

SEQ ID NO: 133549 - DNA, 25 bp, Canis familiaris
gttaccaggcaagtttgggtcatac

SEQ ID NO: 133550 - DNA, 25 bp, Canis familiaris
gttaccaggtcagaatttgtgcatc

SEQ ID NO: 133551 - DNA, 25 bp, Canis familiaris
gttacaatggtagcatgtgattgag

SEQ ID NO: 133552 - DNA, 25 bp, Canis familiaris
gggctaaatccgcagcaaactgccg

SEQ ID NO: 133553 - DNA, 25 bp, Canis familiaris
cgcagcaaactgccgtgctggcagg

SEQ ID NO: 133554 - DNA, 25 bp, Canis familiaris
acagcaacgtcttgaacaggcgctg

SEQ ID NO: 133555 - DNA, 25 bp, Canis familiaris
cgtcttgaacaggcgctgatgaccc

SEQ ID NO: 133556 - DNA, 25 bp, Canis familiaris
acaggcgctgatgaccccggacacc

SEQ ID NO: 133557 - DNA, 25 bp, Canis familiaris
atattacaacgcggcagcattatga

SEQ ID NO: 133558 - DNA, 25 bp, Canis familiaris
cagcggcatttggtcgggcagccgc

SEQ ID NO: 133559 - DNA, 25 bp, Canis familiaris
gtcgggcagccgcacactatgagca

SEQ ID NO: 133560 - DNA, 25 bp, Canis familiaris
cgcacactatgagcaacatgcagat

SEQ ID NO: 133561 - DNA, 25 bp, Canis familiaris
aacatgcagatctacagcgccagag

SEQ ID NO: 133562 - DNA, 25 bp, Canis familiaris
tacagcgccagagtgctgacgcctt

SEQ ID NO: 133563 - DNA, 25 bp, Canis familiaris
gagtgctgacgccttactggcaatg

SEQ ID NO: 133564 - DNA, 25 bp, Canis familiaris
tactggcaatgcttccacagcgtaa

SEQ ID NO: 133565 - DNA, 25 bp, Canis familiaris
gggttgtggacctggctggatgagc

SEQ ID NO: 133566 - DNA, 25 bp, Canis familiaris
tgagccgccactggcgggaacgtca

SEQ ID NO: 133567 - DNA, 25 bp, Canis familiaris
gcgcaggtgacggccttagatctct

SEQ ID NO: 133568 - DNA, 25 bp, Canis familiaris
gccttagatctctcgccgccaatgc

SEQ ID NO: 133569 - DNA, 25 bp, Canis familiaris
gccgccaatgcttgttcaggcacgc

SEQ ID NO: 133570 - DNA, 25 bp, Canis familiaris
gttacccgatctgttgcatcagtgc

SEQ ID NO: 133571 - DNA, 25 bp, Canis familiaris
gttacttggactatagcaccagcct

SEQ ID NO: 133572 - DNA, 25 bp, Canis familiaris
gttacaggttcaattcctccaggtt

SEQ ID NO: 133573 - DNA, 25 bp, Canis familiaris
gttacggtatttcctccagagtata

SEQ ID NO: 133574 - DNA, 25 bp, Canis familiaris
gttacggttatccacatcgcaagga

SEQ ID NO: 133575 - DNA, 25 bp, Canis familiaris
gttaagaattcccactctaattagt

SEQ ID NO: 133576 - DNA, 25 bp, Canis familiaris
gttacaaattcacagtgcttcctag

SEQ ID NO: 133577 - DNA, 25 bp, Canis familiaris
gttaacacttattaggcttcttaga

SEQ ID NO: 133578 - DNA, 25 bp, Canis familiaris
gttacatccattgataaattttaga

SEQ ID NO: 133579 - DNA, 25 bp, Canis familiaris
gttaatccattagaactgtttcgtg

SEQ ID NO: 133580 - DNA, 25 bp, Canis familiaris
gttactccttactcactggttatgt

SEQ ID NO: 133581 - DNA, 25 bp, Canis familiaris
gttacccttgactacacttgattat

SEQ ID NO: 133582 - DNA, 25 bp, Canis familiaris
gttaccctgtcacatcatgcataga

SEQ ID NO: 133583 - DNA, 25 bp, Canis familiaris
gttaccgtacagctgacatgtattt

SEQ ID NO: 133584 - DNA, 25 bp, Canis familiaris
gttattcgtacgttgtatatatact

SEQ ID NO: 133585 - DNA, 25 bp, Canis familiaris
gttacgcgtagcgaattattctcct

SEQ ID NO: 133586 - DNA, 25 bp, Canis familiaris
gtttctggtcgcgagattaactatt

SEQ ID NO: 133587 - DNA, 25 bp, Canis familiaris
gttttggctgcgtcaggtatttgat

SEQ ID NO: 133588 - DNA, 25 bp, Canis familiaris
gttacgacgtactgtcttgtgatgt

SEQ ID NO: 133589 - DNA, 25 bp, Canis familiaris
gttaaacctgaatgtttgtgtgcta

SEQ ID NO: 133590 - DNA, 25 bp, Canis familiaris
gttaaacgcgttcgcttggtgctgc

SEQ ID NO: 133591 - DNA, 25 bp, Canis familiaris
gttaactgactttactgtggtgatc

SEQ ID NO: 133592 - DNA, 25 bp, Canis familiaris
gttacagctacggcccgatggtgtc

SEQ ID NO: 133593 - DNA, 25 bp, Canis familiaris
gttaaataatgccccgatcctgtgc

SEQ ID NO: 133594 - DNA, 25 bp, Canis familiaris
gttacggaatcggccatgatgttgg

SEQ ID NO: 133595 - DNA, 25 bp, Canis familiaris
gttacgtgcctggtccatgatgttc

SEQ ID NO: 133596 - DNA, 25 bp, Canis familiaris
gttagagtgactctctctgaggcct

SEQ ID NO: 133597 - DNA, 25 bp, Canis familiaris
gttacaggtgtttccagagaccata

SEQ ID NO: 133598 - DNA, 25 bp, Canis familiaris
gttacattttcattaagccccatca

SEQ ID NO: 133599 - DNA, 25 bp, Canis familiaris
gttacatttcactttagcataccta

SEQ ID NO: 133600 - DNA, 25 bp, Canis familiaris
gttatttccaacccagatactgaca

SEQ ID NO: 133601 - DNA, 25 bp, Canis familiaris
gttttatagagaggtaatcgcgaca

SEQ ID NO: 133602 - DNA, 25 bp, Canis familiaris
gttattgaagatgctcggcacccac

SEQ ID NO: 133603 - DNA, 25 bp, Canis familiaris
gttttaaatgaatgtcaccacacga

SEQ ID NO: 133604 - DNA, 25 bp, Canis familiaris
gttttcaaacactttaggcaacaat

SEQ ID NO: 133605 - DNA, 25 bp, Canis familiaris
gttttccaaactcagggagactctg

SEQ ID NO: 133606 - DNA, 25 bp, Canis familiaris
gttagtaaaacacatgggcgacttg

SEQ ID NO: 133607 - DNA, 25 bp, Canis familiaris
gttagtatttacttaccagcccttg

SEQ ID NO: 133608 - DNA, 25 bp, Canis familiaris
gttacttttgtaaaccactccattg

SEQ ID NO: 133609 - DNA, 25 bp, Canis familiaris
gttaccttattaaaatgaccaccat

SEQ ID NO: 133610 - DNA, 25 bp, Canis familiaris
gttaccttattatcgtgatacctac

SEQ ID NO: 133611 - DNA, 25 bp, Canis familiaris
gttatccttttatgacaaacaaaca

SEQ ID NO: 133612 - DNA, 25 bp, Canis familiaris
gtatttattttcagtcaaaccaaag

SEQ ID NO: 133613 - DNA, 25 bp, Canis familiaris
gtttcttcagttaagtccaaactat

SEQ ID NO: 133614 - DNA, 25 bp, Canis familiaris
gttttgaagttcagtcttacattga

SEQ ID NO: 133615 - DNA, 25 bp, Canis familiaris
gtttcaacagggtgctgctggcaat

SEQ ID NO: 133616 - DNA, 25 bp, Canis familiaris
gtgttcccgttgtccctggcacaga

SEQ ID NO: 133617 - DNA, 25 bp, Canis familiaris
gttttcaggttttccaggctcaatc

SEQ ID NO: 133618 - DNA, 25 bp, Canis familiaris
gttttatagctgttggggcccgatg

SEQ ID NO: 133619 - DNA, 25 bp, Canis familiaris
gttttgtactgatgtagccctgaga

SEQ ID NO: 133620 - DNA, 25 bp, Canis familiaris
gttttggccgggaagggcttgcttg

SEQ ID NO: 133621 - DNA, 25 bp, Canis familiaris
gtttcggcgagaggcgggagtttgg

SEQ ID NO: 133622 - DNA, 25 bp, Canis familiaris
gtatctcatgggcaaggagggggga

SEQ ID NO: 133623 - DNA, 25 bp, Canis familiaris
gttatctgggaaaggtggtgttgga

SEQ ID NO: 133624 - DNA, 25 bp, Canis familiaris
gttatgtgggaaactgctgctcgct

SEQ ID NO: 133625 - DNA, 25 bp, Canis familiaris
gttagatgtggctgttttgcgtagc

SEQ ID NO: 133626 - DNA, 25 bp, Canis familiaris
gttaaggactagactcttgctttag

SEQ ID NO: 133627 - DNA, 25 bp, Canis familiaris
gttaggtcacaatttttcagtctag

SEQ ID NO: 133628 - DNA, 25 bp, Canis familiaris
gttttgtaaaatgataagttctgaa

SEQ ID NO: 133629 - DNA, 25 bp, Canis familiaris
gttttacacaaagatacactttcaa

SEQ ID NO: 133630 - DNA, 25 bp, Canis familiaris
gttttcctaggagaggcccagtgct

SEQ ID NO: 133631 - DNA, 25 bp, Canis familiaris
gtttactttcaagatgaatccaggt

SEQ ID NO: 133632 - DNA, 25 bp, Canis familiaris
gtttgactttccagtagcttgaggg

SEQ ID NO: 133633 - DNA, 25 bp, Canis familiaris
gtttattatcccaggaggaggccct

SEQ ID NO: 133634 - DNA, 25 bp, Canis familiaris
gttatttacccattactgtgaccct

SEQ ID NO: 133635 - DNA, 25 bp, Canis familiaris
gttatgtttccatataactgtcaac

SEQ ID NO: 133636 - DNA, 25 bp, Canis familiaris
gttttgctttcagttgaatcccaac

SEQ ID NO: 133637 - DNA, 25 bp, Canis familiaris
gttattgtttaaagttcttcacagc

SEQ ID NO: 133638 - DNA, 25 bp, Canis familiaris
gttacgtgtgtaaagttgccacagg

SEQ ID NO: 133639 - DNA, 25 bp, Canis familiaris
gttactgctttgtggttgcctagcg

SEQ ID NO: 133640 - DNA, 25 bp, Canis familiaris
gttatctcatggcaagatttcctac

SEQ ID NO: 133641 - DNA, 25 bp, Canis familiaris
gttactcattctccatatattctgt

SEQ ID NO: 133642 - DNA, 25 bp, Canis familiaris
gttactactctgacaatttctggca

SEQ ID NO: 133643 - DNA, 25 bp, Canis familiaris
gttacaactcatgaattgggacaca

SEQ ID NO: 133644 - DNA, 25 bp, Canis familiaris
gttactactatggcactttgataaa

SEQ ID NO: 133645 - DNA, 25 bp, Canis familiaris
gttacatattgtggactcatctgtg

SEQ ID NO: 133646 - DNA, 25 bp, Canis familiaris
gttaaatcatctgcctatctgtcat

SEQ ID NO: 133647 - DNA, 25 bp, Canis familiaris
gttaaactcaggcctgtttctcttt

SEQ ID NO: 133648 - DNA, 25 bp, Canis familiaris
gttaagactgttatgtttctattgc

SEQ ID NO: 133649 - DNA, 25 bp, Canis familiaris
gttacagtctttttcttatcttcta

SEQ ID NO: 133650 - DNA, 25 bp, Canis familiaris
gttaagctttttgttgcatcgtgaa

SEQ ID NO: 133651 - DNA, 25 bp, Canis familiaris
gtttgggaatttgttgtcgctggaa

SEQ ID NO: 133652 - DNA, 25 bp, Canis familiaris
gtattgtgcacagctttagggggga

SEQ ID NO: 133653 - DNA, 25 bp, Canis familiaris
gtatcggccaggatcgtggggaggt

SEQ ID NO: 133654 - DNA, 25 bp, Canis familiaris
gttaggccaggggctggagtaggga

SEQ ID NO: 133655 - DNA, 25 bp, Canis familiaris
gttaggcagctgtggggtgctagtc

SEQ ID NO: 133656 - DNA, 25 bp, Canis familiaris
gttagggtaggaatgatgtctcagt

SEQ ID NO: 133657 - DNA, 25 bp, Canis familiaris
gttagtgcaacccagtgcatgctcc

SEQ ID NO: 133658 - DNA, 25 bp, Canis familiaris
gttaggcatggccagagtggtccct

SEQ ID NO: 133659 - DNA, 25 bp, Canis familiaris
gttagagtggccaagctggtgtctt

SEQ ID NO: 133660 - DNA, 25 bp, Canis familiaris
gttagctgtggacttgggatggtaa

SEQ ID NO: 133661 - DNA, 25 bp, Canis familiaris
gttatgctgggagtcgagctgtgac

SEQ ID NO: 133662 - DNA, 25 bp, Canis familiaris
gttactgacgagcctcagcaaaccc

SEQ ID NO: 133663 - DNA, 25 bp, Canis familiaris
gttactgatcagggatgtgacgact

SEQ ID NO: 133664 - DNA, 25 bp, Canis familiaris
gttactcaagtccatggacgctccc

SEQ ID NO: 133665 - DNA, 25 bp, Canis familiaris
gttactcattgggtggacactccgc

SEQ ID NO: 133666 - DNA, 25 bp, Canis familiaris
gttaccatcaggtggactccatgga

SEQ ID NO: 133667 - DNA, 25 bp, Canis familiaris
gttaccaaggacatgactctggaag

SEQ ID NO: 133668 - DNA, 25 bp, Canis familiaris
gttaacacatggactctgtcttgta

SEQ ID NO: 133669 - DNA, 25 bp, Canis familiaris
gttaaatgctggactatattatgaa

SEQ ID NO: 133670 - DNA, 25 bp, Canis familiaris
gttaaacagcgaggatcatcagaaa

SEQ ID NO: 133671 - DNA, 25 bp, Canis familiaris
gtgtaaaactgctgtctggaatgag

SEQ ID NO: 133672 - DNA, 25 bp, Canis familiaris
gttatttcaagctgttggagatggg

SEQ ID NO: 133673 - DNA, 25 bp, Canis familiaris
gtttattaaccctgtgactggctta

SEQ ID NO: 133674 - DNA, 25 bp, Canis familiaris
gtactttgaagatcacggactagtg

SEQ ID NO: 133675 - DNA, 25 bp, Canis familiaris
gtacttttagtttccagacttagag

SEQ ID NO: 133676 - DNA, 25 bp, Canis familiaris
gtaccttaggttttctgactcttgg

SEQ ID NO: 133677 - DNA, 25 bp, Canis familiaris
gttacttggggttgtctgagattgt

SEQ ID NO: 133678 - DNA, 25 bp, Canis familiaris
gtatattttaggtgtgtgaattgta

SEQ ID NO: 133679 - DNA, 25 bp, Canis familiaris
gttattgaataggtccttgcaaatc

SEQ ID NO: 133680 - DNA, 25 bp, Canis familiaris
gttacatgtatattgttttgcacaa

SEQ ID NO: 133681 - DNA, 25 bp, Canis familiaris
gttactttagtgacagctgtgccca

SEQ ID NO: 133682 - DNA, 25 bp, Canis familiaris
gttactttatatatctgtaccagct

SEQ ID NO: 133683 - DNA, 25 bp, Canis familiaris
gttacatattttaccataacacctg

SEQ ID NO: 133684 - DNA, 25 bp, Canis familiaris
gtttcaatgtttactctacccgtag

SEQ ID NO: 133685 - DNA, 25 bp, Canis familiaris
gttaccaagttactatcctccgtgg

SEQ ID NO: 133686 - DNA, 25 bp, Canis familiaris
gttactaagttacttcctccaactg

SEQ ID NO: 133687 - DNA, 25 bp, Canis familiaris
gttactggagttacattcgttgaag

SEQ ID NO: 133688 - DNA, 25 bp, Canis familiaris
gttactgatgcatttacttctattc

SEQ ID NO: 133689 - DNA, 25 bp, Canis familiaris
gttagctgaaacccattctatgtca

SEQ ID NO: 133690 - DNA, 25 bp, Canis familiaris
gttacttcaactcctatcatgcaga

SEQ ID NO: 133691 - DNA, 25 bp, Canis familiaris
gttactacagctttctatgatccaa

SEQ ID NO: 133692 - DNA, 25 bp, Canis familiaris
gttactgcactgtgaaagaccaaaa

SEQ ID NO: 133693 - DNA, 25 bp, Canis familiaris
gttaggcctatttaaagctctgaaa

SEQ ID NO: 133694 - DNA, 25 bp, Canis familiaris
gttaaactcttacttagcatctaca

SEQ ID NO: 133695 - DNA, 25 bp, Canis familiaris
gttaaagactcaacacaggcttcac

SEQ ID NO: 133696 - DNA, 25 bp, Canis familiaris
gtatagacccgaaagcgtcgtccat

SEQ ID NO: 133697 - DNA, 25 bp, Canis familiaris
gttaggcttcagaataggtccatct

SEQ ID NO: 133698 - DNA, 25 bp, Canis familiaris
gttatggttcctttggtcgctcgct

SEQ ID NO: 133699 - DNA, 25 bp, Canis familiaris
gttatgttgtgtattagattgctcc

SEQ ID NO: 133700 - DNA, 25 bp, Canis familiaris
gtttttatgtgtacggttctgcggc

SEQ ID NO: 133701 - DNA, 25 bp, Canis familiaris
gttttgagagtgagggtatggagag

SEQ ID NO: 133702 - DNA, 25 bp, Canis familiaris
gtatttggaagtagggtaagagttg

SEQ ID NO: 133703 - DNA, 25 bp, Canis familiaris
gttattggaactatgactaagacat

SEQ ID NO: 133704 - DNA, 25 bp, Canis familiaris
gttactgtgatagtttagaaatatc

SEQ ID NO: 133705 - DNA, 25 bp, Canis familiaris
gttacttcactggtatcaacatttc

SEQ ID NO: 133706 - DNA, 25 bp, Canis familiaris
gttactctccatgactaactgtgta

SEQ ID NO: 133707 - DNA, 25 bp, Canis familiaris
gttaccatccccatagaatttgaca

SEQ ID NO: 133708 - DNA, 25 bp, Canis familiaris
gttaccaccacctacagaatgtttc

SEQ ID NO: 133709 - DNA, 25 bp, Canis familiaris
gttaccaccaatgaagagagccttc

SEQ ID NO: 133710 - DNA, 25 bp, Canis familiaris
gtttctctacgataaagcacacttc

SEQ ID NO: 133711 - DNA, 25 bp, Canis familiaris
gttatcatcgtagcagaaagacaca

SEQ ID NO: 133712 - DNA, 25 bp, Canis familiaris
gttatatccagtaaactatatcaca

SEQ ID NO: 133713 - DNA, 25 bp, Canis familiaris
gttattccagggtcattctatcata

SEQ ID NO: 133714 - DNA, 25 bp, Canis familiaris
tgttttccgtggtgttttaatctca

SEQ ID NO: 133715 - DNA, 25 bp, Canis familiaris
gttttcctatgcactttttacgtca

SEQ ID NO: 133716 - DNA, 25 bp, Canis familiaris
gttttaatgtatcttttccacttat

SEQ ID NO: 133717 - DNA, 25 bp, Canis familiaris
gttttggatttgtggttaccattag

SEQ ID NO: 133718 - DNA, 25 bp, Canis familiaris
gttttacttgtgttgctgttacgca

SEQ ID NO: 133719 - DNA, 25 bp, Canis familiaris
gttttacttgacagctgctactgga

SEQ ID NO: 133720 - DNA, 25 bp, Canis familiaris
gttagagcgatttcctgtgctactg

SEQ ID NO: 133721 - DNA, 25 bp, Canis familiaris
gttagacaatcctgatggccttgag

SEQ ID NO: 133722 - DNA, 25 bp, Canis familiaris
gttacgcatttctgatgggatagac

SEQ ID NO: 133723 - DNA, 25 bp, Canis familiaris
gttacactcttgggttggtacattg

SEQ ID NO: 133724 - DNA, 25 bp, Canis familiaris
gttacacacattcacttggattctt

SEQ ID NO: 133725 - DNA, 25 bp, Canis familiaris
gttacccgttgagtgtggatgatct

SEQ ID NO: 133726 - DNA, 25 bp, Canis familiaris
gttatcagccctttgttggatgtct

SEQ ID NO: 133727 - DNA, 25 bp, Canis familiaris
gtttagtgagcctgtaggatcctac

SEQ ID NO: 133728 - DNA, 25 bp, Canis familiaris
gtttattggtcattgttcccctaca

SEQ ID NO: 133729 - DNA, 25 bp, Canis familiaris
gtttattcagctttttccttacaca

SEQ ID NO: 133730 - DNA, 25 bp, Canis familiaris
gttattttatgattcccacaaacaa

SEQ ID NO: 133731 - DNA, 25 bp, Canis familiaris
gttacgtttatctctcagaaatgga

SEQ ID NO: 133732 - DNA, 25 bp, Canis familiaris
gttactgtttcatactcaacctctt

SEQ ID NO: 133733 - DNA, 25 bp, Canis familiaris
gttacttcttacaaccagagctcac

SEQ ID NO: 133734 - DNA, 25 bp, Canis familiaris
gttagttgttgttaccagatgctgc

SEQ ID NO: 133735 - DNA, 25 bp, Canis familiaris
gttagtcaacttgcaccagagcggt

SEQ ID NO: 133736 - DNA, 25 bp, Canis familiaris
gttatgtccacagctaccagagcaa

SEQ ID NO: 133737 - DNA, 25 bp, Canis familiaris
gttactcccagccatagaagactaa

SEQ ID NO: 133738 - DNA, 25 bp, Canis familiaris
gttatcgcccgtgagaagagtaagc

SEQ ID NO: 133739 - DNA, 25 bp, Canis familiaris
gttatccacgagacactgagaagta

SEQ ID NO: 133740 - DNA, 25 bp, Canis familiaris
gttatcaagagctcactgcaggcag

SEQ ID NO: 133741 - DNA, 25 bp, Canis familiaris
gttagccacatctccgaagcatgga

SEQ ID NO: 133742 - DNA, 25 bp, Canis familiaris
gttagccatctctggcctatgtgga

SEQ ID NO: 133743 - DNA, 25 bp, Canis familiaris
gttacctctctatggatgatgggat

SEQ ID NO: 133744 - DNA, 25 bp, Canis familiaris
gttacacattcttaatttggtcttt

SEQ ID NO: 133745 - DNA, 25 bp, Canis familiaris
gttaccttcattcttgtagcttctt

SEQ ID NO: 133746 - DNA, 25 bp, Canis familiaris
gttacgctgtgcattttttttattg

SEQ ID NO: 133747 - DNA, 25 bp, Canis familiaris
gtcttcctgtttgtttttaatactg

SEQ ID NO: 133748 - DNA, 25 bp, Canis familiaris
gtttcactccttgttattttttcat

SEQ ID NO: 133749 - DNA, 25 bp, Canis familiaris
gtttcctcggctgtttatattgttt

SEQ ID NO: 133750 - DNA, 25 bp, Canis familiaris
gttactgttggcatttctttgtggt

SEQ ID NO: 133751 - DNA, 25 bp, Canis familiaris
gttactttttgctttcttctgagag

SEQ ID NO: 133752 - DNA, 25 bp, Canis familiaris
gttacatctgtcatttcgtttgagt

SEQ ID NO: 133753 - DNA, 25 bp, Canis familiaris
gttactcttaggctggttgtgggga

SEQ ID NO: 133754 - DNA, 25 bp, Canis familiaris
gttacatccttggtggacttgtgga

SEQ ID NO: 133755 - DNA, 25 bp, Canis familiaris
gttactattgtcctggactttgaat

SEQ ID NO: 133756 - DNA, 25 bp, Canis familiaris
gttacttctttttgattattcgatc

SEQ ID NO: 133757 - DNA, 25 bp, Canis familiaris
gttacatgtcctattgtgtttgcga

SEQ ID NO: 133758 - DNA, 25 bp, Canis familiaris
gttatcccctatatatttatgacgc

SEQ ID NO: 133759 - DNA, 25 bp, Canis familiaris
gttatccaactgtatattgtttact

SEQ ID NO: 133760 - DNA, 25 bp, Canis familiaris
gttacatcacatcttactttttttc

SEQ ID NO: 133761 - DNA, 25 bp, Canis familiaris
gttttgccttctggacttagttttg

SEQ ID NO: 133762 - DNA, 25 bp, Canis familiaris
gttttccttcatgggttgttaatca

SEQ ID NO: 133763 - DNA, 25 bp, Canis familiaris
gttagtccttattgtgggcttatca

SEQ ID NO: 133764 - DNA, 25 bp, Canis familiaris
gtttttctttacagagctttagtgc

SEQ ID NO: 133765 - DNA, 25 bp, Canis familiaris
gttttgtcctaatctgaggttactc

SEQ ID NO: 133766 - DNA, 25 bp, Canis familiaris
gtttttcatctatcacgggtaaaca

SEQ ID NO: 133767 - DNA, 25 bp, Canis familiaris
gtttttcatctatcagggtaaaaag

SEQ ID NO: 133768 - DNA, 25 bp, Canis familiaris
gttttcctgctgttggggcatgaca

SEQ ID NO: 133769 - DNA, 25 bp, Canis familiaris
gtttcaccgctgtggaggaccagta

SEQ ID NO: 133770 - DNA, 25 bp, Canis familiaris
gtttatgcccattgtgctgcagtac

SEQ ID NO: 133771 - DNA, 25 bp, Canis familiaris
gtttaaccatcgacggtcaccagga

SEQ ID NO: 133772 - DNA, 25 bp, Canis familiaris
gttattaccattacagttccagcag

SEQ ID NO: 133773 - DNA, 25 bp, Canis familiaris
gttatgttcctaatatttcacgatg

SEQ ID NO: 133774 - DNA, 25 bp, Canis familiaris
gttatgacttgttgacatttccatt

SEQ ID NO: 133775 - DNA, 25 bp, Canis familiaris
gttacctttgatgattatgctctct

SEQ ID NO: 133776 - DNA, 25 bp, Canis familiaris
gttactctcttctttttgagctcat

SEQ ID NO: 133777 - DNA, 25 bp, Canis familiaris
gttagttctctagctgatctaccac

SEQ ID NO: 133778 - DNA, 25 bp, Canis familiaris
gtttaatctgtagcatgcatcattc

SEQ ID NO: 133779 - DNA, 25 bp, Canis familiaris
gttttcctgatagcacatgaccaat

SEQ ID NO: 133780 - DNA, 25 bp, Canis familiaris
gttttggagatcacaggagcactat

SEQ ID NO: 133781 - DNA, 25 bp, Canis familiaris
gttttcatggacagccaagcactaa

SEQ ID NO: 133782 - DNA, 25 bp, Canis familiaris
gtttgccatccaaggccttactaag

SEQ ID NO: 133783 - DNA, 25 bp, Canis familiaris
gttagtaccagcagccagctaaaag

SEQ ID NO: 133784 - DNA, 25 bp, Canis familiaris
gttatgtgacacagtggcctaatca

SEQ ID NO: 133785 - DNA, 25 bp, Canis familiaris
gttatgtgaagatcttctctatgga

SEQ ID NO: 133786 - DNA, 25 bp, Canis familiaris
gttatggatatctcattgctttcag

SEQ ID NO: 133787 - DNA, 25 bp, Canis familiaris
gttagaaacacctgttggatgccaa

SEQ ID NO: 133788 - DNA, 25 bp, Canis familiaris
gttttaaaccacattttgccacaca

SEQ ID NO: 133789 - DNA, 25 bp, Canis familiaris
gtttttaaccatctctttcatttca

SEQ ID NO: 133790 - DNA, 25 bp, Canis familiaris
gttttgtaaacatgtgttactactt

SEQ ID NO: 133791 - DNA, 25 bp, Canis familiaris
gttttgattacagtggtttcctagt

SEQ ID NO: 133792 - DNA, 25 bp, Canis familiaris
gttttgtctaatgttccatcgtcac

SEQ ID NO: 133793 - DNA, 25 bp, Canis familiaris
gtttatttaggcagtctcggatcag

SEQ ID NO: 133794 - DNA, 25 bp, Canis familiaris
gttttataattcattacgagtggtt

SEQ ID NO: 133795 - DNA, 25 bp, Canis familiaris
gtttttccatttctaagtggcgtgt

SEQ ID NO: 133796 - DNA, 25 bp, Canis familiaris
gtttctctccggattgagggggctt

SEQ ID NO: 133797 - DNA, 25 bp, Canis familiaris
gttttccttggtctcgagactgggt

SEQ ID NO: 133798 - DNA, 25 bp, Canis familiaris
gtttttattgcgttctgtagccgtg

SEQ ID NO: 133799 - DNA, 25 bp, Canis familiaris
gttatgtttctggcttttaaatggt

SEQ ID NO: 133800 - DNA, 25 bp, Canis familiaris
gtttcgtgttcctttctaactggat

SEQ ID NO: 133801 - DNA, 25 bp, Canis familiaris
gtagtcgtgttcaactaccagttgc

SEQ ID NO: 133802 - DNA, 25 bp, Canis familiaris
gttaccggacgactaccgtctggat

SEQ ID NO: 133803 - DNA, 25 bp, Canis familiaris
gtttgccgggagatccggtgctggt

SEQ ID NO: 133804 - DNA, 25 bp, Canis familiaris
gtttagctgggtgtcccaactggct

SEQ ID NO: 133805 - DNA, 25 bp, Canis familiaris
gtttagctgggtgtcccaactggct

SEQ ID NO: 133806 - DNA, 25 bp, Canis familiaris
gtttatctgggtggtcccaactggc

SEQ ID NO: 133807 - DNA, 25 bp, Canis familiaris
gtttagctgtggtggtcccacactg

SEQ ID NO: 133808 - DNA, 25 bp, Canis familiaris
gtttatctggggtgtcccaatctgg

SEQ ID NO: 133809 - DNA, 25 bp, Canis familiaris
gtttatctggctcaagtcccaagga

SEQ ID NO: 133810 - DNA, 25 bp, Canis familiaris
gtttgtctgagctgaaggaaagata

SEQ ID NO: 133811 - DNA, 25 bp, Canis familiaris
gttttgctggccccaggggcaggac

SEQ ID NO: 133812 - DNA, 25 bp, Canis familiaris
gttttgctgcgactccgaggtagat

SEQ ID NO: 133813 - DNA, 25 bp, Canis familiaris
gttagtcgcagtccttagtgagtgt

SEQ ID NO: 133814 - DNA, 25 bp, Canis familiaris
gttactccagacatggaggagatgt

SEQ ID NO: 133815 - DNA, 25 bp, Canis familiaris
gttattgccgccattggggatcgca

SEQ ID NO: 133816 - DNA, 25 bp, Canis familiaris
gttttagccctatgtgtgtgtctgg

SEQ ID NO: 133817 - DNA, 25 bp, Canis familiaris
gttatccagtaaaagcctgcttagt

SEQ ID NO: 133818 - DNA, 25 bp, Canis familiaris
gttaccagtgaaacacccttgtggt

SEQ ID NO: 133819 - DNA, 25 bp, Canis familiaris
gttaccaacatttcaccactttgtg

SEQ ID NO: 133820 - DNA, 25 bp, Canis familiaris
gttacctacatttatctcacatatg

SEQ ID NO: 133821 - DNA, 25 bp, Canis familiaris
gttacctcagttgttccattgttac

SEQ ID NO: 133822 - DNA, 25 bp, Canis familiaris
gttacctcatttttcccatgtatgt

SEQ ID NO: 133823 - DNA, 25 bp, Canis familiaris
gttatttattctcttccagtctgat

SEQ ID NO: 133824 - DNA, 25 bp, Canis familiaris
gttttaaccagcattctccgctgtt

SEQ ID NO: 133825 - DNA, 25 bp, Canis familiaris
gttttctaaacgttctccactattg

SEQ ID NO: 133826 - DNA, 25 bp, Canis familiaris
gtttcttaaggaattgcccaatttg

SEQ ID NO: 133827 - DNA, 25 bp, Canis familiaris
gtttcttcggaaactgctgaacttc

SEQ ID NO: 133828 - DNA, 25 bp, Canis familiaris
gttttaagaaacccatacacatatc

SEQ ID NO: 133829 - DNA, 25 bp, Canis familiaris
gttttccaaagaagacatccacatg

SEQ ID NO: 133830 - DNA, 25 bp, Canis familiaris
gttttggggagaaccatgccatcat

SEQ ID NO: 133831 - DNA, 25 bp, Canis familiaris
gttttggataggatcccagatcatc

SEQ ID NO: 133832 - DNA, 25 bp, Canis familiaris
gttttatgtagaactcccaattact

SEQ ID NO: 133833 - DNA, 25 bp, Canis familiaris
gtttacttgaatttcctcagttagt

SEQ ID NO: 133834 - DNA, 25 bp, Canis familiaris
gttactctggaattatcccatttat

SEQ ID NO: 133835 - DNA, 25 bp, Canis familiaris
gttattgctgcagaactctaccttt

SEQ ID NO: 133836 - DNA, 25 bp, Canis familiaris
gtttttgcacagaacttcagtttta

SEQ ID NO: 133837 - DNA, 25 bp, Canis familiaris
gttttctcctaacttagctgcacgt

SEQ ID NO: 133838 - DNA, 25 bp, Canis familiaris
gttttctcctaactagactgcactt

SEQ ID NO: 133839 - DNA, 25 bp, Canis familiaris
gtttttccttgatggatctgggtgg

SEQ ID NO: 133840 - DNA, 25 bp, Canis familiaris
gttattggccttctgggctgtgtag

SEQ ID NO: 133841 - DNA, 25 bp, Canis familiaris
gttactcccttgaagatgtttgttg

SEQ ID NO: 133842 - DNA, 25 bp, Canis familiaris
gttatacctctgcttatgtttaaga

SEQ ID NO: 133843 - DNA, 25 bp, Canis familiaris
gttacctctctgttcttgtgttaac

SEQ ID NO: 133844 - DNA, 25 bp, Canis familiaris
gttatgtttctattgcttttgtatg

SEQ ID NO: 133845 - DNA, 25 bp, Canis familiaris
gttatgttccatttggagttgtaaa

SEQ ID NO: 133846 - DNA, 25 bp, Canis familiaris
gttatggtcatctgggctctttaaa

SEQ ID NO: 133847 - DNA, 25 bp, Canis familiaris
gttatttgaattgtgctgctgttta

SEQ ID NO: 133848 - DNA, 25 bp, Canis familiaris
gttagtcttttggtgtgtggtggtt

SEQ ID NO: 133849 - DNA, 25 bp, Canis familiaris
gtttttctggtcagtggctgaggtt

SEQ ID NO: 133850 - DNA, 25 bp, Canis familiaris
gttttttccttgagggcagtgtaga

SEQ ID NO: 133851 - DNA, 25 bp, Canis familiaris
gttatctttcctcctgaaggtggga

SEQ ID NO: 133852 - DNA, 25 bp, Canis familiaris
gttatcttttcttgtgtagggtctt

SEQ ID NO: 133853 - DNA, 25 bp, Canis familiaris
gttttcctactgcattggggacttc

SEQ ID NO: 133854 - DNA, 25 bp, Canis familiaris
gttttttcgtggttagtgacactat

SEQ ID NO: 133855 - DNA, 25 bp, Canis familiaris
gttattttctgttgtttgctactaa

SEQ ID NO: 133856 - DNA, 25 bp, Canis familiaris
gttatatttatgctgctgttgtatt

SEQ ID NO: 133857 - DNA, 25 bp, Canis familiaris
gttatattaatgcatatgttgtgtg

SEQ ID NO: 133858 - DNA, 25 bp, Canis familiaris
gtataattgaacctcactgcgtcag

SEQ ID NO: 133859 - DNA, 25 bp, Canis familiaris
gttatttgtaagcactggccagcca

SEQ ID NO: 133860 - DNA, 25 bp, Canis familiaris
gttttggatacacactacatagaga

SEQ ID NO: 133861 - DNA, 25 bp, Canis familiaris
gtttgtttgcacccaatcaacggac

SEQ ID NO: 133862 - DNA, 25 bp, Canis familiaris
gttttttgcagtcaggcaccttcat

SEQ ID NO: 133863 - DNA, 25 bp, Canis familiaris
gttttcgtcgtgcagacaacgtcac

SEQ ID NO: 133864 - DNA, 25 bp, Canis familiaris
gttttgttccttcagcatacgtagc

SEQ ID NO: 133865 - DNA, 25 bp, Canis familiaris
gttttttctctgcaacatttggctc

SEQ ID NO: 133866 - DNA, 25 bp, Canis familiaris
gtttgttaaactggactttggctag

SEQ ID NO: 133867 - DNA, 25 bp, Canis familiaris
gttttattatactcgcaggtcctag

SEQ ID NO: 133868 - DNA, 25 bp, Canis familiaris
gttttgcaatcatgaaccggttcca

SEQ ID NO: 133869 - DNA, 25 bp, Canis familiaris
gttttgcagaaatgatccagtggac

SEQ ID NO: 133870 - DNA, 25 bp, Canis familiaris
gttattacacaatggcagcagctaa

SEQ ID NO: 133871 - DNA, 25 bp, Canis familiaris
gttagctaacacatagagcctgtaa

SEQ ID NO: 133872 - DNA, 25 bp, Canis familiaris
gttagtaatacatagagccgaatat

SEQ ID NO: 133873 - DNA, 25 bp, Canis familiaris
gttatgtggaacagatgagccgaca

SEQ ID NO: 133874 - DNA, 25 bp, Canis familiaris
gtgtaatagaaggtgaatctcgaca

SEQ ID NO: 133875 - DNA, 25 bp, Canis familiaris
ttttgataacaactgaattcggaat

SEQ ID NO: 133876 - DNA, 25 bp, Canis familiaris
gttatataaccactcttggcggtat

SEQ ID NO: 133877 - DNA, 25 bp, Canis familiaris
tgtctaagtacgcacggccggtaca

SEQ ID NO: 133878 - DNA, 25 bp, Canis familiaris
gtctaagtacgcacggccggtacag

SEQ ID NO: 133879 - DNA, 25 bp, Canis familiaris
gtctaagtacgcacggccggtacag

SEQ ID NO: 133880 - DNA, 25 bp, Canis familiaris
gttttacttagtcttcaggctagct

SEQ ID NO: 133881 - DNA, 25 bp, Canis familiaris
gttttagctccaatccaagcaggtt

SEQ ID NO: 133882 - DNA, 25 bp, Canis familiaris
gttattgagtcctttcagtgaattt

SEQ ID NO: 133883 - DNA, 25 bp, Canis familiaris
gtttcagcagtgtcaattagggatt

SEQ ID NO: 133884 - DNA, 25 bp, Canis familiaris
gttttcagttatcaagtggcatcta

SEQ ID NO: 133885 - DNA, 25 bp, Canis familiaris
gttttgactgtttatattggcatgt

SEQ ID NO: 133886 - DNA, 25 bp, Canis familiaris
gttatatagctggagtcttctgtgc

SEQ ID NO: 133887 - DNA, 25 bp, Canis familiaris
gtttcagtgctggagtatggcctaa

SEQ ID NO: 133888 - DNA, 25 bp, Canis familiaris
gttatctatctggtgtatggcttat

SEQ ID NO: 133889 - DNA, 25 bp, Canis familiaris
gttatctcctgcatgtatgactcaa

SEQ ID NO: 133890 - DNA, 25 bp, Canis familiaris
gttatctctctgtctatatcgtgac

SEQ ID NO: 133891 - DNA, 25 bp, Canis familiaris
gttatcatttggttattgtactgta

SEQ ID NO: 133892 - DNA, 25 bp, Canis familiaris
gttatcattattcctacatgggatt

SEQ ID NO: 133893 - DNA, 25 bp, Canis familiaris
gttatctgccatttctacggtaaac

SEQ ID NO: 133894 - DNA, 25 bp, Canis familiaris
gttatgtcacattacttcaggagaa

SEQ ID NO: 133895 - DNA, 25 bp, Canis familiaris
gtatagccacttattaatgaaatca

SEQ ID NO: 133896 - DNA, 25 bp, Canis familiaris
gtatcggagttcactggaatactgc

SEQ ID NO: 133897 - DNA, 25 bp, Canis familiaris
gtttggaggatgccctggaaaatgg

SEQ ID NO: 133898 - DNA, 25 bp, Canis familiaris
gtttgggttctgggatggacatgga

SEQ ID NO: 133899 - DNA, 25 bp, Canis familiaris
gttttggccctgtgaggactctaat

SEQ ID NO: 133900 - DNA, 25 bp, Canis familiaris
gttttgaccttcaggacacactagt

SEQ ID NO: 133901 - DNA, 25 bp, Canis familiaris
gttttattttcacggtgacgtagct

SEQ ID NO: 133902 - DNA, 25 bp, Canis familiaris
gtttggttttcacattgggatagct

SEQ ID NO: 133903 - DNA, 25 bp, Canis familiaris
gttagtttattcactttcaaagcta

SEQ ID NO: 133904 - DNA, 25 bp, Canis familiaris
gttatttgtgagacttgctgtgtaa

SEQ ID NO: 133905 - DNA, 25 bp, Canis familiaris
gttttgttagtcttgcatgcttaat

SEQ ID NO: 133906 - DNA, 25 bp, Canis familiaris
tgttcatcgtacctttcagttagtg

SEQ ID NO: 133907 - DNA, 25 bp, Canis familiaris
gttttgttaatttcagttagtgtat

SEQ ID NO: 133908 - DNA, 25 bp, Canis familiaris
gtttattgcattttgaagtttgggt

SEQ ID NO: 133909 - DNA, 25 bp, Canis familiaris
gtttttgtctccgtagtatttcagt

SEQ ID NO: 133910 - DNA, 25 bp, Canis familiaris
gtttacatacatgcctagattattc

SEQ ID NO: 133911 - DNA, 25 bp, Canis familiaris
gtttactttcccagatgaatcccag

SEQ ID NO: 133912 - DNA, 25 bp, Canis familiaris
gttttgcttgttccactcagcaacc

SEQ ID NO: 133913 - DNA, 25 bp, Canis familiaris
gttttcttgccaaggccagaatgcc

SEQ ID NO: 133914 - DNA, 25 bp, Canis familiaris
gttttcttggcatccaaattccaga

SEQ ID NO: 133915 - DNA, 25 bp, Canis familiaris
gtagtacctccatccgagtgtaagg

SEQ ID NO: 133916 - DNA, 25 bp, Canis familiaris
gtggttcctccctggagtttattag

SEQ ID NO: 133917 - DNA, 25 bp, Canis familiaris
gttttcctggtctggagcattttta

SEQ ID NO: 133918 - DNA, 25 bp, Canis familiaris
gttttccttttatgacattttgctt

SEQ ID NO: 133919 - DNA, 25 bp, Canis familiaris
gtttttgttttctgttgttggccat

SEQ ID NO: 133920 - DNA, 25 bp, Canis familiaris
gttttttttccagtcatagttagca

SEQ ID NO: 133921 - DNA, 25 bp, Canis familiaris
gttatattcttggggcctcagggga

SEQ ID NO: 133922 - DNA, 25 bp, Canis familiaris
gttatttgcttcggtcctatgtttg

SEQ ID NO: 133923 - DNA, 25 bp, Canis familiaris
gttttatctgggccttctagttttg

SEQ ID NO: 133924 - DNA, 25 bp, Canis familiaris
gttttacaggtgctccttatttatt

SEQ ID NO: 133925 - DNA, 25 bp, Canis familiaris
gttttgaagagaaatgcctccattt

SEQ ID NO: 133926 - DNA, 25 bp, Canis familiaris
gttatgtgaagattcttgacacttc

SEQ ID NO: 133927 - DNA, 25 bp, Canis familiaris
gttatccatgtgtatgcttgaacct

SEQ ID NO: 133928 - DNA, 25 bp, Canis familiaris
gttatcacagtgggcagtgggctct

SEQ ID NO: 133929 - DNA, 25 bp, Canis familiaris
gttataaagagtgggacgcctgggt

SEQ ID NO: 133930 - DNA, 25 bp, Canis familiaris
gtttacgcaatagcgacgcgctggc

SEQ ID NO: 133931 - DNA, 25 bp, Canis familiaris
gtttttcacaatccgagtgccggct

SEQ ID NO: 133932 - DNA, 25 bp, Canis familiaris
gttttcaacaatccggagtgcggct

SEQ ID NO: 133933 - DNA, 25 bp, Canis familiaris
gttatcttcaaaacggcagaggctg

SEQ ID NO: 133934 - DNA, 25 bp, Canis familiaris
gttatcgctcacatatcttcgacgc

SEQ ID NO: 133935 - DNA, 25 bp, Canis familiaris
gttatgcctcacctatctataaaca

SEQ ID NO: 133936 - DNA, 25 bp, Canis familiaris
gtttcccctcgtggtatgaacaact

SEQ ID NO: 133937 - DNA, 25 bp, Canis familiaris
gttatcctgagttgagtttaagcca

SEQ ID NO: 133938 - DNA, 25 bp, Canis familiaris
gtatattgcggatatgttttcccac

SEQ ID NO: 133939 - DNA, 25 bp, Canis familiaris
gttatatgcaaatattttctgcctc

SEQ ID NO: 133940 - DNA, 25 bp, Canis familiaris
gttattgacatatattgaactgtta

SEQ ID NO: 133941 - DNA, 25 bp, Canis familiaris
gtgctattaatttactaccgtttgt

SEQ ID NO: 133942 - DNA, 25 bp, Canis familiaris
gttataaatctttccactatttagt

SEQ ID NO: 133943 - DNA, 25 bp, Canis familiaris
gttagaatttagtgactcatcagtc

SEQ ID NO: 133944 - DNA, 25 bp, Canis familiaris
gttattcatcgtattgaccatcaac

SEQ ID NO: 133945 - DNA, 25 bp, Canis familiaris
gttatgcccttgagtaccatgctaa

SEQ ID NO: 133946 - DNA, 25 bp, Canis familiaris
gttatccgcttgatctgattgctcg

SEQ ID NO: 133947 - DNA, 25 bp, Canis familiaris
gttatggccttcacagcatttcaga

SEQ ID NO: 133948 - DNA, 25 bp, Canis familiaris
gttttgcatcattcactcgtttaga

SEQ ID NO: 133949 - DNA, 25 bp, Canis familiaris
gttttaagtactctgatctcagaat

SEQ ID NO: 133950 - DNA, 25 bp, Canis familiaris
gttagttcagtagcttatctcagtt

SEQ ID NO: 133951 - DNA, 25 bp, Canis familiaris
gttagcataaaaacttcttcagtta

SEQ ID NO: 133952 - DNA, 25 bp, Canis familiaris
gttaggtttatactctcatctttta

SEQ ID NO: 133953 - DNA, 25 bp, Canis familiaris
gttagaatttgacctctctcttctt

SEQ ID NO: 133954 - DNA, 25 bp, Canis familiaris
gttatgtgtttacctgtttctctgt

SEQ ID NO: 133955 - DNA, 25 bp, Canis familiaris
gttattgttgcattactgtgttgtg

SEQ ID NO: 133956 - DNA, 25 bp, Canis familiaris
gttttgctgctttgactggtgagtc

SEQ ID NO: 133957 - DNA, 25 bp, Canis familiaris
gttttgctgcttttgctttgattcc

SEQ ID NO: 133958 - DNA, 25 bp, Canis familiaris
gttattcggatgttctttgatttct

SEQ ID NO: 133959 - DNA, 25 bp, Canis familiaris
gttttgtggagccacatttgttttt

SEQ ID NO: 133960 - DNA, 25 bp, Canis familiaris
gtttctttacgagggatgttcttct

SEQ ID NO: 133961 - DNA, 25 bp, Canis familiaris
gtttgtgcctcacagggagcttttc

SEQ ID NO: 133962 - DNA, 25 bp, Canis familiaris
gttattctctcacagtgtactctat

SEQ ID NO: 133963 - DNA, 25 bp, Canis familiaris
gttagccatctaggctgttcctcat

SEQ ID NO: 133964 - DNA, 25 bp, Canis familiaris
gttatccagcatggtgtgtctgcgt

SEQ ID NO: 133965 - DNA, 25 bp, Canis familiaris
gtttcaagcatgttcatctctgcag

SEQ ID NO: 133966 - DNA, 25 bp, Canis familiaris
gttatctcagtgttgctactgcaga

SEQ ID NO: 133967 - DNA, 25 bp, Canis familiaris
gttatcacactggtctattacattg

SEQ ID NO: 133968 - DNA, 25 bp, Canis familiaris
gtttcacactgagctattacattag

SEQ ID NO: 133969 - DNA, 25 bp, Canis familiaris
gtttcacaggcacctaacaagccag

SEQ ID NO: 133970 - DNA, 25 bp, Canis familiaris
gtttgaggacctgaacaagcgcaag

SEQ ID NO: 133971 - DNA, 25 bp, Canis familiaris
gtttgatgtcacctctggaaaggag

SEQ ID NO: 133972 - DNA, 25 bp, Canis familiaris
gttattgatatctcggatacaatag

SEQ ID NO: 133973 - DNA, 25 bp, Canis familiaris
gttttctgatcttcatggatgatgc

SEQ ID NO: 133974 - DNA, 25 bp, Canis familiaris
gttttcgctctggtgaatgcatgtt

SEQ ID NO: 133975 - DNA, 25 bp, Canis familiaris
gttttcacatttggatagctgtcac

SEQ ID NO: 133976 - DNA, 25 bp, Canis familiaris
gttttcacatttggatagctgtcac

SEQ ID NO: 133977 - DNA, 25 bp, Canis familiaris
gttttcacatttggatagctgtcac

SEQ ID NO: 133978 - DNA, 25 bp, Canis familiaris
gttttacacacttggacgtcacctg

SEQ ID NO: 133979 - DNA, 25 bp, Canis familiaris
gtttctagtcttcgggagtcagggc

SEQ ID NO: 133980 - DNA, 25 bp, Canis familiaris
gtttttgttttgagagtgagggtat

SEQ ID NO: 133981 - DNA, 25 bp, Canis familiaris
gttttgtttttgtggtactgcgaca

SEQ ID NO: 133982 - DNA, 25 bp, Canis familiaris
gttttaatatttgaggaacctccat

SEQ ID NO: 133983 - DNA, 25 bp, Canis familiaris
gttttctactttgtgttcaactcca

SEQ ID NO: 133984 - DNA, 25 bp, Canis familiaris
gttttctatctgtagttttaatgct

SEQ ID NO: 133985 - DNA, 25 bp, Canis familiaris
gtttcttctcttggttctaaagctc

SEQ ID NO: 133986 - DNA, 25 bp, Canis familiaris
gtttatttctgcagggctgaaagca

SEQ ID NO: 133987 - DNA, 25 bp, Canis familiaris
gttttctctagcatttgtaaagcca

SEQ ID NO: 133988 - DNA, 25 bp, Canis familiaris
gttttttgaccatatgctaaatcga

SEQ ID NO: 133989 - DNA, 25 bp, Canis familiaris
gttttgtaaccttagtacgagcaga

SEQ ID NO: 133990 - DNA, 25 bp, Canis familiaris
gtttctgtaagcacttttcgagaga

SEQ ID NO: 133991 - DNA, 25 bp, Canis familiaris
gttttgataaccatgccttcgtgta

SEQ ID NO: 133992 - DNA, 25 bp, Canis familiaris
gtttattaagcacctgccttgtggt

SEQ ID NO: 133993 - DNA, 25 bp, Canis familiaris
gtttaccgaagctgcctttgtgttt

SEQ ID NO: 133994 - DNA, 25 bp, Canis familiaris
gtttctccagaattacccttggcat

SEQ ID NO: 133995 - DNA, 25 bp, Canis familiaris
gtttcccaggtttccctggatcaga

SEQ ID NO: 133996 - DNA, 25 bp, Canis familiaris
gtttctaatgtggcaaccgtggtaa

SEQ ID NO: 133997 - DNA, 25 bp, Canis familiaris
gtttttatatcgcaactccatgtaa

SEQ ID NO: 133998 - DNA, 25 bp, Canis familiaris
gtatgtttttggagacttcagggat

SEQ ID NO: 133999 - DNA, 25 bp, Canis familiaris
gtttctttctgttgtactatggggt

SEQ ID NO: 134000 - DNA, 25 bp, Canis familiaris
gttttttggtaattctgtctgtggt

SEQ ID NO: 134001 - DNA, 25 bp, Canis familiaris
gttttttgtatctaacatggtgaag

SEQ ID NO: 134002 - DNA, 25 bp, Canis familiaris
gtttttggcttctggatggatgtgg

SEQ ID NO: 134003 - DNA, 25 bp, Canis familiaris
gttttctgggtctggtatgtgtgct

SEQ ID NO: 134004 - DNA, 25 bp, Canis familiaris
gttttctgaactgagcgttttgcca

SEQ ID NO: 134005 - DNA, 25 bp, Canis familiaris
gtttggctcgacttaggtttgattt

SEQ ID NO: 134006 - DNA, 25 bp, Canis familiaris
gtttgaccagaccattaatttgatt

SEQ ID NO: 134007 - DNA, 25 bp, Canis familiaris
gttatgtccatgtccattcatttta

SEQ ID NO: 134008 - DNA, 25 bp, Canis familiaris
gttattcgaacctttattactagtg

SEQ ID NO: 134009 - DNA, 25 bp, Canis familiaris
ggtccccaaccactagttgataagt

SEQ ID NO: 134010 - DNA, 25 bp, Canis familiaris
gtttctccaaccctatgaactacag

SEQ ID NO: 134011 - DNA, 25 bp, Canis familiaris
gttttctaactactgatgcctctaa

SEQ ID NO: 134012 - DNA, 25 bp, Canis familiaris
gtttcattacctttggctccaaagg

SEQ ID NO: 134013 - DNA, 25 bp, Canis familiaris
gtttattgcaacattcctaaaaggc

SEQ ID NO: 134014 - DNA, 25 bp, Canis familiaris
gttttccacatcatacgtacacata

SEQ ID NO: 134015 - DNA, 25 bp, Canis familiaris
gttttcccagcaatactgctataga

SEQ ID NO: 134016 - DNA, 25 bp, Canis familiaris
gtttacatccacaatggcgctgacg

SEQ ID NO: 134017 - DNA, 25 bp, Canis familiaris
gtttacagagcctagtcagatcgcg

SEQ ID NO: 134018 - DNA, 25 bp, Canis familiaris
gtattaaatgtctccaagcacatga

SEQ ID NO: 134019 - DNA, 25 bp, Canis familiaris
gtattgggcatttgctccaagccag

SEQ ID NO: 134020 - DNA, 25 bp, Canis familiaris
gtttagtgattgacccacagccatt

SEQ ID NO: 134021 - DNA, 25 bp, Canis familiaris
gtttagtgaaccgtcagatcgcctg

SEQ ID NO: 134022 - DNA, 25 bp, Canis familiaris
gtttggtaaggctctgattccagac

SEQ ID NO: 134023 - DNA, 25 bp, Canis familiaris
gttttgttcaaaagctgagtccaac

SEQ ID NO: 134024 - DNA, 25 bp, Canis familiaris
gttttgtgttagcagcggaaaaaat

SEQ ID NO: 134025 - DNA, 25 bp, Canis familiaris
gttttgtttcagcaggccaaaccta

SEQ ID NO: 134026 - DNA, 25 bp, Canis familiaris
gttttgtattcaccaaggaggacct

SEQ ID NO: 134027 - DNA, 25 bp, Canis familiaris
gttttgtgaaggcaatgcgggcaca

SEQ ID NO: 134028 - DNA, 25 bp, Canis familiaris
gttttctgacacacgagaggccaca

SEQ ID NO: 134029 - DNA, 25 bp, Canis familiaris
gttttgctaccaggcaggtggccaa

SEQ ID NO: 134030 - DNA, 25 bp, Canis familiaris
gttttgctattttgagggtgctccc

SEQ ID NO: 134031 - DNA, 25 bp, Canis familiaris
gttttctctgggacaactggcttcc

SEQ ID NO: 134032 - DNA, 25 bp, Canis familiaris
gttatccctgtggtaacttttctgc

SEQ ID NO: 134033 - DNA, 25 bp, Canis familiaris
gtttcccgatgttacactcgtatat

SEQ ID NO: 134034 - DNA, 25 bp, Canis familiaris
gtttctcacgttggacacggttgtc

SEQ ID NO: 134035 - DNA, 25 bp, Canis familiaris
gtttctaatgtttacagagcctagt

SEQ ID NO: 134036 - DNA, 25 bp, Canis familiaris
gtttgtacaatgatgaccgccaagt

SEQ ID NO: 134037 - DNA, 25 bp, Canis familiaris
gtttggaaagttcaccacctctagc

SEQ ID NO: 134038 - DNA, 25 bp, Canis familiaris
gtttgaaaagtacagcctccaggcc

SEQ ID NO: 134039 - DNA, 25 bp, Canis familiaris
gtttaaactttgcttctccgagaca

SEQ ID NO: 134040 - DNA, 25 bp, Canis familiaris
gtttagaatttttttctcgcagaat

SEQ ID NO: 134041 - DNA, 25 bp, Canis familiaris
gtttagtaactttaatcgccagcaa

SEQ ID NO: 134042 - DNA, 25 bp, Canis familiaris
gtttacttcccttgaacttcgagat

SEQ ID NO: 134043 - DNA, 25 bp, Canis familiaris
gtttcaggccccagaatattcagat

SEQ ID NO: 134044 - DNA, 25 bp, Canis familiaris
gtttgcccacgaaaaatattccagg

SEQ ID NO: 134045 - DNA, 25 bp, Canis familiaris
gtttgcccagtgtacaccaattcga

SEQ ID NO: 134046 - DNA, 25 bp, Canis familiaris
gtttgccacgtgaaactcaatagaa

SEQ ID NO: 134047 - DNA, 25 bp, Canis familiaris
gtttgccgaggaagacaaaaagctc

SEQ ID NO: 134048 - DNA, 25 bp, Canis familiaris
gtttcaggagatgtgacaatttggc

SEQ ID NO: 134049 - DNA, 25 bp, Canis familiaris
gtttcggggttgtcattgttggatg

SEQ ID NO: 134050 - DNA, 25 bp, Canis familiaris
gtttctggggtttcaccaaggtgat

SEQ ID NO: 134051 - DNA, 25 bp, Canis familiaris
gtttctggtgtccttcaaagaagta

SEQ ID NO: 134052 - DNA, 25 bp, Canis familiaris
gttttgtgtttcacacattggagta

SEQ ID NO: 134053 - DNA, 25 bp, Canis familiaris
gttttgtgtttcaccattgtggata

SEQ ID NO: 134054 - DNA, 25 bp, Canis familiaris
gttttttgttttctctctgtgaaat

SEQ ID NO: 134055 - DNA, 25 bp, Canis familiaris
gttttttgttgtgcttctttagaat

SEQ ID NO: 134056 - DNA, 25 bp, Canis familiaris
gttttgttgttgttgctgttttaca

SEQ ID NO: 134057 - DNA, 25 bp, Canis familiaris
gttattccatgtttgtctttttaat

SEQ ID NO: 134058 - DNA, 25 bp, Canis familiaris
gttatccagtgtcttttttgatcaa

SEQ ID NO: 134059 - DNA, 25 bp, Canis familiaris
gttattagtgcccctttcactgtaa

SEQ ID NO: 134060 - DNA, 25 bp, Canis familiaris
gttattgggatcctaattctcatta

SEQ ID NO: 134061 - DNA, 25 bp, Canis familiaris
gtttatggcccatctattctatgta

SEQ ID NO: 134062 - DNA, 25 bp, Canis familiaris
gtttagccaccaggtactccagtaa

SEQ ID NO: 134063 - DNA, 25 bp, Canis familiaris
gtttaacgccacgctgtcaagtgaa

SEQ ID NO: 134064 - DNA, 25 bp, Canis familiaris
gttttacctgcaaccttgaactgaa

SEQ ID NO: 134065 - DNA, 25 bp, Canis familiaris
gtttgttcaggaaccctgtcccaat

SEQ ID NO: 134066 - DNA, 25 bp, Canis familiaris
gtttttgcggcagccctgatggaga

SEQ ID NO: 134067 - DNA, 25 bp, Canis familiaris
gtttgctagtggaccccgagaggta

SEQ ID NO: 134068 - DNA, 25 bp, Canis familiaris
gtctggttgggacccccaatggaga

SEQ ID NO: 134069 - DNA, 25 bp, Canis familiaris
gtttttggggccctcaagggagcag

SEQ ID NO: 134070 - DNA, 25 bp, Canis familiaris
gtttgttgggagcgtgaaaggagga

SEQ ID NO: 134071 - DNA, 25 bp, Canis familiaris
gtttggcgggacagttaagaggcac

SEQ ID NO: 134072 - DNA, 25 bp, Canis familiaris
gtttgtggggcagcccttagatccc

SEQ ID NO: 134073 - DNA, 25 bp, Canis familiaris
gttttgcgggcagtctttctggaac

SEQ ID NO: 134074 - DNA, 25 bp, Canis familiaris
gttttgcacaactcatttctacaga

SEQ ID NO: 134075 - DNA, 25 bp, Canis familiaris
gttatttcaattatgtatcttcaga

SEQ ID NO: 134076 - DNA, 25 bp, Canis familiaris
gtttattcaactatctcatccacag

SEQ ID NO: 134077 - DNA, 25 bp, Canis familiaris
gtttttaagcacctctatacatcaa

SEQ ID NO: 134078 - DNA, 25 bp, Canis familiaris
gtttataaaccgtcccacatatgaa

SEQ ID NO: 134079 - DNA, 25 bp, Canis familiaris
gtttatggaacgtgaccctgatgaa

SEQ ID NO: 134080 - DNA, 25 bp, Canis familiaris
gtactacggctcctggaacctagaa

SEQ ID NO: 134081 - DNA, 25 bp, Canis familiaris
gtttactggctctgtgaccttgaga

SEQ ID NO: 134082 - DNA, 25 bp, Canis familiaris
gtttatagtggctggtgccatctgc

SEQ ID NO: 134083 - DNA, 25 bp, Canis familiaris
gtttctcgatggagagcttcctctg

SEQ ID NO: 134084 - DNA, 25 bp, Canis familiaris
gttttcgaggtggagcatatcccgg

SEQ ID NO: 134085 - DNA, 25 bp, Canis familiaris
gtttctgtgggtgtctatccaagcc

SEQ ID NO: 134086 - DNA, 25 bp, Canis familiaris
gttttggcggtactaactgcaacac

SEQ ID NO: 134087 - DNA, 25 bp, Canis familiaris
gtttttggtgggtgcgccaacacct

SEQ ID NO: 134088 - DNA, 25 bp, Canis familiaris
gtttttggtaggttgcgcatcacac

SEQ ID NO: 134089 - DNA, 25 bp, Canis familiaris
gttatttggtagttctctgtacgtt

SEQ ID NO: 134090 - DNA, 25 bp, Canis familiaris
gtttactggtaatccatgtcatggc

SEQ ID NO: 134091 - DNA, 25 bp, Canis familiaris
gtttacttgtagtgccatagaggcc

SEQ ID NO: 134092 - DNA, 25 bp, Canis familiaris
gttttcttgtactgacgatgaggtg

SEQ ID NO: 134093 - DNA, 25 bp, Canis familiaris
gtttcttattccagcaccatgaagt

SEQ ID NO: 134094 - DNA, 25 bp, Canis familiaris
gttttcgtccctttacagcagaatg

SEQ ID NO: 134095 - DNA, 25 bp, Canis familiaris
gtttttccctcatctgagagcaaag

SEQ ID NO: 134096 - DNA, 25 bp, Canis familiaris
gtttttccctccataaagaacatca

SEQ ID NO: 134097 - DNA, 25 bp, Canis familiaris
gtttttccctccatgaacacatgga

SEQ ID NO: 134098 - DNA, 25 bp, Canis familiaris
gtttttcagccatttttaccacgat

SEQ ID NO: 134099 - DNA, 25 bp, Canis familiaris
gttttattcacatttaggcaccata

SEQ ID NO: 134100 - DNA, 25 bp, Canis familiaris
gttttgtacacatttgactactttt

SEQ ID NO: 134101 - DNA, 25 bp, Canis familiaris
gttttgtcacaattctgcactaaat

SEQ ID NO: 134102 - DNA, 25 bp, Canis familiaris
gtttttcgagaattgcactgcatac

SEQ ID NO: 134103 - DNA, 25 bp, Canis familiaris
gtttacacgcagggctcacagatct

SEQ ID NO: 134104 - DNA, 25 bp, Canis familiaris
gtattggcaacggttcacagttcaa

SEQ ID NO: 134105 - DNA, 25 bp, Canis familiaris
gtttactgaccgttcactgtccaaa

SEQ ID NO: 134106 - DNA, 25 bp, Canis familiaris
gtttagtccttctcttgtacaaatg

SEQ ID NO: 134107 - DNA, 25 bp, Canis familiaris
gttttggcacttttttggaccatat

SEQ ID NO: 134108 - DNA, 25 bp, Canis familiaris
gtttgatgaccttggttctaaccta

SEQ ID NO: 134109 - DNA, 25 bp, Canis familiaris
gtttatcaccatctttggaacacga

SEQ ID NO: 134110 - DNA, 25 bp, Canis familiaris
gtttatctctcagaaatggaaagaa

SEQ ID NO: 134111 - DNA, 25 bp, Canis familiaris
gtttatctcctcataagcccgagaa

SEQ ID NO: 134112 - DNA, 25 bp, Canis familiaris
gttatataccacatcaatgcctcta

SEQ ID NO: 134113 - DNA, 25 bp, Canis familiaris
gttatttacagaacacatcccaatc

SEQ ID NO: 134114 - DNA, 25 bp, Canis familiaris
gttattctgatcataatctcccacc

SEQ ID NO: 134115 - DNA, 25 bp, Canis familiaris
gttttctgtgttacatctacttcca

SEQ ID NO: 134116 - DNA, 25 bp, Canis familiaris
gttttcatgactgtcactcacttct

SEQ ID NO: 134117 - DNA, 25 bp, Canis familiaris
gttttatgtctggtccatactgtcc

SEQ ID NO: 134118 - DNA, 25 bp, Canis familiaris
gtttcaagtgggctatcctgccctc

SEQ ID NO: 134119 - DNA, 25 bp, Canis familiaris
gtaattagggctctcaggctgcccc

SEQ ID NO: 134120 - DNA, 25 bp, Canis familiaris
gttatctagagtcaccaaagccgcc

SEQ ID NO: 134121 - DNA, 25 bp, Canis familiaris
gttttgagaggcaagccaatacacg

SEQ ID NO: 134122 - DNA, 25 bp, Canis familiaris
gttttggtagctttaatatcatcag

SEQ ID NO: 134123 - DNA, 25 bp, Canis familiaris
gttttgaatactttttactgagcta

SEQ ID NO: 134124 - DNA, 25 bp, Canis familiaris
gttattttctatttttactcagata

SEQ ID NO: 134125 - DNA, 25 bp, Canis familiaris
gttattttatatttctgttgccttt

SEQ ID NO: 134126 - DNA, 25 bp, Canis familiaris
gttatccttgattatttgtcttttt

SEQ ID NO: 134127 - DNA, 25 bp, Canis familiaris
gttatttcatgagatttgctttttt

SEQ ID NO: 134128 - DNA, 25 bp, Canis familiaris
gttattgttgtgctttgccttcttt

SEQ ID NO: 134129 - DNA, 25 bp, Canis familiaris
gttatatgtttaccctgtgttcttt

SEQ ID NO: 134130 - DNA, 25 bp, Canis familiaris
gttttctttactctatctacttgtg

SEQ ID NO: 134131 - DNA, 25 bp, Canis familiaris
gtttttttgacacaactttctctga

SEQ ID NO: 134132 - DNA, 25 bp, Canis familiaris
gttttcattttcttacactttgcta

SEQ ID NO: 134133 - DNA, 25 bp, Canis familiaris
gtttacaatttatactgctttccta

SEQ ID NO: 134134 - DNA, 25 bp, Canis familiaris
gtgttaaactatatacattttcaaa

SEQ ID NO: 134135 - DNA, 25 bp, Canis familiaris
gtctgtaaccctctaaggtatccag

SEQ ID NO: 134136 - DNA, 25 bp, Canis familiaris
gtttaccccccaatagagtgtacat

SEQ ID NO: 134137 - DNA, 25 bp, Canis familiaris
gttttccctccaagtgtgatatttc

SEQ ID NO: 134138 - DNA, 25 bp, Canis familiaris
gtttatccctaaaggcattcctcct

SEQ ID NO: 134139 - DNA, 25 bp, Canis familiaris
gtttgaccttacagtagcccatttt

SEQ ID NO: 134140 - DNA, 25 bp, Canis familiaris
gtttgcagagttttagtcacccttt

SEQ ID NO: 134141 - DNA, 25 bp, Canis familiaris
gtttgagagagaaccagtaccccaa

SEQ ID NO: 134142 - DNA, 25 bp, Canis familiaris
gttttgagcagtaggtgtcctccca

SEQ ID NO: 134143 - DNA, 25 bp, Canis familiaris
gttttgacaccaatgctgaacccca

SEQ ID NO: 134144 - DNA, 25 bp, Canis familiaris
gttattgaactggctctgagaaatc

SEQ ID NO: 134145 - DNA, 25 bp, Canis familiaris
gtttgagacactgtcagacaagacg

SEQ ID NO: 134146 - DNA, 25 bp, Canis familiaris
gttatagacacaagccagcaagaga

SEQ ID NO: 134147 - DNA, 25 bp, Canis familiaris
gtttaaccaggaccagaagaatctt

SEQ ID NO: 134148 - DNA, 25 bp, Canis familiaris
gtttacattcgaacgggcaagtgtt

SEQ ID NO: 134149 - DNA, 25 bp, Canis familiaris
gtttacatatttacagagtcatagt

SEQ ID NO: 134150 - DNA, 25 bp, Canis familiaris
gtttgctctaccaaatagtgatcgt

SEQ ID NO: 134151 - DNA, 25 bp, Canis familiaris
gtttatcaaacttatgggcacagct

SEQ ID NO: 134152 - DNA, 25 bp, Canis familiaris
gttattctgatattttagcactact

SEQ ID NO: 134153 - DNA, 25 bp, Canis familiaris
gttatattatcattcgaacattatc

SEQ ID NO: 134154 - DNA, 25 bp, Canis familiaris
gttttctacatgtctaccttcaaag

SEQ ID NO: 134155 - DNA, 25 bp, Canis familiaris
gtttagtaatttacacttggacagc

SEQ ID NO: 134156 - DNA, 25 bp, Canis familiaris
gtttagtttttgtgctttgatctca

SEQ ID NO: 134157 - DNA, 25 bp, Canis familiaris
gttttgttttgtcagctcataacct

SEQ ID NO: 134158 - DNA, 25 bp, Canis familiaris
gtttgtttcaggctacgtaaactct

SEQ ID NO: 134159 - DNA, 25 bp, Canis familiaris
gttttgttcaggcatccgaacgctc

SEQ ID NO: 134160 - DNA, 25 bp, Canis familiaris
gtttcgtgggggaccgcagaatgtc

SEQ ID NO: 134161 - DNA, 25 bp, Canis familiaris
gtttactgggcgccaacgagtgtgt

SEQ ID NO: 134162 - DNA, 25 bp, Canis familiaris
gtttacatgtgtggccaaatcagtg

SEQ ID NO: 134163 - DNA, 25 bp, Canis familiaris
gtttatcagctttgcgacatgacag

SEQ ID NO: 134164 - DNA, 25 bp, Canis familiaris
gtttcctttcatggatctgcaagaa

SEQ ID NO: 134165 - DNA, 25 bp, Canis familiaris
gtttcctggccagttcatgacagac

SEQ ID NO: 134166 - DNA, 25 bp, Canis familiaris
gtttcttgatgccttcagagactca

SEQ ID NO: 134167 - DNA, 25 bp, Canis familiaris
gtttttggtttctcacacaattggg

SEQ ID NO: 134168 - DNA, 25 bp, Canis familiaris
gtttttttcttctccagtatctagt

SEQ ID NO: 134169 - DNA, 25 bp, Canis familiaris
gttttcagtattttaccagtacttg

SEQ ID NO: 134170 - DNA, 25 bp, Canis familiaris
gttttcactcatttctaatcagtag

SEQ ID NO: 134171 - DNA, 25 bp, Canis familiaris
gttttcactttcatagatcagtatc

SEQ ID NO: 134172 - DNA, 25 bp, Canis familiaris
gttattatccctatctcacagatga

SEQ ID NO: 134173 - DNA, 25 bp, Canis familiaris
gttatttccaatatttcagaggcat

SEQ ID NO: 134174 - DNA, 25 bp, Canis familiaris
gtttttcacctcctcttcagaggac

SEQ ID NO: 134175 - DNA, 25 bp, Canis familiaris
gttttgtgcccaacctatcaagaac

SEQ ID NO: 134176 - DNA, 25 bp, Canis familiaris
gttttggcaccaactctgaagggca

SEQ ID NO: 134177 - DNA, 25 bp, Canis familiaris
gttattggacactggatgagaggcg

SEQ ID NO: 134178 - DNA, 25 bp, Canis familiaris
gtttctaacatctgaggaaagccta

SEQ ID NO: 134179 - DNA, 25 bp, Canis familiaris
gttttagcagctgcagggaacccca

SEQ ID NO: 134180 - DNA, 25 bp, Canis familiaris
gtttatagcagtacaggtctacctc

SEQ ID NO: 134181 - DNA, 25 bp, Canis familiaris
gttttggagtgggagcctcaggctc

SEQ ID NO: 134182 - DNA, 25 bp, Canis familiaris
gtttcagcgttcggagacactggcc

SEQ ID NO: 134183 - DNA, 25 bp, Canis familiaris
gtttcacgattagcagcgaacgccc

SEQ ID NO: 134184 - DNA, 25 bp, Canis familiaris
gtttcactggttatgcggcggatcc

SEQ ID NO: 134185 - DNA, 25 bp, Canis familiaris
gtttccagatgactttgggggcccg

SEQ ID NO: 134186 - DNA, 25 bp, Canis familiaris
gtttccagagacctgtttgggtcca

SEQ ID NO: 134187 - DNA, 25 bp, Canis familiaris
gtcttacagtgttttgtttggggca

SEQ ID NO: 134188 - DNA, 25 bp, Canis familiaris
tgttcaggcacgccagaaggatgcc

SEQ ID NO: 134189 - DNA, 25 bp, Canis familiaris
agaaggatgccgcagaccattatct

SEQ ID NO: 134190 - DNA, 25 bp, Canis familiaris
gccgcagaccattatctggcgggag

SEQ ID NO: 134191 - DNA, 25 bp, Canis familiaris
cgttagcgactgcgacgttcgatct

SEQ ID NO: 134192 - DNA, 25 bp, Canis familiaris
cgacgttcgatcttgcatggagcaa

SEQ ID NO: 134193 - DNA, 25 bp, Canis familiaris
gatcttgcatggagcaatctcgcag

SEQ ID NO: 134194 - DNA, 25 bp, Canis familiaris
caatctcgcagtgcagtggtgcggt

SEQ ID NO: 134195 - DNA, 25 bp, Canis familiaris
atttatccacggcactccgcgagct

SEQ ID NO: 134196 - DNA, 25 bp, Canis familiaris
tacccgaacgtcatcaggcgtggca

SEQ ID NO: 134197 - DNA, 25 bp, Canis familiaris
ggtggacgagcgtccgcatgctaat

SEQ ID NO: 134198 - DNA, 25 bp, Canis familiaris
cgtccgcatgctaatcgctttttac

SEQ ID NO: 134199 - DNA, 25 bp, Canis familiaris
tttaccgccagatgaaatcgaacag

SEQ ID NO: 134200 - DNA, 25 bp, Canis familiaris
gatgaaatcgaacagtcgctgaacg

SEQ ID NO: 134201 - DNA, 25 bp, Canis familiaris
aacagtcgctgaacggcgtgcatta

SEQ ID NO: 134202 - DNA, 25 bp, Canis familiaris
acatcatattcagcccatcacgctg

SEQ ID NO: 134203 - DNA, 25 bp, Canis familiaris
ttcagcccatcacgctgtggtttga

SEQ ID NO: 134204 - DNA, 25 bp, Canis familiaris
atcacgctgtggtttgatgatgcgc

SEQ ID NO: 134205 - DNA, 25 bp, Canis familiaris
ggtttgatgatgcgctcagtgccat

SEQ ID NO: 134206 - DNA, 25 bp, Canis familiaris
gttttcaataaacttgccagctgtt

SEQ ID NO: 134207 - DNA, 25 bp, Canis familiaris
gttttatggaattgttcacctggtt

SEQ ID NO: 134208 - DNA, 25 bp, Canis familiaris
gttttctgtgaaatctcccactggt

SEQ ID NO: 134209 - DNA, 25 bp, Canis familiaris
gtttctttgaacactccaggtttct

SEQ ID NO: 134210 - DNA, 25 bp, Canis familiaris
gtttctttggtccctccaagatatt

SEQ ID NO: 134211 - DNA, 25 bp, Canis familiaris
gtatacgtttttctcttcagtaata

SEQ ID NO: 134212 - DNA, 25 bp, Canis familiaris
gtttcagtttttcatttcaatcttg

SEQ ID NO: 134213 - DNA, 25 bp, Canis familiaris
gttttatttgttctttcatccgtga

SEQ ID NO: 134214 - DNA, 25 bp, Canis familiaris
gtttattttcctcattcctacgaga

SEQ ID NO: 134215 - DNA, 25 bp, Canis familiaris
gtttttattacatacttctactgaa

SEQ ID NO: 134216 - DNA, 25 bp, Canis familiaris
gttttctattcagtcatttttatta

SEQ ID NO: 134217 - DNA, 25 bp, Canis familiaris
gttttgctatatatactcttttggg

SEQ ID NO: 134218 - DNA, 25 bp, Canis familiaris
gttattgccataattcctgctaggt

SEQ ID NO: 134219 - DNA, 25 bp, Canis familiaris
gttttgcgtagcatcgtgtgctgcc

SEQ ID NO: 134220 - DNA, 25 bp, Canis familiaris
gttattaggagcctctgttgcacca

SEQ ID NO: 134221 - DNA, 25 bp, Canis familiaris
gttttcagagcacattttcctacta

SEQ ID NO: 134222 - DNA, 25 bp, Canis familiaris
gttttcaggcacctgatcttccttg

SEQ ID NO: 134223 - DNA, 25 bp, Canis familiaris
gttttgaggcagacttctgtgctac

SEQ ID NO: 134224 - DNA, 25 bp, Canis familiaris
gtttctgagagattctgtgttgaag

SEQ ID NO: 134225 - DNA, 25 bp, Canis familiaris
gtttgctgagttgagtctgtgcggg

SEQ ID NO: 134226 - DNA, 25 bp, Canis familiaris
gtttctaaagattgccatgtggggc

SEQ ID NO: 134227 - DNA, 25 bp, Canis familiaris
gttttctcagaatcctgggtacctg

SEQ ID NO: 134228 - DNA, 25 bp, Canis familiaris
gtttcttcagaatcctttggtcaac

SEQ ID NO: 134229 - DNA, 25 bp, Canis familiaris
gtttattgcaactcctttctgcatc

SEQ ID NO: 134230 - DNA, 25 bp, Canis familiaris
gtttcaaacatctaagcttattgct

SEQ ID NO: 134231 - DNA, 25 bp, Canis familiaris
gtttcaaactcagctgctttgatcc

SEQ ID NO: 134232 - DNA, 25 bp, Canis familiaris
gtttcaaattacaatctgtgagcac

SEQ ID NO: 134233 - DNA, 25 bp, Canis familiaris
gtttagacatgtatgctcgtgcacc

SEQ ID NO: 134234 - DNA, 25 bp, Canis familiaris
gtttattcaatcatctagtggccat

SEQ ID NO: 134235 - DNA, 25 bp, Canis familiaris
gtttaaatgagctctgttgacctaa

SEQ ID NO: 134236 - DNA, 25 bp, Canis familiaris
gttttagcagcacaacattgaccaa

SEQ ID NO: 134237 - DNA, 25 bp, Canis familiaris
gttttacggcaatatcatcaccaca

SEQ ID NO: 134238 - DNA, 25 bp, Canis familiaris
gttttactgtaatctattccatcaa

SEQ ID NO: 134239 - DNA, 25 bp, Canis familiaris
gttttactgtacaactataaatcca

SEQ ID NO: 134240 - DNA, 25 bp, Canis familiaris
gttttctgttcaaactccaactcca

SEQ ID NO: 134241 - DNA, 25 bp, Canis familiaris
gttttcctgtcaaattgcgtacttc

SEQ ID NO: 134242 - DNA, 25 bp, Canis familiaris
gtttctatttaacttggggttcatg

SEQ ID NO: 134243 - DNA, 25 bp, Canis familiaris
gtttccttgtagcttgggaggctgg

SEQ ID NO: 134244 - DNA, 25 bp, Canis familiaris
gttttctttacatatggtgacctgg

SEQ ID NO: 134245 - DNA, 25 bp, Canis familiaris
gttttattttgtttgtgtccctgag

SEQ ID NO: 134246 - DNA, 25 bp, Canis familiaris
gttttttttaatgtgctaccaatat

SEQ ID NO: 134247 - DNA, 25 bp, Canis familiaris
gttttttttaacattcctcatgaat

SEQ ID NO: 134248 - DNA, 25 bp, Canis familiaris
gttttgtgtcttaagcatttcccaa

SEQ ID NO: 134249 - DNA, 25 bp, Canis familiaris
gttttgtgtcttaagttccacatat

SEQ ID NO: 134250 - DNA, 25 bp, Canis familiaris
gttttgtgtttatatcctcagctgg

SEQ ID NO: 134251 - DNA, 25 bp, Canis familiaris
gtttctggccggaagtccatggcag

SEQ ID NO: 134252 - DNA, 25 bp, Canis familiaris
gttttgcgccagctagtgcttacaa

SEQ ID NO: 134253 - DNA, 25 bp, Canis familiaris
gtatttggccatttaccgtaatcac

SEQ ID NO: 134254 - DNA, 25 bp, Canis familiaris
gtatgttaccggtaccagctgacaa

SEQ ID NO: 134255 - DNA, 25 bp, Canis familiaris
gtttaatttggagccagcttcagac

SEQ ID NO: 134256 - DNA, 25 bp, Canis familiaris
gtttagttctggtgctctttagtta

SEQ ID NO: 134257 - DNA, 25 bp, Canis familiaris
gtttgggtggactgtctatatagtt

SEQ ID NO: 134258 - DNA, 25 bp, Canis familiaris
gtttgaaatggaaatgtctttagtt

SEQ ID NO: 134259 - DNA, 25 bp, Canis familiaris
gttttaaatatttgtctgctgtagt

SEQ ID NO: 134260 - DNA, 25 bp, Canis familiaris
gttttagcaaactgtgatctgtcaa

SEQ ID NO: 134261 - DNA, 25 bp, Canis familiaris
gttttggccaacttggtcttgcagt

SEQ ID NO: 134262 - DNA, 25 bp, Canis familiaris
gttttgtcacagtttcgtgttggag

SEQ ID NO: 134263 - DNA, 25 bp, Canis familiaris
gttttgaacagaatgacctttgcta

SEQ ID NO: 134264 - DNA, 25 bp, Canis familiaris
gttttgatactattgattttccctg

SEQ ID NO: 134265 - DNA, 25 bp, Canis familiaris
gttttgacacataagctttttactg

SEQ ID NO: 134266 - DNA, 25 bp, Canis familiaris
gttttagctcatgacttgtcctctc

SEQ ID NO: 134267 - DNA, 25 bp, Canis familiaris
gttttagccatattcttttctcttc

SEQ ID NO: 134268 - DNA, 25 bp, Canis familiaris
gttttcattctaactgatagttctg

SEQ ID NO: 134269 - DNA, 25 bp, Canis familiaris
gttttattccatattactttgccct

SEQ ID NO: 134270 - DNA, 25 bp, Canis familiaris
gttttgattcctgatgttttgtcct

SEQ ID NO: 134271 - DNA, 25 bp, Canis familiaris
gttttgcttcaagatgtgtctgcct

SEQ ID NO: 134272 - DNA, 25 bp, Canis familiaris
gttttgcatgtgtgctttctggcct

SEQ ID NO: 134273 - DNA, 25 bp, Canis familiaris
gtttcatgactgtcgttttatcaat

SEQ ID NO: 134274 - DNA, 25 bp, Canis familiaris
gtttcagatctgtgtcaattacttt

SEQ ID NO: 134275 - DNA, 25 bp, Canis familiaris
gtttcagtagatttttgtccattgc

SEQ ID NO: 134276 - DNA, 25 bp, Canis familiaris
gttttctcagtaatgtttcctatag

SEQ ID NO: 134277 - DNA, 25 bp, Canis familiaris
gttttctggctgacatttatctgtt

SEQ ID NO: 134278 - DNA, 25 bp, Canis familiaris
gttttagcctgtaattctcattgta

SEQ ID NO: 134279 - DNA, 25 bp, Canis familiaris
gtttcgaccagtagattcgactcaa

SEQ ID NO: 134280 - DNA, 25 bp, Canis familiaris
gtatctctaccagcgtgtcaggatc

SEQ ID NO: 134281 - DNA, 25 bp, Canis familiaris
gtttaagccacccagatctggacca

SEQ ID NO: 134282 - DNA, 25 bp, Canis familiaris
gtttacataccccagtcaggaagtc

SEQ ID NO: 134283 - DNA, 25 bp, Canis familiaris
gtttactctacccgtagtgtatgtt

SEQ ID NO: 134284 - DNA, 25 bp, Canis familiaris
gtttattcttccttgtaagaatcct

SEQ ID NO: 134285 - DNA, 25 bp, Canis familiaris
gttttgtctccttcagtaagtactt

SEQ ID NO: 134286 - DNA, 25 bp, Canis familiaris
gtttatttcacttggctgtagtttg

SEQ ID NO: 134287 - DNA, 25 bp, Canis familiaris
gtttttaacttgctttgctgtgtga

SEQ ID NO: 134288 - DNA, 25 bp, Canis familiaris
gttttcataactatcatttgtctct

SEQ ID NO: 134289 - DNA, 25 bp, Canis familiaris
gtttctaaagtagctgtgtcctttt

SEQ ID NO: 134290 - DNA, 25 bp, Canis familiaris
gtttccgcaagttcctggtatttgt

SEQ ID NO: 134291 - DNA, 25 bp, Canis familiaris
gtttccgcaaaactatggctttaga

SEQ ID NO: 134292 - DNA, 25 bp, Canis familiaris
gtttccgctaggttagtttgttgat

SEQ ID NO: 134293 - DNA, 25 bp, Canis familiaris
gtttcaccacggtaaccctgtatag

SEQ ID NO: 134294 - DNA, 25 bp, Canis familiaris
gtttcacatcacaggtacaggggaa

SEQ ID NO: 134295 - DNA, 25 bp, Canis familiaris
gtttcacatgctggtggctgacggc

SEQ ID NO: 134296 - DNA, 25 bp, Canis familiaris
gtttctgcatgctgtgagaatgggc

SEQ ID NO: 134297 - DNA, 25 bp, Canis familiaris
gtttgtgcagcgatgaggatggagg

SEQ ID NO: 134298 - DNA, 25 bp, Canis familiaris
gtttgctgagcggctggccaagagg

SEQ ID NO: 134299 - DNA, 25 bp, Canis familiaris
gttttccacttgacccagagtgatc

SEQ ID NO: 134300 - DNA, 25 bp, Canis familiaris
gttttccctatggtcacagattgtg

SEQ ID NO: 134301 - DNA, 25 bp, Canis familiaris
gttttccttcatgtaagtgcctgtt

SEQ ID NO: 134302 - DNA, 25 bp, Canis familiaris
gttttcacgtataataagccactgc

SEQ ID NO: 134303 - DNA, 25 bp, Canis familiaris
gttttccgcctcctgaagcgaataa

SEQ ID NO: 134304 - DNA, 25 bp, Canis familiaris
gtttctctgccggctgtgaagtaat

SEQ ID NO: 134305 - DNA, 25 bp, Canis familiaris
gtttttgccctgtatatgcaaattg

SEQ ID NO: 134306 - DNA, 25 bp, Canis familiaris
gttttcccctgaggcatcaaattgc

SEQ ID NO: 134307 - DNA, 25 bp, Canis familiaris
gtttttctccgggctctagatgagc

SEQ ID NO: 134308 - DNA, 25 bp, Canis familiaris
gttttgctctctgtatgttcgtggc

SEQ ID NO: 134309 - DNA, 25 bp, Canis familiaris
gttttgcccggtgttagtggctaca

SEQ ID NO: 134310 - DNA, 25 bp, Canis familiaris
gtttatccgggtctgggctgagtac

SEQ ID NO: 134311 - DNA, 25 bp, Canis familiaris
gttttctttgttctggactaatatc

SEQ ID NO: 134312 - DNA, 25 bp, Canis familiaris
gttttgctttttctggcactcacaa

SEQ ID NO: 134313 - DNA, 25 bp, Canis familiaris
gttttgatgttttgtgtggcgccac

SEQ ID NO: 134314 - DNA, 25 bp, Canis familiaris
gtttgtatttttggatggacacggt

SEQ ID NO: 134315 - DNA, 25 bp, Canis familiaris
gttttttaccaggaggcacacagcg

SEQ ID NO: 134316 - DNA, 25 bp, Canis familiaris
gtatgaggttaccgtacagactacg

SEQ ID NO: 134317 - DNA, 25 bp, Canis familiaris
gtatgtcgttaagtgtccgtccatt

SEQ ID NO: 134318 - DNA, 25 bp, Canis familiaris
gtatacgttgaaacattctgcccag

SEQ ID NO: 134319 - DNA, 25 bp, Canis familiaris
gtttagttctcaacagaccacacag

SEQ ID NO: 134320 - DNA, 25 bp, Canis familiaris
gtttattttcacccacacacaagac

SEQ ID NO: 134321 - DNA, 25 bp, Canis familiaris
gtttttttcctgtatgaccaacaca

SEQ ID NO: 134322 - DNA, 25 bp, Canis familiaris
gttttttctctcagagcacccaagc

SEQ ID NO: 134323 - DNA, 25 bp, Canis familiaris
gtttcgtgagttacaacagtccaga

SEQ ID NO: 134324 - DNA, 25 bp, Canis familiaris
gtttcggtgtcttgctcaaggtcga

SEQ ID NO: 134325 - DNA, 25 bp, Canis familiaris
gtttcgagatggattcaatttctga

SEQ ID NO: 134326 - DNA, 25 bp, Canis familiaris
gtttctggctttctacatgattcta

SEQ ID NO: 134327 - DNA, 25 bp, Canis familiaris
gtttctgggctccctagattcatct

SEQ ID NO: 134328 - DNA, 25 bp, Canis familiaris
gtttctgtggttcatagtctttgca

SEQ ID NO: 134329 - DNA, 25 bp, Canis familiaris
gttttgctctttcatatggtattca

SEQ ID NO: 134330 - DNA, 25 bp, Canis familiaris
gtttaatcgcttctgtgagagttca

SEQ ID NO: 134331 - DNA, 25 bp, Canis familiaris
gttttagatcttcagtgagattcca

SEQ ID NO: 134332 - DNA, 25 bp, Canis familiaris
gttttcagctcctcagtggttacaa

SEQ ID NO: 134333 - DNA, 25 bp, Canis familiaris
gttttcttgcctatgcttctaacaa

SEQ ID NO: 134334 - DNA, 25 bp, Canis familiaris
gtttttgctgccttctggtcaaata

SEQ ID NO: 134335 - DNA, 25 bp, Canis familiaris
gtttttgatccatatgacatacaga

SEQ ID NO: 134336 - DNA, 25 bp, Canis familiaris
gttttctatctataattatctgggc

SEQ ID NO: 134337 - DNA, 25 bp, Canis familiaris
gttttgccatcttaacatttctgta

SEQ ID NO: 134338 - DNA, 25 bp, Canis familiaris
gttttgctgcactttaatcttgtgt

SEQ ID NO: 134339 - DNA, 25 bp, Canis familiaris
gtttcctgcatgtttacactgaagt

SEQ ID NO: 134340 - DNA, 25 bp, Canis familiaris
gtttcactatagctcataatgacac

SEQ ID NO: 134341 - DNA, 25 bp, Canis familiaris
gttttgctatctctctcaaacactc

SEQ ID NO: 134342 - DNA, 25 bp, Canis familiaris
gttttgctactcttgtcagacaatg

SEQ ID NO: 134343 - DNA, 25 bp, Canis familiaris
gttttgcgcacattcatccgaaagc

SEQ ID NO: 134344 - DNA, 25 bp, Canis familiaris
gttttccacagactcctaaacacca

SEQ ID NO: 134345 - DNA, 25 bp, Canis familiaris
gttttacatggccaccgaggagacc

SEQ ID NO: 134346 - DNA, 25 bp, Canis familiaris
gtttttcaaggcatccaggagcttc

SEQ ID NO: 134347 - DNA, 25 bp, Canis familiaris
gttttcctagctcatctaagacttc

SEQ ID NO: 134348 - DNA, 25 bp, Canis familiaris
gttttcttgactatctctaagttca

SEQ ID NO: 134349 - DNA, 25 bp, Canis familiaris
gttttttgtcattactctagaggct

SEQ ID NO: 134350 - DNA, 25 bp, Canis familiaris
gttttacatgtgaacttccatggcc

SEQ ID NO: 134351 - DNA, 25 bp, Canis familiaris
gttttcctgtgcacagtcacattcc

SEQ ID NO: 134352 - DNA, 25 bp, Canis familiaris
gtttacagtgtcgacatctcctatc

SEQ ID NO: 134353 - DNA, 25 bp, Canis familiaris
gttttcagatgtccatattcttact

SEQ ID NO: 134354 - DNA, 25 bp, Canis familiaris
gttttccatgtccatcattttatgc

SEQ ID NO: 134355 - DNA, 25 bp, Canis familiaris
gttttctgattccttgtgtttgctc

SEQ ID NO: 134356 - DNA, 25 bp, Canis familiaris
gttttctgattccttgtgtttgctc

SEQ ID NO: 134357 - DNA, 25 bp, Canis familiaris
gttttctgattccttgtgtttgctc

SEQ ID NO: 134358 - DNA, 25 bp, Canis familiaris
gttttctgattccttgtgtttgctc

SEQ ID NO: 134359 - DNA, 25 bp, Canis familiaris
gttttctgattccttgtgtttgctc

SEQ ID NO: 134360 - DNA, 25 bp, Canis familiaris
gttttctgattccttgtgtttgctc

SEQ ID NO: 134361 - DNA, 25 bp, Canis familiaris
gttttctgatatccttgtgtttgct

SEQ ID NO: 134362 - DNA, 25 bp, Canis familiaris
gttttctgacatactctgtttgacc

SEQ ID NO: 134363 - DNA, 25 bp, Canis familiaris
gtttttgcatcatatgttcattcca

SEQ ID NO: 134364 - DNA, 25 bp, Canis familiaris
gttttctgctgcaaagtctgcgtcc

SEQ ID NO: 134365 - DNA, 25 bp, Canis familiaris
gtttttcagcttcatctgcagttct

SEQ ID NO: 134366 - DNA, 25 bp, Canis familiaris
gtttttcctcattcagctagtatcc

SEQ ID NO: 134367 - DNA, 25 bp, Canis familiaris
gtttcttgacttcctgccaggaaca

SEQ ID NO: 134368 - DNA, 25 bp, Canis familiaris
gtttctggatttccctaggaccatc

SEQ ID NO: 134369 - DNA, 25 bp, Canis familiaris
gtttttattgttgcaagagacctca

SEQ ID NO: 134370 - DNA, 25 bp, Canis familiaris
gtttttatttatccaaatgtagctt

SEQ ID NO: 134371 - DNA, 25 bp, Canis familiaris
gttttcttttatccaaggaatgcta

SEQ ID NO: 134372 - DNA, 25 bp, Canis familiaris
gttttcttctttgcaacatgcaacc

SEQ ID NO: 134373 - DNA, 25 bp, Canis familiaris
gtttgtattccctgcaacagtacac

SEQ ID NO: 134374 - DNA, 25 bp, Canis familiaris
gttttaactgcctgacacagcggat

SEQ ID NO: 134375 - DNA, 25 bp, Canis familiaris
gtttaacaatcctttccatcgacat

SEQ ID NO: 134376 - DNA, 25 bp, Canis familiaris
gtttaaaatctgggtccaagttgag

SEQ ID NO: 134377 - DNA, 25 bp, Canis familiaris
gtttggcccttgggtcctagtagag

SEQ ID NO: 134378 - DNA, 25 bp, Canis familiaris
gtttacctcttgctgtggtaggtag

SEQ ID NO: 134379 - DNA, 25 bp, Canis familiaris
gttttcctcatcaggtgtggctggt

SEQ ID NO: 134380 - DNA, 25 bp, Canis familiaris
gtttttcttccgagtggtggtggcg

SEQ ID NO: 134381 - DNA, 25 bp, Canis familiaris
gttttatctatttattgtgccgtgt

SEQ ID NO: 134382 - DNA, 25 bp, Canis familiaris
gttttattgctttgatcattctcga

SEQ ID NO: 134383 - DNA, 25 bp, Canis familiaris
gttttattctcttctctttcaagta

SEQ ID NO: 134384 - DNA, 25 bp, Canis familiaris
gtttttctggattttcttcaacatc

SEQ ID NO: 134385 - DNA, 25 bp, Canis familiaris
gtttccctgagttttctcatgaata

SEQ ID NO: 134386 - DNA, 25 bp, Canis familiaris
gtttctcctgagggcagtttagagg

SEQ ID NO: 134387 - DNA, 25 bp, Canis familiaris
gtttctgtcttgggattctggggta

SEQ ID NO: 134388 - DNA, 25 bp, Canis familiaris
gtttcatgattccgattcctgaggg

SEQ ID NO: 134389 - DNA, 25 bp, Canis familiaris
gtttagttcatggattggtggctcg

SEQ ID NO: 134390 - DNA, 25 bp, Canis familiaris
gtttagtgcctgtttatgctgttgc

SEQ ID NO: 134391 - DNA, 25 bp, Canis familiaris
gtttaagtgctgttatactgttgtc

SEQ ID NO: 134392 - DNA, 25 bp, Canis familiaris
gtttagactctgtaatccatttgga

SEQ ID NO: 134393 - DNA, 25 bp, Canis familiaris
gtttaatgccctttctgtcattgga

SEQ ID NO: 134394 - DNA, 25 bp, Canis familiaris
gtgttgacccaaactctgactggag

SEQ ID NO: 134395 - DNA, 25 bp, Canis familiaris
gtttgccacatcgattttagggagt

SEQ ID NO: 134396 - DNA, 25 bp, Canis familiaris
gtttgcagactgttgtttacggatt

SEQ ID NO: 134397 - DNA, 25 bp, Canis familiaris
gtttgtagttttgctgaaggattct

SEQ ID NO: 134398 - DNA, 25 bp, Canis familiaris
gttttagtttgtgctgataagacca

SEQ ID NO: 134399 - DNA, 25 bp, Canis familiaris
gtttttctctttgtgctgaagcatg

SEQ ID NO: 134400 - DNA, 25 bp, Canis familiaris
gttttatccattagccttgattctg

SEQ ID NO: 134401 - DNA, 25 bp, Canis familiaris
gtttatgtctttacctctgattcta

SEQ ID NO: 134402 - DNA, 25 bp, Canis familiaris
gtttctgtttgggctcttggtatga

SEQ ID NO: 134403 - DNA, 25 bp, Canis familiaris
gtttctctttgggccatgttaaatt

SEQ ID NO: 134404 - DNA, 25 bp, Canis familiaris
gtttcctttctgactgatggctaaa

SEQ ID NO: 134405 - DNA, 25 bp, Canis familiaris
gtttccctgtgctctgggagaatag

SEQ ID NO: 134406 - DNA, 25 bp, Canis familiaris
gtttcatccttggttggaatttact

SEQ ID NO: 134407 - DNA, 25 bp, Canis familiaris
gtttgatccttgggccaaagcgtat

SEQ ID NO: 134408 - DNA, 25 bp, Canis familiaris
gtttgacctttacctacacagaaat

SEQ ID NO: 134409 - DNA, 25 bp, Canis familiaris
gtttgtgccttttgaattcacagca

SEQ ID NO: 134410 - DNA, 25 bp, Canis familiaris
gttttcactttgattatccagcatt

SEQ ID NO: 134411 - DNA, 25 bp, Canis familiaris
gttttctctttcagatcatctgcct

SEQ ID NO: 134412 - DNA, 25 bp, Canis familiaris
gtttcttctttgagtctagcatttg

SEQ ID NO: 134413 - DNA, 25 bp, Canis familiaris
gttttctccttaatgcctatcattc

SEQ ID NO: 134414 - DNA, 25 bp, Canis familiaris
gttttctcttaaagccatttccatg

SEQ ID NO: 134415 - DNA, 25 bp, Canis familiaris
gttttctttgagtccacactacaca

SEQ ID NO: 134416 - DNA, 25 bp, Canis familiaris
gttttttctgggatcatcacatcac

SEQ ID NO: 134417 - DNA, 25 bp, Canis familiaris
gttttattagttcctcatatcttta

SEQ ID NO: 134418 - DNA, 25 bp, Canis familiaris
gttttattacttcctcatacttatg

SEQ ID NO: 134419 - DNA, 25 bp, Canis familiaris
gttttatcttctggtcactagctta

SEQ ID NO: 134420 - DNA, 25 bp, Canis familiaris
gtttttctcttctcagctatgtgaa

SEQ ID NO: 134421 - DNA, 25 bp, Canis familiaris
gtttatgcttctacatccagtttgt

SEQ ID NO: 134422 - DNA, 25 bp, Canis familiaris
gtttcacttctgccatggctttagt

SEQ ID NO: 134423 - DNA, 25 bp, Canis familiaris
gtttcacattcagctggatggtggt

SEQ ID NO: 134424 - DNA, 25 bp, Canis familiaris
gtttatatgatgacctttgctccgt

SEQ ID NO: 134425 - DNA, 25 bp, Canis familiaris
gtttagatgtgtcttttcccatttt

SEQ ID NO: 134426 - DNA, 25 bp, Canis familiaris
gtttttgttcttatttccattcagt

SEQ ID NO: 134427 - DNA, 25 bp, Canis familiaris
gtttttgttttcatttcactccatc

SEQ ID NO: 134428 - DNA, 25 bp, Canis familiaris
gttttttaaacatctatttctcact

SEQ ID NO: 134429 - DNA, 25 bp, Canis familiaris
gtttctttagaatgttcattgtcta

SEQ ID NO: 134430 - DNA, 25 bp, Canis familiaris
gtttcctcaatatagttactttgaa

SEQ ID NO: 134431 - DNA, 25 bp, Canis familiaris
gtttcctcaaggtagtctatgccct

SEQ ID NO: 134432 - DNA, 25 bp, Canis familiaris
gtttcccaagtgttttcagtcgtgc

SEQ ID NO: 134433 - DNA, 25 bp, Canis familiaris
gtttccaaaggaggtccaatctggg

SEQ ID NO: 134434 - DNA, 25 bp, Canis familiaris
gtttgcaaaggccctggccaacgtg

SEQ ID NO: 134435 - DNA, 25 bp, Canis familiaris
gtttacaagactctggaccacagag

SEQ ID NO: 134436 - DNA, 25 bp, Canis familiaris
gtctctaaaacaactgaatccggga

SEQ ID NO: 134437 - DNA, 25 bp, Canis familiaris
gtattctgtttcactaatcctggga

SEQ ID NO: 134438 - DNA, 25 bp, Canis familiaris
gtattctgtttcactaatcctggga

SEQ ID NO: 134439 - DNA, 25 bp, Canis familiaris
gtttcactggtcatgtatacctggt

SEQ ID NO: 134440 - DNA, 25 bp, Canis familiaris
gtttcctggggttgtatcacgagat

SEQ ID NO: 134441 - DNA, 25 bp, Canis familiaris
gtttccttggggttgaaatagcagc

SEQ ID NO: 134442 - DNA, 25 bp, Canis familiaris
gtttcctggtggggcaaataagcca

SEQ ID NO: 134443 - DNA, 25 bp, Canis familiaris
gtttcctggttgcccagaagaccct

SEQ ID NO: 134444 - DNA, 25 bp, Canis familiaris
gttttaggtaatccaagagactgca

SEQ ID NO: 134445 - DNA, 25 bp, Canis familiaris
gtttagaggctctatggccgaaagg

SEQ ID NO: 134446 - DNA, 25 bp, Canis familiaris
gtttcactagcttgagctgcgagaa

SEQ ID NO: 134447 - DNA, 25 bp, Canis familiaris
gtttacttcattccaggctgcagac

SEQ ID NO: 134448 - DNA, 25 bp, Canis familiaris
gtttgagttggttcagaggcaagcc

SEQ ID NO: 134449 - DNA, 25 bp, Canis familiaris
gtttccagtggtacacatggcaccc

SEQ ID NO: 134450 - DNA, 25 bp, Canis familiaris
gtttcagcctgtctgacaggccgtc

SEQ ID NO: 134451 - DNA, 25 bp, Canis familiaris
gtttatccgccaataaggtccatcc

SEQ ID NO: 134452 - DNA, 25 bp, Canis familiaris
gttttacgccatacaggtggcccct

SEQ ID NO: 134453 - DNA, 25 bp, Canis familiaris
gtttatacagccttagactccatca

SEQ ID NO: 134454 - DNA, 25 bp, Canis familiaris
gtttatactcatttgtcactcactt

SEQ ID NO: 134455 - DNA, 25 bp, Canis familiaris
gtttttcctacaatgatcctctgat

SEQ ID NO: 134456 - DNA, 25 bp, Canis familiaris
gtttcttccataaagagacctgagg

SEQ ID NO: 134457 - DNA, 25 bp, Canis familiaris
gtttcttgccattatgggaaggatt

SEQ ID NO: 134458 - DNA, 25 bp, Canis familiaris
gtttttgcacactggccaatggaga

SEQ ID NO: 134459 - DNA, 25 bp, Canis familiaris
gtttttgaatatgtataagctaaat

SEQ ID NO: 134460 - DNA, 25 bp, Canis familiaris
gtttcttgaatatctttcacttttt

SEQ ID NO: 134461 - DNA, 25 bp, Canis familiaris
gtttttgaatcacctctttcatttt

SEQ ID NO: 134462 - DNA, 25 bp, Canis familiaris
gtttctgaaacagcttcctagtttg

SEQ ID NO: 134463 - DNA, 25 bp, Canis familiaris
gtttctgaagtgttttggtagttct

SEQ ID NO: 134464 - DNA, 25 bp, Canis familiaris
gtttctctagtattttgatgtaagt

SEQ ID NO: 134465 - DNA, 25 bp, Canis familiaris
gtttctcttttcttccagtgaatgg

SEQ ID NO: 134466 - DNA, 25 bp, Canis familiaris
gtttccattctgtcttccagtagat

SEQ ID NO: 134467 - DNA, 25 bp, Canis familiaris
gtttccattctgtcttccagtagat

SEQ ID NO: 134468 - DNA, 25 bp, Canis familiaris
gtttttttatcttctcaagagcata

SEQ ID NO: 134469 - DNA, 25 bp, Canis familiaris
gtttcttatgtattcatccattggt

SEQ ID NO: 134470 - DNA, 25 bp, Canis familiaris
gtaccttggtttacctggtgttgat

SEQ ID NO: 134471 - DNA, 25 bp, Canis familiaris
gtattcctggtagccgctggattta

SEQ ID NO: 134472 - DNA, 25 bp, Canis familiaris
gtttcctggagatcgtggtgtcctc

SEQ ID NO: 134473 - DNA, 25 bp, Canis familiaris
gtttcttcagggtttggtgtatctc

SEQ ID NO: 134474 - DNA, 25 bp, Canis familiaris
gtttcttacgtagttgactctcctc

SEQ ID NO: 134475 - DNA, 25 bp, Canis familiaris
gtttttgacgtgttggacttgccag

SEQ ID NO: 134476 - DNA, 25 bp, Canis familiaris
gtattttatcaccttggagctttcg

SEQ ID NO: 134477 - DNA, 25 bp, Canis familiaris
gtatttacctcctgagtgttttgta

SEQ ID NO: 134478 - DNA, 25 bp, Canis familiaris
gtttttccttatatgtgttgttgta

SEQ ID NO: 134479 - DNA, 25 bp, Canis familiaris
gtttcctcctaattgtgtttgtatc

SEQ ID NO: 134480 - DNA, 25 bp, Canis familiaris
gtcttttcaataagtggtgttaact

SEQ ID NO: 134481 - DNA, 25 bp, Canis familiaris
gtttcttcaattgggactgttaatt

SEQ ID NO: 134482 - DNA, 25 bp, Canis familiaris
gtttccacgcttggcgtctttaatt

SEQ ID NO: 134483 - DNA, 25 bp, Canis familiaris
gtttaccatttgccgtcatttctgg

SEQ ID NO: 134484 - DNA, 25 bp, Canis familiaris
gtttattatttgcagtctttcttaa

SEQ ID NO: 134485 - DNA, 25 bp, Canis familiaris
gtttttcatttattggttgtctgtt

SEQ ID NO: 134486 - DNA, 25 bp, Canis familiaris
gttttttcatctttgtggttctgga

SEQ ID NO: 134487 - DNA, 25 bp, Canis familiaris
gttttttcatcttcagttgtctctg

SEQ ID NO: 134488 - DNA, 25 bp, Canis familiaris
gtttgtttcctgtgatctatagcca

SEQ ID NO: 134489 - DNA, 25 bp, Canis familiaris
gtttatctctcactatagcactaag

SEQ ID NO: 134490 - DNA, 25 bp, Canis familiaris
gtttctctgtcacttagcagtacga

SEQ ID NO: 134491 - DNA, 25 bp, Canis familiaris
gtttctttcttttgcatgtgaccat

SEQ ID NO: 134492 - DNA, 25 bp, Canis familiaris
gttttttcatgtgctcattggccat

SEQ ID NO: 134493 - DNA, 25 bp, Canis familiaris
gtttttacatgtgatcatttccctt

SEQ ID NO: 134494 - DNA, 25 bp, Canis familiaris
gtttgttaactggacatctctgccc

SEQ ID NO: 134495 - DNA, 25 bp, Canis familiaris
gtattaatgaaggcgacgtgcttcc

SEQ ID NO: 134496 - DNA, 25 bp, Canis familiaris
gtattatctgaaaggcacaatctga

SEQ ID NO: 134497 - DNA, 25 bp, Canis familiaris
gtttttacttgactacatcatggta

SEQ ID NO: 134498 - DNA, 25 bp, Canis familiaris
gtttttactctgttacctgatcaat

SEQ ID NO: 134499 - DNA, 25 bp, Canis familiaris
gtttatctactttaatcagggactc

SEQ ID NO: 134500 - DNA, 25 bp, Canis familiaris
gtttagtttgcatgtatcaggtttc

SEQ ID NO: 134501 - DNA, 25 bp, Canis familiaris
gtttctggtctatgtacaggatttc

SEQ ID NO: 134502 - DNA, 25 bp, Canis familiaris
gtttgctgaaaatgtgaagtagtaa

SEQ ID NO: 134503 - DNA, 25 bp, Canis familiaris
gtttgcttacaatggagactttgga

SEQ ID NO: 134504 - DNA, 25 bp, Canis familiaris
gtttctgaactctttcctttgtgaa

SEQ ID NO: 134505 - DNA, 25 bp, Canis familiaris
gtgtttagcctagggcctgtcgtac

SEQ ID NO: 134506 - DNA, 25 bp, Canis familiaris
gtttctagaccaatggccctggaac

SEQ ID NO: 134507 - DNA, 25 bp, Canis familiaris
gtttgtttgcaaaggccctggccaa

SEQ ID NO: 134508 - DNA, 25 bp, Canis familiaris
gtttttctacataacctgtggataa

SEQ ID NO: 134509 - DNA, 25 bp, Canis familiaris
gtttatatgctataatctcctggat

SEQ ID NO: 134510 - DNA, 25 bp, Canis familiaris
gtttaatctccatacatctgtgaat

SEQ ID NO: 134511 - DNA, 25 bp, Canis familiaris
gtttatgataaccaagcatctgtta

SEQ ID NO: 134512 - DNA, 25 bp, Canis familiaris
gtttataaacactgtgctctttaaa

SEQ ID NO: 134513 - DNA, 25 bp, Canis familiaris
gtttagaaatcctgtttgtattcaa

SEQ ID NO: 134514 - DNA, 25 bp, Canis familiaris
gtttcagtttacgggacatgttaca

SEQ ID NO: 134515 - DNA, 25 bp, Canis familiaris
gtttcactagtttcggcctttgaag

SEQ ID NO: 134516 - DNA, 25 bp, Canis familiaris
gtttaaaatcctgttcatctgcacg

SEQ ID NO: 134517 - DNA, 25 bp, Canis familiaris
gtttcaaaacttttactctctggtg

SEQ ID NO: 134518 - DNA, 25 bp, Canis familiaris
gtttcaaaacttttatacgcatttg

SEQ ID NO: 134519 - DNA, 25 bp, Canis familiaris
gtttctacagatattcttggtttgg

SEQ ID NO: 134520 - DNA, 25 bp, Canis familiaris
gtttttaggacattcttggctttgc

SEQ ID NO: 134521 - DNA, 25 bp, Canis familiaris
gtttttgtgatgtaatcttggttga

SEQ ID NO: 134522 - DNA, 25 bp, Canis familiaris
gtttttctgttcttttggctatgca

SEQ ID NO: 134523 - DNA, 25 bp, Canis familiaris
gtttttctttgcttcatttgtacca

SEQ ID NO: 134524 - DNA, 25 bp, Canis familiaris
gtttctaatttcttcttggtaacat

SEQ ID NO: 134525 - DNA, 25 bp, Canis familiaris
gtttatcgtcttttgctgtcgtaaa

SEQ ID NO: 134526 - DNA, 25 bp, Canis familiaris
gtttcactttctttctgtcaatata

SEQ ID NO: 134527 - DNA, 25 bp, Canis familiaris
gtttattttgcttatttacagtagg

SEQ ID NO: 134528 - DNA, 25 bp, Canis familiaris
gtttatttttgccattaccagtcag

SEQ ID NO: 134529 - DNA, 25 bp, Canis familiaris
gtttatttttccttatgtactcaga

SEQ ID NO: 134530 - DNA, 25 bp, Canis familiaris
gtttcatagatctcgtcaatgtcaa

SEQ ID NO: 134531 - DNA, 25 bp, Canis familiaris
gtttgtatcattccttcaaataaag

SEQ ID NO: 134532 - DNA, 25 bp, Canis familiaris
gtttctatcttgcctgagcagagta

SEQ ID NO: 134533 - DNA, 25 bp, Canis familiaris
gtttagagtgtgccctgcgagtaga

SEQ ID NO: 134534 - DNA, 25 bp, Canis familiaris
gtttgggttcacctaagctaacatt

SEQ ID NO: 134535 - DNA, 25 bp, Canis familiaris
gtttagccttatctagaatataaca

SEQ ID NO: 134536 - DNA, 25 bp, Canis familiaris
gtttcaactcctcctgcaaataaaa

SEQ ID NO: 134537 - DNA, 25 bp, Canis familiaris
gtttgagcatacctgccaaaaaaaa

SEQ ID NO: 134538 - DNA, 25 bp, Canis familiaris
gtattagatgtctccaaatcccaaa

SEQ ID NO: 134539 - DNA, 25 bp, Canis familiaris
gtttaattttctatacccacgatca

SEQ ID NO: 134540 - DNA, 25 bp, Canis familiaris
gtttatttttcttaattctcactct

SEQ ID NO: 134541 - DNA, 25 bp, Canis familiaris
gtttttgtttcttcagtttcttctg

SEQ ID NO: 134542 - DNA, 25 bp, Canis familiaris
gtttttactttgtcttttgctatct

SEQ ID NO: 134543 - DNA, 25 bp, Canis familiaris
gtttattatcttatcttctggtttt

SEQ ID NO: 134544 - DNA, 25 bp, Canis familiaris
gtttttatgtttatatatatgcttt

SEQ ID NO: 134545 - DNA, 25 bp, Canis familiaris
gtttttatattctcttatctcttaa

SEQ ID NO: 134546 - DNA, 25 bp, Canis familiaris
gtttttaatcttgctcattccacta

SEQ ID NO: 134547 - DNA, 25 bp, Canis familiaris
gtttttatactcattctttgcctca

SEQ ID NO: 134548 - DNA, 25 bp, Canis familiaris
gtttctattattttgtcttgtccta

SEQ ID NO: 134549 - DNA, 25 bp, Canis familiaris
gtttatttgtgtttgtctgtgttgt

SEQ ID NO: 134550 - DNA, 25 bp, Canis familiaris
gtttcatcttggcataacatggtta

SEQ ID NO: 134551 - DNA, 25 bp, Canis familiaris
gtttatccttcgtaagcattgctat

SEQ ID NO: 134552 - DNA, 25 bp, Canis familiaris
gtttttctcctagacatcttttaga

SEQ ID NO: 134553 - DNA, 25 bp, Canis familiaris
gtttttcctgctatgaattctttag

SEQ ID NO: 134554 - DNA, 25 bp, Canis familiaris
gtttttgttatttaaatgctgttga

SEQ ID NO: 134555 - DNA, 25 bp, Canis familiaris
gtttttctgttatcccagctgggaa

SEQ ID NO: 134556 - DNA, 25 bp, Canis familiaris
gtttctttatttaccgactgtgcca

SEQ ID NO: 134557 - DNA, 25 bp, Canis familiaris
gtttacatttttacctacacacaca

SEQ ID NO: 134558 - DNA, 25 bp, Canis familiaris
gtttatgctcttaattcctctcaac

SEQ ID NO: 134559 - DNA, 25 bp, Canis familiaris
gtttaccattaattgctttgttcta

SEQ ID NO: 134560 - DNA, 25 bp, Canis familiaris
gtttttcatctttgctgtttcttta

SEQ ID NO: 134561 - DNA, 25 bp, Canis familiaris
gtttttctagatgctggatccattg

SEQ ID NO: 134562 - DNA, 25 bp, Canis familiaris
gtttttctaaactaatctcatctgg

SEQ ID NO: 134563 - DNA, 25 bp, Canis familiaris
gtttatcttcattactgtttcatag

SEQ ID NO: 134564 - DNA, 25 bp, Canis familiaris
gtttcactgcatcaacttggtctgg

SEQ ID NO: 134565 - DNA, 25 bp, Canis familiaris
gtttactgcagtttctggggctggt

SEQ ID NO: 134566 - DNA, 25 bp, Canis familiaris
gtttcccagtgaacaggcggagagt

SEQ ID NO: 134567 - DNA, 25 bp, Canis familiaris
gtttcacgcatatccacgcggagag

SEQ ID NO: 134568 - DNA, 25 bp, Canis familiaris
gtttgcacagatgcggggcgagggc

SEQ ID NO: 134569 - DNA, 25 bp, Canis familiaris
gtttgtcatcccggaggcagaagcc

SEQ ID NO: 134570 - DNA, 25 bp, Canis familiaris
gtttttccctttccagaggtcatat

SEQ ID NO: 134571 - DNA, 25 bp, Canis familiaris
gtttttgccctattgaagaagactt

SEQ ID NO: 134572 - DNA, 25 bp, Canis familiaris
gtttctccctcccataaaagagtct

SEQ ID NO: 134573 - DNA, 25 bp, Canis familiaris
gtttacactcccataagcagggtgt

SEQ ID NO: 134574 - DNA, 25 bp, Canis familiaris
gtttatcctcccatatatatcctgg

SEQ ID NO: 134575 - DNA, 25 bp, Canis familiaris
gtttctcacttcgtttgaggccttg

SEQ ID NO: 134576 - DNA, 25 bp, Canis familiaris
gtttccagttgaatggttggcactt

SEQ ID NO: 134577 - DNA, 25 bp, Canis familiaris
gtttctagcactatggttggcctgg

SEQ ID NO: 134578 - DNA, 25 bp, Canis familiaris
tgttgttaacttatcgttcctggtc

SEQ ID NO: 134579 - DNA, 25 bp, Canis familiaris
gtttggataattatcgtgccctctg

SEQ ID NO: 134580 - DNA, 25 bp, Canis familiaris
gtttggtgaattttctctcccagtg

SEQ ID NO: 134581 - DNA, 25 bp, Canis familiaris
gtttttgtttaaatcatcaccacat

SEQ ID NO: 134582 - DNA, 25 bp, Canis familiaris
gtttttgtgtctttcatagcccact

SEQ ID NO: 134583 - DNA, 25 bp, Canis familiaris
gtttattgttcttttcattctacta

SEQ ID NO: 134584 - DNA, 25 bp, Canis familiaris
gtttaggtcacaatttcatctgtca

SEQ ID NO: 134585 - DNA, 25 bp, Canis familiaris
gtttatggacatagtttctctatac

SEQ ID NO: 134586 - DNA, 25 bp, Canis familiaris
gtttattatcagtcacattctctag

SEQ ID NO: 134587 - DNA, 25 bp, Canis familiaris
gtttcaaaagtccttgctgctctga

SEQ ID NO: 134588 - DNA, 25 bp, Canis familiaris
gtttcgaattaggtggctgcttgca

SEQ ID NO: 134589 - DNA, 25 bp, Canis familiaris
gtttcgatttagttggcttctgttt

SEQ ID NO: 134590 - DNA, 25 bp, Canis familiaris
gtttcgatttagtttggcttgctgt

SEQ ID NO: 134591 - DNA, 25 bp, Canis familiaris
gtttcgagcttcacttttgtgcagt

SEQ ID NO: 134592 - DNA, 25 bp, Canis familiaris
gtttcaactgtctacctttacttgg

SEQ ID NO: 134593 - DNA, 25 bp, Canis familiaris
gtttcacccaaagcatttgcacttc

SEQ ID NO: 134594 - DNA, 25 bp, Canis familiaris
gtttacccaattagagtgccactgt

SEQ ID NO: 134595 - DNA, 25 bp, Canis familiaris
gtttacccataaatataccttgcat

SEQ ID NO: 134596 - DNA, 25 bp, Canis familiaris
gtttattgcacacctattactcttg

SEQ ID NO: 134597 - DNA, 25 bp, Canis familiaris
gtttatgtctcagggtatactcttt

SEQ ID NO: 134598 - DNA, 25 bp, Canis familiaris
gtatcaagtccaggtataacattcc

SEQ ID NO: 134599 - DNA, 25 bp, Canis familiaris
gtataagacggccttctactcattc

SEQ ID NO: 134600 - DNA, 25 bp, Canis familiaris
gtttaatctgcctttgtagctcaaa

SEQ ID NO: 134601 - DNA, 25 bp, Canis familiaris
gtttagcattgcattttcagaggaa

SEQ ID NO: 134602 - DNA, 25 bp, Canis familiaris
gtttacatgtgtggcatttcagaag

SEQ ID NO: 134603 - DNA, 25 bp, Canis familiaris
gtttgccatggtgctgtggccaagg

SEQ ID NO: 134604 - DNA, 25 bp, Canis familiaris
gtttgccagttttgttccaggatgt

SEQ ID NO: 134605 - DNA, 25 bp, Canis familiaris
gtttacagcttttgcatttagaaga

SEQ ID NO: 134606 - DNA, 25 bp, Canis familiaris
gtttaagcttatagtgttgaccagg

SEQ ID NO: 134607 - DNA, 25 bp, Canis familiaris
gtttatttttttcagagccagtggc

SEQ ID NO: 134608 - DNA, 25 bp, Canis familiaris
gtttatttgttcatgagacacagag

SEQ ID NO: 134609 - DNA, 25 bp, Canis familiaris
gtttcatagctttagtatactcagg

SEQ ID NO: 134610 - DNA, 25 bp, Canis familiaris
gtttctatgcttcacttgaactggt

SEQ ID NO: 134611 - DNA, 25 bp, Canis familiaris
gtttcacctctggaattgaactctg

SEQ ID NO: 134612 - DNA, 25 bp, Canis familiaris
gtttactgtctgtaagagaattctg

SEQ ID NO: 134613 - DNA, 25 bp, Canis familiaris
gtttacttctggttgagccatagcg

SEQ ID NO: 134614 - DNA, 25 bp, Canis familiaris
gtattaccagatcagggcgtagcca

SEQ ID NO: 134615 - DNA, 25 bp, Canis familiaris
gtttcacttgtccaggggatgagcc

SEQ ID NO: 134616 - DNA, 25 bp, Canis familiaris
gtttccttccagagaggcatggccc

SEQ ID NO: 134617 - DNA, 25 bp, Canis familiaris
gtttcctttgccaaaagattgccct

SEQ ID NO: 134618 - DNA, 25 bp, Canis familiaris
gtttgccaattctgaagtactccca

SEQ ID NO: 134619 - DNA, 25 bp, Canis familiaris
gtatcctgaccctgaagtaccccat

SEQ ID NO: 134620 - DNA, 25 bp, Canis familiaris
gtattctactccagtattttcccat

SEQ ID NO: 134621 - DNA, 25 bp, Canis familiaris
gtattgtcaccctgaaattttcatc

SEQ ID NO: 134622 - DNA, 25 bp, Canis familiaris
gtttgtcttcgctcaaagtggtcac

SEQ ID NO: 134623 - DNA, 25 bp, Canis familiaris
gtttctcctccttcaagagttttcg

SEQ ID NO: 134624 - DNA, 25 bp, Canis familiaris
gtatttcccctgtagaatgtttcca

SEQ ID NO: 134625 - DNA, 25 bp, Canis familiaris
gtatttccaaggttgacacgtttag

SEQ ID NO: 134626 - DNA, 25 bp, Canis familiaris
gtttctccaaggctcctgttgaaag

SEQ ID NO: 134627 - DNA, 25 bp, Canis familiaris
gtttctccaaggctcctgttgaaag

SEQ ID NO: 134628 - DNA, 25 bp, Canis familiaris
gtttctccaaggctcctgttgaaag

SEQ ID NO: 134629 - DNA, 25 bp, Canis familiaris
gtttctccaaggctcctgttgaaag

SEQ ID NO: 134630 - DNA, 25 bp, Canis familiaris
gtttctccaaggctcctgttgaaag

SEQ ID NO: 134631 - DNA, 25 bp, Canis familiaris
gtttctccaaggctcctgttgaaag

SEQ ID NO: 134632 - DNA, 25 bp, Canis familiaris
gtttctccaaggctcctgtttgaaa

SEQ ID NO: 134633 - DNA, 25 bp, Canis familiaris
gtcccttaatatggaccttaatgaa

SEQ ID NO: 134634 - DNA, 25 bp, Canis familiaris
gtagacttataagacccttgggcac

SEQ ID NO: 134635 - DNA, 25 bp, Canis familiaris
gtcttcctgtaagacctttgggtcg

SEQ ID NO: 134636 - DNA, 25 bp, Canis familiaris
gtcttcctgtaagacctttgggtcg

SEQ ID NO: 134637 - DNA, 25 bp, Canis familiaris
gtttccatataagccctttgcgagg

SEQ ID NO: 134638 - DNA, 25 bp, Canis familiaris
gtttctttcaaggcttctttctgag

SEQ ID NO: 134639 - DNA, 25 bp, Canis familiaris
gtttctttccatatttatcttcgaa

SEQ ID NO: 134640 - DNA, 25 bp, Canis familiaris
gtttctttccatatgttatttccaa

SEQ ID NO: 134641 - DNA, 25 bp, Canis familiaris
gtttctgcttccagtgtcatgtttc

SEQ ID NO: 134642 - DNA, 25 bp, Canis familiaris
gtttcatgcactttactttgttttg

SEQ ID NO: 134643 - DNA, 25 bp, Canis familiaris
gtttctcactgatcattattttttt

SEQ ID NO: 134644 - DNA, 25 bp, Canis familiaris
gtttctgagcaatattttttaatgt

SEQ ID NO: 134645 - DNA, 25 bp, Canis familiaris
gtttcaacaagcaattatcttttag

SEQ ID NO: 134646 - DNA, 25 bp, Canis familiaris
gtttgatacaggcagtacttttata

SEQ ID NO: 134647 - DNA, 25 bp, Canis familiaris
gtttgccaatcaagactacttttaa

SEQ ID NO: 134648 - DNA, 25 bp, Canis familiaris
gtttgaatatcacgttagctttcta

SEQ ID NO: 134649 - DNA, 25 bp, Canis familiaris
gtttaaccagtgcttgccaatcata

SEQ ID NO: 134650 - DNA, 25 bp, Canis familiaris
gtttaatccagtttcagacagtttc

SEQ ID NO: 134651 - DNA, 25 bp, Canis familiaris
gtttccatccgtttccaatggtggg

SEQ ID NO: 134652 - DNA, 25 bp, Canis familiaris
gtttcacatacctttccgaggagtg

SEQ ID NO: 134653 - DNA, 25 bp, Canis familiaris
gtttactactccatgcagctgagga

SEQ ID NO: 134654 - DNA, 25 bp, Canis familiaris
gtttagctactaagcagcatgtgat

SEQ ID NO: 134655 - DNA, 25 bp, Canis familiaris
gtttaccagctaatcactcatgatc

SEQ ID NO: 134656 - DNA, 25 bp, Canis familiaris
gtttagcatcagttgtcaccagcac

SEQ ID NO: 134657 - DNA, 25 bp, Canis familiaris
gtttagaaggtgcctgctactgcac

SEQ ID NO: 134658 - DNA, 25 bp, Canis familiaris
gtttagcaagaacctgtggatgccc

SEQ ID NO: 134659 - DNA, 25 bp, Canis familiaris
gtttcgtgaaattcttcaaccatcc

SEQ ID NO: 134660 - DNA, 25 bp, Canis familiaris
gtttctatcggagttatcaacagct

SEQ ID NO: 134661 - DNA, 25 bp, Canis familiaris
gtttctacttacatgtctaagcatc

SEQ ID NO: 134662 - DNA, 25 bp, Canis familiaris
gtttctcacttagcagacggactct

SEQ ID NO: 134663 - DNA, 25 bp, Canis familiaris
gtttggatcataaggagagcggaat

SEQ ID NO: 134664 - DNA, 25 bp, Canis familiaris
gtttcgatcgtacaggggatgcaag

SEQ ID NO: 134665 - DNA, 25 bp, Canis familiaris
gtttcttcgagactcgtgggccaca

SEQ ID NO: 134666 - DNA, 25 bp, Canis familiaris
gtttcgtcaaccaagggagccacac

SEQ ID NO: 134667 - DNA, 25 bp, Canis familiaris
gtttatgtcacaacctgggagtcct

SEQ ID NO: 134668 - DNA, 25 bp, Canis familiaris
gtttagctcaacccaggggtctctc

SEQ ID NO: 134669 - DNA, 25 bp, Canis familiaris
gtttctatccaaaagaggtgtcctc

SEQ ID NO: 134670 - DNA, 25 bp, Canis familiaris
gtttgtaccaataaagcaggtctgt

SEQ ID NO: 134671 - DNA, 25 bp, Canis familiaris
gtttgtacacaaaaagcaggctggt

SEQ ID NO: 134672 - DNA, 25 bp, Canis familiaris
gtttgtacaagatccgcagacgtgt

SEQ ID NO: 134673 - DNA, 25 bp, Canis familiaris
gtttgtacacgctaacccaggatta

SEQ ID NO: 134674 - DNA, 25 bp, Canis familiaris
gtttgtacctgtatcccagcaatgc

SEQ ID NO: 134675 - DNA, 25 bp, Canis familiaris
gtttgagaccgaagtgtcccaagca

SEQ ID NO: 134676 - DNA, 25 bp, Canis familiaris
gtttcaggctaaaggtccctgcaga

SEQ ID NO: 134677 - DNA, 25 bp, Canis familiaris
gtttcagagtacaagatatccccca

SEQ ID NO: 134678 - DNA, 25 bp, Canis familiaris
gtttgctggtaccaaaagcccagga

SEQ ID NO: 134679 - DNA, 25 bp, Canis familiaris
gtttcgtgtactttgaagatcacgg

SEQ ID NO: 134680 - DNA, 25 bp, Canis familiaris
gtatatcagtgtgtcttgcagaatc

SEQ ID NO: 134681 - DNA, 25 bp, Canis familiaris
gtttggctgtggcctgagccaatcc

SEQ ID NO: 134682 - DNA, 25 bp, Canis familiaris
gtttctgctgggagcagccaaagca

SEQ ID NO: 134683 - DNA, 25 bp, Canis familiaris
gtttctctggcagccagcgcagaga

SEQ ID NO: 134684 - DNA, 25 bp, Canis familiaris
gtttctatccaggccacattgaagt

SEQ ID NO: 134685 - DNA, 25 bp, Canis familiaris
gtttctattcctgcatcttgtggta

SEQ ID NO: 134686 - DNA, 25 bp, Canis familiaris
gtttgcttccctgatctcaaagcta

SEQ ID NO: 134687 - DNA, 25 bp, Canis familiaris
gtttctaccccttgtaatagtatga

SEQ ID NO: 134688 - DNA, 25 bp, Canis familiaris
gtttgcattcccttcttaaggattg

SEQ ID NO: 134689 - DNA, 25 bp, Canis familiaris
gtttgtttgctttttcaagtttcat

SEQ ID NO: 134690 - DNA, 25 bp, Canis familiaris
gtttctattgtttttaccatcttct

SEQ ID NO: 134691 - DNA, 25 bp, Canis familiaris
gtttgaacttcttttagcatttctt

SEQ ID NO: 134692 - DNA, 25 bp, Canis familiaris
gtttatggtattttcgtgcatttgt

SEQ ID NO: 134693 - DNA, 25 bp, Canis familiaris
gtttcatggatttttcgtcttctgc

SEQ ID NO: 134694 - DNA, 25 bp, Canis familiaris
gtttcgtctgtcttttgttactgtt

SEQ ID NO: 134695 - DNA, 25 bp, Canis familiaris
gtataattctggttctttcaaatga

SEQ ID NO: 134696 - DNA, 25 bp, Canis familiaris
gtatatgctgtggatgttcttgtca

SEQ ID NO: 134697 - DNA, 25 bp, Canis familiaris
gtatatgtgctggacaccactggcc

SEQ ID NO: 134698 - DNA, 25 bp, Canis familiaris
gtattgtgcgccaagtacggcccat

SEQ ID NO: 134699 - DNA, 25 bp, Canis familiaris
gtatgttcatgtgaggaagccacct

SEQ ID NO: 134700 - DNA, 25 bp, Canis familiaris
gtagatttgttgtgacattagcctg

SEQ ID NO: 134701 - DNA, 25 bp, Canis familiaris
gtagatttgcggagaatgcttcatc

SEQ ID NO: 134702 - DNA, 25 bp, Canis familiaris
gtaggttaggagattcttctcgacc

SEQ ID NO: 134703 - DNA, 25 bp, Canis familiaris
gtatggtgggggtttctaacgatca

SEQ ID NO: 134704 - DNA, 25 bp, Canis familiaris
gtatggtgggggtttctaacgatca

SEQ ID NO: 134705 - DNA, 25 bp, Canis familiaris
gtatggtgggggtttctaacgatca

SEQ ID NO: 134706 - DNA, 25 bp, Canis familiaris
gtatggtgggggtttctaacgatca

SEQ ID NO: 134707 - DNA, 25 bp, Canis familiaris
gtatggtgggggtttctaacgatca

SEQ ID NO: 134708 - DNA, 25 bp, Canis familiaris
gtatggtgggggtttctaacgatca

SEQ ID NO: 134709 - DNA, 25 bp, Canis familiaris
gtatggtgggggtttctaacgatca

SEQ ID NO: 134710 - DNA, 25 bp, Canis familiaris
gtatggtgggggtttctaacgatca

SEQ ID NO: 134711 - DNA, 25 bp, Canis familiaris
gtatggtgggggtttctaacgatca

SEQ ID NO: 134712 - DNA, 25 bp, Canis familiaris
gtatggtgggggtttctaacgatca

SEQ ID NO: 134713 - DNA, 25 bp, Canis familiaris
gtatggtgggggtttctaacgatca

SEQ ID NO: 134714 - DNA, 25 bp, Canis familiaris
gtatggtgggggtttctaacgatca

SEQ ID NO: 134715 - DNA, 25 bp, Canis familiaris
gtatttggggggctctgcagatctg

SEQ ID NO: 134716 - DNA, 25 bp, Canis familiaris
gtttgggggcggccacatcaaggat

SEQ ID NO: 134717 - DNA, 25 bp, Canis familiaris
gtttgtgatgggcgtgaaccatgag

SEQ ID NO: 134718 - DNA, 25 bp, Canis familiaris
gtttaagatggaggggacctggctg

SEQ ID NO: 134719 - DNA, 25 bp, Canis familiaris
gtttgccaagaagagagaccgtgct

SEQ ID NO: 134720 - DNA, 25 bp, Canis familiaris
gtttccagaggagacaagcctgtgt

SEQ ID NO: 134721 - DNA, 25 bp, Canis familiaris
gtttccacggactataagaagctga

SEQ ID NO: 134722 - DNA, 25 bp, Canis familiaris
gtttccgcggtcttagatggtgtat

SEQ ID NO: 134723 - DNA, 25 bp, Canis familiaris
gtttctcggagttttgcaccgtaat

SEQ ID NO: 134724 - DNA, 25 bp, Canis familiaris
gtttctcaggtttgttcacactgct

SEQ ID NO: 134725 - DNA, 25 bp, Canis familiaris
gtttctttgatttttctcagcgctt

SEQ ID NO: 134726 - DNA, 25 bp, Canis familiaris
gtttctcatcttgatttctcagctc

SEQ ID NO: 134727 - DNA, 25 bp, Canis familiaris
gtttcatcacttgtatcctgagacc

SEQ ID NO: 134728 - DNA, 25 bp, Canis familiaris
gtttcatctcttgcatgtgtctaag

SEQ ID NO: 134729 - DNA, 25 bp, Canis familiaris
gtttcatctttcctggatcactaca

SEQ ID NO: 134730 - DNA, 25 bp, Canis familiaris
gtttccttctatcgagtactaagtg

SEQ ID NO: 134731 - DNA, 25 bp, Canis familiaris
gtttcctaatttatgactgacagtg

SEQ ID NO: 134732 - DNA, 25 bp, Canis familiaris
gtattcctacacattaactatttat

SEQ ID NO: 134733 - DNA, 25 bp, Canis familiaris
gtttcttacccctgacatgaatcta

SEQ ID NO: 134734 - DNA, 25 bp, Canis familiaris
gtttcttcaccctcaaaaatctgtg

SEQ ID NO: 134735 - DNA, 25 bp, Canis familiaris
gtctttaccccatgataccgattgg

SEQ ID NO: 134736 - DNA, 25 bp, Canis familiaris
gtcttgttttcctgacggcagttag

SEQ ID NO: 134737 - DNA, 25 bp, Canis familiaris
gtcttttcataggctgaccttgcag

SEQ ID NO: 134738 - DNA, 25 bp, Canis familiaris
gtttgtgtcgagtcagatccttaat

SEQ ID NO: 134739 - DNA, 25 bp, Canis familiaris
gtttgatgatgcgctcagtgccatg

SEQ ID NO: 134740 - DNA, 25 bp, Canis familiaris
gtttgatgaaaccactgcagatgac

SEQ ID NO: 134741 - DNA, 25 bp, Canis familiaris
gtttgcagatgaagtacgattgtcc

SEQ ID NO: 134742 - DNA, 25 bp, Canis familiaris
gtttggatcatgctaaattctcaca

SEQ ID NO: 134743 - DNA, 25 bp, Canis familiaris
gtttggtccatgaacagatgttgtc

SEQ ID NO: 134744 - DNA, 25 bp, Canis familiaris
tgtttggtcctggcacaattctcag

SEQ ID NO: 134745 - DNA, 25 bp, Canis familiaris
gtttcagtcctggtatctgtgcttg

SEQ ID NO: 134746 - DNA, 25 bp, Canis familiaris
gtttctgctccaagtacgagtgctg

SEQ ID NO: 134747 - DNA, 25 bp, Canis familiaris
gtttcatcccattttcagattgtga

SEQ ID NO: 134748 - DNA, 25 bp, Canis familiaris
gtttcaagctcttcaatctctttat

SEQ ID NO: 134749 - DNA, 25 bp, Canis familiaris
gtttaatcatcttagttactgtaca

SEQ ID NO: 134750 - DNA, 25 bp, Canis familiaris
gtttaagatctattgtgtcctgcat

SEQ ID NO: 134751 - DNA, 25 bp, Canis familiaris
gtttaagacatttgtcaccattttt

SEQ ID NO: 134752 - DNA, 25 bp, Canis familiaris
gtttcaggagtttgccaacattgct

SEQ ID NO: 134753 - DNA, 25 bp, Canis familiaris
gtttctggacatcatccacacttgg

SEQ ID NO: 134754 - DNA, 25 bp, Canis familiaris
gtatttggaaagtctcagcacctga

SEQ ID NO: 134755 - DNA, 25 bp, Canis familiaris
gtattgtggtaatgccacctgccac

SEQ ID NO: 134756 - DNA, 25 bp, Canis familiaris
gtttgggtgagattgaccaggcctg

SEQ ID NO: 134757 - DNA, 25 bp, Canis familiaris
gtttggagataatacacaaggctgt

SEQ ID NO: 134758 - DNA, 25 bp, Canis familiaris
gtttcgtgtaaattcctagtgcaga

SEQ ID NO: 134759 - DNA, 25 bp, Canis familiaris
gtttctggtccacttctgtattgaa

SEQ ID NO: 134760 - DNA, 25 bp, Canis familiaris
gtttctttccatcctctttaaaatg

SEQ ID NO: 134761 - DNA, 25 bp, Canis familiaris
gtttgttttctccttctgtgaaaag

SEQ ID NO: 134762 - DNA, 25 bp, Canis familiaris
gtattactaggcccttctggaaaag

SEQ ID NO: 134763 - DNA, 25 bp, Canis familiaris
gtcttacaggggcttctgggaaagt

SEQ ID NO: 134764 - DNA, 25 bp, Canis familiaris
gtagtagggggccttggtggctaca

SEQ ID NO: 134765 - DNA, 25 bp, Canis familiaris
gtagtaagggatgtgacagttttca

SEQ ID NO: 134766 - DNA, 25 bp, Canis familiaris
gtttaagaaacatacagtcctatca

SEQ ID NO: 134767 - DNA, 25 bp, Canis familiaris
gtataaataaactcaagtcttgtct

SEQ ID NO: 134768 - DNA, 25 bp, Canis familiaris
gtttctaaaaaacactctagctata

SEQ ID NO: 134769 - DNA, 25 bp, Canis familiaris
gtttctaataaaatgttctcaccga

SEQ ID NO: 134770 - DNA, 25 bp, Canis familiaris
gtggaataaaaggttcttatcctag

SEQ ID NO: 134771 - DNA, 25 bp, Canis familiaris
gtgggaaaactggaaccgagcccag

SEQ ID NO: 134772 - DNA, 25 bp, Canis familiaris
gtagaacaaccacaaccggacactg

SEQ ID NO: 134773 - DNA, 25 bp, Canis familiaris
gtacgaataccacaggccagataaa

SEQ ID NO: 134774 - DNA, 25 bp, Canis familiaris
gtttgaacactacaggtccacttac

SEQ ID NO: 134775 - DNA, 25 bp, Canis familiaris
gtttcaacttgttaggtcccattat

SEQ ID NO: 134776 - DNA, 25 bp, Canis familiaris
gtaggatcatttcaaggctcccttt

SEQ ID NO: 134777 - DNA, 25 bp, Canis familiaris
gtttgctatacttacgagatgccct

SEQ ID NO: 134778 - DNA, 25 bp, Canis familiaris
gtttggtgactgtattggactctta

SEQ ID NO: 134779 - DNA, 25 bp, Canis familiaris
gtttctgtacattttaagcacgtat

SEQ ID NO: 134780 - DNA, 25 bp, Canis familiaris
gtttcttgaaagatgctaactgcca

SEQ ID NO: 134781 - DNA, 25 bp, Canis familiaris
gtttctggagcaggggctcagaccc

SEQ ID NO: 134782 - DNA, 25 bp, Canis familiaris
gtttctggataggccacaacactcc

SEQ ID NO: 134783 - DNA, 25 bp, Canis familiaris
gtttcagacatacagagaacccact

SEQ ID NO: 134784 - DNA, 25 bp, Canis familiaris
gtttcagaaaaacgagagcacctct

SEQ ID NO: 134785 - DNA, 25 bp, Canis familiaris
gtttggaaataccgagctatacttt

SEQ ID NO: 134786 - DNA, 25 bp, Canis familiaris
gtttggcaaacacaaggtatccctt

SEQ ID NO: 134787 - DNA, 25 bp, Canis familiaris
gtttgctcaaacaggggtcagtccg

SEQ ID NO: 134788 - DNA, 25 bp, Canis familiaris
gtttcataaaatagtggcttttctc

SEQ ID NO: 134789 - DNA, 25 bp, Canis familiaris
gtttgtgctaaatgaggctttcctc

SEQ ID NO: 134790 - DNA, 25 bp, Canis familiaris
gtttgtgtactgtggcttggatgca

SEQ ID NO: 134791 - DNA, 25 bp, Canis familiaris
gtttctgtactaacctttgagcaca

SEQ ID NO: 134792 - DNA, 25 bp, Canis familiaris
gtttgagtagttaccagcttatgaa

SEQ ID NO: 134793 - DNA, 25 bp, Canis familiaris
gtttggttttcagcagcatcttaca

SEQ ID NO: 134794 - DNA, 25 bp, Canis familiaris
gtttgtgtgctcaatgggccattta

SEQ ID NO: 134795 - DNA, 25 bp, Canis familiaris
gtttgttgcccaggtgtcatgaaag

SEQ ID NO: 134796 - DNA, 25 bp, Canis familiaris
gtttggtcctcggtgtgcagagatc

SEQ ID NO: 134797 - DNA, 25 bp, Canis familiaris
gtattgcgccgctagaggtgaaatt

SEQ ID NO: 134798 - DNA, 25 bp, Canis familiaris
gtattgtctggccaaagtaatatta

SEQ ID NO: 134799 - DNA, 25 bp, Canis familiaris
gtattgattcagccagtagtgataa

SEQ ID NO: 134800 - DNA, 25 bp, Canis familiaris
gtttgattatgccccaatggaaagt

SEQ ID NO: 134801 - DNA, 25 bp, Canis familiaris
gtttgataatgccacgcatctacaa

SEQ ID NO: 134802 - DNA, 25 bp, Canis familiaris
gtttgtagagcgaagccaacacagc

SEQ ID NO: 134803 - DNA, 25 bp, Canis familiaris
gtttgcttgatggttacaatgcaag

SEQ ID NO: 134804 - DNA, 25 bp, Canis familiaris
gtttctctgttcacacaatgccaat

SEQ ID NO: 134805 - DNA, 25 bp, Canis familiaris
gtttcctgattcttctaagccattt

SEQ ID NO: 134806 - DNA, 25 bp, Canis familiaris
gtttctctgagttctgtaagctgct

SEQ ID NO: 134807 - DNA, 25 bp, Canis familiaris
gtttctcaagttctacatatgctga

SEQ ID NO: 134808 - DNA, 25 bp, Canis familiaris
gtttctcaagttttctgcttctgtg

SEQ ID NO: 134809 - DNA, 25 bp, Canis familiaris
gtttctcagagcttatttttttgtt

SEQ ID NO: 134810 - DNA, 25 bp, Canis familiaris
gtctttaggcttcgcctttttgtca

SEQ ID NO: 134811 - DNA, 25 bp, Canis familiaris
tgtcctaaggttccacttaatttag

SEQ ID NO: 134812 - DNA, 25 bp, Canis familiaris
gtttgccagtttgcctaaattctag

SEQ ID NO: 134813 - DNA, 25 bp, Canis familiaris
gtttccaactttgctaagtgctcat

SEQ ID NO: 134814 - DNA, 25 bp, Canis familiaris
gtttcagcagacatccctattagta

SEQ ID NO: 134815 - DNA, 25 bp, Canis familiaris
gtttcagagaccccagtgttcaaaa

SEQ ID NO: 134816 - DNA, 25 bp, Canis familiaris
gtttcagaccggacagagttcacca

SEQ ID NO: 134817 - DNA, 25 bp, Canis familiaris
gtatttaacggcagagcttgacttc

SEQ ID NO: 134818 - DNA, 25 bp, Canis familiaris
gtattctcaactagcagggtctggc

SEQ ID NO: 134819 - DNA, 25 bp, Canis familiaris
gtttctcagactatctggactgcca

SEQ ID NO: 134820 - DNA, 25 bp, Canis familiaris
gtttctcagactttctgaactccca

SEQ ID NO: 134821 - DNA, 25 bp, Canis familiaris
gtttctcagagcttcgggagtccga

SEQ ID NO: 134822 - DNA, 25 bp, Canis familiaris
gtttccagaattcgttgttgttgaa

SEQ ID NO: 134823 - DNA, 25 bp, Canis familiaris
gtttcacgagattctctttttgaaa

SEQ ID NO: 134824 - DNA, 25 bp, Canis familiaris
atgatgcgctcagtgccatgcgttc

SEQ ID NO: 134825 - DNA, 25 bp, Canis familiaris
ctcagtgccatgcgttcgctgaaag

SEQ ID NO: 134826 - DNA, 25 bp, Canis familiaris
catgcgttcgctgaaaggcatcggt

SEQ ID NO: 134827 - DNA, 25 bp, Canis familiaris
ctgaaaggcatcggtgccacgcatc

SEQ ID NO: 134828 - DNA, 25 bp, Canis familiaris
ggcatcggtgccacgcatcttcatg

SEQ ID NO: 134829 - DNA, 25 bp, Canis familiaris
tgccacgcatcttcatgaagggcgc

SEQ ID NO: 134830 - DNA, 25 bp, Canis familiaris
atcttcatgaagggcgcgacccgcg

SEQ ID NO: 134831 - DNA, 25 bp, Canis familiaris
attaacgcgttcgcagttgcagcga

SEQ ID NO: 134832 - DNA, 25 bp, Canis familiaris
gcgttcgcagttgcagcgattgcaa

SEQ ID NO: 134833 - DNA, 25 bp, Canis familiaris
agttgcagcgattgcaactggcctg

SEQ ID NO: 134834 - DNA, 25 bp, Canis familiaris
gggaaaactgtcgccagttgtgcac

SEQ ID NO: 134835 - DNA, 25 bp, Canis familiaris
cgccagttgtgcacttttacaagcc

SEQ ID NO: 134836 - DNA, 25 bp, Canis familiaris
cacttttacaagccgcaaaggcagc

SEQ ID NO: 134837 - DNA, 25 bp, Canis familiaris
caagccgcaaaggcagcaggctacc

SEQ ID NO: 134838 - DNA, 25 bp, Canis familiaris
gcaaaggcagcaggctaccggacgg

SEQ ID NO: 134839 - DNA, 25 bp, Canis familiaris
aggtttacgcaatagcgacgcgctg

SEQ ID NO: 134840 - DNA, 25 bp, Canis familiaris
cgcaatagcgacgcgctggcgttac

SEQ ID NO: 134841 - DNA, 25 bp, Canis familiaris
gcgacgcgctggcgttacagcgcaa

SEQ ID NO: 134842 - DNA, 25 bp, Canis familiaris
gtttctctcgttcgatggaagtctc

SEQ ID NO: 134843 - DNA, 25 bp, Canis familiaris
gtttctgtattttgtgactagttgc

SEQ ID NO: 134844 - DNA, 25 bp, Canis familiaris
gtttcagctcaagttgtgacctcgg

SEQ ID NO: 134845 - DNA, 25 bp, Canis familiaris
gtttcagcaacagtagtgtcaaggg

SEQ ID NO: 134846 - DNA, 25 bp, Canis familiaris
gtttccaagagatgtggccagggct

SEQ ID NO: 134847 - DNA, 25 bp, Canis familiaris
gtttcagaatggtgttgccgcctgc

SEQ ID NO: 134848 - DNA, 25 bp, Canis familiaris
gtttcataaagcatgttcctgccag

SEQ ID NO: 134849 - DNA, 25 bp, Canis familiaris
gtattcagatacgaggcctttcctc

SEQ ID NO: 134850 - DNA, 25 bp, Canis familiaris
gtttccttcatagcagcatttcttc

SEQ ID NO: 134851 - DNA, 25 bp, Canis familiaris
gtattaccatactcaactgtctctc

SEQ ID NO: 134852 - DNA, 25 bp, Canis familiaris
gtttgcagcctttatagtcgtctac

SEQ ID NO: 134853 - DNA, 25 bp, Canis familiaris
gtttgactgcttcagatctctgtcc

SEQ ID NO: 134854 - DNA, 25 bp, Canis familiaris
gtttggccatagtcaacatctgcac

SEQ ID NO: 134855 - DNA, 25 bp, Canis familiaris
gtttggcctgtgacatcagccagcc

SEQ ID NO: 134856 - DNA, 25 bp, Canis familiaris
gtttggacagcagctgcagtcctcc

SEQ ID NO: 134857 - DNA, 25 bp, Canis familiaris
gtttgaagcgcagcaggtgcatcgc

SEQ ID NO: 134858 - DNA, 25 bp, Canis familiaris
gtttgtcagccagtgcatgtctgcc

SEQ ID NO: 134859 - DNA, 25 bp, Canis familiaris
gtttgcgcagacagctgttggccaa

SEQ ID NO: 134860 - DNA, 25 bp, Canis familiaris
gtttctgaagctttgagttcctcaa

SEQ ID NO: 134861 - DNA, 25 bp, Canis familiaris
gtttctgaactaatgtttccacctg

SEQ ID NO: 134862 - DNA, 25 bp, Canis familiaris
gtttcttgaagaattgcttgccccg

SEQ ID NO: 134863 - DNA, 25 bp, Canis familiaris
gtatttataaatattccaccccgtg

SEQ ID NO: 134864 - DNA, 25 bp, Canis familiaris
gtattttagaaagatcccgtccagt

SEQ ID NO: 134865 - DNA, 25 bp, Canis familiaris
gtttcttggaaacttccgagaccag

SEQ ID NO: 134866 - DNA, 25 bp, Canis familiaris
gtatttaaacaacttcccaggctga

SEQ ID NO: 134867 - DNA, 25 bp, Canis familiaris
gtagaatgaaatgttccccacctga

SEQ ID NO: 134868 - DNA, 25 bp, Canis familiaris
gtataagtaattcttctccccagca

SEQ ID NO: 134869 - DNA, 25 bp, Canis familiaris
gtatctaatacttattttccccact

SEQ ID NO: 134870 - DNA, 25 bp, Canis familiaris
gtatcaaataactttacttgcctaa

SEQ ID NO: 134871 - DNA, 25 bp, Canis familiaris
gtataataaacttctttggcctgac

SEQ ID NO: 134872 - DNA, 25 bp, Canis familiaris
gtatagtacagcttggtttgaccca

SEQ ID NO: 134873 - DNA, 25 bp, Canis familiaris
gtatttacttgtttttgacccacag

SEQ ID NO: 134874 - DNA, 25 bp, Canis familiaris
gtttctactttggtcttattctaca

SEQ ID NO: 134875 - DNA, 25 bp, Canis familiaris
gtttcttttatggatcttttattca

SEQ ID NO: 134876 - DNA, 25 bp, Canis familiaris
gtttctctttcacattgatcttctg

SEQ ID NO: 134877 - DNA, 25 bp, Canis familiaris
gtttctctttgctcttgagtttcca

SEQ ID NO: 134878 - DNA, 25 bp, Canis familiaris
gtttctcttctgggtcatggtaaaa

SEQ ID NO: 134879 - DNA, 25 bp, Canis familiaris
gtttctccttcaaatatggtgacac

SEQ ID NO: 134880 - DNA, 25 bp, Canis familiaris
gtttgccttgtgtcaatcaggtacc

SEQ ID NO: 134881 - DNA, 25 bp, Canis familiaris
gtttgccttgaagaatggccaccgg

SEQ ID NO: 134882 - DNA, 25 bp, Canis familiaris
gtttgggggacacatgtccccggat

SEQ ID NO: 134883 - DNA, 25 bp, Canis familiaris
gtttgatggggagcttgtctgcaca

SEQ ID NO: 134884 - DNA, 25 bp, Canis familiaris
gtttcagggtatttgcttctcatct

SEQ ID NO: 134885 - DNA, 25 bp, Canis familiaris
gtttctgggtgatctgtttcatctg

SEQ ID NO: 134886 - DNA, 25 bp, Canis familiaris
gtttctggttggatttgccatctgg

SEQ ID NO: 134887 - DNA, 25 bp, Canis familiaris
gtttcggttggccacggcaaaggca

SEQ ID NO: 134888 - DNA, 25 bp, Canis familiaris
gtttcggaatgaccaggagcagaca

SEQ ID NO: 134889 - DNA, 25 bp, Canis familiaris
gtttcgtggcagagagctaggaata

SEQ ID NO: 134890 - DNA, 25 bp, Canis familiaris
gtttcatgtgaacggtgccactgta

SEQ ID NO: 134891 - DNA, 25 bp, Canis familiaris
gtttgctttcagcgatccagctgga

SEQ ID NO: 134892 - DNA, 25 bp, Canis familiaris
gtattgattccaggggccatgcagg

SEQ ID NO: 134893 - DNA, 25 bp, Canis familiaris
gtattgattccaggggccatgcagg

SEQ ID NO: 134894 - DNA, 25 bp, Canis familiaris
gtttgctttgcaaggaggctcagat

SEQ ID NO: 134895 - DNA, 25 bp, Canis familiaris
gtatcattcttgagtgatcgctcgg

SEQ ID NO: 134896 - DNA, 25 bp, Canis familiaris
gtatactgttaacgatcgtccgccc

SEQ ID NO: 134897 - DNA, 25 bp, Canis familiaris
gtttgtgttaactatggtctgggcc

SEQ ID NO: 134898 - DNA, 25 bp, Canis familiaris
gtttgcgtaagactcggtgtgggcc

SEQ ID NO: 134899 - DNA, 25 bp, Canis familiaris
gtttctggacagttggaagttggca

SEQ ID NO: 134900 - DNA, 25 bp, Canis familiaris
gtttctggaagcttggagtatgact

SEQ ID NO: 134901 - DNA, 25 bp, Canis familiaris
gtttctcagatatttctgtttactc

SEQ ID NO: 134902 - DNA, 25 bp, Canis familiaris
gtttctggttatgctatgttcctct

SEQ ID NO: 134903 - DNA, 25 bp, Canis familiaris
gtttgggaatatacatttatctcta

SEQ ID NO: 134904 - DNA, 25 bp, Canis familiaris
gtttgcctaattcatgtcttcactt

SEQ ID NO: 134905 - DNA, 25 bp, Canis familiaris
gtttgccaaccttagtttgatttca

SEQ ID NO: 134906 - DNA, 25 bp, Canis familiaris
gtttcggactctgatggtgtttcca

SEQ ID NO: 134907 - DNA, 25 bp, Canis familiaris
gtttctggactctgatggtgtcttc

SEQ ID NO: 134908 - DNA, 25 bp, Canis familiaris
gtttgttgattcgtgatgactgcct

SEQ ID NO: 134909 - DNA, 25 bp, Canis familiaris
gtttgaattgtattgaagtcctgtg

SEQ ID NO: 134910 - DNA, 25 bp, Canis familiaris
gtttggagttttagagccactgtgt

SEQ ID NO: 134911 - DNA, 25 bp, Canis familiaris
gtttgagatttttttcgccgtgtgt

SEQ ID NO: 134912 - DNA, 25 bp, Canis familiaris
gtattagccttttgttggacttgtg

SEQ ID NO: 134913 - DNA, 25 bp, Canis familiaris
gtttgagggtgttttggtgtttgat

SEQ ID NO: 134914 - DNA, 25 bp, Canis familiaris
gtttgagtcccactttgggtgtaga

SEQ ID NO: 134915 - DNA, 25 bp, Canis familiaris
gtttgcagccggctttggggtagac

SEQ ID NO: 134916 - DNA, 25 bp, Canis familiaris
gtttgccccggtgtggatgtgggag

SEQ ID NO: 134917 - DNA, 25 bp, Canis familiaris
gtttctccccggaggagatcaggaa

SEQ ID NO: 134918 - DNA, 25 bp, Canis familiaris
gtttctcctgcctgaggtgatgaca

SEQ ID NO: 134919 - DNA, 25 bp, Canis familiaris
gtttgctgcttgttgcagggagctg

SEQ ID NO: 134920 - DNA, 25 bp, Canis familiaris
gtttctttggtgcgtgtgcgtgaat

SEQ ID NO: 134921 - DNA, 25 bp, Canis familiaris
gtttctttgactcaggagcagaagt

SEQ ID NO: 134922 - DNA, 25 bp, Canis familiaris
gtttctcttaattgagtaggagtgt

SEQ ID NO: 134923 - DNA, 25 bp, Canis familiaris
gtttcttttcttgatatggaatctt

SEQ ID NO: 134924 - DNA, 25 bp, Canis familiaris
gtctacctttttgataaactcttag

SEQ ID NO: 134925 - DNA, 25 bp, Canis familiaris
gtctaacgttttgattcccgtgttg

SEQ ID NO: 134926 - DNA, 25 bp, Canis familiaris
gtcttactgttgctggaattccgtt

SEQ ID NO: 134927 - DNA, 25 bp, Canis familiaris
gtttccgtgaggatgacttccggag

SEQ ID NO: 134928 - DNA, 25 bp, Canis familiaris
gtttccctggggaagcttccaagat

SEQ ID NO: 134929 - DNA, 25 bp, Canis familiaris
gtttctccagaaggaaggtccaatg

SEQ ID NO: 134930 - DNA, 25 bp, Canis familiaris
gtttcccctaggccaggtaattgag

SEQ ID NO: 134931 - DNA, 25 bp, Canis familiaris
gtttccacaaagaccaatgtaacta

SEQ ID NO: 134932 - DNA, 25 bp, Canis familiaris
gtttgccactgaaattcacatccat

SEQ ID NO: 134933 - DNA, 25 bp, Canis familiaris
gtttgccctgcaaatgctcaataaa

SEQ ID NO: 134934 - DNA, 25 bp, Canis familiaris
gtttccacagcactgagctctatga

SEQ ID NO: 134935 - DNA, 25 bp, Canis familiaris
gtttccagcaagtgccttgacagtc

SEQ ID NO: 134936 - DNA, 25 bp, Canis familiaris
gtttcctaagctgtcttgactctgc

SEQ ID NO: 134937 - DNA, 25 bp, Canis familiaris
gtttcctcaatctatttattcctca

SEQ ID NO: 134938 - DNA, 25 bp, Canis familiaris
gtttccatcctcttaaatatcctga

SEQ ID NO: 134939 - DNA, 25 bp, Canis familiaris
gtttcctccatttgtagaatctcat

SEQ ID NO: 134940 - DNA, 25 bp, Canis familiaris
gtattccgctcgtggagactacttc

SEQ ID NO: 134941 - DNA, 25 bp, Canis familiaris
gtattccgctcgtggagactacttc

SEQ ID NO: 134942 - DNA, 25 bp, Canis familiaris
gtattcaccaaggaggacctcactg

SEQ ID NO: 134943 - DNA, 25 bp, Canis familiaris
gtattacaatcggaacacattcagc

SEQ ID NO: 134944 - DNA, 25 bp, Canis familiaris
gtatctacttggtaagaagctaggt

SEQ ID NO: 134945 - DNA, 25 bp, Canis familiaris
gtctctgactgctgaaatagatcgg

SEQ ID NO: 134946 - DNA, 25 bp, Canis familiaris
gtttgacatctgtaaatcaatcagc

SEQ ID NO: 134947 - DNA, 25 bp, Canis familiaris
gtttctcatctgtagcactgaccac

SEQ ID NO: 134948 - DNA, 25 bp, Canis familiaris
gtttcctgctgccagatgtggacac

SEQ ID NO: 134949 - DNA, 25 bp, Canis familiaris
gtttctccttgtatggatcactgac

SEQ ID NO: 134950 - DNA, 25 bp, Canis familiaris
gtttctggtctgtgtggaactgggt

SEQ ID NO: 134951 - DNA, 25 bp, Canis familiaris
gtattctcgttaagggacttcaggt

SEQ ID NO: 134952 - DNA, 25 bp, Canis familiaris
gtatcccattaaagttgcctctagc

SEQ ID NO: 134953 - DNA, 25 bp, Canis familiaris
gtttcctgacaaagattgcctcgag

SEQ ID NO: 134954 - DNA, 25 bp, Canis familiaris
gtttcgtggaatccttccatagagt

SEQ ID NO: 134955 - DNA, 25 bp, Canis familiaris
tgtttgggcgacactgtccaactac

SEQ ID NO: 134956 - DNA, 25 bp, Canis familiaris
gtatctttggaaaatcccaaccagc

SEQ ID NO: 134957 - DNA, 25 bp, Canis familiaris
gtttgttggataagacagtcccaca

SEQ ID NO: 134958 - DNA, 25 bp, Canis familiaris
gtttgtctatttcctagacccacac

SEQ ID NO: 134959 - DNA, 25 bp, Canis familiaris
gtattttattacttggagccccatc

SEQ ID NO: 134960 - DNA, 25 bp, Canis familiaris
gtttctgttgtacttggaaccttgt

SEQ ID NO: 134961 - DNA, 25 bp, Canis familiaris
gtttctgttgaatgtatgatccact

SEQ ID NO: 134962 - DNA, 25 bp, Canis familiaris
gtttctacacactttatcatccact

SEQ ID NO: 134963 - DNA, 25 bp, Canis familiaris
gtttctacacactttatcatccact

SEQ ID NO: 134964 - DNA, 25 bp, Canis familiaris
gtttgtggacacttaccactcactg

SEQ ID NO: 134965 - DNA, 25 bp, Canis familiaris
gtttctgaaacatacgtgcttcatt

SEQ ID NO: 134966 - DNA, 25 bp, Canis familiaris
gtttctcacccatagtgttatacaa

SEQ ID NO: 134967 - DNA, 25 bp, Canis familiaris
gtttctcacccatagcagtattgac

SEQ ID NO: 134968 - DNA, 25 bp, Canis familiaris
gtttctctccctcaggaatctgaga

SEQ ID NO: 134969 - DNA, 25 bp, Canis familiaris
gtttgattcatctccagtttctaca

SEQ ID NO: 134970 - DNA, 25 bp, Canis familiaris
gtttgtcgcataaccttgttcaatt

SEQ ID NO: 134971 - DNA, 25 bp, Canis familiaris
gtattttaagcatcctatatcagat

SEQ ID NO: 134972 - DNA, 25 bp, Canis familiaris
gtatcagtgtaataccatattattt

SEQ ID NO: 134973 - DNA, 25 bp, Canis familiaris
gtttgttgcaacagccattttcttg

SEQ ID NO: 134974 - DNA, 25 bp, Canis familiaris
gtttgcttaagcagctgcagcagtt

SEQ ID NO: 134975 - DNA, 25 bp, Canis familiaris
gtttgctttgagatgcacaggtttc

SEQ ID NO: 134976 - DNA, 25 bp, Canis familiaris
gtttgtgctttgatgccaggaatgc

SEQ ID NO: 134977 - DNA, 25 bp, Canis familiaris
gtttggttccagaccagcagcatct

SEQ ID NO: 134978 - DNA, 25 bp, Canis familiaris
gtttggtccaaaccacagcaatccc

SEQ ID NO: 134979 - DNA, 25 bp, Canis familiaris
gtttgtcctaaactagcagacccac

SEQ ID NO: 134980 - DNA, 25 bp, Canis familiaris
gtttctccagaaaaacagaaccaca

SEQ ID NO: 134981 - DNA, 25 bp, Canis familiaris
gtatttcaaagcaaacacgagagcc

SEQ ID NO: 134982 - DNA, 25 bp, Canis familiaris
gtttgtcacatagaaccagaaccac

SEQ ID NO: 134983 - DNA, 25 bp, Canis familiaris
gtttctcttcaggaactggaatccc

SEQ ID NO: 134984 - DNA, 25 bp, Canis familiaris
gtttcccatacctagctgtaacttc

SEQ ID NO: 134985 - DNA, 25 bp, Canis familiaris
gtttgcacttaatccttaactgtat

SEQ ID NO: 134986 - DNA, 25 bp, Canis familiaris
gtttgacgtcattacattggaaggc

SEQ ID NO: 134987 - DNA, 25 bp, Canis familiaris
gtttccgccatctcagtcatcaggg

SEQ ID NO: 134988 - DNA, 25 bp, Canis familiaris
gtttgcacccatgacatgttcaggc

SEQ ID NO: 134989 - DNA, 25 bp, Canis familiaris
gtttgcctcacttgacagttgcagt

SEQ ID NO: 134990 - DNA, 25 bp, Canis familiaris
gtttccaagtgacctgttgagctgt

SEQ ID NO: 134991 - DNA, 25 bp, Canis familiaris
gtttctctagtgtgatttgagcgtt

SEQ ID NO: 134992 - DNA, 25 bp, Canis familiaris
gtttctgtgaacatgtttgcagctt

SEQ ID NO: 134993 - DNA, 25 bp, Canis familiaris
gtttctctgaacatcatttcatcaa

SEQ ID NO: 134994 - DNA, 25 bp, Canis familiaris
gtttctgatatgtcctcttgtattg

SEQ ID NO: 134995 - DNA, 25 bp, Canis familiaris
gtttgccaacttgcttgatattgac

SEQ ID NO: 134996 - DNA, 25 bp, Canis familiaris
gtttgaattcttgtagttggacttt

SEQ ID NO: 134997 - DNA, 25 bp, Canis familiaris
gtttccttcattgtatttgggcctt

SEQ ID NO: 134998 - DNA, 25 bp, Canis familiaris
gtttctctacttgcatttctgtggc

SEQ ID NO: 134999 - DNA, 25 bp, Canis familiaris
gtttctctgactccacatatattgt

SEQ ID NO: 135000 - DNA, 25 bp, Canis familiaris
gtttctctgctgaacacctagtgac

SEQ ID NO: 135001 - DNA, 25 bp, Canis familiaris
gtttctgtcatgtagcctcaagtgt

SEQ ID NO: 135002 - DNA, 25 bp, Canis familiaris
gtattgctgttgtcatcccaagata

SEQ ID NO: 135003 - DNA, 25 bp, Canis familiaris
gtttgctctgattactccggagaag

SEQ ID NO: 135004 - DNA, 25 bp, Canis familiaris
gtttccttttctccgggaagacatg

SEQ ID NO: 135005 - DNA, 25 bp, Canis familiaris
gtttccttgtttcagtgttcaacac

SEQ ID NO: 135006 - DNA, 25 bp, Canis familiaris
gtattgcctggtatgcttttgtaag

SEQ ID NO: 135007 - DNA, 25 bp, Canis familiaris
gtttcctggctaagattaggacaag

SEQ ID NO: 135008 - DNA, 25 bp, Canis familiaris
gtctgtccttcaagagaaatcggaa

SEQ ID NO: 135009 - DNA, 25 bp, Canis familiaris
gtttccactctggcagaagacagga

SEQ ID NO: 135010 - DNA, 25 bp, Canis familiaris
gtttcccctccaatgaaatgtgata

SEQ ID NO: 135011 - DNA, 25 bp, Canis familiaris
gtggaaaccgacagaaattagacaa

SEQ ID NO: 135012 - DNA, 25 bp, Canis familiaris
gggagcaagtgccgttaattaagaa

SEQ ID NO: 135013 - DNA, 25 bp, Canis familiaris
ggtgggaccctgatccattaggata

SEQ ID NO: 135014 - DNA, 25 bp, Canis familiaris
ggatgaaggcccgttcgttgggatg

SEQ ID NO: 135015 - DNA, 25 bp, Canis familiaris
gtagaactgcccgtacgtggagggg

SEQ ID NO: 135016 - DNA, 25 bp, Canis familiaris
gtagcaaaccccgaagctgaggggc

SEQ ID NO: 135017 - DNA, 25 bp, Canis familiaris
gtatcaatcaacatccacgtagggt

SEQ ID NO: 135018 - DNA, 25 bp, Canis familiaris
gtataatatacttgctcagctctaa

SEQ ID NO: 135019 - DNA, 25 bp, Canis familiaris
gtatcctatgaatgtcactttgaat

SEQ ID NO: 135020 - DNA, 25 bp, Canis familiaris
gtatactttgctagcatcctgttga

SEQ ID NO: 135021 - DNA, 25 bp, Canis familiaris
gtgtacgttgggaggtctaaataag

SEQ ID NO: 135022 - DNA, 25 bp, Canis familiaris
gtaacttctaggagtgttcaaggaa

SEQ ID NO: 135023 - DNA, 25 bp, Canis familiaris
gtatcacattaaccggttgtgccgg

SEQ ID NO: 135024 - DNA, 25 bp, Canis familiaris
gtatactgtgatcccgatgattggc

SEQ ID NO: 135025 - DNA, 25 bp, Canis familiaris
gtattcagtgacctagatttgtgct

SEQ ID NO: 135026 - DNA, 25 bp, Canis familiaris
gtagtcctgactaacatagctgtct

SEQ ID NO: 135027 - DNA, 25 bp, Canis familiaris
gtattcactgtctcaaagtggtaga

SEQ ID NO: 135028 - DNA, 25 bp, Canis familiaris
gtattgccacctgaacgttgcattg

SEQ ID NO: 135029 - DNA, 25 bp, Canis familiaris
gtatatgccccaataatttttgagc

SEQ ID NO: 135030 - DNA, 25 bp, Canis familiaris
gtttccccagataatgtgttagcac

SEQ ID NO: 135031 - DNA, 25 bp, Canis familiaris
gtttgcccacagtttgttctgtcac

SEQ ID NO: 135032 - DNA, 25 bp, Canis familiaris
gtttgcctccactatgatgtttgga

SEQ ID NO: 135033 - DNA, 25 bp, Canis familiaris
gtttggatacatctgctgtgtggga

SEQ ID NO: 135034 - DNA, 25 bp, Canis familiaris
gtttgttgaaagtcctgtgggaaca

SEQ ID NO: 135035 - DNA, 25 bp, Canis familiaris
ggactactaaaatctctgggataca

SEQ ID NO: 135036 - DNA, 25 bp, Canis familiaris
gtagctatttaatacatcgagtaac

SEQ ID NO: 135037 - DNA, 25 bp, Canis familiaris
gtattatagtaatcctgtttccact

SEQ ID NO: 135038 - DNA, 25 bp, Canis familiaris
gtttgttgatatctccttataccac

SEQ ID NO: 135039 - DNA, 25 bp, Canis familiaris
gtttgcctgatatctactttagcca

SEQ ID NO: 135040 - DNA, 25 bp, Canis familiaris
gtattgcttggatctattggctaca

SEQ ID NO: 135041 - DNA, 25 bp, Canis familiaris
gtttgcttggatggttcgggactcc

SEQ ID NO: 135042 - DNA, 25 bp, Canis familiaris
gtttgctttttgttgggtcaggcca

SEQ ID NO: 135043 - DNA, 25 bp, Canis familiaris
gtttgctttcttggggaggctggaa

SEQ ID NO: 135044 - DNA, 25 bp, Canis familiaris
gtttgctcttcgcggtgaatgggaa

SEQ ID NO: 135045 - DNA, 25 bp, Canis familiaris
gtttcctgctctgaggtttgggggc

SEQ ID NO: 135046 - DNA, 25 bp, Canis familiaris
gtttgcccattagggttatcgggag

SEQ ID NO: 135047 - DNA, 25 bp, Canis familiaris
gtttgatcctttggggttctttgag

SEQ ID NO: 135048 - DNA, 25 bp, Canis familiaris
gtttgcacctttatttgtttgctga

SEQ ID NO: 135049 - DNA, 25 bp, Canis familiaris
gtttcccttatttcaattgctactt

SEQ ID NO: 135050 - DNA, 25 bp, Canis familiaris
gtttgttttagaaccattgcttcct

SEQ ID NO: 135051 - DNA, 25 bp, Canis familiaris
gtttctgtttgacacacattcctca

SEQ ID NO: 135052 - DNA, 25 bp, Canis familiaris
gtttctgtttcaggtacatctcctc

SEQ ID NO: 135053 - DNA, 25 bp, Canis familiaris
gtttgctgttcatggagacatccgc

SEQ ID NO: 135054 - DNA, 25 bp, Canis familiaris
gtttgctgtatatgctgaaattttt

SEQ ID NO: 135055 - DNA, 25 bp, Canis familiaris
gtttgtgttgtctgcaatttctttc

SEQ ID NO: 135056 - DNA, 25 bp, Canis familiaris
gtttgtcttgtctgatagtgctcca

SEQ ID NO: 135057 - DNA, 25 bp, Canis familiaris
gtttgtgttgtcttcagagtgtatg

SEQ ID NO: 135058 - DNA, 25 bp, Canis familiaris
gtttctgtatgcagtaggctgaaat

SEQ ID NO: 135059 - DNA, 25 bp, Canis familiaris
gtttgcatttccctggaggagaatc

SEQ ID NO: 135060 - DNA, 25 bp, Canis familiaris
gtatcgttccgcctgggcgggattc

SEQ ID NO: 135061 - DNA, 25 bp, Canis familiaris
gtatcaaggcccagggggccaccgg

SEQ ID NO: 135062 - DNA, 25 bp, Canis familiaris
gtatacgtccttaggggggcacacg

SEQ ID NO: 135063 - DNA, 25 bp, Canis familiaris
gtataggtctgtattcggtacccct

SEQ ID NO: 135064 - DNA, 25 bp, Canis familiaris
gtttgactctgtatttatttcccca

SEQ ID NO: 135065 - DNA, 25 bp, Canis familiaris
gtttccctgcaactcttttgttgcc

SEQ ID NO: 135066 - DNA, 25 bp, Canis familiaris
gtttgccctaatcttttgtcgagta

SEQ ID NO: 135067 - DNA, 25 bp, Canis familiaris
gtttgcgactaaaatcttgtgtctc

SEQ ID NO: 135068 - DNA, 25 bp, Canis familiaris
gtttctggtcctgattgggtccaac

SEQ ID NO: 135069 - DNA, 25 bp, Canis familiaris
gtattcggaccgacactgggtcgct

SEQ ID NO: 135070 - DNA, 25 bp, Canis familiaris
gtatcatttaccggagggttctgtg

SEQ ID NO: 135071 - DNA, 25 bp, Canis familiaris
gtatataaaacgggagtctcatctt

SEQ ID NO: 135072 - DNA, 25 bp, Canis familiaris
gtataaaatcccggcagttccttgt

SEQ ID NO: 135073 - DNA, 25 bp, Canis familiaris
gtattcagtaccgctcagtatttta

SEQ ID NO: 135074 - DNA, 25 bp, Canis familiaris
gtattcagtaccgctcagtatttta

SEQ ID NO: 135075 - DNA, 25 bp, Canis familiaris
gtattcagtaccgctcagtatttta

SEQ ID NO: 135076 - DNA, 25 bp, Canis familiaris
gtatcaagctatgcgtcggatttat

SEQ ID NO: 135077 - DNA, 25 bp, Canis familiaris
gtatcctttccagctggatttttct

SEQ ID NO: 135078 - DNA, 25 bp, Canis familiaris
gtatcctattacacgggtaattcca

SEQ ID NO: 135079 - DNA, 25 bp, Canis familiaris
gtatccacgggcacgggaaaccaca

SEQ ID NO: 135080 - DNA, 25 bp, Canis familiaris
gtagcaccgtgagacgcgggacaca

SEQ ID NO: 135081 - DNA, 25 bp, Canis familiaris
gtatgccaagtacacccgtacagga

SEQ ID NO: 135082 - DNA, 25 bp, Canis familiaris
gtatccatggtgtgagcccaaaggt

SEQ ID NO: 135083 - DNA, 25 bp, Canis familiaris
gtatcaatggtgtgagccccaaggt

SEQ ID NO: 135084 - DNA, 25 bp, Canis familiaris
gtatacagtgtatatccccaataac

SEQ ID NO: 135085 - DNA, 25 bp, Canis familiaris
gtatcacgtgtccgtcaacgaatcc

SEQ ID NO: 135086 - DNA, 25 bp, Canis familiaris
gtatcacagttctctaagtgcccct

SEQ ID NO: 135087 - DNA, 25 bp, Canis familiaris
gtatcctgtacagcaaggttggtcc

SEQ ID NO: 135088 - DNA, 25 bp, Canis familiaris
gtatcctccatagacagggtggccc

SEQ ID NO: 135089 - DNA, 25 bp, Canis familiaris
gtatccttaacaaagatcagcttcc

SEQ ID NO: 135090 - DNA, 25 bp, Canis familiaris
gtaaataccacaatgacaatgctta

SEQ ID NO: 135091 - DNA, 25 bp, Canis familiaris
gtatatttacaaagaaatcatcatg

SEQ ID NO: 135092 - DNA, 25 bp, Canis familiaris
gtatacctcaagaggaatgactgtt

SEQ ID NO: 135093 - DNA, 25 bp, Canis familiaris
gtataccccagtcagtcagaggttc

SEQ ID NO: 135094 - DNA, 25 bp, Canis familiaris
gtttgcccacaagtagcacagaggt

SEQ ID NO: 135095 - DNA, 25 bp, Canis familiaris
gtttgccaacattgctgaatcagga

SEQ ID NO: 135096 - DNA, 25 bp, Canis familiaris
gtttgcgcagcagatccagagagga

SEQ ID NO: 135097 - DNA, 25 bp, Canis familiaris
gtttcctgcagcatagcaaatgtga

SEQ ID NO: 135098 - DNA, 25 bp, Canis familiaris
gtatctcgtgcttccagcaaactga

SEQ ID NO: 135099 - DNA, 25 bp, Canis familiaris
gtttcgtgcctttcagtagctagta

SEQ ID NO: 135100 - DNA, 25 bp, Canis familiaris
gtttcgcacctttcaattgccagat

SEQ ID NO: 135101 - DNA, 25 bp, Canis familiaris
gtttccaccttcaagattccattta

SEQ ID NO: 135102 - DNA, 25 bp, Canis familiaris
gtttccattcttagacatctgtcat

SEQ ID NO: 135103 - DNA, 25 bp, Canis familiaris
gtttccattctgatccttacatgtg

SEQ ID NO: 135104 - DNA, 25 bp, Canis familiaris
gtttgctttgagacttttcagcata

SEQ ID NO: 135105 - DNA, 25 bp, Canis familiaris
gtttgcttttgccactttcaagatt

SEQ ID NO: 135106 - DNA, 25 bp, Canis familiaris
gtttgtctttgttttcccagcaata

SEQ ID NO: 135107 - DNA, 25 bp, Canis familiaris
gtttgttctgtcacttggttgaata

SEQ ID NO: 135108 - DNA, 25 bp, Canis familiaris
gtttgtcttgtaactgcctgtttat

SEQ ID NO: 135109 - DNA, 25 bp, Canis familiaris
gtttgtgtagctcggtccgtattgt

SEQ ID NO: 135110 - DNA, 25 bp, Canis familiaris
gtttgtctgagtctgtaggttagat

SEQ ID NO: 135111 - DNA, 25 bp, Canis familiaris
gtttcctgggtcttctgagttcaga

SEQ ID NO: 135112 - DNA, 25 bp, Canis familiaris
gtatttgtggggttcatagttatat

SEQ ID NO: 135113 - DNA, 25 bp, Canis familiaris
gtattcgttagtatcattttttgta

SEQ ID NO: 135114 - DNA, 25 bp, Canis familiaris
gtattcggctttaattctgttttgc

SEQ ID NO: 135115 - DNA, 25 bp, Canis familiaris
gtttcccatgctacaattatttttc

SEQ ID NO: 135116 - DNA, 25 bp, Canis familiaris
gtttccagtctcaactttgtttctt

SEQ ID NO: 135117 - DNA, 25 bp, Canis familiaris
gtttgtgaacacatttatgtttata

SEQ ID NO: 135118 - DNA, 25 bp, Canis familiaris
gtttgctgcaggccttgttttaagt

SEQ ID NO: 135119 - DNA, 25 bp, Canis familiaris
gtttgtggatgcattgctgcttata

SEQ ID NO: 135120 - DNA, 25 bp, Canis familiaris
gtttgtgtattttgtgtttacctcg

SEQ ID NO: 135121 - DNA, 25 bp, Canis familiaris
gtttgtgtcttgacgtcttaatcgt

SEQ ID NO: 135122 - DNA, 25 bp, Canis familiaris
gtttgattcttgactgtctgcttcc

SEQ ID NO: 135123 - DNA, 25 bp, Canis familiaris
gtttgctttatcatatctactcctt

SEQ ID NO: 135124 - DNA, 25 bp, Canis familiaris
gtttgtatttcatagctcagtagct

SEQ ID NO: 135125 - DNA, 25 bp, Canis familiaris
gtttccatcattttactagtgcagt

SEQ ID NO: 135126 - DNA, 25 bp, Canis familiaris
gtttgctctttgttactctggatat

SEQ ID NO: 135127 - DNA, 25 bp, Canis familiaris
gtattttgtgtgttacgtttatctc

SEQ ID NO: 135128 - DNA, 25 bp, Canis familiaris
gtatttttcctatgctggctgtttc

SEQ ID NO: 135129 - DNA, 25 bp, Canis familiaris
gtattttcctccaacttttattgca

SEQ ID NO: 135130 - DNA, 25 bp, Canis familiaris
gtattatgtgcccgcaactgtttcc

SEQ ID NO: 135131 - DNA, 25 bp, Canis familiaris
gtttggatagagcccatcttggtcc

SEQ ID NO: 135132 - DNA, 25 bp, Canis familiaris
gtttgagagcaatgccatcacctgt

SEQ ID NO: 135133 - DNA, 25 bp, Canis familiaris
gtattcatcgaattcaacacacttc

SEQ ID NO: 135134 - DNA, 25 bp, Canis familiaris
gtattcttccaagcatagccttcga

SEQ ID NO: 135135 - DNA, 25 bp, Canis familiaris
gtcttgtttcaagcatacagtccct

SEQ ID NO: 135136 - DNA, 25 bp, Canis familiaris
gtttgcttctcaaggttcagtcctc

SEQ ID NO: 135137 - DNA, 25 bp, Canis familiaris
gtttggttcaattgttagctctctt

SEQ ID NO: 135138 - DNA, 25 bp, Canis familiaris
gtttgagttaacgtgctgagcattt

SEQ ID NO: 135139 - DNA, 25 bp, Canis familiaris
gtttgtcttacaatggcagactttg

SEQ ID NO: 135140 - DNA, 25 bp, Canis familiaris
gtttgtatatccagaagcttttgta

SEQ ID NO: 135141 - DNA, 25 bp, Canis familiaris
gtatttatttactgagcttctctgt

SEQ ID NO: 135142 - DNA, 25 bp, Canis familiaris
gtattgtacgtattttcacttgtgt

SEQ ID NO: 135143 - DNA, 25 bp, Canis familiaris
gtttgtttgatgtttcctcttggtt

SEQ ID NO: 135144 - DNA, 25 bp, Canis familiaris
gtttgtgaaagccttcctttggatt

SEQ ID NO: 135145 - DNA, 25 bp, Canis familiaris
gtaattacacgtatccccgagattt

SEQ ID NO: 135146 - DNA, 25 bp, Canis familiaris
gtatcttaccccactcagtggagat

SEQ ID NO: 135147 - DNA, 25 bp, Canis familiaris
gtactacatacctggtctctgggtc

SEQ ID NO: 135148 - DNA, 25 bp, Canis familiaris
gtactaataccaggcctcctggtct

SEQ ID NO: 135149 - DNA, 25 bp, Canis familiaris
gtatctgaaaacgctctccgtgact

SEQ ID NO: 135150 - DNA, 25 bp, Canis familiaris
gtttgaataattgcctacgatgaag

SEQ ID NO: 135151 - DNA, 25 bp, Canis familiaris
gtttgacatatttgacttcctttca

SEQ ID NO: 135152 - DNA, 25 bp, Canis familiaris
gtattttaatctcactacttatccc

SEQ ID NO: 135153 - DNA, 25 bp, Canis familiaris
gtatttatttctgttaccctgacgc

SEQ ID NO: 135154 - DNA, 25 bp, Canis familiaris
gtattttaatcctgtacccaatctg

SEQ ID NO: 135155 - DNA, 25 bp, Canis familiaris
gtttgtagaatgtcgttacccgttg

SEQ ID NO: 135156 - DNA, 25 bp, Canis familiaris
gtttgaaacagtctctactctctct

SEQ ID NO: 135157 - DNA, 25 bp, Canis familiaris
gtttccaggcaacatttatccctaa

SEQ ID NO: 135158 - DNA, 25 bp, Canis familiaris
gtttccaggcaatttgattccttca

SEQ ID NO: 135159 - DNA, 25 bp, Canis familiaris
gtttgcatcagttatattgttcaca

SEQ ID NO: 135160 - DNA, 25 bp, Canis familiaris
gtttgagagtctttgtgttgcacat

SEQ ID NO: 135161 - DNA, 25 bp, Canis familiaris
gtttgagagtctttgtgttgcacat

SEQ ID NO: 135162 - DNA, 25 bp, Canis familiaris
gtttccatgtcttgactgttgcaaa

SEQ ID NO: 135163 - DNA, 25 bp, Canis familiaris
gtttgctgctcttggtcagtacaga

SEQ ID NO: 135164 - DNA, 25 bp, Canis familiaris
gtttgtggtgtccacgacacgaccg

SEQ ID NO: 135165 - DNA, 25 bp, Canis familiaris
gtttgatgtttcccgtatggaccag

SEQ ID NO: 135166 - DNA, 25 bp, Canis familiaris
gtttgatagttcctgctgtgaggac

SEQ ID NO: 135167 - DNA, 25 bp, Canis familiaris
gtttgtcatttggcatctgttggtc

SEQ ID NO: 135168 - DNA, 25 bp, Canis familiaris
gtttgtatatctggctgtgtgtgtg

SEQ ID NO: 135169 - DNA, 25 bp, Canis familiaris
gtattgtgggctggaggcatggtgc

SEQ ID NO: 135170 - DNA, 25 bp, Canis familiaris
gtattgggccacaagacatggtgaa

SEQ ID NO: 135171 - DNA, 25 bp, Canis familiaris
gtttgagcccaagtgcctggatgaa

SEQ ID NO: 135172 - DNA, 25 bp, Canis familiaris
gtttggcattattgtccgactggat

SEQ ID NO: 135173 - DNA, 25 bp, Canis familiaris
gtttgcacattcactcagagatttt

SEQ ID NO: 135174 - DNA, 25 bp, Canis familiaris
gtttgagcaggcatctagcaaccct

SEQ ID NO: 135175 - DNA, 25 bp, Canis familiaris
gtttgaatgtgcgtgcttgttctcc

SEQ ID NO: 135176 - DNA, 25 bp, Canis familiaris
gtttgatatgttgtagtctctcact

SEQ ID NO: 135177 - DNA, 25 bp, Canis familiaris
gtttgctatgattttggttttctga

SEQ ID NO: 135178 - DNA, 25 bp, Canis familiaris
gtttgcttttttaacttctgcatga

SEQ ID NO: 135179 - DNA, 25 bp, Canis familiaris
gtttgcacttttgtacactgctgct

SEQ ID NO: 135180 - DNA, 25 bp, Canis familiaris
gtcttgccttttcctcagcaagtgg

SEQ ID NO: 135181 - DNA, 25 bp, Canis familiaris
gtttgcttgtttctcgaagagcgat

SEQ ID NO: 135182 - DNA, 25 bp, Canis familiaris
gtttgctgtgttacctcttggcagc

SEQ ID NO: 135183 - DNA, 25 bp, Canis familiaris
gtattcagtgtgtgccttttggctt

SEQ ID NO: 135184 - DNA, 25 bp, Canis familiaris
gtattgccatggtgttgtttatgtt

SEQ ID NO: 135185 - DNA, 25 bp, Canis familiaris
gtttgtctgtgttgtttgttagttt

SEQ ID NO: 135186 - DNA, 25 bp, Canis familiaris
gtatttatgtttatccaccagtctt

SEQ ID NO: 135187 - DNA, 25 bp, Canis familiaris
gtttgttgctatcaccagcaccaac

SEQ ID NO: 135188 - DNA, 25 bp, Canis familiaris
gtaggtatctatcatgccagaactt

SEQ ID NO: 135189 - DNA, 25 bp, Canis familiaris
gtttgtacattgcacagaaacttgt

SEQ ID NO: 135190 - DNA, 25 bp, Canis familiaris
gtttgcttcaggaaaattcactgtt

SEQ ID NO: 135191 - DNA, 25 bp, Canis familiaris
gtatccttatgaaaataccactttt

SEQ ID NO: 135192 - DNA, 25 bp, Canis familiaris
gtttgttgtatatttcaccatttcc

SEQ ID NO: 135193 - DNA, 25 bp, Canis familiaris
gtttgtgttgtgtttcaccaacatt

SEQ ID NO: 135194 - DNA, 25 bp, Canis familiaris
gtatcaggtttcaattcagcctaga

SEQ ID NO: 135195 - DNA, 25 bp, Canis familiaris
gtattggtttgcaaatctcttgaat

SEQ ID NO: 135196 - DNA, 25 bp, Canis familiaris
gtatttattctgtgcacatttgtac

SEQ ID NO: 135197 - DNA, 25 bp, Canis familiaris
gtattttctgcttacacaacttggc

SEQ ID NO: 135198 - DNA, 25 bp, Canis familiaris
gtatattttcacacactgaccagcg

SEQ ID NO: 135199 - DNA, 25 bp, Canis familiaris
gtattatttgaaacctgacagatgc

SEQ ID NO: 135200 - DNA, 25 bp, Canis familiaris
gtattgatgtacagccttgaatgtg

SEQ ID NO: 135201 - DNA, 25 bp, Canis familiaris
gtattgatgatgtcatacaccatga

SEQ ID NO: 135202 - DNA, 25 bp, Canis familiaris
gtatcttgagttccacaccagagtt

SEQ ID NO: 135203 - DNA, 25 bp, Canis familiaris
gtttgtgcagtgaaccacgcagcaa

SEQ ID NO: 135204 - DNA, 25 bp, Canis familiaris
gtttggcagttccgcaacatgatca

SEQ ID NO: 135205 - DNA, 25 bp, Canis familiaris
gtattctgccaggggaacagcacat

SEQ ID NO: 135206 - DNA, 25 bp, Canis familiaris
gtattctccggtcacgagacgtcaa

SEQ ID NO: 135207 - DNA, 25 bp, Canis familiaris
gtattcccgggatcagagaagacat

SEQ ID NO: 135208 - DNA, 25 bp, Canis familiaris
gtattgcccgatgcaatgagaaaaa

SEQ ID NO: 135209 - DNA, 25 bp, Canis familiaris
gtattgtcacaagcagtagtccagg

SEQ ID NO: 135210 - DNA, 25 bp, Canis familiaris
gtattgtccctgtcagtactagcca

SEQ ID NO: 135211 - DNA, 25 bp, Canis familiaris
gtttggccagtggctgtttggccac

SEQ ID NO: 135212 - DNA, 25 bp, Canis familiaris
gtttggccgcagaaggtgagcccac

SEQ ID NO: 135213 - DNA, 25 bp, Canis familiaris
gtttgcccatcatcgatgtggcacc

SEQ ID NO: 135214 - DNA, 25 bp, Canis familiaris
gtttgtcacacatgtggggctgcct

SEQ ID NO: 135215 - DNA, 25 bp, Canis familiaris
gtttggcaacagtctgcgtggtctc

SEQ ID NO: 135216 - DNA, 25 bp, Canis familiaris
gtatctgtaaagtccgttctcttct

SEQ ID NO: 135217 - DNA, 25 bp, Canis familiaris
gtatcataaagccgtttattcttcc

SEQ ID NO: 135218 - DNA, 25 bp, Canis familiaris
gtagcaaatggccgttcctggcaac

SEQ ID NO: 135219 - DNA, 25 bp, Canis familiaris
gtatcatacattgcttttcgtcaga

SEQ ID NO: 135220 - DNA, 25 bp, Canis familiaris
gtatcttttggattttcaggagacc

SEQ ID NO: 135221 - DNA, 25 bp, Canis familiaris
gtattgttgtgattgtttctctgaa

SEQ ID NO: 135222 - DNA, 25 bp, Canis familiaris
gtattttccaaatgatctctaaaac

SEQ ID NO: 135223 - DNA, 25 bp, Canis familiaris
gtattttcttttctctctctagaac

SEQ ID NO: 135224 - DNA, 25 bp, Canis familiaris
gtttgtgtgtttttattctctaaag

SEQ ID NO: 135225 - DNA, 25 bp, Canis familiaris
gtttgtgatactgttacatctctga

SEQ ID NO: 135226 - DNA, 25 bp, Canis familiaris
gtattgctactctagttaacttaac

SEQ ID NO: 135227 - DNA, 25 bp, Canis familiaris
gtatcgcgatcttctgcttaatctt

SEQ ID NO: 135228 - DNA, 25 bp, Canis familiaris
gtatccagacgtacccaactaataa

SEQ ID NO: 135229 - DNA, 25 bp, Canis familiaris
gtattcagccagtttccttctaata

SEQ ID NO: 135230 - DNA, 25 bp, Canis familiaris
gtatgcgaccagtttccaataaagt

SEQ ID NO: 135231 - DNA, 25 bp, Canis familiaris
gtatcagaccgcttttttcaattta

SEQ ID NO: 135232 - DNA, 25 bp, Canis familiaris
gtatcaaccagttcctttatatggg

SEQ ID NO: 135233 - DNA, 25 bp, Canis familiaris
gtattactctgctacacttattagc

SEQ ID NO: 135234 - DNA, 25 bp, Canis familiaris
gtatattcctcattacattgatctc

SEQ ID NO: 135235 - DNA, 25 bp, Canis familiaris
gtatattgcctgtatttctacctct

SEQ ID NO: 135236 - DNA, 25 bp, Canis familiaris
gtataagtctcttctgtctacttcc

SEQ ID NO: 135237 - DNA, 25 bp, Canis familiaris
gtatgaggtgccttcagaccagacc

SEQ ID NO: 135238 - DNA, 25 bp, Canis familiaris
gtatacctgcacttgcagccaaaac

SEQ ID NO: 135239 - DNA, 25 bp, Canis familiaris
gtttgcactgcgcctgcaggacaaa

SEQ ID NO: 135240 - DNA, 25 bp, Canis familiaris
gtttgcactgcctttggagctagag

SEQ ID NO: 135241 - DNA, 25 bp, Canis familiaris
gtttgcagccttagtggcatctaaa

SEQ ID NO: 135242 - DNA, 25 bp, Canis familiaris
gtttgacacttttgatgactttact

SEQ ID NO: 135243 - DNA, 25 bp, Canis familiaris
gtttgtcctgtttgtctcatggtat

SEQ ID NO: 135244 - DNA, 25 bp, Canis familiaris
gtttgatttgtttgcccagtggcag

SEQ ID NO: 135245 - DNA, 25 bp, Canis familiaris
gtattgatttgtactggtagttcgt

SEQ ID NO: 135246 - DNA, 25 bp, Canis familiaris
gtattcctttacagtagcatcatcg

SEQ ID NO: 135247 - DNA, 25 bp, Canis familiaris
gtattcctttacagtagcatcatcg

SEQ ID NO: 135248 - DNA, 25 bp, Canis familiaris
gtattcctttacagtagcatcatcg

SEQ ID NO: 135249 - DNA, 25 bp, Canis familiaris
gtattcctttacagtagcatcatcg

SEQ ID NO: 135250 - DNA, 25 bp, Canis familiaris
gtattcctttacagtagcatcatcg

SEQ ID NO: 135251 - DNA, 25 bp, Canis familiaris
gtattcctttacagtagcatcatcg

SEQ ID NO: 135252 - DNA, 25 bp, Canis familiaris
gtattcctttacagtagcatcatcg

SEQ ID NO: 135253 - DNA, 25 bp, Canis familiaris
gtattcctttacagtagcatcatcg

SEQ ID NO: 135254 - DNA, 25 bp, Canis familiaris
gtatactctctgaagcgtgatacca

SEQ ID NO: 135255 - DNA, 25 bp, Canis familiaris
gtataccacctgagttacctacaca

SEQ ID NO: 135256 - DNA, 25 bp, Canis familiaris
gtattgccaactacgttcatgtcaa

SEQ ID NO: 135257 - DNA, 25 bp, Canis familiaris
gtattctataattcggtcttcatgc

SEQ ID NO: 135258 - DNA, 25 bp, Canis familiaris
gtattcctaagtggcagactgtaga

SEQ ID NO: 135259 - DNA, 25 bp, Canis familiaris
gtattcccacttgcagtgtatgaga

SEQ ID NO: 135260 - DNA, 25 bp, Canis familiaris
gtattctccactttaggtaattcct

SEQ ID NO: 135261 - DNA, 25 bp, Canis familiaris
gtatgactccactcacggcaaattc

SEQ ID NO: 135262 - DNA, 25 bp, Canis familiaris
gtatcacttcctgtcgccctatgta

SEQ ID NO: 135263 - DNA, 25 bp, Canis familiaris
gtatcctggagtttgaccctagtct

SEQ ID NO: 135264 - DNA, 25 bp, Canis familiaris
gtattcattgggttactcctattat

SEQ ID NO: 135265 - DNA, 25 bp, Canis familiaris
gtattccagttcagacatcctttat

SEQ ID NO: 135266 - DNA, 25 bp, Canis familiaris
gtatcgccgtggcagacttcgttaa

SEQ ID NO: 135267 - DNA, 25 bp, Canis familiaris
gtatccacgggataattttattatg

SEQ ID NO: 135268 - DNA, 25 bp, Canis familiaris
gtatcccctggagttagttattgaa

SEQ ID NO: 135269 - DNA, 25 bp, Canis familiaris
gtatcacttttataatattttgcag

SEQ ID NO: 135270 - DNA, 25 bp, Canis familiaris
gtatcagtatatcttaattttgcca

SEQ ID NO: 135271 - DNA, 25 bp, Canis familiaris
gtatcctaagcttgaaacaattcct

SEQ ID NO: 135272 - DNA, 25 bp, Canis familiaris
gtatcctaggtccacattcacattc

SEQ ID NO: 135273 - DNA, 25 bp, Canis familiaris
gtatcactagagtcaagcctcgtta

SEQ ID NO: 135274 - DNA, 25 bp, Canis familiaris
gtatcatctttgtagagtcgcgtat

SEQ ID NO: 135275 - DNA, 25 bp, Canis familiaris
gtatatccttgccaggtgtctgatt

SEQ ID NO: 135276 - DNA, 25 bp, Canis familiaris
gtattgtcttgccaggatggttagg

SEQ ID NO: 135277 - DNA, 25 bp, Canis familiaris
gtttgttgtcctggggtggatgggg

SEQ ID NO: 135278 - DNA, 25 bp, Canis familiaris
gtttggattcgtgtgtggtggttgg

SEQ ID NO: 135279 - DNA, 25 bp, Canis familiaris
gtttggttagactctttgtgttggg

SEQ ID NO: 135280 - DNA, 25 bp, Canis familiaris
gtttgtttgacatcgttcgtgttgt

SEQ ID NO: 135281 - DNA, 25 bp, Canis familiaris
gtatttcctgaatggtttgtctgtg

SEQ ID NO: 135282 - DNA, 25 bp, Canis familiaris
gtttgtacttgattgtttttcagtg

SEQ ID NO: 135283 - DNA, 25 bp, Canis familiaris
gtttgatagaccatgtcctttcgcg

SEQ ID NO: 135284 - DNA, 25 bp, Canis familiaris
gtaggacaaccatggagccttcctg

SEQ ID NO: 135285 - DNA, 25 bp, Canis familiaris
gtaggaaccaattgagtcccccatc

SEQ ID NO: 135286 - DNA, 25 bp, Canis familiaris
gtaagaaccgagaactcacctaccg

SEQ ID NO: 135287 - DNA, 25 bp, Canis familiaris
gtatcagacccgtagtcgagctgct

SEQ ID NO: 135288 - DNA, 25 bp, Canis familiaris
gtatccaccctatttcaggttagtt

SEQ ID NO: 135289 - DNA, 25 bp, Canis familiaris
gtataccccagactgtcagctttga

SEQ ID NO: 135290 - DNA, 25 bp, Canis familiaris
gtattcaccgattggctcgatatta

SEQ ID NO: 135291 - DNA, 25 bp, Canis familiaris
gtatctgaccaaatgagctgcttaa

SEQ ID NO: 135292 - DNA, 25 bp, Canis familiaris
gtttgtgctcacaaagcatgcctgt

SEQ ID NO: 135293 - DNA, 25 bp, Canis familiaris
gtttgagctgcaaaagctgccagga

SEQ ID NO: 135294 - DNA, 25 bp, Canis familiaris
gtttgacacgaacctgcgcagtgac

SEQ ID NO: 135295 - DNA, 25 bp, Canis familiaris
gtttggcaaaatgtctgattcccct

SEQ ID NO: 135296 - DNA, 25 bp, Canis familiaris
gtttgtacaggtttctgaaatccct

SEQ ID NO: 135297 - DNA, 25 bp, Canis familiaris
gtattgtacgagcattgaaagatcc

SEQ ID NO: 135298 - DNA, 25 bp, Canis familiaris
gtatttattactacagcaaagatcc

SEQ ID NO: 135299 - DNA, 25 bp, Canis familiaris
gtatttattacttgagcccctcata

SEQ ID NO: 135300 - DNA, 25 bp, Canis familiaris
gtatcaatggttgtgagcccccaag

SEQ ID NO: 135301 - DNA, 25 bp, Canis familiaris
gtatcaaatggtgtggagcccaaag

SEQ ID NO: 135302 - DNA, 25 bp, Canis familiaris
gtatcaaagcttgcagaagcccaaa

SEQ ID NO: 135303 - DNA, 25 bp, Canis familiaris
gtataaatctaggtaaccgatgcct

SEQ ID NO: 135304 - DNA, 25 bp, Canis familiaris
gtataacctactgacctcagattct

SEQ ID NO: 135305 - DNA, 25 bp, Canis familiaris
gtatatacctgaaaacccatgcatt

SEQ ID NO: 135306 - DNA, 25 bp, Canis familiaris
gtataagcccatcaagaaagtcatg

SEQ ID NO: 135307 - DNA, 25 bp, Canis familiaris
gtagaatgccaacccataaacgtag

SEQ ID NO: 135308 - DNA, 25 bp, Canis familiaris
gtataagcaagacctcaagcaactg

SEQ ID NO: 135309 - DNA, 25 bp, Canis familiaris
gtataggccaaccatattcccttaa

SEQ ID NO: 135310 - DNA, 25 bp, Canis familiaris
gtatcaggaagtaattttccttgca

SEQ ID NO: 135311 - DNA, 25 bp, Canis familiaris
gtatcaaaggttaccattggttgca

SEQ ID NO: 135312 - DNA, 25 bp, Canis familiaris
gtatcaaagtcaataacctggttgt

SEQ ID NO: 135313 - DNA, 25 bp, Canis familiaris
gtatcaactgtcataatgccctttt

SEQ ID NO: 135314 - DNA, 25 bp, Canis familiaris
gtatcacgtgtaaagatgccacatg

SEQ ID NO: 135315 - DNA, 25 bp, Canis familiaris
gtatactgtcccaaatgaagcatta

SEQ ID NO: 135316 - DNA, 25 bp, Canis familiaris
gtatatcaatcaactaataaccaaa

SEQ ID NO: 135317 - DNA, 25 bp, Canis familiaris
gtatttgtgcagaccaaaaccaaag

SEQ ID NO: 135318 - DNA, 25 bp, Canis familiaris
gtattcttgtgacagacaaagcaaa

SEQ ID NO: 135319 - DNA, 25 bp, Canis familiaris
gtattcctggacagacccaaaagtc

SEQ ID NO: 135320 - DNA, 25 bp, Canis familiaris
gtattcctgaccgaactctgaaaac

SEQ ID NO: 135321 - DNA, 25 bp, Canis familiaris
gtattctccatcagaatctcgggga

SEQ ID NO: 135322 - DNA, 25 bp, Canis familiaris
gtatttcttctagattctttggaac

SEQ ID NO: 135323 - DNA, 25 bp, Canis familiaris
gtatttcctccagagtatacgagag

SEQ ID NO: 135324 - DNA, 25 bp, Canis familiaris
gtttggcccgaggattttggacagt

SEQ ID NO: 135325 - DNA, 25 bp, Canis familiaris
gtttggtttaggtttctcagaatgc

SEQ ID NO: 135326 - DNA, 25 bp, Canis familiaris
gtttgttttttgtttctgcaagctt

SEQ ID NO: 135327 - DNA, 25 bp, Canis familiaris
gtttgttttctgtcttttggatctt

SEQ ID NO: 135328 - DNA, 25 bp, Canis familiaris
gtattgttttcacacttctggcatc

SEQ ID NO: 135329 - DNA, 25 bp, Canis familiaris
gtttgattttattgacgatctggcc

SEQ ID NO: 135330 - DNA, 25 bp, Canis familiaris
gtttgttttcattattgttgtgcga

SEQ ID NO: 135331 - DNA, 25 bp, Canis familiaris
gtttgttcctatttatgcctgagta

SEQ ID NO: 135332 - DNA, 25 bp, Canis familiaris
gtttgtagctccaatttgtcgacta

SEQ ID NO: 135333 - DNA, 25 bp, Canis familiaris
gtttgtgtgtccattttctttgcat

SEQ ID NO: 135334 - DNA, 25 bp, Canis familiaris
gtatttgaatcctatttctccctgt

SEQ ID NO: 135335 - DNA, 25 bp, Canis familiaris
gtatttgcaatccacattcttgacc

SEQ ID NO: 135336 - DNA, 25 bp, Canis familiaris
gtattttcagattcatgtctcagac

SEQ ID NO: 135337 - DNA, 25 bp, Canis familiaris
gtattttgacattagcttgagacca

SEQ ID NO: 135338 - DNA, 25 bp, Canis familiaris
gtattcttaatttgcttttctcttg

SEQ ID NO: 135339 - DNA, 25 bp, Canis familiaris
gtatttgtcagcatccttttgctct

SEQ ID NO: 135340 - DNA, 25 bp, Canis familiaris
gtatttgagcagccctagtattgtt

SEQ ID NO: 135341 - DNA, 25 bp, Canis familiaris
gtatagtccatgccctgaacatgta

SEQ ID NO: 135342 - DNA, 25 bp, Canis familiaris
gtatcctcatcgtcctgagcagaag

SEQ ID NO: 135343 - DNA, 25 bp, Canis familiaris
gtatcatgcactaggcctgagacaa

SEQ ID NO: 135344 - DNA, 25 bp, Canis familiaris
gtattaatacatctgcagtctcact

SEQ ID NO: 135345 - DNA, 25 bp, Canis familiaris
gtattaatcacgcgatgttgactgc

SEQ ID NO: 135346 - DNA, 25 bp, Canis familiaris
gtataaacatcgctgcactgtgact

SEQ ID NO: 135347 - DNA, 25 bp, Canis familiaris
gtataaacttgttgcatcactatgt

SEQ ID NO: 135348 - DNA, 25 bp, Canis familiaris
gtatcagaatgctgtggagacctgg

SEQ ID NO: 135349 - DNA, 25 bp, Canis familiaris
gtatcagtatgcagtggtttagaga

SEQ ID NO: 135350 - DNA, 25 bp, Canis familiaris
gtatgatgtatgacccagtgcttag

SEQ ID NO: 135351 - DNA, 25 bp, Canis familiaris
gtagcaattaggtcagtgcctcact

SEQ ID NO: 135352 - DNA, 25 bp, Canis familiaris
gtagacattgggggggccgttgtat

SEQ ID NO: 135353 - DNA, 25 bp, Canis familiaris
gtagacagggctggggaaggttcca

SEQ ID NO: 135354 - DNA, 25 bp, Canis familiaris
gtagcaagggcctggaaacctgggc

SEQ ID NO: 135355 - DNA, 25 bp, Canis familiaris
gtgaggaagggcacctaacctcggc

SEQ ID NO: 135356 - DNA, 25 bp, Canis familiaris
gtaggaagggttatgagatctggct

SEQ ID NO: 135357 - DNA, 25 bp, Canis familiaris
gtaggaagggcccttgaagctgtcc

SEQ ID NO: 135358 - DNA, 25 bp, Canis familiaris
gtagttccgaccataaacgatgccg

SEQ ID NO: 135359 - DNA, 25 bp, Canis familiaris
gtaagtccgcctctagatactatgc

SEQ ID NO: 135360 - DNA, 25 bp, Canis familiaris
gtatagcttcagcttaagccctatg

SEQ ID NO: 135361 - DNA, 25 bp, Canis familiaris
gtattcattcaccattaaacctcag

SEQ ID NO: 135362 - DNA, 25 bp, Canis familiaris
gtattcttcactatcccaaaagata

SEQ ID NO: 135363 - DNA, 25 bp, Canis familiaris
gtatatgtacaccttaccaatacgt

SEQ ID NO: 135364 - DNA, 25 bp, Canis familiaris
gtattgtgcataactcttctaaagg

SEQ ID NO: 135365 - DNA, 25 bp, Canis familiaris
gtattctcagatatgatttcaaaag

SEQ ID NO: 135366 - DNA, 25 bp, Canis familiaris
gtatctgaattttgtttcaaacgta

SEQ ID NO: 135367 - DNA, 25 bp, Canis familiaris
gtattggaccatttgtgtacaccgt

SEQ ID NO: 135368 - DNA, 25 bp, Canis familiaris
gtaatggcaacttggtaagccggta

SEQ ID NO: 135369 - DNA, 25 bp, Canis familiaris
gtatttacactaggtagccccacta

SEQ ID NO: 135370 - DNA, 25 bp, Canis familiaris
gtatatattcacacaaaaacctcta

SEQ ID NO: 135371 - DNA, 25 bp, Canis familiaris
gtatgctttaccctgaaacacttta

SEQ ID NO: 135372 - DNA, 25 bp, Canis familiaris
gtatcttttcccgtgaaaccatata

SEQ ID NO: 135373 - DNA, 25 bp, Canis familiaris
gtatttttaccattgttcccattag

SEQ ID NO: 135374 - DNA, 25 bp, Canis familiaris
gtatttttaccattgcctgttttag

SEQ ID NO: 135375 - DNA, 25 bp, Canis familiaris
gtattttgtcaaccatcctttttgg

SEQ ID NO: 135376 - DNA, 25 bp, Canis familiaris
gtatgtatagtatgacacaatattt

SEQ ID NO: 135377 - DNA, 25 bp, Canis familiaris
gtatctccatggtgacaacttcatc

SEQ ID NO: 135378 - DNA, 25 bp, Canis familiaris
gtattgccactgttgagaactactg

SEQ ID NO: 135379 - DNA, 25 bp, Canis familiaris
gtattggttatttacactgagctgt

SEQ ID NO: 135380 - DNA, 25 bp, Canis familiaris
gtttggtgctcatttaactatctga

SEQ ID NO: 135381 - DNA, 25 bp, Canis familiaris
gtttggcctgccattggtcaatgac

SEQ ID NO: 135382 - DNA, 25 bp, Canis familiaris
gtttgtccacataattggcttagaa

SEQ ID NO: 135383 - DNA, 25 bp, Canis familiaris
gtttgtgccacatattccatttgat

SEQ ID NO: 135384 - DNA, 25 bp, Canis familiaris
gtatactgccaatctcccagttatg

SEQ ID NO: 135385 - DNA, 25 bp, Canis familiaris
gtatttgctttgtcctaagttatgg

SEQ ID NO: 135386 - DNA, 25 bp, Canis familiaris
gtattagtttggtctgttctcttgg

SEQ ID NO: 135387 - DNA, 25 bp, Canis familiaris
gtatatagtatccggttccatttgg

SEQ ID NO: 135388 - DNA, 25 bp, Canis familiaris
gtatattgtgtcttagcttccattt

SEQ ID NO: 135389 - DNA, 25 bp, Canis familiaris
gtatgaatttctccagtacccatgt

SEQ ID NO: 135390 - DNA, 25 bp, Canis familiaris
gtatatatatataccactgagccac

SEQ ID NO: 135391 - DNA, 25 bp, Canis familiaris
gtatctatatatcaaaagctgctgc

SEQ ID NO: 135392 - DNA, 25 bp, Canis familiaris
gtattgtgcacttgaaattcgctga

SEQ ID NO: 135393 - DNA, 25 bp, Canis familiaris
gtattgtggctgttaagcacctggt

SEQ ID NO: 135394 - DNA, 25 bp, Canis familiaris
gtttgggataagaatgcacctgtgc

SEQ ID NO: 135395 - DNA, 25 bp, Canis familiaris
gtttgggtcacagatgaaccatatg

SEQ ID NO: 135396 - DNA, 25 bp, Canis familiaris
gtaaaggcagccgaggaatccaatg

SEQ ID NO: 135397 - DNA, 25 bp, Canis familiaris
gtaaagcccctgaaaagccagaaag

SEQ ID NO: 135398 - DNA, 25 bp, Canis familiaris
gtaaagcaaacgcaaagaagcaccc

SEQ ID NO: 135399 - DNA, 25 bp, Canis familiaris
tgtaaatgcgtagatggaaggaaaa

SEQ ID NO: 135400 - DNA, 25 bp, Canis familiaris
gtaaatgcgtagatggaaggaaaag

SEQ ID NO: 135401 - DNA, 25 bp, Canis familiaris
gtaaatacggcatttcagggaaata

SEQ ID NO: 135402 - DNA, 25 bp, Canis familiaris
gtatagagacaattttactggaaat

SEQ ID NO: 135403 - DNA, 25 bp, Canis familiaris
gtatcagacaaatctttagtcaaat

SEQ ID NO: 135404 - DNA, 25 bp, Canis familiaris
gtattgccaagagcttgaagctcga

SEQ ID NO: 135405 - DNA, 25 bp, Canis familiaris
gtattgccaagagcttgaagctcga

SEQ ID NO: 135406 - DNA, 25 bp, Canis familiaris
gtaggccaaacgctcaggttataac

SEQ ID NO: 135407 - DNA, 25 bp, Canis familiaris
gtcggtaaccggacaggtctgggag

SEQ ID NO: 135408 - DNA, 25 bp, Canis familiaris
gtcaggtaacctggtaccctggaag

SEQ ID NO: 135409 - DNA, 25 bp, Canis familiaris
gtagtgtagacctggactctggaaa

SEQ ID NO: 135410 - DNA, 25 bp, Canis familiaris
gtatggtgaggccaacggatcagga

SEQ ID NO: 135411 - DNA, 25 bp, Canis familiaris
gtatggccctggaacaggccgcatc

SEQ ID NO: 135412 - DNA, 25 bp, Canis familiaris
gtatgggcctaaaaggtccctagtg

SEQ ID NO: 135413 - DNA, 25 bp, Canis familiaris
gtatgctgggattccaaggttccaa

SEQ ID NO: 135414 - DNA, 25 bp, Canis familiaris
gtatcgggcacccgaggatgctctc

SEQ ID NO: 135415 - DNA, 25 bp, Canis familiaris
gtttgtggcccactgggagcacact

SEQ ID NO: 135416 - DNA, 25 bp, Canis familiaris
gtttgtgtgcctccttaaatcacct

SEQ ID NO: 135417 - DNA, 25 bp, Canis familiaris
gtattatatacaccttaccacacct

SEQ ID NO: 135418 - DNA, 25 bp, Canis familiaris
gtatttttagccctagccaatcagc

SEQ ID NO: 135419 - DNA, 25 bp, Canis familiaris
gtatttatgggcagctggccactcc

SEQ ID NO: 135420 - DNA, 25 bp, Canis familiaris
gtattagggctgagctgggacctgc

SEQ ID NO: 135421 - DNA, 25 bp, Canis familiaris
gtttggggcagtgcaggagacctgt

SEQ ID NO: 135422 - DNA, 25 bp, Canis familiaris
gtttggggaccaaggatggctcctc

SEQ ID NO: 135423 - DNA, 25 bp, Canis familiaris
gtttggggacataggtgcttcctcc

SEQ ID NO: 135424 - DNA, 25 bp, Canis familiaris
gtattggtagcacgggatgttttca

SEQ ID NO: 135425 - DNA, 25 bp, Canis familiaris
gtatttctaggcaagatagttttca

SEQ ID NO: 135426 - DNA, 25 bp, Canis familiaris
gtatttgtaatgagaatgatttctc

SEQ ID NO: 135427 - DNA, 25 bp, Canis familiaris
gtattttaatgtggcagtttgtgtg

SEQ ID NO: 135428 - DNA, 25 bp, Canis familiaris
gtattgtgtttttggccttgagagt

SEQ ID NO: 135429 - DNA, 25 bp, Canis familiaris
gtatttttcttattcacctagagac

SEQ ID NO: 135430 - DNA, 25 bp, Canis familiaris
gtattgtggttttttgccttgagag

SEQ ID NO: 135431 - DNA, 25 bp, Canis familiaris
gtattggctttatttgtccgtgaaa

SEQ ID NO: 135432 - DNA, 25 bp, Canis familiaris
gtttggcttgtttgggggtctgagc

SEQ ID NO: 135433 - DNA, 25 bp, Canis familiaris
gtttgggtgttcggggatattggtg

SEQ ID NO: 135434 - DNA, 25 bp, Canis familiaris
gtatttggtgttggggagatcctcg

SEQ ID NO: 135435 - DNA, 25 bp, Canis familiaris
gtattctgttgtatggctagaccac

SEQ ID NO: 135436 - DNA, 25 bp, Canis familiaris
gtattattattattcactagcaccc

SEQ ID NO: 135437 - DNA, 25 bp, Canis familiaris
gtattttcagtaagaccaccacacc

SEQ ID NO: 135438 - DNA, 25 bp, Canis familiaris
gtatcttatagtaagccaccaccaa

SEQ ID NO: 135439 - DNA, 25 bp, Canis familiaris
gtatcgttgactattaccaccaagc

SEQ ID NO: 135440 - DNA, 25 bp, Canis familiaris
gtagttaattttgagcccagaagcc

SEQ ID NO: 135441 - DNA, 25 bp, Canis familiaris
gtagctggaattgtgaaggtcggag

SEQ ID NO: 135442 - DNA, 25 bp, Canis familiaris
gtaggaggatttcaaggtctggcaa

SEQ ID NO: 135443 - DNA, 25 bp, Canis familiaris
gtagtgggtggataaaggtggtgta

SEQ ID NO: 135444 - DNA, 25 bp, Canis familiaris
gtttgggaggtatttgagggtgttg

SEQ ID NO: 135445 - DNA, 25 bp, Canis familiaris
gtattgggggtgtttgtgtggtatt

SEQ ID NO: 135446 - DNA, 25 bp, Canis familiaris
gtattcagggttttttttgtgtgtg

SEQ ID NO: 135447 - DNA, 25 bp, Canis familiaris
gtcccacagggtgccctattgggga

SEQ ID NO: 135448 - DNA, 25 bp, Canis familiaris
gtcatgtacaggttaccctttggtt

SEQ ID NO: 135449 - DNA, 25 bp, Canis familiaris
gtattcacagattattccacttttg

SEQ ID NO: 135450 - DNA, 25 bp, Canis familiaris
gtattaagacaattcctctttagtt

SEQ ID NO: 135451 - DNA, 25 bp, Canis familiaris
gtattagcaagatggcctcttccag

SEQ ID NO: 135452 - DNA, 25 bp, Canis familiaris
gtagtcagcaagggtgcctactcct

SEQ ID NO: 135453 - DNA, 25 bp, Canis familiaris
gtagaaaatctggtcctttgcccca

SEQ ID NO: 135454 - DNA, 25 bp, Canis familiaris
gtaaacaatttgattttgcccaccg

SEQ ID NO: 135455 - DNA, 25 bp, Canis familiaris
gtattacacactctgttaatggcca

SEQ ID NO: 135456 - DNA, 25 bp, Canis familiaris
gtatcaaccaccagtagaaacccat

SEQ ID NO: 135457 - DNA, 25 bp, Canis familiaris
gtattcccatcctgtggagagcaca

SEQ ID NO: 135458 - DNA, 25 bp, Canis familiaris
gtattccagaacacgatgaggcaga

SEQ ID NO: 135459 - DNA, 25 bp, Canis familiaris
gtattgccagaaacacgaccgagaa

SEQ ID NO: 135460 - DNA, 25 bp, Canis familiaris
gcgctggcgttacagcgcaacagca

SEQ ID NO: 135461 - DNA, 25 bp, Canis familiaris
cgttacagcgcaacagcagcctgca

SEQ ID NO: 135462 - DNA, 25 bp, Canis familiaris
agcgcaacagcagcctgcagctgga

SEQ ID NO: 135463 - DNA, 25 bp, Canis familiaris
cagcagcctgcagctggattacgca

SEQ ID NO: 135464 - DNA, 25 bp, Canis familiaris
ctgcagctggattacgcaacagtaa

SEQ ID NO: 135465 - DNA, 25 bp, Canis familiaris
catcagcgcgcaagagggcagaccg

SEQ ID NO: 135466 - DNA, 25 bp, Canis familiaris
cgcaagagggcagaccgatagaatc

SEQ ID NO: 135467 - DNA, 25 bp, Canis familiaris
gggcagaccgatagaatcattggta

SEQ ID NO: 135468 - DNA, 25 bp, Canis familiaris
gaccgatagaatcattggtaatgag

SEQ ID NO: 135469 - DNA, 25 bp, Canis familiaris
agaatcattggtaatgagcgccgga

SEQ ID NO: 135470 - DNA, 25 bp, Canis familiaris
ttggtaatgagcgccggattacgcg

SEQ ID NO: 135471 - DNA, 25 bp, Canis familiaris
atgagcgccggattacgcgcgcttg

SEQ ID NO: 135472 - DNA, 25 bp, Canis familiaris
ggtgctggcggctggtttacgccgc

SEQ ID NO: 135473 - DNA, 25 bp, Canis familiaris
ctttctgacactttcacttttgcag

SEQ ID NO: 135474 - DNA, 25 bp, Canis familiaris
tgacactttcacttttgcagattgg

SEQ ID NO: 135475 - DNA, 25 bp, Canis familiaris
tttgcagattgggtaacacaggaac

SEQ ID NO: 135476 - DNA, 25 bp, Canis familiaris
gaaaacgtcacgctgaatatatgac

SEQ ID NO: 135477 - DNA, 25 bp, Canis familiaris
aaacgtcacgctgaatatatgacca

SEQ ID NO: 135478 - DNA, 25 bp, Canis familiaris
gtattctcagccatgacatgtgatc

SEQ ID NO: 135479 - DNA, 25 bp, Canis familiaris
gtatattacatttccaggatttatc

SEQ ID NO: 135480 - DNA, 25 bp, Canis familiaris
gtatttgacatatctgcaacgttgt

SEQ ID NO: 135481 - DNA, 25 bp, Canis familiaris
gtatttaacacatcagatcctttac

SEQ ID NO: 135482 - DNA, 25 bp, Canis familiaris
gtattcgaagacacattccttaatg

SEQ ID NO: 135483 - DNA, 25 bp, Canis familiaris
gtattcgcataatctttccctatag

SEQ ID NO: 135484 - DNA, 25 bp, Canis familiaris
gtattctaagattgtttcctccatt

SEQ ID NO: 135485 - DNA, 25 bp, Canis familiaris
gtattagatggaacttgcccccact

SEQ ID NO: 135486 - DNA, 25 bp, Canis familiaris
gtattagtctgctacaatcatcccc

SEQ ID NO: 135487 - DNA, 25 bp, Canis familiaris
gtatatagcttaacaccatccactc

SEQ ID NO: 135488 - DNA, 25 bp, Canis familiaris
gtattagctttaagcaccgcactct

SEQ ID NO: 135489 - DNA, 25 bp, Canis familiaris
gtattagctagtggagccactttct

SEQ ID NO: 135490 - DNA, 25 bp, Canis familiaris
gtatacagcaatgtgaccctagttg

SEQ ID NO: 135491 - DNA, 25 bp, Canis familiaris
gtatgcactgcaatgattaccctag

SEQ ID NO: 135492 - DNA, 25 bp, Canis familiaris
gtatcccactgaatcaacaatgctg

SEQ ID NO: 135493 - DNA, 25 bp, Canis familiaris
gtatcacaactgcactacacactga

SEQ ID NO: 135494 - DNA, 25 bp, Canis familiaris
gtatcaacagctctctagtagaatc

SEQ ID NO: 135495 - DNA, 25 bp, Canis familiaris
gtataggcagtctctgtgctgatgc

SEQ ID NO: 135496 - DNA, 25 bp, Canis familiaris
gtattaggcatctctgtgcagactg

SEQ ID NO: 135497 - DNA, 25 bp, Canis familiaris
gtatttagatcttctgctcgacttc

SEQ ID NO: 135498 - DNA, 25 bp, Canis familiaris
gtatctgatagggtgctgggagctt

SEQ ID NO: 135499 - DNA, 25 bp, Canis familiaris
gtattgagtgtgttggagtggcttg

SEQ ID NO: 135500 - DNA, 25 bp, Canis familiaris
gtattatgtatatgagcgggatgtg

SEQ ID NO: 135501 - DNA, 25 bp, Canis familiaris
gtatttttgtattgctttgagtgaa

SEQ ID NO: 135502 - DNA, 25 bp, Canis familiaris
gtatttcagtggtgtttcaggctaa

SEQ ID NO: 135503 - DNA, 25 bp, Canis familiaris
gtattatatgtacctgtttcgaaat

SEQ ID NO: 135504 - DNA, 25 bp, Canis familiaris
gtattgtttatctcttacataatat

SEQ ID NO: 135505 - DNA, 25 bp, Canis familiaris
gtattcttttattcttaaaatcagt

SEQ ID NO: 135506 - DNA, 25 bp, Canis familiaris
gtattttattcattctaataaagct

SEQ ID NO: 135507 - DNA, 25 bp, Canis familiaris
gtatctattttatttattagcgaga

SEQ ID NO: 135508 - DNA, 25 bp, Canis familiaris
gtatcaattcttctacggacgcaat

SEQ ID NO: 135509 - DNA, 25 bp, Canis familiaris
gtataattttttccaaatccagcac

SEQ ID NO: 135510 - DNA, 25 bp, Canis familiaris
gtatatgtatgtatttaaactccaa

SEQ ID NO: 135511 - DNA, 25 bp, Canis familiaris
gtatagttttctctattcgtttcat

SEQ ID NO: 135512 - DNA, 25 bp, Canis familiaris
gtatctattttccttttcgttatag

SEQ ID NO: 135513 - DNA, 25 bp, Canis familiaris
gtatctttttcagttttgttatcca

SEQ ID NO: 135514 - DNA, 25 bp, Canis familiaris
gtatttcttcttttcactttaccag

SEQ ID NO: 135515 - DNA, 25 bp, Canis familiaris
gtattccttatttatagctctgata

SEQ ID NO: 135516 - DNA, 25 bp, Canis familiaris
gtatcctttggtcttccatgatcat

SEQ ID NO: 135517 - DNA, 25 bp, Canis familiaris
gtatccgttgttttgttctgatcta

SEQ ID NO: 135518 - DNA, 25 bp, Canis familiaris
gtatctcgtggaatcagtggttagc

SEQ ID NO: 135519 - DNA, 25 bp, Canis familiaris
gtattgtgtgtgaacaggtgctata

SEQ ID NO: 135520 - DNA, 25 bp, Canis familiaris
gtatagtgctgcattaaggcatgat

SEQ ID NO: 135521 - DNA, 25 bp, Canis familiaris
gtattctgctttgctatgagtgatc

SEQ ID NO: 135522 - DNA, 25 bp, Canis familiaris
gtatttggtatgcttgatagtacgt

SEQ ID NO: 135523 - DNA, 25 bp, Canis familiaris
gtatttggttggcctgtggctgcac

SEQ ID NO: 135524 - DNA, 25 bp, Canis familiaris
gtattctggaaggtcgggctcatct

SEQ ID NO: 135525 - DNA, 25 bp, Canis familiaris
gtatgtcgtggagtctactggtgtc

SEQ ID NO: 135526 - DNA, 25 bp, Canis familiaris
gtattgcgtgtagttttttgctgaa

SEQ ID NO: 135527 - DNA, 25 bp, Canis familiaris
gtattgtgctttgttttgtgtcatg

SEQ ID NO: 135528 - DNA, 25 bp, Canis familiaris
gtattgctgccttgtgtatttgatt

SEQ ID NO: 135529 - DNA, 25 bp, Canis familiaris
gtatcttgcccactctttttgtggg

SEQ ID NO: 135530 - DNA, 25 bp, Canis familiaris
gtgtttctacagcttggatcgggag

SEQ ID NO: 135531 - DNA, 25 bp, Canis familiaris
gtattcctagccaacgagatcgggt

SEQ ID NO: 135532 - DNA, 25 bp, Canis familiaris
gtatccctagcgcccagaacaggga

SEQ ID NO: 135533 - DNA, 25 bp, Canis familiaris
gtatcacgctaaggacaagatgcag

SEQ ID NO: 135534 - DNA, 25 bp, Canis familiaris
gtatacgtacaggccagatgtgggg

SEQ ID NO: 135535 - DNA, 25 bp, Canis familiaris
gtattagttcacctggatggcgtcg

SEQ ID NO: 135536 - DNA, 25 bp, Canis familiaris
gtagtgctgtaagtgtggacctgac

SEQ ID NO: 135537 - DNA, 25 bp, Canis familiaris
gtattgtatatattgggagactccc

SEQ ID NO: 135538 - DNA, 25 bp, Canis familiaris
gtatagtaatttctgacatctgccc

SEQ ID NO: 135539 - DNA, 25 bp, Canis familiaris
gtatatgctgaaatttttgtattcc

SEQ ID NO: 135540 - DNA, 25 bp, Canis familiaris
gtattcagaatagtgctttgcatgt

SEQ ID NO: 135541 - DNA, 25 bp, Canis familiaris
gtattcacagagacttggctgctag

SEQ ID NO: 135542 - DNA, 25 bp, Canis familiaris
gtattcaaaggctgactctgagtca

SEQ ID NO: 135543 - DNA, 25 bp, Canis familiaris
gtattctgtgaaaggagcctggcca

SEQ ID NO: 135544 - DNA, 25 bp, Canis familiaris
gtatttgtggtaggagctcgatctc

SEQ ID NO: 135545 - DNA, 25 bp, Canis familiaris
gtatctggggtaggtcatttgtctg

SEQ ID NO: 135546 - DNA, 25 bp, Canis familiaris
gtattgggctttggatctttctgtc

SEQ ID NO: 135547 - DNA, 25 bp, Canis familiaris
gtattggtgttgttgttttcgatca

SEQ ID NO: 135548 - DNA, 25 bp, Canis familiaris
gtattattcttgtgttttgccattg

SEQ ID NO: 135549 - DNA, 25 bp, Canis familiaris
gtattttgcattttgtgtggttttt

SEQ ID NO: 135550 - DNA, 25 bp, Canis familiaris
gtattatcttattatttgttttatt

SEQ ID NO: 135551 - DNA, 25 bp, Canis familiaris
gtatagatcacggtatgtcgttttt

SEQ ID NO: 135552 - DNA, 25 bp, Canis familiaris
gtaaataccgttccttgacactgtt

SEQ ID NO: 135553 - DNA, 25 bp, Canis familiaris
gtatttacagccattgttacaagtt

SEQ ID NO: 135554 - DNA, 25 bp, Canis familiaris
tgaacctggcccactgatttgaact

SEQ ID NO: 135555 - DNA, 25 bp, Canis familiaris
tgaaccgtccctctggggaagtaca

SEQ ID NO: 135556 - DNA, 25 bp, Canis familiaris
gtagcctgtacctgggggaagtcga

SEQ ID NO: 135557 - DNA, 25 bp, Canis familiaris
tgtagcatttaagagaagggaagtc

SEQ ID NO: 135558 - DNA, 25 bp, Canis familiaris
gtagttaaaagggatgtggacagtt

SEQ ID NO: 135559 - DNA, 25 bp, Canis familiaris
gtagtataagaagtgcaagcgcgaa

SEQ ID NO: 135560 - DNA, 25 bp, Canis familiaris
gtagataatctgtagctgaggactg

SEQ ID NO: 135561 - DNA, 25 bp, Canis familiaris
gtataacatatttgtgaagactcta

SEQ ID NO: 135562 - DNA, 25 bp, Canis familiaris
gtataggttctcttggatgactcca

SEQ ID NO: 135563 - DNA, 25 bp, Canis familiaris
gtataggatttcctttgtctccatt

SEQ ID NO: 135564 - DNA, 25 bp, Canis familiaris
gtataccaccacattgtttccattc

SEQ ID NO: 135565 - DNA, 25 bp, Canis familiaris
gtataccaccacattgtttccattc

SEQ ID NO: 135566 - DNA, 25 bp, Canis familiaris
gtatccaaccagatgtttgtccctg

SEQ ID NO: 135567 - DNA, 25 bp, Canis familiaris
gtatcctagaaaaccagtgtcacct

SEQ ID NO: 135568 - DNA, 25 bp, Canis familiaris
gtatcctactaacctcatggagaac

SEQ ID NO: 135569 - DNA, 25 bp, Canis familiaris
gtatgcttactctgtcttggttaat

SEQ ID NO: 135570 - DNA, 25 bp, Canis familiaris
gtatgtccacttaggtatgttgtat

SEQ ID NO: 135571 - DNA, 25 bp, Canis familiaris
gtatgtcgacaacggtcttggtcat

SEQ ID NO: 135572 - DNA, 25 bp, Canis familiaris
gtatacttatagttgtcttgcagtt

SEQ ID NO: 135573 - DNA, 25 bp, Canis familiaris
gtatttatatcgtagctcctgcagc

SEQ ID NO: 135574 - DNA, 25 bp, Canis familiaris
gtatatatattcaataccctaccga

SEQ ID NO: 135575 - DNA, 25 bp, Canis familiaris
gtatactgttattatccctatctca

SEQ ID NO: 135576 - DNA, 25 bp, Canis familiaris
gtattctgtgcaatttttttctcag

SEQ ID NO: 135577 - DNA, 25 bp, Canis familiaris
gtatctcttttttaagttccagtat

SEQ ID NO: 135578 - DNA, 25 bp, Canis familiaris
gtatttcatttttgaggtcccagtt

SEQ ID NO: 135579 - DNA, 25 bp, Canis familiaris
gtattatttctggagaccccgtgat

SEQ ID NO: 135580 - DNA, 25 bp, Canis familiaris
gtattaaattgatgacaccccctcc

SEQ ID NO: 135581 - DNA, 25 bp, Canis familiaris
gtatctgagtgtagggagcctcccc

SEQ ID NO: 135582 - DNA, 25 bp, Canis familiaris
gtatctggttcaaaggttgcccacc

SEQ ID NO: 135583 - DNA, 25 bp, Canis familiaris
gtatcatttctcttgagggtccacc

SEQ ID NO: 135584 - DNA, 25 bp, Canis familiaris
gtatcctgcccaaagtgcagtccac

SEQ ID NO: 135585 - DNA, 25 bp, Canis familiaris
gtatccatgactggtattgcctaac

SEQ ID NO: 135586 - DNA, 25 bp, Canis familiaris
gtatacatgtagctttgccagatat

SEQ ID NO: 135587 - DNA, 25 bp, Canis familiaris
gtatactctcactttacgagattcc

SEQ ID NO: 135588 - DNA, 25 bp, Canis familiaris
gtatcctgctctattaagatgtttt

SEQ ID NO: 135589 - DNA, 25 bp, Canis familiaris
gtattctctgtcctgtaattgtgag

SEQ ID NO: 135590 - DNA, 25 bp, Canis familiaris
gtattcctgggatttatctgtcaag

SEQ ID NO: 135591 - DNA, 25 bp, Canis familiaris
gtatgtgaggggtcatgtgtccaaa

SEQ ID NO: 135592 - DNA, 25 bp, Canis familiaris
gtatgacccggatgttgcacaacac

SEQ ID NO: 135593 - DNA, 25 bp, Canis familiaris
gtatgaaagggatgaggacaacaac

SEQ ID NO: 135594 - DNA, 25 bp, Canis familiaris
gtattactgaatctaggaaaccacg

SEQ ID NO: 135595 - DNA, 25 bp, Canis familiaris
gtaatttgattttcaggcaaaccca

SEQ ID NO: 135596 - DNA, 25 bp, Canis familiaris
gtattttagttgacggcaacacttc

SEQ ID NO: 135597 - DNA, 25 bp, Canis familiaris
gtatgggtgggaccaggcaatcctt

SEQ ID NO: 135598 - DNA, 25 bp, Canis familiaris
gtatgctagtgagaccctgcaggcc

SEQ ID NO: 135599 - DNA, 25 bp, Canis familiaris
gtagcaaaagccacctgaacgcaca

SEQ ID NO: 135600 - DNA, 25 bp, Canis familiaris
gtagatggggccaccagagtcacaa

SEQ ID NO: 135601 - DNA, 25 bp, Canis familiaris
gtatgcagtgggaaaccgagttcaa

SEQ ID NO: 135602 - DNA, 25 bp, Canis familiaris
gtatctcttcgaaaacggtctcaca

SEQ ID NO: 135603 - DNA, 25 bp, Canis familiaris
gtatttcccaaatagagcctcagca

SEQ ID NO: 135604 - DNA, 25 bp, Canis familiaris
gtatttcccacctggcaaagaacca

SEQ ID NO: 135605 - DNA, 25 bp, Canis familiaris
gtagctctcctcaccggaaaggaaa

SEQ ID NO: 135606 - DNA, 25 bp, Canis familiaris
gtatgcctcctatctttaaaaataa

SEQ ID NO: 135607 - DNA, 25 bp, Canis familiaris
gtatgcccagttttgttaatagttt

SEQ ID NO: 135608 - DNA, 25 bp, Canis familiaris
gtaccctttcctgccaatattggta

SEQ ID NO: 135609 - DNA, 25 bp, Canis familiaris
gtataccatttctccaaattctgtc

SEQ ID NO: 135610 - DNA, 25 bp, Canis familiaris
gtatttttctttgcaggcttcttct

SEQ ID NO: 135611 - DNA, 25 bp, Canis familiaris
gtatttttctttgcaggcttcttct

SEQ ID NO: 135612 - DNA, 25 bp, Canis familiaris
gtatttttctttgcaggcttcttct

SEQ ID NO: 135613 - DNA, 25 bp, Canis familiaris
gtatctgtttttcctcaggcacatc

SEQ ID NO: 135614 - DNA, 25 bp, Canis familiaris
gtattctcattcacctcatcagaac

SEQ ID NO: 135615 - DNA, 25 bp, Canis familiaris
gtattctcatcccacagtaaaaccc

SEQ ID NO: 135616 - DNA, 25 bp, Canis familiaris
gtatcattcatgggactttcaaaaa

SEQ ID NO: 135617 - DNA, 25 bp, Canis familiaris
gtatcttctaagtcaatgtaatcaa

SEQ ID NO: 135618 - DNA, 25 bp, Canis familiaris
gtatctcgaactcctatgtacaata

SEQ ID NO: 135619 - DNA, 25 bp, Canis familiaris
gtatctgcagatgtccacagtggaa

SEQ ID NO: 135620 - DNA, 25 bp, Canis familiaris
gtatacgcatgcacccagtgtggac

SEQ ID NO: 135621 - DNA, 25 bp, Canis familiaris
gtagatagctgttaccgttaacgta

SEQ ID NO: 135622 - DNA, 25 bp, Canis familiaris
gtattagctgtgcatgcctgtgtgc

SEQ ID NO: 135623 - DNA, 25 bp, Canis familiaris
gtattattgctgctgtgctttcgat

SEQ ID NO: 135624 - DNA, 25 bp, Canis familiaris
gtattttgagagcttctgatgcaga

SEQ ID NO: 135625 - DNA, 25 bp, Canis familiaris
gtattctgtaattataatgtgccac

SEQ ID NO: 135626 - DNA, 25 bp, Canis familiaris
gtatttcacagaaaacttcccaata

SEQ ID NO: 135627 - DNA, 25 bp, Canis familiaris
gtatttcacgtgtaatttcctaatt

SEQ ID NO: 135628 - DNA, 25 bp, Canis familiaris
gtattttcagtattttctacataat

SEQ ID NO: 135629 - DNA, 25 bp, Canis familiaris
gtattttaatcatcttcctcatata

SEQ ID NO: 135630 - DNA, 25 bp, Canis familiaris
gtatttctatacgtcatgtgcctta

SEQ ID NO: 135631 - DNA, 25 bp, Canis familiaris
gtatttgtacaccagactgccataa

SEQ ID NO: 135632 - DNA, 25 bp, Canis familiaris
gtattagtatctatgatcgcgaaat

SEQ ID NO: 135633 - DNA, 25 bp, Canis familiaris
gtattagtcacagttgttgggcaag

SEQ ID NO: 135634 - DNA, 25 bp, Canis familiaris
gtatatactgcaatgttaggggaat

SEQ ID NO: 135635 - DNA, 25 bp, Canis familiaris
gtataatcgttgtatcaaaggttta

SEQ ID NO: 135636 - DNA, 25 bp, Canis familiaris
gtatactcgtgtacaccaagggtgt

SEQ ID NO: 135637 - DNA, 25 bp, Canis familiaris
gtataccataggaccactagggact

SEQ ID NO: 135638 - DNA, 25 bp, Canis familiaris
gtatacactagaatcgcacaaggaa

SEQ ID NO: 135639 - DNA, 25 bp, Canis familiaris
gtatatgcctatttgctcacagagc

SEQ ID NO: 135640 - DNA, 25 bp, Canis familiaris
gtattctagagctttacatgccgac

SEQ ID NO: 135641 - DNA, 25 bp, Canis familiaris
gtatttcattgcttttgactcagac

SEQ ID NO: 135642 - DNA, 25 bp, Canis familiaris
gtatttttctctttgatttgcacaa

SEQ ID NO: 135643 - DNA, 25 bp, Canis familiaris
gtattttttattttgtatcacaact

SEQ ID NO: 135644 - DNA, 25 bp, Canis familiaris
gtatcttttttatttgttgagtaat

SEQ ID NO: 135645 - DNA, 25 bp, Canis familiaris
gtatcattccttcaaataaagtaat

SEQ ID NO: 135646 - DNA, 25 bp, Canis familiaris
gtatattcctgcccagtgaataaaa

SEQ ID NO: 135647 - DNA, 25 bp, Canis familiaris
gtatatacctggcctctgatattta

SEQ ID NO: 135648 - DNA, 25 bp, Canis familiaris
gtattacctggtgatggcaattaca

SEQ ID NO: 135649 - DNA, 25 bp, Canis familiaris
gtatctactctgttaacaaatttca

SEQ ID NO: 135650 - DNA, 25 bp, Canis familiaris
gtatttctcctttacaaattgtaca

SEQ ID NO: 135651 - DNA, 25 bp, Canis familiaris
gtatatgatgtggctttaatacgtg

SEQ ID NO: 135652 - DNA, 25 bp, Canis familiaris
gtaggagctggcgtcatagatgaag

SEQ ID NO: 135653 - DNA, 25 bp, Canis familiaris
gtacggcttgcattaaggcggaata

SEQ ID NO: 135654 - DNA, 25 bp, Canis familiaris
gtatgccctggtacaagttggaaac

SEQ ID NO: 135655 - DNA, 25 bp, Canis familiaris
gtatccagtatgaaccagtatccaa

SEQ ID NO: 135656 - DNA, 25 bp, Canis familiaris
gtatccagtatctccgtgattacct

SEQ ID NO: 135657 - DNA, 25 bp, Canis familiaris
gtatccgtagccatttgttgacact

SEQ ID NO: 135658 - DNA, 25 bp, Canis familiaris
gtagagcgaatgctgttcgttacag

SEQ ID NO: 135659 - DNA, 25 bp, Canis familiaris
gtagatggtgcatcttactttccgg

SEQ ID NO: 135660 - DNA, 25 bp, Canis familiaris
gtatagagtgtacatttgccccggt

SEQ ID NO: 135661 - DNA, 25 bp, Canis familiaris
gtataggtggagcagcctgctgccc

SEQ ID NO: 135662 - DNA, 25 bp, Canis familiaris
gtatgatgtcggcgaagtgccccgt

SEQ ID NO: 135663 - DNA, 25 bp, Canis familiaris
gtatgactatggggaaagggctgag

SEQ ID NO: 135664 - DNA, 25 bp, Canis familiaris
gtatgaggatggggacaagctgcga

SEQ ID NO: 135665 - DNA, 25 bp, Canis familiaris
gtatcggcaggactatgacgctggg

SEQ ID NO: 135666 - DNA, 25 bp, Canis familiaris
gtatctgcacagcctatgaatccga

SEQ ID NO: 135667 - DNA, 25 bp, Canis familiaris
gtatctgaatccaagatgggctgat

SEQ ID NO: 135668 - DNA, 25 bp, Canis familiaris
gtatctaactcacgatgtctgtcat

SEQ ID NO: 135669 - DNA, 25 bp, Canis familiaris
gtattaactatttagctgatttggg

SEQ ID NO: 135670 - DNA, 25 bp, Canis familiaris
gtattcaacactacaatgcagtttt

SEQ ID NO: 135671 - DNA, 25 bp, Canis familiaris
gtatgctaataccctacaggttcat

SEQ ID NO: 135672 - DNA, 25 bp, Canis familiaris
gtatcatattcatcccccgatgtat

SEQ ID NO: 135673 - DNA, 25 bp, Canis familiaris
gtatataaagcacccatccgttaaa

SEQ ID NO: 135674 - DNA, 25 bp, Canis familiaris
gtatataaatcatccttttctacca

SEQ ID NO: 135675 - DNA, 25 bp, Canis familiaris
gtattaacatctactttcttctcca

SEQ ID NO: 135676 - DNA, 25 bp, Canis familiaris
gtattatctgcctgctatttaccta

SEQ ID NO: 135677 - DNA, 25 bp, Canis familiaris
gtatctctttgctgctacgtgaaca

SEQ ID NO: 135678 - DNA, 25 bp, Canis familiaris
gtatcagctttgggaccagaaatcc

SEQ ID NO: 135679 - DNA, 25 bp, Canis familiaris
gtaggcttcatgggccttatacccc

SEQ ID NO: 135680 - DNA, 25 bp, Canis familiaris
gtaggccatgctcgaggttaacgcg

SEQ ID NO: 135681 - DNA, 25 bp, Canis familiaris
gtatgggatgtgcgagtccctctgg

SEQ ID NO: 135682 - DNA, 25 bp, Canis familiaris
gtattttgttggtgccatctctggc

SEQ ID NO: 135683 - DNA, 25 bp, Canis familiaris
gtatttttgttatgtatcttctggg

SEQ ID NO: 135684 - DNA, 25 bp, Canis familiaris
gtattttttctttctcatttatgtt

SEQ ID NO: 135685 - DNA, 25 bp, Canis familiaris
gtattttttcttaatattgtgattt

SEQ ID NO: 135686 - DNA, 25 bp, Canis familiaris
gtatttctctatgatttgaatggat

SEQ ID NO: 135687 - DNA, 25 bp, Canis familiaris
gtattatctgttggtgtgaagggtc

SEQ ID NO: 135688 - DNA, 25 bp, Canis familiaris
gtatctccgttcctggaaggtcttg

SEQ ID NO: 135689 - DNA, 25 bp, Canis familiaris
gtatcctcttcgcggagatgtgtgc

SEQ ID NO: 135690 - DNA, 25 bp, Canis familiaris
gtatccttctggagtaacttggcag

SEQ ID NO: 135691 - DNA, 25 bp, Canis familiaris
gtgatcggtttcagtactttgtgag

SEQ ID NO: 135692 - DNA, 25 bp, Canis familiaris
gtatttcctctcagtactgctatat

SEQ ID NO: 135693 - DNA, 25 bp, Canis familiaris
gtatttttgtgcacattctgttgat

SEQ ID NO: 135694 - DNA, 25 bp, Canis familiaris
gtattatttggaattcctgatgtat

SEQ ID NO: 135695 - DNA, 25 bp, Canis familiaris
gtatttttggatggacacggtgata

SEQ ID NO: 135696 - DNA, 25 bp, Canis familiaris
gtatttcctggattacacatagtgt

SEQ ID NO: 135697 - DNA, 25 bp, Canis familiaris
gtatttctccctttgcaatagcagt

SEQ ID NO: 135698 - DNA, 25 bp, Canis familiaris
gtatttcatcagtttgtgagacgcg

SEQ ID NO: 135699 - DNA, 25 bp, Canis familiaris
gtatttcatattttgtagcaggcag

SEQ ID NO: 135700 - DNA, 25 bp, Canis familiaris
gtatttcatcttttctccagtaact

SEQ ID NO: 135701 - DNA, 25 bp, Canis familiaris
gtatttcatgctaatcttcagttca

SEQ ID NO: 135702 - DNA, 25 bp, Canis familiaris
gtatttcatctgatttgctggctga

SEQ ID NO: 135703 - DNA, 25 bp, Canis familiaris
gtatctctcctaatattcggctagc

SEQ ID NO: 135704 - DNA, 25 bp, Canis familiaris
gtatctccgacactttgggaatctc

SEQ ID NO: 135705 - DNA, 25 bp, Canis familiaris
gtatctccagccatgtcctggaact

SEQ ID NO: 135706 - DNA, 25 bp, Canis familiaris
gtatcatccctgctggagctggatc

SEQ ID NO: 135707 - DNA, 25 bp, Canis familiaris
gtatcatcggctgacgaagcagatc

SEQ ID NO: 135708 - DNA, 25 bp, Canis familiaris
gtatgaccgatcaaccaacgtcgat

SEQ ID NO: 135709 - DNA, 25 bp, Canis familiaris
gtatacctgttataatattcagtaa

SEQ ID NO: 135710 - DNA, 25 bp, Canis familiaris
gtatatcctttaaccaattcactta

SEQ ID NO: 135711 - DNA, 25 bp, Canis familiaris
gtagacctttacagcaaaacattag

SEQ ID NO: 135712 - DNA, 25 bp, Canis familiaris
gtacccgagacgtgctaaacttatg

SEQ ID NO: 135713 - DNA, 25 bp, Canis familiaris
gtagccgggaagtgctgcaagattt

SEQ ID NO: 135714 - DNA, 25 bp, Canis familiaris
gtatgcctgggtcttggataaactg

SEQ ID NO: 135715 - DNA, 25 bp, Canis familiaris
gtatctccggttcagcatgtcaaac

SEQ ID NO: 135716 - DNA, 25 bp, Canis familiaris
gtatcccaggaagacatgtcctccc

SEQ ID NO: 135717 - DNA, 25 bp, Canis familiaris
gtatcccagatgtggacagggccta

SEQ ID NO: 135718 - DNA, 25 bp, Canis familiaris
gtaccacaatgagggcccgggtgat

SEQ ID NO: 135719 - DNA, 25 bp, Canis familiaris
gtatcggccatggggtccgagggaa

SEQ ID NO: 135720 - DNA, 25 bp, Canis familiaris
gtatcgcccaaagcaccgagaggaa

SEQ ID NO: 135721 - DNA, 25 bp, Canis familiaris
gtatcccctaaggaggcagcaacag

SEQ ID NO: 135722 - DNA, 25 bp, Canis familiaris
gtatgcccttcattctgaagcagaa

SEQ ID NO: 135723 - DNA, 25 bp, Canis familiaris
gtatgccctgctggctggaagccag

SEQ ID NO: 135724 - DNA, 25 bp, Canis familiaris
gtatcccacatgacgagtgaccgcc

SEQ ID NO: 135725 - DNA, 25 bp, Canis familiaris
gtatcccaagggtgactctcacact

SEQ ID NO: 135726 - DNA, 25 bp, Canis familiaris
gtatccagcaacataggatttatca

SEQ ID NO: 135727 - DNA, 25 bp, Canis familiaris
gtatctggcaagagaaatctataac

SEQ ID NO: 135728 - DNA, 25 bp, Canis familiaris
gtatctctcacgaatgaatattaaa

SEQ ID NO: 135729 - DNA, 25 bp, Canis familiaris
gtatgcatctcaccacagtagttgt

SEQ ID NO: 135730 - DNA, 25 bp, Canis familiaris
gtatcatctcaaagagtttcggtgt

SEQ ID NO: 135731 - DNA, 25 bp, Canis familiaris
gtatcttcaagcgactattccgttt

SEQ ID NO: 135732 - DNA, 25 bp, Canis familiaris
gtatttccaccattagtgcggtgtg

SEQ ID NO: 135733 - DNA, 25 bp, Canis familiaris
gtatgtcccatttttggaggctgtg

SEQ ID NO: 135734 - DNA, 25 bp, Canis familiaris
gtatattgccatacactgtgggtgt

SEQ ID NO: 135735 - DNA, 25 bp, Canis familiaris
gtatgccagacaccgtgctaggcgt

SEQ ID NO: 135736 - DNA, 25 bp, Canis familiaris
gtatcagagcagctggctttgggat

SEQ ID NO: 135737 - DNA, 25 bp, Canis familiaris
gtatgcaagcaggtccttttgccct

SEQ ID NO: 135738 - DNA, 25 bp, Canis familiaris
gtatgccaaactggtgtcttgtcct

SEQ ID NO: 135739 - DNA, 25 bp, Canis familiaris
gtatgtacaactggatacttcctta

SEQ ID NO: 135740 - DNA, 25 bp, Canis familiaris
gtatttattcatgtagcttctcctc

SEQ ID NO: 135741 - DNA, 25 bp, Canis familiaris
gtatattttctcagtgtatccagtc

SEQ ID NO: 135742 - DNA, 25 bp, Canis familiaris
gtatattctcttatttacacgtagc

SEQ ID NO: 135743 - DNA, 25 bp, Canis familiaris
gtatttctccatatgttcacttgct

SEQ ID NO: 135744 - DNA, 25 bp, Canis familiaris
gtatttttgcattttgaccattgtc

SEQ ID NO: 135745 - DNA, 25 bp, Canis familiaris
gtatatttgtcttcttgaggatatt

SEQ ID NO: 135746 - DNA, 25 bp, Canis familiaris
gtatagattgcatttcttaggtgtt

SEQ ID NO: 135747 - DNA, 25 bp, Canis familiaris
gtatgcaaggtttgcttcaagcagt

SEQ ID NO: 135748 - DNA, 25 bp, Canis familiaris
gtataagggattggctcacacagtt

SEQ ID NO: 135749 - DNA, 25 bp, Canis familiaris
gtataagggactgttcactgctgta

SEQ ID NO: 135750 - DNA, 25 bp, Canis familiaris
gtatatttagttgcttcagtttata

SEQ ID NO: 135751 - DNA, 25 bp, Canis familiaris
gtatacggatctaccttttttatag

SEQ ID NO: 135752 - DNA, 25 bp, Canis familiaris
gtataccagtctagttgttgtttta

SEQ ID NO: 135753 - DNA, 25 bp, Canis familiaris
gtatttacctcatttttgtctgttt

SEQ ID NO: 135754 - DNA, 25 bp, Canis familiaris
gtatctactcgtcttttttgttgtt

SEQ ID NO: 135755 - DNA, 25 bp, Canis familiaris
gtatttcttgctattttattctctt

SEQ ID NO: 135756 - DNA, 25 bp, Canis familiaris
gtatactctttgcttctttttgcta

SEQ ID NO: 135757 - DNA, 25 bp, Canis familiaris
gtatatgttctagcttttcttttga

SEQ ID NO: 135758 - DNA, 25 bp, Canis familiaris
gtatatttttgcttttcagccttct

SEQ ID NO: 135759 - DNA, 25 bp, Canis familiaris
gtatattttgtgttttcccatttat

SEQ ID NO: 135760 - DNA, 25 bp, Canis familiaris
gtatcatttctttatatttccgttt

SEQ ID NO: 135761 - DNA, 25 bp, Canis familiaris
gtatatgtcctttaacttccagtga

SEQ ID NO: 135762 - DNA, 25 bp, Canis familiaris
gtatattctctttaactcagctggt

SEQ ID NO: 135763 - DNA, 25 bp, Canis familiaris
gtatttctgctttgaatccttgata

SEQ ID NO: 135764 - DNA, 25 bp, Canis familiaris
gtatcttcattcttaaatctctatc

SEQ ID NO: 135765 - DNA, 25 bp, Canis familiaris
gtatcttggtgctgctgaatttctc

SEQ ID NO: 135766 - DNA, 25 bp, Canis familiaris
gtatattgctggcagctattgtatt

SEQ ID NO: 135767 - DNA, 25 bp, Canis familiaris
gtatatttgtctgctattctgttca

SEQ ID NO: 135768 - DNA, 25 bp, Canis familiaris
gtatcaactgctgactatcctttaa

SEQ ID NO: 135769 - DNA, 25 bp, Canis familiaris
gtatgaatctgcaaattcgcacctt

SEQ ID NO: 135770 - DNA, 25 bp, Canis familiaris
gtatgcattatcaagacctcacgtg

SEQ ID NO: 135771 - DNA, 25 bp, Canis familiaris
gtatcaattttgaccacatctggca

SEQ ID NO: 135772 - DNA, 25 bp, Canis familiaris
gtatagactttgaggcattatgcta

SEQ ID NO: 135773 - DNA, 25 bp, Canis familiaris
gtatcaactttgtatggtgtcagat

SEQ ID NO: 135774 - DNA, 25 bp, Canis familiaris
gtatagacattattttcgtcgtatg

SEQ ID NO: 135775 - DNA, 25 bp, Canis familiaris
gtatatgtattgtcttactgccttt

SEQ ID NO: 135776 - DNA, 25 bp, Canis familiaris
gtatatgtataaatgttccacgttc

SEQ ID NO: 135777 - DNA, 25 bp, Canis familiaris
gtatatgtataataacctcctctgc

SEQ ID NO: 135778 - DNA, 25 bp, Canis familiaris
gtatcatctacctaaacatcctttg

SEQ ID NO: 135779 - DNA, 25 bp, Canis familiaris
gtatactagcaatctacacctttat

SEQ ID NO: 135780 - DNA, 25 bp, Canis familiaris
gtatttaattctctcacttttgagt

SEQ ID NO: 135781 - DNA, 25 bp, Canis familiaris
gtatagtaattctctcactctttga

SEQ ID NO: 135782 - DNA, 25 bp, Canis familiaris
gtatagtactctctttcatcgatgt

SEQ ID NO: 135783 - DNA, 25 bp, Canis familiaris
gtatactacatacttcttatgctaa

SEQ ID NO: 135784 - DNA, 25 bp, Canis familiaris
gtatatctataacatcttacacata

SEQ ID NO: 135785 - DNA, 25 bp, Canis familiaris
gtatcttcttcacatactaacatag

SEQ ID NO: 135786 - DNA, 25 bp, Canis familiaris
gtatcttttatggcacctagcacag

SEQ ID NO: 135787 - DNA, 25 bp, Canis familiaris
gtatctgatatttgagacattcacc

SEQ ID NO: 135788 - DNA, 25 bp, Canis familiaris
gtactagtttctgaccttgaaaggt

SEQ ID NO: 135789 - DNA, 25 bp, Canis familiaris
gtaacagtttggcattttaaaggcg

SEQ ID NO: 135790 - DNA, 25 bp, Canis familiaris
gtatccggtaagcctttttaatctg

SEQ ID NO: 135791 - DNA, 25 bp, Canis familiaris
gtatcctaggaggactttttccttg

SEQ ID NO: 135792 - DNA, 25 bp, Canis familiaris
gtaggataggggcaaccttcctgtt

SEQ ID NO: 135793 - DNA, 25 bp, Canis familiaris
gtaaaagacggataatttgcctagt

SEQ ID NO: 135794 - DNA, 25 bp, Canis familiaris
gtatcataaagctggcaaacttgcc

SEQ ID NO: 135795 - DNA, 25 bp, Canis familiaris
gtatctcaaggatgggaacagcagt

SEQ ID NO: 135796 - DNA, 25 bp, Canis familiaris
gtatctatactgtcaccgaccagga

SEQ ID NO: 135797 - DNA, 25 bp, Canis familiaris
gtatataatctgtcacctttcacga

SEQ ID NO: 135798 - DNA, 25 bp, Canis familiaris
gtatattatgtctagttttcacaaa

SEQ ID NO: 135799 - DNA, 25 bp, Canis familiaris
gtagtttcatgctatgtatgtatca

SEQ ID NO: 135800 - DNA, 25 bp, Canis familiaris
gtatttctcagaatgtatgtgacta

SEQ ID NO: 135801 - DNA, 25 bp, Canis familiaris
gtatttctgatgttatattcattca

SEQ ID NO: 135802 - DNA, 25 bp, Canis familiaris
gtatctctctaggctttgtattagt

SEQ ID NO: 135803 - DNA, 25 bp, Canis familiaris
gtatcttgtaggccctctttagcat

SEQ ID NO: 135804 - DNA, 25 bp, Canis familiaris
gtatatttgtagccctttcatgcca

SEQ ID NO: 135805 - DNA, 25 bp, Canis familiaris
gtatctttaatgccagctttgcttc

SEQ ID NO: 135806 - DNA, 25 bp, Canis familiaris
gtatctgtaacaggcccttgtatct

SEQ ID NO: 135807 - DNA, 25 bp, Canis familiaris
gtatctatcacaacaccctgtaatt

SEQ ID NO: 135808 - DNA, 25 bp, Canis familiaris
gtatcttatcatgattcctgtaggt

SEQ ID NO: 135809 - DNA, 25 bp, Canis familiaris
gtatctgctatcatttcactttgtg

SEQ ID NO: 135810 - DNA, 25 bp, Canis familiaris
gtatgctgtcaggtaccacctggcc

SEQ ID NO: 135811 - DNA, 25 bp, Canis familiaris
gtatggtagagttactctccccggt

SEQ ID NO: 135812 - DNA, 25 bp, Canis familiaris
gtaggggaggttgtctccactaggt

SEQ ID NO: 135813 - DNA, 25 bp, Canis familiaris
gtaggggaggtcctgattggtcctg

SEQ ID NO: 135814 - DNA, 25 bp, Canis familiaris
gtatgtgggggtcatggtggcaggc

SEQ ID NO: 135815 - DNA, 25 bp, Canis familiaris
gtagatggtgcgcttgctggtgcgc

SEQ ID NO: 135816 - DNA, 25 bp, Canis familiaris
gtagaggtcggaactccacgaggga

SEQ ID NO: 135817 - DNA, 25 bp, Canis familiaris
gtcaatgggtcttacccactgggac

SEQ ID NO: 135818 - DNA, 25 bp, Canis familiaris
gtcgtttttagctccattagaactc

SEQ ID NO: 135819 - DNA, 25 bp, Canis familiaris
gtcagttttgtccaactttaacctg

SEQ ID NO: 135820 - DNA, 25 bp, Canis familiaris
gtatgatttagtacaacttctcaat

SEQ ID NO: 135821 - DNA, 25 bp, Canis familiaris
gtatttggatatatattcttacatt

SEQ ID NO: 135822 - DNA, 25 bp, Canis familiaris
gtatttgaggatatattctgtcgtt

SEQ ID NO: 135823 - DNA, 25 bp, Canis familiaris
gtatgtctcaagtacctatagccgg

SEQ ID NO: 135824 - DNA, 25 bp, Canis familiaris
gtagatatccagtccatctgcaacc

SEQ ID NO: 135825 - DNA, 25 bp, Canis familiaris
gtatcatagcagccaggactcaacc

SEQ ID NO: 135826 - DNA, 25 bp, Canis familiaris
gtatcatatgtgcaccacatgcccc

SEQ ID NO: 135827 - DNA, 25 bp, Canis familiaris
gtatcagattagtccaaacccgtag

SEQ ID NO: 135828 - DNA, 25 bp, Canis familiaris
gtatcagctgttcaaggactcggtc

SEQ ID NO: 135829 - DNA, 25 bp, Canis familiaris
gtatcattgttggattctgacctgc

SEQ ID NO: 135830 - DNA, 25 bp, Canis familiaris
gtatcatagcctgtatgctgacccc

SEQ ID NO: 135831 - DNA, 25 bp, Canis familiaris
gtatgctagaatggtcaggtcctca

SEQ ID NO: 135832 - DNA, 25 bp, Canis familiaris
gtatgtggaactcagctgtgcaccc

SEQ ID NO: 135833 - DNA, 25 bp, Canis familiaris
gtatggggcgctaactcacaatccc

SEQ ID NO: 135834 - DNA, 25 bp, Canis familiaris
gtcatggacggacggatacacccac

SEQ ID NO: 135835 - DNA, 25 bp, Canis familiaris
gtaggcactgggtgtcagccagctc

SEQ ID NO: 135836 - DNA, 25 bp, Canis familiaris
gtatcgacatagggcttcgctacca

SEQ ID NO: 135837 - DNA, 25 bp, Canis familiaris
gtatcgaatcagtactttgtaggca

SEQ ID NO: 135838 - DNA, 25 bp, Canis familiaris
gtatcgtgaggttgctgcttttgcc

SEQ ID NO: 135839 - DNA, 25 bp, Canis familiaris
gtatgaggcagtgtcacctgcttcc

SEQ ID NO: 135840 - DNA, 25 bp, Canis familiaris
gtatgaggcgtcttgccaacactgc

SEQ ID NO: 135841 - DNA, 25 bp, Canis familiaris
gtaggggatctgcctgcaacagtac

SEQ ID NO: 135842 - DNA, 25 bp, Canis familiaris
gtagatgggtcttgtcacggtgaac

SEQ ID NO: 135843 - DNA, 25 bp, Canis familiaris
gtaagggatcctacatgggcaaaat

SEQ ID NO: 135844 - DNA, 25 bp, Canis familiaris
gtaagttttcccaagagcagtaata

SEQ ID NO: 135845 - DNA, 25 bp, Canis familiaris
gtatagctttacggttgaggaggaa

SEQ ID NO: 135846 - DNA, 25 bp, Canis familiaris
gtaggatcctaagtgtggccaggga

SEQ ID NO: 135847 - DNA, 25 bp, Canis familiaris
gtaggctgcctagtgtgttgtacca

SEQ ID NO: 135848 - DNA, 25 bp, Canis familiaris
gtatgtctgccagcataggttaccc

SEQ ID NO: 135849 - DNA, 25 bp, Canis familiaris
gtatccagacaccaaggtgggccac

SEQ ID NO: 135850 - DNA, 25 bp, Canis familiaris
gtatggaggctccagggagggccct

SEQ ID NO: 135851 - DNA, 25 bp, Canis familiaris
gtacgtgaaccacgacagggcaccc

SEQ ID NO: 135852 - DNA, 25 bp, Canis familiaris
gtatgcgtaaaccagggtgtgcccc

SEQ ID NO: 135853 - DNA, 25 bp, Canis familiaris
gtatcgtcagaaaagtgattactac

SEQ ID NO: 135854 - DNA, 25 bp, Canis familiaris
gtatctggatggtagggttacaact

SEQ ID NO: 135855 - DNA, 25 bp, Canis familiaris
gtatcgtgttggtggatcccgagct

SEQ ID NO: 135856 - DNA, 25 bp, Canis familiaris
gtatcggtcttaatggtccgtgaca

SEQ ID NO: 135857 - DNA, 25 bp, Canis familiaris
gtatcttgatgtgtgtgcaggggtg

SEQ ID NO: 135858 - DNA, 25 bp, Canis familiaris
gtatatttgctgctactgtagtgta

SEQ ID NO: 135859 - DNA, 25 bp, Canis familiaris
gtatgttttggctctgtactccaga

SEQ ID NO: 135860 - DNA, 25 bp, Canis familiaris
gtatggtctacctgatttccaagag

SEQ ID NO: 135861 - DNA, 25 bp, Canis familiaris
gtatctgtctactaattggctctaa

SEQ ID NO: 135862 - DNA, 25 bp, Canis familiaris
gtatcagttctgcagttgtcctata

SEQ ID NO: 135863 - DNA, 25 bp, Canis familiaris
gtatagctatcccagctttctttag

SEQ ID NO: 135864 - DNA, 25 bp, Canis familiaris
gtatatctaacctttattatttcat

SEQ ID NO: 135865 - DNA, 25 bp, Canis familiaris
gtagtacatacctgcacattattaa

SEQ ID NO: 135866 - DNA, 25 bp, Canis familiaris
gtagtacttgcctcatagatatgtg

SEQ ID NO: 135867 - DNA, 25 bp, Canis familiaris
gtagatactttaccaggattattaa

SEQ ID NO: 135868 - DNA, 25 bp, Canis familiaris
gtatgaaccattctaagttttgaga

SEQ ID NO: 135869 - DNA, 25 bp, Canis familiaris
gtataatgtatgcactactgtttta

SEQ ID NO: 135870 - DNA, 25 bp, Canis familiaris
gtatcagtcattcactacttagtat

SEQ ID NO: 135871 - DNA, 25 bp, Canis familiaris
gtatagtcattttctctgcttttca

SEQ ID NO: 135872 - DNA, 25 bp, Canis familiaris
gtataatcttattctctgtgtatgt

SEQ ID NO: 135873 - DNA, 25 bp, Canis familiaris
gtataatctttgccagctggactgc

SEQ ID NO: 135874 - DNA, 25 bp, Canis familiaris
gtatagatcttctgactgtcaatca

SEQ ID NO: 135875 - DNA, 25 bp, Canis familiaris
gtatctgcctttggcacaggctata

SEQ ID NO: 135876 - DNA, 25 bp, Canis familiaris
gtatccactataatgcctggcatgt

SEQ ID NO: 135877 - DNA, 25 bp, Canis familiaris
gtatcagcacactgatgcagccagc

SEQ ID NO: 135878 - DNA, 25 bp, Canis familiaris
gtatgcgaactggagcagccactct

SEQ ID NO: 135879 - DNA, 25 bp, Canis familiaris
gtatgcagacatttagagcctcaat

SEQ ID NO: 135880 - DNA, 25 bp, Canis familiaris
gtatctattacttgagcccatcata

SEQ ID NO: 135881 - DNA, 25 bp, Canis familiaris
gtatctattacttgagcccatcata

SEQ ID NO: 135882 - DNA, 25 bp, Canis familiaris
gtatctattacttgagcccatcata

SEQ ID NO: 135883 - DNA, 25 bp, Canis familiaris
gtatctattacttgagcccatcata

SEQ ID NO: 135884 - DNA, 25 bp, Canis familiaris
gtatctattacttgagcccatcata

SEQ ID NO: 135885 - DNA, 25 bp, Canis familiaris
gtatctattacttgagcccatcata

SEQ ID NO: 135886 - DNA, 25 bp, Canis familiaris
gtatctattacttgagcccactcat

SEQ ID NO: 135887 - DNA, 25 bp, Canis familiaris
gtatctattagctgtgagccccatc

SEQ ID NO: 135888 - DNA, 25 bp, Canis familiaris
gtatctatttacttgagcccatcat

SEQ ID NO: 135889 - DNA, 25 bp, Canis familiaris
gtataattcatagcttgaacatatc

SEQ ID NO: 135890 - DNA, 25 bp, Canis familiaris
gtataatctgcagtgtcctaactaa

SEQ ID NO: 135891 - DNA, 25 bp, Canis familiaris
gtataactacttcctttctatcaca

SEQ ID NO: 135892 - DNA, 25 bp, Canis familiaris
gtatccctacttcattagattcaca

SEQ ID NO: 135893 - DNA, 25 bp, Canis familiaris
gtatcccacgttggcagtaaatcca

SEQ ID NO: 135894 - DNA, 25 bp, Canis familiaris
gtatctcccgagtccggaattctgc

SEQ ID NO: 135895 - DNA, 25 bp, Canis familiaris
gtatccccagtgtctaaacagtacc

SEQ ID NO: 135896 - DNA, 25 bp, Canis familiaris
gtatccccaggattaaccctataga

SEQ ID NO: 135897 - DNA, 25 bp, Canis familiaris
gtatgcacaccacatgtgagaccac

SEQ ID NO: 135898 - DNA, 25 bp, Canis familiaris
gtatcacactcatatgttgtcctct

SEQ ID NO: 135899 - DNA, 25 bp, Canis familiaris
gtatccactataattgtgtgacgtc

SEQ ID NO: 135900 - DNA, 25 bp, Canis familiaris
gtatccatatatcttgattactgtc

SEQ ID NO: 135901 - DNA, 25 bp, Canis familiaris
gtatccatccatttatgtttttcgg

SEQ ID NO: 135902 - DNA, 25 bp, Canis familiaris
gtatccccatagtagatgttaccca

SEQ ID NO: 135903 - DNA, 25 bp, Canis familiaris
gtatccccaagtattttagctcatt

SEQ ID NO: 135904 - DNA, 25 bp, Canis familiaris
gtatcccctagcatttgtgcttgta

SEQ ID NO: 135905 - DNA, 25 bp, Canis familiaris
gtataatcattaccttggtcttgta

SEQ ID NO: 135906 - DNA, 25 bp, Canis familiaris
gtataatctcatatttaattctgta

SEQ ID NO: 135907 - DNA, 25 bp, Canis familiaris
gtacagttctttgacaagtttagct

SEQ ID NO: 135908 - DNA, 25 bp, Canis familiaris
gtatagttctttgtatcgtatctga

SEQ ID NO: 135909 - DNA, 25 bp, Canis familiaris
gtatagttgccagacaatgttacat

SEQ ID NO: 135910 - DNA, 25 bp, Canis familiaris
gtatcagtttgcgaccacatgttaa

SEQ ID NO: 135911 - DNA, 25 bp, Canis familiaris
gtatcgtttcagtactttgtagggc

SEQ ID NO: 135912 - DNA, 25 bp, Canis familiaris
gtagggctatcgttcagtttaggag

SEQ ID NO: 135913 - DNA, 25 bp, Canis familiaris
gtatgcggttagagaggaagtggag

SEQ ID NO: 135914 - DNA, 25 bp, Canis familiaris
gtatgcatgtgtgtaggggttgggg

SEQ ID NO: 135915 - DNA, 25 bp, Canis familiaris
gtatgtgtgtgtcttggtttggggt

SEQ ID NO: 135916 - DNA, 25 bp, Canis familiaris
gtatcgtgtgttaatggttttaggg

SEQ ID NO: 135917 - DNA, 25 bp, Canis familiaris
gtatacttgttttcagttttcattt

SEQ ID NO: 135918 - DNA, 25 bp, Canis familiaris
gtatgaccatgttgaacttgtttca

SEQ ID NO: 135919 - DNA, 25 bp, Canis familiaris
gtatggactggtctctccagtaccc

SEQ ID NO: 135920 - DNA, 25 bp, Canis familiaris
gtatggtgcgggctaccacatgacg

SEQ ID NO: 135921 - DNA, 25 bp, Canis familiaris
gtagggaggagaccatgcccatgac

SEQ ID NO: 135922 - DNA, 25 bp, Canis familiaris
gtaggagagctggaaccccacaaac

SEQ ID NO: 135923 - DNA, 25 bp, Canis familiaris
gtaggggtccatagtttgagccaac

SEQ ID NO: 135924 - DNA, 25 bp, Canis familiaris
gtagggcccagtataggagctttct

SEQ ID NO: 135925 - DNA, 25 bp, Canis familiaris
gtaaccccaatagaggagctaggcg

SEQ ID NO: 135926 - DNA, 25 bp, Canis familiaris
gtatacccaaaatcagccagctttc

SEQ ID NO: 135927 - DNA, 25 bp, Canis familiaris
gtatccccaaggtgcagaagctgct

SEQ ID NO: 135928 - DNA, 25 bp, Canis familiaris
gtatcgccagaaagcacgcgagagg

SEQ ID NO: 135929 - DNA, 25 bp, Canis familiaris
gtatgtccggcaagcctggcagaag

SEQ ID NO: 135930 - DNA, 25 bp, Canis familiaris
gtatgtccggcaagcctggcagaag

SEQ ID NO: 135931 - DNA, 25 bp, Canis familiaris
gtatgatcctgggatcctgggatcg

SEQ ID NO: 135932 - DNA, 25 bp, Canis familiaris
gtatggctacaggtcctggtgtgtg

SEQ ID NO: 135933 - DNA, 25 bp, Canis familiaris
gtaggtgcaaggtcattagggcatt

SEQ ID NO: 135934 - DNA, 25 bp, Canis familiaris
gtaggtgcagtgtctttagggcagt

SEQ ID NO: 135935 - DNA, 25 bp, Canis familiaris
gtaggcaagtactattacgacttaa

SEQ ID NO: 135936 - DNA, 25 bp, Canis familiaris
gtcggagaggattttactcccagaa

SEQ ID NO: 135937 - DNA, 25 bp, Canis familiaris
gtaggagtgtgcaccatactcccag

SEQ ID NO: 135938 - DNA, 25 bp, Canis familiaris
gtataactgtgtacccagcacctag

SEQ ID NO: 135939 - DNA, 25 bp, Canis familiaris
gtataatatataagccctccctctt

SEQ ID NO: 135940 - DNA, 25 bp, Canis familiaris
gtatgaatcatttcccactttcttc

SEQ ID NO: 135941 - DNA, 25 bp, Canis familiaris
gtatacactgatttccactttcttt

SEQ ID NO: 135942 - DNA, 25 bp, Canis familiaris
gtatacacccatacatacttgttat

SEQ ID NO: 135943 - DNA, 25 bp, Canis familiaris
gtataacagcaaactactgtcattt

SEQ ID NO: 135944 - DNA, 25 bp, Canis familiaris
gtatgaacgaagccgacatgctgtt

SEQ ID NO: 135945 - DNA, 25 bp, Canis familiaris
gtatgagaccaatgtcctctcttcc

SEQ ID NO: 135946 - DNA, 25 bp, Canis familiaris
gtatgtcacaaatggttcctacacc

SEQ ID NO: 135947 - DNA, 25 bp, Canis familiaris
gtatctgaagtatgtgttctttgca

SEQ ID NO: 135948 - DNA, 25 bp, Canis familiaris
gtatcagcaggttagagtctcttcc

SEQ ID NO: 135949 - DNA, 25 bp, Canis familiaris
gtatacatgtgtgtgcgtgcctgtc

SEQ ID NO: 135950 - DNA, 25 bp, Canis familiaris
gtatcctggatcatgagtgccttgc

SEQ ID NO: 135951 - DNA, 25 bp, Canis familiaris
gtagtcatggacctgatcatccttt

SEQ ID NO: 135952 - DNA, 25 bp, Canis familiaris
gtaggcattaaatattgtttacgtt

SEQ ID NO: 135953 - DNA, 25 bp, Canis familiaris
gtactggtaaacaggctttagtatt

SEQ ID NO: 135954 - DNA, 25 bp, Canis familiaris
gtacggtatcccagacatacggtat

SEQ ID NO: 135955 - DNA, 25 bp, Canis familiaris
gtacgggctccggaacaaacgtgag

SEQ ID NO: 135956 - DNA, 25 bp, Canis familiaris
gtaggaggacacagacgcaaaccga

SEQ ID NO: 135957 - DNA, 25 bp, Canis familiaris
gtagtagctaccgagaccgaacttc

SEQ ID NO: 135958 - DNA, 25 bp, Canis familiaris
gtagtgactcactacagagcacccc

SEQ ID NO: 135959 - DNA, 25 bp, Canis familiaris
gtagtaccaccgcagagacaggcaa

SEQ ID NO: 135960 - DNA, 25 bp, Canis familiaris
gtcacataccccctggtaaggagcg

SEQ ID NO: 135961 - DNA, 25 bp, Canis familiaris
gtatctcgtccccggtgaagaagac

SEQ ID NO: 135962 - DNA, 25 bp, Canis familiaris
gtatcgcttcccagaagaacaggaa

SEQ ID NO: 135963 - DNA, 25 bp, Canis familiaris
gtatccttccttctagggctggaat

SEQ ID NO: 135964 - DNA, 25 bp, Canis familiaris
gtatcccttcttgtaacactgtaat

SEQ ID NO: 135965 - DNA, 25 bp, Canis familiaris
gtatctacttttgtaacttcatcag

SEQ ID NO: 135966 - DNA, 25 bp, Canis familiaris
gtaatccttattgtgagttccctgg

SEQ ID NO: 135967 - DNA, 25 bp, Canis familiaris
gtagaagttgttgggactctctgcc

SEQ ID NO: 135968 - DNA, 25 bp, Canis familiaris
gtatgaaggcttttggtctccctgg

SEQ ID NO: 135969 - DNA, 25 bp, Canis familiaris
gtatgaggtctttttgctcctttag

SEQ ID NO: 135970 - DNA, 25 bp, Canis familiaris
gtagtcgttttcagtacattgtagg

SEQ ID NO: 135971 - DNA, 25 bp, Canis familiaris
gtatgcatctgtttgtcttgtaacc

SEQ ID NO: 135972 - DNA, 25 bp, Canis familiaris
gtatctcttcactctttgcagaggt

SEQ ID NO: 135973 - DNA, 25 bp, Canis familiaris
gtatcttgtcactccttgtgactct

SEQ ID NO: 135974 - DNA, 25 bp, Canis familiaris
gtatctttacaagtctctctaatta

SEQ ID NO: 135975 - DNA, 25 bp, Canis familiaris
gtatctatatcagattcttctatat

SEQ ID NO: 135976 - DNA, 25 bp, Canis familiaris
gtatctttgcttttactcatgtact

SEQ ID NO: 135977 - DNA, 25 bp, Canis familiaris
gtatcagtcaattttaccagctaat

SEQ ID NO: 135978 - DNA, 25 bp, Canis familiaris
gtatcagctctaatctttcaagtaa

SEQ ID NO: 135979 - DNA, 25 bp, Canis familiaris
gtatcagccttggtttcataatgta

SEQ ID NO: 135980 - DNA, 25 bp, Canis familiaris
gtatcagcagttccttttataatgg

SEQ ID NO: 135981 - DNA, 25 bp, Canis familiaris
gtatcaggatacggtatttactcag

SEQ ID NO: 135982 - DNA, 25 bp, Canis familiaris
gtatggaacactgatattctacaag

SEQ ID NO: 135983 - DNA, 25 bp, Canis familiaris
gtatgtggagcctttttgatagtag

SEQ ID NO: 135984 - DNA, 25 bp, Canis familiaris
gtatgtgaatgctgcttttgcaaag

SEQ ID NO: 135985 - DNA, 25 bp, Canis familiaris
gtaggaattagtagcttcattttct

SEQ ID NO: 135986 - DNA, 25 bp, Canis familiaris
gtaggagtctaccaaattctgttct

SEQ ID NO: 135987 - DNA, 25 bp, Canis familiaris
gtagggttgagccaagcttactttg

SEQ ID NO: 135988 - DNA, 25 bp, Canis familiaris
gtagggattgtcagactttcctctt

SEQ ID NO: 135989 - DNA, 25 bp, Canis familiaris
gtagggcttgtctttatttttctca

SEQ ID NO: 135990 - DNA, 25 bp, Canis familiaris
gtatggctctggattagttagttgc

SEQ ID NO: 135991 - DNA, 25 bp, Canis familiaris
gtatggctctggatacacatagaga

SEQ ID NO: 135992 - DNA, 25 bp, Canis familiaris
gtagtaatggttaattaggagccct

SEQ ID NO: 135993 - DNA, 25 bp, Canis familiaris
gtagtaatggttaaataggaggcac

SEQ ID NO: 135994 - DNA, 25 bp, Canis familiaris
gtagaactggtcatagaagaagagc

SEQ ID NO: 135995 - DNA, 25 bp, Canis familiaris
gtagcttcggtcacagtaacagggg

SEQ ID NO: 135996 - DNA, 25 bp, Canis familiaris
gtacccaagcttccagaaccaaggg

SEQ ID NO: 135997 - DNA, 25 bp, Canis familiaris
gtactccttccacaacacaacaagg

SEQ ID NO: 135998 - DNA, 25 bp, Canis familiaris
gtatcccaccccaaacataagaaat

SEQ ID NO: 135999 - DNA, 25 bp, Canis familiaris
gtaccacaccttaaccaaaatctgt

SEQ ID NO: 136000 - DNA, 25 bp, Canis familiaris
gtaccaaaccttacacagaaccact

SEQ ID NO: 136001 - DNA, 25 bp, Canis familiaris
gtatcccagacgtttatcacaacca

SEQ ID NO: 136002 - DNA, 25 bp, Canis familiaris
gtagtcgatgacagtttccaaccat

SEQ ID NO: 136003 - DNA, 25 bp, Canis familiaris
gtagtaatgactgtgttgacttcaa

SEQ ID NO: 136004 - DNA, 25 bp, Canis familiaris
gtagaacatacgactcttgatctca

SEQ ID NO: 136005 - DNA, 25 bp, Canis familiaris
gtagggcacacgattgggcatgcca

SEQ ID NO: 136006 - DNA, 25 bp, Canis familiaris
gtaggagcaacaatctcttggtccc

SEQ ID NO: 136007 - DNA, 25 bp, Canis familiaris
gtaggcaatgaattctcttgtacct

SEQ ID NO: 136008 - DNA, 25 bp, Canis familiaris
gtaggaatcctagttgcttacttag

SEQ ID NO: 136009 - DNA, 25 bp, Canis familiaris
gtagagtacccgtgttggctctaac

SEQ ID NO: 136010 - DNA, 25 bp, Canis familiaris
gtagtgtaccctcttgtggattttc

SEQ ID NO: 136011 - DNA, 25 bp, Canis familiaris
gtaggttgctcctgtactggaattt

SEQ ID NO: 136012 - DNA, 25 bp, Canis familiaris
gtcggtagtaacgtcacgggtccat

SEQ ID NO: 136013 - DNA, 25 bp, Canis familiaris
gtaggctaggaagctcaccaggtca

SEQ ID NO: 136014 - DNA, 25 bp, Canis familiaris
gtatgagtcaagaaagccccaaata

SEQ ID NO: 136015 - DNA, 25 bp, Canis familiaris
gtatcgtgaagaaaaccatcaacaa

SEQ ID NO: 136016 - DNA, 25 bp, Canis familiaris
gtatcgggacaattagctcccagca

SEQ ID NO: 136017 - DNA, 25 bp, Canis familiaris
gtatctggcgccagtgtctaccaga

SEQ ID NO: 136018 - DNA, 25 bp, Canis familiaris
gtatgtgactccaggatctactgaa

SEQ ID NO: 136019 - DNA, 25 bp, Canis familiaris
gtatgggacacatgtataagtgaga

SEQ ID NO: 136020 - DNA, 25 bp, Canis familiaris
gtatcgctgcctagagtgaaattga

SEQ ID NO: 136021 - DNA, 25 bp, Canis familiaris
gtatcagtgccatgggcaacctgaa

SEQ ID NO: 136022 - DNA, 25 bp, Canis familiaris
gtatcgtgctcattgacagcacacc

SEQ ID NO: 136023 - DNA, 25 bp, Canis familiaris
gtatcgtgctcattgacagcacacc

SEQ ID NO: 136024 - DNA, 25 bp, Canis familiaris
gtatctcttgtgacaagcacatccc

SEQ ID NO: 136025 - DNA, 25 bp, Canis familiaris
gtatcatttgtggggtacacccctc

SEQ ID NO: 136026 - DNA, 25 bp, Canis familiaris
gtatcatttatagcttatcagtcat

SEQ ID NO: 136027 - DNA, 25 bp, Canis familiaris
gtatcttagcagccatcttacgcat

SEQ ID NO: 136028 - DNA, 25 bp, Canis familiaris
gtatcttagcagccatcttacgcat

SEQ ID NO: 136029 - DNA, 25 bp, Canis familiaris
gtatcgtgcactgatttgaccattg

SEQ ID NO: 136030 - DNA, 25 bp, Canis familiaris
gtatcggcgatcattctgaactgta

SEQ ID NO: 136031 - DNA, 25 bp, Canis familiaris
gtatctgggattgctctgaacggag

SEQ ID NO: 136032 - DNA, 25 bp, Canis familiaris
gtactgggctgggcctgaaggtgta

SEQ ID NO: 136033 - DNA, 25 bp, Canis familiaris
gtactgggctggggcaaaggaggtg

SEQ ID NO: 136034 - DNA, 25 bp, Canis familiaris
gtactggaacacgcagaaggaactc

SEQ ID NO: 136035 - DNA, 25 bp, Canis familiaris
gtagggcaacaagcaacagaacatt

SEQ ID NO: 136036 - DNA, 25 bp, Canis familiaris
gtagggaactgtgggacagacaaac

SEQ ID NO: 136037 - DNA, 25 bp, Canis familiaris
gtatgggacctgccgagtgtggaaa

SEQ ID NO: 136038 - DNA, 25 bp, Canis familiaris
gtgggaatcccctgttagaaatctg

SEQ ID NO: 136039 - DNA, 25 bp, Canis familiaris
gtaggaataggccctttatgaaagg

SEQ ID NO: 136040 - DNA, 25 bp, Canis familiaris
gtagcagtggaagcctttagtaagt

SEQ ID NO: 136041 - DNA, 25 bp, Canis familiaris
gtatgcagtgatagaacctggaagc

SEQ ID NO: 136042 - DNA, 25 bp, Canis familiaris
gtatggctgtagactttggcaacat

SEQ ID NO: 136043 - DNA, 25 bp, Canis familiaris
gtatcgtgtcatacctatggcatct

SEQ ID NO: 136044 - DNA, 25 bp, Canis familiaris
gtatggtggcatgtctgcagcttct

SEQ ID NO: 136045 - DNA, 25 bp, Canis familiaris
gtagcagggatggatgtggagttga

SEQ ID NO: 136046 - DNA, 25 bp, Canis familiaris
gtatgagtggtggatggggaatgta

SEQ ID NO: 136047 - DNA, 25 bp, Canis familiaris
gtagagtgttagacgcctgcaggaa

SEQ ID NO: 136048 - DNA, 25 bp, Canis familiaris
gtagagtccaagagtcaggtaacct

SEQ ID NO: 136049 - DNA, 25 bp, Canis familiaris
gtaggttctgacaccgttcagtcac

SEQ ID NO: 136050 - DNA, 25 bp, Canis familiaris
gtaggttggaccaggtgtgctgcac

SEQ ID NO: 136051 - DNA, 25 bp, Canis familiaris
gtatgagatcatggacggggcgccc

SEQ ID NO: 136052 - DNA, 25 bp, Canis familiaris
gtagaggagccagaaggcagccccc

SEQ ID NO: 136053 - DNA, 25 bp, Canis familiaris
gtaggtgaactgggaggccctggcc

SEQ ID NO: 136054 - DNA, 25 bp, Canis familiaris
gtagttaaatgggcgtgctcacccc

SEQ ID NO: 136055 - DNA, 25 bp, Canis familiaris
gtagtggcagcaattccgtgctcaa

SEQ ID NO: 136056 - DNA, 25 bp, Canis familiaris
gtacgacagtgactctgcagtctac

SEQ ID NO: 136057 - DNA, 25 bp, Canis familiaris
gtaggagggagcctagtcttcactg

SEQ ID NO: 136058 - DNA, 25 bp, Canis familiaris
gtaggggaaggctgtctaagtcttg

SEQ ID NO: 136059 - DNA, 25 bp, Canis familiaris
gtagggggactgagctttggtcgtg

SEQ ID NO: 136060 - DNA, 25 bp, Canis familiaris
gtaggtaggttggtctttggctttg

SEQ ID NO: 136061 - DNA, 25 bp, Canis familiaris
gtaggatgggtgaacctgttggtgg

SEQ ID NO: 136062 - DNA, 25 bp, Canis familiaris
gtatggagtaacacctgtatcttgg

SEQ ID NO: 136063 - DNA, 25 bp, Canis familiaris
gtaggttaaatccctgtatctgttg

SEQ ID NO: 136064 - DNA, 25 bp, Canis familiaris
gtaggtgtaactgctctagttggtt

SEQ ID NO: 136065 - DNA, 25 bp, Canis familiaris
gtaggcatgtaattcagtcacggag

SEQ ID NO: 136066 - DNA, 25 bp, Canis familiaris
gtaggcattaattcctgcctctggg

SEQ ID NO: 136067 - DNA, 25 bp, Canis familiaris
gtagtgttatttgtgacacagggga

SEQ ID NO: 136068 - DNA, 25 bp, Canis familiaris
gtaggccgctttgaggactggtgga

SEQ ID NO: 136069 - DNA, 25 bp, Canis familiaris
gtaggccctttggacatggcgatgg

SEQ ID NO: 136070 - DNA, 25 bp, Canis familiaris
gtaggtcctcttgaaggaatgtctg

SEQ ID NO: 136071 - DNA, 25 bp, Canis familiaris
gtatgtttccttaacagtaaactat

SEQ ID NO: 136072 - DNA, 25 bp, Canis familiaris
gtagtatttttacagcatcaattta

SEQ ID NO: 136073 - DNA, 25 bp, Canis familiaris
gtatgtatgtactttaacactattg

SEQ ID NO: 136074 - DNA, 25 bp, Canis familiaris
gtagtagtttacatacatgcctaga

SEQ ID NO: 136075 - DNA, 25 bp, Canis familiaris
gtatgtgactgtatttagggctaaa

SEQ ID NO: 136076 - DNA, 25 bp, Canis familiaris
gtatggaatgttatgataggagcat

SEQ ID NO: 136077 - DNA, 25 bp, Canis familiaris
gtatgtgtgatgtaaatgtaagcta

SEQ ID NO: 136078 - DNA, 25 bp, Canis familiaris
gtagatgtatgtttataaagttgga

SEQ ID NO: 136079 - DNA, 25 bp, Canis familiaris
gtaggtagttgaataggatatttaa

SEQ ID NO: 136080 - DNA, 25 bp, Canis familiaris
gtagcggtttgaaaggaggcgttca

SEQ ID NO: 136081 - DNA, 25 bp, Canis familiaris
gtagggttggtcattgggtcattca

SEQ ID NO: 136082 - DNA, 25 bp, Canis familiaris
gtagtcgttgttgtcgtggtggtgc

SEQ ID NO: 136083 - DNA, 25 bp, Canis familiaris
gtacccgcaattctcgtgggtgggg

SEQ ID NO: 136084 - DNA, 25 bp, Canis familiaris
gtactccaaacccttgctggtgggt

SEQ ID NO: 136085 - DNA, 25 bp, Canis familiaris
gtactactacactgtccagaggagg

SEQ ID NO: 136086 - DNA, 25 bp, Canis familiaris
gtagccctacttcttcttgtaggcc

SEQ ID NO: 136087 - DNA, 25 bp, Canis familiaris
gtagtccttgacaggttttaggcca

SEQ ID NO: 136088 - DNA, 25 bp, Canis familiaris
gtagtcctatgaagggtagcttggg

SEQ ID NO: 136089 - DNA, 25 bp, Canis familiaris
gtatgtccaatgtcaggtcaacttc

SEQ ID NO: 136090 - DNA, 25 bp, Canis familiaris
gtatgaagcagatttggtctttgtc

SEQ ID NO: 136091 - DNA, 25 bp, Canis familiaris
gtatgaaccatttagtttggagagc

SEQ ID NO: 136092 - DNA, 25 bp, Canis familiaris
gtatgatgagccacaagttcataag

SEQ ID NO: 136093 - DNA, 25 bp, Canis familiaris
gtatgatggccaaaatgtttaccaa

SEQ ID NO: 136094 - DNA, 25 bp, Canis familiaris
gtagcatcccaaaatcgtcaacaat

SEQ ID NO: 136095 - DNA, 25 bp, Canis familiaris
gtatgcccgaattcactaaagccaa

SEQ ID NO: 136096 - DNA, 25 bp, Canis familiaris
cgtcacgctgaatatatgaccacgc

SEQ ID NO: 136097 - DNA, 25 bp, Canis familiaris
acgctgaatatatgaccacgctcac

SEQ ID NO: 136098 - DNA, 25 bp, Canis familiaris
ctgaatatatgaccacgctcacccg

SEQ ID NO: 136099 - DNA, 25 bp, Canis familiaris
gaatatatgaccacgctcacccgca

SEQ ID NO: 136100 - DNA, 25 bp, Canis familiaris
cccgcatgattcccgcgccgctgct

SEQ ID NO: 136101 - DNA, 25 bp, Canis familiaris
catgattcccgcgccgctgctggga

SEQ ID NO: 136102 - DNA, 25 bp, Canis familiaris
gattcccgcgccgctgctgggagag

SEQ ID NO: 136103 - DNA, 25 bp, Canis familiaris
cgcgccgctgctgggagagatcccc

SEQ ID NO: 136104 - DNA, 25 bp, Canis familiaris
ccgctgctgggagagatcccctggc

SEQ ID NO: 136105 - DNA, 25 bp, Canis familiaris
ctgctgggagagatcccctggcttg

SEQ ID NO: 136106 - DNA, 25 bp, Canis familiaris
gctgggagagatcccctggcttgca

SEQ ID NO: 136107 - DNA, 25 bp, Canis familiaris
ggagagatcccctggcttgcagaaa

SEQ ID NO: 136108 - DNA, 25 bp, Canis familiaris
gagatcccctggcttgcagaaaatc

SEQ ID NO: 136109 - DNA, 25 bp, Canis familiaris
atcccctggcttgcagaaaatccag

SEQ ID NO: 136110 - DNA, 25 bp, Canis familiaris
atttgcctgcattaccggtcgatgc

SEQ ID NO: 136111 - DNA, 25 bp, Canis familiaris
taccggtcgatgcaacgagtgatga

SEQ ID NO: 136112 - DNA, 25 bp, Canis familiaris
gagtgatgaggttcgcaagaacctg

SEQ ID NO: 136113 - DNA, 25 bp, Canis familiaris
gcaagaacctgatggacatgttcag

SEQ ID NO: 136114 - DNA, 25 bp, Canis familiaris
gtatgctatactcctactgtgatgg

SEQ ID NO: 136115 - DNA, 25 bp, Canis familiaris
gtatcttatgcttccaagtctttgt

SEQ ID NO: 136116 - DNA, 25 bp, Canis familiaris
gtatctttcatatcatatacttttt

SEQ ID NO: 136117 - DNA, 25 bp, Canis familiaris
gtatctcctgaagcatatttttcat

SEQ ID NO: 136118 - DNA, 25 bp, Canis familiaris
gtatgcccagaagctttccttcata

SEQ ID NO: 136119 - DNA, 25 bp, Canis familiaris
gtatctctaaacctttcttatgtat

SEQ ID NO: 136120 - DNA, 25 bp, Canis familiaris
gtatctgtaaatggttctgcttgta

SEQ ID NO: 136121 - DNA, 25 bp, Canis familiaris
gtatgcagtagagggcttgttttag

SEQ ID NO: 136122 - DNA, 25 bp, Canis familiaris
gtatgaatgtggccacttttgttaa

SEQ ID NO: 136123 - DNA, 25 bp, Canis familiaris
gtatggatgttgcactaggccttta

SEQ ID NO: 136124 - DNA, 25 bp, Canis familiaris
gtatggactttgtgagggtgtctac

SEQ ID NO: 136125 - DNA, 25 bp, Canis familiaris
gtatgtagccttcggggttgtcttt

SEQ ID NO: 136126 - DNA, 25 bp, Canis familiaris
gtatgtacgacgaacaggtttgttg

SEQ ID NO: 136127 - DNA, 25 bp, Canis familiaris
gtagtagcaaggcatcacttttgat

SEQ ID NO: 136128 - DNA, 25 bp, Canis familiaris
gtagtcgccgtgcctaccatggtga

SEQ ID NO: 136129 - DNA, 25 bp, Canis familiaris
gtagtcgccgtgcctaccatggtga

SEQ ID NO: 136130 - DNA, 25 bp, Canis familiaris
gtcagtcccgggtagtcggtatggg

SEQ ID NO: 136131 - DNA, 25 bp, Canis familiaris
gtagctcccaggctggggggtgggg

SEQ ID NO: 136132 - DNA, 25 bp, Canis familiaris
gtagcaccccggggtacaggattgg

SEQ ID NO: 136133 - DNA, 25 bp, Canis familiaris
gtagaccacactctggtccttgacg

SEQ ID NO: 136134 - DNA, 25 bp, Canis familiaris
gtagagtccactctgggggtggata

SEQ ID NO: 136135 - DNA, 25 bp, Canis familiaris
gtagtctctggtctgggggaggaac

SEQ ID NO: 136136 - DNA, 25 bp, Canis familiaris
gtagtagcatagagtctggggagga

SEQ ID NO: 136137 - DNA, 25 bp, Canis familiaris
gtaggacatatttgcgtggggggaa

SEQ ID NO: 136138 - DNA, 25 bp, Canis familiaris
gtagaacagtcttggggtgggcgag

SEQ ID NO: 136139 - DNA, 25 bp, Canis familiaris
gtagttagttactggtggcacctgt

SEQ ID NO: 136140 - DNA, 25 bp, Canis familiaris
gtaggtttttgcttcagttgaccat

SEQ ID NO: 136141 - DNA, 25 bp, Canis familiaris
gtatctgttctttcttcaaaaccat

SEQ ID NO: 136142 - DNA, 25 bp, Canis familiaris
gtatctgttctttcttcaaaaccat

SEQ ID NO: 136143 - DNA, 25 bp, Canis familiaris
gtatctgttctttcttcaaaaccat

SEQ ID NO: 136144 - DNA, 25 bp, Canis familiaris
gtatctgttctttcttcaaaaccat

SEQ ID NO: 136145 - DNA, 25 bp, Canis familiaris
gtatctgttctttcttcaaaaccat

SEQ ID NO: 136146 - DNA, 25 bp, Canis familiaris
gtatctgttctttcttcaaaaccat

SEQ ID NO: 136147 - DNA, 25 bp, Canis familiaris
gtatctgttctttcttcaaaaccat

SEQ ID NO: 136148 - DNA, 25 bp, Canis familiaris
gtatgctgtttttgttactttaata

SEQ ID NO: 136149 - DNA, 25 bp, Canis familiaris
gtatgctttgtattaggttttattt

SEQ ID NO: 136150 - DNA, 25 bp, Canis familiaris
gtatgttcttagtatcagggtttct

SEQ ID NO: 136151 - DNA, 25 bp, Canis familiaris
gtatctgccttagttcaggtcctga

SEQ ID NO: 136152 - DNA, 25 bp, Canis familiaris
gtatctcatctttcattgtgttctc

SEQ ID NO: 136153 - DNA, 25 bp, Canis familiaris
gtatctctttgtactctgtatctat

SEQ ID NO: 136154 - DNA, 25 bp, Canis familiaris
gtatgcattgttcactcttggtatt

SEQ ID NO: 136155 - DNA, 25 bp, Canis familiaris
gtatctggtggttcctatggcttat

SEQ ID NO: 136156 - DNA, 25 bp, Canis familiaris
gtatcggtttctgctgatgctgatt

SEQ ID NO: 136157 - DNA, 25 bp, Canis familiaris
gtatcgctgtttctgctgagtgtta

SEQ ID NO: 136158 - DNA, 25 bp, Canis familiaris
gtatccaagtggcagctgaagtata

SEQ ID NO: 136159 - DNA, 25 bp, Canis familiaris
gtatccaattggtagacagagttga

SEQ ID NO: 136160 - DNA, 25 bp, Canis familiaris
gtatccggatagtctccagagttgt

SEQ ID NO: 136161 - DNA, 25 bp, Canis familiaris
gtatccaggtccatcgcatagaatt

SEQ ID NO: 136162 - DNA, 25 bp, Canis familiaris
gtatcctagtcctcctagaatgaat

SEQ ID NO: 136163 - DNA, 25 bp, Canis familiaris
gtatccttatcctcctagatgaaat

SEQ ID NO: 136164 - DNA, 25 bp, Canis familiaris
gtatccctgtcagacctgtgatgat

SEQ ID NO: 136165 - DNA, 25 bp, Canis familiaris
gtatctctcttcacacgttgtgtca

SEQ ID NO: 136166 - DNA, 25 bp, Canis familiaris
gtatccatcttctgtagttcgtagg

SEQ ID NO: 136167 - DNA, 25 bp, Canis familiaris
gtatccatcttctgtagttcgtagg

SEQ ID NO: 136168 - DNA, 25 bp, Canis familiaris
gtatgcctctggtcgtaccacgggc

SEQ ID NO: 136169 - DNA, 25 bp, Canis familiaris
gtatgcctctggtcgtaccacgggc

SEQ ID NO: 136170 - DNA, 25 bp, Canis familiaris
gtatgcccccagcaacagagggagc

SEQ ID NO: 136171 - DNA, 25 bp, Canis familiaris
gtatccagttcaggtgacggggtct

SEQ ID NO: 136172 - DNA, 25 bp, Canis familiaris
gtatgagcagttcgcgtacgacggc

SEQ ID NO: 136173 - DNA, 25 bp, Canis familiaris
gtatgacaactccctcaagattgtc

SEQ ID NO: 136174 - DNA, 25 bp, Canis familiaris
gtagaaacctctcaagcattgcttg

SEQ ID NO: 136175 - DNA, 25 bp, Canis familiaris
gtatgacattcctttaaggtttgtt

SEQ ID NO: 136176 - DNA, 25 bp, Canis familiaris
gtatgacatgttgctttctcagttt

SEQ ID NO: 136177 - DNA, 25 bp, Canis familiaris
gtatgaccaatgaatttttggcttt

SEQ ID NO: 136178 - DNA, 25 bp, Canis familiaris
gtatgtcccaaatattgcatgagat

SEQ ID NO: 136179 - DNA, 25 bp, Canis familiaris
gtatctggccagtggagccatagat

SEQ ID NO: 136180 - DNA, 25 bp, Canis familiaris
gtatgggctgagtggcagccgcgtg

SEQ ID NO: 136181 - DNA, 25 bp, Canis familiaris
gtaggggagagaggcgccccttgta

SEQ ID NO: 136182 - DNA, 25 bp, Canis familiaris
gtaggggctggatggtgtaatgtta

SEQ ID NO: 136183 - DNA, 25 bp, Canis familiaris
gtaggagtgtggttggtgtcctttc

SEQ ID NO: 136184 - DNA, 25 bp, Canis familiaris
gtatctgattgtggttgtttccttt

SEQ ID NO: 136185 - DNA, 25 bp, Canis familiaris
gtatgttttggtagctcagattctg

SEQ ID NO: 136186 - DNA, 25 bp, Canis familiaris
gtatgttttgttttgcagacttttt

SEQ ID NO: 136187 - DNA, 25 bp, Canis familiaris
gtatgttccagattaccgactgtta

SEQ ID NO: 136188 - DNA, 25 bp, Canis familiaris
gtagtaccaagttccagggctgtca

SEQ ID NO: 136189 - DNA, 25 bp, Canis familiaris
gtagttacaaccttcagggcgtaca

SEQ ID NO: 136190 - DNA, 25 bp, Canis familiaris
gtagttactgcaagactctcgggta

SEQ ID NO: 136191 - DNA, 25 bp, Canis familiaris
gtagttgccgaggcctttgggtgag

SEQ ID NO: 136192 - DNA, 25 bp, Canis familiaris
gtatgttttaccgtctagtggggag

SEQ ID NO: 136193 - DNA, 25 bp, Canis familiaris
gtagttactcaagaaagggctggat

SEQ ID NO: 136194 - DNA, 25 bp, Canis familiaris
gtagttgaaaagaagaaggcctgga

SEQ ID NO: 136195 - DNA, 25 bp, Canis familiaris
gtagttacacagataggacctcagt

SEQ ID NO: 136196 - DNA, 25 bp, Canis familiaris
gtagacatagccattagtgacacta

SEQ ID NO: 136197 - DNA, 25 bp, Canis familiaris
gtatgacaatgaatttggctacagc

SEQ ID NO: 136198 - DNA, 25 bp, Canis familiaris
gtatgccatggagttgtgcattaca

SEQ ID NO: 136199 - DNA, 25 bp, Canis familiaris
gtatccatattttgtcattaacatc

SEQ ID NO: 136200 - DNA, 25 bp, Canis familiaris
gtatcccatgtatgtgttctatctc

SEQ ID NO: 136201 - DNA, 25 bp, Canis familiaris
gtatcctgtggattcgttttcttcc

SEQ ID NO: 136202 - DNA, 25 bp, Canis familiaris
gtaccattggcattcatcttaatct

SEQ ID NO: 136203 - DNA, 25 bp, Canis familiaris
gtatcctgagtgtattctctgtaag

SEQ ID NO: 136204 - DNA, 25 bp, Canis familiaris
gtatcctgtgctttttctgtgggac

SEQ ID NO: 136205 - DNA, 25 bp, Canis familiaris
gtatcctgacatttttctgggttaa

SEQ ID NO: 136206 - DNA, 25 bp, Canis familiaris
gtatgaccatatttgtcctggattt

SEQ ID NO: 136207 - DNA, 25 bp, Canis familiaris
gtatgatcaaactgactctgtaatt

SEQ ID NO: 136208 - DNA, 25 bp, Canis familiaris
gtatgatggtaatagtcttcagagt

SEQ ID NO: 136209 - DNA, 25 bp, Canis familiaris
gtatgtagctactaagctgccccag

SEQ ID NO: 136210 - DNA, 25 bp, Canis familiaris
gtatgattactctaagcccatccag

SEQ ID NO: 136211 - DNA, 25 bp, Canis familiaris
gtatgatctactgaactcaacctag

SEQ ID NO: 136212 - DNA, 25 bp, Canis familiaris
gtatgattatgcatctttaacccag

SEQ ID NO: 136213 - DNA, 25 bp, Canis familiaris
gtagttgagttttgaacttccagtc

SEQ ID NO: 136214 - DNA, 25 bp, Canis familiaris
gtaggtgactttgggtttggcagtg

SEQ ID NO: 136215 - DNA, 25 bp, Canis familiaris
gtaggattttgtggtgattgggatt

SEQ ID NO: 136216 - DNA, 25 bp, Canis familiaris
gtatggtctttgtggaaacgtctcc

SEQ ID NO: 136217 - DNA, 25 bp, Canis familiaris
gtatggacttggcttgaatcacttc

SEQ ID NO: 136218 - DNA, 25 bp, Canis familiaris
gtagcctctctgggttaatctaacc

SEQ ID NO: 136219 - DNA, 25 bp, Canis familiaris
gtatgtcctccggtatgagtctaag

SEQ ID NO: 136220 - DNA, 25 bp, Canis familiaris
gtagctccccgaatgggcttaagaa

SEQ ID NO: 136221 - DNA, 25 bp, Canis familiaris
gtatgctcagcttcagaagagcctt

SEQ ID NO: 136222 - DNA, 25 bp, Canis familiaris
gtatgccaataattaagccactact

SEQ ID NO: 136223 - DNA, 25 bp, Canis familiaris
gtatccctcactttcaggcatttta

SEQ ID NO: 136224 - DNA, 25 bp, Canis familiaris
gtatccgtcagtttagtattagtat

SEQ ID NO: 136225 - DNA, 25 bp, Canis familiaris
gtatccttcgcttatctttgtagta

SEQ ID NO: 136226 - DNA, 25 bp, Canis familiaris
gtatccttggctcacaactatataa

SEQ ID NO: 136227 - DNA, 25 bp, Canis familiaris
gtatccaaggtgctgaatcttggag

SEQ ID NO: 136228 - DNA, 25 bp, Canis familiaris
gtatccagggctgtagtgccgtcac

SEQ ID NO: 136229 - DNA, 25 bp, Canis familiaris
gtatcgagggccagagagccagagc

SEQ ID NO: 136230 - DNA, 25 bp, Canis familiaris
gtatccagggtaactgggtggctca

SEQ ID NO: 136231 - DNA, 25 bp, Canis familiaris
gtatcctggatatcgcgggtatcaa

SEQ ID NO: 136232 - DNA, 25 bp, Canis familiaris
gtatgcctaaaagcgggtactaccg

SEQ ID NO: 136233 - DNA, 25 bp, Canis familiaris
gtatgccacaagcaccaggtgtagt

SEQ ID NO: 136234 - DNA, 25 bp, Canis familiaris
gtaggcatgcaaaactcagtgggtg

SEQ ID NO: 136235 - DNA, 25 bp, Canis familiaris
gtaggcatgaggggtagtggggtga

SEQ ID NO: 136236 - DNA, 25 bp, Canis familiaris
gtaggtgggtgggtggatggatgga

SEQ ID NO: 136237 - DNA, 25 bp, Canis familiaris
gtatgaggggctcctcggaggtgct

SEQ ID NO: 136238 - DNA, 25 bp, Canis familiaris
gtagaggtcaatctcgggactgcca

SEQ ID NO: 136239 - DNA, 25 bp, Canis familiaris
gtagtaaccacaacgaggactccac

SEQ ID NO: 136240 - DNA, 25 bp, Canis familiaris
gtagtacctcgaactaatgtcttac

SEQ ID NO: 136241 - DNA, 25 bp, Canis familiaris
gtagttccttagttaagtcttagca

SEQ ID NO: 136242 - DNA, 25 bp, Canis familiaris
gtaccaccttacatgaagtatttca

SEQ ID NO: 136243 - DNA, 25 bp, Canis familiaris
gtagcccttttcctggtatatttca

SEQ ID NO: 136244 - DNA, 25 bp, Canis familiaris
gtagcccatattaccagaaattgat

SEQ ID NO: 136245 - DNA, 25 bp, Canis familiaris
gtagaactctatacctgaatattca

SEQ ID NO: 136246 - DNA, 25 bp, Canis familiaris
gtatgaacatctagtcttgagatgc

SEQ ID NO: 136247 - DNA, 25 bp, Canis familiaris
gtatgaccattcctatctcagatct

SEQ ID NO: 136248 - DNA, 25 bp, Canis familiaris
gtatgatcatcatcctgacaaagct

SEQ ID NO: 136249 - DNA, 25 bp, Canis familiaris
gtatgcatcttagcagaaagaccac

SEQ ID NO: 136250 - DNA, 25 bp, Canis familiaris
gtatgctctctgtccaaatgaggaa

SEQ ID NO: 136251 - DNA, 25 bp, Canis familiaris
gtatcctctctcgagagtaggcata

SEQ ID NO: 136252 - DNA, 25 bp, Canis familiaris
gtatgtgctcgctggatgtcgacac

SEQ ID NO: 136253 - DNA, 25 bp, Canis familiaris
gtaggtccttgcagatgcgaacgca

SEQ ID NO: 136254 - DNA, 25 bp, Canis familiaris
gtagctgacccagactggaactcag

SEQ ID NO: 136255 - DNA, 25 bp, Canis familiaris
gtatgtggcctacagtggagagaac

SEQ ID NO: 136256 - DNA, 25 bp, Canis familiaris
gtagtgccgtcactggggagaacct

SEQ ID NO: 136257 - DNA, 25 bp, Canis familiaris
gtagtagagtatccccgagaaccat

SEQ ID NO: 136258 - DNA, 25 bp, Canis familiaris
gtatgctagatatttcccaggagat

SEQ ID NO: 136259 - DNA, 25 bp, Canis familiaris
gtatgtatcatgttgttcccaggca

SEQ ID NO: 136260 - DNA, 25 bp, Canis familiaris
gtagttctgagagttcggacagcag

SEQ ID NO: 136261 - DNA, 25 bp, Canis familiaris
gtatgacatttagtttgagagccag

SEQ ID NO: 136262 - DNA, 25 bp, Canis familiaris
gtatgtatctatttattgatgagga

SEQ ID NO: 136263 - DNA, 25 bp, Canis familiaris
gtagtactcgttataagccacagga

SEQ ID NO: 136264 - DNA, 25 bp, Canis familiaris
gtatgtttctgtattaccgacgacg

SEQ ID NO: 136265 - DNA, 25 bp, Canis familiaris
gtatgagtccgtatgtacacgtgaa

SEQ ID NO: 136266 - DNA, 25 bp, Canis familiaris
gtagaatccggttttgccagtacat

SEQ ID NO: 136267 - DNA, 25 bp, Canis familiaris
gtagaagccatccggaccaattaca

SEQ ID NO: 136268 - DNA, 25 bp, Canis familiaris
gtaaactatgcaccgactgcacgaa

SEQ ID NO: 136269 - DNA, 25 bp, Canis familiaris
gtagtcacttgcccagattacacaa

SEQ ID NO: 136270 - DNA, 25 bp, Canis familiaris
gtagatgcactttgcagcagttgga

SEQ ID NO: 136271 - DNA, 25 bp, Canis familiaris
gtagagctctattgccgaataaggt

SEQ ID NO: 136272 - DNA, 25 bp, Canis familiaris
gtaggcatgtttggagattacaggt

SEQ ID NO: 136273 - DNA, 25 bp, Canis familiaris
gtagactgtagtgtgcttcagaggt

SEQ ID NO: 136274 - DNA, 25 bp, Canis familiaris
gtatgactgtgattttcttaagaaa

SEQ ID NO: 136275 - DNA, 25 bp, Canis familiaris
gtatgagtctatcatccctgacaaa

SEQ ID NO: 136276 - DNA, 25 bp, Canis familiaris
gtatgttctatttgttgctgtaaat

SEQ ID NO: 136277 - DNA, 25 bp, Canis familiaris
gtatgttgattttccagctgtaagc

SEQ ID NO: 136278 - DNA, 25 bp, Canis familiaris
gtatgaattctttgcactttcccaa

SEQ ID NO: 136279 - DNA, 25 bp, Canis familiaris
gtatgagttctttcggttacaaccg

SEQ ID NO: 136280 - DNA, 25 bp, Canis familiaris
gtaggttctttcagttatgcccttc

SEQ ID NO: 136281 - DNA, 25 bp, Canis familiaris
gtagaggtttgtatttagcgcttat

SEQ ID NO: 136282 - DNA, 25 bp, Canis familiaris
gtatgattgactctactttacacat

SEQ ID NO: 136283 - DNA, 25 bp, Canis familiaris
gtatgattactggttccttcgtgcg

SEQ ID NO: 136284 - DNA, 25 bp, Canis familiaris
gtatgattgcctctttaaatgtaga

SEQ ID NO: 136285 - DNA, 25 bp, Canis familiaris
gtagcatatcagagtcttaaaggga

SEQ ID NO: 136286 - DNA, 25 bp, Canis familiaris
gtagtcccagttttataatgcagta

SEQ ID NO: 136287 - DNA, 25 bp, Canis familiaris
gtagatctcacattgttttgaagag

SEQ ID NO: 136288 - DNA, 25 bp, Canis familiaris
gtcagtacacacctataatgccatg

SEQ ID NO: 136289 - DNA, 25 bp, Canis familiaris
gtaggacataccaaggatgtgctga

SEQ ID NO: 136290 - DNA, 25 bp, Canis familiaris
gtaggagctgaccgagtgatgggaa

SEQ ID NO: 136291 - DNA, 25 bp, Canis familiaris
gtaggatggcaagcatttggagaga

SEQ ID NO: 136292 - DNA, 25 bp, Canis familiaris
gtaggaagcaacatttgtatcagaa

SEQ ID NO: 136293 - DNA, 25 bp, Canis familiaris
gtatgtacccacagtgtttgagaac

SEQ ID NO: 136294 - DNA, 25 bp, Canis familiaris
gtatgtagccctggtgctgtgttag

SEQ ID NO: 136295 - DNA, 25 bp, Canis familiaris
gtatgtgaggccatgatgattttat

SEQ ID NO: 136296 - DNA, 25 bp, Canis familiaris
gtatgatgagtcttctgcattgtca

SEQ ID NO: 136297 - DNA, 25 bp, Canis familiaris
gtatgatgtgtgtgccatctgcctg

SEQ ID NO: 136298 - DNA, 25 bp, Canis familiaris
gtatgtgtgtgtgggatctgtgctt

SEQ ID NO: 136299 - DNA, 25 bp, Canis familiaris
gtagcatttccaagcatctacttct

SEQ ID NO: 136300 - DNA, 25 bp, Canis familiaris
gtatgagatttaccattgactgtat

SEQ ID NO: 136301 - DNA, 25 bp, Canis familiaris
gtatgggtatgagattcctgtggac

SEQ ID NO: 136302 - DNA, 25 bp, Canis familiaris
gtatggtgatgcatttatccgtgga

SEQ ID NO: 136303 - DNA, 25 bp, Canis familiaris
gtatgtggcatgtttgtatatctgg

SEQ ID NO: 136304 - DNA, 25 bp, Canis familiaris
gtatgctggctatgactactcgcag

SEQ ID NO: 136305 - DNA, 25 bp, Canis familiaris
gtatgctgtttatatgactcctgga

SEQ ID NO: 136306 - DNA, 25 bp, Canis familiaris
gtatgcaatattttaagcctctgtg

SEQ ID NO: 136307 - DNA, 25 bp, Canis familiaris
gtatgctttctgctaaactgtatgt

SEQ ID NO: 136308 - DNA, 25 bp, Canis familiaris
gtatgctttcagaataaattatttt

SEQ ID NO: 136309 - DNA, 25 bp, Canis familiaris
gtatgtttaaaagcacgtgtgtgtg

SEQ ID NO: 136310 - DNA, 25 bp, Canis familiaris
gtatgttttaaatatttgtctgctg

SEQ ID NO: 136311 - DNA, 25 bp, Canis familiaris
gtatgtaccgactttttttctctga

SEQ ID NO: 136312 - DNA, 25 bp, Canis familiaris
gtgtgaacccaactatcttttttca

SEQ ID NO: 136313 - DNA, 25 bp, Canis familiaris
gtatgtcccggactacgtatacttc

SEQ ID NO: 136314 - DNA, 25 bp, Canis familiaris
gtatgcagacgcgtccataggtaac

SEQ ID NO: 136315 - DNA, 25 bp, Canis familiaris
gtagctgacccggcattcagctcaa

SEQ ID NO: 136316 - DNA, 25 bp, Canis familiaris
gtagtacacggcgatgccagcgaac

SEQ ID NO: 136317 - DNA, 25 bp, Canis familiaris
gtagtccaaggtactcagctgctaa

SEQ ID NO: 136318 - DNA, 25 bp, Canis familiaris
gtagttcatgaggctcgtgccatgt

SEQ ID NO: 136319 - DNA, 25 bp, Canis familiaris
gtatgttcacatctgtggtatgttt

SEQ ID NO: 136320 - DNA, 25 bp, Canis familiaris
gtatgttcagatgctgtttgactca

SEQ ID NO: 136321 - DNA, 25 bp, Canis familiaris
gtagattggatgtcactttcacgga

SEQ ID NO: 136322 - DNA, 25 bp, Canis familiaris
gtagatgtagtgtgcttccagagaa

SEQ ID NO: 136323 - DNA, 25 bp, Canis familiaris
gtacatgatcgtttgatttaaaccc

SEQ ID NO: 136324 - DNA, 25 bp, Canis familiaris
gtaattagttggctctacattcctc

SEQ ID NO: 136325 - DNA, 25 bp, Canis familiaris
gtggtctcagtcagttaaatgtccg

SEQ ID NO: 136326 - DNA, 25 bp, Canis familiaris
gtaccaggtttgttgaaagtcctgt

SEQ ID NO: 136327 - DNA, 25 bp, Canis familiaris
gtacagggttttgaaagtcagcagt

SEQ ID NO: 136328 - DNA, 25 bp, Canis familiaris
gtaagggcctttgaactgtagcacc

SEQ ID NO: 136329 - DNA, 25 bp, Canis familiaris
gtaagttcctggccaaagtttgcac

SEQ ID NO: 136330 - DNA, 25 bp, Canis familiaris
gtagcctttcgacagcaagtcttgc

SEQ ID NO: 136331 - DNA, 25 bp, Canis familiaris
gtagtttttcaagcacagttcacat

SEQ ID NO: 136332 - DNA, 25 bp, Canis familiaris
gtagaatggtccaaccacagctgtc

SEQ ID NO: 136333 - DNA, 25 bp, Canis familiaris
gtaggatttctgaaactcaggcctt

SEQ ID NO: 136334 - DNA, 25 bp, Canis familiaris
gtaggtcttctggtcaggaggctct

SEQ ID NO: 136335 - DNA, 25 bp, Canis familiaris
gtgctggactttgtaaaggccatca

SEQ ID NO: 136336 - DNA, 25 bp, Canis familiaris
gtatgaggtcttctaacgctccatc

SEQ ID NO: 136337 - DNA, 25 bp, Canis familiaris
gtatgagcctttgtgacagcctctt

SEQ ID NO: 136338 - DNA, 25 bp, Canis familiaris
gtagaccactgtctacacctggtgc

SEQ ID NO: 136339 - DNA, 25 bp, Canis familiaris
gtagtaacatattttcaccaagaca

SEQ ID NO: 136340 - DNA, 25 bp, Canis familiaris
gtagggacagtttcgacgggacctg

SEQ ID NO: 136341 - DNA, 25 bp, Canis familiaris
gtagggagggttccaggaggctcct

SEQ ID NO: 136342 - DNA, 25 bp, Canis familiaris
gtagggacgggcagagagatggatc

SEQ ID NO: 136343 - DNA, 25 bp, Canis familiaris
gtaggaatctggaggaagcggcaaa

SEQ ID NO: 136344 - DNA, 25 bp, Canis familiaris
gtaggccctctcagcgaggggacac

SEQ ID NO: 136345 - DNA, 25 bp, Canis familiaris
gtaggcctatcctttagatgggaca

SEQ ID NO: 136346 - DNA, 25 bp, Canis familiaris
gtaggctctttgctcaatgtgggac

SEQ ID NO: 136347 - DNA, 25 bp, Canis familiaris
gtaggactttgtccagtcatgtgga

SEQ ID NO: 136348 - DNA, 25 bp, Canis familiaris
gtagtgacgctcggtcgtagtggac

SEQ ID NO: 136349 - DNA, 25 bp, Canis familiaris
gtacgcggccatggtggtgaaggtc

SEQ ID NO: 136350 - DNA, 25 bp, Canis familiaris
gtcacgtggaccaggtaaagtgcca

SEQ ID NO: 136351 - DNA, 25 bp, Canis familiaris
gtagccggtcggccaataaaggcac

SEQ ID NO: 136352 - DNA, 25 bp, Canis familiaris
gtagtccagggtccaacaattggcc

SEQ ID NO: 136353 - DNA, 25 bp, Canis familiaris
gtagccacgggtccacaatgtggcc

SEQ ID NO: 136354 - DNA, 25 bp, Canis familiaris
gtaccaccatgtacccaggcattgc

SEQ ID NO: 136355 - DNA, 25 bp, Canis familiaris
gtaccccttagtaagtgcctctagc

SEQ ID NO: 136356 - DNA, 25 bp, Canis familiaris
gtacgcccgtagcagagaactaatc

SEQ ID NO: 136357 - DNA, 25 bp, Canis familiaris
gtaggagccagttcaaagaccatga

SEQ ID NO: 136358 - DNA, 25 bp, Canis familiaris
gtagcagatgccgttcaaaaggtcg

SEQ ID NO: 136359 - DNA, 25 bp, Canis familiaris
gtagtgtcgccaggcacaacaggtg

SEQ ID NO: 136360 - DNA, 25 bp, Canis familiaris
gtagtcttcaacctaacgcagggct

SEQ ID NO: 136361 - DNA, 25 bp, Canis familiaris
gtagaccctggccagaaccaggact

SEQ ID NO: 136362 - DNA, 25 bp, Canis familiaris
gtagacaccatacaaatgtactgaa

SEQ ID NO: 136363 - DNA, 25 bp, Canis familiaris
gtatgatccactttgaaattgacag

SEQ ID NO: 136364 - DNA, 25 bp, Canis familiaris
gtatgtgctttctgaatgtttcaaa

SEQ ID NO: 136365 - DNA, 25 bp, Canis familiaris
gtatgctgccataaggtatctcttc

SEQ ID NO: 136366 - DNA, 25 bp, Canis familiaris
gtagagcctgattgggattctctcc

SEQ ID NO: 136367 - DNA, 25 bp, Canis familiaris
gtagagcatccagctggcaatctcg

SEQ ID NO: 136368 - DNA, 25 bp, Canis familiaris
gtaggcaccacctgtgactagttgt

SEQ ID NO: 136369 - DNA, 25 bp, Canis familiaris
gtatggaccagaccgtggacgttgt

SEQ ID NO: 136370 - DNA, 25 bp, Canis familiaris
gtagaaccatgtcctggtttgttga

SEQ ID NO: 136371 - DNA, 25 bp, Canis familiaris
gtagggccatggctgtatgtgctgt

SEQ ID NO: 136372 - DNA, 25 bp, Canis familiaris
gtaggagccgtcatcaattgtgctg

SEQ ID NO: 136373 - DNA, 25 bp, Canis familiaris
gtatggacggctaccagattgtcta

SEQ ID NO: 136374 - DNA, 25 bp, Canis familiaris
gtatgcttcatgctactaaatgtta

SEQ ID NO: 136375 - DNA, 25 bp, Canis familiaris
gtatgcttaggctttactatgtatt

SEQ ID NO: 136376 - DNA, 25 bp, Canis familiaris
gtagtctcagacatctagggctttg

SEQ ID NO: 136377 - DNA, 25 bp, Canis familiaris
gtatggctagaatgataggtgccgt

SEQ ID NO: 136378 - DNA, 25 bp, Canis familiaris
gtagtgtgtcaatgggtgagccgtt

SEQ ID NO: 136379 - DNA, 25 bp, Canis familiaris
gtagcagttccatttggtagttatg

SEQ ID NO: 136380 - DNA, 25 bp, Canis familiaris
gtaggagcccagagagacgctttgg

SEQ ID NO: 136381 - DNA, 25 bp, Canis familiaris
gtaggagcccaccagagaggatgtt

SEQ ID NO: 136382 - DNA, 25 bp, Canis familiaris
gtaggagttcatttaagtgattcta

SEQ ID NO: 136383 - DNA, 25 bp, Canis familiaris
gtagaagtcctgttgagagtcttta

SEQ ID NO: 136384 - DNA, 25 bp, Canis familiaris
gtaacagtaatgcctatggggtatt

SEQ ID NO: 136385 - DNA, 25 bp, Canis familiaris
gtagaagtctaggctttggcgctta

SEQ ID NO: 136386 - DNA, 25 bp, Canis familiaris
gtaggcagactgtctctgcttggcc

SEQ ID NO: 136387 - DNA, 25 bp, Canis familiaris
gtaggcagagtctagtctggcactt

SEQ ID NO: 136388 - DNA, 25 bp, Canis familiaris
gtatggcaagtgatgtatggcagtg

SEQ ID NO: 136389 - DNA, 25 bp, Canis familiaris
gtatggataggtattgctgctcgac

SEQ ID NO: 136390 - DNA, 25 bp, Canis familiaris
gtaggacgatggttgccttcgacat

SEQ ID NO: 136391 - DNA, 25 bp, Canis familiaris
gtagtcacgatacttcttctcaacc

SEQ ID NO: 136392 - DNA, 25 bp, Canis familiaris
gtatgtgcccaagctttactactgt

SEQ ID NO: 136393 - DNA, 25 bp, Canis familiaris
gtatgtgcccaagctttactactgt

SEQ ID NO: 136394 - DNA, 25 bp, Canis familiaris
gtatgtgcccaagctttactactgt

SEQ ID NO: 136395 - DNA, 25 bp, Canis familiaris
gtatgtgcccaagctttactactgt

SEQ ID NO: 136396 - DNA, 25 bp, Canis familiaris
gtatgtgcccaagctttactactgt

SEQ ID NO: 136397 - DNA, 25 bp, Canis familiaris
gtatgtgcccaagctttactactgt

SEQ ID NO: 136398 - DNA, 25 bp, Canis familiaris
gtaggcatccttatttcgttgctgt

SEQ ID NO: 136399 - DNA, 25 bp, Canis familiaris
gtatggctccattattactctgtta

SEQ ID NO: 136400 - DNA, 25 bp, Canis familiaris
gtatgtggtctaataacttgcgtaa

SEQ ID NO: 136401 - DNA, 25 bp, Canis familiaris
gtatgtgtgtgtgtagttaggcttc

SEQ ID NO: 136402 - DNA, 25 bp, Canis familiaris
gtatgattgattgattgattgattg

SEQ ID NO: 136403 - DNA, 25 bp, Canis familiaris
gtatgacttgttctgagtgctgctt

SEQ ID NO: 136404 - DNA, 25 bp, Canis familiaris
gtatgagcgttcacatagtcattgt

SEQ ID NO: 136405 - DNA, 25 bp, Canis familiaris
gtagcaagttgaaatcagtcattcg

SEQ ID NO: 136406 - DNA, 25 bp, Canis familiaris
gtagcctttagatcccattcaattt

SEQ ID NO: 136407 - DNA, 25 bp, Canis familiaris
gtagccattaaaggcaccttctctc

SEQ ID NO: 136408 - DNA, 25 bp, Canis familiaris
gtagtcattttcagcacactggctc

SEQ ID NO: 136409 - DNA, 25 bp, Canis familiaris
gtaggattgctaaagcgatctaggc

SEQ ID NO: 136410 - DNA, 25 bp, Canis familiaris
gtaggatctctcaatattttcggtc

SEQ ID NO: 136411 - DNA, 25 bp, Canis familiaris
gtaggtattctagtgacttccagac

SEQ ID NO: 136412 - DNA, 25 bp, Canis familiaris
gtagtgtaaccagtgctgcttccgt

SEQ ID NO: 136413 - DNA, 25 bp, Canis familiaris
gtagggaaacgtcagtccttggaag

SEQ ID NO: 136414 - DNA, 25 bp, Canis familiaris
gtatggtgaaccgtgaagtcctaga

SEQ ID NO: 136415 - DNA, 25 bp, Canis familiaris
gtatggttgcaaagctgaaacttaa

SEQ ID NO: 136416 - DNA, 25 bp, Canis familiaris
gtatggattcagtgctttactttat

SEQ ID NO: 136417 - DNA, 25 bp, Canis familiaris
gtaggtccattactttatctcttag

SEQ ID NO: 136418 - DNA, 25 bp, Canis familiaris
gtatggttttcacttgagcaccgtg

SEQ ID NO: 136419 - DNA, 25 bp, Canis familiaris
gtagtgttgttatttgagtcgagga

SEQ ID NO: 136420 - DNA, 25 bp, Canis familiaris
gtatgtgttgttttatagcagccat

SEQ ID NO: 136421 - DNA, 25 bp, Canis familiaris
gtagtatgctgtcagatcaccccac

SEQ ID NO: 136422 - DNA, 25 bp, Canis familiaris
gtatgttcttgaagccacaccacta

SEQ ID NO: 136423 - DNA, 25 bp, Canis familiaris
gtagtgccttgtagacatctgccac

SEQ ID NO: 136424 - DNA, 25 bp, Canis familiaris
gtatgtcatttttgaagttggcaca

SEQ ID NO: 136425 - DNA, 25 bp, Canis familiaris
gtaacgatttcggacttgaataggt

SEQ ID NO: 136426 - DNA, 25 bp, Canis familiaris
gtaacaagtggggatttggacgagt

SEQ ID NO: 136427 - DNA, 25 bp, Canis familiaris
gtagaaagcggggcattttgtcctt

SEQ ID NO: 136428 - DNA, 25 bp, Canis familiaris
gtaacaagagggtctactttgccga

SEQ ID NO: 136429 - DNA, 25 bp, Canis familiaris
gtaacacaggaacaactgccggtga

SEQ ID NO: 136430 - DNA, 25 bp, Canis familiaris
gtaagaatagaagaaagtggtgttg

SEQ ID NO: 136431 - DNA, 25 bp, Canis familiaris
gtagggaaaggggaattcatgtagg

SEQ ID NO: 136432 - DNA, 25 bp, Canis familiaris
gtagggaccttgaaaacttgaagtg

SEQ ID NO: 136433 - DNA, 25 bp, Canis familiaris
gtagttaccctggaaacatgctgaa

SEQ ID NO: 136434 - DNA, 25 bp, Canis familiaris
gtagtaaccattgttcctctggact

SEQ ID NO: 136435 - DNA, 25 bp, Canis familiaris
gtatgtaagaatttttcacatgtgg

SEQ ID NO: 136436 - DNA, 25 bp, Canis familiaris
gtatgttatcattattcctacatgg

SEQ ID NO: 136437 - DNA, 25 bp, Canis familiaris
gtatgtctgaattttcctatatttg

SEQ ID NO: 136438 - DNA, 25 bp, Canis familiaris
gtatgtccatattttcccattcatt

SEQ ID NO: 136439 - DNA, 25 bp, Canis familiaris
gtatgtttatgggttctcattatga

SEQ ID NO: 136440 - DNA, 25 bp, Canis familiaris
gtatgtttatatgttctatcctcaa

SEQ ID NO: 136441 - DNA, 25 bp, Canis familiaris
gtagtgccttacttttctattcaaa

SEQ ID NO: 136442 - DNA, 25 bp, Canis familiaris
gtatgtctttactttggttattaat

SEQ ID NO: 136443 - DNA, 25 bp, Canis familiaris
gtatggttcacagatgtccttttaa

SEQ ID NO: 136444 - DNA, 25 bp, Canis familiaris
gtatgtctaatcagatttctcttgt

SEQ ID NO: 136445 - DNA, 25 bp, Canis familiaris
gtatgttactgttgtgtattctgtg

SEQ ID NO: 136446 - DNA, 25 bp, Canis familiaris
gtatgtgtacgtatgtgtttggagg

SEQ ID NO: 136447 - DNA, 25 bp, Canis familiaris
gtaggtcacagtcttccttaacgtc

SEQ ID NO: 136448 - DNA, 25 bp, Canis familiaris
gtagtggggtttacctctaactgtg

SEQ ID NO: 136449 - DNA, 25 bp, Canis familiaris
gtagggggcttgtgactgcttagtt

SEQ ID NO: 136450 - DNA, 25 bp, Canis familiaris
gtagggggttaccacatggctgatg

SEQ ID NO: 136451 - DNA, 25 bp, Canis familiaris
gtaggggcggtaggtcattgcatta

SEQ ID NO: 136452 - DNA, 25 bp, Canis familiaris
gtagggactgtttcggactattgcg

SEQ ID NO: 136453 - DNA, 25 bp, Canis familiaris
gtagggtctgataacggtctgggag

SEQ ID NO: 136454 - DNA, 25 bp, Canis familiaris
gtaggttctctcaagtggttgaaag

SEQ ID NO: 136455 - DNA, 25 bp, Canis familiaris
gtagcctttgcggaggtttgtaagt

SEQ ID NO: 136456 - DNA, 25 bp, Canis familiaris
gtagcagtcttggaaccttctgcct

SEQ ID NO: 136457 - DNA, 25 bp, Canis familiaris
gtatgtgtgcttgtagaattctctt

SEQ ID NO: 136458 - DNA, 25 bp, Canis familiaris
gtatgttgcaggttaatttctctat

SEQ ID NO: 136459 - DNA, 25 bp, Canis familiaris
gtagtctggggtgtttctttccatc

SEQ ID NO: 136460 - DNA, 25 bp, Canis familiaris
gtcgactcgggtaaggtcctatcta

SEQ ID NO: 136461 - DNA, 25 bp, Canis familiaris
gtcgaagtgggagaccccttctatc

SEQ ID NO: 136462 - DNA, 25 bp, Canis familiaris
gtacacgagggacacccctggtaat

SEQ ID NO: 136463 - DNA, 25 bp, Canis familiaris
ggacagaaaggagaacccggagaca

SEQ ID NO: 136464 - DNA, 25 bp, Canis familiaris
gtagcagcaatagaggaacccgtag

SEQ ID NO: 136465 - DNA, 25 bp, Canis familiaris
gtagccaattacctaaccacgtggg

SEQ ID NO: 136466 - DNA, 25 bp, Canis familiaris
gtagcatttcttgataacacggttg

SEQ ID NO: 136467 - DNA, 25 bp, Canis familiaris
gtagtcaactctgcaaagacgttcg

SEQ ID NO: 136468 - DNA, 25 bp, Canis familiaris
gtagtgacacttgagcacgactgtt

SEQ ID NO: 136469 - DNA, 25 bp, Canis familiaris
gtaggagacttcaacacagcactct

SEQ ID NO: 136470 - DNA, 25 bp, Canis familiaris
gtaggcagagatttgacagacagtc

SEQ ID NO: 136471 - DNA, 25 bp, Canis familiaris
gtaggcagccacctaaggcagactc

SEQ ID NO: 136472 - DNA, 25 bp, Canis familiaris
gtaggaaagccttcagccagaatgc

SEQ ID NO: 136473 - DNA, 25 bp, Canis familiaris
gtaggaaagccattctgtacatgag

SEQ ID NO: 136474 - DNA, 25 bp, Canis familiaris
gtatggaagggactctttgctcgta

SEQ ID NO: 136475 - DNA, 25 bp, Canis familiaris
gtaggagactgccacgtttttgcta

SEQ ID NO: 136476 - DNA, 25 bp, Canis familiaris
gtagcgagaagaaaatgtagtgtta

SEQ ID NO: 136477 - DNA, 25 bp, Canis familiaris
gtatggaggaaatgcaccaggttgc

SEQ ID NO: 136478 - DNA, 25 bp, Canis familiaris
gtaggcacgtattaccggtttgcca

SEQ ID NO: 136479 - DNA, 25 bp, Canis familiaris
gtaggcaggttctaggggtgggtcg

SEQ ID NO: 136480 - DNA, 25 bp, Canis familiaris
gtaggcgttacggtgggaggtctat

SEQ ID NO: 136481 - DNA, 25 bp, Canis familiaris
gtatggcgtgtacgcgtgggaggtc

SEQ ID NO: 136482 - DNA, 25 bp, Canis familiaris
gtatggcatctgtgccttgggtggc

SEQ ID NO: 136483 - DNA, 25 bp, Canis familiaris
gtagatgctctcgcagcttgaagtc

SEQ ID NO: 136484 - DNA, 25 bp, Canis familiaris
gtagtgcatgctctgtgtggaattc

SEQ ID NO: 136485 - DNA, 25 bp, Canis familiaris
gtagtcagtccttgtggcataactt

SEQ ID NO: 136486 - DNA, 25 bp, Canis familiaris
gtagtaggctgccagtgcgtggtgt

SEQ ID NO: 136487 - DNA, 25 bp, Canis familiaris
gtagatgccctgcgggtgggcatgg

SEQ ID NO: 136488 - DNA, 25 bp, Canis familiaris
gtaggccctgacgtgggagatgctc

SEQ ID NO: 136489 - DNA, 25 bp, Canis familiaris
gtagtgctatgttcctggtgaggct

SEQ ID NO: 136490 - DNA, 25 bp, Canis familiaris
gtatgggatgttggtggtcaagata

SEQ ID NO: 136491 - DNA, 25 bp, Canis familiaris
gtatggtcctttaggtcagactcac

SEQ ID NO: 136492 - DNA, 25 bp, Canis familiaris
gtagcggttcttatgtcgcgacacg

SEQ ID NO: 136493 - DNA, 25 bp, Canis familiaris
gtagggatttttatgcggtgcgagc

SEQ ID NO: 136494 - DNA, 25 bp, Canis familiaris
gtgtgggtgtttatttggtcgggat

SEQ ID NO: 136495 - DNA, 25 bp, Canis familiaris
gtgaggcagtttgttttcctgggga

SEQ ID NO: 136496 - DNA, 25 bp, Canis familiaris
gtcaggtcgaggatttgtccgaggg

SEQ ID NO: 136497 - DNA, 25 bp, Canis familiaris
gtaggccgagatgggtgcgtacaag

SEQ ID NO: 136498 - DNA, 25 bp, Canis familiaris
gtatggcaacgggcctggctacaag

SEQ ID NO: 136499 - DNA, 25 bp, Canis familiaris
gtaccaaccccatgatgcttaaggt

SEQ ID NO: 136500 - DNA, 25 bp, Canis familiaris
ggacctaaccgctttgtcaagtgcc

SEQ ID NO: 136501 - DNA, 25 bp, Canis familiaris
gtagttcaaccgtggaaagatgcca

SEQ ID NO: 136502 - DNA, 25 bp, Canis familiaris
gtagttccccgtatgatatttctct

SEQ ID NO: 136503 - DNA, 25 bp, Canis familiaris
gtagtaacttttgtattttctgctt

SEQ ID NO: 136504 - DNA, 25 bp, Canis familiaris
gtagtatccttattcctggttttgt

SEQ ID NO: 136505 - DNA, 25 bp, Canis familiaris
gtagtttaatttgtggcttttctct

SEQ ID NO: 136506 - DNA, 25 bp, Canis familiaris
gtagttgcggtcaggtagttttatt

SEQ ID NO: 136507 - DNA, 25 bp, Canis familiaris
gtatgtcgggtaatttgcttttctt

SEQ ID NO: 136508 - DNA, 25 bp, Canis familiaris
gtagtcttttgatttggcttttctt

SEQ ID NO: 136509 - DNA, 25 bp, Canis familiaris
gtatgtgttctttgcaagcgttctt

SEQ ID NO: 136510 - DNA, 25 bp, Canis familiaris
gtatggatcttcttgcaattcttta

SEQ ID NO: 136511 - DNA, 25 bp, Canis familiaris
gtatgtgatgtatttcaaacatttt

SEQ ID NO: 136512 - DNA, 25 bp, Canis familiaris
gtagcatatgcttgtctcaaagatt

SEQ ID NO: 136513 - DNA, 25 bp, Canis familiaris
gtagcatatgcttgtctcaaagatt

SEQ ID NO: 136514 - DNA, 25 bp, Canis familiaris
gtagtatgtatgccgctgcacacag

SEQ ID NO: 136515 - DNA, 25 bp, Canis familiaris
gtagaaatatgggctgtcacagagt

SEQ ID NO: 136516 - DNA, 25 bp, Canis familiaris
gtagagccattgcaatgcatcaata

SEQ ID NO: 136517 - DNA, 25 bp, Canis familiaris
gtagccctttcatgccatagaattc

SEQ ID NO: 136518 - DNA, 25 bp, Canis familiaris
gtagttttatcatctcaatcaatcg

SEQ ID NO: 136519 - DNA, 25 bp, Canis familiaris
gtatgtgtgttgtaatctctaaaaa

SEQ ID NO: 136520 - DNA, 25 bp, Canis familiaris
gtagtagctctaaacacattaaaag

SEQ ID NO: 136521 - DNA, 25 bp, Canis familiaris
gtaggagccacaaacatccttgaag

SEQ ID NO: 136522 - DNA, 25 bp, Canis familiaris
gtaggatgtcactgagatccctcaa

SEQ ID NO: 136523 - DNA, 25 bp, Canis familiaris
gtagagatacagtccagagcccaaa

SEQ ID NO: 136524 - DNA, 25 bp, Canis familiaris
gtagttcatatccaaggccaacaga

SEQ ID NO: 136525 - DNA, 25 bp, Canis familiaris
gtagttcagtccaagtaaccaccga

SEQ ID NO: 136526 - DNA, 25 bp, Canis familiaris
gtagtctgcagtccataaagaagat

SEQ ID NO: 136527 - DNA, 25 bp, Canis familiaris
gtagatgccattccagggaggagaa

SEQ ID NO: 136528 - DNA, 25 bp, Canis familiaris
gtaggccttcgagggcaagcaagac

SEQ ID NO: 136529 - DNA, 25 bp, Canis familiaris
gtagcccaccgagatgctaacagct

SEQ ID NO: 136530 - DNA, 25 bp, Canis familiaris
gtagcccagtgcaacaagtaatcct

SEQ ID NO: 136531 - DNA, 25 bp, Canis familiaris
gtacctgggaaatctcagtcccctt

SEQ ID NO: 136532 - DNA, 25 bp, Canis familiaris
gtaccgagacaaataccagtccctg

SEQ ID NO: 136533 - DNA, 25 bp, Canis familiaris
gtaggccaaggtaagacagtccact

SEQ ID NO: 136534 - DNA, 25 bp, Canis familiaris
gtacccaaaactagcacaaccatta

SEQ ID NO: 136535 - DNA, 25 bp, Canis familiaris
gtaccaaacctcagaagtcctatgt

SEQ ID NO: 136536 - DNA, 25 bp, Canis familiaris
gtaccaaaccttcatgagagactat

SEQ ID NO: 136537 - DNA, 25 bp, Canis familiaris
gtacctttcttggcttgggatttga

SEQ ID NO: 136538 - DNA, 25 bp, Canis familiaris
gtaccttttgggttcaggcattatt

SEQ ID NO: 136539 - DNA, 25 bp, Canis familiaris
gtacccacttcgcattcgtgcgaat

SEQ ID NO: 136540 - DNA, 25 bp, Canis familiaris
gtagaccccaccaatttgtgcgagt

SEQ ID NO: 136541 - DNA, 25 bp, Canis familiaris
gtagtccagaatgcagtaagtcgtg

SEQ ID NO: 136542 - DNA, 25 bp, Canis familiaris
gtagtcctatcagtttacctctgtg

SEQ ID NO: 136543 - DNA, 25 bp, Canis familiaris
gtaggcctttgtccataggctcttg

SEQ ID NO: 136544 - DNA, 25 bp, Canis familiaris
gtaggttctattcatatggctctta

SEQ ID NO: 136545 - DNA, 25 bp, Canis familiaris
gtaggtgatctctgtaagctttccc

SEQ ID NO: 136546 - DNA, 25 bp, Canis familiaris
gtagagttgctctgttctcttcaac

SEQ ID NO: 136547 - DNA, 25 bp, Canis familiaris
gtatggcattgttggatcactatat

SEQ ID NO: 136548 - DNA, 25 bp, Canis familiaris
gtaggattttggaacttgaagtgac

SEQ ID NO: 136549 - DNA, 25 bp, Canis familiaris
gtaggatttggtaagtcgcgaagac

SEQ ID NO: 136550 - DNA, 25 bp, Canis familiaris
gtaggatttgagtgaccttgaatat

SEQ ID NO: 136551 - DNA, 25 bp, Canis familiaris
gtagactctgggtagactcctaata

SEQ ID NO: 136552 - DNA, 25 bp, Canis familiaris
gtaggcttgtattagtgctttaatg

SEQ ID NO: 136553 - DNA, 25 bp, Canis familiaris
gtaggcttgtattagtgctttaatg

SEQ ID NO: 136554 - DNA, 25 bp, Canis familiaris
gtagatgctcagtaaagttttgaca

SEQ ID NO: 136555 - DNA, 25 bp, Canis familiaris
gtagtgcacacctaacttttattaa

SEQ ID NO: 136556 - DNA, 25 bp, Canis familiaris
gtaggcacaggccattttgttgtta

SEQ ID NO: 136557 - DNA, 25 bp, Canis familiaris
gtaggcggcgatttttgtatgttat

SEQ ID NO: 136558 - DNA, 25 bp, Canis familiaris
gtagggggctacatactagattatt

SEQ ID NO: 136559 - DNA, 25 bp, Canis familiaris
gtaggggtctgtttacttggtgata

SEQ ID NO: 136560 - DNA, 25 bp, Canis familiaris
gtacgaggcagttttagctgggtgt

SEQ ID NO: 136561 - DNA, 25 bp, Canis familiaris
gtatggaaggattatcgaggcggtg

SEQ ID NO: 136562 - DNA, 25 bp, Canis familiaris
gtagaccacgcaaacgaccgagtgt

SEQ ID NO: 136563 - DNA, 25 bp, Canis familiaris
gtagcagaacctacacgaccgtgtt

SEQ ID NO: 136564 - DNA, 25 bp, Canis familiaris
gtagatgatagctcaccgacgtgga

SEQ ID NO: 136565 - DNA, 25 bp, Canis familiaris
gtagagtcagagaactgtgacgtca

SEQ ID NO: 136566 - DNA, 25 bp, Canis familiaris
gtcatggtaatgcatcgtaagatct

SEQ ID NO: 136567 - DNA, 25 bp, Canis familiaris
gtagctgttcatcacgatcagattc

SEQ ID NO: 136568 - DNA, 25 bp, Canis familiaris
gtagcttaataacactgttgctgca

SEQ ID NO: 136569 - DNA, 25 bp, Canis familiaris
gtaggtagaacacacctgctgccaa

SEQ ID NO: 136570 - DNA, 25 bp, Canis familiaris
gtaggttatactcttatgtgcacat

SEQ ID NO: 136571 - DNA, 25 bp, Canis familiaris
gtatggacttactttgctttcagtt

SEQ ID NO: 136572 - DNA, 25 bp, Canis familiaris
gtagaacgtcaccttgttctagtag

SEQ ID NO: 136573 - DNA, 25 bp, Canis familiaris
gtagataggtacccaactcttgaca

SEQ ID NO: 136574 - DNA, 25 bp, Canis familiaris
gtagatgagtttgaccacctgtaca

SEQ ID NO: 136575 - DNA, 25 bp, Canis familiaris
gtaggagttgatgagcccgttgcac

SEQ ID NO: 136576 - DNA, 25 bp, Canis familiaris
gtaggtcattataacatcttgttga

SEQ ID NO: 136577 - DNA, 25 bp, Canis familiaris
gtagagccaacattttctcttctga

SEQ ID NO: 136578 - DNA, 25 bp, Canis familiaris
gtaggcatcaaattcttctcagcat

SEQ ID NO: 136579 - DNA, 25 bp, Canis familiaris
gtaggtaacaccaactgacagatga

SEQ ID NO: 136580 - DNA, 25 bp, Canis familiaris
gtaggaacgaccaacgcaggcatga

SEQ ID NO: 136581 - DNA, 25 bp, Canis familiaris
gtaggagacagaatgccctcaccaa

SEQ ID NO: 136582 - DNA, 25 bp, Canis familiaris
gtagtcagagcagcatggttcccga

SEQ ID NO: 136583 - DNA, 25 bp, Canis familiaris
gtagaaggaagagtatgacaccgac

SEQ ID NO: 136584 - DNA, 25 bp, Canis familiaris
gtaggagccagaagtggacccaggc

SEQ ID NO: 136585 - DNA, 25 bp, Canis familiaris
gtaggagaatatggtgtcctctcgg

SEQ ID NO: 136586 - DNA, 25 bp, Canis familiaris
gtaggagagattggtgtccctcttc

SEQ ID NO: 136587 - DNA, 25 bp, Canis familiaris
gtagaaagttgcctgatcctctgtt

SEQ ID NO: 136588 - DNA, 25 bp, Canis familiaris
gtagaactgttcatcattgtatttg

SEQ ID NO: 136589 - DNA, 25 bp, Canis familiaris
gtagattggtctagaattgcattct

SEQ ID NO: 136590 - DNA, 25 bp, Canis familiaris
gtactggaatttgatgtcttcttta

SEQ ID NO: 136591 - DNA, 25 bp, Canis familiaris
gtactgggtcctattcaagatttaa

SEQ ID NO: 136592 - DNA, 25 bp, Canis familiaris
gtaggtggtactattcttacttaca

SEQ ID NO: 136593 - DNA, 25 bp, Canis familiaris
gtaggagttacaaatacgtactctt

SEQ ID NO: 136594 - DNA, 25 bp, Canis familiaris
gtaggattgctattgattgacgata

SEQ ID NO: 136595 - DNA, 25 bp, Canis familiaris
gtagttgctgcttaggcagactaat

SEQ ID NO: 136596 - DNA, 25 bp, Canis familiaris
gtagtagctctctgtagcatcatgg

SEQ ID NO: 136597 - DNA, 25 bp, Canis familiaris
gtactactgctaggtttcaggctga

SEQ ID NO: 136598 - DNA, 25 bp, Canis familiaris
gtaccagcctcttttccaagctgga

SEQ ID NO: 136599 - DNA, 25 bp, Canis familiaris
gtaccatcccactgatatcacgggc

SEQ ID NO: 136600 - DNA, 25 bp, Canis familiaris
gtacctaccacagaacacagagcaa

SEQ ID NO: 136601 - DNA, 25 bp, Canis familiaris
gtacccctacatgaagcaagtagag

SEQ ID NO: 136602 - DNA, 25 bp, Canis familiaris
gtaccctctactgatgaaaaactga

SEQ ID NO: 136603 - DNA, 25 bp, Canis familiaris
gtaccatttgttggtgaaccatact

SEQ ID NO: 136604 - DNA, 25 bp, Canis familiaris
gtgaacttttccagaacctattgta

SEQ ID NO: 136605 - DNA, 25 bp, Canis familiaris
gtaagggttccacaactctcaatat

SEQ ID NO: 136606 - DNA, 25 bp, Canis familiaris
gtagggtttccagcaacaccatcac

SEQ ID NO: 136607 - DNA, 25 bp, Canis familiaris
gtagacagttgtgaccgagaccgaa

SEQ ID NO: 136608 - DNA, 25 bp, Canis familiaris
gtaggagtcccctaggagacgctat

SEQ ID NO: 136609 - DNA, 25 bp, Canis familiaris
gtaagattccccttgggacatcctt

SEQ ID NO: 136610 - DNA, 25 bp, Canis familiaris
gtagggtacttcttttacatccttg

SEQ ID NO: 136611 - DNA, 25 bp, Canis familiaris
gtagtactacttgcttttacaatgt

SEQ ID NO: 136612 - DNA, 25 bp, Canis familiaris
gtagtactgttttgcattttccatt

SEQ ID NO: 136613 - DNA, 25 bp, Canis familiaris
gtaggactgtttcgactattgcgtt

SEQ ID NO: 136614 - DNA, 25 bp, Canis familiaris
gtaggagttcttcatatattctgga

SEQ ID NO: 136615 - DNA, 25 bp, Canis familiaris
gtagaggtctcgtatatatagtagg

SEQ ID NO: 136616 - DNA, 25 bp, Canis familiaris
gtaggagttcgtaaaaggacagtga

SEQ ID NO: 136617 - DNA, 25 bp, Canis familiaris
gtagggaaccccatgcaggaaggac

SEQ ID NO: 136618 - DNA, 25 bp, Canis familiaris
gtaggggacactcttgaccaaggtc

SEQ ID NO: 136619 - DNA, 25 bp, Canis familiaris
gtactggaaacctttgcaccaaaga

SEQ ID NO: 136620 - DNA, 25 bp, Canis familiaris
gtacggtcagtttgcgtaaagaaga

SEQ ID NO: 136621 - DNA, 25 bp, Canis familiaris
gtagggtgcatatttctgttactaa

SEQ ID NO: 136622 - DNA, 25 bp, Canis familiaris
gtaggcttcaggaatctgcatttta

SEQ ID NO: 136623 - DNA, 25 bp, Canis familiaris
gtaggcggaggtttcatctctttag

SEQ ID NO: 136624 - DNA, 25 bp, Canis familiaris
gtaggctgggactgtcatgtttcta

SEQ ID NO: 136625 - DNA, 25 bp, Canis familiaris
gtagactgttatcttcttttccacc

SEQ ID NO: 136626 - DNA, 25 bp, Canis familiaris
gtagtcattttaatttgctttccaa

SEQ ID NO: 136627 - DNA, 25 bp, Canis familiaris
gtaggctttctgtattattgtgtta

SEQ ID NO: 136628 - DNA, 25 bp, Canis familiaris
gtaggtttcgctaaatgtgccacaa

SEQ ID NO: 136629 - DNA, 25 bp, Canis familiaris
gtcaggccttccaaaagcacgacag

SEQ ID NO: 136630 - DNA, 25 bp, Canis familiaris
gtagagtttctcaaagccacaagag

SEQ ID NO: 136631 - DNA, 25 bp, Canis familiaris
gtagtgtttgccaatttccacagtg

SEQ ID NO: 136632 - DNA, 25 bp, Canis familiaris
gtaggctgtgagcttcttgccaaag

SEQ ID NO: 136633 - DNA, 25 bp, Canis familiaris
gtaggctgagagtagtccaccaaca

SEQ ID NO: 136634 - DNA, 25 bp, Canis familiaris
gtaggcagcacggagtaccaagaca

SEQ ID NO: 136635 - DNA, 25 bp, Canis familiaris
gtaggcagaaccgatatcccagaag

SEQ ID NO: 136636 - DNA, 25 bp, Canis familiaris
gtaggcaggaactatatcagcccaa

SEQ ID NO: 136637 - DNA, 25 bp, Canis familiaris
gtcatggtaggaatttcagcccaat

SEQ ID NO: 136638 - DNA, 25 bp, Canis familiaris
gtagcctgaggtaagtagccctttt

SEQ ID NO: 136639 - DNA, 25 bp, Canis familiaris
gtagttctttatagcttccttggtt

SEQ ID NO: 136640 - DNA, 25 bp, Canis familiaris
gtaggactgcttaacattcactttg

SEQ ID NO: 136641 - DNA, 25 bp, Canis familiaris
gtaggtggctaaacaaacatttgtg

SEQ ID NO: 136642 - DNA, 25 bp, Canis familiaris
gtaggtgctgaattactagaagttg

SEQ ID NO: 136643 - DNA, 25 bp, Canis familiaris
gtaggttaagtgtctgcttcagctt

SEQ ID NO: 136644 - DNA, 25 bp, Canis familiaris
gtagttaactgtccttactgcttaa

SEQ ID NO: 136645 - DNA, 25 bp, Canis familiaris
gtagtattccttattatctttatta

SEQ ID NO: 136646 - DNA, 25 bp, Canis familiaris
gtaggtactcattatttattttatt

SEQ ID NO: 136647 - DNA, 25 bp, Canis familiaris
gtaggtatgtagcttttgtttcatt

SEQ ID NO: 136648 - DNA, 25 bp, Canis familiaris
gtagggattcagcattcctggtttt

SEQ ID NO: 136649 - DNA, 25 bp, Canis familiaris
gtagggggcatcatatttggtctta

SEQ ID NO: 136650 - DNA, 25 bp, Canis familiaris
gtaggggctgaattactatgaagtt

SEQ ID NO: 136651 - DNA, 25 bp, Canis familiaris
gtagtgggtgtttttctgaagctat

SEQ ID NO: 136652 - DNA, 25 bp, Canis familiaris
gtagtggggggagctgcttatgaac

SEQ ID NO: 136653 - DNA, 25 bp, Canis familiaris
gtagtgcgggagggatccttgtcag

SEQ ID NO: 136654 - DNA, 25 bp, Canis familiaris
gtagggcccagaggtcactgtatga

SEQ ID NO: 136655 - DNA, 25 bp, Canis familiaris
gtagggctccacagatgttgctgag

SEQ ID NO: 136656 - DNA, 25 bp, Canis familiaris
gtaggtgcttacatgatatggtgaa

SEQ ID NO: 136657 - DNA, 25 bp, Canis familiaris
gtagtttctggttgaacatgtgata

SEQ ID NO: 136658 - DNA, 25 bp, Canis familiaris
gtagctgattctggaagcaacgttc

SEQ ID NO: 136659 - DNA, 25 bp, Canis familiaris
gtagctgattctggaagcaacgttc

SEQ ID NO: 136660 - DNA, 25 bp, Canis familiaris
gtagctcatgttgtagcaaaccccg

SEQ ID NO: 136661 - DNA, 25 bp, Canis familiaris
gtagtctcttcatggaaaccacccc

SEQ ID NO: 136662 - DNA, 25 bp, Canis familiaris
gtagttcttcatctaaagccaccac

SEQ ID NO: 136663 - DNA, 25 bp, Canis familiaris
gtagttctccatctgggcaggaatc

SEQ ID NO: 136664 - DNA, 25 bp, Canis familiaris
gtactgtagcctcctgggaacattc

SEQ ID NO: 136665 - DNA, 25 bp, Canis familiaris
gtactgctacaactgggacaacttt

SEQ ID NO: 136666 - DNA, 25 bp, Canis familiaris
gtaccaagaaggcccagaactggct

SEQ ID NO: 136667 - DNA, 25 bp, Canis familiaris
gtaccagagattgtccagaactttt

SEQ ID NO: 136668 - DNA, 25 bp, Canis familiaris
gtacccaggagcttccagaagcccc

SEQ ID NO: 136669 - DNA, 25 bp, Canis familiaris
gtaccaggaggcttacgacgagtgc

SEQ ID NO: 136670 - DNA, 25 bp, Canis familiaris
gtacacgggagctgccgaaggaaga

SEQ ID NO: 136671 - DNA, 25 bp, Canis familiaris
gtcaccgtgggtcgtcaaatcgaat

SEQ ID NO: 136672 - DNA, 25 bp, Canis familiaris
gtaggtgtatagtgttaatggagta

SEQ ID NO: 136673 - DNA, 25 bp, Canis familiaris
gtaggtttactggattaatggcaat

SEQ ID NO: 136674 - DNA, 25 bp, Canis familiaris
gtaggattttcgctgtatataactt

SEQ ID NO: 136675 - DNA, 25 bp, Canis familiaris
gtaggtcatttgtctggtgattcaa

SEQ ID NO: 136676 - DNA, 25 bp, Canis familiaris
gtagagtgtgacacgtgtgttccaa

SEQ ID NO: 136677 - DNA, 25 bp, Canis familiaris
gtagagcttgccacttaatagccac

SEQ ID NO: 136678 - DNA, 25 bp, Canis familiaris
gtaggtctctgaactgtggaaccca

SEQ ID NO: 136679 - DNA, 25 bp, Canis familiaris
gtagcagctctccttctgagagccc

SEQ ID NO: 136680 - DNA, 25 bp, Canis familiaris
gtaggacctgcttctgcagatgcca

SEQ ID NO: 136681 - DNA, 25 bp, Canis familiaris
gtaggacctctatcaatgccttgaa

SEQ ID NO: 136682 - DNA, 25 bp, Canis familiaris
gtagagtcccaagagtgccgtaacc

SEQ ID NO: 136683 - DNA, 25 bp, Canis familiaris
gtagagtccaaagagtgcagtaacc

SEQ ID NO: 136684 - DNA, 25 bp, Canis familiaris
gtagccccaaggtgtgtgtggacca

SEQ ID NO: 136685 - DNA, 25 bp, Canis familiaris
gtagtcactcattgttagttgtagt

SEQ ID NO: 136686 - DNA, 25 bp, Canis familiaris
gtagttctcaatgtgggttgcatgt

SEQ ID NO: 136687 - DNA, 25 bp, Canis familiaris
gtagttctcgagatggagcgcgctg

SEQ ID NO: 136688 - DNA, 25 bp, Canis familiaris
gtagccctcagatctagtggcagct

SEQ ID NO: 136689 - DNA, 25 bp, Canis familiaris
gtagtcaccatgatcgaggtctctc

SEQ ID NO: 136690 - DNA, 25 bp, Canis familiaris
gtagtaaaggcagcaggctagctca

SEQ ID NO: 136691 - DNA, 25 bp, Canis familiaris
gtagataaagtgttagtgcattgaa

SEQ ID NO: 136692 - DNA, 25 bp, Canis familiaris
gtagcaataacctcagtgcatttaa

SEQ ID NO: 136693 - DNA, 25 bp, Canis familiaris
gtacctgaagccatggtttcttccc

SEQ ID NO: 136694 - DNA, 25 bp, Canis familiaris
gtacctagaaacctgtttgggctgg

SEQ ID NO: 136695 - DNA, 25 bp, Canis familiaris
gtagctttgaatgtagcctttgcgg

SEQ ID NO: 136696 - DNA, 25 bp, Canis familiaris
gtagcttctggtgatatcctttcat

SEQ ID NO: 136697 - DNA, 25 bp, Canis familiaris
gtagttctcgtgtattcagggtctc

SEQ ID NO: 136698 - DNA, 25 bp, Canis familiaris
gtagtcttattgtttcatggggtta

SEQ ID NO: 136699 - DNA, 25 bp, Canis familiaris
gtagtttactactaactgggtgtca

SEQ ID NO: 136700 - DNA, 25 bp, Canis familiaris
gtagtttccacaaatctttgttgtt

SEQ ID NO: 136701 - DNA, 25 bp, Canis familiaris
gtagatgttctcatataccctgttc

SEQ ID NO: 136702 - DNA, 25 bp, Canis familiaris
gtagtatctcttagcaacaccattt

SEQ ID NO: 136703 - DNA, 25 bp, Canis familiaris
gtagtgatagtactgcacacacaca

SEQ ID NO: 136704 - DNA, 25 bp, Canis familiaris
gtaggatatgaaccagcacaactca

SEQ ID NO: 136705 - DNA, 25 bp, Canis familiaris
gtacgagtacacctgcaaaccatag

SEQ ID NO: 136706 - DNA, 25 bp, Canis familiaris
gtacgacgcaccattaggccaagtg

SEQ ID NO: 136707 - DNA, 25 bp, Canis familiaris
gtagctatagcccttaacccaagga

SEQ ID NO: 136708 - DNA, 25 bp, Canis familiaris
gtagctatagcccttggagccaagg

SEQ ID NO: 136709 - DNA, 25 bp, Canis familiaris
gtagttgagcactttgaaccaattg

SEQ ID NO: 136710 - DNA, 25 bp, Canis familiaris
gtagttgtccagatgtgaatagatt

SEQ ID NO: 136711 - DNA, 25 bp, Canis familiaris
gtagcgtgtccatttctaaagaggg

SEQ ID NO: 136712 - DNA, 25 bp, Canis familiaris
gtaggtattctttgtaggaatctgg

SEQ ID NO: 136713 - DNA, 25 bp, Canis familiaris
gtaggtgtgtccatgtaaatttagt

SEQ ID NO: 136714 - DNA, 25 bp, Canis familiaris
gtagtggttctgctctaagatttca

SEQ ID NO: 136715 - DNA, 25 bp, Canis familiaris
gtagtatatacctttaagatggtca

SEQ ID NO: 136716 - DNA, 25 bp, Canis familiaris
gtagctccttcaggtcaaagacgtc

SEQ ID NO: 136717 - DNA, 25 bp, Canis familiaris
gtagtctgcattggcgtgaagtggc

SEQ ID NO: 136718 - DNA, 25 bp, Canis familiaris
gtagttgctatggggacagtgggag

SEQ ID NO: 136719 - DNA, 25 bp, Canis familiaris
gtagctctgctaaatgcaccgagga

SEQ ID NO: 136720 - DNA, 25 bp, Canis familiaris
gtagatcgccattcacagggaggag

SEQ ID NO: 136721 - DNA, 25 bp, Canis familiaris
gtagtatggagaaagtgagaggagg

SEQ ID NO: 136722 - DNA, 25 bp, Canis familiaris
gtagttggacaatctcagggtgacc

SEQ ID NO: 136723 - DNA, 25 bp, Canis familiaris
gtagtacgacgatgtgcagggctcc

SEQ ID NO: 136724 - DNA, 25 bp, Canis familiaris
gtagtgggattgtgtgggttcgcat

SEQ ID NO: 136725 - DNA, 25 bp, Canis familiaris
gtagctccagattcggatgggttcg

SEQ ID NO: 136726 - DNA, 25 bp, Canis familiaris
gtagttgcagtgtcgatgtcagttt

SEQ ID NO: 136727 - DNA, 25 bp, Canis familiaris
gtagtatgagtgtggtatgcttgat

SEQ ID NO: 136728 - DNA, 25 bp, Canis familiaris
gtagtatgactgtgattttcttaag

SEQ ID NO: 136729 - DNA, 25 bp, Canis familiaris
gtagtacacgtattttgctttatca

SEQ ID NO: 136730 - DNA, 25 bp, Canis familiaris
gtagtacacgtattctgctctatca

SEQ ID NO: 136731 - DNA, 25 bp, Canis familiaris
gtagtaaaatagactttgagccaaa

SEQ ID NO: 136732 - DNA, 25 bp, Canis familiaris
gacatgttcagggatcgccaggcgt

SEQ ID NO: 136733 - DNA, 25 bp, Canis familiaris
gccaggcgttttctgagcatacctg

SEQ ID NO: 136734 - DNA, 25 bp, Canis familiaris
gcggcatggtgcaagttgaataacc

SEQ ID NO: 136735 - DNA, 25 bp, Canis familiaris
gaagatgttcgcgattatcttctat

SEQ ID NO: 136736 - DNA, 25 bp, Canis familiaris
tctatatcttcaggcgcgcggtctg

SEQ ID NO: 136737 - DNA, 25 bp, Canis familiaris
gcaacatttgggccagctaaacatg

SEQ ID NO: 136738 - DNA, 25 bp, Canis familiaris
ccagctaaacatgcttcatcgtcgg

SEQ ID NO: 136739 - DNA, 25 bp, Canis familiaris
ccgggctgccacgaccaagtgacag

SEQ ID NO: 136740 - DNA, 25 bp, Canis familiaris
gaccaagtgacagcaatgctgtttc

SEQ ID NO: 136741 - DNA, 25 bp, Canis familiaris
aatgctgtttcactggttatgcggc

SEQ ID NO: 136742 - DNA, 25 bp, Canis familiaris
atgccggtgaacgtgcaaaacaggc

SEQ ID NO: 136743 - DNA, 25 bp, Canis familiaris
acgtgcaaaacaggctctagcgttc

SEQ ID NO: 136744 - DNA, 25 bp, Canis familiaris
ctctagcgttcgaacgcactgattt

SEQ ID NO: 136745 - DNA, 25 bp, Canis familiaris
tcgttcactcatggaaaatagcgat

SEQ ID NO: 136746 - DNA, 25 bp, Canis familiaris
atggaaaatagcgatcgctgccagg

SEQ ID NO: 136747 - DNA, 25 bp, Canis familiaris
tcagggttaaagatatctcacgtac

SEQ ID NO: 136748 - DNA, 25 bp, Canis familiaris
cgctggttagcaccgcaggtgtaga

SEQ ID NO: 136749 - DNA, 25 bp, Canis familiaris
caccgcaggtgtagagaaggcactt

SEQ ID NO: 136750 - DNA, 25 bp, Canis familiaris
gtagcatatgcttgtctcaaagatt

SEQ ID NO: 136751 - DNA, 25 bp, Canis familiaris
gtagaattcagtgcataagctgtat

SEQ ID NO: 136752 - DNA, 25 bp, Canis familiaris
gtaggtctgcacacatacacatatt

SEQ ID NO: 136753 - DNA, 25 bp, Canis familiaris
gtagtgatatcctcattctcatgat

SEQ ID NO: 136754 - DNA, 25 bp, Canis familiaris
gtagcctacctagtattctgtggga

SEQ ID NO: 136755 - DNA, 25 bp, Canis familiaris
gtacctaccgtaattcttgacactt

SEQ ID NO: 136756 - DNA, 25 bp, Canis familiaris
gtagtctctaccattctcatatgaa

SEQ ID NO: 136757 - DNA, 25 bp, Canis familiaris
gtagtatgtatgcccttcattctga

SEQ ID NO: 136758 - DNA, 25 bp, Canis familiaris
gtagtatgtctgcactctttcagct

SEQ ID NO: 136759 - DNA, 25 bp, Canis familiaris
gtagatgcggtgcatcctggctatg

SEQ ID NO: 136760 - DNA, 25 bp, Canis familiaris
gtagagccggagacctgtttgttca

SEQ ID NO: 136761 - DNA, 25 bp, Canis familiaris
gtagaggccagagggcggcgtgttc

SEQ ID NO: 136762 - DNA, 25 bp, Canis familiaris
gtagagttgcgacgccggtgttgtt

SEQ ID NO: 136763 - DNA, 25 bp, Canis familiaris
gtagagcttcaggatggcctttctg

SEQ ID NO: 136764 - DNA, 25 bp, Canis familiaris
gtagacccaagtggctctagagctg

SEQ ID NO: 136765 - DNA, 25 bp, Canis familiaris
gtagacactgagctgcagcttcggc

SEQ ID NO: 136766 - DNA, 25 bp, Canis familiaris
gtagcacaatgcagtgagacccgcg

SEQ ID NO: 136767 - DNA, 25 bp, Canis familiaris
gtagcatccagcagtgttcctacag

SEQ ID NO: 136768 - DNA, 25 bp, Canis familiaris
gtagcagccaggggagactcataaa

SEQ ID NO: 136769 - DNA, 25 bp, Canis familiaris
gtagcagccagagacaagcatatgt

SEQ ID NO: 136770 - DNA, 25 bp, Canis familiaris
gtagggcaatgcaagccacagattg

SEQ ID NO: 136771 - DNA, 25 bp, Canis familiaris
gtacccaggcattgctgacaggatg

SEQ ID NO: 136772 - DNA, 25 bp, Canis familiaris
gtactccagctctctgggctgggag

SEQ ID NO: 136773 - DNA, 25 bp, Canis familiaris
gtagcccattgctcagggcagggga

SEQ ID NO: 136774 - DNA, 25 bp, Canis familiaris
gtagagcaagcgatagggtggggtt

SEQ ID NO: 136775 - DNA, 25 bp, Canis familiaris
gtcaaagtggtcagggctgccggtt

SEQ ID NO: 136776 - DNA, 25 bp, Canis familiaris
gtaagggttgtttggtctcctgttg

SEQ ID NO: 136777 - DNA, 25 bp, Canis familiaris
gtgaagattgttgggtcgtttcgtt

SEQ ID NO: 136778 - DNA, 25 bp, Canis familiaris
gtagaatttgtcccttattccttat

SEQ ID NO: 136779 - DNA, 25 bp, Canis familiaris
gtagacaatttatgcttattctcct

SEQ ID NO: 136780 - DNA, 25 bp, Canis familiaris
gtagggactgtaccttattcatctg

SEQ ID NO: 136781 - DNA, 25 bp, Canis familiaris
gtagttgtcttacctgtagtcatca

SEQ ID NO: 136782 - DNA, 25 bp, Canis familiaris
gtagtctggctattcttgtatgtat

SEQ ID NO: 136783 - DNA, 25 bp, Canis familiaris
gtagttgcgtatacttacaatgatg

SEQ ID NO: 136784 - DNA, 25 bp, Canis familiaris
gtagcattttatactttcaagtgtt

SEQ ID NO: 136785 - DNA, 25 bp, Canis familiaris
gtagttttatttctcacagccacat

SEQ ID NO: 136786 - DNA, 25 bp, Canis familiaris
gtagtgttataaagtgacccctctg

SEQ ID NO: 136787 - DNA, 25 bp, Canis familiaris
gtagatgctttactcaaaacccgta

SEQ ID NO: 136788 - DNA, 25 bp, Canis familiaris
gtagctctttagcgctaacctagga

SEQ ID NO: 136789 - DNA, 25 bp, Canis familiaris
gtacgcctctggccgtaccactggc

SEQ ID NO: 136790 - DNA, 25 bp, Canis familiaris
gtagcaggttggccagcttggcctc

SEQ ID NO: 136791 - DNA, 25 bp, Canis familiaris
gtagggctggatgcagttgccgtcg

SEQ ID NO: 136792 - DNA, 25 bp, Canis familiaris
gtaccgggcatgtcatgttgcccaa

SEQ ID NO: 136793 - DNA, 25 bp, Canis familiaris
gtagttgtggtgtgagtcgcagaag

SEQ ID NO: 136794 - DNA, 25 bp, Canis familiaris
gtactatacttgtgagtccaggcgc

SEQ ID NO: 136795 - DNA, 25 bp, Canis familiaris
gtactggaggtatgaatatactggc

SEQ ID NO: 136796 - DNA, 25 bp, Canis familiaris
gtacttgcgtaatgcctatgctcgg

SEQ ID NO: 136797 - DNA, 25 bp, Canis familiaris
gtaggtggatcatttcttatgcctg

SEQ ID NO: 136798 - DNA, 25 bp, Canis familiaris
gtagcgtgccactttaaacaccaca

SEQ ID NO: 136799 - DNA, 25 bp, Canis familiaris
gtagcaaccacatcattaacataaa

SEQ ID NO: 136800 - DNA, 25 bp, Canis familiaris
gtagaacttactaccaatctaacac

SEQ ID NO: 136801 - DNA, 25 bp, Canis familiaris
gtagaatctgtagaccttccaaact

SEQ ID NO: 136802 - DNA, 25 bp, Canis familiaris
gtagagttgctaggaagttacacag

SEQ ID NO: 136803 - DNA, 25 bp, Canis familiaris
gtaccttgtcagtcaatgttcacta

SEQ ID NO: 136804 - DNA, 25 bp, Canis familiaris
gtagcccgtagtagtgatatccaca

SEQ ID NO: 136805 - DNA, 25 bp, Canis familiaris
gtactcctggccatgatcatagccc

SEQ ID NO: 136806 - DNA, 25 bp, Canis familiaris
gtacaccggcacttacaatgcctac

SEQ ID NO: 136807 - DNA, 25 bp, Canis familiaris
gtagcaaggacagatacctccaatc

SEQ ID NO: 136808 - DNA, 25 bp, Canis familiaris
gtagtggtgagtgaaacatccaggc

SEQ ID NO: 136809 - DNA, 25 bp, Canis familiaris
gtagtagttcatgaccaatctctgt

SEQ ID NO: 136810 - DNA, 25 bp, Canis familiaris
gtagtaattcttgaaattctcttta

SEQ ID NO: 136811 - DNA, 25 bp, Canis familiaris
gtagtttgtcttgactgttttttag

SEQ ID NO: 136812 - DNA, 25 bp, Canis familiaris
gtagtatttcttttctcttgtgtta

SEQ ID NO: 136813 - DNA, 25 bp, Canis familiaris
gtagttctagtttgatttctctgtt

SEQ ID NO: 136814 - DNA, 25 bp, Canis familiaris
gtagttctctgacatcttttgtgta

SEQ ID NO: 136815 - DNA, 25 bp, Canis familiaris
gtagtagctagtttcttcatttgta

SEQ ID NO: 136816 - DNA, 25 bp, Canis familiaris
gtagtagccaaagtgcctgctgtcg

SEQ ID NO: 136817 - DNA, 25 bp, Canis familiaris
gtagtaggcaggaagccctggcgcc

SEQ ID NO: 136818 - DNA, 25 bp, Canis familiaris
gtagtaggctgaatagtgtccccca

SEQ ID NO: 136819 - DNA, 25 bp, Canis familiaris
gtagatgaggtttctgtttcccaga

SEQ ID NO: 136820 - DNA, 25 bp, Canis familiaris
gtagatgaggtttctgtttcccaga

SEQ ID NO: 136821 - DNA, 25 bp, Canis familiaris
gtagtgattgtttctgatctcctct

SEQ ID NO: 136822 - DNA, 25 bp, Canis familiaris
gtagtttctatattgtgcaccatta

SEQ ID NO: 136823 - DNA, 25 bp, Canis familiaris
gtagtctactcaatcaggcagttct

SEQ ID NO: 136824 - DNA, 25 bp, Canis familiaris
gtagtctactcaatcaggcagttct

SEQ ID NO: 136825 - DNA, 25 bp, Canis familiaris
gtagtgcccttggcaggcatttgcc

SEQ ID NO: 136826 - DNA, 25 bp, Canis familiaris
gtagttagtagcgggctcttggctc

SEQ ID NO: 136827 - DNA, 25 bp, Canis familiaris
gtagttgggatgggccttgtggcaa

SEQ ID NO: 136828 - DNA, 25 bp, Canis familiaris
gtggctttattcagcccattccaaa

SEQ ID NO: 136829 - DNA, 25 bp, Canis familiaris
gtagctttactcataatctcccaaa

SEQ ID NO: 136830 - DNA, 25 bp, Canis familiaris
gtagcattatttataatagccaaga

SEQ ID NO: 136831 - DNA, 25 bp, Canis familiaris
gtagccactttgatcacaagcctta

SEQ ID NO: 136832 - DNA, 25 bp, Canis familiaris
gtacctcaattttgcaaacctaatc

SEQ ID NO: 136833 - DNA, 25 bp, Canis familiaris
gtactaagcattttcttaccataat

SEQ ID NO: 136834 - DNA, 25 bp, Canis familiaris
gtaccatgacactcacagtaaatag

SEQ ID NO: 136835 - DNA, 25 bp, Canis familiaris
gtagctgtgaacttagcagcatgac

SEQ ID NO: 136836 - DNA, 25 bp, Canis familiaris
gtaccgcatacaggacatcagacac

SEQ ID NO: 136837 - DNA, 25 bp, Canis familiaris
gtacctgtaagaccaagccgtattc

SEQ ID NO: 136838 - DNA, 25 bp, Canis familiaris
gtaccattgagatcctggcctgttt

SEQ ID NO: 136839 - DNA, 25 bp, Canis familiaris
gtacctatacaaccttcctttgaga

SEQ ID NO: 136840 - DNA, 25 bp, Canis familiaris
gtaccagaccaaactgcattttggg

SEQ ID NO: 136841 - DNA, 25 bp, Canis familiaris
gtaccagactaaactgcaacttttg

SEQ ID NO: 136842 - DNA, 25 bp, Canis familiaris
gtagcagcagactgtacgcaaccaa

SEQ ID NO: 136843 - DNA, 25 bp, Canis familiaris
gtagctatgaatatggcgcccaata

SEQ ID NO: 136844 - DNA, 25 bp, Canis familiaris
gtagactaatgtagaccttcacaga

SEQ ID NO: 136845 - DNA, 25 bp, Canis familiaris
gtagatggaataacccctcacggtc

SEQ ID NO: 136846 - DNA, 25 bp, Canis familiaris
gtagatgtattttcccaaactgtgt

SEQ ID NO: 136847 - DNA, 25 bp, Canis familiaris
gtagaatctttgttccaacctttgt

SEQ ID NO: 136848 - DNA, 25 bp, Canis familiaris
gtagacaagtctctctcataccaat

SEQ ID NO: 136849 - DNA, 25 bp, Canis familiaris
gtagacaacttgtgtcatccaaagc

SEQ ID NO: 136850 - DNA, 25 bp, Canis familiaris
gtagaagttctgcttgctcgaaggc

SEQ ID NO: 136851 - DNA, 25 bp, Canis familiaris
gtagtgcaatttctggttcataggc

SEQ ID NO: 136852 - DNA, 25 bp, Canis familiaris
gtagagtccttggcagggcttaggc

SEQ ID NO: 136853 - DNA, 25 bp, Canis familiaris
gtagaagcttgggatgggtttgtgt

SEQ ID NO: 136854 - DNA, 25 bp, Canis familiaris
gtagcacagttgatagtggttggtg

SEQ ID NO: 136855 - DNA, 25 bp, Canis familiaris
gtacattttggctacagtattggtg

SEQ ID NO: 136856 - DNA, 25 bp, Canis familiaris
gtagcctttggatttgaattggagc

SEQ ID NO: 136857 - DNA, 25 bp, Canis familiaris
gtaaacttggaagtacattgcaaga

SEQ ID NO: 136858 - DNA, 25 bp, Canis familiaris
gtaacaaggtaagcacactagaagg

SEQ ID NO: 136859 - DNA, 25 bp, Canis familiaris
gtaccaccagtggacccactagata

SEQ ID NO: 136860 - DNA, 25 bp, Canis familiaris
gtaccccattggcctcaaataactt

SEQ ID NO: 136861 - DNA, 25 bp, Canis familiaris
gtacccctggaattaatgtaacatt

SEQ ID NO: 136862 - DNA, 25 bp, Canis familiaris
gtacctctgagtaaatcaattcaac

SEQ ID NO: 136863 - DNA, 25 bp, Canis familiaris
gtagccaaatgctgatacgttcaat

SEQ ID NO: 136864 - DNA, 25 bp, Canis familiaris
gtaccaagtgggaacgggagcatct

SEQ ID NO: 136865 - DNA, 25 bp, Canis familiaris
gtacgagcagtccaaacagggcagc

SEQ ID NO: 136866 - DNA, 25 bp, Canis familiaris
gtaccagagcttcgagttgggcgcc

SEQ ID NO: 136867 - DNA, 25 bp, Canis familiaris
gtgactatggcatggactgggtccg

SEQ ID NO: 136868 - DNA, 25 bp, Canis familiaris
gtacctgtactgaagggctgtcctg

SEQ ID NO: 136869 - DNA, 25 bp, Canis familiaris
gtacgttatggaaatggtgtcgggg

SEQ ID NO: 136870 - DNA, 25 bp, Canis familiaris
gtcacctttgggccaggtggcagga

SEQ ID NO: 136871 - DNA, 25 bp, Canis familiaris
gtagccttggtcacaatcgagggca

SEQ ID NO: 136872 - DNA, 25 bp, Canis familiaris
gtagcactgggctgaaagcaaggtg

SEQ ID NO: 136873 - DNA, 25 bp, Canis familiaris
gtagagggtctccaaagaagtgcac

SEQ ID NO: 136874 - DNA, 25 bp, Canis familiaris
gtagcagtgggtggcacggtgggcc

SEQ ID NO: 136875 - DNA, 25 bp, Canis familiaris
gtacttgggtagccagggaggcact

SEQ ID NO: 136876 - DNA, 25 bp, Canis familiaris
gtacttgaggggcccaagtggcacc

SEQ ID NO: 136877 - DNA, 25 bp, Canis familiaris
gtacttcgggaagacgctgagcccc

SEQ ID NO: 136878 - DNA, 25 bp, Canis familiaris
gtactttggaacttcctggaagctc

SEQ ID NO: 136879 - DNA, 25 bp, Canis familiaris
gtaacttggattttgccttataggc

SEQ ID NO: 136880 - DNA, 25 bp, Canis familiaris
gtagacttggattcaaggcttttca

SEQ ID NO: 136881 - DNA, 25 bp, Canis familiaris
gtagtcttgtttcatagttgttgca

SEQ ID NO: 136882 - DNA, 25 bp, Canis familiaris
gtagttggtttgtatgagatggtta

SEQ ID NO: 136883 - DNA, 25 bp, Canis familiaris
gtagttggtttgtatgagatggtta

SEQ ID NO: 136884 - DNA, 25 bp, Canis familiaris
gtagttgttcttctgtgagtgtgtg

SEQ ID NO: 136885 - DNA, 25 bp, Canis familiaris
gtagtcttacagggttgagtgtgct

SEQ ID NO: 136886 - DNA, 25 bp, Canis familiaris
gtagtttcacgtgcttatgtatggt

SEQ ID NO: 136887 - DNA, 25 bp, Canis familiaris
gtcactttcacggactaacaacctg

SEQ ID NO: 136888 - DNA, 25 bp, Canis familiaris
gtactgttcacggtaggaaactcca

SEQ ID NO: 136889 - DNA, 25 bp, Canis familiaris
gtacctattctgtgtcgaaacccag

SEQ ID NO: 136890 - DNA, 25 bp, Canis familiaris
gtacgcttccttgctggaagaaccc

SEQ ID NO: 136891 - DNA, 25 bp, Canis familiaris
gtacctgcccctttgtgggcaaact

SEQ ID NO: 136892 - DNA, 25 bp, Canis familiaris
gtacctggccagattggggaaccaa

SEQ ID NO: 136893 - DNA, 25 bp, Canis familiaris
gtactattgccagcctaaggaacaa

SEQ ID NO: 136894 - DNA, 25 bp, Canis familiaris
gtacttttcacacgaacgagagact

SEQ ID NO: 136895 - DNA, 25 bp, Canis familiaris
gtacctttctgaaccacgacagagt

SEQ ID NO: 136896 - DNA, 25 bp, Canis familiaris
gtaccttccagagccggacagaaga

SEQ ID NO: 136897 - DNA, 25 bp, Canis familiaris
gtagcgattctctccacagtggagt

SEQ ID NO: 136898 - DNA, 25 bp, Canis familiaris
gtagagacctcagaacagctggact

SEQ ID NO: 136899 - DNA, 25 bp, Canis familiaris
gtagaactcccaattactggactaa

SEQ ID NO: 136900 - DNA, 25 bp, Canis familiaris
gtacgacctcttgtaagaactaaca

SEQ ID NO: 136901 - DNA, 25 bp, Canis familiaris
gtagcgagtcttcttatagagccta

SEQ ID NO: 136902 - DNA, 25 bp, Canis familiaris
gtagaagctcggtcgttgtagctcc

SEQ ID NO: 136903 - DNA, 25 bp, Canis familiaris
gtagctcaggggttgggtatctgcc

SEQ ID NO: 136904 - DNA, 25 bp, Canis familiaris
gtagctagctagctcgggtgtacct

SEQ ID NO: 136905 - DNA, 25 bp, Canis familiaris
gtagctagccacccagggttctagt

SEQ ID NO: 136906 - DNA, 25 bp, Canis familiaris
gtacatacccccttattattactgc

SEQ ID NO: 136907 - DNA, 25 bp, Canis familiaris
gtaatggtccccatttaatggtcgt

SEQ ID NO: 136908 - DNA, 25 bp, Canis familiaris
tgtaaggacctccgtttaagcacct

SEQ ID NO: 136909 - DNA, 25 bp, Canis familiaris
gtagcacgggtccttttagagactg

SEQ ID NO: 136910 - DNA, 25 bp, Canis familiaris
gtagccctggtgctgtgttagatag

SEQ ID NO: 136911 - DNA, 25 bp, Canis familiaris
gtagcggtgcttacttctgtagaac

SEQ ID NO: 136912 - DNA, 25 bp, Canis familiaris
gtagcagttttaacgctggaagcac

SEQ ID NO: 136913 - DNA, 25 bp, Canis familiaris
gtagcggaattcatgcgtggcagag

SEQ ID NO: 136914 - DNA, 25 bp, Canis familiaris
gtagaggaattcagtatgtcataaa

SEQ ID NO: 136915 - DNA, 25 bp, Canis familiaris
gtagttctattcaagtgttacaata

SEQ ID NO: 136916 - DNA, 25 bp, Canis familiaris
gtagagttctttttatgtactttct

SEQ ID NO: 136917 - DNA, 25 bp, Canis familiaris
gtagtttgttctttttactgtgtgt

SEQ ID NO: 136918 - DNA, 25 bp, Canis familiaris
gtagattttgcctctttactttgta

SEQ ID NO: 136919 - DNA, 25 bp, Canis familiaris
gtagttaatgctttccttcaatttt

SEQ ID NO: 136920 - DNA, 25 bp, Canis familiaris
gtagattgcatgtgttccttcagct

SEQ ID NO: 136921 - DNA, 25 bp, Canis familiaris
gtagctctgagatgatccctatagt

SEQ ID NO: 136922 - DNA, 25 bp, Canis familiaris
gtagctcaaacaatcctcataatga

SEQ ID NO: 136923 - DNA, 25 bp, Canis familiaris
gtagcctctaaaactctagatgagt

SEQ ID NO: 136924 - DNA, 25 bp, Canis familiaris
gtagccatccacaacttctggaggt

SEQ ID NO: 136925 - DNA, 25 bp, Canis familiaris
gtagtacatcctacttcaggagtat

SEQ ID NO: 136926 - DNA, 25 bp, Canis familiaris
gtagtaacactcactgctgtggtat

SEQ ID NO: 136927 - DNA, 25 bp, Canis familiaris
gtagataagcagcatcctcttggga

SEQ ID NO: 136928 - DNA, 25 bp, Canis familiaris
gtagattatgcatgacccttctcaa

SEQ ID NO: 136929 - DNA, 25 bp, Canis familiaris
gtagcatgtgtcaatactccattta

SEQ ID NO: 136930 - DNA, 25 bp, Canis familiaris
gtagctggagccaaatcctgcttca

SEQ ID NO: 136931 - DNA, 25 bp, Canis familiaris
gtagttgctcacatattcatctctt

SEQ ID NO: 136932 - DNA, 25 bp, Canis familiaris
gtagcaggtcacaatttacctttgt

SEQ ID NO: 136933 - DNA, 25 bp, Canis familiaris
gtcagggtggtggttactcttaggc

SEQ ID NO: 136934 - DNA, 25 bp, Canis familiaris
gtagcgtgtgggcttgtgttttgcg

SEQ ID NO: 136935 - DNA, 25 bp, Canis familiaris
gtagcattttaaagtgttttcctga

SEQ ID NO: 136936 - DNA, 25 bp, Canis familiaris
gtagatgttcttttgtagttattta

SEQ ID NO: 136937 - DNA, 25 bp, Canis familiaris
gtagcatttcttaatgtagcttgtt

SEQ ID NO: 136938 - DNA, 25 bp, Canis familiaris
gtagttttttcttactctgttcacg

SEQ ID NO: 136939 - DNA, 25 bp, Canis familiaris
tgttgctggattcactaaccgttga

SEQ ID NO: 136940 - DNA, 25 bp, Canis familiaris
gtagcaggcagttaccaaccaggaa

SEQ ID NO: 136941 - DNA, 25 bp, Canis familiaris
gtacggaggacaccaactctgagag

SEQ ID NO: 136942 - DNA, 25 bp, Canis familiaris
gtacgtattttccaaatgcgagcat

SEQ ID NO: 136943 - DNA, 25 bp, Canis familiaris
gtactgtgtctgtgaaaatcgtgct

SEQ ID NO: 136944 - DNA, 25 bp, Canis familiaris
gtagctcttctctgactaaagttta

SEQ ID NO: 136945 - DNA, 25 bp, Canis familiaris
gtagatcttttaagcatagaacttt

SEQ ID NO: 136946 - DNA, 25 bp, Canis familiaris
gtagctcattttcacaatgggcttt

SEQ ID NO: 136947 - DNA, 25 bp, Canis familiaris
gtagctcattgcttcaaaaacccta

SEQ ID NO: 136948 - DNA, 25 bp, Canis familiaris
gtagctacaggacaatcaaccttac

SEQ ID NO: 136949 - DNA, 25 bp, Canis familiaris
gtaccccgaggattcaaatgtttca

SEQ ID NO: 136950 - DNA, 25 bp, Canis familiaris
gtaaccacgagccaactaaaggaat

SEQ ID NO: 136951 - DNA, 25 bp, Canis familiaris
gtaattagcgataaaccaaataaga

SEQ ID NO: 136952 - DNA, 25 bp, Canis familiaris
ggcctaactgtaagacctaaaactg

SEQ ID NO: 136953 - DNA, 25 bp, Canis familiaris
ggcactgtaattattcctaaaactg

SEQ ID NO: 136954 - DNA, 25 bp, Canis familiaris
gtcaggtaatgttttccttaaatca

SEQ ID NO: 136955 - DNA, 25 bp, Canis familiaris
gtagttcactgtatactttacaaca

SEQ ID NO: 136956 - DNA, 25 bp, Canis familiaris
gtagttccatccatcttgttacaaa

SEQ ID NO: 136957 - DNA, 25 bp, Canis familiaris
gtagtatggatctatttctctaata

SEQ ID NO: 136958 - DNA, 25 bp, Canis familiaris
gtagttagccaagtttcagaatata

SEQ ID NO: 136959 - DNA, 25 bp, Canis familiaris
gtagatgtgatctcagttgtaaata

SEQ ID NO: 136960 - DNA, 25 bp, Canis familiaris
gtaagctacaatggtttaatttgca

SEQ ID NO: 136961 - DNA, 25 bp, Canis familiaris
gtagactaccattgtgtcaagtatc

SEQ ID NO: 136962 - DNA, 25 bp, Canis familiaris
gtagacattccttctgttgagcaac

SEQ ID NO: 136963 - DNA, 25 bp, Canis familiaris
tgtctaaagccttggattagccccc

SEQ ID NO: 136964 - DNA, 25 bp, Canis familiaris
gtcttgaagccctcatttagacaga

SEQ ID NO: 136965 - DNA, 25 bp, Canis familiaris
gtcttcctcccaggtatgtacctgg

SEQ ID NO: 136966 - DNA, 25 bp, Canis familiaris
gtacccttccatgattggtccatgc

SEQ ID NO: 136967 - DNA, 25 bp, Canis familiaris
gtaccctcatactgtaggtagcact

SEQ ID NO: 136968 - DNA, 25 bp, Canis familiaris
gtacctctgacctaatatgactatc

SEQ ID NO: 136969 - DNA, 25 bp, Canis familiaris
gtacgttccatctaatatgtcactg

SEQ ID NO: 136970 - DNA, 25 bp, Canis familiaris
gtactttcgtcttaatgtccgtcac

SEQ ID NO: 136971 - DNA, 25 bp, Canis familiaris
gtactccttgtcttaatctgactga

SEQ ID NO: 136972 - DNA, 25 bp, Canis familiaris
gtacatgacgctaacgaacgacttt

SEQ ID NO: 136973 - DNA, 25 bp, Canis familiaris
gtagcacacgtatcaaacctatttc

SEQ ID NO: 136974 - DNA, 25 bp, Canis familiaris
gtagacctatatgtaacctattcct

SEQ ID NO: 136975 - DNA, 25 bp, Canis familiaris
gtagatctaaatgtatactcataga

SEQ ID NO: 136976 - DNA, 25 bp, Canis familiaris
gtagatctgcaactggaacacctgg

SEQ ID NO: 136977 - DNA, 25 bp, Canis familiaris
gtaaggaggggaacgccagtggcgt

SEQ ID NO: 136978 - DNA, 25 bp, Canis familiaris
gtaagggggggtgcagagagctggg

SEQ ID NO: 136979 - DNA, 25 bp, Canis familiaris
gtacgagatagcagggacaggagca

SEQ ID NO: 136980 - DNA, 25 bp, Canis familiaris
tgtactactacgacggtctggccaa

SEQ ID NO: 136981 - DNA, 25 bp, Canis familiaris
gtactggtatcgacatgacctggga

SEQ ID NO: 136982 - DNA, 25 bp, Canis familiaris
gtagcagtgtacccacactgggtat

SEQ ID NO: 136983 - DNA, 25 bp, Canis familiaris
gtagcgtatacttccacacagatgt

SEQ ID NO: 136984 - DNA, 25 bp, Canis familiaris
gtactgttatcactccagacacatg

SEQ ID NO: 136985 - DNA, 25 bp, Canis familiaris
gtagctctgtaccgaggaacatgat

SEQ ID NO: 136986 - DNA, 25 bp, Canis familiaris
gtacctggactccggatccagactt

SEQ ID NO: 136987 - DNA, 25 bp, Canis familiaris
gtaccgagcctgagggctagacgtg

SEQ ID NO: 136988 - DNA, 25 bp, Canis familiaris
gtaccagagcgtgaggacaggaagt

SEQ ID NO: 136989 - DNA, 25 bp, Canis familiaris
gtacctacgtgggagcaagctaact

SEQ ID NO: 136990 - DNA, 25 bp, Canis familiaris
gtaccaagcggtaagcaagcaagac

SEQ ID NO: 136991 - DNA, 25 bp, Canis familiaris
gtaccacactggaaacaaactgctc

SEQ ID NO: 136992 - DNA, 25 bp, Canis familiaris
gtagctcccggtagaagtattcctc

SEQ ID NO: 136993 - DNA, 25 bp, Canis familiaris
gtagctttcagaccatacagtattc

SEQ ID NO: 136994 - DNA, 25 bp, Canis familiaris
gtagcactccaacaaaatctttcga

SEQ ID NO: 136995 - DNA, 25 bp, Canis familiaris
gtagcctcctcaaaaacgctgtact

SEQ ID NO: 136996 - DNA, 25 bp, Canis familiaris
gtaccctaagaaaacagcattgagt

SEQ ID NO: 136997 - DNA, 25 bp, Canis familiaris
gtaccctaacagacacatccagata

SEQ ID NO: 136998 - DNA, 25 bp, Canis familiaris
gtaccaataaagactaaccaagcct

SEQ ID NO: 136999 - DNA, 25 bp, Canis familiaris
gtacataaataagcaaagcgcccga

SEQ ID NO: 137000 - DNA, 25 bp, Canis familiaris
gtaagtatagaagcaaaccttcata

SEQ ID NO: 137001 - DNA, 25 bp, Canis familiaris
gtagcgtgatagaaaattgaccctt

SEQ ID NO: 137002 - DNA, 25 bp, Canis familiaris
gtacggagccgagattatcgcaatt

SEQ ID NO: 137003 - DNA, 25 bp, Canis familiaris
gtacggagccaagcgctacagttac

SEQ ID NO: 137004 - DNA, 25 bp, Canis familiaris
gtactttgccacgggcttcagtggc

SEQ ID NO: 137005 - DNA, 25 bp, Canis familiaris
gtacgcagggaggtgagcccgtggg

SEQ ID NO: 137006 - DNA, 25 bp, Canis familiaris
gtcaacggggaccagtactgtgggg

SEQ ID NO: 137007 - DNA, 25 bp, Canis familiaris
gtcacggggtgagagtgggggtggt

SEQ ID NO: 137008 - DNA, 25 bp, Canis familiaris
gtacgtggccgaacagtttgggtgg

SEQ ID NO: 137009 - DNA, 25 bp, Canis familiaris
gtacgtgggccgaacattttgggtg

SEQ ID NO: 137010 - DNA, 25 bp, Canis familiaris
gtacgctgattccagaacattttca

SEQ ID NO: 137011 - DNA, 25 bp, Canis familiaris
gtactgtaactgtatccatattata

SEQ ID NO: 137012 - DNA, 25 bp, Canis familiaris
gtagcgtagcatttactggtttgtc

SEQ ID NO: 137013 - DNA, 25 bp, Canis familiaris
gtagcatgtcaaaacgctggtcacg

SEQ ID NO: 137014 - DNA, 25 bp, Canis familiaris
gtagcagctccaaagcactggatgc

SEQ ID NO: 137015 - DNA, 25 bp, Canis familiaris
gtagagctcccaatagctgtagcta

SEQ ID NO: 137016 - DNA, 25 bp, Canis familiaris
gtagagatgccgttactttcacatt

SEQ ID NO: 137017 - DNA, 25 bp, Canis familiaris
gtagaagcccttatggtcacaatta

SEQ ID NO: 137018 - DNA, 25 bp, Canis familiaris
gtagaagcttttcaggaaccatatt

SEQ ID NO: 137019 - DNA, 25 bp, Canis familiaris
gtaatatgtcttgtacgtcactcat

SEQ ID NO: 137020 - DNA, 25 bp, Canis familiaris
gtagcaattttgtctacccatccat

SEQ ID NO: 137021 - DNA, 25 bp, Canis familiaris
gtagaacttgcgatgacccatcctc

SEQ ID NO: 137022 - DNA, 25 bp, Canis familiaris
gtagaagcactcgttgagcatcgca

SEQ ID NO: 137023 - DNA, 25 bp, Canis familiaris
gtagaagcgcatacgcatgactaca

SEQ ID NO: 137024 - DNA, 25 bp, Canis familiaris
gtagcaatcatggtcgaactggcag

SEQ ID NO: 137025 - DNA, 25 bp, Canis familiaris
gtagcaatcaaattatcctgtggat

SEQ ID NO: 137026 - DNA, 25 bp, Canis familiaris
gtagcaactactgagctctctggaa

SEQ ID NO: 137027 - DNA, 25 bp, Canis familiaris
gtagaaggacagttccctgagacag

SEQ ID NO: 137028 - DNA, 25 bp, Canis familiaris
gtagttggaacttactggcagtgga

SEQ ID NO: 137029 - DNA, 25 bp, Canis familiaris
gtaactggaacatagttcgtgggca

SEQ ID NO: 137030 - DNA, 25 bp, Canis familiaris
gtagactagtactgtttggtggcaa

SEQ ID NO: 137031 - DNA, 25 bp, Canis familiaris
gtagagttgtccttgtttgtagtaa

SEQ ID NO: 137032 - DNA, 25 bp, Canis familiaris
gtagatttgttgtgctttgtaatta

SEQ ID NO: 137033 - DNA, 25 bp, Canis familiaris
gtacttcgagtcttctttataattc

SEQ ID NO: 137034 - DNA, 25 bp, Canis familiaris
gtacctcgacgaatgcattttttta

SEQ ID NO: 137035 - DNA, 25 bp, Canis familiaris
gtagctctacacttccatttgatat

SEQ ID NO: 137036 - DNA, 25 bp, Canis familiaris
gtagcttattttgactggcatatca

SEQ ID NO: 137037 - DNA, 25 bp, Canis familiaris
gtagcgatattcttagtctagccta

SEQ ID NO: 137038 - DNA, 25 bp, Canis familiaris
gtagattatgtcacagtctgagcat

SEQ ID NO: 137039 - DNA, 25 bp, Canis familiaris
gtagaattgtatttgctctgcctat

SEQ ID NO: 137040 - DNA, 25 bp, Canis familiaris
gtagacatattttttactgtatcag

SEQ ID NO: 137041 - DNA, 25 bp, Canis familiaris
gtagacaactattatgatgttgtag

SEQ ID NO: 137042 - DNA, 25 bp, Canis familiaris
gtagaccatttgtcattcatgctgt

SEQ ID NO: 137043 - DNA, 25 bp, Canis familiaris
gtagaccattatcctgagccatgta

SEQ ID NO: 137044 - DNA, 25 bp, Canis familiaris
gtagcttcactttatggccatgttt

SEQ ID NO: 137045 - DNA, 25 bp, Canis familiaris
gtagctgttctaagaggcactggtc

SEQ ID NO: 137046 - DNA, 25 bp, Canis familiaris
gtagatgtatcttttctgcactcgt

SEQ ID NO: 137047 - DNA, 25 bp, Canis familiaris
gtagatttcttctcttatgcgttca

SEQ ID NO: 137048 - DNA, 25 bp, Canis familiaris
gtagttgattctgtcttatccttca

SEQ ID NO: 137049 - DNA, 25 bp, Canis familiaris
gtagctcggtccgtattgttttcac

SEQ ID NO: 137050 - DNA, 25 bp, Canis familiaris
gtagctgtggtggcctgaagtttgt

SEQ ID NO: 137051 - DNA, 25 bp, Canis familiaris
gtagcgctgttagctgtagttctgg

SEQ ID NO: 137052 - DNA, 25 bp, Canis familiaris
gtagagcctgtaactcttgatcttg

SEQ ID NO: 137053 - DNA, 25 bp, Canis familiaris
gtagcttctgtgtcactttgatttc

SEQ ID NO: 137054 - DNA, 25 bp, Canis familiaris
gtagcacttcttattgctgatctcc

SEQ ID NO: 137055 - DNA, 25 bp, Canis familiaris
gtagcagtttctgtatgcagtaggc

SEQ ID NO: 137056 - DNA, 25 bp, Canis familiaris
gtagagtctcttgattcagaattga

SEQ ID NO: 137057 - DNA, 25 bp, Canis familiaris
gtagcatttgcttggatccaggaaa

SEQ ID NO: 137058 - DNA, 25 bp, Canis familiaris
gtagcatatctgttcctgcatcagc

SEQ ID NO: 137059 - DNA, 25 bp, Canis familiaris
gtagctgatctgttatggcattcac

SEQ ID NO: 137060 - DNA, 25 bp, Canis familiaris
gtaccaggcctaaagctgggcaccc

SEQ ID NO: 137061 - DNA, 25 bp, Canis familiaris
gtactcactgcagtactacatgggc

SEQ ID NO: 137062 - DNA, 25 bp, Canis familiaris
gtaccttggtgaaatctgtggccaa

SEQ ID NO: 137063 - DNA, 25 bp, Canis familiaris
gtacatttggtattgtttgaccctt

SEQ ID NO: 137064 - DNA, 25 bp, Canis familiaris
gtactctagggtattcaacctctgt

SEQ ID NO: 137065 - DNA, 25 bp, Canis familiaris
gtaccacaggtaacatccacacgtt

SEQ ID NO: 137066 - DNA, 25 bp, Canis familiaris
gtaataaagtgaagccaacgtgttt

SEQ ID NO: 137067 - DNA, 25 bp, Canis familiaris
gtaccaaaggagagaactgcattta

SEQ ID NO: 137068 - DNA, 25 bp, Canis familiaris
gtacctaccaagagcaactatgtgt

SEQ ID NO: 137069 - DNA, 25 bp, Canis familiaris
gtacttaccaggagcaacttatgtg

SEQ ID NO: 137070 - DNA, 25 bp, Canis familiaris
gtcacaacaaaagttaactcttggg

SEQ ID NO: 137071 - DNA, 25 bp, Canis familiaris
gtaccacagaacagtaactctcagt

SEQ ID NO: 137072 - DNA, 25 bp, Canis familiaris
gtacccaataatatggaccgcaatt

SEQ ID NO: 137073 - DNA, 25 bp, Canis familiaris
gtagctccagaattttgtgacaact

SEQ ID NO: 137074 - DNA, 25 bp, Canis familiaris
gtagcccaaacactttataattttg

SEQ ID NO: 137075 - DNA, 25 bp, Canis familiaris
gtagctataaacattttgtgccatt

SEQ ID NO: 137076 - DNA, 25 bp, Canis familiaris
gtagcttctaactattcttgctctc

SEQ ID NO: 137077 - DNA, 25 bp, Canis familiaris
gtaccttaaccttgtgactcagatc

SEQ ID NO: 137078 - DNA, 25 bp, Canis familiaris
gtactttaactatgtaatatgtcct

SEQ ID NO: 137079 - DNA, 25 bp, Canis familiaris
gtaccttacacatagtcttgtttat

SEQ ID NO: 137080 - DNA, 25 bp, Canis familiaris
gtaccgtgaacaacgtttctgtttg

SEQ ID NO: 137081 - DNA, 25 bp, Canis familiaris
gtagccggagaggtctgagtgcagg

SEQ ID NO: 137082 - DNA, 25 bp, Canis familiaris
gtagcgtggagagttgtgattggtg

SEQ ID NO: 137083 - DNA, 25 bp, Canis familiaris
gtagcttgctacattgtgtgtggaa

SEQ ID NO: 137084 - DNA, 25 bp, Canis familiaris
gtagcttgtgacatagtttcttgaa

SEQ ID NO: 137085 - DNA, 25 bp, Canis familiaris
gtacactgtcagctattttttcaga

SEQ ID NO: 137086 - DNA, 25 bp, Canis familiaris
gtacgcattcttgatttctgttggc

SEQ ID NO: 137087 - DNA, 25 bp, Canis familiaris
gtacgttcttgatgcatgttttaca

SEQ ID NO: 137088 - DNA, 25 bp, Canis familiaris
gtacgtactttgtttgtgttaagat

SEQ ID NO: 137089 - DNA, 25 bp, Canis familiaris
gtacgtacttgttaggattgtttgt

SEQ ID NO: 137090 - DNA, 25 bp, Canis familiaris
gtaccccattgaacatggcattgtt

SEQ ID NO: 137091 - DNA, 25 bp, Canis familiaris
gtcaccctttgacagtttgtaagaa

SEQ ID NO: 137092 - DNA, 25 bp, Canis familiaris
gtacctcctgtacagttttataatt

SEQ ID NO: 137093 - DNA, 25 bp, Canis familiaris
gtagcccacttaccattttattatg

SEQ ID NO: 137094 - DNA, 25 bp, Canis familiaris
gtagcctttttgcattttttgtttg

SEQ ID NO: 137095 - DNA, 25 bp, Canis familiaris
gtacctattgatatgtttttctcct

SEQ ID NO: 137096 - DNA, 25 bp, Canis familiaris
gtacgcttgtatatatgttccctct

SEQ ID NO: 137097 - DNA, 25 bp, Canis familiaris
gtcccgtttgtttttatgtccatag

SEQ ID NO: 137098 - DNA, 25 bp, Canis familiaris
gtaccgtcttgaggtttcagtctaa

SEQ ID NO: 137099 - DNA, 25 bp, Canis familiaris
gtacctggcaaagaattcggcaacc

SEQ ID NO: 137100 - DNA, 25 bp, Canis familiaris
gtcaccgggtcggaaatcccgatct

SEQ ID NO: 137101 - DNA, 25 bp, Canis familiaris
gtaccggtcacagaagacctcgcgc

SEQ ID NO: 137102 - DNA, 25 bp, Canis familiaris
gtaccggtggcacatagagcaccca

SEQ ID NO: 137103 - DNA, 25 bp, Canis familiaris
gtaccgggggagaatccgtctgacg

SEQ ID NO: 137104 - DNA, 25 bp, Canis familiaris
gtacctacgaggtcagattcttcga

SEQ ID NO: 137105 - DNA, 25 bp, Canis familiaris
gtacctgcacaacaacaagctggcg

SEQ ID NO: 137106 - DNA, 25 bp, Canis familiaris
gtagcatctcaaacataactcagtc

SEQ ID NO: 137107 - DNA, 25 bp, Canis familiaris
gtagagcatgcaattcttgatctca

SEQ ID NO: 137108 - DNA, 25 bp, Canis familiaris
gtaagtcatcagtatgctgaatcag

SEQ ID NO: 137109 - DNA, 25 bp, Canis familiaris
gtagatggagcagatgatgattcac

SEQ ID NO: 137110 - DNA, 25 bp, Canis familiaris
gtagaggaccaggtgtccactggta

SEQ ID NO: 137111 - DNA, 25 bp, Canis familiaris
gtagacgatccagtggttcctgtga

SEQ ID NO: 137112 - DNA, 25 bp, Canis familiaris
gtaccagaactgaagattccatggc

SEQ ID NO: 137113 - DNA, 25 bp, Canis familiaris
gtagccagagaggagcaaacctgtt

SEQ ID NO: 137114 - DNA, 25 bp, Canis familiaris
gtagccgggtaacagctatttgtcc

SEQ ID NO: 137115 - DNA, 25 bp, Canis familiaris
gtaccgggtgtgacgagctttggac

SEQ ID NO: 137116 - DNA, 25 bp, Canis familiaris
gtacccaggagtacagcatcttcgc

SEQ ID NO: 137117 - DNA, 25 bp, Canis familiaris
gtacccaggagggatccatggcagc

SEQ ID NO: 137118 - DNA, 25 bp, Canis familiaris
gtacccaggctggttcttgggctag

SEQ ID NO: 137119 - DNA, 25 bp, Canis familiaris
gtagcccagctgttgctttatgagt

SEQ ID NO: 137120 - DNA, 25 bp, Canis familiaris
gtaccgccacattgctgatttggct

SEQ ID NO: 137121 - DNA, 25 bp, Canis familiaris
gtagcacttacatgcttcttgactt

SEQ ID NO: 137122 - DNA, 25 bp, Canis familiaris
gtagcaaggtctagtttggactgcc

SEQ ID NO: 137123 - DNA, 25 bp, Canis familiaris
gtagcaaaatctaaagtggcactga

SEQ ID NO: 137124 - DNA, 25 bp, Canis familiaris
gtagctacctccaaagagcgcacac

SEQ ID NO: 137125 - DNA, 25 bp, Canis familiaris
gtagcataagcccaaggttgccctt

SEQ ID NO: 137126 - DNA, 25 bp, Canis familiaris
gtagcatagggctagcggtcgtcac

SEQ ID NO: 137127 - DNA, 25 bp, Canis familiaris
gtagagaagtgctcaggtcccatcc

SEQ ID NO: 137128 - DNA, 25 bp, Canis familiaris
gtagcaataagcacacctaccatcc

SEQ ID NO: 137129 - DNA, 25 bp, Canis familiaris
gtacaatgagacacagccggcttgc

SEQ ID NO: 137130 - DNA, 25 bp, Canis familiaris
gtacaaggtttcactagcttgagct

SEQ ID NO: 137131 - DNA, 25 bp, Canis familiaris
gtagccacgtgacacttagcctggc

SEQ ID NO: 137132 - DNA, 25 bp, Canis familiaris
gtaccgggcgatgcttgtgcctgag

SEQ ID NO: 137133 - DNA, 25 bp, Canis familiaris
gtaccaaggacagctcagaccagga

SEQ ID NO: 137134 - DNA, 25 bp, Canis familiaris
gtaccaacaggccctgggccagggt

SEQ ID NO: 137135 - DNA, 25 bp, Canis familiaris
gtaccaccaggccctaggtatagag

SEQ ID NO: 137136 - DNA, 25 bp, Canis familiaris
gtagccaccacacagcctgggtggc

SEQ ID NO: 137137 - DNA, 25 bp, Canis familiaris
gtagctcaccacaaacacgggaggc

SEQ ID NO: 137138 - DNA, 25 bp, Canis familiaris
gtagactcctaagtacagggtggct

SEQ ID NO: 137139 - DNA, 25 bp, Canis familiaris
gtaaatacttgggacagaggttgct

SEQ ID NO: 137140 - DNA, 25 bp, Canis familiaris
gtaaaatctctacaggggcttagta

SEQ ID NO: 137141 - DNA, 25 bp, Canis familiaris
gtaaattctttgcagtggtttaaga

SEQ ID NO: 137142 - DNA, 25 bp, Canis familiaris
gtagaaagttctcggtaggtataag

SEQ ID NO: 137143 - DNA, 25 bp, Canis familiaris
gtacacgaagttctttggatttcag

SEQ ID NO: 137144 - DNA, 25 bp, Canis familiaris
gtacctgggtggctcagtggtttag

SEQ ID NO: 137145 - DNA, 25 bp, Canis familiaris
gtacctgggtggctcagtggtttag

SEQ ID NO: 137146 - DNA, 25 bp, Canis familiaris
gtagcgcatgcgaatctgatctcag

SEQ ID NO: 137147 - DNA, 25 bp, Canis familiaris
gtagcagcagcagtaatgtgatcaa

SEQ ID NO: 137148 - DNA, 25 bp, Canis familiaris
gtagcagcagcatcagcagcaacaa

SEQ ID NO: 137149 - DNA, 25 bp, Canis familiaris
gtagcagagcaagccatcaagcatt

SEQ ID NO: 137150 - DNA, 25 bp, Canis familiaris
gtaaggcagcaggctgcgcataatt

SEQ ID NO: 137151 - DNA, 25 bp, Canis familiaris
gtagcaggctcggcgcagagcaaga

SEQ ID NO: 137152 - DNA, 25 bp, Canis familiaris
gtaagagctcggaggcaatcggacg

SEQ ID NO: 137153 - DNA, 25 bp, Canis familiaris
gtacgagtgcaagcccaacgagacg

SEQ ID NO: 137154 - DNA, 25 bp, Canis familiaris
ggatcgagtagaaaccaccaacgcc

SEQ ID NO: 137155 - DNA, 25 bp, Canis familiaris
gtagccgtagattgaccacaaacac

SEQ ID NO: 137156 - DNA, 25 bp, Canis familiaris
gtactggctgttgaccaccagacac

SEQ ID NO: 137157 - DNA, 25 bp, Canis familiaris
gtacatacctatgtcaacactacag

SEQ ID NO: 137158 - DNA, 25 bp, Canis familiaris
gtaaagacagacatacatacataca

SEQ ID NO: 137159 - DNA, 25 bp, Canis familiaris
gtagcaagaagaccacacacctgcc

SEQ ID NO: 137160 - DNA, 25 bp, Canis familiaris
gtactgaaaagcaacgccttccaac

SEQ ID NO: 137161 - DNA, 25 bp, Canis familiaris
gtactgaaaagaacctcccactcac

SEQ ID NO: 137162 - DNA, 25 bp, Canis familiaris
gtacttgaaaacacagctccatccc

SEQ ID NO: 137163 - DNA, 25 bp, Canis familiaris
gtacaagtaacaccgactctcaacc

SEQ ID NO: 137164 - DNA, 25 bp, Canis familiaris
gtacacctacgacggaatacaacca

SEQ ID NO: 137165 - DNA, 25 bp, Canis familiaris
gtacagagtacgaagcaaaacacaa

SEQ ID NO: 137166 - DNA, 25 bp, Canis familiaris
gtaccaaatctccaaaacacacaca

SEQ ID NO: 137167 - DNA, 25 bp, Canis familiaris
gtacctaagcaccaaaagcctcaag

SEQ ID NO: 137168 - DNA, 25 bp, Canis familiaris
gtacttatgagacttaaacccattt

SEQ ID NO: 137169 - DNA, 25 bp, Canis familiaris
gtcacctctaagtgaagacccagtt

SEQ ID NO: 137170 - DNA, 25 bp, Canis familiaris
gtacccgaagaatgaacccgaagag

SEQ ID NO: 137171 - DNA, 25 bp, Canis familiaris
ggaaccgaaggtgaactgcactggg

SEQ ID NO: 137172 - DNA, 25 bp, Canis familiaris
gtacaccagacacggaaacgccggg

SEQ ID NO: 137173 - DNA, 25 bp, Canis familiaris
gtacacagcatgttgggtagccctc

SEQ ID NO: 137174 - DNA, 25 bp, Canis familiaris
gtacatcatctatggcatgtacttc

SEQ ID NO: 137175 - DNA, 25 bp, Canis familiaris
gtactgtccaagtcagtccttgggt

SEQ ID NO: 137176 - DNA, 25 bp, Canis familiaris
gtacttcctcaatgtctttgggctt

SEQ ID NO: 137177 - DNA, 25 bp, Canis familiaris
gtactgtcattatagtctctctcgt

SEQ ID NO: 137178 - DNA, 25 bp, Canis familiaris
gtactcttctgatagttcctctatt

SEQ ID NO: 137179 - DNA, 25 bp, Canis familiaris
gtagcttttaattctgtgcctcttc

SEQ ID NO: 137180 - DNA, 25 bp, Canis familiaris
gtagcttttaatgttgcacctctcc

SEQ ID NO: 137181 - DNA, 25 bp, Canis familiaris
gtagctgtttaaaactcgtatccct

SEQ ID NO: 137182 - DNA, 25 bp, Canis familiaris
gtaaatttcacagaccaatacccat

SEQ ID NO: 137183 - DNA, 25 bp, Canis familiaris
gtagccatttgatgtaaagtactta

SEQ ID NO: 137184 - DNA, 25 bp, Canis familiaris
gtagccttgttgtttatagattctt

SEQ ID NO: 137185 - DNA, 25 bp, Canis familiaris
gtaccactggagtttataatgttac

SEQ ID NO: 137186 - DNA, 25 bp, Canis familiaris
gtacgcctgaagccttacacgtaag

SEQ ID NO: 137187 - DNA, 25 bp, Canis familiaris
gtaccattggcagcattaccttaat

SEQ ID NO: 137188 - DNA, 25 bp, Canis familiaris
gtacctatgtgctcttatccttaga

SEQ ID NO: 137189 - DNA, 25 bp, Canis familiaris
gtaccaatgtctgcagttacaatgg

SEQ ID NO: 137190 - DNA, 25 bp, Canis familiaris
gtaccaatgtactgctttcaactta

SEQ ID NO: 137191 - DNA, 25 bp, Canis familiaris
gtactaattctctgggtcaacccac

SEQ ID NO: 137192 - DNA, 25 bp, Canis familiaris
gtactaattctctgggtcaacccac

SEQ ID NO: 137193 - DNA, 25 bp, Canis familiaris
gtacttttcaagtgttcagtccttc

SEQ ID NO: 137194 - DNA, 25 bp, Canis familiaris
gtaaggttcaactgataatttcttc

SEQ ID NO: 137195 - DNA, 25 bp, Canis familiaris
gtaaagtgtaacccagatttgtgtt

SEQ ID NO: 137196 - DNA, 25 bp, Canis familiaris
gtaaatgaaaccccagatttgtgtt

SEQ ID NO: 137197 - DNA, 25 bp, Canis familiaris
gtagcaagaaatactccgtactggt

SEQ ID NO: 137198 - DNA, 25 bp, Canis familiaris
gtctgaaaagtttcctgcccaggta

SEQ ID NO: 137199 - DNA, 25 bp, Canis familiaris
tcttggtgacgttgacccgtaggtg

SEQ ID NO: 137200 - DNA, 25 bp, Canis familiaris
gtagaatgtcgttacccgttgagtg

SEQ ID NO: 137201 - DNA, 25 bp, Canis familiaris
gtacgtctcgtatacgcggatagtg

SEQ ID NO: 137202 - DNA, 25 bp, Canis familiaris
gtacgttgggaggtctaaataagca

SEQ ID NO: 137203 - DNA, 25 bp, Canis familiaris
gtagcagttgggtcctctttgataa

SEQ ID NO: 137204 - DNA, 25 bp, Canis familiaris
gtgtagttcggtgctttgttcaaag

SEQ ID NO: 137205 - DNA, 25 bp, Canis familiaris
gtaaataggagcgacgttgtacaaa

SEQ ID NO: 137206 - DNA, 25 bp, Canis familiaris
gtacctaggacttcgggatcatcat

SEQ ID NO: 137207 - DNA, 25 bp, Canis familiaris
gtaactcggccttcggatatggctc

SEQ ID NO: 137208 - DNA, 25 bp, Canis familiaris
gtaactagacctgtgggatttctgc

SEQ ID NO: 137209 - DNA, 25 bp, Canis familiaris
gtaaaagatcgcgccggattattgc

SEQ ID NO: 137210 - DNA, 25 bp, Canis familiaris
gtacttatacctgcctggattgttc

SEQ ID NO: 137211 - DNA, 25 bp, Canis familiaris
gtagctggagtcttacccagattga

SEQ ID NO: 137212 - DNA, 25 bp, Canis familiaris
gtagctaatgtcatcacgtcagaga

SEQ ID NO: 137213 - DNA, 25 bp, Canis familiaris
gtagctcagagccattgttgtctaa

SEQ ID NO: 137214 - DNA, 25 bp, Canis familiaris
gtagccactgagatttgctctcacc

SEQ ID NO: 137215 - DNA, 25 bp, Canis familiaris
gtaccagatcagctttctgtctcgt

SEQ ID NO: 137216 - DNA, 25 bp, Canis familiaris
gtacgcaaaggctttctattcggta

SEQ ID NO: 137217 - DNA, 25 bp, Canis familiaris
gtaccaatagtatttctgactggac

SEQ ID NO: 137218 - DNA, 25 bp, Canis familiaris
gtactcaatcacaagccttgcctag

SEQ ID NO: 137219 - DNA, 25 bp, Canis familiaris
gtagcataagcagcagctttcccag

SEQ ID NO: 137220 - DNA, 25 bp, Canis familiaris
gtagcagtactgtcctgtgattaca

SEQ ID NO: 137221 - DNA, 25 bp, Canis familiaris
gtagcatgcatcattccttggctga

SEQ ID NO: 137222 - DNA, 25 bp, Canis familiaris
gtagcagagcagctccctcgctgcg

SEQ ID NO: 137223 - DNA, 25 bp, Canis familiaris
gtagcagagcagccacagagcttct

SEQ ID NO: 137224 - DNA, 25 bp, Canis familiaris
gtagcatgaggttcatctgcatttt

SEQ ID NO: 137225 - DNA, 25 bp, Canis familiaris
gtagctaggtcttctgttcttatct

SEQ ID NO: 137226 - DNA, 25 bp, Canis familiaris
gtactaccttgtattctgatgccaa

SEQ ID NO: 137227 - DNA, 25 bp, Canis familiaris
gtaccagcctgcttttttgtacaaa

SEQ ID NO: 137228 - DNA, 25 bp, Canis familiaris
gtactgcagcggcggtgggtaatta

SEQ ID NO: 137229 - DNA, 25 bp, Canis familiaris
gtaccagggagtggtggtgtactcc

SEQ ID NO: 137230 - DNA, 25 bp, Canis familiaris
gtacgcgtatggacttggcttgaat

SEQ ID NO: 137231 - DNA, 25 bp, Canis familiaris
gtagctttgtggatgtgcctctgtt

SEQ ID NO: 137232 - DNA, 25 bp, Canis familiaris
gtagccagattgaagtgtgcctagt

SEQ ID NO: 137233 - DNA, 25 bp, Canis familiaris
gtagcataattgtggtctgtcgtga

SEQ ID NO: 137234 - DNA, 25 bp, Canis familiaris
gtagcaactgtgtgttatacaatgt

SEQ ID NO: 137235 - DNA, 25 bp, Canis familiaris
gtacagactggattcgtcacaaagt

SEQ ID NO: 137236 - DNA, 25 bp, Canis familiaris
gtagcagtatagaccgactaacagt

SEQ ID NO: 137237 - DNA, 25 bp, Canis familiaris
gtagccctagccagagatgaagcag

SEQ ID NO: 137238 - DNA, 25 bp, Canis familiaris
gtactactgtgccctgagagatcga

SEQ ID NO: 137239 - DNA, 25 bp, Canis familiaris
gtacatcagttctctggaatccgcc

SEQ ID NO: 137240 - DNA, 25 bp, Canis familiaris
gtacatcagttctctggaatccgcc

SEQ ID NO: 137241 - DNA, 25 bp, Canis familiaris
gtacatcagttctctggaatccgcc

SEQ ID NO: 137242 - DNA, 25 bp, Canis familiaris
gtagcagcaatttccacaattgccc

SEQ ID NO: 137243 - DNA, 25 bp, Canis familiaris
gtagcacaatttccacactgtgaag

SEQ ID NO: 137244 - DNA, 25 bp, Canis familiaris
gtagcaacaggacccaatggacagg

SEQ ID NO: 137245 - DNA, 25 bp, Canis familiaris
gtacgaggggccatatgcagacagc

SEQ ID NO: 137246 - DNA, 25 bp, Canis familiaris
gtacaagggtcccgataggcaccac

SEQ ID NO: 137247 - DNA, 25 bp, Canis familiaris
gtacgcaggagtgcgtctcggacgc

SEQ ID NO: 137248 - DNA, 25 bp, Canis familiaris
gtacatggtggtgttctgggacggg

SEQ ID NO: 137249 - DNA, 25 bp, Canis familiaris
gtacaggctgggtttctaacagggt

SEQ ID NO: 137250 - DNA, 25 bp, Canis familiaris
gtacggccgtgcttatacattcggg

SEQ ID NO: 137251 - DNA, 25 bp, Canis familiaris
gtacggtctggacaacttcgacacc

SEQ ID NO: 137252 - DNA, 25 bp, Canis familiaris
gtactacttgggtgactaccacagt

SEQ ID NO: 137253 - DNA, 25 bp, Canis familiaris
gtacctcaggtgcggactcaaaagt

SEQ ID NO: 137254 - DNA, 25 bp, Canis familiaris
gtacctcaggtgcagagacccgagt

SEQ ID NO: 137255 - DNA, 25 bp, Canis familiaris
gtaccctggttcattcccagagtag

SEQ ID NO: 137256 - DNA, 25 bp, Canis familiaris
gtagccctggttatggaggaggaag

SEQ ID NO: 137257 - DNA, 25 bp, Canis familiaris
gtagccgttactatggggccaaagg

SEQ ID NO: 137258 - DNA, 25 bp, Canis familiaris
gtaccgtttctacttggattgcaaa

SEQ ID NO: 137259 - DNA, 25 bp, Canis familiaris
gtagccgtgttggagtcagtgttgc

SEQ ID NO: 137260 - DNA, 25 bp, Canis familiaris
gtagcagcccttcagctagtgtatc

SEQ ID NO: 137261 - DNA, 25 bp, Canis familiaris
gtagcagagtctattctcaattaca

SEQ ID NO: 137262 - DNA, 25 bp, Canis familiaris
gtagcatttttttcactattagaat

SEQ ID NO: 137263 - DNA, 25 bp, Canis familiaris
gtagcctttcttactcttgttgaat

SEQ ID NO: 137264 - DNA, 25 bp, Canis familiaris
gtagcttattctgattatagctgtg

SEQ ID NO: 137265 - DNA, 25 bp, Canis familiaris
gtacatttgtctgcataactctgga

SEQ ID NO: 137266 - DNA, 25 bp, Canis familiaris
gtagcctttcttaatatgcacataa

SEQ ID NO: 137267 - DNA, 25 bp, Canis familiaris
gtacttttgtatttagccaagatgt

SEQ ID NO: 137268 - DNA, 25 bp, Canis familiaris
gtagctggtgctaaacttccaagtg

SEQ ID NO: 137269 - DNA, 25 bp, Canis familiaris
gtactgggcctaatcgctacaagcc

SEQ ID NO: 137270 - DNA, 25 bp, Canis familiaris
gtacggacgtgatcgggcacacggt

SEQ ID NO: 137271 - DNA, 25 bp, Canis familiaris
gtagcgggcagggtagggcccaggc

SEQ ID NO: 137272 - DNA, 25 bp, Canis familiaris
gtagctcggagtgggagcaggcccc

SEQ ID NO: 137273 - DNA, 25 bp, Canis familiaris
gtagctagaaagtgcggcagccctc

SEQ ID NO: 137274 - DNA, 25 bp, Canis familiaris
gtagctggaaggtgtggcagcacta

SEQ ID NO: 137275 - DNA, 25 bp, Canis familiaris
gtagctgtgcagactgagtgtggcc

SEQ ID NO: 137276 - DNA, 25 bp, Canis familiaris
gtagctgtctgtccagtgctacacc

SEQ ID NO: 137277 - DNA, 25 bp, Canis familiaris
gtacgctctgtgaaggctgtgcagc

SEQ ID NO: 137278 - DNA, 25 bp, Canis familiaris
gtacgtgctgaagcagcttgcacag

SEQ ID NO: 137279 - DNA, 25 bp, Canis familiaris
gtagccgtgacagcacatcatcagc

SEQ ID NO: 137280 - DNA, 25 bp, Canis familiaris
gtagcaggcacattgtcctctgagc

SEQ ID NO: 137281 - DNA, 25 bp, Canis familiaris
gtagcatggaggttgcactgtgcag

SEQ ID NO: 137282 - DNA, 25 bp, Canis familiaris
gtacatgtgcattcttcctggagct

SEQ ID NO: 137283 - DNA, 25 bp, Canis familiaris
gtagctgttcctgcatgtggatgct

SEQ ID NO: 137284 - DNA, 25 bp, Canis familiaris
gtagctgttccagtgatgtattctg

SEQ ID NO: 137285 - DNA, 25 bp, Canis familiaris
gtagcatcattggatttgcatttag

SEQ ID NO: 137286 - DNA, 25 bp, Canis familiaris
gtactcatgtggtcagaatttgctg

SEQ ID NO: 137287 - DNA, 25 bp, Canis familiaris
gtactcgggcattgaatttggggtt

SEQ ID NO: 137288 - DNA, 25 bp, Canis familiaris
gtactgtgggataccctgtggtgtg

SEQ ID NO: 137289 - DNA, 25 bp, Canis familiaris
gtaccgggacacggtgtgtggctgc

SEQ ID NO: 137290 - DNA, 25 bp, Canis familiaris
gtagcctgggaagtggggtagagct

SEQ ID NO: 137291 - DNA, 25 bp, Canis familiaris
gtacctgtaaacattgtggagagct

SEQ ID NO: 137292 - DNA, 25 bp, Canis familiaris
gtacctgcaaatttgtgggaggact

SEQ ID NO: 137293 - DNA, 25 bp, Canis familiaris
gtaccctatgtggatggggggctcc

SEQ ID NO: 137294 - DNA, 25 bp, Canis familiaris
gtaccatttctggggtggccccagc

SEQ ID NO: 137295 - DNA, 25 bp, Canis familiaris
gtaccattctccaagttaacctgac

SEQ ID NO: 137296 - DNA, 25 bp, Canis familiaris
gtaccattctccatctgtacattct

SEQ ID NO: 137297 - DNA, 25 bp, Canis familiaris
gtaccagctctattatttgacctct

SEQ ID NO: 137298 - DNA, 25 bp, Canis familiaris
gtgactaccaagtcttctagcccat

SEQ ID NO: 137299 - DNA, 25 bp, Canis familiaris
gtagcattccaaattgtaagccctt

SEQ ID NO: 137300 - DNA, 25 bp, Canis familiaris
gtacatccttagagtagagctgact

SEQ ID NO: 137301 - DNA, 25 bp, Canis familiaris
gtacatgtcgaatggtcagcgctga

SEQ ID NO: 137302 - DNA, 25 bp, Canis familiaris
gtacgtcagatcactgatcacctgc

SEQ ID NO: 137303 - DNA, 25 bp, Canis familiaris
gtacgcatggaccttgacgagcagc

SEQ ID NO: 137304 - DNA, 25 bp, Canis familiaris
gtactgcagtgggcttaagactcaa

SEQ ID NO: 137305 - DNA, 25 bp, Canis familiaris
gtagccaggcatactctagacagta

SEQ ID NO: 137306 - DNA, 25 bp, Canis familiaris
gtaccagcgcatgccttggaaagac

SEQ ID NO: 137307 - DNA, 25 bp, Canis familiaris
gtcaccccatgtgtgtccaaatgaa

SEQ ID NO: 137308 - DNA, 25 bp, Canis familiaris
gtacctgcctggctcagtcaaaaaa

SEQ ID NO: 137309 - DNA, 25 bp, Canis familiaris
gtacctctctagctttaacaaaaca

SEQ ID NO: 137310 - DNA, 25 bp, Canis familiaris
gtaccttctatgcttgtcaaacgat

SEQ ID NO: 137311 - DNA, 25 bp, Canis familiaris
gtaccttttgtatgtgagacactgt

SEQ ID NO: 137312 - DNA, 25 bp, Canis familiaris
gtacagcagttctcttggaatccgt

SEQ ID NO: 137313 - DNA, 25 bp, Canis familiaris
gtacatgcaatcgcctgtggtagcc

SEQ ID NO: 137314 - DNA, 25 bp, Canis familiaris
gtagcccattcagctgctggtgatc

SEQ ID NO: 137315 - DNA, 25 bp, Canis familiaris
gtagcgacttaggtgtgaggattgc

SEQ ID NO: 137316 - DNA, 25 bp, Canis familiaris
gtagccattccgagagatggcattc

SEQ ID NO: 137317 - DNA, 25 bp, Canis familiaris
gtgtccgtcacgtgaaggattaaaa

SEQ ID NO: 137318 - DNA, 25 bp, Canis familiaris
gtcccttccagatacccattaaaga

SEQ ID NO: 137319 - DNA, 25 bp, Canis familiaris
gtcaactgtgcccaaaggccttaca

SEQ ID NO: 137320 - DNA, 25 bp, Canis familiaris
gtacccgccagaaatggacttgccc

SEQ ID NO: 137321 - DNA, 25 bp, Canis familiaris
gtacccctgagaaatgtgcaatagc

SEQ ID NO: 137322 - DNA, 25 bp, Canis familiaris
gtacccctaccaaggatatccacag

SEQ ID NO: 137323 - DNA, 25 bp, Canis familiaris
gtagctgccctagaggggctcagaa

SEQ ID NO: 137324 - DNA, 25 bp, Canis familiaris
gtagctgccctagatggggtctcag

SEQ ID NO: 137325 - DNA, 25 bp, Canis familiaris
gtactcccacagttgagagtctctc

SEQ ID NO: 137326 - DNA, 25 bp, Canis familiaris
gtacttgcacaaggaaggatcttca

SEQ ID NO: 137327 - DNA, 25 bp, Canis familiaris
gtagcttaacatatatctcacttca

SEQ ID NO: 137328 - DNA, 25 bp, Canis familiaris
gtagctctaactaaatgtatttacc

SEQ ID NO: 137329 - DNA, 25 bp, Canis familiaris
gtagcctggagcctaagttttagca

SEQ ID NO: 137330 - DNA, 25 bp, Canis familiaris
gtacctggtgttcggttatggagcc

SEQ ID NO: 137331 - DNA, 25 bp, Canis familiaris
gtagcctggtcttcatggctgtatg

SEQ ID NO: 137332 - DNA, 25 bp, Canis familiaris
gtacctgtgtctcttgtgtacacag

SEQ ID NO: 137333 - DNA, 25 bp, Canis familiaris
gtacctgttgatgtctcctgacaca

SEQ ID NO: 137334 - DNA, 25 bp, Canis familiaris
gtaaatattgatgcccctgaacttc

SEQ ID NO: 137335 - DNA, 25 bp, Canis familiaris
gtactttgaggacccactgactttc

SEQ ID NO: 137336 - DNA, 25 bp, Canis familiaris
gtagctttgaaatctcttacttact

SEQ ID NO: 137337 - DNA, 25 bp, Canis familiaris
gtacttccaattttttatgtctaat

SEQ ID NO: 137338 - DNA, 25 bp, Canis familiaris
gtagctctgtcatttgtcctatatg

SEQ ID NO: 137339 - DNA, 25 bp, Canis familiaris
gtagccatttgttgacactatatac

SEQ ID NO: 137340 - DNA, 25 bp, Canis familiaris
gtaccatgattaaccttcatatact

SEQ ID NO: 137341 - DNA, 25 bp, Canis familiaris
gtaccatatactaccatatactact

SEQ ID NO: 137342 - DNA, 25 bp, Canis familiaris
gtacgatatatcccttagagtgacc

SEQ ID NO: 137343 - DNA, 25 bp, Canis familiaris
gtgacgctaatacaatacaggactc

SEQ ID NO: 137344 - DNA, 25 bp, Canis familiaris
gtacagctaagctgagctaaggagt

SEQ ID NO: 137345 - DNA, 25 bp, Canis familiaris
gtagcctgaacagagccacagaagg

SEQ ID NO: 137346 - DNA, 25 bp, Canis familiaris
gtagccgactgcatcagatccaaag

SEQ ID NO: 137347 - DNA, 25 bp, Canis familiaris
gtactcgttcctgatgcacacaggg

SEQ ID NO: 137348 - DNA, 25 bp, Canis familiaris
gtagcggttgccgaagcgcaagtgc

SEQ ID NO: 137349 - DNA, 25 bp, Canis familiaris
gtactgagtacctaagtcatgagtt

SEQ ID NO: 137350 - DNA, 25 bp, Canis familiaris
gtactggtaaaatattgtgtgttgt

SEQ ID NO: 137351 - DNA, 25 bp, Canis familiaris
gtacatgatgtcacaactaaatggt

SEQ ID NO: 137352 - DNA, 25 bp, Canis familiaris
gtaccagccaccagtaatatggatg

SEQ ID NO: 137353 - DNA, 25 bp, Canis familiaris
gtacgcagccacctgggaggctggc

SEQ ID NO: 137354 - DNA, 25 bp, Canis familiaris
gtaccagctgcctgagtactgtggc

SEQ ID NO: 137355 - DNA, 25 bp, Canis familiaris
gtactcgctggaagagtgcctcgag

SEQ ID NO: 137356 - DNA, 25 bp, Canis familiaris
gtactctgctgtgaagtggctggaa

SEQ ID NO: 137357 - DNA, 25 bp, Canis familiaris
gtaactcggtcatgtgccgtgacat

SEQ ID NO: 137358 - DNA, 25 bp, Canis familiaris
gtacgctgggtgtggccgataatgc

SEQ ID NO: 137359 - DNA, 25 bp, Canis familiaris
gtacctggtgcgcgagagcgtatcc

SEQ ID NO: 137360 - DNA, 25 bp, Canis familiaris
gtacctgtgggaagaggagtcatgc

SEQ ID NO: 137361 - DNA, 25 bp, Canis familiaris
gtacggaacaaactgatggtcatgc

SEQ ID NO: 137362 - DNA, 25 bp, Canis familiaris
gtaccagactcattcattagctttc

SEQ ID NO: 137363 - DNA, 25 bp, Canis familiaris
gtaccatgcctttcatgttctgcaa

SEQ ID NO: 137364 - DNA, 25 bp, Canis familiaris
gtagccatacttatattagacaaac

SEQ ID NO: 137365 - DNA, 25 bp, Canis familiaris
gtagcctactacaagtgtcaaaaac

SEQ ID NO: 137366 - DNA, 25 bp, Canis familiaris
gtagccaactaactctgtcattaaa

SEQ ID NO: 137367 - DNA, 25 bp, Canis familiaris
gtagccaacgcaagtcttacgaaaa

SEQ ID NO: 137368 - DNA, 25 bp, Canis familiaris
tggtcgagcgatggatttccgtctc

SEQ ID NO: 137369 - DNA, 25 bp, Canis familiaris
atggatttccgtctctggtgtagct

SEQ ID NO: 137370 - DNA, 25 bp, Canis familiaris
gtctctggtgtagctgatgatccga

SEQ ID NO: 137371 - DNA, 25 bp, Canis familiaris
tgtagctgatgatccgaataactac

SEQ ID NO: 137372 - DNA, 25 bp, Canis familiaris
accagccagctatcaactcgcgccc

SEQ ID NO: 137373 - DNA, 25 bp, Canis familiaris
gcaactcatcgattgatttacggcg

SEQ ID NO: 137374 - DNA, 25 bp, Canis familiaris
gattgatttacggcgctaaggatga

SEQ ID NO: 137375 - DNA, 25 bp, Canis familiaris
taaggatgactctggtcagagatac

SEQ ID NO: 137376 - DNA, 25 bp, Canis familiaris
tggtcagagatacctggcctggtct

SEQ ID NO: 137377 - DNA, 25 bp, Canis familiaris
ctggtctggacacagtgcccgtgtc

SEQ ID NO: 137378 - DNA, 25 bp, Canis familiaris
gtgcccgtgtcggagccgcgcgaga

SEQ ID NO: 137379 - DNA, 25 bp, Canis familiaris
cgagatatggcccgcgctggagttt

SEQ ID NO: 137380 - DNA, 25 bp, Canis familiaris
ggagtttcaataccggagatcatgc

SEQ ID NO: 137381 - DNA, 25 bp, Canis familiaris
ggagatcatgcaagctggtggctgg

SEQ ID NO: 137382 - DNA, 25 bp, Canis familiaris
ctggtggctggaccaatgtaaatat

SEQ ID NO: 137383 - DNA, 25 bp, Canis familiaris
ccaatgtaaatattgtcatgaacta

SEQ ID NO: 137384 - DNA, 25 bp, Canis familiaris
ttgtcatgaactatatccgtaacct

SEQ ID NO: 137385 - DNA, 25 bp, Canis familiaris
tagtgaaacaggggcaatggtgcgc

SEQ ID NO: 137386 - DNA, 25 bp, Canis familiaris
gtaccatgtgctggagcatctattt

SEQ ID NO: 137387 - DNA, 25 bp, Canis familiaris
gtacgcatgtgagaacttgttgtcc

SEQ ID NO: 137388 - DNA, 25 bp, Canis familiaris
gtacgtggcaagtgcctgtgttcca

SEQ ID NO: 137389 - DNA, 25 bp, Canis familiaris
gtacttagcacagcacctgttaccc

SEQ ID NO: 137390 - DNA, 25 bp, Canis familiaris
gtacctagtcaagatctgtcgtcca

SEQ ID NO: 137391 - DNA, 25 bp, Canis familiaris
gtacctaattttttgttgatcacat

SEQ ID NO: 137392 - DNA, 25 bp, Canis familiaris
gtagccattatcatttctgttccac

SEQ ID NO: 137393 - DNA, 25 bp, Canis familiaris
gtaccatgtgtaatttgcatttcct

SEQ ID NO: 137394 - DNA, 25 bp, Canis familiaris
gtaccagttgaagattttgctcata

SEQ ID NO: 137395 - DNA, 25 bp, Canis familiaris
gtactcagttggacagcttttgtat

SEQ ID NO: 137396 - DNA, 25 bp, Canis familiaris
gtaccatattggtcgctgtgggtct

SEQ ID NO: 137397 - DNA, 25 bp, Canis familiaris
gtaaattcggatgctggggccttca

SEQ ID NO: 137398 - DNA, 25 bp, Canis familiaris
gtaaattgggcgagtgggacatgtt

SEQ ID NO: 137399 - DNA, 25 bp, Canis familiaris
gtaagtctcagggtccaggggaggt

SEQ ID NO: 137400 - DNA, 25 bp, Canis familiaris
gtaaatcctgtaagaatgggcatgg

SEQ ID NO: 137401 - DNA, 25 bp, Canis familiaris
gtacgacttgtcttatctgggtgag

SEQ ID NO: 137402 - DNA, 25 bp, Canis familiaris
gtacgttgtttggattcgtgtgtgg

SEQ ID NO: 137403 - DNA, 25 bp, Canis familiaris
gtactgtctctcagccaattaaggg

SEQ ID NO: 137404 - DNA, 25 bp, Canis familiaris
gtagctgtcccagaagtctcaagca

SEQ ID NO: 137405 - DNA, 25 bp, Canis familiaris
gtactggcaccccagtgttcatagc

SEQ ID NO: 137406 - DNA, 25 bp, Canis familiaris
gtactgtccgcaaggttcatgtgac

SEQ ID NO: 137407 - DNA, 25 bp, Canis familiaris
gtagcccttctactgatgagcagtg

SEQ ID NO: 137408 - DNA, 25 bp, Canis familiaris
gtagcctctgttttgaggaggtgga

SEQ ID NO: 137409 - DNA, 25 bp, Canis familiaris
gtacctgctttgtggacagcttgga

SEQ ID NO: 137410 - DNA, 25 bp, Canis familiaris
gtactctgctttgtgaggtgctggg

SEQ ID NO: 137411 - DNA, 25 bp, Canis familiaris
gtaccagttccgtcagaggcggtgg

SEQ ID NO: 137412 - DNA, 25 bp, Canis familiaris
gtaaagttcgtgtagggctgttgtc

SEQ ID NO: 137413 - DNA, 25 bp, Canis familiaris
gtaaagtggggcttcactctgtggt

SEQ ID NO: 137414 - DNA, 25 bp, Canis familiaris
gtacacggttagatcctttggtatc

SEQ ID NO: 137415 - DNA, 25 bp, Canis familiaris
gtacacggttagatcctttggtatc

SEQ ID NO: 137416 - DNA, 25 bp, Canis familiaris
gtacacggttagatcctttggtatc

SEQ ID NO: 137417 - DNA, 25 bp, Canis familiaris
gtcaaccgtttgatctcggcttttc

SEQ ID NO: 137418 - DNA, 25 bp, Canis familiaris
gtcaaattctttattagatttttct

SEQ ID NO: 137419 - DNA, 25 bp, Canis familiaris
gtaagtttttccacagacttgtatt

SEQ ID NO: 137420 - DNA, 25 bp, Canis familiaris
tgtaactttttataaacatttcttg

SEQ ID NO: 137421 - DNA, 25 bp, Canis familiaris
gtcacctttttatactaccttcagt

SEQ ID NO: 137422 - DNA, 25 bp, Canis familiaris
gtcactgttttattttaaccttcag

SEQ ID NO: 137423 - DNA, 25 bp, Canis familiaris
gtgacggttttatttactgccagta

SEQ ID NO: 137424 - DNA, 25 bp, Canis familiaris
gtaccttgtatatgcttgactccag

SEQ ID NO: 137425 - DNA, 25 bp, Canis familiaris
gtacctatggtccgcattgaactac

SEQ ID NO: 137426 - DNA, 25 bp, Canis familiaris
gtagccagggtccacattggccaag

SEQ ID NO: 137427 - DNA, 25 bp, Canis familiaris
gtagccagggtccacattggccaag

SEQ ID NO: 137428 - DNA, 25 bp, Canis familiaris
gtagccagggtccacattggccaag

SEQ ID NO: 137429 - DNA, 25 bp, Canis familiaris
gtacctggtgaaagctgtggccaag

SEQ ID NO: 137430 - DNA, 25 bp, Canis familiaris
gtacctgaagtgatggtgtgcccac

SEQ ID NO: 137431 - DNA, 25 bp, Canis familiaris
gtacctgaaagaatgttggccgctg

SEQ ID NO: 137432 - DNA, 25 bp, Canis familiaris
gtacgtaaaagagctctgcactgcc

SEQ ID NO: 137433 - DNA, 25 bp, Canis familiaris
gtacctggaacattatctagcacat

SEQ ID NO: 137434 - DNA, 25 bp, Canis familiaris
gtaccagcggattctacaagcacac

SEQ ID NO: 137435 - DNA, 25 bp, Canis familiaris
gtacctgccagaaccaaagaagctt

SEQ ID NO: 137436 - DNA, 25 bp, Canis familiaris
gtacccctgataacaacttagtata

SEQ ID NO: 137437 - DNA, 25 bp, Canis familiaris
gtacaccttaaccacactagaaaca

SEQ ID NO: 137438 - DNA, 25 bp, Canis familiaris
gtacaccgtacaggaacgaggagcc

SEQ ID NO: 137439 - DNA, 25 bp, Canis familiaris
gtaccgctgtactgactgtgattac

SEQ ID NO: 137440 - DNA, 25 bp, Canis familiaris
gtagcctcgctagtcaagctgtgaa

SEQ ID NO: 137441 - DNA, 25 bp, Canis familiaris
gtaccccaagctggcagctctgaac

SEQ ID NO: 137442 - DNA, 25 bp, Canis familiaris
gtactaccatgccaatgcagctctg

SEQ ID NO: 137443 - DNA, 25 bp, Canis familiaris
gtaccaggagcacatggcctacatc

SEQ ID NO: 137444 - DNA, 25 bp, Canis familiaris
gtactgggagatccaagccatcaca

SEQ ID NO: 137445 - DNA, 25 bp, Canis familiaris
gtacgagacagaccatcagacacca

SEQ ID NO: 137446 - DNA, 25 bp, Canis familiaris
gtaccaactgcatgccagacactgt

SEQ ID NO: 137447 - DNA, 25 bp, Canis familiaris
gtactcggatcagccaggacttttt

SEQ ID NO: 137448 - DNA, 25 bp, Canis familiaris
gtactcatgtaccccaatgttttta

SEQ ID NO: 137449 - DNA, 25 bp, Canis familiaris
gtacttgtactgcaataatttttca

SEQ ID NO: 137450 - DNA, 25 bp, Canis familiaris
gtactctgtttccctgaatgttgtt

SEQ ID NO: 137451 - DNA, 25 bp, Canis familiaris
gtacaagctttcccgagcttttgtc

SEQ ID NO: 137452 - DNA, 25 bp, Canis familiaris
gtacttgctttatggggttttccag

SEQ ID NO: 137453 - DNA, 25 bp, Canis familiaris
gtacttgtattttgcacgtggttta

SEQ ID NO: 137454 - DNA, 25 bp, Canis familiaris
gtactttgctttagaggtcagttac

SEQ ID NO: 137455 - DNA, 25 bp, Canis familiaris
gtacgtatgtgtttggaggattctc

SEQ ID NO: 137456 - DNA, 25 bp, Canis familiaris
gtacggctggtattaagtgctttaa

SEQ ID NO: 137457 - DNA, 25 bp, Canis familiaris
gtaccactggtattgatgagcctgt

SEQ ID NO: 137458 - DNA, 25 bp, Canis familiaris
gtacgcagatgcttacattgaagtt

SEQ ID NO: 137459 - DNA, 25 bp, Canis familiaris
gtacgatgatgctgcctgtgaggct

SEQ ID NO: 137460 - DNA, 25 bp, Canis familiaris
gtacgtagccatccaggctgtgctg

SEQ ID NO: 137461 - DNA, 25 bp, Canis familiaris
gtacgtagccatccaggctgtgctg

SEQ ID NO: 137462 - DNA, 25 bp, Canis familiaris
gtacgttgctatccaggctgtgcta

SEQ ID NO: 137463 - DNA, 25 bp, Canis familiaris
gtactgtggtacctctgtgtgtgag

SEQ ID NO: 137464 - DNA, 25 bp, Canis familiaris
gtacctggtactacatgggatagcc

SEQ ID NO: 137465 - DNA, 25 bp, Canis familiaris
gtacctagaaatactgctctaacac

SEQ ID NO: 137466 - DNA, 25 bp, Canis familiaris
gtacctgatgtcaattggtctcgag

SEQ ID NO: 137467 - DNA, 25 bp, Canis familiaris
gtaccatatgattttactctgctgg

SEQ ID NO: 137468 - DNA, 25 bp, Canis familiaris
gtacccagattttttcctgcttgtt

SEQ ID NO: 137469 - DNA, 25 bp, Canis familiaris
gtactacaattgtacttccttttgt

SEQ ID NO: 137470 - DNA, 25 bp, Canis familiaris
gtactatgacctgagactaattttg

SEQ ID NO: 137471 - DNA, 25 bp, Canis familiaris
gtacttggagctggatgacagacat

SEQ ID NO: 137472 - DNA, 25 bp, Canis familiaris
gtagccaggatctaacagcgcacat

SEQ ID NO: 137473 - DNA, 25 bp, Canis familiaris
gtacctggcacataaggcacatctg

SEQ ID NO: 137474 - DNA, 25 bp, Canis familiaris
gtaccaggagctcaaggccgtggtc

SEQ ID NO: 137475 - DNA, 25 bp, Canis familiaris
gtaccgagatgcagacggcctggtg

SEQ ID NO: 137476 - DNA, 25 bp, Canis familiaris
gtaccagagcaaaggcccaatggct

SEQ ID NO: 137477 - DNA, 25 bp, Canis familiaris
gtaccagaagagatgcctgcgtggc

SEQ ID NO: 137478 - DNA, 25 bp, Canis familiaris
gtagccagatcagtgtatcacctag

SEQ ID NO: 137479 - DNA, 25 bp, Canis familiaris
gtaccaaatatctatcacctactga

SEQ ID NO: 137480 - DNA, 25 bp, Canis familiaris
gtacctgcaatctcatcaactacta

SEQ ID NO: 137481 - DNA, 25 bp, Canis familiaris
gtacattcaatcaaacaccaaccaa

SEQ ID NO: 137482 - DNA, 25 bp, Canis familiaris
gtaaatccttacaccttcgcagaac

SEQ ID NO: 137483 - DNA, 25 bp, Canis familiaris
gtggaatcggtgttcgacttccgga

SEQ ID NO: 137484 - DNA, 25 bp, Canis familiaris
gtaaactggcgtaacctctcttgga

SEQ ID NO: 137485 - DNA, 25 bp, Canis familiaris
gtaccttctgggaacctatagtgcc

SEQ ID NO: 137486 - DNA, 25 bp, Canis familiaris
gtacctgttggtgcagtcctaaggc

SEQ ID NO: 137487 - DNA, 25 bp, Canis familiaris
gtacctgttgagcggtgtctaggcc

SEQ ID NO: 137488 - DNA, 25 bp, Canis familiaris
gtacagactttgcggtgttaagcac

SEQ ID NO: 137489 - DNA, 25 bp, Canis familiaris
gtactgactgatttggaggtttgga

SEQ ID NO: 137490 - DNA, 25 bp, Canis familiaris
gtaccaccaaatggcaggttgtcct

SEQ ID NO: 137491 - DNA, 25 bp, Canis familiaris
gtactaccagacatcggtctgggct

SEQ ID NO: 137492 - DNA, 25 bp, Canis familiaris
gtactaacgtgcattgagtcattgt

SEQ ID NO: 137493 - DNA, 25 bp, Canis familiaris
gtaccaagtggttcaagtatatata

SEQ ID NO: 137494 - DNA, 25 bp, Canis familiaris
gtaccaagctttgcagatcttttca

SEQ ID NO: 137495 - DNA, 25 bp, Canis familiaris
gtaccaagaggctcagtcacttagc

SEQ ID NO: 137496 - DNA, 25 bp, Canis familiaris
gtacagcccggagctgatcgttcac

SEQ ID NO: 137497 - DNA, 25 bp, Canis familiaris
gtacaaacttgtctatagtgtcacc

SEQ ID NO: 137498 - DNA, 25 bp, Canis familiaris
gtaccaccttgctggaagtctcatc

SEQ ID NO: 137499 - DNA, 25 bp, Canis familiaris
gtagccaacttggagcagctgatgc

SEQ ID NO: 137500 - DNA, 25 bp, Canis familiaris
gtagccagaggggacctatgtgcct

SEQ ID NO: 137501 - DNA, 25 bp, Canis familiaris
gtactgcaggggacatcgcctgcgc

SEQ ID NO: 137502 - DNA, 25 bp, Canis familiaris
gtagccagcgggactggacaggccc

SEQ ID NO: 137503 - DNA, 25 bp, Canis familiaris
gtagccagcagcagtctgggggtgc

SEQ ID NO: 137504 - DNA, 25 bp, Canis familiaris
gtaccagcagcagggccggctggac

SEQ ID NO: 137505 - DNA, 25 bp, Canis familiaris
gtacctcacaggaccagagtggccg

SEQ ID NO: 137506 - DNA, 25 bp, Canis familiaris
gtaccgcgtggagcaggtgggcgac

SEQ ID NO: 137507 - DNA, 25 bp, Canis familiaris
gtactccgtggagaagcgtgccaga

SEQ ID NO: 137508 - DNA, 25 bp, Canis familiaris
gtacattggtgaaaaagctgtggcg

SEQ ID NO: 137509 - DNA, 25 bp, Canis familiaris
gtaaatagttaaaatgcttgtgcag

SEQ ID NO: 137510 - DNA, 25 bp, Canis familiaris
gtacactatgttctagatcggtcag

SEQ ID NO: 137511 - DNA, 25 bp, Canis familiaris
gtaccaagcccactcgagggtagtc

SEQ ID NO: 137512 - DNA, 25 bp, Canis familiaris
gtacagaagccgccacaagggtgac

SEQ ID NO: 137513 - DNA, 25 bp, Canis familiaris
gtactacatcggcagcgacaggtcc

SEQ ID NO: 137514 - DNA, 25 bp, Canis familiaris
gtaccaccggaaggccgtgtgaggc

SEQ ID NO: 137515 - DNA, 25 bp, Canis familiaris
gtaccaggctgagaggcttctcggc

SEQ ID NO: 137516 - DNA, 25 bp, Canis familiaris
gtactcagtgtagaagcttctggca

SEQ ID NO: 137517 - DNA, 25 bp, Canis familiaris
gtacctgttcacgtgatctttgagt

SEQ ID NO: 137518 - DNA, 25 bp, Canis familiaris
gtaactgttatgctgatcttaggct

SEQ ID NO: 137519 - DNA, 25 bp, Canis familiaris
gtacctgtgtgtctgtggctgaggt

SEQ ID NO: 137520 - DNA, 25 bp, Canis familiaris
gtacctgtgtgtctgcggttttatc

SEQ ID NO: 137521 - DNA, 25 bp, Canis familiaris
gtacgctgtggaccgggcgtttgac

SEQ ID NO: 137522 - DNA, 25 bp, Canis familiaris
gtacctgtcaagccgttattcatta

SEQ ID NO: 137523 - DNA, 25 bp, Canis familiaris
gtacctgtacagagatttccaatat

SEQ ID NO: 137524 - DNA, 25 bp, Canis familiaris
gtacctgtcaccactttcaaaaatc

SEQ ID NO: 137525 - DNA, 25 bp, Canis familiaris
gtaccatccacgaacttcagcaaac

SEQ ID NO: 137526 - DNA, 25 bp, Canis familiaris
gtaccatcttcctgtgtcacaaaat

SEQ ID NO: 137527 - DNA, 25 bp, Canis familiaris
gtaccagatccatcggatgaaaaat

SEQ ID NO: 137528 - DNA, 25 bp, Canis familiaris
gtaccagtgccaagggggatgtcaa

SEQ ID NO: 137529 - DNA, 25 bp, Canis familiaris
gtacgagtcccggggaggccataag

SEQ ID NO: 137530 - DNA, 25 bp, Canis familiaris
gtacctgggccgggggaataatgag

SEQ ID NO: 137531 - DNA, 25 bp, Canis familiaris
gtacctggcacagtggttagaaaag

SEQ ID NO: 137532 - DNA, 25 bp, Canis familiaris
gtaacggaaatctttggaaccagca

SEQ ID NO: 137533 - DNA, 25 bp, Canis familiaris
gtaacgcgaaaccactcgagtcgat

SEQ ID NO: 137534 - DNA, 25 bp, Canis familiaris
gtaaaggataaacctctgaccagag

SEQ ID NO: 137535 - DNA, 25 bp, Canis familiaris
gtcagaagccaagaccacttcctgt

SEQ ID NO: 137536 - DNA, 25 bp, Canis familiaris
gtaccacgcatagagtcaaatcctt

SEQ ID NO: 137537 - DNA, 25 bp, Canis familiaris
gtacgactgtatgcttcaagatcct

SEQ ID NO: 137538 - DNA, 25 bp, Canis familiaris
gtactgatcattaatctgctcgaac

SEQ ID NO: 137539 - DNA, 25 bp, Canis familiaris
gtactatcgttgttgcagcagcaac

SEQ ID NO: 137540 - DNA, 25 bp, Canis familiaris
gtacttggatggtgcaatgctatca

SEQ ID NO: 137541 - DNA, 25 bp, Canis familiaris
gtacttttggcatgcaagcgtgcta

SEQ ID NO: 137542 - DNA, 25 bp, Canis familiaris
gtactctggttctagaacggccacc

SEQ ID NO: 137543 - DNA, 25 bp, Canis familiaris
gtacatggggctcagggtgaccccc

SEQ ID NO: 137544 - DNA, 25 bp, Canis familiaris
gtactggaagctctggttgtcctcg

SEQ ID NO: 137545 - DNA, 25 bp, Canis familiaris
gtacgagcacgtttactgtgtgtcc

SEQ ID NO: 137546 - DNA, 25 bp, Canis familiaris
gtacccatcgtatctctataatcgc

SEQ ID NO: 137547 - DNA, 25 bp, Canis familiaris
gtaccctagttccttgaatgtcaga

SEQ ID NO: 137548 - DNA, 25 bp, Canis familiaris
gtaccttttctccttgaatttcaca

SEQ ID NO: 137549 - DNA, 25 bp, Canis familiaris
gtaccttattctgtgttatatacct

SEQ ID NO: 137550 - DNA, 25 bp, Canis familiaris
gtacctgggtctgatttctaaattt

SEQ ID NO: 137551 - DNA, 25 bp, Canis familiaris
gtacctcgaactaatgtcttacaaa

SEQ ID NO: 137552 - DNA, 25 bp, Canis familiaris
gtacccgtgttcatgttctacaaca

SEQ ID NO: 137553 - DNA, 25 bp, Canis familiaris
gtacccggcattcattgtcaattta

SEQ ID NO: 137554 - DNA, 25 bp, Canis familiaris
gtacttcttgttcattaaatgttta

SEQ ID NO: 137555 - DNA, 25 bp, Canis familiaris
gtacctcttcctcacataaatattt

SEQ ID NO: 137556 - DNA, 25 bp, Canis familiaris
gtacaagctgtcattccaacaatag

SEQ ID NO: 137557 - DNA, 25 bp, Canis familiaris
gtacatagagtcatctatatggaaa

SEQ ID NO: 137558 - DNA, 25 bp, Canis familiaris
gtactgggatcaagccatgattaca

SEQ ID NO: 137559 - DNA, 25 bp, Canis familiaris
gtactgcagagtacagccagtatct

SEQ ID NO: 137560 - DNA, 25 bp, Canis familiaris
gtactgtcagtgccatgcctattta

SEQ ID NO: 137561 - DNA, 25 bp, Canis familiaris
gtactgtatgtttctctactgtatg

SEQ ID NO: 137562 - DNA, 25 bp, Canis familiaris
gtactgtatatttcaccctgtgtgc

SEQ ID NO: 137563 - DNA, 25 bp, Canis familiaris
gtactcttcatttccattgtggtgt

SEQ ID NO: 137564 - DNA, 25 bp, Canis familiaris
gtactcgaatctgctccttgcagtt

SEQ ID NO: 137565 - DNA, 25 bp, Canis familiaris
gtacttgatgacattcctggcaatt

SEQ ID NO: 137566 - DNA, 25 bp, Canis familiaris
gtacgggacatcatctatggcaagt

SEQ ID NO: 137567 - DNA, 25 bp, Canis familiaris
gtacgtgtacatcatctatggcatg

SEQ ID NO: 137568 - DNA, 25 bp, Canis familiaris
gtactggtcacatttctagtgctta

SEQ ID NO: 137569 - DNA, 25 bp, Canis familiaris
gtacatgggcaatttcatgatctca

SEQ ID NO: 137570 - DNA, 25 bp, Canis familiaris
gtactgtggcaggtgtatgcatctg

SEQ ID NO: 137571 - DNA, 25 bp, Canis familiaris
gtacttatgtggctactttgtccag

SEQ ID NO: 137572 - DNA, 25 bp, Canis familiaris
gtactttttcctttttgtcacagtg

SEQ ID NO: 137573 - DNA, 25 bp, Canis familiaris
gtactcttttaattttgtgccacgt

SEQ ID NO: 137574 - DNA, 25 bp, Canis familiaris
gtaccttcatttttttggacctgca

SEQ ID NO: 137575 - DNA, 25 bp, Canis familiaris
gtaccgtagttataccgatggcgaa

SEQ ID NO: 137576 - DNA, 25 bp, Canis familiaris
gtaccgggttaagtcagcagaggaa

SEQ ID NO: 137577 - DNA, 25 bp, Canis familiaris
gtaccggagttggattcacatggag

SEQ ID NO: 137578 - DNA, 25 bp, Canis familiaris
gtaccgatagtacgacttctggaga

SEQ ID NO: 137579 - DNA, 25 bp, Canis familiaris
gtactgagacagggtgctttcggga

SEQ ID NO: 137580 - DNA, 25 bp, Canis familiaris
gtacgagcactgattctgaactgtc

SEQ ID NO: 137581 - DNA, 25 bp, Canis familiaris
gtacgccctttaatgaaagtgcctc

SEQ ID NO: 137582 - DNA, 25 bp, Canis familiaris
gtacccactgttaagttggtggctc

SEQ ID NO: 137583 - DNA, 25 bp, Canis familiaris
gtactcccagtaagaattgcgactc

SEQ ID NO: 137584 - DNA, 25 bp, Canis familiaris
gtactaccagagcaactatgtgttc

SEQ ID NO: 137585 - DNA, 25 bp, Canis familiaris
gtactaccagagcaacttatgtgtt

SEQ ID NO: 137586 - DNA, 25 bp, Canis familiaris
gtacacccaagacattctcaatttt

SEQ ID NO: 137587 - DNA, 25 bp, Canis familiaris
gtaaggccaactattcacaagtttt

SEQ ID NO: 137588 - DNA, 25 bp, Canis familiaris
gtacgcttcacttatttcacaggtt

SEQ ID NO: 137589 - DNA, 25 bp, Canis familiaris
gtacgtctgcaattttctagggctc

SEQ ID NO: 137590 - DNA, 25 bp, Canis familiaris
gtacgtctcaacaattctaggtcaa

SEQ ID NO: 137591 - DNA, 25 bp, Canis familiaris
gtacgtctaaccatttgtgactcaa

SEQ ID NO: 137592 - DNA, 25 bp, Canis familiaris
gtacgtctacacttttgttgacaca

SEQ ID NO: 137593 - DNA, 25 bp, Canis familiaris
gtacgttcaccatgttgtgcaacca

SEQ ID NO: 137594 - DNA, 25 bp, Canis familiaris
gtactttcaccctggagaggcacag

SEQ ID NO: 137595 - DNA, 25 bp, Canis familiaris
gtaaattcaccgcatgtcaaaacat

SEQ ID NO: 137596 - DNA, 25 bp, Canis familiaris
gtaatgctccggggttccagaaatc

SEQ ID NO: 137597 - DNA, 25 bp, Canis familiaris
gtaacccctggtgtcaagatgaatg

SEQ ID NO: 137598 - DNA, 25 bp, Canis familiaris
gtaacccctagcctaacaatgggca

SEQ ID NO: 137599 - DNA, 25 bp, Canis familiaris
gtaaccgcctagcaaattattctcc

SEQ ID NO: 137600 - DNA, 25 bp, Canis familiaris
gtcaaacgcccatcaaataacaccc

SEQ ID NO: 137601 - DNA, 25 bp, Canis familiaris
gtaaacctccaagaatctccatctc

SEQ ID NO: 137602 - DNA, 25 bp, Canis familiaris
gtacacgtcccaaaagttcacttct

SEQ ID NO: 137603 - DNA, 25 bp, Canis familiaris
gtaccttcacacagagggtttctct

SEQ ID NO: 137604 - DNA, 25 bp, Canis familiaris
gtcatgttacccagagaactttcca

SEQ ID NO: 137605 - DNA, 25 bp, Canis familiaris
gtacttcaatccagatagttttgtg

SEQ ID NO: 137606 - DNA, 25 bp, Canis familiaris
gtactgttatactaaagctcctact

SEQ ID NO: 137607 - DNA, 25 bp, Canis familiaris
gtcactgcgttacaaactcctagga

SEQ ID NO: 137608 - DNA, 25 bp, Canis familiaris
gtactggttgacaaaacacttggga

SEQ ID NO: 137609 - DNA, 25 bp, Canis familiaris
gtactgagtgtacactacctgctgt

SEQ ID NO: 137610 - DNA, 25 bp, Canis familiaris
gtactgcatcttagtttacctggat

SEQ ID NO: 137611 - DNA, 25 bp, Canis familiaris
gtactactatatcttccaaaatcca

SEQ ID NO: 137612 - DNA, 25 bp, Canis familiaris
gtacttcatttgcttcaccatatca

SEQ ID NO: 137613 - DNA, 25 bp, Canis familiaris
gtacagtagtggctctgaccatttt

SEQ ID NO: 137614 - DNA, 25 bp, Canis familiaris
gtacaggagggtatgccgcatacct

SEQ ID NO: 137615 - DNA, 25 bp, Canis familiaris
gtacgggggagtgcacctcatgcac

SEQ ID NO: 137616 - DNA, 25 bp, Canis familiaris
gtacatgggagggcgcaacccagca

SEQ ID NO: 137617 - DNA, 25 bp, Canis familiaris
gtactggatggctgagcaactacca

SEQ ID NO: 137618 - DNA, 25 bp, Canis familiaris
gtacgagatgaaggaccccaccaac

SEQ ID NO: 137619 - DNA, 25 bp, Canis familiaris
gtactatgatgaatagcctccccac

SEQ ID NO: 137620 - DNA, 25 bp, Canis familiaris
gtacttcagatttacatacccctgg

SEQ ID NO: 137621 - DNA, 25 bp, Canis familiaris
gtactctaagatggaaatgcccctg

SEQ ID NO: 137622 - DNA, 25 bp, Canis familiaris
gtacgctactatgaaacacacaatg

SEQ ID NO: 137623 - DNA, 25 bp, Canis familiaris
gtacactattcagctaccatactaa

SEQ ID NO: 137624 - DNA, 25 bp, Canis familiaris
gtacactgacttgagaccagttgaa

SEQ ID NO: 137625 - DNA, 25 bp, Canis familiaris
gtacctgcagctgaacacgcagcct

SEQ ID NO: 137626 - DNA, 25 bp, Canis familiaris
gtactgccacaggacagacagcagc

SEQ ID NO: 137627 - DNA, 25 bp, Canis familiaris
gtacccatcattgcaatagcaggag

SEQ ID NO: 137628 - DNA, 25 bp, Canis familiaris
gtaccccatatggatgaaccagagg

SEQ ID NO: 137629 - DNA, 25 bp, Canis familiaris
gtactgcgacatttgtaagccatac

SEQ ID NO: 137630 - DNA, 25 bp, Canis familiaris
gtacagcaccagagtaggccaatcc

SEQ ID NO: 137631 - DNA, 25 bp, Canis familiaris
gtacagcaaggtcctggccctgtac

SEQ ID NO: 137632 - DNA, 25 bp, Canis familiaris
gtacccaagatagttcccgatgacg

SEQ ID NO: 137633 - DNA, 25 bp, Canis familiaris
gtaccgcagtaagcttcatcgctga

SEQ ID NO: 137634 - DNA, 25 bp, Canis familiaris
gtaccgcattaagttaccatctcag

SEQ ID NO: 137635 - DNA, 25 bp, Canis familiaris
gtacccttcatatttaacatctctc

SEQ ID NO: 137636 - DNA, 25 bp, Canis familiaris
gtaacctgtcaataaaccgtgcctc

SEQ ID NO: 137637 - DNA, 25 bp, Canis familiaris
gtaacctgaataaaaatcctctgac

SEQ ID NO: 137638 - DNA, 25 bp, Canis familiaris
gtacccatccataaagtatactgta

SEQ ID NO: 137639 - DNA, 25 bp, Canis familiaris
gtaacttgcctaccgatataggata

SEQ ID NO: 137640 - DNA, 25 bp, Canis familiaris
gtaactatggcccagtgctttggaa

SEQ ID NO: 137641 - DNA, 25 bp, Canis familiaris
gtaaataaggcttggctttcaggaa

SEQ ID NO: 137642 - DNA, 25 bp, Canis familiaris
gtaaacggactgctcttgtcagaga

SEQ ID NO: 137643 - DNA, 25 bp, Canis familiaris
gtactactggctggaacggtcgatc

SEQ ID NO: 137644 - DNA, 25 bp, Canis familiaris
gtaaatcagactggctacgttggtc

SEQ ID NO: 137645 - DNA, 25 bp, Canis familiaris
gtaacagcagccaactactttgggg

SEQ ID NO: 137646 - DNA, 25 bp, Canis familiaris
gtaccgactcaactccatatgtgtc

SEQ ID NO: 137647 - DNA, 25 bp, Canis familiaris
gtacccaagagactgccaatgttaa

SEQ ID NO: 137648 - DNA, 25 bp, Canis familiaris
gtacccagaagatcaagtttcactt

SEQ ID NO: 137649 - DNA, 25 bp, Canis familiaris
gtacatctcagtgttaagtattcac

SEQ ID NO: 137650 - DNA, 25 bp, Canis familiaris
gtactactgtggaatcaagtatatc

SEQ ID NO: 137651 - DNA, 25 bp, Canis familiaris
gtacccttgtgttgcatatgagtca

SEQ ID NO: 137652 - DNA, 25 bp, Canis familiaris
gtacccatagtgtttgcaagccttt

SEQ ID NO: 137653 - DNA, 25 bp, Canis familiaris
gtactcctatgttttgctatgacgt

SEQ ID NO: 137654 - DNA, 25 bp, Canis familiaris
gtacaccttgctttaggcaacagtt

SEQ ID NO: 137655 - DNA, 25 bp, Canis familiaris
gtacattgctgtctgtagaacatca

SEQ ID NO: 137656 - DNA, 25 bp, Canis familiaris
gtaaatgttttgtagctgccagcag

SEQ ID NO: 137657 - DNA, 25 bp, Canis familiaris
gtaaagtttttagcatagttcctgg

SEQ ID NO: 137658 - DNA, 25 bp, Canis familiaris
gtaaagcgtgttcaagatactttta

SEQ ID NO: 137659 - DNA, 25 bp, Canis familiaris
gtaaacgttatatgcagtttttata

SEQ ID NO: 137660 - DNA, 25 bp, Canis familiaris
gtacaacgttaatctccttttcact

SEQ ID NO: 137661 - DNA, 25 bp, Canis familiaris
gtaaacaaatagtgctcctagttaa

SEQ ID NO: 137662 - DNA, 25 bp, Canis familiaris
gtaaaccagtaagctgctctattgt

SEQ ID NO: 137663 - DNA, 25 bp, Canis familiaris
gtaagagccagcaagtgcccttagg

SEQ ID NO: 137664 - DNA, 25 bp, Canis familiaris
gtaaagccatcaaacctgtcaagga

SEQ ID NO: 137665 - DNA, 25 bp, Canis familiaris
gtaaatacacccacgtactggacgc

SEQ ID NO: 137666 - DNA, 25 bp, Canis familiaris
gtacacaaaacagctggtaccgtcc

SEQ ID NO: 137667 - DNA, 25 bp, Canis familiaris
gtaagcaagtaagtacgtacgtaca

SEQ ID NO: 137668 - DNA, 25 bp, Canis familiaris
gtacaccattaaatcctggaaatcc

SEQ ID NO: 137669 - DNA, 25 bp, Canis familiaris
gtacgctatacaacttttgaatatc

SEQ ID NO: 137670 - DNA, 25 bp, Canis familiaris
gtacgttcgcagagttttcattatg

SEQ ID NO: 137671 - DNA, 25 bp, Canis familiaris
gtacgaaccagattgtttttgcatt

SEQ ID NO: 137672 - DNA, 25 bp, Canis familiaris
gtacgcaatgcttctagacttttat

SEQ ID NO: 137673 - DNA, 25 bp, Canis familiaris
gtactgtatgtagtcatgcactttg

SEQ ID NO: 137674 - DNA, 25 bp, Canis familiaris
gtactattgtcactagctctatata

SEQ ID NO: 137675 - DNA, 25 bp, Canis familiaris
gtactgcattctgtggctttcaata

SEQ ID NO: 137676 - DNA, 25 bp, Canis familiaris
gtactcatcatgctgttcttttaac

SEQ ID NO: 137677 - DNA, 25 bp, Canis familiaris
gtactatcattttgtcagtagtgag

SEQ ID NO: 137678 - DNA, 25 bp, Canis familiaris
gtacccttctagttgatagtgcagc

SEQ ID NO: 137679 - DNA, 25 bp, Canis familiaris
gtaccctgaatgcctggttgtcagc

SEQ ID NO: 137680 - DNA, 25 bp, Canis familiaris
gtaccccagatgccatggtgttctg

SEQ ID NO: 137681 - DNA, 25 bp, Canis familiaris
gtacttccatacgaggttcattaat

SEQ ID NO: 137682 - DNA, 25 bp, Canis familiaris
gtactttcaacttggttcatcttct

SEQ ID NO: 137683 - DNA, 25 bp, Canis familiaris
gtacatttgaactctttctgctttc

SEQ ID NO: 137684 - DNA, 25 bp, Canis familiaris
gtacttttatcagtcatttccttta

SEQ ID NO: 137685 - DNA, 25 bp, Canis familiaris
gtactttttttctttgcatcgacat

SEQ ID NO: 137686 - DNA, 25 bp, Canis familiaris
gtacgttcttatttaatgtctgatt

SEQ ID NO: 137687 - DNA, 25 bp, Canis familiaris
gtacgtgtttatttcacttggctgt

SEQ ID NO: 137688 - DNA, 25 bp, Canis familiaris
gtacaatcgtttcatcattcggcgt

SEQ ID NO: 137689 - DNA, 25 bp, Canis familiaris
gtacactcgttcatagattcggcta

SEQ ID NO: 137690 - DNA, 25 bp, Canis familiaris
gtacatctagcgttcttttctggta

SEQ ID NO: 137691 - DNA, 25 bp, Canis familiaris
gtactgcacgctactttttcgagtg

SEQ ID NO: 137692 - DNA, 25 bp, Canis familiaris
gtactcatctctgcctttgtaggag

SEQ ID NO: 137693 - DNA, 25 bp, Canis familiaris
gtactccatctgagttactacagaa

SEQ ID NO: 137694 - DNA, 25 bp, Canis familiaris
gtactgactgtgattacactacaaa

SEQ ID NO: 137695 - DNA, 25 bp, Canis familiaris
gtactgactggtagtgccatcctca

SEQ ID NO: 137696 - DNA, 25 bp, Canis familiaris
gtacacggactcgcactacgaggag

SEQ ID NO: 137697 - DNA, 25 bp, Canis familiaris
gtacgccgaccctctagatgaggtc

SEQ ID NO: 137698 - DNA, 25 bp, Canis familiaris
gtacccggggatcctgagatgggaa

SEQ ID NO: 137699 - DNA, 25 bp, Canis familiaris
gtactttggtgaactctaatgggaa

SEQ ID NO: 137700 - DNA, 25 bp, Canis familiaris
gtacatttgggtcctctagagtcga

SEQ ID NO: 137701 - DNA, 25 bp, Canis familiaris
gtacataagggcctcttagcctgta

SEQ ID NO: 137702 - DNA, 25 bp, Canis familiaris
gtacatcaagggcatcgtgaaggga

SEQ ID NO: 137703 - DNA, 25 bp, Canis familiaris
gtactaagtggcacgtggctgatag

SEQ ID NO: 137704 - DNA, 25 bp, Canis familiaris
gtactataaatcagttactatatgt

SEQ ID NO: 137705 - DNA, 25 bp, Canis familiaris
gtactgtaacatccttatactttct

SEQ ID NO: 137706 - DNA, 25 bp, Canis familiaris
gtactgttgataggctttatctttc

SEQ ID NO: 137707 - DNA, 25 bp, Canis familiaris
gtactggtaacatttttctttcttg

SEQ ID NO: 137708 - DNA, 25 bp, Canis familiaris
gtactggtaacatttttctttcttg

SEQ ID NO: 137709 - DNA, 25 bp, Canis familiaris
gtactggtaacatttttctttcttg

SEQ ID NO: 137710 - DNA, 25 bp, Canis familiaris
gtactggtaacatttttctttcttg

SEQ ID NO: 137711 - DNA, 25 bp, Canis familiaris
gtactggtaacatttttctttcttg

SEQ ID NO: 137712 - DNA, 25 bp, Canis familiaris
gtactggtaacatttttctttcttg

SEQ ID NO: 137713 - DNA, 25 bp, Canis familiaris
gtactggtaacatttttctttcttg

SEQ ID NO: 137714 - DNA, 25 bp, Canis familiaris
gtactggtaacatttttctttcttg

SEQ ID NO: 137715 - DNA, 25 bp, Canis familiaris
gtactggtaacatttttctttcttg

SEQ ID NO: 137716 - DNA, 25 bp, Canis familiaris
gtactggtaacatttttctttcttg

SEQ ID NO: 137717 - DNA, 25 bp, Canis familiaris
gtactggtaacatttttctttcttg

SEQ ID NO: 137718 - DNA, 25 bp, Canis familiaris
gaagccttttcactatttgacaagg

SEQ ID NO: 137719 - DNA, 25 bp, Canis familiaris
gtactactggcttttgattttcatt

SEQ ID NO: 137720 - DNA, 25 bp, Canis familiaris
gtacatattagctgctttgtgttca

SEQ ID NO: 137721 - DNA, 25 bp, Canis familiaris
gtacttctgaagttttgtgcttgag

SEQ ID NO: 137722 - DNA, 25 bp, Canis familiaris
gtacttctccatgcttctagttgga

SEQ ID NO: 137723 - DNA, 25 bp, Canis familiaris
gtacttctccagctgaaacgaggcc

SEQ ID NO: 137724 - DNA, 25 bp, Canis familiaris
gtactctccctgcaagtggtggggc

SEQ ID NO: 137725 - DNA, 25 bp, Canis familiaris
gtacaccccgctaagtggggccatg

SEQ ID NO: 137726 - DNA, 25 bp, Canis familiaris
gtgtaccctgtatcagggtggccat

SEQ ID NO: 137727 - DNA, 25 bp, Canis familiaris
gtcttccacttcaacgggaacgtga

SEQ ID NO: 137728 - DNA, 25 bp, Canis familiaris
gtaaccacccaggcagggaaccaca

SEQ ID NO: 137729 - DNA, 25 bp, Canis familiaris
gtacagacactttggcaaggcccca

SEQ ID NO: 137730 - DNA, 25 bp, Canis familiaris
gtgacccatttagaagtggcctcta

SEQ ID NO: 137731 - DNA, 25 bp, Canis familiaris
gtacgtgctttttaatgggacctat

SEQ ID NO: 137732 - DNA, 25 bp, Canis familiaris
gtactgtcttttcataggctgacct

SEQ ID NO: 137733 - DNA, 25 bp, Canis familiaris
gtactgtatttttatattgctgctt

SEQ ID NO: 137734 - DNA, 25 bp, Canis familiaris
gtactgtgttttttatgttgtccaa

SEQ ID NO: 137735 - DNA, 25 bp, Canis familiaris
gtacagtgtgctatttatgtggcca

SEQ ID NO: 137736 - DNA, 25 bp, Canis familiaris
gtacagtttgtatttattcccctat

SEQ ID NO: 137737 - DNA, 25 bp, Canis familiaris
gtacagttagtaattgaccccacaa

SEQ ID NO: 137738 - DNA, 25 bp, Canis familiaris
gtaaaggggcacttgagcccctcaa

SEQ ID NO: 137739 - DNA, 25 bp, Canis familiaris
gtaaaaaggaccagccccatagcgt

SEQ ID NO: 137740 - DNA, 25 bp, Canis familiaris
gtaaaactaacctgtctcacgacgg

SEQ ID NO: 137741 - DNA, 25 bp, Canis familiaris
gtaacatactaatataactgccaac

SEQ ID NO: 137742 - DNA, 25 bp, Canis familiaris
gtaagtaatccataaagtgccaaca

SEQ ID NO: 137743 - DNA, 25 bp, Canis familiaris
gtaagtgcaatcctttcaagttcac

SEQ ID NO: 137744 - DNA, 25 bp, Canis familiaris
gtaaagaagccatttccactacgca

SEQ ID NO: 137745 - DNA, 25 bp, Canis familiaris
gtaaggaatgccagtctcactaccc

SEQ ID NO: 137746 - DNA, 25 bp, Canis familiaris
gtgaaggagccttcgttattcaccc

SEQ ID NO: 137747 - DNA, 25 bp, Canis familiaris
gtaagagggctctggtctttcaacc

SEQ ID NO: 137748 - DNA, 25 bp, Canis familiaris
gtaaatggagcctgactttccctaa

SEQ ID NO: 137749 - DNA, 25 bp, Canis familiaris
gtacaaggcagctggcaacgttctc

SEQ ID NO: 137750 - DNA, 25 bp, Canis familiaris
gtaacggccaaggcaaccattatgt

SEQ ID NO: 137751 - DNA, 25 bp, Canis familiaris
gtaaggggagaagacactgttgatt

SEQ ID NO: 137752 - DNA, 25 bp, Canis familiaris
gtaaccagggaaccctgctgaatgg

SEQ ID NO: 137753 - DNA, 25 bp, Canis familiaris
gtacagccagagcaactcattctgc

SEQ ID NO: 137754 - DNA, 25 bp, Canis familiaris
gtacgcgcaaggctttatgctgctg

SEQ ID NO: 137755 - DNA, 25 bp, Canis familiaris
gtaagccagaggggattcaggggaa

SEQ ID NO: 137756 - DNA, 25 bp, Canis familiaris
gtaacgctaggcgtggtaggcgtgt

SEQ ID NO: 137757 - DNA, 25 bp, Canis familiaris
gtacacgtagagatgatttcctttc

SEQ ID NO: 137758 - DNA, 25 bp, Canis familiaris
gtacacgttacagactttcattaat

SEQ ID NO: 137759 - DNA, 25 bp, Canis familiaris
gtaacgttacaaagtattctgccta

SEQ ID NO: 137760 - DNA, 25 bp, Canis familiaris
gtaaagccttaaatgccaagtccaa

SEQ ID NO: 137761 - DNA, 25 bp, Canis familiaris
gtaaagatgcttaattacccacaca

SEQ ID NO: 137762 - DNA, 25 bp, Canis familiaris
gtacaacttctgaaggacaccacca

SEQ ID NO: 137763 - DNA, 25 bp, Canis familiaris
gtacataggactaaagctgcccttg

SEQ ID NO: 137764 - DNA, 25 bp, Canis familiaris
gtaaaaactcagcactcttcttggg

SEQ ID NO: 137765 - DNA, 25 bp, Canis familiaris
gtaagacaacttctactctggctag

SEQ ID NO: 137766 - DNA, 25 bp, Canis familiaris
gtaaaattatttgtgcctgggatgt

SEQ ID NO: 137767 - DNA, 25 bp, Canis familiaris
gtaatagctctgtttcttaagggca

SEQ ID NO: 137768 - DNA, 25 bp, Canis familiaris
gtaaagtatcttcctattactggaa

SEQ ID NO: 137769 - DNA, 25 bp, Canis familiaris
gtaacagtatttgtaatcctgaata

SEQ ID NO: 137770 - DNA, 25 bp, Canis familiaris
gtactcagatttcgtccaaccagaa

SEQ ID NO: 137771 - DNA, 25 bp, Canis familiaris
gtactcccagggtccagactaatac

SEQ ID NO: 137772 - DNA, 25 bp, Canis familiaris
gtacacccaggacgcttattagatc

SEQ ID NO: 137773 - DNA, 25 bp, Canis familiaris
gtacgacctggacggcgaggagagc

SEQ ID NO: 137774 - DNA, 25 bp, Canis familiaris
gtgactacctgatccgtgaagacgg

SEQ ID NO: 137775 - DNA, 25 bp, Canis familiaris
gtacttcctagtgggtgcaggtgcc

SEQ ID NO: 137776 - DNA, 25 bp, Canis familiaris
gtacgtgctctgtttgggagcctgc

SEQ ID NO: 137777 - DNA, 25 bp, Canis familiaris
gtactcattcaggtgtgggggtctc

SEQ ID NO: 137778 - DNA, 25 bp, Canis familiaris
gtacatggatgggcaggggaggtta

SEQ ID NO: 137779 - DNA, 25 bp, Canis familiaris
gtacaggtaccaggggcgtcttaat

SEQ ID NO: 137780 - DNA, 25 bp, Canis familiaris
gtaaggggacatggtcggttcttat

SEQ ID NO: 137781 - DNA, 25 bp, Canis familiaris
gtacttgggaggctggttttctcat

SEQ ID NO: 137782 - DNA, 25 bp, Canis familiaris
tgtacgggtgggaggttctataata

SEQ ID NO: 137783 - DNA, 25 bp, Canis familiaris
tgctcgggggtggaatttacaaaat

SEQ ID NO: 137784 - DNA, 25 bp, Canis familiaris
gggcagggggcagatcttacaaaac

SEQ ID NO: 137785 - DNA, 25 bp, Canis familiaris
gtgacacggggcacagttggcccga

SEQ ID NO: 137786 - DNA, 25 bp, Canis familiaris
gtacagcgtggacttcatggtggac

SEQ ID NO: 137787 - DNA, 25 bp, Canis familiaris
gtacatgatgctggagcagacacgg

SEQ ID NO: 137788 - DNA, 25 bp, Canis familiaris
gtaagctgtcgctatgatgcatcga

SEQ ID NO: 137789 - DNA, 25 bp, Canis familiaris
gtacacgtccattcatcacggtgtg

SEQ ID NO: 137790 - DNA, 25 bp, Canis familiaris
gtacacagtggatcacacagaagaa

SEQ ID NO: 137791 - DNA, 25 bp, Canis familiaris
gtacacggagtaaacaacagtcagc

SEQ ID NO: 137792 - DNA, 25 bp, Canis familiaris
gtactccagatttccacaaacacac

SEQ ID NO: 137793 - DNA, 25 bp, Canis familiaris
gtactccagatgtctacactcaata

SEQ ID NO: 137794 - DNA, 25 bp, Canis familiaris
gtacacacacaaatgacctaatgaa

SEQ ID NO: 137795 - DNA, 25 bp, Canis familiaris
gtaacaccacatggaccaaggtcaa

SEQ ID NO: 137796 - DNA, 25 bp, Canis familiaris
gtcacagagcctaggaaaccgtcaa

SEQ ID NO: 137797 - DNA, 25 bp, Canis familiaris
gtcaagagccaaaaaaccctcaaag

SEQ ID NO: 137798 - DNA, 25 bp, Canis familiaris
gtaacgccaatagggactttccatt

SEQ ID NO: 137799 - DNA, 25 bp, Canis familiaris
gtaagcaatccatcggaactaccat

SEQ ID NO: 137800 - DNA, 25 bp, Canis familiaris
gtaacatcatcctcggcaaatcgca

SEQ ID NO: 137801 - DNA, 25 bp, Canis familiaris
gtacacatatccttagacacaaatc

SEQ ID NO: 137802 - DNA, 25 bp, Canis familiaris
gtacacgagacgcaggccagagtcc

SEQ ID NO: 137803 - DNA, 25 bp, Canis familiaris
gtgaaaggatccaaaggaggtcctg

SEQ ID NO: 137804 - DNA, 25 bp, Canis familiaris
gtaaagttagaatggagaccctgga

SEQ ID NO: 137805 - DNA, 25 bp, Canis familiaris
gtaaagatggagtgggaacccttga

SEQ ID NO: 137806 - DNA, 25 bp, Canis familiaris
gtactaagaatgtggaaacccttgg

SEQ ID NO: 137807 - DNA, 25 bp, Canis familiaris
gtaaaggcaatgggagaacccctcg

SEQ ID NO: 137808 - DNA, 25 bp, Canis familiaris
gtaaaggcaatgggaaagctcttcg

SEQ ID NO: 137809 - DNA, 25 bp, Canis familiaris
gtacaaaaagggatatcgattcgga

SEQ ID NO: 137810 - DNA, 25 bp, Canis familiaris
gtacacaaaaggactaccgattccg

SEQ ID NO: 137811 - DNA, 25 bp, Canis familiaris
gtacaacataaaaatccttgcatac

SEQ ID NO: 137812 - DNA, 25 bp, Canis familiaris
gtacataattaaacttttgtcctgt

SEQ ID NO: 137813 - DNA, 25 bp, Canis familiaris
gtacatatcctatcgtgtagtccct

SEQ ID NO: 137814 - DNA, 25 bp, Canis familiaris
gtactccttgaaagtgctagccaac

SEQ ID NO: 137815 - DNA, 25 bp, Canis familiaris
gtactgttagacatttagccaaagc

SEQ ID NO: 137816 - DNA, 25 bp, Canis familiaris
gtacgtattatcccttagcctaatg

SEQ ID NO: 137817 - DNA, 25 bp, Canis familiaris
gtacgtttacacgtcgcagcactaa

SEQ ID NO: 137818 - DNA, 25 bp, Canis familiaris
gtgtgactttaaccccaagtccagc

SEQ ID NO: 137819 - DNA, 25 bp, Canis familiaris
gtacactttgatacccaaaatgcac

SEQ ID NO: 137820 - DNA, 25 bp, Canis familiaris
gtacactttgtgtttaaattcatag

SEQ ID NO: 137821 - DNA, 25 bp, Canis familiaris
gtacatccaggttgtctaccttcat

SEQ ID NO: 137822 - DNA, 25 bp, Canis familiaris
gtacatccaggttgtctaccttcat

SEQ ID NO: 137823 - DNA, 25 bp, Canis familiaris
gtacacgaggggtctgcccctatac

SEQ ID NO: 137824 - DNA, 25 bp, Canis familiaris
gtacacgtgtgacttcgtccagtta

SEQ ID NO: 137825 - DNA, 25 bp, Canis familiaris
gtacacatgtgctacttctgtaata

SEQ ID NO: 137826 - DNA, 25 bp, Canis familiaris
gtaaatctgtacttttttcaaatat

SEQ ID NO: 137827 - DNA, 25 bp, Canis familiaris
gtaaatcaatccttttgggaatcca

SEQ ID NO: 137828 - DNA, 25 bp, Canis familiaris
gtaaactatcctttggaaaagcaca

SEQ ID NO: 137829 - DNA, 25 bp, Canis familiaris
gtacacccacacagtagaaaactac

SEQ ID NO: 137830 - DNA, 25 bp, Canis familiaris
gtaaccttccatcattaagtactat

SEQ ID NO: 137831 - DNA, 25 bp, Canis familiaris
gtaacctgcacccaaatcaaaactt

SEQ ID NO: 137832 - DNA, 25 bp, Canis familiaris
gtaaccgcaccgcgtgcaaggtttt

SEQ ID NO: 137833 - DNA, 25 bp, Canis familiaris
gtacaaagaccaacgtggggctgtt

SEQ ID NO: 137834 - DNA, 25 bp, Canis familiaris
gtaaagatactctctggggacttat

SEQ ID NO: 137835 - DNA, 25 bp, Canis familiaris
gtaaggcatagccgttcggggctta

SEQ ID NO: 137836 - DNA, 25 bp, Canis familiaris
gtacatcagccgttgttcggtgtgc

SEQ ID NO: 137837 - DNA, 25 bp, Canis familiaris
gtacagatgtcgtgttctgggggtt

SEQ ID NO: 137838 - DNA, 25 bp, Canis familiaris
gtaagcttcgctgtgtcggagcttg

SEQ ID NO: 137839 - DNA, 25 bp, Canis familiaris
gtgaaggtcctatgctgatggaggt

SEQ ID NO: 137840 - DNA, 25 bp, Canis familiaris
gtaaggttgcgttctgatgggtaaa

SEQ ID NO: 137841 - DNA, 25 bp, Canis familiaris
gtacaggttgggcctgggccacaac

SEQ ID NO: 137842 - DNA, 25 bp, Canis familiaris
gtacaggtaggcggggtgctcatgc

SEQ ID NO: 137843 - DNA, 25 bp, Canis familiaris
gtaagtgtaggtaggtgtgatgaaa

SEQ ID NO: 137844 - DNA, 25 bp, Canis familiaris
gtaaatgccaagaaagatgctgtga

SEQ ID NO: 137845 - DNA, 25 bp, Canis familiaris
gtaaatgaaacccagatgtgtgtga

SEQ ID NO: 137846 - DNA, 25 bp, Canis familiaris
gtaaagtgacctccgtgggtgattc

SEQ ID NO: 137847 - DNA, 25 bp, Canis familiaris
gtgaagacggccacctgtggtggtc

SEQ ID NO: 137848 - DNA, 25 bp, Canis familiaris
gtaagaatggtctccatggggatat

SEQ ID NO: 137849 - DNA, 25 bp, Canis familiaris
gtaataatgtctgtcctatggaggt

SEQ ID NO: 137850 - DNA, 25 bp, Canis familiaris
gtacaacatggggctccttaagttt

SEQ ID NO: 137851 - DNA, 25 bp, Canis familiaris
gtacaacatcaaggtcctctactta

SEQ ID NO: 137852 - DNA, 25 bp, Canis familiaris
gtacaaagagacgtccatattggga

SEQ ID NO: 137853 - DNA, 25 bp, Canis familiaris
gtacaaaatgtagtttattgagcca

SEQ ID NO: 137854 - DNA, 25 bp, Canis familiaris
gtactcctattcgtttcatgggcca

SEQ ID NO: 137855 - DNA, 25 bp, Canis familiaris
gtaaccaacccttatctggcaacat

SEQ ID NO: 137856 - DNA, 25 bp, Canis familiaris
gtaacaaaaccttatttctagcagt

SEQ ID NO: 137857 - DNA, 25 bp, Canis familiaris
gtaagctaagtacaattgacctagt

SEQ ID NO: 137858 - DNA, 25 bp, Canis familiaris
gtccagaaggttccagtaccctagt

SEQ ID NO: 137859 - DNA, 25 bp, Canis familiaris
tgatcacgaaggtggttttcccagg

SEQ ID NO: 137860 - DNA, 25 bp, Canis familiaris
gtcaggaggtttaggtttccctgcg

SEQ ID NO: 137861 - DNA, 25 bp, Canis familiaris
gtactgaggttactgattttccagg

SEQ ID NO: 137862 - DNA, 25 bp, Canis familiaris
gtacagtcgtagagatgtcttccac

SEQ ID NO: 137863 - DNA, 25 bp, Canis familiaris
gtacactagtcagtctttttcacct

SEQ ID NO: 137864 - DNA, 25 bp, Canis familiaris
gtacacaagtcctgtggttacatcc

SEQ ID NO: 137865 - DNA, 25 bp, Canis familiaris
gtaacatgagttccctggttcacac

SEQ ID NO: 137866 - DNA, 25 bp, Canis familiaris
gtaaaggttgcctggcttcacatgg

SEQ ID NO: 137867 - DNA, 25 bp, Canis familiaris
gtcaaggagtcgttcacgttcacgg

SEQ ID NO: 137868 - DNA, 25 bp, Canis familiaris
gtaaggtctgggtcccgatactgta

SEQ ID NO: 137869 - DNA, 25 bp, Canis familiaris
gtacatggatggggcccctgtgaat

SEQ ID NO: 137870 - DNA, 25 bp, Canis familiaris
gtaatggtggccaacagaggtgaga

SEQ ID NO: 137871 - DNA, 25 bp, Canis familiaris
gtacaagctgagccacctggaggag

SEQ ID NO: 137872 - DNA, 25 bp, Canis familiaris
gtacaatgatgaccgccaagtgaag

SEQ ID NO: 137873 - DNA, 25 bp, Canis familiaris
gtacagttactcggaagatgaagga

SEQ ID NO: 137874 - DNA, 25 bp, Canis familiaris
gtacagtttctggctgacaaccgtg

SEQ ID NO: 137875 - DNA, 25 bp, Canis familiaris
gtactgcattcttgccaggcatacc

SEQ ID NO: 137876 - DNA, 25 bp, Canis familiaris
gtactcctctagccaggctaaggga

SEQ ID NO: 137877 - DNA, 25 bp, Canis familiaris
gtactcctccagctgctgttaggac

SEQ ID NO: 137878 - DNA, 25 bp, Canis familiaris
gtaacattccagcttctcctggatc

SEQ ID NO: 137879 - DNA, 25 bp, Canis familiaris
gtaaaataggctcccttcggactag

SEQ ID NO: 137880 - DNA, 25 bp, Canis familiaris
gtaaaaaggtctgcttgctggccag

SEQ ID NO: 137881 - DNA, 25 bp, Canis familiaris
gtacaaaaggtcctttctcctcgag

SEQ ID NO: 137882 - DNA, 25 bp, Canis familiaris
gtaaatataactttgcttgccctcg

SEQ ID NO: 137883 - DNA, 25 bp, Canis familiaris
gtaacttacccagggtcatcctgct

SEQ ID NO: 137884 - DNA, 25 bp, Canis familiaris
gtaactttctaatagtacacatgtg

SEQ ID NO: 137885 - DNA, 25 bp, Canis familiaris
gtaaagtttaactcagacactgctg

SEQ ID NO: 137886 - DNA, 25 bp, Canis familiaris
gtaatggccttggaaggaaaccagg

SEQ ID NO: 137887 - DNA, 25 bp, Canis familiaris
gtaaggctcggggcatggagtccca

SEQ ID NO: 137888 - DNA, 25 bp, Canis familiaris
gtacagaacggggcatgcgccccca

SEQ ID NO: 137889 - DNA, 25 bp, Canis familiaris
gtacagtagagcagaagccccgcac

SEQ ID NO: 137890 - DNA, 25 bp, Canis familiaris
gtaattagaggtcgagttcctgctc

SEQ ID NO: 137891 - DNA, 25 bp, Canis familiaris
gtaataaagttccagtgatccccaa

SEQ ID NO: 137892 - DNA, 25 bp, Canis familiaris
gtaaagacccttgggtcgaggcaga

SEQ ID NO: 137893 - DNA, 25 bp, Canis familiaris
gtaagaacccttgggtcgaaggcag

SEQ ID NO: 137894 - DNA, 25 bp, Canis familiaris
gtaatgcaaccctggtgtctaaagc

SEQ ID NO: 137895 - DNA, 25 bp, Canis familiaris
gtactgcaaccctggtgatgtgtgc

SEQ ID NO: 137896 - DNA, 25 bp, Canis familiaris
gtacaagcagtcgcgggatgtgtcc

SEQ ID NO: 137897 - DNA, 25 bp, Canis familiaris
gtaaactttgactctgatttcagct

SEQ ID NO: 137898 - DNA, 25 bp, Canis familiaris
gtaaacacctatcacttgtccagtt

SEQ ID NO: 137899 - DNA, 25 bp, Canis familiaris
gtaaattctctacccttggaagtat

SEQ ID NO: 137900 - DNA, 25 bp, Canis familiaris
gtaaatgtcttacccttgatgtaaa

SEQ ID NO: 137901 - DNA, 25 bp, Canis familiaris
gtcaaagtcttccacgttcaggacc

SEQ ID NO: 137902 - DNA, 25 bp, Canis familiaris
gtcaacggtgcctagttccaagacg

SEQ ID NO: 137903 - DNA, 25 bp, Canis familiaris
gtcaattggtcgagactccacaact

SEQ ID NO: 137904 - DNA, 25 bp, Canis familiaris
gtacttggtgacaaaccccaatgta

SEQ ID NO: 137905 - DNA, 25 bp, Canis familiaris
gtacttggtaatttcttcaccagta

SEQ ID NO: 137906 - DNA, 25 bp, Canis familiaris
gtactcagggttgttccaccagaga

SEQ ID NO: 137907 - DNA, 25 bp, Canis familiaris
gtactgctggatatttgtgccacca

SEQ ID NO: 137908 - DNA, 25 bp, Canis familiaris
gtactctgtgtggatcggtggctcc

SEQ ID NO: 137909 - DNA, 25 bp, Canis familiaris
gtactctgtgtggatcggtggctcc

SEQ ID NO: 137910 - DNA, 25 bp, Canis familiaris
gtactctgtgtggattgggggctcc

SEQ ID NO: 137911 - DNA, 25 bp, Canis familiaris
gtaatatgtgtggagtgtgcgtgtg

SEQ ID NO: 137912 - DNA, 25 bp, Canis familiaris
gtactttctacagtgtgcagtggac

SEQ ID NO: 137913 - DNA, 25 bp, Canis familiaris
gtactttcgatgatctactgagtca

SEQ ID NO: 137914 - DNA, 25 bp, Canis familiaris
gtactactggatatctgactggagc

SEQ ID NO: 137915 - DNA, 25 bp, Canis familiaris
gtactcctagataatcctcgggctc

SEQ ID NO: 137916 - DNA, 25 bp, Canis familiaris
gtacaccatcaggaatcgtgttggt

SEQ ID NO: 137917 - DNA, 25 bp, Canis familiaris
gtactccatggggcatctggtgagg

SEQ ID NO: 137918 - DNA, 25 bp, Canis familiaris
gtactccgagtggacgtgtgtcttg

SEQ ID NO: 137919 - DNA, 25 bp, Canis familiaris
gtactccagccagatagtgttcttc

SEQ ID NO: 137920 - DNA, 25 bp, Canis familiaris
gtactccagccagatgtttctgctc

SEQ ID NO: 137921 - DNA, 25 bp, Canis familiaris
gtacatctacttcgtcattttcatc

SEQ ID NO: 137922 - DNA, 25 bp, Canis familiaris
gtacacggcgttgcctttatctttg

SEQ ID NO: 137923 - DNA, 25 bp, Canis familiaris
gtacacggcgttgtttctaatgttt

SEQ ID NO: 137924 - DNA, 25 bp, Canis familiaris
gtacagtggctcacggttttttctt

SEQ ID NO: 137925 - DNA, 25 bp, Canis familiaris
gtacagggccacaggttcagttttc

SEQ ID NO: 137926 - DNA, 25 bp, Canis familiaris
gtctcagggtccaggggaggtttca

SEQ ID NO: 137927 - DNA, 25 bp, Canis familiaris
gtgctacgaatctcaagggaagtat

SEQ ID NO: 137928 - DNA, 25 bp, Canis familiaris
gtaactgatcactttaggagggtat

SEQ ID NO: 137929 - DNA, 25 bp, Canis familiaris
gtaatccatcctgtacaggtagcta

SEQ ID NO: 137930 - DNA, 25 bp, Canis familiaris
gtactacctctgttactgtgctagc

SEQ ID NO: 137931 - DNA, 25 bp, Canis familiaris
gtactccctgcagaagctggcatac

SEQ ID NO: 137932 - DNA, 25 bp, Canis familiaris
gtacaacatccggcaagtgtctgac

SEQ ID NO: 137933 - DNA, 25 bp, Canis familiaris
gtacaactccaagaggaggcactgg

SEQ ID NO: 137934 - DNA, 25 bp, Canis familiaris
gtacaattccaagaggagacactgg

SEQ ID NO: 137935 - DNA, 25 bp, Canis familiaris
gtacatttctaagtcgaacaccttg

SEQ ID NO: 137936 - DNA, 25 bp, Canis familiaris
gtaatggtgcttttgccaactcctt

SEQ ID NO: 137937 - DNA, 25 bp, Canis familiaris
gtaagggatttatcaccatgcctcg

SEQ ID NO: 137938 - DNA, 25 bp, Canis familiaris
gtacagggctcttcaaacttgtttg

SEQ ID NO: 137939 - DNA, 25 bp, Canis familiaris
gtacaggagcatcaatgacctcgtg

SEQ ID NO: 137940 - DNA, 25 bp, Canis familiaris
gtacagctatgaccattaggcctat

SEQ ID NO: 137941 - DNA, 25 bp, Canis familiaris
gtacatctagtgtatcatatggccc

SEQ ID NO: 137942 - DNA, 25 bp, Canis familiaris
gtactctatagacctgatggccagc

SEQ ID NO: 137943 - DNA, 25 bp, Canis familiaris
gtactcatacgacgtggctcacact

SEQ ID NO: 137944 - DNA, 25 bp, Canis familiaris
gtacatattatattgtggcccacat

SEQ ID NO: 137945 - DNA, 25 bp, Canis familiaris
gtacataagatacttcccaatcatg

SEQ ID NO: 137946 - DNA, 25 bp, Canis familiaris
gtacattcaatacttccgaaatata

SEQ ID NO: 137947 - DNA, 25 bp, Canis familiaris
gtacttttagtactctgaaaatatc

SEQ ID NO: 137948 - DNA, 25 bp, Canis familiaris
gtacatgtttggtagccgtagcaca

SEQ ID NO: 137949 - DNA, 25 bp, Canis familiaris
gtacatactaagtgcctgtgacata

SEQ ID NO: 137950 - DNA, 25 bp, Canis familiaris
gtacaacccagatcatcagtgtcta

SEQ ID NO: 137951 - DNA, 25 bp, Canis familiaris
gtaaaccatacagatcaggcctgag

SEQ ID NO: 137952 - DNA, 25 bp, Canis familiaris
gtaaagcaccagctgttgacctaga

SEQ ID NO: 137953 - DNA, 25 bp, Canis familiaris
gtaaagcacaccagtatttctaaga

SEQ ID NO: 137954 - DNA, 25 bp, Canis familiaris
gtaaaccactctgatttagtgaaga

SEQ ID NO: 137955 - DNA, 25 bp, Canis familiaris
gtaaatactctggctttccggaaga

SEQ ID NO: 137956 - DNA, 25 bp, Canis familiaris
gtaaaacggagcatttgctcgaaaa

SEQ ID NO: 137957 - DNA, 25 bp, Canis familiaris
gtaacagatctggaacctcagcctg

SEQ ID NO: 137958 - DNA, 25 bp, Canis familiaris
gtacacaacatagagcattatactc

SEQ ID NO: 137959 - DNA, 25 bp, Canis familiaris
gtacaccctgcatagcattagtgcc

SEQ ID NO: 137960 - DNA, 25 bp, Canis familiaris
gtacatagcctataccaagtgctgg

SEQ ID NO: 137961 - DNA, 25 bp, Canis familiaris
gtactacaccataagcagcaacctg

SEQ ID NO: 137962 - DNA, 25 bp, Canis familiaris
gtacatacacatgtgcacaggacac

SEQ ID NO: 137963 - DNA, 25 bp, Canis familiaris
gtaaatcacagcctagggaccggaa

SEQ ID NO: 137964 - DNA, 25 bp, Canis familiaris
gtacagatcaccttagaacacggaa

SEQ ID NO: 137965 - DNA, 25 bp, Canis familiaris
gtaaagcaccttaaatcacagaaaa

SEQ ID NO: 137966 - DNA, 25 bp, Canis familiaris
gtaaatgcccataaaatccatcgaa

SEQ ID NO: 137967 - DNA, 25 bp, Canis familiaris
gtaactgcgactagtgagtaatcca

SEQ ID NO: 137968 - DNA, 25 bp, Canis familiaris
gtaacctgattgaagtttaccttgt

SEQ ID NO: 137969 - DNA, 25 bp, Canis familiaris
gtaacggttgcatgtttcagccttc

SEQ ID NO: 137970 - DNA, 25 bp, Canis familiaris
gtaaaagctatctgttatcctccca

SEQ ID NO: 137971 - DNA, 25 bp, Canis familiaris
gtaaatatgaactttcgttccctca

SEQ ID NO: 137972 - DNA, 25 bp, Canis familiaris
gtaaacttgaaaattgttctccaca

SEQ ID NO: 137973 - DNA, 25 bp, Canis familiaris
gtaaaccaaaacttttccatgacag

SEQ ID NO: 137974 - DNA, 25 bp, Canis familiaris
gtaacttcacaatcctaatacagta

SEQ ID NO: 137975 - DNA, 25 bp, Canis familiaris
gtaacctacctaactcatatcaaaa

SEQ ID NO: 137976 - DNA, 25 bp, Canis familiaris
gtactcttagcacatttcaataaaa

SEQ ID NO: 137977 - DNA, 25 bp, Canis familiaris
gtacacagtagcaaatgttcacaga

SEQ ID NO: 137978 - DNA, 25 bp, Canis familiaris
gtacaaactgactagtgtcacaaaa

SEQ ID NO: 137979 - DNA, 25 bp, Canis familiaris
gtacactacttctgttacaaatata

SEQ ID NO: 137980 - DNA, 25 bp, Canis familiaris
gtacagataacctgatctaccaagt

SEQ ID NO: 137981 - DNA, 25 bp, Canis familiaris
gtacaggcaccctcaatgcaaaagt

SEQ ID NO: 137982 - DNA, 25 bp, Canis familiaris
gtacaaacagcctaacatgaagaga

SEQ ID NO: 137983 - DNA, 25 bp, Canis familiaris
gtacacagacaggaaacgccgggag

SEQ ID NO: 137984 - DNA, 25 bp, Canis familiaris
gtcacaggaataaccacccaggggg

SEQ ID NO: 137985 - DNA, 25 bp, Canis familiaris
gtacatggagatacaccacccagct

SEQ ID NO: 137986 - DNA, 25 bp, Canis familiaris
gtacagggaacctactttctcttct

SEQ ID NO: 137987 - DNA, 25 bp, Canis familiaris
gtcaagggacacgccttcttgtact

SEQ ID NO: 137988 - DNA, 25 bp, Canis familiaris
gtcacaagcgacattttttttcagt

SEQ ID NO: 137989 - DNA, 25 bp, Canis familiaris
gtacacacaaccttcagtttttcga

SEQ ID NO: 137990 - DNA, 25 bp, Canis familiaris
gtaagcaaatcctacgatttgtgtt

SEQ ID NO: 137991 - DNA, 25 bp, Canis familiaris
gtaacactataaactgtaggagttc

SEQ ID NO: 137992 - DNA, 25 bp, Canis familiaris
gtaacagtgtaaactgctcagtcag

SEQ ID NO: 137993 - DNA, 25 bp, Canis familiaris
gtaacgctgttatcccagtagaaac

SEQ ID NO: 137994 - DNA, 25 bp, Canis familiaris
gtaagctggttttctcctgatgaag

SEQ ID NO: 137995 - DNA, 25 bp, Canis familiaris
gtaactgcatgtagtcgtggcatac

SEQ ID NO: 137996 - DNA, 25 bp, Canis familiaris
gtacagctggattgtggttgattgc

SEQ ID NO: 137997 - DNA, 25 bp, Canis familiaris
gtacaggtatagacagagtgttcag

SEQ ID NO: 137998 - DNA, 25 bp, Canis familiaris
gtacagagcttcataatgcagtata

SEQ ID NO: 137999 - DNA, 25 bp, Canis familiaris
gtacatatgctaatatcatcatcac

SEQ ID NO: 138000 - DNA, 25 bp, Canis familiaris
gtacaagtcattacacatcacatgc

SEQ ID NO: 138001 - DNA, 25 bp, Canis familiaris
gtacagaccatattaaccagcttta

SEQ ID NO: 138002 - DNA, 25 bp, Canis familiaris
gtacaacctgaattctggactatta

SEQ ID NO: 138003 - DNA, 25 bp, Canis familiaris
gtaaatagtgaactcggatcgataa

SEQ ID NO: 138004 - DNA, 25 bp, Canis familiaris
gtcggtagtctatttacatgacaac

SEQ ID NO: 138005 - DNA, 25 bp, Canis familiaris
gtcaggtagtctcttgtaaactcta

SEQ ID NO: 138006 - DNA, 25 bp, Canis familiaris
gtcggtgtgacgctattcagaacca

SEQ ID NO: 138007 - DNA, 25 bp, Canis familiaris
gtaaatagacacctcctctgagacc

SEQ ID NO: 138008 - DNA, 25 bp, Canis familiaris
gtaaaagacacaccctgataactca

SEQ ID NO: 138009 - DNA, 25 bp, Canis familiaris
gtaaatacatacctgggaaacataa

SEQ ID NO: 138010 - DNA, 25 bp, Canis familiaris
gtaaaagtccgcagctgtgaacaaa

SEQ ID NO: 138011 - DNA, 25 bp, Canis familiaris
gtacagacagtgtctgctctctgct

SEQ ID NO: 138012 - DNA, 25 bp, Canis familiaris
gtacagaaggcactctcttatcaca

SEQ ID NO: 138013 - DNA, 25 bp, Canis familiaris
gtacatgccacattttgcttatcca

SEQ ID NO: 138014 - DNA, 25 bp, Canis familiaris
gtacatgcatctttgttgtgtctct

SEQ ID NO: 138015 - DNA, 25 bp, Canis familiaris
gtaatttctggtgttcttttgtaag

SEQ ID NO: 138016 - DNA, 25 bp, Canis familiaris
gtaatgggggtctttctgtggagta

SEQ ID NO: 138017 - DNA, 25 bp, Canis familiaris
gtaagactggggttatcgggatggg

SEQ ID NO: 138018 - DNA, 25 bp, Canis familiaris
gtaaacacatggttgtctcgggagg

SEQ ID NO: 138019 - DNA, 25 bp, Canis familiaris
gtaaacactgtcattcttgggaggt

SEQ ID NO: 138020 - DNA, 25 bp, Canis familiaris
gtaactttgtttgctctggtgggta

SEQ ID NO: 138021 - DNA, 25 bp, Canis familiaris
gtaatcctgtttccacttttggtat

SEQ ID NO: 138022 - DNA, 25 bp, Canis familiaris
gtgaagatttccccaattttgagtt

SEQ ID NO: 138023 - DNA, 25 bp, Canis familiaris
gtcaagattcccggtttattgaaat

SEQ ID NO: 138024 - DNA, 25 bp, Canis familiaris
gtcacagtcccagtggttctagatc

SEQ ID NO: 138025 - DNA, 25 bp, Canis familiaris
gtacatgttccagtatgattctacc

SEQ ID NO: 138026 - DNA, 25 bp, Canis familiaris
gtacagttgcgaatatggctccatg

SEQ ID NO: 138027 - DNA, 25 bp, Canis familiaris
gtacagttctagagatgcccatgag

SEQ ID NO: 138028 - DNA, 25 bp, Canis familiaris
gtacatgtcacttttgatccttgga

SEQ ID NO: 138029 - DNA, 25 bp, Canis familiaris
gtacatggccttcatgatcagccgt

SEQ ID NO: 138030 - DNA, 25 bp, Canis familiaris
gtacatcgccatagtgagcacgacg

SEQ ID NO: 138031 - DNA, 25 bp, Canis familiaris
gtacatcagttgatgcaccgcacca

SEQ ID NO: 138032 - DNA, 25 bp, Canis familiaris
gtacatcagttactcattccacagt

SEQ ID NO: 138033 - DNA, 25 bp, Canis familiaris
gtaaggacatgactcttccatcagt

SEQ ID NO: 138034 - DNA, 25 bp, Canis familiaris
gtaatggtactgactttgcttgctt

SEQ ID NO: 138035 - DNA, 25 bp, Canis familiaris
gtacatggtatttactgttggtttc

SEQ ID NO: 138036 - DNA, 25 bp, Canis familiaris
gtacttgattttttctcacagtgtg

SEQ ID NO: 138037 - DNA, 25 bp, Canis familiaris
gtacttgattgtttttcagtgtgag

SEQ ID NO: 138038 - DNA, 25 bp, Canis familiaris
gtacttcttgtattttcattgatat

SEQ ID NO: 138039 - DNA, 25 bp, Canis familiaris
gtacttctttctttgactttctagg

SEQ ID NO: 138040 - DNA, 25 bp, Canis familiaris
gtacttttacagtgacatcttatcc

SEQ ID NO: 138041 - DNA, 25 bp, Canis familiaris
gtcacgtttaatgtaatcctcgaga

SEQ ID NO: 138042 - DNA, 25 bp, Canis familiaris
gtacttcttaattgtagattcccga

SEQ ID NO: 138043 - DNA, 25 bp, Canis familiaris
gtcagactcttaagtgtaattccac

SEQ ID NO: 138044 - DNA, 25 bp, Canis familiaris
gtaacatttcaacaaactccactga

SEQ ID NO: 138045 - DNA, 25 bp, Canis familiaris
gtaacacttgaatagaactacagga

SEQ ID NO: 138046 - DNA, 25 bp, Canis familiaris
gtaaccactgttgacaccaagaggc

SEQ ID NO: 138047 - DNA, 25 bp, Canis familiaris
gtaaccgtttaatgccgaggctcta

SEQ ID NO: 138048 - DNA, 25 bp, Canis familiaris
gtaaccagttcgatcgagcggacac

SEQ ID NO: 138049 - DNA, 25 bp, Canis familiaris
gtaactaaactggtcgagcgatgga

SEQ ID NO: 138050 - DNA, 25 bp, Canis familiaris
gtacagaaaaagatccagaaggagc

SEQ ID NO: 138051 - DNA, 25 bp, Canis familiaris
gtaaggaataagaatgccaaatcag

SEQ ID NO: 138052 - DNA, 25 bp, Canis familiaris
gtacattgcaagaaccatgaaaaaa

SEQ ID NO: 138053 - DNA, 25 bp, Canis familiaris
gtaatcagccagaaccagaacatcc

SEQ ID NO: 138054 - DNA, 25 bp, Canis familiaris
gtaatcccagcttaaatctaccaat

SEQ ID NO: 138055 - DNA, 25 bp, Canis familiaris
gtaacccgccaggagcctgaagaat

SEQ ID NO: 138056 - DNA, 25 bp, Canis familiaris
gtaagcctaccagagccggagtgaa

SEQ ID NO: 138057 - DNA, 25 bp, Canis familiaris
gtacaggtaccatgaccaggcagaa

SEQ ID NO: 138058 - DNA, 25 bp, Canis familiaris
gtacaactcccatcagctagggaac

SEQ ID NO: 138059 - DNA, 25 bp, Canis familiaris
gtacacgtacgcacgcgcgtaagac

SEQ ID NO: 138060 - DNA, 25 bp, Canis familiaris
gtacaaagcacgaggccgaaatgag

SEQ ID NO: 138061 - DNA, 25 bp, Canis familiaris
gtacaaagcaccaggcgcatttatg

SEQ ID NO: 138062 - DNA, 25 bp, Canis familiaris
gtaaagagcaaccgatcgatccctg

SEQ ID NO: 138063 - DNA, 25 bp, Canis familiaris
gtacaagacaagcctgcacgtagcc

SEQ ID NO: 138064 - DNA, 25 bp, Canis familiaris
gtacaaggccagggaccatgcagct

SEQ ID NO: 138065 - DNA, 25 bp, Canis familiaris
gtaaatggctcagcagggtgcagcg

SEQ ID NO: 138066 - DNA, 25 bp, Canis familiaris
gtacatcacccagcaggtgtgcacc

SEQ ID NO: 138067 - DNA, 25 bp, Canis familiaris
gtacatactgcccaagaattgtctt

SEQ ID NO: 138068 - DNA, 25 bp, Canis familiaris
gtacatccctccatgaaatctatta

SEQ ID NO: 138069 - DNA, 25 bp, Canis familiaris
gtacaccgtcaagtagccattgttt

SEQ ID NO: 138070 - DNA, 25 bp, Canis familiaris
gtacatttgcttcatagcgcatttt

SEQ ID NO: 138071 - DNA, 25 bp, Canis familiaris
gtacagctctttggaacttctttct

SEQ ID NO: 138072 - DNA, 25 bp, Canis familiaris
gtacattatttccaaggtcatttca

SEQ ID NO: 138073 - DNA, 25 bp, Canis familiaris
gtacatgtatttggttgagtctctg

SEQ ID NO: 138074 - DNA, 25 bp, Canis familiaris
gtacatgtttgttgggatggctgtc

SEQ ID NO: 138075 - DNA, 25 bp, Canis familiaris
gtacaggtcgtctgagctgcctgtc

SEQ ID NO: 138076 - DNA, 25 bp, Canis familiaris
gtaatggagggctagacatgagcta

SEQ ID NO: 138077 - DNA, 25 bp, Canis familiaris
gtaatggatgtgattgcaagacaga

SEQ ID NO: 138078 - DNA, 25 bp, Canis familiaris
gtaaggtatgctgtacacaaagtag

SEQ ID NO: 138079 - DNA, 25 bp, Canis familiaris
tgtaagtctcagggtaaaaactaat

SEQ ID NO: 138080 - DNA, 25 bp, Canis familiaris
gtaagtatgccacacggaaagctaa

SEQ ID NO: 138081 - DNA, 25 bp, Canis familiaris
gtaagttccagctccaatagcgtat

SEQ ID NO: 138082 - DNA, 25 bp, Canis familiaris
gtacagttcccatcacgtaagtcag

SEQ ID NO: 138083 - DNA, 25 bp, Canis familiaris
gtaaaatgcccattcccatcaagac

SEQ ID NO: 138084 - DNA, 25 bp, Canis familiaris
gtaaattgatcacttgccccataac

SEQ ID NO: 138085 - DNA, 25 bp, Canis familiaris
gtacaattatcaattcccctgaaga

SEQ ID NO: 138086 - DNA, 25 bp, Canis familiaris
gtaaattatttttcctctgctaagg

SEQ ID NO: 138087 - DNA, 25 bp, Canis familiaris
gtaaattatattctctcccttgtta

SEQ ID NO: 138088 - DNA, 25 bp, Canis familiaris
gtaaaagcagtgcctgttacctttt

SEQ ID NO: 138089 - DNA, 25 bp, Canis familiaris
gtaaatgtggtgctgctttcctcac

SEQ ID NO: 138090 - DNA, 25 bp, Canis familiaris
gtaaatctggatagactgtattgcc

SEQ ID NO: 138091 - DNA, 25 bp, Canis familiaris
gtaaactgcagctatccggtatcca

SEQ ID NO: 138092 - DNA, 25 bp, Canis familiaris
gtaacctgatgcttaaggctattca

SEQ ID NO: 138093 - DNA, 25 bp, Canis familiaris
gtaaccgatgctccaaggactggcc

SEQ ID NO: 138094 - DNA, 25 bp, Canis familiaris
gtaaacgacacccgagaatgactct

SEQ ID NO: 138095 - DNA, 25 bp, Canis familiaris
gtaaaacagcattctggcagagata

SEQ ID NO: 138096 - DNA, 25 bp, Canis familiaris
gtaacaacacaaccatgcgcatgca

SEQ ID NO: 138097 - DNA, 25 bp, Canis familiaris
gtaaaaacataattggcgacttgaa

SEQ ID NO: 138098 - DNA, 25 bp, Canis familiaris
gtaaaaaccacacgaggattatata

SEQ ID NO: 138099 - DNA, 25 bp, Canis familiaris
gtaaataagccaaaagagttcaata

SEQ ID NO: 138100 - DNA, 25 bp, Canis familiaris
gtaacatcaactatactgtataaat

SEQ ID NO: 138101 - DNA, 25 bp, Canis familiaris
gtaattccacagatactgtttccag

SEQ ID NO: 138102 - DNA, 25 bp, Canis familiaris
gtaactcaaggtcactgccttctgg

SEQ ID NO: 138103 - DNA, 25 bp, Canis familiaris
gtaatttaggttgcgcttagctgga

SEQ ID NO: 138104 - DNA, 25 bp, Canis familiaris
gtaaatgtttctcgaccttgacgga

SEQ ID NO: 138105 - DNA, 25 bp, Canis familiaris
gtaaagctgtacagactttgcggtg

SEQ ID NO: 138106 - DNA, 25 bp, Canis familiaris
gtaaactgtactagtctatgtggga

SEQ ID NO: 138107 - DNA, 25 bp, Canis familiaris
gtaaacgctactgttgctttggcaa

SEQ ID NO: 138108 - DNA, 25 bp, Canis familiaris
gtaaaaattctcaatgtgttttcaa

SEQ ID NO: 138109 - DNA, 25 bp, Canis familiaris
gtaataggtattcaggatttgtaga

SEQ ID NO: 138110 - DNA, 25 bp, Canis familiaris
gtaatagtttcctttgatttgtggt

SEQ ID NO: 138111 - DNA, 25 bp, Canis familiaris
gtaaaggttccattcctgttgtgag

SEQ ID NO: 138112 - DNA, 25 bp, Canis familiaris
gtcaattggttccacttcaggtctc

SEQ ID NO: 138113 - DNA, 25 bp, Canis familiaris
gtacaagggtgcacttcatggtctc

SEQ ID NO: 138114 - DNA, 25 bp, Canis familiaris
gtacaggcctggagcttgcaggtcc

SEQ ID NO: 138115 - DNA, 25 bp, Canis familiaris
gtaaggcctggcggaaagagtcatc

SEQ ID NO: 138116 - DNA, 25 bp, Canis familiaris
gtacaacctatcgagataatgttca

SEQ ID NO: 138117 - DNA, 25 bp, Canis familiaris
gtacaaactcatctgaaatgtcacg

SEQ ID NO: 138118 - DNA, 25 bp, Canis familiaris
gtacacgagtatcgaaatgggcacg

SEQ ID NO: 138119 - DNA, 25 bp, Canis familiaris
gtaacttgtgtgtcagcaaggacaa

SEQ ID NO: 138120 - DNA, 25 bp, Canis familiaris
gtacagctccttctgacaagacaca

SEQ ID NO: 138121 - DNA, 25 bp, Canis familiaris
gtacatctgcctggctaacaaggac

SEQ ID NO: 138122 - DNA, 25 bp, Canis familiaris
gtaagccgtcgtaaacggcactcta

SEQ ID NO: 138123 - DNA, 25 bp, Canis familiaris
gtaaaaagcgtccaccgtgcattct

SEQ ID NO: 138124 - DNA, 25 bp, Canis familiaris
gtaacagaagtgaggccctgcacat

SEQ ID NO: 138125 - DNA, 25 bp, Canis familiaris
gtaaacacagtgatatgccccttaa

SEQ ID NO: 138126 - DNA, 25 bp, Canis familiaris
gtaatccggtgaagtgcctttccaa

SEQ ID NO: 138127 - DNA, 25 bp, Canis familiaris
gtaacacgtgtaaggattgttccca

SEQ ID NO: 138128 - DNA, 25 bp, Canis familiaris
gtacaaagcattataattttcctca

SEQ ID NO: 138129 - DNA, 25 bp, Canis familiaris
gtacacatacctatatttctttgct

SEQ ID NO: 138130 - DNA, 25 bp, Canis familiaris
gtacacaacccggagagtctgttca

SEQ ID NO: 138131 - DNA, 25 bp, Canis familiaris
gtacaacagccgcagagacctggac

SEQ ID NO: 138132 - DNA, 25 bp, Canis familiaris
gtgacaaccctgacaaacgtggacg

SEQ ID NO: 138133 - DNA, 25 bp, Canis familiaris
gtacaagccctgtaattttgctgac

SEQ ID NO: 138134 - DNA, 25 bp, Canis familiaris
gtacatcctccataatattctgctg

SEQ ID NO: 138135 - DNA, 25 bp, Canis familiaris
gtacatcttgcgaggaataggcttg

SEQ ID NO: 138136 - DNA, 25 bp, Canis familiaris
gtacatcctgcgaggaataggcctg

SEQ ID NO: 138137 - DNA, 25 bp, Canis familiaris
gtacatccatgggcgtggataccgt

SEQ ID NO: 138138 - DNA, 25 bp, Canis familiaris
gtacatcctgggaggattctattgt

SEQ ID NO: 138139 - DNA, 25 bp, Canis familiaris
gtaattcgggaccgacacttgagtc

SEQ ID NO: 138140 - DNA, 25 bp, Canis familiaris
gtaactggcttgacggacccagaac

SEQ ID NO: 138141 - DNA, 25 bp, Canis familiaris
gtaactcctggtggcaaaccaaaca

SEQ ID NO: 138142 - DNA, 25 bp, Canis familiaris
gtaacccgagttcactggcaaacat

SEQ ID NO: 138143 - DNA, 25 bp, Canis familiaris
gtaaacgccagtagtgaccaagaac

SEQ ID NO: 138144 - DNA, 25 bp, Canis familiaris
gtaaatgcacccaatggttcaaata

SEQ ID NO: 138145 - DNA, 25 bp, Canis familiaris
gtaactgccctactgtgtatagaca

SEQ ID NO: 138146 - DNA, 25 bp, Canis familiaris
gtaacagtcctcattgtacagccaa

SEQ ID NO: 138147 - DNA, 25 bp, Canis familiaris
gtaaaccgacacctgaaagccaaag

SEQ ID NO: 138148 - DNA, 25 bp, Canis familiaris
gtaaggtggcacaggattaccaaag

SEQ ID NO: 138149 - DNA, 25 bp, Canis familiaris
gtacaaattgcactgaacaatacca

SEQ ID NO: 138150 - DNA, 25 bp, Canis familiaris
gtaaaattaatattcaaagccacag

SEQ ID NO: 138151 - DNA, 25 bp, Canis familiaris
gtaagtgaaagtctcatcaacccga

SEQ ID NO: 138152 - DNA, 25 bp, Canis familiaris
gtaagtaatggtccccaagccgagc

SEQ ID NO: 138153 - DNA, 25 bp, Canis familiaris
gtaagatccgcgaggactaccgagc

SEQ ID NO: 138154 - DNA, 25 bp, Canis familiaris
gtaatatactacgggacttcacggt

SEQ ID NO: 138155 - DNA, 25 bp, Canis familiaris
gtaaatactatttctacttcatatg

SEQ ID NO: 138156 - DNA, 25 bp, Canis familiaris
gtaaaacatgttcctagctcatcct

SEQ ID NO: 138157 - DNA, 25 bp, Canis familiaris
gtaacacaaagtcctagctgccaag

SEQ ID NO: 138158 - DNA, 25 bp, Canis familiaris
gtaattgcaaagtttaccatgaact

SEQ ID NO: 138159 - DNA, 25 bp, Canis familiaris
gtgaatagctcagaagtaccttaca

SEQ ID NO: 138160 - DNA, 25 bp, Canis familiaris
gtaatcgcaacatagtacctgtcaa

SEQ ID NO: 138161 - DNA, 25 bp, Canis familiaris
gtacatggacactagaggatttgca

SEQ ID NO: 138162 - DNA, 25 bp, Canis familiaris
gtacatggaaatgagcagtcttact

SEQ ID NO: 138163 - DNA, 25 bp, Canis familiaris
gtcactggatctgaggacttatact

SEQ ID NO: 138164 - DNA, 25 bp, Canis familiaris
gtcactgacactgacctctgttagc

SEQ ID NO: 138165 - DNA, 25 bp, Canis familiaris
gtacaatcatctgtccatctcaata

SEQ ID NO: 138166 - DNA, 25 bp, Canis familiaris
gtacagtgttgttctcttgcaaatc

SEQ ID NO: 138167 - DNA, 25 bp, Canis familiaris
gtacagttcagttccttttttgcat

SEQ ID NO: 138168 - DNA, 25 bp, Canis familiaris
gtaacattgtgtagcctttttgtat

SEQ ID NO: 138169 - DNA, 25 bp, Canis familiaris
gtaattccgtcgtatattttatata

SEQ ID NO: 138170 - DNA, 25 bp, Canis familiaris
gtaattctgtggcggtttctatagg

SEQ ID NO: 138171 - DNA, 25 bp, Canis familiaris
gtaactctggggtcagccttttaga

SEQ ID NO: 138172 - DNA, 25 bp, Canis familiaris
gtaactcttggggccactaattgta

SEQ ID NO: 138173 - DNA, 25 bp, Canis familiaris
gtaacctgtgttgctcataaaatgt

SEQ ID NO: 138174 - DNA, 25 bp, Canis familiaris
gtaacccttccttagagaagtgccg

SEQ ID NO: 138175 - DNA, 25 bp, Canis familiaris
gtaacaggctttctcgagaagcacc

SEQ ID NO: 138176 - DNA, 25 bp, Canis familiaris
gtaatcaggtgtaggatggaaaaac

SEQ ID NO: 138177 - DNA, 25 bp, Canis familiaris
gtaacaggtgcaatggagtagacgg

SEQ ID NO: 138178 - DNA, 25 bp, Canis familiaris
gtaaatggggcagactatgatcgag

SEQ ID NO: 138179 - DNA, 25 bp, Canis familiaris
gtaacgccggggagcatgtgcaagt

SEQ ID NO: 138180 - DNA, 25 bp, Canis familiaris
gtaagtcctggacaccattaagttc

SEQ ID NO: 138181 - DNA, 25 bp, Canis familiaris
gtaagccacttacagcctagagagt

SEQ ID NO: 138182 - DNA, 25 bp, Canis familiaris
gtaactacttgattatggcatatgc

SEQ ID NO: 138183 - DNA, 25 bp, Canis familiaris
gtacactactggactcacaagcagc

SEQ ID NO: 138184 - DNA, 25 bp, Canis familiaris
gtacagcaactgaactctcatccat

SEQ ID NO: 138185 - DNA, 25 bp, Canis familiaris
gtacagagtatgtgccctcagcatc

SEQ ID NO: 138186 - DNA, 25 bp, Canis familiaris
gtacagagaagccatcacctcagat

SEQ ID NO: 138187 - DNA, 25 bp, Canis familiaris
gtacagatggcagaatgctccagaa

SEQ ID NO: 138188 - DNA, 25 bp, Canis familiaris
gtacagcaggcagttgacatggcta

SEQ ID NO: 138189 - DNA, 25 bp, Canis familiaris
gtacagggagtttcagtgcaccttc

SEQ ID NO: 138190 - DNA, 25 bp, Canis familiaris
gtaaagggttaattgacatctaaat

SEQ ID NO: 138191 - DNA, 25 bp, Canis familiaris
gtaaactatttacatggctccaaag

SEQ ID NO: 138192 - DNA, 25 bp, Canis familiaris
gtaactttttaattggcctgcgaca

SEQ ID NO: 138193 - DNA, 25 bp, Canis familiaris
gtacactacttttaaggccgtgaca

SEQ ID NO: 138194 - DNA, 25 bp, Canis familiaris
gtaactaccttatcaccttggagat

SEQ ID NO: 138195 - DNA, 25 bp, Canis familiaris
gtacactatcatgaaccccattggc

SEQ ID NO: 138196 - DNA, 25 bp, Canis familiaris
gtaacattaaagtccccgtggcagt

SEQ ID NO: 138197 - DNA, 25 bp, Canis familiaris
gtaaatatacaaggcctctggggaa

SEQ ID NO: 138198 - DNA, 25 bp, Canis familiaris
gtaagataacaagtcccaggtggtg

SEQ ID NO: 138199 - DNA, 25 bp, Canis familiaris
gtaatccttaatatcctagatggtg

SEQ ID NO: 138200 - DNA, 25 bp, Canis familiaris
gtaagccattgttcattcctaattt

SEQ ID NO: 138201 - DNA, 25 bp, Canis familiaris
gtaacgtctgtgtgttcttgactat

SEQ ID NO: 138202 - DNA, 25 bp, Canis familiaris
gtaacagtcttgcagccttgttttc

SEQ ID NO: 138203 - DNA, 25 bp, Canis familiaris
gtaaatctctgtatgcactttgctt

SEQ ID NO: 138204 - DNA, 25 bp, Canis familiaris
gtaagtcactacacactttctttgg

SEQ ID NO: 138205 - DNA, 25 bp, Canis familiaris
gtaacccatcacattctgaatttct

SEQ ID NO: 138206 - DNA, 25 bp, Canis familiaris
gtaacatctgctcgcattttttttt

SEQ ID NO: 138207 - DNA, 25 bp, Canis familiaris
gtaatgcctgcaaacttggtgcttg

SEQ ID NO: 138208 - DNA, 25 bp, Canis familiaris
gtacacacgacatattgtggtgtct

SEQ ID NO: 138209 - DNA, 25 bp, Canis familiaris
gtcagcctagaatattctccggttt

SEQ ID NO: 138210 - DNA, 25 bp, Canis familiaris
gtcacctaatactattgtgccagtg

SEQ ID NO: 138211 - DNA, 25 bp, Canis familiaris
gtacactatcatgagtttgagagac

SEQ ID NO: 138212 - DNA, 25 bp, Canis familiaris
gtcacacgtacttctggtgaggccc

SEQ ID NO: 138213 - DNA, 25 bp, Canis familiaris
gtacactgtaccttcattggttcct

SEQ ID NO: 138214 - DNA, 25 bp, Canis familiaris
gtaagtgtactctcttagtgtcaaa

SEQ ID NO: 138215 - DNA, 25 bp, Canis familiaris
gtaagtgtttcctttactgtagcag

SEQ ID NO: 138216 - DNA, 25 bp, Canis familiaris
gtaaatgtttcactttcctatagct

SEQ ID NO: 138217 - DNA, 25 bp, Canis familiaris
gtaaattttcagttgtcaattctat

SEQ ID NO: 138218 - DNA, 25 bp, Canis familiaris
gtaaaatttaggccgacattcgatt

SEQ ID NO: 138219 - DNA, 25 bp, Canis familiaris
gtaaacttcaagcacgtcatccata

SEQ ID NO: 138220 - DNA, 25 bp, Canis familiaris
gtaacaatattatacagttctgcca

SEQ ID NO: 138221 - DNA, 25 bp, Canis familiaris
gtcaccaatttcaacagggttccca

SEQ ID NO: 138222 - DNA, 25 bp, Canis familiaris
gtctaaactccttagggtctctaca

SEQ ID NO: 138223 - DNA, 25 bp, Canis familiaris
gtctcccaaccttaagaggctcttg

SEQ ID NO: 138224 - DNA, 25 bp, Canis familiaris
gtaacccacctgtgaggcggtgatg

SEQ ID NO: 138225 - DNA, 25 bp, Canis familiaris
gtaaaaacattgtgagtccttttat

SEQ ID NO: 138226 - DNA, 25 bp, Canis familiaris
gtccgaaacttgtgcaacctgttgt

SEQ ID NO: 138227 - DNA, 25 bp, Canis familiaris
gtaaacttcttgttaagactgttat

SEQ ID NO: 138228 - DNA, 25 bp, Canis familiaris
gtaacactttgtttatccactacta

SEQ ID NO: 138229 - DNA, 25 bp, Canis familiaris
gtacaactattcattacccttctca

SEQ ID NO: 138230 - DNA, 25 bp, Canis familiaris
gtaaatcatactacttttgcacttt

SEQ ID NO: 138231 - DNA, 25 bp, Canis familiaris
gtcagaatatagtgtacattgccat

SEQ ID NO: 138232 - DNA, 25 bp, Canis familiaris
gtcagaaagatgtgtctcagcagcc

SEQ ID NO: 138233 - DNA, 25 bp, Canis familiaris
gtaaagaatgagccctaacctccct

SEQ ID NO: 138234 - DNA, 25 bp, Canis familiaris
gtacaatgaattccctgaacccatc

SEQ ID NO: 138235 - DNA, 25 bp, Canis familiaris
gtacaagtgtgcaccagaaccctgc

SEQ ID NO: 138236 - DNA, 25 bp, Canis familiaris
gtacaacatggaaccaccacgtcac

SEQ ID NO: 138237 - DNA, 25 bp, Canis familiaris
gtacaaatgtgtacacacccctctt

SEQ ID NO: 138238 - DNA, 25 bp, Canis familiaris
gtacaagatgtgttactaccgcttt

SEQ ID NO: 138239 - DNA, 25 bp, Canis familiaris
gtcagacaagttcagtaaagctttt

SEQ ID NO: 138240 - DNA, 25 bp, Canis familiaris
gtaagcaagctgacatttgaaaact

SEQ ID NO: 138241 - DNA, 25 bp, Canis familiaris
gtaaggatgcttttatgaaactgta

SEQ ID NO: 138242 - DNA, 25 bp, Canis familiaris
gtaaatgtcttgcagtgaaagtggg

SEQ ID NO: 138243 - DNA, 25 bp, Canis familiaris
gtaaatagtgctgcagtgaacctgg

SEQ ID NO: 138244 - DNA, 25 bp, Canis familiaris
gtaacaaagatgccaatacacttgg

SEQ ID NO: 138245 - DNA, 25 bp, Canis familiaris
gtacacagcaactcaatgatacaag

SEQ ID NO: 138246 - DNA, 25 bp, Canis familiaris
gtacacacacactgatagaccaata

SEQ ID NO: 138247 - DNA, 25 bp, Canis familiaris
gtaaagcatcattttgagcctcagt

SEQ ID NO: 138248 - DNA, 25 bp, Canis familiaris
gtaacagctctgtgcttgtagcagt

SEQ ID NO: 138249 - DNA, 25 bp, Canis familiaris
gtacacgtgcgtacacgtacgtaca

SEQ ID NO: 138250 - DNA, 25 bp, Canis familiaris
gtacacccagtaaagataatctaca

SEQ ID NO: 138251 - DNA, 25 bp, Canis familiaris
gtacacaccttgtccgttgacaaca

SEQ ID NO: 138252 - DNA, 25 bp, Canis familiaris
gtaacttccaagtgttgcacaacat

SEQ ID NO: 138253 - DNA, 25 bp, Canis familiaris
gtacaacctaagttgtcccatccat

SEQ ID NO: 138254 - DNA, 25 bp, Canis familiaris
gtacactcgtaaggttcactttcat

SEQ ID NO: 138255 - DNA, 25 bp, Canis familiaris
gtcaattttagagagatcccttcac

SEQ ID NO: 138256 - DNA, 25 bp, Canis familiaris
gtaaatttctaaaatgctccccact

SEQ ID NO: 138257 - DNA, 25 bp, Canis familiaris
gtaatgtttcttgagaaccccacta

SEQ ID NO: 138258 - DNA, 25 bp, Canis familiaris
gtaatacttcttgatgaactttaat

SEQ ID NO: 138259 - DNA, 25 bp, Canis familiaris
gtaaactgtgttaattggtaatgac

SEQ ID NO: 138260 - DNA, 25 bp, Canis familiaris
gtaaacagattttttttcagcatga

SEQ ID NO: 138261 - DNA, 25 bp, Canis familiaris
gtaaacatcacttattcgttagtat

SEQ ID NO: 138262 - DNA, 25 bp, Canis familiaris
gtaaccatcagtttgttttcagtat

SEQ ID NO: 138263 - DNA, 25 bp, Canis familiaris
gtaacactcagtttgttctctatgg

SEQ ID NO: 138264 - DNA, 25 bp, Canis familiaris
gtaaatgccatgtgtgtgctgcttt

SEQ ID NO: 138265 - DNA, 25 bp, Canis familiaris
gtaaatcgtgtaggcctctgcttga

SEQ ID NO: 138266 - DNA, 25 bp, Canis familiaris
gtaaaatgtagagccattgcaatgc

SEQ ID NO: 138267 - DNA, 25 bp, Canis familiaris
gtaaattctcaagcactgtgaatgg

SEQ ID NO: 138268 - DNA, 25 bp, Canis familiaris
gtaaaggtctgattcctggaattgt

SEQ ID NO: 138269 - DNA, 25 bp, Canis familiaris
gtacacgggtgatgtatggcattgt

SEQ ID NO: 138270 - DNA, 25 bp, Canis familiaris
gtacacgtgagatgtgtctggccag

SEQ ID NO: 138271 - DNA, 25 bp, Canis familiaris
gtcccttcgaatcatcgagccatgt

SEQ ID NO: 138272 - DNA, 25 bp, Canis familiaris
gtacacttcagaaaactgtgacatg

SEQ ID NO: 138273 - DNA, 25 bp, Canis familiaris
gtacactttgcgaacagattgcctc

SEQ ID NO: 138274 - DNA, 25 bp, Canis familiaris
gtaatctgtgatatgaagttggcta

SEQ ID NO: 138275 - DNA, 25 bp, Canis familiaris
gtaatctggttttgagctctggaat

SEQ ID NO: 138276 - DNA, 25 bp, Canis familiaris
gtaattggtatgtagccctggtgct

SEQ ID NO: 138277 - DNA, 25 bp, Canis familiaris
gtaaatggtatttcctctgtctgtt

SEQ ID NO: 138278 - DNA, 25 bp, Canis familiaris
gtcaggaggttcactctctgggatt

SEQ ID NO: 138279 - DNA, 25 bp, Canis familiaris
gtcacaaaatgtcactcttccgatt

SEQ ID NO: 138280 - DNA, 25 bp, Canis familiaris
gtaactaagtgggctcttcagaagt

SEQ ID NO: 138281 - DNA, 25 bp, Canis familiaris
gtaagccaaggggtccacattggcc

SEQ ID NO: 138282 - DNA, 25 bp, Canis familiaris
tgatctaccaagtggctaaacggac

SEQ ID NO: 138283 - DNA, 25 bp, Canis familiaris
tgcttagccaactccgattacggac

SEQ ID NO: 138284 - DNA, 25 bp, Canis familiaris
gtaagcaatactaccgtaacgaaca

SEQ ID NO: 138285 - DNA, 25 bp, Canis familiaris
gtaagcaattcaatccggaactaac

SEQ ID NO: 138286 - DNA, 25 bp, Canis familiaris
gtaactcattacagctgggcactat

SEQ ID NO: 138287 - DNA, 25 bp, Canis familiaris
gtaactgaaaattgcattgggaatc

SEQ ID NO: 138288 - DNA, 25 bp, Canis familiaris
gtcataaaaagcacttttaattacg

SEQ ID NO: 138289 - DNA, 25 bp, Canis familiaris
gtaataaaacaggcttcatttatta

SEQ ID NO: 138290 - DNA, 25 bp, Canis familiaris
gtaaggaagaaaccattatctagtc

SEQ ID NO: 138291 - DNA, 25 bp, Canis familiaris
gtaactgacaggcatattgattcta

SEQ ID NO: 138292 - DNA, 25 bp, Canis familiaris
gtaagtactcgcttttatctctgac

SEQ ID NO: 138293 - DNA, 25 bp, Canis familiaris
gtaatgttcacatgttgcttcctac

SEQ ID NO: 138294 - DNA, 25 bp, Canis familiaris
gtcaaggtcagctgttgttaaagcc

SEQ ID NO: 138295 - DNA, 25 bp, Canis familiaris
gtcataagcttgcgttgattaagtc

SEQ ID NO: 138296 - DNA, 25 bp, Canis familiaris
gtcataagcttgcgttgattaagtc

SEQ ID NO: 138297 - DNA, 25 bp, Canis familiaris
gtcaaacctggggaagtcacgttgg

SEQ ID NO: 138298 - DNA, 25 bp, Canis familiaris
gtaagcccagagggaattccagggg

SEQ ID NO: 138299 - DNA, 25 bp, Canis familiaris
gtaagaccaagccgtattccaaagt

SEQ ID NO: 138300 - DNA, 25 bp, Canis familiaris
gtaagcctcacgccagtaaactaag

SEQ ID NO: 138301 - DNA, 25 bp, Canis familiaris
gtaacctcaagttctcaacctaaga

SEQ ID NO: 138302 - DNA, 25 bp, Canis familiaris
gtaacactaggttctctgacctctt

SEQ ID NO: 138303 - DNA, 25 bp, Canis familiaris
gtaaattaagttccttctatgccta

SEQ ID NO: 138304 - DNA, 25 bp, Canis familiaris
gtaaacttatttccattctgtctca

SEQ ID NO: 138305 - DNA, 25 bp, Canis familiaris
gtaactctttgtactgcattctgtg

SEQ ID NO: 138306 - DNA, 25 bp, Canis familiaris
gtaactgctttttgtatttggagag

SEQ ID NO: 138307 - DNA, 25 bp, Canis familiaris
gtaacacattttctttcttgatagg

SEQ ID NO: 138308 - DNA, 25 bp, Canis familiaris
gtaacatatcgttctttccttgata

SEQ ID NO: 138309 - DNA, 25 bp, Canis familiaris
gtaatcaacttgcctttgtctttaa

SEQ ID NO: 138310 - DNA, 25 bp, Canis familiaris
gtaaaaccatgccttcatgtttaga

SEQ ID NO: 138311 - DNA, 25 bp, Canis familiaris
gtaaacacctgagttttccataagt

SEQ ID NO: 138312 - DNA, 25 bp, Canis familiaris
gtaaaccctaggaatctgccttgag

SEQ ID NO: 138313 - DNA, 25 bp, Canis familiaris
gtaaattgtgcattggccatctcct

SEQ ID NO: 138314 - DNA, 25 bp, Canis familiaris
gtacaatcgacttgtgttgcatcct

SEQ ID NO: 138315 - DNA, 25 bp, Canis familiaris
gtcacagccagagatggtggacatt

SEQ ID NO: 138316 - DNA, 25 bp, Canis familiaris
gtaagctcgatggcagggacactat

SEQ ID NO: 138317 - DNA, 25 bp, Canis familiaris
gtaacgcttccaaggacctcaaggt

SEQ ID NO: 138318 - DNA, 25 bp, Canis familiaris
gtaatttacacttggacagccgggt

SEQ ID NO: 138319 - DNA, 25 bp, Canis familiaris
gtaatacatactatagcaactggga

SEQ ID NO: 138320 - DNA, 25 bp, Canis familiaris
gtaaactcgcgaaaagcctaggtat

SEQ ID NO: 138321 - DNA, 25 bp, Canis familiaris
gtcgttgggctacaaggtagtttca

SEQ ID NO: 138322 - DNA, 25 bp, Canis familiaris
gtgggaggcccacagggtaactcaa

SEQ ID NO: 138323 - DNA, 25 bp, Canis familiaris
gtcaggggcccagactgggaaccaa

SEQ ID NO: 138324 - DNA, 25 bp, Canis familiaris
gtaagtggccgtgactgggcacagc

SEQ ID NO: 138325 - DNA, 25 bp, Canis familiaris
gtaactgtctttgacttggaccttg

SEQ ID NO: 138326 - DNA, 25 bp, Canis familiaris
gtaacctttgtgaaattgtatcctt

SEQ ID NO: 138327 - DNA, 25 bp, Canis familiaris
gtaacctttgtctacagtgaattct

SEQ ID NO: 138328 - DNA, 25 bp, Canis familiaris
gtacaacttgtcttagcacgagata

SEQ ID NO: 138329 - DNA, 25 bp, Canis familiaris
gtacaaccagatcctcagaattgaa

SEQ ID NO: 138330 - DNA, 25 bp, Canis familiaris
gtacaagcagaccctgaaaatgatc

SEQ ID NO: 138331 - DNA, 25 bp, Canis familiaris
gtaagcagctgagtccttaacgact

SEQ ID NO: 138332 - DNA, 25 bp, Canis familiaris
gtaacctattccttagtctcatatt

SEQ ID NO: 138333 - DNA, 25 bp, Canis familiaris
gtaacaaatcccacacattctaata

SEQ ID NO: 138334 - DNA, 25 bp, Canis familiaris
gtacaagtgaccaactcaattccag

SEQ ID NO: 138335 - DNA, 25 bp, Canis familiaris
gtaaagcagcctcagctcaagtcag

SEQ ID NO: 138336 - DNA, 25 bp, Canis familiaris
gtaacacacctcaccaagttttgta

SEQ ID NO: 138337 - DNA, 25 bp, Canis familiaris
gtaacccagtgcactgaggttttcg

SEQ ID NO: 138338 - DNA, 25 bp, Canis familiaris
gtaacccaggtggctgtggggcttc

SEQ ID NO: 138339 - DNA, 25 bp, Canis familiaris
gtaaacagccgcgactgggggtgtc

SEQ ID NO: 138340 - DNA, 25 bp, Canis familiaris
gtcaaaacctgctccgaggtggacg

SEQ ID NO: 138341 - DNA, 25 bp, Canis familiaris
gtcaaccaggacttcgtggtgtgga

SEQ ID NO: 138342 - DNA, 25 bp, Canis familiaris
gtaaatagttcactctgtgtgtgtg

SEQ ID NO: 138343 - DNA, 25 bp, Canis familiaris
gtaaataagatcctctatctgattt

SEQ ID NO: 138344 - DNA, 25 bp, Canis familiaris
gtaagaatagaccctgtatataata

SEQ ID NO: 138345 - DNA, 25 bp, Canis familiaris
gtaaataacagtccctttaaatgtg

SEQ ID NO: 138346 - DNA, 25 bp, Canis familiaris
gtaaaaccagatcccttatattgtg

SEQ ID NO: 138347 - DNA, 25 bp, Canis familiaris
gtaaatcacaagtccctgttatact

SEQ ID NO: 138348 - DNA, 25 bp, Canis familiaris
gtaaattctagtcctctttctactc

SEQ ID NO: 138349 - DNA, 25 bp, Canis familiaris
gtaacattctagcatctttatctga

SEQ ID NO: 138350 - DNA, 25 bp, Canis familiaris
gtaactttgcatgcacttgtataaa

SEQ ID NO: 138351 - DNA, 25 bp, Canis familiaris
gtaagattcctgtcctgtagaacaa

SEQ ID NO: 138352 - DNA, 25 bp, Canis familiaris
gtaaataccatgagttcgacctaat

SEQ ID NO: 138353 - DNA, 25 bp, Canis familiaris
gtaaaatctatgagtctctacacaa

SEQ ID NO: 138354 - DNA, 25 bp, Canis familiaris
gtaaagatttcggatctctcctcgt

SEQ ID NO: 138355 - DNA, 25 bp, Canis familiaris
gtaaatgaattcaaactcttctctg

SEQ ID NO: 138356 - DNA, 25 bp, Canis familiaris
gtaatttatcctaagccttcctgtt

SEQ ID NO: 138357 - DNA, 25 bp, Canis familiaris
gtaatttactctttgtttccttcat

SEQ ID NO: 138358 - DNA, 25 bp, Canis familiaris
gtaattttgcctttcttaatatgtt

SEQ ID NO: 138359 - DNA, 25 bp, Canis familiaris
gtaattgcttcctcttgtaatcttt

SEQ ID NO: 138360 - DNA, 25 bp, Canis familiaris
gtaattctccactatattaactcta

SEQ ID NO: 138361 - DNA, 25 bp, Canis familiaris
gtaattctccaggttatactccttt

SEQ ID NO: 138362 - DNA, 25 bp, Canis familiaris
gtaatattccagggtatatgtgtgt

SEQ ID NO: 138363 - DNA, 25 bp, Canis familiaris
gtgaaaaccggggtgagctcagtta

SEQ ID NO: 138364 - DNA, 25 bp, Canis familiaris
gtaagaccttggctggaggagtcta

SEQ ID NO: 138365 - DNA, 25 bp, Canis familiaris
gtaatgcccttttgtggaagaattt

SEQ ID NO: 138366 - DNA, 25 bp, Canis familiaris
gtaacacctggccagcctgaagaaa

SEQ ID NO: 138367 - DNA, 25 bp, Canis familiaris
gtaaacccagaaccgagatcacaca

SEQ ID NO: 138368 - DNA, 25 bp, Canis familiaris
gtaaaccataacccatagtcacata

SEQ ID NO: 138369 - DNA, 25 bp, Canis familiaris
gtaagaactaccgctcagtcataag

SEQ ID NO: 138370 - DNA, 25 bp, Canis familiaris
gtcaagtactccggaccgataacgt

SEQ ID NO: 138371 - DNA, 25 bp, Canis familiaris
gtcacgatatgctctagaccgtgaa

SEQ ID NO: 138372 - DNA, 25 bp, Canis familiaris
gtcacttactactcaggggaaaaag

SEQ ID NO: 138373 - DNA, 25 bp, Canis familiaris
gtcaggtacttgtctatagggctaa

SEQ ID NO: 138374 - DNA, 25 bp, Canis familiaris
gtcaggtttatcagaagggatgaga

SEQ ID NO: 138375 - DNA, 25 bp, Canis familiaris
gtcaagtgtgcgaggaacgcggaag

SEQ ID NO: 138376 - DNA, 25 bp, Canis familiaris
gtaagcgatctggggaggacggcat

SEQ ID NO: 138377 - DNA, 25 bp, Canis familiaris
gtaacgacggagaatggcagctggc

SEQ ID NO: 138378 - DNA, 25 bp, Canis familiaris
gtaacgtcctacaacggatggccag

SEQ ID NO: 138379 - DNA, 25 bp, Canis familiaris
gtaaccctggaccacaagatggcaa

SEQ ID NO: 138380 - DNA, 25 bp, Canis familiaris
gtaactaggtcccaaagatgcaaac

SEQ ID NO: 138381 - DNA, 25 bp, Canis familiaris
gtaactcatgttacagatcaagagc

SEQ ID NO: 138382 - DNA, 25 bp, Canis familiaris
gtaatctcatgctcagaagatggcc

SEQ ID NO: 138383 - DNA, 25 bp, Canis familiaris
gtaatgcttgatgcaggatctgaac

SEQ ID NO: 138384 - DNA, 25 bp, Canis familiaris
gtaagggattgcggatctgattcaa

SEQ ID NO: 138385 - DNA, 25 bp, Canis familiaris
gtaaatggtggctgattgctctcta

SEQ ID NO: 138386 - DNA, 25 bp, Canis familiaris
gtaaaggtcaattgcacctctctac

SEQ ID NO: 138387 - DNA, 25 bp, Canis familiaris
gtaaagcctcacagatgctcttaat

SEQ ID NO: 138388 - DNA, 25 bp, Canis familiaris
gtcaatcgcccgggcaagtctgaat

SEQ ID NO: 138389 - DNA, 25 bp, Canis familiaris
gtaaggcccagtgcaaacagacttg

SEQ ID NO: 138390 - DNA, 25 bp, Canis familiaris
gtaaggcacaagtgcccccattgtg

SEQ ID NO: 138391 - DNA, 25 bp, Canis familiaris
gtaaggaaaggagcagccgccatgt

SEQ ID NO: 138392 - DNA, 25 bp, Canis familiaris
gtcaaggaagcggccgaggccttcc

SEQ ID NO: 138393 - DNA, 25 bp, Canis familiaris
gtaaggagtgtggggacgccttccg

SEQ ID NO: 138394 - DNA, 25 bp, Canis familiaris
gtcatgggtgggcggaagccctcgc

SEQ ID NO: 138395 - DNA, 25 bp, Canis familiaris
gtcaggaggtggtggactccttctg

SEQ ID NO: 138396 - DNA, 25 bp, Canis familiaris
gtgagggaagggcaccttcagcctg

SEQ ID NO: 138397 - DNA, 25 bp, Canis familiaris
gtaacgtcaggccaagcctacagcc

SEQ ID NO: 138398 - DNA, 25 bp, Canis familiaris
gtcaaaatgcgtcaagcctaggccg

SEQ ID NO: 138399 - DNA, 25 bp, Canis familiaris
gtaaaactactagggccagctgcca

SEQ ID NO: 138400 - DNA, 25 bp, Canis familiaris
gtaaaattcagtggcccaccaccac

SEQ ID NO: 138401 - DNA, 25 bp, Canis familiaris
gtaaaggtcattgcagccaccaaca

SEQ ID NO: 138402 - DNA, 25 bp, Canis familiaris
gtaaagagtcatcggagcccaatta

SEQ ID NO: 138403 - DNA, 25 bp, Canis familiaris
gtaagaagtcagtgtctccctctga

SEQ ID NO: 138404 - DNA, 25 bp, Canis familiaris
tgtaagaattggggttcctcctact

SEQ ID NO: 138405 - DNA, 25 bp, Canis familiaris
gtaattattggctctacattcctca

SEQ ID NO: 138406 - DNA, 25 bp, Canis familiaris
gtaatttcatgtctaacttggtata

SEQ ID NO: 138407 - DNA, 25 bp, Canis familiaris
gtaattttcttctccattggaataa

SEQ ID NO: 138408 - DNA, 25 bp, Canis familiaris
gtaacgtatcgtcacaattggagta

SEQ ID NO: 138409 - DNA, 25 bp, Canis familiaris
gtaacgtcctgtacaagacttggaa

SEQ ID NO: 138410 - DNA, 25 bp, Canis familiaris
gtcacccccgaggaaatctttacat

SEQ ID NO: 138411 - DNA, 25 bp, Canis familiaris
gtcaagcccacaaggagggttaaag

SEQ ID NO: 138412 - DNA, 25 bp, Canis familiaris
gtaacaggctaaccgggactctaag

SEQ ID NO: 138413 - DNA, 25 bp, Canis familiaris
gtaatctcgtaattcgggaccgaca

SEQ ID NO: 138414 - DNA, 25 bp, Canis familiaris
gtaactcttgatttcggtgtcctga

SEQ ID NO: 138415 - DNA, 25 bp, Canis familiaris
gtaacatctggtttccagtcccatc

SEQ ID NO: 138416 - DNA, 25 bp, Canis familiaris
gtaagttggtgatgacggctccact

SEQ ID NO: 138417 - DNA, 25 bp, Canis familiaris
gtcaagtggccgtggctggactact

SEQ ID NO: 138418 - DNA, 25 bp, Canis familiaris
gtcaagggctggctgagctggactt

SEQ ID NO: 138419 - DNA, 25 bp, Canis familiaris
gtcaagaggctgagaatttactttt

SEQ ID NO: 138420 - DNA, 25 bp, Canis familiaris
gtaaggctgtgtaagatttgttttt

SEQ ID NO: 138421 - DNA, 25 bp, Canis familiaris
gtcccgcggtgacgtattgtttagg

SEQ ID NO: 138422 - DNA, 25 bp, Canis familiaris
gtccgggggcacgatttatttgaca

SEQ ID NO: 138423 - DNA, 25 bp, Canis familiaris
gtaagtggggaccactcttgcccac

SEQ ID NO: 138424 - DNA, 25 bp, Canis familiaris
gtaagagggtgctcctgcttgatcc

SEQ ID NO: 138425 - DNA, 25 bp, Canis familiaris
gtaacagcggtgaacctggtgctcc

SEQ ID NO: 138426 - DNA, 25 bp, Canis familiaris
gtaactgcccgaggcctgagtgatc

SEQ ID NO: 138427 - DNA, 25 bp, Canis familiaris
gtcaagctggcccagtccaatgtgt

SEQ ID NO: 138428 - DNA, 25 bp, Canis familiaris
gtcaccgggccattcacaagacggt

SEQ ID NO: 138429 - DNA, 25 bp, Canis familiaris
gtctccgtagtatttcagtaccgct

SEQ ID NO: 138430 - DNA, 25 bp, Canis familiaris
gtcatttctactctacagtacctgc

SEQ ID NO: 138431 - DNA, 25 bp, Canis familiaris
gtcacttcaaacaaaactcatcccc

SEQ ID NO: 138432 - DNA, 25 bp, Canis familiaris
gtaaccatgaagctgaactcaccac

SEQ ID NO: 138433 - DNA, 25 bp, Canis familiaris
gtaaacatgaccttaaccagtgact

SEQ ID NO: 138434 - DNA, 25 bp, Canis familiaris
gtaagagaaccccagaacactccag

SEQ ID NO: 138435 - DNA, 25 bp, Canis familiaris
gtaaagaaatcgcaagaacataata

SEQ ID NO: 138436 - DNA, 25 bp, Canis familiaris
gtaaagccaatctgcaaaactgtat

SEQ ID NO: 138437 - DNA, 25 bp, Canis familiaris
gtaacacctaaggcaaaactttatg

SEQ ID NO: 138438 - DNA, 25 bp, Canis familiaris
gtaacacctaaagcaaactgtatgg

SEQ ID NO: 138439 - DNA, 25 bp, Canis familiaris
gtaatccctcaatgtgcaaacttcg

SEQ ID NO: 138440 - DNA, 25 bp, Canis familiaris
gtcagaccctactggctaattcaca

SEQ ID NO: 138441 - DNA, 25 bp, Canis familiaris
gtcagtgaccatcccgagctgaata

SEQ ID NO: 138442 - DNA, 25 bp, Canis familiaris
gtcaggacgtgcagggcggaggaga

SEQ ID NO: 138443 - DNA, 25 bp, Canis familiaris
gtaatgacccggaggcataggaaag

SEQ ID NO: 138444 - DNA, 25 bp, Canis familiaris
gtaatgacccttgaggatcatgtac

SEQ ID NO: 138445 - DNA, 25 bp, Canis familiaris
gtaaactccttgaatgtctctgcta

SEQ ID NO: 138446 - DNA, 25 bp, Canis familiaris
gtaaagctttctctggctgagctcc

SEQ ID NO: 138447 - DNA, 25 bp, Canis familiaris
gtaaacttattgttgtgccagtgct

SEQ ID NO: 138448 - DNA, 25 bp, Canis familiaris
gtaaaaatatgttgtgtgcgtgtgt

SEQ ID NO: 138449 - DNA, 25 bp, Canis familiaris
gtaagaaacaagtttgtgatgatgc

SEQ ID NO: 138450 - DNA, 25 bp, Canis familiaris
gtaagaagtctaccttgctgttcct

SEQ ID NO: 138451 - DNA, 25 bp, Canis familiaris
gtaaaactctagcagttgtaactgg

SEQ ID NO: 138452 - DNA, 25 bp, Canis familiaris
gtaatccagccttaatgcttgtaac

SEQ ID NO: 138453 - DNA, 25 bp, Canis familiaris
gtaaccgccattatctgggagcacc

SEQ ID NO: 138454 - DNA, 25 bp, Canis familiaris
gtaatctttaatcttgggcagcccc

SEQ ID NO: 138455 - DNA, 25 bp, Canis familiaris
gtaagctttaatcctatggttgtca

SEQ ID NO: 138456 - DNA, 25 bp, Canis familiaris
gtaactttaatggcaagcaatttca

SEQ ID NO: 138457 - DNA, 25 bp, Canis familiaris
gtaacatttacttcagcatctattt

SEQ ID NO: 138458 - DNA, 25 bp, Canis familiaris
gtaacttatggcaacaccttctttg

SEQ ID NO: 138459 - DNA, 25 bp, Canis familiaris
gtaaacatactgagcctctgtctgt

SEQ ID NO: 138460 - DNA, 25 bp, Canis familiaris
gtaaacagttgcaccactgacctgg

SEQ ID NO: 138461 - DNA, 25 bp, Canis familiaris
gtcaaccagttaaccctgttcattc

SEQ ID NO: 138462 - DNA, 25 bp, Canis familiaris
gtcaacgaggtagtctgccgttcat

SEQ ID NO: 138463 - DNA, 25 bp, Canis familiaris
gtaactgttgcatctctcaggcatt

SEQ ID NO: 138464 - DNA, 25 bp, Canis familiaris
gtaacatgtgttcttcgtcatttga

SEQ ID NO: 138465 - DNA, 25 bp, Canis familiaris
gtaagtctgagtctttgtaattatt

SEQ ID NO: 138466 - DNA, 25 bp, Canis familiaris
gtaagtctcttcctgttgtaaacac

SEQ ID NO: 138467 - DNA, 25 bp, Canis familiaris
gtaagccctgagatcttgaacacca

SEQ ID NO: 138468 - DNA, 25 bp, Canis familiaris
gtaactcctatttttgatatctcct

SEQ ID NO: 138469 - DNA, 25 bp, Canis familiaris
gtaagctccattaactcaaactcat

SEQ ID NO: 138470 - DNA, 25 bp, Canis familiaris
gtaagcccttaagatctcagtgatc

SEQ ID NO: 138471 - DNA, 25 bp, Canis familiaris
gtaacacagattaaactgctgggac

SEQ ID NO: 138472 - DNA, 25 bp, Canis familiaris
gtcaaaagttgatccagctggcgtg

SEQ ID NO: 138473 - DNA, 25 bp, Canis familiaris
gtcaaaggggccccagtgggctgtg

SEQ ID NO: 138474 - DNA, 25 bp, Canis familiaris
gtcaacaagcgggcgccacagatgg

SEQ ID NO: 138475 - DNA, 25 bp, Canis familiaris
gtcacgcaacgcacgttcgtgggga

SEQ ID NO: 138476 - DNA, 25 bp, Canis familiaris
gtaagacccttctcctggagaggag

SEQ ID NO: 138477 - DNA, 25 bp, Canis familiaris
gtaagacctttgggtcgaggcagag

SEQ ID NO: 138478 - DNA, 25 bp, Canis familiaris
gtaaacctgttgctgggagtgaatc

SEQ ID NO: 138479 - DNA, 25 bp, Canis familiaris
gtaagtcacttctggtagatcgaac

SEQ ID NO: 138480 - DNA, 25 bp, Canis familiaris
gtaacttatctcggcgtagttgccc

SEQ ID NO: 138481 - DNA, 25 bp, Canis familiaris
gtaattgaaatctgcgtatgttctc

SEQ ID NO: 138482 - DNA, 25 bp, Canis familiaris
gtaatccacaacttcagggcttcac

SEQ ID NO: 138483 - DNA, 25 bp, Canis familiaris
gtaacacacttcttcagatgtttga

SEQ ID NO: 138484 - DNA, 25 bp, Canis familiaris
gtaacaatttcttgaggttctgtgt

SEQ ID NO: 138485 - DNA, 25 bp, Canis familiaris
gtaaacgtgtttagctgaatctgtt

SEQ ID NO: 138486 - DNA, 25 bp, Canis familiaris
gtaacacagtgtttcctaatgtatt

SEQ ID NO: 138487 - DNA, 25 bp, Canis familiaris
gtaacaagactcctcaccaatattt

SEQ ID NO: 138488 - DNA, 25 bp, Canis familiaris
gtaaaaactcctcctagaagctatc

SEQ ID NO: 138489 - DNA, 25 bp, Canis familiaris
gtaaaaagccctgctcaacatctac

SEQ ID NO: 138490 - DNA, 25 bp, Canis familiaris
gtaaaaaccctcctttatgcatagc

SEQ ID NO: 138491 - DNA, 25 bp, Canis familiaris
gtaagagaatctttgccttcgtaag

SEQ ID NO: 138492 - DNA, 25 bp, Canis familiaris
gtaacagttcatttctttcattgga

SEQ ID NO: 138493 - DNA, 25 bp, Canis familiaris
gtaacagattcatcccgtctaatac

SEQ ID NO: 138494 - DNA, 25 bp, Canis familiaris
gtaaaaccatccagccatttgacac

SEQ ID NO: 138495 - DNA, 25 bp, Canis familiaris
gtcaaatgccctgtacaatgttaac

SEQ ID NO: 138496 - DNA, 25 bp, Canis familiaris
gtcaagaaggctgtaaatgccaaga

SEQ ID NO: 138497 - DNA, 25 bp, Canis familiaris
gtcaagaaggtgagatctgccccgg

SEQ ID NO: 138498 - DNA, 25 bp, Canis familiaris
gtaagagagattgggttcctctcgg

SEQ ID NO: 138499 - DNA, 25 bp, Canis familiaris
gtcaagacgattcgctgattcccca

SEQ ID NO: 138500 - DNA, 25 bp, Canis familiaris
gtaatggccaaatgcattccctcat

SEQ ID NO: 138501 - DNA, 25 bp, Canis familiaris
gtaacctatacactgcagttccatc

SEQ ID NO: 138502 - DNA, 25 bp, Canis familiaris
gtaacagcatataaggatcttcctc

SEQ ID NO: 138503 - DNA, 25 bp, Canis familiaris
gtaacagcactgcaccagctgtacc

SEQ ID NO: 138504 - DNA, 25 bp, Canis familiaris
gtcataagactaccgccgtgtcatc

SEQ ID NO: 138505 - DNA, 25 bp, Canis familiaris
gtcagaccagtaagcccgttctggg

SEQ ID NO: 138506 - DNA, 25 bp, Canis familiaris
gtaagctgctctatgtgccagttcg

SEQ ID NO: 138507 - DNA, 25 bp, Canis familiaris
gtaactcatcgaagcccagcttacc

SEQ ID NO: 138508 - DNA, 25 bp, Canis familiaris
gtaactacagcatcccagcttgaga

SEQ ID NO: 138509 - DNA, 25 bp, Canis familiaris
gtaacctgcaggtccaattctggca

SEQ ID NO: 138510 - DNA, 25 bp, Canis familiaris
gtaagcctgcaggtcaatcgcggac

SEQ ID NO: 138511 - DNA, 25 bp, Canis familiaris
gtaacctcactttactgcagagcag

SEQ ID NO: 138512 - DNA, 25 bp, Canis familiaris
gtaaccaagttctatagctgcactg

SEQ ID NO: 138513 - DNA, 25 bp, Canis familiaris
gtaaacacttcttgatgatcatgtc

SEQ ID NO: 138514 - DNA, 25 bp, Canis familiaris
gtaagcacctacaagagatagttgc

SEQ ID NO: 138515 - DNA, 25 bp, Canis familiaris
gtaacctcagaaagcaagaatgtga

SEQ ID NO: 138516 - DNA, 25 bp, Canis familiaris
gtcaacattcaatatgaagtcattg

SEQ ID NO: 138517 - DNA, 25 bp, Canis familiaris
gtaactgcacaattatgccaatcac

SEQ ID NO: 138518 - DNA, 25 bp, Canis familiaris
gtaaccaagaattccatatccacct

SEQ ID NO: 138519 - DNA, 25 bp, Canis familiaris
gtaacagaacagactttaccacctg

SEQ ID NO: 138520 - DNA, 25 bp, Canis familiaris
gtaaacaaccttagtgtccaccatg

SEQ ID NO: 138521 - DNA, 25 bp, Canis familiaris
gtcaaattactatattgtcaacctg

SEQ ID NO: 138522 - DNA, 25 bp, Canis familiaris
gtaactgtattatcatcttcaaact

SEQ ID NO: 138523 - DNA, 25 bp, Canis familiaris
gtaacgttctataactccaacatgt

SEQ ID NO: 138524 - DNA, 25 bp, Canis familiaris
gtaatgcggttatagcgaacactgg

SEQ ID NO: 138525 - DNA, 25 bp, Canis familiaris
gtaatgccgttgtacagctcatacc

SEQ ID NO: 138526 - DNA, 25 bp, Canis familiaris
gtaattcttaggccagctgcagcac

SEQ ID NO: 138527 - DNA, 25 bp, Canis familiaris
gtaatgacgtaggtagcaagccgag

SEQ ID NO: 138528 - DNA, 25 bp, Canis familiaris
gtaaccagctatgagaaaccagatg

SEQ ID NO: 138529 - DNA, 25 bp, Canis familiaris
gtaaccagatttagagaaccctcca

SEQ ID NO: 138530 - DNA, 25 bp, Canis familiaris
gtaaccaattagctgtgaactctta

SEQ ID NO: 138531 - DNA, 25 bp, Canis familiaris
gtaacattttagcggcacctttggc

SEQ ID NO: 138532 - DNA, 25 bp, Canis familiaris
gtaatattactacgggaccttcaca

SEQ ID NO: 138533 - DNA, 25 bp, Canis familiaris
gtaattccctacaggattgcggaga

SEQ ID NO: 138534 - DNA, 25 bp, Canis familiaris
gtaattcccctccagaattgtcgga

SEQ ID NO: 138535 - DNA, 25 bp, Canis familiaris
gtaactcgtcgtccaaatttcattg

SEQ ID NO: 138536 - DNA, 25 bp, Canis familiaris
gtaagtgcgggtcataagcttgcgt

SEQ ID NO: 138537 - DNA, 25 bp, Canis familiaris
gtaagtcctggtctgaatctgaaaa

SEQ ID NO: 138538 - DNA, 25 bp, Canis familiaris
gtcataatcctgtgcacggcattga

SEQ ID NO: 138539 - DNA, 25 bp, Canis familiaris
gtctcaaccgggtcggacggacatt

SEQ ID NO: 138540 - DNA, 25 bp, Canis familiaris
gtctaaccagagccccaatgtaact

SEQ ID NO: 138541 - DNA, 25 bp, Canis familiaris
gtcagacactaatgccctagctaac

SEQ ID NO: 138542 - DNA, 25 bp, Canis familiaris
gtgaggcactgttcgtccttaaact

SEQ ID NO: 138543 - DNA, 25 bp, Canis familiaris
gtaagcacttacattttaaaattca

SEQ ID NO: 138544 - DNA, 25 bp, Canis familiaris
gtaacactgggttttatctaaatgg

SEQ ID NO: 138545 - DNA, 25 bp, Canis familiaris
gtaacttgaggtatttcttcagtgg

SEQ ID NO: 138546 - DNA, 25 bp, Canis familiaris
gtaacaggtgcctttgagctctaca

SEQ ID NO: 138547 - DNA, 25 bp, Canis familiaris
gtaacagagcgttcttatgtcccat

SEQ ID NO: 138548 - DNA, 25 bp, Canis familiaris
gtctataagcgccactacatggacg

SEQ ID NO: 138549 - DNA, 25 bp, Canis familiaris
gtcaataaactgcctcacatgctga

SEQ ID NO: 138550 - DNA, 25 bp, Canis familiaris
gtaataaatccattctcagctgagg

SEQ ID NO: 138551 - DNA, 25 bp, Canis familiaris
gtaatgtgctatgttcagccgggac

SEQ ID NO: 138552 - DNA, 25 bp, Canis familiaris
gtaatgagttgtttccagaggagac

SEQ ID NO: 138553 - DNA, 25 bp, Canis familiaris
gtcaatggtcaattttaggaggccg

SEQ ID NO: 138554 - DNA, 25 bp, Canis familiaris
gtaatcccagcactttgggaggccg

SEQ ID NO: 138555 - DNA, 25 bp, Canis familiaris
gtaatcctgagcccagtggggcctt

SEQ ID NO: 138556 - DNA, 25 bp, Canis familiaris
gtaacagtgagcctctggggtttgc

SEQ ID NO: 138557 - DNA, 25 bp, Canis familiaris
gtaacagatacctggtgcttttgta

SEQ ID NO: 138558 - DNA, 25 bp, Canis familiaris
gtaatctggcctcagttcttcttaa

SEQ ID NO: 138559 - DNA, 25 bp, Canis familiaris
gtaatgtagtctcagttctatctaa

SEQ ID NO: 138560 - DNA, 25 bp, Canis familiaris
gtcaaatgaactcagtttttaagtt

SEQ ID NO: 138561 - DNA, 25 bp, Canis familiaris
gtcacaacgacgggttttagcattt

SEQ ID NO: 138562 - DNA, 25 bp, Canis familiaris
gtcacgatcggtgggttcttcagac

SEQ ID NO: 138563 - DNA, 25 bp, Canis familiaris
gtcacgatcggtggggtttctcaga

SEQ ID NO: 138564 - DNA, 25 bp, Canis familiaris
gtcacatggggtcggggtgaccgcc

SEQ ID NO: 138565 - DNA, 25 bp, Canis familiaris
gtcacggggacagggcgtaacctgg

SEQ ID NO: 138566 - DNA, 25 bp, Canis familiaris
gtcacgtggccatcacggaaaatgt

SEQ ID NO: 138567 - DNA, 25 bp, Canis familiaris
gtcacagcggtctcgggacatatat

SEQ ID NO: 138568 - DNA, 25 bp, Canis familiaris
gtcaacaacatcgaccggaagaatc

SEQ ID NO: 138569 - DNA, 25 bp, Canis familiaris
gtaacacctaccctgtggagaaccg

SEQ ID NO: 138570 - DNA, 25 bp, Canis familiaris
gtaacattctaggctcagggcagag

SEQ ID NO: 138571 - DNA, 25 bp, Canis familiaris
gtaatttctgggacacgtgggtggc

SEQ ID NO: 138572 - DNA, 25 bp, Canis familiaris
gtaagtttcgagtcactctgggtcg

SEQ ID NO: 138573 - DNA, 25 bp, Canis familiaris
gtaattccggaatccatgcggccat

SEQ ID NO: 138574 - DNA, 25 bp, Canis familiaris
gtaatttggggagccatcaacatat

SEQ ID NO: 138575 - DNA, 25 bp, Canis familiaris
gtaagatgtgtgtgagtcctccagc

SEQ ID NO: 138576 - DNA, 25 bp, Canis familiaris
gtaagaatctcatcatgtcctactc

SEQ ID NO: 138577 - DNA, 25 bp, Canis familiaris
gtaacgcagatcttatgtcctattc

SEQ ID NO: 138578 - DNA, 25 bp, Canis familiaris
gtaacacaatagtggcctctgtctt

SEQ ID NO: 138579 - DNA, 25 bp, Canis familiaris
gtaacatctaagactcagccttgac

SEQ ID NO: 138580 - DNA, 25 bp, Canis familiaris
gtaacatcacaagctgagccaccac

SEQ ID NO: 138581 - DNA, 25 bp, Canis familiaris
gtaacacacacacaggccaaaggta

SEQ ID NO: 138582 - DNA, 25 bp, Canis familiaris
gtaacaccacaggggctagagcagc

SEQ ID NO: 138583 - DNA, 25 bp, Canis familiaris
gtaacacccagtgatgctgtacaca

SEQ ID NO: 138584 - DNA, 25 bp, Canis familiaris
gtaataccatagaaactgaccattg

SEQ ID NO: 138585 - DNA, 25 bp, Canis familiaris
gtaatgaattcacaactgaccagaa

SEQ ID NO: 138586 - DNA, 25 bp, Canis familiaris
gtaacattatcacatcacagacaaa

SEQ ID NO: 138587 - DNA, 25 bp, Canis familiaris
gtaacagatacacacaaggacattt

SEQ ID NO: 138588 - DNA, 25 bp, Canis familiaris
gtaatcaggacatcaatgggccttg

SEQ ID NO: 138589 - DNA, 25 bp, Canis familiaris
gtaaggcccaacatgggccagggca

SEQ ID NO: 138590 - DNA, 25 bp, Canis familiaris
gtaaggaccgacatggaccagtaga

SEQ ID NO: 138591 - DNA, 25 bp, Canis familiaris
gtaaggctccctagtggacaagcga

SEQ ID NO: 138592 - DNA, 25 bp, Canis familiaris
gtaacagccaccctggaggagaaga

SEQ ID NO: 138593 - DNA, 25 bp, Canis familiaris
gtaacagccaccctggaggagaaga

SEQ ID NO: 138594 - DNA, 25 bp, Canis familiaris
gtaacagatcaacctttggacgaga

SEQ ID NO: 138595 - DNA, 25 bp, Canis familiaris
gtaacagatcaaacaccggcgctaa

SEQ ID NO: 138596 - DNA, 25 bp, Canis familiaris
gtaaccacatattagcttggcagct

SEQ ID NO: 138597 - DNA, 25 bp, Canis familiaris
gtaatctcctccaactgtagagctg

SEQ ID NO: 138598 - DNA, 25 bp, Canis familiaris
gtaagtcacctttctgggtctggtt

SEQ ID NO: 138599 - DNA, 25 bp, Canis familiaris
gtaattcccacttcaggcggaggtt

SEQ ID NO: 138600 - DNA, 25 bp, Canis familiaris
gtaattcccacacgcacagaggaac

SEQ ID NO: 138601 - DNA, 25 bp, Canis familiaris
gtcaattccaccactctgcaggtgg

SEQ ID NO: 138602 - DNA, 25 bp, Canis familiaris
gtaattcaatccacacatttgctga

SEQ ID NO: 138603 - DNA, 25 bp, Canis familiaris
gtcacttcctcctcaattatgatgt

SEQ ID NO: 138604 - DNA, 25 bp, Canis familiaris
gtaagcatcccctaaattattgtga

SEQ ID NO: 138605 - DNA, 25 bp, Canis familiaris
gtaactcccatctgcagataatctg

SEQ ID NO: 138606 - DNA, 25 bp, Canis familiaris
gtaactcctcatgataaaagtcctg

SEQ ID NO: 138607 - DNA, 25 bp, Canis familiaris
gtaatcttttcctaatgaagccgtg

SEQ ID NO: 138608 - DNA, 25 bp, Canis familiaris
gtcaatgttttgggaaaccctggca

SEQ ID NO: 138609 - DNA, 25 bp, Canis familiaris
gtcaatttaattctaaccctgctct

SEQ ID NO: 138610 - DNA, 25 bp, Canis familiaris
gtaattattattcttatacttcata

SEQ ID NO: 138611 - DNA, 25 bp, Canis familiaris
gtaattaatataaagtaccctgata

SEQ ID NO: 138612 - DNA, 25 bp, Canis familiaris
gtaagtttataaagacattcctaat

SEQ ID NO: 138613 - DNA, 25 bp, Canis familiaris
gtaactttttcaagacttcagacca

SEQ ID NO: 138614 - DNA, 25 bp, Canis familiaris
gtccacttttccactggtaaccata

SEQ ID NO: 138615 - DNA, 25 bp, Canis familiaris
gtcacacttaatatccgggaaccca

SEQ ID NO: 138616 - DNA, 25 bp, Canis familiaris
gtcacctagatactgtccaggtaga

SEQ ID NO: 138617 - DNA, 25 bp, Canis familiaris
gtcagccttgtccgtttgggaaagg

SEQ ID NO: 138618 - DNA, 25 bp, Canis familiaris
gtcacctagacggccttatggaaac

SEQ ID NO: 138619 - DNA, 25 bp, Canis familiaris
gtcctttccgactattcagtaaatt

SEQ ID NO: 138620 - DNA, 25 bp, Canis familiaris
gtcacttcacctgtttcagatcaaa

SEQ ID NO: 138621 - DNA, 25 bp, Canis familiaris
gtcaccaaccagtttctcaaacaat

SEQ ID NO: 138622 - DNA, 25 bp, Canis familiaris
gtcttgcagttgctgttccaaaagg

SEQ ID NO: 138623 - DNA, 25 bp, Canis familiaris
gtcttgggattgagtccccatcagg

SEQ ID NO: 138624 - DNA, 25 bp, Canis familiaris
gtccttggggggtgtcacaatggaa

SEQ ID NO: 138625 - DNA, 25 bp, Canis familiaris
gtcgttgggacatactacaaattac

SEQ ID NO: 138626 - DNA, 25 bp, Canis familiaris
gtcgttgaggactcaccattttttt

SEQ ID NO: 138627 - DNA, 25 bp, Canis familiaris
gtcgaataaacacatctactttttt

SEQ ID NO: 138628 - DNA, 25 bp, Canis familiaris
gtcacaataaaacagtctctctttt

SEQ ID NO: 138629 - DNA, 25 bp, Canis familiaris
gtcaagataaaattaggcctctctg

SEQ ID NO: 138630 - DNA, 25 bp, Canis familiaris
gtcaagataaaccagtccctttcca

SEQ ID NO: 138631 - DNA, 25 bp, Canis familiaris
gtgaggtcagtaaaatcccctgtaa

SEQ ID NO: 138632 - DNA, 25 bp, Canis familiaris
gtgggttttgtattcaccaaggagg

SEQ ID NO: 138633 - DNA, 25 bp, Canis familiaris
gtaactagttaattatccacaggca

SEQ ID NO: 138634 - DNA, 25 bp, Canis familiaris
gtaattatgattgggattccgagga

SEQ ID NO: 138635 - DNA, 25 bp, Canis familiaris
gtaatctatattcctggtcccagtg

SEQ ID NO: 138636 - DNA, 25 bp, Canis familiaris
gtaacatcattttctgagctgctta

SEQ ID NO: 138637 - DNA, 25 bp, Canis familiaris
gtcatgaccttggctatgacgccca

SEQ ID NO: 138638 - DNA, 25 bp, Canis familiaris
gtaatgcagttcgttgagccaagcc

SEQ ID NO: 138639 - DNA, 25 bp, Canis familiaris
gtaatgcagtctccttagtcaactt

SEQ ID NO: 138640 - DNA, 25 bp, Canis familiaris
gtaagcagagctcgtctagtgaccc

SEQ ID NO: 138641 - DNA, 25 bp, Canis familiaris
gtaatagcgatgcactgggacggat

SEQ ID NO: 138642 - DNA, 25 bp, Canis familiaris
gtcgtccggccagatggctatgtgc

SEQ ID NO: 138643 - DNA, 25 bp, Canis familiaris
gtcagttggaaatgtggtagcctca

SEQ ID NO: 138644 - DNA, 25 bp, Canis familiaris
gtcgttcgactgggtaggagccaca

SEQ ID NO: 138645 - DNA, 25 bp, Canis familiaris
gtcgaggtacccaaagggccgattg

SEQ ID NO: 138646 - DNA, 25 bp, Canis familiaris
gtaaggtacaccaaggaccgcttat

SEQ ID NO: 138647 - DNA, 25 bp, Canis familiaris
gtcacaagaactcaaggaaccaaaa

SEQ ID NO: 138648 - DNA, 25 bp, Canis familiaris
gtgcataaggaaaagggaaccaaca

SEQ ID NO: 138649 - DNA, 25 bp, Canis familiaris
gtaagaagtcaaatggggaccacaa

SEQ ID NO: 138650 - DNA, 25 bp, Canis familiaris
gtaagagcctcagtttgtagaccaa

SEQ ID NO: 138651 - DNA, 25 bp, Canis familiaris
gtaagctgctccattgttaactaca

SEQ ID NO: 138652 - DNA, 25 bp, Canis familiaris
gtaagcatgcatggctttggataga

SEQ ID NO: 138653 - DNA, 25 bp, Canis familiaris
gtaactatggctttgtgtatttttt

SEQ ID NO: 138654 - DNA, 25 bp, Canis familiaris
gtaactggccaaattttgttagtgt

SEQ ID NO: 138655 - DNA, 25 bp, Canis familiaris
gtaagctggaacttttctggtttgg

SEQ ID NO: 138656 - DNA, 25 bp, Canis familiaris
gtcaacggatcctttgttgggtgga

SEQ ID NO: 138657 - DNA, 25 bp, Canis familiaris
gtcaacagtgcccaagagacgggtg

SEQ ID NO: 138658 - DNA, 25 bp, Canis familiaris
gtcaggctcccgaaggtcgggctga

SEQ ID NO: 138659 - DNA, 25 bp, Canis familiaris
gtaactgccctgtggattgtggcgt

SEQ ID NO: 138660 - DNA, 25 bp, Canis familiaris
gtaatcttctcttgaggtttgtact

SEQ ID NO: 138661 - DNA, 25 bp, Canis familiaris
gtaacctccctgtgactgttgacag

SEQ ID NO: 138662 - DNA, 25 bp, Canis familiaris
gtaaccccctctggttgttgagaat

SEQ ID NO: 138663 - DNA, 25 bp, Canis familiaris
gtaatgccagccattggttcttcga

SEQ ID NO: 138664 - DNA, 25 bp, Canis familiaris
gtaagccactgactcttggtttcgg

SEQ ID NO: 138665 - DNA, 25 bp, Canis familiaris
gtaactacacatcccatgctgtttc

SEQ ID NO: 138666 - DNA, 25 bp, Canis familiaris
gtaactaaatgcgcatggtatgttt

SEQ ID NO: 138667 - DNA, 25 bp, Canis familiaris
gtaaccacaagggaagttgctgtcc

SEQ ID NO: 138668 - DNA, 25 bp, Canis familiaris
gtaacctcatcactggaatgttcca

SEQ ID NO: 138669 - DNA, 25 bp, Canis familiaris
gtcaaagctatcttgagaaagcaca

SEQ ID NO: 138670 - DNA, 25 bp, Canis familiaris
gtcaaaatatctagctgtaatcaaa

SEQ ID NO: 138671 - DNA, 25 bp, Canis familiaris
gtcaaggacatcatgctgctacacg

SEQ ID NO: 138672 - DNA, 25 bp, Canis familiaris
gtcaaggtatattttagctcactat

SEQ ID NO: 138673 - DNA, 25 bp, Canis familiaris
gtcaaggtattacgtttcgttatag

SEQ ID NO: 138674 - DNA, 25 bp, Canis familiaris
gtcggattttagtttggccaggcta

SEQ ID NO: 138675 - DNA, 25 bp, Canis familiaris
gtaagatatgtataatgctggccat

SEQ ID NO: 138676 - DNA, 25 bp, Canis familiaris
gtaagtgcttcagtaattggctatt

SEQ ID NO: 138677 - DNA, 25 bp, Canis familiaris
gtaagtttcctactgagtgtatttc

SEQ ID NO: 138678 - DNA, 25 bp, Canis familiaris
gtcaggttctacaacgaattgattc

SEQ ID NO: 138679 - DNA, 25 bp, Canis familiaris
gtcaggtgttaagctaagtgttttc

SEQ ID NO: 138680 - DNA, 25 bp, Canis familiaris
gtcagaggcagtacacactaagaat

SEQ ID NO: 138681 - DNA, 25 bp, Canis familiaris
gtcagaacttgcagcctgaagttaa

SEQ ID NO: 138682 - DNA, 25 bp, Canis familiaris
gtcacacctagattgggcacgttaa

SEQ ID NO: 138683 - DNA, 25 bp, Canis familiaris
gtaagactagaaagatgcatctctt

SEQ ID NO: 138684 - DNA, 25 bp, Canis familiaris
gtaagcctaggcttcagactctgct

SEQ ID NO: 138685 - DNA, 25 bp, Canis familiaris
gtaactgttacattagagctgctat

SEQ ID NO: 138686 - DNA, 25 bp, Canis familiaris
gtaactgtgtatgtgcacaagcata

SEQ ID NO: 138687 - DNA, 25 bp, Canis familiaris
gtaactggaactcgtcatccatgat

SEQ ID NO: 138688 - DNA, 25 bp, Canis familiaris
gtaagctggaactttcacagaatca

SEQ ID NO: 138689 - DNA, 25 bp, Canis familiaris
gtctagctctgaaagcttccaaacg

SEQ ID NO: 138690 - DNA, 25 bp, Canis familiaris
gtcaggctctgaaactctcaaaatt

SEQ ID NO: 138691 - DNA, 25 bp, Canis familiaris
gtaagctgctctgactagcaatata

SEQ ID NO: 138692 - DNA, 25 bp, Canis familiaris
gtaatgctcttcaagaaccttcatc

SEQ ID NO: 138693 - DNA, 25 bp, Canis familiaris
gtaatcatcttcctagacctagcac

SEQ ID NO: 138694 - DNA, 25 bp, Canis familiaris
gtcaatctcctcaacagaccaacaa

SEQ ID NO: 138695 - DNA, 25 bp, Canis familiaris
gtcaacagtttgacatgcaccccta

SEQ ID NO: 138696 - DNA, 25 bp, Canis familiaris
gtcacagaacttaatcctcaggtag

SEQ ID NO: 138697 - DNA, 25 bp, Canis familiaris
gtaagaatttttcacatgtggaaat

SEQ ID NO: 138698 - DNA, 25 bp, Canis familiaris
gtaatggcattttgttcctgttaaa

SEQ ID NO: 138699 - DNA, 25 bp, Canis familiaris
gtaatgagcttggttcctcttttgc

SEQ ID NO: 138700 - DNA, 25 bp, Canis familiaris
gtaagagatgtcctctcaccttttc

SEQ ID NO: 138701 - DNA, 25 bp, Canis familiaris
gtcgggattcaagcacgtggtcccc

SEQ ID NO: 138702 - DNA, 25 bp, Canis familiaris
gtcagaaaacctgcacgtgtctcac

SEQ ID NO: 138703 - DNA, 25 bp, Canis familiaris
gtaataaacagctgcctgggctcgc

SEQ ID NO: 138704 - DNA, 25 bp, Canis familiaris
gtaataaacaccgagtggacaccgg

SEQ ID NO: 138705 - DNA, 25 bp, Canis familiaris
gtcactaaccccgattggtcgtagg

SEQ ID NO: 138706 - DNA, 25 bp, Canis familiaris
gtcagtactacccaaatggtctgta

SEQ ID NO: 138707 - DNA, 25 bp, Canis familiaris
tccagtttggccctcaggagtttta

SEQ ID NO: 138708 - DNA, 25 bp, Canis familiaris
tccagttttcccaccatttattggg

SEQ ID NO: 138709 - DNA, 25 bp, Canis familiaris
tccaagtttcccagcaatgttcttc

SEQ ID NO: 138710 - DNA, 25 bp, Canis familiaris
tcctagttaatccaggaggaacttc

SEQ ID NO: 138711 - DNA, 25 bp, Canis familiaris
tgttagttaatccaggacgtccccg

SEQ ID NO: 138712 - DNA, 25 bp, Canis familiaris
gtaatgtgtatatcaggcacagtct

SEQ ID NO: 138713 - DNA, 25 bp, Canis familiaris
gtaaggtgagaccagtgctcctctc

SEQ ID NO: 138714 - DNA, 25 bp, Canis familiaris
gtcaagagtgcgaccccagcactca

SEQ ID NO: 138715 - DNA, 25 bp, Canis familiaris
gtcaaggctgctgacctagtcatca

SEQ ID NO: 138716 - DNA, 25 bp, Canis familiaris
gtaatgtctggcgatttcactcaaa

SEQ ID NO: 138717 - DNA, 25 bp, Canis familiaris
gtaagcatctgcatgtgtacaccat

SEQ ID NO: 138718 - DNA, 25 bp, Canis familiaris
gtaacctgctgtgatacgatgcttc

SEQ ID NO: 138719 - DNA, 25 bp, Canis familiaris
gtaagcttttcattgggctcttcct

SEQ ID NO: 138720 - DNA, 25 bp, Canis familiaris
gtaagttttcagtactgtgctttta

SEQ ID NO: 138721 - DNA, 25 bp, Canis familiaris
gtaagtgtcttgcattcttccatta

SEQ ID NO: 138722 - DNA, 25 bp, Canis familiaris
gtcaaatatttgcaacttctcttac

SEQ ID NO: 138723 - DNA, 25 bp, Canis familiaris
gtgaagactttgcttgcttctttac

SEQ ID NO: 138724 - DNA, 25 bp, Canis familiaris
gtaagatttggatatgtccttcata

SEQ ID NO: 138725 - DNA, 25 bp, Canis familiaris
gtaagcatttgattttcatactttt

SEQ ID NO: 138726 - DNA, 25 bp, Canis familiaris
gtaatgagaatgatttctcacttgt

SEQ ID NO: 138727 - DNA, 25 bp, Canis familiaris
gtaataatgtgtctgtctgcctttt

SEQ ID NO: 138728 - DNA, 25 bp, Canis familiaris
gtaacctgttcagtttgctgctatc

SEQ ID NO: 138729 - DNA, 25 bp, Canis familiaris
gtaagctctgactgctttgctgatc

SEQ ID NO: 138730 - DNA, 25 bp, Canis familiaris
gtaattccagctccaatagcgtata

SEQ ID NO: 138731 - DNA, 25 bp, Canis familiaris
gtaatcccacttaatgagagcttat

SEQ ID NO: 138732 - DNA, 25 bp, Canis familiaris
gtaacccacctgcacaggcattttc

SEQ ID NO: 138733 - DNA, 25 bp, Canis familiaris
gtcaagcccaaacacagatgagtta

SEQ ID NO: 138734 - DNA, 25 bp, Canis familiaris
gtcatcaccaaaccccgatgtttac

SEQ ID NO: 138735 - DNA, 25 bp, Canis familiaris
gtctccgaaaacaacgtgtcttcca

SEQ ID NO: 138736 - DNA, 25 bp, Canis familiaris
gtcactcaaaaggtaaggtttcaca

SEQ ID NO: 138737 - DNA, 25 bp, Canis familiaris
gtccccacgaattaacagttactag

SEQ ID NO: 138738 - DNA, 25 bp, Canis familiaris
gtcaaccctaattagacaataaatc

SEQ ID NO: 138739 - DNA, 25 bp, Canis familiaris
gtaattcccaattcagactgctaca

SEQ ID NO: 138740 - DNA, 25 bp, Canis familiaris
gtaatctaaaaatactctgaccatt

SEQ ID NO: 138741 - DNA, 25 bp, Canis familiaris
gtaattaatggatcaacctaggaat

SEQ ID NO: 138742 - DNA, 25 bp, Canis familiaris
gtaatttgtgtttccacccattgga

SEQ ID NO: 138743 - DNA, 25 bp, Canis familiaris
gtaatttgtttagtgttgggtagat

SEQ ID NO: 138744 - DNA, 25 bp, Canis familiaris
gtaattggctttagatttttgtaat

SEQ ID NO: 138745 - DNA, 25 bp, Canis familiaris
gtaatctggctgataatctttgatg

SEQ ID NO: 138746 - DNA, 25 bp, Canis familiaris
gtaatgtcactgatatacttaagcc

SEQ ID NO: 138747 - DNA, 25 bp, Canis familiaris
gtaagaacccttatcatgaagctca

SEQ ID NO: 138748 - DNA, 25 bp, Canis familiaris
gtaataacaccttttgcttcaccag

SEQ ID NO: 138749 - DNA, 25 bp, Canis familiaris
gtaagaaaccgaattctgctcagcg

SEQ ID NO: 138750 - DNA, 25 bp, Canis familiaris
gtaagggaaccaaatgtcatgcaca

SEQ ID NO: 138751 - DNA, 25 bp, Canis familiaris
gtaaggaggatcccagtgtctgagc

SEQ ID NO: 138752 - DNA, 25 bp, Canis familiaris
gtcaaagggcgcccgtgtggaaagg

SEQ ID NO: 138753 - DNA, 25 bp, Canis familiaris
gtaagagaggcgccacctaggacta

SEQ ID NO: 138754 - DNA, 25 bp, Canis familiaris
gtcaaggaggagcagcctcgggcag

SEQ ID NO: 138755 - DNA, 25 bp, Canis familiaris
gtcacacggtcagagtcttgtcccg

SEQ ID NO: 138756 - DNA, 25 bp, Canis familiaris
gtcaccgacgtgtaattggtcccag

SEQ ID NO: 138757 - DNA, 25 bp, Canis familiaris
gtccatcttggtcaaggacacccag

SEQ ID NO: 138758 - DNA, 25 bp, Canis familiaris
gtcactcctcggaaagccaaactag

SEQ ID NO: 138759 - DNA, 25 bp, Canis familiaris
gtcgtacgcccgtagcagagaacta

SEQ ID NO: 138760 - DNA, 25 bp, Canis familiaris
gtcagtgacagcctgggaaggaagc

SEQ ID NO: 138761 - DNA, 25 bp, Canis familiaris
gtcaagagcaacggtgtagagaaat

SEQ ID NO: 138762 - DNA, 25 bp, Canis familiaris
gtaagcacatcatgctatgtgaaaa

SEQ ID NO: 138763 - DNA, 25 bp, Canis familiaris
gtaagcactcagttaatgaacacat

SEQ ID NO: 138764 - DNA, 25 bp, Canis familiaris
gtaagcctcagattgttgtacagct

SEQ ID NO: 138765 - DNA, 25 bp, Canis familiaris
gtaagcagctatatgttgtgcactg

SEQ ID NO: 138766 - DNA, 25 bp, Canis familiaris
gtaatgatgagcttagttgacactt

SEQ ID NO: 138767 - DNA, 25 bp, Canis familiaris
gtaatgtacctggtggatttgtttt

SEQ ID NO: 138768 - DNA, 25 bp, Canis familiaris
gtaatctcacttctggagcttgttt

SEQ ID NO: 138769 - DNA, 25 bp, Canis familiaris
gtaaccacacttgggcatcttgctt

SEQ ID NO: 138770 - DNA, 25 bp, Canis familiaris
gtaaccatccttcggtatgatcttc

SEQ ID NO: 138771 - DNA, 25 bp, Canis familiaris
gtaagccctcttagaaatctctacg

SEQ ID NO: 138772 - DNA, 25 bp, Canis familiaris
gtaatgccctgtaaaaatctgtgtt

SEQ ID NO: 138773 - DNA, 25 bp, Canis familiaris
gtcatccacggttgaagaactagtt

SEQ ID NO: 138774 - DNA, 25 bp, Canis familiaris
gtcaccacgtttgggctaatgcgtt

SEQ ID NO: 138775 - DNA, 25 bp, Canis familiaris
gtaatactgtcttatggaaacgttt

SEQ ID NO: 138776 - DNA, 25 bp, Canis familiaris
gtaattcgtctgcctggagaccgtc

SEQ ID NO: 138777 - DNA, 25 bp, Canis familiaris
gtaattctgcaagacggcaccgtcc

SEQ ID NO: 138778 - DNA, 25 bp, Canis familiaris
gtcaaactcaacttcgagcacggga

SEQ ID NO: 138779 - DNA, 25 bp, Canis familiaris
gtcaaggcctacttcaagcggggca

SEQ ID NO: 138780 - DNA, 25 bp, Canis familiaris
gtcaactccaaggtcaactggctgc

SEQ ID NO: 138781 - DNA, 25 bp, Canis familiaris
gtcaacccacagtatggagctgtca

SEQ ID NO: 138782 - DNA, 25 bp, Canis familiaris
gtcaacacccactggagttaaatag

SEQ ID NO: 138783 - DNA, 25 bp, Canis familiaris
gtgagacccttctggggacaaggac

SEQ ID NO: 138784 - DNA, 25 bp, Canis familiaris
gtgggcccgtgctggttaaaggaga

SEQ ID NO: 138785 - DNA, 25 bp, Canis familiaris
gtcttcccggctgtgcttaaaggag

SEQ ID NO: 138786 - DNA, 25 bp, Canis familiaris
gtcttttggactttgttacaaactg

SEQ ID NO: 138787 - DNA, 25 bp, Canis familiaris
gtcttcttgggttcggtcaaaagca

SEQ ID NO: 138788 - DNA, 25 bp, Canis familiaris
gtcaccaagggcaaaggctacaaaa

SEQ ID NO: 138789 - DNA, 25 bp, Canis familiaris
gtaagaaaggctttgtctagacaag

SEQ ID NO: 138790 - DNA, 25 bp, Canis familiaris
gtaagtacaggctgctgctctaaaa

SEQ ID NO: 138791 - DNA, 25 bp, Canis familiaris
gtaagcccgtgcttgtgctaacgaa

SEQ ID NO: 138792 - DNA, 25 bp, Canis familiaris
gtaagccctggactgagtttagaga

SEQ ID NO: 138793 - DNA, 25 bp, Canis familiaris
gtaaccagctggccattttagcagg

SEQ ID NO: 138794 - DNA, 25 bp, Canis familiaris
gtaaggactgaccactttgagcctc

SEQ ID NO: 138795 - DNA, 25 bp, Canis familiaris
gtcacaatagtacccttgctgacct

SEQ ID NO: 138796 - DNA, 25 bp, Canis familiaris
gtaatataggagaccctctaccctc

SEQ ID NO: 138797 - DNA, 25 bp, Canis familiaris
gtaatagaggcaccggctctcagtc

SEQ ID NO: 138798 - DNA, 25 bp, Canis familiaris
gtaatggcatagtccgtatctcgtc

SEQ ID NO: 138799 - DNA, 25 bp, Canis familiaris
gtaagcctagatcgtgctcttgtac

SEQ ID NO: 138800 - DNA, 25 bp, Canis familiaris
gtaatctcttgtctcgatttactcg

SEQ ID NO: 138801 - DNA, 25 bp, Canis familiaris
gtaatatctcttaatcgtatctcag

SEQ ID NO: 138802 - DNA, 25 bp, Canis familiaris
gtcaaatccatgctcatcactttca

SEQ ID NO: 138803 - DNA, 25 bp, Canis familiaris
gtcaagtctgtgcacatgagtacca

SEQ ID NO: 138804 - DNA, 25 bp, Canis familiaris
gtaatgactggctacagcttcaact

SEQ ID NO: 138805 - DNA, 25 bp, Canis familiaris
gtcaatttgcagtacactccaagtg

SEQ ID NO: 138806 - DNA, 25 bp, Canis familiaris
gtaattctgtgatcccaacctaata

SEQ ID NO: 138807 - DNA, 25 bp, Canis familiaris
gtaattgctgttacacgaatttaaa

SEQ ID NO: 138808 - DNA, 25 bp, Canis familiaris
gtcaattgtgtaacccgagttggaa

SEQ ID NO: 138809 - DNA, 25 bp, Canis familiaris
gtaatatcctaacctcagcagttta

SEQ ID NO: 138810 - DNA, 25 bp, Canis familiaris
gtgaatttcttacaccagcgtttgg

SEQ ID NO: 138811 - DNA, 25 bp, Canis familiaris
gtaatcttttatccctggacttgtc

SEQ ID NO: 138812 - DNA, 25 bp, Canis familiaris
gtaattcttgataccgaggtgtttc

SEQ ID NO: 138813 - DNA, 25 bp, Canis familiaris
gtaatttctatctttgggtgtttct

SEQ ID NO: 138814 - DNA, 25 bp, Canis familiaris
gtaattctgctgctgtgatggggtg

SEQ ID NO: 138815 - DNA, 25 bp, Canis familiaris
gtaatctggctgttcgcaggaatgt

SEQ ID NO: 138816 - DNA, 25 bp, Canis familiaris
gtcaactgggttagcacgatatctg

SEQ ID NO: 138817 - DNA, 25 bp, Canis familiaris
gtcaacaggttggagacgatgcatc

SEQ ID NO: 138818 - DNA, 25 bp, Canis familiaris
gtcaccatgactagatgagaatata

SEQ ID NO: 138819 - DNA, 25 bp, Canis familiaris
gtcactggccattgcagaactctag

SEQ ID NO: 138820 - DNA, 25 bp, Canis familiaris
gtctcacgagtgtcagtcaatctgg

SEQ ID NO: 138821 - DNA, 25 bp, Canis familiaris
gtctcacacagatgcactgacacat

SEQ ID NO: 138822 - DNA, 25 bp, Canis familiaris
gtcaatccacgtggctgtcagatcc

SEQ ID NO: 138823 - DNA, 25 bp, Canis familiaris
gtcacatcagcaggaatgctgccag

SEQ ID NO: 138824 - DNA, 25 bp, Canis familiaris
gtcacagtcactatgcaacagagta

SEQ ID NO: 138825 - DNA, 25 bp, Canis familiaris
gtcacagtcatcaccaggaaggcct

SEQ ID NO: 138826 - DNA, 25 bp, Canis familiaris
gtaagtcacacctagattgggcacg

SEQ ID NO: 138827 - DNA, 25 bp, Canis familiaris
gtaagtcaaggctaaggcagagctg

SEQ ID NO: 138828 - DNA, 25 bp, Canis familiaris
gtcaagtgaagactagcaagagagt

SEQ ID NO: 138829 - DNA, 25 bp, Canis familiaris
gtcacagggtcacagcaatagcagg

SEQ ID NO: 138830 - DNA, 25 bp, Canis familiaris
gtcaagtgtgaaaatgtacagcaag

SEQ ID NO: 138831 - DNA, 25 bp, Canis familiaris
gtcgcgttgtatgttaccggtacca

SEQ ID NO: 138832 - DNA, 25 bp, Canis familiaris
gtccgttcctctgtgacacggtatt

SEQ ID NO: 138833 - DNA, 25 bp, Canis familiaris
gtcactgtgttttaatgaacagggc

SEQ ID NO: 138834 - DNA, 25 bp, Canis familiaris
gtaagatatggttaaaaatgtgcgc

SEQ ID NO: 138835 - DNA, 25 bp, Canis familiaris
gtaagatgatagcacccagacacgg

SEQ ID NO: 138836 - DNA, 25 bp, Canis familiaris
gtaagaagagcaaaccagcacagtg

SEQ ID NO: 138837 - DNA, 25 bp, Canis familiaris
gtgaagatataaaaccctagaatgc

SEQ ID NO: 138838 - DNA, 25 bp, Canis familiaris
gtaagatataacatcctctgtattt

SEQ ID NO: 138839 - DNA, 25 bp, Canis familiaris
gtaattacagtcatcctctgtcctt

SEQ ID NO: 138840 - DNA, 25 bp, Canis familiaris
gtaagaacatgcattccttgtcctt

SEQ ID NO: 138841 - DNA, 25 bp, Canis familiaris
gtaagaatctgcaattcgcacgttt

SEQ ID NO: 138842 - DNA, 25 bp, Canis familiaris
gtaatgaactaaactcactttcttt

SEQ ID NO: 138843 - DNA, 25 bp, Canis familiaris
gtaattactcacagatgccttattc

SEQ ID NO: 138844 - DNA, 25 bp, Canis familiaris
gtaattgtctacatcctttttcacc

SEQ ID NO: 138845 - DNA, 25 bp, Canis familiaris
gtaattgtgtacagtcttgttagct

SEQ ID NO: 138846 - DNA, 25 bp, Canis familiaris
gtcacaccttacaaatttcttcaat

SEQ ID NO: 138847 - DNA, 25 bp, Canis familiaris
gtcaatctttaaactcttgctggat

SEQ ID NO: 138848 - DNA, 25 bp, Canis familiaris
gtcacctaatttatctgtgctcatg

SEQ ID NO: 138849 - DNA, 25 bp, Canis familiaris
gtcacagctaatgcataccattaag

SEQ ID NO: 138850 - DNA, 25 bp, Canis familiaris
gtcaacttaccaaccgtgaagcaca

SEQ ID NO: 138851 - DNA, 25 bp, Canis familiaris
gtgactcggaccgcacggaaacaga

SEQ ID NO: 138852 - DNA, 25 bp, Canis familiaris
gtgaccgtgacctcgaggtagacac

SEQ ID NO: 138853 - DNA, 25 bp, Canis familiaris
gtcacctaggcctgagggtagcgac

SEQ ID NO: 138854 - DNA, 25 bp, Canis familiaris
gtcacttaggtctgtgagccttcgt

SEQ ID NO: 138855 - DNA, 25 bp, Canis familiaris
gtcacttcagtgtcaactgtcctac

SEQ ID NO: 138856 - DNA, 25 bp, Canis familiaris
gtcactatgcaggtacgtgccactc

SEQ ID NO: 138857 - DNA, 25 bp, Canis familiaris
gtcactacgtaacgcactacatcct

SEQ ID NO: 138858 - DNA, 25 bp, Canis familiaris
gtcaacaggtaacacttccgctgct

SEQ ID NO: 138859 - DNA, 25 bp, Canis familiaris
gtcaatcggtttcagctagtttgcc

SEQ ID NO: 138860 - DNA, 25 bp, Canis familiaris
gtcaccgatttttagtagtattgtc

SEQ ID NO: 138861 - DNA, 25 bp, Canis familiaris
gtcccacacttattccaagtttgtc

SEQ ID NO: 138862 - DNA, 25 bp, Canis familiaris
gtcaccaccaggcacgaaggttgtg

SEQ ID NO: 138863 - DNA, 25 bp, Canis familiaris
gtcagctaggcacccggaaagttat

SEQ ID NO: 138864 - DNA, 25 bp, Canis familiaris
gtcactggtcccaaggagacacttt

SEQ ID NO: 138865 - DNA, 25 bp, Canis familiaris
gtcactgacttccgggagtcgtgct

SEQ ID NO: 138866 - DNA, 25 bp, Canis familiaris
gtcacttttaggtggacttctccat

SEQ ID NO: 138867 - DNA, 25 bp, Canis familiaris
gtcacgtttggttgtggaaagctcc

SEQ ID NO: 138868 - DNA, 25 bp, Canis familiaris
gtcacggttaattttgttcagtatc

SEQ ID NO: 138869 - DNA, 25 bp, Canis familiaris
gtcaggtcttaatgttatccaactc

SEQ ID NO: 138870 - DNA, 25 bp, Canis familiaris
gtcatgtgaaaacaccggccaacca

SEQ ID NO: 138871 - DNA, 25 bp, Canis familiaris
gtaatacaacacgccggactgactc

SEQ ID NO: 138872 - DNA, 25 bp, Canis familiaris
gtcagaaaacaagcctgagagtgat

SEQ ID NO: 138873 - DNA, 25 bp, Canis familiaris
gtcatgaactatatccgtaacctgg

SEQ ID NO: 138874 - DNA, 25 bp, Canis familiaris
gtgcaggttgaacccgtaaccttgg

SEQ ID NO: 138875 - DNA, 25 bp, Canis familiaris
gtcggggacaacgtggcaaccgtat

SEQ ID NO: 138876 - DNA, 25 bp, Canis familiaris
gtcaacgtgacactcctgagcaagc

SEQ ID NO: 138877 - DNA, 25 bp, Canis familiaris
gtcagccgaggtgagctgagccgcc

SEQ ID NO: 138878 - DNA, 25 bp, Canis familiaris
gtcacacggctgtaagagcctcagt

SEQ ID NO: 138879 - DNA, 25 bp, Canis familiaris
gtcacagccgcttgacaatgcagat

SEQ ID NO: 138880 - DNA, 25 bp, Canis familiaris
gtcaccacacttgcagtaggggtac

SEQ ID NO: 138881 - DNA, 25 bp, Canis familiaris
gtcactcagcatttccatatggagc

SEQ ID NO: 138882 - DNA, 25 bp, Canis familiaris
gtcactctgcaaacctgaatggctt

SEQ ID NO: 138883 - DNA, 25 bp, Canis familiaris
gtcacctgcaagagcgaaatgttca

SEQ ID NO: 138884 - DNA, 25 bp, Canis familiaris
gtcacccaactgctggtataatcag

SEQ ID NO: 138885 - DNA, 25 bp, Canis familiaris
gtcagcacccagaggaggtcgacgc

SEQ ID NO: 138886 - DNA, 25 bp, Canis familiaris
gtcacagcccagagatggttgacat

SEQ ID NO: 138887 - DNA, 25 bp, Canis familiaris
gtcaactctgcaaagacgttcgcat

SEQ ID NO: 138888 - DNA, 25 bp, Canis familiaris
gtcaaccagcataatgaagtcgtat

SEQ ID NO: 138889 - DNA, 25 bp, Canis familiaris
gtcaagccagtacaagtgagccaac

SEQ ID NO: 138890 - DNA, 25 bp, Canis familiaris
gtcaaccatgaacagcatttgccaa

SEQ ID NO: 138891 - DNA, 25 bp, Canis familiaris
gtcagcacctaactatgttcaccta

SEQ ID NO: 138892 - DNA, 25 bp, Canis familiaris
gtaatctctgaactgcagtctcctc

SEQ ID NO: 138893 - DNA, 25 bp, Canis familiaris
gtcaacttgcaaagcgttcgcatcg

SEQ ID NO: 138894 - DNA, 25 bp, Canis familiaris
gtcaagttcacttctgaatcctcga

SEQ ID NO: 138895 - DNA, 25 bp, Canis familiaris
gtcaatttagcctataaactctagc

SEQ ID NO: 138896 - DNA, 25 bp, Canis familiaris
gtaattattcctaaaactgatatga

SEQ ID NO: 138897 - DNA, 25 bp, Canis familiaris
gtaatcttgtggtcttatatttata

SEQ ID NO: 138898 - DNA, 25 bp, Canis familiaris
gtaatgatttagtagcttattttga

SEQ ID NO: 138899 - DNA, 25 bp, Canis familiaris
gtcagactctaggtcactatttttg

SEQ ID NO: 138900 - DNA, 25 bp, Canis familiaris
gtcagataccagactacatatgtac

SEQ ID NO: 138901 - DNA, 25 bp, Canis familiaris
gtcatgtcaccagcacaatgtgtca

SEQ ID NO: 138902 - DNA, 25 bp, Canis familiaris
gtcagagccaaggcacttgctgcag

SEQ ID NO: 138903 - DNA, 25 bp, Canis familiaris
gtcaggctattgacctgctctactg

SEQ ID NO: 138904 - DNA, 25 bp, Canis familiaris
gtcaagtttcatactcatctgagtt

SEQ ID NO: 138905 - DNA, 25 bp, Canis familiaris
gtaagtgttgaagtgccatgatgta

SEQ ID NO: 138906 - DNA, 25 bp, Canis familiaris
gtaaggcgcattatcctggatacat

SEQ ID NO: 138907 - DNA, 25 bp, Canis familiaris
gtcacgggcattgtacttttatcca

SEQ ID NO: 138908 - DNA, 25 bp, Canis familiaris
gtcacggggacaaactacttcatca

SEQ ID NO: 138909 - DNA, 25 bp, Canis familiaris
gtcacgggaaatacacgcgtttctt

SEQ ID NO: 138910 - DNA, 25 bp, Canis familiaris
gtcccgctaagtatcggtttctgct

SEQ ID NO: 138911 - DNA, 25 bp, Canis familiaris
gtcccgttgagatgttgtcttttta

SEQ ID NO: 138912 - DNA, 25 bp, Canis familiaris
gtcactcgtaattcacgttctgcct

SEQ ID NO: 138913 - DNA, 25 bp, Canis familiaris
gtaatcgctcagtgaatgttcgctt

SEQ ID NO: 138914 - DNA, 25 bp, Canis familiaris
gtaaggtgcatgtctatcaggctgg

SEQ ID NO: 138915 - DNA, 25 bp, Canis familiaris
gtcaagatggcaactcacgcggtgc

SEQ ID NO: 138916 - DNA, 25 bp, Canis familiaris
gtcaatgtgagccccagtcctgtgg

SEQ ID NO: 138917 - DNA, 25 bp, Canis familiaris
gtaagtgacactgcactgctcaacc

SEQ ID NO: 138918 - DNA, 25 bp, Canis familiaris
gtaatttactgtcctgctgaaagca

SEQ ID NO: 138919 - DNA, 25 bp, Canis familiaris
gtaatttcagtgtttctgacaagat

SEQ ID NO: 138920 - DNA, 25 bp, Canis familiaris
gtaatctttgcgtctggtgagaatg

SEQ ID NO: 138921 - DNA, 25 bp, Canis familiaris
gtaattctagaagtcgtgtatcatg

SEQ ID NO: 138922 - DNA, 25 bp, Canis familiaris
gtaatctctaaactctatgcagtac

SEQ ID NO: 138923 - DNA, 25 bp, Canis familiaris
gtaatctctataccctatactctag

SEQ ID NO: 138924 - DNA, 25 bp, Canis familiaris
gtaattgattagcctcgtgactctc

SEQ ID NO: 138925 - DNA, 25 bp, Canis familiaris
gtaattgataaattgctggaggctc

SEQ ID NO: 138926 - DNA, 25 bp, Canis familiaris
gtaatgacaaagtatctagagcagt

SEQ ID NO: 138927 - DNA, 25 bp, Canis familiaris
gtaatgacaaagttgcttagtattt

SEQ ID NO: 138928 - DNA, 25 bp, Canis familiaris
gtaatgccaaaatgccataatctat

SEQ ID NO: 138929 - DNA, 25 bp, Canis familiaris
gtaatccattgttagccatgatagc

SEQ ID NO: 138930 - DNA, 25 bp, Canis familiaris
gtaatatcattgtatagcccacatg

SEQ ID NO: 138931 - DNA, 25 bp, Canis familiaris
gtaattatcttaatcagccattgaa

SEQ ID NO: 138932 - DNA, 25 bp, Canis familiaris
gtaattgtcctgatacctctgaagt

SEQ ID NO: 138933 - DNA, 25 bp, Canis familiaris
gtaatagtgggtccactcctgcagg

SEQ ID NO: 138934 - DNA, 25 bp, Canis familiaris
gtcacaagttgccatctaccttggg

SEQ ID NO: 138935 - DNA, 25 bp, Canis familiaris
gtaatatgtatccgtagccatttgt

SEQ ID NO: 138936 - DNA, 25 bp, Canis familiaris
gtcagatgagtatggatcagcttct

SEQ ID NO: 138937 - DNA, 25 bp, Canis familiaris
gtcagatgtccattgtacctactcc

SEQ ID NO: 138938 - DNA, 25 bp, Canis familiaris
gtcaactcagcaagctgcccatact

SEQ ID NO: 138939 - DNA, 25 bp, Canis familiaris
gtcaagtcataggctctcaatagtt

SEQ ID NO: 138940 - DNA, 25 bp, Canis familiaris
gtcagacctggagtccataacctca

SEQ ID NO: 138941 - DNA, 25 bp, Canis familiaris
gtcaatcttggaggaattacttcac

SEQ ID NO: 138942 - DNA, 25 bp, Canis familiaris
gtaatcctgtgataagctccgagaa

SEQ ID NO: 138943 - DNA, 25 bp, Canis familiaris
gtcaatcctggaatacagtcccaca

SEQ ID NO: 138944 - DNA, 25 bp, Canis familiaris
gtaatcctctgtaaaataccaatgt

SEQ ID NO: 138945 - DNA, 25 bp, Canis familiaris
gtcacatcctttcaaatggcaagtt

SEQ ID NO: 138946 - DNA, 25 bp, Canis familiaris
gtcagctctttcaacaaataaatta

SEQ ID NO: 138947 - DNA, 25 bp, Canis familiaris
gtcactcgttcatgcataacttgaa

SEQ ID NO: 138948 - DNA, 25 bp, Canis familiaris
gtcacttttatgtatccagcttcag

SEQ ID NO: 138949 - DNA, 25 bp, Canis familiaris
gtaatttgcttagctatgctccaga

SEQ ID NO: 138950 - DNA, 25 bp, Canis familiaris
gtaatacctttgatatccacaatga

SEQ ID NO: 138951 - DNA, 25 bp, Canis familiaris
gtaattcttttggtcatctacagtg

SEQ ID NO: 138952 - DNA, 25 bp, Canis familiaris
gtaattcttctccatgtcatgttcc

SEQ ID NO: 138953 - DNA, 25 bp, Canis familiaris
gtcagagatgctgctcttgtctgcc

SEQ ID NO: 138954 - DNA, 25 bp, Canis familiaris
gtcaatgcatctggtatcgtgtgtt

SEQ ID NO: 138955 - DNA, 25 bp, Canis familiaris
gtgcaagttttaggtcgtctggggc

SEQ ID NO: 138956 - DNA, 25 bp, Canis familiaris
gtctagttcctctggaagctggggc

SEQ ID NO: 138957 - DNA, 25 bp, Canis familiaris
gtcacagcccttttagctagctggc

SEQ ID NO: 138958 - DNA, 25 bp, Canis familiaris
gtcaacaccttgatcaggcctgatg

SEQ ID NO: 138959 - DNA, 25 bp, Canis familiaris
gtcagaaccattatagggcatgagg

SEQ ID NO: 138960 - DNA, 25 bp, Canis familiaris
gtcagaacctagcctgagagtgatt

SEQ ID NO: 138961 - DNA, 25 bp, Canis familiaris
gtcacagagtgctctctgaaggatc

SEQ ID NO: 138962 - DNA, 25 bp, Canis familiaris
gtcagccaggagcctcttatggggc

SEQ ID NO: 138963 - DNA, 25 bp, Canis familiaris
gtcaacaggaacgtgactgggttct

SEQ ID NO: 138964 - DNA, 25 bp, Canis familiaris
gtcaaactgttctcaggggatttta

SEQ ID NO: 138965 - DNA, 25 bp, Canis familiaris
gtcgacgttgtaccagggagctttg

SEQ ID NO: 138966 - DNA, 25 bp, Canis familiaris
gtcacccttgtctcaaagagcttag

SEQ ID NO: 138967 - DNA, 25 bp, Canis familiaris
gtcaactaatattcacaaagcagga

SEQ ID NO: 138968 - DNA, 25 bp, Canis familiaris
gtcaccatgagatcatccaaacgat

SEQ ID NO: 138969 - DNA, 25 bp, Canis familiaris
gtcaccagagaaccttagctcgttg

SEQ ID NO: 138970 - DNA, 25 bp, Canis familiaris
gtcaccataggtcatatagtccatt

SEQ ID NO: 138971 - DNA, 25 bp, Canis familiaris
gtcacctactctctatcaaagctta

SEQ ID NO: 138972 - DNA, 25 bp, Canis familiaris
gtcaattgtcactgtcatcagaatc

SEQ ID NO: 138973 - DNA, 25 bp, Canis familiaris
gtcaattggctctctcatgagctgt

SEQ ID NO: 138974 - DNA, 25 bp, Canis familiaris
gtcaattgcacctctctacagggtg

SEQ ID NO: 138975 - DNA, 25 bp, Canis familiaris
gtcacacgcctctgtgggatgtggt

SEQ ID NO: 138976 - DNA, 25 bp, Canis familiaris
gtcacttgcccagaggcggtgggct

SEQ ID NO: 138977 - DNA, 25 bp, Canis familiaris
gtcaactgcccagatgccggtgggc

SEQ ID NO: 138978 - DNA, 25 bp, Canis familiaris
gtaatcctcctgactctggggtcag

SEQ ID NO: 138979 - DNA, 25 bp, Canis familiaris
gtaatcccagctactcgggaggctg

SEQ ID NO: 138980 - DNA, 25 bp, Canis familiaris
gtcaagccttgtaactggtgggtgg

SEQ ID NO: 138981 - DNA, 25 bp, Canis familiaris
gtcagaggtctggctacttgaggtt

SEQ ID NO: 138982 - DNA, 25 bp, Canis familiaris
gtcagggattgggattgggctttaa

SEQ ID NO: 138983 - DNA, 25 bp, Canis familiaris
gtcaggggtggtgtctttctggaag

SEQ ID NO: 138984 - DNA, 25 bp, Canis familiaris
gtaatcaccggtgtttgatatggtc

SEQ ID NO: 138985 - DNA, 25 bp, Canis familiaris
gtgaagcccaaatatttaagagttt

SEQ ID NO: 138986 - DNA, 25 bp, Canis familiaris
gtgaatcccaaaccattaaagcttt

SEQ ID NO: 138987 - DNA, 25 bp, Canis familiaris
gtaatcacctaggtttacaagtatt

SEQ ID NO: 138988 - DNA, 25 bp, Canis familiaris
gtaattgtctatgcattttaagtta

SEQ ID NO: 138989 - DNA, 25 bp, Canis familiaris
gtcaagcgtcttgttgtttaaataa

SEQ ID NO: 138990 - DNA, 25 bp, Canis familiaris
gtgaatggtccagaacatttaaaaa

SEQ ID NO: 138991 - DNA, 25 bp, Canis familiaris
gtcaaagtctattaagatgttacaa

SEQ ID NO: 138992 - DNA, 25 bp, Canis familiaris
gtcactcagtttttactgtggcaca

SEQ ID NO: 138993 - DNA, 25 bp, Canis familiaris
gtctaagtcttttgggggcacatgc

SEQ ID NO: 138994 - DNA, 25 bp, Canis familiaris
gtcaatgtgagttttgtttggcacc

SEQ ID NO: 138995 - DNA, 25 bp, Canis familiaris
gtaattgatgtgtcttttttcctaa

SEQ ID NO: 138996 - DNA, 25 bp, Canis familiaris
gtaatgtgctgttttctgttttcta

SEQ ID NO: 138997 - DNA, 25 bp, Canis familiaris
gtaatgagctgtttttatattttta

SEQ ID NO: 138998 - DNA, 25 bp, Canis familiaris
gtcacaggctgtaattttactttat

SEQ ID NO: 138999 - DNA, 25 bp, Canis familiaris
gtcagtgcgtttacttgtgactgta

SEQ ID NO: 139000 - DNA, 25 bp, Canis familiaris
gtcactttttgtgcgtgctgcattc

SEQ ID NO: 139001 - DNA, 25 bp, Canis familiaris
gtctaacctttacatccatagccaa

SEQ ID NO: 139002 - DNA, 25 bp, Canis familiaris
gtcaaggcctttttggctgatacca

SEQ ID NO: 139003 - DNA, 25 bp, Canis familiaris
gtaattgcttttcgtgggtagtatg

SEQ ID NO: 139004 - DNA, 25 bp, Canis familiaris
gtaatgtcttttgcattgggaaatg

SEQ ID NO: 139005 - DNA, 25 bp, Canis familiaris
gtaatttttggtactgaggcagcaa

SEQ ID NO: 139006 - DNA, 25 bp, Canis familiaris
gtaattgtttttaaaggccgcagag

SEQ ID NO: 139007 - DNA, 25 bp, Canis familiaris
gtggaaggttccctcaaggggcaag

SEQ ID NO: 139008 - DNA, 25 bp, Canis familiaris
gtaatagatttcattccagtggtgc

SEQ ID NO: 139009 - DNA, 25 bp, Canis familiaris
gtctttatggacgtaccgtggtcgg

SEQ ID NO: 139010 - DNA, 25 bp, Canis familiaris
gtctttgggacactcaggtctggga

SEQ ID NO: 139011 - DNA, 25 bp, Canis familiaris
gtcatggttgaaagtcatttaggga

SEQ ID NO: 139012 - DNA, 25 bp, Canis familiaris
gtcaggtgaacaaatcaggttaggg

SEQ ID NO: 139013 - DNA, 25 bp, Canis familiaris
gtcagcggaggaagcacgtcctcgg

SEQ ID NO: 139014 - DNA, 25 bp, Canis familiaris
gtcagacgatgttcaaagtcccggc

SEQ ID NO: 139015 - DNA, 25 bp, Canis familiaris
gtcaacttctgtaattgtcctggga

SEQ ID NO: 139016 - DNA, 25 bp, Canis familiaris
gtcaacttcaccatagtgcacaggc

SEQ ID NO: 139017 - DNA, 25 bp, Canis familiaris
gtcaaccgcccaaagccaagagcga

SEQ ID NO: 139018 - DNA, 25 bp, Canis familiaris
gtcatcattacccaagagcaaagag

SEQ ID NO: 139019 - DNA, 25 bp, Canis familiaris
gtcaaaattccaggcaccaagcatg

SEQ ID NO: 139020 - DNA, 25 bp, Canis familiaris
gtcagaaagctccagcccagaaagc

SEQ ID NO: 139021 - DNA, 25 bp, Canis familiaris
gtcagaaagctccagcccagaaagc

SEQ ID NO: 139022 - DNA, 25 bp, Canis familiaris
gtcagaaggatccagaagcagaaga

SEQ ID NO: 139023 - DNA, 25 bp, Canis familiaris
gtcacaagtatgccaaagacatcca

SEQ ID NO: 139024 - DNA, 25 bp, Canis familiaris
gtcacagaagctgcaaagagcccta

SEQ ID NO: 139025 - DNA, 25 bp, Canis familiaris
gtcagagaactccttgacacccata

SEQ ID NO: 139026 - DNA, 25 bp, Canis familiaris
gtcaagcagcacacagtgaccacca

SEQ ID NO: 139027 - DNA, 25 bp, Canis familiaris
gtcatcgctgccaggaactgaccac

SEQ ID NO: 139028 - DNA, 25 bp, Canis familiaris
gtcaagctgtccagaagccagccgc

SEQ ID NO: 139029 - DNA, 25 bp, Canis familiaris
gtcaaggagccttgacacctgccac

SEQ ID NO: 139030 - DNA, 25 bp, Canis familiaris
gtcaaggacaaggacctctgccacc

SEQ ID NO: 139031 - DNA, 25 bp, Canis familiaris
gtcaatggatgatgcatggcccgta

SEQ ID NO: 139032 - DNA, 25 bp, Canis familiaris
gtcactggatgttgtgaggtcagta

SEQ ID NO: 139033 - DNA, 25 bp, Canis familiaris
gtcagccagtgttggggactgatgt

SEQ ID NO: 139034 - DNA, 25 bp, Canis familiaris
gtcagctcaggagagggcaaggcca

SEQ ID NO: 139035 - DNA, 25 bp, Canis familiaris
gtcagactgtgggaaggtatggaaa

SEQ ID NO: 139036 - DNA, 25 bp, Canis familiaris
gtcagccctgcgggactggatgggc

SEQ ID NO: 139037 - DNA, 25 bp, Canis familiaris
gtcaccaagctgctactgacgaggc

SEQ ID NO: 139038 - DNA, 25 bp, Canis familiaris
gtcagcaacacgcttcagaaggcca

SEQ ID NO: 139039 - DNA, 25 bp, Canis familiaris
gtcaagagcctctgcgagaaggcta

SEQ ID NO: 139040 - DNA, 25 bp, Canis familiaris
gtcaagtgcgtcgtgcggaacgtgc

SEQ ID NO: 139041 - DNA, 25 bp, Canis familiaris
gtcacagtcgctcgggagttggtgc

SEQ ID NO: 139042 - DNA, 25 bp, Canis familiaris
gtcaagcctaggccgcagatttcgc

SEQ ID NO: 139043 - DNA, 25 bp, Canis familiaris
gtcaaggttggagcgtgataccaga

SEQ ID NO: 139044 - DNA, 25 bp, Canis familiaris
gtcaaagttggtgcagtggacgcag

SEQ ID NO: 139045 - DNA, 25 bp, Canis familiaris
gtcacatagcctgttagtgcaaccc

SEQ ID NO: 139046 - DNA, 25 bp, Canis familiaris
gtcacacgtctagattgagaatcgg

SEQ ID NO: 139047 - DNA, 25 bp, Canis familiaris
gtcacacgtctagatgagaaatcgg

SEQ ID NO: 139048 - DNA, 25 bp, Canis familiaris
gtcagccacctcagtaaaattggag

SEQ ID NO: 139049 - DNA, 25 bp, Canis familiaris
gtcagagagcccggtgaaaataaga

SEQ ID NO: 139050 - DNA, 25 bp, Canis familiaris
gtcaagccccggctgaggcaagtga

SEQ ID NO: 139051 - DNA, 25 bp, Canis familiaris
gtcacactgtaacgttgggaagatg

SEQ ID NO: 139052 - DNA, 25 bp, Canis familiaris
gtctggagtcagaggtcggacgtgg

SEQ ID NO: 139053 - DNA, 25 bp, Canis familiaris
gtcgtgatgtcgaaaatccccgtac

SEQ ID NO: 139054 - DNA, 25 bp, Canis familiaris
gtaattattgtacatccctccatga

SEQ ID NO: 139055 - DNA, 25 bp, Canis familiaris
gtaatctagatttgttctcctcaca

SEQ ID NO: 139056 - DNA, 25 bp, Canis familiaris
gtaatctagccttgatgctgtaacc

SEQ ID NO: 139057 - DNA, 25 bp, Canis familiaris
gtaatcaactgttttgtatacttgt

SEQ ID NO: 139058 - DNA, 25 bp, Canis familiaris
gtaatcgtgctattttttatcattg

SEQ ID NO: 139059 - DNA, 25 bp, Canis familiaris
gtcaacttgtgactttggttttgtg

SEQ ID NO: 139060 - DNA, 25 bp, Canis familiaris
gtcacgtttgtgatctttctttgga

SEQ ID NO: 139061 - DNA, 25 bp, Canis familiaris
gtcaggtatttgatgctttgtttcc

SEQ ID NO: 139062 - DNA, 25 bp, Canis familiaris
gtcaggatgtgtggttgcgctttac

SEQ ID NO: 139063 - DNA, 25 bp, Canis familiaris
gtcaagatggtattgatctgtggta

SEQ ID NO: 139064 - DNA, 25 bp, Canis familiaris
gtcaatggcaaattctcctctgatt

SEQ ID NO: 139065 - DNA, 25 bp, Canis familiaris
gtcaagcacacattgttctccgagt

SEQ ID NO: 139066 - DNA, 25 bp, Canis familiaris
gtcaaagccaaattccacgagcaac

SEQ ID NO: 139067 - DNA, 25 bp, Canis familiaris
gtcacaagccaatgtgtcacagagc

SEQ ID NO: 139068 - DNA, 25 bp, Canis familiaris
gtcactttcattggtgctgcactgg

SEQ ID NO: 139069 - DNA, 25 bp, Canis familiaris
gtcagcataatcatcatttcactct

SEQ ID NO: 139070 - DNA, 25 bp, Canis familiaris
gtcacattatgtcttagcatctcac

SEQ ID NO: 139071 - DNA, 25 bp, Canis familiaris
gtcatctgaaggcttaactaagact

SEQ ID NO: 139072 - DNA, 25 bp, Canis familiaris
gtcagcatggggccctaactatttt

SEQ ID NO: 139073 - DNA, 25 bp, Canis familiaris
gtcacatgcagcatccgtagactga

SEQ ID NO: 139074 - DNA, 25 bp, Canis familiaris
gtcacagccactacggagactgagc

SEQ ID NO: 139075 - DNA, 25 bp, Canis familiaris
gtcaagcacagtccaggcgctatac

SEQ ID NO: 139076 - DNA, 25 bp, Canis familiaris
gtcacagcacaggtgagcgtctgga

SEQ ID NO: 139077 - DNA, 25 bp, Canis familiaris
gtcaagcacgtccagcagtgatggc

SEQ ID NO: 139078 - DNA, 25 bp, Canis familiaris
gtcagagctctgcctgagggatctg

SEQ ID NO: 139079 - DNA, 25 bp, Canis familiaris
gtcatgtgcatgtgtcaggtgcata

SEQ ID NO: 139080 - DNA, 25 bp, Canis familiaris
gtcatggtcatgtcatatatgccaa

SEQ ID NO: 139081 - DNA, 25 bp, Canis familiaris
gtcactgtgctgctgtatctagatc

SEQ ID NO: 139082 - DNA, 25 bp, Canis familiaris
gtcagcagattcggtatctgaatcc

SEQ ID NO: 139083 - DNA, 25 bp, Canis familiaris
gtcaacatctccttgtctgaaatct

SEQ ID NO: 139084 - DNA, 25 bp, Canis familiaris
gtaattgccatgtttctgaaactca

SEQ ID NO: 139085 - DNA, 25 bp, Canis familiaris
gtaattccatgctcctatatgcgta

SEQ ID NO: 139086 - DNA, 25 bp, Canis familiaris
gtcaattcctgtgatttatgcccaa

SEQ ID NO: 139087 - DNA, 25 bp, Canis familiaris
gtaataccatattatttatgccatg

SEQ ID NO: 139088 - DNA, 25 bp, Canis familiaris
gtcattacctatgtttcctgtgttc

SEQ ID NO: 139089 - DNA, 25 bp, Canis familiaris
gtcaggaccctacgtctgggatttc

SEQ ID NO: 139090 - DNA, 25 bp, Canis familiaris
gtcaggcccctgaagaacattattt

SEQ ID NO: 139091 - DNA, 25 bp, Canis familiaris
gtcaactccccaagtaatttgcttc

SEQ ID NO: 139092 - DNA, 25 bp, Canis familiaris
gtcaaccccgatttagtcgtatctc

SEQ ID NO: 139093 - DNA, 25 bp, Canis familiaris
gtcaaattcctgtaacgctggttct

SEQ ID NO: 139094 - DNA, 25 bp, Canis familiaris
gtcatagtttcgtcacatggtactt

SEQ ID NO: 139095 - DNA, 25 bp, Canis familiaris
gtcaagatttagtccaattgcacta

SEQ ID NO: 139096 - DNA, 25 bp, Canis familiaris
gtcaatatttgacccattcttattt

SEQ ID NO: 139097 - DNA, 25 bp, Canis familiaris
gtcaaatcttgtatttctcctttac

SEQ ID NO: 139098 - DNA, 25 bp, Canis familiaris
gtcaaacagaagacttcctccctta

SEQ ID NO: 139099 - DNA, 25 bp, Canis familiaris
gtcacaacgcagatcagtcctgccc

SEQ ID NO: 139100 - DNA, 25 bp, Canis familiaris
gtcatcaacgggaagtccatctcca

SEQ ID NO: 139101 - DNA, 25 bp, Canis familiaris
gtcacaacttcaaattccactctag

SEQ ID NO: 139102 - DNA, 25 bp, Canis familiaris
gtcaaatgtctatcttccacttaaa

SEQ ID NO: 139103 - DNA, 25 bp, Canis familiaris
gtcaaattgcgtacttctattgtag

SEQ ID NO: 139104 - DNA, 25 bp, Canis familiaris
gtcacatcattcttccttttaaacc

SEQ ID NO: 139105 - DNA, 25 bp, Canis familiaris
gtcaatcttctttccttgagaacac

SEQ ID NO: 139106 - DNA, 25 bp, Canis familiaris
gtcaatctgcaaattccttctcaat

SEQ ID NO: 139107 - DNA, 25 bp, Canis familiaris
gtcaatgctgccattggcaccatca

SEQ ID NO: 139108 - DNA, 25 bp, Canis familiaris
tcgttgtcacggtgcaagcatcctg

SEQ ID NO: 139109 - DNA, 25 bp, Canis familiaris
tagattgtaagctcgatggcaggga

SEQ ID NO: 139110 - DNA, 25 bp, Canis familiaris
gtcttgccaagctcgtggggagcag

SEQ ID NO: 139111 - DNA, 25 bp, Canis familiaris
gtcagttagagcccctggtggagag

SEQ ID NO: 139112 - DNA, 25 bp, Canis familiaris
gtcagaaagggcggcggtggtggtg

SEQ ID NO: 139113 - DNA, 25 bp, Canis familiaris
gtcaactacgtggcgtggtgtggtc

SEQ ID NO: 139114 - DNA, 25 bp, Canis familiaris
gtaattcaccttggtttgctatgtt

SEQ ID NO: 139115 - DNA, 25 bp, Canis familiaris
gtaatatcccttttgttgatgagct

SEQ ID NO: 139116 - DNA, 25 bp, Canis familiaris
gtaatatcaatgttcttgggtgtga

SEQ ID NO: 139117 - DNA, 25 bp, Canis familiaris
gtaattcctcttttgggagctgagc

SEQ ID NO: 139118 - DNA, 25 bp, Canis familiaris
gtaattcatcctcttggatcagtgc

SEQ ID NO: 139119 - DNA, 25 bp, Canis familiaris
gtcaataacctggttgtgatattgc

SEQ ID NO: 139120 - DNA, 25 bp, Canis familiaris
gtcacacccactgacatgtacattc

SEQ ID NO: 139121 - DNA, 25 bp, Canis familiaris
gtcacccgatctacacgtttatcgg

SEQ ID NO: 139122 - DNA, 25 bp, Canis familiaris
gtcagcccgattcagggcttctcag

SEQ ID NO: 139123 - DNA, 25 bp, Canis familiaris
gtcacctgacttcaggtcatgatct

SEQ ID NO: 139124 - DNA, 25 bp, Canis familiaris
gtcacctacagtcatgttttctacc

SEQ ID NO: 139125 - DNA, 25 bp, Canis familiaris
gtcaactgggccgttattttccctg

SEQ ID NO: 139126 - DNA, 25 bp, Canis familiaris
gtcaagtaccactttattaccccat

SEQ ID NO: 139127 - DNA, 25 bp, Canis familiaris
gtcaagtaatctgctctttatccgc

SEQ ID NO: 139128 - DNA, 25 bp, Canis familiaris
gtcaataaacatgtcctgtactcgg

SEQ ID NO: 139129 - DNA, 25 bp, Canis familiaris
gtcacagaaagtgctgctttgcagt

SEQ ID NO: 139130 - DNA, 25 bp, Canis familiaris
gtcaccgtgactttgcttatcgtgt

SEQ ID NO: 139131 - DNA, 25 bp, Canis familiaris
gtcatccagtacatccctgtctgga

SEQ ID NO: 139132 - DNA, 25 bp, Canis familiaris
gtcaagagaatgatcggctgctctg

SEQ ID NO: 139133 - DNA, 25 bp, Canis familiaris
gtcaagcagatctgcctggtcatgc

SEQ ID NO: 139134 - DNA, 25 bp, Canis familiaris
gtcaagctcatttcctggtatgaca

SEQ ID NO: 139135 - DNA, 25 bp, Canis familiaris
gtcaagctcatttcctggtatgaca

SEQ ID NO: 139136 - DNA, 25 bp, Canis familiaris
gtcaagacattctgcatgtgccatt

SEQ ID NO: 139137 - DNA, 25 bp, Canis familiaris
gtcagagacttgcagcagttttccc

SEQ ID NO: 139138 - DNA, 25 bp, Canis familiaris
gtcactccctgctatagctattacc

SEQ ID NO: 139139 - DNA, 25 bp, Canis familiaris
gtcagatccgcttatggataagtga

SEQ ID NO: 139140 - DNA, 25 bp, Canis familiaris
gtcaaccactttggatttggacccg

SEQ ID NO: 139141 - DNA, 25 bp, Canis familiaris
gtcaacccttaccgcattgaaggcc

SEQ ID NO: 139142 - DNA, 25 bp, Canis familiaris
gtcagatgtcctaacccattgatcc

SEQ ID NO: 139143 - DNA, 25 bp, Canis familiaris
gtcagatctcacatagcaccgtctg

SEQ ID NO: 139144 - DNA, 25 bp, Canis familiaris
gtcaatctagtgtctgaacgctatg

SEQ ID NO: 139145 - DNA, 25 bp, Canis familiaris
gtcaccatcatttctagcacgttgg

SEQ ID NO: 139146 - DNA, 25 bp, Canis familiaris
gtcaacacatcagatcacacagctt

SEQ ID NO: 139147 - DNA, 25 bp, Canis familiaris
gtcacagactcaggaccaattgcgt

SEQ ID NO: 139148 - DNA, 25 bp, Canis familiaris
gtcaacactcctgagcacattgttc

SEQ ID NO: 139149 - DNA, 25 bp, Canis familiaris
gtcaacactcacaaaacatcaagat

SEQ ID NO: 139150 - DNA, 25 bp, Canis familiaris
gtcaacacaacattgcaaatcaagg

SEQ ID NO: 139151 - DNA, 25 bp, Canis familiaris
gtcaagccataattcaaatctcagt

SEQ ID NO: 139152 - DNA, 25 bp, Canis familiaris
gtcagccagctgtattcaacatctg

SEQ ID NO: 139153 - DNA, 25 bp, Canis familiaris
gtcacactctgatttaatcatgata

SEQ ID NO: 139154 - DNA, 25 bp, Canis familiaris
gtcacacacttatagactgatacgt

SEQ ID NO: 139155 - DNA, 25 bp, Canis familiaris
gtcaaacccatatactatacagtgt

SEQ ID NO: 139156 - DNA, 25 bp, Canis familiaris
gtcaaggcccaataagcaccagatc

SEQ ID NO: 139157 - DNA, 25 bp, Canis familiaris
gtcaaggccaagacctacatccaga

SEQ ID NO: 139158 - DNA, 25 bp, Canis familiaris
gtcagaatgacaaccttacatccaa

SEQ ID NO: 139159 - DNA, 25 bp, Canis familiaris
gtcaaatccatttgctgtaatccat

SEQ ID NO: 139160 - DNA, 25 bp, Canis familiaris
gtcaatgtacatctcttaatctgat

SEQ ID NO: 139161 - DNA, 25 bp, Canis familiaris
gtcagatgctttcatttacacagat

SEQ ID NO: 139162 - DNA, 25 bp, Canis familiaris
gtcaggctttgaaatttacaatgca

SEQ ID NO: 139163 - DNA, 25 bp, Canis familiaris
gtcaccttgtaatattcagagagca

SEQ ID NO: 139164 - DNA, 25 bp, Canis familiaris
gtcacaattgtattcggtcaaccca

SEQ ID NO: 139165 - DNA, 25 bp, Canis familiaris
gtcaaatgagtactcggagaccagg

SEQ ID NO: 139166 - DNA, 25 bp, Canis familiaris
gtcagagctcgtttagtgaaccgtc

SEQ ID NO: 139167 - DNA, 25 bp, Canis familiaris
gtcagagctcgtttagtgaaccgtc

SEQ ID NO: 139168 - DNA, 25 bp, Canis familiaris
gtcagaccgctaataggtgtactgt

SEQ ID NO: 139169 - DNA, 25 bp, Canis familiaris
gtcaacttgcaaataggtctctctt

SEQ ID NO: 139170 - DNA, 25 bp, Canis familiaris
gtcacatttacaatggggattgctc

SEQ ID NO: 139171 - DNA, 25 bp, Canis familiaris
gtcacatgctcttttaggaactctt

SEQ ID NO: 139172 - DNA, 25 bp, Canis familiaris
gtcaactgccattctaaaagcttta

SEQ ID NO: 139173 - DNA, 25 bp, Canis familiaris
gtcacacctctctttaatcattttg

SEQ ID NO: 139174 - DNA, 25 bp, Canis familiaris
gtcacaccattcagtataagctttt

SEQ ID NO: 139175 - DNA, 25 bp, Canis familiaris
gtcacatcttctgttctgaggttta

SEQ ID NO: 139176 - DNA, 25 bp, Canis familiaris
gtcaccattaaatttgagcagtact

SEQ ID NO: 139177 - DNA, 25 bp, Canis familiaris
gtcacaaccggatttgccagttgtt

SEQ ID NO: 139178 - DNA, 25 bp, Canis familiaris
gtcacgaccaagtttgctcaacatt

SEQ ID NO: 139179 - DNA, 25 bp, Canis familiaris
gtcaagaacaaattctctatatcaa

SEQ ID NO: 139180 - DNA, 25 bp, Canis familiaris
gtcaattactacttcctatcaactg

SEQ ID NO: 139181 - DNA, 25 bp, Canis familiaris
gtcaatgttctacaacttggaagtt

SEQ ID NO: 139182 - DNA, 25 bp, Canis familiaris
gtcacattttaatactactctagtt

SEQ ID NO: 139183 - DNA, 25 bp, Canis familiaris
gtcacttttgagtttttcttcagtc

SEQ ID NO: 139184 - DNA, 25 bp, Canis familiaris
gtcaataggctgagttttctccagt

SEQ ID NO: 139185 - DNA, 25 bp, Canis familiaris
gtcacaagaggtctttccctcagtt

SEQ ID NO: 139186 - DNA, 25 bp, Canis familiaris
gtcaccaaggtgacttctccttggc

SEQ ID NO: 139187 - DNA, 25 bp, Canis familiaris
gtcacaacaggtgctcgcatttggc

SEQ ID NO: 139188 - DNA, 25 bp, Canis familiaris
gtcactaaaggatttgcagcttgcg

SEQ ID NO: 139189 - DNA, 25 bp, Canis familiaris
gtcactagataacatgtgccttggc

SEQ ID NO: 139190 - DNA, 25 bp, Canis familiaris
gtcttgaaataatggcccgtgcaaa

SEQ ID NO: 139191 - DNA, 25 bp, Canis familiaris
gtgttcaaattgtggggtggctaag

SEQ ID NO: 139192 - DNA, 25 bp, Canis familiaris
gtcaacataatcctgggggggagca

SEQ ID NO: 139193 - DNA, 25 bp, Canis familiaris
gtcaacatccatgtcgggggtggtg

SEQ ID NO: 139194 - DNA, 25 bp, Canis familiaris
gtcagacagtaagtgggttttgggc

SEQ ID NO: 139195 - DNA, 25 bp, Canis familiaris
gtctgcacgtaataggtgtttggta

SEQ ID NO: 139196 - DNA, 25 bp, Canis familiaris
gtcacctcccagaacgtttctggtt

SEQ ID NO: 139197 - DNA, 25 bp, Canis familiaris
gtcactggtcctgacagtttctgaa

SEQ ID NO: 139198 - DNA, 25 bp, Canis familiaris
gtcaattgcccagagcgttggctaa

SEQ ID NO: 139199 - DNA, 25 bp, Canis familiaris
gtcaatgccccagagcggtgggcaa

SEQ ID NO: 139200 - DNA, 25 bp, Canis familiaris
gtcaataacacaggaggaatgccca

SEQ ID NO: 139201 - DNA, 25 bp, Canis familiaris
gtcacgcatatgtggtggagtccca

SEQ ID NO: 139202 - DNA, 25 bp, Canis familiaris
gtcacagagtgtctttgcatgtccc

SEQ ID NO: 139203 - DNA, 25 bp, Canis familiaris
gtcactgaggtgttctgagctgtac

SEQ ID NO: 139204 - DNA, 25 bp, Canis familiaris
gtcacagagggaccatgcagggaca

SEQ ID NO: 139205 - DNA, 25 bp, Canis familiaris
gtcacaaggagacctgggatatgct

SEQ ID NO: 139206 - DNA, 25 bp, Canis familiaris
gtcaacatacaaactgtggctcact

SEQ ID NO: 139207 - DNA, 25 bp, Canis familiaris
gtcatcacaaacacgtgggacaaag

SEQ ID NO: 139208 - DNA, 25 bp, Canis familiaris
gtcaatctaacaatgctcggagcaa

SEQ ID NO: 139209 - DNA, 25 bp, Canis familiaris
gtgctatgtcacagagatcgaccaa

SEQ ID NO: 139210 - DNA, 25 bp, Canis familiaris
gtcactgtcatcagaatctgtcggc

SEQ ID NO: 139211 - DNA, 25 bp, Canis familiaris
gtcactgtcatcagaatctgtcggc

SEQ ID NO: 139212 - DNA, 25 bp, Canis familiaris
gtcacgtatcgcgtgatctccgaca

SEQ ID NO: 139213 - DNA, 25 bp, Canis familiaris
gtcaagtctctgggactcctgaagc

SEQ ID NO: 139214 - DNA, 25 bp, Canis familiaris
gtcaagttgccacattccatgagtc

SEQ ID NO: 139215 - DNA, 25 bp, Canis familiaris
gtcaacttgacagattaaagcttct

SEQ ID NO: 139216 - DNA, 25 bp, Canis familiaris
gtcaagactgacgcattggaccttt

SEQ ID NO: 139217 - DNA, 25 bp, Canis familiaris
gtcagaaataaggcatctggaccag

SEQ ID NO: 139218 - DNA, 25 bp, Canis familiaris
gtcagaaaacacaacagtcactatc

SEQ ID NO: 139219 - DNA, 25 bp, Canis familiaris
gtcagtgaccaagagcagtcctcgt

SEQ ID NO: 139220 - DNA, 25 bp, Canis familiaris
gtcaaacagcaagggattccattct

SEQ ID NO: 139221 - DNA, 25 bp, Canis familiaris
gtcaaaagctcaggactcttcacca

SEQ ID NO: 139222 - DNA, 25 bp, Canis familiaris
gtcaacagactaggacaccatatct

SEQ ID NO: 139223 - DNA, 25 bp, Canis familiaris
gtcaggaaccacgacatccatacat

SEQ ID NO: 139224 - DNA, 25 bp, Canis familiaris
gtcagaaaccagatcacacatccgc

SEQ ID NO: 139225 - DNA, 25 bp, Canis familiaris
gtcatacaacccagcaattctgccc

SEQ ID NO: 139226 - DNA, 25 bp, Canis familiaris
gtcaaagcaacagagcacttcatcc

SEQ ID NO: 139227 - DNA, 25 bp, Canis familiaris
gtcaggatgcagcacaaacccagtc

SEQ ID NO: 139228 - DNA, 25 bp, Canis familiaris
gtcagggagggcaaacagccggctg

SEQ ID NO: 139229 - DNA, 25 bp, Canis familiaris
gtcagtggtggacctgacctgccgt

SEQ ID NO: 139230 - DNA, 25 bp, Canis familiaris
gtcaacgtggagctgatcacacctg

SEQ ID NO: 139231 - DNA, 25 bp, Canis familiaris
gtcaacacgaagcgtagcagccggg

SEQ ID NO: 139232 - DNA, 25 bp, Canis familiaris
gtcaaaagcaacggctctggcgggc

SEQ ID NO: 139233 - DNA, 25 bp, Canis familiaris
gtcagagatacctggcctggtctgg

SEQ ID NO: 139234 - DNA, 25 bp, Canis familiaris
gtcaacacacccgacttggtgctgt

SEQ ID NO: 139235 - DNA, 25 bp, Canis familiaris
gtcaccaacccgtctatatgtgtat

SEQ ID NO: 139236 - DNA, 25 bp, Canis familiaris
gtcaccaactctggcaatttggaag

SEQ ID NO: 139237 - DNA, 25 bp, Canis familiaris
gtcactcaacctcatttgctggacc

SEQ ID NO: 139238 - DNA, 25 bp, Canis familiaris
gtcactaatcacaagggatggggac

SEQ ID NO: 139239 - DNA, 25 bp, Canis familiaris
gtcactccaccactgggtgggggcc

SEQ ID NO: 139240 - DNA, 25 bp, Canis familiaris
gtcaaccacgacacagatgcgggag

SEQ ID NO: 139241 - DNA, 25 bp, Canis familiaris
gtcacccctgccaaagagtggtgag

SEQ ID NO: 139242 - DNA, 25 bp, Canis familiaris
gtcacaccttctaaaaagaataagg

SEQ ID NO: 139243 - DNA, 25 bp, Canis familiaris
tgttacctactcacaaaaatcccct

SEQ ID NO: 139244 - DNA, 25 bp, Canis familiaris
tgtttaaatgtttgaaaattgccct

SEQ ID NO: 139245 - DNA, 25 bp, Canis familiaris
gtctttcagttgagaaaaggcctgc

SEQ ID NO: 139246 - DNA, 25 bp, Canis familiaris
gtcatttccttagaagacctctcta

SEQ ID NO: 139247 - DNA, 25 bp, Canis familiaris
gtcatttttttgcgcgacccgctga

SEQ ID NO: 139248 - DNA, 25 bp, Canis familiaris
gtcttttttgttattacaccgagtg

SEQ ID NO: 139249 - DNA, 25 bp, Canis familiaris
gtcttttattttgttgaccttagca

SEQ ID NO: 139250 - DNA, 25 bp, Canis familiaris
gtcttattttttgatttcactataa

SEQ ID NO: 139251 - DNA, 25 bp, Canis familiaris
gtcctatttttgagacgtcagcacc

SEQ ID NO: 139252 - DNA, 25 bp, Canis familiaris
gtcacttttattgagtcaccgatcc

SEQ ID NO: 139253 - DNA, 25 bp, Canis familiaris
gtcaccttgatgttctggtaccgtc

SEQ ID NO: 139254 - DNA, 25 bp, Canis familiaris
gtcacacatatttttgttaacagtc

SEQ ID NO: 139255 - DNA, 25 bp, Canis familiaris
gtcaacatttacttatctaccagtt

SEQ ID NO: 139256 - DNA, 25 bp, Canis familiaris
gtcaccaattcacgtattcttcaga

SEQ ID NO: 139257 - DNA, 25 bp, Canis familiaris
gtcacctaatgcagccattactcaa

SEQ ID NO: 139258 - DNA, 25 bp, Canis familiaris
ttcccagttcaacgttaccaaagtg

SEQ ID NO: 139259 - DNA, 25 bp, Canis familiaris
gtcccagttcgacttaccgaaatgc

SEQ ID NO: 139260 - DNA, 25 bp, Canis familiaris
gtcacttgtctcggttacacagaat

SEQ ID NO: 139261 - DNA, 25 bp, Canis familiaris
gtcactggttctgttcaagccaagg

SEQ ID NO: 139262 - DNA, 25 bp, Canis familiaris
gtcactggttttgaggtcccatagt

SEQ ID NO: 139263 - DNA, 25 bp, Canis familiaris
gtcacggtctagactacgtcaagat

SEQ ID NO: 139264 - DNA, 25 bp, Canis familiaris
gtcactgtttagactacaacgagat

SEQ ID NO: 139265 - DNA, 25 bp, Canis familiaris
gtcacttgtgtggtctaatagctag

SEQ ID NO: 139266 - DNA, 25 bp, Canis familiaris
gtcacatgtttggttcactcatttg

SEQ ID NO: 139267 - DNA, 25 bp, Canis familiaris
gtcactgctttaatcacagcctttg

SEQ ID NO: 139268 - DNA, 25 bp, Canis familiaris
gtcactgatatacttaagccttgtt

SEQ ID NO: 139269 - DNA, 25 bp, Canis familiaris
gtcacttcatttggaatcacttgga

SEQ ID NO: 139270 - DNA, 25 bp, Canis familiaris
gtcagtgtctctctgaaacctggca

SEQ ID NO: 139271 - DNA, 25 bp, Canis familiaris
gtcagatgtcattttcttacctgca

SEQ ID NO: 139272 - DNA, 25 bp, Canis familiaris
gtcagtcgtattatatcacacccca

SEQ ID NO: 139273 - DNA, 25 bp, Canis familiaris
gtcagtgtttagacatgttacccta

SEQ ID NO: 139274 - DNA, 25 bp, Canis familiaris
gtcaagatttatccatgttatctca

SEQ ID NO: 139275 - DNA, 25 bp, Canis familiaris
gtcactatgtagtctcagttcctca

SEQ ID NO: 139276 - DNA, 25 bp, Canis familiaris
gtcacttgtatggactggtctctcc

SEQ ID NO: 139277 - DNA, 25 bp, Canis familiaris
gtcacaattcagtactgcagttatc

SEQ ID NO: 139278 - DNA, 25 bp, Canis familiaris
gtcaaagtgctgaactagtaaccaa

SEQ ID NO: 139279 - DNA, 25 bp, Canis familiaris
gtcagaagggaacagctcaccagca

SEQ ID NO: 139280 - DNA, 25 bp, Canis familiaris
gtcagtcgggtgctcaacaagctgg

SEQ ID NO: 139281 - DNA, 25 bp, Canis familiaris
gtcagtctcgggtttcacaacgatt

SEQ ID NO: 139282 - DNA, 25 bp, Canis familiaris
gtcatgttgggtttgccaggaccaa

SEQ ID NO: 139283 - DNA, 25 bp, Canis familiaris
gtcaggtgcaggagttggaggccaa

SEQ ID NO: 139284 - DNA, 25 bp, Canis familiaris
gtcagggaggtccttggagtcagct

SEQ ID NO: 139285 - DNA, 25 bp, Canis familiaris
gtcacggaggtgggctacagacagc

SEQ ID NO: 139286 - DNA, 25 bp, Canis familiaris
gtcacggaggataagatcaatgccc

SEQ ID NO: 139287 - DNA, 25 bp, Canis familiaris
gtcacgaagtacaatgacctcatcc

SEQ ID NO: 139288 - DNA, 25 bp, Canis familiaris
gtcacggagtccaatgagttaccgg

SEQ ID NO: 139289 - DNA, 25 bp, Canis familiaris
gtcacacggtccagtggtaccaaag

SEQ ID NO: 139290 - DNA, 25 bp, Canis familiaris
gtcacattgactggctgggggacca

SEQ ID NO: 139291 - DNA, 25 bp, Canis familiaris
gtcaactaggctctggaggaccacc

SEQ ID NO: 139292 - DNA, 25 bp, Canis familiaris
gtcagccggagtatctgggacaacc

SEQ ID NO: 139293 - DNA, 25 bp, Canis familiaris
gtcagccgggagtatctggggcaac

SEQ ID NO: 139294 - DNA, 25 bp, Canis familiaris
gtcaccaggcaaacgctttggcctc

SEQ ID NO: 139295 - DNA, 25 bp, Canis familiaris
gtcatcggaggcacgtcgtgggtct

SEQ ID NO: 139296 - DNA, 25 bp, Canis familiaris
gtgagaggggctgtggcttttgtgc

SEQ ID NO: 139297 - DNA, 25 bp, Canis familiaris
gtcaggaagcctgtggcctttggct

SEQ ID NO: 139298 - DNA, 25 bp, Canis familiaris
gtcagaaagcttgctggtctctgct

SEQ ID NO: 139299 - DNA, 25 bp, Canis familiaris
gtcagatgaatctttgttgtcttgt

SEQ ID NO: 139300 - DNA, 25 bp, Canis familiaris
gtcagaaagacgctgctgctctgtt

SEQ ID NO: 139301 - DNA, 25 bp, Canis familiaris
gtcaggaaggggaattttctctgcc

SEQ ID NO: 139302 - DNA, 25 bp, Canis familiaris
gtctggaaaggtaaagttgcctggg

SEQ ID NO: 139303 - DNA, 25 bp, Canis familiaris
gtcgaaaagggacattatgcttatg

SEQ ID NO: 139304 - DNA, 25 bp, Canis familiaris
gtcagaatcaagggggagggcattt

SEQ ID NO: 139305 - DNA, 25 bp, Canis familiaris
gtcaccacagcacggacgagctggc

SEQ ID NO: 139306 - DNA, 25 bp, Canis familiaris
gtcacgccacgcatgaagagtctgc

SEQ ID NO: 139307 - DNA, 25 bp, Canis familiaris
gtcactgccacctttggacattgag

SEQ ID NO: 139308 - DNA, 25 bp, Canis familiaris
gtcaggcaaccggctggacctgatc

SEQ ID NO: 139309 - DNA, 25 bp, Canis familiaris
gtcaggacacacttgggacgctttt

SEQ ID NO: 139310 - DNA, 25 bp, Canis familiaris
gtcagcggccaatggtattcatttg

SEQ ID NO: 139311 - DNA, 25 bp, Canis familiaris
gtcaggcccatctaggctttttgtt

SEQ ID NO: 139312 - DNA, 25 bp, Canis familiaris
gtcatggcagccttagttttggggg

SEQ ID NO: 139313 - DNA, 25 bp, Canis familiaris
gtcatgtgacctcagtttggctaag

SEQ ID NO: 139314 - DNA, 25 bp, Canis familiaris
gtcacgaactaactctatctgctta

SEQ ID NO: 139315 - DNA, 25 bp, Canis familiaris
gtcactgaatgtaccttcatcctta

SEQ ID NO: 139316 - DNA, 25 bp, Canis familiaris
gtcattgagctatcttatcactctt

SEQ ID NO: 139317 - DNA, 25 bp, Canis familiaris
gtcactgatgtatttgttcgtttgt

SEQ ID NO: 139318 - DNA, 25 bp, Canis familiaris
gtcaggtgcgttatctcagcttctt

SEQ ID NO: 139319 - DNA, 25 bp, Canis familiaris
gtcaggggtataactcaggatatga

SEQ ID NO: 139320 - DNA, 25 bp, Canis familiaris
gtcactgagggattccgcaagctga

SEQ ID NO: 139321 - DNA, 25 bp, Canis familiaris
gtcatcattgtaaacacgcacctga

SEQ ID NO: 139322 - DNA, 25 bp, Canis familiaris
gtcacaggtgatgaaagccatctga

SEQ ID NO: 139323 - DNA, 25 bp, Canis familiaris
gtcacagcctgattcacaggcctca

SEQ ID NO: 139324 - DNA, 25 bp, Canis familiaris
gtcagagttgctaactggcaccaga

SEQ ID NO: 139325 - DNA, 25 bp, Canis familiaris
gtcagaattgctggagcgtctgcca

SEQ ID NO: 139326 - DNA, 25 bp, Canis familiaris
gtcagacattgcacacatgcttaca

SEQ ID NO: 139327 - DNA, 25 bp, Canis familiaris
gtcagaacagcacagatttaacgat

SEQ ID NO: 139328 - DNA, 25 bp, Canis familiaris
gtcaggaacaccgtattgaacatgt

SEQ ID NO: 139329 - DNA, 25 bp, Canis familiaris
gtcagtgacactgcatttgaggaat

SEQ ID NO: 139330 - DNA, 25 bp, Canis familiaris
gtcactacatagacaccatagcgaa

SEQ ID NO: 139331 - DNA, 25 bp, Canis familiaris
gtcacatacacaatatccacgctaa

SEQ ID NO: 139332 - DNA, 25 bp, Canis familiaris
gtcataataattacccctatactag

SEQ ID NO: 139333 - DNA, 25 bp, Canis familiaris
gtcaaatcattcattcaccctggat

SEQ ID NO: 139334 - DNA, 25 bp, Canis familiaris
gtcatcaacatgtactttgccacgg

SEQ ID NO: 139335 - DNA, 25 bp, Canis familiaris
gtcatcgaagtattttcctcgagga

SEQ ID NO: 139336 - DNA, 25 bp, Canis familiaris
gtcactgaattttatctgccttaca

SEQ ID NO: 139337 - DNA, 25 bp, Canis familiaris
gtcacaggcagattttcccatttca

SEQ ID NO: 139338 - DNA, 25 bp, Canis familiaris
gtcacaggaatcttcaacctcactc

SEQ ID NO: 139339 - DNA, 25 bp, Canis familiaris
gtgcgagcgaattcactacctagcc

SEQ ID NO: 139340 - DNA, 25 bp, Canis familiaris
gtcaggcagtgttggcgtcgtagcc

SEQ ID NO: 139341 - DNA, 25 bp, Canis familiaris
gtcactgcagttggagcactagggt

SEQ ID NO: 139342 - DNA, 25 bp, Canis familiaris
gtcttcagagtccgacattgagagt

SEQ ID NO: 139343 - DNA, 25 bp, Canis familiaris
gtcagtagtgatttggcattggtgc

SEQ ID NO: 139344 - DNA, 25 bp, Canis familiaris
gtcatgtagttctgtctttgggctt

SEQ ID NO: 139345 - DNA, 25 bp, Canis familiaris
gtcagaagtccttttcatggttttt

SEQ ID NO: 139346 - DNA, 25 bp, Canis familiaris
gtcatgggtcctttacttatttcct

SEQ ID NO: 139347 - DNA, 25 bp, Canis familiaris
gtcagtggacatctgggctttttcc

SEQ ID NO: 139348 - DNA, 25 bp, Canis familiaris
gtcagttactgcttgggcagggccc

SEQ ID NO: 139349 - DNA, 25 bp, Canis familiaris
gtgagttgacgccagcgtgagggcc

SEQ ID NO: 139350 - DNA, 25 bp, Canis familiaris
gtcactgtggcccatctggatggcc

SEQ ID NO: 139351 - DNA, 25 bp, Canis familiaris
gtcactgatggagcacagagcccct

SEQ ID NO: 139352 - DNA, 25 bp, Canis familiaris
gtcacttagagccaacaatctcctc

SEQ ID NO: 139353 - DNA, 25 bp, Canis familiaris
gtcagtggagagcagcccaccagac

SEQ ID NO: 139354 - DNA, 25 bp, Canis familiaris
gtcagatgactggtctttcttcaac

SEQ ID NO: 139355 - DNA, 25 bp, Canis familiaris
gtcatggcactggtgttacccaact

SEQ ID NO: 139356 - DNA, 25 bp, Canis familiaris
gtcaggcctctgttacacctgattc

SEQ ID NO: 139357 - DNA, 25 bp, Canis familiaris
gtcttctttggaaacctatctattc

SEQ ID NO: 139358 - DNA, 25 bp, Canis familiaris
gtcttcttttagttcctatttctag

SEQ ID NO: 139359 - DNA, 25 bp, Canis familiaris
gtcactttttattatatctttctgc

SEQ ID NO: 139360 - DNA, 25 bp, Canis familiaris
gtcacttttctaggcacttttctag

SEQ ID NO: 139361 - DNA, 25 bp, Canis familiaris
gtcactgttgactaatcctttacta

SEQ ID NO: 139362 - DNA, 25 bp, Canis familiaris
gtcactattaaaaacttcatactac

SEQ ID NO: 139363 - DNA, 25 bp, Canis familiaris
gtcactattctgtaaacctccaaac

SEQ ID NO: 139364 - DNA, 25 bp, Canis familiaris
gtcactatactacaagctccacaag

SEQ ID NO: 139365 - DNA, 25 bp, Canis familiaris
gtcagcataagttagatcgctccca

SEQ ID NO: 139366 - DNA, 25 bp, Canis familiaris
gtcacacctgagcagcattgtcacc

SEQ ID NO: 139367 - DNA, 25 bp, Canis familiaris
gtcacagtctgtggagcttttgcag

SEQ ID NO: 139368 - DNA, 25 bp, Canis familiaris
gtcactgagtgaaggtcttgcgagt

SEQ ID NO: 139369 - DNA, 25 bp, Canis familiaris
gtcactatcagaccattcttgagca

SEQ ID NO: 139370 - DNA, 25 bp, Canis familiaris
gtcatgatctaacctgtcactcgat

SEQ ID NO: 139371 - DNA, 25 bp, Canis familiaris
gtcaaatctcaactgtcaccgagga

SEQ ID NO: 139372 - DNA, 25 bp, Canis familiaris
gtcaacaatgaacaccagtgagtac

SEQ ID NO: 139373 - DNA, 25 bp, Canis familiaris
gtctactatagttattagggctacc

SEQ ID NO: 139374 - DNA, 25 bp, Canis familiaris
gtcacaataaagataagggctactg

SEQ ID NO: 139375 - DNA, 25 bp, Canis familiaris
gtcctgacgaagatgaaggaaattg

SEQ ID NO: 139376 - DNA, 25 bp, Canis familiaris
gtcttgccaaaatgaaagaaattgc

SEQ ID NO: 139377 - DNA, 25 bp, Canis familiaris
gtcttgtcccaaataaatgattcat

SEQ ID NO: 139378 - DNA, 25 bp, Canis familiaris
gtcttccccaaaacaaatgccacta

SEQ ID NO: 139379 - DNA, 25 bp, Canis familiaris
gtgttcccggatataaccaggcatc

SEQ ID NO: 139380 - DNA, 25 bp, Canis familiaris
gtcttcctaggtgccaaccagaggc

SEQ ID NO: 139381 - DNA, 25 bp, Canis familiaris
gtcattgttggatgccaaatctcag

SEQ ID NO: 139382 - DNA, 25 bp, Canis familiaris
gtcatgtggggctcctgatgaccag

SEQ ID NO: 139383 - DNA, 25 bp, Canis familiaris
gtctgcttcaggctcctgaacaggt

SEQ ID NO: 139384 - DNA, 25 bp, Canis familiaris
gtcagaatcacgctccagatcaaag

SEQ ID NO: 139385 - DNA, 25 bp, Canis familiaris
gtcagaatatccaagggactaagtg

SEQ ID NO: 139386 - DNA, 25 bp, Canis familiaris
gtcacaatcaccaggtatcccgaca

SEQ ID NO: 139387 - DNA, 25 bp, Canis familiaris
gtcagctataccagttttctgcctc

SEQ ID NO: 139388 - DNA, 25 bp, Canis familiaris
gtcagaatggacaactcttttgccc

SEQ ID NO: 139389 - DNA, 25 bp, Canis familiaris
gtcagagggccatctctatgtcagc

SEQ ID NO: 139390 - DNA, 25 bp, Canis familiaris
gtcatcgaggactgtctcatggcgc

SEQ ID NO: 139391 - DNA, 25 bp, Canis familiaris
gtcatagagtgacgtgtcgccaggc

SEQ ID NO: 139392 - DNA, 25 bp, Canis familiaris
gtcacagaggagttgaccctgggga

SEQ ID NO: 139393 - DNA, 25 bp, Canis familiaris
gtcacacctgagagacacctctgtc

SEQ ID NO: 139394 - DNA, 25 bp, Canis familiaris
gtcacccatgagaagatcctgtact

SEQ ID NO: 139395 - DNA, 25 bp, Canis familiaris
gtcagcaccaggagagcagcgtagt

SEQ ID NO: 139396 - DNA, 25 bp, Canis familiaris
gtcacacacaggatggacaccaggt

SEQ ID NO: 139397 - DNA, 25 bp, Canis familiaris
gtcagatcaccgaggagccgggcta

SEQ ID NO: 139398 - DNA, 25 bp, Canis familiaris
gtcagacccagcaaggagaggaagc

SEQ ID NO: 139399 - DNA, 25 bp, Canis familiaris
gtcacagcccacaagtgtcggtagc

SEQ ID NO: 139400 - DNA, 25 bp, Canis familiaris
gtcacagtgcccaattctctgggat

SEQ ID NO: 139401 - DNA, 25 bp, Canis familiaris
gtcacatatgctcatagcctgggga

SEQ ID NO: 139402 - DNA, 25 bp, Canis familiaris
gtcagccagctcatggccatgaggg

SEQ ID NO: 139403 - DNA, 25 bp, Canis familiaris
gtcatggccattgggcctggtgagc

SEQ ID NO: 139404 - DNA, 25 bp, Canis familiaris
gtcagcgctgattaagttggcacac

SEQ ID NO: 139405 - DNA, 25 bp, Canis familiaris
gtcaggctgcagcaattcaggcact

SEQ ID NO: 139406 - DNA, 25 bp, Canis familiaris
gtcaggctgcaattcacaagaccta

SEQ ID NO: 139407 - DNA, 25 bp, Canis familiaris
gtcaggctccctgcatggagcctgc

SEQ ID NO: 139408 - DNA, 25 bp, Canis familiaris
gtcagacgcaccagagcgtctctgc

SEQ ID NO: 139409 - DNA, 25 bp, Canis familiaris
gtcagtcgacactatggagttgctc

SEQ ID NO: 139410 - DNA, 25 bp, Canis familiaris
gtcagcttccactcgatgttggctg

SEQ ID NO: 139411 - DNA, 25 bp, Canis familiaris
gtcactccgcagaacgcagtggttc

SEQ ID NO: 139412 - DNA, 25 bp, Canis familiaris
gtcactccacctactcaggaatgag

SEQ ID NO: 139413 - DNA, 25 bp, Canis familiaris
gtcactcatcccaaatctagaatct

SEQ ID NO: 139414 - DNA, 25 bp, Canis familiaris
gtcaccatgctgtaccttagaatcc

SEQ ID NO: 139415 - DNA, 25 bp, Canis familiaris
gtcactatcagctctcttgagaacc

SEQ ID NO: 139416 - DNA, 25 bp, Canis familiaris
gtcatctgagacttcatctagggac

SEQ ID NO: 139417 - DNA, 25 bp, Canis familiaris
gtcactcagcctacagttgggatga

SEQ ID NO: 139418 - DNA, 25 bp, Canis familiaris
gtcacaagccatctgttggcgagtc

SEQ ID NO: 139419 - DNA, 25 bp, Canis familiaris
gtcaccagctcatgtttgtgccatt

SEQ ID NO: 139420 - DNA, 25 bp, Canis familiaris
gtcacacatgtctacatttagcttc

SEQ ID NO: 139421 - DNA, 25 bp, Canis familiaris
gtcacacattcaaatcttttttaat

SEQ ID NO: 139422 - DNA, 25 bp, Canis familiaris
gtcatgaccaagcatttatttaata

SEQ ID NO: 139423 - DNA, 25 bp, Canis familiaris
gtcgatcccaccacatttgtagatc

SEQ ID NO: 139424 - DNA, 25 bp, Canis familiaris
gtcagacctgacctgtctttgtaca

SEQ ID NO: 139425 - DNA, 25 bp, Canis familiaris
gtcagattctgagagtcactgtgaa

SEQ ID NO: 139426 - DNA, 25 bp, Canis familiaris
gtcacactcgtgggatacactgaga

SEQ ID NO: 139427 - DNA, 25 bp, Canis familiaris
gtcacacaggtcacattgcttgcaa

SEQ ID NO: 139428 - DNA, 25 bp, Canis familiaris
gtcaccgaggcagtgcatgcatgtt

SEQ ID NO: 139429 - DNA, 25 bp, Canis familiaris
gtcaccgaggcagtgcatgcatgtt

SEQ ID NO: 139430 - DNA, 25 bp, Canis familiaris
gtcaccgaggcagtgcatgcatgtt

SEQ ID NO: 139431 - DNA, 25 bp, Canis familiaris
gtcaccgaggcagtgcatgcatgtt

SEQ ID NO: 139432 - DNA, 25 bp, Canis familiaris
gtcaccgaggcagtgcatgcatgtt

SEQ ID NO: 139433 - DNA, 25 bp, Canis familiaris
gtcaccgaggcagtgcatgcatgtt

SEQ ID NO: 139434 - DNA, 25 bp, Canis familiaris
gtcagctgcgatgggtggcattctc

SEQ ID NO: 139435 - DNA, 25 bp, Canis familiaris
gtcagctctggctaggagattcgag

SEQ ID NO: 139436 - DNA, 25 bp, Canis familiaris
gtcactctggggccagtttagatgc

SEQ ID NO: 139437 - DNA, 25 bp, Canis familiaris
gtcaccagggagcatgtgttgtgtt

SEQ ID NO: 139438 - DNA, 25 bp, Canis familiaris
gtcaccattggtaagttgtctgttc

SEQ ID NO: 139439 - DNA, 25 bp, Canis familiaris
gtcacacttccaatactatgtcatt

SEQ ID NO: 139440 - DNA, 25 bp, Canis familiaris
gtcacatcctgggatccaatgtata

SEQ ID NO: 139441 - DNA, 25 bp, Canis familiaris
gtcattgtccaggatccagctgtta

SEQ ID NO: 139442 - DNA, 25 bp, Canis familiaris
gtcatctggacagacgatgcccaaa

SEQ ID NO: 139443 - DNA, 25 bp, Canis familiaris
gtcactgtgtcagacatctccagca

SEQ ID NO: 139444 - DNA, 25 bp, Canis familiaris
gtcacattgatctatgaatctccta

SEQ ID NO: 139445 - DNA, 25 bp, Canis familiaris
gtcacattgtttgatcccaaattgc

SEQ ID NO: 139446 - DNA, 25 bp, Canis familiaris
gtgaattggaatgaccccagtgtca

SEQ ID NO: 139447 - DNA, 25 bp, Canis familiaris
gtcttttgtcatgaccaagcattta

SEQ ID NO: 139448 - DNA, 25 bp, Canis familiaris
gtcactttccatgcataaagtttag

SEQ ID NO: 139449 - DNA, 25 bp, Canis familiaris
gtcagtttcctttacatactttatg

SEQ ID NO: 139450 - DNA, 25 bp, Canis familiaris
gtcagtttcctgtgacatacgttat

SEQ ID NO: 139451 - DNA, 25 bp, Canis familiaris
gtcagcttgtttcctggagactttt

SEQ ID NO: 139452 - DNA, 25 bp, Canis familiaris
gtcactttcttttgagagagacttg

SEQ ID NO: 139453 - DNA, 25 bp, Canis familiaris
gtcagtgttcttcctaaagacttga

SEQ ID NO: 139454 - DNA, 25 bp, Canis familiaris
gtcactgtctttagttcaagctgct

SEQ ID NO: 139455 - DNA, 25 bp, Canis familiaris
gtcacatctctttagaacctctgct

SEQ ID NO: 139456 - DNA, 25 bp, Canis familiaris
gtcagcactgctgtgcagaatctac

SEQ ID NO: 139457 - DNA, 25 bp, Canis familiaris
gtcagatcagatgcacagaaccaag

SEQ ID NO: 139458 - DNA, 25 bp, Canis familiaris
gtcagatcagatgcaagaacaaagc

SEQ ID NO: 139459 - DNA, 25 bp, Canis familiaris
gtcatgccaggccaactacaaaggg

SEQ ID NO: 139460 - DNA, 25 bp, Canis familiaris
gtcactactggaactgcacaaactg

SEQ ID NO: 139461 - DNA, 25 bp, Canis familiaris
gtcactactggaactgcacaactgg

SEQ ID NO: 139462 - DNA, 25 bp, Canis familiaris
gtcactcacttggactgcaacagta

SEQ ID NO: 139463 - DNA, 25 bp, Canis familiaris
gtcagtccttaactgcaagcagccc

SEQ ID NO: 139464 - DNA, 25 bp, Canis familiaris
gtcagtgccaaaagccttcaggcct

SEQ ID NO: 139465 - DNA, 25 bp, Canis familiaris
gtcagaggacagagccaacgggtct

SEQ ID NO: 139466 - DNA, 25 bp, Canis familiaris
gtcaggagaccaaccaagctaaagt

SEQ ID NO: 139467 - DNA, 25 bp, Canis familiaris
gtcagagcgtccatacacagctcaa

SEQ ID NO: 139468 - DNA, 25 bp, Canis familiaris
gtcagacgtcacacaaagctgccga

SEQ ID NO: 139469 - DNA, 25 bp, Canis familiaris
gtcagcttgtccacaaagcacggtt

SEQ ID NO: 139470 - DNA, 25 bp, Canis familiaris
gtcaccattgcctcaaacacggcaa

SEQ ID NO: 139471 - DNA, 25 bp, Canis familiaris
gtcactttccgtaagatcatctatc

SEQ ID NO: 139472 - DNA, 25 bp, Canis familiaris
gtcttcctgggtaatgacctgtgcc

SEQ ID NO: 139473 - DNA, 25 bp, Canis familiaris
gtcactcgtagggaagcaagctggc

SEQ ID NO: 139474 - DNA, 25 bp, Canis familiaris
gtcaccgatgacggacacacacatg

SEQ ID NO: 139475 - DNA, 25 bp, Canis familiaris
gtcagaggtggccgaccataaggtg

SEQ ID NO: 139476 - DNA, 25 bp, Canis familiaris
gtcacaggtggctgagtttcggtgg

SEQ ID NO: 139477 - DNA, 25 bp, Canis familiaris
gtcacagttgggtggtggtggtggt

SEQ ID NO: 139478 - DNA, 25 bp, Canis familiaris
gtctccttggtcttttggactttgt

SEQ ID NO: 139479 - DNA, 25 bp, Canis familiaris
gtcactttgtgttttattacttcct

SEQ ID NO: 139480 - DNA, 25 bp, Canis familiaris
gtcactgaggccttttttattctgc

SEQ ID NO: 139481 - DNA, 25 bp, Canis familiaris
gtcacatgaaccctttggacatttt

SEQ ID NO: 139482 - DNA, 25 bp, Canis familiaris
gtcagtgagacagcattttggcttt

SEQ ID NO: 139483 - DNA, 25 bp, Canis familiaris
gtcattggtacctgttcatctttga

SEQ ID NO: 139484 - DNA, 25 bp, Canis familiaris
gtcactttactcccattacttgata

SEQ ID NO: 139485 - DNA, 25 bp, Canis familiaris
gtcactcatttagggcttactgtat

SEQ ID NO: 139486 - DNA, 25 bp, Canis familiaris
gtcacgtttattagatttcatgaat

SEQ ID NO: 139487 - DNA, 25 bp, Canis familiaris
gtcagggatctgactctgtttaaat

SEQ ID NO: 139488 - DNA, 25 bp, Canis familiaris
gtcagcttatatatgtctttaaagt

SEQ ID NO: 139489 - DNA, 25 bp, Canis familiaris
gtcacttcagacttgttttaaattc

SEQ ID NO: 139490 - DNA, 25 bp, Canis familiaris
gtcacttcaacacgtagggaacctg

SEQ ID NO: 139491 - DNA, 25 bp, Canis familiaris
gtcacttctaaccctgggacagcac

SEQ ID NO: 139492 - DNA, 25 bp, Canis familiaris
gtcacttaatcctctgtgttccatc

SEQ ID NO: 139493 - DNA, 25 bp, Canis familiaris
gtcacgtaatacttgctggtctcga

SEQ ID NO: 139494 - DNA, 25 bp, Canis familiaris
gtcacgtgcgagattgggcatccag

SEQ ID NO: 139495 - DNA, 25 bp, Canis familiaris
gtcacgctgaatatatgaccacgct

SEQ ID NO: 139496 - DNA, 25 bp, Canis familiaris
gtccaggcattgataagccccttct

SEQ ID NO: 139497 - DNA, 25 bp, Canis familiaris
gtctaggctcttcacaggtacattt

SEQ ID NO: 139498 - DNA, 25 bp, Canis familiaris
gtcttgagttgtccactggttcttt

SEQ ID NO: 139499 - DNA, 25 bp, Canis familiaris
gtcattacatttcttgggtgctgga

SEQ ID NO: 139500 - DNA, 25 bp, Canis familiaris
gtcaccatccttctgtgggagtggt

SEQ ID NO: 139501 - DNA, 25 bp, Canis familiaris
gtcagaagggatcctgggtcaaggt

SEQ ID NO: 139502 - DNA, 25 bp, Canis familiaris
gtcacgaggaatcctggtccacagc

SEQ ID NO: 139503 - DNA, 25 bp, Canis familiaris
gtcacggaaggcctggatgtcctgc

SEQ ID NO: 139504 - DNA, 25 bp, Canis familiaris
gtcactggttgggtgctggtatctc

SEQ ID NO: 139505 - DNA, 25 bp, Canis familiaris
gtcacttctggggatgctgggatgc

SEQ ID NO: 139506 - DNA, 25 bp, Canis familiaris
gtcatcaggctggttaggggtgcgt

SEQ ID NO: 139507 - DNA, 25 bp, Canis familiaris
gtcacggtgttcagtgttgccgacg

SEQ ID NO: 139508 - DNA, 25 bp, Canis familiaris
gtctcggcttttattggggacctca

SEQ ID NO: 139509 - DNA, 25 bp, Canis familiaris
gtcagtggtagacttgtccgggacc

SEQ ID NO: 139510 - DNA, 25 bp, Canis familiaris
gtcagggaaggctttctggaggaga

SEQ ID NO: 139511 - DNA, 25 bp, Canis familiaris
gtcagaaaaagactcctggaccaga

SEQ ID NO: 139512 - DNA, 25 bp, Canis familiaris
gtctaaagaggaccctgaacctggc

SEQ ID NO: 139513 - DNA, 25 bp, Canis familiaris
gtcttgaagcgggccctgaaggcgg

SEQ ID NO: 139514 - DNA, 25 bp, Canis familiaris
gtctctggtggcgtgacgctgaagc

SEQ ID NO: 139515 - DNA, 25 bp, Canis familiaris
gtcacccatggctagacgctgaagc

SEQ ID NO: 139516 - DNA, 25 bp, Canis familiaris
gtcacccactgcagagtctggaggc

SEQ ID NO: 139517 - DNA, 25 bp, Canis familiaris
gtcagccacctgcagatatctgcag

SEQ ID NO: 139518 - DNA, 25 bp, Canis familiaris
gtcacgctcctggcaggatgctggg

SEQ ID NO: 139519 - DNA, 25 bp, Canis familiaris
gtcacgcgcgcgcaagcagagagag

SEQ ID NO: 139520 - DNA, 25 bp, Canis familiaris
gtcactcctgctcacgtgtgagcag

SEQ ID NO: 139521 - DNA, 25 bp, Canis familiaris
gtcaccactcgctcagggatgacta

SEQ ID NO: 139522 - DNA, 25 bp, Canis familiaris
gtcaccagagcctgagggatgagga

SEQ ID NO: 139523 - DNA, 25 bp, Canis familiaris
gtcaccagagccacgaggagagtcc

SEQ ID NO: 139524 - DNA, 25 bp, Canis familiaris
gtcagcgaaccaatcaggtggcgtc

SEQ ID NO: 139525 - DNA, 25 bp, Canis familiaris
gtcagaaacatggcaagggggctca

SEQ ID NO: 139526 - DNA, 25 bp, Canis familiaris
gtcagacaacagcaaggcctggacg

SEQ ID NO: 139527 - DNA, 25 bp, Canis familiaris
gtcagaaacagctaaaccacccttc

SEQ ID NO: 139528 - DNA, 25 bp, Canis familiaris
gtcataaaaggacagcctcccattt

SEQ ID NO: 139529 - DNA, 25 bp, Canis familiaris
gtcagagaataggcatcggacccga

SEQ ID NO: 139530 - DNA, 25 bp, Canis familiaris
gtcagaaatgacccggatcaccaag

SEQ ID NO: 139531 - DNA, 25 bp, Canis familiaris
gtcagacaagacgagggtttcagag

SEQ ID NO: 139532 - DNA, 25 bp, Canis familiaris
gtcataggagagacccgattataga

SEQ ID NO: 139533 - DNA, 25 bp, Canis familiaris
gtcattacaggcacaggtatttgaa

SEQ ID NO: 139534 - DNA, 25 bp, Canis familiaris
gtcatctaaacctatgtttctgaag

SEQ ID NO: 139535 - DNA, 25 bp, Canis familiaris
gtcacgtaatcgtatattgtttatt

SEQ ID NO: 139536 - DNA, 25 bp, Canis familiaris
gtcactgtcagtactagggttttgt

SEQ ID NO: 139537 - DNA, 25 bp, Canis familiaris
gtcacctctggaaaggagttttatg

SEQ ID NO: 139538 - DNA, 25 bp, Canis familiaris
gtcacctccagaaagtatttgaaag

SEQ ID NO: 139539 - DNA, 25 bp, Canis familiaris
gtcaggcactcagctaggtttggaa

SEQ ID NO: 139540 - DNA, 25 bp, Canis familiaris
gtcagtctgtcagcctgggcaatgg

SEQ ID NO: 139541 - DNA, 25 bp, Canis familiaris
gtcagatcacgtgcctggatgatgg

SEQ ID NO: 139542 - DNA, 25 bp, Canis familiaris
gtcactccctccgtatgatgatata

SEQ ID NO: 139543 - DNA, 25 bp, Canis familiaris
gtcaccctcatgacatcatagatga

SEQ ID NO: 139544 - DNA, 25 bp, Canis familiaris
gtcaccgtcatcttcatctatgaga

SEQ ID NO: 139545 - DNA, 25 bp, Canis familiaris
gtcatcttgagccttgcacatgata

SEQ ID NO: 139546 - DNA, 25 bp, Canis familiaris
gtcatcatgggctattgtggatgat

SEQ ID NO: 139547 - DNA, 25 bp, Canis familiaris
gtctcatgcaaatcttcgttcactt

SEQ ID NO: 139548 - DNA, 25 bp, Canis familiaris
gtctatataacgattttcgtttctc

SEQ ID NO: 139549 - DNA, 25 bp, Canis familiaris
gtcttctcgaggatttttttcctga

SEQ ID NO: 139550 - DNA, 25 bp, Canis familiaris
gtcttccaagatgttttgtatttgt

SEQ ID NO: 139551 - DNA, 25 bp, Canis familiaris
gtcactccatcgatgttcttcttcg

SEQ ID NO: 139552 - DNA, 25 bp, Canis familiaris
gtcatcctgcatccaatgtttgtat

SEQ ID NO: 139553 - DNA, 25 bp, Canis familiaris
gtcatcgtgcgtgtttcgtgagtta

SEQ ID NO: 139554 - DNA, 25 bp, Canis familiaris
gtcattctgactggtatgaagtggt

SEQ ID NO: 139555 - DNA, 25 bp, Canis familiaris
gtcactctgacaggactgctttgga

SEQ ID NO: 139556 - DNA, 25 bp, Canis familiaris
gtcacgcgcacatcacatttgtgga

SEQ ID NO: 139557 - DNA, 25 bp, Canis familiaris
gtcacgtgtcatgatttgtgtgcaa

SEQ ID NO: 139558 - DNA, 25 bp, Canis familiaris
gtcagcttgtactatgtggaggcga

SEQ ID NO: 139559 - DNA, 25 bp, Canis familiaris
gtcagtcttcactatttagatccag

SEQ ID NO: 139560 - DNA, 25 bp, Canis familiaris
gtcacctgtccagttgtcagagtca

SEQ ID NO: 139561 - DNA, 25 bp, Canis familiaris
gtcacctacacagtttatcagcttt

SEQ ID NO: 139562 - DNA, 25 bp, Canis familiaris
gtcactcttctaaatctaactttgc

SEQ ID NO: 139563 - DNA, 25 bp, Canis familiaris
gtctgtgaattaacctgaagcctcc

SEQ ID NO: 139564 - DNA, 25 bp, Canis familiaris
gtcttgcaactatgtccagcatccc

SEQ ID NO: 139565 - DNA, 25 bp, Canis familiaris
gtctagacacttgtccattctacac

SEQ ID NO: 139566 - DNA, 25 bp, Canis familiaris
gtctaaattatttccattgcactaa

SEQ ID NO: 139567 - DNA, 25 bp, Canis familiaris
gtcttaattaaacctgtcagtcctt

SEQ ID NO: 139568 - DNA, 25 bp, Canis familiaris
gtcttaattggactacccaacctgg

SEQ ID NO: 139569 - DNA, 25 bp, Canis familiaris
gtcatctaacgtatacacggtctct

SEQ ID NO: 139570 - DNA, 25 bp, Canis familiaris
gtcatgtatcgcttttaacggccac

SEQ ID NO: 139571 - DNA, 25 bp, Canis familiaris
gtcgtttggttccacactacgagct

SEQ ID NO: 139572 - DNA, 25 bp, Canis familiaris
gtcagaattgtggttacacttttgc

SEQ ID NO: 139573 - DNA, 25 bp, Canis familiaris
gtcagctttgatcctttcatttttc

SEQ ID NO: 139574 - DNA, 25 bp, Canis familiaris
gtcactgctttagtttgcttttttt

SEQ ID NO: 139575 - DNA, 25 bp, Canis familiaris
gtcactgcaactattactactacta

SEQ ID NO: 139576 - DNA, 25 bp, Canis familiaris
gtcccacactttcactaatttagca

SEQ ID NO: 139577 - DNA, 25 bp, Canis familiaris
gtccaagacatcactaaaatatttc

SEQ ID NO: 139578 - DNA, 25 bp, Canis familiaris
gtgcgacagggacctagtaattccc

SEQ ID NO: 139579 - DNA, 25 bp, Canis familiaris
gtctgtcggtgacgggtactacatc

SEQ ID NO: 139580 - DNA, 25 bp, Canis familiaris
gtcttctgggagacggggaccatta

SEQ ID NO: 139581 - DNA, 25 bp, Canis familiaris
gtcagtcctggcttatggaggacct

SEQ ID NO: 139582 - DNA, 25 bp, Canis familiaris
gtcagtcctgtgtaacgggcaagtg

SEQ ID NO: 139583 - DNA, 25 bp, Canis familiaris
gtcagctcatcttgtcgaggtggct

SEQ ID NO: 139584 - DNA, 25 bp, Canis familiaris
gtcagccactttgcaagatgtctat

SEQ ID NO: 139585 - DNA, 25 bp, Canis familiaris
gtcagcccttggtcatagaacatct

SEQ ID NO: 139586 - DNA, 25 bp, Canis familiaris
gtcagtccttgtggcataacttgta

SEQ ID NO: 139587 - DNA, 25 bp, Canis familiaris
gtcaggcagttttccaagcttgtga

SEQ ID NO: 139588 - DNA, 25 bp, Canis familiaris
gtcaggtgtttttaacttgatcatg

SEQ ID NO: 139589 - DNA, 25 bp, Canis familiaris
gtcaggtttcttgtctctatatcat

SEQ ID NO: 139590 - DNA, 25 bp, Canis familiaris
gtcagttttttgtttgattacgtag

SEQ ID NO: 139591 - DNA, 25 bp, Canis familiaris
gtcagttttttgtatcttttgcctt

SEQ ID NO: 139592 - DNA, 25 bp, Canis familiaris
gtcttcctcgttttacgtcagactt

SEQ ID NO: 139593 - DNA, 25 bp, Canis familiaris
gtctcttactatacctacgtcgggt

SEQ ID NO: 139594 - DNA, 25 bp, Canis familiaris
gtctagtagacgatgctcacggggg

SEQ ID NO: 139595 - DNA, 25 bp, Canis familiaris
gtcaggttgggaggtgtcaggggga

SEQ ID NO: 139596 - DNA, 25 bp, Canis familiaris
gtcaggggtctgtggatttgggggc

SEQ ID NO: 139597 - DNA, 25 bp, Canis familiaris
gtcaccaggctttagtgtgtttggg

SEQ ID NO: 139598 - DNA, 25 bp, Canis familiaris
gtcaccagccccttggagtttgggc

SEQ ID NO: 139599 - DNA, 25 bp, Canis familiaris
gtcatccatgacaactttggtatcg

SEQ ID NO: 139600 - DNA, 25 bp, Canis familiaris
gtcatccatgacaactttggcattg

SEQ ID NO: 139601 - DNA, 25 bp, Canis familiaris
gtcaccagcacaagcagtggctctg

SEQ ID NO: 139602 - DNA, 25 bp, Canis familiaris
gtcaccagcaggtttgcagtgcgtg

SEQ ID NO: 139603 - DNA, 25 bp, Canis familiaris
gtcaccatagatgctctggctgggc

SEQ ID NO: 139604 - DNA, 25 bp, Canis familiaris
gtcaccctgctgtcctgagcagggc

SEQ ID NO: 139605 - DNA, 25 bp, Canis familiaris
gtcagccctgctaccagagaaagga

SEQ ID NO: 139606 - DNA, 25 bp, Canis familiaris
gtcacctgcccaacgaaaaggaggg

SEQ ID NO: 139607 - DNA, 25 bp, Canis familiaris
gtcaccaccgagagaaacacctggg

SEQ ID NO: 139608 - DNA, 25 bp, Canis familiaris
gtcaccacggtgatgaaagccactc

SEQ ID NO: 139609 - DNA, 25 bp, Canis familiaris
gtcaccaagtctgcccagaaagctc

SEQ ID NO: 139610 - DNA, 25 bp, Canis familiaris
gtcaccaaccctgtcaagaggacac

SEQ ID NO: 139611 - DNA, 25 bp, Canis familiaris
gtcttaagcccccgataaaacagct

SEQ ID NO: 139612 - DNA, 25 bp, Canis familiaris
gtcatgtacccatccataaagtata

SEQ ID NO: 139613 - DNA, 25 bp, Canis familiaris
gtcagtccctagttccttagattag

SEQ ID NO: 139614 - DNA, 25 bp, Canis familiaris
gtcagagctgactggtccctgatat

SEQ ID NO: 139615 - DNA, 25 bp, Canis familiaris
gtcagactaccatatcccgatagag

SEQ ID NO: 139616 - DNA, 25 bp, Canis familiaris
gtcagactacaatatccagaaagag

SEQ ID NO: 139617 - DNA, 25 bp, Canis familiaris
gtcaggctccacactcaatggggag

SEQ ID NO: 139618 - DNA, 25 bp, Canis familiaris
gtcaggcccctttctgaggggattg

SEQ ID NO: 139619 - DNA, 25 bp, Canis familiaris
gtgcagggccccacagaggggcttt

SEQ ID NO: 139620 - DNA, 25 bp, Canis familiaris
gtcaggggtcagggcaggagtggct

SEQ ID NO: 139621 - DNA, 25 bp, Canis familiaris
gtcaggaggtggggtggtttgtagg

SEQ ID NO: 139622 - DNA, 25 bp, Canis familiaris
gtcagaaagggtggggaatttagca

SEQ ID NO: 139623 - DNA, 25 bp, Canis familiaris
gtctaccgggtcaataaatttcaca

SEQ ID NO: 139624 - DNA, 25 bp, Canis familiaris
gtctacgcgggaacaacgtcagatg

SEQ ID NO: 139625 - DNA, 25 bp, Canis familiaris
gtcttcaactagaaaacttaatggc

SEQ ID NO: 139626 - DNA, 25 bp, Canis familiaris
gtcttaaccagaccatcattctaat

SEQ ID NO: 139627 - DNA, 25 bp, Canis familiaris
gtcaggaaacaaaatatttagcatt

SEQ ID NO: 139628 - DNA, 25 bp, Canis familiaris
gtcagagggatcacaatctttcagc

SEQ ID NO: 139629 - DNA, 25 bp, Canis familiaris
gtcaggggctgatcacagcggtcca

SEQ ID NO: 139630 - DNA, 25 bp, Canis familiaris
gtcagcgggcaagtccgtgtggaca

SEQ ID NO: 139631 - DNA, 25 bp, Canis familiaris
gtctctagcctagcggggggcaaat

SEQ ID NO: 139632 - DNA, 25 bp, Canis familiaris
gtcattccctaggcactggggtggc

SEQ ID NO: 139633 - DNA, 25 bp, Canis familiaris
gtcttctcgtagtatcggagttcac

SEQ ID NO: 139634 - DNA, 25 bp, Canis familiaris
gtcatatctcttttatttcagtgta

SEQ ID NO: 139635 - DNA, 25 bp, Canis familiaris
gtcatatcttggtttttactatcac

SEQ ID NO: 139636 - DNA, 25 bp, Canis familiaris
gtctaggctgggttcattacatgat

SEQ ID NO: 139637 - DNA, 25 bp, Canis familiaris
gtcattgggatgcatgctatttcag

SEQ ID NO: 139638 - DNA, 25 bp, Canis familiaris
gtcatctttgatgtcagttctgatt

SEQ ID NO: 139639 - DNA, 25 bp, Canis familiaris
gtctatacgcaatcgtcattgtatg

SEQ ID NO: 139640 - DNA, 25 bp, Canis familiaris
gtcttaacatttatttgtagcaccc

SEQ ID NO: 139641 - DNA, 25 bp, Canis familiaris
gtcttccctttatattggattcctg

SEQ ID NO: 139642 - DNA, 25 bp, Canis familiaris
gtctttcgcctttaatggggtctca

SEQ ID NO: 139643 - DNA, 25 bp, Canis familiaris
gtcttcattgccagtaaggtaacca

SEQ ID NO: 139644 - DNA, 25 bp, Canis familiaris
gtcagtagttatctaaagctaccca

SEQ ID NO: 139645 - DNA, 25 bp, Canis familiaris
gtctgttggtttcgtaagttcccat

SEQ ID NO: 139646 - DNA, 25 bp, Canis familiaris
gtcatggggtttataatgttggcat

SEQ ID NO: 139647 - DNA, 25 bp, Canis familiaris
gtcttgggttctttcaattttcagt

SEQ ID NO: 139648 - DNA, 25 bp, Canis familiaris
gtcattggaggcttttagttttgca

SEQ ID NO: 139649 - DNA, 25 bp, Canis familiaris
gtctcgggagagtgtatttggtcag

SEQ ID NO: 139650 - DNA, 25 bp, Canis familiaris
gtcgggaaagattgtgttctcctag

SEQ ID NO: 139651 - DNA, 25 bp, Canis familiaris
gtcagaggacagctcttgtctccac

SEQ ID NO: 139652 - DNA, 25 bp, Canis familiaris
gtcagatggactctagagacccacg

SEQ ID NO: 139653 - DNA, 25 bp, Canis familiaris
gtcagaggacgatgaggtacgatgc

SEQ ID NO: 139654 - DNA, 25 bp, Canis familiaris
gtcaggaggccatccctacagatgg

SEQ ID NO: 139655 - DNA, 25 bp, Canis familiaris
gtcatggaggtgtttgcccaaaggc

SEQ ID NO: 139656 - DNA, 25 bp, Canis familiaris
gtcaggggcagtacagacagtagag

SEQ ID NO: 139657 - DNA, 25 bp, Canis familiaris
gtcaggtgactaaagatgactagtg

SEQ ID NO: 139658 - DNA, 25 bp, Canis familiaris
gtcagagatgacagaaatatccact

SEQ ID NO: 139659 - DNA, 25 bp, Canis familiaris
gtcagcagatacgagacgtgatcaa

SEQ ID NO: 139660 - DNA, 25 bp, Canis familiaris
gtcatgcagatggccaacaggtaca

SEQ ID NO: 139661 - DNA, 25 bp, Canis familiaris
gtcagctgtgctggagacaggacca

SEQ ID NO: 139662 - DNA, 25 bp, Canis familiaris
gtcagccttgcaagagcagggaccg

SEQ ID NO: 139663 - DNA, 25 bp, Canis familiaris
gtcagcgagagcatctgcgggagcc

SEQ ID NO: 139664 - DNA, 25 bp, Canis familiaris
gtcagcgcagacacagtctgggccc

SEQ ID NO: 139665 - DNA, 25 bp, Canis familiaris
gtcagccagtgctgcagtgctggta

SEQ ID NO: 139666 - DNA, 25 bp, Canis familiaris
gtcagctgcagtcatcaggttgtac

SEQ ID NO: 139667 - DNA, 25 bp, Canis familiaris
gtcttgagttatggatctattagca

SEQ ID NO: 139668 - DNA, 25 bp, Canis familiaris
gtgcttgtacttgtgcttatacggc

SEQ ID NO: 139669 - DNA, 25 bp, Canis familiaris
gtcttcttatagagcctatcacggt

SEQ ID NO: 139670 - DNA, 25 bp, Canis familiaris
gtcagttttactgcggcatgttgtg

SEQ ID NO: 139671 - DNA, 25 bp, Canis familiaris
gtcatgccttgtagctggtgggtgg

SEQ ID NO: 139672 - DNA, 25 bp, Canis familiaris
gtcagcctgtggaccaggagcggct

SEQ ID NO: 139673 - DNA, 25 bp, Canis familiaris
gtcaggctgctggatggatggggga

SEQ ID NO: 139674 - DNA, 25 bp, Canis familiaris
gtcattgctgtgcgggtgaaggaag

SEQ ID NO: 139675 - DNA, 25 bp, Canis familiaris
gtcttggtggggtgacaggatgcaa

SEQ ID NO: 139676 - DNA, 25 bp, Canis familiaris
gtcttagtaggttcagaaggctgca

SEQ ID NO: 139677 - DNA, 25 bp, Canis familiaris
gtctcttaatcacactgaagtgcca

SEQ ID NO: 139678 - DNA, 25 bp, Canis familiaris
gtcttagaatcttggctgtaggtca

SEQ ID NO: 139679 - DNA, 25 bp, Canis familiaris
gtcaggagacatggggctgggcgtg

SEQ ID NO: 139680 - DNA, 25 bp, Canis familiaris
gtcagaggaagggcacatggggctg

SEQ ID NO: 139681 - DNA, 25 bp, Canis familiaris
gtcagaggggagcctagggcgcaca

SEQ ID NO: 139682 - DNA, 25 bp, Canis familiaris
gtcagttggtgatctaggacccata

SEQ ID NO: 139683 - DNA, 25 bp, Canis familiaris
gtcagcttggctctttgctgacctc

SEQ ID NO: 139684 - DNA, 25 bp, Canis familiaris
gtcagtagctctgtttgatacctgc

SEQ ID NO: 139685 - DNA, 25 bp, Canis familiaris
gtcagtggttagctaggacctggat

SEQ ID NO: 139686 - DNA, 25 bp, Canis familiaris
gtcagggctcttttaggagacggtt

SEQ ID NO: 139687 - DNA, 25 bp, Canis familiaris
gtcagaggcccatggggatacgaat

SEQ ID NO: 139688 - DNA, 25 bp, Canis familiaris
gtcatgaaggcctgctctgggaagt

SEQ ID NO: 139689 - DNA, 25 bp, Canis familiaris
gtcatcagggatagggcggagaagt

SEQ ID NO: 139690 - DNA, 25 bp, Canis familiaris
gtctttgctgtgcgcagtgggaagt

SEQ ID NO: 139691 - DNA, 25 bp, Canis familiaris
gtcttagctgctccaaatgccgaaa

SEQ ID NO: 139692 - DNA, 25 bp, Canis familiaris
gtcttacctgtctctctcaggaaaa

SEQ ID NO: 139693 - DNA, 25 bp, Canis familiaris
gtctgcccgttttcctaagaaagct

SEQ ID NO: 139694 - DNA, 25 bp, Canis familiaris
gtcagcccgtgtggggtaacacagg

SEQ ID NO: 139695 - DNA, 25 bp, Canis familiaris
gtcagcccggataggatttacatct

SEQ ID NO: 139696 - DNA, 25 bp, Canis familiaris
gtcatctcccgatagatatttcttg

SEQ ID NO: 139697 - DNA, 25 bp, Canis familiaris
gtcagattccgatatattgttcttc

SEQ ID NO: 139698 - DNA, 25 bp, Canis familiaris
gtcaggtccagtctcatattactta

SEQ ID NO: 139699 - DNA, 25 bp, Canis familiaris
gtcagcgctctgttgtactattaac

SEQ ID NO: 139700 - DNA, 25 bp, Canis familiaris
gtcaggctttgtgagctgatgtagc

SEQ ID NO: 139701 - DNA, 25 bp, Canis familiaris
gtcaggtcctgaaggctgtgggctc

SEQ ID NO: 139702 - DNA, 25 bp, Canis familiaris
gtctatcatcggaagacctgggccc

SEQ ID NO: 139703 - DNA, 25 bp, Canis familiaris
gtcagatgcctgataaccgggtgca

SEQ ID NO: 139704 - DNA, 25 bp, Canis familiaris
gtcagcctctggattcacaagggac

SEQ ID NO: 139705 - DNA, 25 bp, Canis familiaris
gtcaccactgtcatcatcacaacag

SEQ ID NO: 139706 - DNA, 25 bp, Canis familiaris
gtcagcctcttaactgctaagcact

SEQ ID NO: 139707 - DNA, 25 bp, Canis familiaris
gtcaccatgtctattctcaagatcc

SEQ ID NO: 139708 - DNA, 25 bp, Canis familiaris
gtcaccagtcattttaaataccgtt

SEQ ID NO: 139709 - DNA, 25 bp, Canis familiaris
gtccgcaggtttcagaatgaccctt

SEQ ID NO: 139710 - DNA, 25 bp, Canis familiaris
gtccggaggtatctactgaccttcc

SEQ ID NO: 139711 - DNA, 25 bp, Canis familiaris
gtccgtcggttggtaccagacgcgg

SEQ ID NO: 139712 - DNA, 25 bp, Canis familiaris
gtcatcgtcggtgggttctcatgac

SEQ ID NO: 139713 - DNA, 25 bp, Canis familiaris
gtcatccaaggggtttctagcagca

SEQ ID NO: 139714 - DNA, 25 bp, Canis familiaris
gtcatccacggcagttcatctgtac

SEQ ID NO: 139715 - DNA, 25 bp, Canis familiaris
gtcatgctgatgcacgagttctctg

SEQ ID NO: 139716 - DNA, 25 bp, Canis familiaris
gtgcatgcagctgactgacttcatc

SEQ ID NO: 139717 - DNA, 25 bp, Canis familiaris
gtcagcactgaaatcctggcatcat

SEQ ID NO: 139718 - DNA, 25 bp, Canis familiaris
gtcagcagtgaacttgtcagccaat

SEQ ID NO: 139719 - DNA, 25 bp, Canis familiaris
gtcatgcctgcattggtggaccaat

SEQ ID NO: 139720 - DNA, 25 bp, Canis familiaris
gtcatcagaatctgtcggccaaaag

SEQ ID NO: 139721 - DNA, 25 bp, Canis familiaris
gtcagatgaatccagtttctccaaa

SEQ ID NO: 139722 - DNA, 25 bp, Canis familiaris
gtcagcagaggaactgttgtggaaa

SEQ ID NO: 139723 - DNA, 25 bp, Canis familiaris
gtcagaagccagatgtttacagtaa

SEQ ID NO: 139724 - DNA, 25 bp, Canis familiaris
gtcagttccaatatttcacaccaac

SEQ ID NO: 139725 - DNA, 25 bp, Canis familiaris
gtcatttgcaaatatcttctcccat

SEQ ID NO: 139726 - DNA, 25 bp, Canis familiaris
gtcttacacacatacttaatctgag

SEQ ID NO: 139727 - DNA, 25 bp, Canis familiaris
gtcagtacacagtagacttcactat

SEQ ID NO: 139728 - DNA, 25 bp, Canis familiaris
gtcagtgatccatttttattctatg

SEQ ID NO: 139729 - DNA, 25 bp, Canis familiaris
gtcagagaccattgtgtttgtgttc

SEQ ID NO: 139730 - DNA, 25 bp, Canis familiaris
gtgcaaatgccagggttggttttta

SEQ ID NO: 139731 - DNA, 25 bp, Canis familiaris
gtctttgccgctttaggtttgtttg

SEQ ID NO: 139732 - DNA, 25 bp, Canis familiaris
gtctttaggatcttaggacttaatt

SEQ ID NO: 139733 - DNA, 25 bp, Canis familiaris
gtcttgttcaacacaggactgctag

SEQ ID NO: 139734 - DNA, 25 bp, Canis familiaris
gtcagatttaacatcagggtattct

SEQ ID NO: 139735 - DNA, 25 bp, Canis familiaris
gtcagattttacaatatattttcct

SEQ ID NO: 139736 - DNA, 25 bp, Canis familiaris
gtcatagtttctcattcattctgtt

SEQ ID NO: 139737 - DNA, 25 bp, Canis familiaris
gtcatgagtttctaggacccttctc

SEQ ID NO: 139738 - DNA, 25 bp, Canis familiaris
gtcatcaattatgactaccctaact

SEQ ID NO: 139739 - DNA, 25 bp, Canis familiaris
gtcctttcagagattccctaactat

SEQ ID NO: 139740 - DNA, 25 bp, Canis familiaris
gtctcttcctgtattccttacaaga

SEQ ID NO: 139741 - DNA, 25 bp, Canis familiaris
gtctagtccgtcgtccaattaggat

SEQ ID NO: 139742 - DNA, 25 bp, Canis familiaris
gtctttacgtccgcactataatatc

SEQ ID NO: 139743 - DNA, 25 bp, Canis familiaris
gtcttttttccctagcgaacaacag

SEQ ID NO: 139744 - DNA, 25 bp, Canis familiaris
gtcttatacttacaatgacaacacc

SEQ ID NO: 139745 - DNA, 25 bp, Canis familiaris
gtcttacctctttgactgaaccacc

SEQ ID NO: 139746 - DNA, 25 bp, Canis familiaris
gtcttcaagcggtgttgcaactcac

SEQ ID NO: 139747 - DNA, 25 bp, Canis familiaris
gtcttcaaagtacctggaacatcct

SEQ ID NO: 139748 - DNA, 25 bp, Canis familiaris
gtctatctgaagagccaggactttt

SEQ ID NO: 139749 - DNA, 25 bp, Canis familiaris
gtcaggtcaagatccaggtctgttt

SEQ ID NO: 139750 - DNA, 25 bp, Canis familiaris
gtcatggtagagttgctaggaagtt

SEQ ID NO: 139751 - DNA, 25 bp, Canis familiaris
gtcagtgtggcagtgcggaggcaca

SEQ ID NO: 139752 - DNA, 25 bp, Canis familiaris
gtcattcagaccggcgtggacaacc

SEQ ID NO: 139753 - DNA, 25 bp, Canis familiaris
gtcttacccttgatgtaaatatctc

SEQ ID NO: 139754 - DNA, 25 bp, Canis familiaris
gtcttacttttttcagccataactc

SEQ ID NO: 139755 - DNA, 25 bp, Canis familiaris
gtcttcagtgttcttcagggtaatt

SEQ ID NO: 139756 - DNA, 25 bp, Canis familiaris
gtcttgatcaccctttcggggaagt

SEQ ID NO: 139757 - DNA, 25 bp, Canis familiaris
gtcttatctcctctttgagggaatg

SEQ ID NO: 139758 - DNA, 25 bp, Canis familiaris
gtcatccccactctttgggatctat

SEQ ID NO: 139759 - DNA, 25 bp, Canis familiaris
gtcatccctcgtacaattggaagtg

SEQ ID NO: 139760 - DNA, 25 bp, Canis familiaris
gtcagctcctgacacacttggatac

SEQ ID NO: 139761 - DNA, 25 bp, Canis familiaris
gtcagctgtaatgaacttgaatgca

SEQ ID NO: 139762 - DNA, 25 bp, Canis familiaris
gtcagcctaatgtaattgcttgtga

SEQ ID NO: 139763 - DNA, 25 bp, Canis familiaris
gtcagactgtaaaatcttgtgtgga

SEQ ID NO: 139764 - DNA, 25 bp, Canis familiaris
gtcagtgctgtatactttgtagcca

SEQ ID NO: 139765 - DNA, 25 bp, Canis familiaris
gtcagttttacctggaagctgcagc

SEQ ID NO: 139766 - DNA, 25 bp, Canis familiaris
gtcgtagaaacctcgatattgagcg

SEQ ID NO: 139767 - DNA, 25 bp, Canis familiaris
gtcttaaacactggctcaaattccc

SEQ ID NO: 139768 - DNA, 25 bp, Canis familiaris
gtcttacacagctctggacaacttc

SEQ ID NO: 139769 - DNA, 25 bp, Canis familiaris
gtctctacctggtggacttgctgac

SEQ ID NO: 139770 - DNA, 25 bp, Canis familiaris
gtcagtcacttgctaggtgctttac

SEQ ID NO: 139771 - DNA, 25 bp, Canis familiaris
gtcagtgcactaaatagttgctgtt

SEQ ID NO: 139772 - DNA, 25 bp, Canis familiaris
gtcaggcgctatactctgtagctgt

SEQ ID NO: 139773 - DNA, 25 bp, Canis familiaris
gtcaggcgctatactctgtagctgt

SEQ ID NO: 139774 - DNA, 25 bp, Canis familiaris
gtcatgggccagaacttgatcttga

SEQ ID NO: 139775 - DNA, 25 bp, Canis familiaris
gtcagcggcgctgagcgaatctgtg

SEQ ID NO: 139776 - DNA, 25 bp, Canis familiaris
gtcagtggcctgctggaatctatcc

SEQ ID NO: 139777 - DNA, 25 bp, Canis familiaris
gtcatgtggccaggggtcatctgaa

SEQ ID NO: 139778 - DNA, 25 bp, Canis familiaris
gtcatgtgtcactggtggtctggga

SEQ ID NO: 139779 - DNA, 25 bp, Canis familiaris
gtcagttctccgctgagttggaggg

SEQ ID NO: 139780 - DNA, 25 bp, Canis familiaris
gtcagttctacgatgagcattggtc

SEQ ID NO: 139781 - DNA, 25 bp, Canis familiaris
gtcagattctgacgtactgcagtgg

SEQ ID NO: 139782 - DNA, 25 bp, Canis familiaris
gtcatatatgctgcagctactcctt

SEQ ID NO: 139783 - DNA, 25 bp, Canis familiaris
gtcatgcttgcagtactagatcttg

SEQ ID NO: 139784 - DNA, 25 bp, Canis familiaris
gtcagctgtcagaaaaatctgctta

SEQ ID NO: 139785 - DNA, 25 bp, Canis familiaris
gtcagagtagtaaccagtcttgtaa

SEQ ID NO: 139786 - DNA, 25 bp, Canis familiaris
gtcagaatttctaccatgtttccaa

SEQ ID NO: 139787 - DNA, 25 bp, Canis familiaris
gtcataatttcaaacctcttgcaca

SEQ ID NO: 139788 - DNA, 25 bp, Canis familiaris
gtcattgtcctctaaagacttgtga

SEQ ID NO: 139789 - DNA, 25 bp, Canis familiaris
gtctatgctctttataaactgggtc

SEQ ID NO: 139790 - DNA, 25 bp, Canis familiaris
gtcttgcttctttaacttaggctct

SEQ ID NO: 139791 - DNA, 25 bp, Canis familiaris
gtcttgtgtgatttaacgtttcctc

SEQ ID NO: 139792 - DNA, 25 bp, Canis familiaris
gtctctcggatttagacgttagagt

SEQ ID NO: 139793 - DNA, 25 bp, Canis familiaris
gtcccaggcctgtgccttaaggagc

SEQ ID NO: 139794 - DNA, 25 bp, Canis familiaris
gtcgaaacctatacctacaagtgtc

SEQ ID NO: 139795 - DNA, 25 bp, Canis familiaris
gtctgtaacgccacttagaagtgcc

SEQ ID NO: 139796 - DNA, 25 bp, Canis familiaris
gtgagtaacctctcaaactcggcac

SEQ ID NO: 139797 - DNA, 25 bp, Canis familiaris
gtgatttcacctttaataccgtcag

SEQ ID NO: 139798 - DNA, 25 bp, Canis familiaris
ggcatttaactacaacccgtgccct

SEQ ID NO: 139799 - DNA, 25 bp, Canis familiaris
gtcatttagccttaaaccacgtcca

SEQ ID NO: 139800 - DNA, 25 bp, Canis familiaris
gtctataaagcatttaacccccctg

SEQ ID NO: 139801 - DNA, 25 bp, Canis familiaris
gtcttaaggaataaacagcagcacg

SEQ ID NO: 139802 - DNA, 25 bp, Canis familiaris
gtgtctacgaaatcgtacaccgtag

SEQ ID NO: 139803 - DNA, 25 bp, Canis familiaris
gtgacgacgaagtcgcgtagactcg

SEQ ID NO: 139804 - DNA, 25 bp, Canis familiaris
gtcagtggcgggtcagcgatagtta

SEQ ID NO: 139805 - DNA, 25 bp, Canis familiaris
gtcaggccaggggagcatatgcatg

SEQ ID NO: 139806 - DNA, 25 bp, Canis familiaris
gtcagagccgggagcagatcacagg

SEQ ID NO: 139807 - DNA, 25 bp, Canis familiaris
gtcagacccagaaggacacacactg

SEQ ID NO: 139808 - DNA, 25 bp, Canis familiaris
gtcagtcctcactggacactgagtc

SEQ ID NO: 139809 - DNA, 25 bp, Canis familiaris
gtcagacccttgtgagactgtgttc

SEQ ID NO: 139810 - DNA, 25 bp, Canis familiaris
gtcagacctcataaaggacagtgtt

SEQ ID NO: 139811 - DNA, 25 bp, Canis familiaris
gtcagaccattaacatgtacacttt

SEQ ID NO: 139812 - DNA, 25 bp, Canis familiaris
gtcaggcagagcatcgtataacttt

SEQ ID NO: 139813 - DNA, 25 bp, Canis familiaris
gtcagtcgaacaagtcatgaagatt

SEQ ID NO: 139814 - DNA, 25 bp, Canis familiaris
gtcatgttgtaaaagtgcaagatta

SEQ ID NO: 139815 - DNA, 25 bp, Canis familiaris
gtcagttctaagtattcacaatgtc

SEQ ID NO: 139816 - DNA, 25 bp, Canis familiaris
gtctgtcctaagattacacctgctg

SEQ ID NO: 139817 - DNA, 25 bp, Canis familiaris
gtcttcttgaggatattattcctga

SEQ ID NO: 139818 - DNA, 25 bp, Canis familiaris
gtctttcgtgacaacctttatctga

SEQ ID NO: 139819 - DNA, 25 bp, Canis familiaris
gtcattctttacatccttttatttt

SEQ ID NO: 139820 - DNA, 25 bp, Canis familiaris
gtcatccacttccaggactgtttat

SEQ ID NO: 139821 - DNA, 25 bp, Canis familiaris
gtgctgaatcttggaggaggtttcg

SEQ ID NO: 139822 - DNA, 25 bp, Canis familiaris
gtgtaactgggactcaagtattctg

SEQ ID NO: 139823 - DNA, 25 bp, Canis familiaris
gtctacctggggtctagctgttttt

SEQ ID NO: 139824 - DNA, 25 bp, Canis familiaris
gtctaacggggttacgttgctgccg

SEQ ID NO: 139825 - DNA, 25 bp, Canis familiaris
gtctaaatgaggcctgaacgtgtga

SEQ ID NO: 139826 - DNA, 25 bp, Canis familiaris
gtctttattggagtgatagctttga

SEQ ID NO: 139827 - DNA, 25 bp, Canis familiaris
gtcttaatagcagtaatcctttcaa

SEQ ID NO: 139828 - DNA, 25 bp, Canis familiaris
gtctaaggagcaaacttcttgtaaa

SEQ ID NO: 139829 - DNA, 25 bp, Canis familiaris
ggttaaactggctgtcctggaatac

SEQ ID NO: 139830 - DNA, 25 bp, Canis familiaris
gggacgaactgcatttgccgggtcc

SEQ ID NO: 139831 - DNA, 25 bp, Canis familiaris
gtgcgactgaacgtgttcggggttg

SEQ ID NO: 139832 - DNA, 25 bp, Canis familiaris
gtgcgatctgaagagggccgggact

SEQ ID NO: 139833 - DNA, 25 bp, Canis familiaris
gtgttctgtaaagggtctgggattt

SEQ ID NO: 139834 - DNA, 25 bp, Canis familiaris
gtcttcttaactgggtggaggcagg

SEQ ID NO: 139835 - DNA, 25 bp, Canis familiaris
gtcttgaatcccgaggcttgagcta

SEQ ID NO: 139836 - DNA, 25 bp, Canis familiaris
gtcttaactgactggctgtaggatt

SEQ ID NO: 139837 - DNA, 25 bp, Canis familiaris
gtcattacctactggtcaaggagac

SEQ ID NO: 139838 - DNA, 25 bp, Canis familiaris
gtctctacccactggataccagcag

SEQ ID NO: 139839 - DNA, 25 bp, Canis familiaris
gtcatcctccctgtgagaagtcacg

SEQ ID NO: 139840 - DNA, 25 bp, Canis familiaris
gtcatcgacgggatcggtgtacgaa

SEQ ID NO: 139841 - DNA, 25 bp, Canis familiaris
gtcttgacgggcagctgtgttgagc

SEQ ID NO: 139842 - DNA, 25 bp, Canis familiaris
gtctcaggagcccatcctgtttgac

SEQ ID NO: 139843 - DNA, 25 bp, Canis familiaris
gtctgcaggagcacacgtgcgttct

SEQ ID NO: 139844 - DNA, 25 bp, Canis familiaris
gtctgtgtcaaacctgtggctactc

SEQ ID NO: 139845 - DNA, 25 bp, Canis familiaris
gtcttctcaacggaagggcctcaac

SEQ ID NO: 139846 - DNA, 25 bp, Canis familiaris
gtcttcagcaacacaaggtcccaac

SEQ ID NO: 139847 - DNA, 25 bp, Canis familiaris
gtctcatcagcaacatgagctgttg

SEQ ID NO: 139848 - DNA, 25 bp, Canis familiaris
gtctgcagctgcctcagagctgtag

SEQ ID NO: 139849 - DNA, 25 bp, Canis familiaris
gtcatgctgccgcaggatgatcagt

SEQ ID NO: 139850 - DNA, 25 bp, Canis familiaris
gtcatgcagactccaggacatctgg

SEQ ID NO: 139851 - DNA, 25 bp, Canis familiaris
gtcagattgatcttggagatctgga

SEQ ID NO: 139852 - DNA, 25 bp, Canis familiaris
gtcatgttcatcttgcctactgatg

SEQ ID NO: 139853 - DNA, 25 bp, Canis familiaris
gtcatactgctcttccaacataatc

SEQ ID NO: 139854 - DNA, 25 bp, Canis familiaris
gtctctactcctgcaatacgagctc

SEQ ID NO: 139855 - DNA, 25 bp, Canis familiaris
gtcatgtatttcggactactcccgt

SEQ ID NO: 139856 - DNA, 25 bp, Canis familiaris
gtctatattacacaaagcatgctac

SEQ ID NO: 139857 - DNA, 25 bp, Canis familiaris
gtcttgagcttaataaatgtgcatt

SEQ ID NO: 139858 - DNA, 25 bp, Canis familiaris
gtcttagcacgagataatacatttt

SEQ ID NO: 139859 - DNA, 25 bp, Canis familiaris
gtcttagaccccatcatatactgtt

SEQ ID NO: 139860 - DNA, 25 bp, Canis familiaris
gtcttgcatatctcagttccatact

SEQ ID NO: 139861 - DNA, 25 bp, Canis familiaris
gtcttgatgtattcaccacgcttat

SEQ ID NO: 139862 - DNA, 25 bp, Canis familiaris
gtcatgtagtcactgacctcctatc

SEQ ID NO: 139863 - DNA, 25 bp, Canis familiaris
gtcattcaatcacactcagtttcca

SEQ ID NO: 139864 - DNA, 25 bp, Canis familiaris
gtcttccataagtctcacttcatcc

SEQ ID NO: 139865 - DNA, 25 bp, Canis familiaris
gtcttctgacagatgaagttcagcc

SEQ ID NO: 139866 - DNA, 25 bp, Canis familiaris
gtctaggcacaagtaacgtcacaga

SEQ ID NO: 139867 - DNA, 25 bp, Canis familiaris
gtcatggagagcaaagaaggcccga

SEQ ID NO: 139868 - DNA, 25 bp, Canis familiaris
gtcaggaatgcaaaggaggcccttc

SEQ ID NO: 139869 - DNA, 25 bp, Canis familiaris
gtcatagacatcaaggtggcagcag

SEQ ID NO: 139870 - DNA, 25 bp, Canis familiaris
gtcatcaacagcatgggcagcagcc

SEQ ID NO: 139871 - DNA, 25 bp, Canis familiaris
gtcataatcagcatcacggacagtc

SEQ ID NO: 139872 - DNA, 25 bp, Canis familiaris
gtcatctgtcagctgcaaggtactc

SEQ ID NO: 139873 - DNA, 25 bp, Canis familiaris
gtcatctccgagcctgatggattcc

SEQ ID NO: 139874 - DNA, 25 bp, Canis familiaris
gtcatgcccatacggaatgtctaca

SEQ ID NO: 139875 - DNA, 25 bp, Canis familiaris
gtcatgcccatacggaatgtctaca

SEQ ID NO: 139876 - DNA, 25 bp, Canis familiaris
gtcatgcccatacggaatgtctaca

SEQ ID NO: 139877 - DNA, 25 bp, Canis familiaris
gtcagtgcactactggagagttgca

SEQ ID NO: 139878 - DNA, 25 bp, Canis familiaris
gtcatccaccacctgcagcaggtgg

SEQ ID NO: 139879 - DNA, 25 bp, Canis familiaris
gtcatcccagagctgaacgggaagc

SEQ ID NO: 139880 - DNA, 25 bp, Canis familiaris
gtcatccctgagctgaacgggaagc

SEQ ID NO: 139881 - DNA, 25 bp, Canis familiaris
gtcatccctgagtctgacggggatg

SEQ ID NO: 139882 - DNA, 25 bp, Canis familiaris
gtcatttgtgatttggcggggtggg

SEQ ID NO: 139883 - DNA, 25 bp, Canis familiaris
gtctttcctcttggggaggtgacag

SEQ ID NO: 139884 - DNA, 25 bp, Canis familiaris
gtcatttctttgtggtgtggtgtac

SEQ ID NO: 139885 - DNA, 25 bp, Canis familiaris
gtcatctattttttcaggggttgtg

SEQ ID NO: 139886 - DNA, 25 bp, Canis familiaris
gtcataattattttgcaggtgcctt

SEQ ID NO: 139887 - DNA, 25 bp, Canis familiaris
gtctcactttctttgaggcttttta

SEQ ID NO: 139888 - DNA, 25 bp, Canis familiaris
gtcttgtctttattgaggaatttct

SEQ ID NO: 139889 - DNA, 25 bp, Canis familiaris
gtcgtcacttattctagtaatcagt

SEQ ID NO: 139890 - DNA, 25 bp, Canis familiaris
gtcataaatgtattgtagcgagaag

SEQ ID NO: 139891 - DNA, 25 bp, Canis familiaris
gtcatgtattgttgtccagcaaaaa

SEQ ID NO: 139892 - DNA, 25 bp, Canis familiaris
gtcattatcttctcctgtaaaacaa

SEQ ID NO: 139893 - DNA, 25 bp, Canis familiaris
gtctttctttacctgtacacttaag

SEQ ID NO: 139894 - DNA, 25 bp, Canis familiaris
gtctactttttacttcccagttatg

SEQ ID NO: 139895 - DNA, 25 bp, Canis familiaris
gtctcctttgttgttgtccaattgt

SEQ ID NO: 139896 - DNA, 25 bp, Canis familiaris
gtctccgcttatcttttaacatggt

SEQ ID NO: 139897 - DNA, 25 bp, Canis familiaris
gtccccttcgcatttacgaggtgga

SEQ ID NO: 139898 - DNA, 25 bp, Canis familiaris
gtctgtttacctttactgtggtgga

SEQ ID NO: 139899 - DNA, 25 bp, Canis familiaris
gtcttgtttacctcaagggagggag

SEQ ID NO: 139900 - DNA, 25 bp, Canis familiaris
gtctttttttcataggttcaggagg

SEQ ID NO: 139901 - DNA, 25 bp, Canis familiaris
gtcatggttctttttaagcccaggc

SEQ ID NO: 139902 - DNA, 25 bp, Canis familiaris
gtcttcatgtctttttagactgcca

SEQ ID NO: 139903 - DNA, 25 bp, Canis familiaris
gtctgtaggttagatagatcgtcgt

SEQ ID NO: 139904 - DNA, 25 bp, Canis familiaris
gtcttaggtatacgatgacaagtct

SEQ ID NO: 139905 - DNA, 25 bp, Canis familiaris
gtctatgcaggatagcaaactagtt

SEQ ID NO: 139906 - DNA, 25 bp, Canis familiaris
gtcttcgcagactatgaagcctatg

SEQ ID NO: 139907 - DNA, 25 bp, Canis familiaris
gtcttcagcatcgtataaccctggc

SEQ ID NO: 139908 - DNA, 25 bp, Canis familiaris
gtcatgtgagcatgttgggcccggc

SEQ ID NO: 139909 - DNA, 25 bp, Canis familiaris
gtcaggtaatttccatgccttggct

SEQ ID NO: 139910 - DNA, 25 bp, Canis familiaris
gtcagggacttctagagactctcct

SEQ ID NO: 139911 - DNA, 25 bp, Canis familiaris
gtcagggatgtatcaactctccagc

SEQ ID NO: 139912 - DNA, 25 bp, Canis familiaris
gtcatgggatgtcggatttctccgt

SEQ ID NO: 139913 - DNA, 25 bp, Canis familiaris
gtcagtggactgagcatttctgcca

SEQ ID NO: 139914 - DNA, 25 bp, Canis familiaris
gtcagtctgacagttctttctctca

SEQ ID NO: 139915 - DNA, 25 bp, Canis familiaris
gtcagtagtcacatcatcacttctc

SEQ ID NO: 139916 - DNA, 25 bp, Canis familiaris
gtcatgacagtgcttgcatcctatt

SEQ ID NO: 139917 - DNA, 25 bp, Canis familiaris
gtcatgtcagggaaggctttctgga

SEQ ID NO: 139918 - DNA, 25 bp, Canis familiaris
gtcagttttcatagtattcaatttt

SEQ ID NO: 139919 - DNA, 25 bp, Canis familiaris
gtcagttttctgattctcattcttg

SEQ ID NO: 139920 - DNA, 25 bp, Canis familiaris
gtcagatttgttgctgtctgcgctc

SEQ ID NO: 139921 - DNA, 25 bp, Canis familiaris
gtcatgttttgcattgttgcgctag

SEQ ID NO: 139922 - DNA, 25 bp, Canis familiaris
gtcatattttgtcttctgcaacagt

SEQ ID NO: 139923 - DNA, 25 bp, Canis familiaris
gtcatttaatgttatctccaccagc

SEQ ID NO: 139924 - DNA, 25 bp, Canis familiaris
gtcttcgattggtacatctatcaac

SEQ ID NO: 139925 - DNA, 25 bp, Canis familiaris
gtcttacattgactgataataaacc

SEQ ID NO: 139926 - DNA, 25 bp, Canis familiaris
gtctcttggctgcagaataaaaccc

SEQ ID NO: 139927 - DNA, 25 bp, Canis familiaris
tgtttctggtcgcgagattaactat

SEQ ID NO: 139928 - DNA, 25 bp, Canis familiaris
gtctatctgttccccgatttaatac

SEQ ID NO: 139929 - DNA, 25 bp, Canis familiaris
gtctaccccaaaggaataagattca

SEQ ID NO: 139930 - DNA, 25 bp, Canis familiaris
gtcttcccacaagggggacatggat

SEQ ID NO: 139931 - DNA, 25 bp, Canis familiaris
gtctgcccgaggagcttggacaagt

SEQ ID NO: 139932 - DNA, 25 bp, Canis familiaris
gtctcctgggtagcttagtcaagtg

SEQ ID NO: 139933 - DNA, 25 bp, Canis familiaris
gtcatctcgggcacctgtcagatga

SEQ ID NO: 139934 - DNA, 25 bp, Canis familiaris
gtcatttcggtttttgcagatgcgc

SEQ ID NO: 139935 - DNA, 25 bp, Canis familiaris
gtctttcaggttggtggcagtcagt

SEQ ID NO: 139936 - DNA, 25 bp, Canis familiaris
gtcttaaggtctagcgtgcgtcttg

SEQ ID NO: 139937 - DNA, 25 bp, Canis familiaris
gtcagtgaagcagttgccctggtcc

SEQ ID NO: 139938 - DNA, 25 bp, Canis familiaris
gtcgacaagcagggtccgtttcgga

SEQ ID NO: 139939 - DNA, 25 bp, Canis familiaris
gtctacagtagggtgagggttccga

SEQ ID NO: 139940 - DNA, 25 bp, Canis familiaris
gtctagtgtagtgtgggctgttcgg

SEQ ID NO: 139941 - DNA, 25 bp, Canis familiaris
gtcatggagtaggtggggctgctgc

SEQ ID NO: 139942 - DNA, 25 bp, Canis familiaris
gtcatggaaactagagtgctgggca

SEQ ID NO: 139943 - DNA, 25 bp, Canis familiaris
gtcgtcaacacgattgctgagccac

SEQ ID NO: 139944 - DNA, 25 bp, Canis familiaris
gtctcgaactcgatcatgcatgacc

SEQ ID NO: 139945 - DNA, 25 bp, Canis familiaris
gtctctcccaagctacaagcagagt

SEQ ID NO: 139946 - DNA, 25 bp, Canis familiaris
gtcttcggtcagcttcatgagggta

SEQ ID NO: 139947 - DNA, 25 bp, Canis familiaris
gtcttgggctcacagtctagtattt

SEQ ID NO: 139948 - DNA, 25 bp, Canis familiaris
gtctttggggcttctgtgacttttg

SEQ ID NO: 139949 - DNA, 25 bp, Canis familiaris
gtctgtttcctggtttgtcttttat

SEQ ID NO: 139950 - DNA, 25 bp, Canis familiaris
gtcatacattcccagtttactctgt

SEQ ID NO: 139951 - DNA, 25 bp, Canis familiaris
gtcaggcattcatagttcttcttgg

SEQ ID NO: 139952 - DNA, 25 bp, Canis familiaris
gtcaggactcaatgtgccttcttac

SEQ ID NO: 139953 - DNA, 25 bp, Canis familiaris
gtcaggttacaactccagcctgtac

SEQ ID NO: 139954 - DNA, 25 bp, Canis familiaris
gtcatgggtaaaatctgcagttgta

SEQ ID NO: 139955 - DNA, 25 bp, Canis familiaris
gtcatccattaagcattcagtcgtt

SEQ ID NO: 139956 - DNA, 25 bp, Canis familiaris
gtctactctaagttccagtggtttg

SEQ ID NO: 139957 - DNA, 25 bp, Canis familiaris
gtcttgtcggagtacccggatgagg

SEQ ID NO: 139958 - DNA, 25 bp, Canis familiaris
gtctcttcgagatcccgcaaagatg

SEQ ID NO: 139959 - DNA, 25 bp, Canis familiaris
gtctctgctaatgaacccaaaggct

SEQ ID NO: 139960 - DNA, 25 bp, Canis familiaris
gtctcaacatttaaagccaaaggct

SEQ ID NO: 139961 - DNA, 25 bp, Canis familiaris
gtctacactgttcatacctttcgtg

SEQ ID NO: 139962 - DNA, 25 bp, Canis familiaris
gtctgcaaatgtgcaaccctttcca

SEQ ID NO: 139963 - DNA, 25 bp, Canis familiaris
gtcatcactattggcaacgagcgct

SEQ ID NO: 139964 - DNA, 25 bp, Canis familiaris
gtcatcactattggcaacgagcggt

SEQ ID NO: 139965 - DNA, 25 bp, Canis familiaris
gtcatatccacagggactacggtta

SEQ ID NO: 139966 - DNA, 25 bp, Canis familiaris
gtcattccacagctcctaggaattt

SEQ ID NO: 139967 - DNA, 25 bp, Canis familiaris
gtcatgtcccatttctataggtttc

SEQ ID NO: 139968 - DNA, 25 bp, Canis familiaris
gtcatgtcacctgacttcaggtcat

SEQ ID NO: 139969 - DNA, 25 bp, Canis familiaris
gtcataaccgtccttagaacatcag

SEQ ID NO: 139970 - DNA, 25 bp, Canis familiaris
gtcattatacatttctccaaactcg

SEQ ID NO: 139971 - DNA, 25 bp, Canis familiaris
gtcatatagtgttttccaaagtttg

SEQ ID NO: 139972 - DNA, 25 bp, Canis familiaris
gtcatctttgtatctcccatagtac

SEQ ID NO: 139973 - DNA, 25 bp, Canis familiaris
gtcatgctaaggaactacccagaat

SEQ ID NO: 139974 - DNA, 25 bp, Canis familiaris
gtcatgcaagaactacgtacaaaat

SEQ ID NO: 139975 - DNA, 25 bp, Canis familiaris
gtctagaaaaacctgccaaatatga

SEQ ID NO: 139976 - DNA, 25 bp, Canis familiaris
gtcttaaatagaaacccaccatgca

SEQ ID NO: 139977 - DNA, 25 bp, Canis familiaris
gtctcaataataataaccccaatgg

SEQ ID NO: 139978 - DNA, 25 bp, Canis familiaris
gtctgccaaaaatgtcagtgccaag

SEQ ID NO: 139979 - DNA, 25 bp, Canis familiaris
gtctccagacataaaccgtctcata

SEQ ID NO: 139980 - DNA, 25 bp, Canis familiaris
gtctgacagagacgaaccggccagc

SEQ ID NO: 139981 - DNA, 25 bp, Canis familiaris
gtcatccggaggaagccggctgcgc

SEQ ID NO: 139982 - DNA, 25 bp, Canis familiaris
gtcattcggatgaggccaaggtcta

SEQ ID NO: 139983 - DNA, 25 bp, Canis familiaris
gtcattctgttcaggccaattgctg

SEQ ID NO: 139984 - DNA, 25 bp, Canis familiaris
gtcatagtgtacagctgccttcttc

SEQ ID NO: 139985 - DNA, 25 bp, Canis familiaris
gtcatcgggactggaagcttcttcc

SEQ ID NO: 139986 - DNA, 25 bp, Canis familiaris
gtctcggagatcccaagttggtgat

SEQ ID NO: 139987 - DNA, 25 bp, Canis familiaris
gtcttggcaagcctgggttggcgct

SEQ ID NO: 139988 - DNA, 25 bp, Canis familiaris
gtcttgctgtacctgggagtggcac

SEQ ID NO: 139989 - DNA, 25 bp, Canis familiaris
gtctttgggcgagagcgtgccatca

SEQ ID NO: 139990 - DNA, 25 bp, Canis familiaris
gtctttcaaggagaatatggcacat

SEQ ID NO: 139991 - DNA, 25 bp, Canis familiaris
gtcttggaaggaccaagacatgcct

SEQ ID NO: 139992 - DNA, 25 bp, Canis familiaris
gtcttgggaacttaacgtgcatcat

SEQ ID NO: 139993 - DNA, 25 bp, Canis familiaris
gtcttccagcaagtgaaaggcccat

SEQ ID NO: 139994 - DNA, 25 bp, Canis familiaris
gtcattcctcatttacactgaccca

SEQ ID NO: 139995 - DNA, 25 bp, Canis familiaris
gtcatacttattaaactatcaaaca

SEQ ID NO: 139996 - DNA, 25 bp, Canis familiaris
gtctacatttaaacctaaccactat

SEQ ID NO: 139997 - DNA, 25 bp, Canis familiaris
gtctccactttgtacttaagcacct

SEQ ID NO: 139998 - DNA, 25 bp, Canis familiaris
gtcttacttataactcagatgacct

SEQ ID NO: 139999 - DNA, 25 bp, Canis familiaris
gtctttctttatcccaaaccaatga

SEQ ID NO: 140000 - DNA, 25 bp, Canis familiaris
gtcatttctttttcacatattctaa

SEQ ID NO: 140001 - DNA, 25 bp, Canis familiaris
gtcatttctcggtacacaaagcaag

SEQ ID NO: 140002 - DNA, 25 bp, Canis familiaris
gtcattttgcggtacagagctccaa

SEQ ID NO: 140003 - DNA, 25 bp, Canis familiaris
gtcattcaagctaacacagtcccaa

SEQ ID NO: 140004 - DNA, 25 bp, Canis familiaris
gtcatagccattgagcatcattccc

SEQ ID NO: 140005 - DNA, 25 bp, Canis familiaris
gtcatgcagcctgcggtattccagc

SEQ ID NO: 140006 - DNA, 25 bp, Canis familiaris
gtcatgatcctcgggtcttggagtc

SEQ ID NO: 140007 - DNA, 25 bp, Canis familiaris
gtcatgatcctgggttcctgagatc

SEQ ID NO: 140008 - DNA, 25 bp, Canis familiaris
gtcatgatctcggggctgtggaatc

SEQ ID NO: 140009 - DNA, 25 bp, Canis familiaris
gtcatgattcatggagcgtctaaga

SEQ ID NO: 140010 - DNA, 25 bp, Canis familiaris
gtcttactcaagccctaaagtcagg

SEQ ID NO: 140011 - DNA, 25 bp, Canis familiaris
gtctatatctaaaccttcaggggct

SEQ ID NO: 140012 - DNA, 25 bp, Canis familiaris
gtcatgagttcaacccttgcattgg

SEQ ID NO: 140013 - DNA, 25 bp, Canis familiaris
gtctagtcacaggaggtctgatctg

SEQ ID NO: 140014 - DNA, 25 bp, Canis familiaris
gtctttgcacaggaaatctacggtt

SEQ ID NO: 140015 - DNA, 25 bp, Canis familiaris
gtctcttgggaaaacgcacggatct

SEQ ID NO: 140016 - DNA, 25 bp, Canis familiaris
gtctttcgacaaaaccaacaaatct

SEQ ID NO: 140017 - DNA, 25 bp, Canis familiaris
gtctttcagcaagggacaacaaagc

SEQ ID NO: 140018 - DNA, 25 bp, Canis familiaris
gtgctttccagagcctcagaaaagg

SEQ ID NO: 140019 - DNA, 25 bp, Canis familiaris
gtcattgtccatgcctacagataat

SEQ ID NO: 140020 - DNA, 25 bp, Canis familiaris
gtcattgttaaccatcacagaaata

SEQ ID NO: 140021 - DNA, 25 bp, Canis familiaris
gtcatcattctgaaccacaataaat

SEQ ID NO: 140022 - DNA, 25 bp, Canis familiaris
gtcatcatcctgaagtgacttaaag

SEQ ID NO: 140023 - DNA, 25 bp, Canis familiaris
gtcatgctctctctaggtgaacaag

SEQ ID NO: 140024 - DNA, 25 bp, Canis familiaris
gtcatgacctccttggaagacacgc

SEQ ID NO: 140025 - DNA, 25 bp, Canis familiaris
gtcttccctcctgaaagacagccac

SEQ ID NO: 140026 - DNA, 25 bp, Canis familiaris
gtctacccatcttgaaattaaccac

SEQ ID NO: 140027 - DNA, 25 bp, Canis familiaris
gtcatgacccattagagatttcact

SEQ ID NO: 140028 - DNA, 25 bp, Canis familiaris
gtctgagcgtctaagggtccgatgg

SEQ ID NO: 140029 - DNA, 25 bp, Canis familiaris
gtcgagatgtcacatgggcacaaga

SEQ ID NO: 140030 - DNA, 25 bp, Canis familiaris
gtctatgtgtagttgagccctgggg

SEQ ID NO: 140031 - DNA, 25 bp, Canis familiaris
gtctttcataggtgtccatctctgg

SEQ ID NO: 140032 - DNA, 25 bp, Canis familiaris
gtctttctggtcaattttcctgggt

SEQ ID NO: 140033 - DNA, 25 bp, Canis familiaris
gtgaattggacttatttatttggga

SEQ ID NO: 140034 - DNA, 25 bp, Canis familiaris
gtcatattagacattttattttgga

SEQ ID NO: 140035 - DNA, 25 bp, Canis familiaris
gtcttccctcctgtattttgtgaga

SEQ ID NO: 140036 - DNA, 25 bp, Canis familiaris
gtcttccccgtgacagggtgtgagg

SEQ ID NO: 140037 - DNA, 25 bp, Canis familiaris
gtcatctcctgctggttgggggagg

SEQ ID NO: 140038 - DNA, 25 bp, Canis familiaris
gtcatttggcatctgttggtctggg

SEQ ID NO: 140039 - DNA, 25 bp, Canis familiaris
gtcatttctctgtgtgctggttgaa

SEQ ID NO: 140040 - DNA, 25 bp, Canis familiaris
gtctgacccgtgccctgggtcagag

SEQ ID NO: 140041 - DNA, 25 bp, Canis familiaris
gtctgcatcgacctggtcatggggc

SEQ ID NO: 140042 - DNA, 25 bp, Canis familiaris
gtcatcagctagctatggcagtggc

SEQ ID NO: 140043 - DNA, 25 bp, Canis familiaris
gtcattgctgcggtaagccatgtgc

SEQ ID NO: 140044 - DNA, 25 bp, Canis familiaris
gtcattgctcctaaagctctggcta

SEQ ID NO: 140045 - DNA, 25 bp, Canis familiaris
gtcattggcctacagatgggcagca

SEQ ID NO: 140046 - DNA, 25 bp, Canis familiaris
gtcattggccctcagggctgagaat

SEQ ID NO: 140047 - DNA, 25 bp, Canis familiaris
gtcatgtggtctgaaggagcatatg

SEQ ID NO: 140048 - DNA, 25 bp, Canis familiaris
gtcatgtttctagagcagtgctgtc

SEQ ID NO: 140049 - DNA, 25 bp, Canis familiaris
gtcattttgcttcacagctggttcc

SEQ ID NO: 140050 - DNA, 25 bp, Canis familiaris
gtcatcttccctgacagcgtgatat

SEQ ID NO: 140051 - DNA, 25 bp, Canis familiaris
gtctcttcacctcacagtagtttgg

SEQ ID NO: 140052 - DNA, 25 bp, Canis familiaris
gtctttcagcagcccatgaggaagt

SEQ ID NO: 140053 - DNA, 25 bp, Canis familiaris
gtcttctacgcccagaggtagtcag

SEQ ID NO: 140054 - DNA, 25 bp, Canis familiaris
gtctccaaagcccagacctgatgaa

SEQ ID NO: 140055 - DNA, 25 bp, Canis familiaris
gtcttcaactgctcaatttgctgat

SEQ ID NO: 140056 - DNA, 25 bp, Canis familiaris
gtcatccagactctcaagttcatta

SEQ ID NO: 140057 - DNA, 25 bp, Canis familiaris
gtcatcctgtctagttggtatgctt

SEQ ID NO: 140058 - DNA, 25 bp, Canis familiaris
gtcatcctgtcaaatatagcaagca

SEQ ID NO: 140059 - DNA, 25 bp, Canis familiaris
gtcatcacgtcaaactcagctaatt

SEQ ID NO: 140060 - DNA, 25 bp, Canis familiaris
gtcatacctaacgtggctaatgtca

SEQ ID NO: 140061 - DNA, 25 bp, Canis familiaris
gtctacttgtccatgtcttattact

SEQ ID NO: 140062 - DNA, 25 bp, Canis familiaris
gtctacttgtccatgtcttattact

SEQ ID NO: 140063 - DNA, 25 bp, Canis familiaris
gtcttctctgtcaattcctgtaata

SEQ ID NO: 140064 - DNA, 25 bp, Canis familiaris
gtcattccagactgtcctgtgagca

SEQ ID NO: 140065 - DNA, 25 bp, Canis familiaris
gtcatcatgtatattctctcttcca

SEQ ID NO: 140066 - DNA, 25 bp, Canis familiaris
gtcatagcatgtattagtgtcttat

SEQ ID NO: 140067 - DNA, 25 bp, Canis familiaris
gtcatgtctgtagtaattgtgccct

SEQ ID NO: 140068 - DNA, 25 bp, Canis familiaris
gtcatgtctgcttaaaagtgttctt

SEQ ID NO: 140069 - DNA, 25 bp, Canis familiaris
gtcgtctgtaaggcagtttcctacc

SEQ ID NO: 140070 - DNA, 25 bp, Canis familiaris
gtcattctgtaagctgtattgtcta

SEQ ID NO: 140071 - DNA, 25 bp, Canis familiaris
gtcatatgttggtcctgtgttgcta

SEQ ID NO: 140072 - DNA, 25 bp, Canis familiaris
gtcattgtgatggtcgtctttgctc

SEQ ID NO: 140073 - DNA, 25 bp, Canis familiaris
gtcttgggcttggtagtggctgcca

SEQ ID NO: 140074 - DNA, 25 bp, Canis familiaris
gtcttgggttttggttccatcaata

SEQ ID NO: 140075 - DNA, 25 bp, Canis familiaris
gtcatatatgtgtttaggttcctag

SEQ ID NO: 140076 - DNA, 25 bp, Canis familiaris
gtcatactgggttaggtgtcttcct

SEQ ID NO: 140077 - DNA, 25 bp, Canis familiaris
gtctagtgagtttagccagtctgtc

SEQ ID NO: 140078 - DNA, 25 bp, Canis familiaris
gtcattctgcattttatccagcttt

SEQ ID NO: 140079 - DNA, 25 bp, Canis familiaris
gtcattgccaatgatatggcagctt

SEQ ID NO: 140080 - DNA, 25 bp, Canis familiaris
gtcatggatccagctctggcagcac

SEQ ID NO: 140081 - DNA, 25 bp, Canis familiaris
gtcatccaccaggcgctggagaacg

SEQ ID NO: 140082 - DNA, 25 bp, Canis familiaris
gtctccactctggtcagcaaatacc

SEQ ID NO: 140083 - DNA, 25 bp, Canis familiaris
gtctctgcacacatgctccaaatga

SEQ ID NO: 140084 - DNA, 25 bp, Canis familiaris
gtcttgagatgcaacgcacaaacag

SEQ ID NO: 140085 - DNA, 25 bp, Canis familiaris
gtcatggagatgaaggccgtgtgcg

SEQ ID NO: 140086 - DNA, 25 bp, Canis familiaris
gtcatcgatatcactggttctgcag

SEQ ID NO: 140087 - DNA, 25 bp, Canis familiaris
gtccgaacaccggttcggtcaagcg

SEQ ID NO: 140088 - DNA, 25 bp, Canis familiaris
gtccgattccggtaaaggtgccaag

SEQ ID NO: 140089 - DNA, 25 bp, Canis familiaris
gtcatggttttgggaaagggtctga

SEQ ID NO: 140090 - DNA, 25 bp, Canis familiaris
gtcttgcttcttgtgaaaacccgtg

SEQ ID NO: 140091 - DNA, 25 bp, Canis familiaris
gtcttgcttcttgtaaaagcccgat

SEQ ID NO: 140092 - DNA, 25 bp, Canis familiaris
gtcttttctggttacagtggccctg

SEQ ID NO: 140093 - DNA, 25 bp, Canis familiaris
gtcatgtccattcgaaacctggcca

SEQ ID NO: 140094 - DNA, 25 bp, Canis familiaris
gtcatgtcatatctgcagaacccgc

SEQ ID NO: 140095 - DNA, 25 bp, Canis familiaris
gtcatctctacactgcagattcacc

SEQ ID NO: 140096 - DNA, 25 bp, Canis familiaris
gtcatcgatgatggatggaggacca

SEQ ID NO: 140097 - DNA, 25 bp, Canis familiaris
gtcatcgcagatggagtagccccag

SEQ ID NO: 140098 - DNA, 25 bp, Canis familiaris
gtcatccaagacacaggcatccagg

SEQ ID NO: 140099 - DNA, 25 bp, Canis familiaris
gtctcagaagaaatcaccatgggga

SEQ ID NO: 140100 - DNA, 25 bp, Canis familiaris
gtctcatgccagtaattgcacatgt

SEQ ID NO: 140101 - DNA, 25 bp, Canis familiaris
gtcattccaaatatgagatgcattg

SEQ ID NO: 140102 - DNA, 25 bp, Canis familiaris
gtcattgcctagaagtagagcatcc

SEQ ID NO: 140103 - DNA, 25 bp, Canis familiaris
gtcatacctgagtgctctacttgcc

SEQ ID NO: 140104 - DNA, 25 bp, Canis familiaris
gtcatcggtggttgtgtacttggca

SEQ ID NO: 140105 - DNA, 25 bp, Canis familiaris
gtcatgtgggtttggaatctttggt

SEQ ID NO: 140106 - DNA, 25 bp, Canis familiaris
gtcataggtgttttagtctttcaga

SEQ ID NO: 140107 - DNA, 25 bp, Canis familiaris
gtcatcagggtcaaccaggacttcc

SEQ ID NO: 140108 - DNA, 25 bp, Canis familiaris
gtcatcacgtggacacaaggccggc

SEQ ID NO: 140109 - DNA, 25 bp, Canis familiaris
gtcatcctgttagcaagaccctgtc

SEQ ID NO: 140110 - DNA, 25 bp, Canis familiaris
gtctacttgtagctgaagcccttgc

SEQ ID NO: 140111 - DNA, 25 bp, Canis familiaris
gtctcttcgatgttgataaccgctg

SEQ ID NO: 140112 - DNA, 25 bp, Canis familiaris
gtctgccattagtgaccaccttaac

SEQ ID NO: 140113 - DNA, 25 bp, Canis familiaris
gtcttttactgtagccactttatac

SEQ ID NO: 140114 - DNA, 25 bp, Canis familiaris
gtcattatgtagctggcgaccattg

SEQ ID NO: 140115 - DNA, 25 bp, Canis familiaris
gtcattgtttggaggatgccctgga

SEQ ID NO: 140116 - DNA, 25 bp, Canis familiaris
gtctggttgtggatctggccaccat

SEQ ID NO: 140117 - DNA, 25 bp, Canis familiaris
gtctactggtgtcttcaccaccatg

SEQ ID NO: 140118 - DNA, 25 bp, Canis familiaris
gtctcattggggcttttatcctgtt

SEQ ID NO: 140119 - DNA, 25 bp, Canis familiaris
gtctttgggggtgtgaactcttcat

SEQ ID NO: 140120 - DNA, 25 bp, Canis familiaris
gtctcttggtgccagtttggtctta

SEQ ID NO: 140121 - DNA, 25 bp, Canis familiaris
gtctcttggacccagctttattttg

SEQ ID NO: 140122 - DNA, 25 bp, Canis familiaris
gtctttaggcagcagcttttaatac

SEQ ID NO: 140123 - DNA, 25 bp, Canis familiaris
gtctttgcagtattcgctttcttga

SEQ ID NO: 140124 - DNA, 25 bp, Canis familiaris
gtctcttaatcttcgctttgaaatg

SEQ ID NO: 140125 - DNA, 25 bp, Canis familiaris
gtcatcccagtctcagtctaagaag

SEQ ID NO: 140126 - DNA, 25 bp, Canis familiaris
gtcatcccttgctcctggaaaatgg

SEQ ID NO: 140127 - DNA, 25 bp, Canis familiaris
gtctctccatcctcatttgaaaatg

SEQ ID NO: 140128 - DNA, 25 bp, Canis familiaris
gtctccccccacggtgaaaatagag

SEQ ID NO: 140129 - DNA, 25 bp, Canis familiaris
gtctactcccccatggatcaaaaga

SEQ ID NO: 140130 - DNA, 25 bp, Canis familiaris
gtctacttaccacagagagggagaa

SEQ ID NO: 140131 - DNA, 25 bp, Canis familiaris
gtctaataagcctggagatgcgaag

SEQ ID NO: 140132 - DNA, 25 bp, Canis familiaris
gtcttacacgcatttggtctcgtag

SEQ ID NO: 140133 - DNA, 25 bp, Canis familiaris
gtcttacacgcatttggtctcgtag

SEQ ID NO: 140134 - DNA, 25 bp, Canis familiaris
gtctatcacacgtggagtcacctat

SEQ ID NO: 140135 - DNA, 25 bp, Canis familiaris
gtcttacagacacaggtcacctttg

SEQ ID NO: 140136 - DNA, 25 bp, Canis familiaris
gtcttttgtgcactcaattaacttt

SEQ ID NO: 140137 - DNA, 25 bp, Canis familiaris
gtcatttctgccattttaactcaat

SEQ ID NO: 140138 - DNA, 25 bp, Canis familiaris
gtcatttccctgcattaaacataga

SEQ ID NO: 140139 - DNA, 25 bp, Canis familiaris
gtctgtggccttcattaaaaagtgt

SEQ ID NO: 140140 - DNA, 25 bp, Canis familiaris
gtcatgctggacaactataaccata

SEQ ID NO: 140141 - DNA, 25 bp, Canis familiaris
gtcattctgacaactgtaaggtgag

SEQ ID NO: 140142 - DNA, 25 bp, Canis familiaris
gtctatgctgaggtccttagggacc

SEQ ID NO: 140143 - DNA, 25 bp, Canis familiaris
gtcattgattgcttcctgtaggcct

SEQ ID NO: 140144 - DNA, 25 bp, Canis familiaris
gtcattggtgataccgggggctttc

SEQ ID NO: 140145 - DNA, 25 bp, Canis familiaris
gtctttgtttcatgttgggctgagt

SEQ ID NO: 140146 - DNA, 25 bp, Canis familiaris
gtctttgttctcttcttggtgataa

SEQ ID NO: 140147 - DNA, 25 bp, Canis familiaris
gtcattagggcattttctcgtgtga

SEQ ID NO: 140148 - DNA, 25 bp, Canis familiaris
gtcttgtgcaggttcttcaggatta

SEQ ID NO: 140149 - DNA, 25 bp, Canis familiaris
gtctgagtgcagatccttaaatata

SEQ ID NO: 140150 - DNA, 25 bp, Canis familiaris
gtctcattagatcccatttagaaca

SEQ ID NO: 140151 - DNA, 25 bp, Canis familiaris
gtcatcaaacattccagaaaacaca

SEQ ID NO: 140152 - DNA, 25 bp, Canis familiaris
gtctcagcagcacaccaaggaagcc

SEQ ID NO: 140153 - DNA, 25 bp, Canis familiaris
gtcatcagcacagagccaactggac

SEQ ID NO: 140154 - DNA, 25 bp, Canis familiaris
gtcatcacagacaaagagaaggcag

SEQ ID NO: 140155 - DNA, 25 bp, Canis familiaris
gtcgctgcagtccaggctgaagaca

SEQ ID NO: 140156 - DNA, 25 bp, Canis familiaris
gtcatgcgcatgtcggcggaggaca

SEQ ID NO: 140157 - DNA, 25 bp, Canis familiaris
gtcatgcgcgtaatcgtcaggcaga

SEQ ID NO: 140158 - DNA, 25 bp, Canis familiaris
gtcattctgtgttttcagatgcaga

SEQ ID NO: 140159 - DNA, 25 bp, Canis familiaris
gtcattctgtgaagttaatgcaccg

SEQ ID NO: 140160 - DNA, 25 bp, Canis familiaris
gtcatactgataacatctaatgatc

SEQ ID NO: 140161 - DNA, 25 bp, Canis familiaris
gtcatactgattaacatctaataat

SEQ ID NO: 140162 - DNA, 25 bp, Canis familiaris
gtctctgtgatactacatttatata

SEQ ID NO: 140163 - DNA, 25 bp, Canis familiaris
gtcatcttctagacacaagttatcg

SEQ ID NO: 140164 - DNA, 25 bp, Canis familiaris
gtctcttctagaacgactggagggc

SEQ ID NO: 140165 - DNA, 25 bp, Canis familiaris
gtcatcttcaagtacgaggttccgg

SEQ ID NO: 140166 - DNA, 25 bp, Canis familiaris
gtcatcttcaaaatggggactcctt

SEQ ID NO: 140167 - DNA, 25 bp, Canis familiaris
gtcatcattaaaggatgtgaaccct

SEQ ID NO: 140168 - DNA, 25 bp, Canis familiaris
gtcataataacggattcccccttag

SEQ ID NO: 140169 - DNA, 25 bp, Canis familiaris
gtctaaaacgtgaacctgcctggaa

SEQ ID NO: 140170 - DNA, 25 bp, Canis familiaris
gtctacaacacatcaggactcttga

SEQ ID NO: 140171 - DNA, 25 bp, Canis familiaris
gtctaaacagtgacatggtacatta

SEQ ID NO: 140172 - DNA, 25 bp, Canis familiaris
gtctaagcatcgatcgttacgtggc

SEQ ID NO: 140173 - DNA, 25 bp, Canis familiaris
gtctaagcacaccctttgagagtct

SEQ ID NO: 140174 - DNA, 25 bp, Canis familiaris
gtctaccaccccatgaatgggcctg

SEQ ID NO: 140175 - DNA, 25 bp, Canis familiaris
gtctaccggaacctgaatgggggcg

SEQ ID NO: 140176 - DNA, 25 bp, Canis familiaris
gtctaccgagaccgtgagttgggag

SEQ ID NO: 140177 - DNA, 25 bp, Canis familiaris
gtctacgtgaactggaattggctga

SEQ ID NO: 140178 - DNA, 25 bp, Canis familiaris
gtcttcgagacccggaatctgagat

SEQ ID NO: 140179 - DNA, 25 bp, Canis familiaris
gtctatcagtacgtcggcaatggaa

SEQ ID NO: 140180 - DNA, 25 bp, Canis familiaris
gtcttagtgatggctcctgcaaaat

SEQ ID NO: 140181 - DNA, 25 bp, Canis familiaris
gtcttcagtcatgctactctgcaaa

SEQ ID NO: 140182 - DNA, 25 bp, Canis familiaris
gtcttcgtgcattaattctaataaa

SEQ ID NO: 140183 - DNA, 25 bp, Canis familiaris
gtcttctgcgcttatgatctggaaa

SEQ ID NO: 140184 - DNA, 25 bp, Canis familiaris
gtcttctgtgccaatgtgtgcgtgt

SEQ ID NO: 140185 - DNA, 25 bp, Canis familiaris
gtcatcatctggattgtctcctgca

SEQ ID NO: 140186 - DNA, 25 bp, Canis familiaris
gtcatcatttgagtttatttgggca

SEQ ID NO: 140187 - DNA, 25 bp, Canis familiaris
gtctcttctgaccttagtttggtgc

SEQ ID NO: 140188 - DNA, 25 bp, Canis familiaris
gtcttccatgaacctttttgatctg

SEQ ID NO: 140189 - DNA, 25 bp, Canis familiaris
gtcttccagatattccatttggtgc

SEQ ID NO: 140190 - DNA, 25 bp, Canis familiaris
gtcattgccattttgtttgtaggga

SEQ ID NO: 140191 - DNA, 25 bp, Canis familiaris
gtcattgtcttctatgatttgtatc

SEQ ID NO: 140192 - DNA, 25 bp, Canis familiaris
gtctatgctcctctgaatgcttaga

SEQ ID NO: 140193 - DNA, 25 bp, Canis familiaris
gtcattctctacctgcaattatgag

SEQ ID NO: 140194 - DNA, 25 bp, Canis familiaris
gtcatctccatctgctattttgagc

SEQ ID NO: 140195 - DNA, 25 bp, Canis familiaris
gtcatcttccatagtttctgtcagt

SEQ ID NO: 140196 - DNA, 25 bp, Canis familiaris
gtcatctcttcaatgcattttgtga

SEQ ID NO: 140197 - DNA, 25 bp, Canis familiaris
gtcatctcttcagtttctagtactt

SEQ ID NO: 140198 - DNA, 25 bp, Canis familiaris
gtcatttacaatcttcaggccatat

SEQ ID NO: 140199 - DNA, 25 bp, Canis familiaris
gtcatttacacacattgttctcatt

SEQ ID NO: 140200 - DNA, 25 bp, Canis familiaris
gtcattatacgtctctgattctttg

SEQ ID NO: 140201 - DNA, 25 bp, Canis familiaris
gtctgtaaagtgctctgaggtctcc

SEQ ID NO: 140202 - DNA, 25 bp, Canis familiaris
gtcttgtaagctgtcctgttctcag

SEQ ID NO: 140203 - DNA, 25 bp, Canis familiaris
gtcttgaaatctagcatcctttcgc

SEQ ID NO: 140204 - DNA, 25 bp, Canis familiaris
gtctaaatattcaatccctctctgc

SEQ ID NO: 140205 - DNA, 25 bp, Canis familiaris
gtctatacaaacaatccattccctc

SEQ ID NO: 140206 - DNA, 25 bp, Canis familiaris
gtcttacataaaaccacaccaccga

SEQ ID NO: 140207 - DNA, 25 bp, Canis familiaris
gtcttaatcaatatacccatcctcg

SEQ ID NO: 140208 - DNA, 25 bp, Canis familiaris
gtcttaagcaattctaaactgtcct

SEQ ID NO: 140209 - DNA, 25 bp, Canis familiaris
gtctattgacgatttcaactcggcc

SEQ ID NO: 140210 - DNA, 25 bp, Canis familiaris
gtctgttgactttgtgaaattggat

SEQ ID NO: 140211 - DNA, 25 bp, Canis familiaris
gtcgtagactgtttgaccaagttta

SEQ ID NO: 140212 - DNA, 25 bp, Canis familiaris
gtcattaattgacttttcttgttta

SEQ ID NO: 140213 - DNA, 25 bp, Canis familiaris
gtcttacattagtttatttattcat

SEQ ID NO: 140214 - DNA, 25 bp, Canis familiaris
gtctaacatcatttttctttttact

SEQ ID NO: 140215 - DNA, 25 bp, Canis familiaris
gtcattaacatcttttctgatttta

SEQ ID NO: 140216 - DNA, 25 bp, Canis familiaris
gtcttcaggactcttctacttaaca

SEQ ID NO: 140217 - DNA, 25 bp, Canis familiaris
gtctgtcaggggcttggagttcatt

SEQ ID NO: 140218 - DNA, 25 bp, Canis familiaris
gtcattgaggggtttggagttcgtc

SEQ ID NO: 140219 - DNA, 25 bp, Canis familiaris
gtcttggtgggttttgggatcgtcg

SEQ ID NO: 140220 - DNA, 25 bp, Canis familiaris
gtcttgtgggggagtgggatgtggc

SEQ ID NO: 140221 - DNA, 25 bp, Canis familiaris
gtcttgtggggcttttgggatgtgc

SEQ ID NO: 140222 - DNA, 25 bp, Canis familiaris
gtcttgtttggccttcatggtgtag

SEQ ID NO: 140223 - DNA, 25 bp, Canis familiaris
gtctgttctggcggcattgtgggct

SEQ ID NO: 140224 - DNA, 25 bp, Canis familiaris
gtcttccatggagcctcaggtgctc

SEQ ID NO: 140225 - DNA, 25 bp, Canis familiaris
gtctatgtatttgccatatgtggcc

SEQ ID NO: 140226 - DNA, 25 bp, Canis familiaris
gtcttgctgctttgccaatgatggg

SEQ ID NO: 140227 - DNA, 25 bp, Canis familiaris
gtcttgtcctgttcattatgcgttt

SEQ ID NO: 140228 - DNA, 25 bp, Canis familiaris
gtcttgggtttattgtcttattctt

SEQ ID NO: 140229 - DNA, 25 bp, Canis familiaris
gtcattgtttttatgttatctcttt

SEQ ID NO: 140230 - DNA, 25 bp, Canis familiaris
gtcattctgttgatattgtttcggc

SEQ ID NO: 140231 - DNA, 25 bp, Canis familiaris
gtctacatttactttcatcgtcggg

SEQ ID NO: 140232 - DNA, 25 bp, Canis familiaris
gtcttgcttgatattttcagggggt

SEQ ID NO: 140233 - DNA, 25 bp, Canis familiaris
gtctggtttcacagttcagcggtgg

SEQ ID NO: 140234 - DNA, 25 bp, Canis familiaris
gtctgtgtccccatggttaggtgac

SEQ ID NO: 140235 - DNA, 25 bp, Canis familiaris
gtcttcaccaccatggagaaggctg

SEQ ID NO: 140236 - DNA, 25 bp, Canis familiaris
gtcttcaccaccatggagaaggctg

SEQ ID NO: 140237 - DNA, 25 bp, Canis familiaris
gtctacaactgctctggggaggcgt

SEQ ID NO: 140238 - DNA, 25 bp, Canis familiaris
gtcttaggctaatggagggaggtgt

SEQ ID NO: 140239 - DNA, 25 bp, Canis familiaris
gtcttcaggcatggcagggctggga

SEQ ID NO: 140240 - DNA, 25 bp, Canis familiaris
gtcttgcagtgaaagtggggtagaa

SEQ ID NO: 140241 - DNA, 25 bp, Canis familiaris
gtcttgaggatgaactggggacaga

SEQ ID NO: 140242 - DNA, 25 bp, Canis familiaris
gtcttgctgctctcacgggagaaag

SEQ ID NO: 140243 - DNA, 25 bp, Canis familiaris
gtcttagccacatgagaggagaaag

SEQ ID NO: 140244 - DNA, 25 bp, Canis familiaris
gtctccaccacacagtgtcagggat

SEQ ID NO: 140245 - DNA, 25 bp, Canis familiaris
gtctccttggcaattttccaggtcc

SEQ ID NO: 140246 - DNA, 25 bp, Canis familiaris
gtctcctgggagatagtaccctcct

SEQ ID NO: 140247 - DNA, 25 bp, Canis familiaris
gtctcctcggtgactaagaccacac

SEQ ID NO: 140248 - DNA, 25 bp, Canis familiaris
gtctcactccgttccgaaagaacca

SEQ ID NO: 140249 - DNA, 25 bp, Canis familiaris
gtcttctccttgcctggaaagaacc

SEQ ID NO: 140250 - DNA, 25 bp, Canis familiaris
gtcattcgtccaacttgaaaacaaa

SEQ ID NO: 140251 - DNA, 25 bp, Canis familiaris
gtcttcctgtagtttaatcaacaag

SEQ ID NO: 140252 - DNA, 25 bp, Canis familiaris
gtcttccagggaccatcctaaaatt

SEQ ID NO: 140253 - DNA, 25 bp, Canis familiaris
gtcttcccagggtatgcaatataaa

SEQ ID NO: 140254 - DNA, 25 bp, Canis familiaris
gtctctcacaaatgaacaaatatta

SEQ ID NO: 140255 - DNA, 25 bp, Canis familiaris
gtctctcctgaataaatacataaaa

SEQ ID NO: 140256 - DNA, 25 bp, Canis familiaris
gtcttctctgatccgagaatggcta

SEQ ID NO: 140257 - DNA, 25 bp, Canis familiaris
gtctgtccaagccatagcacgagct

SEQ ID NO: 140258 - DNA, 25 bp, Canis familiaris
gtcgtgaccacatcagaggagctgc

SEQ ID NO: 140259 - DNA, 25 bp, Canis familiaris
gtcggagatccggcagacggccgac

SEQ ID NO: 140260 - DNA, 25 bp, Canis familiaris
gtcgggaaaggagccagctcgcaag

SEQ ID NO: 140261 - DNA, 25 bp, Canis familiaris
gtcgggagacaataaagtggtacag

SEQ ID NO: 140262 - DNA, 25 bp, Canis familiaris
gtctaaggactgtgaaatgtgtgta

SEQ ID NO: 140263 - DNA, 25 bp, Canis familiaris
gtctacggtctgtgaagctgctgcc

SEQ ID NO: 140264 - DNA, 25 bp, Canis familiaris
gtctagccaccttcagagcaggctc

SEQ ID NO: 140265 - DNA, 25 bp, Canis familiaris
gtctgactcacgatgaacacctact

SEQ ID NO: 140266 - DNA, 25 bp, Canis familiaris
gtctagtacattcaaaggtcacttt

SEQ ID NO: 140267 - DNA, 25 bp, Canis familiaris
gtcggctacttgcaaattattcaat

SEQ ID NO: 140268 - DNA, 25 bp, Canis familiaris
gtcggtccaagcctggtattttcat

SEQ ID NO: 140269 - DNA, 25 bp, Canis familiaris
gtctctgtcacatccggtgattgtt

SEQ ID NO: 140270 - DNA, 25 bp, Canis familiaris
gtctctgtcacatccggtgattgtt

SEQ ID NO: 140271 - DNA, 25 bp, Canis familiaris
gtcttcatcctaactggcagtttgt

SEQ ID NO: 140272 - DNA, 25 bp, Canis familiaris
gtcttcaccattttgactgttcttg

SEQ ID NO: 140273 - DNA, 25 bp, Canis familiaris
gtcttcgccacagttgttgtttctg

SEQ ID NO: 140274 - DNA, 25 bp, Canis familiaris
gtcttggccagtttcttggttgcta

SEQ ID NO: 140275 - DNA, 25 bp, Canis familiaris
gtcattgggtgtttttctcatctgc

SEQ ID NO: 140276 - DNA, 25 bp, Canis familiaris
gtcttgattctttctgttctattgc

SEQ ID NO: 140277 - DNA, 25 bp, Canis familiaris
gtcattgcattaaactttctcttct

SEQ ID NO: 140278 - DNA, 25 bp, Canis familiaris
gtcattggcaattactattcatctg

SEQ ID NO: 140279 - DNA, 25 bp, Canis familiaris
gtcttggcagtgttctttgcctacc

SEQ ID NO: 140280 - DNA, 25 bp, Canis familiaris
gtcttgtgcagtattttgtttccag

SEQ ID NO: 140281 - DNA, 25 bp, Canis familiaris
gtcttcagattcattaggtttacgg

SEQ ID NO: 140282 - DNA, 25 bp, Canis familiaris
gtcatatatgtattttagcgagtat

SEQ ID NO: 140283 - DNA, 25 bp, Canis familiaris
gtcttgtttcatcctcagtatgtat

SEQ ID NO: 140284 - DNA, 25 bp, Canis familiaris
gtctggtttctggaagtcacttgct

SEQ ID NO: 140285 - DNA, 25 bp, Canis familiaris
gtcttgtttctgcgagacacgcttc

SEQ ID NO: 140286 - DNA, 25 bp, Canis familiaris
gtcttgtagtggctgagaacttctc

SEQ ID NO: 140287 - DNA, 25 bp, Canis familiaris
gtgccagtttagatggagatttcgc

SEQ ID NO: 140288 - DNA, 25 bp, Canis familiaris
gtccctaaagttcatactgtccctc

SEQ ID NO: 140289 - DNA, 25 bp, Canis familiaris
gtccgtaaagtgtcgatgccgtctc

SEQ ID NO: 140290 - DNA, 25 bp, Canis familiaris
gtgggtgacgggtgaccgagttctt

SEQ ID NO: 140291 - DNA, 25 bp, Canis familiaris
gtcgggaccggatttacaatgttca

SEQ ID NO: 140292 - DNA, 25 bp, Canis familiaris
gtctgggaccagttcccaactgttg

SEQ ID NO: 140293 - DNA, 25 bp, Canis familiaris
gtctggggagatggtcccaaagtgt

SEQ ID NO: 140294 - DNA, 25 bp, Canis familiaris
gtctagggatgagggccttccgtga

SEQ ID NO: 140295 - DNA, 25 bp, Canis familiaris
gtcggaagatgaaggccagttagtc

SEQ ID NO: 140296 - DNA, 25 bp, Canis familiaris
gtctggaagctgtgaaagtccgtca

SEQ ID NO: 140297 - DNA, 25 bp, Canis familiaris
gtctagtaggttcagagtcctgtga

SEQ ID NO: 140298 - DNA, 25 bp, Canis familiaris
gtctatatatggtggagggcctgaa

SEQ ID NO: 140299 - DNA, 25 bp, Canis familiaris
gtctttcggaggcagcgccaaggaa

SEQ ID NO: 140300 - DNA, 25 bp, Canis familiaris
gtctactcggagcaggacacagggc

SEQ ID NO: 140301 - DNA, 25 bp, Canis familiaris
gtctttcagcgagcaaggcattaac

SEQ ID NO: 140302 - DNA, 25 bp, Canis familiaris
gtctttcacggccaaggatgccacc

SEQ ID NO: 140303 - DNA, 25 bp, Canis familiaris
gtgcttccggtgcagatggaccaag

SEQ ID NO: 140304 - DNA, 25 bp, Canis familiaris
gtcttgctctttcggggaaaagaag

SEQ ID NO: 140305 - DNA, 25 bp, Canis familiaris
gtctgtactttctctggacaataca

SEQ ID NO: 140306 - DNA, 25 bp, Canis familiaris
gtcttgattttctgtgctacctgaa

SEQ ID NO: 140307 - DNA, 25 bp, Canis familiaris
gtcttcatcttttgggctaccagga

SEQ ID NO: 140308 - DNA, 25 bp, Canis familiaris
gtcttttttatgggcatgcagaggg

SEQ ID NO: 140309 - DNA, 25 bp, Canis familiaris
gtcttttggcctgacacaatgtggt

SEQ ID NO: 140310 - DNA, 25 bp, Canis familiaris
gtcattcgttccgagacgaggttgt

SEQ ID NO: 140311 - DNA, 25 bp, Canis familiaris
gtcttctgaacggagccgggtgtcc

SEQ ID NO: 140312 - DNA, 25 bp, Canis familiaris
gtctctggaagaggaccgggaggcg

SEQ ID NO: 140313 - DNA, 25 bp, Canis familiaris
gtcttagagactgaccagggccagc

SEQ ID NO: 140314 - DNA, 25 bp, Canis familiaris
gtcgtcatgatcatctaccgggacc

SEQ ID NO: 140315 - DNA, 25 bp, Canis familiaris
gtctgcttctgcatatactcggacc

SEQ ID NO: 140316 - DNA, 25 bp, Canis familiaris
gtctattgagcaagaagcgccatga

SEQ ID NO: 140317 - DNA, 25 bp, Canis familiaris
gtctgatagcaggggagcgctccaa

SEQ ID NO: 140318 - DNA, 25 bp, Canis familiaris
gtctaagcacagggaagaggctcag

SEQ ID NO: 140319 - DNA, 25 bp, Canis familiaris
gtcgaggagcgaggatgaaggatag

SEQ ID NO: 140320 - DNA, 25 bp, Canis familiaris
gtcgggatgcgattcgaagcaacaa

SEQ ID NO: 140321 - DNA, 25 bp, Canis familiaris
gtcttggcacgacttgttgcaacag

SEQ ID NO: 140322 - DNA, 25 bp, Canis familiaris
gtctggtccagcgtaatgagcaccg

SEQ ID NO: 140323 - DNA, 25 bp, Canis familiaris
gtcggctgctgtggtaaggaccgcc

SEQ ID NO: 140324 - DNA, 25 bp, Canis familiaris
gtcgggcatcatgtccgtgaacggc

SEQ ID NO: 140325 - DNA, 25 bp, Canis familiaris
gtccaggtcctcgcaggaaggagat

SEQ ID NO: 140326 - DNA, 25 bp, Canis familiaris
gtcttgtctcctgtctggtcaggaa

SEQ ID NO: 140327 - DNA, 25 bp, Canis familiaris
gtcttgttgcttctcccaatgagaa

SEQ ID NO: 140328 - DNA, 25 bp, Canis familiaris
gtcttttgcttctcccaagagacat

SEQ ID NO: 140329 - DNA, 25 bp, Canis familiaris
gtcttttgcttctcccaagagacat

SEQ ID NO: 140330 - DNA, 25 bp, Canis familiaris
gtctatttcttgctccacagaaaac

SEQ ID NO: 140331 - DNA, 25 bp, Canis familiaris
gtctatttcttagccaacccatagc

SEQ ID NO: 140332 - DNA, 25 bp, Canis familiaris
gtcttaatgttatccaactccatga

SEQ ID NO: 140333 - DNA, 25 bp, Canis familiaris
gtctcaacgttagtccataaccaca

SEQ ID NO: 140334 - DNA, 25 bp, Canis familiaris
gtccagagccgaactaatttccaca

SEQ ID NO: 140335 - DNA, 25 bp, Canis familiaris
gtcttgtcctgttttatttgcttca

SEQ ID NO: 140336 - DNA, 25 bp, Canis familiaris
gtcttcttgcgtgttttctgttaaa

SEQ ID NO: 140337 - DNA, 25 bp, Canis familiaris
gtcttttggtgatgttgtgctaata

SEQ ID NO: 140338 - DNA, 25 bp, Canis familiaris
gtctctttcgagctgtttgcagaca

SEQ ID NO: 140339 - DNA, 25 bp, Canis familiaris
gtcttacttgtgccagtgtgggcca

SEQ ID NO: 140340 - DNA, 25 bp, Canis familiaris
gtcttactgttggccgtgtgggccc

SEQ ID NO: 140341 - DNA, 25 bp, Canis familiaris
gtcttccttgtaaacggtgagccca

SEQ ID NO: 140342 - DNA, 25 bp, Canis familiaris
gtcttcactattttacatcaggagc

SEQ ID NO: 140343 - DNA, 25 bp, Canis familiaris
gtctcacacatattctacaatagtg

SEQ ID NO: 140344 - DNA, 25 bp, Canis familiaris
gtcttccatttttatgatcattcta

SEQ ID NO: 140345 - DNA, 25 bp, Canis familiaris
gtcttccttttatacacacatgcga

SEQ ID NO: 140346 - DNA, 25 bp, Canis familiaris
gtcttactgcctttataaccatgct

SEQ ID NO: 140347 - DNA, 25 bp, Canis familiaris
gtcttacttcttttcaatcactttg

SEQ ID NO: 140348 - DNA, 25 bp, Canis familiaris
gtctgtggcttttgtgtaccacctt

SEQ ID NO: 140349 - DNA, 25 bp, Canis familiaris
gtcttgagggagcatgtacacacac

SEQ ID NO: 140350 - DNA, 25 bp, Canis familiaris
gtcttcggcgctgagtgaccagcac

SEQ ID NO: 140351 - DNA, 25 bp, Canis familiaris
gtcttcgcagaggcacaggagcttc

SEQ ID NO: 140352 - DNA, 25 bp, Canis familiaris
gtctctatgagactggagaactttc

SEQ ID NO: 140353 - DNA, 25 bp, Canis familiaris
gtctctcgatgactgcatgcatgga

SEQ ID NO: 140354 - DNA, 25 bp, Canis familiaris
gtctgcttcatcttcatcagcatga

SEQ ID NO: 140355 - DNA, 25 bp, Canis familiaris
gtctgcttcagcttggggcatgatc

SEQ ID NO: 140356 - DNA, 25 bp, Canis familiaris
gtctgctgacaggtgggccaaagtt

SEQ ID NO: 140357 - DNA, 25 bp, Canis familiaris
gtctcagccagaggtgagccaattc

SEQ ID NO: 140358 - DNA, 25 bp, Canis familiaris
gtctcagctcagtgtcagttcagta

SEQ ID NO: 140359 - DNA, 25 bp, Canis familiaris
gtctcagcagcatgtgttttcctag

SEQ ID NO: 140360 - DNA, 25 bp, Canis familiaris
gtctcagcagcacgttttgggaagg

SEQ ID NO: 140361 - DNA, 25 bp, Canis familiaris
gtctatgcacgagttctcggccaag

SEQ ID NO: 140362 - DNA, 25 bp, Canis familiaris
gtcttctcagagttcctgtgtcaga

SEQ ID NO: 140363 - DNA, 25 bp, Canis familiaris
gtctctctaattaatcttgctatga

SEQ ID NO: 140364 - DNA, 25 bp, Canis familiaris
gtcttccgatctacactttatgacc

SEQ ID NO: 140365 - DNA, 25 bp, Canis familiaris
gtcttccctgagaacttcacagagc

SEQ ID NO: 140366 - DNA, 25 bp, Canis familiaris
gtcttccctgaggatcttcattcat

SEQ ID NO: 140367 - DNA, 25 bp, Canis familiaris
gtctaccgatgatgattctgttcct

SEQ ID NO: 140368 - DNA, 25 bp, Canis familiaris
gtctcactcagcaagaggtcggtcc

SEQ ID NO: 140369 - DNA, 25 bp, Canis familiaris
gtctccatccagttatgatcggtct

SEQ ID NO: 140370 - DNA, 25 bp, Canis familiaris
gtctctagccttcatgaggactctc

SEQ ID NO: 140371 - DNA, 25 bp, Canis familiaris
gtctcaaccattctatggatcttga

SEQ ID NO: 140372 - DNA, 25 bp, Canis familiaris
gtctgcaattttctagggctctaaa

SEQ ID NO: 140373 - DNA, 25 bp, Canis familiaris
gtctcatatttacatggggctccca

SEQ ID NO: 140374 - DNA, 25 bp, Canis familiaris
gtctagtttcagcatttgcctacct

SEQ ID NO: 140375 - DNA, 25 bp, Canis familiaris
gtctagttgacaatctttgcctttc

SEQ ID NO: 140376 - DNA, 25 bp, Canis familiaris
gtctattctacattttgggtattct

SEQ ID NO: 140377 - DNA, 25 bp, Canis familiaris
gtcttttgctaaatatgcccttttt

SEQ ID NO: 140378 - DNA, 25 bp, Canis familiaris
gtctttgtctattttctctttttga

SEQ ID NO: 140379 - DNA, 25 bp, Canis familiaris
gtctttcctacctctgtggtatgtg

SEQ ID NO: 140380 - DNA, 25 bp, Canis familiaris
gtctatatcctacgtcctgaagttt

SEQ ID NO: 140381 - DNA, 25 bp, Canis familiaris
gtgcttcttcaacccctgatagcac

SEQ ID NO: 140382 - DNA, 25 bp, Canis familiaris
gtcttctctcaatacactacaatca

SEQ ID NO: 140383 - DNA, 25 bp, Canis familiaris
gtctccgtcacacagatctaaatcc

SEQ ID NO: 140384 - DNA, 25 bp, Canis familiaris
gtctccgtcaaccagatctgaaatc

SEQ ID NO: 140385 - DNA, 25 bp, Canis familiaris
gtctcacattacccgaggacacatc

SEQ ID NO: 140386 - DNA, 25 bp, Canis familiaris
gtctctctctacacaaaacacactc

SEQ ID NO: 140387 - DNA, 25 bp, Canis familiaris
gtctctgtggtcaccaagtcaagat

SEQ ID NO: 140388 - DNA, 25 bp, Canis familiaris
gtcttgtggcatatacaaatattta

SEQ ID NO: 140389 - DNA, 25 bp, Canis familiaris
gtgcttgtgatgcctcttcaaaatt

SEQ ID NO: 140390 - DNA, 25 bp, Canis familiaris
gtcttgatgatccctctctggataa

SEQ ID NO: 140391 - DNA, 25 bp, Canis familiaris
gtctctgctattctttgtaaaacta

SEQ ID NO: 140392 - DNA, 25 bp, Canis familiaris
gtcttatttattttctatccacact

SEQ ID NO: 140393 - DNA, 25 bp, Canis familiaris
gtcttcatttttttctgtgctacat

SEQ ID NO: 140394 - DNA, 25 bp, Canis familiaris
gtcttctctaatattttatctctca

SEQ ID NO: 140395 - DNA, 25 bp, Canis familiaris
gtcgatgcctttgattttattcgca

SEQ ID NO: 140396 - DNA, 25 bp, Canis familiaris
gtctagactctttttctatagtaca

SEQ ID NO: 140397 - DNA, 25 bp, Canis familiaris
gtctcagccctggtttctgaggctg

SEQ ID NO: 140398 - DNA, 25 bp, Canis familiaris
gtctggccctgtaagttgaggatcc

SEQ ID NO: 140399 - DNA, 25 bp, Canis familiaris
gtctgtcgcaccagatgtcgaggca

SEQ ID NO: 140400 - DNA, 25 bp, Canis familiaris
gtctgggatcaaaagccaatgctga

SEQ ID NO: 140401 - DNA, 25 bp, Canis familiaris
gtctgttaaatgaatgtcatatgta

SEQ ID NO: 140402 - DNA, 25 bp, Canis familiaris
gtctgttaagagcgacatgttcaca

SEQ ID NO: 140403 - DNA, 25 bp, Canis familiaris
gtctttgtacagtgacaggccacac

SEQ ID NO: 140404 - DNA, 25 bp, Canis familiaris
gtctttgtaactcatcgaagcccag

SEQ ID NO: 140405 - DNA, 25 bp, Canis familiaris
gtctttgtaacttatcatcaaccca

SEQ ID NO: 140406 - DNA, 25 bp, Canis familiaris
gtctttctcaaacatcatcagcacc

SEQ ID NO: 140407 - DNA, 25 bp, Canis familiaris
gtcttattcatcaactggagtgcac

SEQ ID NO: 140408 - DNA, 25 bp, Canis familiaris
gtctctatcactcagccggagacca

SEQ ID NO: 140409 - DNA, 25 bp, Canis familiaris
gtctctgcctctggagtagaggacc

SEQ ID NO: 140410 - DNA, 25 bp, Canis familiaris
gtctcatgactagtgatgctgatag

SEQ ID NO: 140411 - DNA, 25 bp, Canis familiaris
gtctgcagttacaatggtagcatgt

SEQ ID NO: 140412 - DNA, 25 bp, Canis familiaris
gtctcagtctcagctggatgcagcc

SEQ ID NO: 140413 - DNA, 25 bp, Canis familiaris
gtctctgactcagagcagcagctca

SEQ ID NO: 140414 - DNA, 25 bp, Canis familiaris
gtcttgaccatggtcatgagtcatc

SEQ ID NO: 140415 - DNA, 25 bp, Canis familiaris
gtcttgcagaatcttggatcattaa

SEQ ID NO: 140416 - DNA, 25 bp, Canis familiaris
gtctcagctccacttgtggactcta

SEQ ID NO: 140417 - DNA, 25 bp, Canis familiaris
gtctctctgctgctgttgaagttac

SEQ ID NO: 140418 - DNA, 25 bp, Canis familiaris
gtcttcttgtggtgcacagattatc

SEQ ID NO: 140419 - DNA, 25 bp, Canis familiaris
gtctctttcgagtgccagtgtgaat

SEQ ID NO: 140420 - DNA, 25 bp, Canis familiaris
gtctcttgcccacggggattcagaa

SEQ ID NO: 140421 - DNA, 25 bp, Canis familiaris
gtctttgctccggagtttccagaac

SEQ ID NO: 140422 - DNA, 25 bp, Canis familiaris
gtcttgcttcacacaattctctaaa

SEQ ID NO: 140423 - DNA, 25 bp, Canis familiaris
gtcttctagtcaacaactcttcaaa

SEQ ID NO: 140424 - DNA, 25 bp, Canis familiaris
gtcttctgaatctccagtttccagg

SEQ ID NO: 140425 - DNA, 25 bp, Canis familiaris
gtctatatatatttacctttgccag

SEQ ID NO: 140426 - DNA, 25 bp, Canis familiaris
gtctatttctgccaaacctgtgtag

SEQ ID NO: 140427 - DNA, 25 bp, Canis familiaris
gtctctttctaattagccttgtcag

SEQ ID NO: 140428 - DNA, 25 bp, Canis familiaris
gtctctttctagaaactctttcaga

SEQ ID NO: 140429 - DNA, 25 bp, Canis familiaris
gtcttttccataaagcttttccact

SEQ ID NO: 140430 - DNA, 25 bp, Canis familiaris
gtcttgcaagttaaggctttcccct

SEQ ID NO: 140431 - DNA, 25 bp, Canis familiaris
gtctatcgtttacagctgtatcccc

SEQ ID NO: 140432 - DNA, 25 bp, Canis familiaris
gtctatgcagttgagttctcccacc

SEQ ID NO: 140433 - DNA, 25 bp, Canis familiaris
gtctgtagtgcagactttccacccc

SEQ ID NO: 140434 - DNA, 25 bp, Canis familiaris
gtctacagtcaggagtcccagcatc

SEQ ID NO: 140435 - DNA, 25 bp, Canis familiaris
gtctaagtcttgaatacacacacac

SEQ ID NO: 140436 - DNA, 25 bp, Canis familiaris
gtccttgtttgaatggagccacctg

SEQ ID NO: 140437 - DNA, 25 bp, Canis familiaris
gtcggggttgatagagcctccgtgc

SEQ ID NO: 140438 - DNA, 25 bp, Canis familiaris
gtctgatgtggtggatgctagcccg

SEQ ID NO: 140439 - DNA, 25 bp, Canis familiaris
gtctatatagttatggccggatttg

SEQ ID NO: 140440 - DNA, 25 bp, Canis familiaris
gtctacggatacatggctcgtttag

SEQ ID NO: 140441 - DNA, 25 bp, Canis familiaris
gtctcgagggacagggcgacttgag

SEQ ID NO: 140442 - DNA, 25 bp, Canis familiaris
gtctcaagcgtgtacagggcagcca

SEQ ID NO: 140443 - DNA, 25 bp, Canis familiaris
gtctcacatgctggtctcaggagca

SEQ ID NO: 140444 - DNA, 25 bp, Canis familiaris
gtctcatcactgagtggagagcctg

SEQ ID NO: 140445 - DNA, 25 bp, Canis familiaris
gtctcacctgcagaggaaagctgcg

SEQ ID NO: 140446 - DNA, 25 bp, Canis familiaris
gtctaccatgagcgcgtcaacacgc

SEQ ID NO: 140447 - DNA, 25 bp, Canis familiaris
gtctaacgagagggccatccaggct

SEQ ID NO: 140448 - DNA, 25 bp, Canis familiaris
gtctattagggggctatcacacctt

SEQ ID NO: 140449 - DNA, 25 bp, Canis familiaris
gtctactaattggctctaaccctgt

SEQ ID NO: 140450 - DNA, 25 bp, Canis familiaris
tgtcggcttcttgttagacccgtac

SEQ ID NO: 140451 - DNA, 25 bp, Canis familiaris
gtctgctttcttgtgaaacccgtac

SEQ ID NO: 140452 - DNA, 25 bp, Canis familiaris
gtctgctttcttgttaaacctcgta

SEQ ID NO: 140453 - DNA, 25 bp, Canis familiaris
gtctcttttcaaatgtacacacccc

SEQ ID NO: 140454 - DNA, 25 bp, Canis familiaris
gtctatgctttatatgtaatcaact

SEQ ID NO: 140455 - DNA, 25 bp, Canis familiaris
gtctgagcttggagtgttgtcccgc

SEQ ID NO: 140456 - DNA, 25 bp, Canis familiaris
gtctagtaggacctcttattctgcc

SEQ ID NO: 140457 - DNA, 25 bp, Canis familiaris
gtctaatttgaacctcttttcctca

SEQ ID NO: 140458 - DNA, 25 bp, Canis familiaris
gtcttcttttggcctttttgtgcca

SEQ ID NO: 140459 - DNA, 25 bp, Canis familiaris
gtcttctctttggaatgttttgtca

SEQ ID NO: 140460 - DNA, 25 bp, Canis familiaris
gtctaatctatgagaaattgttcca

SEQ ID NO: 140461 - DNA, 25 bp, Canis familiaris
gtctactgttcacgaaattctctgc

SEQ ID NO: 140462 - DNA, 25 bp, Canis familiaris
gtctactgtggggaacacagatctg

SEQ ID NO: 140463 - DNA, 25 bp, Canis familiaris
gtctactagtttgacatcagatcta

SEQ ID NO: 140464 - DNA, 25 bp, Canis familiaris
gtctatctcattcactacacaaata

SEQ ID NO: 140465 - DNA, 25 bp, Canis familiaris
gtctatactacccaaagcaatctac

SEQ ID NO: 140466 - DNA, 25 bp, Canis familiaris
gtctaagtaatccaaatgcctcata

SEQ ID NO: 140467 - DNA, 25 bp, Canis familiaris
gtctttatataccaacttctctgaa

SEQ ID NO: 140468 - DNA, 25 bp, Canis familiaris
gtcgtgaattcccaagtccgtgaca

SEQ ID NO: 140469 - DNA, 25 bp, Canis familiaris
gtcgtcaacgtcgcgatccgcgacg

SEQ ID NO: 140470 - DNA, 25 bp, Canis familiaris
gtcgtctgacggtccgtctaggggg

SEQ ID NO: 140471 - DNA, 25 bp, Canis familiaris
gggtcagtagaaacttccaggggag

SEQ ID NO: 140472 - DNA, 25 bp, Canis familiaris
gtgtccgatagatcgttcgggccga

SEQ ID NO: 140473 - DNA, 25 bp, Canis familiaris
gtgtgcccacacgcgtttgtgggcc

SEQ ID NO: 140474 - DNA, 25 bp, Canis familiaris
gtcttcgaccgggtttggtgagccg

SEQ ID NO: 140475 - DNA, 25 bp, Canis familiaris
gtcggccccagggatactaggactg

SEQ ID NO: 140476 - DNA, 25 bp, Canis familiaris
gtgcccacccagcttagttgaaggg

SEQ ID NO: 140477 - DNA, 25 bp, Canis familiaris
gtctccccccgaggatgggaaggct

SEQ ID NO: 140478 - DNA, 25 bp, Canis familiaris
gtctcagcagccagggttgggaagg

SEQ ID NO: 140479 - DNA, 25 bp, Canis familiaris
gtcttagccagggttcatgttgcac

SEQ ID NO: 140480 - DNA, 25 bp, Canis familiaris
gtctgctaccaggagagtatttgca

SEQ ID NO: 140481 - DNA, 25 bp, Canis familiaris
gtctattcactgacagccttgttca

SEQ ID NO: 140482 - DNA, 25 bp, Canis familiaris
gtctttaatgcttctttgtcacatc

SEQ ID NO: 140483 - DNA, 25 bp, Canis familiaris
gtcttaaatgcttctagcttcctaa

SEQ ID NO: 140484 - DNA, 25 bp, Canis familiaris
gtcttacactgctaaaatatcacca

SEQ ID NO: 140485 - DNA, 25 bp, Canis familiaris
gtcttcacgctgggtacaacccaga

SEQ ID NO: 140486 - DNA, 25 bp, Canis familiaris
gtctcaatcctgggtcagaatctcc

SEQ ID NO: 140487 - DNA, 25 bp, Canis familiaris
gtctcataggctgaggcaacacccc

SEQ ID NO: 140488 - DNA, 25 bp, Canis familiaris
gtctcagtgtgtagagaccaccccc

SEQ ID NO: 140489 - DNA, 25 bp, Canis familiaris
gtctactgtattgggcagcacatgc

SEQ ID NO: 140490 - DNA, 25 bp, Canis familiaris
gtctatgtgctatgcccatgcagag

SEQ ID NO: 140491 - DNA, 25 bp, Canis familiaris
gtctattgtgcaccgctacatgagc

SEQ ID NO: 140492 - DNA, 25 bp, Canis familiaris
gtctcatatgctctcgaaagatcct

SEQ ID NO: 140493 - DNA, 25 bp, Canis familiaris
gtcttagtgtccgtagtgatcctgg

SEQ ID NO: 140494 - DNA, 25 bp, Canis familiaris
gtctaagtgtgcggtcaggacgccg

SEQ ID NO: 140495 - DNA, 25 bp, Canis familiaris
gtcttcagatgccagctcctggagc

SEQ ID NO: 140496 - DNA, 25 bp, Canis familiaris
gtcttaatgcaagttctgtgatttc

SEQ ID NO: 140497 - DNA, 25 bp, Canis familiaris
gtcttaacagcattcttgtatttca

SEQ ID NO: 140498 - DNA, 25 bp, Canis familiaris
gtctagatacagtactttcttccct

SEQ ID NO: 140499 - DNA, 25 bp, Canis familiaris
gtctcagaacaacctcttttcagcc

SEQ ID NO: 140500 - DNA, 25 bp, Canis familiaris
gtctcagggtatactctttacgata

SEQ ID NO: 140501 - DNA, 25 bp, Canis familiaris
gtctcccgcagaaccttctcgggag

SEQ ID NO: 140502 - DNA, 25 bp, Canis familiaris
gtctctttgaaaccttttgtggaat

SEQ ID NO: 140503 - DNA, 25 bp, Canis familiaris
gtctcttatagatgtttttggattt

SEQ ID NO: 140504 - DNA, 25 bp, Canis familiaris
gtctttatattcctgactttaattt

SEQ ID NO: 140505 - DNA, 25 bp, Canis familiaris
gtctttacatttgactggatagata

SEQ ID NO: 140506 - DNA, 25 bp, Canis familiaris
gtcgtaatatttaaatggccttaga

SEQ ID NO: 140507 - DNA, 25 bp, Canis familiaris
gtctttatttcttatttccttctga

SEQ ID NO: 140508 - DNA, 25 bp, Canis familiaris
gtctttggtatttatctcctcttca

SEQ ID NO: 140509 - DNA, 25 bp, Canis familiaris
gtctttgtgtcacactgctcattgc

SEQ ID NO: 140510 - DNA, 25 bp, Canis familiaris
gtctctgtattacacctcaacgtac

SEQ ID NO: 140511 - DNA, 25 bp, Canis familiaris
gtctctattttttcgtaactttcat

SEQ ID NO: 140512 - DNA, 25 bp, Canis familiaris
gtctcttttgtttgatggttgcttt

SEQ ID NO: 140513 - DNA, 25 bp, Canis familiaris
gtctcttctccttatgggtagggct

SEQ ID NO: 140514 - DNA, 25 bp, Canis familiaris
gtctctcttctccatgagggtaaac

SEQ ID NO: 140515 - DNA, 25 bp, Canis familiaris
gtctgcttcttgggaggctggaaaa

SEQ ID NO: 140516 - DNA, 25 bp, Canis familiaris
gtctctcctatctgagcatgctgga

SEQ ID NO: 140517 - DNA, 25 bp, Canis familiaris
gtctacctcttccacatgcaggagg

SEQ ID NO: 140518 - DNA, 25 bp, Canis familiaris
gtctacctgcaggccacagacaaga

SEQ ID NO: 140519 - DNA, 25 bp, Canis familiaris
gtctctctcatagtctccaggaaga

SEQ ID NO: 140520 - DNA, 25 bp, Canis familiaris
gtctcttcaacaatccaggggttcc

SEQ ID NO: 140521 - DNA, 25 bp, Canis familiaris
gtctctgagccggtggcaggtggtt

SEQ ID NO: 140522 - DNA, 25 bp, Canis familiaris
gtctcattccctagtatttggatat

SEQ ID NO: 140523 - DNA, 25 bp, Canis familiaris
gtctttggctcatttcatgattgga

SEQ ID NO: 140524 - DNA, 25 bp, Canis familiaris
gtctttgagtgttctgtgtgcatgt

SEQ ID NO: 140525 - DNA, 25 bp, Canis familiaris
gtctttcctctactgatggatattg

SEQ ID NO: 140526 - DNA, 25 bp, Canis familiaris
gtctttgccactttgatgtcatttg

SEQ ID NO: 140527 - DNA, 25 bp, Canis familiaris
gtctttctcatcttctagtatcttt

SEQ ID NO: 140528 - DNA, 25 bp, Canis familiaris
gtcttttcatggaatagatagattg

SEQ ID NO: 140529 - DNA, 25 bp, Canis familiaris
gtctgatttaggacaaacagcttca

SEQ ID NO: 140530 - DNA, 25 bp, Canis familiaris
gtctgtcttccgaggggtagcagtg

SEQ ID NO: 140531 - DNA, 25 bp, Canis familiaris
gtcttttccgggttttcatcgatgt

SEQ ID NO: 140532 - DNA, 25 bp, Canis familiaris
gtctttttctgttgaatttcatcct

SEQ ID NO: 140533 - DNA, 25 bp, Canis familiaris
gtctctttttggtaatgataaacgt

SEQ ID NO: 140534 - DNA, 25 bp, Canis familiaris
gtcttttgtttccatttcagaagcc

SEQ ID NO: 140535 - DNA, 25 bp, Canis familiaris
gtctttctgtctggtcatttcagtg

SEQ ID NO: 140536 - DNA, 25 bp, Canis familiaris
gtctgtttgtcattacatttcttgg

SEQ ID NO: 140537 - DNA, 25 bp, Canis familiaris
gtcttttatcattgcacttactctg

SEQ ID NO: 140538 - DNA, 25 bp, Canis familiaris
gtcttttatcagttttatttcaggg

SEQ ID NO: 140539 - DNA, 25 bp, Canis familiaris
gtctgttttatattttgtaccgagg

SEQ ID NO: 140540 - DNA, 25 bp, Canis familiaris
gtctttgtaattattgaatcgtgag

SEQ ID NO: 140541 - DNA, 25 bp, Canis familiaris
gtcttttactctttcagaattctga

SEQ ID NO: 140542 - DNA, 25 bp, Canis familiaris
gtcttattactttgatcgcgatgat

SEQ ID NO: 140543 - DNA, 25 bp, Canis familiaris
gtcttattactttgatcgcgatgat

SEQ ID NO: 140544 - DNA, 25 bp, Canis familiaris
gtctattactttggatctcgatgat

SEQ ID NO: 140545 - DNA, 25 bp, Canis familiaris
gtctgtgctgacagtggaccgtgtc

SEQ ID NO: 140546 - DNA, 25 bp, Canis familiaris
gtctagagaccgtggtcgtggcggc

SEQ ID NO: 140547 - DNA, 25 bp, Canis familiaris
gtctaggattccttggctggtggtc

SEQ ID NO: 140548 - DNA, 25 bp, Canis familiaris
gtgctatgtgattccattggacact

SEQ ID NO: 140549 - DNA, 25 bp, Canis familiaris
gtctgaggcatgtctctggagaagc

SEQ ID NO: 140550 - DNA, 25 bp, Canis familiaris
gtctcaagcagactctgcgccaacc

SEQ ID NO: 140551 - DNA, 25 bp, Canis familiaris
gtctcactgctgtttccatataagc

SEQ ID NO: 140552 - DNA, 25 bp, Canis familiaris
gtctcctctgacgctattcaaaaga

SEQ ID NO: 140553 - DNA, 25 bp, Canis familiaris
gtctgaatgtctgccttctacaaag

SEQ ID NO: 140554 - DNA, 25 bp, Canis familiaris
gtctcaatgaggtctgcttcttaca

SEQ ID NO: 140555 - DNA, 25 bp, Canis familiaris
gtctaactgtgttcttcttcaagga

SEQ ID NO: 140556 - DNA, 25 bp, Canis familiaris
gtctgctatattcaaaccctgaggc

SEQ ID NO: 140557 - DNA, 25 bp, Canis familiaris
gtctcttttgtggcacaccacattg

SEQ ID NO: 140558 - DNA, 25 bp, Canis familiaris
gtctttcttgtggccacttacagtg

SEQ ID NO: 140559 - DNA, 25 bp, Canis familiaris
gtcttttcttccggatcaatcaggg

SEQ ID NO: 140560 - DNA, 25 bp, Canis familiaris
gtctacatttgattccgacttcaga

SEQ ID NO: 140561 - DNA, 25 bp, Canis familiaris
gtctcgattctgttcttacattagc

SEQ ID NO: 140562 - DNA, 25 bp, Canis familiaris
gtctctgttttgacatttcctagta

SEQ ID NO: 140563 - DNA, 25 bp, Canis familiaris
gtctcagatttggccattttaacta

SEQ ID NO: 140564 - DNA, 25 bp, Canis familiaris
gtctgagtctaggaattatataatc

SEQ ID NO: 140565 - DNA, 25 bp, Canis familiaris
gtctgagctgactctgttattgaag

SEQ ID NO: 140566 - DNA, 25 bp, Canis familiaris
gtctgagtaccagccttctaagaac

SEQ ID NO: 140567 - DNA, 25 bp, Canis familiaris
gtctttcccataattactatagaat

SEQ ID NO: 140568 - DNA, 25 bp, Canis familiaris
gtcccaccacaagtgtcctgaagaa

SEQ ID NO: 140569 - DNA, 25 bp, Canis familiaris
gtcccactgaacctgtcgtaaacag

SEQ ID NO: 140570 - DNA, 25 bp, Canis familiaris
tgtccaaccaaacctccaaaacagg

SEQ ID NO: 140571 - DNA, 25 bp, Canis familiaris
gtccacaaacacactgctagaaaca

SEQ ID NO: 140572 - DNA, 25 bp, Canis familiaris
gtctcacacaacggtctcttgtata

SEQ ID NO: 140573 - DNA, 25 bp, Canis familiaris
gtctcaagcagtgttctcaagttca

SEQ ID NO: 140574 - DNA, 25 bp, Canis familiaris
gtctcttagttcactgcatggttcc

SEQ ID NO: 140575 - DNA, 25 bp, Canis familiaris
gtctctgtcagttttctcatactgc

SEQ ID NO: 140576 - DNA, 25 bp, Canis familiaris
gtctatatcgacttttatattccgg

SEQ ID NO: 140577 - DNA, 25 bp, Canis familiaris
gtcttatctgcagtttttgtgtcct

SEQ ID NO: 140578 - DNA, 25 bp, Canis familiaris
gtcttttgctctgctgtgattttct

SEQ ID NO: 140579 - DNA, 25 bp, Canis familiaris
gtcttagtggcttctgtttcattgt

SEQ ID NO: 140580 - DNA, 25 bp, Canis familiaris
gtctcaacaggtttgtgttcactta

SEQ ID NO: 140581 - DNA, 25 bp, Canis familiaris
gtccaaatgccctgtgtttcagata

SEQ ID NO: 140582 - DNA, 25 bp, Canis familiaris
gtctcagaactcgtttgtgtccaat

SEQ ID NO: 140583 - DNA, 25 bp, Canis familiaris
gtctatgtaccattttgctaccagt

SEQ ID NO: 140584 - DNA, 25 bp, Canis familiaris
gtctaatgagtccttttactatgta

SEQ ID NO: 140585 - DNA, 25 bp, Canis familiaris
gtctactggtcccatgtctattact

SEQ ID NO: 140586 - DNA, 25 bp, Canis familiaris
gtctgtgcatgtgttagttattact

SEQ ID NO: 140587 - DNA, 25 bp, Canis familiaris
gtctgtgtatgcgtgtgggtatgta

SEQ ID NO: 140588 - DNA, 25 bp, Canis familiaris
gtctcagcttgcggaggtggaggag

SEQ ID NO: 140589 - DNA, 25 bp, Canis familiaris
gtctcagcctgggattgggcacgtg

SEQ ID NO: 140590 - DNA, 25 bp, Canis familiaris
gtctcagcctgggatcagggcttct

SEQ ID NO: 140591 - DNA, 25 bp, Canis familiaris
gtctcaccgagagcacgtgtttatg

SEQ ID NO: 140592 - DNA, 25 bp, Canis familiaris
gtctcatttgagaagggtgtttgat

SEQ ID NO: 140593 - DNA, 25 bp, Canis familiaris
gtctctctgtggaccagactgttta

SEQ ID NO: 140594 - DNA, 25 bp, Canis familiaris
gtctccagtcaagagtcatgtctgc

SEQ ID NO: 140595 - DNA, 25 bp, Canis familiaris
gtcccaacaaaagtctgtggttcct

SEQ ID NO: 140596 - DNA, 25 bp, Canis familiaris
gtctccaaaaatggcctttattcca

SEQ ID NO: 140597 - DNA, 25 bp, Canis familiaris
gtcccatagttaggcttttttctct

SEQ ID NO: 140598 - DNA, 25 bp, Canis familiaris
gtgccgaactttgatttctgtggtc

SEQ ID NO: 140599 - DNA, 25 bp, Canis familiaris
gtctagctacatactttttttggtc

SEQ ID NO: 140600 - DNA, 25 bp, Canis familiaris
gtctcagctaaccatatttttcttg

SEQ ID NO: 140601 - DNA, 25 bp, Canis familiaris
gtctccctaaattctttcttctgaa

SEQ ID NO: 140602 - DNA, 25 bp, Canis familiaris
gtctcactattaatgatttctcccg

SEQ ID NO: 140603 - DNA, 25 bp, Canis familiaris
gtctatatactattattactcccaa

SEQ ID NO: 140604 - DNA, 25 bp, Canis familiaris
gtctgttgactgtaatcttgctgct

SEQ ID NO: 140605 - DNA, 25 bp, Canis familiaris
gtctgtccgcattaacttctgtgcg

SEQ ID NO: 140606 - DNA, 25 bp, Canis familiaris
gtctccctgctgaaattgggtgaga

SEQ ID NO: 140607 - DNA, 25 bp, Canis familiaris
gtcgaacttgactatctagaggaag

SEQ ID NO: 140608 - DNA, 25 bp, Canis familiaris
gtcggagcttacactcaattgccag

SEQ ID NO: 140609 - DNA, 25 bp, Canis familiaris
gtcgggttacaataatagcatttga

SEQ ID NO: 140610 - DNA, 25 bp, Canis familiaris
gtccctttccaagcaaagcttctca

SEQ ID NO: 140611 - DNA, 25 bp, Canis familiaris
gtcgcattcgtcgatatacaacacg

SEQ ID NO: 140612 - DNA, 25 bp, Canis familiaris
gtgcagcggcgggaaaccaaggtca

SEQ ID NO: 140613 - DNA, 25 bp, Canis familiaris
gtccaggaagaaaaccaagagatca

SEQ ID NO: 140614 - DNA, 25 bp, Canis familiaris
tttctagaaataatacccaagtcat

SEQ ID NO: 140615 - DNA, 25 bp, Canis familiaris
gtctctagaaatgaaacccgaataa

SEQ ID NO: 140616 - DNA, 25 bp, Canis familiaris
gtcctataaaggcaatcccaaacaa

SEQ ID NO: 140617 - DNA, 25 bp, Canis familiaris
gtccctaaaggccacttcctatatc

SEQ ID NO: 140618 - DNA, 25 bp, Canis familiaris
gtcccaaaaggctcccttatcttga

SEQ ID NO: 140619 - DNA, 25 bp, Canis familiaris
gtcccaaaggccacaagcctgttgg

SEQ ID NO: 140620 - DNA, 25 bp, Canis familiaris
gtctcctagaacagctcaagccatg

SEQ ID NO: 140621 - DNA, 25 bp, Canis familiaris
gtctcctgagactggccaagttgaa

SEQ ID NO: 140622 - DNA, 25 bp, Canis familiaris
gtctcgtagactggtcacggttcaa

SEQ ID NO: 140623 - DNA, 25 bp, Canis familiaris
gtccgtaactcttacagtcctatcg

SEQ ID NO: 140624 - DNA, 25 bp, Canis familiaris
gtccgaacacaatccattgccaatc

SEQ ID NO: 140625 - DNA, 25 bp, Canis familiaris
gtcgtggaccaatgcagcattccac

SEQ ID NO: 140626 - DNA, 25 bp, Canis familiaris
gtctgtggaacagggagcagggatc

SEQ ID NO: 140627 - DNA, 25 bp, Canis familiaris
gtcgtggtcaagagcactgggtcct

SEQ ID NO: 140628 - DNA, 25 bp, Canis familiaris
gtcggttcagcagagcatcatgtgg

SEQ ID NO: 140629 - DNA, 25 bp, Canis familiaris
gtcggctagcagcagacactggctg

SEQ ID NO: 140630 - DNA, 25 bp, Canis familiaris
gtcgtggagcatcatgccacacact

SEQ ID NO: 140631 - DNA, 25 bp, Canis familiaris
gtctgtctgagcttatgaacacccc

SEQ ID NO: 140632 - DNA, 25 bp, Canis familiaris
gtctgagtggcttttacatccccaa

SEQ ID NO: 140633 - DNA, 25 bp, Canis familiaris
gtctgtttacttgagatcacccata

SEQ ID NO: 140634 - DNA, 25 bp, Canis familiaris
gtctgctttttagagatcccaactt

SEQ ID NO: 140635 - DNA, 25 bp, Canis familiaris
gtctcttctttagaatattcacttt

SEQ ID NO: 140636 - DNA, 25 bp, Canis familiaris
gtctcttgctttaaaattgtccctt

SEQ ID NO: 140637 - DNA, 25 bp, Canis familiaris
gtctgtttttagatttctctccttt

SEQ ID NO: 140638 - DNA, 25 bp, Canis familiaris
gtcgtttgtttgtcttacgcttttg

SEQ ID NO: 140639 - DNA, 25 bp, Canis familiaris
gtcgttgttgtttctaactgatgtt

SEQ ID NO: 140640 - DNA, 25 bp, Canis familiaris
gtcgatttcgttttacaggatttgt

SEQ ID NO: 140641 - DNA, 25 bp, Canis familiaris
gtcgaatccttcccttcaggataat

SEQ ID NO: 140642 - DNA, 25 bp, Canis familiaris
gtctagttttagccaccagtgattt

SEQ ID NO: 140643 - DNA, 25 bp, Canis familiaris
gtctcctgtgtttggaccaatttgt

SEQ ID NO: 140644 - DNA, 25 bp, Canis familiaris
gtctctcttctatgggacagttatt

SEQ ID NO: 140645 - DNA, 25 bp, Canis familiaris
gtctctatgtgaatactggacagtt

SEQ ID NO: 140646 - DNA, 25 bp, Canis familiaris
gtctcttggtgggtctgaatgtcat

SEQ ID NO: 140647 - DNA, 25 bp, Canis familiaris
gtctttctctgggtctcagatgttc

SEQ ID NO: 140648 - DNA, 25 bp, Canis familiaris
gtctttctaggcttcaaatttcttc

SEQ ID NO: 140649 - DNA, 25 bp, Canis familiaris
gtctcttctactgcaataattgttt

SEQ ID NO: 140650 - DNA, 25 bp, Canis familiaris
gtctattaatccactccatgagttt

SEQ ID NO: 140651 - DNA, 25 bp, Canis familiaris
gtctaataaggcactctccgttagt

SEQ ID NO: 140652 - DNA, 25 bp, Canis familiaris
gtgctaaaatcgagtctcctctgtc

SEQ ID NO: 140653 - DNA, 25 bp, Canis familiaris
gtctttgatatttttcccatgtgtc

SEQ ID NO: 140654 - DNA, 25 bp, Canis familiaris
gtctttctatcttctatcctataaa

SEQ ID NO: 140655 - DNA, 25 bp, Canis familiaris
gtctttcctctgctgcatttataaa

SEQ ID NO: 140656 - DNA, 25 bp, Canis familiaris
gtctcttacaacctcattaatatac

SEQ ID NO: 140657 - DNA, 25 bp, Canis familiaris
gtcctataacaccctcaggcataag

SEQ ID NO: 140658 - DNA, 25 bp, Canis familiaris
gtctctacaacccctgtagcaagag

SEQ ID NO: 140659 - DNA, 25 bp, Canis familiaris
gtctcccaatcctcgttaaggtgga

SEQ ID NO: 140660 - DNA, 25 bp, Canis familiaris
gtctgcccccttgtgttacaggcag

SEQ ID NO: 140661 - DNA, 25 bp, Canis familiaris
gtctttgtcgttgttcatactgggg

SEQ ID NO: 140662 - DNA, 25 bp, Canis familiaris
gtcgtttcctttgacaactgcggga

SEQ ID NO: 140663 - DNA, 25 bp, Canis familiaris
gtctacttgctcatttactactcag

SEQ ID NO: 140664 - DNA, 25 bp, Canis familiaris
gtcgactctcctataaatatcactg

SEQ ID NO: 140665 - DNA, 25 bp, Canis familiaris
gtgcagacccatcttcaagtaattg

SEQ ID NO: 140666 - DNA, 25 bp, Canis familiaris
gtctgagccctgtgtcatcaggcaa

SEQ ID NO: 140667 - DNA, 25 bp, Canis familiaris
gtcgatcaccagattgccaagctga

SEQ ID NO: 140668 - DNA, 25 bp, Canis familiaris
gtcgatagtgagatactgccgcata

SEQ ID NO: 140669 - DNA, 25 bp, Canis familiaris
gtctatttaggtctgcccattttta

SEQ ID NO: 140670 - DNA, 25 bp, Canis familiaris
gtctatttgatgctattgtctcttg

SEQ ID NO: 140671 - DNA, 25 bp, Canis familiaris
gtctgcgtcagatctattgttttgt

SEQ ID NO: 140672 - DNA, 25 bp, Canis familiaris
gtctcgtcgagtttttctttggtgc

SEQ ID NO: 140673 - DNA, 25 bp, Canis familiaris
gtctacctgactctttctatggtga

SEQ ID NO: 140674 - DNA, 25 bp, Canis familiaris
gtctatcctatgctttggatgggga

SEQ ID NO: 140675 - DNA, 25 bp, Canis familiaris
gtctcacctcagatattttgggggt

SEQ ID NO: 140676 - DNA, 25 bp, Canis familiaris
gtctcttatcagttggtgcttgggg

SEQ ID NO: 140677 - DNA, 25 bp, Canis familiaris
gtctttgtcagtaggtgtctcttca

SEQ ID NO: 140678 - DNA, 25 bp, Canis familiaris
gtctcatttcagttcctggagttca

SEQ ID NO: 140679 - DNA, 25 bp, Canis familiaris
gtcgatccacgctttgtgggtgtag

SEQ ID NO: 140680 - DNA, 25 bp, Canis familiaris
gtcgaccagtcttctggggactagg

SEQ ID NO: 140681 - DNA, 25 bp, Canis familiaris
gtctcagtccctggctggggaaagg

SEQ ID NO: 140682 - DNA, 25 bp, Canis familiaris
gtctagtctgcttttgtgtggaaca

SEQ ID NO: 140683 - DNA, 25 bp, Canis familiaris
gtctagatctcaactcgtagggcac

SEQ ID NO: 140684 - DNA, 25 bp, Canis familiaris
gtctatgtctgcaccgtgagcaacc

SEQ ID NO: 140685 - DNA, 25 bp, Canis familiaris
gtctatgacatcgctcaggtcaacc

SEQ ID NO: 140686 - DNA, 25 bp, Canis familiaris
gtctgtaagcctgcaggtcaatcgc

SEQ ID NO: 140687 - DNA, 25 bp, Canis familiaris
gtctctctccaatgaagtcagattc

SEQ ID NO: 140688 - DNA, 25 bp, Canis familiaris
gtctcccccaggaagtcagaaacca

SEQ ID NO: 140689 - DNA, 25 bp, Canis familiaris
gtctcactcccatggagtcactaag

SEQ ID NO: 140690 - DNA, 25 bp, Canis familiaris
gtctgaagcccatagttcaataggt

SEQ ID NO: 140691 - DNA, 25 bp, Canis familiaris
gtctgcccaccatcagtgagaagag

SEQ ID NO: 140692 - DNA, 25 bp, Canis familiaris
gtctgaacagcgtccagtgcaagag

SEQ ID NO: 140693 - DNA, 25 bp, Canis familiaris
gtctggcagcaggtgctttcaagca

SEQ ID NO: 140694 - DNA, 25 bp, Canis familiaris
gtctggcacaaaatccttcacttca

SEQ ID NO: 140695 - DNA, 25 bp, Canis familiaris
gtcggccagaagttcgtggtgctgc

SEQ ID NO: 140696 - DNA, 25 bp, Canis familiaris
gtcgtccaacagatcgacgcggact

SEQ ID NO: 140697 - DNA, 25 bp, Canis familiaris
gtcggagactcatctcgacgggact

SEQ ID NO: 140698 - DNA, 25 bp, Canis familiaris
gtctaggccaagcctggcctgggac

SEQ ID NO: 140699 - DNA, 25 bp, Canis familiaris
gtctatgtgatcatccaggtctggg

SEQ ID NO: 140700 - DNA, 25 bp, Canis familiaris
gtctatggcttcaacatgtcttgga

SEQ ID NO: 140701 - DNA, 25 bp, Canis familiaris
gtctatccttgcatgatttgtggaa

SEQ ID NO: 140702 - DNA, 25 bp, Canis familiaris
gtctctccatgtctgttttgcatga

SEQ ID NO: 140703 - DNA, 25 bp, Canis familiaris
gtctatctcatcattcttgttgcaa

SEQ ID NO: 140704 - DNA, 25 bp, Canis familiaris
gtctagctcatatttcaggtcccaa

SEQ ID NO: 140705 - DNA, 25 bp, Canis familiaris
gtctagtatgcatatctttccctga

SEQ ID NO: 140706 - DNA, 25 bp, Canis familiaris
gtctagtgttaactcatcttttgat

SEQ ID NO: 140707 - DNA, 25 bp, Canis familiaris
gtctcagtaaagatctctgtttctt

SEQ ID NO: 140708 - DNA, 25 bp, Canis familiaris
gtctcaggagaaggtttgtgtttgt

SEQ ID NO: 140709 - DNA, 25 bp, Canis familiaris
gtctgggaaacacctgtgtgtgtgt

SEQ ID NO: 140710 - DNA, 25 bp, Canis familiaris
gtctgaggtgattcagtcctgcctg

SEQ ID NO: 140711 - DNA, 25 bp, Canis familiaris
gtctgggctgtgtcaagatctctgc

SEQ ID NO: 140712 - DNA, 25 bp, Canis familiaris
gtctctggctaatgaacttgccctt

SEQ ID NO: 140713 - DNA, 25 bp, Canis familiaris
gtcggagtagtgtcaatcttccctt

SEQ ID NO: 140714 - DNA, 25 bp, Canis familiaris
gtccaggtcagagagagcttccctc

SEQ ID NO: 140715 - DNA, 25 bp, Canis familiaris
gtctgaggatcgtgaccctcatcgc

SEQ ID NO: 140716 - DNA, 25 bp, Canis familiaris
gtctgaggatcgtgaccctcatcgc

SEQ ID NO: 140717 - DNA, 25 bp, Canis familiaris
gtctggagactgcaaggcctacagc

SEQ ID NO: 140718 - DNA, 25 bp, Canis familiaris
gtctgggacagccactgaacttcag

SEQ ID NO: 140719 - DNA, 25 bp, Canis familiaris
gtctggaggagttctacgcactctg

SEQ ID NO: 140720 - DNA, 25 bp, Canis familiaris
gtctgagagaagaaccagtaccccg

SEQ ID NO: 140721 - DNA, 25 bp, Canis familiaris
tgtctacgtcctgccagtagtacca

SEQ ID NO: 140722 - DNA, 25 bp, Canis familiaris
gtctaaggttgcgcagtatgttcac

SEQ ID NO: 140723 - DNA, 25 bp, Canis familiaris
gtgctaatgtttggccagtggctgt

SEQ ID NO: 140724 - DNA, 25 bp, Canis familiaris
gtctcaacttggggcttggtgtggt

SEQ ID NO: 140725 - DNA, 25 bp, Canis familiaris
gtccaaggggctccgtggttaactg

SEQ ID NO: 140726 - DNA, 25 bp, Canis familiaris
tcccgtggggggaggtgtacattgc

SEQ ID NO: 140727 - DNA, 25 bp, Canis familiaris
gtcgggggagggagaggtagtagcg

SEQ ID NO: 140728 - DNA, 25 bp, Canis familiaris
gtcggcggcgaaggagggaggaaag

SEQ ID NO: 140729 - DNA, 25 bp, Canis familiaris
gtctggggcctctggggagaaggat

SEQ ID NO: 140730 - DNA, 25 bp, Canis familiaris
gtccgggccctatgagggactggag

SEQ ID NO: 140731 - DNA, 25 bp, Canis familiaris
gtcgtcggacgattacggtccgtga

SEQ ID NO: 140732 - DNA, 25 bp, Canis familiaris
gtcccaggaggcaccaaatccctga

SEQ ID NO: 140733 - DNA, 25 bp, Canis familiaris
gtcccaagagaaatcccaattacta

SEQ ID NO: 140734 - DNA, 25 bp, Canis familiaris
gtcccagattacactactatttctg

SEQ ID NO: 140735 - DNA, 25 bp, Canis familiaris
gtcgcacaactactgactgagccat

SEQ ID NO: 140736 - DNA, 25 bp, Canis familiaris
gtcgacaaggaccacgatctcattc

SEQ ID NO: 140737 - DNA, 25 bp, Canis familiaris
gtctaggggactaccatctggatgc

SEQ ID NO: 140738 - DNA, 25 bp, Canis familiaris
gtctacgtggaggagctgattgggc

SEQ ID NO: 140739 - DNA, 25 bp, Canis familiaris
gtctacatgctggtgggcttgttgc

SEQ ID NO: 140740 - DNA, 25 bp, Canis familiaris
gtctctgagctcacaggatttcctg

SEQ ID NO: 140741 - DNA, 25 bp, Canis familiaris
gtctctggataaggttcctatgctg

SEQ ID NO: 140742 - DNA, 25 bp, Canis familiaris
gtctctgagactgttttcttgctgg

SEQ ID NO: 140743 - DNA, 25 bp, Canis familiaris
gtctcataggtctgtaatttgtcaa

SEQ ID NO: 140744 - DNA, 25 bp, Canis familiaris
gtctcagactcttttaattattgca

SEQ ID NO: 140745 - DNA, 25 bp, Canis familiaris
gtctaattgcttttagcttgcttga

SEQ ID NO: 140746 - DNA, 25 bp, Canis familiaris
gtctagtatttcctgagttcttgag

SEQ ID NO: 140747 - DNA, 25 bp, Canis familiaris
gtctgttgctctccggaattttagc

SEQ ID NO: 140748 - DNA, 25 bp, Canis familiaris
gtctactgcattcagagaaacccag

SEQ ID NO: 140749 - DNA, 25 bp, Canis familiaris
gtctcgtctcatccagtgaaaggca

SEQ ID NO: 140750 - DNA, 25 bp, Canis familiaris
gtctggcttatgctgtgaacccaac

SEQ ID NO: 140751 - DNA, 25 bp, Canis familiaris
gtctgcctgtgacgttcaactagtg

SEQ ID NO: 140752 - DNA, 25 bp, Canis familiaris
gtctctgagaggcttcagtctccag

SEQ ID NO: 140753 - DNA, 25 bp, Canis familiaris
gtcctgttgcggtatagtcccgaac

SEQ ID NO: 140754 - DNA, 25 bp, Canis familiaris
gtctcggatccgttgagatcaccgg

SEQ ID NO: 140755 - DNA, 25 bp, Canis familiaris
gtctcgtgagacgtgggacctcaga

SEQ ID NO: 140756 - DNA, 25 bp, Canis familiaris
gtcggtggaccctgacgatccaccg

SEQ ID NO: 140757 - DNA, 25 bp, Canis familiaris
gtcggggagaacaggaacgcaccgg

SEQ ID NO: 140758 - DNA, 25 bp, Canis familiaris
gtcggggtgcaattctgggacagac

SEQ ID NO: 140759 - DNA, 25 bp, Canis familiaris
gtctctgggacatcctgtggtccca

SEQ ID NO: 140760 - DNA, 25 bp, Canis familiaris
gtctctcggtgcagtgtgtattcct

SEQ ID NO: 140761 - DNA, 25 bp, Canis familiaris
gtctctggcagtcttattttccatg

SEQ ID NO: 140762 - DNA, 25 bp, Canis familiaris
gtctgctgggatcttatttgccctt

SEQ ID NO: 140763 - DNA, 25 bp, Canis familiaris
gtctctcggacacttgagattgccc

SEQ ID NO: 140764 - DNA, 25 bp, Canis familiaris
gtctcttgtgtacacagactctcct

SEQ ID NO: 140765 - DNA, 25 bp, Canis familiaris
gtctctgctgtttccaaactggact

SEQ ID NO: 140766 - DNA, 25 bp, Canis familiaris
gtctcctcggcactaatgatctgga

SEQ ID NO: 140767 - DNA, 25 bp, Canis familiaris
gtctcaccggcacttagaggaaatt

SEQ ID NO: 140768 - DNA, 25 bp, Canis familiaris
gtctcaccgatttccagggtcaaca

SEQ ID NO: 140769 - DNA, 25 bp, Canis familiaris
gtctagacaacatcctgggcagcaa

SEQ ID NO: 140770 - DNA, 25 bp, Canis familiaris
gtcggaccagcgtccagctggaaga

SEQ ID NO: 140771 - DNA, 25 bp, Canis familiaris
gtctgaacaagggggctggggcacc

SEQ ID NO: 140772 - DNA, 25 bp, Canis familiaris
gtctctaaagagaggctccctcctc

SEQ ID NO: 140773 - DNA, 25 bp, Canis familiaris
gtcctggaagacaggtccacctgct

SEQ ID NO: 140774 - DNA, 25 bp, Canis familiaris
gtctgcaaaaacagagtcctgctct

SEQ ID NO: 140775 - DNA, 25 bp, Canis familiaris
gtctgtaattctatatgtcttcctg

SEQ ID NO: 140776 - DNA, 25 bp, Canis familiaris
gtctgttacttgtttgtcttgcacg

SEQ ID NO: 140777 - DNA, 25 bp, Canis familiaris
gtctgtttgcttgtttctcgaagag

SEQ ID NO: 140778 - DNA, 25 bp, Canis familiaris
gtctgttttcttttatccaaggaat

SEQ ID NO: 140779 - DNA, 25 bp, Canis familiaris
gtctgttcctttttgacaagggaag

SEQ ID NO: 140780 - DNA, 25 bp, Canis familiaris
gtcgacccttctctaagcatggtca

SEQ ID NO: 140781 - DNA, 25 bp, Canis familiaris
gtctggcccaatcaggaacaggtca

SEQ ID NO: 140782 - DNA, 25 bp, Canis familiaris
gtctggggcctggggaaagggctcg

SEQ ID NO: 140783 - DNA, 25 bp, Canis familiaris
gtctgtggtggtgtaattagcgttc

SEQ ID NO: 140784 - DNA, 25 bp, Canis familiaris
gtctgggtttacccttagcttggcg

SEQ ID NO: 140785 - DNA, 25 bp, Canis familiaris
gtctgtagttggcccctgagggtac

SEQ ID NO: 140786 - DNA, 25 bp, Canis familiaris
gtctctaggggcttagctaggcgct

SEQ ID NO: 140787 - DNA, 25 bp, Canis familiaris
gtctgaaggatgccctatgccaggc

SEQ ID NO: 140788 - DNA, 25 bp, Canis familiaris
gtcgcatcgaagtcctgtctagtgc

SEQ ID NO: 140789 - DNA, 25 bp, Canis familiaris
gtctcaccaagtcctgatgatttgc

SEQ ID NO: 140790 - DNA, 25 bp, Canis familiaris
gtctccttcatgaatggagcatttc

SEQ ID NO: 140791 - DNA, 25 bp, Canis familiaris
gtctcaccctcaagaagctgtgtcc

SEQ ID NO: 140792 - DNA, 25 bp, Canis familiaris
gtctgacacaatatgaatcggattc

SEQ ID NO: 140793 - DNA, 25 bp, Canis familiaris
gtctggcagcctttatattcgcatt

SEQ ID NO: 140794 - DNA, 25 bp, Canis familiaris
gtctgctgcagccatcattgtttac

SEQ ID NO: 140795 - DNA, 25 bp, Canis familiaris
gtctcaattgcatttggcttcacca

SEQ ID NO: 140796 - DNA, 25 bp, Canis familiaris
gtctcaataaaacttgcatcagcca

SEQ ID NO: 140797 - DNA, 25 bp, Canis familiaris
gtctacactatatgttcacgctaca

SEQ ID NO: 140798 - DNA, 25 bp, Canis familiaris
gtctcaactttcttaaatctaacca

SEQ ID NO: 140799 - DNA, 25 bp, Canis familiaris
gtctcacagttttgtagaatcttac

SEQ ID NO: 140800 - DNA, 25 bp, Canis familiaris
gtctcggtctctggtaaataaggca

SEQ ID NO: 140801 - DNA, 25 bp, Canis familiaris
gtccggtgttcgaagcttatggtca

SEQ ID NO: 140802 - DNA, 25 bp, Canis familiaris
gtctcgtcttatggggctcgaggcc

SEQ ID NO: 140803 - DNA, 25 bp, Canis familiaris
gtcggtccaagcaggcacagactgc

SEQ ID NO: 140804 - DNA, 25 bp, Canis familiaris
gtcggtaatataagtctgagcagct

SEQ ID NO: 140805 - DNA, 25 bp, Canis familiaris
gtctgttgaaatgcaccatgaagct

SEQ ID NO: 140806 - DNA, 25 bp, Canis familiaris
gtctgtggaactgactctacacctt

SEQ ID NO: 140807 - DNA, 25 bp, Canis familiaris
gtctcaagaactggttttccctgga

SEQ ID NO: 140808 - DNA, 25 bp, Canis familiaris
gtctgcaaataatgttttcctttac

SEQ ID NO: 140809 - DNA, 25 bp, Canis familiaris
gtcgaaatactctatttggtccatt

SEQ ID NO: 140810 - DNA, 25 bp, Canis familiaris
gtctgagaatttttgtttggctagt

SEQ ID NO: 140811 - DNA, 25 bp, Canis familiaris
gtctacaatctattttctcaggcta

SEQ ID NO: 140812 - DNA, 25 bp, Canis familiaris
gtctcaagcacctattttcattcta

SEQ ID NO: 140813 - DNA, 25 bp, Canis familiaris
gtctaactccgaatgcagttctctg

SEQ ID NO: 140814 - DNA, 25 bp, Canis familiaris
gtctgcatttccgatgtggtttcgc

SEQ ID NO: 140815 - DNA, 25 bp, Canis familiaris
gtctgcagcttctgtggactttgag

SEQ ID NO: 140816 - DNA, 25 bp, Canis familiaris
gtctcacgacttcggactacgggaa

SEQ ID NO: 140817 - DNA, 25 bp, Canis familiaris
gtctcagagacctgtgtctcctggg

SEQ ID NO: 140818 - DNA, 25 bp, Canis familiaris
gtctgaggacatccggtgatcctgg

SEQ ID NO: 140819 - DNA, 25 bp, Canis familiaris
gtctgtgggctgccatgttgatggc

SEQ ID NO: 140820 - DNA, 25 bp, Canis familiaris
gtctgtgggctgcaatgttgatggc

SEQ ID NO: 140821 - DNA, 25 bp, Canis familiaris
gtcgtggccaaagtgctgcaggagc

SEQ ID NO: 140822 - DNA, 25 bp, Canis familiaris
gtctgctggtcctgtgatgatgggc

SEQ ID NO: 140823 - DNA, 25 bp, Canis familiaris
gtctctcgggcatgtatgaccacag

SEQ ID NO: 140824 - DNA, 25 bp, Canis familiaris
gtctcttggactttaacgctagtag

SEQ ID NO: 140825 - DNA, 25 bp, Canis familiaris
gtctcctggacttttcacttgagct

SEQ ID NO: 140826 - DNA, 25 bp, Canis familiaris
gtctccctcaagattactgtgcatc

SEQ ID NO: 140827 - DNA, 25 bp, Canis familiaris
gtctctgcccatagactttggttca

SEQ ID NO: 140828 - DNA, 25 bp, Canis familiaris
gtctgcgttttgactttgtgactca

SEQ ID NO: 140829 - DNA, 25 bp, Canis familiaris
gtctcgtttgagatgcttgatgctg

SEQ ID NO: 140830 - DNA, 25 bp, Canis familiaris
gtctctttgctgtttctgtgacata

SEQ ID NO: 140831 - DNA, 25 bp, Canis familiaris
gtctcttcgtgattctctgtatgga

SEQ ID NO: 140832 - DNA, 25 bp, Canis familiaris
gtctctacttgccttctgatgtagt

SEQ ID NO: 140833 - DNA, 25 bp, Canis familiaris
gtctctaccattctcatatgaagtt

SEQ ID NO: 140834 - DNA, 25 bp, Canis familiaris
gtctcccgaatagtgctcaaattgg

SEQ ID NO: 140835 - DNA, 25 bp, Canis familiaris
gtctctaacatctttctaaattggc

SEQ ID NO: 140836 - DNA, 25 bp, Canis familiaris
gtctcttcactgatttaagttctgc

SEQ ID NO: 140837 - DNA, 25 bp, Canis familiaris
gtctgttacctgtttcaatttcttg

SEQ ID NO: 140838 - DNA, 25 bp, Canis familiaris
gtctgttagccatctgtatatcttt

SEQ ID NO: 140839 - DNA, 25 bp, Canis familiaris
gtcgattaagcatctgctgtcagct

SEQ ID NO: 140840 - DNA, 25 bp, Canis familiaris
gtctgtttcagcctgtctgacaggc

SEQ ID NO: 140841 - DNA, 25 bp, Canis familiaris
gtctctctctgtgtgactatcatga

SEQ ID NO: 140842 - DNA, 25 bp, Canis familiaris
gtctcatatttttacttcacaagtc

SEQ ID NO: 140843 - DNA, 25 bp, Canis familiaris
gtcgatatttaatcctcaacgctcc

SEQ ID NO: 140844 - DNA, 25 bp, Canis familiaris
gtctgaactaagtgccatactcgtc

SEQ ID NO: 140845 - DNA, 25 bp, Canis familiaris
gtctgtacaaggttcctacagccac

SEQ ID NO: 140846 - DNA, 25 bp, Canis familiaris
gtctgtaacaatcaacctcagtact

SEQ ID NO: 140847 - DNA, 25 bp, Canis familiaris
gtgcttcaaagaaaacgccgaccaa

SEQ ID NO: 140848 - DNA, 25 bp, Canis familiaris
gtctgggaaatagaccctgacagca

SEQ ID NO: 140849 - DNA, 25 bp, Canis familiaris
gtcggaaagaaggacgaatgtcccg

SEQ ID NO: 140850 - DNA, 25 bp, Canis familiaris
gtccttcaagaagacttcagtcccc

SEQ ID NO: 140851 - DNA, 25 bp, Canis familiaris
gtctcctcaggagaactggggaacc

SEQ ID NO: 140852 - DNA, 25 bp, Canis familiaris
gtcgacaccgcagtgaacgggggac

SEQ ID NO: 140853 - DNA, 25 bp, Canis familiaris
gtgcgtacctgagaactgtttgtcc

SEQ ID NO: 140854 - DNA, 25 bp, Canis familiaris
gtcgttggccgacacttttgaacac

SEQ ID NO: 140855 - DNA, 25 bp, Canis familiaris
gtcggggcggagcagagttctgtac

SEQ ID NO: 140856 - DNA, 25 bp, Canis familiaris
gtcgggatcgtgaatggagcttttt

SEQ ID NO: 140857 - DNA, 25 bp, Canis familiaris
gtctgagcagctcggaattgagctt

SEQ ID NO: 140858 - DNA, 25 bp, Canis familiaris
gtctgacggggatgctcacttgtca

SEQ ID NO: 140859 - DNA, 25 bp, Canis familiaris
gtctgacggagggatctcctggtgc

SEQ ID NO: 140860 - DNA, 25 bp, Canis familiaris
gtctgaggggacgtgtgcctgagta

SEQ ID NO: 140861 - DNA, 25 bp, Canis familiaris
gtctgcagtggaagctgagcggctg

SEQ ID NO: 140862 - DNA, 25 bp, Canis familiaris
gtctgcggcagaagcaagcccaggc

SEQ ID NO: 140863 - DNA, 25 bp, Canis familiaris
gtctcagtgttcaaccaccatgtgc

SEQ ID NO: 140864 - DNA, 25 bp, Canis familiaris
gtctcctgtgtgacaccagtcgatg

SEQ ID NO: 140865 - DNA, 25 bp, Canis familiaris
gtctgccctatcaactttcgatggt

SEQ ID NO: 140866 - DNA, 25 bp, Canis familiaris
gtctgcgcctttttgtatttagttc

SEQ ID NO: 140867 - DNA, 25 bp, Canis familiaris
gtcggcctttgctggatgtatgtgt

SEQ ID NO: 140868 - DNA, 25 bp, Canis familiaris
gtcggcagtttgcagccttagtggc

SEQ ID NO: 140869 - DNA, 25 bp, Canis familiaris
gtcggcagttctatgatcgggtcgc

SEQ ID NO: 140870 - DNA, 25 bp, Canis familiaris
gtctccagttttaactgggatcatg

SEQ ID NO: 140871 - DNA, 25 bp, Canis familiaris
gtctgggttgtttcctggagatcgt

SEQ ID NO: 140872 - DNA, 25 bp, Canis familiaris
gtccggtggtttcggaatgaccagg

SEQ ID NO: 140873 - DNA, 25 bp, Canis familiaris
gtctccgatgccactggacagatga

SEQ ID NO: 140874 - DNA, 25 bp, Canis familiaris
gtctccaagcagacctgggcaatgt

SEQ ID NO: 140875 - DNA, 25 bp, Canis familiaris
gtctccaatggagagaagcagaggg

SEQ ID NO: 140876 - DNA, 25 bp, Canis familiaris
gtctgccatcagaagactgaaggag

SEQ ID NO: 140877 - DNA, 25 bp, Canis familiaris
gtctctgatcagagccgacaccaga

SEQ ID NO: 140878 - DNA, 25 bp, Canis familiaris
gtctctggtgtagctgatgatccga

SEQ ID NO: 140879 - DNA, 25 bp, Canis familiaris
gtctctggatttgctgtgtgtgcca

SEQ ID NO: 140880 - DNA, 25 bp, Canis familiaris
gtctgcaggaagtgctgctgcgtcc

SEQ ID NO: 140881 - DNA, 25 bp, Canis familiaris
gtcgtggcacagctgcatgatggtc

SEQ ID NO: 140882 - DNA, 25 bp, Canis familiaris
gtctcgcaccatagtgcaggctgtc

SEQ ID NO: 140883 - DNA, 25 bp, Canis familiaris
gtctcagatccatgacattgtcctg

SEQ ID NO: 140884 - DNA, 25 bp, Canis familiaris
gtctctgtccaggcatcataatcta

SEQ ID NO: 140885 - DNA, 25 bp, Canis familiaris
gtctctctctcacgacatgaatatc

SEQ ID NO: 140886 - DNA, 25 bp, Canis familiaris
gtctctctctcattctcagatagat

SEQ ID NO: 140887 - DNA, 25 bp, Canis familiaris
gtctgatctctattgctctgtgaag

SEQ ID NO: 140888 - DNA, 25 bp, Canis familiaris
gtctcatcatctacctgcgtaagaa

SEQ ID NO: 140889 - DNA, 25 bp, Canis familiaris
gtcccttgtcagctgtaatgaactt

SEQ ID NO: 140890 - DNA, 25 bp, Canis familiaris
gtccctgggaagttcctgaatttgt

SEQ ID NO: 140891 - DNA, 25 bp, Canis familiaris
gtctccacggaaccatcctaaattt

SEQ ID NO: 140892 - DNA, 25 bp, Canis familiaris
gtctcctcaggagtgtgcaccaaac

SEQ ID NO: 140893 - DNA, 25 bp, Canis familiaris
gtctgccctgggtgtacaaatcaca

SEQ ID NO: 140894 - DNA, 25 bp, Canis familiaris
gtctgtcctgggtatgttaccacca

SEQ ID NO: 140895 - DNA, 25 bp, Canis familiaris
gtctgatccgacgcagacgacgcag

SEQ ID NO: 140896 - DNA, 25 bp, Canis familiaris
gtctgtactgatcctcagaagaacc

SEQ ID NO: 140897 - DNA, 25 bp, Canis familiaris
gtctgtcattgtgctcaatggcacc

SEQ ID NO: 140898 - DNA, 25 bp, Canis familiaris
gtctgtgctggcaggactggcagcc

SEQ ID NO: 140899 - DNA, 25 bp, Canis familiaris
gtcgtggagtccactggcgtcttca

SEQ ID NO: 140900 - DNA, 25 bp, Canis familiaris
gtcgacggacgcactgggtgttgat

SEQ ID NO: 140901 - DNA, 25 bp, Canis familiaris
gtcccggactcgtgaggttatttag

SEQ ID NO: 140902 - DNA, 25 bp, Canis familiaris
gtgaccgagcacacagggttttttt

SEQ ID NO: 140903 - DNA, 25 bp, Canis familiaris
gtgtcctagcctaaaacctttactg

SEQ ID NO: 140904 - DNA, 25 bp, Canis familiaris
gtgtgccaagttaaaaagttgtaag

SEQ ID NO: 140905 - DNA, 25 bp, Canis familiaris
gtgcgccgagttaaaagagttgctt

SEQ ID NO: 140906 - DNA, 25 bp, Canis familiaris
gtctgccttttaaacctgttgcaat

SEQ ID NO: 140907 - DNA, 25 bp, Canis familiaris
gtcgtccttttatccatctgatgac

SEQ ID NO: 140908 - DNA, 25 bp, Canis familiaris
gtctgctcctttgtgtgctatttac

SEQ ID NO: 140909 - DNA, 25 bp, Canis familiaris
gtctctcctctcaggttatgtgacc

SEQ ID NO: 140910 - DNA, 25 bp, Canis familiaris
gtctctcctccaatgtgttggtgtg

SEQ ID NO: 140911 - DNA, 25 bp, Canis familiaris
gtctccgtacaaatgcctgtgttca

SEQ ID NO: 140912 - DNA, 25 bp, Canis familiaris
gtctcttgtaaactctatggttctg

SEQ ID NO: 140913 - DNA, 25 bp, Canis familiaris
gtctctgaattatgcactttttgct

SEQ ID NO: 140914 - DNA, 25 bp, Canis familiaris
gtcgtatcttgaaggctgtttggct

SEQ ID NO: 140915 - DNA, 25 bp, Canis familiaris
gtgcctgacttaacgtttccagcta

SEQ ID NO: 140916 - DNA, 25 bp, Canis familiaris
gtccgacattgagagtgtcatgtac

SEQ ID NO: 140917 - DNA, 25 bp, Canis familiaris
gtctcgacgtctgctgttatgaaca

SEQ ID NO: 140918 - DNA, 25 bp, Canis familiaris
gtctgtacacttgggttataacact

SEQ ID NO: 140919 - DNA, 25 bp, Canis familiaris
gtctgtactttagtatttttcacca

SEQ ID NO: 140920 - DNA, 25 bp, Canis familiaris
gtctgtagctttttaggttcttcac

SEQ ID NO: 140921 - DNA, 25 bp, Canis familiaris
gtctctggttttcgcagtttttgga

SEQ ID NO: 140922 - DNA, 25 bp, Canis familiaris
gtctctgtttatttcagatgatttg

SEQ ID NO: 140923 - DNA, 25 bp, Canis familiaris
gtctctgtttatatctatcatgttt

SEQ ID NO: 140924 - DNA, 25 bp, Canis familiaris
gtctctgctcttgttctgaaatgtt

SEQ ID NO: 140925 - DNA, 25 bp, Canis familiaris
gtctgcattttcttggagaaattta

SEQ ID NO: 140926 - DNA, 25 bp, Canis familiaris
gtctgcaatttctttcaccaatgtt

SEQ ID NO: 140927 - DNA, 25 bp, Canis familiaris
gtcgcaatacatgtactacagtgtt

SEQ ID NO: 140928 - DNA, 25 bp, Canis familiaris
gtctggatgcactgtactgaccaat

SEQ ID NO: 140929 - DNA, 25 bp, Canis familiaris
gtcggacctgggtctgagtgcagtc

SEQ ID NO: 140930 - DNA, 25 bp, Canis familiaris
gtcggacctaggacgtatcgttcgt

SEQ ID NO: 140931 - DNA, 25 bp, Canis familiaris
gtcggaggaacgaccgacctccatt

SEQ ID NO: 140932 - DNA, 25 bp, Canis familiaris
gtctggtggaaccaccatgtaccct

SEQ ID NO: 140933 - DNA, 25 bp, Canis familiaris
gtctggaggtaccaccatgtaccct

SEQ ID NO: 140934 - DNA, 25 bp, Canis familiaris
gtctcggagtaacctcatgtggcct

SEQ ID NO: 140935 - DNA, 25 bp, Canis familiaris
gtcctggttccgatcattggttttt

SEQ ID NO: 140936 - DNA, 25 bp, Canis familiaris
gtgcctatgtccgggttgggtaatt

SEQ ID NO: 140937 - DNA, 25 bp, Canis familiaris
gggcatgatcccagagttccgggat

SEQ ID NO: 140938 - DNA, 25 bp, Canis familiaris
gtcgcagttggcagagtacgggcgt

SEQ ID NO: 140939 - DNA, 25 bp, Canis familiaris
gtcggttggaggagatgcgccagtc

SEQ ID NO: 140940 - DNA, 25 bp, Canis familiaris
gtccttttgaagagatggccctggt

SEQ ID NO: 140941 - DNA, 25 bp, Canis familiaris
gtccctgaggggagtgaccctggtc

SEQ ID NO: 140942 - DNA, 25 bp, Canis familiaris
gtctcctgtgggttgggacaaaggt

SEQ ID NO: 140943 - DNA, 25 bp, Canis familiaris
gtcctctatggtcttgccaaaatga

SEQ ID NO: 140944 - DNA, 25 bp, Canis familiaris
gtctccttcctagggtcacaaagag

SEQ ID NO: 140945 - DNA, 25 bp, Canis familiaris
gtctgtttccgagggtacagtgcta

SEQ ID NO: 140946 - DNA, 25 bp, Canis familiaris
gtcgattctctcagacgaacatggc

SEQ ID NO: 140947 - DNA, 25 bp, Canis familiaris
gtcgtttctcacctgagacactgac

SEQ ID NO: 140948 - DNA, 25 bp, Canis familiaris
gtctggcttctctggatggcaggac

SEQ ID NO: 140949 - DNA, 25 bp, Canis familiaris
gtctggcatacctggcatggatggt

SEQ ID NO: 140950 - DNA, 25 bp, Canis familiaris
gtctggcaactccgacgtgtatgag

SEQ ID NO: 140951 - DNA, 25 bp, Canis familiaris
gtcgggcagccgcacactatgagca

SEQ ID NO: 140952 - DNA, 25 bp, Canis familiaris
gtcggtggtctgtaatcgggcaaac

SEQ ID NO: 140953 - DNA, 25 bp, Canis familiaris
gtcgttggttcatcctgtgtcataa

SEQ ID NO: 140954 - DNA, 25 bp, Canis familiaris
gtctgatttattgacctgttcttca

SEQ ID NO: 140955 - DNA, 25 bp, Canis familiaris
gtctgattgctgagaatggtcttca

SEQ ID NO: 140956 - DNA, 25 bp, Canis familiaris
gtctgatgagggaacacttcattca

SEQ ID NO: 140957 - DNA, 25 bp, Canis familiaris
gtcgaggttgaagtcaccatcgcag

SEQ ID NO: 140958 - DNA, 25 bp, Canis familiaris
gtcgacgtgggagtcgtgaccggag

SEQ ID NO: 140959 - DNA, 25 bp, Canis familiaris
gtctgggccggagtcttaactagag

SEQ ID NO: 140960 - DNA, 25 bp, Canis familiaris
gtctggacacccttcctaaaaacag

SEQ ID NO: 140961 - DNA, 25 bp, Canis familiaris
gtctgtgccccgtgcagtaaaaaat

SEQ ID NO: 140962 - DNA, 25 bp, Canis familiaris
gtcggcccacgtgagtaaatgacac

SEQ ID NO: 140963 - DNA, 25 bp, Canis familiaris
gtctgggtccgtccagggattgact

SEQ ID NO: 140964 - DNA, 25 bp, Canis familiaris
gtctctgtttcctagcagggtggac

SEQ ID NO: 140965 - DNA, 25 bp, Canis familiaris
gtctcccccccagggagtatgactc

SEQ ID NO: 140966 - DNA, 25 bp, Canis familiaris
gtctcccctccgaagaagatcggtt

SEQ ID NO: 140967 - DNA, 25 bp, Canis familiaris
gtctccacccctaataaacaatcta

SEQ ID NO: 140968 - DNA, 25 bp, Canis familiaris
gtctccaagcacatgattagaaaaa

SEQ ID NO: 140969 - DNA, 25 bp, Canis familiaris
gtctcgtagccacgttgaaaagtac

SEQ ID NO: 140970 - DNA, 25 bp, Canis familiaris
gtctcggagacggttgaaaggtgat

SEQ ID NO: 140971 - DNA, 25 bp, Canis familiaris
gtctcgggaggcctctgaagatggg

SEQ ID NO: 140972 - DNA, 25 bp, Canis familiaris
gtccaaggaagcccaaaacctgcac

SEQ ID NO: 140973 - DNA, 25 bp, Canis familiaris
gtccaacggaacaagaaccgtgcga

SEQ ID NO: 140974 - DNA, 25 bp, Canis familiaris
gtccagaattggccttaacctggaa

SEQ ID NO: 140975 - DNA, 25 bp, Canis familiaris
gtctcttttgctcatttaccagaaa

SEQ ID NO: 140976 - DNA, 25 bp, Canis familiaris
gtctcttttgatgtttacacgcaca

SEQ ID NO: 140977 - DNA, 25 bp, Canis familiaris
gtctcttttgcagattgttcctcag

SEQ ID NO: 140978 - DNA, 25 bp, Canis familiaris
gtctctttatgggactgttcatggc

SEQ ID NO: 140979 - DNA, 25 bp, Canis familiaris
gtctgctcttggaaacctggcatgg

SEQ ID NO: 140980 - DNA, 25 bp, Canis familiaris
gtctgtacatagtggcctcagcatg

SEQ ID NO: 140981 - DNA, 25 bp, Canis familiaris
gtctgaacatcagctccttcatgac

SEQ ID NO: 140982 - DNA, 25 bp, Canis familiaris
gtctgaccatacatcactgtgatag

SEQ ID NO: 140983 - DNA, 25 bp, Canis familiaris
gtctgtggcagtatccatgtggcaa

SEQ ID NO: 140984 - DNA, 25 bp, Canis familiaris
gtctgtggcagtgttgcaatacaac

SEQ ID NO: 140985 - DNA, 25 bp, Canis familiaris
gtctgtggttcctgaatatgacacc

SEQ ID NO: 140986 - DNA, 25 bp, Canis familiaris
gtcgtggttgtgtggattgtccgtc

SEQ ID NO: 140987 - DNA, 25 bp, Canis familiaris
gtcgtggttgtgtggattgtccgtc

SEQ ID NO: 140988 - DNA, 25 bp, Canis familiaris
gtcgtatgccttctggatcatggcc

SEQ ID NO: 140989 - DNA, 25 bp, Canis familiaris
gtctgctatcaaatcaaggtcactc

SEQ ID NO: 140990 - DNA, 25 bp, Canis familiaris
gtctctataatagtatgctttctgc

SEQ ID NO: 140991 - DNA, 25 bp, Canis familiaris
gtctctctcaagacgtcttgttcgg

SEQ ID NO: 140992 - DNA, 25 bp, Canis familiaris
gtctctccaactgatctgatttcac

SEQ ID NO: 140993 - DNA, 25 bp, Canis familiaris
gtctgttcaactgtaatgcttcctt

SEQ ID NO: 140994 - DNA, 25 bp, Canis familiaris
gtctgctcccctgtggagctatttc

SEQ ID NO: 140995 - DNA, 25 bp, Canis familiaris
gtctctcccccataagcataaaaaa

SEQ ID NO: 140996 - DNA, 25 bp, Canis familiaris
gtctccccagctccaaagtaggaat

SEQ ID NO: 140997 - DNA, 25 bp, Canis familiaris
gtctcctgcaggctgaaagtattaa

SEQ ID NO: 140998 - DNA, 25 bp, Canis familiaris
gtctcctgcgacttcaacagcaact

SEQ ID NO: 140999 - DNA, 25 bp, Canis familiaris
gtctcctgtgacttcaacagtgaca

SEQ ID NO: 141000 - DNA, 25 bp, Canis familiaris
gtctccgtgagacttcagaggatca

SEQ ID NO: 141001 - DNA, 25 bp, Canis familiaris
gtctgccgctaacggagagccacat

SEQ ID NO: 141002 - DNA, 25 bp, Canis familiaris
gtctccgcgatatcgtggacagtgc

SEQ ID NO: 141003 - DNA, 25 bp, Canis familiaris
gtctccacgaggtcatatgctagca

SEQ ID NO: 141004 - DNA, 25 bp, Canis familiaris
gtccccaaggtatttgcagcattgc

SEQ ID NO: 141005 - DNA, 25 bp, Canis familiaris
gtctctcccaggacattctgaagcc

SEQ ID NO: 141006 - DNA, 25 bp, Canis familiaris
gtctccagccagagcattggaggcc

SEQ ID NO: 141007 - DNA, 25 bp, Canis familiaris
gtctccacagagaagttgggccatt

SEQ ID NO: 141008 - DNA, 25 bp, Canis familiaris
gtctccaggcgtagcttggcgcctg

SEQ ID NO: 141009 - DNA, 25 bp, Canis familiaris
gtctccagggctacttgtgtgatat

SEQ ID NO: 141010 - DNA, 25 bp, Canis familiaris
gtctggaggatgaagcctggtgtac

SEQ ID NO: 141011 - DNA, 25 bp, Canis familiaris
gtctgaaatgtaccatctttgtcac

SEQ ID NO: 141012 - DNA, 25 bp, Canis familiaris
gtctgtaaatagccaggttgtctta

SEQ ID NO: 141013 - DNA, 25 bp, Canis familiaris
gtctgttaaagtgagttcttttagt

SEQ ID NO: 141014 - DNA, 25 bp, Canis familiaris
gtctgtttaaatgtggccttttctg

SEQ ID NO: 141015 - DNA, 25 bp, Canis familiaris
gtctggggtattttcgtttgttctg

SEQ ID NO: 141016 - DNA, 25 bp, Canis familiaris
gtcgtcgtctttcttgtattttgga

SEQ ID NO: 141017 - DNA, 25 bp, Canis familiaris
gtcgtggtcgttgtagtggtcgacg

SEQ ID NO: 141018 - DNA, 25 bp, Canis familiaris
gtcggtctctttgacaggtgtgtac

SEQ ID NO: 141019 - DNA, 25 bp, Canis familiaris
gtcggtctcggtccttaggagaacg

SEQ ID NO: 141020 - DNA, 25 bp, Canis familiaris
gtgcaggccttgatcccaaggtcat

SEQ ID NO: 141021 - DNA, 25 bp, Canis familiaris
gtccagaccgctagaccatagttca

SEQ ID NO: 141022 - DNA, 25 bp, Canis familiaris
gtccagaatccctccatgaattgat

SEQ ID NO: 141023 - DNA, 25 bp, Canis familiaris
gtctccattcccaaaggacatgtgg

SEQ ID NO: 141024 - DNA, 25 bp, Canis familiaris
gtctccttcagcattaggtatgact

SEQ ID NO: 141025 - DNA, 25 bp, Canis familiaris
gtctgcgttggcactatggctaaac

SEQ ID NO: 141026 - DNA, 25 bp, Canis familiaris
gtctggttcagatttctagctttac

SEQ ID NO: 141027 - DNA, 25 bp, Canis familiaris
gtctgtttgctgtatatgctgaaat

SEQ ID NO: 141028 - DNA, 25 bp, Canis familiaris
gtctgctggtggtttgctggcaatc

SEQ ID NO: 141029 - DNA, 25 bp, Canis familiaris
gtctcgtgtgtgatatcgccataat

SEQ ID NO: 141030 - DNA, 25 bp, Canis familiaris
gtctccatgatgttacacccatagc

SEQ ID NO: 141031 - DNA, 25 bp, Canis familiaris
gtctccatatttaactgcatctgcc

SEQ ID NO: 141032 - DNA, 25 bp, Canis familiaris
gtctcctttccgacatatcttctgg

SEQ ID NO: 141033 - DNA, 25 bp, Canis familiaris
gtctccttccccaatttgatgaggc

SEQ ID NO: 141034 - DNA, 25 bp, Canis familiaris
gtctccttcagctaccattcaagga

SEQ ID NO: 141035 - DNA, 25 bp, Canis familiaris
gtctcctccagctacagactgaaat

SEQ ID NO: 141036 - DNA, 25 bp, Canis familiaris
gtctgtgctcccgaaagctgaggat

SEQ ID NO: 141037 - DNA, 25 bp, Canis familiaris
gtctgtctcggataagcagggcggc

SEQ ID NO: 141038 - DNA, 25 bp, Canis familiaris
gtctgtccgcgtttaaggggagatc

SEQ ID NO: 141039 - DNA, 25 bp, Canis familiaris
gtcgttacccgttgagtgtggatga

SEQ ID NO: 141040 - DNA, 25 bp, Canis familiaris
gtcggtcatctccgggagcttaaca

SEQ ID NO: 141041 - DNA, 25 bp, Canis familiaris
gtcgagtcttaacgtacattacacc

SEQ ID NO: 141042 - DNA, 25 bp, Canis familiaris
gtcggatgcttaaccaactaaacca

SEQ ID NO: 141043 - DNA, 25 bp, Canis familiaris
gtctgagcagctaaatcttcattaa

SEQ ID NO: 141044 - DNA, 25 bp, Canis familiaris
gtctgctgcctgaagagcttcttca

SEQ ID NO: 141045 - DNA, 25 bp, Canis familiaris
gtcggttgagtgtctgacttcagct

SEQ ID NO: 141046 - DNA, 25 bp, Canis familiaris
gtctgtgtctgtgactgacgtggcc

SEQ ID NO: 141047 - DNA, 25 bp, Canis familiaris
gtctgcgtttccaagagatgtggcc

SEQ ID NO: 141048 - DNA, 25 bp, Canis familiaris
gtgctgggtactaggtagtctccct

SEQ ID NO: 141049 - DNA, 25 bp, Canis familiaris
gtctgaggatgaattggtggtctgc

SEQ ID NO: 141050 - DNA, 25 bp, Canis familiaris
gtctggtacatgtcgaatggtcagc

SEQ ID NO: 141051 - DNA, 25 bp, Canis familiaris
gtcgctgtgacttcgaaggaagctt

SEQ ID NO: 141052 - DNA, 25 bp, Canis familiaris
gtcgctcactcatcatgatggtaac

SEQ ID NO: 141053 - DNA, 25 bp, Canis familiaris
gtctgtctccatgctatggttgcat

SEQ ID NO: 141054 - DNA, 25 bp, Canis familiaris
gtctgcactactacttcgttgcatg

SEQ ID NO: 141055 - DNA, 25 bp, Canis familiaris
gtctgatctatctatatgttgttta

SEQ ID NO: 141056 - DNA, 25 bp, Canis familiaris
gtctgtctatcagatgtgcacatct

SEQ ID NO: 141057 - DNA, 25 bp, Canis familiaris
gtctcctacgtgttgcacttggtag

SEQ ID NO: 141058 - DNA, 25 bp, Canis familiaris
gtctctgtccggttgagtcttgtag

SEQ ID NO: 141059 - DNA, 25 bp, Canis familiaris
gtctggctccctttggtttggagtc

SEQ ID NO: 141060 - DNA, 25 bp, Canis familiaris
gtctcccacctcatggtttatgatt

SEQ ID NO: 141061 - DNA, 25 bp, Canis familiaris
gtctgtaacctagcctgttcatttt

SEQ ID NO: 141062 - DNA, 25 bp, Canis familiaris
gtctgtagaagcagccctttccata

SEQ ID NO: 141063 - DNA, 25 bp, Canis familiaris
gtctgatcaaaaaatactcttccaa

SEQ ID NO: 141064 - DNA, 25 bp, Canis familiaris
gtctgcatgcaataattttcttcta

SEQ ID NO: 141065 - DNA, 25 bp, Canis familiaris
gtctgctaaagattcattctccctc

SEQ ID NO: 141066 - DNA, 25 bp, Canis familiaris
gtctccacagtattgtttgctaatc

SEQ ID NO: 141067 - DNA, 25 bp, Canis familiaris
gtctccgatgctttgtatcattctt

SEQ ID NO: 141068 - DNA, 25 bp, Canis familiaris
gtctcctgagccatatttttctgcc

SEQ ID NO: 141069 - DNA, 25 bp, Canis familiaris
gtctccttgattaatatgattttcc

SEQ ID NO: 141070 - DNA, 25 bp, Canis familiaris
gtctgcatcttctaaatcatgatat

SEQ ID NO: 141071 - DNA, 25 bp, Canis familiaris
gtctgctattgtcactgcaaataga

SEQ ID NO: 141072 - DNA, 25 bp, Canis familiaris
gtctgtattgactatctgccacaca

SEQ ID NO: 141073 - DNA, 25 bp, Canis familiaris
gtctgtttaattacaccagcatcgc

SEQ ID NO: 141074 - DNA, 25 bp, Canis familiaris
gtctgctttatttgtcagctccagg

SEQ ID NO: 141075 - DNA, 25 bp, Canis familiaris
gtctgtttattttacacatcacgtg

SEQ ID NO: 141076 - DNA, 25 bp, Canis familiaris
gtctgtgtgtgtgtaagcatgcatg

SEQ ID NO: 141077 - DNA, 25 bp, Canis familiaris
gtcgatgttgtcgtgcaggatctgc

SEQ ID NO: 141078 - DNA, 25 bp, Canis familiaris
gtctgattttcaccaagtctgcaat

SEQ ID NO: 141079 - DNA, 25 bp, Canis familiaris
gtctgtcgggcacatgagtcggtgg

SEQ ID NO: 141080 - DNA, 25 bp, Canis familiaris
gtctgaagaagccacaagtccgcgg

SEQ ID NO: 141081 - DNA, 25 bp, Canis familiaris
gtctccagaatgctcaagtacccag

SEQ ID NO: 141082 - DNA, 25 bp, Canis familiaris
gtctccagacattgctaaatgaccc

SEQ ID NO: 141083 - DNA, 25 bp, Canis familiaris
gtcccatgtcttaaaatatactgta

SEQ ID NO: 141084 - DNA, 25 bp, Canis familiaris
gtctccacactaacaataattctct

SEQ ID NO: 141085 - DNA, 25 bp, Canis familiaris
gtctccaagagaaaaattcactcat

SEQ ID NO: 141086 - DNA, 25 bp, Canis familiaris
gtcccaggaatacagtaacgatttc

SEQ ID NO: 141087 - DNA, 25 bp, Canis familiaris
gtctccagaatttagattccacctt

SEQ ID NO: 141088 - DNA, 25 bp, Canis familiaris
gtcggctacttactgaatacacctt

SEQ ID NO: 141089 - DNA, 25 bp, Canis familiaris
gtctggcttctgtgtatataacccg

SEQ ID NO: 141090 - DNA, 25 bp, Canis familiaris
gtctgcgttctttgtgtaaacaccg

SEQ ID NO: 141091 - DNA, 25 bp, Canis familiaris
gtctgcgttctttgtataaaacctc

SEQ ID NO: 141092 - DNA, 25 bp, Canis familiaris
gtctgtgtctctcatgaataaataa

SEQ ID NO: 141093 - DNA, 25 bp, Canis familiaris
gtctgtgttcatctgtatgttagta

SEQ ID NO: 141094 - DNA, 25 bp, Canis familiaris
gtctgtttcatgtgtcttgtagctc

SEQ ID NO: 141095 - DNA, 25 bp, Canis familiaris
gtcgtgtttgaattcttgatctctc

SEQ ID NO: 141096 - DNA, 25 bp, Canis familiaris
gtctgctttctgtaaaattctcttc

SEQ ID NO: 141097 - DNA, 25 bp, Canis familiaris
gtctcgctctggtgaaatacatttc

SEQ ID NO: 141098 - DNA, 25 bp, Canis familiaris
gtctcctcttgctgaatatatttag

SEQ ID NO: 141099 - DNA, 25 bp, Canis familiaris
gtctcctacatccagtgtattatta

SEQ ID NO: 141100 - DNA, 25 bp, Canis familiaris
gtctcctactgttactgaaatgctg

SEQ ID NO: 141101 - DNA, 25 bp, Canis familiaris
gtctccttttcttcataaatctgca

SEQ ID NO: 141102 - DNA, 25 bp, Canis familiaris
gtctccatgtgtgtgtataaatata

SEQ ID NO: 141103 - DNA, 25 bp, Canis familiaris
gtctccatggggatataccatgatg

SEQ ID NO: 141104 - DNA, 25 bp, Canis familiaris
gtgataagggccataaccaggaacc

SEQ ID NO: 141105 - DNA, 25 bp, Canis familiaris
gggacaaggcacggacattaggaac

SEQ ID NO: 141106 - DNA, 25 bp, Canis familiaris
gtccaaaggccaaacttgaagaaca

SEQ ID NO: 141107 - DNA, 25 bp, Canis familiaris
gtcgtaaggcctcaggtggggacca

SEQ ID NO: 141108 - DNA, 25 bp, Canis familiaris
gtcgtttggcttcgacaagggggct

SEQ ID NO: 141109 - DNA, 25 bp, Canis familiaris
gtcgtttggaacataagctcgtgga

SEQ ID NO: 141110 - DNA, 25 bp, Canis familiaris
gtcggatgcggggtctacgacggga

SEQ ID NO: 141111 - DNA, 25 bp, Canis familiaris
gtcgggcaggaggtgttggagctgg

SEQ ID NO: 141112 - DNA, 25 bp, Canis familiaris
gtcggcggccatggagttgggcgag

SEQ ID NO: 141113 - DNA, 25 bp, Canis familiaris
gtcggccaccagggtgattgggggg

SEQ ID NO: 141114 - DNA, 25 bp, Canis familiaris
gtccctcggcaggggtgttggggag

SEQ ID NO: 141115 - DNA, 25 bp, Canis familiaris
gtctcctgcgtggcggggagggaga

SEQ ID NO: 141116 - DNA, 25 bp, Canis familiaris
gtctgaggcctggggtgggagcagg

SEQ ID NO: 141117 - DNA, 25 bp, Canis familiaris
gtctgtcctatggaggtgaggaacg

SEQ ID NO: 141118 - DNA, 25 bp, Canis familiaris
gtctgtcctctgtcagggatttgaa

SEQ ID NO: 141119 - DNA, 25 bp, Canis familiaris
gtctgcttcctgtctgtgaatttga

SEQ ID NO: 141120 - DNA, 25 bp, Canis familiaris
gtctgcttctcttggtgtagttgat

SEQ ID NO: 141121 - DNA, 25 bp, Canis familiaris
gtctcctctacatgctgggtttata

SEQ ID NO: 141122 - DNA, 25 bp, Canis familiaris
gtctcctcaagatcccttcttgaga

SEQ ID NO: 141123 - DNA, 25 bp, Canis familiaris
gtctgcccgagaagaccttctccga

SEQ ID NO: 141124 - DNA, 25 bp, Canis familiaris
gtctccaggagacacagtctctctc

SEQ ID NO: 141125 - DNA, 25 bp, Canis familiaris
gtcccatgggaggaatttctcctgc

SEQ ID NO: 141126 - DNA, 25 bp, Canis familiaris
gtccagatcggggacattgtcacag

SEQ ID NO: 141127 - DNA, 25 bp, Canis familiaris
gtctgctttgggggcagctgtctag

SEQ ID NO: 141128 - DNA, 25 bp, Canis familiaris
gtctgtttggggccagaggtcccag

SEQ ID NO: 141129 - DNA, 25 bp, Canis familiaris
gtcgtattgggcgcctggtcaccag

SEQ ID NO: 141130 - DNA, 25 bp, Canis familiaris
gtcgtggaggacgaccgactcactc

SEQ ID NO: 141131 - DNA, 25 bp, Canis familiaris
gtcggggtgacgacgtgttcactgc

SEQ ID NO: 141132 - DNA, 25 bp, Canis familiaris
gtcggagcttgatgtcggaagcctg

SEQ ID NO: 141133 - DNA, 25 bp, Canis familiaris
gtcgagacatgttggccgtcattgc

SEQ ID NO: 141134 - DNA, 25 bp, Canis familiaris
gtctgaactggacggttctgtctgc

SEQ ID NO: 141135 - DNA, 25 bp, Canis familiaris
gtctgccagtagctctttctgtaga

SEQ ID NO: 141136 - DNA, 25 bp, Canis familiaris
gtgatccctaggctgttctttgaac

SEQ ID NO: 141137 - DNA, 25 bp, Canis familiaris
gtgtctaaagtggttttatggggca

SEQ ID NO: 141138 - DNA, 25 bp, Canis familiaris
gtctccagagttgtctttatatgtg

SEQ ID NO: 141139 - DNA, 25 bp, Canis familiaris
gtctccaaggttctgtgtctagtgt

SEQ ID NO: 141140 - DNA, 25 bp, Canis familiaris
gtccccagacgtcttgtatagttcg

SEQ ID NO: 141141 - DNA, 25 bp, Canis familiaris
gtcccagagccgattcgatgttttc

SEQ ID NO: 141142 - DNA, 25 bp, Canis familiaris
gtcggtggccagtttttgttattgt

SEQ ID NO: 141143 - DNA, 25 bp, Canis familiaris
gtctgtgtacatttttattgttatt

SEQ ID NO: 141144 - DNA, 25 bp, Canis familiaris
gtctggtattttctatggtcctgta

SEQ ID NO: 141145 - DNA, 25 bp, Canis familiaris
gtcgggatggttgtatggtcgggat

SEQ ID NO: 141146 - DNA, 25 bp, Canis familiaris
gtcgagcgatggatttccgtctctg

SEQ ID NO: 141147 - DNA, 25 bp, Canis familiaris
gtcggggtggtgatctcgtgagtga

SEQ ID NO: 141148 - DNA, 25 bp, Canis familiaris
gtgcttcaggtgataggcctaggaa

SEQ ID NO: 141149 - DNA, 25 bp, Canis familiaris
gtctgtatcctgataggaatagtct

SEQ ID NO: 141150 - DNA, 25 bp, Canis familiaris
gtctgtatttgtcagtggatactct

SEQ ID NO: 141151 - DNA, 25 bp, Canis familiaris
gtctgtcatgcgctgtagggtatct

SEQ ID NO: 141152 - DNA, 25 bp, Canis familiaris
gtctgcctgagcctgagaggggagt

SEQ ID NO: 141153 - DNA, 25 bp, Canis familiaris
gtctgacaggcagtagagcgggtgc

SEQ ID NO: 141154 - DNA, 25 bp, Canis familiaris
gtctccaggagcaggggctgctgca

SEQ ID NO: 141155 - DNA, 25 bp, Canis familiaris
gtctccaggctcagtgggggaagtc

SEQ ID NO: 141156 - DNA, 25 bp, Canis familiaris
gtctgccgggggaggtggagagagg

SEQ ID NO: 141157 - DNA, 25 bp, Canis familiaris
gtctgacggagcactcggtggacaa

SEQ ID NO: 141158 - DNA, 25 bp, Canis familiaris
gtcgactcaagatccaggtgcgaaa

SEQ ID NO: 141159 - DNA, 25 bp, Canis familiaris
gtctgcgccaagttgcggggcagga

SEQ ID NO: 141160 - DNA, 25 bp, Canis familiaris
gtcgtgcacgcttggcgttggagtt

SEQ ID NO: 141161 - DNA, 25 bp, Canis familiaris
gtcgtgcatagctatgaggagttgg

SEQ ID NO: 141162 - DNA, 25 bp, Canis familiaris
gtcgtgacatcagtgcacgcgtctg

SEQ ID NO: 141163 - DNA, 25 bp, Canis familiaris
gtcgctatgccagtgaccttattct

SEQ ID NO: 141164 - DNA, 25 bp, Canis familiaris
gtctgctaccagtatcctggatatc

SEQ ID NO: 141165 - DNA, 25 bp, Canis familiaris
gtctgtagtcagaacctggattctt

SEQ ID NO: 141166 - DNA, 25 bp, Canis familiaris
gtctgattccaggagcttgggttct

SEQ ID NO: 141167 - DNA, 25 bp, Canis familiaris
gtctgttccagagcaggatgccttt

SEQ ID NO: 141168 - DNA, 25 bp, Canis familiaris
gtcggcaccaggagaatcctcattg

SEQ ID NO: 141169 - DNA, 25 bp, Canis familiaris
gtctggccaaggaacaaattaaatg

SEQ ID NO: 141170 - DNA, 25 bp, Canis familiaris
gtctgcctcattctaaaatttacac

SEQ ID NO: 141171 - DNA, 25 bp, Canis familiaris
gtcccaattctcggaaatttcggat

SEQ ID NO: 141172 - DNA, 25 bp, Canis familiaris
gtcccaattcccctatatgagggcg

SEQ ID NO: 141173 - DNA, 25 bp, Canis familiaris
gtccccatactgcaaattacgtcgg

SEQ ID NO: 141174 - DNA, 25 bp, Canis familiaris
tgcccaactacacctaacaaggggg

SEQ ID NO: 141175 - DNA, 25 bp, Canis familiaris
tgacctttaaaggcccaacggtctg

SEQ ID NO: 141176 - DNA, 25 bp, Canis familiaris
tcagggttagaccttcctaggggtg

SEQ ID NO: 141177 - DNA, 25 bp, Canis familiaris
tcagaacttcgaggtatttacgggg

SEQ ID NO: 141178 - DNA, 25 bp, Canis familiaris
gtgaatcttaaggttttccctgagg

SEQ ID NO: 141179 - DNA, 25 bp, Canis familiaris
gtgcgtcttaaaataactccctgaa

SEQ ID NO: 141180 - DNA, 25 bp, Canis familiaris
gtcgatgttaaaacaagactacaaa

SEQ ID NO: 141181 - DNA, 25 bp, Canis familiaris
gtcgggtccaagaaaatgagtcata

SEQ ID NO: 141182 - DNA, 25 bp, Canis familiaris
gtctgaagatactctaccatgaata

SEQ ID NO: 141183 - DNA, 25 bp, Canis familiaris
gtctgccagaattgttcccatgaat

SEQ ID NO: 141184 - DNA, 25 bp, Canis familiaris
gtctgtggcacactgtgtcttcaga

SEQ ID NO: 141185 - DNA, 25 bp, Canis familiaris
gtctggacacagatttctcgggagc

SEQ ID NO: 141186 - DNA, 25 bp, Canis familiaris
gtctgtgtccagattttggggggag

SEQ ID NO: 141187 - DNA, 25 bp, Canis familiaris
gtcgttcacgttcacgggacaagag

SEQ ID NO: 141188 - DNA, 25 bp, Canis familiaris
gtcccgggttgcccagggcaaagtg

SEQ ID NO: 141189 - DNA, 25 bp, Canis familiaris
gtccacatggcctccaaggagtaag

SEQ ID NO: 141190 - DNA, 25 bp, Canis familiaris
gtcgccagctcctccaataaagagg

SEQ ID NO: 141191 - DNA, 25 bp, Canis familiaris
gtctgctcacagcccggaattaaag

SEQ ID NO: 141192 - DNA, 25 bp, Canis familiaris
gtctgccacaggaaccaattaaatg

SEQ ID NO: 141193 - DNA, 25 bp, Canis familiaris
gtctccaagtgaacctttcgaaacg

SEQ ID NO: 141194 - DNA, 25 bp, Canis familiaris
gtctccaaggtgaacagcctctggc

SEQ ID NO: 141195 - DNA, 25 bp, Canis familiaris
gtctgccattcagtgtacatacctg

SEQ ID NO: 141196 - DNA, 25 bp, Canis familiaris
gtctgtctctctgtacatatccaaa

SEQ ID NO: 141197 - DNA, 25 bp, Canis familiaris
gtctgttcacattcacctaaaagca

SEQ ID NO: 141198 - DNA, 25 bp, Canis familiaris
gtcgtctcacataacccaaaagcat

SEQ ID NO: 141199 - DNA, 25 bp, Canis familiaris
gtcgtctgactattcccaagtagca

SEQ ID NO: 141200 - DNA, 25 bp, Canis familiaris
gtctgtcagtctttcagtctttaga

SEQ ID NO: 141201 - DNA, 25 bp, Canis familiaris
gtctgagtgttgttagttttgagga

SEQ ID NO: 141202 - DNA, 25 bp, Canis familiaris
gtctgactatagctattttgtgaag

SEQ ID NO: 141203 - DNA, 25 bp, Canis familiaris
gtcggcttagagcttgtctggggga

SEQ ID NO: 141204 - DNA, 25 bp, Canis familiaris
gtctgtttccaccctggtggggaga

SEQ ID NO: 141205 - DNA, 25 bp, Canis familiaris
gtcgttcttaccatggctgtatgga

SEQ ID NO: 141206 - DNA, 25 bp, Canis familiaris
gtccctctaaccatactctggaaat

SEQ ID NO: 141207 - DNA, 25 bp, Canis familiaris
gtccacttttcggtcgtctgaaatt

SEQ ID NO: 141208 - DNA, 25 bp, Canis familiaris
gtccacggtccggcagagaaaaaat

SEQ ID NO: 141209 - DNA, 25 bp, Canis familiaris
gtccctggaccggtcaatataacgt

SEQ ID NO: 141210 - DNA, 25 bp, Canis familiaris
gtccctccatcctttaaaagagtct

SEQ ID NO: 141211 - DNA, 25 bp, Canis familiaris
gtccccagtcacttttaggggctct

SEQ ID NO: 141212 - DNA, 25 bp, Canis familiaris
gtccttcagttcttttactagccga

SEQ ID NO: 141213 - DNA, 25 bp, Canis familiaris
gtcctggagtcctggtattgagccg

SEQ ID NO: 141214 - DNA, 25 bp, Canis familiaris
gtccattagaccgggtctggcaccc

SEQ ID NO: 141215 - DNA, 25 bp, Canis familiaris
gtctgtgtagaccaagggggcagct

SEQ ID NO: 141216 - DNA, 25 bp, Canis familiaris
gtctgtgtagaccagggtggttgta

SEQ ID NO: 141217 - DNA, 25 bp, Canis familiaris
gtgctaaagacgagtgtggtgttaa

SEQ ID NO: 141218 - DNA, 25 bp, Canis familiaris
gtcgacatggagggggctggagttg

SEQ ID NO: 141219 - DNA, 25 bp, Canis familiaris
gtctgactgaggacgggttaaataa

SEQ ID NO: 141220 - DNA, 25 bp, Canis familiaris
gtctggcttttcgttgtataaatat

SEQ ID NO: 141221 - DNA, 25 bp, Canis familiaris
gtctggctattcttgtatgtatcta

SEQ ID NO: 141222 - DNA, 25 bp, Canis familiaris
gtctggctattcttgtatgtatcta

SEQ ID NO: 141223 - DNA, 25 bp, Canis familiaris
gtctggctattcttgtatgtatcta

SEQ ID NO: 141224 - DNA, 25 bp, Canis familiaris
gtctggctattcttgtatgtatcta

SEQ ID NO: 141225 - DNA, 25 bp, Canis familiaris
gtctggctattcttgtatgtatcta

SEQ ID NO: 141226 - DNA, 25 bp, Canis familiaris
gtctggctattcttgtatgtatcta

SEQ ID NO: 141227 - DNA, 25 bp, Canis familiaris
gtctggctattcttgtatgtatcta

SEQ ID NO: 141228 - DNA, 25 bp, Canis familiaris
gtctggcttgactctattgtccatc

SEQ ID NO: 141229 - DNA, 25 bp, Canis familiaris
gtcgaggcttctttcaattctatca

SEQ ID NO: 141230 - DNA, 25 bp, Canis familiaris
gtcgagactggttgtcacattctta

SEQ ID NO: 141231 - DNA, 25 bp, Canis familiaris
gtcggtctggttgatggtcttgatc

SEQ ID NO: 141232 - DNA, 25 bp, Canis familiaris
gtcgcgattggtagatgtttttgat

SEQ ID NO: 141233 - DNA, 25 bp, Canis familiaris
gtcggttcgttgtctttcaattcaa

SEQ ID NO: 141234 - DNA, 25 bp, Canis familiaris
gtcggttgttgtctttccattaaag

SEQ ID NO: 141235 - DNA, 25 bp, Canis familiaris
gtcggttgttgtctttcaattaaag

SEQ ID NO: 141236 - DNA, 25 bp, Canis familiaris
gtcggttgttgtctttcaattaaag

SEQ ID NO: 141237 - DNA, 25 bp, Canis familiaris
gtcggttgttgtctttcaattaaag

SEQ ID NO: 141238 - DNA, 25 bp, Canis familiaris
gtccgtttgcgtatgtgtaaaaggg

SEQ ID NO: 141239 - DNA, 25 bp, Canis familiaris
gtgcccccgaggctgttgaataaag

SEQ ID NO: 141240 - DNA, 25 bp, Canis familiaris
gtccctcccaagatgttgtttacac

SEQ ID NO: 141241 - DNA, 25 bp, Canis familiaris
gtccacccaaatttgttcctataat

SEQ ID NO: 141242 - DNA, 25 bp, Canis familiaris
gtccacgactccagttttctaaata

SEQ ID NO: 141243 - DNA, 25 bp, Canis familiaris
gtcccgactacaactatttccagaa

SEQ ID NO: 141244 - DNA, 25 bp, Canis familiaris
gtccccctactgacttggtatggaa

SEQ ID NO: 141245 - DNA, 25 bp, Canis familiaris
gtgtccctaacctgggtgttgaaca

SEQ ID NO: 141246 - DNA, 25 bp, Canis familiaris
gtcccgataacccacgttgtggaca

SEQ ID NO: 141247 - DNA, 25 bp, Canis familiaris
gtccctgaaacctagaaattgtcct

SEQ ID NO: 141248 - DNA, 25 bp, Canis familiaris
gtcccgaacaccagaaactacagca

SEQ ID NO: 141249 - DNA, 25 bp, Canis familiaris
gtgccactaactcaataaaaccgcc

SEQ ID NO: 141250 - DNA, 25 bp, Canis familiaris
gtgccaatgaaccaaccaataaccc

SEQ ID NO: 141251 - DNA, 25 bp, Canis familiaris
gtgacgtggacatccgcaaagacct

SEQ ID NO: 141252 - DNA, 25 bp, Canis familiaris
gtgggggaaatctgctgacaacctg

SEQ ID NO: 141253 - DNA, 25 bp, Canis familiaris
gtgtcgggaaagagcttgaaccagg

SEQ ID NO: 141254 - DNA, 25 bp, Canis familiaris
gtccgggaaagtccaggaactcagg

SEQ ID NO: 141255 - DNA, 25 bp, Canis familiaris
gtcccgaaaagccatcgacaagctt

SEQ ID NO: 141256 - DNA, 25 bp, Canis familiaris
gtccccagaaacacggaagtcctca

SEQ ID NO: 141257 - DNA, 25 bp, Canis familiaris
gtccccagggcctggaaagtcccag

SEQ ID NO: 141258 - DNA, 25 bp, Canis familiaris
gtcccatagaggattgtaagggccc

SEQ ID NO: 141259 - DNA, 25 bp, Canis familiaris
gtcgtatagaagatcaaaaacccaa

SEQ ID NO: 141260 - DNA, 25 bp, Canis familiaris
gtcggctagatacttcaattatacc

SEQ ID NO: 141261 - DNA, 25 bp, Canis familiaris
gtcgagtcagatccttaatatatgt

SEQ ID NO: 141262 - DNA, 25 bp, Canis familiaris
gtcgcaggaacactgtcaaacagtc

SEQ ID NO: 141263 - DNA, 25 bp, Canis familiaris
gtcgcgcggatcatgatgccaacct

SEQ ID NO: 141264 - DNA, 25 bp, Canis familiaris
gtctgcaagaagcctgggagctcct

SEQ ID NO: 141265 - DNA, 25 bp, Canis familiaris
gtccaaaggttgcaggctcactatc

SEQ ID NO: 141266 - DNA, 25 bp, Canis familiaris
gtgccagcaaccctcgggtaatgtc

SEQ ID NO: 141267 - DNA, 25 bp, Canis familiaris
ggccctgacggaggccgtcatgttc

SEQ ID NO: 141268 - DNA, 25 bp, Canis familiaris
gtcccgacggactcgaagtgtcgtt

SEQ ID NO: 141269 - DNA, 25 bp, Canis familiaris
gtcggcgatctttgcttgcagaagg

SEQ ID NO: 141270 - DNA, 25 bp, Canis familiaris
gtctgagctactatctagctggggg

SEQ ID NO: 141271 - DNA, 25 bp, Canis familiaris
gtctgagcttttactgatcactgga

SEQ ID NO: 141272 - DNA, 25 bp, Canis familiaris
gtctgagttttacaatctcgtccga

SEQ ID NO: 141273 - DNA, 25 bp, Canis familiaris
gtcgggtgttctcaactcttccgac

SEQ ID NO: 141274 - DNA, 25 bp, Canis familiaris
gtcgggtattcttgaaactctctgg

SEQ ID NO: 141275 - DNA, 25 bp, Canis familiaris
gtctgggtttgcttaaatctatagg

SEQ ID NO: 141276 - DNA, 25 bp, Canis familiaris
gtctgggtgtgtgttaagctgtggc

SEQ ID NO: 141277 - DNA, 25 bp, Canis familiaris
gtcccaggcgtggttatggctgtgg

SEQ ID NO: 141278 - DNA, 25 bp, Canis familiaris
gtcgctgcaggggtacttagttggg

SEQ ID NO: 141279 - DNA, 25 bp, Canis familiaris
gtcgctatgtggagtcttaaagtca

SEQ ID NO: 141280 - DNA, 25 bp, Canis familiaris
gtgcctgttcagagtttcaaaattt

SEQ ID NO: 141281 - DNA, 25 bp, Canis familiaris
gtcccttagggttagcaaacacttg

SEQ ID NO: 141282 - DNA, 25 bp, Canis familiaris
gtcgcgctgtaagaagcaacaacct

SEQ ID NO: 141283 - DNA, 25 bp, Canis familiaris
gtcgcactgtttggggaccagatcc

SEQ ID NO: 141284 - DNA, 25 bp, Canis familiaris
gtcgcctctggcagcgaaaagaccc

SEQ ID NO: 141285 - DNA, 25 bp, Canis familiaris
gtgcggtctcacaccaaagagtgca

SEQ ID NO: 141286 - DNA, 25 bp, Canis familiaris
gtcggtctgcagcatcctgaaattc

SEQ ID NO: 141287 - DNA, 25 bp, Canis familiaris
gtccggctggcttccaaatatgcca

SEQ ID NO: 141288 - DNA, 25 bp, Canis familiaris
gtcggttaccatccatatatatcca

SEQ ID NO: 141289 - DNA, 25 bp, Canis familiaris
gtcggtaaccggtatctacgagatt

SEQ ID NO: 141290 - DNA, 25 bp, Canis familiaris
gtgcgggaaccttgtacaccgatca

SEQ ID NO: 141291 - DNA, 25 bp, Canis familiaris
gtgcggtaatttatccacggcactc

SEQ ID NO: 141292 - DNA, 25 bp, Canis familiaris
gtcggttatttaggtccagcagcta

SEQ ID NO: 141293 - DNA, 25 bp, Canis familiaris
gtcgttatctataaggaccaaggac

SEQ ID NO: 141294 - DNA, 25 bp, Canis familiaris
gtcgttatctataagaccaagaccg

SEQ ID NO: 141295 - DNA, 25 bp, Canis familiaris
gtcgatgtgacctgaagcctaactg

SEQ ID NO: 141296 - DNA, 25 bp, Canis familiaris
ttacttcctaggtgcctgaacggcc

SEQ ID NO: 141297 - DNA, 25 bp, Canis familiaris
ttccccctttgctgtaaaggtccag

SEQ ID NO: 141298 - DNA, 25 bp, Canis familiaris
gtccaccctttcagggaagttcctg

SEQ ID NO: 141299 - DNA, 25 bp, Canis familiaris
gtcccctcttcatgggaaaggtggt

SEQ ID NO: 141300 - DNA, 25 bp, Canis familiaris
gtcccctcttcatgggaaaggtggt

SEQ ID NO: 141301 - DNA, 25 bp, Canis familiaris
gtcccccttggagcaataccaagcg

SEQ ID NO: 141302 - DNA, 25 bp, Canis familiaris
gtcctactttggagcaactggcaag

SEQ ID NO: 141303 - DNA, 25 bp, Canis familiaris
gtcgtccaattggctaagactttga

SEQ ID NO: 141304 - DNA, 25 bp, Canis familiaris
gtcggccctatggtgatcgagttta

SEQ ID NO: 141305 - DNA, 25 bp, Canis familiaris
gtcgagcctcattaaacgagttatt

SEQ ID NO: 141306 - DNA, 25 bp, Canis familiaris
gtcgagatctcattaatactgccta

SEQ ID NO: 141307 - DNA, 25 bp, Canis familiaris
gtcgacactatggagttgctcctga

SEQ ID NO: 141308 - DNA, 25 bp, Canis familiaris
gtcgacactgctgacagtgccactg

SEQ ID NO: 141309 - DNA, 25 bp, Canis familiaris
gtcgactcctgaacagtgactctgc

SEQ ID NO: 141310 - DNA, 25 bp, Canis familiaris
gtcggcatccgaagttgacttctac

SEQ ID NO: 141311 - DNA, 25 bp, Canis familiaris
gtcggcagcacatttttgtctttag

SEQ ID NO: 141312 - DNA, 25 bp, Canis familiaris
gtctgtgcccactttgtttgattgg

SEQ ID NO: 141313 - DNA, 25 bp, Canis familiaris
gtctgtcctcacttattcggagtgg

SEQ ID NO: 141314 - DNA, 25 bp, Canis familiaris
gtctgtttccaatgtgtgtgatgtg

SEQ ID NO: 141315 - DNA, 25 bp, Canis familiaris
gtctgtatgtctttggtgtgtgtgt

SEQ ID NO: 141316 - DNA, 25 bp, Canis familiaris
gtctgtagtgatcctccggagtgat

SEQ ID NO: 141317 - DNA, 25 bp, Canis familiaris
gtcgtcagtgttccttgaagctgcc

SEQ ID NO: 141318 - DNA, 25 bp, Canis familiaris
gtcgtcgtggctcgtggagagacgc

SEQ ID NO: 141319 - DNA, 25 bp, Canis familiaris
gtctggcagctgtctggatagcgtg

SEQ ID NO: 141320 - DNA, 25 bp, Canis familiaris
gtcgagcagcgtagtgtcaggggga

SEQ ID NO: 141321 - DNA, 25 bp, Canis familiaris
gtcgcacacatctgtgtacgcggtg

SEQ ID NO: 141322 - DNA, 25 bp, Canis familiaris
gtcgcaatatatactgtagcctttc

SEQ ID NO: 141323 - DNA, 25 bp, Canis familiaris
gtcgtataatgagccaccatacccc

SEQ ID NO: 141324 - DNA, 25 bp, Canis familiaris
gtcgtaggctgtcctaccatacagc

SEQ ID NO: 141325 - DNA, 25 bp, Canis familiaris
gtcctcggctaaagcccaaagcgga

SEQ ID NO: 141326 - DNA, 25 bp, Canis familiaris
gtccgagtgctatttcaccaacggg

SEQ ID NO: 141327 - DNA, 25 bp, Canis familiaris
gtcgcagacccagttactcattggg

SEQ ID NO: 141328 - DNA, 25 bp, Canis familiaris
gtcgagacgactttttgttggtgcg

SEQ ID NO: 141329 - DNA, 25 bp, Canis familiaris
gtccgaccacatttcatggttgcgg

SEQ ID NO: 141330 - DNA, 25 bp, Canis familiaris
gtcgctgaggccatagtcaataggg

SEQ ID NO: 141331 - DNA, 25 bp, Canis familiaris
gtgcgaaggactcgttcaacagtgg

SEQ ID NO: 141332 - DNA, 25 bp, Canis familiaris
gtctggaagactttctcaacgctga

SEQ ID NO: 141333 - DNA, 25 bp, Canis familiaris
gtctggacagacactccagcggaca

SEQ ID NO: 141334 - DNA, 25 bp, Canis familiaris
gtcgagaaacggactcacaggaaag

SEQ ID NO: 141335 - DNA, 25 bp, Canis familiaris
gtcgagaacggacttcacaggaggg

SEQ ID NO: 141336 - DNA, 25 bp, Canis familiaris
gtcgagaaccggctcgtcaggatgc

SEQ ID NO: 141337 - DNA, 25 bp, Canis familiaris
gtctgtgatgactgggtactacgag

SEQ ID NO: 141338 - DNA, 25 bp, Canis familiaris
gtctgtggatctggagttactactc

SEQ ID NO: 141339 - DNA, 25 bp, Canis familiaris
gtcgatgtgactgcatgttcctgga

SEQ ID NO: 141340 - DNA, 25 bp, Canis familiaris
gtctgtgtgattcatgtgatcccga

SEQ ID NO: 141341 - DNA, 25 bp, Canis familiaris
gtctgtggatcatatgtttcctgac

SEQ ID NO: 141342 - DNA, 25 bp, Canis familiaris
gtctgtgaatcataagcatgccctg

SEQ ID NO: 141343 - DNA, 25 bp, Canis familiaris
gtctgtaatgcaacacttggtgctg

SEQ ID NO: 141344 - DNA, 25 bp, Canis familiaris
gtctgtatatgctaactccgttgct

SEQ ID NO: 141345 - DNA, 25 bp, Canis familiaris
gtctggatgatctacccatttatga

SEQ ID NO: 141346 - DNA, 25 bp, Canis familiaris
gtctggagtgaaccttttatgcaaa

SEQ ID NO: 141347 - DNA, 25 bp, Canis familiaris
gtctggaggaatctgtatctgtgga

SEQ ID NO: 141348 - DNA, 25 bp, Canis familiaris
gtctggtgagaatgtgtcatcagct

SEQ ID NO: 141349 - DNA, 25 bp, Canis familiaris
gtctgggaagtagggcagtgctggg

SEQ ID NO: 141350 - DNA, 25 bp, Canis familiaris
gtcggagcatatgaggagctggtga

SEQ ID NO: 141351 - DNA, 25 bp, Canis familiaris
gtcgcgatccgcgacgaggtggacc

SEQ ID NO: 141352 - DNA, 25 bp, Canis familiaris
gtcggagccgcgcgagatatggccc

SEQ ID NO: 141353 - DNA, 25 bp, Canis familiaris
gtcggagtcggaagatgaaggccag

SEQ ID NO: 141354 - DNA, 25 bp, Canis familiaris
gtcggatgtggggaaatcagggcag

SEQ ID NO: 141355 - DNA, 25 bp, Canis familiaris
gtcgtgtgagggtccagactggacg

SEQ ID NO: 141356 - DNA, 25 bp, Canis familiaris
gtcggaagcggagtgcagagcgggg

SEQ ID NO: 141357 - DNA, 25 bp, Canis familiaris
gtcggaagcggaatgacgccggggg

SEQ ID NO: 141358 - DNA, 25 bp, Canis familiaris
gtcgtccagggaccactgacggagg

SEQ ID NO: 141359 - DNA, 25 bp, Canis familiaris
gtcccctgagtacctctgggatgac

SEQ ID NO: 141360 - DNA, 25 bp, Canis familiaris
gtccttcgtgtaccctgtatcaggg

SEQ ID NO: 141361 - DNA, 25 bp, Canis familiaris
gtccaatgagttaccggatacaggg

SEQ ID NO: 141362 - DNA, 25 bp, Canis familiaris
gtccaaattggcaggtgctaagggt

SEQ ID NO: 141363 - DNA, 25 bp, Canis familiaris
gtccaagatgtgggggttcgtggtt

SEQ ID NO: 141364 - DNA, 25 bp, Canis familiaris
gtcccaggtgggggtgtctgtagaa

SEQ ID NO: 141365 - DNA, 25 bp, Canis familiaris
gtcccagcgtggggactacaggcca

SEQ ID NO: 141366 - DNA, 25 bp, Canis familiaris
gtcccagcggggaaccactggtagc

SEQ ID NO: 141367 - DNA, 25 bp, Canis familiaris
gtcccagggctgcatgaacaatgtg

SEQ ID NO: 141368 - DNA, 25 bp, Canis familiaris
gtcgccgcggcacaagaaggaggag

SEQ ID NO: 141369 - DNA, 25 bp, Canis familiaris
gtcgtcgtgtcgtaaatactgtcga

SEQ ID NO: 141370 - DNA, 25 bp, Canis familiaris
gtcccttatctatagtactgcacgc

SEQ ID NO: 141371 - DNA, 25 bp, Canis familiaris
gtcccttcactttagtagttagcta

SEQ ID NO: 141372 - DNA, 25 bp, Canis familiaris
tgatcaccttttgtagttttaccgg

SEQ ID NO: 141373 - DNA, 25 bp, Canis familiaris
gtccctatccatcaagtttgtcacc

SEQ ID NO: 141374 - DNA, 25 bp, Canis familiaris
gtcgaccatccacattgacgagatc

SEQ ID NO: 141375 - DNA, 25 bp, Canis familiaris
gtcgagggctagtagtgttgagaca

SEQ ID NO: 141376 - DNA, 25 bp, Canis familiaris
gtcgaatggtcagcgctgattaagt

SEQ ID NO: 141377 - DNA, 25 bp, Canis familiaris
gtcgactgtattgctgcttttcgct

SEQ ID NO: 141378 - DNA, 25 bp, Canis familiaris
gtcgtagttgaccatattttctgct

SEQ ID NO: 141379 - DNA, 25 bp, Canis familiaris
gtcgaaggacactatttttctagac

SEQ ID NO: 141380 - DNA, 25 bp, Canis familiaris
gtcggagatgatccagttttacttg

SEQ ID NO: 141381 - DNA, 25 bp, Canis familiaris
gtctggcgtgatcaacattttgtta

SEQ ID NO: 141382 - DNA, 25 bp, Canis familiaris
gtctgggtcatttagattttctttt

SEQ ID NO: 141383 - DNA, 25 bp, Canis familiaris
gtctggctatttttgtatgtatcta

SEQ ID NO: 141384 - DNA, 25 bp, Canis familiaris
gtcggtgatttcgtttgactcaaac

SEQ ID NO: 141385 - DNA, 25 bp, Canis familiaris
gtcgttgttgtcggcgatactctag

SEQ ID NO: 141386 - DNA, 25 bp, Canis familiaris
gtcgttgttggaggagcaaccacag

SEQ ID NO: 141387 - DNA, 25 bp, Canis familiaris
gtccaggtcggggaaatccacagac

SEQ ID NO: 141388 - DNA, 25 bp, Canis familiaris
gtccggttggtggcgaacgccatca

SEQ ID NO: 141389 - DNA, 25 bp, Canis familiaris
gtccgggggttcaaagagtctgcgt

SEQ ID NO: 141390 - DNA, 25 bp, Canis familiaris
gtccgagggagtcaaacaggtgtct

SEQ ID NO: 141391 - DNA, 25 bp, Canis familiaris
gtccgcggggaggtgaggcgggact

SEQ ID NO: 141392 - DNA, 25 bp, Canis familiaris
gtcggctggggatggtacgggaacg

SEQ ID NO: 141393 - DNA, 25 bp, Canis familiaris
tgtcgtggggacaggttcggatttc

SEQ ID NO: 141394 - DNA, 25 bp, Canis familiaris
gtctggggaggcaggttctgtgttc

SEQ ID NO: 141395 - DNA, 25 bp, Canis familiaris
gtctggggcagggaggtgtctgttg

SEQ ID NO: 141396 - DNA, 25 bp, Canis familiaris
gtctggggcagacaggtggtcaagg

SEQ ID NO: 141397 - DNA, 25 bp, Canis familiaris
gtccgtggcaaccacgtggtccaac

SEQ ID NO: 141398 - DNA, 25 bp, Canis familiaris
gtccacattaaacgggtctccaaca

SEQ ID NO: 141399 - DNA, 25 bp, Canis familiaris
gtcggaactacacacagtctccaac

SEQ ID NO: 141400 - DNA, 25 bp, Canis familiaris
gtctggggtaagcactgtcacccac

SEQ ID NO: 141401 - DNA, 25 bp, Canis familiaris
gtctggggaaatcaatctcacacaa

SEQ ID NO: 141402 - DNA, 25 bp, Canis familiaris
gtcgcggagataaaaactattcaag

SEQ ID NO: 141403 - DNA, 25 bp, Canis familiaris
gtcggtgcaatcaaaacacaatcac

SEQ ID NO: 141404 - DNA, 25 bp, Canis familiaris
gtcccaaactaattgacgatcacag

SEQ ID NO: 141405 - DNA, 25 bp, Canis familiaris
gtccacaatggcaaaaaggcaactc

SEQ ID NO: 141406 - DNA, 25 bp, Canis familiaris
gtccctcatgttttcaaggctgacc

SEQ ID NO: 141407 - DNA, 25 bp, Canis familiaris
gtcccatctgttacccagggacctc

SEQ ID NO: 141408 - DNA, 25 bp, Canis familiaris
gtccgcatctgtgacgtcgggaacc

SEQ ID NO: 141409 - DNA, 25 bp, Canis familiaris
gtcgagctcagggacatgtctagga

SEQ ID NO: 141410 - DNA, 25 bp, Canis familiaris
gtctgggcaagcgcagttaatgtgc

SEQ ID NO: 141411 - DNA, 25 bp, Canis familiaris
gtcgaggcagaggccggaaacttac

SEQ ID NO: 141412 - DNA, 25 bp, Canis familiaris
gtctggggagacaggaaagtttcca

SEQ ID NO: 141413 - DNA, 25 bp, Canis familiaris
gtctggggaagcaaggaacatgttt

SEQ ID NO: 141414 - DNA, 25 bp, Canis familiaris
gtctggagggagagcgacctgcaag

SEQ ID NO: 141415 - DNA, 25 bp, Canis familiaris
gtctggacgagccgggagacgaggt

SEQ ID NO: 141416 - DNA, 25 bp, Canis familiaris
gtcggccgtctcctggagacgcagg

SEQ ID NO: 141417 - DNA, 25 bp, Canis familiaris
gtcggtcgttggggatgttgcggaa

SEQ ID NO: 141418 - DNA, 25 bp, Canis familiaris
gtcggtggtatcgtgaatgtgtgcg

SEQ ID NO: 141419 - DNA, 25 bp, Canis familiaris
gtcggtggtcacctgagagacggta

SEQ ID NO: 141420 - DNA, 25 bp, Canis familiaris
gtctggggtccagtgaggaagcctc

SEQ ID NO: 141421 - DNA, 25 bp, Canis familiaris
gtctggggcctcatgagtgaatttg

SEQ ID NO: 141422 - DNA, 25 bp, Canis familiaris
gtcggacctctcagaggactttggc

SEQ ID NO: 141423 - DNA, 25 bp, Canis familiaris
gtcgtggctcccagggagtgagggc

SEQ ID NO: 141424 - DNA, 25 bp, Canis familiaris
gtccgagtcacgacggtgtcgaggg

SEQ ID NO: 141425 - DNA, 25 bp, Canis familiaris
gtccggacatcgaccgggtggggct

SEQ ID NO: 141426 - DNA, 25 bp, Canis familiaris
gtcccagtcccacagaggtagaggt

SEQ ID NO: 141427 - DNA, 25 bp, Canis familiaris
gtcccctcttcctatgttggaaggc

SEQ ID NO: 141428 - DNA, 25 bp, Canis familiaris
gtcccgcctcaagatgtttgcaaag

SEQ ID NO: 141429 - DNA, 25 bp, Canis familiaris
gtcctccactggagactttagagga

SEQ ID NO: 141430 - DNA, 25 bp, Canis familiaris
gtccatcacattgtacacccggaaa

SEQ ID NO: 141431 - DNA, 25 bp, Canis familiaris
gtcgtccatcgaaaactccacggaa

SEQ ID NO: 141432 - DNA, 25 bp, Canis familiaris
gtcgtggtgcagagactcttccagg

SEQ ID NO: 141433 - DNA, 25 bp, Canis familiaris
gtctggtctgagacaggcttcatct

SEQ ID NO: 141434 - DNA, 25 bp, Canis familiaris
gtcgcacatcgaacaggatatctcg

SEQ ID NO: 141435 - DNA, 25 bp, Canis familiaris
gtcggtgcaaaagtgtatccccaga

SEQ ID NO: 141436 - DNA, 25 bp, Canis familiaris
gtccctgccaagacatggacaccca

SEQ ID NO: 141437 - DNA, 25 bp, Canis familiaris
gtcccatgtctaactgtagacttat

SEQ ID NO: 141438 - DNA, 25 bp, Canis familiaris
gtcgcgagattaactattcaagcta

SEQ ID NO: 141439 - DNA, 25 bp, Canis familiaris
gtcctgatgtttctgcagtcaacca

SEQ ID NO: 141440 - DNA, 25 bp, Canis familiaris
gtccgattttcacctgatagcaagc

SEQ ID NO: 141441 - DNA, 25 bp, Canis familiaris
gtccgttccatctgtgagaaatcac

SEQ ID NO: 141442 - DNA, 25 bp, Canis familiaris
gtccgtgaccgcagtgatgaagaaa

SEQ ID NO: 141443 - DNA, 25 bp, Canis familiaris
gtctggtatcctaagcttgaaacaa

SEQ ID NO: 141444 - DNA, 25 bp, Canis familiaris
gtgcagagtaccatagtaaaccagt

SEQ ID NO: 141445 - DNA, 25 bp, Canis familiaris
gtgcagaaacccaggatacttcgtg

SEQ ID NO: 141446 - DNA, 25 bp, Canis familiaris
gtcgaataccaaaggacaccttgga

SEQ ID NO: 141447 - DNA, 25 bp, Canis familiaris
gtcggacaccagacggtggcacttt

SEQ ID NO: 141448 - DNA, 25 bp, Canis familiaris
gtcctgaaccaggtgggcgactgtt

SEQ ID NO: 141449 - DNA, 25 bp, Canis familiaris
gtccagaccaagggtacagcctgtt

SEQ ID NO: 141450 - DNA, 25 bp, Canis familiaris
gtccaactcaaggtcttcagtccta

SEQ ID NO: 141451 - DNA, 25 bp, Canis familiaris
gtccagagaatagtccttaccactg

SEQ ID NO: 141452 - DNA, 25 bp, Canis familiaris
gtccacaactactcggaggccgaga

SEQ ID NO: 141453 - DNA, 25 bp, Canis familiaris
gtcccataaggctcccatggggaga

SEQ ID NO: 141454 - DNA, 25 bp, Canis familiaris
tataccaaggagggccccgagggca

SEQ ID NO: 141455 - DNA, 25 bp, Canis familiaris
tgattaagagggacggccgggggca

SEQ ID NO: 141456 - DNA, 25 bp, Canis familiaris
gtcgaagcgaggacgtggtgggtcc

SEQ ID NO: 141457 - DNA, 25 bp, Canis familiaris
gtctggaaagagctggggggcttct

SEQ ID NO: 141458 - DNA, 25 bp, Canis familiaris
gtctggagggaggtggttggggtct

SEQ ID NO: 141459 - DNA, 25 bp, Canis familiaris
gtgctggatatgcacctgtgctggg

SEQ ID NO: 141460 - DNA, 25 bp, Canis familiaris
gtctggctatgcgaggttcatgggg

SEQ ID NO: 141461 - DNA, 25 bp, Canis familiaris
gtctggctaccatgaactgccacgc

SEQ ID NO: 141462 - DNA, 25 bp, Canis familiaris
gtcggtatcctaaactctcaggctt

SEQ ID NO: 141463 - DNA, 25 bp, Canis familiaris
gtccgttactcaagattctaggtct

SEQ ID NO: 141464 - DNA, 25 bp, Canis familiaris
gtcgcatttactttgaccaatgttc

SEQ ID NO: 141465 - DNA, 25 bp, Canis familiaris
gtccgtttctaatctcgtgttttga

SEQ ID NO: 141466 - DNA, 25 bp, Canis familiaris
gtctggtttctagacttgtgctgat

SEQ ID NO: 141467 - DNA, 25 bp, Canis familiaris
gtcgttttcataggcaactggagtc

SEQ ID NO: 141468 - DNA, 25 bp, Canis familiaris
gtcctcttcaagggccaagggtgcc

SEQ ID NO: 141469 - DNA, 25 bp, Canis familiaris
gtccttcccaatgcctaaggcaact

SEQ ID NO: 141470 - DNA, 25 bp, Canis familiaris
gtccttcccttaactgaagttacat

SEQ ID NO: 141471 - DNA, 25 bp, Canis familiaris
gtccaacccacttttgaagttccat

SEQ ID NO: 141472 - DNA, 25 bp, Canis familiaris
gtccaactccaacgaaaactccgat

SEQ ID NO: 141473 - DNA, 25 bp, Canis familiaris
gtccgtaccaaccaaaacatctaat

SEQ ID NO: 141474 - DNA, 25 bp, Canis familiaris
gtccctacggagctaacattctgaa

SEQ ID NO: 141475 - DNA, 25 bp, Canis familiaris
gtcccccacgagttataatacataa

SEQ ID NO: 141476 - DNA, 25 bp, Canis familiaris
gtccccccgtggaatgatgataaac

SEQ ID NO: 141477 - DNA, 25 bp, Canis familiaris
gtcgcatccaccagtgtatcagcat

SEQ ID NO: 141478 - DNA, 25 bp, Canis familiaris
gtcgcttacagctgtcgacagtatg

SEQ ID NO: 141479 - DNA, 25 bp, Canis familiaris
gtcgcttgccatcagttagcagaga

SEQ ID NO: 141480 - DNA, 25 bp, Canis familiaris
gtcgtcatccatccaagacacacaa

SEQ ID NO: 141481 - DNA, 25 bp, Canis familiaris
gtcgtgatctcatgctgacacacac

SEQ ID NO: 141482 - DNA, 25 bp, Canis familiaris
gtcggatgctaagatcacctttcca

SEQ ID NO: 141483 - DNA, 25 bp, Canis familiaris
gtctggaagaagactctcccttccc

SEQ ID NO: 141484 - DNA, 25 bp, Canis familiaris
gtcgtaacgagttcctcaatgtccc

SEQ ID NO: 141485 - DNA, 25 bp, Canis familiaris
gtcccaaaatgttacgttgaccagc

SEQ ID NO: 141486 - DNA, 25 bp, Canis familiaris
gtccccaaagatcagccttaaagta

SEQ ID NO: 141487 - DNA, 25 bp, Canis familiaris
gtccaacaaaacgcacttaagaggt

SEQ ID NO: 141488 - DNA, 25 bp, Canis familiaris
gtcctacaatacagcctctaacaaa

SEQ ID NO: 141489 - DNA, 25 bp, Canis familiaris
gtcccagcactgtaacctgtaacca

SEQ ID NO: 141490 - DNA, 25 bp, Canis familiaris
gtcgcagcagcaagacatgcaccgt

SEQ ID NO: 141491 - DNA, 25 bp, Canis familiaris
gtcgcgacacgcatgaacgttatat

SEQ ID NO: 141492 - DNA, 25 bp, Canis familiaris
gtcgcaagtcacagaattatttgaa

SEQ ID NO: 141493 - DNA, 25 bp, Canis familiaris
gtcggtggcccaagaagagtgctga

SEQ ID NO: 141494 - DNA, 25 bp, Canis familiaris
gtcggtggcccaagaagagtgctga

SEQ ID NO: 141495 - DNA, 25 bp, Canis familiaris
gtcggtggcccaagaagagtgctga

SEQ ID NO: 141496 - DNA, 25 bp, Canis familiaris
gtcggtggcgagatgagctgggcgc

SEQ ID NO: 141497 - DNA, 25 bp, Canis familiaris
gtcggtgggatgtgacggaggcccc

SEQ ID NO: 141498 - DNA, 25 bp, Canis familiaris
gtcgctgcatgggaggggggaggcc

SEQ ID NO: 141499 - DNA, 25 bp, Canis familiaris
gtctggcaggggtgtgctgagggga

SEQ ID NO: 141500 - DNA, 25 bp, Canis familiaris
gtcggaggttcaagtgggggtgtgg

SEQ ID NO: 141501 - DNA, 25 bp, Canis familiaris
gtcgttgtgtccaggcaggggagtg

SEQ ID NO: 141502 - DNA, 25 bp, Canis familiaris
gtcgttgtgttccagggttgggtgg

SEQ ID NO: 141503 - DNA, 25 bp, Canis familiaris
gtcgggttggcctgggtaggatgtt

SEQ ID NO: 141504 - DNA, 25 bp, Canis familiaris
gtcgggtttgctgtgggtgaggagc

SEQ ID NO: 141505 - DNA, 25 bp, Canis familiaris
gtcggcgtattggccttggaaggaa

SEQ ID NO: 141506 - DNA, 25 bp, Canis familiaris
gtcgggtcattgctctttagaagta

SEQ ID NO: 141507 - DNA, 25 bp, Canis familiaris
ggcagggttggtcacttggaagtta

SEQ ID NO: 141508 - DNA, 25 bp, Canis familiaris
gtcgggcttgttgagcctgaggagt

SEQ ID NO: 141509 - DNA, 25 bp, Canis familiaris
gtcgggcattttgctgccaaaccat

SEQ ID NO: 141510 - DNA, 25 bp, Canis familiaris
gtccggttcattggtccaagcccag

SEQ ID NO: 141511 - DNA, 25 bp, Canis familiaris
gtcccgttgagtggtccacaggggc

SEQ ID NO: 141512 - DNA, 25 bp, Canis familiaris
gtcccagtagttcttccagggcagt

SEQ ID NO: 141513 - DNA, 25 bp, Canis familiaris
gtcccgttatctcttaaggtgaatt

SEQ ID NO: 141514 - DNA, 25 bp, Canis familiaris
gtgcccgtttctgtcgagggttatt

SEQ ID NO: 141515 - DNA, 25 bp, Canis familiaris
gtcccactttctggtctaaggtatt

SEQ ID NO: 141516 - DNA, 25 bp, Canis familiaris
gtccgagatcggatgttaaggattt

SEQ ID NO: 141517 - DNA, 25 bp, Canis familiaris
gtcccgtctggcttgtttcagaata

SEQ ID NO: 141518 - DNA, 25 bp, Canis familiaris
gtgcccgacaggtcatgtttggtta

SEQ ID NO: 141519 - DNA, 25 bp, Canis familiaris
gtcccgaatggactgtggggtttct

SEQ ID NO: 141520 - DNA, 25 bp, Canis familiaris
gtcccaagtggccggggcagtaagt

SEQ ID NO: 141521 - DNA, 25 bp, Canis familiaris
gtccaataccaccggggcgaaatga

SEQ ID NO: 141522 - DNA, 25 bp, Canis familiaris
gtccccacgcccaggacaagaagat

SEQ ID NO: 141523 - DNA, 25 bp, Canis familiaris
tgtcccctccggtggaaagatttgg

SEQ ID NO: 141524 - DNA, 25 bp, Canis familiaris
tgtccgcctactcttggaattttta

SEQ ID NO: 141525 - DNA, 25 bp, Canis familiaris
gtcccctcgctactaataatttatg

SEQ ID NO: 141526 - DNA, 25 bp, Canis familiaris
gtccacctttcccaaagattctagt

SEQ ID NO: 141527 - DNA, 25 bp, Canis familiaris
gtcccgttttccaaagatactgcat

SEQ ID NO: 141528 - DNA, 25 bp, Canis familiaris
gtcgccgtcttgtgaacaagaattt

SEQ ID NO: 141529 - DNA, 25 bp, Canis familiaris
gtcccggggaggccataagaatgta

SEQ ID NO: 141530 - DNA, 25 bp, Canis familiaris
gtcccaaggagatgccacagaacgt

SEQ ID NO: 141531 - DNA, 25 bp, Canis familiaris
gtcccaaggaggcagaagaccctga

SEQ ID NO: 141532 - DNA, 25 bp, Canis familiaris
gtcccacaggacagttaacagccga

SEQ ID NO: 141533 - DNA, 25 bp, Canis familiaris
gtcctccgtcaccgttgacagacgg

SEQ ID NO: 141534 - DNA, 25 bp, Canis familiaris
gtcgcatccgtctttgtaacaatcg

SEQ ID NO: 141535 - DNA, 25 bp, Canis familiaris
gtcccacgtggtatgagcacagcac

SEQ ID NO: 141536 - DNA, 25 bp, Canis familiaris
gtcgtctgggggatggcacatgagt

SEQ ID NO: 141537 - DNA, 25 bp, Canis familiaris
gtcgattcgtgtggttgcgtgttgt

SEQ ID NO: 141538 - DNA, 25 bp, Canis familiaris
gtcgcatccattggcggtggtggtg

SEQ ID NO: 141539 - DNA, 25 bp, Canis familiaris
gtcgctactaccgattggatggttt

SEQ ID NO: 141540 - DNA, 25 bp, Canis familiaris
gtccccatgacctagttgttttata

SEQ ID NO: 141541 - DNA, 25 bp, Canis familiaris
gtcccgctacctgtagattctgtat

SEQ ID NO: 141542 - DNA, 25 bp, Canis familiaris
gtcccgatttctcttttatgatttc

SEQ ID NO: 141543 - DNA, 25 bp, Canis familiaris
gtcccaatttctcttgtatgagttt

SEQ ID NO: 141544 - DNA, 25 bp, Canis familiaris
gtcccttgtttatggttggacaaat

SEQ ID NO: 141545 - DNA, 25 bp, Canis familiaris
gtcgccatagttcgagacctgggac

SEQ ID NO: 141546 - DNA, 25 bp, Canis familiaris
gtcgtgcatatttcaaagcttaaga

SEQ ID NO: 141547 - DNA, 25 bp, Canis familiaris
gtcggctcttcctatcattgtgaag

SEQ ID NO: 141548 - DNA, 25 bp, Canis familiaris
gtcgtgtcttctctatgtgtgtaga

SEQ ID NO: 141549 - DNA, 25 bp, Canis familiaris
gtcggctgctacaaagctgatcgta

SEQ ID NO: 141550 - DNA, 25 bp, Canis familiaris
gtcggtgctcaacactatggcaact

SEQ ID NO: 141551 - DNA, 25 bp, Canis familiaris
gtcggatctaatgacttctgcccac

SEQ ID NO: 141552 - DNA, 25 bp, Canis familiaris
gtcggatctaatgacttctgcccac

SEQ ID NO: 141553 - DNA, 25 bp, Canis familiaris
gtcgttcttcatgactcttcacaaa

SEQ ID NO: 141554 - DNA, 25 bp, Canis familiaris
gtcgtatcatctacttgtcattaca

SEQ ID NO: 141555 - DNA, 25 bp, Canis familiaris
gtcgctgaacggcgtgcattatcaa

SEQ ID NO: 141556 - DNA, 25 bp, Canis familiaris
gtcctgaacaacggtgtgctccaga

SEQ ID NO: 141557 - DNA, 25 bp, Canis familiaris
gtcgcttactttgagtgatcctcca

SEQ ID NO: 141558 - DNA, 25 bp, Canis familiaris
gtcgttgagttactatgttcctcca

SEQ ID NO: 141559 - DNA, 25 bp, Canis familiaris
gtcggtgatttgtttgtctttctga

SEQ ID NO: 141560 - DNA, 25 bp, Canis familiaris
gtcgtttggcttttgcttctacaga

SEQ ID NO: 141561 - DNA, 25 bp, Canis familiaris
gtcctttggtccttctttgaagctc

SEQ ID NO: 141562 - DNA, 25 bp, Canis familiaris
gtccctttagctttgtttgagtctc

SEQ ID NO: 141563 - DNA, 25 bp, Canis familiaris
gtcgcgatttcacaagttctggtgg

SEQ ID NO: 141564 - DNA, 25 bp, Canis familiaris
gtcggtattcctaaactcttctggt

SEQ ID NO: 141565 - DNA, 25 bp, Canis familiaris
gtcctgaattttagtccagttctgg

SEQ ID NO: 141566 - DNA, 25 bp, Canis familiaris
gtccgtattgttttcacacttctgg

SEQ ID NO: 141567 - DNA, 25 bp, Canis familiaris
gtccgtttgatgtttcccgtatgga

SEQ ID NO: 141568 - DNA, 25 bp, Canis familiaris
gtccgtcttagcataccatgcgtgt

SEQ ID NO: 141569 - DNA, 25 bp, Canis familiaris
gtcgggttagcatcagagtgcggtt

SEQ ID NO: 141570 - DNA, 25 bp, Canis familiaris
gtcgggttcagatagatctttcttt

SEQ ID NO: 141571 - DNA, 25 bp, Canis familiaris
gtccgttgtagttatttgttgcctt

SEQ ID NO: 141572 - DNA, 25 bp, Canis familiaris
gtccagtggaaactttttgctcttt

SEQ ID NO: 141573 - DNA, 25 bp, Canis familiaris
gtgccggtgagttttgttggctcgt

SEQ ID NO: 141574 - DNA, 25 bp, Canis familiaris
gtgcgggtactattgtggatggtaa

SEQ ID NO: 141575 - DNA, 25 bp, Canis familiaris
gtcgctggctccagtggtcaggtaa

SEQ ID NO: 141576 - DNA, 25 bp, Canis familiaris
gtcgctgagtactggaacgggcaga

SEQ ID NO: 141577 - DNA, 25 bp, Canis familiaris
gtcgtgagccacaggaggggagcag

SEQ ID NO: 141578 - DNA, 25 bp, Canis familiaris
gtccgccacaatgggatgcaggtac

SEQ ID NO: 141579 - DNA, 25 bp, Canis familiaris
gtcgatgcaacgagtgatgaggttc

SEQ ID NO: 141580 - DNA, 25 bp, Canis familiaris
gtcgccaatgggctgatgggtgacc

SEQ ID NO: 141581 - DNA, 25 bp, Canis familiaris
gtcccgatggtgttaccgtgggtca

SEQ ID NO: 141582 - DNA, 25 bp, Canis familiaris
gtgcctcgggtgatgacccaggact

SEQ ID NO: 141583 - DNA, 25 bp, Canis familiaris
gtgcctttgggaagccccagggcac

SEQ ID NO: 141584 - DNA, 25 bp, Canis familiaris
gtgcctttgggaagccccagggcac

SEQ ID NO: 141585 - DNA, 25 bp, Canis familiaris
gtccttggggattttctcaggcaaa

SEQ ID NO: 141586 - DNA, 25 bp, Canis familiaris
gtcctgtggatcctgctgttcctgt

SEQ ID NO: 141587 - DNA, 25 bp, Canis familiaris
gtccctatgtcttgtgtgtttgtgc

SEQ ID NO: 141588 - DNA, 25 bp, Canis familiaris
gtccatctatgttgttccttaggca

SEQ ID NO: 141589 - DNA, 25 bp, Canis familiaris
gtcctggacttgaacacgtatgcca

SEQ ID NO: 141590 - DNA, 25 bp, Canis familiaris
gtcgccgtgcctaccatggtgacca

SEQ ID NO: 141591 - DNA, 25 bp, Canis familiaris
gtcgccgtgcctaccatggtgacca

SEQ ID NO: 141592 - DNA, 25 bp, Canis familiaris
gtcgtcttgatcttaatggtgtctt

SEQ ID NO: 141593 - DNA, 25 bp, Canis familiaris
gtcgatctggcatacgatagctgta

SEQ ID NO: 141594 - DNA, 25 bp, Canis familiaris
gtccctgatgagtacagcatactta

SEQ ID NO: 141595 - DNA, 25 bp, Canis familiaris
gtcgctgtcagagaatgccgctgtg

SEQ ID NO: 141596 - DNA, 25 bp, Canis familiaris
gtccgtcatggattatgcttttggt

SEQ ID NO: 141597 - DNA, 25 bp, Canis familiaris
gtcctgccaggagagtttacttgtg

SEQ ID NO: 141598 - DNA, 25 bp, Canis familiaris
gtcctgccagttcttttactgtcat

SEQ ID NO: 141599 - DNA, 25 bp, Canis familiaris
gtccccagaagttacattactattt

SEQ ID NO: 141600 - DNA, 25 bp, Canis familiaris
gtccacctgatgctaaagaaataaa

SEQ ID NO: 141601 - DNA, 25 bp, Canis familiaris
gtcgcgccttcgatcaaggactgaa

SEQ ID NO: 141602 - DNA, 25 bp, Canis familiaris
gtccgatttcagtgcaagggtacaa

SEQ ID NO: 141603 - DNA, 25 bp, Canis familiaris
gtcccactcacctgcaaggtggact

SEQ ID NO: 141604 - DNA, 25 bp, Canis familiaris
gtcctacttcctgaggctgttagct

SEQ ID NO: 141605 - DNA, 25 bp, Canis familiaris
gtcctagccaccaggggtctagtaa

SEQ ID NO: 141606 - DNA, 25 bp, Canis familiaris
gtcctgctgagagattggggttaag

SEQ ID NO: 141607 - DNA, 25 bp, Canis familiaris
gtccgtgtagagtttggggtagagc

SEQ ID NO: 141608 - DNA, 25 bp, Canis familiaris
gtcctggggtggatggggtaaggtg

SEQ ID NO: 141609 - DNA, 25 bp, Canis familiaris
gtcctcggaaggtgggtgtggggtg

SEQ ID NO: 141610 - DNA, 25 bp, Canis familiaris
gtccgggaatgcccggggatgcggc

SEQ ID NO: 141611 - DNA, 25 bp, Canis familiaris
gtccgaggaacaccagccagtggtg

SEQ ID NO: 141612 - DNA, 25 bp, Canis familiaris
gtccaggaacctccgaagtctggct

SEQ ID NO: 141613 - DNA, 25 bp, Canis familiaris
gtccgggacctgtatggagttgcag

SEQ ID NO: 141614 - DNA, 25 bp, Canis familiaris
gtcccaagccctttgaacatctggg

SEQ ID NO: 141615 - DNA, 25 bp, Canis familiaris
gtccttgacctttgataaccgtggc

SEQ ID NO: 141616 - DNA, 25 bp, Canis familiaris
gtccttgtccttactgaactgtgag

SEQ ID NO: 141617 - DNA, 25 bp, Canis familiaris
gtcccttgcactaactggatgtgtc

SEQ ID NO: 141618 - DNA, 25 bp, Canis familiaris
gtcccatccgtagctggctgatggc

SEQ ID NO: 141619 - DNA, 25 bp, Canis familiaris
gtcccagcacacatcacttgctgtg

SEQ ID NO: 141620 - DNA, 25 bp, Canis familiaris
gtcgatcgagactgcacactggatg

SEQ ID NO: 141621 - DNA, 25 bp, Canis familiaris
gtcgatccaccattgtcatttgagc

SEQ ID NO: 141622 - DNA, 25 bp, Canis familiaris
gtcgtaccacgggcattgtgatgga

SEQ ID NO: 141623 - DNA, 25 bp, Canis familiaris
gtcgtgaatcacagccactgtgacc

SEQ ID NO: 141624 - DNA, 25 bp, Canis familiaris
gtcgtgagaacttgcgcacttgggc

SEQ ID NO: 141625 - DNA, 25 bp, Canis familiaris
gtcgtggatgttggcggttgagcgc

SEQ ID NO: 141626 - DNA, 25 bp, Canis familiaris
gtcgaggtgttggtggatatggtga

SEQ ID NO: 141627 - DNA, 25 bp, Canis familiaris
gtccgggattcaatggatccgtgaa

SEQ ID NO: 141628 - DNA, 25 bp, Canis familiaris
gtccgacagcaacgtggtcctggac

SEQ ID NO: 141629 - DNA, 25 bp, Canis familiaris
gtccccagacatcggcgttctgggc

SEQ ID NO: 141630 - DNA, 25 bp, Canis familiaris
gtgaattcaaatctcgtgttgggct

SEQ ID NO: 141631 - DNA, 25 bp, Canis familiaris
gtcgttcacattgtcggtgtggtgt

SEQ ID NO: 141632 - DNA, 25 bp, Canis familiaris
gtcgctttatgtatcggtttgtgca

SEQ ID NO: 141633 - DNA, 25 bp, Canis familiaris
gtcgtacgtttgtaagctattgtga

SEQ ID NO: 141634 - DNA, 25 bp, Canis familiaris
gtccaccgttgacaagctttgtgcc

SEQ ID NO: 141635 - DNA, 25 bp, Canis familiaris
gtcccttgattaagcaagtgacttg

SEQ ID NO: 141636 - DNA, 25 bp, Canis familiaris
gtcccatttctaacttggcagcatg

SEQ ID NO: 141637 - DNA, 25 bp, Canis familiaris
gtcccacagatcaaaccggcaatga

SEQ ID NO: 141638 - DNA, 25 bp, Canis familiaris
gtcccgaagccattcaggccagatg

SEQ ID NO: 141639 - DNA, 25 bp, Canis familiaris
gtcgacgagaaggtgcaggccgtgc

SEQ ID NO: 141640 - DNA, 25 bp, Canis familiaris
gtgctaccgaagacaatggggtgcc

SEQ ID NO: 141641 - DNA, 25 bp, Canis familiaris
gtcgccctgagagcataggcggccc

SEQ ID NO: 141642 - DNA, 25 bp, Canis familiaris
gtccccatgtgagaaaggtccctcc

SEQ ID NO: 141643 - DNA, 25 bp, Canis familiaris
gtcccattggactacgaattccgat

SEQ ID NO: 141644 - DNA, 25 bp, Canis familiaris
gtcccctggtgatgggttcctaaca

SEQ ID NO: 141645 - DNA, 25 bp, Canis familiaris
gtccctgtgggatggtagtgtgtaa

SEQ ID NO: 141646 - DNA, 25 bp, Canis familiaris
gtccctgttgcttcggttatattgt

SEQ ID NO: 141647 - DNA, 25 bp, Canis familiaris
gtcccagtctctgctcagagttttg

SEQ ID NO: 141648 - DNA, 25 bp, Canis familiaris
gtcccagtgtgctctgtagtaggct

SEQ ID NO: 141649 - DNA, 25 bp, Canis familiaris
gtcctcagtgatgtcagttagtggc

SEQ ID NO: 141650 - DNA, 25 bp, Canis familiaris
gtccctgtatgcctctggtcgtacc

SEQ ID NO: 141651 - DNA, 25 bp, Canis familiaris
gtccctgtatttatggtcatacagc

SEQ ID NO: 141652 - DNA, 25 bp, Canis familiaris
gtccatttatttaacgcctaggcct

SEQ ID NO: 141653 - DNA, 25 bp, Canis familiaris
gtcctagtgattttacctttgttct

SEQ ID NO: 141654 - DNA, 25 bp, Canis familiaris
gtcccgtattttccagcatttatac

SEQ ID NO: 141655 - DNA, 25 bp, Canis familiaris
gtcccgttatttccagtgggtgcca

SEQ ID NO: 141656 - DNA, 25 bp, Canis familiaris
gtcccctcttagcagcttgggtaca

SEQ ID NO: 141657 - DNA, 25 bp, Canis familiaris
gtcgccctcagggtacttggaggac

SEQ ID NO: 141658 - DNA, 25 bp, Canis familiaris
gtgagttcctggtttcttggaaact

SEQ ID NO: 141659 - DNA, 25 bp, Canis familiaris
gtgctttcctactcatcttagtaag

SEQ ID NO: 141660 - DNA, 25 bp, Canis familiaris
gtgcctttcccatagcatttttgga

SEQ ID NO: 141661 - DNA, 25 bp, Canis familiaris
gtgcccataaccttagctattttaa

SEQ ID NO: 141662 - DNA, 25 bp, Canis familiaris
gtccgctcaattttagttaatccca

SEQ ID NO: 141663 - DNA, 25 bp, Canis familiaris
gtccttcctgggcagtgtaattcca

SEQ ID NO: 141664 - DNA, 25 bp, Canis familiaris
gtccggttgagtcttgtagtgacgc

SEQ ID NO: 141665 - DNA, 25 bp, Canis familiaris
gtccagtgtcaaccctttactacac

SEQ ID NO: 141666 - DNA, 25 bp, Canis familiaris
gtcctggtgaatgcccttattaccc

SEQ ID NO: 141667 - DNA, 25 bp, Canis familiaris
gtcctgagtttttccaatgaaccca

SEQ ID NO: 141668 - DNA, 25 bp, Canis familiaris
gtccttatcttcactagatacccaa

SEQ ID NO: 141669 - DNA, 25 bp, Canis familiaris
gtcccattctttgctgatgcattca

SEQ ID NO: 141670 - DNA, 25 bp, Canis familiaris
gtccctggcatctattcagagcagt

SEQ ID NO: 141671 - DNA, 25 bp, Canis familiaris
gtccctagcacttgtaggtgcttac

SEQ ID NO: 141672 - DNA, 25 bp, Canis familiaris
gtcgcctagcaggactactacatta

SEQ ID NO: 141673 - DNA, 25 bp, Canis familiaris
gtccccaaggacaagaacttagtga

SEQ ID NO: 141674 - DNA, 25 bp, Canis familiaris
gtcccccaagacagaagtacagcca

SEQ ID NO: 141675 - DNA, 25 bp, Canis familiaris
gtcccccaaacgctcagggatgacc

SEQ ID NO: 141676 - DNA, 25 bp, Canis familiaris
gtcccccgaaatcagaggagctacc

SEQ ID NO: 141677 - DNA, 25 bp, Canis familiaris
gtccccccaatttctgggagcatca

SEQ ID NO: 141678 - DNA, 25 bp, Canis familiaris
gtccacgtccgaaactgaggaactg

SEQ ID NO: 141679 - DNA, 25 bp, Canis familiaris
gtccacgtccggaactgagggactg

SEQ ID NO: 141680 - DNA, 25 bp, Canis familiaris
gtcccttccaggaaccaggaaccag

SEQ ID NO: 141681 - DNA, 25 bp, Canis familiaris
gtcctttccgcgaatcttctgaaaa

SEQ ID NO: 141682 - DNA, 25 bp, Canis familiaris
gtccctttagagtacttagattaga

SEQ ID NO: 141683 - DNA, 25 bp, Canis familiaris
gtcccttgtaagaccttggctggag

SEQ ID NO: 141684 - DNA, 25 bp, Canis familiaris
gtccagtttgggagctgtggccaga

SEQ ID NO: 141685 - DNA, 25 bp, Canis familiaris
tgacacgtgtttcaaggggccatct

SEQ ID NO: 141686 - DNA, 25 bp, Canis familiaris
gtccggaattcccgggatgccatct

SEQ ID NO: 141687 - DNA, 25 bp, Canis familiaris
gtccggaattcccgggatgcctgga

SEQ ID NO: 141688 - DNA, 25 bp, Canis familiaris
gtcgctggagaacccatgaggtttg

SEQ ID NO: 141689 - DNA, 25 bp, Canis familiaris
gtccggaggaccagagacaatcttg

SEQ ID NO: 141690 - DNA, 25 bp, Canis familiaris
gtccgggaaaaccatacacgctgtg

SEQ ID NO: 141691 - DNA, 25 bp, Canis familiaris
gtccgggaccgacgatgtagacagg

SEQ ID NO: 141692 - DNA, 25 bp, Canis familiaris
gtccacgatgtccgacggggacagg

SEQ ID NO: 141693 - DNA, 25 bp, Canis familiaris
gtccacgcgcacagatcgttgtgac

SEQ ID NO: 141694 - DNA, 25 bp, Canis familiaris
gtcgctcgtcaaatgtcgtgggaac

SEQ ID NO: 141695 - DNA, 25 bp, Canis familiaris
gtcgtttctgagcccaggttgataa

SEQ ID NO: 141696 - DNA, 25 bp, Canis familiaris
gtcgttccggaacactgtgaactgc

SEQ ID NO: 141697 - DNA, 25 bp, Canis familiaris
gtccttccagccaaggactgggacc

SEQ ID NO: 141698 - DNA, 25 bp, Canis familiaris
gtcctcccagccttggagagggttc

SEQ ID NO: 141699 - DNA, 25 bp, Canis familiaris
gtccatacggcgttgttttgcgttc

SEQ ID NO: 141700 - DNA, 25 bp, Canis familiaris
gtccaacagggtcttggtcctgcag

SEQ ID NO: 141701 - DNA, 25 bp, Canis familiaris
gtccaataaagtctttgaactgcaa

SEQ ID NO: 141702 - DNA, 25 bp, Canis familiaris
gtccgaaaatttatctgccacgttg

SEQ ID NO: 141703 - DNA, 25 bp, Canis familiaris
gtcctacatcagataattcccaccc

SEQ ID NO: 141704 - DNA, 25 bp, Canis familiaris
gtcctctaatatatttgctccctac

SEQ ID NO: 141705 - DNA, 25 bp, Canis familiaris
gtcccagagataaggtctgcatctt

SEQ ID NO: 141706 - DNA, 25 bp, Canis familiaris
gtcccacgaattacattacatttct

SEQ ID NO: 141707 - DNA, 25 bp, Canis familiaris
gtcgccacgatatattaactttagc

SEQ ID NO: 141708 - DNA, 25 bp, Canis familiaris
gtcgctccagaaagaagccaccttg

SEQ ID NO: 141709 - DNA, 25 bp, Canis familiaris
gtccattgcaaaagaaccataaggg

SEQ ID NO: 141710 - DNA, 25 bp, Canis familiaris
gtccgactacataccatccagaagg

SEQ ID NO: 141711 - DNA, 25 bp, Canis familiaris
gtcgccctatgtatctccaagagag

SEQ ID NO: 141712 - DNA, 25 bp, Canis familiaris
gtcctgttactagccccagatagat

SEQ ID NO: 141713 - DNA, 25 bp, Canis familiaris
gtcctgattttaaccaccgggattg

SEQ ID NO: 141714 - DNA, 25 bp, Canis familiaris
gtcgcgatgtgtgatttcaccgagg

SEQ ID NO: 141715 - DNA, 25 bp, Canis familiaris
gtcgatttgtatttatcaccgtctt

SEQ ID NO: 141716 - DNA, 25 bp, Canis familiaris
gtcgatttccagtcaaactcgtttg

SEQ ID NO: 141717 - DNA, 25 bp, Canis familiaris
gtcgctcctccttaaacagcggtat

SEQ ID NO: 141718 - DNA, 25 bp, Canis familiaris
gtcgctcctccgtagaagcgagcgg

SEQ ID NO: 141719 - DNA, 25 bp, Canis familiaris
gtccctgtccggagacaagcacatg

SEQ ID NO: 141720 - DNA, 25 bp, Canis familiaris
gtccgtgtccagtaggatgacgcct

SEQ ID NO: 141721 - DNA, 25 bp, Canis familiaris
gtccagttaatcttggtagcagctt

SEQ ID NO: 141722 - DNA, 25 bp, Canis familiaris
gtcccttatcatgctggtggaggtg

SEQ ID NO: 141723 - DNA, 25 bp, Canis familiaris
gtcccatcagaaaccctggcaggga

SEQ ID NO: 141724 - DNA, 25 bp, Canis familiaris
gtcccaggcaaagcctctagggggc

SEQ ID NO: 141725 - DNA, 25 bp, Canis familiaris
gtcccaagcaagagccatctggcgg

SEQ ID NO: 141726 - DNA, 25 bp, Canis familiaris
gtccgaaaagcaactctcagccgag

SEQ ID NO: 141727 - DNA, 25 bp, Canis familiaris
gtccgcaaggaaaattgcagccagt

SEQ ID NO: 141728 - DNA, 25 bp, Canis familiaris
gtccgatgaggagaaggtgcgaata

SEQ ID NO: 141729 - DNA, 25 bp, Canis familiaris
gtccggacggcaaacgagtgacaaa

SEQ ID NO: 141730 - DNA, 25 bp, Canis familiaris
gtcccaccagggaattagtgaccag

SEQ ID NO: 141731 - DNA, 25 bp, Canis familiaris
gtcgcgatccaggttactgagtccc

SEQ ID NO: 141732 - DNA, 25 bp, Canis familiaris
gtcgtttcagacatgcagggagccc

SEQ ID NO: 141733 - DNA, 25 bp, Canis familiaris
gtcgtttgagaccattatgggccca

SEQ ID NO: 141734 - DNA, 25 bp, Canis familiaris
gtcctttgagtacttgggagactta

SEQ ID NO: 141735 - DNA, 25 bp, Canis familiaris
gtccctgggtacgtgattgaagtct

SEQ ID NO: 141736 - DNA, 25 bp, Canis familiaris
gtccctgtgtgcacgtatttaaccg

SEQ ID NO: 141737 - DNA, 25 bp, Canis familiaris
gtccgtcgcattgggttttagaccg

SEQ ID NO: 141738 - DNA, 25 bp, Canis familiaris
gtcctatccttgggcttttgggaga

SEQ ID NO: 141739 - DNA, 25 bp, Canis familiaris
gtccttctgttgtgaatacattggg

SEQ ID NO: 141740 - DNA, 25 bp, Canis familiaris
gtcctactgcttctgaagcccatgc

SEQ ID NO: 141741 - DNA, 25 bp, Canis familiaris
gtccagactggacggaagccaaggg

SEQ ID NO: 141742 - DNA, 25 bp, Canis familiaris
gtcccacatggtcgaacaccatcga

SEQ ID NO: 141743 - DNA, 25 bp, Canis familiaris
gtcgaagggacgtcaatcacatcga

SEQ ID NO: 141744 - DNA, 25 bp, Canis familiaris
gtcccatgggacagcacacacacta

SEQ ID NO: 141745 - DNA, 25 bp, Canis familiaris
gtcccaagacctggactggcactgg

SEQ ID NO: 141746 - DNA, 25 bp, Canis familiaris
gtcgctcttgaccttgacatgagaa

SEQ ID NO: 141747 - DNA, 25 bp, Canis familiaris
gtcccttgcatctgtgattgagctc

SEQ ID NO: 141748 - DNA, 25 bp, Canis familiaris
gtgcttggtgactgttgtagccgtg

SEQ ID NO: 141749 - DNA, 25 bp, Canis familiaris
gtcctggctgactgccttagtagtg

SEQ ID NO: 141750 - DNA, 25 bp, Canis familiaris
gtccaggtgaaacgttgtaagagct

SEQ ID NO: 141751 - DNA, 25 bp, Canis familiaris
gtcccgtgtcactgtttacatgagc

SEQ ID NO: 141752 - DNA, 25 bp, Canis familiaris
gtcccaggacctagagatcatatct

SEQ ID NO: 141753 - DNA, 25 bp, Canis familiaris
gtcctgcacgtcgtggagcatcatg

SEQ ID NO: 141754 - DNA, 25 bp, Canis familiaris
gtcccatcgcatggtggatgaagat

SEQ ID NO: 141755 - DNA, 25 bp, Canis familiaris
gtccccgaagtggtgcaggagctgc

SEQ ID NO: 141756 - DNA, 25 bp, Canis familiaris
gtcgccccgagtggtggatggacta

SEQ ID NO: 141757 - DNA, 25 bp, Canis familiaris
gtcgccccacagagctgggcagatt

SEQ ID NO: 141758 - DNA, 25 bp, Canis familiaris
gtccctcctagctagtgagtatgat

SEQ ID NO: 141759 - DNA, 25 bp, Canis familiaris
gtcgcacccagagatgaagctttct

SEQ ID NO: 141760 - DNA, 25 bp, Canis familiaris
gtcccaccatgaagtacttctctgc

SEQ ID NO: 141761 - DNA, 25 bp, Canis familiaris
gtcgccccaaggaacagtctcgacc

SEQ ID NO: 141762 - DNA, 25 bp, Canis familiaris
gtcccaccaatggaaatacctgagc

SEQ ID NO: 141763 - DNA, 25 bp, Canis familiaris
gtccaccacattgaatgacccgggc

SEQ ID NO: 141764 - DNA, 25 bp, Canis familiaris
gtccacaacaagcgaaccacacgac

SEQ ID NO: 141765 - DNA, 25 bp, Canis familiaris
gtcgccccaggacagggcaagggca

SEQ ID NO: 141766 - DNA, 25 bp, Canis familiaris
gtcccctaggagctgaggaagccca

SEQ ID NO: 141767 - DNA, 25 bp, Canis familiaris
gtcccctgcaggcaaaggaagccct

SEQ ID NO: 141768 - DNA, 25 bp, Canis familiaris
gtcgccccggcgtaagtagagacag

SEQ ID NO: 141769 - DNA, 25 bp, Canis familiaris
gtccccttgggattgagttctacag

SEQ ID NO: 141770 - DNA, 25 bp, Canis familiaris
gtccctctgtgggttggatcaccac

SEQ ID NO: 141771 - DNA, 25 bp, Canis familiaris
gtccccttgaggctgtcatcagcca

SEQ ID NO: 141772 - DNA, 25 bp, Canis familiaris
gtccctcatcgagggcttctcattc

SEQ ID NO: 141773 - DNA, 25 bp, Canis familiaris
gtgcatttatcatgtctttccatcc

SEQ ID NO: 141774 - DNA, 25 bp, Canis familiaris
gtgctttgatgacagttttaccaac

SEQ ID NO: 141775 - DNA, 25 bp, Canis familiaris
gtgtttgtaggaacttctcgaccac

SEQ ID NO: 141776 - DNA, 25 bp, Canis familiaris
gtgctttattggagttctatttgcc

SEQ ID NO: 141777 - DNA, 25 bp, Canis familiaris
gtcctgtctcaggtggttcatttgg

SEQ ID NO: 141778 - DNA, 25 bp, Canis familiaris
gtcctggccatactgagtgtcatta

SEQ ID NO: 141779 - DNA, 25 bp, Canis familiaris
gtcctgggcacggaggtgcatgctc

SEQ ID NO: 141780 - DNA, 25 bp, Canis familiaris
gtcctgggatcgagttctgcatcgg

SEQ ID NO: 141781 - DNA, 25 bp, Canis familiaris
gtgctttggacacagctatttcggg

SEQ ID NO: 141782 - DNA, 25 bp, Canis familiaris
gtgcctataaaaatttttctctggg

SEQ ID NO: 141783 - DNA, 25 bp, Canis familiaris
gtgcctttcaggatctatttttgga

SEQ ID NO: 141784 - DNA, 25 bp, Canis familiaris
gtccctgtgggtgtatgtgtttgtg

SEQ ID NO: 141785 - DNA, 25 bp, Canis familiaris
gtcgcctgggtggctttttagttgg

SEQ ID NO: 141786 - DNA, 25 bp, Canis familiaris
gtcccggtgggatgttcagaggtgg

SEQ ID NO: 141787 - DNA, 25 bp, Canis familiaris
gtgaggtgggggttgttgagagtgg

SEQ ID NO: 141788 - DNA, 25 bp, Canis familiaris
gtgagagttggggtggttgggcttg

SEQ ID NO: 141789 - DNA, 25 bp, Canis familiaris
tgtaaaatcgtggggagttcctgat

SEQ ID NO: 141790 - DNA, 25 bp, Canis familiaris
gtccaagccttgtggggttctgatt

SEQ ID NO: 141791 - DNA, 25 bp, Canis familiaris
gtccctcactgcttagggtttagtt

SEQ ID NO: 141792 - DNA, 25 bp, Canis familiaris
gtccccctgtaggtggtgcttagaa

SEQ ID NO: 141793 - DNA, 25 bp, Canis familiaris
gtcccgcctggtggagttggtagta

SEQ ID NO: 141794 - DNA, 25 bp, Canis familiaris
gtgccctccggtgaggggaaaagtg

SEQ ID NO: 141795 - DNA, 25 bp, Canis familiaris
gtccccagccctgagatgggaggaa

SEQ ID NO: 141796 - DNA, 25 bp, Canis familiaris
gtcccccattgcacagatgaggaaa

SEQ ID NO: 141797 - DNA, 25 bp, Canis familiaris
gtcccctagtgtcggaagcggaatg

SEQ ID NO: 141798 - DNA, 25 bp, Canis familiaris
gtccccaaagtcgcagcaggaaatc

SEQ ID NO: 141799 - DNA, 25 bp, Canis familiaris
gtccctacgagtaccggagacttgc

SEQ ID NO: 141800 - DNA, 25 bp, Canis familiaris
gtccctagaggtgcgtggggttctc

SEQ ID NO: 141801 - DNA, 25 bp, Canis familiaris
gtcccttatggagagtggctggttt

SEQ ID NO: 141802 - DNA, 25 bp, Canis familiaris
gtccctgtcatgaaagagtgttggt

SEQ ID NO: 141803 - DNA, 25 bp, Canis familiaris
gtccctgatataaaccatacgtgtg

SEQ ID NO: 141804 - DNA, 25 bp, Canis familiaris
gtccatctcgggaaccgacgatctg

SEQ ID NO: 141805 - DNA, 25 bp, Canis familiaris
gtcctctcggtgatggtattgctct

SEQ ID NO: 141806 - DNA, 25 bp, Canis familiaris
gtcccacgcggatgggttgttgttc

SEQ ID NO: 141807 - DNA, 25 bp, Canis familiaris
gtcccacagaggtagaggttgacag

SEQ ID NO: 141808 - DNA, 25 bp, Canis familiaris
gtccctgcagggtgcagagttcggc

SEQ ID NO: 141809 - DNA, 25 bp, Canis familiaris
gtcccaccggaggaagattgctcgc

SEQ ID NO: 141810 - DNA, 25 bp, Canis familiaris
gtccaccacgccgtgaacaatgtcg

SEQ ID NO: 141811 - DNA, 25 bp, Canis familiaris
gtccccacgagtggaatccatgccc

SEQ ID NO: 141812 - DNA, 25 bp, Canis familiaris
gtcctacagacgtgaacactgaggc

SEQ ID NO: 141813 - DNA, 25 bp, Canis familiaris
gtcctaaacacagaccactggatgt

SEQ ID NO: 141814 - DNA, 25 bp, Canis familiaris
gtccttttcagatccgcagtggagg

SEQ ID NO: 141815 - DNA, 25 bp, Canis familiaris
tcgacttttatattccggtaggatc

SEQ ID NO: 141816 - DNA, 25 bp, Canis familiaris
tcgactttccacccgaagtaaatcg

SEQ ID NO: 141817 - DNA, 25 bp, Canis familiaris
gggtttccaaccaaactaagacatg

SEQ ID NO: 141818 - DNA, 25 bp, Canis familiaris
gggagtaaaccacagactacgaggg

SEQ ID NO: 141819 - DNA, 25 bp, Canis familiaris
gtgggtcaacaagaaagaaagtggg

SEQ ID NO: 141820 - DNA, 25 bp, Canis familiaris
gggccacaaacagcattaagggatg

SEQ ID NO: 141821 - DNA, 25 bp, Canis familiaris
tgggcccaaacctccaagtgggaag

SEQ ID NO: 141822 - DNA, 25 bp, Canis familiaris
tttcccaacacttgtccaaattcgg

SEQ ID NO: 141823 - DNA, 25 bp, Canis familiaris
gtccccaagttctctgaaatctcgg

SEQ ID NO: 141824 - DNA, 25 bp, Canis familiaris
gtcccaaagtgtcttgaaatctggg

SEQ ID NO: 141825 - DNA, 25 bp, Canis familiaris
gtcctaactgggccctgagaatcag

SEQ ID NO: 141826 - DNA, 25 bp, Canis familiaris
gtcgctaacgtcttcctgattaaag

SEQ ID NO: 141827 - DNA, 25 bp, Canis familiaris
gtcctaagctgttctcttgggaaac

SEQ ID NO: 141828 - DNA, 25 bp, Canis familiaris
gtccaagcacctttgactaggataa

SEQ ID NO: 141829 - DNA, 25 bp, Canis familiaris
gtccaacatcacagtcacatacaga

SEQ ID NO: 141830 - DNA, 25 bp, Canis familiaris
gtgccatactgtcggctacttgcaa

SEQ ID NO: 141831 - DNA, 25 bp, Canis familiaris
gtcctactggctggccagtgctgcg

SEQ ID NO: 141832 - DNA, 25 bp, Canis familiaris
gtccgactgatgacgtctttgcagc

SEQ ID NO: 141833 - DNA, 25 bp, Canis familiaris
gtcccattgcaggttttctgcagaa

SEQ ID NO: 141834 - DNA, 25 bp, Canis familiaris
gtcctctgtgctgtatttgccaatg

SEQ ID NO: 141835 - DNA, 25 bp, Canis familiaris
gtccatcattctaattactccactg

SEQ ID NO: 141836 - DNA, 25 bp, Canis familiaris
gtccattgtgctcatgtactcacca

SEQ ID NO: 141837 - DNA, 25 bp, Canis familiaris
gtccattgccatatcggctcgcaaa

SEQ ID NO: 141838 - DNA, 25 bp, Canis familiaris
gtcccatgacatagtatttcagcaa

SEQ ID NO: 141839 - DNA, 25 bp, Canis familiaris
gtcccatgtctattactttggatct

SEQ ID NO: 141840 - DNA, 25 bp, Canis familiaris
gtcccatgttcagattttgtaccgg

SEQ ID NO: 141841 - DNA, 25 bp, Canis familiaris
gtcgccagttgtgcacttttacaag

SEQ ID NO: 141842 - DNA, 25 bp, Canis familiaris
gtcgcctttgctactgctttaaaag

SEQ ID NO: 141843 - DNA, 25 bp, Canis familiaris
gtccttctgtacacatttccaaatc

SEQ ID NO: 141844 - DNA, 25 bp, Canis familiaris
gtccctcttgacgtttctcaaatta

SEQ ID NO: 141845 - DNA, 25 bp, Canis familiaris
gtccttcttacgttacatggaaaag

SEQ ID NO: 141846 - DNA, 25 bp, Canis familiaris
gtccctggtacgtgaaccacgacag

SEQ ID NO: 141847 - DNA, 25 bp, Canis familiaris
gtcctatggacctcaacaccaggaa

SEQ ID NO: 141848 - DNA, 25 bp, Canis familiaris
gtccctggagccataacctgatgga

SEQ ID NO: 141849 - DNA, 25 bp, Canis familiaris
gtccctggagcagctcacccagggc

SEQ ID NO: 141850 - DNA, 25 bp, Canis familiaris
gtccgtggaggagttcaccagggtg

SEQ ID NO: 141851 - DNA, 25 bp, Canis familiaris
gtccgtgaggaagctccgtgaggcg

SEQ ID NO: 141852 - DNA, 25 bp, Canis familiaris
gtcctgtcacgttggagtcggaagc

SEQ ID NO: 141853 - DNA, 25 bp, Canis familiaris
gtcctaccgcatcggggaggatggc

SEQ ID NO: 141854 - DNA, 25 bp, Canis familiaris
gtcctgaaccggttgtgtgtgttgc

SEQ ID NO: 141855 - DNA, 25 bp, Canis familiaris
gtcctataccgatatctggctatgt

SEQ ID NO: 141856 - DNA, 25 bp, Canis familiaris
gtcctagaacagtgcctggcacgta

SEQ ID NO: 141857 - DNA, 25 bp, Canis familiaris
gtgctccgaactcagactgtcaaaa

SEQ ID NO: 141858 - DNA, 25 bp, Canis familiaris
gtcctcttactcccaggtgaaaatc

SEQ ID NO: 141859 - DNA, 25 bp, Canis familiaris
gtccgactacacccaagtgttctac

SEQ ID NO: 141860 - DNA, 25 bp, Canis familiaris
gtccgatccgacactatgtgtttca

SEQ ID NO: 141861 - DNA, 25 bp, Canis familiaris
gtccatgatcggacgacctcttttc

SEQ ID NO: 141862 - DNA, 25 bp, Canis familiaris
gtcgctgctaggacagacctatcac

SEQ ID NO: 141863 - DNA, 25 bp, Canis familiaris
gtcctgtgatgcgtcagagctcatc

SEQ ID NO: 141864 - DNA, 25 bp, Canis familiaris
gtgacttgggtcccgatgttggcta

SEQ ID NO: 141865 - DNA, 25 bp, Canis familiaris
gtgacgtaatcccaatgctttggtt

SEQ ID NO: 141866 - DNA, 25 bp, Canis familiaris
gtccgtaacacacttcttcagatgt

SEQ ID NO: 141867 - DNA, 25 bp, Canis familiaris
gtcctactacaacttcttcaggaat

SEQ ID NO: 141868 - DNA, 25 bp, Canis familiaris
gtccatggtatttattttcagtcaa

SEQ ID NO: 141869 - DNA, 25 bp, Canis familiaris
gtcctctctacaaattcggattcca

SEQ ID NO: 141870 - DNA, 25 bp, Canis familiaris
gtccctctcatatatgtttatttca

SEQ ID NO: 141871 - DNA, 25 bp, Canis familiaris
gtccaacttccattttcgatttcat

SEQ ID NO: 141872 - DNA, 25 bp, Canis familiaris
gtcgccaaccactttttgaattctc

SEQ ID NO: 141873 - DNA, 25 bp, Canis familiaris
gtcccaacgcacgtgttcataattt

SEQ ID NO: 141874 - DNA, 25 bp, Canis familiaris
gtccacctccatgaactcagaattt

SEQ ID NO: 141875 - DNA, 25 bp, Canis familiaris
gtcccttgcctgaaattctgaagcc

SEQ ID NO: 141876 - DNA, 25 bp, Canis familiaris
gtcccttgggtattgctgcggacgc

SEQ ID NO: 141877 - DNA, 25 bp, Canis familiaris
gtccgcctgaggacaggcctgggtg

SEQ ID NO: 141878 - DNA, 25 bp, Canis familiaris
gtccctctgttggcaggggtgggat

SEQ ID NO: 141879 - DNA, 25 bp, Canis familiaris
gtccccacgtgttgggcggggagct

SEQ ID NO: 141880 - DNA, 25 bp, Canis familiaris
gtccccaggtcttggatctggggat

SEQ ID NO: 141881 - DNA, 25 bp, Canis familiaris
gtccccgatgtcaacgtcggacgac

SEQ ID NO: 141882 - DNA, 25 bp, Canis familiaris
gtccccgattcgtcacgggggacag

SEQ ID NO: 141883 - DNA, 25 bp, Canis familiaris
gtccccggagcgtcgggggatgtca

SEQ ID NO: 141884 - DNA, 25 bp, Canis familiaris
gtcctcgacgagctcttgtgggagc

SEQ ID NO: 141885 - DNA, 25 bp, Canis familiaris
gtccctgaggaaatcatcttcgtga

SEQ ID NO: 141886 - DNA, 25 bp, Canis familiaris
gtcccaggaatcattgttcttaatg

SEQ ID NO: 141887 - DNA, 25 bp, Canis familiaris
gtcctcaggcttacgtgttcattga

SEQ ID NO: 141888 - DNA, 25 bp, Canis familiaris
gtccacggcttacgagttaaatctc

SEQ ID NO: 141889 - DNA, 25 bp, Canis familiaris
gtccacgacaaaccagtgttcaact

SEQ ID NO: 141890 - DNA, 25 bp, Canis familiaris
gtccaggaagctccaggtttcaatc

SEQ ID NO: 141891 - DNA, 25 bp, Canis familiaris
gtccaaggagccaagggtgtaggaa

SEQ ID NO: 141892 - DNA, 25 bp, Canis familiaris
gtccaagggtaggggtgagaggtga

SEQ ID NO: 141893 - DNA, 25 bp, Canis familiaris
gtcccgggatactggacggatggac

SEQ ID NO: 141894 - DNA, 25 bp, Canis familiaris
gtcctcccttactggacgtgtaact

SEQ ID NO: 141895 - DNA, 25 bp, Canis familiaris
gtcctgtcgtcatccggacagtgtc

SEQ ID NO: 141896 - DNA, 25 bp, Canis familiaris
gtccgtagtggagtctggagggcct

SEQ ID NO: 141897 - DNA, 25 bp, Canis familiaris
gtgctggtaggcgtactcggaggcc

SEQ ID NO: 141898 - DNA, 25 bp, Canis familiaris
gtgcggaattgaggactctgaagga

SEQ ID NO: 141899 - DNA, 25 bp, Canis familiaris
gtgcggaagtcattacctttgtgga

SEQ ID NO: 141900 - DNA, 25 bp, Canis familiaris
gtgctagggtagttccagtgtgtca

SEQ ID NO: 141901 - DNA, 25 bp, Canis familiaris
gtccgtggtgctgtccatggacaac

SEQ ID NO: 141902 - DNA, 25 bp, Canis familiaris
gtcccagggcgcgatcctggagatc

SEQ ID NO: 141903 - DNA, 25 bp, Canis familiaris
gtccctgggcgtgcagagggtctac

SEQ ID NO: 141904 - DNA, 25 bp, Canis familiaris
gtccctggggccatgagggtgcatc

SEQ ID NO: 141905 - DNA, 25 bp, Canis familiaris
gtccacgcaagggccgagaggtgta

SEQ ID NO: 141906 - DNA, 25 bp, Canis familiaris
gtccacgcaagggccgagaggtgta

SEQ ID NO: 141907 - DNA, 25 bp, Canis familiaris
gtccacgcaagggccgagaggtgta

SEQ ID NO: 141908 - DNA, 25 bp, Canis familiaris
gtcctcaccgggccaataggggaat

SEQ ID NO: 141909 - DNA, 25 bp, Canis familiaris
gtcctccgctgtgccaaagaggtct

SEQ ID NO: 141910 - DNA, 25 bp, Canis familiaris
gtccgccatggagccagagcagatg

SEQ ID NO: 141911 - DNA, 25 bp, Canis familiaris
gtccctgcatgaggcccacgagttc

SEQ ID NO: 141912 - DNA, 25 bp, Canis familiaris
gtccctgaagacgctcaggtccagc

SEQ ID NO: 141913 - DNA, 25 bp, Canis familiaris
gtccgtcaagacacatgcaaatccc

SEQ ID NO: 141914 - DNA, 25 bp, Canis familiaris
gtccgtcaagacacatgcaaatccc

SEQ ID NO: 141915 - DNA, 25 bp, Canis familiaris
gtccggcggacaacatggagatgtg

SEQ ID NO: 141916 - DNA, 25 bp, Canis familiaris
gtccgcccgtcgacatggagggggc

SEQ ID NO: 141917 - DNA, 25 bp, Canis familiaris
gtccaccgtgacgctggatggaggc

SEQ ID NO: 141918 - DNA, 25 bp, Canis familiaris
gtccctctgatgctcctggagggtc

SEQ ID NO: 141919 - DNA, 25 bp, Canis familiaris
gtccctgctggggcctagagatgga

SEQ ID NO: 141920 - DNA, 25 bp, Canis familiaris
gtcccagctgcagcgctataagaac

SEQ ID NO: 141921 - DNA, 25 bp, Canis familiaris
gtcccatgctcagtctgttacaagt

SEQ ID NO: 141922 - DNA, 25 bp, Canis familiaris
gtcccacatgcaatcgtgagagaag

SEQ ID NO: 141923 - DNA, 25 bp, Canis familiaris
gtccctccaatcgtcagggagctca

SEQ ID NO: 141924 - DNA, 25 bp, Canis familiaris
gtcctcccaaatgcgcgataatata

SEQ ID NO: 141925 - DNA, 25 bp, Canis familiaris
gtcctcccaacgcagcagataacat

SEQ ID NO: 141926 - DNA, 25 bp, Canis familiaris
gtcctacaccctcgaaatatacatc

SEQ ID NO: 141927 - DNA, 25 bp, Canis familiaris
gtcctaccaacttcaactatgcaaa

SEQ ID NO: 141928 - DNA, 25 bp, Canis familiaris
gtcctgaaaatctgtcacttctgcc

SEQ ID NO: 141929 - DNA, 25 bp, Canis familiaris
gtcctgacaagttttcttcttcaca

SEQ ID NO: 141930 - DNA, 25 bp, Canis familiaris
gtcctgaaattctttctccatctta

SEQ ID NO: 141931 - DNA, 25 bp, Canis familiaris
gtccttagcttctttcttaattgac

SEQ ID NO: 141932 - DNA, 25 bp, Canis familiaris
gtccattatctttcaactcttaaac

SEQ ID NO: 141933 - DNA, 25 bp, Canis familiaris
gtccatcttctgggaaccttacgga

SEQ ID NO: 141934 - DNA, 25 bp, Canis familiaris
gtccatttctgagaacttaacccag

SEQ ID NO: 141935 - DNA, 25 bp, Canis familiaris
gtgccatttttgttggttaaccctg

SEQ ID NO: 141936 - DNA, 25 bp, Canis familiaris
gtcctttctgcttcttgtataaacc

SEQ ID NO: 141937 - DNA, 25 bp, Canis familiaris
gtccgatctctttccaaatgaaatc

SEQ ID NO: 141938 - DNA, 25 bp, Canis familiaris
gtcccagctgttaagcaggataaac

SEQ ID NO: 141939 - DNA, 25 bp, Canis familiaris
gtcccacttcggacaggaccaaggc

SEQ ID NO: 141940 - DNA, 25 bp, Canis familiaris
gtccgccttcggccagcgaaggagg

SEQ ID NO: 141941 - DNA, 25 bp, Canis familiaris
gtccctcttcaggagacgacagtag

SEQ ID NO: 141942 - DNA, 25 bp, Canis familiaris
gtccctgttgcctaattacactatg

SEQ ID NO: 141943 - DNA, 25 bp, Canis familiaris
gtccctttttatataacatgcatct

SEQ ID NO: 141944 - DNA, 25 bp, Canis familiaris
gtccgttgttttttaagcatgctgt

SEQ ID NO: 141945 - DNA, 25 bp, Canis familiaris
gtgccttttattatttagtttctct

SEQ ID NO: 141946 - DNA, 25 bp, Canis familiaris
gtccttttagtataatcctttctca

SEQ ID NO: 141947 - DNA, 25 bp, Canis familiaris
gtccccttgatgagtaattctttcc

SEQ ID NO: 141948 - DNA, 25 bp, Canis familiaris
gtccccatggagattatctttgata

SEQ ID NO: 141949 - DNA, 25 bp, Canis familiaris
gtccgctctggattgttgagtttgc

SEQ ID NO: 141950 - DNA, 25 bp, Canis familiaris
gtccgcctacagattgaggtctgcg

SEQ ID NO: 141951 - DNA, 25 bp, Canis familiaris
gtcccctactgtaaatgcgtgtgcc

SEQ ID NO: 141952 - DNA, 25 bp, Canis familiaris
gtccctttctctaatagcgaggctc

SEQ ID NO: 141953 - DNA, 25 bp, Canis familiaris
gtcccatttcctagagtggggagcc

SEQ ID NO: 141954 - DNA, 25 bp, Canis familiaris
gtcccaggaactcggggaggctgcc

SEQ ID NO: 141955 - DNA, 25 bp, Canis familiaris
gtcccagagacccaggattgagtcc

SEQ ID NO: 141956 - DNA, 25 bp, Canis familiaris
gtccctgaatctctggtatgactgc

SEQ ID NO: 141957 - DNA, 25 bp, Canis familiaris
gtccctgaatcctgatgagatgcgc

SEQ ID NO: 141958 - DNA, 25 bp, Canis familiaris
gtgcccgagtctttaaggtgctaat

SEQ ID NO: 141959 - DNA, 25 bp, Canis familiaris
gtgcccttactatatagtgggtatg

SEQ ID NO: 141960 - DNA, 25 bp, Canis familiaris
gtccacttaatcttgaagttgtctt

SEQ ID NO: 141961 - DNA, 25 bp, Canis familiaris
gtccatttcaagcaaacttttgtcg

SEQ ID NO: 141962 - DNA, 25 bp, Canis familiaris
gtccattctgcagcctaactgtagt

SEQ ID NO: 141963 - DNA, 25 bp, Canis familiaris
gtcctatgctgaaatctacccaagt

SEQ ID NO: 141964 - DNA, 25 bp, Canis familiaris
gtcctgctgtgtgacaagcccaagg

SEQ ID NO: 141965 - DNA, 25 bp, Canis familiaris
gtgccagcctatgacaagatccggg

SEQ ID NO: 141966 - DNA, 25 bp, Canis familiaris
gtccatgccaatgacatctaccagg

SEQ ID NO: 141967 - DNA, 25 bp, Canis familiaris
gtcctgtccactactctgacagtgc

SEQ ID NO: 141968 - DNA, 25 bp, Canis familiaris
gtcctgagccacctgcttaaggaag

SEQ ID NO: 141969 - DNA, 25 bp, Canis familiaris
gtccataggctcttgcctgcagaga

SEQ ID NO: 141970 - DNA, 25 bp, Canis familiaris
gtgcctatggtggtgatctaaacta

SEQ ID NO: 141971 - DNA, 25 bp, Canis familiaris
gtccttggtcaactcaaagagaacc

SEQ ID NO: 141972 - DNA, 25 bp, Canis familiaris
gtccctggtgctgtggaagctgaac

SEQ ID NO: 141973 - DNA, 25 bp, Canis familiaris
gtccacgagtgtgttcctggagtcc

SEQ ID NO: 141974 - DNA, 25 bp, Canis familiaris
gtccacagtttgtttcctaaagcct

SEQ ID NO: 141975 - DNA, 25 bp, Canis familiaris
gtcctatgatttgtcattctcaaga

SEQ ID NO: 141976 - DNA, 25 bp, Canis familiaris
gtcctgtattgggctttctgcatgg

SEQ ID NO: 141977 - DNA, 25 bp, Canis familiaris
gtcctgtgctttgtttcacagcggc

SEQ ID NO: 141978 - DNA, 25 bp, Canis familiaris
gtcctggctagggggacacacggca

SEQ ID NO: 141979 - DNA, 25 bp, Canis familiaris
gtccgaggagcggggacctgatgcc

SEQ ID NO: 141980 - DNA, 25 bp, Canis familiaris
tgaccaagagcagcaaacccttgct

SEQ ID NO: 141981 - DNA, 25 bp, Canis familiaris
gtcccatgagcatgaaagcaccttg

SEQ ID NO: 141982 - DNA, 25 bp, Canis familiaris
gtcctcatggaacgtacaattttat

SEQ ID NO: 141983 - DNA, 25 bp, Canis familiaris
gtccctgggaagatgcctgttgtca

SEQ ID NO: 141984 - DNA, 25 bp, Canis familiaris
gtccctgggaagctacatgatgtgg

SEQ ID NO: 141985 - DNA, 25 bp, Canis familiaris
gtccctgcagagtatgtgtatgtat

SEQ ID NO: 141986 - DNA, 25 bp, Canis familiaris
gtccctgcaagaggcatgtttatcc

SEQ ID NO: 141987 - DNA, 25 bp, Canis familiaris
gtcccatcaagatcagtggcgtcgg

SEQ ID NO: 141988 - DNA, 25 bp, Canis familiaris
gtcccatcaatgacggatgccggat

SEQ ID NO: 141989 - DNA, 25 bp, Canis familiaris
gtcctcagaagacagaccttgcatt

SEQ ID NO: 141990 - DNA, 25 bp, Canis familiaris
gtcctggcagggggacacaggcact

SEQ ID NO: 141991 - DNA, 25 bp, Canis familiaris
gtcctggcagggggacacaggcact

SEQ ID NO: 141992 - DNA, 25 bp, Canis familiaris
gtcctggcagggggacacaggcact

SEQ ID NO: 141993 - DNA, 25 bp, Canis familiaris
gtcctggcagggggacacaggcact

SEQ ID NO: 141994 - DNA, 25 bp, Canis familiaris
gtcctggcaggggggacacaggcac

SEQ ID NO: 141995 - DNA, 25 bp, Canis familiaris
gtcctgccagggggacactaggcac

SEQ ID NO: 141996 - DNA, 25 bp, Canis familiaris
gtcccttggtcagcagagctcggac

SEQ ID NO: 141997 - DNA, 25 bp, Canis familiaris
gtccctattccatatgactagagac

SEQ ID NO: 141998 - DNA, 25 bp, Canis familiaris
gtcccctccaactatgactgatgga

SEQ ID NO: 141999 - DNA, 25 bp, Canis familiaris
gtgctacgtcgccctggacttcgag

SEQ ID NO: 142000 - DNA, 25 bp, Canis familiaris
ttgaagattcttccgggttacaggg

SEQ ID NO: 142001 - DNA, 25 bp, Canis familiaris
gtgccatgttcattgggggttgaaa

SEQ ID NO: 142002 - DNA, 25 bp, Canis familiaris
gtgctgctgtttagggggggaataa

SEQ ID NO: 142003 - DNA, 25 bp, Canis familiaris
gtgcagtggtgaagggggaaggaaa

SEQ ID NO: 142004 - DNA, 25 bp, Canis familiaris
gtcctaggccgtcgggatcggataa

SEQ ID NO: 142005 - DNA, 25 bp, Canis familiaris
gtccgagcgccaggtcaagatctgg

SEQ ID NO: 142006 - DNA, 25 bp, Canis familiaris
gtccgcagctgtgaacaaattgagg

SEQ ID NO: 142007 - DNA, 25 bp, Canis familiaris
gtccccattccagacatgtctagag

SEQ ID NO: 142008 - DNA, 25 bp, Canis familiaris
gtcccttttctgcaattgctactgt

SEQ ID NO: 142009 - DNA, 25 bp, Canis familiaris
gtccctttgcttcaatgcgtaatct

SEQ ID NO: 142010 - DNA, 25 bp, Canis familiaris
gtccctcttgatgccatgatgttaa

SEQ ID NO: 142011 - DNA, 25 bp, Canis familiaris
gtccccattcatgacagcatggtac

SEQ ID NO: 142012 - DNA, 25 bp, Canis familiaris
gtcctccctgctgaagcagctgaac

SEQ ID NO: 142013 - DNA, 25 bp, Canis familiaris
gtcctccctgctgaagcagctgaac

SEQ ID NO: 142014 - DNA, 25 bp, Canis familiaris
gtccctcttgctgtggcagagaagc

SEQ ID NO: 142015 - DNA, 25 bp, Canis familiaris
gtccctgtcgtcctgaaaaggctga

SEQ ID NO: 142016 - DNA, 25 bp, Canis familiaris
gtcccctggagccacaaaactgtgg

SEQ ID NO: 142017 - DNA, 25 bp, Canis familiaris
gtcccctgaaacttctgaactgttc

SEQ ID NO: 142018 - DNA, 25 bp, Canis familiaris
gtcccgtataactctctttggtgct

SEQ ID NO: 142019 - DNA, 25 bp, Canis familiaris
gtcctatttaacccttgtttctatg

SEQ ID NO: 142020 - DNA, 25 bp, Canis familiaris
gtcctatgctattaactttttttca

SEQ ID NO: 142021 - DNA, 25 bp, Canis familiaris
gtccttgtttttgtggattgtccac

SEQ ID NO: 142022 - DNA, 25 bp, Canis familiaris
gtgccttttactattggctcgaccc

SEQ ID NO: 142023 - DNA, 25 bp, Canis familiaris
gtgccttatttcacttacatagact

SEQ ID NO: 142024 - DNA, 25 bp, Canis familiaris
gtccttgttttcatctacttgagct

SEQ ID NO: 142025 - DNA, 25 bp, Canis familiaris
gtcctggttttggtaagtgctgttt

SEQ ID NO: 142026 - DNA, 25 bp, Canis familiaris
gtcctggtttgttgaaagggatctt

SEQ ID NO: 142027 - DNA, 25 bp, Canis familiaris
gtccttgctttgcgtcagaggtgac

SEQ ID NO: 142028 - DNA, 25 bp, Canis familiaris
gtcctgcgcttgaggggaggtgtct

SEQ ID NO: 142029 - DNA, 25 bp, Canis familiaris
gtcctcgctgagagactggggtgta

SEQ ID NO: 142030 - DNA, 25 bp, Canis familiaris
gtcctgcctggttaaggggagagaa

SEQ ID NO: 142031 - DNA, 25 bp, Canis familiaris
gtcctgcctggagagtaactgcatg

SEQ ID NO: 142032 - DNA, 25 bp, Canis familiaris
gtcctcgccagagagtcaagcactc

SEQ ID NO: 142033 - DNA, 25 bp, Canis familiaris
gtccctggcacagagctgcaagatc

SEQ ID NO: 142034 - DNA, 25 bp, Canis familiaris
gtccctgtagagtgtgctgactccc

SEQ ID NO: 142035 - DNA, 25 bp, Canis familiaris
gtccgttgatatctgtgtactccga

SEQ ID NO: 142036 - DNA, 25 bp, Canis familiaris
gtccagttcattctgtgagaccagc

SEQ ID NO: 142037 - DNA, 25 bp, Canis familiaris
gtcctgtacataattggtgcccacg

SEQ ID NO: 142038 - DNA, 25 bp, Canis familiaris
gtccagttctaattaatcccacttc

SEQ ID NO: 142039 - DNA, 25 bp, Canis familiaris
gtccctaataaaagatccagcactt

SEQ ID NO: 142040 - DNA, 25 bp, Canis familiaris
gtgaccaaatcatcataacccaatt

SEQ ID NO: 142041 - DNA, 25 bp, Canis familiaris
gtgaagtcgtcatatgaacccaggt

SEQ ID NO: 142042 - DNA, 25 bp, Canis familiaris
gtccgagtgctcaaatgaacccaag

SEQ ID NO: 142043 - DNA, 25 bp, Canis familiaris
gtccggatgttggatgacacccaca

SEQ ID NO: 142044 - DNA, 25 bp, Canis familiaris
gtccggaggctgtgcccaaatatat

SEQ ID NO: 142045 - DNA, 25 bp, Canis familiaris
gtccggcggctgtttgagcagaatt

SEQ ID NO: 142046 - DNA, 25 bp, Canis familiaris
gtcccgcgccgagagagagaaactg

SEQ ID NO: 142047 - DNA, 25 bp, Canis familiaris
gtccctgcggcgccagatgaaaaac

SEQ ID NO: 142048 - DNA, 25 bp, Canis familiaris
gtccctgatggcctcagaggaggag

SEQ ID NO: 142049 - DNA, 25 bp, Canis familiaris
gtgccttaagcccagaagggtgggg

SEQ ID NO: 142050 - DNA, 25 bp, Canis familiaris
gtcctccaagccctagaggggctga

SEQ ID NO: 142051 - DNA, 25 bp, Canis familiaris
gtccggcaagcctggcagaaggctg

SEQ ID NO: 142052 - DNA, 25 bp, Canis familiaris
gtccggggactcggagatcgagctg

SEQ ID NO: 142053 - DNA, 25 bp, Canis familiaris
gtgccgaaggttccgagcacaggcg

SEQ ID NO: 142054 - DNA, 25 bp, Canis familiaris
gtccagaaattcttaaacggcgagc

SEQ ID NO: 142055 - DNA, 25 bp, Canis familiaris
gtgcccgacatccctgaaacgggag

SEQ ID NO: 142056 - DNA, 25 bp, Canis familiaris
gtgtgggacatctcaacacggggag

SEQ ID NO: 142057 - DNA, 25 bp, Canis familiaris
gtgctggatccttcctaaggggtga

SEQ ID NO: 142058 - DNA, 25 bp, Canis familiaris
gtggcagaagatttttggtggggat

SEQ ID NO: 142059 - DNA, 25 bp, Canis familiaris
gtgtcagacctggacgtggtggtgg

SEQ ID NO: 142060 - DNA, 25 bp, Canis familiaris
gtcctgcacctggagtggagttggg

SEQ ID NO: 142061 - DNA, 25 bp, Canis familiaris
gtccagccctgctggggtgggagtg

SEQ ID NO: 142062 - DNA, 25 bp, Canis familiaris
gtccagtcctctgaggagggagcct

SEQ ID NO: 142063 - DNA, 25 bp, Canis familiaris
gtccgtgcacgtgatcgagggtgac

SEQ ID NO: 142064 - DNA, 25 bp, Canis familiaris
gtccttgtcctcctcgaggatggac

SEQ ID NO: 142065 - DNA, 25 bp, Canis familiaris
gtcctttgcctcctgaaacatgaga

SEQ ID NO: 142066 - DNA, 25 bp, Canis familiaris
gtcctcaatccccgattgatctcaa

SEQ ID NO: 142067 - DNA, 25 bp, Canis familiaris
gtcctccaaggcctatttctagaca

SEQ ID NO: 142068 - DNA, 25 bp, Canis familiaris
gtccccacagcacatttcttggaga

SEQ ID NO: 142069 - DNA, 25 bp, Canis familiaris
gtcccgctcacacaactgttgagga

SEQ ID NO: 142070 - DNA, 25 bp, Canis familiaris
gtcccgtgcacggaaaatacagcgt

SEQ ID NO: 142071 - DNA, 25 bp, Canis familiaris
gtccccgatgccaagaattcgcatc

SEQ ID NO: 142072 - DNA, 25 bp, Canis familiaris
gtcccctatccaggcatgaataacc

SEQ ID NO: 142073 - DNA, 25 bp, Canis familiaris
gtccgccaataacatactgaacaca

SEQ ID NO: 142074 - DNA, 25 bp, Canis familiaris
gtccccaaaagtaacgtgatcacgc

SEQ ID NO: 142075 - DNA, 25 bp, Canis familiaris
gtccgccactatattatcgctaatc

SEQ ID NO: 142076 - DNA, 25 bp, Canis familiaris
gtccccacgaagttgcataaccatc

SEQ ID NO: 142077 - DNA, 25 bp, Canis familiaris
gtccctggtgaatttaaacgcaagc

SEQ ID NO: 142078 - DNA, 25 bp, Canis familiaris
gtcctcgaagaaggtattggcgcca

SEQ ID NO: 142079 - DNA, 25 bp, Canis familiaris
gtgcctcgcaagtggtgaccactgc

SEQ ID NO: 142080 - DNA, 25 bp, Canis familiaris
gtccccacagaaggtaagaaggttg

SEQ ID NO: 142081 - DNA, 25 bp, Canis familiaris
gtccgccacaattcgggaacaagat

SEQ ID NO: 142082 - DNA, 25 bp, Canis familiaris
gtccaccatccttcgagtaaagaga

SEQ ID NO: 142083 - DNA, 25 bp, Canis familiaris
gtccaactccaccgaataaaatatt

SEQ ID NO: 142084 - DNA, 25 bp, Canis familiaris
gtccccaccacagggatcatcgaat

SEQ ID NO: 142085 - DNA, 25 bp, Canis familiaris
gtcccgtcagactgtgcatctagac

SEQ ID NO: 142086 - DNA, 25 bp, Canis familiaris
gtcccgtatattatgtgtcatacag

SEQ ID NO: 142087 - DNA, 25 bp, Canis familiaris
gtccgggaaggtgttcattcagcga

SEQ ID NO: 142088 - DNA, 25 bp, Canis familiaris
gtgccaagaaagctcacttgtccac

SEQ ID NO: 142089 - DNA, 25 bp, Canis familiaris
gtccaaacaacgtccaacatcctgg

SEQ ID NO: 142090 - DNA, 25 bp, Canis familiaris
gtcctctaaatatccaaccacagcg

SEQ ID NO: 142091 - DNA, 25 bp, Canis familiaris
gtgccctagttattcaaatccagac

SEQ ID NO: 142092 - DNA, 25 bp, Canis familiaris
gtcccgggtgaatcagtctctcacc

SEQ ID NO: 142093 - DNA, 25 bp, Canis familiaris
gtccaagggagaaactgccccacga

SEQ ID NO: 142094 - DNA, 25 bp, Canis familiaris
gtccaagttggaaaatgtggtagcc

SEQ ID NO: 142095 - DNA, 25 bp, Canis familiaris
gtccggtaggagtagatgtggggcc

SEQ ID NO: 142096 - DNA, 25 bp, Canis familiaris
gtccgggaacagggctgaggaggct

SEQ ID NO: 142097 - DNA, 25 bp, Canis familiaris
gtcccggcaagccttggcagaaggc

SEQ ID NO: 142098 - DNA, 25 bp, Canis familiaris
gtcctgttcacgcttggatgggcgc

SEQ ID NO: 142099 - DNA, 25 bp, Canis familiaris
gtgccttccactggattttggggtc

SEQ ID NO: 142100 - DNA, 25 bp, Canis familiaris
gtccatgtacactctatttggggta

SEQ ID NO: 142101 - DNA, 25 bp, Canis familiaris
gtccatgtccacttttaagacccta

SEQ ID NO: 142102 - DNA, 25 bp, Canis familiaris
gtccattccacagttgtaaatgcta

SEQ ID NO: 142103 - DNA, 25 bp, Canis familiaris
gtccttctccaattgtaaagtcctt

SEQ ID NO: 142104 - DNA, 25 bp, Canis familiaris
tgttttccctaacagcaactggttt

SEQ ID NO: 142105 - DNA, 25 bp, Canis familiaris
gtgtttcccaaacacgtggtgtggt

SEQ ID NO: 142106 - DNA, 25 bp, Canis familiaris
gtgcctaccatggtgaccacgggtg

SEQ ID NO: 142107 - DNA, 25 bp, Canis familiaris
gtgcattgactttgtaccaagtggt

SEQ ID NO: 142108 - DNA, 25 bp, Canis familiaris
tgtcttgcagctgaataccctatgg

SEQ ID NO: 142109 - DNA, 25 bp, Canis familiaris
gtcctggcctatgagcctgtatggg

SEQ ID NO: 142110 - DNA, 25 bp, Canis familiaris
gtcctggcgtcacagccagagatgg

SEQ ID NO: 142111 - DNA, 25 bp, Canis familiaris
gtcctgccagctacgggaggaatgg

SEQ ID NO: 142112 - DNA, 25 bp, Canis familiaris
gtccgccatattcgggaaagatgat

SEQ ID NO: 142113 - DNA, 25 bp, Canis familiaris
gtgccccactttggaagcaataatt

SEQ ID NO: 142114 - DNA, 25 bp, Canis familiaris
gtccccggttcttagcaaagagctc

SEQ ID NO: 142115 - DNA, 25 bp, Canis familiaris
gtccccacggattaacacaaggcct

SEQ ID NO: 142116 - DNA, 25 bp, Canis familiaris
gtccgccaccgacagacaggggcga

SEQ ID NO: 142117 - DNA, 25 bp, Canis familiaris
gtccccaccgagcagacaggaaagc

SEQ ID NO: 142118 - DNA, 25 bp, Canis familiaris
gtgcccccctccaagaagggcaaga

SEQ ID NO: 142119 - DNA, 25 bp, Canis familiaris
gtccgcatccgacaggaagggaaga

SEQ ID NO: 142120 - DNA, 25 bp, Canis familiaris
gtccagttgcgacaggcactagtaa

SEQ ID NO: 142121 - DNA, 25 bp, Canis familiaris
gtccaggtggtgcggcacttgttac

SEQ ID NO: 142122 - DNA, 25 bp, Canis familiaris
gtcctggtggtgtacctctatgtgt

SEQ ID NO: 142123 - DNA, 25 bp, Canis familiaris
gtcctggtagtgcatacattctgtg

SEQ ID NO: 142124 - DNA, 25 bp, Canis familiaris
gtcctggccaagctgaatgccttca

SEQ ID NO: 142125 - DNA, 25 bp, Canis familiaris
gtcctgagaccagctaactatccag

SEQ ID NO: 142126 - DNA, 25 bp, Canis familiaris
gtccaatgacacacttgtctcaccc

SEQ ID NO: 142127 - DNA, 25 bp, Canis familiaris
gtcctatgccataaatgagtctcat

SEQ ID NO: 142128 - DNA, 25 bp, Canis familiaris
gtccattcaacaagcatgtagtcta

SEQ ID NO: 142129 - DNA, 25 bp, Canis familiaris
gtccagaaatatggcagatcctcta

SEQ ID NO: 142130 - DNA, 25 bp, Canis familiaris
gtccaaaatgttgatctattataaa

SEQ ID NO: 142131 - DNA, 25 bp, Canis familiaris
gtccaaatgaggaaatcttttagga

SEQ ID NO: 142132 - DNA, 25 bp, Canis familiaris
gtccagaagagccaagagatatttc

SEQ ID NO: 142133 - DNA, 25 bp, Canis familiaris
gtccagaggacttagagaagctgtt

SEQ ID NO: 142134 - DNA, 25 bp, Canis familiaris
gtgcaggggtcctggaagtcttcct

SEQ ID NO: 142135 - DNA, 25 bp, Canis familiaris
gtgcgttctttacgtaggtcgtact

SEQ ID NO: 142136 - DNA, 25 bp, Canis familiaris
gtgcgtcttctgtggaatggacccc

SEQ ID NO: 142137 - DNA, 25 bp, Canis familiaris
gtccgctttgaagggatggagccgc

SEQ ID NO: 142138 - DNA, 25 bp, Canis familiaris
gtccgctgattgtatctgtctggtc

SEQ ID NO: 142139 - DNA, 25 bp, Canis familiaris
gtccatcatcgttactgatcacgtt

SEQ ID NO: 142140 - DNA, 25 bp, Canis familiaris
gtccaactgtttaatcctttaatcg

SEQ ID NO: 142141 - DNA, 25 bp, Canis familiaris
gtccatgacagtagtcctccttatg

SEQ ID NO: 142142 - DNA, 25 bp, Canis familiaris
gtcctcatgtgtatcccactgaatc

SEQ ID NO: 142143 - DNA, 25 bp, Canis familiaris
gtcctcattctaccacatgttaact

SEQ ID NO: 142144 - DNA, 25 bp, Canis familiaris
gtccacgtttccctgttgagatgtg

SEQ ID NO: 142145 - DNA, 25 bp, Canis familiaris
gtccgctgtttggaggtgctggagt

SEQ ID NO: 142146 - DNA, 25 bp, Canis familiaris
gtgccagggttggactcgtggacat

SEQ ID NO: 142147 - DNA, 25 bp, Canis familiaris
gtccaggtgctgttgactctaggag

SEQ ID NO: 142148 - DNA, 25 bp, Canis familiaris
gtccgctgtctgttaaccacagtgc

SEQ ID NO: 142149 - DNA, 25 bp, Canis familiaris
gtcctttcgttccatcacaaggtca

SEQ ID NO: 142150 - DNA, 25 bp, Canis familiaris
gtcctggtccttgccaagaggcatc

SEQ ID NO: 142151 - DNA, 25 bp, Canis familiaris
gtcctggaaccggcagaaggagctc

SEQ ID NO: 142152 - DNA, 25 bp, Canis familiaris
gtccggattcccggaatgtgcgtac

SEQ ID NO: 142153 - DNA, 25 bp, Canis familiaris
gtgcctcaatgagccccaaaggtac

SEQ ID NO: 142154 - DNA, 25 bp, Canis familiaris
gtgccacaaagggacctacctgtac

SEQ ID NO: 142155 - DNA, 25 bp, Canis familiaris
gtccaaaaggtttccacgcttggcg

SEQ ID NO: 142156 - DNA, 25 bp, Canis familiaris
gtccaatggagggtcagcccgtgtg

SEQ ID NO: 142157 - DNA, 25 bp, Canis familiaris
gtcctatgaagggtagcttgggtct

SEQ ID NO: 142158 - DNA, 25 bp, Canis familiaris
gtccttagatgggtagctgtgcaga

SEQ ID NO: 142159 - DNA, 25 bp, Canis familiaris
gtccttgaagaggtctgctgtcaga

SEQ ID NO: 142160 - DNA, 25 bp, Canis familiaris
gtcctgcccaagttcctggaaaaga

SEQ ID NO: 142161 - DNA, 25 bp, Canis familiaris
gtcctggccaactcttaaaacttgt

SEQ ID NO: 142162 - DNA, 25 bp, Canis familiaris
gtccttgctgactttttgaaaactt

SEQ ID NO: 142163 - DNA, 25 bp, Canis familiaris
gtccttctaagatttctacgacctt

SEQ ID NO: 142164 - DNA, 25 bp, Canis familiaris
gtcccctaagagggctacctctgtg

SEQ ID NO: 142165 - DNA, 25 bp, Canis familiaris
tgtccacctaggtctaaacctctgc

SEQ ID NO: 142166 - DNA, 25 bp, Canis familiaris
gtccacgtaggatataaattcttta

SEQ ID NO: 142167 - DNA, 25 bp, Canis familiaris
gtgccctttggcttaaaattgttct

SEQ ID NO: 142168 - DNA, 25 bp, Canis familiaris
ggaccctgggaaaacagcactttca

SEQ ID NO: 142169 - DNA, 25 bp, Canis familiaris
gtgaccaaggaacaaatcaatccta

SEQ ID NO: 142170 - DNA, 25 bp, Canis familiaris
gtgcccaggaaactataccaaccca

SEQ ID NO: 142171 - DNA, 25 bp, Canis familiaris
gtccttggacgacaactatcatccc

SEQ ID NO: 142172 - DNA, 25 bp, Canis familiaris
gtcctgtggcatccacgaaactacc

SEQ ID NO: 142173 - DNA, 25 bp, Canis familiaris
gtccttggaggcctaagcggaccca

SEQ ID NO: 142174 - DNA, 25 bp, Canis familiaris
gtcctctgtgggcttgatgctgagc

SEQ ID NO: 142175 - DNA, 25 bp, Canis familiaris
gtcctgtatcagagttgagcttccc

SEQ ID NO: 142176 - DNA, 25 bp, Canis familiaris
gtcctgctattctgacagacttctt

SEQ ID NO: 142177 - DNA, 25 bp, Canis familiaris
gtcctcattccactgacagagttgt

SEQ ID NO: 142178 - DNA, 25 bp, Canis familiaris
gtcctttccaggggcagtggtgttg

SEQ ID NO: 142179 - DNA, 25 bp, Canis familiaris
gtccatttgccaccgtggtactggt

SEQ ID NO: 142180 - DNA, 25 bp, Canis familiaris
tgtcccttcccaggggatggggttg

SEQ ID NO: 142181 - DNA, 25 bp, Canis familiaris
gtccacctcccatcgtgtagaggtt

SEQ ID NO: 142182 - DNA, 25 bp, Canis familiaris
gtccacctatcttaagtgtacagtt

SEQ ID NO: 142183 - DNA, 25 bp, Canis familiaris
gtgcacctcgatttgggggaagtag

SEQ ID NO: 142184 - DNA, 25 bp, Canis familiaris
gtgccctcttcctcagggcaaatag

SEQ ID NO: 142185 - DNA, 25 bp, Canis familiaris
gtgccctcatggcttcgggaagaaa

SEQ ID NO: 142186 - DNA, 25 bp, Canis familiaris
gtcctgtcatggtttctgtggtaaa

SEQ ID NO: 142187 - DNA, 25 bp, Canis familiaris
gtcctgcctgcggaactgaggttaa

SEQ ID NO: 142188 - DNA, 25 bp, Canis familiaris
gtcctgccccatagacttggttaac

SEQ ID NO: 142189 - DNA, 25 bp, Canis familiaris
gtcctgcacctcatactttgtggtg

SEQ ID NO: 142190 - DNA, 25 bp, Canis familiaris
gtcctgaagacaaacattctgggag

SEQ ID NO: 142191 - DNA, 25 bp, Canis familiaris
gtccgagatacacaatatccagaag

SEQ ID NO: 142192 - DNA, 25 bp, Canis familiaris
gtccaatattgcccgaaccagaatg

SEQ ID NO: 142193 - DNA, 25 bp, Canis familiaris
gtgccaaactggttgtaatcaggaa

SEQ ID NO: 142194 - DNA, 25 bp, Canis familiaris
gtccagatcctgattgttccaagca

SEQ ID NO: 142195 - DNA, 25 bp, Canis familiaris
gtccagatgctagaggtctccacat

SEQ ID NO: 142196 - DNA, 25 bp, Canis familiaris
gtccagatttctagttattcgtacg

SEQ ID NO: 142197 - DNA, 25 bp, Canis familiaris
gtcctgtgttctacttgattttccc

SEQ ID NO: 142198 - DNA, 25 bp, Canis familiaris
gtcctgcgtgactattcagattctg

SEQ ID NO: 142199 - DNA, 25 bp, Canis familiaris
gtcctgtgctgaagcatccagcttg

SEQ ID NO: 142200 - DNA, 25 bp, Canis familiaris
gtcctgtggggaagccatttcagac

SEQ ID NO: 142201 - DNA, 25 bp, Canis familiaris
gtccttgctgtggaagcttgtctca

SEQ ID NO: 142202 - DNA, 25 bp, Canis familiaris
gtcctctggtcctcagagttcactg

SEQ ID NO: 142203 - DNA, 25 bp, Canis familiaris
gtcctctggggcacagagtttcctc

SEQ ID NO: 142204 - DNA, 25 bp, Canis familiaris
gtccttgggcgtcagcagccaagag

SEQ ID NO: 142205 - DNA, 25 bp, Canis familiaris
gtcctgctggggagacacccatgag

SEQ ID NO: 142206 - DNA, 25 bp, Canis familiaris
gtcctgctggggagacactccatga

SEQ ID NO: 142207 - DNA, 25 bp, Canis familiaris
gtccagtggggaagacgcctagcac

SEQ ID NO: 142208 - DNA, 25 bp, Canis familiaris
gtcctgcagcggcatcaggacctcc

SEQ ID NO: 142209 - DNA, 25 bp, Canis familiaris
gtcctgactgctcacagaatcggcc

SEQ ID NO: 142210 - DNA, 25 bp, Canis familiaris
gtccatgccctgaacatgtatttct

SEQ ID NO: 142211 - DNA, 25 bp, Canis familiaris
gtgcgaggccctactatgaggtcta

SEQ ID NO: 142212 - DNA, 25 bp, Canis familiaris
gtgagggccagatcggacgtaagtc

SEQ ID NO: 142213 - DNA, 25 bp, Canis familiaris
gtgagggagccatcagggactgaga

SEQ ID NO: 142214 - DNA, 25 bp, Canis familiaris
gtgacggaccaactatggcacggcc

SEQ ID NO: 142215 - DNA, 25 bp, Canis familiaris
gtgcctgggccttaagacactagcc

SEQ ID NO: 142216 - DNA, 25 bp, Canis familiaris
gtcctgagtatctaaatggcccacc

SEQ ID NO: 142217 - DNA, 25 bp, Canis familiaris
gtcctgaaagcagcattggcctcac

SEQ ID NO: 142218 - DNA, 25 bp, Canis familiaris
gtcctgaaagaggccagcggtgcaa

SEQ ID NO: 142219 - DNA, 25 bp, Canis familiaris
gtcctggcacaattctcagggttac

SEQ ID NO: 142220 - DNA, 25 bp, Canis familiaris
gtcctggtcacatgcactgggagat

SEQ ID NO: 142221 - DNA, 25 bp, Canis familiaris
gtccatgtgactcatgcttgggagg

SEQ ID NO: 142222 - DNA, 25 bp, Canis familiaris
gtcctgtagctggtggtccgacagc

SEQ ID NO: 142223 - DNA, 25 bp, Canis familiaris
gtccttgagcagtttgtccacggag

SEQ ID NO: 142224 - DNA, 25 bp, Canis familiaris
gtcctgcacaggttctgcatcaacg

SEQ ID NO: 142225 - DNA, 25 bp, Canis familiaris
gtcctctcaggggcatgatcagggg

SEQ ID NO: 142226 - DNA, 25 bp, Canis familiaris
gtccagcatgaggggctgccggagc

SEQ ID NO: 142227 - DNA, 25 bp, Canis familiaris
gtcctgagactccgtgtctggagcc

SEQ ID NO: 142228 - DNA, 25 bp, Canis familiaris
gtccatgaggttctttctgcaggcc

SEQ ID NO: 142229 - DNA, 25 bp, Canis familiaris
gtcctcaggaatcttatgatcccac

SEQ ID NO: 142230 - DNA, 25 bp, Canis familiaris
gtcctattaatgtcaatctttctcc

SEQ ID NO: 142231 - DNA, 25 bp, Canis familiaris
gtcctttgaatgtatacacctctac

SEQ ID NO: 142232 - DNA, 25 bp, Canis familiaris
gtccttgagaataagccccatctca

SEQ ID NO: 142233 - DNA, 25 bp, Canis familiaris
gtccatgtgaaattccacgctcacc

SEQ ID NO: 142234 - DNA, 25 bp, Canis familiaris
gtccgtgatgcaaaaacgctctgcc

SEQ ID NO: 142235 - DNA, 25 bp, Canis familiaris
gtccattgatgttccatctcgtgtc

SEQ ID NO: 142236 - DNA, 25 bp, Canis familiaris
gtcctgctggttgcacttttcaggc

SEQ ID NO: 142237 - DNA, 25 bp, Canis familiaris
gtcctgctggcaactattttttact

SEQ ID NO: 142238 - DNA, 25 bp, Canis familiaris
gtcctcccattctatttaatatcac

SEQ ID NO: 142239 - DNA, 25 bp, Canis familiaris
gtcctgcctctaggtcactgaataa

SEQ ID NO: 142240 - DNA, 25 bp, Canis familiaris
gtcctgtctccatgtgcacagataa

SEQ ID NO: 142241 - DNA, 25 bp, Canis familiaris
gtccagtcctgaaagcggatgataa

SEQ ID NO: 142242 - DNA, 25 bp, Canis familiaris
gtccaacctgaacggtgtcacgact

SEQ ID NO: 142243 - DNA, 25 bp, Canis familiaris
gtccaagccctagcggagactgatc

SEQ ID NO: 142244 - DNA, 25 bp, Canis familiaris
gtcctacacaccaacgcgaaatgtc

SEQ ID NO: 142245 - DNA, 25 bp, Canis familiaris
gtccaagctcccatagcgtatatta

SEQ ID NO: 142246 - DNA, 25 bp, Canis familiaris
gtgcactcagatgccttacgtcaag

SEQ ID NO: 142247 - DNA, 25 bp, Canis familiaris
gtccatcgagctgtagaggctccag

SEQ ID NO: 142248 - DNA, 25 bp, Canis familiaris
gtccagctgagtttacaggtcccag

SEQ ID NO: 142249 - DNA, 25 bp, Canis familiaris
gtccagtgtgggaacaggtcttctg

SEQ ID NO: 142250 - DNA, 25 bp, Canis familiaris
gtccagtggaatcaccagtgttcct

SEQ ID NO: 142251 - DNA, 25 bp, Canis familiaris
gtccggagaagcagggcgttcactc

SEQ ID NO: 142252 - DNA, 25 bp, Canis familiaris
gtccagggcacgaggggtcagagcc

SEQ ID NO: 142253 - DNA, 25 bp, Canis familiaris
gtcctacgaggaagtggtccggctc

SEQ ID NO: 142254 - DNA, 25 bp, Canis familiaris
gtcctactgggatgctgaagtcgtg

SEQ ID NO: 142255 - DNA, 25 bp, Canis familiaris
gtcctgggcaggtgctgggagggaa

SEQ ID NO: 142256 - DNA, 25 bp, Canis familiaris
gtcctcccaggatgctggagagagc

SEQ ID NO: 142257 - DNA, 25 bp, Canis familiaris
gtcctcatccgctagagctagcaga

SEQ ID NO: 142258 - DNA, 25 bp, Canis familiaris
gtcctctctggcaagcagcaggtag

SEQ ID NO: 142259 - DNA, 25 bp, Canis familiaris
gtccttcagcgacggcaggatggcc

SEQ ID NO: 142260 - DNA, 25 bp, Canis familiaris
gtccttcgcttcgtcaagggacagt

SEQ ID NO: 142261 - DNA, 25 bp, Canis familiaris
gtccatttcacggtcatcgggattt

SEQ ID NO: 142262 - DNA, 25 bp, Canis familiaris
gtccttatcctgactcatggaagat

SEQ ID NO: 142263 - DNA, 25 bp, Canis familiaris
gtgccattattttacatggggattc

SEQ ID NO: 142264 - DNA, 25 bp, Canis familiaris
gtccttgtctgttaaagtgagttct

SEQ ID NO: 142265 - DNA, 25 bp, Canis familiaris
gtgccagtgttttaaaatagcgttc

SEQ ID NO: 142266 - DNA, 25 bp, Canis familiaris
gtgccagagcttgcagaaaaacctg

SEQ ID NO: 142267 - DNA, 25 bp, Canis familiaris
gtgccagcagccgcggtaattccag

SEQ ID NO: 142268 - DNA, 25 bp, Canis familiaris
gtgccacgtcaatggggacttctgt

SEQ ID NO: 142269 - DNA, 25 bp, Canis familiaris
gtccatcgtctacaacgactctggt

SEQ ID NO: 142270 - DNA, 25 bp, Canis familiaris
gtccttactgataggggcacctggg

SEQ ID NO: 142271 - DNA, 25 bp, Canis familiaris
gtccttccaggagaagccctggccc

SEQ ID NO: 142272 - DNA, 25 bp, Canis familiaris
gggccctagtcagagagtgcctggc

SEQ ID NO: 142273 - DNA, 25 bp, Canis familiaris
gtccactttctagacatgtcctggc

SEQ ID NO: 142274 - DNA, 25 bp, Canis familiaris
gtccaccttagagtcaagtccatca

SEQ ID NO: 142275 - DNA, 25 bp, Canis familiaris
gtgccatcttgatgaccatagccct

SEQ ID NO: 142276 - DNA, 25 bp, Canis familiaris
gtcctcatatgatcttgcaagctcc

SEQ ID NO: 142277 - DNA, 25 bp, Canis familiaris
gtcctttacactggaagccacttag

SEQ ID NO: 142278 - DNA, 25 bp, Canis familiaris
gtcctttcatcagtcgatgggcact

SEQ ID NO: 142279 - DNA, 25 bp, Canis familiaris
gtccttgtcgaatgcggagcactca

SEQ ID NO: 142280 - DNA, 25 bp, Canis familiaris
gtcctgctgcacgaacaagggatcc

SEQ ID NO: 142281 - DNA, 25 bp, Canis familiaris
gtgccgtggtgaaacgggaccgctc

SEQ ID NO: 142282 - DNA, 25 bp, Canis familiaris
gtgcctggagttgaggggactcgac

SEQ ID NO: 142283 - DNA, 25 bp, Canis familiaris
gtccaatgggctgcaggggccttga

SEQ ID NO: 142284 - DNA, 25 bp, Canis familiaris
gtgccatcatgctgctggagggcca

SEQ ID NO: 142285 - DNA, 25 bp, Canis familiaris
gtgccacgcatcttcatgaagggcg

SEQ ID NO: 142286 - DNA, 25 bp, Canis familiaris
gtcctactcattacagcaagtgggt

SEQ ID NO: 142287 - DNA, 25 bp, Canis familiaris
gtcctgcctttttgcaggtgggctt

SEQ ID NO: 142288 - DNA, 25 bp, Canis familiaris
gtgctcggcgtcatggacgcggagc

SEQ ID NO: 142289 - DNA, 25 bp, Canis familiaris
gtccttgcagtcaggacggcaccag

SEQ ID NO: 142290 - DNA, 25 bp, Canis familiaris
gtcctgtcattctgttcaggccaat

SEQ ID NO: 142291 - DNA, 25 bp, Canis familiaris
gtccttttatcgtatcaggaagtaa

SEQ ID NO: 142292 - DNA, 25 bp, Canis familiaris
gtccatagttcacattaggtatgat

SEQ ID NO: 142293 - DNA, 25 bp, Canis familiaris
gtccaaaaatgcttttgtgtgtgtg

SEQ ID NO: 142294 - DNA, 25 bp, Canis familiaris
gtgctttagactttggctgttgtgc

SEQ ID NO: 142295 - DNA, 25 bp, Canis familiaris
gtcctatcagcagtttcactctggg

SEQ ID NO: 142296 - DNA, 25 bp, Canis familiaris
gtcctatcacctgttcattgtggcc

SEQ ID NO: 142297 - DNA, 25 bp, Canis familiaris
gtcctatgcctcctattgcattgag

SEQ ID NO: 142298 - DNA, 25 bp, Canis familiaris
gtcctcaccttctatctgaatggtt

SEQ ID NO: 142299 - DNA, 25 bp, Canis familiaris
gtcctcaaattctcatgaatgcttt

SEQ ID NO: 142300 - DNA, 25 bp, Canis familiaris
gtcctgttttgcttctgagattttt

SEQ ID NO: 142301 - DNA, 25 bp, Canis familiaris
gtccatttttgggcggcatgttgtc

SEQ ID NO: 142302 - DNA, 25 bp, Canis familiaris
gtcctatgtttgtgctggcttgtac

SEQ ID NO: 142303 - DNA, 25 bp, Canis familiaris
gtcctagatgtgggctgtgccctta

SEQ ID NO: 142304 - DNA, 25 bp, Canis familiaris
gtcctgagatggagctccatgctca

SEQ ID NO: 142305 - DNA, 25 bp, Canis familiaris
gtcctagtggattcttcacacacac

SEQ ID NO: 142306 - DNA, 25 bp, Canis familiaris
gtcctcctgttgtctgtaaaccaag

SEQ ID NO: 142307 - DNA, 25 bp, Canis familiaris
gtccttctatgttctgctaaatcac

SEQ ID NO: 142308 - DNA, 25 bp, Canis familiaris
gtcctctgctctgactgtaagctaa

SEQ ID NO: 142309 - DNA, 25 bp, Canis familiaris
gtcctgatctccatcacaaactaac

SEQ ID NO: 142310 - DNA, 25 bp, Canis familiaris
gtcctgcattacacgacacagctaa

SEQ ID NO: 142311 - DNA, 25 bp, Canis familiaris
gtccttgctggtgcgccagagtaaa

SEQ ID NO: 142312 - DNA, 25 bp, Canis familiaris
gtcctagcaggagaaagatgttcaa

SEQ ID NO: 142313 - DNA, 25 bp, Canis familiaris
gtcctatcagggagaagatgttcaa

SEQ ID NO: 142314 - DNA, 25 bp, Canis familiaris
gtcctatctggcaaatgagaagttc

SEQ ID NO: 142315 - DNA, 25 bp, Canis familiaris
gtcctgtgggatagtgtcatagtac

SEQ ID NO: 142316 - DNA, 25 bp, Canis familiaris
gtcctggaggacctagctctggatc

SEQ ID NO: 142317 - DNA, 25 bp, Canis familiaris
gtcctggaggaggtcagcacggtgg

SEQ ID NO: 142318 - DNA, 25 bp, Canis familiaris
gtcctggcaccaattaactgagatg

SEQ ID NO: 142319 - DNA, 25 bp, Canis familiaris
gtccttgtccaagtgaactgcagca

SEQ ID NO: 142320 - DNA, 25 bp, Canis familiaris
gtcctttctagagtatactacggcc

SEQ ID NO: 142321 - DNA, 25 bp, Canis familiaris
gtccagttgggagttctttccagcc

SEQ ID NO: 142322 - DNA, 25 bp, Canis familiaris
gtccattggtgtgggttttgctacc

SEQ ID NO: 142323 - DNA, 25 bp, Canis familiaris
gtccttggtgctgtaggtatgtacc

SEQ ID NO: 142324 - DNA, 25 bp, Canis familiaris
gtccttaggttttgggagctcccag

SEQ ID NO: 142325 - DNA, 25 bp, Canis familiaris
gtccaaatgtttacagggagcctcc

SEQ ID NO: 142326 - DNA, 25 bp, Canis familiaris
gtgccagagagtggtccagcgggcc

SEQ ID NO: 142327 - DNA, 25 bp, Canis familiaris
gtgccaggaggaccccatgaagatc

SEQ ID NO: 142328 - DNA, 25 bp, Canis familiaris
gtccatggggaaatccagacccaag

SEQ ID NO: 142329 - DNA, 25 bp, Canis familiaris
gtccagggtcagatactacatacag

SEQ ID NO: 142330 - DNA, 25 bp, Canis familiaris
gtccagctggaagaactcaaacggg

SEQ ID NO: 142331 - DNA, 25 bp, Canis familiaris
gtcctcgtgcgagaatcatagtacg

SEQ ID NO: 142332 - DNA, 25 bp, Canis familiaris
gtcctcgtcgactatcgtgggacgc

SEQ ID NO: 142333 - DNA, 25 bp, Canis familiaris
gtcctcattagagtgacagggacac

SEQ ID NO: 142334 - DNA, 25 bp, Canis familiaris
gtccatgtctaagcacagggaagag

SEQ ID NO: 142335 - DNA, 25 bp, Canis familiaris
gtcctcctgcacactgggcagaaga

SEQ ID NO: 142336 - DNA, 25 bp, Canis familiaris
gtcctgcccactatgtgaccaaggc

SEQ ID NO: 142337 - DNA, 25 bp, Canis familiaris
gtccttccagacatgttcctgggcc

SEQ ID NO: 142338 - DNA, 25 bp, Canis familiaris
gtcctccaacaaaagtcctcgatgg

SEQ ID NO: 142339 - DNA, 25 bp, Canis familiaris
gtcctccacaaagagcgttcctgaa

SEQ ID NO: 142340 - DNA, 25 bp, Canis familiaris
gtccttccacagttactttcctgtg

SEQ ID NO: 142341 - DNA, 25 bp, Canis familiaris
gtcctatcaagatgtactttcacac

SEQ ID NO: 142342 - DNA, 25 bp, Canis familiaris
gtcctgccaaagttcttgcattcac

SEQ ID NO: 142343 - DNA, 25 bp, Canis familiaris
gtcctgcagagctaagtctttcctc

SEQ ID NO: 142344 - DNA, 25 bp, Canis familiaris
gtcctcagattgacgacgttccttg

SEQ ID NO: 142345 - DNA, 25 bp, Canis familiaris
gtcctcacttagcattatatcctct

SEQ ID NO: 142346 - DNA, 25 bp, Canis familiaris
gtccatccattatgttgattccgcc

SEQ ID NO: 142347 - DNA, 25 bp, Canis familiaris
gtccatcgcaaatgcttctagatcg

SEQ ID NO: 142348 - DNA, 25 bp, Canis familiaris
gtccaccagagaccttccagaattt

SEQ ID NO: 142349 - DNA, 25 bp, Canis familiaris
gtgccaccaggttttaaggattctg

SEQ ID NO: 142350 - DNA, 25 bp, Canis familiaris
gtgcctccgagtttaaaaatccttg

SEQ ID NO: 142351 - DNA, 25 bp, Canis familiaris
gtgcgcttccttttacaacaagcct

SEQ ID NO: 142352 - DNA, 25 bp, Canis familiaris
gtccaatgcttaattaaccaagact

SEQ ID NO: 142353 - DNA, 25 bp, Canis familiaris
gtccatacttaacaactgggcagct

SEQ ID NO: 142354 - DNA, 25 bp, Canis familiaris
gtcctcactcacaaaaactggtggt

SEQ ID NO: 142355 - DNA, 25 bp, Canis familiaris
gtgcgtcccatcaagaatcactgga

SEQ ID NO: 142356 - DNA, 25 bp, Canis familiaris
gtccatcctcactgagtacgagcag

SEQ ID NO: 142357 - DNA, 25 bp, Canis familiaris
gtcctccccccagaggagatgtggc

SEQ ID NO: 142358 - DNA, 25 bp, Canis familiaris
gtgcccttcatctcaggggaggtgg

SEQ ID NO: 142359 - DNA, 25 bp, Canis familiaris
gtccacttcttcgactgggaggagc

SEQ ID NO: 142360 - DNA, 25 bp, Canis familiaris
gtccactttccaccgtagtggcaca

SEQ ID NO: 142361 - DNA, 25 bp, Canis familiaris
gtccaattttgcacctactggcatc

SEQ ID NO: 142362 - DNA, 25 bp, Canis familiaris
gtccaagtttgtgctgtttggccga

SEQ ID NO: 142363 - DNA, 25 bp, Canis familiaris
gtccaaggttgtggctgtttggccg

SEQ ID NO: 142364 - DNA, 25 bp, Canis familiaris
gtgccaaggacattctgtgttttgc

SEQ ID NO: 142365 - DNA, 25 bp, Canis familiaris
gtgccagaggattcatcctggcctt

SEQ ID NO: 142366 - DNA, 25 bp, Canis familiaris
gtgccgggaacaactgggccaaggc

SEQ ID NO: 142367 - DNA, 25 bp, Canis familiaris
gtgccgggcaggaactgcgggcaca

SEQ ID NO: 142368 - DNA, 25 bp, Canis familiaris
gtgaggagttgggtctccgtcaatc

SEQ ID NO: 142369 - DNA, 25 bp, Canis familiaris
gtgatggacatctttgtccggatcc

SEQ ID NO: 142370 - DNA, 25 bp, Canis familiaris
gtgctggacaagatgtcgcagatgc

SEQ ID NO: 142371 - DNA, 25 bp, Canis familiaris
gtgctgtgtcaggtggacggactcc

SEQ ID NO: 142372 - DNA, 25 bp, Canis familiaris
gtcctgaagaggccagcgggcaagc

SEQ ID NO: 142373 - DNA, 25 bp, Canis familiaris
gtcctgagcagaagatgccggtgca

SEQ ID NO: 142374 - DNA, 25 bp, Canis familiaris
gtcctcacatgacctctgtgtgtgt

SEQ ID NO: 142375 - DNA, 25 bp, Canis familiaris
gtcctgttcatgatgtgtgtgtgtg

SEQ ID NO: 142376 - DNA, 25 bp, Canis familiaris
gtgcctgtttatgaggtttgttgtt

SEQ ID NO: 142377 - DNA, 25 bp, Canis familiaris
gtgagttttaaaggaatctgtgttc

SEQ ID NO: 142378 - DNA, 25 bp, Canis familiaris
ggcactgtggtaaagcaaatcgtct

SEQ ID NO: 142379 - DNA, 25 bp, Canis familiaris
gtcctgcttgtcacaggatatcccg

SEQ ID NO: 142380 - DNA, 25 bp, Canis familiaris
gtcctccttgcacagatgcatacac

SEQ ID NO: 142381 - DNA, 25 bp, Canis familiaris
gtcctcagcttcttaatatcaccgc

SEQ ID NO: 142382 - DNA, 25 bp, Canis familiaris
gtcctcgtttcatgagatcccataa

SEQ ID NO: 142383 - DNA, 25 bp, Canis familiaris
gtcctagtgatttagagctctccag

SEQ ID NO: 142384 - DNA, 25 bp, Canis familiaris
gtccttgcttggggagctcagacag

SEQ ID NO: 142385 - DNA, 25 bp, Canis familiaris
gtccttcttggagtacaggtcgtct

SEQ ID NO: 142386 - DNA, 25 bp, Canis familiaris
gtccttctgtgggtccaatgttgtc

SEQ ID NO: 142387 - DNA, 25 bp, Canis familiaris
gtccttttcaggcccattgtatggt

SEQ ID NO: 142388 - DNA, 25 bp, Canis familiaris
gtccttttgcacaggttggtggctg

SEQ ID NO: 142389 - DNA, 25 bp, Canis familiaris
gtcctctgttccaagtggtggtggc

SEQ ID NO: 142390 - DNA, 25 bp, Canis familiaris
gtgcccgtctccaggagaagttgtc

SEQ ID NO: 142391 - DNA, 25 bp, Canis familiaris
gtgcccctgtccatggagagaaggg

SEQ ID NO: 142392 - DNA, 25 bp, Canis familiaris
gtgccccctctggacaagaaagggt

SEQ ID NO: 142393 - DNA, 25 bp, Canis familiaris
gtgcctcggtgcatccagatgaaag

SEQ ID NO: 142394 - DNA, 25 bp, Canis familiaris
gtcctcacatatgcccatggcaaaa

SEQ ID NO: 142395 - DNA, 25 bp, Canis familiaris
gtgcatgtcaccacaacaggactaa

SEQ ID NO: 142396 - DNA, 25 bp, Canis familiaris
gtgccacaccaaaaaggattatgaa

SEQ ID NO: 142397 - DNA, 25 bp, Canis familiaris
gtccagctccaagaaggtcactttc

SEQ ID NO: 142398 - DNA, 25 bp, Canis familiaris
gtccacaccaaggaaagaaccctgc

SEQ ID NO: 142399 - DNA, 25 bp, Canis familiaris
gtccatcacagcagacgacgacacc

SEQ ID NO: 142400 - DNA, 25 bp, Canis familiaris
gtccagcaacagcaaaccatcacat

SEQ ID NO: 142401 - DNA, 25 bp, Canis familiaris
gtgccagacacacagaaacaccagg

SEQ ID NO: 142402 - DNA, 25 bp, Canis familiaris
gtccacagacagaggcaacagccaa

SEQ ID NO: 142403 - DNA, 25 bp, Canis familiaris
gtcctcagcctactggatagaccca

SEQ ID NO: 142404 - DNA, 25 bp, Canis familiaris
gtgccataccggatagacactccat

SEQ ID NO: 142405 - DNA, 25 bp, Canis familiaris
gtgcctaccaaaagcagccaaccat

SEQ ID NO: 142406 - DNA, 25 bp, Canis familiaris
gtccatagtcaacagatctcaaact

SEQ ID NO: 142407 - DNA, 25 bp, Canis familiaris
gtgcctagtggggaatccaatatta

SEQ ID NO: 142408 - DNA, 25 bp, Canis familiaris
gtcctatttgctgttctgcttgtta

SEQ ID NO: 142409 - DNA, 25 bp, Canis familiaris
gtgcctttctgcagtttttcaggag

SEQ ID NO: 142410 - DNA, 25 bp, Canis familiaris
gtcctacctgcaccagttttatgag

SEQ ID NO: 142411 - DNA, 25 bp, Canis familiaris
gtgcctaacatcgcatttcatttaa

SEQ ID NO: 142412 - DNA, 25 bp, Canis familiaris
gtgcctaacatcgcatttcatttaa

SEQ ID NO: 142413 - DNA, 25 bp, Canis familiaris
gtgctttaatgggagtactggtaac

SEQ ID NO: 142414 - DNA, 25 bp, Canis familiaris
gtgctttaatggagtactggtgaac

SEQ ID NO: 142415 - DNA, 25 bp, Canis familiaris
gtgctttcgggaaggaggggagcct

SEQ ID NO: 142416 - DNA, 25 bp, Canis familiaris
gtccttcgagtctggggtaagcact

SEQ ID NO: 142417 - DNA, 25 bp, Canis familiaris
gtgccttaattgtgggggagagcct

SEQ ID NO: 142418 - DNA, 25 bp, Canis familiaris
gtgctttcaaagtaggtcctgaggc

SEQ ID NO: 142419 - DNA, 25 bp, Canis familiaris
gtgctggaaaaaactgtcctgggga

SEQ ID NO: 142420 - DNA, 25 bp, Canis familiaris
gtgaggaaaacaacttgggtctgag

SEQ ID NO: 142421 - DNA, 25 bp, Canis familiaris
gtgaccaaaaggacttcggatcgga

SEQ ID NO: 142422 - DNA, 25 bp, Canis familiaris
gtgcaaaacaggctctagcgttcga

SEQ ID NO: 142423 - DNA, 25 bp, Canis familiaris
gtgcctgggaggctcaatcgtttag

SEQ ID NO: 142424 - DNA, 25 bp, Canis familiaris
gtgccaaggggatcatactagtata

SEQ ID NO: 142425 - DNA, 25 bp, Canis familiaris
gtgaatatggggagtatcggtttac

SEQ ID NO: 142426 - DNA, 25 bp, Canis familiaris
gtgaggtcgggaacactaggtcttc

SEQ ID NO: 142427 - DNA, 25 bp, Canis familiaris
ggaggaagggacacggtctctttcg

SEQ ID NO: 142428 - DNA, 25 bp, Canis familiaris
gggcccacggactggagtttattct

SEQ ID NO: 142429 - DNA, 25 bp, Canis familiaris
gggcctccagcacaagggttaatat

SEQ ID NO: 142430 - DNA, 25 bp, Canis familiaris
gtggccaccaatactacgggaacta

SEQ ID NO: 142431 - DNA, 25 bp, Canis familiaris
gtgccccgctggactacggggacta

SEQ ID NO: 142432 - DNA, 25 bp, Canis familiaris
gtgcctccctggacgggggaggtca

SEQ ID NO: 142433 - DNA, 25 bp, Canis familiaris
gtgccatcacctgtcggaggaaggt

SEQ ID NO: 142434 - DNA, 25 bp, Canis familiaris
gtgcccgcctggtggaggaatgaga

SEQ ID NO: 142435 - DNA, 25 bp, Canis familiaris
gtgcccctaggcagtagagaataga

SEQ ID NO: 142436 - DNA, 25 bp, Canis familiaris
gtgcccttaggatgccgcatggaaa

SEQ ID NO: 142437 - DNA, 25 bp, Canis familiaris
gtcctctttggatttctgtgtgaaa

SEQ ID NO: 142438 - DNA, 25 bp, Canis familiaris
gtccacttaggtatgttgtatagtc

SEQ ID NO: 142439 - DNA, 25 bp, Canis familiaris
gtgccacttgagggttctttgttat

SEQ ID NO: 142440 - DNA, 25 bp, Canis familiaris
gtccaattgcaggttttcttgcaga

SEQ ID NO: 142441 - DNA, 25 bp, Canis familiaris
gtccagcgtccagattgatctttga

SEQ ID NO: 142442 - DNA, 25 bp, Canis familiaris
gtccatgaggtcgttcgatcggata

SEQ ID NO: 142443 - DNA, 25 bp, Canis familiaris
gtccatgggatggtcggatctcacc

SEQ ID NO: 142444 - DNA, 25 bp, Canis familiaris
gtccatgtggctcacacagacacac

SEQ ID NO: 142445 - DNA, 25 bp, Canis familiaris
gtgctgcgagctgcaacggagcaac

SEQ ID NO: 142446 - DNA, 25 bp, Canis familiaris
gtgctgaccactcgaccgagaaagg

SEQ ID NO: 142447 - DNA, 25 bp, Canis familiaris
gtgctgaccattcgacgcagaatag

SEQ ID NO: 142448 - DNA, 25 bp, Canis familiaris
gtgctgacgccttactggcaatgct

SEQ ID NO: 142449 - DNA, 25 bp, Canis familiaris
gtgctgcccacgatcggcagacata

SEQ ID NO: 142450 - DNA, 25 bp, Canis familiaris
gtgctgacaacacaggagccaaaaa

SEQ ID NO: 142451 - DNA, 25 bp, Canis familiaris
gtccacataaaaaaccagctaaatc

SEQ ID NO: 142452 - DNA, 25 bp, Canis familiaris
gtccactgaggaagccaccgtaaga

SEQ ID NO: 142453 - DNA, 25 bp, Canis familiaris
gtccattggaagacccctgtaatag

SEQ ID NO: 142454 - DNA, 25 bp, Canis familiaris
gtgccttaaaccccaatgtcaatag

SEQ ID NO: 142455 - DNA, 25 bp, Canis familiaris
gtgcctttaaacttacaccaaagtg

SEQ ID NO: 142456 - DNA, 25 bp, Canis familiaris
gtccttttacaatatcaccagcagc

SEQ ID NO: 142457 - DNA, 25 bp, Canis familiaris
gtgtatttcccctaacaattcagtg

SEQ ID NO: 142458 - DNA, 25 bp, Canis familiaris
gtgttaatcccctgttattactggt

SEQ ID NO: 142459 - DNA, 25 bp, Canis familiaris
ggtgctaaaccctggtacttcgtat

SEQ ID NO: 142460 - DNA, 25 bp, Canis familiaris
gtgaaaaacccctctttcattattg

SEQ ID NO: 142461 - DNA, 25 bp, Canis familiaris
ggtaaaaagcacaccataaagtttg

SEQ ID NO: 142462 - DNA, 25 bp, Canis familiaris
ggaaggaagggcgccaagcaaggtt

SEQ ID NO: 142463 - DNA, 25 bp, Canis familiaris
gtgactggaaggtacccaagataga

SEQ ID NO: 142464 - DNA, 25 bp, Canis familiaris
gtggtcggagagtccccaatatagt

SEQ ID NO: 142465 - DNA, 25 bp, Canis familiaris
gtgttcacggaagtctccagtcaag

SEQ ID NO: 142466 - DNA, 25 bp, Canis familiaris
gtgcttaccacaagtacaaggcaaa

SEQ ID NO: 142467 - DNA, 25 bp, Canis familiaris
gtgcttacaggcctctaatgggcag

SEQ ID NO: 142468 - DNA, 25 bp, Canis familiaris
gtccaagcaggccatcttagcagct

SEQ ID NO: 142469 - DNA, 25 bp, Canis familiaris
gtccagatcggcgacattgtcacag

SEQ ID NO: 142470 - DNA, 25 bp, Canis familiaris
gtccaccacaaatgcttctagatgg

SEQ ID NO: 142471 - DNA, 25 bp, Canis familiaris
gtccaccgcaaatgcttctaggcgg

SEQ ID NO: 142472 - DNA, 25 bp, Canis familiaris
gtccaccgcaaatgcttctaggcgg

SEQ ID NO: 142473 - DNA, 25 bp, Canis familiaris
gtccaccgagagagatctgctgcat

SEQ ID NO: 142474 - DNA, 25 bp, Canis familiaris
gtccaagagcaaattcatcaggtcc

SEQ ID NO: 142475 - DNA, 25 bp, Canis familiaris
gtccaggagctaatctgaccgttct

SEQ ID NO: 142476 - DNA, 25 bp, Canis familiaris
gtccacgacttttgtcacgtttcga

SEQ ID NO: 142477 - DNA, 25 bp, Canis familiaris
gtgcccgactttttgtctgttagga

SEQ ID NO: 142478 - DNA, 25 bp, Canis familiaris
gtgcacctatttatatttttgaaaa

SEQ ID NO: 142479 - DNA, 25 bp, Canis familiaris
gtccttctcttttcttttctaagat

SEQ ID NO: 142480 - DNA, 25 bp, Canis familiaris
gtccttgattctttgcctgtttaag

SEQ ID NO: 142481 - DNA, 25 bp, Canis familiaris
gtccattttattaccattttctatc

SEQ ID NO: 142482 - DNA, 25 bp, Canis familiaris
gtccttttgttttcaatgaccttga

SEQ ID NO: 142483 - DNA, 25 bp, Canis familiaris
gtccagttgttttctcctaactaga

SEQ ID NO: 142484 - DNA, 25 bp, Canis familiaris
gtccactttaatcctttatacgagg

SEQ ID NO: 142485 - DNA, 25 bp, Canis familiaris
gtccaatgttaatccgtatccaacc

SEQ ID NO: 142486 - DNA, 25 bp, Canis familiaris
gtccacctctaatccagcttaatag

SEQ ID NO: 142487 - DNA, 25 bp, Canis familiaris
gtccactgtaaatcctgttaacgag

SEQ ID NO: 142488 - DNA, 25 bp, Canis familiaris
gtcctttacaattttcctgatagga

SEQ ID NO: 142489 - DNA, 25 bp, Canis familiaris
gtccaatgtgacaacctacctgggc

SEQ ID NO: 142490 - DNA, 25 bp, Canis familiaris
gtccttgtgtcatcgtttggggcac

SEQ ID NO: 142491 - DNA, 25 bp, Canis familiaris
gtcctttgccatgtgtctgaggtgg

SEQ ID NO: 142492 - DNA, 25 bp, Canis familiaris
gtccatggtgactcattctgggcat

SEQ ID NO: 142493 - DNA, 25 bp, Canis familiaris
gtccaggtgtcggtcctggtgttgg

SEQ ID NO: 142494 - DNA, 25 bp, Canis familiaris
gtgccccaccaggtcctggtggtgg

SEQ ID NO: 142495 - DNA, 25 bp, Canis familiaris
gtgccctcacctgaccttgagggac

SEQ ID NO: 142496 - DNA, 25 bp, Canis familiaris
gtgcccttccagcaagtgtggggac

SEQ ID NO: 142497 - DNA, 25 bp, Canis familiaris
gtgccctggtgccaacagggggtca

SEQ ID NO: 142498 - DNA, 25 bp, Canis familiaris
ggcccgggccatcgccattgctgcg

SEQ ID NO: 142499 - DNA, 25 bp, Canis familiaris
gtgcctggaagcagcccatggctgc

SEQ ID NO: 142500 - DNA, 25 bp, Canis familiaris
gtcctacatgatcgtcctcatgacc

SEQ ID NO: 142501 - DNA, 25 bp, Canis familiaris
gtccttcagcaccatcagctatagc

SEQ ID NO: 142502 - DNA, 25 bp, Canis familiaris
gtgccttgcagaaccactgatgact

SEQ ID NO: 142503 - DNA, 25 bp, Canis familiaris
gtccatctccatgttagatgattgg

SEQ ID NO: 142504 - DNA, 25 bp, Canis familiaris
gtccatctcaatatgtcatgttggg

SEQ ID NO: 142505 - DNA, 25 bp, Canis familiaris
gtccattcactccagtctgttaatg

SEQ ID NO: 142506 - DNA, 25 bp, Canis familiaris
gtccatgtccattcattttataaat

SEQ ID NO: 142507 - DNA, 25 bp, Canis familiaris
gtcctttcatttcttgtgacacatg

SEQ ID NO: 142508 - DNA, 25 bp, Canis familiaris
gtccttttatccatctgatgacgat

SEQ ID NO: 142509 - DNA, 25 bp, Canis familiaris
gtccaatctagtccattaggcaaga

SEQ ID NO: 142510 - DNA, 25 bp, Canis familiaris
gtccacactaagccttgtggccatc

SEQ ID NO: 142511 - DNA, 25 bp, Canis familiaris
gtccacaatgtggccaagtccaatc

SEQ ID NO: 142512 - DNA, 25 bp, Canis familiaris
gtccattcttagccaagctgctagt

SEQ ID NO: 142513 - DNA, 25 bp, Canis familiaris
gtccattcctgacaatgccggagga

SEQ ID NO: 142514 - DNA, 25 bp, Canis familiaris
gtccaatcaaggccaatccggaccc

SEQ ID NO: 142515 - DNA, 25 bp, Canis familiaris
gtgccagtcgagggtaacgtacccg

SEQ ID NO: 142516 - DNA, 25 bp, Canis familiaris
gtgcccacggcattaagggtacgtc

SEQ ID NO: 142517 - DNA, 25 bp, Canis familiaris
gtgcccacggccagagggtgaaggc

SEQ ID NO: 142518 - DNA, 25 bp, Canis familiaris
gtgcccgagggtaggggtggaggag

SEQ ID NO: 142519 - DNA, 25 bp, Canis familiaris
tgtcaccgcggtcaacggggatggg

SEQ ID NO: 142520 - DNA, 25 bp, Canis familiaris
gtgcacccggtggaccaggggaaag

SEQ ID NO: 142521 - DNA, 25 bp, Canis familiaris
gtgcccctggggtccaggatggagt

SEQ ID NO: 142522 - DNA, 25 bp, Canis familiaris
gtccaccgaggagtccgtgtgaggc

SEQ ID NO: 142523 - DNA, 25 bp, Canis familiaris
gtgccccagggagtcatggagcgaa

SEQ ID NO: 142524 - DNA, 25 bp, Canis familiaris
gtgccttagggtacagtgggtaagc

SEQ ID NO: 142525 - DNA, 25 bp, Canis familiaris
gtgcttgtagctattgggggtcagg

SEQ ID NO: 142526 - DNA, 25 bp, Canis familiaris
gtgctcctagttaagtatttgtcag

SEQ ID NO: 142527 - DNA, 25 bp, Canis familiaris
gtgccctaaatgaatttttgccagt

SEQ ID NO: 142528 - DNA, 25 bp, Canis familiaris
gtgccctccgatgagttttcagagc

SEQ ID NO: 142529 - DNA, 25 bp, Canis familiaris
gtccactccgagcagctttggaaga

SEQ ID NO: 142530 - DNA, 25 bp, Canis familiaris
gtccactcctgatgctgttatgagc

SEQ ID NO: 142531 - DNA, 25 bp, Canis familiaris
gtccaccactgatacctatataacc

SEQ ID NO: 142532 - DNA, 25 bp, Canis familiaris
gtccttcctgataacctcacagaga

SEQ ID NO: 142533 - DNA, 25 bp, Canis familiaris
gtccaatcaatcaaacatcccagta

SEQ ID NO: 142534 - DNA, 25 bp, Canis familiaris
gtccagaacacagccatggccagtc

SEQ ID NO: 142535 - DNA, 25 bp, Canis familiaris
gtccagtagatagccttgcgagcca

SEQ ID NO: 142536 - DNA, 25 bp, Canis familiaris
gtccatcgaagagtccttggaacaa

SEQ ID NO: 142537 - DNA, 25 bp, Canis familiaris
gtgcttcaaaaatcttggctgactt

SEQ ID NO: 142538 - DNA, 25 bp, Canis familiaris
gtgcttgctagaaacctggtgctgt

SEQ ID NO: 142539 - DNA, 25 bp, Canis familiaris
gtgcgttagacgcctcatcgttata

SEQ ID NO: 142540 - DNA, 25 bp, Canis familiaris
gtgctgataggacctttctctggat

SEQ ID NO: 142541 - DNA, 25 bp, Canis familiaris
gtgcctatgtacgttgtttggattc

SEQ ID NO: 142542 - DNA, 25 bp, Canis familiaris
gtgcctattgcggttgtaactggtc

SEQ ID NO: 142543 - DNA, 25 bp, Canis familiaris
gtgccaatcgggagtgatgatcatc

SEQ ID NO: 142544 - DNA, 25 bp, Canis familiaris
gtccacaaggggctgcaacacaggg

SEQ ID NO: 142545 - DNA, 25 bp, Canis familiaris
gtccacaggggctctggaactggga

SEQ ID NO: 142546 - DNA, 25 bp, Canis familiaris
gtccacaggggtgcggcagggagac

SEQ ID NO: 142547 - DNA, 25 bp, Canis familiaris
gtccaacctgggcagccagtggagc

SEQ ID NO: 142548 - DNA, 25 bp, Canis familiaris
gtgccagacgtgtggacctttgatg

SEQ ID NO: 142549 - DNA, 25 bp, Canis familiaris
gtccacagctggagacactcactta

SEQ ID NO: 142550 - DNA, 25 bp, Canis familiaris
gtccaactgtcatgacttcttgcta

SEQ ID NO: 142551 - DNA, 25 bp, Canis familiaris
gtccatgtcttattactttgatcgc

SEQ ID NO: 142552 - DNA, 25 bp, Canis familiaris
gtccatgtcttattactttgatcgc

SEQ ID NO: 142553 - DNA, 25 bp, Canis familiaris
gtccatgtcttattacttgatcgcg

SEQ ID NO: 142554 - DNA, 25 bp, Canis familiaris
gtccactcttcatcttgtgttgaga

SEQ ID NO: 142555 - DNA, 25 bp, Canis familiaris
gtccactcttcatcttgtgttgaga

SEQ ID NO: 142556 - DNA, 25 bp, Canis familiaris
gtccactcttcatcttgtgttgaga

SEQ ID NO: 142557 - DNA, 25 bp, Canis familiaris
gtgccagtattatctgttggtgtga

SEQ ID NO: 142558 - DNA, 25 bp, Canis familiaris
gtgccgtcaccatgttcatgggctt

SEQ ID NO: 142559 - DNA, 25 bp, Canis familiaris
gtgcccccaaagtttgggctaagct

SEQ ID NO: 142560 - DNA, 25 bp, Canis familiaris
gtgcccccaacgtcaattcagttgg

SEQ ID NO: 142561 - DNA, 25 bp, Canis familiaris
gtgccttacaaccacaaagagtcag

SEQ ID NO: 142562 - DNA, 25 bp, Canis familiaris
gtccttcgacacccaggaggtgagg

SEQ ID NO: 142563 - DNA, 25 bp, Canis familiaris
gtccaactactcccaggcagggatc

SEQ ID NO: 142564 - DNA, 25 bp, Canis familiaris
gtccaactcgttcaagatgagacac

SEQ ID NO: 142565 - DNA, 25 bp, Canis familiaris
gtgcctcacttactaaagcatgaac

SEQ ID NO: 142566 - DNA, 25 bp, Canis familiaris
gtgcctactgatataaccagctcca

SEQ ID NO: 142567 - DNA, 25 bp, Canis familiaris
gtccttctgtctaaaatgagtctct

SEQ ID NO: 142568 - DNA, 25 bp, Canis familiaris
gtccttactgcttaacatacatttg

SEQ ID NO: 142569 - DNA, 25 bp, Canis familiaris
gtgccttacttttctattctatatg

SEQ ID NO: 142570 - DNA, 25 bp, Canis familiaris
gtccaatcctttactcatagtcact

SEQ ID NO: 142571 - DNA, 25 bp, Canis familiaris
gtccacacgagatactacttgcaca

SEQ ID NO: 142572 - DNA, 25 bp, Canis familiaris
gtccacatcctataaatgttgctca

SEQ ID NO: 142573 - DNA, 25 bp, Canis familiaris
gtgccaagcacttatggacattatc

SEQ ID NO: 142574 - DNA, 25 bp, Canis familiaris
gtgctctatttgtcaagagttactt

SEQ ID NO: 142575 - DNA, 25 bp, Canis familiaris
gtgccttgcctgtaaaaatcctata

SEQ ID NO: 142576 - DNA, 25 bp, Canis familiaris
gtgccttggcttcagagaacaccta

SEQ ID NO: 142577 - DNA, 25 bp, Canis familiaris
gtccatctgttcctaacaaatccac

SEQ ID NO: 142578 - DNA, 25 bp, Canis familiaris
gtccaagtactcagacatcaccacc

SEQ ID NO: 142579 - DNA, 25 bp, Canis familiaris
gtccacagtgatacgcagacacacc

SEQ ID NO: 142580 - DNA, 25 bp, Canis familiaris
gtccaatgtgacgagcacctatccc

SEQ ID NO: 142581 - DNA, 25 bp, Canis familiaris
gtccttgtacattgacacatatcct

SEQ ID NO: 142582 - DNA, 25 bp, Canis familiaris
gtccacttgacgttcagatagccgg

SEQ ID NO: 142583 - DNA, 25 bp, Canis familiaris
gtccacttgggttcaattcttgtaa

SEQ ID NO: 142584 - DNA, 25 bp, Canis familiaris
gtgaagatttggtacctttatgtcc

SEQ ID NO: 142585 - DNA, 25 bp, Canis familiaris
gtccacagtttgtgctcgtttggcc

SEQ ID NO: 142586 - DNA, 25 bp, Canis familiaris
gtgccacagttttcctagttttaag

SEQ ID NO: 142587 - DNA, 25 bp, Canis familiaris
gtgccacaagcaaacctatgttctt

SEQ ID NO: 142588 - DNA, 25 bp, Canis familiaris
gtccaatggagagttaagtatcttc

SEQ ID NO: 142589 - DNA, 25 bp, Canis familiaris
gtccaagggacttgcacctgatctc

SEQ ID NO: 142590 - DNA, 25 bp, Canis familiaris
gtccaggggacttgagtcaggccta

SEQ ID NO: 142591 - DNA, 25 bp, Canis familiaris
gtgctagttggtctactcaggctac

SEQ ID NO: 142592 - DNA, 25 bp, Canis familiaris
gtgctaaaggtgctaacggcgctcc

SEQ ID NO: 142593 - DNA, 25 bp, Canis familiaris
gtgccccaggacagaagaggcctcc

SEQ ID NO: 142594 - DNA, 25 bp, Canis familiaris
gtgccctaatgtgggggagagccct

SEQ ID NO: 142595 - DNA, 25 bp, Canis familiaris
gtgccctgaatgcgggaagcgcttc

SEQ ID NO: 142596 - DNA, 25 bp, Canis familiaris
gtgccctgtgcacactggagggtca

SEQ ID NO: 142597 - DNA, 25 bp, Canis familiaris
gtgccaggagcacaagcgagggccc

SEQ ID NO: 142598 - DNA, 25 bp, Canis familiaris
gtccagggaggctgggtgtctctgc

SEQ ID NO: 142599 - DNA, 25 bp, Canis familiaris
gtccatggaaggagggtctcagtcc

SEQ ID NO: 142600 - DNA, 25 bp, Canis familiaris
gtccttgccaggactggggtgcagg

SEQ ID NO: 142601 - DNA, 25 bp, Canis familiaris
gtccttgccaccctgggagagaaga

SEQ ID NO: 142602 - DNA, 25 bp, Canis familiaris
gtgcccgagacccgagggagaaaca

SEQ ID NO: 142603 - DNA, 25 bp, Canis familiaris
gtccaccagggacagatccagaaac

SEQ ID NO: 142604 - DNA, 25 bp, Canis familiaris
gtccaccgtggacgagacacaggag

SEQ ID NO: 142605 - DNA, 25 bp, Canis familiaris
gtccagagcggggctgcagaaggga

SEQ ID NO: 142606 - DNA, 25 bp, Canis familiaris
gtccaggctgcacgtcatgaaacag

SEQ ID NO: 142607 - DNA, 25 bp, Canis familiaris
gtgccattggcatctacatagacag

SEQ ID NO: 142608 - DNA, 25 bp, Canis familiaris
gtgccattggcatctacatagacag

SEQ ID NO: 142609 - DNA, 25 bp, Canis familiaris
gtgccattggcatctacatagacag

SEQ ID NO: 142610 - DNA, 25 bp, Canis familiaris
gtgccattgtctttctatgaacata

SEQ ID NO: 142611 - DNA, 25 bp, Canis familiaris
gtccaagctcttacattaacgttct

SEQ ID NO: 142612 - DNA, 25 bp, Canis familiaris
gtccaatgtcttattacttttgatc

SEQ ID NO: 142613 - DNA, 25 bp, Canis familiaris
gtgccagagtgtgattaacctttgt

SEQ ID NO: 142614 - DNA, 25 bp, Canis familiaris
gtccaattgtggtttattataggtg

SEQ ID NO: 142615 - DNA, 25 bp, Canis familiaris
gtccaattgtgaattctaaaccctg

SEQ ID NO: 142616 - DNA, 25 bp, Canis familiaris
gtccaactagatctgtaatccctca

SEQ ID NO: 142617 - DNA, 25 bp, Canis familiaris
gtccaaagagtgcagtaacctcctt

SEQ ID NO: 142618 - DNA, 25 bp, Canis familiaris
gtgcccaacgtgctgatgcactttc

SEQ ID NO: 142619 - DNA, 25 bp, Canis familiaris
gtgccttagcatcggtaacctgtgc

SEQ ID NO: 142620 - DNA, 25 bp, Canis familiaris
gtgctctgaaaatgtcgacactgta

SEQ ID NO: 142621 - DNA, 25 bp, Canis familiaris
gtgccgaaggacaggcaccttgcag

SEQ ID NO: 142622 - DNA, 25 bp, Canis familiaris
gtccaggaggagggtcacagctcag

SEQ ID NO: 142623 - DNA, 25 bp, Canis familiaris
gtccaggaagcacagtatactcagg

SEQ ID NO: 142624 - DNA, 25 bp, Canis familiaris
gtgacaagaagcaggcgtaccggtc

SEQ ID NO: 142625 - DNA, 25 bp, Canis familiaris
gtgagaataaatgaggtaacgcgta

SEQ ID NO: 142626 - DNA, 25 bp, Canis familiaris
gtgaccaaaatgtggctcccatggt

SEQ ID NO: 142627 - DNA, 25 bp, Canis familiaris
gtgcacgaaatgagttccgactgga

SEQ ID NO: 142628 - DNA, 25 bp, Canis familiaris
gtgcggacagtgtgcgtccgaggcc

SEQ ID NO: 142629 - DNA, 25 bp, Canis familiaris
gtgcgtgaaattggggctgggccgg

SEQ ID NO: 142630 - DNA, 25 bp, Canis familiaris
gtgcaggagaaagatggagagtgac

SEQ ID NO: 142631 - DNA, 25 bp, Canis familiaris
gtgctgggcacatactcgaaggacc

SEQ ID NO: 142632 - DNA, 25 bp, Canis familiaris
gtgctgggaaaattggacatccacc

SEQ ID NO: 142633 - DNA, 25 bp, Canis familiaris
gtgctggtaccagggtactcgtcca

SEQ ID NO: 142634 - DNA, 25 bp, Canis familiaris
gtgagcggtaaggggactcgtccag

SEQ ID NO: 142635 - DNA, 25 bp, Canis familiaris
gtgcaggtttaccaggaacctaaca

SEQ ID NO: 142636 - DNA, 25 bp, Canis familiaris
gtgccggcgtcaccaggaagaaaac

SEQ ID NO: 142637 - DNA, 25 bp, Canis familiaris
gtgcggcagggcacaggaagtcaga

SEQ ID NO: 142638 - DNA, 25 bp, Canis familiaris
gtggaaggcgttttgagaccagacg

SEQ ID NO: 142639 - DNA, 25 bp, Canis familiaris
gtgaggggagttagaagtccgtcca

SEQ ID NO: 142640 - DNA, 25 bp, Canis familiaris
gtgagggccacgtgaaggagccgcc

SEQ ID NO: 142641 - DNA, 25 bp, Canis familiaris
gtgattggcccagagtggtactcaa

SEQ ID NO: 142642 - DNA, 25 bp, Canis familiaris
gtgttttccctgagagaagcataag

SEQ ID NO: 142643 - DNA, 25 bp, Canis familiaris
gtgccatttccactgtaagccagaa

SEQ ID NO: 142644 - DNA, 25 bp, Canis familiaris
gtgcgcatattccatattcaagtct

SEQ ID NO: 142645 - DNA, 25 bp, Canis familiaris
gtccatgacattcctataatctctc

SEQ ID NO: 142646 - DNA, 25 bp, Canis familiaris
gtgccagaatttgaagatcccgctc

SEQ ID NO: 142647 - DNA, 25 bp, Canis familiaris
gtgcggattttacatggcccgtcta

SEQ ID NO: 142648 - DNA, 25 bp, Canis familiaris
gtgggctctattgaatggttaccta

SEQ ID NO: 142649 - DNA, 25 bp, Canis familiaris
gtgcgtttttcgaattttactcttg

SEQ ID NO: 142650 - DNA, 25 bp, Canis familiaris
gtgctgtcgctgtgttttttaattt

SEQ ID NO: 142651 - DNA, 25 bp, Canis familiaris
gtgctgctgcctgagtttcaagaat

SEQ ID NO: 142652 - DNA, 25 bp, Canis familiaris
gtgctgccatctgcttttcaaaggc

SEQ ID NO: 142653 - DNA, 25 bp, Canis familiaris
gtgctgtttctgctgtccaaagagc

SEQ ID NO: 142654 - DNA, 25 bp, Canis familiaris
gtgcgtggtggaggatcgaccagtg

SEQ ID NO: 142655 - DNA, 25 bp, Canis familiaris
gtgcagggtcacagcacgtgcacgg

SEQ ID NO: 142656 - DNA, 25 bp, Canis familiaris
gtgctgaaggaagccctcacttggc

SEQ ID NO: 142657 - DNA, 25 bp, Canis familiaris
gtgctctaggaatactccgtacgct

SEQ ID NO: 142658 - DNA, 25 bp, Canis familiaris
gtgcctagagccaaactgccttaat

SEQ ID NO: 142659 - DNA, 25 bp, Canis familiaris
gtgcgccatagccaaaggtctgttt

SEQ ID NO: 142660 - DNA, 25 bp, Canis familiaris
gtgcgaatcaccagagtgtgagtct

SEQ ID NO: 142661 - DNA, 25 bp, Canis familiaris
gtgatgaatcacctaattctacccc

SEQ ID NO: 142662 - DNA, 25 bp, Canis familiaris
gggcatatgccggatatgccccccc

SEQ ID NO: 142663 - DNA, 25 bp, Canis familiaris
gtccaatctctggactcaactccac

SEQ ID NO: 142664 - DNA, 25 bp, Canis familiaris
gtccagctctctgacatcaaaacgt

SEQ ID NO: 142665 - DNA, 25 bp, Canis familiaris
gtccaggcctaggcatcactgtatc

SEQ ID NO: 142666 - DNA, 25 bp, Canis familiaris
gtccaggtctgtgaactgtggctga

SEQ ID NO: 142667 - DNA, 25 bp, Canis familiaris
gtgccatggttgttaatgtgggctg

SEQ ID NO: 142668 - DNA, 25 bp, Canis familiaris
gtgacagggattaaagggggcacct

SEQ ID NO: 142669 - DNA, 25 bp, Canis familiaris
gtgctcagggtcccggtgagtggac

SEQ ID NO: 142670 - DNA, 25 bp, Canis familiaris
gtgccttcccagcctggtatgaaga

SEQ ID NO: 142671 - DNA, 25 bp, Canis familiaris
gtgccctggaagctgtatctgaaat

SEQ ID NO: 142672 - DNA, 25 bp, Canis familiaris
gtgctgtcggggctgattgcagatc

SEQ ID NO: 142673 - DNA, 25 bp, Canis familiaris
gtgctcttggacctgtgtggaacag

SEQ ID NO: 142674 - DNA, 25 bp, Canis familiaris
gtgctgcgttacgtcagggtatcgg

SEQ ID NO: 142675 - DNA, 25 bp, Canis familiaris
gtgcgagttatcctgttggtacctg

SEQ ID NO: 142676 - DNA, 25 bp, Canis familiaris
gtgctgggttcactttgagtcgtgc

SEQ ID NO: 142677 - DNA, 25 bp, Canis familiaris
gtgctggcggctggtttacgccgct

SEQ ID NO: 142678 - DNA, 25 bp, Canis familiaris
gtgctgggacttattcctccagcct

SEQ ID NO: 142679 - DNA, 25 bp, Canis familiaris
gtgctgatgatgattaaaacccaaa

SEQ ID NO: 142680 - DNA, 25 bp, Canis familiaris
gtgccacatggctttgaaacccaca

SEQ ID NO: 142681 - DNA, 25 bp, Canis familiaris
gtgccagtgggtcgagaggcccaaa

SEQ ID NO: 142682 - DNA, 25 bp, Canis familiaris
gtgccatgttggcaactggctctca

SEQ ID NO: 142683 - DNA, 25 bp, Canis familiaris
gtccatggctggcagagtggctacc

SEQ ID NO: 142684 - DNA, 25 bp, Canis familiaris
gtccatggctggcagtggaaatccc

SEQ ID NO: 142685 - DNA, 25 bp, Canis familiaris
gtccagtgcgcgcagggacgagcac

SEQ ID NO: 142686 - DNA, 25 bp, Canis familiaris
gtccagctcctggtgccagagtaga

SEQ ID NO: 142687 - DNA, 25 bp, Canis familiaris
gtccagcatcaagctgagagaggaa

SEQ ID NO: 142688 - DNA, 25 bp, Canis familiaris
gtgccactgaatggctagagggata

SEQ ID NO: 142689 - DNA, 25 bp, Canis familiaris
gtgccccagactgtgcagggatttg

SEQ ID NO: 142690 - DNA, 25 bp, Canis familiaris
gtgcccaacactttcggtggaggtc

SEQ ID NO: 142691 - DNA, 25 bp, Canis familiaris
gtgccaaaagccttcaggcctacaa

SEQ ID NO: 142692 - DNA, 25 bp, Canis familiaris
gtgccacaaacttgccagtggtaac

SEQ ID NO: 142693 - DNA, 25 bp, Canis familiaris
gtgccaaaacctccagaagacaagc

SEQ ID NO: 142694 - DNA, 25 bp, Canis familiaris
gtgctcagccaagaccaaggagtgg

SEQ ID NO: 142695 - DNA, 25 bp, Canis familiaris
gtgctcaacaaaccaggaggagttg

SEQ ID NO: 142696 - DNA, 25 bp, Canis familiaris
gtccagatcaaacctggagctttta

SEQ ID NO: 142697 - DNA, 25 bp, Canis familiaris
gtccagtgacactgctgtgagtgtt

SEQ ID NO: 142698 - DNA, 25 bp, Canis familiaris
gtgcgggtcataagcttgcgttgat

SEQ ID NO: 142699 - DNA, 25 bp, Canis familiaris
gtgcgggtcataagcttgcgttgat

SEQ ID NO: 142700 - DNA, 25 bp, Canis familiaris
tggcctggtgcaacggtaacgacgg

SEQ ID NO: 142701 - DNA, 25 bp, Canis familiaris
gtgctcgagctcacggagaacgacc

SEQ ID NO: 142702 - DNA, 25 bp, Canis familiaris
gtgccgagcttgaagaagaattgaa

SEQ ID NO: 142703 - DNA, 25 bp, Canis familiaris
gtgcccaggtgataaatactgagct

SEQ ID NO: 142704 - DNA, 25 bp, Canis familiaris
gtgctccatgggtcaaaaatggcag

SEQ ID NO: 142705 - DNA, 25 bp, Canis familiaris
gtgctggatgagggccaaaaatgaa

SEQ ID NO: 142706 - DNA, 25 bp, Canis familiaris
gtgctaggcccctaaaagaagaagc

SEQ ID NO: 142707 - DNA, 25 bp, Canis familiaris
gtgctcggccaagaccaaggagggc

SEQ ID NO: 142708 - DNA, 25 bp, Canis familiaris
gtgccgggcacagacgaacaatggt

SEQ ID NO: 142709 - DNA, 25 bp, Canis familiaris
gtgccagaggcatgtattggtcaat

SEQ ID NO: 142710 - DNA, 25 bp, Canis familiaris
gtccagcacgctctcttgtgtggac

SEQ ID NO: 142711 - DNA, 25 bp, Canis familiaris
gtccaagccttgattttgctgatga

SEQ ID NO: 142712 - DNA, 25 bp, Canis familiaris
gtccaccgtcatatttagtgctgcc

SEQ ID NO: 142713 - DNA, 25 bp, Canis familiaris
gtgccatccagtcatttgctggctt

SEQ ID NO: 142714 - DNA, 25 bp, Canis familiaris
gtccaccagcatttagtgtgatgcc

SEQ ID NO: 142715 - DNA, 25 bp, Canis familiaris
gtccactgagttaattgcagcagac

SEQ ID NO: 142716 - DNA, 25 bp, Canis familiaris
gtccacgtgtatactgtgatcccga

SEQ ID NO: 142717 - DNA, 25 bp, Canis familiaris
gtgccgtgcattaagagtttcctga

SEQ ID NO: 142718 - DNA, 25 bp, Canis familiaris
gtgccaccattcaaagtattacaga

SEQ ID NO: 142719 - DNA, 25 bp, Canis familiaris
gtccacgctgccacggatgtataga

SEQ ID NO: 142720 - DNA, 25 bp, Canis familiaris
gtccaccatggcactggaggcaagt

SEQ ID NO: 142721 - DNA, 25 bp, Canis familiaris
gtccaagcaggcagtgtaagcaagg

SEQ ID NO: 142722 - DNA, 25 bp, Canis familiaris
gtgcccagcaccaggtagcaggaga

SEQ ID NO: 142723 - DNA, 25 bp, Canis familiaris
gtgccagcccaaatggtgccagaaa

SEQ ID NO: 142724 - DNA, 25 bp, Canis familiaris
gtgcccggaaatttcgcagtatcgg

SEQ ID NO: 142725 - DNA, 25 bp, Canis familiaris
gtgtccggactttcctaattggagt

SEQ ID NO: 142726 - DNA, 25 bp, Canis familiaris
gtgtccgtagtgatcctggattccc

SEQ ID NO: 142727 - DNA, 25 bp, Canis familiaris
gtccacgtagtgagcgcaggcatct

SEQ ID NO: 142728 - DNA, 25 bp, Canis familiaris
gtgccatttagttcaggagatctct

SEQ ID NO: 142729 - DNA, 25 bp, Canis familiaris
gtgctctttgtagctgcaaattgcc

SEQ ID NO: 142730 - DNA, 25 bp, Canis familiaris
gtgcttgaggtggaacgatttgatc

SEQ ID NO: 142731 - DNA, 25 bp, Canis familiaris
gtgctggaggtgcaggagtccgacc

SEQ ID NO: 142732 - DNA, 25 bp, Canis familiaris
gtgctggaggggagatgctagtggc

SEQ ID NO: 142733 - DNA, 25 bp, Canis familiaris
gtgcgtgggtgggaagtgggggcgg

SEQ ID NO: 142734 - DNA, 25 bp, Canis familiaris
gtgcgcggggagcaggtgggagagc

SEQ ID NO: 142735 - DNA, 25 bp, Canis familiaris
gtccaatggcggcgggagcaggagc

SEQ ID NO: 142736 - DNA, 25 bp, Canis familiaris
gtgccttggcagctggaggaggggt

SEQ ID NO: 142737 - DNA, 25 bp, Canis familiaris
gtgcctccacaatggattgggggat

SEQ ID NO: 142738 - DNA, 25 bp, Canis familiaris
gtgcctccaacatttttggtgaggt

SEQ ID NO: 142739 - DNA, 25 bp, Canis familiaris
gtgccaccacattctgtttagtacc

SEQ ID NO: 142740 - DNA, 25 bp, Canis familiaris
gtgcctgccaatttgtacacagtgg

SEQ ID NO: 142741 - DNA, 25 bp, Canis familiaris
gtgcctctccaagtatccaagtggc

SEQ ID NO: 142742 - DNA, 25 bp, Canis familiaris
gtgctttccataggaccacgttttt

SEQ ID NO: 142743 - DNA, 25 bp, Canis familiaris
gtgctttccagaataaaggttgtgt

SEQ ID NO: 142744 - DNA, 25 bp, Canis familiaris
gtgctgatggccactaacagacctg

SEQ ID NO: 142745 - DNA, 25 bp, Canis familiaris
gtgcttggctcatatgaatcacctg

SEQ ID NO: 142746 - DNA, 25 bp, Canis familiaris
gtgctgtcagacaaacataaacggg

SEQ ID NO: 142747 - DNA, 25 bp, Canis familiaris
gtgctgtgcgaaaaccactactgga

SEQ ID NO: 142748 - DNA, 25 bp, Canis familiaris
gtgactgaggaaacacctgaaggtg

SEQ ID NO: 142749 - DNA, 25 bp, Canis familiaris
gtgccgatcctaattttgaaggtgg

SEQ ID NO: 142750 - DNA, 25 bp, Canis familiaris
gtgccgtttgggataacatggatgg

SEQ ID NO: 142751 - DNA, 25 bp, Canis familiaris
gtgtagtattggtttcaggggtaga

SEQ ID NO: 142752 - DNA, 25 bp, Canis familiaris
gtgactagttgtgcttcgagggtga

SEQ ID NO: 142753 - DNA, 25 bp, Canis familiaris
gtgcttggacgtgattccagaaggg

SEQ ID NO: 142754 - DNA, 25 bp, Canis familiaris
gtgcgtgtgcgtgaatttaagagag

SEQ ID NO: 142755 - DNA, 25 bp, Canis familiaris
gtgcgacggctggaacttcagcgac

SEQ ID NO: 142756 - DNA, 25 bp, Canis familiaris
gtgcgagcggcctgcaaacaggaac

SEQ ID NO: 142757 - DNA, 25 bp, Canis familiaris
gtgcgcaaggccgtgcagtacacga

SEQ ID NO: 142758 - DNA, 25 bp, Canis familiaris
gtgcgatacgcggcgcaatacaccc

SEQ ID NO: 142759 - DNA, 25 bp, Canis familiaris
gtgccatgcaagccgcggtaaattc

SEQ ID NO: 142760 - DNA, 25 bp, Canis familiaris
gtgcctgattgactgggctgaagcg

SEQ ID NO: 142761 - DNA, 25 bp, Canis familiaris
gtgcctgtgctggtggaggaagcct

SEQ ID NO: 142762 - DNA, 25 bp, Canis familiaris
gtgcctgatgtgggggagagcctat

SEQ ID NO: 142763 - DNA, 25 bp, Canis familiaris
gtgcctgcatggagtcagtactata

SEQ ID NO: 142764 - DNA, 25 bp, Canis familiaris
gtgcttatgggcaacgtgcctgacc

SEQ ID NO: 142765 - DNA, 25 bp, Canis familiaris
gtgctgttggtttcagtgactatcc

SEQ ID NO: 142766 - DNA, 25 bp, Canis familiaris
gtgctgatactaatggcactatctt

SEQ ID NO: 142767 - DNA, 25 bp, Canis familiaris
gtgctgtcagcaatatcctcattgc

SEQ ID NO: 142768 - DNA, 25 bp, Canis familiaris
gtgctggatgccatcagcagcgtcc

SEQ ID NO: 142769 - DNA, 25 bp, Canis familiaris
gtgcgagcagcaggggagcattctc

SEQ ID NO: 142770 - DNA, 25 bp, Canis familiaris
gtgcaggcctacctgcacattccag

SEQ ID NO: 142771 - DNA, 25 bp, Canis familiaris
gtgctggcctgtgacacatgtggca

SEQ ID NO: 142772 - DNA, 25 bp, Canis familiaris
gtgctgggcgctgcagacgagaaat

SEQ ID NO: 142773 - DNA, 25 bp, Canis familiaris
gtgctgaggtgtgtgacacacagac

SEQ ID NO: 142774 - DNA, 25 bp, Canis familiaris
gtgccatgcgttcgctgaaaggcat

SEQ ID NO: 142775 - DNA, 25 bp, Canis familiaris
gtccagctgcttcggaggcaggatg

SEQ ID NO: 142776 - DNA, 25 bp, Canis familiaris
gtccactgagtcgaggtgcaggtcg

SEQ ID NO: 142777 - DNA, 25 bp, Canis familiaris
gtgccactagcttcagtgtagtcct

SEQ ID NO: 142778 - DNA, 25 bp, Canis familiaris
gtccaacgtctctgatgcagtggct

SEQ ID NO: 142779 - DNA, 25 bp, Canis familiaris
gtccaacaggtatgtccatggcaac

SEQ ID NO: 142780 - DNA, 25 bp, Canis familiaris
gtccaagcactgatggctgcctgga

SEQ ID NO: 142781 - DNA, 25 bp, Canis familiaris
gtgccacatatcaagtgactcctgc

SEQ ID NO: 142782 - DNA, 25 bp, Canis familiaris
gtccacttctagacatgtcctggca

SEQ ID NO: 142783 - DNA, 25 bp, Canis familiaris
gtccacttctagacatgtcctggca

SEQ ID NO: 142784 - DNA, 25 bp, Canis familiaris
gtccacttctagacatgtcctggca

SEQ ID NO: 142785 - DNA, 25 bp, Canis familiaris
gtccacttctagacatgtcctggca

SEQ ID NO: 142786 - DNA, 25 bp, Canis familiaris
gtccactgtgctagacatgtcctgg

SEQ ID NO: 142787 - DNA, 25 bp, Canis familiaris
gtccactgttgaactgactgctcag

SEQ ID NO: 142788 - DNA, 25 bp, Canis familiaris
gtgccagtggtatgtgactccagga

SEQ ID NO: 142789 - DNA, 25 bp, Canis familiaris
gtgcgcagtgggaagtacaaagctc

SEQ ID NO: 142790 - DNA, 25 bp, Canis familiaris
gtgccgtgtggccgtgagaagagtt

SEQ ID NO: 142791 - DNA, 25 bp, Canis familiaris
gtgccagagtggagcgagaacagct

SEQ ID NO: 142792 - DNA, 25 bp, Canis familiaris
gtgactattgaacttgaaacctttt

SEQ ID NO: 142793 - DNA, 25 bp, Canis familiaris
gtgccatataaaaatacaagcctct

SEQ ID NO: 142794 - DNA, 25 bp, Canis familiaris
gtgccttagaattcatcaatccctg

SEQ ID NO: 142795 - DNA, 25 bp, Canis familiaris
gtgccttgaaatctatgacctcaac

SEQ ID NO: 142796 - DNA, 25 bp, Canis familiaris
gtgccattaaagctctcacaaaact

SEQ ID NO: 142797 - DNA, 25 bp, Canis familiaris
gtgccattaaggctgcatatccaga

SEQ ID NO: 142798 - DNA, 25 bp, Canis familiaris
gtgccatccataagctgatgcgctg

SEQ ID NO: 142799 - DNA, 25 bp, Canis familiaris
gtgccatcaagtacattggtgaaaa

SEQ ID NO: 142800 - DNA, 25 bp, Canis familiaris
gtgccataccttttttgaaacaaat

SEQ ID NO: 142801 - DNA, 25 bp, Canis familiaris
gtgcttttctttatatacaaccaat

SEQ ID NO: 142802 - DNA, 25 bp, Canis familiaris
ggactattttacattgtccccctgt

SEQ ID NO: 142803 - DNA, 25 bp, Canis familiaris
ggaccactagggatagtccctttgt

SEQ ID NO: 142804 - DNA, 25 bp, Canis familiaris
gtgacccaaagtgtcagacccttgt

SEQ ID NO: 142805 - DNA, 25 bp, Canis familiaris
gtgcccccgaatatcataatctttg

SEQ ID NO: 142806 - DNA, 25 bp, Canis familiaris
gtgacttcaagatatcctactttat

SEQ ID NO: 142807 - DNA, 25 bp, Canis familiaris
gggcccgagatcacggactttatcc

SEQ ID NO: 142808 - DNA, 25 bp, Canis familiaris
gtgtcccgaggtccaggacctactt

SEQ ID NO: 142809 - DNA, 25 bp, Canis familiaris
gtgttagggagtcaggacctgaact

SEQ ID NO: 142810 - DNA, 25 bp, Canis familiaris
gtgcttgaggagttcgaggacccga

SEQ ID NO: 142811 - DNA, 25 bp, Canis familiaris
gtgcctgtggagttctaagagccgt

SEQ ID NO: 142812 - DNA, 25 bp, Canis familiaris
gtgccattggcatcgtagcatagac

SEQ ID NO: 142813 - DNA, 25 bp, Canis familiaris
gtgccattacacttgtggccatgat

SEQ ID NO: 142814 - DNA, 25 bp, Canis familiaris
gtccaagacacatttgtgctctgtc

SEQ ID NO: 142815 - DNA, 25 bp, Canis familiaris
gtgccacatagaatttgtgctgcat

SEQ ID NO: 142816 - DNA, 25 bp, Canis familiaris
gtgcctatgaacttaatgctgcttg

SEQ ID NO: 142817 - DNA, 25 bp, Canis familiaris
gtgccaatataaccaatgtgcatat

SEQ ID NO: 142818 - DNA, 25 bp, Canis familiaris
gtgccaattttcaacatatatatgc

SEQ ID NO: 142819 - DNA, 25 bp, Canis familiaris
gtccaattcctttctatatggctgc

SEQ ID NO: 142820 - DNA, 25 bp, Canis familiaris
gtgccaattcctatttatactgctc

SEQ ID NO: 142821 - DNA, 25 bp, Canis familiaris
gtgcacatttgtactttgaaacgct

SEQ ID NO: 142822 - DNA, 25 bp, Canis familiaris
gtgccatttataattcattcccagc

SEQ ID NO: 142823 - DNA, 25 bp, Canis familiaris
gtgccatcttcaaacctgtaacagg

SEQ ID NO: 142824 - DNA, 25 bp, Canis familiaris
gtgcctttgctgagcactgctgaac

SEQ ID NO: 142825 - DNA, 25 bp, Canis familiaris
gtgcgtcttctgatgatacggcctt

SEQ ID NO: 142826 - DNA, 25 bp, Canis familiaris
gtgcgttcttgcttggattgatgcc

SEQ ID NO: 142827 - DNA, 25 bp, Canis familiaris
gtgccttctgtgttgggcttggatg

SEQ ID NO: 142828 - DNA, 25 bp, Canis familiaris
gtgccagttgtagttgtgcctgaag

SEQ ID NO: 142829 - DNA, 25 bp, Canis familiaris
gtgccgattgtaattgatactcaca

SEQ ID NO: 142830 - DNA, 25 bp, Canis familiaris
gtccaaatcctggatgagaccacac

SEQ ID NO: 142831 - DNA, 25 bp, Canis familiaris
gtgccacaacctgggatacaacacc

SEQ ID NO: 142832 - DNA, 25 bp, Canis familiaris
gtgccagcaggcctgggttcaaatc

SEQ ID NO: 142833 - DNA, 25 bp, Canis familiaris
gtgccagcagcttagatgcgttcga

SEQ ID NO: 142834 - DNA, 25 bp, Canis familiaris
gtgctgcagtctaatcatgctgtct

SEQ ID NO: 142835 - DNA, 25 bp, Canis familiaris
gtgcatgcatgtgtcctattggttg

SEQ ID NO: 142836 - DNA, 25 bp, Canis familiaris
gtgctgtggatgctcaagtgttgtg

SEQ ID NO: 142837 - DNA, 25 bp, Canis familiaris
gtgctcatgacagctgcatttgttg

SEQ ID NO: 142838 - DNA, 25 bp, Canis familiaris
gtgccagagggccattctgtttaaa

SEQ ID NO: 142839 - DNA, 25 bp, Canis familiaris
gtgccagagcttcttctgtgttacc

SEQ ID NO: 142840 - DNA, 25 bp, Canis familiaris
gtgcctaatatgtttcgtgtttttc

SEQ ID NO: 142841 - DNA, 25 bp, Canis familiaris
gtgccccaagtctacagatttttct

SEQ ID NO: 142842 - DNA, 25 bp, Canis familiaris
gtgcccctactatgagattatgttg

SEQ ID NO: 142843 - DNA, 25 bp, Canis familiaris
gtgcctcctctttggagtgtaaatg

SEQ ID NO: 142844 - DNA, 25 bp, Canis familiaris
gtgccctcttggagagcgtatcaat

SEQ ID NO: 142845 - DNA, 25 bp, Canis familiaris
gtgccagttgctgtttggtatcaca

SEQ ID NO: 142846 - DNA, 25 bp, Canis familiaris
gtgctagcatttgagtttcctgcca

SEQ ID NO: 142847 - DNA, 25 bp, Canis familiaris
gtgcacaacctgaagatgttctggc

SEQ ID NO: 142848 - DNA, 25 bp, Canis familiaris
gtgccagcccagacacagttctggg

SEQ ID NO: 142849 - DNA, 25 bp, Canis familiaris
gtgcgcaggccaaacagtggggctg

SEQ ID NO: 142850 - DNA, 25 bp, Canis familiaris
gtgcgcaggccaaacagtggggctg

SEQ ID NO: 142851 - DNA, 25 bp, Canis familiaris
gtgcgcaggccaaacagtgggggct

SEQ ID NO: 142852 - DNA, 25 bp, Canis familiaris
gtgctcaggtccaaacagtggggct

SEQ ID NO: 142853 - DNA, 25 bp, Canis familiaris
gtgccacgtgactaacctggtggct

SEQ ID NO: 142854 - DNA, 25 bp, Canis familiaris
gtgcctaatacatcccaggaagcct

SEQ ID NO: 142855 - DNA, 25 bp, Canis familiaris
gtgaataatagccccctgggatgca

SEQ ID NO: 142856 - DNA, 25 bp, Canis familiaris
gtgccaagtcagctccagggtgagc

SEQ ID NO: 142857 - DNA, 25 bp, Canis familiaris
gtgcctgcacctctatcagggatac

SEQ ID NO: 142858 - DNA, 25 bp, Canis familiaris
gtgcctcctccatcactgaggagtc

SEQ ID NO: 142859 - DNA, 25 bp, Canis familiaris
gtgccacacatagtacactggtgaa

SEQ ID NO: 142860 - DNA, 25 bp, Canis familiaris
gtgccaaacagttctgctcgtgacc

SEQ ID NO: 142861 - DNA, 25 bp, Canis familiaris
gtgccaaacagtgcttctggccgga

SEQ ID NO: 142862 - DNA, 25 bp, Canis familiaris
gtgccaaagagtggcttccagggag

SEQ ID NO: 142863 - DNA, 25 bp, Canis familiaris
gtgccgaagaatgctatctctggat

SEQ ID NO: 142864 - DNA, 25 bp, Canis familiaris
gtgcactgaagagccatcctgtgga

SEQ ID NO: 142865 - DNA, 25 bp, Canis familiaris
gtgcccagggcagtgtttgtagacc

SEQ ID NO: 142866 - DNA, 25 bp, Canis familiaris
gtgcccagggcagtgtttgtagacc

SEQ ID NO: 142867 - DNA, 25 bp, Canis familiaris
gtgcccagggcagtgtttgtagacc

SEQ ID NO: 142868 - DNA, 25 bp, Canis familiaris
gtgcccagggcagtgtttgtagacc

SEQ ID NO: 142869 - DNA, 25 bp, Canis familiaris
gtgccacgtggctacattagttgat

SEQ ID NO: 142870 - DNA, 25 bp, Canis familiaris
gtgccagttcgtaatgtagcttgtt

SEQ ID NO: 142871 - DNA, 25 bp, Canis familiaris
gtgccgttcagaaatcacacttcct

SEQ ID NO: 142872 - DNA, 25 bp, Canis familiaris
gtgccggtgcagacgatgacagctt

SEQ ID NO: 142873 - DNA, 25 bp, Canis familiaris
gtgccgatgctctctaaagcatgtt

SEQ ID NO: 142874 - DNA, 25 bp, Canis familiaris
gtgcgtgtgtgctcaggcaattgtt

SEQ ID NO: 142875 - DNA, 25 bp, Canis familiaris
gtgcctttgtacctcagatgtttta

SEQ ID NO: 142876 - DNA, 25 bp, Canis familiaris
gtgcctcttgtatttatttattctg

SEQ ID NO: 142877 - DNA, 25 bp, Canis familiaris
gtgcctttgctattataatgcccct

SEQ ID NO: 142878 - DNA, 25 bp, Canis familiaris
gtgccttctccatatgaagtcagcg

SEQ ID NO: 142879 - DNA, 25 bp, Canis familiaris
gtgccatacccagaaagatgacagt

SEQ ID NO: 142880 - DNA, 25 bp, Canis familiaris
gtccaacccagaagaatatgcacta

SEQ ID NO: 142881 - DNA, 25 bp, Canis familiaris
gtgcaaaccctgtgaatagactgta

SEQ ID NO: 142882 - DNA, 25 bp, Canis familiaris
gtgcattacacgtgggaaacttcct

SEQ ID NO: 142883 - DNA, 25 bp, Canis familiaris
gtgccatactcgtctgggtaagatt

SEQ ID NO: 142884 - DNA, 25 bp, Canis familiaris
gtgccaaatacactgtgcgtatcta

SEQ ID NO: 142885 - DNA, 25 bp, Canis familiaris
gtgccacttacaggaagttgctaga

SEQ ID NO: 142886 - DNA, 25 bp, Canis familiaris
gtgccagctcaagtgtaagttccag

SEQ ID NO: 142887 - DNA, 25 bp, Canis familiaris
gtgccatgttgatgtacagtttctg

SEQ ID NO: 142888 - DNA, 25 bp, Canis familiaris
gtgccaggctgatggttttgttgtt

SEQ ID NO: 142889 - DNA, 25 bp, Canis familiaris
gtgccgggaagaatttgctgtcttt

SEQ ID NO: 142890 - DNA, 25 bp, Canis familiaris
gtgccgttaatgtttgagtgtctat

SEQ ID NO: 142891 - DNA, 25 bp, Canis familiaris
gtgccgttttgtaatggtggctggc

SEQ ID NO: 142892 - DNA, 25 bp, Canis familiaris
gtgcccattttaactgagacctggc

SEQ ID NO: 142893 - DNA, 25 bp, Canis familiaris
gtgccttttctaactggaactgaca

SEQ ID NO: 142894 - DNA, 25 bp, Canis familiaris
gtgcttctctcagtaagctggaaat

SEQ ID NO: 142895 - DNA, 25 bp, Canis familiaris
gtgctcttgcccaaagggggttgcc

SEQ ID NO: 142896 - DNA, 25 bp, Canis familiaris
gtgcttctgcccaagcaggagtgga

SEQ ID NO: 142897 - DNA, 25 bp, Canis familiaris
gtgctctatgcccgagacaagtggc

SEQ ID NO: 142898 - DNA, 25 bp, Canis familiaris
gtgctctgtgccttgacatctaggc

SEQ ID NO: 142899 - DNA, 25 bp, Canis familiaris
gtgttcgcatcttgcaattaggtaa

SEQ ID NO: 142900 - DNA, 25 bp, Canis familiaris
gtgcctgcttcgtagctttggaaag

SEQ ID NO: 142901 - DNA, 25 bp, Canis familiaris
gtgctgcttccgtatgaattgcgag

SEQ ID NO: 142902 - DNA, 25 bp, Canis familiaris
gtgccttgcatgctataatgagcca

SEQ ID NO: 142903 - DNA, 25 bp, Canis familiaris
gtgcattagcataggaaaggctgac

SEQ ID NO: 142904 - DNA, 25 bp, Canis familiaris
gtgctggatgcaagaaccccatcac

SEQ ID NO: 142905 - DNA, 25 bp, Canis familiaris
gtgctgagcagctgagaccttttcc

SEQ ID NO: 142906 - DNA, 25 bp, Canis familiaris
gtgctacagtaacattatttcctaa

SEQ ID NO: 142907 - DNA, 25 bp, Canis familiaris
gtgtcacctccagaaagtatttgaa

SEQ ID NO: 142908 - DNA, 25 bp, Canis familiaris
gtgtcactcccagtaggtgaccttc

SEQ ID NO: 142909 - DNA, 25 bp, Canis familiaris
gtgccttgttagaggctgagccccc

SEQ ID NO: 142910 - DNA, 25 bp, Canis familiaris
gtgcactaatacacggatagccccg

SEQ ID NO: 142911 - DNA, 25 bp, Canis familiaris
gtgccaagatacatccataaccggg

SEQ ID NO: 142912 - DNA, 25 bp, Canis familiaris
gtgccaatgaccaccaataccagag

SEQ ID NO: 142913 - DNA, 25 bp, Canis familiaris
gtgcttaatccaaacaaacaatacc

SEQ ID NO: 142914 - DNA, 25 bp, Canis familiaris
gtgcggcgatcggcaagcagaacat

SEQ ID NO: 142915 - DNA, 25 bp, Canis familiaris
gtgcggtatctggcaagagaaatct

SEQ ID NO: 142916 - DNA, 25 bp, Canis familiaris
gtgcggcttctgactaaatacatct

SEQ ID NO: 142917 - DNA, 25 bp, Canis familiaris
gtgcccttcacggaaatgaagctca

SEQ ID NO: 142918 - DNA, 25 bp, Canis familiaris
gtgctccccactgaagatggcactc

SEQ ID NO: 142919 - DNA, 25 bp, Canis familiaris
gtgctggccacgggagcaaggttca

SEQ ID NO: 142920 - DNA, 25 bp, Canis familiaris
gtgcccgcactgtaagaaggtcatc

SEQ ID NO: 142921 - DNA, 25 bp, Canis familiaris
gtgccctcagtctcagaggagccat

SEQ ID NO: 142922 - DNA, 25 bp, Canis familiaris
gtgccctacctccagagagatatgc

SEQ ID NO: 142923 - DNA, 25 bp, Canis familiaris
gtgctgcaggagcctcggagaatct

SEQ ID NO: 142924 - DNA, 25 bp, Canis familiaris
gtgctgcagcagtcactcaggaagt

SEQ ID NO: 142925 - DNA, 25 bp, Canis familiaris
gtgcgagcaccagttgaaagtgtgg

SEQ ID NO: 142926 - DNA, 25 bp, Canis familiaris
gtgccacagccgctaactggctgtg

SEQ ID NO: 142927 - DNA, 25 bp, Canis familiaris
gtgcctacggaggagcatctggccg

SEQ ID NO: 142928 - DNA, 25 bp, Canis familiaris
gtgcccacgtatgagacaggccagc

SEQ ID NO: 142929 - DNA, 25 bp, Canis familiaris
gtgcccctgggcaagagaggactgt

SEQ ID NO: 142930 - DNA, 25 bp, Canis familiaris
gtgcctactaaaatatgggaatgtc

SEQ ID NO: 142931 - DNA, 25 bp, Canis familiaris
gtgccaactaacatgtgtgcctggt

SEQ ID NO: 142932 - DNA, 25 bp, Canis familiaris
gtgccaacgcctgtgtgtgttgtgt

SEQ ID NO: 142933 - DNA, 25 bp, Canis familiaris
gtgccaacgcctgtgtgtgttgtgt

SEQ ID NO: 142934 - DNA, 25 bp, Canis familiaris
gtgccttctgttgatgctgatttgt

SEQ ID NO: 142935 - DNA, 25 bp, Canis familiaris
gtgcactaatgacttttatctatgt

SEQ ID NO: 142936 - DNA, 25 bp, Canis familiaris
gtgctctaatgctactttgaaatgt

SEQ ID NO: 142937 - DNA, 25 bp, Canis familiaris
gtgctcgaatcttccttcaggatat

SEQ ID NO: 142938 - DNA, 25 bp, Canis familiaris
gtgcctggtctacatccagtgtcag

SEQ ID NO: 142939 - DNA, 25 bp, Canis familiaris
gtgcctcttctactgtggagtgggt

SEQ ID NO: 142940 - DNA, 25 bp, Canis familiaris
gtgccttttctgagtgagtgtgtgc

SEQ ID NO: 142941 - DNA, 25 bp, Canis familiaris
gtgcctcatgatccttttggtttag

SEQ ID NO: 142942 - DNA, 25 bp, Canis familiaris
gtgcctggctggcttgaggctttac

SEQ ID NO: 142943 - DNA, 25 bp, Canis familiaris
gtgcttatgctggaagtaggctaaa

SEQ ID NO: 142944 - DNA, 25 bp, Canis familiaris
gtgctgctcatcgagaatgtggcgt

SEQ ID NO: 142945 - DNA, 25 bp, Canis familiaris
gtgcccacgtgaatctgctggtaaa

SEQ ID NO: 142946 - DNA, 25 bp, Canis familiaris
gtgcccatcctgatcttgggtaaca

SEQ ID NO: 142947 - DNA, 25 bp, Canis familiaris
gtgccttcctgcattacttgtaaca

SEQ ID NO: 142948 - DNA, 25 bp, Canis familiaris
gtgcctttccttcagcctgaaataa

SEQ ID NO: 142949 - DNA, 25 bp, Canis familiaris
gtgcttttacttctgttggaggatc

SEQ ID NO: 142950 - DNA, 25 bp, Canis familiaris
gtgcttttccgccaagttagacgat

SEQ ID NO: 142951 - DNA, 25 bp, Canis familiaris
gtgctttcccggcaagttaagacga

SEQ ID NO: 142952 - DNA, 25 bp, Canis familiaris
ggtgttccctgggataccttgcaat

SEQ ID NO: 142953 - DNA, 25 bp, Canis familiaris
gtgatggtccctggtatccagtatc

SEQ ID NO: 142954 - DNA, 25 bp, Canis familiaris
gtgacgtcacactgtaacgttggga

SEQ ID NO: 142955 - DNA, 25 bp, Canis familiaris
gtgcacgtccgtgtagagtttgggg

SEQ ID NO: 142956 - DNA, 25 bp, Canis familiaris
gtgccgaatcgtggtagaggtcggg

SEQ ID NO: 142957 - DNA, 25 bp, Canis familiaris
gtgccagttctgagaaacagtcagg

SEQ ID NO: 142958 - DNA, 25 bp, Canis familiaris
gtgacactgtctatcagtacgtcgg

SEQ ID NO: 142959 - DNA, 25 bp, Canis familiaris
gtgaaccttgggctacagatgcggg

SEQ ID NO: 142960 - DNA, 25 bp, Canis familiaris
gtgaagccttggattggaatggggg

SEQ ID NO: 142961 - DNA, 25 bp, Canis familiaris
gtgccacacgtgcttttgagatgag

SEQ ID NO: 142962 - DNA, 25 bp, Canis familiaris
gtgccacagcagattttccatgatg

SEQ ID NO: 142963 - DNA, 25 bp, Canis familiaris
gtgccagaggatatttgacaggagt

SEQ ID NO: 142964 - DNA, 25 bp, Canis familiaris
gtgccagaggccacttggaggatcg

SEQ ID NO: 142965 - DNA, 25 bp, Canis familiaris
gtgccagggctacctatggaggaca

SEQ ID NO: 142966 - DNA, 25 bp, Canis familiaris
gtgccgggaagactgtgaacaccaa

SEQ ID NO: 142967 - DNA, 25 bp, Canis familiaris
gtgccgggagaagagatacgccagg

SEQ ID NO: 142968 - DNA, 25 bp, Canis familiaris
gtggcggggtcagacccagcaagga

SEQ ID NO: 142969 - DNA, 25 bp, Canis familiaris
gtgaggggagtctacaacacgagag

SEQ ID NO: 142970 - DNA, 25 bp, Canis familiaris
gtgcggggacactacaaaggtcagc

SEQ ID NO: 142971 - DNA, 25 bp, Canis familiaris
gtgcgtgtgttcataagaggttcag

SEQ ID NO: 142972 - DNA, 25 bp, Canis familiaris
gtgcaagtgtgaacccaaggaccgg

SEQ ID NO: 142973 - DNA, 25 bp, Canis familiaris
gtgcagggatgcatccttgatggca

SEQ ID NO: 142974 - DNA, 25 bp, Canis familiaris
gtgcagaggctgcctctgtgtggcc

SEQ ID NO: 142975 - DNA, 25 bp, Canis familiaris
gtgcatcgtccagcttgtgtgcacg

SEQ ID NO: 142976 - DNA, 25 bp, Canis familiaris
gtgcatcggcacggatgtggtccgg

SEQ ID NO: 142977 - DNA, 25 bp, Canis familiaris
gtgctctgctcacgagagggtgtct

SEQ ID NO: 142978 - DNA, 25 bp, Canis familiaris
gtgcgtctgcgacgagggtttcacg

SEQ ID NO: 142979 - DNA, 25 bp, Canis familiaris
gtgcccttaggacagttgtccagaa

SEQ ID NO: 142980 - DNA, 25 bp, Canis familiaris
gtgccatctttggattctttgccac

SEQ ID NO: 142981 - DNA, 25 bp, Canis familiaris
gtgccacttgtggatgtcttggaat

SEQ ID NO: 142982 - DNA, 25 bp, Canis familiaris
gtgcccattgtggagtctgtggatc

SEQ ID NO: 142983 - DNA, 25 bp, Canis familiaris
gtgccatctccagcagctataaatc

SEQ ID NO: 142984 - DNA, 25 bp, Canis familiaris
gtgccttctcaaattatatatatgc

SEQ ID NO: 142985 - DNA, 25 bp, Canis familiaris
gtgcctctacagtgtttaatgctgg

SEQ ID NO: 142986 - DNA, 25 bp, Canis familiaris
gtgcctctccaatgtggtaattcta

SEQ ID NO: 142987 - DNA, 25 bp, Canis familiaris
gtgctttctgaatgtttcaaattac

SEQ ID NO: 142988 - DNA, 25 bp, Canis familiaris
gtgctttcaaataggacccagtttc

SEQ ID NO: 142989 - DNA, 25 bp, Canis familiaris
gtgctgttttataaacccgaactct

SEQ ID NO: 142990 - DNA, 25 bp, Canis familiaris
gtgcctctttctgaaacagcggacg

SEQ ID NO: 142991 - DNA, 25 bp, Canis familiaris
gtgccttatgtcagaacacgcgata

SEQ ID NO: 142992 - DNA, 25 bp, Canis familiaris
gtgctcctctatataacactgagta

SEQ ID NO: 142993 - DNA, 25 bp, Canis familiaris
gtgcatgcttgtattatccaatggt

SEQ ID NO: 142994 - DNA, 25 bp, Canis familiaris
gtgcgtagctacaaatctaagcatg

SEQ ID NO: 142995 - DNA, 25 bp, Canis familiaris
gtgacttcccatgcatgctaagatg

SEQ ID NO: 142996 - DNA, 25 bp, Canis familiaris
gtgccatttctcttcatgttaggct

SEQ ID NO: 142997 - DNA, 25 bp, Canis familiaris
gtgccagcctctttcatgttgagga

SEQ ID NO: 142998 - DNA, 25 bp, Canis familiaris
gtgccgccattctatcagtcaatgg

SEQ ID NO: 142999 - DNA, 25 bp, Canis familiaris
gtgctgaccattttagccaaggaga

SEQ ID NO: 143000 - DNA, 25 bp, Canis familiaris
gtgctacccatcctcaaaatgtgat

SEQ ID NO: 143001 - DNA, 25 bp, Canis familiaris
gtgctaggcgctctcgagcattaga

SEQ ID NO: 143002 - DNA, 25 bp, Canis familiaris
gtgctaaggctttgctggatctcat

SEQ ID NO: 143003 - DNA, 25 bp, Canis familiaris
gtgcccagagcaattccatgattac

SEQ ID NO: 143004 - DNA, 25 bp, Canis familiaris
gtgctcagcaaagccctgagtcagc

SEQ ID NO: 143005 - DNA, 25 bp, Canis familiaris
gtgctgaagaaggctcctgtgcggc

SEQ ID NO: 143006 - DNA, 25 bp, Canis familiaris
gtgcggagaatggcatgctcgtgag

SEQ ID NO: 143007 - DNA, 25 bp, Canis familiaris
gtgcatggaaatgtcctgctggctg

SEQ ID NO: 143008 - DNA, 25 bp, Canis familiaris
gtgctggacaccctggggagatgtg

SEQ ID NO: 143009 - DNA, 25 bp, Canis familiaris
gtgctgatgtccatgtgtgggattt

SEQ ID NO: 143010 - DNA, 25 bp, Canis familiaris
gtgcctggcacatggtaggtcttca

SEQ ID NO: 143011 - DNA, 25 bp, Canis familiaris
gtgcctgcgcaatgatcggcgggaa

SEQ ID NO: 143012 - DNA, 25 bp, Canis familiaris
gtgcctgccacaggaagtgcgtgcc

SEQ ID NO: 143013 - DNA, 25 bp, Canis familiaris
gtgctgggcacatgtgagtgtgtgt

SEQ ID NO: 143014 - DNA, 25 bp, Canis familiaris
gtgcgaccaagggcaggatcgtcac

SEQ ID NO: 143015 - DNA, 25 bp, Canis familiaris
gtgcgtcatctcaggggagcgatga

SEQ ID NO: 143016 - DNA, 25 bp, Canis familiaris
gtgaattgtctgagggcacctgact

SEQ ID NO: 143017 - DNA, 25 bp, Canis familiaris
gtgcaaggttttcgcggcacaactc

SEQ ID NO: 143018 - DNA, 25 bp, Canis familiaris
tgtagggctaggtgccgactaggcg

SEQ ID NO: 143019 - DNA, 25 bp, Canis familiaris
gtgaggtctaaggaccatgcccggg

SEQ ID NO: 143020 - DNA, 25 bp, Canis familiaris
gtggggtaataacagcacactgggg

SEQ ID NO: 143021 - DNA, 25 bp, Canis familiaris
gtgctggggaattccagagctcact

SEQ ID NO: 143022 - DNA, 25 bp, Canis familiaris
gtgcaggggaagccacttccatcag

SEQ ID NO: 143023 - DNA, 25 bp, Canis familiaris
gtgaggggtgcacagtgtttacctg

SEQ ID NO: 143024 - DNA, 25 bp, Canis familiaris
gtgcagcaggggctatggcttctac

SEQ ID NO: 143025 - DNA, 25 bp, Canis familiaris
gtgacaaggggctgcagcattttcc

SEQ ID NO: 143026 - DNA, 25 bp, Canis familiaris
gtgcacaagcaggggctgatgttgt

SEQ ID NO: 143027 - DNA, 25 bp, Canis familiaris
gtgcctcatggattcgtgtgtgtgt

SEQ ID NO: 143028 - DNA, 25 bp, Canis familiaris
gtgcccaggatttcgtgcagtggtt

SEQ ID NO: 143029 - DNA, 25 bp, Canis familiaris
gtgcccagaatttagtaggtagtca

SEQ ID NO: 143030 - DNA, 25 bp, Canis familiaris
gtgcccgagttctagaacaacagga

SEQ ID NO: 143031 - DNA, 25 bp, Canis familiaris
gtgccctgattgtctccaaaaatgg

SEQ ID NO: 143032 - DNA, 25 bp, Canis familiaris
gtgccttctatagcacaagagaata

SEQ ID NO: 143033 - DNA, 25 bp, Canis familiaris
tgtcgatgttaaaacaagactacaa

SEQ ID NO: 143034 - DNA, 25 bp, Canis familiaris
gtgaaactcaaaccaggactcgcca

SEQ ID NO: 143035 - DNA, 25 bp, Canis familiaris
gtgcagcacacctgagtaggacctc

SEQ ID NO: 143036 - DNA, 25 bp, Canis familiaris
gtgctgagcccatgaattgcagaca

SEQ ID NO: 143037 - DNA, 25 bp, Canis familiaris
gtgctcagcgccatgaagatggaga

SEQ ID NO: 143038 - DNA, 25 bp, Canis familiaris
gtgctcaacgatggatggatggaca

SEQ ID NO: 143039 - DNA, 25 bp, Canis familiaris
gtgctgaggcaactatggcatagaa

SEQ ID NO: 143040 - DNA, 25 bp, Canis familiaris
gtgctggctgcatgttggcaaaggc

SEQ ID NO: 143041 - DNA, 25 bp, Canis familiaris
gtgcggctggccatggagaaagctg

SEQ ID NO: 143042 - DNA, 25 bp, Canis familiaris
gtgcgtcgccctgagagcataggcg

SEQ ID NO: 143043 - DNA, 25 bp, Canis familiaris
gtgcccagctcagtgcacagagcac

SEQ ID NO: 143044 - DNA, 25 bp, Canis familiaris
gtgcgacagctgctgcaagaccttc

SEQ ID NO: 143045 - DNA, 25 bp, Canis familiaris
gtgcgctcagagctcaagaccaagc

SEQ ID NO: 143046 - DNA, 25 bp, Canis familiaris
gtgcgccattttcaactatgtgctt

SEQ ID NO: 143047 - DNA, 25 bp, Canis familiaris
gtgcctcatttcagttctatttata

SEQ ID NO: 143048 - DNA, 25 bp, Canis familiaris
gtgctccactacaccataattctga

SEQ ID NO: 143049 - DNA, 25 bp, Canis familiaris
gtgcttcacctcatgggaattctac

SEQ ID NO: 143050 - DNA, 25 bp, Canis familiaris
gtgcatgtaccccttggaatcatta

SEQ ID NO: 143051 - DNA, 25 bp, Canis familiaris
gtgctgtaccacatttatttcaata

SEQ ID NO: 143052 - DNA, 25 bp, Canis familiaris
gtgcagtggtgcggtaatttatcca

SEQ ID NO: 143053 - DNA, 25 bp, Canis familiaris
gtgcgtgtttcgtgagttacaacag

SEQ ID NO: 143054 - DNA, 25 bp, Canis familiaris
gtgaaggttgcctgggtcacaacag

SEQ ID NO: 143055 - DNA, 25 bp, Canis familiaris
gtgaggtgggcatgcggggtaaaga

SEQ ID NO: 143056 - DNA, 25 bp, Canis familiaris
gtgctggctgggcagctgggtgaga

SEQ ID NO: 143057 - DNA, 25 bp, Canis familiaris
gtgcgcagctggagagcagggtgca

SEQ ID NO: 143058 - DNA, 25 bp, Canis familiaris
gtgcgcagatggcagagacgggcgt

SEQ ID NO: 143059 - DNA, 25 bp, Canis familiaris
gtgcgcgtaggaggtcggcgctgac

SEQ ID NO: 143060 - DNA, 25 bp, Canis familiaris
gtgcgcatggacgaggctcgggaca

SEQ ID NO: 143061 - DNA, 25 bp, Canis familiaris
gtgaatgtgacagggcccctgccac

SEQ ID NO: 143062 - DNA, 25 bp, Canis familiaris
gtgcctggataggaaatcctgaact

SEQ ID NO: 143063 - DNA, 25 bp, Canis familiaris
gtgcctcatgtggtgaacttctgat

SEQ ID NO: 143064 - DNA, 25 bp, Canis familiaris
gtgctgtctggtggaaccaccatgt

SEQ ID NO: 143065 - DNA, 25 bp, Canis familiaris
gtgcttgggaggaaggccctgtttc

SEQ ID NO: 143066 - DNA, 25 bp, Canis familiaris
gtgccgggatggaaagcctgtgtgg

SEQ ID NO: 143067 - DNA, 25 bp, Canis familiaris
gggcggcaaggatacctgtgtgggt

SEQ ID NO: 143068 - DNA, 25 bp, Canis familiaris
gggaagcacggacacctgggtgtgc

SEQ ID NO: 143069 - DNA, 25 bp, Canis familiaris
gtgaaaccgagaatcccattggagg

SEQ ID NO: 143070 - DNA, 25 bp, Canis familiaris
gtgaagcccgagatacagtactaca

SEQ ID NO: 143071 - DNA, 25 bp, Canis familiaris
gtgccgactcgcgattaatgaaccc

SEQ ID NO: 143072 - DNA, 25 bp, Canis familiaris
gtgcccacacgcgtttgtgggcccc

SEQ ID NO: 143073 - DNA, 25 bp, Canis familiaris
gtgacttaaggtcttgaggcaccct

SEQ ID NO: 143074 - DNA, 25 bp, Canis familiaris
gtgtccatagggagtttccactttg

SEQ ID NO: 143075 - DNA, 25 bp, Canis familiaris
gtgcgccacaggtaagttctgccaa

SEQ ID NO: 143076 - DNA, 25 bp, Canis familiaris
gtgcctccaaggttttctgtgaatt

SEQ ID NO: 143077 - DNA, 25 bp, Canis familiaris
gtgcctctcaagtccttgtttgaat

SEQ ID NO: 143078 - DNA, 25 bp, Canis familiaris
gtgcctgtcaactgcttgttagcag

SEQ ID NO: 143079 - DNA, 25 bp, Canis familiaris
gtgctcagtaaacatcagctctgaa

SEQ ID NO: 143080 - DNA, 25 bp, Canis familiaris
gtgcctggagggctcagtcagataa

SEQ ID NO: 143081 - DNA, 25 bp, Canis familiaris
gtgcctgtggggtgcatgtgtgcaa

SEQ ID NO: 143082 - DNA, 25 bp, Canis familiaris
gtgcctggtgcgcagcaagtacaac

SEQ ID NO: 143083 - DNA, 25 bp, Canis familiaris
gtgcctgattcacaggatggacact

SEQ ID NO: 143084 - DNA, 25 bp, Canis familiaris
gtgcgggtccaaagtgctgagcatt

SEQ ID NO: 143085 - DNA, 25 bp, Canis familiaris
gtgcgcgtgtggtacaagctggatg

SEQ ID NO: 143086 - DNA, 25 bp, Canis familiaris
gtgctggttctgtacgacgagctga

SEQ ID NO: 143087 - DNA, 25 bp, Canis familiaris
gtgctggttctgtacgacgagctga

SEQ ID NO: 143088 - DNA, 25 bp, Canis familiaris
gtgctggttctgtacgacgagctga

SEQ ID NO: 143089 - DNA, 25 bp, Canis familiaris
gtgctttactaggcgacgatcaaat

SEQ ID NO: 143090 - DNA, 25 bp, Canis familiaris
gtgaatgtacaacctacgacgaata

SEQ ID NO: 143091 - DNA, 25 bp, Canis familiaris
gtgaattacaccttaaagctatcaa

SEQ ID NO: 143092 - DNA, 25 bp, Canis familiaris
gtgatgttacattcctatgaagtag

SEQ ID NO: 143093 - DNA, 25 bp, Canis familiaris
gtgagttacaacagtccagaaagag

SEQ ID NO: 143094 - DNA, 25 bp, Canis familiaris
gtgcacttttacaagccgcaaaggc

SEQ ID NO: 143095 - DNA, 25 bp, Canis familiaris
gtgctttatctacactccaatatgt

SEQ ID NO: 143096 - DNA, 25 bp, Canis familiaris
gtgctttaattccacactactttat

SEQ ID NO: 143097 - DNA, 25 bp, Canis familiaris
tgcttttaaaccataaccttactat

SEQ ID NO: 143098 - DNA, 25 bp, Canis familiaris
gtgtaataaaccataacctcttcga

SEQ ID NO: 143099 - DNA, 25 bp, Canis familiaris
tgattaaaacccccaataacttgca

SEQ ID NO: 143100 - DNA, 25 bp, Canis familiaris
tgtaaagtaaacccaccaccattgg

SEQ ID NO: 143101 - DNA, 25 bp, Canis familiaris
tgtagacggaaaggctcaaacccgc

SEQ ID NO: 143102 - DNA, 25 bp, Canis familiaris
gtgaaggaccaagccataactaccc

SEQ ID NO: 143103 - DNA, 25 bp, Canis familiaris
gtgaaaagccaacctgcggaatgac

SEQ ID NO: 143104 - DNA, 25 bp, Canis familiaris
gtgaaaaccctcatcaagtcatttg

SEQ ID NO: 143105 - DNA, 25 bp, Canis familiaris
gtgcagaaaccgtcccaagatgagt

SEQ ID NO: 143106 - DNA, 25 bp, Canis familiaris
gtgcgaaggatccctcgacatatat

SEQ ID NO: 143107 - DNA, 25 bp, Canis familiaris
gtgctgaaggactactctgacattg

SEQ ID NO: 143108 - DNA, 25 bp, Canis familiaris
gtgcctcaaataaacacatgttccc

SEQ ID NO: 143109 - DNA, 25 bp, Canis familiaris
gtgcctcgcttagagactgattcgg

SEQ ID NO: 143110 - DNA, 25 bp, Canis familiaris
gtgctgccctgttaagggttgcagg

SEQ ID NO: 143111 - DNA, 25 bp, Canis familiaris
gtgcccctgaactgggctatgggaa

SEQ ID NO: 143112 - DNA, 25 bp, Canis familiaris
gtgcccctgaacggagcagtgaggc

SEQ ID NO: 143113 - DNA, 25 bp, Canis familiaris
gtgcccctggacctgaggaatggct

SEQ ID NO: 143114 - DNA, 25 bp, Canis familiaris
gtgctccacggatgttgcaggtggt

SEQ ID NO: 143115 - DNA, 25 bp, Canis familiaris
gtgcccactttgtttgattgggatc

SEQ ID NO: 143116 - DNA, 25 bp, Canis familiaris
gtgcatggccgttcttagttggtgg

SEQ ID NO: 143117 - DNA, 25 bp, Canis familiaris
gtgctgcggtgttttcagtttgctc

SEQ ID NO: 143118 - DNA, 25 bp, Canis familiaris
gtgcctgtttgtatgcgtgtgtgta

SEQ ID NO: 143119 - DNA, 25 bp, Canis familiaris
gtgcgtattttgtttgttgctgttg

SEQ ID NO: 143120 - DNA, 25 bp, Canis familiaris
gtgctttcgttttttgtgagttcta

SEQ ID NO: 143121 - DNA, 25 bp, Canis familiaris
gtgttacgtttatctctcagaaatg

SEQ ID NO: 143122 - DNA, 25 bp, Canis familiaris
gtgtccacgtttcacattaaaagtt

SEQ ID NO: 143123 - DNA, 25 bp, Canis familiaris
tgtcccggtaccacgtgaaagattc

SEQ ID NO: 143124 - DNA, 25 bp, Canis familiaris
tgtccacaggcctaatccgtaatgg

SEQ ID NO: 143125 - DNA, 25 bp, Canis familiaris
gtgcgacgtggacatccgtaaggac

SEQ ID NO: 143126 - DNA, 25 bp, Canis familiaris
gtgcgtttgaaaatctccttaggag

SEQ ID NO: 143127 - DNA, 25 bp, Canis familiaris
gtgcagaaagtatctcccttcaggc

SEQ ID NO: 143128 - DNA, 25 bp, Canis familiaris
gtgcaaatggccacacttttcaagc

SEQ ID NO: 143129 - DNA, 25 bp, Canis familiaris
gtgaatatgggtgtgcttaggaagc

SEQ ID NO: 143130 - DNA, 25 bp, Canis familiaris
gtgcaatggcgaaaagactaggtag

SEQ ID NO: 143131 - DNA, 25 bp, Canis familiaris
gtgcatgaacgctggcaacttagta

SEQ ID NO: 143132 - DNA, 25 bp, Canis familiaris
gtgctgaaagctgtagactggggat

SEQ ID NO: 143133 - DNA, 25 bp, Canis familiaris
gtgctggaactgccttaccgaggca

SEQ ID NO: 143134 - DNA, 25 bp, Canis familiaris
gtgccgagtcggaaagcagcgagga

SEQ ID NO: 143135 - DNA, 25 bp, Canis familiaris
gtgcccaagagccaaaccgaggagc

SEQ ID NO: 143136 - DNA, 25 bp, Canis familiaris
gtgcccagaagtcatagtcgcgagg

SEQ ID NO: 143137 - DNA, 25 bp, Canis familiaris
gtgcctgcagaacccaagtggcatt

SEQ ID NO: 143138 - DNA, 25 bp, Canis familiaris
gtgcccatgatgaccgcctgggcat

SEQ ID NO: 143139 - DNA, 25 bp, Canis familiaris
gtgcccatgatgaccgcctgggcat

SEQ ID NO: 143140 - DNA, 25 bp, Canis familiaris
gtgcttatgatgaggcagctctgaa

SEQ ID NO: 143141 - DNA, 25 bp, Canis familiaris
gtgcttgttgatcacattctgcaat

SEQ ID NO: 143142 - DNA, 25 bp, Canis familiaris
gtgcctgtcgtttgcatatgcatgc

SEQ ID NO: 143143 - DNA, 25 bp, Canis familiaris
gtgcgtgctgcagtgaatgatatat

SEQ ID NO: 143144 - DNA, 25 bp, Canis familiaris
gtgccctcacaggatgcattttttc

SEQ ID NO: 143145 - DNA, 25 bp, Canis familiaris
gtgcctgttcatgttatttttcttc

SEQ ID NO: 143146 - DNA, 25 bp, Canis familiaris
gtgcctgctgtttcttttatattgt

SEQ ID NO: 143147 - DNA, 25 bp, Canis familiaris
gtgcccttgtctggtatgtacagga

SEQ ID NO: 143148 - DNA, 25 bp, Canis familiaris
gtgccgtcagatgggttgtacctca

SEQ ID NO: 143149 - DNA, 25 bp, Canis familiaris
gtgcagggcaatgcagggtccttca

SEQ ID NO: 143150 - DNA, 25 bp, Canis familiaris
gtgcagattcaaagcagcggctcca

SEQ ID NO: 143151 - DNA, 25 bp, Canis familiaris
gtgcaggtcaatgacctccgcagcg

SEQ ID NO: 143152 - DNA, 25 bp, Canis familiaris
gtgaagtcctgcaacttcacggccg

SEQ ID NO: 143153 - DNA, 25 bp, Canis familiaris
gtgcaggcaccagagttccgtgcac

SEQ ID NO: 143154 - DNA, 25 bp, Canis familiaris
gtgctgccacggcaggcccaggcca

SEQ ID NO: 143155 - DNA, 25 bp, Canis familiaris
gtgctgccaggggtgggggtcagca

SEQ ID NO: 143156 - DNA, 25 bp, Canis familiaris
gtgcatagcggggggggctgatcta

SEQ ID NO: 143157 - DNA, 25 bp, Canis familiaris
ggatagtcgagcgtgacgcgctgtc

SEQ ID NO: 143158 - DNA, 25 bp, Canis familiaris
ggacgactgtgcttggggcagtccc

SEQ ID NO: 143159 - DNA, 25 bp, Canis familiaris
gtgaatactgtgtgtccagaacccc

SEQ ID NO: 143160 - DNA, 25 bp, Canis familiaris
gtgacaacgggacccaatgcagccc

SEQ ID NO: 143161 - DNA, 25 bp, Canis familiaris
gtgctgaccgggctcaaagcagtct

SEQ ID NO: 143162 - DNA, 25 bp, Canis familiaris
gtgcgcctcggggcaaagaagatcc

SEQ ID NO: 143163 - DNA, 25 bp, Canis familiaris
gtgcctggtggggggtgagagtgcc

SEQ ID NO: 143164 - DNA, 25 bp, Canis familiaris
gtgctcgcatgtgcgggttgttgtg

SEQ ID NO: 143165 - DNA, 25 bp, Canis familiaris
gtgcccattccatgggtgtctggca

SEQ ID NO: 143166 - DNA, 25 bp, Canis familiaris
gtgacattcgccggggatgttggca

SEQ ID NO: 143167 - DNA, 25 bp, Canis familiaris
gtgacctcaacggcggtctgaggcg

SEQ ID NO: 143168 - DNA, 25 bp, Canis familiaris
gtgctgaccatcttgggtttgaggc

SEQ ID NO: 143169 - DNA, 25 bp, Canis familiaris
gtgctgacttcattgagactcatta

SEQ ID NO: 143170 - DNA, 25 bp, Canis familiaris
gtgctcctgttatactctcaagtac

SEQ ID NO: 143171 - DNA, 25 bp, Canis familiaris
gtgctcactttcttttccatagtgg

SEQ ID NO: 143172 - DNA, 25 bp, Canis familiaris
gtgctagctagtctcttttacttct

SEQ ID NO: 143173 - DNA, 25 bp, Canis familiaris
gtgctcaatgtggccactttaagtt

SEQ ID NO: 143174 - DNA, 25 bp, Canis familiaris
gtgcaccttcctctttaaaaagcct

SEQ ID NO: 143175 - DNA, 25 bp, Canis familiaris
gtgcttctgtcccgtttattaagat

SEQ ID NO: 143176 - DNA, 25 bp, Canis familiaris
gtgcttctgcctaagtttttgcaag

SEQ ID NO: 143177 - DNA, 25 bp, Canis familiaris
gtgctgttttattgccatttataga

SEQ ID NO: 143178 - DNA, 25 bp, Canis familiaris
gtgctgtgtatatcactgctttata

SEQ ID NO: 143179 - DNA, 25 bp, Canis familiaris
gtgcgtgtgtaccactttttcttta

SEQ ID NO: 143180 - DNA, 25 bp, Canis familiaris
gtgcgtatctacgatttaatctttg

SEQ ID NO: 143181 - DNA, 25 bp, Canis familiaris
gtgcgtacacgttattagccttttt

SEQ ID NO: 143182 - DNA, 25 bp, Canis familiaris
gtgctgccacacctaagtagttttt

SEQ ID NO: 143183 - DNA, 25 bp, Canis familiaris
gtgcaacaaggcaggtagcttctgg

SEQ ID NO: 143184 - DNA, 25 bp, Canis familiaris
gtgaagcaatggatagcggccttgt

SEQ ID NO: 143185 - DNA, 25 bp, Canis familiaris
gtgaagagggacagcggctcggagc

SEQ ID NO: 143186 - DNA, 25 bp, Canis familiaris
gtgcagaagggaagtgggcctgttg

SEQ ID NO: 143187 - DNA, 25 bp, Canis familiaris
gtgaaagaggaaccccactattggt

SEQ ID NO: 143188 - DNA, 25 bp, Canis familiaris
gtggaaaggtacaccatgttcttga

SEQ ID NO: 143189 - DNA, 25 bp, Canis familiaris
gtgtgaacggatttggccgtattgg

SEQ ID NO: 143190 - DNA, 25 bp, Canis familiaris
gtgaaagggatcttgcctcggagct

SEQ ID NO: 143191 - DNA, 25 bp, Canis familiaris
gtgaagagttgttagcccaaggcga

SEQ ID NO: 143192 - DNA, 25 bp, Canis familiaris
gtgaagatgtttaaggccgagtgcc

SEQ ID NO: 143193 - DNA, 25 bp, Canis familiaris
gtgaagtttaaagttcgatgcagcc

SEQ ID NO: 143194 - DNA, 25 bp, Canis familiaris
ggaagtttggttgtggacactcggg

SEQ ID NO: 143195 - DNA, 25 bp, Canis familiaris
gtgaaattttttctggcataatagg

SEQ ID NO: 143196 - DNA, 25 bp, Canis familiaris
gtgcaactacttaatttggctattg

SEQ ID NO: 143197 - DNA, 25 bp, Canis familiaris
gtgcccaccgtaatttggttctgag

SEQ ID NO: 143198 - DNA, 25 bp, Canis familiaris
gtgcccacgctgagtaattgcttta

SEQ ID NO: 143199 - DNA, 25 bp, Canis familiaris
gtgcccaagagtcgttttgtgctat

SEQ ID NO: 143200 - DNA, 25 bp, Canis familiaris
gtgcccaagagacgggtgggctaaa

SEQ ID NO: 143201 - DNA, 25 bp, Canis familiaris
gtgctagaaatgtgggatgcagtat

SEQ ID NO: 143202 - DNA, 25 bp, Canis familiaris
gtgctacttagctgggccatgtcac

SEQ ID NO: 143203 - DNA, 25 bp, Canis familiaris
gtgcatccaggacggagggcagcta

SEQ ID NO: 143204 - DNA, 25 bp, Canis familiaris
gtgctatgcccatgcagaggtcact

SEQ ID NO: 143205 - DNA, 25 bp, Canis familiaris
gtgcttccaatgttgaggtgccttt

SEQ ID NO: 143206 - DNA, 25 bp, Canis familiaris
gtgcttccacactttgagcatactt

SEQ ID NO: 143207 - DNA, 25 bp, Canis familiaris
gtgcttctacgaattaacattaatg

SEQ ID NO: 143208 - DNA, 25 bp, Canis familiaris
gtgcttctactgttttcaagtcaat

SEQ ID NO: 143209 - DNA, 25 bp, Canis familiaris
gtgcttctgagcaaatgtcccctac

SEQ ID NO: 143210 - DNA, 25 bp, Canis familiaris
gtgccctgcagcaaatacctgtgga

SEQ ID NO: 143211 - DNA, 25 bp, Canis familiaris
gtgccccacaaggagacatgatcta

SEQ ID NO: 143212 - DNA, 25 bp, Canis familiaris
gtgcatccgacccagagtatattct

SEQ ID NO: 143213 - DNA, 25 bp, Canis familiaris
gtgcacctaccatgagctgcacttt

SEQ ID NO: 143214 - DNA, 25 bp, Canis familiaris
gtgcttcgacctggattgcattatg

SEQ ID NO: 143215 - DNA, 25 bp, Canis familiaris
gtgcttctggccggaagtttgtatc

SEQ ID NO: 143216 - DNA, 25 bp, Canis familiaris
gtgctcatctggaccaaagctttga

SEQ ID NO: 143217 - DNA, 25 bp, Canis familiaris
gtgcgcctggcagccaattgttgac

SEQ ID NO: 143218 - DNA, 25 bp, Canis familiaris
gtgccctggagatagcttttacaga

SEQ ID NO: 143219 - DNA, 25 bp, Canis familiaris
gtgcccgtgcagaagaattatttaa

SEQ ID NO: 143220 - DNA, 25 bp, Canis familiaris
gtgcccctgaggaaattagctgctc

SEQ ID NO: 143221 - DNA, 25 bp, Canis familiaris
gtgccctctgggaaatttattctta

SEQ ID NO: 143222 - DNA, 25 bp, Canis familiaris
gtgtgccttggagaccttttgggaa

SEQ ID NO: 143223 - DNA, 25 bp, Canis familiaris
gtgtccgggaccacaatttggatct

SEQ ID NO: 143224 - DNA, 25 bp, Canis familiaris
ggcaaagacgatcccaaatttattt

SEQ ID NO: 143225 - DNA, 25 bp, Canis familiaris
gtgaaaagtgacccaatgactttgt

SEQ ID NO: 143226 - DNA, 25 bp, Canis familiaris
gtgttggaggacccaagtcttgggg

SEQ ID NO: 143227 - DNA, 25 bp, Canis familiaris
gtggtctgggagcaaagtctttgaa

SEQ ID NO: 143228 - DNA, 25 bp, Canis familiaris
gtgaaggcggcagaaggaccctgga

SEQ ID NO: 143229 - DNA, 25 bp, Canis familiaris
gtgaaggctgtggggatgggccctg

SEQ ID NO: 143230 - DNA, 25 bp, Canis familiaris
gtgcatggccggaggaaggctgccc

SEQ ID NO: 143231 - DNA, 25 bp, Canis familiaris
gtgcgcgccaggacagaagcgggca

SEQ ID NO: 143232 - DNA, 25 bp, Canis familiaris
gtgccctgcaacgaggagcacggca

SEQ ID NO: 143233 - DNA, 25 bp, Canis familiaris
gtgcccatctacgagggctatgctc

SEQ ID NO: 143234 - DNA, 25 bp, Canis familiaris
gtgcagcttataccagggtacatcc

SEQ ID NO: 143235 - DNA, 25 bp, Canis familiaris
gtgcacctacacaaggtatcaacca

SEQ ID NO: 143236 - DNA, 25 bp, Canis familiaris
gtgctttgacaggaggaacccctca

SEQ ID NO: 143237 - DNA, 25 bp, Canis familiaris
gtgctcattacagaagcggtccatt

SEQ ID NO: 143238 - DNA, 25 bp, Canis familiaris
gtgcttatgaacctgagggtccttg

SEQ ID NO: 143239 - DNA, 25 bp, Canis familiaris
gtgctgcagtgaacctggggatgcc

SEQ ID NO: 143240 - DNA, 25 bp, Canis familiaris
gtgctgcctgtcaacttggaggcac

SEQ ID NO: 143241 - DNA, 25 bp, Canis familiaris
gtgctggctgtcacatctggacaaa

SEQ ID NO: 143242 - DNA, 25 bp, Canis familiaris
gtgcaggttctgccattgaaaaaaa

SEQ ID NO: 143243 - DNA, 25 bp, Canis familiaris
gtgaagacctggagagactgaagaa

SEQ ID NO: 143244 - DNA, 25 bp, Canis familiaris
gtgcagaacgtgactatggaccagg

SEQ ID NO: 143245 - DNA, 25 bp, Canis familiaris
gtgcacaagtgtttagctgagccgt

SEQ ID NO: 143246 - DNA, 25 bp, Canis familiaris
gtgctgcttatgttgctggccagcc

SEQ ID NO: 143247 - DNA, 25 bp, Canis familiaris
gtgcgctgtgatttgtagtcacctg

SEQ ID NO: 143248 - DNA, 25 bp, Canis familiaris
gtgcagtgtgttctcaaagctctga

SEQ ID NO: 143249 - DNA, 25 bp, Canis familiaris
gtgcattcagttttcataattcttt

SEQ ID NO: 143250 - DNA, 25 bp, Canis familiaris
gtgcacaagttaaatactttgattt

SEQ ID NO: 143251 - DNA, 25 bp, Canis familiaris
gtgcacggaaaatacagcgtttctt

SEQ ID NO: 143252 - DNA, 25 bp, Canis familiaris
gtgaccctagttgacagtattgtat

SEQ ID NO: 143253 - DNA, 25 bp, Canis familiaris
gtgacccttttaagggactgcctga

SEQ ID NO: 143254 - DNA, 25 bp, Canis familiaris
gtgaccctgttcaattataatctcc

SEQ ID NO: 143255 - DNA, 25 bp, Canis familiaris
gtgcccactggtgttaacagtcctc

SEQ ID NO: 143256 - DNA, 25 bp, Canis familiaris
gtgcccaaaggccttacacagtgcc

SEQ ID NO: 143257 - DNA, 25 bp, Canis familiaris
gtgcaccaaaggacttctcctgtgc

SEQ ID NO: 143258 - DNA, 25 bp, Canis familiaris
gtgcttcagaaggaatctcccattt

SEQ ID NO: 143259 - DNA, 25 bp, Canis familiaris
gtgttagaactattccccattaatg

SEQ ID NO: 143260 - DNA, 25 bp, Canis familiaris
gtgagtagaattgctgtcccctaca

SEQ ID NO: 143261 - DNA, 25 bp, Canis familiaris
gtgacatgtgaaaccttttttaaga

SEQ ID NO: 143262 - DNA, 25 bp, Canis familiaris
gtgactgaaaatcctgcttatttcc

SEQ ID NO: 143263 - DNA, 25 bp, Canis familiaris
gtgaaacaataccagcctttctcct

SEQ ID NO: 143264 - DNA, 25 bp, Canis familiaris
gtgaagcgaatcacggctttctcca

SEQ ID NO: 143265 - DNA, 25 bp, Canis familiaris
gtgcaaaatgtctctggttttcgca

SEQ ID NO: 143266 - DNA, 25 bp, Canis familiaris
gtgaaagcgtgtccgttcttgtgct

SEQ ID NO: 143267 - DNA, 25 bp, Canis familiaris
gtgaaaaagtagggcctcggctgtt

SEQ ID NO: 143268 - DNA, 25 bp, Canis familiaris
gtgaaactaggagagctgccaggct

SEQ ID NO: 143269 - DNA, 25 bp, Canis familiaris
gtgaaagcgggattattaacactta

SEQ ID NO: 143270 - DNA, 25 bp, Canis familiaris
gtgcaatgggggttataccacacca

SEQ ID NO: 143271 - DNA, 25 bp, Canis familiaris
gtgaaggtgacgttcaactcggctc

SEQ ID NO: 143272 - DNA, 25 bp, Canis familiaris
gtgaaggtacagtggacacgcctgc

SEQ ID NO: 143273 - DNA, 25 bp, Canis familiaris
gtgaagtttcagtgaccatcgcaag

SEQ ID NO: 143274 - DNA, 25 bp, Canis familiaris
gtgacaacttgggaggccacgcaag

SEQ ID NO: 143275 - DNA, 25 bp, Canis familiaris
gtgaaactttccagcagccataaat

SEQ ID NO: 143276 - DNA, 25 bp, Canis familiaris
gtgaatctcttttttgagcacaata

SEQ ID NO: 143277 - DNA, 25 bp, Canis familiaris
gtgaaccaggtgtttgggcaagatg

SEQ ID NO: 143278 - DNA, 25 bp, Canis familiaris
gtgaacccaggtcaagtgccaatga

SEQ ID NO: 143279 - DNA, 25 bp, Canis familiaris
gtgaacgccgaactgaaggcccaaa

SEQ ID NO: 143280 - DNA, 25 bp, Canis familiaris
gtgagtggccagtggtcagaccgaa

SEQ ID NO: 143281 - DNA, 25 bp, Canis familiaris
gtgaatttcagatcggcatcccgaa

SEQ ID NO: 143282 - DNA, 25 bp, Canis familiaris
gtgcatctatgttaacctaccttga

SEQ ID NO: 143283 - DNA, 25 bp, Canis familiaris
gtgaacacttaattctactgtgaca

SEQ ID NO: 143284 - DNA, 25 bp, Canis familiaris
gtgctacactgtattctaataagta

SEQ ID NO: 143285 - DNA, 25 bp, Canis familiaris
gtgctgacacgtttgtttttgagta

SEQ ID NO: 143286 - DNA, 25 bp, Canis familiaris
gtgctaactcattctgtgtactttg

SEQ ID NO: 143287 - DNA, 25 bp, Canis familiaris
gtgctggttcattagttattttctc

SEQ ID NO: 143288 - DNA, 25 bp, Canis familiaris
gtgctagtgccttacttttctattc

SEQ ID NO: 143289 - DNA, 25 bp, Canis familiaris
gtgctgttcctgtaagtttgctatt

SEQ ID NO: 143290 - DNA, 25 bp, Canis familiaris
gtgctcgttagctattgtgttcttt

SEQ ID NO: 143291 - DNA, 25 bp, Canis familiaris
gtgctgtttcagtctgtgtgttcga

SEQ ID NO: 143292 - DNA, 25 bp, Canis familiaris
gtgctgctggtcattgatgctgtac

SEQ ID NO: 143293 - DNA, 25 bp, Canis familiaris
gtgctgctgggactgggcagctgcc

SEQ ID NO: 143294 - DNA, 25 bp, Canis familiaris
gtgctgcagtggatctgcactctcc

SEQ ID NO: 143295 - DNA, 25 bp, Canis familiaris
gtgctggatggagctgactgcatca

SEQ ID NO: 143296 - DNA, 25 bp, Canis familiaris
gtgcaggatctggttactgtgcagt

SEQ ID NO: 143297 - DNA, 25 bp, Canis familiaris
gtgcgcagatgcaagcttacgcctt

SEQ ID NO: 143298 - DNA, 25 bp, Canis familiaris
gtgcgcaagcactttgacatgcctc

SEQ ID NO: 143299 - DNA, 25 bp, Canis familiaris
gtgctgaaaccattgctgatgctcc

SEQ ID NO: 143300 - DNA, 25 bp, Canis familiaris
gtgcgaagggcatttgcctctgccc

SEQ ID NO: 143301 - DNA, 25 bp, Canis familiaris
gtgcaaatatgtccatacctctcct

SEQ ID NO: 143302 - DNA, 25 bp, Canis familiaris
gtgcaagctcatgcacacacatgcc

SEQ ID NO: 143303 - DNA, 25 bp, Canis familiaris
gtgcagagcactggcctctgcacct

SEQ ID NO: 143304 - DNA, 25 bp, Canis familiaris
gtgcactatctactatctcacatct

SEQ ID NO: 143305 - DNA, 25 bp, Canis familiaris
gtgcacatgattggatattattcga

SEQ ID NO: 143306 - DNA, 25 bp, Canis familiaris
gtgacatattctcttaaggggcttc

SEQ ID NO: 143307 - DNA, 25 bp, Canis familiaris
gtgcatgtttgtgttttgagggact

SEQ ID NO: 143308 - DNA, 25 bp, Canis familiaris
gtgcagatgtggtgtgcttcatgat

SEQ ID NO: 143309 - DNA, 25 bp, Canis familiaris
gtgcagactgtagtggctccatgtc

SEQ ID NO: 143310 - DNA, 25 bp, Canis familiaris
gtgcgacggattgggtcagtcacct

SEQ ID NO: 143311 - DNA, 25 bp, Canis familiaris
gtgcagagctggatgggggactcac

SEQ ID NO: 143312 - DNA, 25 bp, Canis familiaris
gtgcatgactacaggctggttctca

SEQ ID NO: 143313 - DNA, 25 bp, Canis familiaris
gtgctcaatactcgtgattttccag

SEQ ID NO: 143314 - DNA, 25 bp, Canis familiaris
gtgctcagtatccagagtatggctc

SEQ ID NO: 143315 - DNA, 25 bp, Canis familiaris
gtgctcatttgccattattggctcg

SEQ ID NO: 143316 - DNA, 25 bp, Canis familiaris
gtgctctggagctatttttgtagga

SEQ ID NO: 143317 - DNA, 25 bp, Canis familiaris
gtgcttgcttcattttctttggtaa

SEQ ID NO: 143318 - DNA, 25 bp, Canis familiaris
gtgctcagctatcatttcttcgaaa

SEQ ID NO: 143319 - DNA, 25 bp, Canis familiaris
gtgctactatgtatgtagtgggcaa

SEQ ID NO: 143320 - DNA, 25 bp, Canis familiaris
gtgcttctttcatgtcaggcgttaa

SEQ ID NO: 143321 - DNA, 25 bp, Canis familiaris
gtgcgtcatttttgctgactgggga

SEQ ID NO: 143322 - DNA, 25 bp, Canis familiaris
gtgcgagcgatgttggtgacggggc

SEQ ID NO: 143323 - DNA, 25 bp, Canis familiaris
gtgcggctgctgttgggaatggacc

SEQ ID NO: 143324 - DNA, 25 bp, Canis familiaris
gtgcggtctgctgtggaaggacccc

SEQ ID NO: 143325 - DNA, 25 bp, Canis familiaris
gtgcggttgccagtgtgatcaggtc

SEQ ID NO: 143326 - DNA, 25 bp, Canis familiaris
gtgcatggtccacgcttatgagttc

SEQ ID NO: 143327 - DNA, 25 bp, Canis familiaris
gtgcaggggcagctctgaaggcatc

SEQ ID NO: 143328 - DNA, 25 bp, Canis familiaris
gtgaggaagccgaggcgtcacaggt

SEQ ID NO: 143329 - DNA, 25 bp, Canis familiaris
gtgcaggaagcccgatgcgggactc

SEQ ID NO: 143330 - DNA, 25 bp, Canis familiaris
gtgtaagcagccaagacggggcccc

SEQ ID NO: 143331 - DNA, 25 bp, Canis familiaris
gtgcagaaaaccgacgagggccacc

SEQ ID NO: 143332 - DNA, 25 bp, Canis familiaris
gtgcaatgaaatgtacgtgggccgt

SEQ ID NO: 143333 - DNA, 25 bp, Canis familiaris
gtgaattcactggggtttggtagat

SEQ ID NO: 143334 - DNA, 25 bp, Canis familiaris
gtgaggtccagggcagtatgtggta

SEQ ID NO: 143335 - DNA, 25 bp, Canis familiaris
gtgcgtgatgccagcgcatgtactt

SEQ ID NO: 143336 - DNA, 25 bp, Canis familiaris
gtgctctgtgtaacctgtcacatgc

SEQ ID NO: 143337 - DNA, 25 bp, Canis familiaris
gtgcttgtacataggcttgcgctga

SEQ ID NO: 143338 - DNA, 25 bp, Canis familiaris
gtgttgtatccttgcttaggcacct

SEQ ID NO: 143339 - DNA, 25 bp, Canis familiaris
gtgcttctataatttggggtcctct

SEQ ID NO: 143340 - DNA, 25 bp, Canis familiaris
gtgctatgcatttaagtgagtggta

SEQ ID NO: 143341 - DNA, 25 bp, Canis familiaris
gtgctccttaaagcagatcagtgca

SEQ ID NO: 143342 - DNA, 25 bp, Canis familiaris
gtgctcactagacagcacaccgtac

SEQ ID NO: 143343 - DNA, 25 bp, Canis familiaris
gtgctgtctggcggcaccaccatgt

SEQ ID NO: 143344 - DNA, 25 bp, Canis familiaris
gtgctgcaagaggtcacaactcaga

SEQ ID NO: 143345 - DNA, 25 bp, Canis familiaris
gtgctcagagtcaccaacatcaacc

SEQ ID NO: 143346 - DNA, 25 bp, Canis familiaris
gtgcttactgcctaaccatcaacac

SEQ ID NO: 143347 - DNA, 25 bp, Canis familiaris
gtgcttgactgagatttgtaaaccc

SEQ ID NO: 143348 - DNA, 25 bp, Canis familiaris
gtgcgatcctgtgattattttaccc

SEQ ID NO: 143349 - DNA, 25 bp, Canis familiaris
gtgctgacctgtgtatggattctat

SEQ ID NO: 143350 - DNA, 25 bp, Canis familiaris
gtgcatgaactgtctttgtctttta

SEQ ID NO: 143351 - DNA, 25 bp, Canis familiaris
gtgcattgcacaggtattgcttttt

SEQ ID NO: 143352 - DNA, 25 bp, Canis familiaris
gtgcatcgccagcatttcgatcctc

SEQ ID NO: 143353 - DNA, 25 bp, Canis familiaris
gtgctgaccgaattttatgctcctt

SEQ ID NO: 143354 - DNA, 25 bp, Canis familiaris
gtgcaacctgaagttaactcctgag

SEQ ID NO: 143355 - DNA, 25 bp, Canis familiaris
gtgcaatcccaatcaaaatcctaac

SEQ ID NO: 143356 - DNA, 25 bp, Canis familiaris
gtgcaatccctatcagaataccaat

SEQ ID NO: 143357 - DNA, 25 bp, Canis familiaris
gtgcaatccctatcaagatgccaac

SEQ ID NO: 143358 - DNA, 25 bp, Canis familiaris
gtgcacttggtaccaaggccaccga

SEQ ID NO: 143359 - DNA, 25 bp, Canis familiaris
gtgcacggagtggccatggtgccag

SEQ ID NO: 143360 - DNA, 25 bp, Canis familiaris
gtgaaggagatgccctggagcagga

SEQ ID NO: 143361 - DNA, 25 bp, Canis familiaris
gtgaaccaacagcatgtggcagagc

SEQ ID NO: 143362 - DNA, 25 bp, Canis familiaris
gtgcaaaaaccatgccacagagccc

SEQ ID NO: 143363 - DNA, 25 bp, Canis familiaris
gtgaaaggcacccgtcacagatgtc

SEQ ID NO: 143364 - DNA, 25 bp, Canis familiaris
gtgtatagatgcagccgttgcaggc

SEQ ID NO: 143365 - DNA, 25 bp, Canis familiaris
gtgacacgacagtccgttggtcgac

SEQ ID NO: 143366 - DNA, 25 bp, Canis familiaris
gtgctcatctaagtccagttggtcc

SEQ ID NO: 143367 - DNA, 25 bp, Canis familiaris
gtgctcatcctgaactcgattgttc

SEQ ID NO: 143368 - DNA, 25 bp, Canis familiaris
gtgctatcagggattgtttccccac

SEQ ID NO: 143369 - DNA, 25 bp, Canis familiaris
gtgctacgggaatttgctgcccgcc

SEQ ID NO: 143370 - DNA, 25 bp, Canis familiaris
gtgctctgaaggctttgggctggcc

SEQ ID NO: 143371 - DNA, 25 bp, Canis familiaris
gtgctgtgcagagggccttggacga

SEQ ID NO: 143372 - DNA, 25 bp, Canis familiaris
gtgctggggagtgtgtgtgagggac

SEQ ID NO: 143373 - DNA, 25 bp, Canis familiaris
gtgctaggaagggtgggctgggaca

SEQ ID NO: 143374 - DNA, 25 bp, Canis familiaris
gtgctggccagaggggggtggtgat

SEQ ID NO: 143375 - DNA, 25 bp, Canis familiaris
gtgtcccccgcagagcggggtgtcc

SEQ ID NO: 143376 - DNA, 25 bp, Canis familiaris
gtgctccctccaggggagtgggacc

SEQ ID NO: 143377 - DNA, 25 bp, Canis familiaris
gtgcaagcccgggtgggatgggccc

SEQ ID NO: 143378 - DNA, 25 bp, Canis familiaris
gtgcacgcccttcgtcaagaaggtc

SEQ ID NO: 143379 - DNA, 25 bp, Canis familiaris
gtgcttgccactatgtactaagaat

SEQ ID NO: 143380 - DNA, 25 bp, Canis familiaris
gtgctatccagctatgtgtacttgt

SEQ ID NO: 143381 - DNA, 25 bp, Canis familiaris
gtgctgatgcgccagatggaaccgt

SEQ ID NO: 143382 - DNA, 25 bp, Canis familiaris
gtgctgggcctgtgaagccatttgt

SEQ ID NO: 143383 - DNA, 25 bp, Canis familiaris
gtgctgggatcgtggatgcccatct

SEQ ID NO: 143384 - DNA, 25 bp, Canis familiaris
gtgctcgtacgtcagatcactgatc

SEQ ID NO: 143385 - DNA, 25 bp, Canis familiaris
gtgctgtgaacacaccacactgcac

SEQ ID NO: 143386 - DNA, 25 bp, Canis familiaris
gtgcttgcagaagtacccacacagc

SEQ ID NO: 143387 - DNA, 25 bp, Canis familiaris
gtgtggaaagtgtccccaagttggt

SEQ ID NO: 143388 - DNA, 25 bp, Canis familiaris
gtggtgacggggtcccaaattggca

SEQ ID NO: 143389 - DNA, 25 bp, Canis familiaris
gtgaaagcacggatcccaaattaga

SEQ ID NO: 143390 - DNA, 25 bp, Canis familiaris
gtgacaactcgaactctccaaagta

SEQ ID NO: 143391 - DNA, 25 bp, Canis familiaris
gtgtagaccgtgattctcagaagcg

SEQ ID NO: 143392 - DNA, 25 bp, Canis familiaris
gtgctagcagcagaattactaaggg

SEQ ID NO: 143393 - DNA, 25 bp, Canis familiaris
tgtcaacaggtcaattactaattct

SEQ ID NO: 143394 - DNA, 25 bp, Canis familiaris
gtgaatccgctcaataaaagtgtcg

SEQ ID NO: 143395 - DNA, 25 bp, Canis familiaris
gtgcacatcgcgacaatcgacatca

SEQ ID NO: 143396 - DNA, 25 bp, Canis familiaris
gtgcatatccagagccagatcacgc

SEQ ID NO: 143397 - DNA, 25 bp, Canis familiaris
gtgaatgcaagcagccagtggactt

SEQ ID NO: 143398 - DNA, 25 bp, Canis familiaris
gtgcatatctacagttgtcaacatt

SEQ ID NO: 143399 - DNA, 25 bp, Canis familiaris
gtgctagtatctggttgacaaatct

SEQ ID NO: 143400 - DNA, 25 bp, Canis familiaris
gtgaagattgctgtatactatttat

SEQ ID NO: 143401 - DNA, 25 bp, Canis familiaris
gtgcacgtgcgtgtatatacatgta

SEQ ID NO: 143402 - DNA, 25 bp, Canis familiaris
gtgcatcctgcagcttattggctta

SEQ ID NO: 143403 - DNA, 25 bp, Canis familiaris
gtgctgctctgaggttctgggcagt

SEQ ID NO: 143404 - DNA, 25 bp, Canis familiaris
gtgctgtctgcattttcttggagaa

SEQ ID NO: 143405 - DNA, 25 bp, Canis familiaris
gtgcttcagctttatcatctgtaaa

SEQ ID NO: 143406 - DNA, 25 bp, Canis familiaris
gtgcatgctcagccatgtacactgt

SEQ ID NO: 143407 - DNA, 25 bp, Canis familiaris
gtgctgtgcagcctggcagcacttg

SEQ ID NO: 143408 - DNA, 25 bp, Canis familiaris
gtgcttgaatatacagccttaacaa

SEQ ID NO: 143409 - DNA, 25 bp, Canis familiaris
gtgctggcaatgaacctcagtacca

SEQ ID NO: 143410 - DNA, 25 bp, Canis familiaris
gtgctggagctgacaggctgcatga

SEQ ID NO: 143411 - DNA, 25 bp, Canis familiaris
gtgctggagctgacaggctgcagac

SEQ ID NO: 143412 - DNA, 25 bp, Canis familiaris
gtgcatgcgtgcacatgtgcataca

SEQ ID NO: 143413 - DNA, 25 bp, Canis familiaris
gtgcactggcaagcgagacgaagac

SEQ ID NO: 143414 - DNA, 25 bp, Canis familiaris
gtgctcggcagctgggtcagaagcc

SEQ ID NO: 143415 - DNA, 25 bp, Canis familiaris
gtgacctgcagctgggactgtcacc

SEQ ID NO: 143416 - DNA, 25 bp, Canis familiaris
gtgcatttgcgttgtttcttcatgc

SEQ ID NO: 143417 - DNA, 25 bp, Canis familiaris
gtgctgatactgagtttggctatgc

SEQ ID NO: 143418 - DNA, 25 bp, Canis familiaris
gtgctgcatactattttgggaactg

SEQ ID NO: 143419 - DNA, 25 bp, Canis familiaris
gtgacagttattacctgggaaattt

SEQ ID NO: 143420 - DNA, 25 bp, Canis familiaris
gtgcagaatttcttacatggtaaag

SEQ ID NO: 143421 - DNA, 25 bp, Canis familiaris
gtgcagcctctaacatagtggggaa

SEQ ID NO: 143422 - DNA, 25 bp, Canis familiaris
gtgcacgccatcaaccaggtggtgc

SEQ ID NO: 143423 - DNA, 25 bp, Canis familiaris
gtgcatccctcctcattatgagcac

SEQ ID NO: 143424 - DNA, 25 bp, Canis familiaris
gtgctacacacactgttctgagaac

SEQ ID NO: 143425 - DNA, 25 bp, Canis familiaris
gtgcaacatccacattgacagtgac

SEQ ID NO: 143426 - DNA, 25 bp, Canis familiaris
gtgcaacatccaaattgaacagtta

SEQ ID NO: 143427 - DNA, 25 bp, Canis familiaris
gtgcacacacatgacttgaaagagt

SEQ ID NO: 143428 - DNA, 25 bp, Canis familiaris
gtgctcatcgatgtgggaacaggct

SEQ ID NO: 143429 - DNA, 25 bp, Canis familiaris
gtgctgcagagagcagggcaagacc

SEQ ID NO: 143430 - DNA, 25 bp, Canis familiaris
gtgcacgtgaccgtgtgcacacacc

SEQ ID NO: 143431 - DNA, 25 bp, Canis familiaris
gtgctctacatcgtgatatcaccac

SEQ ID NO: 143432 - DNA, 25 bp, Canis familiaris
gtgctatatggcattatatccacgt

SEQ ID NO: 143433 - DNA, 25 bp, Canis familiaris
gtgaatgtggagtctgagcatcaac

SEQ ID NO: 143434 - DNA, 25 bp, Canis familiaris
gtgacagttcaatggccaagcctat

SEQ ID NO: 143435 - DNA, 25 bp, Canis familiaris
gtgcacattctatagctgcaaaaca

SEQ ID NO: 143436 - DNA, 25 bp, Canis familiaris
gtgcatatcctctcagcagcagaag

SEQ ID NO: 143437 - DNA, 25 bp, Canis familiaris
gtgcatactagctgagaggaagtcc

SEQ ID NO: 143438 - DNA, 25 bp, Canis familiaris
gtgcacctcactcacatgtaagtcc

SEQ ID NO: 143439 - DNA, 25 bp, Canis familiaris
gtgacgtcactttttcaagattcca

SEQ ID NO: 143440 - DNA, 25 bp, Canis familiaris
gtgaattctatcttttaggttccag

SEQ ID NO: 143441 - DNA, 25 bp, Canis familiaris
gtgaagccacactgttttatttatg

SEQ ID NO: 143442 - DNA, 25 bp, Canis familiaris
gtgcaaccaatacctttacatttta

SEQ ID NO: 143443 - DNA, 25 bp, Canis familiaris
gtgaacccaaaccatctattttgtt

SEQ ID NO: 143444 - DNA, 25 bp, Canis familiaris
gtgaaccaatagcacactgttttaa

SEQ ID NO: 143445 - DNA, 25 bp, Canis familiaris
gtgaccaaatatttgcctttttaca

SEQ ID NO: 143446 - DNA, 25 bp, Canis familiaris
gtgcaccaacgctttaggttttcac

SEQ ID NO: 143447 - DNA, 25 bp, Canis familiaris
gtgaccaagcccaacaaggtccatc

SEQ ID NO: 143448 - DNA, 25 bp, Canis familiaris
gtgaagcagaacgccaaggccgctt

SEQ ID NO: 143449 - DNA, 25 bp, Canis familiaris
gtgcaatagagggtctcacggcctg

SEQ ID NO: 143450 - DNA, 25 bp, Canis familiaris
gtgaacaagttttactagcccgagc

SEQ ID NO: 143451 - DNA, 25 bp, Canis familiaris
gtgaactaccttaagttgccggact

SEQ ID NO: 143452 - DNA, 25 bp, Canis familiaris
gtgaaataccagtaggttggattcc

SEQ ID NO: 143453 - DNA, 25 bp, Canis familiaris
gtgaactggccctggtaaattacta

SEQ ID NO: 143454 - DNA, 25 bp, Canis familiaris
gtgaacctccactttgtataaattt

SEQ ID NO: 143455 - DNA, 25 bp, Canis familiaris
gtgacaaaccccaatgtacagaaaa

SEQ ID NO: 143456 - DNA, 25 bp, Canis familiaris
gtgaataaccttatgtcaaccaaca

SEQ ID NO: 143457 - DNA, 25 bp, Canis familiaris
gtgaaagagcctcactgtgacccga

SEQ ID NO: 143458 - DNA, 25 bp, Canis familiaris
gtgaacacagcctcgtgctgtgccc

SEQ ID NO: 143459 - DNA, 25 bp, Canis familiaris
gtgaagatcgccgtggatgggccgc

SEQ ID NO: 143460 - DNA, 25 bp, Canis familiaris
gtgacgacccttccatggtcgtcct

SEQ ID NO: 143461 - DNA, 25 bp, Canis familiaris
gtgatccatacacacctggctttcc

SEQ ID NO: 143462 - DNA, 25 bp, Canis familiaris
gtgcatccgacaatgacactggtcc

SEQ ID NO: 143463 - DNA, 25 bp, Canis familiaris
gtgctctctgaaggatcacaggccc

SEQ ID NO: 143464 - DNA, 25 bp, Canis familiaris
gtgcatgctctgtacatgtcaaggt

SEQ ID NO: 143465 - DNA, 25 bp, Canis familiaris
gtgctgctcggctattagcaagggg

SEQ ID NO: 143466 - DNA, 25 bp, Canis familiaris
gtgctctgggagaatagagagggcg

SEQ ID NO: 143467 - DNA, 25 bp, Canis familiaris
gtgttgggtgaataagtcatgcaag

SEQ ID NO: 143468 - DNA, 25 bp, Canis familiaris
gtgcttagaaagtgcaaatcacaac

SEQ ID NO: 143469 - DNA, 25 bp, Canis familiaris
gtgagaaacaagtgcattatggaac

SEQ ID NO: 143470 - DNA, 25 bp, Canis familiaris
gtgaaactcggctgtattaatcacg

SEQ ID NO: 143471 - DNA, 25 bp, Canis familiaris
gtgaaactgcgaatggctcattaaa

SEQ ID NO: 143472 - DNA, 25 bp, Canis familiaris
gtgaaactgcgaatggctcattaaa

SEQ ID NO: 143473 - DNA, 25 bp, Canis familiaris
gtgaatgatctctctgaatcctaag

SEQ ID NO: 143474 - DNA, 25 bp, Canis familiaris
gtgcactgagctgtaaacttggcag

SEQ ID NO: 143475 - DNA, 25 bp, Canis familiaris
gtgcacgatctgattttctggcgag

SEQ ID NO: 143476 - DNA, 25 bp, Canis familiaris
gtgcacagagatattttcttggacc

SEQ ID NO: 143477 - DNA, 25 bp, Canis familiaris
gtgctatagtttcttttctgtcact

SEQ ID NO: 143478 - DNA, 25 bp, Canis familiaris
gtgcttttataccttttaatgccat

SEQ ID NO: 143479 - DNA, 25 bp, Canis familiaris
gtgcttgtaaaggatttgctattct

SEQ ID NO: 143480 - DNA, 25 bp, Canis familiaris
gtgctgaataaatatttgttgaatg

SEQ ID NO: 143481 - DNA, 25 bp, Canis familiaris
gtgcatacccaatatgttgttgact

SEQ ID NO: 143482 - DNA, 25 bp, Canis familiaris
gtgcacctttgtctgttgttcagtt

SEQ ID NO: 143483 - DNA, 25 bp, Canis familiaris
gtgcatccattttctttagttgact

SEQ ID NO: 143484 - DNA, 25 bp, Canis familiaris
gtgcttgcatttttttagaccgctg

SEQ ID NO: 143485 - DNA, 25 bp, Canis familiaris
gtgcttcagtttgttacctttgtag

SEQ ID NO: 143486 - DNA, 25 bp, Canis familiaris
gtgcaccaggttgttactcttgtta

SEQ ID NO: 143487 - DNA, 25 bp, Canis familiaris
gtgacacgtgttgaccagttggtta

SEQ ID NO: 143488 - DNA, 25 bp, Canis familiaris
gtgaaggacttcaacctgttgcgct

SEQ ID NO: 143489 - DNA, 25 bp, Canis familiaris
gtgcagcaggaataacattgttggc

SEQ ID NO: 143490 - DNA, 25 bp, Canis familiaris
gtgcaacggcacgaactcagagggc

SEQ ID NO: 143491 - DNA, 25 bp, Canis familiaris
gtgaacgcgacgaaccggtggatgt

SEQ ID NO: 143492 - DNA, 25 bp, Canis familiaris
gggccagctagagaccgggagctga

SEQ ID NO: 143493 - DNA, 25 bp, Canis familiaris
gtgagcttccaagacctgggatggc

SEQ ID NO: 143494 - DNA, 25 bp, Canis familiaris
gtgtgctttgcatgaacgggggcca

SEQ ID NO: 143495 - DNA, 25 bp, Canis familiaris
gtgagctgactttaacggggccacc

SEQ ID NO: 143496 - DNA, 25 bp, Canis familiaris
gtgagtactagcacctggggacagc

SEQ ID NO: 143497 - DNA, 25 bp, Canis familiaris
gtgaccatcacccctcaggggtagt

SEQ ID NO: 143498 - DNA, 25 bp, Canis familiaris
gtgacacaccttttcaggagggcag

SEQ ID NO: 143499 - DNA, 25 bp, Canis familiaris
gtgaatacctgcacctggagagggt

SEQ ID NO: 143500 - DNA, 25 bp, Canis familiaris
gtgagaacttcacccagagggctgg

SEQ ID NO: 143501 - DNA, 25 bp, Canis familiaris
gtgaagacattgtaccagaatgtgt

SEQ ID NO: 143502 - DNA, 25 bp, Canis familiaris
gtgaagaatgaccacatgcaatgtg

SEQ ID NO: 143503 - DNA, 25 bp, Canis familiaris
gtgaagaagatccccgagtacgatg

SEQ ID NO: 143504 - DNA, 25 bp, Canis familiaris
gtgaaatataccacgtgatacctaa

SEQ ID NO: 143505 - DNA, 25 bp, Canis familiaris
gtgaagtccaccatcaaattccaga

SEQ ID NO: 143506 - DNA, 25 bp, Canis familiaris
gtgagaagctcaccttcaacaaccc

SEQ ID NO: 143507 - DNA, 25 bp, Canis familiaris
gtgcaccagcgaagctgctcacaaa

SEQ ID NO: 143508 - DNA, 25 bp, Canis familiaris
gtgcatcccagctaagatgagcagc

SEQ ID NO: 143509 - DNA, 25 bp, Canis familiaris
gtgactccagaaagacagacttcag

SEQ ID NO: 143510 - DNA, 25 bp, Canis familiaris
gtgaaccaagtcgccagttgagagg

SEQ ID NO: 143511 - DNA, 25 bp, Canis familiaris
gtgaagccaaagcaccaatctggag

SEQ ID NO: 143512 - DNA, 25 bp, Canis familiaris
gtgcagggtaagtgccagtctgtag

SEQ ID NO: 143513 - DNA, 25 bp, Canis familiaris
gtgagggctgtaaggccttcttcaa

SEQ ID NO: 143514 - DNA, 25 bp, Canis familiaris
gtgacttcttcagggacttcttagt

SEQ ID NO: 143515 - DNA, 25 bp, Canis familiaris
gtgactttcactgggatctgttccg

SEQ ID NO: 143516 - DNA, 25 bp, Canis familiaris
gtgacttgtggctggaggggccttc

SEQ ID NO: 143517 - DNA, 25 bp, Canis familiaris
gtgacattgagtccgggcaggtcca

SEQ ID NO: 143518 - DNA, 25 bp, Canis familiaris
gtgaaatgcattctggagataacca

SEQ ID NO: 143519 - DNA, 25 bp, Canis familiaris
gtgaaagctcagttcgtatacccgg

SEQ ID NO: 143520 - DNA, 25 bp, Canis familiaris
gtgaagcacaagaccggatgacccg

SEQ ID NO: 143521 - DNA, 25 bp, Canis familiaris
gtgaatcatcatcgatccggctaag

SEQ ID NO: 143522 - DNA, 25 bp, Canis familiaris
gtgaattgctgaacctggctatgtt

SEQ ID NO: 143523 - DNA, 25 bp, Canis familiaris
gtgcaatttggagggctgcttgatt

SEQ ID NO: 143524 - DNA, 25 bp, Canis familiaris
gtgcaattcggcagccagttaagct

SEQ ID NO: 143525 - DNA, 25 bp, Canis familiaris
gtgaatgacggtgcacagctctaca

SEQ ID NO: 143526 - DNA, 25 bp, Canis familiaris
gtgaagtcgtcttagcatctcagaa

SEQ ID NO: 143527 - DNA, 25 bp, Canis familiaris
gtgaatgggtttcgtctcaacacat

SEQ ID NO: 143528 - DNA, 25 bp, Canis familiaris
gtgaaggctggtagcttcggtcaca

SEQ ID NO: 143529 - DNA, 25 bp, Canis familiaris
gtgcaaggtggtacgctcggtgata

SEQ ID NO: 143530 - DNA, 25 bp, Canis familiaris
gtgcattcaggccgactgttggtta

SEQ ID NO: 143531 - DNA, 25 bp, Canis familiaris
gtgcttcagtgtcttctggagttgt

SEQ ID NO: 143532 - DNA, 25 bp, Canis familiaris
gtgcttcagctttatttgtattctc

SEQ ID NO: 143533 - DNA, 25 bp, Canis familiaris
gtgctttcatctaaatcagtattcc

SEQ ID NO: 143534 - DNA, 25 bp, Canis familiaris
gtgcttttcttatagaacccgttct

SEQ ID NO: 143535 - DNA, 25 bp, Canis familiaris
gtgcactttttataatagcccgtgc

SEQ ID NO: 143536 - DNA, 25 bp, Canis familiaris
gtgcttttttaccacacatgttcct

SEQ ID NO: 143537 - DNA, 25 bp, Canis familiaris
gtgcttctttagaatccagctttca

SEQ ID NO: 143538 - DNA, 25 bp, Canis familiaris
gtgctttggtaacttcatgggattc

SEQ ID NO: 143539 - DNA, 25 bp, Canis familiaris
gtgctttagatgtagttcctggatg

SEQ ID NO: 143540 - DNA, 25 bp, Canis familiaris
gtgctttgatgattttctcctttgg

SEQ ID NO: 143541 - DNA, 25 bp, Canis familiaris
gtgcaattgtgatgttacctctctg

SEQ ID NO: 143542 - DNA, 25 bp, Canis familiaris
gtgcaaggtgacttctgacttcctg

SEQ ID NO: 143543 - DNA, 25 bp, Canis familiaris
gtgaggatgaggttatttacaatgt

SEQ ID NO: 143544 - DNA, 25 bp, Canis familiaris
gtgaaagaaattttaacctgtagag

SEQ ID NO: 143545 - DNA, 25 bp, Canis familiaris
gtgagtaaaactgtacactttgaga

SEQ ID NO: 143546 - DNA, 25 bp, Canis familiaris
gtgaacacaaactgtacacctttga

SEQ ID NO: 143547 - DNA, 25 bp, Canis familiaris
gtgttaggtagctgtggactccttg

SEQ ID NO: 143548 - DNA, 25 bp, Canis familiaris
ggtctagggagctggattccttagg

SEQ ID NO: 143549 - DNA, 25 bp, Canis familiaris
gtgaaagtggcagcaggaccctcta

SEQ ID NO: 143550 - DNA, 25 bp, Canis familiaris
gtgcacaaggccaacatcatgaaac

SEQ ID NO: 143551 - DNA, 25 bp, Canis familiaris
gtgcaataaccagacatactagtag

SEQ ID NO: 143552 - DNA, 25 bp, Canis familiaris
gtgcaaaatccagcaccatttggtg

SEQ ID NO: 143553 - DNA, 25 bp, Canis familiaris
gtgacaaacgatgcagccactattt

SEQ ID NO: 143554 - DNA, 25 bp, Canis familiaris
gtgtaaactgctcagtcagtgctat

SEQ ID NO: 143555 - DNA, 25 bp, Canis familiaris
gtgctacagctccttaactggtttc

SEQ ID NO: 143556 - DNA, 25 bp, Canis familiaris
gtgcataactcttctaaaggatctt

SEQ ID NO: 143557 - DNA, 25 bp, Canis familiaris
gtgcaaccctcccaaaggttgaagg

SEQ ID NO: 143558 - DNA, 25 bp, Canis familiaris
gtgaccctcccctaaagttgagagg

SEQ ID NO: 143559 - DNA, 25 bp, Canis familiaris
gtgacccaccaacaaatgtacagca

SEQ ID NO: 143560 - DNA, 25 bp, Canis familiaris
gtgcacattaccaacagagaattaa

SEQ ID NO: 143561 - DNA, 25 bp, Canis familiaris
gtgacactatgcacacaagagttca

SEQ ID NO: 143562 - DNA, 25 bp, Canis familiaris
gtgagagcaggcaggcaggcaatta

SEQ ID NO: 143563 - DNA, 25 bp, Canis familiaris
gtgacacagctccgtgagagagagt

SEQ ID NO: 143564 - DNA, 25 bp, Canis familiaris
gtgcatcacccggcgagaagtgcat

SEQ ID NO: 143565 - DNA, 25 bp, Canis familiaris
gtgcatctacccagaacagtgccac

SEQ ID NO: 143566 - DNA, 25 bp, Canis familiaris
gtgcaggaaccaagggcaggccact

SEQ ID NO: 143567 - DNA, 25 bp, Canis familiaris
gtgcatggacacgtctggagcaggc

SEQ ID NO: 143568 - DNA, 25 bp, Canis familiaris
gtgactgcacacattggctcaggca

SEQ ID NO: 143569 - DNA, 25 bp, Canis familiaris
gtgagccagccattgtggcttccag

SEQ ID NO: 143570 - DNA, 25 bp, Canis familiaris
gtgaaatgcctcttgatcatgtcca

SEQ ID NO: 143571 - DNA, 25 bp, Canis familiaris
gtgaaacaatatccatctgtgctaa

SEQ ID NO: 143572 - DNA, 25 bp, Canis familiaris
gtgcaaactgcactgccatgggtaa

SEQ ID NO: 143573 - DNA, 25 bp, Canis familiaris
gtgcagatgacagctgacgagggaa

SEQ ID NO: 143574 - DNA, 25 bp, Canis familiaris
gtgcaatgacaccataccagaggac

SEQ ID NO: 143575 - DNA, 25 bp, Canis familiaris
gtgcaacaactgcacagcaagtgca

SEQ ID NO: 143576 - DNA, 25 bp, Canis familiaris
gtgcacccctggaaatagtgatcct

SEQ ID NO: 143577 - DNA, 25 bp, Canis familiaris
gtgacatctcctgtgacaagttcct

SEQ ID NO: 143578 - DNA, 25 bp, Canis familiaris
gtgcaatttttttctcagattgtct

SEQ ID NO: 143579 - DNA, 25 bp, Canis familiaris
gtgcaaccattgctatctagtttga

SEQ ID NO: 143580 - DNA, 25 bp, Canis familiaris
gtgcagactgctgcgttctggtatt

SEQ ID NO: 143581 - DNA, 25 bp, Canis familiaris
gtgcaccttgcagatggctgggatt

SEQ ID NO: 143582 - DNA, 25 bp, Canis familiaris
gtgcagtcttcagctcagtttagct

SEQ ID NO: 143583 - DNA, 25 bp, Canis familiaris
gtgtgttaaccattgccttaccggt

SEQ ID NO: 143584 - DNA, 25 bp, Canis familiaris
gtgttcaaactcatcactttaatcg

SEQ ID NO: 143585 - DNA, 25 bp, Canis familiaris
gtgcttcagaaagtctcctgttaac

SEQ ID NO: 143586 - DNA, 25 bp, Canis familiaris
gtgctaatgtactttcactttaaaa

SEQ ID NO: 143587 - DNA, 25 bp, Canis familiaris
gtgctattgtcacactctgatttaa

SEQ ID NO: 143588 - DNA, 25 bp, Canis familiaris
gtgctatttagcctttgtgtgaaca

SEQ ID NO: 143589 - DNA, 25 bp, Canis familiaris
gtgcttttgtctaagtatgtgagaa

SEQ ID NO: 143590 - DNA, 25 bp, Canis familiaris
gtgcttgtctgtttagttctgtgta

SEQ ID NO: 143591 - DNA, 25 bp, Canis familiaris
gtgcttatgctgttgtatttctgtt

SEQ ID NO: 143592 - DNA, 25 bp, Canis familiaris
gtgcatgcgagacagctattccgtc

SEQ ID NO: 143593 - DNA, 25 bp, Canis familiaris
gtgcaggagcagcagtaagcggcgc

SEQ ID NO: 143594 - DNA, 25 bp, Canis familiaris
gtgcatggaatggaggggcagaggg

SEQ ID NO: 143595 - DNA, 25 bp, Canis familiaris
gtgggagaggagaggtgggggttag

SEQ ID NO: 143596 - DNA, 25 bp, Canis familiaris
gtggacgacatgttcggtagggggt

SEQ ID NO: 143597 - DNA, 25 bp, Canis familiaris
gtgcaacaggcagagggtgagggag

SEQ ID NO: 143598 - DNA, 25 bp, Canis familiaris
gtgcaactgcggaggtgggggaggc

SEQ ID NO: 143599 - DNA, 25 bp, Canis familiaris
gtgaacacggttccttttgggagct

SEQ ID NO: 143600 - DNA, 25 bp, Canis familiaris
gtgaacacgctttttttcatgggtg

SEQ ID NO: 143601 - DNA, 25 bp, Canis familiaris
gtgaagacccattgctatcatacag

SEQ ID NO: 143602 - DNA, 25 bp, Canis familiaris
gtgaaagcgccagctatgttcaata

SEQ ID NO: 143603 - DNA, 25 bp, Canis familiaris
gtgcaagaaactgtaggctggatca

SEQ ID NO: 143604 - DNA, 25 bp, Canis familiaris
gtgcagtaaacaaatagtgctccta

SEQ ID NO: 143605 - DNA, 25 bp, Canis familiaris
gtgcaggaagtcagttgtgtcccag

SEQ ID NO: 143606 - DNA, 25 bp, Canis familiaris
gtgcatcgggtacaatagtcccaac

SEQ ID NO: 143607 - DNA, 25 bp, Canis familiaris
gggcgggtacagaaagccaccaaag

SEQ ID NO: 143608 - DNA, 25 bp, Canis familiaris
gtgttgggtacattaagaactctaa

SEQ ID NO: 143609 - DNA, 25 bp, Canis familiaris
gtgactgggttctaaatgaattcaa

SEQ ID NO: 143610 - DNA, 25 bp, Canis familiaris
gtgacggtggtcggaaccatccaat

SEQ ID NO: 143611 - DNA, 25 bp, Canis familiaris
gtgacagcgattttgagaagccgga

SEQ ID NO: 143612 - DNA, 25 bp, Canis familiaris
gtgacacatgtttctggttgcaccc

SEQ ID NO: 143613 - DNA, 25 bp, Canis familiaris
gtgaccataatcttagtccacccga

SEQ ID NO: 143614 - DNA, 25 bp, Canis familiaris
gtgagtggtctctttgtacagctcc

SEQ ID NO: 143615 - DNA, 25 bp, Canis familiaris
gtgacaggatccaatttgccactcc

SEQ ID NO: 143616 - DNA, 25 bp, Canis familiaris
gtgaaggtggccgtgtgtgacatcc

SEQ ID NO: 143617 - DNA, 25 bp, Canis familiaris
gtgacgggggcgaagtggtccagcc

SEQ ID NO: 143618 - DNA, 25 bp, Canis familiaris
gtgaccaatgggcctagggactccc

SEQ ID NO: 143619 - DNA, 25 bp, Canis familiaris
gtgaataagggcccagtgcagtcct

SEQ ID NO: 143620 - DNA, 25 bp, Canis familiaris
gtgacacataggcagacttggtttt

SEQ ID NO: 143621 - DNA, 25 bp, Canis familiaris
gtgacatgatcatgcgaccctggtc

SEQ ID NO: 143622 - DNA, 25 bp, Canis familiaris
gtgacgacctcatcctggagatcga

SEQ ID NO: 143623 - DNA, 25 bp, Canis familiaris
gtgactgcccactagttctggtgga

SEQ ID NO: 143624 - DNA, 25 bp, Canis familiaris
gtgaatgtctcctagtttatttaca

SEQ ID NO: 143625 - DNA, 25 bp, Canis familiaris
gtgaatttcactgccttatattatt

SEQ ID NO: 143626 - DNA, 25 bp, Canis familiaris
gtgaatttgacatctttctattttt

SEQ ID NO: 143627 - DNA, 25 bp, Canis familiaris
gtgactttagattctagcctcttta

SEQ ID NO: 143628 - DNA, 25 bp, Canis familiaris
gtgcacttttgtcaaaccatttacg

SEQ ID NO: 143629 - DNA, 25 bp, Canis familiaris
gtgcacctcgttgaaaccagattac

SEQ ID NO: 143630 - DNA, 25 bp, Canis familiaris
gtgacactcgtgtctaccacggata

SEQ ID NO: 143631 - DNA, 25 bp, Canis familiaris
gtgcatctccgtgctagtacaagaa

SEQ ID NO: 143632 - DNA, 25 bp, Canis familiaris
gtgattcccatctgcagttacagga

SEQ ID NO: 143633 - DNA, 25 bp, Canis familiaris
gtgcataccctctccaggaaggaaa

SEQ ID NO: 143634 - DNA, 25 bp, Canis familiaris
gtgcttggcttctcaaccaagtgaa

SEQ ID NO: 143635 - DNA, 25 bp, Canis familiaris
gtgcttgctttctgcaattccgaaa

SEQ ID NO: 143636 - DNA, 25 bp, Canis familiaris
gtgctttattatcgagatgcccgct

SEQ ID NO: 143637 - DNA, 25 bp, Canis familiaris
gtgcattctattaattgagtaccaa

SEQ ID NO: 143638 - DNA, 25 bp, Canis familiaris
gtgcatttatcagatcaaaaccaac

SEQ ID NO: 143639 - DNA, 25 bp, Canis familiaris
gtgacattgccagaaacataccatt

SEQ ID NO: 143640 - DNA, 25 bp, Canis familiaris
gtgaagatgccaagaggacaatcct

SEQ ID NO: 143641 - DNA, 25 bp, Canis familiaris
gtgcagataccttgtgggatatcca

SEQ ID NO: 143642 - DNA, 25 bp, Canis familiaris
gtgcaggtcacttttgagaatctga

SEQ ID NO: 143643 - DNA, 25 bp, Canis familiaris
gtgcaggaactcatcgacgaatacc

SEQ ID NO: 143644 - DNA, 25 bp, Canis familiaris
gtgcagggacccacactatgattac

SEQ ID NO: 143645 - DNA, 25 bp, Canis familiaris
gtgcagtggaatgcccagcgagtta

SEQ ID NO: 143646 - DNA, 25 bp, Canis familiaris
gtgagatccaagggccggaagttcg

SEQ ID NO: 143647 - DNA, 25 bp, Canis familiaris
gtgagatcccagggccggaagttcg

SEQ ID NO: 143648 - DNA, 25 bp, Canis familiaris
ggagggcccgagcaggaattttggt

SEQ ID NO: 143649 - DNA, 25 bp, Canis familiaris
gtggccccgtatcaggtaatttggt

SEQ ID NO: 143650 - DNA, 25 bp, Canis familiaris
gtgagctcccccagatggttgggag

SEQ ID NO: 143651 - DNA, 25 bp, Canis familiaris
gtgcatgtccctgtagatgtgctga

SEQ ID NO: 143652 - DNA, 25 bp, Canis familiaris
gtgagcacccatgggaagtcatgcc

SEQ ID NO: 143653 - DNA, 25 bp, Canis familiaris
gtgagaccgcgggcaggtacatcac

SEQ ID NO: 143654 - DNA, 25 bp, Canis familiaris
gtgagactccaccagggaacaacgc

SEQ ID NO: 143655 - DNA, 25 bp, Canis familiaris
gtgcaaatgtggaggggacaacgtc

SEQ ID NO: 143656 - DNA, 25 bp, Canis familiaris
gtgcaaacagtgatagggagctacc

SEQ ID NO: 143657 - DNA, 25 bp, Canis familiaris
gtgcacaacgtaagagtcgcctagc

SEQ ID NO: 143658 - DNA, 25 bp, Canis familiaris
gtgacaatgctttaagggcctatgt

SEQ ID NO: 143659 - DNA, 25 bp, Canis familiaris
gtgcatggacttaaaggactctcat

SEQ ID NO: 143660 - DNA, 25 bp, Canis familiaris
gtgcagggcacaaaactgcctgact

SEQ ID NO: 143661 - DNA, 25 bp, Canis familiaris
gtgcaggagaaggatgatgatggct

SEQ ID NO: 143662 - DNA, 25 bp, Canis familiaris
gtgcaagattactatagagtgctga

SEQ ID NO: 143663 - DNA, 25 bp, Canis familiaris
gtgaagatggaggagcaggccgacc

SEQ ID NO: 143664 - DNA, 25 bp, Canis familiaris
gtgaagatagaggaggtgccattta

SEQ ID NO: 143665 - DNA, 25 bp, Canis familiaris
gtgcaatgtatatgtggacttttag

SEQ ID NO: 143666 - DNA, 25 bp, Canis familiaris
gtgcaaggtcattagggcattttct

SEQ ID NO: 143667 - DNA, 25 bp, Canis familiaris
gtgataaggctattgggcaggtttg

SEQ ID NO: 143668 - DNA, 25 bp, Canis familiaris
gtgacacggtatttgacggtacggg

SEQ ID NO: 143669 - DNA, 25 bp, Canis familiaris
gtgaccgtgtatctcggagaagcgg

SEQ ID NO: 143670 - DNA, 25 bp, Canis familiaris
gtgactggttactacctgaaccgtg

SEQ ID NO: 143671 - DNA, 25 bp, Canis familiaris
gtgaatggtttctatccaggccaca

SEQ ID NO: 143672 - DNA, 25 bp, Canis familiaris
gtgaaatcatcaatcgatccggcct

SEQ ID NO: 143673 - DNA, 25 bp, Canis familiaris
gtgagcactgtcatcgatctcgaat

SEQ ID NO: 143674 - DNA, 25 bp, Canis familiaris
gtgcagcatctgttgtactatcgtt

SEQ ID NO: 143675 - DNA, 25 bp, Canis familiaris
gtgcagctcatgtgtcattgtcaga

SEQ ID NO: 143676 - DNA, 25 bp, Canis familiaris
gtgcactcagtgcagttgctgccac

SEQ ID NO: 143677 - DNA, 25 bp, Canis familiaris
gtgacttggatgtcttggccagcaa

SEQ ID NO: 143678 - DNA, 25 bp, Canis familiaris
gtgagcttgaatgcatagtgtacca

SEQ ID NO: 143679 - DNA, 25 bp, Canis familiaris
gtgcatcttggagtctgaggttccg

SEQ ID NO: 143680 - DNA, 25 bp, Canis familiaris
gtgactgcgcggtcgaggtgaccgg

SEQ ID NO: 143681 - DNA, 25 bp, Canis familiaris
gtgcagctcctgaaaggcgagacac

SEQ ID NO: 143682 - DNA, 25 bp, Canis familiaris
gtgcagccagggacaggagagccag

SEQ ID NO: 143683 - DNA, 25 bp, Canis familiaris
gtgagccaaggaactcactgcctgc

SEQ ID NO: 143684 - DNA, 25 bp, Canis familiaris
gtgaccaatttagacatcctcgttc

SEQ ID NO: 143685 - DNA, 25 bp, Canis familiaris
gtgaccaattaagacacatcttgta

SEQ ID NO: 143686 - DNA, 25 bp, Canis familiaris
gtgagtacatttccaacaccttcca

SEQ ID NO: 143687 - DNA, 25 bp, Canis familiaris
gtgacatactttcgaagatcctctg

SEQ ID NO: 143688 - DNA, 25 bp, Canis familiaris
gtgaatacctgtgacaatcctctga

SEQ ID NO: 143689 - DNA, 25 bp, Canis familiaris
gtgaaaccatgttgtccaaccaata

SEQ ID NO: 143690 - DNA, 25 bp, Canis familiaris
gtgaaacgacttttacactccacac

SEQ ID NO: 143691 - DNA, 25 bp, Canis familiaris
gtgtacaagtcgatccacacctacc

SEQ ID NO: 143692 - DNA, 25 bp, Canis familiaris
gtgaaagaatccatcgactcctaca

SEQ ID NO: 143693 - DNA, 25 bp, Canis familiaris
gtgaaagatgtgaatttcccttaaa

SEQ ID NO: 143694 - DNA, 25 bp, Canis familiaris
gtgaaggagtcttttcttcctgcac

SEQ ID NO: 143695 - DNA, 25 bp, Canis familiaris
gtgaaggagttcctcatctccagta

SEQ ID NO: 143696 - DNA, 25 bp, Canis familiaris
gtgacagaagctagcccaatgcaaa

SEQ ID NO: 143697 - DNA, 25 bp, Canis familiaris
gtgacaacaagtgcgcaggccacac

SEQ ID NO: 143698 - DNA, 25 bp, Canis familiaris
gtgactagtcctgccaggtaccagc

SEQ ID NO: 143699 - DNA, 25 bp, Canis familiaris
gtgagatttgacgccaagctagcca

SEQ ID NO: 143700 - DNA, 25 bp, Canis familiaris
gtgacttgtacgagacactgacgat

SEQ ID NO: 143701 - DNA, 25 bp, Canis familiaris
gtgagcctgggagacacttgacgag

SEQ ID NO: 143702 - DNA, 25 bp, Canis familiaris
gtgagcctgaagacaacctcgacga

SEQ ID NO: 143703 - DNA, 25 bp, Canis familiaris
gtggcctgaaactggcctacggggt

SEQ ID NO: 143704 - DNA, 25 bp, Canis familiaris
gtgacttggaacgggagtggggtgc

SEQ ID NO: 143705 - DNA, 25 bp, Canis familiaris
gtgagcttaagaagagaagtgcgga

SEQ ID NO: 143706 - DNA, 25 bp, Canis familiaris
gtgaaggcacagaaggactgctggg

SEQ ID NO: 143707 - DNA, 25 bp, Canis familiaris
gtgaaggcacaggggtcctggcagg

SEQ ID NO: 143708 - DNA, 25 bp, Canis familiaris
gtgaaggcacttggtgtcgctacaa

SEQ ID NO: 143709 - DNA, 25 bp, Canis familiaris
gtgaaggctcgaggctcagcctgac

SEQ ID NO: 143710 - DNA, 25 bp, Canis familiaris
gtgataggccaagctttggacccct

SEQ ID NO: 143711 - DNA, 25 bp, Canis familiaris
gtgattgaaaccctttaacaactct

SEQ ID NO: 143712 - DNA, 25 bp, Canis familiaris
gtgttgaaaccttattgtacagtca

SEQ ID NO: 143713 - DNA, 25 bp, Canis familiaris
gtgttgaaggtcccttcccagacaa

SEQ ID NO: 143714 - DNA, 25 bp, Canis familiaris
gtgaaaatggtgccttatcccacga

SEQ ID NO: 143715 - DNA, 25 bp, Canis familiaris
gtgactttgggacttatcttagaga

SEQ ID NO: 143716 - DNA, 25 bp, Canis familiaris
gtgcatgcttttacgttttccagaa

SEQ ID NO: 143717 - DNA, 25 bp, Canis familiaris
gtgcatgttaaatttctttcaacta

SEQ ID NO: 143718 - DNA, 25 bp, Canis familiaris
gtgcatttccttttatatttacttt

SEQ ID NO: 143719 - DNA, 25 bp, Canis familiaris
gtgcaattctcgaaagcttttacaa

SEQ ID NO: 143720 - DNA, 25 bp, Canis familiaris
gtgaatactgctacagcaatttcta

SEQ ID NO: 143721 - DNA, 25 bp, Canis familiaris
gtgacatgttgctagcataattaca

SEQ ID NO: 143722 - DNA, 25 bp, Canis familiaris
gtgcatatgttccacggcactgcac

SEQ ID NO: 143723 - DNA, 25 bp, Canis familiaris
gtgcacgtgagccacaagcaggacc

SEQ ID NO: 143724 - DNA, 25 bp, Canis familiaris
gtgcacggagggcagagcaactcag

SEQ ID NO: 143725 - DNA, 25 bp, Canis familiaris
gtgcagctggagcaggataccctca

SEQ ID NO: 143726 - DNA, 25 bp, Canis familiaris
gtgcagggactgactgctatcctta

SEQ ID NO: 143727 - DNA, 25 bp, Canis familiaris
gtgcagtatactcgttactcttgat

SEQ ID NO: 143728 - DNA, 25 bp, Canis familiaris
gtgcagtgtgacctttcattttcta

SEQ ID NO: 143729 - DNA, 25 bp, Canis familiaris
gtgcagttacctttcatttttaaag

SEQ ID NO: 143730 - DNA, 25 bp, Canis familiaris
gtgagattaccattcctgtttctaa

SEQ ID NO: 143731 - DNA, 25 bp, Canis familiaris
gtgagaaaaagttgcgagcttaaag

SEQ ID NO: 143732 - DNA, 25 bp, Canis familiaris
gtgattaatattgaggacttgacag

SEQ ID NO: 143733 - DNA, 25 bp, Canis familiaris
gtgcatgtgatgtttccagtgaata

SEQ ID NO: 143734 - DNA, 25 bp, Canis familiaris
gtgcagtggtttagcactgcctgca

SEQ ID NO: 143735 - DNA, 25 bp, Canis familiaris
gtgagtgtttgtacacgctaaccca

SEQ ID NO: 143736 - DNA, 25 bp, Canis familiaris
gtgaagtttgtgccttctatagcac

SEQ ID NO: 143737 - DNA, 25 bp, Canis familiaris
gtgaattaatgcccttcattatagc

SEQ ID NO: 143738 - DNA, 25 bp, Canis familiaris
gtgaaatacatcctcttctagcaac

SEQ ID NO: 143739 - DNA, 25 bp, Canis familiaris
gtgcaacaaggccatcacatctgga

SEQ ID NO: 143740 - DNA, 25 bp, Canis familiaris
gtgcaacgaggaacacatccggccc

SEQ ID NO: 143741 - DNA, 25 bp, Canis familiaris
gtgaaatgagtcaacactgccggcc

SEQ ID NO: 143742 - DNA, 25 bp, Canis familiaris
gtgagtcagacccagacatccaaac

SEQ ID NO: 143743 - DNA, 25 bp, Canis familiaris
gtgcagacacacaggagcccaaaat

SEQ ID NO: 143744 - DNA, 25 bp, Canis familiaris
gtgcagcagcacaaaggcagccaca

SEQ ID NO: 143745 - DNA, 25 bp, Canis familiaris
gtgcacatacgactacacacacaca

SEQ ID NO: 143746 - DNA, 25 bp, Canis familiaris
gtgcacccagcatagagtctgcttg

SEQ ID NO: 143747 - DNA, 25 bp, Canis familiaris
gtgcagtccatggacgtggctgctt

SEQ ID NO: 143748 - DNA, 25 bp, Canis familiaris
gtgcagtccatggacgtggctgctt

SEQ ID NO: 143749 - DNA, 25 bp, Canis familiaris
gtgcagtccatggacgtggctgctt

SEQ ID NO: 143750 - DNA, 25 bp, Canis familiaris
gtgagcatgctaaccggtgcttgtg

SEQ ID NO: 143751 - DNA, 25 bp, Canis familiaris
gtgcacgcacacgcgagtgtgtgtg

SEQ ID NO: 143752 - DNA, 25 bp, Canis familiaris
gtgcacccagttcactgtgttggat

SEQ ID NO: 143753 - DNA, 25 bp, Canis familiaris
gtgcacaccgttgtgctatggagag

SEQ ID NO: 143754 - DNA, 25 bp, Canis familiaris
gtgaaggctgattgctagttggata

SEQ ID NO: 143755 - DNA, 25 bp, Canis familiaris
gtgcaggtgctattgttgctcttat

SEQ ID NO: 143756 - DNA, 25 bp, Canis familiaris
gtgcaacatgtttgtgtgcgtgtgt

SEQ ID NO: 143757 - DNA, 25 bp, Canis familiaris
gtgaagtatatgtgtgatgtctgtg

SEQ ID NO: 143758 - DNA, 25 bp, Canis familiaris
gtgaagtcttgaactgtgttgtgtt

SEQ ID NO: 143759 - DNA, 25 bp, Canis familiaris
gtgaattgtctttttttgaggataa

SEQ ID NO: 143760 - DNA, 25 bp, Canis familiaris
gtgtcttggttatctcatctgaaaa

SEQ ID NO: 143761 - DNA, 25 bp, Canis familiaris
ttccgggttttcatcgatgtaacct

SEQ ID NO: 143762 - DNA, 25 bp, Canis familiaris
tttacggtggttattgtggaacacg

SEQ ID NO: 143763 - DNA, 25 bp, Canis familiaris
tctaacgtgggttatgtgggaaaca

SEQ ID NO: 143764 - DNA, 25 bp, Canis familiaris
gtgaacttgggtcacggtgaacacc

SEQ ID NO: 143765 - DNA, 25 bp, Canis familiaris
gtgaacattgtaccatccgggagaa

SEQ ID NO: 143766 - DNA, 25 bp, Canis familiaris
gtgaaattcttggaccggcgcaaga

SEQ ID NO: 143767 - DNA, 25 bp, Canis familiaris
gtgaaattcttggaccggcgcaaga

SEQ ID NO: 143768 - DNA, 25 bp, Canis familiaris
gtgaaattcttggaccggcgcaaga

SEQ ID NO: 143769 - DNA, 25 bp, Canis familiaris
gtgaaaccttgggacgatgagacag

SEQ ID NO: 143770 - DNA, 25 bp, Canis familiaris
gtgaaaccttgggacgatgagacag

SEQ ID NO: 143771 - DNA, 25 bp, Canis familiaris
gtgaaaccttgggacgatgagacag

SEQ ID NO: 143772 - DNA, 25 bp, Canis familiaris
gtgaacactttaaatgcaggcagac

SEQ ID NO: 143773 - DNA, 25 bp, Canis familiaris
gtgaatcccattaaatcctgcgagg

SEQ ID NO: 143774 - DNA, 25 bp, Canis familiaris
gtgaccgccagtaatcacctggaac

SEQ ID NO: 143775 - DNA, 25 bp, Canis familiaris
gtgactagaaggaaccagggacagc

SEQ ID NO: 143776 - DNA, 25 bp, Canis familiaris
gtgactcagacacaccacagtgaac

SEQ ID NO: 143777 - DNA, 25 bp, Canis familiaris
gtgcacagcagtgtacctatgtata

SEQ ID NO: 143778 - DNA, 25 bp, Canis familiaris
gtgcacagcagtaaacatctctttt

SEQ ID NO: 143779 - DNA, 25 bp, Canis familiaris
gtgcagtcacataaacatgctttta

SEQ ID NO: 143780 - DNA, 25 bp, Canis familiaris
gtgcagtacattaacattcatttta

SEQ ID NO: 143781 - DNA, 25 bp, Canis familiaris
gtgcagatccttaaatatatgtatt

SEQ ID NO: 143782 - DNA, 25 bp, Canis familiaris
gtgcagatcacctattatttgtttg

SEQ ID NO: 143783 - DNA, 25 bp, Canis familiaris
gtgcacatgtgttttcatttttctt

SEQ ID NO: 143784 - DNA, 25 bp, Canis familiaris
gtgacatgtttacctctgtgttttt

SEQ ID NO: 143785 - DNA, 25 bp, Canis familiaris
gtgacgttgtcacgaccttgaattt

SEQ ID NO: 143786 - DNA, 25 bp, Canis familiaris
gtgaggtagtgacgaagtataacaa

SEQ ID NO: 143787 - DNA, 25 bp, Canis familiaris
gtgcagaggctggaggagcagttaa

SEQ ID NO: 143788 - DNA, 25 bp, Canis familiaris
gtgcagatggcccaggcaggtcaaa

SEQ ID NO: 143789 - DNA, 25 bp, Canis familiaris
gtgagatggcttcgccggtaagagc

SEQ ID NO: 143790 - DNA, 25 bp, Canis familiaris
gtgagggttgggggaagggcaggct

SEQ ID NO: 143791 - DNA, 25 bp, Canis familiaris
gtgagggctgcgcagggaatgaagc

SEQ ID NO: 143792 - DNA, 25 bp, Canis familiaris
gtgagcggcatgggatggtgcctgg

SEQ ID NO: 143793 - DNA, 25 bp, Canis familiaris
gtgagtcgaaggaaggcccacgttc

SEQ ID NO: 143794 - DNA, 25 bp, Canis familiaris
gtgagggaggaaagtccccgcttgc

SEQ ID NO: 143795 - DNA, 25 bp, Canis familiaris
gtgagggggaggctgcctccctgag

SEQ ID NO: 143796 - DNA, 25 bp, Canis familiaris
gtgagaagaggctggtttgccctgc

SEQ ID NO: 143797 - DNA, 25 bp, Canis familiaris
gtgaacattggctggtctactgact

SEQ ID NO: 143798 - DNA, 25 bp, Canis familiaris
gtgaacattgggagcctcatctgca

SEQ ID NO: 143799 - DNA, 25 bp, Canis familiaris
gtgtacttggaaacgaactcatccc

SEQ ID NO: 143800 - DNA, 25 bp, Canis familiaris
gtgttcctggccaaaggcaacatcc

SEQ ID NO: 143801 - DNA, 25 bp, Canis familiaris
gtgttggggctcaacggggcagccc

SEQ ID NO: 143802 - DNA, 25 bp, Canis familiaris
tggtcggtcctcaagagccggaagc

SEQ ID NO: 143803 - DNA, 25 bp, Canis familiaris
gtgagggtccagactggacggaagc

SEQ ID NO: 143804 - DNA, 25 bp, Canis familiaris
gtgaatgtgtcaagtctggagttaa

SEQ ID NO: 143805 - DNA, 25 bp, Canis familiaris
gtgaattatcacttctggcagatga

SEQ ID NO: 143806 - DNA, 25 bp, Canis familiaris
gtgaatagatagccctgctctgtga

SEQ ID NO: 143807 - DNA, 25 bp, Canis familiaris
gtgcagatctggcagctgtcttgga

SEQ ID NO: 143808 - DNA, 25 bp, Canis familiaris
gtgcacttgagcaacatgttttata

SEQ ID NO: 143809 - DNA, 25 bp, Canis familiaris
gtgcacacatacactttcaatgcta

SEQ ID NO: 143810 - DNA, 25 bp, Canis familiaris
gtgaacaacttctctctatatattt

SEQ ID NO: 143811 - DNA, 25 bp, Canis familiaris
gtgaaagccttcctttggatttctg

SEQ ID NO: 143812 - DNA, 25 bp, Canis familiaris
gtgaaatcctatctaaagaattggg

SEQ ID NO: 143813 - DNA, 25 bp, Canis familiaris
gtgaatttcttcttaactgacaatg

SEQ ID NO: 143814 - DNA, 25 bp, Canis familiaris
gtgaatcttcttttagtgactaagc

SEQ ID NO: 143815 - DNA, 25 bp, Canis familiaris
gtgcagtttctgtatatggtcctta

SEQ ID NO: 143816 - DNA, 25 bp, Canis familiaris
gggcttttaagtgtgcctaaatgaa

SEQ ID NO: 143817 - DNA, 25 bp, Canis familiaris
gggctggttaaagttttcaacacag

SEQ ID NO: 143818 - DNA, 25 bp, Canis familiaris
gggcgacttaaagttgtcacttgac

SEQ ID NO: 143819 - DNA, 25 bp, Canis familiaris
gtgaggacaatgtggcttgctcctt

SEQ ID NO: 143820 - DNA, 25 bp, Canis familiaris
gtgacgtcaatgtgagttttgtttg

SEQ ID NO: 143821 - DNA, 25 bp, Canis familiaris
gtgactggagatcctgggttttctg

SEQ ID NO: 143822 - DNA, 25 bp, Canis familiaris
gtgatctcgccaggtgggtttgttc

SEQ ID NO: 143823 - DNA, 25 bp, Canis familiaris
gtgacatcggcagtgtttggttaaa

SEQ ID NO: 143824 - DNA, 25 bp, Canis familiaris
gtgacatagggcctttcccaaatga

SEQ ID NO: 143825 - DNA, 25 bp, Canis familiaris
gtgaacaatggcttctcccaaatat

SEQ ID NO: 143826 - DNA, 25 bp, Canis familiaris
gtgaacaattgcttctccaaaatat

SEQ ID NO: 143827 - DNA, 25 bp, Canis familiaris
gtgaccctacaactacacaatccat

SEQ ID NO: 143828 - DNA, 25 bp, Canis familiaris
gtgacccgtagacgagccgatagct

SEQ ID NO: 143829 - DNA, 25 bp, Canis familiaris
gtgactgctctgtgactgagccgtg

SEQ ID NO: 143830 - DNA, 25 bp, Canis familiaris
gtgacagatactgcacgagcatcgt

SEQ ID NO: 143831 - DNA, 25 bp, Canis familiaris
gtgacaaagatggacagcccgtgac

SEQ ID NO: 143832 - DNA, 25 bp, Canis familiaris
gtgacactataggaaccaggtgtgt

SEQ ID NO: 143833 - DNA, 25 bp, Canis familiaris
gtgagactttctgagccggagactc

SEQ ID NO: 143834 - DNA, 25 bp, Canis familiaris
gtgaccttactatgggaacctgcct

SEQ ID NO: 143835 - DNA, 25 bp, Canis familiaris
gtgacctctacttcctggagaacta

SEQ ID NO: 143836 - DNA, 25 bp, Canis familiaris
gtgactccccagtttcaggaatcta

SEQ ID NO: 143837 - DNA, 25 bp, Canis familiaris
gtgaccgagacagtttccgatgact

SEQ ID NO: 143838 - DNA, 25 bp, Canis familiaris
gtgacccagaagggccttgagtcca

SEQ ID NO: 143839 - DNA, 25 bp, Canis familiaris
gtgacgtctacaggagttcgagtcc

SEQ ID NO: 143840 - DNA, 25 bp, Canis familiaris
gtgaactccaatgggaccagcgacc

SEQ ID NO: 143841 - DNA, 25 bp, Canis familiaris
gtgaacagctacgggagccagtact

SEQ ID NO: 143842 - DNA, 25 bp, Canis familiaris
gtgaaccatcactcgatggcttact

SEQ ID NO: 143843 - DNA, 25 bp, Canis familiaris
gtgaccgcaacctcatggtgtacat

SEQ ID NO: 143844 - DNA, 25 bp, Canis familiaris
gtgcaccgaagccggcatgtatgcc

SEQ ID NO: 143845 - DNA, 25 bp, Canis familiaris
gtgcaactgaggacccttcatgtca

SEQ ID NO: 143846 - DNA, 25 bp, Canis familiaris
gtgcacacagagcgcttcttatgta

SEQ ID NO: 143847 - DNA, 25 bp, Canis familiaris
gtgaccaggctggatgactcaagta

SEQ ID NO: 143848 - DNA, 25 bp, Canis familiaris
gtgagcccgagaagaccaaggaagt

SEQ ID NO: 143849 - DNA, 25 bp, Canis familiaris
gtgtcgatcaaagaccaagccaagc

SEQ ID NO: 143850 - DNA, 25 bp, Canis familiaris
gtgactgaggaagagccacaccctc

SEQ ID NO: 143851 - DNA, 25 bp, Canis familiaris
gtgaatgtaaaatgccaccctcgcc

SEQ ID NO: 143852 - DNA, 25 bp, Canis familiaris
gtgaattgaaacatggccctctggc

SEQ ID NO: 143853 - DNA, 25 bp, Canis familiaris
gtgactctgatatcattgactccta

SEQ ID NO: 143854 - DNA, 25 bp, Canis familiaris
gtgcacactgaaccaattgctccta

SEQ ID NO: 143855 - DNA, 25 bp, Canis familiaris
gtgacactgaaccagtttctctgcc

SEQ ID NO: 143856 - DNA, 25 bp, Canis familiaris
gtgcacactgtacagttcctcaacc

SEQ ID NO: 143857 - DNA, 25 bp, Canis familiaris
gtgcaacatgtaccaggatggacat

SEQ ID NO: 143858 - DNA, 25 bp, Canis familiaris
gtgagaatgtgaagctggataatat

SEQ ID NO: 143859 - DNA, 25 bp, Canis familiaris
gtgaggtgtggtggagaaacttgat

SEQ ID NO: 143860 - DNA, 25 bp, Canis familiaris
gtgaggccggctctgaaatctgtac

SEQ ID NO: 143861 - DNA, 25 bp, Canis familiaris
gtgacactgcggacctgaaatggga

SEQ ID NO: 143862 - DNA, 25 bp, Canis familiaris
gtgacggggtcccaaattggcatcg

SEQ ID NO: 143863 - DNA, 25 bp, Canis familiaris
gtgactgggggcatcaaagctgttg

SEQ ID NO: 143864 - DNA, 25 bp, Canis familiaris
gtgattgggggcggggagtgtagtt

SEQ ID NO: 143865 - DNA, 25 bp, Canis familiaris
gtgagccgggggaggcggctgatgt

SEQ ID NO: 143866 - DNA, 25 bp, Canis familiaris
gtgagctggagacggaagtggagtt

SEQ ID NO: 143867 - DNA, 25 bp, Canis familiaris
gtgacgggcatgacggagggcactt

SEQ ID NO: 143868 - DNA, 25 bp, Canis familiaris
gtgagggtcaatttaggtgccttag

SEQ ID NO: 143869 - DNA, 25 bp, Canis familiaris
gtgaggtctcagcagatagggactt

SEQ ID NO: 143870 - DNA, 25 bp, Canis familiaris
gtgaggtctgtccattaagggcaaa

SEQ ID NO: 143871 - DNA, 25 bp, Canis familiaris
gtgaagctctggccttgagatgctt

SEQ ID NO: 143872 - DNA, 25 bp, Canis familiaris
gtgcacttctgttttgcagtgcttc

SEQ ID NO: 143873 - DNA, 25 bp, Canis familiaris
gtgacttccgaaggatgctgccatc

SEQ ID NO: 143874 - DNA, 25 bp, Canis familiaris
gtgaattaccagagcagcacctcca

SEQ ID NO: 143875 - DNA, 25 bp, Canis familiaris
gtgaatacccagaaggatcccagta

SEQ ID NO: 143876 - DNA, 25 bp, Canis familiaris
gtgacaactccgtgagtgtccgtga

SEQ ID NO: 143877 - DNA, 25 bp, Canis familiaris
gtgcaaacttcgtgcagttaagtca

SEQ ID NO: 143878 - DNA, 25 bp, Canis familiaris
gtgaacttgtcagccaattaagtca

SEQ ID NO: 143879 - DNA, 25 bp, Canis familiaris
gtgcacgcttgttgcccaaacaagg

SEQ ID NO: 143880 - DNA, 25 bp, Canis familiaris
gtgcacgtcttgtcccaataaatca

SEQ ID NO: 143881 - DNA, 25 bp, Canis familiaris
gtgacgtcctactcatacgtgagca

SEQ ID NO: 143882 - DNA, 25 bp, Canis familiaris
gtgagcggcctgactacaagggaga

SEQ ID NO: 143883 - DNA, 25 bp, Canis familiaris
gtgagctggtctatcacaagccaac

SEQ ID NO: 143884 - DNA, 25 bp, Canis familiaris
gtgactggacagactcgaagcccac

SEQ ID NO: 143885 - DNA, 25 bp, Canis familiaris
gtgagcttcagggtaaagcgccccg

SEQ ID NO: 143886 - DNA, 25 bp, Canis familiaris
gtgcacttagctctaagcccaagcc

SEQ ID NO: 143887 - DNA, 25 bp, Canis familiaris
gtgaatgccagcagtatacccgagc

SEQ ID NO: 143888 - DNA, 25 bp, Canis familiaris
gtgaatgaacttaataccactgagt

SEQ ID NO: 143889 - DNA, 25 bp, Canis familiaris
gtgcaatgtattaataacgtctttt

SEQ ID NO: 143890 - DNA, 25 bp, Canis familiaris
gtgacgcgtccttaacgattttgtg

SEQ ID NO: 143891 - DNA, 25 bp, Canis familiaris
gtgacacccttgtagcaggcattgt

SEQ ID NO: 143892 - DNA, 25 bp, Canis familiaris
gtgaaccgcattggacaggagtctt

SEQ ID NO: 143893 - DNA, 25 bp, Canis familiaris
gtgagacaacttagaaggaatgctt

SEQ ID NO: 143894 - DNA, 25 bp, Canis familiaris
gtgatgcaacactcgatggtacagt

SEQ ID NO: 143895 - DNA, 25 bp, Canis familiaris
gtgaacagcacatcgttctgacagt

SEQ ID NO: 143896 - DNA, 25 bp, Canis familiaris
gtgagatccacttcagatatctgac

SEQ ID NO: 143897 - DNA, 25 bp, Canis familiaris
gtgagtaacatctactattccattc

SEQ ID NO: 143898 - DNA, 25 bp, Canis familiaris
gtgagctgaacattgacgtactccg

SEQ ID NO: 143899 - DNA, 25 bp, Canis familiaris
gtgaatgaacaactcagtcctcctt

SEQ ID NO: 143900 - DNA, 25 bp, Canis familiaris
gtgaaaatgaatcctgtcctccttc

SEQ ID NO: 143901 - DNA, 25 bp, Canis familiaris
gtgaagcactccacttacttcttca

SEQ ID NO: 143902 - DNA, 25 bp, Canis familiaris
gtgaacattctcacttgaacgttga

SEQ ID NO: 143903 - DNA, 25 bp, Canis familiaris
gtgaacattctcattgggtaatcta

SEQ ID NO: 143904 - DNA, 25 bp, Canis familiaris
gtgaccacttacctgggtggtcttc

SEQ ID NO: 143905 - DNA, 25 bp, Canis familiaris
gtgaccacagtcaccaggtgcagtt

SEQ ID NO: 143906 - DNA, 25 bp, Canis familiaris
gtgaacatctgtttctcattggcag

SEQ ID NO: 143907 - DNA, 25 bp, Canis familiaris
gtgaagcatgctttgctgctatgaa

SEQ ID NO: 143908 - DNA, 25 bp, Canis familiaris
gtgcacagtgtgagatcatcgcaga

SEQ ID NO: 143909 - DNA, 25 bp, Canis familiaris
gtgcacagagctgggtatccgcaca

SEQ ID NO: 143910 - DNA, 25 bp, Canis familiaris
gtgacaaccagggtgcccaagtgcc

SEQ ID NO: 143911 - DNA, 25 bp, Canis familiaris
gtgactagcctaggggccaagctgg

SEQ ID NO: 143912 - DNA, 25 bp, Canis familiaris
gtgacccaacaagggcacaagaggg

SEQ ID NO: 143913 - DNA, 25 bp, Canis familiaris
gtgacactaagattgtggccacagg

SEQ ID NO: 143914 - DNA, 25 bp, Canis familiaris
gtgaccacggacttgtaccaggttc

SEQ ID NO: 143915 - DNA, 25 bp, Canis familiaris
gtgacgcagcggaaagtggccggct

SEQ ID NO: 143916 - DNA, 25 bp, Canis familiaris
gtgagccaggagggactgtggccct

SEQ ID NO: 143917 - DNA, 25 bp, Canis familiaris
gtgacacaggacacagtgggctccc

SEQ ID NO: 143918 - DNA, 25 bp, Canis familiaris
gtgcaaagacacactgggtggcaag

SEQ ID NO: 143919 - DNA, 25 bp, Canis familiaris
gtgaaattcacaactggtctccaag

SEQ ID NO: 143920 - DNA, 25 bp, Canis familiaris
gtgacaattaagcccagacctatag

SEQ ID NO: 143921 - DNA, 25 bp, Canis familiaris
gtgacaactaagcattatccttcag

SEQ ID NO: 143922 - DNA, 25 bp, Canis familiaris
gtgaaagcaaagttttcctcggaag

SEQ ID NO: 143923 - DNA, 25 bp, Canis familiaris
gtgtagcaggaaagccttcccagga

SEQ ID NO: 143924 - DNA, 25 bp, Canis familiaris
gtgacagcaagatcgcgttccaagg

SEQ ID NO: 143925 - DNA, 25 bp, Canis familiaris
gtgaccaagacagcagtgtcccaca

SEQ ID NO: 143926 - DNA, 25 bp, Canis familiaris
gtgattctagccacagtgattccac

SEQ ID NO: 143927 - DNA, 25 bp, Canis familiaris
gtgattctagccacagtgattccac

SEQ ID NO: 143928 - DNA, 25 bp, Canis familiaris
gtgattctagccacagtgattccac

SEQ ID NO: 143929 - DNA, 25 bp, Canis familiaris
gtgacattgaccacaggagctctca

SEQ ID NO: 143930 - DNA, 25 bp, Canis familiaris
gtgactggacgtgattgacttcggt

SEQ ID NO: 143931 - DNA, 25 bp, Canis familiaris
gtgactggaggtgccaacctgggaa

SEQ ID NO: 143932 - DNA, 25 bp, Canis familiaris
gtgactggagggtacacagggagga

SEQ ID NO: 143933 - DNA, 25 bp, Canis familiaris
gtgtctgaaggtccatctcaacgag

SEQ ID NO: 143934 - DNA, 25 bp, Canis familiaris
gtgagcgagcagctggatgtcaggc

SEQ ID NO: 143935 - DNA, 25 bp, Canis familiaris
gtgaggatgcacatctcatcatcag

SEQ ID NO: 143936 - DNA, 25 bp, Canis familiaris
gtgagagcatacatgtgccttgcat

SEQ ID NO: 143937 - DNA, 25 bp, Canis familiaris
gtgaactgacacaagcttcagcagc

SEQ ID NO: 143938 - DNA, 25 bp, Canis familiaris
gtgaacatccaggagtggctgcagc

SEQ ID NO: 143939 - DNA, 25 bp, Canis familiaris
gtgaacatcacagttatcctgagtt

SEQ ID NO: 143940 - DNA, 25 bp, Canis familiaris
gtgaatgtcactctgtccgaggaac

SEQ ID NO: 143941 - DNA, 25 bp, Canis familiaris
gtgaagtgaagccctccgagggagc

SEQ ID NO: 143942 - DNA, 25 bp, Canis familiaris
gtgaatgttgagcctttctggccgg

SEQ ID NO: 143943 - DNA, 25 bp, Canis familiaris
gtgacagcattggagcttcttggac

SEQ ID NO: 143944 - DNA, 25 bp, Canis familiaris
gtgaagcatatctacttctgagggc

SEQ ID NO: 143945 - DNA, 25 bp, Canis familiaris
gtgaactcagcatctttaggggcca

SEQ ID NO: 143946 - DNA, 25 bp, Canis familiaris
gtgaaccagattcctttagggcaca

SEQ ID NO: 143947 - DNA, 25 bp, Canis familiaris
gtgagaccgacgctaatgtggccaa

SEQ ID NO: 143948 - DNA, 25 bp, Canis familiaris
gtggacccactagataggagaaacc

SEQ ID NO: 143949 - DNA, 25 bp, Canis familiaris
gtgaggccccgagaagaatacatat

SEQ ID NO: 143950 - DNA, 25 bp, Canis familiaris
gggagcccttgggaactataccttg

SEQ ID NO: 143951 - DNA, 25 bp, Canis familiaris
gggcacccggtatcatttaccggag

SEQ ID NO: 143952 - DNA, 25 bp, Canis familiaris
gtggccctcagggaaattcaaccga

SEQ ID NO: 143953 - DNA, 25 bp, Canis familiaris
gtgaccctcacagattttcgagcct

SEQ ID NO: 143954 - DNA, 25 bp, Canis familiaris
gtgacctgtacagttttgaaacacc

SEQ ID NO: 143955 - DNA, 25 bp, Canis familiaris
gtgaacttacactgttgatagaaac

SEQ ID NO: 143956 - DNA, 25 bp, Canis familiaris
gtgacactatttgagttgggaggac

SEQ ID NO: 143957 - DNA, 25 bp, Canis familiaris
gtgaacttgcttgaaggccgaggag

SEQ ID NO: 143958 - DNA, 25 bp, Canis familiaris
gtgaattttgcaaacaggggaggaa

SEQ ID NO: 143959 - DNA, 25 bp, Canis familiaris
gtgcaatatttcttactgtgccgag

SEQ ID NO: 143960 - DNA, 25 bp, Canis familiaris
gtgacagatttctatccaggccaga

SEQ ID NO: 143961 - DNA, 25 bp, Canis familiaris
gtgacagtggatcatcataagccaa

SEQ ID NO: 143962 - DNA, 25 bp, Canis familiaris
gtgaagttgcatctgctacagccta

SEQ ID NO: 143963 - DNA, 25 bp, Canis familiaris
gtgaagctctggggctccaggttaa

SEQ ID NO: 143964 - DNA, 25 bp, Canis familiaris
gtgagcagttaggctcccaaatcta

SEQ ID NO: 143965 - DNA, 25 bp, Canis familiaris
gtgagcagggtcttccaagtatctt

SEQ ID NO: 143966 - DNA, 25 bp, Canis familiaris
gtgagagaggtgctaccagtctccc

SEQ ID NO: 143967 - DNA, 25 bp, Canis familiaris
gtgagtgtgagtcagatcgaattcc

SEQ ID NO: 143968 - DNA, 25 bp, Canis familiaris
gtgacgatgagtcatcagggttcac

SEQ ID NO: 143969 - DNA, 25 bp, Canis familiaris
gtgaaagaatagtctgggaccagca

SEQ ID NO: 143970 - DNA, 25 bp, Canis familiaris
gtgaagaacaacttcgtgcccacca

SEQ ID NO: 143971 - DNA, 25 bp, Canis familiaris
gtgaagaatcagccgtcttctccac

SEQ ID NO: 143972 - DNA, 25 bp, Canis familiaris
gtgaaggcatcaacctttctgccca

SEQ ID NO: 143973 - DNA, 25 bp, Canis familiaris
gtgaattccataccatgtcctgcac

SEQ ID NO: 143974 - DNA, 25 bp, Canis familiaris
gtgaatgcctataacatgataatga

SEQ ID NO: 143975 - DNA, 25 bp, Canis familiaris
gtgaagccatatcacatgatggtag

SEQ ID NO: 143976 - DNA, 25 bp, Canis familiaris
gtgaagaatatctactctgagggct

SEQ ID NO: 143977 - DNA, 25 bp, Canis familiaris
gtgaagagaacattcctgggccctc

SEQ ID NO: 143978 - DNA, 25 bp, Canis familiaris
gtgaagagccactggctgggaccca

SEQ ID NO: 143979 - DNA, 25 bp, Canis familiaris
gtgacgtggacaagccgaggaccac

SEQ ID NO: 143980 - DNA, 25 bp, Canis familiaris
gtgacgtcagagagcgagggtcccc

SEQ ID NO: 143981 - DNA, 25 bp, Canis familiaris
gtgttggacaccggagtcagtcccc

SEQ ID NO: 143982 - DNA, 25 bp, Canis familiaris
gtgatctcgaacaggactcagtcta

SEQ ID NO: 143983 - DNA, 25 bp, Canis familiaris
gtgaaagacttgctcctcgtcaaac

SEQ ID NO: 143984 - DNA, 25 bp, Canis familiaris
gtgaatgaatgtatgacctcttaaa

SEQ ID NO: 143985 - DNA, 25 bp, Canis familiaris
gtgaaatgcattctattgctttaaa

SEQ ID NO: 143986 - DNA, 25 bp, Canis familiaris
gtgactcacagtctgtcttttgacc

SEQ ID NO: 143987 - DNA, 25 bp, Canis familiaris
gtgacccagttggtgactttgaccc

SEQ ID NO: 143988 - DNA, 25 bp, Canis familiaris
gtgatcccgatgattggctttgaag

SEQ ID NO: 143989 - DNA, 25 bp, Canis familiaris
gtgaccacgagctcttggaattcgt

SEQ ID NO: 143990 - DNA, 25 bp, Canis familiaris
gtgacctaagcttttggaattgcct

SEQ ID NO: 143991 - DNA, 25 bp, Canis familiaris
gtgacctaacatgtgatctattctg

SEQ ID NO: 143992 - DNA, 25 bp, Canis familiaris
gtgaacttaacctttgtcatctgcc

SEQ ID NO: 143993 - DNA, 25 bp, Canis familiaris
gtgatactctatacgccgtgtcacc

SEQ ID NO: 143994 - DNA, 25 bp, Canis familiaris
gtgtcaagcagatctgcctggtcat

SEQ ID NO: 143995 - DNA, 25 bp, Canis familiaris
gtgagattcgaattccgcgtcaaca

SEQ ID NO: 143996 - DNA, 25 bp, Canis familiaris
gtgaatctgggctcacagaatcaaa

SEQ ID NO: 143997 - DNA, 25 bp, Canis familiaris
gtgaacggcaagaaagtgctgcata

SEQ ID NO: 143998 - DNA, 25 bp, Canis familiaris
gtgaaaggaagtggtgtgtgatggt

SEQ ID NO: 143999 - DNA, 25 bp, Canis familiaris
gtgaactggaagatggtcgacgctt

SEQ ID NO: 144000 - DNA, 25 bp, Canis familiaris
gtgagacctcactttgtgccgaggt

SEQ ID NO: 144001 - DNA, 25 bp, Canis familiaris
gtgaatcccatcttggtctggagtc

SEQ ID NO: 144002 - DNA, 25 bp, Canis familiaris
gtgagtcaagctttgcgactgcgat

SEQ ID NO: 144003 - DNA, 25 bp, Canis familiaris
gtgactcatagatttgctggcctgt

SEQ ID NO: 144004 - DNA, 25 bp, Canis familiaris
gtgacatctcactagtcgagtctct

SEQ ID NO: 144005 - DNA, 25 bp, Canis familiaris
gtgagattcatctctgcgattccct

SEQ ID NO: 144006 - DNA, 25 bp, Canis familiaris
gtgaatcctctgaggctttcactgt

SEQ ID NO: 144007 - DNA, 25 bp, Canis familiaris
gtgaacgctgtgatgctgtgtgccc

SEQ ID NO: 144008 - DNA, 25 bp, Canis familiaris
gtgaatagcgagctgtgtgggctca

SEQ ID NO: 144009 - DNA, 25 bp, Canis familiaris
gtgaggcccaggctgctgggctcaa

SEQ ID NO: 144010 - DNA, 25 bp, Canis familiaris
gtgagccccagtcctgtggatcctg

SEQ ID NO: 144011 - DNA, 25 bp, Canis familiaris
gtgagcccaaacaattggtccacca

SEQ ID NO: 144012 - DNA, 25 bp, Canis familiaris
gtgagcccaacaggtaggtgccttc

SEQ ID NO: 144013 - DNA, 25 bp, Canis familiaris
gtgacaccacaccgtagcggaattc

SEQ ID NO: 144014 - DNA, 25 bp, Canis familiaris
gtgacacccgtggtgacagggtcgg

SEQ ID NO: 144015 - DNA, 25 bp, Canis familiaris
ggaccacctgttaccgtggtccgcg

SEQ ID NO: 144016 - DNA, 25 bp, Canis familiaris
ggaccgttggtgaccacggtccttg

SEQ ID NO: 144017 - DNA, 25 bp, Canis familiaris
gtgacctggcgttgtccacaggtcc

SEQ ID NO: 144018 - DNA, 25 bp, Canis familiaris
gtgaccggcaggttcaacgggcagt

SEQ ID NO: 144019 - DNA, 25 bp, Canis familiaris
gtgacacaggggaaacacgtgactt

SEQ ID NO: 144020 - DNA, 25 bp, Canis familiaris
gtgaccgtggcaaagtcaattgact

SEQ ID NO: 144021 - DNA, 25 bp, Canis familiaris
gtgagggctggaggagttcttgcac

SEQ ID NO: 144022 - DNA, 25 bp, Canis familiaris
gtgaccggctggggagacattgcag

SEQ ID NO: 144023 - DNA, 25 bp, Canis familiaris
gtgagcgggctgtgacagagatcga

SEQ ID NO: 144024 - DNA, 25 bp, Canis familiaris
gtgaaggccatcttgtaggctctga

SEQ ID NO: 144025 - DNA, 25 bp, Canis familiaris
gtgaggagacactgttggccatcaa

SEQ ID NO: 144026 - DNA, 25 bp, Canis familiaris
gtgagcagttagtgttaccagaatc

SEQ ID NO: 144027 - DNA, 25 bp, Canis familiaris
gtgaggcttctgggtgcataccagt

SEQ ID NO: 144028 - DNA, 25 bp, Canis familiaris
gtgaaactccagcatgcaagctcag

SEQ ID NO: 144029 - DNA, 25 bp, Canis familiaris
gtgaaaccctgctgcaagcacagcc

SEQ ID NO: 144030 - DNA, 25 bp, Canis familiaris
gtgaaacagttttgcgcatgacagc

SEQ ID NO: 144031 - DNA, 25 bp, Canis familiaris
gtgaaccgtctcttggtgaaggata

SEQ ID NO: 144032 - DNA, 25 bp, Canis familiaris
gtgaacctgctcggggaggggtatt

SEQ ID NO: 144033 - DNA, 25 bp, Canis familiaris
gtgaacgctgctcattcgaggggac

SEQ ID NO: 144034 - DNA, 25 bp, Canis familiaris
gtgaacctgcatgatattatctgag

SEQ ID NO: 144035 - DNA, 25 bp, Canis familiaris
gtgaagccatctggacattcgcagg

SEQ ID NO: 144036 - DNA, 25 bp, Canis familiaris
gtgactcaatatgggcatcaccaag

SEQ ID NO: 144037 - DNA, 25 bp, Canis familiaris
gtgacatcttatcctgcaaacaact

SEQ ID NO: 144038 - DNA, 25 bp, Canis familiaris
gtgacagctgtgcccagaaaaatta

SEQ ID NO: 144039 - DNA, 25 bp, Canis familiaris
gtgacctgcacaccaagatacagat

SEQ ID NO: 144040 - DNA, 25 bp, Canis familiaris
gtgacactcatgtaaagtgcctgaa

SEQ ID NO: 144041 - DNA, 25 bp, Canis familiaris
gtgacatccatgtcctgtgtgtgga

SEQ ID NO: 144042 - DNA, 25 bp, Canis familiaris
gtgatattctgatcatttcagggga

SEQ ID NO: 144043 - DNA, 25 bp, Canis familiaris
gtgaactcagaaatgtcctgtggga

SEQ ID NO: 144044 - DNA, 25 bp, Canis familiaris
gtgaagtgagatgtgcccgtgtagg

SEQ ID NO: 144045 - DNA, 25 bp, Canis familiaris
gtgagatgggtgtctgcacctggct

SEQ ID NO: 144046 - DNA, 25 bp, Canis familiaris
gtgaagaccatgtctgtgcctgagt

SEQ ID NO: 144047 - DNA, 25 bp, Canis familiaris
gtgaacaactgacttgcctgcacta

SEQ ID NO: 144048 - DNA, 25 bp, Canis familiaris
gtgaacagcagtgcagtgccagtct

SEQ ID NO: 144049 - DNA, 25 bp, Canis familiaris
gtgacagcagtgcagcagtcgacat

SEQ ID NO: 144050 - DNA, 25 bp, Canis familiaris
gtgatcagctgctcagccatcaaca

SEQ ID NO: 144051 - DNA, 25 bp, Canis familiaris
gtgatgctgcctactacagctatca

SEQ ID NO: 144052 - DNA, 25 bp, Canis familiaris
gtgatccatcatggctatagatgca

SEQ ID NO: 144053 - DNA, 25 bp, Canis familiaris
gtgacactctggagagagcaaaact

SEQ ID NO: 144054 - DNA, 25 bp, Canis familiaris
gtgaccgcgtatgggaaccacatct

SEQ ID NO: 144055 - DNA, 25 bp, Canis familiaris
gtgtctcggttgagacagccatcac

SEQ ID NO: 144056 - DNA, 25 bp, Canis familiaris
gtgtctcctgggagatagtaccctc

SEQ ID NO: 144057 - DNA, 25 bp, Canis familiaris
gtgactttggttttgtggatcccat

SEQ ID NO: 144058 - DNA, 25 bp, Canis familiaris
gtgagcttcttttaatgttaccgtt

SEQ ID NO: 144059 - DNA, 25 bp, Canis familiaris
gtgagtcctttttcgaggatccctt

SEQ ID NO: 144060 - DNA, 25 bp, Canis familiaris
gtgagccacttagtccttggtcaac

SEQ ID NO: 144061 - DNA, 25 bp, Canis familiaris
gtgagccgtctcctgattttgggag

SEQ ID NO: 144062 - DNA, 25 bp, Canis familiaris
gtgacacagttgttgttgcaaggga

SEQ ID NO: 144063 - DNA, 25 bp, Canis familiaris
gtgaccaacatttttaaagagaaca

SEQ ID NO: 144064 - DNA, 25 bp, Canis familiaris
gtgacacacagattttgttaggcag

SEQ ID NO: 144065 - DNA, 25 bp, Canis familiaris
gtgacacaaggttgctgtacagggc

SEQ ID NO: 144066 - DNA, 25 bp, Canis familiaris
gtgaacacaggggtatgtcaggtcc

SEQ ID NO: 144067 - DNA, 25 bp, Canis familiaris
gtgagaagcaggggtaccgagctcg

SEQ ID NO: 144068 - DNA, 25 bp, Canis familiaris
gtgaggagcagcccatggagacgac

SEQ ID NO: 144069 - DNA, 25 bp, Canis familiaris
gtgacgcagacctatatgagacccc

SEQ ID NO: 144070 - DNA, 25 bp, Canis familiaris
gtgaagcaggtctttgagcgccttg

SEQ ID NO: 144071 - DNA, 25 bp, Canis familiaris
gtgacaaggacatttgcagctgcct

SEQ ID NO: 144072 - DNA, 25 bp, Canis familiaris
gtgacagagtaatacagctgggctg

SEQ ID NO: 144073 - DNA, 25 bp, Canis familiaris
gtgacactgtaatcacagggcaggg

SEQ ID NO: 144074 - DNA, 25 bp, Canis familiaris
gtgatacgtccatgcacggtgagtc

SEQ ID NO: 144075 - DNA, 25 bp, Canis familiaris
gtgaactgaccactggatgggagta

SEQ ID NO: 144076 - DNA, 25 bp, Canis familiaris
gtgacacagaaatggtggggaaccc

SEQ ID NO: 144077 - DNA, 25 bp, Canis familiaris
gtgacaaaaagatttgggaccaccg

SEQ ID NO: 144078 - DNA, 25 bp, Canis familiaris
gtgacaattaaaatgtgggattcca

SEQ ID NO: 144079 - DNA, 25 bp, Canis familiaris
gtgaccctaattatgtgccttaacc

SEQ ID NO: 144080 - DNA, 25 bp, Canis familiaris
ggcacccctaatcttgacttaaaat

SEQ ID NO: 144081 - DNA, 25 bp, Canis familiaris
gtgactccctaatgtctgactgtaa

SEQ ID NO: 144082 - DNA, 25 bp, Canis familiaris
gtgacactgacataaacttgctgtt

SEQ ID NO: 144083 - DNA, 25 bp, Canis familiaris
gtgacactatagaacaagtttgtac

SEQ ID NO: 144084 - DNA, 25 bp, Canis familiaris
gtgacactatagatcaagtttgtac

SEQ ID NO: 144085 - DNA, 25 bp, Canis familiaris
gtgaacttttgtttggtgctctatc

SEQ ID NO: 144086 - DNA, 25 bp, Canis familiaris
gtgaacattttgagggtggcgcgcg

SEQ ID NO: 144087 - DNA, 25 bp, Canis familiaris
gtgaaaggggtgcaggtgccatgcc

SEQ ID NO: 144088 - DNA, 25 bp, Canis familiaris
gtgaaatgggttctgcctcacaagc

SEQ ID NO: 144089 - DNA, 25 bp, Canis familiaris
gtgaactgtttttgtgttccaagcc

SEQ ID NO: 144090 - DNA, 25 bp, Canis familiaris
gtgaaatgtttcaagctttgtcaga

SEQ ID NO: 144091 - DNA, 25 bp, Canis familiaris
gtgaaatgttccactttctgtataa

SEQ ID NO: 144092 - DNA, 25 bp, Canis familiaris
gtgaaccagtgtcttattcgcttta

SEQ ID NO: 144093 - DNA, 25 bp, Canis familiaris
gtgaacctttggatttactgaatac

SEQ ID NO: 144094 - DNA, 25 bp, Canis familiaris
gtgagaaccattaaaagtactgaaa

SEQ ID NO: 144095 - DNA, 25 bp, Canis familiaris
ggagaaagactttacgtccgacgag

SEQ ID NO: 144096 - DNA, 25 bp, Canis familiaris
gtgagaaacccttgggaccgaatga

SEQ ID NO: 144097 - DNA, 25 bp, Canis familiaris
gtgataacctcctacgagacaccaa

SEQ ID NO: 144098 - DNA, 25 bp, Canis familiaris
gtgaaatcccccctcagaaggaatt

SEQ ID NO: 144099 - DNA, 25 bp, Canis familiaris
gtgaaatccagcacttcgtggagaa

SEQ ID NO: 144100 - DNA, 25 bp, Canis familiaris
gtgagaactgacccttcaggacaga

SEQ ID NO: 144101 - DNA, 25 bp, Canis familiaris
gtgatggtcaaccctcttggaaagg

SEQ ID NO: 144102 - DNA, 25 bp, Canis familiaris
gtgactgtgaacacctgggaaagca

SEQ ID NO: 144103 - DNA, 25 bp, Canis familiaris
gtgactgggagcaaccttgcaaaag

SEQ ID NO: 144104 - DNA, 25 bp, Canis familiaris
gtgacgggactctgcatggatagta

SEQ ID NO: 144105 - DNA, 25 bp, Canis familiaris
gtgacgggaggagcaggtgaggacc

SEQ ID NO: 144106 - DNA, 25 bp, Canis familiaris
gtgaggccgagggacaggaacgagc

SEQ ID NO: 144107 - DNA, 25 bp, Canis familiaris
gtgagtgaatgagggaaggaaggag

SEQ ID NO: 144108 - DNA, 25 bp, Canis familiaris
gtgacgatgtggagatgaggtagaa

SEQ ID NO: 144109 - DNA, 25 bp, Canis familiaris
gtgacaccatcgagaacgtcaaggc

SEQ ID NO: 144110 - DNA, 25 bp, Canis familiaris
gtgacaacatagatggaccttgagg

SEQ ID NO: 144111 - DNA, 25 bp, Canis familiaris
gtgacttgcacagttgaacctcttg

SEQ ID NO: 144112 - DNA, 25 bp, Canis familiaris
gtgagctgtggtgtaaactggtatc

SEQ ID NO: 144113 - DNA, 25 bp, Canis familiaris
gtgacgtctgtcgtgaagtaggccc

SEQ ID NO: 144114 - DNA, 25 bp, Canis familiaris
gtgaagcttctttgaattctgaccc

SEQ ID NO: 144115 - DNA, 25 bp, Canis familiaris
gtgacacttcttaggttctggtcct

SEQ ID NO: 144116 - DNA, 25 bp, Canis familiaris
gtgacagatttttggttgtttccat

SEQ ID NO: 144117 - DNA, 25 bp, Canis familiaris
gtgacattttagtatgttttgtaca

SEQ ID NO: 144118 - DNA, 25 bp, Canis familiaris
gtgacatttctaccagttgtgttca

SEQ ID NO: 144119 - DNA, 25 bp, Canis familiaris
gtgacttgcctaaagggtctgtgct

SEQ ID NO: 144120 - DNA, 25 bp, Canis familiaris
gtgaccgtcttgggggatgtatgtg

SEQ ID NO: 144121 - DNA, 25 bp, Canis familiaris
gtgaaccctctggggggtcagtggc

SEQ ID NO: 144122 - DNA, 25 bp, Canis familiaris
gtgaactaggagtggggtcaggagc

SEQ ID NO: 144123 - DNA, 25 bp, Canis familiaris
gtgaacggggtggatggggtgggca

SEQ ID NO: 144124 - DNA, 25 bp, Canis familiaris
ggaacggaattccagaaggtggata

SEQ ID NO: 144125 - DNA, 25 bp, Canis familiaris
gtggactgggtgaccaagacttgga

SEQ ID NO: 144126 - DNA, 25 bp, Canis familiaris
ggacgtgggtggacaaattctgggg

SEQ ID NO: 144127 - DNA, 25 bp, Canis familiaris
gtgacagtgggggactttcctgagg

SEQ ID NO: 144128 - DNA, 25 bp, Canis familiaris
gtgacctggagggactccattctcg

SEQ ID NO: 144129 - DNA, 25 bp, Canis familiaris
gtgatccggaggtgtcgtagtgggg

SEQ ID NO: 144130 - DNA, 25 bp, Canis familiaris
gtgatcccggagtcccgggattggg

SEQ ID NO: 144131 - DNA, 25 bp, Canis familiaris
gtgaaccagggcctcctggatttgg

SEQ ID NO: 144132 - DNA, 25 bp, Canis familiaris
gtgagaccgcgacaggggatgttga

SEQ ID NO: 144133 - DNA, 25 bp, Canis familiaris
gtgagagcctggaaaggtgggactg

SEQ ID NO: 144134 - DNA, 25 bp, Canis familiaris
gtgaaactgtggtgtgtgggagtgg

SEQ ID NO: 144135 - DNA, 25 bp, Canis familiaris
gtgaacaatgctgctggtgtgggaa

SEQ ID NO: 144136 - DNA, 25 bp, Canis familiaris
gtgaacagcctctggcatgttggaa

SEQ ID NO: 144137 - DNA, 25 bp, Canis familiaris
gtgacaagccagtagctcatgttgt

SEQ ID NO: 144138 - DNA, 25 bp, Canis familiaris
gtgacaccaagttctcagctgtgct

SEQ ID NO: 144139 - DNA, 25 bp, Canis familiaris
gtgaaaacatgaatccagatggcat

SEQ ID NO: 144140 - DNA, 25 bp, Canis familiaris
gtgaaaaattctgatgcatgtgtat

SEQ ID NO: 144141 - DNA, 25 bp, Canis familiaris
gtgaaattaaccctgcagcatgtga

SEQ ID NO: 144142 - DNA, 25 bp, Canis familiaris
gtgaaataaaccctgtttgcacctt

SEQ ID NO: 144143 - DNA, 25 bp, Canis familiaris
gtgaaaaagatcttctcttctccct

SEQ ID NO: 144144 - DNA, 25 bp, Canis familiaris
gtgagaggagagtccatcccaatcc

SEQ ID NO: 144145 - DNA, 25 bp, Canis familiaris
gtgaggaggaggcatccatcaacct

SEQ ID NO: 144146 - DNA, 25 bp, Canis familiaris
gtgagccagatgaaggacccaacct

SEQ ID NO: 144147 - DNA, 25 bp, Canis familiaris
gtgaccagagaatacaccatcaaca

SEQ ID NO: 144148 - DNA, 25 bp, Canis familiaris
gtgacaccgagatgacagctgacca

SEQ ID NO: 144149 - DNA, 25 bp, Canis familiaris
gtgacccatgagaagcaacgagagc

SEQ ID NO: 144150 - DNA, 25 bp, Canis familiaris
gtgacagcagcgaggacagcgaggc

SEQ ID NO: 144151 - DNA, 25 bp, Canis familiaris
gtgagcagagcttttgaacagatga

SEQ ID NO: 144152 - DNA, 25 bp, Canis familiaris
gtgagcaagtttacccaaggcaaga

SEQ ID NO: 144153 - DNA, 25 bp, Canis familiaris
gtgaccagtagtacgacttacaaca

SEQ ID NO: 144154 - DNA, 25 bp, Canis familiaris
gtgacgagatggagcgctcttacaa

SEQ ID NO: 144155 - DNA, 25 bp, Canis familiaris
gtgaggcagggcagctgtcctgatc

SEQ ID NO: 144156 - DNA, 25 bp, Canis familiaris
gtgactgaaggcctgctgtagtatc

SEQ ID NO: 144157 - DNA, 25 bp, Canis familiaris
gtgactacagcggtgcttgacacat

SEQ ID NO: 144158 - DNA, 25 bp, Canis familiaris
gtgagcccaggagtgttacctacag

SEQ ID NO: 144159 - DNA, 25 bp, Canis familiaris
gtgacctcaggtgttgacaaccaac

SEQ ID NO: 144160 - DNA, 25 bp, Canis familiaris
gtgacctcatggctgtgaacaactg

SEQ ID NO: 144161 - DNA, 25 bp, Canis familiaris
gtgaacattgtgctctgcacaccgc

SEQ ID NO: 144162 - DNA, 25 bp, Canis familiaris
gtgacactttgttatcatactccac

SEQ ID NO: 144163 - DNA, 25 bp, Canis familiaris
gtgaacagtttgctacagctgtcag

SEQ ID NO: 144164 - DNA, 25 bp, Canis familiaris
gtgacgtgttaaaacagtgcatcag

SEQ ID NO: 144165 - DNA, 25 bp, Canis familiaris
gtgaggtggtaacgtcactcagcac

SEQ ID NO: 144166 - DNA, 25 bp, Canis familiaris
gtgagaatgttaagcctcgacacgt

SEQ ID NO: 144167 - DNA, 25 bp, Canis familiaris
gtgagcaatgttttccatgtggttg

SEQ ID NO: 144168 - DNA, 25 bp, Canis familiaris
gtgagcgcaggattgtctatggtgt

SEQ ID NO: 144169 - DNA, 25 bp, Canis familiaris
gtgacccagagattttggtgcttat

SEQ ID NO: 144170 - DNA, 25 bp, Canis familiaris
gtgacccacgagttttctttatttg

SEQ ID NO: 144171 - DNA, 25 bp, Canis familiaris
gtgacacccaaccaaatcttttatt

SEQ ID NO: 144172 - DNA, 25 bp, Canis familiaris
gtgagttctaagtaaagtattttgt

SEQ ID NO: 144173 - DNA, 25 bp, Canis familiaris
gtgacttccataaaaagaatcctta

SEQ ID NO: 144174 - DNA, 25 bp, Canis familiaris
gtgactttcagtgtaccagatcctc

SEQ ID NO: 144175 - DNA, 25 bp, Canis familiaris
gtgactcttcgagatagccttcatc

SEQ ID NO: 144176 - DNA, 25 bp, Canis familiaris
gtgacattttgtggatagcttggat

SEQ ID NO: 144177 - DNA, 25 bp, Canis familiaris
gtgacattgtcgtgtgacgctgtga

SEQ ID NO: 144178 - DNA, 25 bp, Canis familiaris
gtgactgtgtggttggtctctgtga

SEQ ID NO: 144179 - DNA, 25 bp, Canis familiaris
gtgacggtacgaggacttgcatgac

SEQ ID NO: 144180 - DNA, 25 bp, Canis familiaris
gtgactggtacacttgccttgagtc

SEQ ID NO: 144181 - DNA, 25 bp, Canis familiaris
gtgagcggatatatactattggatc

SEQ ID NO: 144182 - DNA, 25 bp, Canis familiaris
gtgacaactatcaaattcttggctt

SEQ ID NO: 144183 - DNA, 25 bp, Canis familiaris
gtggacctgacaattcttcggttcg

SEQ ID NO: 144184 - DNA, 25 bp, Canis familiaris
gtggtccgaaagatgtcaggttatg

SEQ ID NO: 144185 - DNA, 25 bp, Canis familiaris
gtgagctcctgaaaaatctggcctt

SEQ ID NO: 144186 - DNA, 25 bp, Canis familiaris
gtgacttgtgggagactgtccttcc

SEQ ID NO: 144187 - DNA, 25 bp, Canis familiaris
gtgagccagtggccaaaacctcttc

SEQ ID NO: 144188 - DNA, 25 bp, Canis familiaris
gtgagccatgggcccaaaggcaggc

SEQ ID NO: 144189 - DNA, 25 bp, Canis familiaris
gtgacacagaaccccaaaagtccca

SEQ ID NO: 144190 - DNA, 25 bp, Canis familiaris
gtgacaaacacagcacagaagtatc

SEQ ID NO: 144191 - DNA, 25 bp, Canis familiaris
gggcaaatgccaacaggaagttttt

SEQ ID NO: 144192 - DNA, 25 bp, Canis familiaris
gtggcaacaaagcagtccagttttt

SEQ ID NO: 144193 - DNA, 25 bp, Canis familiaris
gtgggacaaaattggccagtttcag

SEQ ID NO: 144194 - DNA, 25 bp, Canis familiaris
gtgaaaatcaaatgggcaggtgtag

SEQ ID NO: 144195 - DNA, 25 bp, Canis familiaris
gtgaaagacaattcaggtctgtgtg

SEQ ID NO: 144196 - DNA, 25 bp, Canis familiaris
gtgacggccaattcggattgttgaa

SEQ ID NO: 144197 - DNA, 25 bp, Canis familiaris
gtgacccatgtactcggttgtagga

SEQ ID NO: 144198 - DNA, 25 bp, Canis familiaris
gtgagctaagtggtcggttggcacc

SEQ ID NO: 144199 - DNA, 25 bp, Canis familiaris
gtgactgttgctgcaaagtctcccc

SEQ ID NO: 144200 - DNA, 25 bp, Canis familiaris
gtgacatgggctgcccagaactccc

SEQ ID NO: 144201 - DNA, 25 bp, Canis familiaris
gtgacaatgtgtgcaccaaacatga

SEQ ID NO: 144202 - DNA, 25 bp, Canis familiaris
gtgagacatcgtgacacacacctgt

SEQ ID NO: 144203 - DNA, 25 bp, Canis familiaris
gtgagaatccatcacaagaattggg

SEQ ID NO: 144204 - DNA, 25 bp, Canis familiaris
gtgagcaaagcagaaggaggtggga

SEQ ID NO: 144205 - DNA, 25 bp, Canis familiaris
gtgagatcactgttaggggctgggg

SEQ ID NO: 144206 - DNA, 25 bp, Canis familiaris
gtgagtcatcgctcaggagagactg

SEQ ID NO: 144207 - DNA, 25 bp, Canis familiaris
gtgagtcatctcaggtgagaccccc

SEQ ID NO: 144208 - DNA, 25 bp, Canis familiaris
gtgaggcaatccaggcaacaccaac

SEQ ID NO: 144209 - DNA, 25 bp, Canis familiaris
gtgtagtacacatgccatcacactc

SEQ ID NO: 144210 - DNA, 25 bp, Canis familiaris
gtgaaacatagctagcctacaataa

SEQ ID NO: 144211 - DNA, 25 bp, Canis familiaris
gtgagatcacagcctgagcctaaat

SEQ ID NO: 144212 - DNA, 25 bp, Canis familiaris
gtgagtacagtgcatggctaaacca

SEQ ID NO: 144213 - DNA, 25 bp, Canis familiaris
gtgagtacgtggcccagaacacacc

SEQ ID NO: 144214 - DNA, 25 bp, Canis familiaris
gtgacaaagttcctagactacctgc

SEQ ID NO: 144215 - DNA, 25 bp, Canis familiaris
gtgaaacgttgtaagagctacctcc

SEQ ID NO: 144216 - DNA, 25 bp, Canis familiaris
gtgaaactgtttaatcgcttctgtg

SEQ ID NO: 144217 - DNA, 25 bp, Canis familiaris
gtgaaagttgacgccgattcttgcc

SEQ ID NO: 144218 - DNA, 25 bp, Canis familiaris
gtgagaagtgaagcaccgactcatg

SEQ ID NO: 144219 - DNA, 25 bp, Canis familiaris
gtgaaattgaacaagctggtctcat

SEQ ID NO: 144220 - DNA, 25 bp, Canis familiaris
gtgatacatacatatagtttccata

SEQ ID NO: 144221 - DNA, 25 bp, Canis familiaris
gtgatgacccagaaggtcttccacc

SEQ ID NO: 144222 - DNA, 25 bp, Canis familiaris
gtgatgaagacagtgacccctgcta

SEQ ID NO: 144223 - DNA, 25 bp, Canis familiaris
gtgacacagagaaaccctctatgga

SEQ ID NO: 144224 - DNA, 25 bp, Canis familiaris
gtgaaattgatccatatccctatta

SEQ ID NO: 144225 - DNA, 25 bp, Canis familiaris
gtgaaattaaatccccattccattc

SEQ ID NO: 144226 - DNA, 25 bp, Canis familiaris
gtgacaatctaagtgacctctgctc

SEQ ID NO: 144227 - DNA, 25 bp, Canis familiaris
gtgacttgttcaggaccacatgttt

SEQ ID NO: 144228 - DNA, 25 bp, Canis familiaris
gtgacttcagattgtgactacattt

SEQ ID NO: 144229 - DNA, 25 bp, Canis familiaris
gtgacttctgattggtctgaattta

SEQ ID NO: 144230 - DNA, 25 bp, Canis familiaris
gtgactctctgacggtctcaaatcc

SEQ ID NO: 144231 - DNA, 25 bp, Canis familiaris
gtgacccggtgtatcggatgggttc

SEQ ID NO: 144232 - DNA, 25 bp, Canis familiaris
gtgacccacgtgcactgaatggggt

SEQ ID NO: 144233 - DNA, 25 bp, Canis familiaris
gtgactgaagctatggagaaggggt

SEQ ID NO: 144234 - DNA, 25 bp, Canis familiaris
gtgagtaggtctggggtaggggtgg

SEQ ID NO: 144235 - DNA, 25 bp, Canis familiaris
ggactcgttcaacagtgggggtggt

SEQ ID NO: 144236 - DNA, 25 bp, Canis familiaris
ggaccgttctagggtgttgggtcag

SEQ ID NO: 144237 - DNA, 25 bp, Canis familiaris
ggtgccttttggtgttggggatgcc

SEQ ID NO: 144238 - DNA, 25 bp, Canis familiaris
gtgtggttttcaccgttatggttgt

SEQ ID NO: 144239 - DNA, 25 bp, Canis familiaris
gtgaggactttagagttgtgttgga

SEQ ID NO: 144240 - DNA, 25 bp, Canis familiaris
gtgaaagggtagtagatttcttggg

SEQ ID NO: 144241 - DNA, 25 bp, Canis familiaris
gtgacaagaagtatgtgtgtgtatt

SEQ ID NO: 144242 - DNA, 25 bp, Canis familiaris
gtgacaaaggcacgggttggtattt

SEQ ID NO: 144243 - DNA, 25 bp, Canis familiaris
gtgataaaggatctggttcctgact

SEQ ID NO: 144244 - DNA, 25 bp, Canis familiaris
gtgataaaagctgtggtcgcgctaa

SEQ ID NO: 144245 - DNA, 25 bp, Canis familiaris
gtgatctaaaccatatgtccctcag

SEQ ID NO: 144246 - DNA, 25 bp, Canis familiaris
gtgattaaaatttatttaccagtca

SEQ ID NO: 144247 - DNA, 25 bp, Canis familiaris
gtggtaaacttggaattcccaatct

SEQ ID NO: 144248 - DNA, 25 bp, Canis familiaris
gtgttttatgtagaactcccaatta

SEQ ID NO: 144249 - DNA, 25 bp, Canis familiaris
gtgtcttataaaacaacccctgtgt

SEQ ID NO: 144250 - DNA, 25 bp, Canis familiaris
gtgacttcaacagtgacacccactc

SEQ ID NO: 144251 - DNA, 25 bp, Canis familiaris
gtgactacatgaacatgaccccccg

SEQ ID NO: 144252 - DNA, 25 bp, Canis familiaris
gtgagctacaaatttgccagcccag

SEQ ID NO: 144253 - DNA, 25 bp, Canis familiaris
gtgacatgaaaagttggcagcccct

SEQ ID NO: 144254 - DNA, 25 bp, Canis familiaris
gtgatgagagacgactctgtccccc

SEQ ID NO: 144255 - DNA, 25 bp, Canis familiaris
gtgagggtggaggctgcctgcctcc

SEQ ID NO: 144256 - DNA, 25 bp, Canis familiaris
gtgaggtttgtggccacagtggcac

SEQ ID NO: 144257 - DNA, 25 bp, Canis familiaris
gtgaggtgacgtggccagatggccc

SEQ ID NO: 144258 - DNA, 25 bp, Canis familiaris
gtgagagtagcggtacgggtgcggc

SEQ ID NO: 144259 - DNA, 25 bp, Canis familiaris
gtgacagtgagggacacctgggcga

SEQ ID NO: 144260 - DNA, 25 bp, Canis familiaris
gtgactggagtggacggggacgagc

SEQ ID NO: 144261 - DNA, 25 bp, Canis familiaris
gtgtatggtgtgtgcaggggaagac

SEQ ID NO: 144262 - DNA, 25 bp, Canis familiaris
gtgtggggttggagagccggatcac

SEQ ID NO: 144263 - DNA, 25 bp, Canis familiaris
ggtgtcggttgaggaactcggccaa

SEQ ID NO: 144264 - DNA, 25 bp, Canis familiaris
ggattcggttacgtactctttgaga

SEQ ID NO: 144265 - DNA, 25 bp, Canis familiaris
gtgattcctgtgaccgaggttttca

SEQ ID NO: 144266 - DNA, 25 bp, Canis familiaris
tgtattacggcctgagacctttctc

SEQ ID NO: 144267 - DNA, 25 bp, Canis familiaris
gtgattaccccaaaatccttttatg

SEQ ID NO: 144268 - DNA, 25 bp, Canis familiaris
tgatactaccccccaaaaaagacat

SEQ ID NO: 144269 - DNA, 25 bp, Canis familiaris
gtgactccagccccagaaaaaggac

SEQ ID NO: 144270 - DNA, 25 bp, Canis familiaris
gtgactccagccccagaaaaaggac

SEQ ID NO: 144271 - DNA, 25 bp, Canis familiaris
gtgactccagccccagaaaaaggac

SEQ ID NO: 144272 - DNA, 25 bp, Canis familiaris
gtgacttgacctgtgacctcaaaac

SEQ ID NO: 144273 - DNA, 25 bp, Canis familiaris
gtgacatttccaggaggcaccaaaa

SEQ ID NO: 144274 - DNA, 25 bp, Canis familiaris
gtgttttcaaggaacccgaaagcag

SEQ ID NO: 144275 - DNA, 25 bp, Canis familiaris
gtgttttaagagcccttcgaattca

SEQ ID NO: 144276 - DNA, 25 bp, Canis familiaris
ggtaattaggagcacccttcagcca

SEQ ID NO: 144277 - DNA, 25 bp, Canis familiaris
ggtactaagggctatacctttcaat

SEQ ID NO: 144278 - DNA, 25 bp, Canis familiaris
ggtcaggaggggatactccttcaat

SEQ ID NO: 144279 - DNA, 25 bp, Canis familiaris
gtgattggccgtagttaacctttgt

SEQ ID NO: 144280 - DNA, 25 bp, Canis familiaris
gtgttgtgtttttgtaactggttgt

SEQ ID NO: 144281 - DNA, 25 bp, Canis familiaris
gtggggttggtagagactggtggga

SEQ ID NO: 144282 - DNA, 25 bp, Canis familiaris
gtgtggagtgtggtaaaggttttcg

SEQ ID NO: 144283 - DNA, 25 bp, Canis familiaris
gtgagcggctgtggccaagagggtt

SEQ ID NO: 144284 - DNA, 25 bp, Canis familiaris
gtgatgagactcagccaactcggtt

SEQ ID NO: 144285 - DNA, 25 bp, Canis familiaris
gtgaggactcacataaatactgttg

SEQ ID NO: 144286 - DNA, 25 bp, Canis familiaris
gggctacccattgaccaattctggg

SEQ ID NO: 144287 - DNA, 25 bp, Canis familiaris
tccgccccagttgacgcaaattggg

SEQ ID NO: 144288 - DNA, 25 bp, Canis familiaris
tttcccccttcgagaagttgaggct

SEQ ID NO: 144289 - DNA, 25 bp, Canis familiaris
tttccctcctctgttaagggggcat

SEQ ID NO: 144290 - DNA, 25 bp, Canis familiaris
ttaatccccttcagtaacaggagaa

SEQ ID NO: 144291 - DNA, 25 bp, Canis familiaris
tgtaatcccggtcattaacagggag

SEQ ID NO: 144292 - DNA, 25 bp, Canis familiaris
tgtagaccccctctaagaagtccaa

SEQ ID NO: 144293 - DNA, 25 bp, Canis familiaris
gggaatccgactgtgaataaaccaa

SEQ ID NO: 144294 - DNA, 25 bp, Canis familiaris
gtgatttcccttgttataaagctaa

SEQ ID NO: 144295 - DNA, 25 bp, Canis familiaris
gtgagttctacatcttgtttaccta

SEQ ID NO: 144296 - DNA, 25 bp, Canis familiaris
gtgatgtttaatgttgcgttatcat

SEQ ID NO: 144297 - DNA, 25 bp, Canis familiaris
gtgatgtattaataatgccttatct

SEQ ID NO: 144298 - DNA, 25 bp, Canis familiaris
gtgaggaggcattccagtccttatt

SEQ ID NO: 144299 - DNA, 25 bp, Canis familiaris
gtgagagggaacggtgctgctttat

SEQ ID NO: 144300 - DNA, 25 bp, Canis familiaris
gtgagagttcagacaggggctaaag

SEQ ID NO: 144301 - DNA, 25 bp, Canis familiaris
gtgaggtgccagagggtataaaagc

SEQ ID NO: 144302 - DNA, 25 bp, Canis familiaris
gtgaggtaggtggggtattaacgtg

SEQ ID NO: 144303 - DNA, 25 bp, Canis familiaris
gggctgtacagggggttttttgctg

SEQ ID NO: 144304 - DNA, 25 bp, Canis familiaris
gtgactgtacgttttgttttgttgt

SEQ ID NO: 144305 - DNA, 25 bp, Canis familiaris
gtgactgggttctttcatttggtgg

SEQ ID NO: 144306 - DNA, 25 bp, Canis familiaris
gtgacagggcttctcgtaatttgga

SEQ ID NO: 144307 - DNA, 25 bp, Canis familiaris
gtgacacgtttctttggaacttgga

SEQ ID NO: 144308 - DNA, 25 bp, Canis familiaris
gtgactggtatttattgggcccgga

SEQ ID NO: 144309 - DNA, 25 bp, Canis familiaris
gtgactgagctgttactccagtgcc

SEQ ID NO: 144310 - DNA, 25 bp, Canis familiaris
gtgacataggtcaagtccactgccc

SEQ ID NO: 144311 - DNA, 25 bp, Canis familiaris
gtgacacaggtttgttatctctcca

SEQ ID NO: 144312 - DNA, 25 bp, Canis familiaris
gtgacataactattttatgcactgg

SEQ ID NO: 144313 - DNA, 25 bp, Canis familiaris
gtgatccaagctggcatgtttgacc

SEQ ID NO: 144314 - DNA, 25 bp, Canis familiaris
gtgactcataccggtttacattgtt

SEQ ID NO: 144315 - DNA, 25 bp, Canis familiaris
gtgactctggctgttattattttgt

SEQ ID NO: 144316 - DNA, 25 bp, Canis familiaris
gtgactctgtgtttatattccttgg

SEQ ID NO: 144317 - DNA, 25 bp, Canis familiaris
gtgaccattgtgttgtattctgctt

SEQ ID NO: 144318 - DNA, 25 bp, Canis familiaris
gtgacctgtggatgaagctttcgtg

SEQ ID NO: 144319 - DNA, 25 bp, Canis familiaris
gtgacctgtagacgagcagatgctg

SEQ ID NO: 144320 - DNA, 25 bp, Canis familiaris
gtgacatggtggccgagcatgctgc

SEQ ID NO: 144321 - DNA, 25 bp, Canis familiaris
gtgactcattggccaagcttgtgca

SEQ ID NO: 144322 - DNA, 25 bp, Canis familiaris
gtgactcagagagatgcaccgccaa

SEQ ID NO: 144323 - DNA, 25 bp, Canis familiaris
gtgtccaaggactaaagccaagggt

SEQ ID NO: 144324 - DNA, 25 bp, Canis familiaris
gtgaggaaggaatagagccaacgtg

SEQ ID NO: 144325 - DNA, 25 bp, Canis familiaris
gtgagaataaagtaataccccaaca

SEQ ID NO: 144326 - DNA, 25 bp, Canis familiaris
gtgagtctacatttatataccagga

SEQ ID NO: 144327 - DNA, 25 bp, Canis familiaris
gtgacacccatgtttctgattcaag

SEQ ID NO: 144328 - DNA, 25 bp, Canis familiaris
gtgagacccagttggtgaccacagt

SEQ ID NO: 144329 - DNA, 25 bp, Canis familiaris
gtgagcacctagatttaccaaaaca

SEQ ID NO: 144330 - DNA, 25 bp, Canis familiaris
gtgagaagcaatacttaaccaaaca

SEQ ID NO: 144331 - DNA, 25 bp, Canis familiaris
gtgagaacatttttgaacatttacc

SEQ ID NO: 144332 - DNA, 25 bp, Canis familiaris
gtgagactgtttctgcacaataaga

SEQ ID NO: 144333 - DNA, 25 bp, Canis familiaris
gtgacctggtgtctgcacagtacta

SEQ ID NO: 144334 - DNA, 25 bp, Canis familiaris
gtgacttatgttgctgaagaacttg

SEQ ID NO: 144335 - DNA, 25 bp, Canis familiaris
gtgtatacatttgagccaaccttta

SEQ ID NO: 144336 - DNA, 25 bp, Canis familiaris
gtgttaaattcctcaaaactcttct

SEQ ID NO: 144337 - DNA, 25 bp, Canis familiaris
gtgtaaacatctcaaccaaaacttt

SEQ ID NO: 144338 - DNA, 25 bp, Canis familiaris
gtgataaatactgagctgccaaaac

SEQ ID NO: 144339 - DNA, 25 bp, Canis familiaris
gtgaggaagatgccaagctgccaag

SEQ ID NO: 144340 - DNA, 25 bp, Canis familiaris
gtgatagtactgcacacacacaagt

SEQ ID NO: 144341 - DNA, 25 bp, Canis familiaris
gtgagcagtgaaaaatcagctctag

SEQ ID NO: 144342 - DNA, 25 bp, Canis familiaris
gtgagcttggtatcaagtccaggta

SEQ ID NO: 144343 - DNA, 25 bp, Canis familiaris
gtgagttatgtgaggagatccacct

SEQ ID NO: 144344 - DNA, 25 bp, Canis familiaris
gtgacatgttctgttatgttagact

SEQ ID NO: 144345 - DNA, 25 bp, Canis familiaris
gtgagtgttctcaagtctgggggtt

SEQ ID NO: 144346 - DNA, 25 bp, Canis familiaris
gtgagcagctgttttgtttgcctgg

SEQ ID NO: 144347 - DNA, 25 bp, Canis familiaris
gtgaggctgtagactcttcattcgt

SEQ ID NO: 144348 - DNA, 25 bp, Canis familiaris
gtgagagttctgatcatctccatgc

SEQ ID NO: 144349 - DNA, 25 bp, Canis familiaris
gtgatcaactccagctttatgccag

SEQ ID NO: 144350 - DNA, 25 bp, Canis familiaris
gtgactgacctcagtttgtacttga

SEQ ID NO: 144351 - DNA, 25 bp, Canis familiaris
gtgttggcattcagttttacctaac

SEQ ID NO: 144352 - DNA, 25 bp, Canis familiaris
gtgattggttctacgttttactgaa

SEQ ID NO: 144353 - DNA, 25 bp, Canis familiaris
gtgattgtgttgtggtgtctttaaa

SEQ ID NO: 144354 - DNA, 25 bp, Canis familiaris
gtgactatgacttctggtcctacat

SEQ ID NO: 144355 - DNA, 25 bp, Canis familiaris
gtgatgtacatttagccatcctaat

SEQ ID NO: 144356 - DNA, 25 bp, Canis familiaris
gtgatttctttactctggctaacga

SEQ ID NO: 144357 - DNA, 25 bp, Canis familiaris
gtgacttctactactctgtcttagc

SEQ ID NO: 144358 - DNA, 25 bp, Canis familiaris
gtgacttctcatttccagattatca

SEQ ID NO: 144359 - DNA, 25 bp, Canis familiaris
gtgactttcagttcacagtgtagaa

SEQ ID NO: 144360 - DNA, 25 bp, Canis familiaris
gtgactttctgtaaccatgcaatgt

SEQ ID NO: 144361 - DNA, 25 bp, Canis familiaris
gtgactattcagatcatccaagtgg

SEQ ID NO: 144362 - DNA, 25 bp, Canis familiaris
gtgagcattgtggaacccaaggatg

SEQ ID NO: 144363 - DNA, 25 bp, Canis familiaris
gtgatcttggcccaataccagtgca

SEQ ID NO: 144364 - DNA, 25 bp, Canis familiaris
gtgatcttactccagcctggcagcc

SEQ ID NO: 144365 - DNA, 25 bp, Canis familiaris
gtgacatattgttgatccgtgccca

SEQ ID NO: 144366 - DNA, 25 bp, Canis familiaris
gtgatcatttggtatagcggctcta

SEQ ID NO: 144367 - DNA, 25 bp, Canis familiaris
gtgtttcaggatcgacggttccaca

SEQ ID NO: 144368 - DNA, 25 bp, Canis familiaris
gtgtcttaaacatctggttccttcc

SEQ ID NO: 144369 - DNA, 25 bp, Canis familiaris
gtgttccaaagtcttgtttacctca

SEQ ID NO: 144370 - DNA, 25 bp, Canis familiaris
gtgattaaacactgggctttaccca

SEQ ID NO: 144371 - DNA, 25 bp, Canis familiaris
gtgttgaacttgtggattttcccca

SEQ ID NO: 144372 - DNA, 25 bp, Canis familiaris
gtgactggtctttgggcatttccac

SEQ ID NO: 144373 - DNA, 25 bp, Canis familiaris
gtgacttgctttttggatacatcga

SEQ ID NO: 144374 - DNA, 25 bp, Canis familiaris
gtgaccctttattgtaagcagacac

SEQ ID NO: 144375 - DNA, 25 bp, Canis familiaris
gtgaccttattctgtgcatcgaaca

SEQ ID NO: 144376 - DNA, 25 bp, Canis familiaris
gtgaccatctactttactcaggaca

SEQ ID NO: 144377 - DNA, 25 bp, Canis familiaris
gtgattcttaggttacacagagtca

SEQ ID NO: 144378 - DNA, 25 bp, Canis familiaris
gtgactgcgtgtgtaactcgagcca

SEQ ID NO: 144379 - DNA, 25 bp, Canis familiaris
gtgagggatgtgctcacctctagcc

SEQ ID NO: 144380 - DNA, 25 bp, Canis familiaris
gtgagagaagtgcttcaccaacgag

SEQ ID NO: 144381 - DNA, 25 bp, Canis familiaris
gtgtaaaatgttacccacactggta

SEQ ID NO: 144382 - DNA, 25 bp, Canis familiaris
gtgtatgctaacagacccacactgc

SEQ ID NO: 144383 - DNA, 25 bp, Canis familiaris
gtgagagcaaagaaaccgacaagtg

SEQ ID NO: 144384 - DNA, 25 bp, Canis familiaris
gtgagcaatcccacatgtgggggga

SEQ ID NO: 144385 - DNA, 25 bp, Canis familiaris
gtgagcaatcccacatgtgggggga

SEQ ID NO: 144386 - DNA, 25 bp, Canis familiaris
gtgaggaagccacctgaggctgggt

SEQ ID NO: 144387 - DNA, 25 bp, Canis familiaris
gtgagggcaggcaactggtctgtga

SEQ ID NO: 144388 - DNA, 25 bp, Canis familiaris
gtgagaagagagctctggccgcaga

SEQ ID NO: 144389 - DNA, 25 bp, Canis familiaris
gtgagacagagtctgaggcctcaga

SEQ ID NO: 144390 - DNA, 25 bp, Canis familiaris
gtgagaccgtcagtgaggagtcgaa

SEQ ID NO: 144391 - DNA, 25 bp, Canis familiaris
gtgagagcctcttcaaggatgggaa

SEQ ID NO: 144392 - DNA, 25 bp, Canis familiaris
gtgagaagccttcgaagttggagca

SEQ ID NO: 144393 - DNA, 25 bp, Canis familiaris
gtgagctatgccattgatactttaa

SEQ ID NO: 144394 - DNA, 25 bp, Canis familiaris
gtgagtcagtcatattgctttttat

SEQ ID NO: 144395 - DNA, 25 bp, Canis familiaris
gtgactttgaaagttttgtctgata

SEQ ID NO: 144396 - DNA, 25 bp, Canis familiaris
gtgacttttgatcttttgcattttt

SEQ ID NO: 144397 - DNA, 25 bp, Canis familiaris
gtgactttttttcgttgagttatca

SEQ ID NO: 144398 - DNA, 25 bp, Canis familiaris
gtgacttttttccactttaaatatg

SEQ ID NO: 144399 - DNA, 25 bp, Canis familiaris
gtgacttcagtattttctttgaaaa

SEQ ID NO: 144400 - DNA, 25 bp, Canis familiaris
gtgttgtcgttgtttctgagtgcta

SEQ ID NO: 144401 - DNA, 25 bp, Canis familiaris
gtgatctcgcaggtgaccgtgggaa

SEQ ID NO: 144402 - DNA, 25 bp, Canis familiaris
gtgaccaccgtgacacaggggaacc

SEQ ID NO: 144403 - DNA, 25 bp, Canis familiaris
gtgaccctggtggacgagggcgacc

SEQ ID NO: 144404 - DNA, 25 bp, Canis familiaris
gtgaccgcgggcgaggaggacgatc

SEQ ID NO: 144405 - DNA, 25 bp, Canis familiaris
gtgaccgcgtgggcatggagtgtac

SEQ ID NO: 144406 - DNA, 25 bp, Canis familiaris
gtgacttcattgagagctgcaggga

SEQ ID NO: 144407 - DNA, 25 bp, Canis familiaris
gtgacttctccttggctgagaggtg

SEQ ID NO: 144408 - DNA, 25 bp, Canis familiaris
gtgacctcatactgccagagaagga

SEQ ID NO: 144409 - DNA, 25 bp, Canis familiaris
gtgttatgatccaagccaaaagaaa

SEQ ID NO: 144410 - DNA, 25 bp, Canis familiaris
gtgagtcctcaattccaaatagtaa

SEQ ID NO: 144411 - DNA, 25 bp, Canis familiaris
gtgacttcacaattccaaatgcgtt

SEQ ID NO: 144412 - DNA, 25 bp, Canis familiaris
gtgactcttctactccaaatggaat

SEQ ID NO: 144413 - DNA, 25 bp, Canis familiaris
gtgagattgctctgtcaaactggaa

SEQ ID NO: 144414 - DNA, 25 bp, Canis familiaris
gtgactcattcattctataactgga

SEQ ID NO: 144415 - DNA, 25 bp, Canis familiaris
gtgagaattcagtcttcttcggaaa

SEQ ID NO: 144416 - DNA, 25 bp, Canis familiaris
gtgagagaatgggcattttctagga

SEQ ID NO: 144417 - DNA, 25 bp, Canis familiaris
gtgatggcacagagtcctttgagta

SEQ ID NO: 144418 - DNA, 25 bp, Canis familiaris
gtgatgccaaaactcctgacaagat

SEQ ID NO: 144419 - DNA, 25 bp, Canis familiaris
gtgatgatgcaacactttgaggaat

SEQ ID NO: 144420 - DNA, 25 bp, Canis familiaris
gtgatgtgccaaactggttgtaatc

SEQ ID NO: 144421 - DNA, 25 bp, Canis familiaris
gtgactggagattctttatgctgaa

SEQ ID NO: 144422 - DNA, 25 bp, Canis familiaris
gtgactgtatcttctatttctaaat

SEQ ID NO: 144423 - DNA, 25 bp, Canis familiaris
gtgactgtcattctgaacactaatt

SEQ ID NO: 144424 - DNA, 25 bp, Canis familiaris
gtgacgtattgcataaaaactattt

SEQ ID NO: 144425 - DNA, 25 bp, Canis familiaris
gtgaccttatgtgaaaagagctact

SEQ ID NO: 144426 - DNA, 25 bp, Canis familiaris
gtgacgttcagaccaagcagaggct

SEQ ID NO: 144427 - DNA, 25 bp, Canis familiaris
gtgaggcggggagagcagaatgctc

SEQ ID NO: 144428 - DNA, 25 bp, Canis familiaris
gtgaggggtggtggcaggacccatg

SEQ ID NO: 144429 - DNA, 25 bp, Canis familiaris
gtgaggggtgagagcagggctgctt

SEQ ID NO: 144430 - DNA, 25 bp, Canis familiaris
gtgagggctgggagctggaggtatc

SEQ ID NO: 144431 - DNA, 25 bp, Canis familiaris
gtgacgatgtggctctggagggtgt

SEQ ID NO: 144432 - DNA, 25 bp, Canis familiaris
gtgactgtaggttctgacaccgttc

SEQ ID NO: 144433 - DNA, 25 bp, Canis familiaris
gtgagtggtggtggctacctacttc

SEQ ID NO: 144434 - DNA, 25 bp, Canis familiaris
gtgaggcggtgatggaactccttgc

SEQ ID NO: 144435 - DNA, 25 bp, Canis familiaris
gtgatggttgggtgatactccctca

SEQ ID NO: 144436 - DNA, 25 bp, Canis familiaris
gtgttgattggctaggtttctcccg

SEQ ID NO: 144437 - DNA, 25 bp, Canis familiaris
gtgttaatgtgtagtcctgctctgc

SEQ ID NO: 144438 - DNA, 25 bp, Canis familiaris
gtgttggtagaattcgctgctccat

SEQ ID NO: 144439 - DNA, 25 bp, Canis familiaris
gtgttcgtgaggagctgctcccagg

SEQ ID NO: 144440 - DNA, 25 bp, Canis familiaris
gtgattcagtgattctacttctaag

SEQ ID NO: 144441 - DNA, 25 bp, Canis familiaris
gtgatgtctgtgtctgtgactgacg

SEQ ID NO: 144442 - DNA, 25 bp, Canis familiaris
gtgagtgtgtgtgtagctaagagcc

SEQ ID NO: 144443 - DNA, 25 bp, Canis familiaris
gtgactgtgtatcctacgaagactc

SEQ ID NO: 144444 - DNA, 25 bp, Canis familiaris
gtgactaataacctctaatgactaa

SEQ ID NO: 144445 - DNA, 25 bp, Canis familiaris
gtgaccgcaaacatcttatgcacca

SEQ ID NO: 144446 - DNA, 25 bp, Canis familiaris
gtgactctcacaacaaccattaaaa

SEQ ID NO: 144447 - DNA, 25 bp, Canis familiaris
gtgactctcacatctacaatatctt

SEQ ID NO: 144448 - DNA, 25 bp, Canis familiaris
gtgaccctcttgtacatgaatcttg

SEQ ID NO: 144449 - DNA, 25 bp, Canis familiaris
gtgacgactctttactagtttggtc

SEQ ID NO: 144450 - DNA, 25 bp, Canis familiaris
gtgactgtccttttgcacaggttgg

SEQ ID NO: 144451 - DNA, 25 bp, Canis familiaris
gtgattgttcttgtcaacgtcggag

SEQ ID NO: 144452 - DNA, 25 bp, Canis familiaris
gtgtactcctagataatcctcgggc

SEQ ID NO: 144453 - DNA, 25 bp, Canis familiaris
gtgagacaccaactttgtccatccg

SEQ ID NO: 144454 - DNA, 25 bp, Canis familiaris
gtgaccaccaaggtatggccatggc

SEQ ID NO: 144455 - DNA, 25 bp, Canis familiaris
gtgactcccaaggatcgacaaagta

SEQ ID NO: 144456 - DNA, 25 bp, Canis familiaris
gtgactccattagacttacacagta

SEQ ID NO: 144457 - DNA, 25 bp, Canis familiaris
gtgttggaataggacttccagcttt

SEQ ID NO: 144458 - DNA, 25 bp, Canis familiaris
gtgttttaaggagtagctgcagcat

SEQ ID NO: 144459 - DNA, 25 bp, Canis familiaris
gtgactgttcaatggtagtatctgg

SEQ ID NO: 144460 - DNA, 25 bp, Canis familiaris
gtgactctccactggagttcacatt

SEQ ID NO: 144461 - DNA, 25 bp, Canis familiaris
gtgattccacctcgatggtttaata

SEQ ID NO: 144462 - DNA, 25 bp, Canis familiaris
gtgatattactgcttcctttaagtt

SEQ ID NO: 144463 - DNA, 25 bp, Canis familiaris
gtggttactgtttccagttgaatgg

SEQ ID NO: 144464 - DNA, 25 bp, Canis familiaris
gtggacggtggttccgtagtatgga

SEQ ID NO: 144465 - DNA, 25 bp, Canis familiaris
gtgtacgttcgtgccatgattgagt

SEQ ID NO: 144466 - DNA, 25 bp, Canis familiaris
gtgtattgttcagtgccaactcgtt

SEQ ID NO: 144467 - DNA, 25 bp, Canis familiaris
gtgattgttcaagctaccatctgtt

SEQ ID NO: 144468 - DNA, 25 bp, Canis familiaris
gtgacgttcattgagactccattat

SEQ ID NO: 144469 - DNA, 25 bp, Canis familiaris
gtgacgttcatctgagactcactaa

SEQ ID NO: 144470 - DNA, 25 bp, Canis familiaris
gtgacgctattctcaaatgcagatg

SEQ ID NO: 144471 - DNA, 25 bp, Canis familiaris
gtgagaccattctacacaatcaagc

SEQ ID NO: 144472 - DNA, 25 bp, Canis familiaris
gtgtgacagctgacgacaccttact

SEQ ID NO: 144473 - DNA, 25 bp, Canis familiaris
gtgatgaccacttgacacttgtcaa

SEQ ID NO: 144474 - DNA, 25 bp, Canis familiaris
gtgatgcccatggatggcattttaa

SEQ ID NO: 144475 - DNA, 25 bp, Canis familiaris
gtgatgacgaggatgtgatctcgag

SEQ ID NO: 144476 - DNA, 25 bp, Canis familiaris
gtgatccaggagtgagctctcgcag

SEQ ID NO: 144477 - DNA, 25 bp, Canis familiaris
gtgactgtagaaaagctctccatgt

SEQ ID NO: 144478 - DNA, 25 bp, Canis familiaris
gtgactgtatacatgaggccatcaa

SEQ ID NO: 144479 - DNA, 25 bp, Canis familiaris
gtgacgctctacaagatgggctttc

SEQ ID NO: 144480 - DNA, 25 bp, Canis familiaris
gtgaccttacattatgaacctgatg

SEQ ID NO: 144481 - DNA, 25 bp, Canis familiaris
gtgaccattcacttttaggctgagc

SEQ ID NO: 144482 - DNA, 25 bp, Canis familiaris
gtgaccattcactgtgtgtagcgtg

SEQ ID NO: 144483 - DNA, 25 bp, Canis familiaris
gtgacctggatgtggtgttggctga

SEQ ID NO: 144484 - DNA, 25 bp, Canis familiaris
gtgatctcaggttcggtgtaggcgt

SEQ ID NO: 144485 - DNA, 25 bp, Canis familiaris
gtgatatcagtaacagagctctagg

SEQ ID NO: 144486 - DNA, 25 bp, Canis familiaris
gtgatctcacaggtcaactcatcct

SEQ ID NO: 144487 - DNA, 25 bp, Canis familiaris
gtgatccacatgggcaatcctgagc

SEQ ID NO: 144488 - DNA, 25 bp, Canis familiaris
gtgatctcaaggccagatgacttcc

SEQ ID NO: 144489 - DNA, 25 bp, Canis familiaris
gtgattcaaagaggtacatgccccc

SEQ ID NO: 144490 - DNA, 25 bp, Canis familiaris
gtgagatggaagcagtgcacccgcc

SEQ ID NO: 144491 - DNA, 25 bp, Canis familiaris
gtgagtcgaagcgtgtgatcccacc

SEQ ID NO: 144492 - DNA, 25 bp, Canis familiaris
ggataaggaccatgatcccaccatt

SEQ ID NO: 144493 - DNA, 25 bp, Canis familiaris
gtgatatagaataactggcctacca

SEQ ID NO: 144494 - DNA, 25 bp, Canis familiaris
gtgatatttgttttaccttccagcg

SEQ ID NO: 144495 - DNA, 25 bp, Canis familiaris
gtgagattctcagcattatcccatc

SEQ ID NO: 144496 - DNA, 25 bp, Canis familiaris
gtgagatttatactgtatcaatgtc

SEQ ID NO: 144497 - DNA, 25 bp, Canis familiaris
gtgatgtttccagtgaataataaat

SEQ ID NO: 144498 - DNA, 25 bp, Canis familiaris
gtgatgtttccatgttactgtcaac

SEQ ID NO: 144499 - DNA, 25 bp, Canis familiaris
gtgtttttagccatctctggaacct

SEQ ID NO: 144500 - DNA, 25 bp, Canis familiaris
gtgtttattgccggaagctggaccc

SEQ ID NO: 144501 - DNA, 25 bp, Canis familiaris
ggtgttcaatacacaccggttccct

SEQ ID NO: 144502 - DNA, 25 bp, Canis familiaris
gtgggatagtacactccaggttttt

SEQ ID NO: 144503 - DNA, 25 bp, Canis familiaris
gtgttacttaaattccagttttctg

SEQ ID NO: 144504 - DNA, 25 bp, Canis familiaris
gtgttactgtaggggtattgttttg

SEQ ID NO: 144505 - DNA, 25 bp, Canis familiaris
gtgttggtgaattggttttgttttg

SEQ ID NO: 144506 - DNA, 25 bp, Canis familiaris
gtgagggtgatttcttttatttttg

SEQ ID NO: 144507 - DNA, 25 bp, Canis familiaris
gtgagggtttgtaatggtgcttatt

SEQ ID NO: 144508 - DNA, 25 bp, Canis familiaris
gtgaggcttgtaattaagtgcttta

SEQ ID NO: 144509 - DNA, 25 bp, Canis familiaris
gtgagtgtccatatccaatgtgtgg

SEQ ID NO: 144510 - DNA, 25 bp, Canis familiaris
gtgagctgtcctatcaggtcttgat

SEQ ID NO: 144511 - DNA, 25 bp, Canis familiaris
gtgaggctcactggaaagctcctgg

SEQ ID NO: 144512 - DNA, 25 bp, Canis familiaris
gtgaggctgaccaagaacatgcctg

SEQ ID NO: 144513 - DNA, 25 bp, Canis familiaris
gtgaggcagcccagagagcatgagc

SEQ ID NO: 144514 - DNA, 25 bp, Canis familiaris
gtgaccgcactcagtcagatgtgct

SEQ ID NO: 144515 - DNA, 25 bp, Canis familiaris
gtgaccagcgcctggagtggtagcc

SEQ ID NO: 144516 - DNA, 25 bp, Canis familiaris
gtgaccacgtaagactgtcaatgcc

SEQ ID NO: 144517 - DNA, 25 bp, Canis familiaris
gtgacccgctatactacaacagatc

SEQ ID NO: 144518 - DNA, 25 bp, Canis familiaris
gggcccctaccgaataaatctgcca

SEQ ID NO: 144519 - DNA, 25 bp, Canis familiaris
gggaggccttccaaattaatgccca

SEQ ID NO: 144520 - DNA, 25 bp, Canis familiaris
ggtaggacttcaaactcgttccacg

SEQ ID NO: 144521 - DNA, 25 bp, Canis familiaris
gtgtatgggcctaaaaggtccctag

SEQ ID NO: 144522 - DNA, 25 bp, Canis familiaris
gtgtttggagattcaaaggcccctg

SEQ ID NO: 144523 - DNA, 25 bp, Canis familiaris
gtgtcggagggaacaaggcctgcct

SEQ ID NO: 144524 - DNA, 25 bp, Canis familiaris
gtgatcgggtggacaccacgtcacc

SEQ ID NO: 144525 - DNA, 25 bp, Canis familiaris
gtgatcaggcttggtcagcctagcc

SEQ ID NO: 144526 - DNA, 25 bp, Canis familiaris
gtgagcagagctctgtatctccacc

SEQ ID NO: 144527 - DNA, 25 bp, Canis familiaris
ggatcatggctgataacccatcctg

SEQ ID NO: 144528 - DNA, 25 bp, Canis familiaris
gtgattggggctaaccagcatccgt

SEQ ID NO: 144529 - DNA, 25 bp, Canis familiaris
gtgttgcggcgaagtccagtgtggg

SEQ ID NO: 144530 - DNA, 25 bp, Canis familiaris
gtgttgggagagctccaggtcgtgt

SEQ ID NO: 144531 - DNA, 25 bp, Canis familiaris
gtgtttaagggctgtgtgtctgtgt

SEQ ID NO: 144532 - DNA, 25 bp, Canis familiaris
gtgttctcaagtctgggggttgtcc

SEQ ID NO: 144533 - DNA, 25 bp, Canis familiaris
ggtcccaaacctgcagaggtggtgc

SEQ ID NO: 144534 - DNA, 25 bp, Canis familiaris
gggcccagccccaaatggggggcat

SEQ ID NO: 144535 - DNA, 25 bp, Canis familiaris
gggccacaggccataatttgttaac

SEQ ID NO: 144536 - DNA, 25 bp, Canis familiaris
gtgtcgaggcccacaatttgatgta

SEQ ID NO: 144537 - DNA, 25 bp, Canis familiaris
gtgtcaagggttccagtttctctac

SEQ ID NO: 144538 - DNA, 25 bp, Canis familiaris
gtgtcaatcaggtaccgtgtctcct

SEQ ID NO: 144539 - DNA, 25 bp, Canis familiaris
gtgataccacgttcacgttcagctt

SEQ ID NO: 144540 - DNA, 25 bp, Canis familiaris
gtgagaatctcgaactgagtctctt

SEQ ID NO: 144541 - DNA, 25 bp, Canis familiaris
gtgaggacttcaagctgggcaccat

SEQ ID NO: 144542 - DNA, 25 bp, Canis familiaris
gtgagctgacttaggtgttgacttg

SEQ ID NO: 144543 - DNA, 25 bp, Canis familiaris
gtgacgactgttgtctgggtgtgtc

SEQ ID NO: 144544 - DNA, 25 bp, Canis familiaris
gtgaccctgttattgctgggcatgg

SEQ ID NO: 144545 - DNA, 25 bp, Canis familiaris
gtgacccatgactttgtgatagctg

SEQ ID NO: 144546 - DNA, 25 bp, Canis familiaris
gtgacctcagtgattgagtgacttg

SEQ ID NO: 144547 - DNA, 25 bp, Canis familiaris
gtgatcatttggacttgactgacat

SEQ ID NO: 144548 - DNA, 25 bp, Canis familiaris
ggtcgtctcgtgctgcacgatcaac

SEQ ID NO: 144549 - DNA, 25 bp, Canis familiaris
gtgattgaccctcggcaggaacagc

SEQ ID NO: 144550 - DNA, 25 bp, Canis familiaris
gtgttagcacagctggcctaagcac

SEQ ID NO: 144551 - DNA, 25 bp, Canis familiaris
gtgattagtcagagtgtccaacagg

SEQ ID NO: 144552 - DNA, 25 bp, Canis familiaris
gtgatgtacgagatgtgatcccgag

SEQ ID NO: 144553 - DNA, 25 bp, Canis familiaris
gtgattgcacggacatgatgataac

SEQ ID NO: 144554 - DNA, 25 bp, Canis familiaris
gtgatcggcctgcatgaggatgacg

SEQ ID NO: 144555 - DNA, 25 bp, Canis familiaris
gtgaccagtcatctcatgaggaccc

SEQ ID NO: 144556 - DNA, 25 bp, Canis familiaris
gtgtcctgtcacgttggagtcggaa

SEQ ID NO: 144557 - DNA, 25 bp, Canis familiaris
gtgagcctgtacctcggaaggtcac

SEQ ID NO: 144558 - DNA, 25 bp, Canis familiaris
gtgacctgttgcccaggactttgac

SEQ ID NO: 144559 - DNA, 25 bp, Canis familiaris
gtgagcatgttttccagatactttt

SEQ ID NO: 144560 - DNA, 25 bp, Canis familiaris
gtgagacatttagaatagcttgtgt

SEQ ID NO: 144561 - DNA, 25 bp, Canis familiaris
gtgtacttctaggttactggtttgt

SEQ ID NO: 144562 - DNA, 25 bp, Canis familiaris
gtgtaccccgaggattcaaatgttt

SEQ ID NO: 144563 - DNA, 25 bp, Canis familiaris
gtgattccacccagagtcagaagtc

SEQ ID NO: 144564 - DNA, 25 bp, Canis familiaris
gtgattccacccagagtcagaagtc

SEQ ID NO: 144565 - DNA, 25 bp, Canis familiaris
gtgattccacccagagtcagaagtc

SEQ ID NO: 144566 - DNA, 25 bp, Canis familiaris
gtgattccacccagagtcagaagtc

SEQ ID NO: 144567 - DNA, 25 bp, Canis familiaris
gtgattccacccagagtcagaagtc

SEQ ID NO: 144568 - DNA, 25 bp, Canis familiaris
gtgattccaccataggagctgactt

SEQ ID NO: 144569 - DNA, 25 bp, Canis familiaris
gtgattcctgcctcagagagagctt

SEQ ID NO: 144570 - DNA, 25 bp, Canis familiaris
gtgatctccagcctccataagaggt

SEQ ID NO: 144571 - DNA, 25 bp, Canis familiaris
gtgatctcgagaggcacatccaagg

SEQ ID NO: 144572 - DNA, 25 bp, Canis familiaris
gtgagtttgagcctcatgtcaagtt

SEQ ID NO: 144573 - DNA, 25 bp, Canis familiaris
gtgatgtgactgtgtatgtacgtgt

SEQ ID NO: 144574 - DNA, 25 bp, Canis familiaris
gtgaggcacagatatgcagtactga

SEQ ID NO: 144575 - DNA, 25 bp, Canis familiaris
gtgaggcagcactgtgattgatgca

SEQ ID NO: 144576 - DNA, 25 bp, Canis familiaris
gtgagcacacccgtgtgtgcatgcc

SEQ ID NO: 144577 - DNA, 25 bp, Canis familiaris
gtgagactcagccgctgtctcgccg

SEQ ID NO: 144578 - DNA, 25 bp, Canis familiaris
gtgaggtgcacgtctgtctgcaccc

SEQ ID NO: 144579 - DNA, 25 bp, Canis familiaris
gtgatggtcaagattctccgtccac

SEQ ID NO: 144580 - DNA, 25 bp, Canis familiaris
gtgagaggcagacgcttctctctgt

SEQ ID NO: 144581 - DNA, 25 bp, Canis familiaris
gtgatgatgagccctctgtctattc

SEQ ID NO: 144582 - DNA, 25 bp, Canis familiaris
gtgagaggcagctatctgcactcta

SEQ ID NO: 144583 - DNA, 25 bp, Canis familiaris
gtgagaccagcattatcctgatacc

SEQ ID NO: 144584 - DNA, 25 bp, Canis familiaris
gtgacctgagatgtccttatctctg

SEQ ID NO: 144585 - DNA, 25 bp, Canis familiaris
gtgagcttcagggctccttgatgac

SEQ ID NO: 144586 - DNA, 25 bp, Canis familiaris
gtgagatatgaaccttttgcagacc

SEQ ID NO: 144587 - DNA, 25 bp, Canis familiaris
gtgagatgaacacctctgctgtgaa

SEQ ID NO: 144588 - DNA, 25 bp, Canis familiaris
gtgagcagcatatggtctctgttta

SEQ ID NO: 144589 - DNA, 25 bp, Canis familiaris
gtgagcagctactgtaactttttta

SEQ ID NO: 144590 - DNA, 25 bp, Canis familiaris
gtgagccaaccttaaaatcaattta

SEQ ID NO: 144591 - DNA, 25 bp, Canis familiaris
gtgaccaacctcgaatatacagaaa

SEQ ID NO: 144592 - DNA, 25 bp, Canis familiaris
gtgaccaacctttgttcctaaatct

SEQ ID NO: 144593 - DNA, 25 bp, Canis familiaris
ggatcgtcttccatttcgtaaatct

SEQ ID NO: 144594 - DNA, 25 bp, Canis familiaris
gtgtcgtcccgtgattcggaacatc

SEQ ID NO: 144595 - DNA, 25 bp, Canis familiaris
tttagtccccttttcagggatgagc

SEQ ID NO: 144596 - DNA, 25 bp, Canis familiaris
gtgtttctcccacattagggatgag

SEQ ID NO: 144597 - DNA, 25 bp, Canis familiaris
gtgttttccagaccacaagtgttga

SEQ ID NO: 144598 - DNA, 25 bp, Canis familiaris
gtgttatacaagtttatggtgtcta

SEQ ID NO: 144599 - DNA, 25 bp, Canis familiaris
gtgttatgtctttttggactgtcga

SEQ ID NO: 144600 - DNA, 25 bp, Canis familiaris
gtgtttagtaatttacacttggaca

SEQ ID NO: 144601 - DNA, 25 bp, Canis familiaris
gtgttgcctggattttcctttgtac

SEQ ID NO: 144602 - DNA, 25 bp, Canis familiaris
gtgatgttctggtttcttatcttta

SEQ ID NO: 144603 - DNA, 25 bp, Canis familiaris
gtgagtagcttgtttccattttttg

SEQ ID NO: 144604 - DNA, 25 bp, Canis familiaris
gtgagatacagaattcccctttctt

SEQ ID NO: 144605 - DNA, 25 bp, Canis familiaris
gtgagtacagtattttgtttctgct

SEQ ID NO: 144606 - DNA, 25 bp, Canis familiaris
gtgagcctcagtgttggacttctgc

SEQ ID NO: 144607 - DNA, 25 bp, Canis familiaris
gtgacctcgctaactggatgatacc

SEQ ID NO: 144608 - DNA, 25 bp, Canis familiaris
gtgacctcgtacataaagctccaga

SEQ ID NO: 144609 - DNA, 25 bp, Canis familiaris
gtgagcccatctgagtaaggcccgt

SEQ ID NO: 144610 - DNA, 25 bp, Canis familiaris
gtgagccagcttgttatgggcaccc

SEQ ID NO: 144611 - DNA, 25 bp, Canis familiaris
gtgagcgctgcctatttggggaagc

SEQ ID NO: 144612 - DNA, 25 bp, Canis familiaris
gtgagcgtccagtttgggcaagtgg

SEQ ID NO: 144613 - DNA, 25 bp, Canis familiaris
gtgatgcccaagctgctgaggcaga

SEQ ID NO: 144614 - DNA, 25 bp, Canis familiaris
gtgatgcagcgatcaatcggttgac

SEQ ID NO: 144615 - DNA, 25 bp, Canis familiaris
gtgagagagagagcatgcgtgtgtg

SEQ ID NO: 144616 - DNA, 25 bp, Canis familiaris
gtgagagacacaccaggtagtggcg

SEQ ID NO: 144617 - DNA, 25 bp, Canis familiaris
gtgaggcataggaaggccaggcctg

SEQ ID NO: 144618 - DNA, 25 bp, Canis familiaris
gtgaccacagagaggctcaggagcc

SEQ ID NO: 144619 - DNA, 25 bp, Canis familiaris
gtgatcccaagcagctgctgctaag

SEQ ID NO: 144620 - DNA, 25 bp, Canis familiaris
gtgtcccaagcatcgtctaatcttg

SEQ ID NO: 144621 - DNA, 25 bp, Canis familiaris
gtgtccacaaggggcttgcaacaaa

SEQ ID NO: 144622 - DNA, 25 bp, Canis familiaris
gtgttccggggactgtgccagaaag

SEQ ID NO: 144623 - DNA, 25 bp, Canis familiaris
gtgtacgcgtgggaggtctaatata

SEQ ID NO: 144624 - DNA, 25 bp, Canis familiaris
gtgtacacctttgggtctgagtacc

SEQ ID NO: 144625 - DNA, 25 bp, Canis familiaris
gtgtttcgttgagagcttagtgcca

SEQ ID NO: 144626 - DNA, 25 bp, Canis familiaris
gtgtttcagtgttgtagtttgcaga

SEQ ID NO: 144627 - DNA, 25 bp, Canis familiaris
gtgttatcagtagtgttgtagctgg

SEQ ID NO: 144628 - DNA, 25 bp, Canis familiaris
gtgtctataatgttttgtaggggtc

SEQ ID NO: 144629 - DNA, 25 bp, Canis familiaris
gtgatcctaagtgtattgatgctgg

SEQ ID NO: 144630 - DNA, 25 bp, Canis familiaris
gtgatagctgaaagactcgtgtgtg

SEQ ID NO: 144631 - DNA, 25 bp, Canis familiaris
gtgtttggatatctcgttgtaagga

SEQ ID NO: 144632 - DNA, 25 bp, Canis familiaris
gtgtcttcggactcggataaagggc

SEQ ID NO: 144633 - DNA, 25 bp, Canis familiaris
gtgttacgaacaccaaatgtaaggg

SEQ ID NO: 144634 - DNA, 25 bp, Canis familiaris
gtgttctctgaagccaaactgaaag

SEQ ID NO: 144635 - DNA, 25 bp, Canis familiaris
gtgatgccctggtttcagatacgga

SEQ ID NO: 144636 - DNA, 25 bp, Canis familiaris
gtgagttggcaacttgcagattcag

SEQ ID NO: 144637 - DNA, 25 bp, Canis familiaris
gtgtaatggcaacttggtaagccgg

SEQ ID NO: 144638 - DNA, 25 bp, Canis familiaris
gtgtacagacactttggcaaggccc

SEQ ID NO: 144639 - DNA, 25 bp, Canis familiaris
gtgtacagacactttggcaaggccc

SEQ ID NO: 144640 - DNA, 25 bp, Canis familiaris
gtgatgcatcattgacttgggagag

SEQ ID NO: 144641 - DNA, 25 bp, Canis familiaris
gtgatgctcacacactggagagggc

SEQ ID NO: 144642 - DNA, 25 bp, Canis familiaris
gtgtctcataggtctgtaatttgtc

SEQ ID NO: 144643 - DNA, 25 bp, Canis familiaris
gtgatcttcatggactgtaatctac

SEQ ID NO: 144644 - DNA, 25 bp, Canis familiaris
gtgatttgagcgttggattgtacag

SEQ ID NO: 144645 - DNA, 25 bp, Canis familiaris
gtgtttcaggcttggtgttgcaccc

SEQ ID NO: 144646 - DNA, 25 bp, Canis familiaris
gtgagttatgactgaatgttgttcc

SEQ ID NO: 144647 - DNA, 25 bp, Canis familiaris
gtgtagcttcaattggagtagttcc

SEQ ID NO: 144648 - DNA, 25 bp, Canis familiaris
gtgatagcccactggatggcatttt

SEQ ID NO: 144649 - DNA, 25 bp, Canis familiaris
gtgataccgagacacatctgttctg

SEQ ID NO: 144650 - DNA, 25 bp, Canis familiaris
gtgagaccagacctcacatcttgtt

SEQ ID NO: 144651 - DNA, 25 bp, Canis familiaris
gtggacctgctcataagcggtttct

SEQ ID NO: 144652 - DNA, 25 bp, Canis familiaris
gtgtacgatttgaccaagtttttgg

SEQ ID NO: 144653 - DNA, 25 bp, Canis familiaris
gtgtacgtttacttaggtctgcagg

SEQ ID NO: 144654 - DNA, 25 bp, Canis familiaris
gtgtccgtgtgtgcttaggttctaa

SEQ ID NO: 144655 - DNA, 25 bp, Canis familiaris
gtgatcccggattttagagagactg

SEQ ID NO: 144656 - DNA, 25 bp, Canis familiaris
gtgatcccgtttttgacggctcatg

SEQ ID NO: 144657 - DNA, 25 bp, Canis familiaris
gtgagcccgtcttaatagctccact

SEQ ID NO: 144658 - DNA, 25 bp, Canis familiaris
gtgtccctgactacaagattccttt

SEQ ID NO: 144659 - DNA, 25 bp, Canis familiaris
gtgtcggtgaaagatgtctctcccc

SEQ ID NO: 144660 - DNA, 25 bp, Canis familiaris
gtgttgcgtctggaggatggtcccg

SEQ ID NO: 144661 - DNA, 25 bp, Canis familiaris
gtgttggccggaaagattcccacca

SEQ ID NO: 144662 - DNA, 25 bp, Canis familiaris
gtgttggccgtgttcacagttacac

SEQ ID NO: 144663 - DNA, 25 bp, Canis familiaris
gtgttggcaccaactcggtgataca

SEQ ID NO: 144664 - DNA, 25 bp, Canis familiaris
gtgtctggcaaaacctaggagtatc

SEQ ID NO: 144665 - DNA, 25 bp, Canis familiaris
gtgatgggcgtgaaccatgagaagt

SEQ ID NO: 144666 - DNA, 25 bp, Canis familiaris
gtgaggcactgcattctgagaaggt

SEQ ID NO: 144667 - DNA, 25 bp, Canis familiaris
gtgggacgtatcgtaatcacggtgt

SEQ ID NO: 144668 - DNA, 25 bp, Canis familiaris
gtgtagcacgttgaatcgaccggtc

SEQ ID NO: 144669 - DNA, 25 bp, Canis familiaris
gggagccgtgactgacgacgaagtc

SEQ ID NO: 144670 - DNA, 25 bp, Canis familiaris
gtgaggccgtggtgacaggggtgac

SEQ ID NO: 144671 - DNA, 25 bp, Canis familiaris
gtgatccacggggtgacggggaatc

SEQ ID NO: 144672 - DNA, 25 bp, Canis familiaris
gtgatccagtggctgaagcgcttgg

SEQ ID NO: 144673 - DNA, 25 bp, Canis familiaris
gtgatccactgtggtctagctgcag

SEQ ID NO: 144674 - DNA, 25 bp, Canis familiaris
gtgattgccttggattagctgggga

SEQ ID NO: 144675 - DNA, 25 bp, Canis familiaris
gtgttgcctcagcattaagggcatt

SEQ ID NO: 144676 - DNA, 25 bp, Canis familiaris
gtgttgtccagccagaaacgtcatc

SEQ ID NO: 144677 - DNA, 25 bp, Canis familiaris
gtgtaggtcacccatgagaagatcc

SEQ ID NO: 144678 - DNA, 25 bp, Canis familiaris
gtgtacttatcaagatgagcactga

SEQ ID NO: 144679 - DNA, 25 bp, Canis familiaris
gtgatcagcagttctctgtggatat

SEQ ID NO: 144680 - DNA, 25 bp, Canis familiaris
gtgatcagtgttactctgtgcatta

SEQ ID NO: 144681 - DNA, 25 bp, Canis familiaris
gtgatactctatacgtgttcgattt

SEQ ID NO: 144682 - DNA, 25 bp, Canis familiaris
gtgttgtctactggctgtacgtgaa

SEQ ID NO: 144683 - DNA, 25 bp, Canis familiaris
gtgttgggcattgatgtcatcctga

SEQ ID NO: 144684 - DNA, 25 bp, Canis familiaris
tgtttaaatgcaaagcccccaaaat

SEQ ID NO: 144685 - DNA, 25 bp, Canis familiaris
gtgtataaggcaaatgtccccaaag

SEQ ID NO: 144686 - DNA, 25 bp, Canis familiaris
gtgtatacagtagattcccattatc

SEQ ID NO: 144687 - DNA, 25 bp, Canis familiaris
gtgtactcagtatactgcccttttt

SEQ ID NO: 144688 - DNA, 25 bp, Canis familiaris
gtgttgctaggatacccttgtgcat

SEQ ID NO: 144689 - DNA, 25 bp, Canis familiaris
gtgattttgtgctgagcccatagtt

SEQ ID NO: 144690 - DNA, 25 bp, Canis familiaris
gtgatatttcacttgctgccagaaa

SEQ ID NO: 144691 - DNA, 25 bp, Canis familiaris
gtgatttattttggctctgaagaac

SEQ ID NO: 144692 - DNA, 25 bp, Canis familiaris
gtgttgatattcctggctgtgagga

SEQ ID NO: 144693 - DNA, 25 bp, Canis familiaris
gtgtttgcattgtggcattgccgat

SEQ ID NO: 144694 - DNA, 25 bp, Canis familiaris
gtgtttcctgggctatgctagtagc

SEQ ID NO: 144695 - DNA, 25 bp, Canis familiaris
gtgtttcctggcagattgaagcccg

SEQ ID NO: 144696 - DNA, 25 bp, Canis familiaris
gtgttctcctagagttataacctta

SEQ ID NO: 144697 - DNA, 25 bp, Canis familiaris
gtgttccatttaaccgaatcaccct

SEQ ID NO: 144698 - DNA, 25 bp, Canis familiaris
gtggtcacttttattgagtcaccga

SEQ ID NO: 144699 - DNA, 25 bp, Canis familiaris
gtgaggcagctgtttgtttggccct

SEQ ID NO: 144700 - DNA, 25 bp, Canis familiaris
gtgatgtgcactgattttagaccgg

SEQ ID NO: 144701 - DNA, 25 bp, Canis familiaris
gtgatggatgtattatttaacctta

SEQ ID NO: 144702 - DNA, 25 bp, Canis familiaris
gtgagtttgacgatctcgaccgtag

SEQ ID NO: 144703 - DNA, 25 bp, Canis familiaris
gtgtctattgacgatttcaactcgg

SEQ ID NO: 144704 - DNA, 25 bp, Canis familiaris
gtgatcacagagcctatttacccag

SEQ ID NO: 144705 - DNA, 25 bp, Canis familiaris
gtggacaagctgcagtattcccggg

SEQ ID NO: 144706 - DNA, 25 bp, Canis familiaris
gtgatggccagctgattagttccgg

SEQ ID NO: 144707 - DNA, 25 bp, Canis familiaris
gtgaggactccatcaagttgcctgc

SEQ ID NO: 144708 - DNA, 25 bp, Canis familiaris
gtgagcagactccacaaaggctcct

SEQ ID NO: 144709 - DNA, 25 bp, Canis familiaris
gtgatgcattgtgattgaaggccct

SEQ ID NO: 144710 - DNA, 25 bp, Canis familiaris
gtgtcagtgcaggaatgggctccca

SEQ ID NO: 144711 - DNA, 25 bp, Canis familiaris
gtgtactgagaatctagccccaact

SEQ ID NO: 144712 - DNA, 25 bp, Canis familiaris
gtgtacgaataccacaggccagata

SEQ ID NO: 144713 - DNA, 25 bp, Canis familiaris
gtgatcacgcacaagaacggggaat

SEQ ID NO: 144714 - DNA, 25 bp, Canis familiaris
gtgatcccctcattacaggagaaat

SEQ ID NO: 144715 - DNA, 25 bp, Canis familiaris
gtgttaccgataccgggaggacctg

SEQ ID NO: 144716 - DNA, 25 bp, Canis familiaris
gtgtctactaaaaagggaacctgct

SEQ ID NO: 144717 - DNA, 25 bp, Canis familiaris
gtgttccgaaaattggtattcctga

SEQ ID NO: 144718 - DNA, 25 bp, Canis familiaris
gtgatttttaaatgtctcatatact

SEQ ID NO: 144719 - DNA, 25 bp, Canis familiaris
gtgttcctttaatgtactgtactgc

SEQ ID NO: 144720 - DNA, 25 bp, Canis familiaris
gtgttcttctctgacctgaaatacg

SEQ ID NO: 144721 - DNA, 25 bp, Canis familiaris
gtgttttcctgaacactgatggaaa

SEQ ID NO: 144722 - DNA, 25 bp, Canis familiaris
gtgttcttactttactctggtatat

SEQ ID NO: 144723 - DNA, 25 bp, Canis familiaris
gtgattcttaacaattggcttttta

SEQ ID NO: 144724 - DNA, 25 bp, Canis familiaris
gtgattccttttttgagttggccca

SEQ ID NO: 144725 - DNA, 25 bp, Canis familiaris
gtgttacttttgtgggccatggcca

SEQ ID NO: 144726 - DNA, 25 bp, Canis familiaris
gtgtaacttcctctggccaaggaaa

SEQ ID NO: 144727 - DNA, 25 bp, Canis familiaris
gtgtcaggtcccagttacaaaacaa

SEQ ID NO: 144728 - DNA, 25 bp, Canis familiaris
gtgttgctttttatatacaaagaaa

SEQ ID NO: 144729 - DNA, 25 bp, Canis familiaris
gtgtgcctcttgctacttttaaaaa

SEQ ID NO: 144730 - DNA, 25 bp, Canis familiaris
gtgtactcttagcacatttcaataa

SEQ ID NO: 144731 - DNA, 25 bp, Canis familiaris
gtgatcacctttgcaatgttacata

SEQ ID NO: 144732 - DNA, 25 bp, Canis familiaris
gtgatgcccatatttctagcttaag

SEQ ID NO: 144733 - DNA, 25 bp, Canis familiaris
gtgagactcatattttattatccag

SEQ ID NO: 144734 - DNA, 25 bp, Canis familiaris
gtgagaccaacctagtgtaacgagt

SEQ ID NO: 144735 - DNA, 25 bp, Canis familiaris
ggaaaccacgaattgtaatctatac

SEQ ID NO: 144736 - DNA, 25 bp, Canis familiaris
ggaaataactactgtgaactattga

SEQ ID NO: 144737 - DNA, 25 bp, Canis familiaris
gtggcaattcctttttggactttga

SEQ ID NO: 144738 - DNA, 25 bp, Canis familiaris
gggatggtccatgttttcaagagtg

SEQ ID NO: 144739 - DNA, 25 bp, Canis familiaris
gtgtgtcgtcacactactacgaagg

SEQ ID NO: 144740 - DNA, 25 bp, Canis familiaris
gtgtctcgtacagctttgactcaag

SEQ ID NO: 144741 - DNA, 25 bp, Canis familiaris
gtgtttggaccaatttgtccaaggt

SEQ ID NO: 144742 - DNA, 25 bp, Canis familiaris
gtgattttaccaaggctgtacatgt

SEQ ID NO: 144743 - DNA, 25 bp, Canis familiaris
gtgttcaaacgagcacagtgatcag

SEQ ID NO: 144744 - DNA, 25 bp, Canis familiaris
gtgttgacaacgttccgatgatcca

SEQ ID NO: 144745 - DNA, 25 bp, Canis familiaris
gtgttacaagagttgctggagacag

SEQ ID NO: 144746 - DNA, 25 bp, Canis familiaris
gtgttgacgcgatgtgatggtctgc

SEQ ID NO: 144747 - DNA, 25 bp, Canis familiaris
gtgatctgtatacgatggaggtctg

SEQ ID NO: 144748 - DNA, 25 bp, Canis familiaris
gtgaggatagagctgtggccctgat

SEQ ID NO: 144749 - DNA, 25 bp, Canis familiaris
gtgagtaacacttgtacctgatgtc

SEQ ID NO: 144750 - DNA, 25 bp, Canis familiaris
gtgagtaaatccttaactgtttttg

SEQ ID NO: 144751 - DNA, 25 bp, Canis familiaris
gtgaggactaccttaagaattcctt

SEQ ID NO: 144752 - DNA, 25 bp, Canis familiaris
gtgaggactaccttatgatttcctt

SEQ ID NO: 144753 - DNA, 25 bp, Canis familiaris
gtgtatgcacgtgcgttgtttcctt

SEQ ID NO: 144754 - DNA, 25 bp, Canis familiaris
gtgtaacattatccgtttttcaggt

SEQ ID NO: 144755 - DNA, 25 bp, Canis familiaris
gtgttacaattcggcattttgagaa

SEQ ID NO: 144756 - DNA, 25 bp, Canis familiaris
gtgttcctttgccgatttttgaatg

SEQ ID NO: 144757 - DNA, 25 bp, Canis familiaris
gtgagtttcttacgtttcttgtcga

SEQ ID NO: 144758 - DNA, 25 bp, Canis familiaris
gtgagtttcttgtctgatgtactta

SEQ ID NO: 144759 - DNA, 25 bp, Canis familiaris
gtgatttcatattgttggaacattc

SEQ ID NO: 144760 - DNA, 25 bp, Canis familiaris
gtgttctcatgaattgagggcagta

SEQ ID NO: 144761 - DNA, 25 bp, Canis familiaris
gtgagagtgtgaagtgggtgaggag

SEQ ID NO: 144762 - DNA, 25 bp, Canis familiaris
gtgagagtgcgagtttgtgtaggag

SEQ ID NO: 144763 - DNA, 25 bp, Canis familiaris
gtggagcgcgaggttgcgtcacaac

SEQ ID NO: 144764 - DNA, 25 bp, Canis familiaris
gtgtaccaggggtcagccctgacag

SEQ ID NO: 144765 - DNA, 25 bp, Canis familiaris
gtgatacacagggcccaacctgaca

SEQ ID NO: 144766 - DNA, 25 bp, Canis familiaris
gtgatcccgagaaggcaacattcca

SEQ ID NO: 144767 - DNA, 25 bp, Canis familiaris
gtgatccttgagttcagaccaaccc

SEQ ID NO: 144768 - DNA, 25 bp, Canis familiaris
gtgttctgtggaccataccaaccag

SEQ ID NO: 144769 - DNA, 25 bp, Canis familiaris
gtgttcagcaggttaaccgattctg

SEQ ID NO: 144770 - DNA, 25 bp, Canis familiaris
gtgttgaaggcacaagcacagagtc

SEQ ID NO: 144771 - DNA, 25 bp, Canis familiaris
gtgttgaattgggaaaacgtcatgg

SEQ ID NO: 144772 - DNA, 25 bp, Canis familiaris
gtgtatgactatggggaaagggctg

SEQ ID NO: 144773 - DNA, 25 bp, Canis familiaris
gtgtaattttcacaggaggttttat

SEQ ID NO: 144774 - DNA, 25 bp, Canis familiaris
gtgtattttagggaggggcctcgtg

SEQ ID NO: 144775 - DNA, 25 bp, Canis familiaris
gtgttgtttaccctgggttctgagg

SEQ ID NO: 144776 - DNA, 25 bp, Canis familiaris
gtgtttgttcatgtgaggttcttgg

SEQ ID NO: 144777 - DNA, 25 bp, Canis familiaris
gtgatattttatttgagacttttta

SEQ ID NO: 144778 - DNA, 25 bp, Canis familiaris
gtgattttatgatatgtagtaattg

SEQ ID NO: 144779 - DNA, 25 bp, Canis familiaris
gtgatactttattttctggaattct

SEQ ID NO: 144780 - DNA, 25 bp, Canis familiaris
gtgatttggtcttttgtggctttct

SEQ ID NO: 144781 - DNA, 25 bp, Canis familiaris
gtgatattacgtgttttgtttgttt

SEQ ID NO: 144782 - DNA, 25 bp, Canis familiaris
gtgataaatctgtgtttttctttga

SEQ ID NO: 144783 - DNA, 25 bp, Canis familiaris
gtgatccaatcattttttactccct

SEQ ID NO: 144784 - DNA, 25 bp, Canis familiaris
gtgatccgatcttgatttttctgaa

SEQ ID NO: 144785 - DNA, 25 bp, Canis familiaris
gtgatccagttctaaacttcatatt

SEQ ID NO: 144786 - DNA, 25 bp, Canis familiaris
ggtcctgcctaaaatgccaagactg

SEQ ID NO: 144787 - DNA, 25 bp, Canis familiaris
gtgtcctgacttaacataatagcca

SEQ ID NO: 144788 - DNA, 25 bp, Canis familiaris
gtgatatcgccttaacacagatagc

SEQ ID NO: 144789 - DNA, 25 bp, Canis familiaris
gtgtagcgcacctgcaagcgcaagc

SEQ ID NO: 144790 - DNA, 25 bp, Canis familiaris
gtgataagagtcttcgagccacgcc

SEQ ID NO: 144791 - DNA, 25 bp, Canis familiaris
gtgatcacaaggttcgaggagggca

SEQ ID NO: 144792 - DNA, 25 bp, Canis familiaris
gtgataacaagttctgtaaaggcaa

SEQ ID NO: 144793 - DNA, 25 bp, Canis familiaris
gtgatcagacaaaagcttcaatgtg

SEQ ID NO: 144794 - DNA, 25 bp, Canis familiaris
gtgattgtgaagggcctccagaggt

SEQ ID NO: 144795 - DNA, 25 bp, Canis familiaris
gtgatcttggaggatgggcgcagac

SEQ ID NO: 144796 - DNA, 25 bp, Canis familiaris
gtgagatctggagcatagcggcgcc

SEQ ID NO: 144797 - DNA, 25 bp, Canis familiaris
gtgatggctctggagcttgggccac

SEQ ID NO: 144798 - DNA, 25 bp, Canis familiaris
gtgaggctgctggtgctgcagagac

SEQ ID NO: 144799 - DNA, 25 bp, Canis familiaris
gtgatgcctgccttgatggagatcc

SEQ ID NO: 144800 - DNA, 25 bp, Canis familiaris
gtgatgcctgttgagtcagatgctt

SEQ ID NO: 144801 - DNA, 25 bp, Canis familiaris
gtgatgcctgttgagtcagatgctt

SEQ ID NO: 144802 - DNA, 25 bp, Canis familiaris
gtgatcgtgttgtatcgagagcagg

SEQ ID NO: 144803 - DNA, 25 bp, Canis familiaris
gtgagtgagttgtaggatccagcag

SEQ ID NO: 144804 - DNA, 25 bp, Canis familiaris
gtgagtggttttgggcagagcatgc

SEQ ID NO: 144805 - DNA, 25 bp, Canis familiaris
gtgatgtgagcttcctcagggaacc

SEQ ID NO: 144806 - DNA, 25 bp, Canis familiaris
gtgatggatgcctgtcttagatgtc

SEQ ID NO: 144807 - DNA, 25 bp, Canis familiaris
gtgaggtgcgctggcttttattttc

SEQ ID NO: 144808 - DNA, 25 bp, Canis familiaris
gtgattgtcagctgtttttattcca

SEQ ID NO: 144809 - DNA, 25 bp, Canis familiaris
gtgatttccagtcaattctttcttt

SEQ ID NO: 144810 - DNA, 25 bp, Canis familiaris
gtgatgctccaataaagtctttttt

SEQ ID NO: 144811 - DNA, 25 bp, Canis familiaris
gtgatcttcacataccaatttctct

SEQ ID NO: 144812 - DNA, 25 bp, Canis familiaris
gtgattttaaattctatattcctgg

SEQ ID NO: 144813 - DNA, 25 bp, Canis familiaris
gtgttttcgtcattcgattgtccgg

SEQ ID NO: 144814 - DNA, 25 bp, Canis familiaris
gtgtttacagccttgcgttgatgcc

SEQ ID NO: 144815 - DNA, 25 bp, Canis familiaris
gtgattttgacatctgtgttgagac

SEQ ID NO: 144816 - DNA, 25 bp, Canis familiaris
gtgagtgtatgagttcctatttgag

SEQ ID NO: 144817 - DNA, 25 bp, Canis familiaris
gtgatgtgatttctcctatcttacc

SEQ ID NO: 144818 - DNA, 25 bp, Canis familiaris
gtgaggaattcagggctttccccat

SEQ ID NO: 144819 - DNA, 25 bp, Canis familiaris
gtgaggtcattactagaattcccaa

SEQ ID NO: 144820 - DNA, 25 bp, Canis familiaris
gtgatagtttagaaatatccccacg

SEQ ID NO: 144821 - DNA, 25 bp, Canis familiaris
gtgagtcttattatttcccaacgtc

SEQ ID NO: 144822 - DNA, 25 bp, Canis familiaris
gtggtttaaactttcgcccagatgc

SEQ ID NO: 144823 - DNA, 25 bp, Canis familiaris
gtggtttgagttgttgcgttgtggc

SEQ ID NO: 144824 - DNA, 25 bp, Canis familiaris
gtgaggttgggttacgcaccttggc

SEQ ID NO: 144825 - DNA, 25 bp, Canis familiaris
gtggtttgggggcaagcctcatggc

SEQ ID NO: 144826 - DNA, 25 bp, Canis familiaris
gtgtttggacggaacagacccaggg

SEQ ID NO: 144827 - DNA, 25 bp, Canis familiaris
gtgatttgctaccgtaaagaccccg

SEQ ID NO: 144828 - DNA, 25 bp, Canis familiaris
gtgtagtgtacacagaaaaccccag

SEQ ID NO: 144829 - DNA, 25 bp, Canis familiaris
gtgtcagtgttctgggaaccctggc

SEQ ID NO: 144830 - DNA, 25 bp, Canis familiaris
gtgttctgtccatggtaacttgcta

SEQ ID NO: 144831 - DNA, 25 bp, Canis familiaris
gtgttttccatagtggctacaccaa

SEQ ID NO: 144832 - DNA, 25 bp, Canis familiaris
gtgttttccatagccatgaccatta

SEQ ID NO: 144833 - DNA, 25 bp, Canis familiaris
tgtcaattgtgtaacccgagttgga

SEQ ID NO: 144834 - DNA, 25 bp, Canis familiaris
tgctgtcgattaagaccggagcttg

SEQ ID NO: 144835 - DNA, 25 bp, Canis familiaris
gtgtacaatttgtcctgaagctttg

SEQ ID NO: 144836 - DNA, 25 bp, Canis familiaris
gtgtataaatggtcgtggtgtttgg

SEQ ID NO: 144837 - DNA, 25 bp, Canis familiaris
gtgtatattttgtcgtggtctgctg

SEQ ID NO: 144838 - DNA, 25 bp, Canis familiaris
gtgttgacagtccacgtgtactatg

SEQ ID NO: 144839 - DNA, 25 bp, Canis familiaris
gtgttagccaaatgttacttgagcc

SEQ ID NO: 144840 - DNA, 25 bp, Canis familiaris
gtgttcgcagcacaagaagacctag

SEQ ID NO: 144841 - DNA, 25 bp, Canis familiaris
gtgtcaccacacttaaatactcaag

SEQ ID NO: 144842 - DNA, 25 bp, Canis familiaris
gtgataccacataggagaattgtcg

SEQ ID NO: 144843 - DNA, 25 bp, Canis familiaris
gtgatgtccgggcgagcataggcgc

SEQ ID NO: 144844 - DNA, 25 bp, Canis familiaris
gtgtttcgtgcgtgcacagagctgg

SEQ ID NO: 144845 - DNA, 25 bp, Canis familiaris
gtgttctctttgtcgacaacgtgca

SEQ ID NO: 144846 - DNA, 25 bp, Canis familiaris
gtggtcccttgatcaaacctgaccc

SEQ ID NO: 144847 - DNA, 25 bp, Canis familiaris
gtggtcaacatcacctacaactacc

SEQ ID NO: 144848 - DNA, 25 bp, Canis familiaris
gtgttcaatgatgtccggctactac

SEQ ID NO: 144849 - DNA, 25 bp, Canis familiaris
gtgttgtcacatgacctggaaccca

SEQ ID NO: 144850 - DNA, 25 bp, Canis familiaris
gtgattatcctgaaccatccaggcc

SEQ ID NO: 144851 - DNA, 25 bp, Canis familiaris
gtgatattgcttttccaaagccacc

SEQ ID NO: 144852 - DNA, 25 bp, Canis familiaris
gtgtatctgcattttgcctaccaca

SEQ ID NO: 144853 - DNA, 25 bp, Canis familiaris
gtgtcatcaaatttgtcaactgcca

SEQ ID NO: 144854 - DNA, 25 bp, Canis familiaris
gtgtcaaaattgttcatcctcctta

SEQ ID NO: 144855 - DNA, 25 bp, Canis familiaris
gtgtaacaattcgtcttttcttccg

SEQ ID NO: 144856 - DNA, 25 bp, Canis familiaris
gtgtcacaatcaatggtcttttctt

SEQ ID NO: 144857 - DNA, 25 bp, Canis familiaris
gtgtacatatccacactctgttctt

SEQ ID NO: 144858 - DNA, 25 bp, Canis familiaris
gtgtagatgtacaccacttccagca

SEQ ID NO: 144859 - DNA, 25 bp, Canis familiaris
gtgtaactacttgtctttcagcatc

SEQ ID NO: 144860 - DNA, 25 bp, Canis familiaris
gtgtaaaactgtccttttcactcca

SEQ ID NO: 144861 - DNA, 25 bp, Canis familiaris
gtgataaaagcatcccttttccctt

SEQ ID NO: 144862 - DNA, 25 bp, Canis familiaris
gtgtcataaaaagcacttttaatta

SEQ ID NO: 144863 - DNA, 25 bp, Canis familiaris
gtgtaattaaagtccttagtcagat

SEQ ID NO: 144864 - DNA, 25 bp, Canis familiaris
tggtaactaaaagtctcaagggtgt

SEQ ID NO: 144865 - DNA, 25 bp, Canis familiaris
tgagatacttcacacctactaggat

SEQ ID NO: 144866 - DNA, 25 bp, Canis familiaris
ggatcgcttagggtctgaatgagga

SEQ ID NO: 144867 - DNA, 25 bp, Canis familiaris
gtgttcttcagggtaattaggatct

SEQ ID NO: 144868 - DNA, 25 bp, Canis familiaris
gtgttcttcaggttctaaatcttgc

SEQ ID NO: 144869 - DNA, 25 bp, Canis familiaris
gtgttcccgcaggttcaaattttat

SEQ ID NO: 144870 - DNA, 25 bp, Canis familiaris
gtgtcccccagaattactatttttg

SEQ ID NO: 144871 - DNA, 25 bp, Canis familiaris
gtgttcatatcctaattaccttttt

SEQ ID NO: 144872 - DNA, 25 bp, Canis familiaris
gtgtgttaccttcagaccttttcac

SEQ ID NO: 144873 - DNA, 25 bp, Canis familiaris
gtgttttctttgcagtttgttgtat

SEQ ID NO: 144874 - DNA, 25 bp, Canis familiaris
gtgttttggttggaaggtttgtcat

SEQ ID NO: 144875 - DNA, 25 bp, Canis familiaris
gtgtactcctttgaacgttttgcag

SEQ ID NO: 144876 - DNA, 25 bp, Canis familiaris
gtgttcctttatttggcttctttgg

SEQ ID NO: 144877 - DNA, 25 bp, Canis familiaris
gtgatttttcttgtgttcctttgta

SEQ ID NO: 144878 - DNA, 25 bp, Canis familiaris
gtgttagttttctgatatccttgtg

SEQ ID NO: 144879 - DNA, 25 bp, Canis familiaris
gtgttagttttctgattccttgtgt

SEQ ID NO: 144880 - DNA, 25 bp, Canis familiaris
gtgttagttttctgattccttgtgt

SEQ ID NO: 144881 - DNA, 25 bp, Canis familiaris
gtgttagttttctgattccttgtgt

SEQ ID NO: 144882 - DNA, 25 bp, Canis familiaris
gtgttagttttctgattccttgtgt

SEQ ID NO: 144883 - DNA, 25 bp, Canis familiaris
gtgttagttttctgattccttgtgt

SEQ ID NO: 144884 - DNA, 25 bp, Canis familiaris
gtgttagttttctgattccttgtgt

SEQ ID NO: 144885 - DNA, 25 bp, Canis familiaris
gtgttagttttctgattccttgtgt

SEQ ID NO: 144886 - DNA, 25 bp, Canis familiaris
gtgattatttttccaactccgtgtt

SEQ ID NO: 144887 - DNA, 25 bp, Canis familiaris
gtgttttatggataacttcagtttt

SEQ ID NO: 144888 - DNA, 25 bp, Canis familiaris
gtgtataaatgggacaacttcttgc

SEQ ID NO: 144889 - DNA, 25 bp, Canis familiaris
gtgtaaagctaggaccctgacctca

SEQ ID NO: 144890 - DNA, 25 bp, Canis familiaris
gtgtagaacaagggccctcacaggg

SEQ ID NO: 144891 - DNA, 25 bp, Canis familiaris
gtgtactaataccaggcctcctggt

SEQ ID NO: 144892 - DNA, 25 bp, Canis familiaris
gtgtacataaagcagctgcgtccct

SEQ ID NO: 144893 - DNA, 25 bp, Canis familiaris
gtgtacaatagcagagccagcctcc

SEQ ID NO: 144894 - DNA, 25 bp, Canis familiaris
gtgttgtgtatgtgagcaatcccac

SEQ ID NO: 144895 - DNA, 25 bp, Canis familiaris
gtgttgtgtatgtgagcaatcccac

SEQ ID NO: 144896 - DNA, 25 bp, Canis familiaris
gtgtagtgtcttcagaacctgtccg

SEQ ID NO: 144897 - DNA, 25 bp, Canis familiaris
gtgttatgcgttcagagctcgtgtg

SEQ ID NO: 144898 - DNA, 25 bp, Canis familiaris
gtgttctcttccaaatgctgttggg

SEQ ID NO: 144899 - DNA, 25 bp, Canis familiaris
gtgtcgttgtcaggaccgttggagc

SEQ ID NO: 144900 - DNA, 25 bp, Canis familiaris
gtgttgtctgtggagaccggtggcc

SEQ ID NO: 144901 - DNA, 25 bp, Canis familiaris
gtgtttgtttacacagtgtggccaa

SEQ ID NO: 144902 - DNA, 25 bp, Canis familiaris
gtgtgttgtttaccctgggttctga

SEQ ID NO: 144903 - DNA, 25 bp, Canis familiaris
gtgtttgtgttctccattgttttgg

SEQ ID NO: 144904 - DNA, 25 bp, Canis familiaris
gtgattttgtttttagctgttttga

SEQ ID NO: 144905 - DNA, 25 bp, Canis familiaris
gtgttacgtctgttaactgctttgg

SEQ ID NO: 144906 - DNA, 25 bp, Canis familiaris
gtgttatttctggtaaattctctac

SEQ ID NO: 144907 - DNA, 25 bp, Canis familiaris
gtgttactcatcgtgtttgtcacca

SEQ ID NO: 144908 - DNA, 25 bp, Canis familiaris
gtgttcctcactggttgggcaaaaa

SEQ ID NO: 144909 - DNA, 25 bp, Canis familiaris
gtgtccccacagtcttaggcgggaa

SEQ ID NO: 144910 - DNA, 25 bp, Canis familiaris
gtgtcctaggccttgggcaggggaa

SEQ ID NO: 144911 - DNA, 25 bp, Canis familiaris
gtgtcctaggcatttgctgaccaac

SEQ ID NO: 144912 - DNA, 25 bp, Canis familiaris
gtgtcttaagcatttcccaaagaaa

SEQ ID NO: 144913 - DNA, 25 bp, Canis familiaris
gtgatttccaatttcctaacaagtt

SEQ ID NO: 144914 - DNA, 25 bp, Canis familiaris
gtgttttatatttcattttcaagtt

SEQ ID NO: 144915 - DNA, 25 bp, Canis familiaris
gtgtcactaatagtttttaaattct

SEQ ID NO: 144916 - DNA, 25 bp, Canis familiaris
gtgtccgaagagtttttagcctaat

SEQ ID NO: 144917 - DNA, 25 bp, Canis familiaris
gtgttcccagagtttctaagtataa

SEQ ID NO: 144918 - DNA, 25 bp, Canis familiaris
gtgttcccaggtagccaatggtggc

SEQ ID NO: 144919 - DNA, 25 bp, Canis familiaris
gtgtattgtagtcatcacaaggttg

SEQ ID NO: 144920 - DNA, 25 bp, Canis familiaris
gtgtaagttgacctccagaaatatt

SEQ ID NO: 144921 - DNA, 25 bp, Canis familiaris
gtgatgagagttcttccggagagaa

SEQ ID NO: 144922 - DNA, 25 bp, Canis familiaris
gtgatagcattgctttcgtgtaaat

SEQ ID NO: 144923 - DNA, 25 bp, Canis familiaris
gtgatagctctgcctattgcaggac

SEQ ID NO: 144924 - DNA, 25 bp, Canis familiaris
gtgatgaggatgcctctcgcatgga

SEQ ID NO: 144925 - DNA, 25 bp, Canis familiaris
gtggacgagcgtccgcatgctaatc

SEQ ID NO: 144926 - DNA, 25 bp, Canis familiaris
gtggatcagatggatgcagacatta

SEQ ID NO: 144927 - DNA, 25 bp, Canis familiaris
gtgtagctgtgcttgcagtcttgaa

SEQ ID NO: 144928 - DNA, 25 bp, Canis familiaris
gtgtagcgatgtaatacatagacac

SEQ ID NO: 144929 - DNA, 25 bp, Canis familiaris
gtgatccttgtgaatttgtgaaata

SEQ ID NO: 144930 - DNA, 25 bp, Canis familiaris
gtgatactggtagttggtgtgaaac

SEQ ID NO: 144931 - DNA, 25 bp, Canis familiaris
gtgttcgcagtgacctggggaacct

SEQ ID NO: 144932 - DNA, 25 bp, Canis familiaris
gtgttacctgctttaatcaaacctg

SEQ ID NO: 144933 - DNA, 25 bp, Canis familiaris
gtgattccttacttacatataaccc

SEQ ID NO: 144934 - DNA, 25 bp, Canis familiaris
gtgttgtctaattgaacaataattc

SEQ ID NO: 144935 - DNA, 25 bp, Canis familiaris
gtgtcttgctatataaaatataccc

SEQ ID NO: 144936 - DNA, 25 bp, Canis familiaris
gtgtttaatattcgtgttttccatc

SEQ ID NO: 144937 - DNA, 25 bp, Canis familiaris
gtgtttaaggccgtgttcttctact

SEQ ID NO: 144938 - DNA, 25 bp, Canis familiaris
gtgtatttccccttgtatttgtagc

SEQ ID NO: 144939 - DNA, 25 bp, Canis familiaris
gtgtttgtctgtgttgtttgttagt

SEQ ID NO: 144940 - DNA, 25 bp, Canis familiaris
gtgattttcagtgttgtcttttttt

SEQ ID NO: 144941 - DNA, 25 bp, Canis familiaris
gtgatttttgccttatttttgttct

SEQ ID NO: 144942 - DNA, 25 bp, Canis familiaris
gtgtttccttattgatttctttcct

SEQ ID NO: 144943 - DNA, 25 bp, Canis familiaris
gtgtttatttatatacctcctctct

SEQ ID NO: 144944 - DNA, 25 bp, Canis familiaris
gtgttggatttaggtccctttggct

SEQ ID NO: 144945 - DNA, 25 bp, Canis familiaris
gtgttggatttagttccttttggct

SEQ ID NO: 144946 - DNA, 25 bp, Canis familiaris
gtgttggagtacctttccttggtag

SEQ ID NO: 144947 - DNA, 25 bp, Canis familiaris
gtgtataagtacatcctttgggggg

SEQ ID NO: 144948 - DNA, 25 bp, Canis familiaris
gtggaaagtccattctctatgtggt

SEQ ID NO: 144949 - DNA, 25 bp, Canis familiaris
gtgtaaagcttttttgcatgtaagt

SEQ ID NO: 144950 - DNA, 25 bp, Canis familiaris
gtgtaaaccctattatgctttccat

SEQ ID NO: 144951 - DNA, 25 bp, Canis familiaris
gtgtaaacccagttcttctctgtat

SEQ ID NO: 144952 - DNA, 25 bp, Canis familiaris
ttctaaactttgggtcctgcgtctg

SEQ ID NO: 144953 - DNA, 25 bp, Canis familiaris
gtgtaaaattctctacctggtctgt

SEQ ID NO: 144954 - DNA, 25 bp, Canis familiaris
gtgatagatgtattctttttctgtg

SEQ ID NO: 144955 - DNA, 25 bp, Canis familiaris
gtgatagatatatatgcttccatct

SEQ ID NO: 144956 - DNA, 25 bp, Canis familiaris
gtgatgtgtttgcacattctctctc

SEQ ID NO: 144957 - DNA, 25 bp, Canis familiaris
gtgattgtgtcagggctcttttagg

SEQ ID NO: 144958 - DNA, 25 bp, Canis familiaris
gtgatgtcagtggtgcagcgtgttt

SEQ ID NO: 144959 - DNA, 25 bp, Canis familiaris
gtgatgtctgtggtatgtgtgtgtg

SEQ ID NO: 144960 - DNA, 25 bp, Canis familiaris
gtgattctgacactaattctctgag

SEQ ID NO: 144961 - DNA, 25 bp, Canis familiaris
gtgatcttgcaccaaaagcactaga

SEQ ID NO: 144962 - DNA, 25 bp, Canis familiaris
gtggggactaagacatacaaacggt

SEQ ID NO: 144963 - DNA, 25 bp, Canis familiaris
gtgggcaaaggcacacaaaccaggg

SEQ ID NO: 144964 - DNA, 25 bp, Canis familiaris
gggccaactggtcaacaacggccgg

SEQ ID NO: 144965 - DNA, 25 bp, Canis familiaris
gtgtccctcatcattaactacgacc

SEQ ID NO: 144966 - DNA, 25 bp, Canis familiaris
gtgtatcccttgtataactgactgt

SEQ ID NO: 144967 - DNA, 25 bp, Canis familiaris
gtgtaccgatgtgtactgctgacat

SEQ ID NO: 144968 - DNA, 25 bp, Canis familiaris
gtgtacacaattcgaatccttcata

SEQ ID NO: 144969 - DNA, 25 bp, Canis familiaris
gtgattccactttgtacacatttca

SEQ ID NO: 144970 - DNA, 25 bp, Canis familiaris
gtgattctcttgtgtacatgcttgt

SEQ ID NO: 144971 - DNA, 25 bp, Canis familiaris
gtgttgcttgtgtgttgcagctgag

SEQ ID NO: 144972 - DNA, 25 bp, Canis familiaris
gtgtgctttgtatgtttgccaggtc

SEQ ID NO: 144973 - DNA, 25 bp, Canis familiaris
gtgatgcccttagatgtccggggct

SEQ ID NO: 144974 - DNA, 25 bp, Canis familiaris
gtgatgcccttagatgtccggggct

SEQ ID NO: 144975 - DNA, 25 bp, Canis familiaris
gtgtccccatacagtccagggactg

SEQ ID NO: 144976 - DNA, 25 bp, Canis familiaris
gtgatcaccacattcggatccgaag

SEQ ID NO: 144977 - DNA, 25 bp, Canis familiaris
gtgatctcaacatagtgcttctgaa

SEQ ID NO: 144978 - DNA, 25 bp, Canis familiaris
gtgatatcaactaagcgtacgaatt

SEQ ID NO: 144979 - DNA, 25 bp, Canis familiaris
gtgtcaaatcatcacgtttaacttt

SEQ ID NO: 144980 - DNA, 25 bp, Canis familiaris
gtgtaattggcatccttcaaggctt

SEQ ID NO: 144981 - DNA, 25 bp, Canis familiaris
gtgataaatggatggcttccacctt

SEQ ID NO: 144982 - DNA, 25 bp, Canis familiaris
gtgatagctttgaaggttcataact

SEQ ID NO: 144983 - DNA, 25 bp, Canis familiaris
gtgttgtttctactttatggcaatt

SEQ ID NO: 144984 - DNA, 25 bp, Canis familiaris
gtgatttgttattttcatattgaga

SEQ ID NO: 144985 - DNA, 25 bp, Canis familiaris
gtgatctttatgtatattctatcta

SEQ ID NO: 144986 - DNA, 25 bp, Canis familiaris
gtgatcatgttttttccatgtgtac

SEQ ID NO: 144987 - DNA, 25 bp, Canis familiaris
gtgtgcattttctctggctttaaaa

SEQ ID NO: 144988 - DNA, 25 bp, Canis familiaris
gtgtactctttgaggattctagatc

SEQ ID NO: 144989 - DNA, 25 bp, Canis familiaris
gtgtagtgccttacttttctattca

SEQ ID NO: 144990 - DNA, 25 bp, Canis familiaris
gtgttctgtcttatatttgttgtta

SEQ ID NO: 144991 - DNA, 25 bp, Canis familiaris
gtgttcgatattattgttttaaatt

SEQ ID NO: 144992 - DNA, 25 bp, Canis familiaris
gtgttcgatatgattgtttaaatta

SEQ ID NO: 144993 - DNA, 25 bp, Canis familiaris
gtgttaaagcatatttcatgacaag

SEQ ID NO: 144994 - DNA, 25 bp, Canis familiaris
gtgttaaggttaaggctgacatttt

SEQ ID NO: 144995 - DNA, 25 bp, Canis familiaris
gtgttaactgttttagcttttctgt

SEQ ID NO: 144996 - DNA, 25 bp, Canis familiaris
gtgttaccatcttattagtacttgg

SEQ ID NO: 144997 - DNA, 25 bp, Canis familiaris
gtgtttctcttaattgagtaggagt

SEQ ID NO: 144998 - DNA, 25 bp, Canis familiaris
gtgtttttgtatggcgggagtgggg

SEQ ID NO: 144999 - DNA, 25 bp, Canis familiaris
gtggtctttggatcggaagtgggtc

SEQ ID NO: 145000 - DNA, 25 bp, Canis familiaris
gtgtttgggtatccctagaggggct

SEQ ID NO: 145001 - DNA, 25 bp, Canis familiaris
gtgatcttgcggaaacgtgaatgag

SEQ ID NO: 145002 - DNA, 25 bp, Canis familiaris
gtgatatctccgcaacaggaggatg

SEQ ID NO: 145003 - DNA, 25 bp, Canis familiaris
gtgatctctctcctggaggtggttg

SEQ ID NO: 145004 - DNA, 25 bp, Canis familiaris
gtgattttctatgaactgcgctgag

SEQ ID NO: 145005 - DNA, 25 bp, Canis familiaris
gtgttttctgctgcaaagtctgcgt

SEQ ID NO: 145006 - DNA, 25 bp, Canis familiaris
gtgatttcccacaacgagtatctct

SEQ ID NO: 145007 - DNA, 25 bp, Canis familiaris
gtgtttcccactccagggaatgccg

SEQ ID NO: 145008 - DNA, 25 bp, Canis familiaris
gtgtaccccagcggcaaggtatacg

SEQ ID NO: 145009 - DNA, 25 bp, Canis familiaris
gtgtagccctcgggtaggaagcctc

SEQ ID NO: 145010 - DNA, 25 bp, Canis familiaris
ggtaggcccagcagtgacctgggct

SEQ ID NO: 145011 - DNA, 25 bp, Canis familiaris
gtgtagggtcaggggacactgagga

SEQ ID NO: 145012 - DNA, 25 bp, Canis familiaris
gtgtattgttctgaggatcacatga

SEQ ID NO: 145013 - DNA, 25 bp, Canis familiaris
gtgtattctttgggtccagcagccc

SEQ ID NO: 145014 - DNA, 25 bp, Canis familiaris
gtgtatttttgtgcactaggcgcat

SEQ ID NO: 145015 - DNA, 25 bp, Canis familiaris
gtgttgtttgagactcactcacgcg

SEQ ID NO: 145016 - DNA, 25 bp, Canis familiaris
gtgttacttgaagaatcactgctat

SEQ ID NO: 145017 - DNA, 25 bp, Canis familiaris
gtgattgaattctactttgccatct

SEQ ID NO: 145018 - DNA, 25 bp, Canis familiaris
gtgtcagaatgtgtcttctgcccag

SEQ ID NO: 145019 - DNA, 25 bp, Canis familiaris
gtgtaaatatgcatttgccctctgc

SEQ ID NO: 145020 - DNA, 25 bp, Canis familiaris
gtgattaacatttgagtcccattgc

SEQ ID NO: 145021 - DNA, 25 bp, Canis familiaris
gtggacaacattcgcacctacaaca

SEQ ID NO: 145022 - DNA, 25 bp, Canis familiaris
gtgtagatgccctgcgggtgggcat

SEQ ID NO: 145023 - DNA, 25 bp, Canis familiaris
ggtggatgcccggtcggtaattgac

SEQ ID NO: 145024 - DNA, 25 bp, Canis familiaris
gtggaatgcccagcgagttaactac

SEQ ID NO: 145025 - DNA, 25 bp, Canis familiaris
gtggaatgcccagcgagttaactac

SEQ ID NO: 145026 - DNA, 25 bp, Canis familiaris
gtggaatgcccagcgagttaactac

SEQ ID NO: 145027 - DNA, 25 bp, Canis familiaris
gtggaagccccggcagattgacaac

SEQ ID NO: 145028 - DNA, 25 bp, Canis familiaris
gtgtaaccttcagagctgtgcaaac

SEQ ID NO: 145029 - DNA, 25 bp, Canis familiaris
gtgtacagtactataggtgcacaac

SEQ ID NO: 145030 - DNA, 25 bp, Canis familiaris
gtgttcgcttctttagttgacagca

SEQ ID NO: 145031 - DNA, 25 bp, Canis familiaris
gtgttcagtccttcaaattggcata

SEQ ID NO: 145032 - DNA, 25 bp, Canis familiaris
gtgttttcccaaaatatgcctcaac

SEQ ID NO: 145033 - DNA, 25 bp, Canis familiaris
gtgttttcatccaactaacttttca

SEQ ID NO: 145034 - DNA, 25 bp, Canis familiaris
gtgttttcttcttgtaattgattct

SEQ ID NO: 145035 - DNA, 25 bp, Canis familiaris
gtgtcactttttttaattccttcat

SEQ ID NO: 145036 - DNA, 25 bp, Canis familiaris
gtgttttgtaacttctgattccttc

SEQ ID NO: 145037 - DNA, 25 bp, Canis familiaris
gtgttttgtaacttctgattccttc

SEQ ID NO: 145038 - DNA, 25 bp, Canis familiaris
gtgatttcagctataatctgttact

SEQ ID NO: 145039 - DNA, 25 bp, Canis familiaris
gtgatctatgagaatttttgttcca

SEQ ID NO: 145040 - DNA, 25 bp, Canis familiaris
gtgatcttgaggacttcttcgtaat

SEQ ID NO: 145041 - DNA, 25 bp, Canis familiaris
gtgatattcagtgggtctgtggtca

SEQ ID NO: 145042 - DNA, 25 bp, Canis familiaris
gtgattgccgctgggatggtggtga

SEQ ID NO: 145043 - DNA, 25 bp, Canis familiaris
gtgatctttctattgatggaggtgg

SEQ ID NO: 145044 - DNA, 25 bp, Canis familiaris
gtgatcttgttttgccgaggagggt

SEQ ID NO: 145045 - DNA, 25 bp, Canis familiaris
gtgattctgataaatgcccaggaag

SEQ ID NO: 145046 - DNA, 25 bp, Canis familiaris
gtgttggatgattctgcccgaaaag

SEQ ID NO: 145047 - DNA, 25 bp, Canis familiaris
gtgttggcactagcatcccataaag

SEQ ID NO: 145048 - DNA, 25 bp, Canis familiaris
gtgttggcgcatagcacatactcaa

SEQ ID NO: 145049 - DNA, 25 bp, Canis familiaris
gtgtttgccaagaaagctgacccat

SEQ ID NO: 145050 - DNA, 25 bp, Canis familiaris
gtgttttcaaggaactgtctctaaa

SEQ ID NO: 145051 - DNA, 25 bp, Canis familiaris
gtgtttatcacacgatcctttcaac

SEQ ID NO: 145052 - DNA, 25 bp, Canis familiaris
gtgtaaatcacagttcccttggaag

SEQ ID NO: 145053 - DNA, 25 bp, Canis familiaris
gtgtacctgcttgtttctgggaaga

SEQ ID NO: 145054 - DNA, 25 bp, Canis familiaris
gtgtacctcattgctactcaaaaat

SEQ ID NO: 145055 - DNA, 25 bp, Canis familiaris
gtgtatgcctcctatctttaaaaat

SEQ ID NO: 145056 - DNA, 25 bp, Canis familiaris
gtgtatcccctttttatgataaact

SEQ ID NO: 145057 - DNA, 25 bp, Canis familiaris
gtgttccctatttttatccattaca

SEQ ID NO: 145058 - DNA, 25 bp, Canis familiaris
gtgtttccgtgcattaatccttgac

SEQ ID NO: 145059 - DNA, 25 bp, Canis familiaris
gtgtataccatgtctttacccattc

SEQ ID NO: 145060 - DNA, 25 bp, Canis familiaris
gtgtataccatgctttatgtgcgtt

SEQ ID NO: 145061 - DNA, 25 bp, Canis familiaris
gtgttcctatttatctgtttgtttt

SEQ ID NO: 145062 - DNA, 25 bp, Canis familiaris
gtgtatttatttgtatgtttcctta

SEQ ID NO: 145063 - DNA, 25 bp, Canis familiaris
gtgtcatttaaggcctgtgtttcct

SEQ ID NO: 145064 - DNA, 25 bp, Canis familiaris
gtgtactgggatggcctgtgttgaa

SEQ ID NO: 145065 - DNA, 25 bp, Canis familiaris
gtgtaccggacacttttgtatgatg

SEQ ID NO: 145066 - DNA, 25 bp, Canis familiaris
gtgtacctggaggcaacattttatg

SEQ ID NO: 145067 - DNA, 25 bp, Canis familiaris
gtgttccatgagaatccgcttgttc

SEQ ID NO: 145068 - DNA, 25 bp, Canis familiaris
gtgtttgatagttcctgctgtgagg

SEQ ID NO: 145069 - DNA, 25 bp, Canis familiaris
gtgtcttaagttccacatatgagtg

SEQ ID NO: 145070 - DNA, 25 bp, Canis familiaris
gtgttgatgcgactaccattcatag

SEQ ID NO: 145071 - DNA, 25 bp, Canis familiaris
gtgttgatagttactcattctccat

SEQ ID NO: 145072 - DNA, 25 bp, Canis familiaris
gtgtttggatgtactgctttcctcc

SEQ ID NO: 145073 - DNA, 25 bp, Canis familiaris
gtgttcttatgcgactcttatgcct

SEQ ID NO: 145074 - DNA, 25 bp, Canis familiaris
gtgattagtgagccgtatcgatgcc

SEQ ID NO: 145075 - DNA, 25 bp, Canis familiaris
gtgtctaaactgcatcatcctgctc

SEQ ID NO: 145076 - DNA, 25 bp, Canis familiaris
gtgttcgaactatcagcacctggtc

SEQ ID NO: 145077 - DNA, 25 bp, Canis familiaris
gtgttctgaacttttgagccttgac

SEQ ID NO: 145078 - DNA, 25 bp, Canis familiaris
gtgtgatgctgcagtgttagcccgg

SEQ ID NO: 145079 - DNA, 25 bp, Canis familiaris
gtgtgcattgactttgtaccaagtg

SEQ ID NO: 145080 - DNA, 25 bp, Canis familiaris
gtgttctgactgacataagcaaact

SEQ ID NO: 145081 - DNA, 25 bp, Canis familiaris
gtgttagccagtaagtcattcatct

SEQ ID NO: 145082 - DNA, 25 bp, Canis familiaris
gtgataggccatttcttgtctgcac

SEQ ID NO: 145083 - DNA, 25 bp, Canis familiaris
gtgtagaccatcattcagtgccaca

SEQ ID NO: 145084 - DNA, 25 bp, Canis familiaris
gtgttgcagaaatatcataccatca

SEQ ID NO: 145085 - DNA, 25 bp, Canis familiaris
gtgttgctctaactacatgccaata

SEQ ID NO: 145086 - DNA, 25 bp, Canis familiaris
gtgttgattgtattatgctgctcat

SEQ ID NO: 145087 - DNA, 25 bp, Canis familiaris
gtgttgtctgtatatgctaactccg

SEQ ID NO: 145088 - DNA, 25 bp, Canis familiaris
gtgtatgtgtgtatctcatgaacta

SEQ ID NO: 145089 - DNA, 25 bp, Canis familiaris
gtgtagcttgtaaacggcctactgt

SEQ ID NO: 145090 - DNA, 25 bp, Canis familiaris
gtgtaatttccatagtgcctttgct

SEQ ID NO: 145091 - DNA, 25 bp, Canis familiaris
gtgtcacttactcatgattcctttc

SEQ ID NO: 145092 - DNA, 25 bp, Canis familiaris
gtgttcttgccaggacagtcacttt

SEQ ID NO: 145093 - DNA, 25 bp, Canis familiaris
gtgattcttctgatacgtccattct

SEQ ID NO: 145094 - DNA, 25 bp, Canis familiaris
gtgattccactgatgatgcttgcaa

SEQ ID NO: 145095 - DNA, 25 bp, Canis familiaris
gtgttctcaagttcagtgatgcatg

SEQ ID NO: 145096 - DNA, 25 bp, Canis familiaris
ggtctgtctagcacgtagcaacaat

SEQ ID NO: 145097 - DNA, 25 bp, Canis familiaris
gtgtctttatgctgggactactcat

SEQ ID NO: 145098 - DNA, 25 bp, Canis familiaris
gtgtcttcaacatgatggttcctct

SEQ ID NO: 145099 - DNA, 25 bp, Canis familiaris
gtgttctcacaatttggttaattgt

SEQ ID NO: 145100 - DNA, 25 bp, Canis familiaris
gtgtgtctcaggattggtcatttta

SEQ ID NO: 145101 - DNA, 25 bp, Canis familiaris
gtggtctcggtctgtatcggtaatg

SEQ ID NO: 145102 - DNA, 25 bp, Canis familiaris
gtgtagctcggtccgtattgttttc

SEQ ID NO: 145103 - DNA, 25 bp, Canis familiaris
gtgttgtgtgttccctatttttatc

SEQ ID NO: 145104 - DNA, 25 bp, Canis familiaris
gtgattgtgtgttgccattttgtct

SEQ ID NO: 145105 - DNA, 25 bp, Canis familiaris
gtgtctatgtgcaactcactaccca

SEQ ID NO: 145106 - DNA, 25 bp, Canis familiaris
gtgtctatggacaacagttcctcaa

SEQ ID NO: 145107 - DNA, 25 bp, Canis familiaris
gtgtcactggacatcgattcttgcc

SEQ ID NO: 145108 - DNA, 25 bp, Canis familiaris
gtgtactctaaaagcttctgaccat

SEQ ID NO: 145109 - DNA, 25 bp, Canis familiaris
gtgtttgctgaatagcttctacccc

SEQ ID NO: 145110 - DNA, 25 bp, Canis familiaris
gtgattatctgcatggtgtatctaa

SEQ ID NO: 145111 - DNA, 25 bp, Canis familiaris
gtgatttctgttcattatctaatga

SEQ ID NO: 145112 - DNA, 25 bp, Canis familiaris
gtgtttgcaggtcgactcattgaat

SEQ ID NO: 145113 - DNA, 25 bp, Canis familiaris
gtgttctgggtggagttcgtcatga

SEQ ID NO: 145114 - DNA, 25 bp, Canis familiaris
gtgttatacgtgcagctcttgtcga

SEQ ID NO: 145115 - DNA, 25 bp, Canis familiaris
gtgtcattagctgggagtgctctcc

SEQ ID NO: 145116 - DNA, 25 bp, Canis familiaris
gtgtcaccgcagggcagtgatggcc

SEQ ID NO: 145117 - DNA, 25 bp, Canis familiaris
gtgtcaccacacagggtggctgagt

SEQ ID NO: 145118 - DNA, 25 bp, Canis familiaris
gtgtccaccatggggagctgggtta

SEQ ID NO: 145119 - DNA, 25 bp, Canis familiaris
gtgttatggcatgggggtggggttg

SEQ ID NO: 145120 - DNA, 25 bp, Canis familiaris
gtgtttggcagaccgtgtgagtcga

SEQ ID NO: 145121 - DNA, 25 bp, Canis familiaris
gtgttctggaagcatgttggtcctt

SEQ ID NO: 145122 - DNA, 25 bp, Canis familiaris
gtgttcagtcatacatagtctggtc

SEQ ID NO: 145123 - DNA, 25 bp, Canis familiaris
gtgttcatctgaggactgcatcggt

SEQ ID NO: 145124 - DNA, 25 bp, Canis familiaris
gtgttcatggatggcaggcacatag

SEQ ID NO: 145125 - DNA, 25 bp, Canis familiaris
gtgttcattgtggatgtcaaggccc

SEQ ID NO: 145126 - DNA, 25 bp, Canis familiaris
gtgtatcatatgccaagtacgcccc

SEQ ID NO: 145127 - DNA, 25 bp, Canis familiaris
gtgttgctgtgcccagaataccacc

SEQ ID NO: 145128 - DNA, 25 bp, Canis familiaris
gtgttgcatcctgagcaacaccaca

SEQ ID NO: 145129 - DNA, 25 bp, Canis familiaris
gtgttgcacattaaaactcaaccat

SEQ ID NO: 145130 - DNA, 25 bp, Canis familiaris
gtgttagtttcaacctctatgccag

SEQ ID NO: 145131 - DNA, 25 bp, Canis familiaris
gtgattgagttaaatccagcttccg

SEQ ID NO: 145132 - DNA, 25 bp, Canis familiaris
gtgattatataaactagcctgatcc

SEQ ID NO: 145133 - DNA, 25 bp, Canis familiaris
gtgtttcattgaagcttgactgtcc

SEQ ID NO: 145134 - DNA, 25 bp, Canis familiaris
gtgtatgtacttagctgtactataa

SEQ ID NO: 145135 - DNA, 25 bp, Canis familiaris
gtgtatgtacttagctgtactataa

SEQ ID NO: 145136 - DNA, 25 bp, Canis familiaris
gtgttccacgaagtctagctctgaa

SEQ ID NO: 145137 - DNA, 25 bp, Canis familiaris
gtgtttgacgtgttgtagccgaagc

SEQ ID NO: 145138 - DNA, 25 bp, Canis familiaris
gtgttctatttgttatactcagggt

SEQ ID NO: 145139 - DNA, 25 bp, Canis familiaris
gtgttgctttccttttcaagtgtgt

SEQ ID NO: 145140 - DNA, 25 bp, Canis familiaris
gtgttgcattttcttgggaatgtgt

SEQ ID NO: 145141 - DNA, 25 bp, Canis familiaris
gtgttgcttttcttttgtggatgcc

SEQ ID NO: 145142 - DNA, 25 bp, Canis familiaris
gtgattcttttattgcttctcttgc

SEQ ID NO: 145143 - DNA, 25 bp, Canis familiaris
gtgttctatttatttattgtcttcc

SEQ ID NO: 145144 - DNA, 25 bp, Canis familiaris
gtgttctatttatttattgtcttcc

SEQ ID NO: 145145 - DNA, 25 bp, Canis familiaris
gtgttgcaattttgctttgctgttt

SEQ ID NO: 145146 - DNA, 25 bp, Canis familiaris
gtgtataatcttattctctgtgtat

SEQ ID NO: 145147 - DNA, 25 bp, Canis familiaris
gtgttgagacttcgtggtggtgcta

SEQ ID NO: 145148 - DNA, 25 bp, Canis familiaris
gtgttgagacttcgtggtggtgcta

SEQ ID NO: 145149 - DNA, 25 bp, Canis familiaris
gtgttgagacttcgtggtggtgcta

SEQ ID NO: 145150 - DNA, 25 bp, Canis familiaris
gtgttgagcacctgctggatgtgga

SEQ ID NO: 145151 - DNA, 25 bp, Canis familiaris
gtgttcatgttctgatgctgtgtgg

SEQ ID NO: 145152 - DNA, 25 bp, Canis familiaris
gtgttcgttgcacagctgtttgaaa

SEQ ID NO: 145153 - DNA, 25 bp, Canis familiaris
gtgtatggggcaccacatctactga

SEQ ID NO: 145154 - DNA, 25 bp, Canis familiaris
gtgtaaggcgcattatcctggatac

SEQ ID NO: 145155 - DNA, 25 bp, Canis familiaris
gtgtagcagctccaaagcactggat

SEQ ID NO: 145156 - DNA, 25 bp, Canis familiaris
gtgtaggctccatcatcatgttgaa

SEQ ID NO: 145157 - DNA, 25 bp, Canis familiaris
gtgtgcaggtcatgacattccgtac

SEQ ID NO: 145158 - DNA, 25 bp, Canis familiaris
gtgtctggtgactctacggtaatcc

SEQ ID NO: 145159 - DNA, 25 bp, Canis familiaris
gtgtttggactacacggatgtacac

SEQ ID NO: 145160 - DNA, 25 bp, Canis familiaris
gtgttctgggaaccctggcagtaga

SEQ ID NO: 145161 - DNA, 25 bp, Canis familiaris
ggtcctcgtgaagcctagagtccat

SEQ ID NO: 145162 - DNA, 25 bp, Canis familiaris
gtgtttcgtgagttacaacagtcca

SEQ ID NO: 145163 - DNA, 25 bp, Canis familiaris
gtgttctggggattacccagcccca

SEQ ID NO: 145164 - DNA, 25 bp, Canis familiaris
gtgtgtcggacggacaaccgtttca

SEQ ID NO: 145165 - DNA, 25 bp, Canis familiaris
gtgtttgagacttaacccctgtaca

SEQ ID NO: 145166 - DNA, 25 bp, Canis familiaris
gtgtttggtttggaacccttcaatg

SEQ ID NO: 145167 - DNA, 25 bp, Canis familiaris
gtgtttggtttgtattcacctggca

SEQ ID NO: 145168 - DNA, 25 bp, Canis familiaris
gtgtttatcttttcatatagttagc

SEQ ID NO: 145169 - DNA, 25 bp, Canis familiaris
gtgtttcacttgtccaggggatgag

SEQ ID NO: 145170 - DNA, 25 bp, Canis familiaris
gtgttccactgccaccaagaggaaa

SEQ ID NO: 145171 - DNA, 25 bp, Canis familiaris
gtgttccacatccctgaggaggaga

SEQ ID NO: 145172 - DNA, 25 bp, Canis familiaris
gtgtcatccacatcttgaaatgtca

SEQ ID NO: 145173 - DNA, 25 bp, Canis familiaris
gtgtcatcgagctgtgtggatatgg

SEQ ID NO: 145174 - DNA, 25 bp, Canis familiaris
gtgttctgacgcccgagatcatggc

SEQ ID NO: 145175 - DNA, 25 bp, Canis familiaris
gtgtaccagacaccaagttggccac

SEQ ID NO: 145176 - DNA, 25 bp, Canis familiaris
gtgtccacagcagacttgttagcta

SEQ ID NO: 145177 - DNA, 25 bp, Canis familiaris
gtgtccactgcaaactagcctgaac

SEQ ID NO: 145178 - DNA, 25 bp, Canis familiaris
gtgtcacatctggtattcgacgaac

SEQ ID NO: 145179 - DNA, 25 bp, Canis familiaris
gtgtcacatgctataggtgtaaatc

SEQ ID NO: 145180 - DNA, 25 bp, Canis familiaris
gtgttatctattgcatctgtaactg

SEQ ID NO: 145181 - DNA, 25 bp, Canis familiaris
gtgttagctgtgtgcatgtaaacca

SEQ ID NO: 145182 - DNA, 25 bp, Canis familiaris
gtgttcacatctcacgtgatgacat

SEQ ID NO: 145183 - DNA, 25 bp, Canis familiaris
gtgtatcagcattaacatgttggca

SEQ ID NO: 145184 - DNA, 25 bp, Canis familiaris
gtgtatagttgttctatgtgtgcat

SEQ ID NO: 145185 - DNA, 25 bp, Canis familiaris
gtgtatgattctttatgatggtgca

SEQ ID NO: 145186 - DNA, 25 bp, Canis familiaris
gtgtcttctcatgcctgaggatcag

SEQ ID NO: 145187 - DNA, 25 bp, Canis familiaris
gtgtttctacacatgtgcaatgaac

SEQ ID NO: 145188 - DNA, 25 bp, Canis familiaris
gtgtttctcacctgtgacattttga

SEQ ID NO: 145189 - DNA, 25 bp, Canis familiaris
gtgttctccacagttaacttttctc

SEQ ID NO: 145190 - DNA, 25 bp, Canis familiaris
gtgttctctggatttactatctttt

SEQ ID NO: 145191 - DNA, 25 bp, Canis familiaris
gtgttggctgagttgtgagctacct

SEQ ID NO: 145192 - DNA, 25 bp, Canis familiaris
gtgttgagagcttctctgactatcc

SEQ ID NO: 145193 - DNA, 25 bp, Canis familiaris
gtgttgaatgcccttgggttctccg

SEQ ID NO: 145194 - DNA, 25 bp, Canis familiaris
gtgttcgtccatttggagtttccct

SEQ ID NO: 145195 - DNA, 25 bp, Canis familiaris
gtgttctgccagggggagttaccct

SEQ ID NO: 145196 - DNA, 25 bp, Canis familiaris
gtgtccttcggtgggagtaagctgc

SEQ ID NO: 145197 - DNA, 25 bp, Canis familiaris
gtgtccttggttgagatctgtagta

SEQ ID NO: 145198 - DNA, 25 bp, Canis familiaris
gtgtactttgaagatcacggactag

SEQ ID NO: 145199 - DNA, 25 bp, Canis familiaris
gtgtccatttatatatcacagtgag

SEQ ID NO: 145200 - DNA, 25 bp, Canis familiaris
gtgtcccttctaacacacaatggaa

SEQ ID NO: 145201 - DNA, 25 bp, Canis familiaris
ggtccctcttaggccaatggtggat

SEQ ID NO: 145202 - DNA, 25 bp, Canis familiaris
ggttccactttgggaaggtcaatct

SEQ ID NO: 145203 - DNA, 25 bp, Canis familiaris
gtgtttgaccttgggaagtgtcctt

SEQ ID NO: 145204 - DNA, 25 bp, Canis familiaris
gtgtttcaccattgtggatagctgt

SEQ ID NO: 145205 - DNA, 25 bp, Canis familiaris
gtgttctttcattgtttcagcttcc

SEQ ID NO: 145206 - DNA, 25 bp, Canis familiaris
gtgttcttgagactgtgttctcatg

SEQ ID NO: 145207 - DNA, 25 bp, Canis familiaris
gtgtcatctacgtcattgattccac

SEQ ID NO: 145208 - DNA, 25 bp, Canis familiaris
gtgttctgagcactgcatttctggc

SEQ ID NO: 145209 - DNA, 25 bp, Canis familiaris
gtgttcatagcagcaatgtctacaa

SEQ ID NO: 145210 - DNA, 25 bp, Canis familiaris
gtgtatcaaacctgtcacgcagaca

SEQ ID NO: 145211 - DNA, 25 bp, Canis familiaris
gtgtacaatacctatgatgcctata

SEQ ID NO: 145212 - DNA, 25 bp, Canis familiaris
gtgttcagatgagttatgagcagct

SEQ ID NO: 145213 - DNA, 25 bp, Canis familiaris
ggtcagcagtgagatatccataagg

SEQ ID NO: 145214 - DNA, 25 bp, Canis familiaris
gtgtcaagtctggagttaaaggatc

SEQ ID NO: 145215 - DNA, 25 bp, Canis familiaris
gtgtctggagctgacttacacggaa

SEQ ID NO: 145216 - DNA, 25 bp, Canis familiaris
gtgttgagacagtttttcatttgaa

SEQ ID NO: 145217 - DNA, 25 bp, Canis familiaris
gtgttgagaatctttctcttgacta

SEQ ID NO: 145218 - DNA, 25 bp, Canis familiaris
gtgttagtcattttgcttatatttg

SEQ ID NO: 145219 - DNA, 25 bp, Canis familiaris
gtgtaagaatgttgtgttaagttaa

SEQ ID NO: 145220 - DNA, 25 bp, Canis familiaris
gtgtaaacagtaccttacatttcta

SEQ ID NO: 145221 - DNA, 25 bp, Canis familiaris
gtgtccaacacctctgtatttttta

SEQ ID NO: 145222 - DNA, 25 bp, Canis familiaris
gtgtccaacacctctgtatttttta

SEQ ID NO: 145223 - DNA, 25 bp, Canis familiaris
gtgtcaaacacctctgtatttttta

SEQ ID NO: 145224 - DNA, 25 bp, Canis familiaris
gtgtcaaacacctctgtatttttta

SEQ ID NO: 145225 - DNA, 25 bp, Canis familiaris
gtgtcaaacacctctgtatttttta

SEQ ID NO: 145226 - DNA, 25 bp, Canis familiaris
gtgtcaaacacctctgtatttttta

SEQ ID NO: 145227 - DNA, 25 bp, Canis familiaris
gtgtcaaacacctctgtatttttta

SEQ ID NO: 145228 - DNA, 25 bp, Canis familiaris
gtgtcaaacacctctgtatttttta

SEQ ID NO: 145229 - DNA, 25 bp, Canis familiaris
gtgtcaaacacctctgtatttttta

SEQ ID NO: 145230 - DNA, 25 bp, Canis familiaris
gtgtcaaacacctctgtatttttta

SEQ ID NO: 145231 - DNA, 25 bp, Canis familiaris
gtgtcaaacacctctgtatttttta

SEQ ID NO: 145232 - DNA, 25 bp, Canis familiaris
gtgtacggatcctcatgaaaagtat

SEQ ID NO: 145233 - DNA, 25 bp, Canis familiaris
gtgtattgtacgagcattgaaagat

SEQ ID NO: 145234 - DNA, 25 bp, Canis familiaris
gtgttttcaagagcatctgaaattt

SEQ ID NO: 145235 - DNA, 25 bp, Canis familiaris
gtgttcattccactgtcttaaactg

SEQ ID NO: 145236 - DNA, 25 bp, Canis familiaris
gtgttcattcactattttgagactc

SEQ ID NO: 145237 - DNA, 25 bp, Canis familiaris
gtgtcttatctctttaaagatctgc

SEQ ID NO: 145238 - DNA, 25 bp, Canis familiaris
gtgtttcctcttcaaatgggcataa

SEQ ID NO: 145239 - DNA, 25 bp, Canis familiaris
gtgttctccactgggtaatgtggaa

SEQ ID NO: 145240 - DNA, 25 bp, Canis familiaris
gtgttccatccactgggacttggac

SEQ ID NO: 145241 - DNA, 25 bp, Canis familiaris
gtgttaacccgcctaattgtgttag

SEQ ID NO: 145242 - DNA, 25 bp, Canis familiaris
gtgttccacccgtggtgatggtttg

SEQ ID NO: 145243 - DNA, 25 bp, Canis familiaris
gtgtgcctacctgtgagaggggttt

SEQ ID NO: 145244 - DNA, 25 bp, Canis familiaris
gtgtccccagctgctggagagggca

SEQ ID NO: 145245 - DNA, 25 bp, Canis familiaris
gtgtcctccgctgtggcaaaaagaa

SEQ ID NO: 145246 - DNA, 25 bp, Canis familiaris
gtgtgccatcccaaagaaaacagaa

SEQ ID NO: 145247 - DNA, 25 bp, Canis familiaris
gtgtcccttcaggatgaaagccgca

SEQ ID NO: 145248 - DNA, 25 bp, Canis familiaris
gtgtgcgcctgatagagaccagctg

SEQ ID NO: 145249 - DNA, 25 bp, Canis familiaris
gtgtctggccagagaaacagctgag

SEQ ID NO: 145250 - DNA, 25 bp, Canis familiaris
gtgtccccagagcaacagagtagga

SEQ ID NO: 145251 - DNA, 25 bp, Canis familiaris
gtgtccggacctagactagtcacga

SEQ ID NO: 145252 - DNA, 25 bp, Canis familiaris
tgttggggaccccatcaattcactc

SEQ ID NO: 145253 - DNA, 25 bp, Canis familiaris
gtgggacgaccgacacaggtcgctc

SEQ ID NO: 145254 - DNA, 25 bp, Canis familiaris
gtggatccatgagcccaagggttac

SEQ ID NO: 145255 - DNA, 25 bp, Canis familiaris
gtgtaatcatcaaaccacgggctta

SEQ ID NO: 145256 - DNA, 25 bp, Canis familiaris
gtgtttcaagaaccacagcggattc

SEQ ID NO: 145257 - DNA, 25 bp, Canis familiaris
gtgtaccaaaacaaagatgttctag

SEQ ID NO: 145258 - DNA, 25 bp, Canis familiaris
gtgtcaccaatccagtaaagctttt

SEQ ID NO: 145259 - DNA, 25 bp, Canis familiaris
gtgtagcacactgagttacgcaatc

SEQ ID NO: 145260 - DNA, 25 bp, Canis familiaris
gtgtcatccaagcagtggacgagaa

SEQ ID NO: 145261 - DNA, 25 bp, Canis familiaris
gtgtcagtcacgcatgtgagaaagt

SEQ ID NO: 145262 - DNA, 25 bp, Canis familiaris
gtgtcttcaccaccatggagaaggc

SEQ ID NO: 145263 - DNA, 25 bp, Canis familiaris
gtgtcttagccacatgagaggagaa

SEQ ID NO: 145264 - DNA, 25 bp, Canis familiaris
gtgtagttggcagtgatcagggcag

SEQ ID NO: 145265 - DNA, 25 bp, Canis familiaris
gtgtatggacatcgcgatagctggg

SEQ ID NO: 145266 - DNA, 25 bp, Canis familiaris
gtgtatgtacgtgtatgtgtgtgta

SEQ ID NO: 145267 - DNA, 25 bp, Canis familiaris
gtgtatggagggtctctgggtgtcg

SEQ ID NO: 145268 - DNA, 25 bp, Canis familiaris
gtgtacggtggaatcggtgttcgac

SEQ ID NO: 145269 - DNA, 25 bp, Canis familiaris
gtgtcacggggaactgcttggagca

SEQ ID NO: 145270 - DNA, 25 bp, Canis familiaris
gtgtactgtggataagctggtgtga

SEQ ID NO: 145271 - DNA, 25 bp, Canis familiaris
gtgttctctgaatacctgacatgga

SEQ ID NO: 145272 - DNA, 25 bp, Canis familiaris
gtgtactcgaaatattatctggtca

SEQ ID NO: 145273 - DNA, 25 bp, Canis familiaris
gtgtattcgaaaggtctgtctggga

SEQ ID NO: 145274 - DNA, 25 bp, Canis familiaris
gtgtccaaacacagtctcttgagga

SEQ ID NO: 145275 - DNA, 25 bp, Canis familiaris
gtgtccaagagcacgcagtttgagt

SEQ ID NO: 145276 - DNA, 25 bp, Canis familiaris
gtgtcacagagccaaggcagttcga

SEQ ID NO: 145277 - DNA, 25 bp, Canis familiaris
gtgtatcagtggccggcaggtgtat

SEQ ID NO: 145278 - DNA, 25 bp, Canis familiaris
gtgtcatcatcgcacggagggagta

SEQ ID NO: 145279 - DNA, 25 bp, Canis familiaris
gtgtttggacacagtgaggctgctg

SEQ ID NO: 145280 - DNA, 25 bp, Canis familiaris
gtgtttgactacagtgagtactggg

SEQ ID NO: 145281 - DNA, 25 bp, Canis familiaris
gtgtttaggatctgcttgtgacgga

SEQ ID NO: 145282 - DNA, 25 bp, Canis familiaris
gtgttctcagcagcaggttggaagg

SEQ ID NO: 145283 - DNA, 25 bp, Canis familiaris
gtgtcttcagacagtttgggaggaa

SEQ ID NO: 145284 - DNA, 25 bp, Canis familiaris
gtgtaccagccacgtgttggggaca

SEQ ID NO: 145285 - DNA, 25 bp, Canis familiaris
gtgtagaccattctgtgggaggata

SEQ ID NO: 145286 - DNA, 25 bp, Canis familiaris
ggtaacgattcggtcggtgtgatct

SEQ ID NO: 145287 - DNA, 25 bp, Canis familiaris
gggaacgcatttcatcgtggtcccc

SEQ ID NO: 145288 - DNA, 25 bp, Canis familiaris
gtggaacctttaagccagtgtccct

SEQ ID NO: 145289 - DNA, 25 bp, Canis familiaris
gtgtcacagttaccatggtctttcc

SEQ ID NO: 145290 - DNA, 25 bp, Canis familiaris
gtgtccagtgatgagagttcttccg

SEQ ID NO: 145291 - DNA, 25 bp, Canis familiaris
gtgtcgcagttggcagagtacgggc

SEQ ID NO: 145292 - DNA, 25 bp, Canis familiaris
gtgtctcagcgtcaggaactggcca

SEQ ID NO: 145293 - DNA, 25 bp, Canis familiaris
gtgtctacttcacaagacatggaca

SEQ ID NO: 145294 - DNA, 25 bp, Canis familiaris
gtgtcttcttcgggaactagatctg

SEQ ID NO: 145295 - DNA, 25 bp, Canis familiaris
gtgtcccttctagagagctcaatcg

SEQ ID NO: 145296 - DNA, 25 bp, Canis familiaris
gtgtccttttgagatgtcttcatcc

SEQ ID NO: 145297 - DNA, 25 bp, Canis familiaris
gtgtccgtttgcgtatgtgtaaaag

SEQ ID NO: 145298 - DNA, 25 bp, Canis familiaris
gtgtcggattttgctgttcacggac

SEQ ID NO: 145299 - DNA, 25 bp, Canis familiaris
gtggggtttaccctatgcacaggag

SEQ ID NO: 145300 - DNA, 25 bp, Canis familiaris
gtgggcagttctgccttccaaagga

SEQ ID NO: 145301 - DNA, 25 bp, Canis familiaris
gtgtttgatgtcacctctggaaagg

SEQ ID NO: 145302 - DNA, 25 bp, Canis familiaris
gtgtggtgttgccccattaaaagcc

SEQ ID NO: 145303 - DNA, 25 bp, Canis familiaris
gtggtgtttcaggctaaaggtccct

SEQ ID NO: 145304 - DNA, 25 bp, Canis familiaris
gtgggtttacgacgtcaggcacatc

SEQ ID NO: 145305 - DNA, 25 bp, Canis familiaris
gtgtaggaggaggaggccagccacc

SEQ ID NO: 145306 - DNA, 25 bp, Canis familiaris
gtgtatggcgggaagtccaccatcc

SEQ ID NO: 145307 - DNA, 25 bp, Canis familiaris
gtgtctcctggagaacacagcctcc

SEQ ID NO: 145308 - DNA, 25 bp, Canis familiaris
gtgtgccgtggtgaaacgggaccgc

SEQ ID NO: 145309 - DNA, 25 bp, Canis familiaris
gtgtcctgtgcttgggagagcggga

SEQ ID NO: 145310 - DNA, 25 bp, Canis familiaris
gtgtgacgagctttggacgctgcac

SEQ ID NO: 145311 - DNA, 25 bp, Canis familiaris
gtgttcatcagtctgcaactgctgc

SEQ ID NO: 145312 - DNA, 25 bp, Canis familiaris
gtgttcatcctgttaattgcttcat

SEQ ID NO: 145313 - DNA, 25 bp, Canis familiaris
gtgttctctctgggtgagcatctta

SEQ ID NO: 145314 - DNA, 25 bp, Canis familiaris
gtgttcttgtctgagagctgcattc

SEQ ID NO: 145315 - DNA, 25 bp, Canis familiaris
gtgtacctattccagagctatcttc

SEQ ID NO: 145316 - DNA, 25 bp, Canis familiaris
gtgtgagcagctatctcgagctaca

SEQ ID NO: 145317 - DNA, 25 bp, Canis familiaris
gtgtagcatgtaactcttgatctca

SEQ ID NO: 145318 - DNA, 25 bp, Canis familiaris
gtgtaatgttaccttgcatcctgtt

SEQ ID NO: 145319 - DNA, 25 bp, Canis familiaris
gtgtcatggtattcagggacctgcc

SEQ ID NO: 145320 - DNA, 25 bp, Canis familiaris
gtgtatgttgattccagagatcctg

SEQ ID NO: 145321 - DNA, 25 bp, Canis familiaris
gtgttactccactagacatccagat

SEQ ID NO: 145322 - DNA, 25 bp, Canis familiaris
gtgtataacaagcaacagcattatg

SEQ ID NO: 145323 - DNA, 25 bp, Canis familiaris
gtgtattaaaaactcagcatctgat

SEQ ID NO: 145324 - DNA, 25 bp, Canis familiaris
gtgtctacaacaaaatctgcctgct

SEQ ID NO: 145325 - DNA, 25 bp, Canis familiaris
gtgttcaagacacaacgcggatttt

SEQ ID NO: 145326 - DNA, 25 bp, Canis familiaris
gtgtccaacgcagacctgctggatt

SEQ ID NO: 145327 - DNA, 25 bp, Canis familiaris
gtgtcctaaggcgagctcagggagg

SEQ ID NO: 145328 - DNA, 25 bp, Canis familiaris
gtgtttcacagagatccagggggag

SEQ ID NO: 145329 - DNA, 25 bp, Canis familiaris
gtgtattaccagtaccacagggaca

SEQ ID NO: 145330 - DNA, 25 bp, Canis familiaris
gtgtttgcattaatagccacagggt

SEQ ID NO: 145331 - DNA, 25 bp, Canis familiaris
gtgtttttatattgactctgcggcg

SEQ ID NO: 145332 - DNA, 25 bp, Canis familiaris
gtgtttttacattgatcttttgcta

SEQ ID NO: 145333 - DNA, 25 bp, Canis familiaris
gtgttttctaatttttctacaatga

SEQ ID NO: 145334 - DNA, 25 bp, Canis familiaris
gtgtttttaatatttatgctacttc

SEQ ID NO: 145335 - DNA, 25 bp, Canis familiaris
gtgtttgctgtattcacttattaat

SEQ ID NO: 145336 - DNA, 25 bp, Canis familiaris
gtgttcatgctttgttcttttttta

SEQ ID NO: 145337 - DNA, 25 bp, Canis familiaris
gtgtgagcatttctttttcctgtta

SEQ ID NO: 145338 - DNA, 25 bp, Canis familiaris
gtgtaatgtaaaatccttccttgct

SEQ ID NO: 145339 - DNA, 25 bp, Canis familiaris
gtgttttgagctttccttgtttgct

SEQ ID NO: 145340 - DNA, 25 bp, Canis familiaris
gtgtttgtgagttgtcctggttgga

SEQ ID NO: 145341 - DNA, 25 bp, Canis familiaris
gtgtttggaggattctccgctggct

SEQ ID NO: 145342 - DNA, 25 bp, Canis familiaris
gtgtgtcgaaggttacccaagtgga

SEQ ID NO: 145343 - DNA, 25 bp, Canis familiaris
gtgtcgcggaggtgaacccggatgg

SEQ ID NO: 145344 - DNA, 25 bp, Canis familiaris
gtgggagggcaggtaactccagttc

SEQ ID NO: 145345 - DNA, 25 bp, Canis familiaris
gtgggagttgaattgaacccctcct

SEQ ID NO: 145346 - DNA, 25 bp, Canis familiaris
gtgtgggttgctagaaaccctcccg

SEQ ID NO: 145347 - DNA, 25 bp, Canis familiaris
gtgtggagaagctaggactcccccc

SEQ ID NO: 145348 - DNA, 25 bp, Canis familiaris
gtgtaaacaataggccaccccatga

SEQ ID NO: 145349 - DNA, 25 bp, Canis familiaris
gtgtacatagaaaagctcccaaaga

SEQ ID NO: 145350 - DNA, 25 bp, Canis familiaris
gtgtcctaatgaaacaatcccagag

SEQ ID NO: 145351 - DNA, 25 bp, Canis familiaris
gtgtctctcctgaataaatacataa

SEQ ID NO: 145352 - DNA, 25 bp, Canis familiaris
gtgtcttcctgtgatagtggctaca

SEQ ID NO: 145353 - DNA, 25 bp, Canis familiaris
gtgtctacatttctattggttcctg

SEQ ID NO: 145354 - DNA, 25 bp, Canis familiaris
gtgtctgaaaggtaattgtttgcct

SEQ ID NO: 145355 - DNA, 25 bp, Canis familiaris
gtgtcgagtttgtgacgtttgcgcc

SEQ ID NO: 145356 - DNA, 25 bp, Canis familiaris
gtgtcgacttaatagtggtgtctca

SEQ ID NO: 145357 - DNA, 25 bp, Canis familiaris
gtgtcagctttctttactggtatct

SEQ ID NO: 145358 - DNA, 25 bp, Canis familiaris
gtgtttatctctaatacgcgttctt

SEQ ID NO: 145359 - DNA, 25 bp, Canis familiaris
gtgttttctttaatcctggttatct

SEQ ID NO: 145360 - DNA, 25 bp, Canis familiaris
gtgtttgaagtttatcctcgttgat

SEQ ID NO: 145361 - DNA, 25 bp, Canis familiaris
gggttgtagctctgtaccgaggaac

SEQ ID NO: 145362 - DNA, 25 bp, Canis familiaris
gggctacattttctacccaagaaca

SEQ ID NO: 145363 - DNA, 25 bp, Canis familiaris
gtgtctacacatctggtgaccttag

SEQ ID NO: 145364 - DNA, 25 bp, Canis familiaris
gtgtctagcaatgtttgtgtctaaa

SEQ ID NO: 145365 - DNA, 25 bp, Canis familiaris
gtgttatgtataatgctttgttaaa

SEQ ID NO: 145366 - DNA, 25 bp, Canis familiaris
gtgtcgtgtaatggcaacttggtaa

SEQ ID NO: 145367 - DNA, 25 bp, Canis familiaris
gtgtcgtgtaatggcaacttggtaa

SEQ ID NO: 145368 - DNA, 25 bp, Canis familiaris
gtgtagagtacccgtgttggctcta

SEQ ID NO: 145369 - DNA, 25 bp, Canis familiaris
gtgtagtatgactgctttttcctca

SEQ ID NO: 145370 - DNA, 25 bp, Canis familiaris
gtggtttacatgttagttccctata

SEQ ID NO: 145371 - DNA, 25 bp, Canis familiaris
gtgggccagactgtagatgacccct

SEQ ID NO: 145372 - DNA, 25 bp, Canis familiaris
gtgtcccaacttgaaatcatcgcct

SEQ ID NO: 145373 - DNA, 25 bp, Canis familiaris
gtgtcctaacttgttgagagctcct

SEQ ID NO: 145374 - DNA, 25 bp, Canis familiaris
gtgttattcctcacttctgagactt

SEQ ID NO: 145375 - DNA, 25 bp, Canis familiaris
gtgtattccacttcatttgtaactt

SEQ ID NO: 145376 - DNA, 25 bp, Canis familiaris
gtgttaccacacttatttatagttt

SEQ ID NO: 145377 - DNA, 25 bp, Canis familiaris
gtgtctacaagtctttaaagtcttt

SEQ ID NO: 145378 - DNA, 25 bp, Canis familiaris
gtgttacgttgccttttgcaaactt

SEQ ID NO: 145379 - DNA, 25 bp, Canis familiaris
gtgtattctgtgccagttgtccaca

SEQ ID NO: 145380 - DNA, 25 bp, Canis familiaris
gtgtccatttcctttgtcgaatgtc

SEQ ID NO: 145381 - DNA, 25 bp, Canis familiaris
gtgtctgcaacccatttgccaaatc

SEQ ID NO: 145382 - DNA, 25 bp, Canis familiaris
gtgtacaaaccacttggcaaggccc

SEQ ID NO: 145383 - DNA, 25 bp, Canis familiaris
gtgtagaccaagggggcagctggcc

SEQ ID NO: 145384 - DNA, 25 bp, Canis familiaris
gtgtagactctgggtgggagctccc

SEQ ID NO: 145385 - DNA, 25 bp, Canis familiaris
gtgtcacatcgtgggtggaactcac

SEQ ID NO: 145386 - DNA, 25 bp, Canis familiaris
gtgtcagtcatttgggtgagcagta

SEQ ID NO: 145387 - DNA, 25 bp, Canis familiaris
gtgtattattatctgagtatgtctt

SEQ ID NO: 145388 - DNA, 25 bp, Canis familiaris
gtgttattttcctctagattcttag

SEQ ID NO: 145389 - DNA, 25 bp, Canis familiaris
gtgttttttcactgatctgatttct

SEQ ID NO: 145390 - DNA, 25 bp, Canis familiaris
gtgtatatttctgttgtctgacctt

SEQ ID NO: 145391 - DNA, 25 bp, Canis familiaris
gtgtaattttcatgtgttttctttt

SEQ ID NO: 145392 - DNA, 25 bp, Canis familiaris
gtgttattgttattgtgttattgtt

SEQ ID NO: 145393 - DNA, 25 bp, Canis familiaris
gtgtttgttgtgtttgtgtttgtgt

SEQ ID NO: 145394 - DNA, 25 bp, Canis familiaris
gtgttttatgtgtgcattgactttg

SEQ ID NO: 145395 - DNA, 25 bp, Canis familiaris
gtgttttgtgtgagaagcaccttct

SEQ ID NO: 145396 - DNA, 25 bp, Canis familiaris
gtgttttggattttagccattcttt

SEQ ID NO: 145397 - DNA, 25 bp, Canis familiaris
gtgttttggtctatacgcaatcgtc

SEQ ID NO: 145398 - DNA, 25 bp, Canis familiaris
gtgttttttcttaagcaaccgattg

SEQ ID NO: 145399 - DNA, 25 bp, Canis familiaris
gtgttttaccttaacaacattctat

SEQ ID NO: 145400 - DNA, 25 bp, Canis familiaris
gtggttggactttgaaacacttcct

SEQ ID NO: 145401 - DNA, 25 bp, Canis familiaris
gtgtcttggctaataaaaccaacct

SEQ ID NO: 145402 - DNA, 25 bp, Canis familiaris
gtgtcaatgagcgtttaaaccaaga

SEQ ID NO: 145403 - DNA, 25 bp, Canis familiaris
gtgtcacgcgcagatatatataccc

SEQ ID NO: 145404 - DNA, 25 bp, Canis familiaris
gtgtaagctcatgaagatctgcatg

SEQ ID NO: 145405 - DNA, 25 bp, Canis familiaris
ggtctggctcaggggaccatgacct

SEQ ID NO: 145406 - DNA, 25 bp, Canis familiaris
gtgtatcctacgaagactcagacct

SEQ ID NO: 145407 - DNA, 25 bp, Canis familiaris
gtgtatcctacgaagactcagacct

SEQ ID NO: 145408 - DNA, 25 bp, Canis familiaris
gtgtatcctacgaagactcagacct

SEQ ID NO: 145409 - DNA, 25 bp, Canis familiaris
gtgtatcctacgaagactcagacct

SEQ ID NO: 145410 - DNA, 25 bp, Canis familiaris
gtgtatattatatcaaggcagacct

SEQ ID NO: 145411 - DNA, 25 bp, Canis familiaris
gtgtcttttaaaatgctgtagcctg

SEQ ID NO: 145412 - DNA, 25 bp, Canis familiaris
gtgttatagtaacttgcctaccgat

SEQ ID NO: 145413 - DNA, 25 bp, Canis familiaris
gtgtattggtaactggcctcactct

SEQ ID NO: 145414 - DNA, 25 bp, Canis familiaris
gtgtattttaggtgcccatcttctc

SEQ ID NO: 145415 - DNA, 25 bp, Canis familiaris
gtgttttaaaagtatcctctctcga

SEQ ID NO: 145416 - DNA, 25 bp, Canis familiaris
gtgtgccttaaatcttacctttgaa

SEQ ID NO: 145417 - DNA, 25 bp, Canis familiaris
gtgtttgtgaattctttaccttttg

SEQ ID NO: 145418 - DNA, 25 bp, Canis familiaris
gtgtttctatatcctattttcttct

SEQ ID NO: 145419 - DNA, 25 bp, Canis familiaris
gtgtttctttggtatttattgtctc

SEQ ID NO: 145420 - DNA, 25 bp, Canis familiaris
gtgtgctacattttgtactttttta

SEQ ID NO: 145421 - DNA, 25 bp, Canis familiaris
gtgtcgaatgtgtgtgtgcttttta

SEQ ID NO: 145422 - DNA, 25 bp, Canis familiaris
gtgtctgggatgaactacttcttgg

SEQ ID NO: 145423 - DNA, 25 bp, Canis familiaris
gtgtttgctgcatactttgatttgg

SEQ ID NO: 145424 - DNA, 25 bp, Canis familiaris
gtgtatcctcattactgtatcattt

SEQ ID NO: 145425 - DNA, 25 bp, Canis familiaris
gtgtatctctcacgaatgaatatta

SEQ ID NO: 145426 - DNA, 25 bp, Canis familiaris
gtgtattctcagccatgacatgtga

SEQ ID NO: 145427 - DNA, 25 bp, Canis familiaris
gtgtttgctgacgtccagtgtacag

SEQ ID NO: 145428 - DNA, 25 bp, Canis familiaris
gtgtctctggaggcacccagtagga

SEQ ID NO: 145429 - DNA, 25 bp, Canis familiaris
gtgtcattgaggtccttcagcgacg

SEQ ID NO: 145430 - DNA, 25 bp, Canis familiaris
gtgtcagagagatcctctcctgtgc

SEQ ID NO: 145431 - DNA, 25 bp, Canis familiaris
gtgtgcaagaagaagcccaacgcca

SEQ ID NO: 145432 - DNA, 25 bp, Canis familiaris
gtgtcgcagacagcgccaacaagct

SEQ ID NO: 145433 - DNA, 25 bp, Canis familiaris
gtgtcgcgagatcctgacggagact

SEQ ID NO: 145434 - DNA, 25 bp, Canis familiaris
gtgtcagctatgtgctacgaatctc

SEQ ID NO: 145435 - DNA, 25 bp, Canis familiaris
gtgtcatgcaccttctgaatatttc

SEQ ID NO: 145436 - DNA, 25 bp, Canis familiaris
gtgtcagcggccaatggtattcatt

SEQ ID NO: 145437 - DNA, 25 bp, Canis familiaris
gtgtgcacgtgctcatgtgtgttat

SEQ ID NO: 145438 - DNA, 25 bp, Canis familiaris
gtgtgacgtctattttgacttttgg

SEQ ID NO: 145439 - DNA, 25 bp, Canis familiaris
gtgtacgtgtaaatagcctgggctt

SEQ ID NO: 145440 - DNA, 25 bp, Canis familiaris
gtgtacgcttgagctaccagtgggt

SEQ ID NO: 145441 - DNA, 25 bp, Canis familiaris
gtgtgcacgtatttaaccgtgggta

SEQ ID NO: 145442 - DNA, 25 bp, Canis familiaris
ggatacgttcctcagagggccgaag

SEQ ID NO: 145443 - DNA, 25 bp, Canis familiaris
gggacgtacgggaaggagccgacat

SEQ ID NO: 145444 - DNA, 25 bp, Canis familiaris
gtgggggaaggccaagtggtcgcca

SEQ ID NO: 145445 - DNA, 25 bp, Canis familiaris
gtgggggcaagtgctggaattcgcc

SEQ ID NO: 145446 - DNA, 25 bp, Canis familiaris
gtgggggcgatatctagctttaacc

SEQ ID NO: 145447 - DNA, 25 bp, Canis familiaris
gtggggctttactaagtttaatgcg

SEQ ID NO: 145448 - DNA, 25 bp, Canis familiaris
tgttaacccgcctaattgtgttagg

SEQ ID NO: 145449 - DNA, 25 bp, Canis familiaris
gtgtcccaccctgagtatgtttagg

SEQ ID NO: 145450 - DNA, 25 bp, Canis familiaris
gtgtaagcatcccttagaaacttag

SEQ ID NO: 145451 - DNA, 25 bp, Canis familiaris
ggctaatgcatcctttggcaatcat

SEQ ID NO: 145452 - DNA, 25 bp, Canis familiaris
gtgtaatgtgcacttgtgtgtatag

SEQ ID NO: 145453 - DNA, 25 bp, Canis familiaris
gtgtctgtgtgactgctgcatggat

SEQ ID NO: 145454 - DNA, 25 bp, Canis familiaris
gtgtctcaatgaggtctgcttctta

SEQ ID NO: 145455 - DNA, 25 bp, Canis familiaris
gtgtctggatagcagcatctctctc

SEQ ID NO: 145456 - DNA, 25 bp, Canis familiaris
gtgtctgatctaaggcatcctacca

SEQ ID NO: 145457 - DNA, 25 bp, Canis familiaris
gtgtatgttaagcaccaggcacagt

SEQ ID NO: 145458 - DNA, 25 bp, Canis familiaris
gtggtcttactgccacttagcagca

SEQ ID NO: 145459 - DNA, 25 bp, Canis familiaris
gtggtttagctggtttagcaccgcc

SEQ ID NO: 145460 - DNA, 25 bp, Canis familiaris
gtgtgttcgagtcttaagccaggct

SEQ ID NO: 145461 - DNA, 25 bp, Canis familiaris
gtgtggccagggagtaaccagggta

SEQ ID NO: 145462 - DNA, 25 bp, Canis familiaris
gtgggccctgggcaaaccaggggca

SEQ ID NO: 145463 - DNA, 25 bp, Canis familiaris
gtgggccgtggtgagggccagggga

SEQ ID NO: 145464 - DNA, 25 bp, Canis familiaris
gtggcgaagtttcaggaccagcccg

SEQ ID NO: 145465 - DNA, 25 bp, Canis familiaris
gtgggtaaatacgggacgcgctacg

SEQ ID NO: 145466 - DNA, 25 bp, Canis familiaris
gtggagtcaacttcaggaaccctta

SEQ ID NO: 145467 - DNA, 25 bp, Canis familiaris
gtgggtatacaatccaaagtcttga

SEQ ID NO: 145468 - DNA, 25 bp, Canis familiaris
gtgggatgtccaaacgctaactact

SEQ ID NO: 145469 - DNA, 25 bp, Canis familiaris
gtgtggattccaacacctaaaccaa

SEQ ID NO: 145470 - DNA, 25 bp, Canis familiaris
gtgtagattgtcaaccctaattaga

SEQ ID NO: 145471 - DNA, 25 bp, Canis familiaris
gtgtagtgattcgaccggacattaa

SEQ ID NO: 145472 - DNA, 25 bp, Canis familiaris
gtggcaaatcggaacggaattccag

SEQ ID NO: 145473 - DNA, 25 bp, Canis familiaris
gtgtagaccgtgagggttctccagt

SEQ ID NO: 145474 - DNA, 25 bp, Canis familiaris
gtgtaggtggtgacaggtgctctgc

SEQ ID NO: 145475 - DNA, 25 bp, Canis familiaris
gtgtatgagagttccagttctctgg

SEQ ID NO: 145476 - DNA, 25 bp, Canis familiaris
gtgtatgatgagccacaagttcata

SEQ ID NO: 145477 - DNA, 25 bp, Canis familiaris
gtgtatcatatggcccagttacgcc

SEQ ID NO: 145478 - DNA, 25 bp, Canis familiaris
gtgtagctatcctaacttaacctta

SEQ ID NO: 145479 - DNA, 25 bp, Canis familiaris
gtgtgacttcattgagactcattac

SEQ ID NO: 145480 - DNA, 25 bp, Canis familiaris
gtgtttctcaggggtcattacactg

SEQ ID NO: 145481 - DNA, 25 bp, Canis familiaris
gtgtattctctgtaagtatagctca

SEQ ID NO: 145482 - DNA, 25 bp, Canis familiaris
gtgtctttcgtccgtagaggcagaa

SEQ ID NO: 145483 - DNA, 25 bp, Canis familiaris
gtgtttgtctttctcagaggctgag

SEQ ID NO: 145484 - DNA, 25 bp, Canis familiaris
gtgtttgtttgtttcagcatgacag

SEQ ID NO: 145485 - DNA, 25 bp, Canis familiaris
gtgtgtttgactacagtgagtactg

SEQ ID NO: 145486 - DNA, 25 bp, Canis familiaris
gggttctagcataccgtgtagtacc

SEQ ID NO: 145487 - DNA, 25 bp, Canis familiaris
gtgggatgccagcatccctgcaagt

SEQ ID NO: 145488 - DNA, 25 bp, Canis familiaris
gtgtggcatggcaagcatcccagaa

SEQ ID NO: 145489 - DNA, 25 bp, Canis familiaris
gtgtctgcagtccgttgcatagcaa

SEQ ID NO: 145490 - DNA, 25 bp, Canis familiaris
gtgtcatgaatagtgtcctatgcaa

SEQ ID NO: 145491 - DNA, 25 bp, Canis familiaris
gtgtcagaatgagttatgtagcagc

SEQ ID NO: 145492 - DNA, 25 bp, Canis familiaris
gtgtaccatactaatgtaagctgtt

SEQ ID NO: 145493 - DNA, 25 bp, Canis familiaris
gtgtgaagaagtgcattggaggtgt

SEQ ID NO: 145494 - DNA, 25 bp, Canis familiaris
gtgtacaagtgtgatcctgcaggtt

SEQ ID NO: 145495 - DNA, 25 bp, Canis familiaris
gtggcacaaactgacactgcggtac

SEQ ID NO: 145496 - DNA, 25 bp, Canis familiaris
gtgtagcaataatacccgttcccta

SEQ ID NO: 145497 - DNA, 25 bp, Canis familiaris
gtgtatgtcaattatacccttcccc

SEQ ID NO: 145498 - DNA, 25 bp, Canis familiaris
gtgtatgccaagtacacccgtacag

SEQ ID NO: 145499 - DNA, 25 bp, Canis familiaris
gtgtagatacactaagtcctggaag

SEQ ID NO: 145500 - DNA, 25 bp, Canis familiaris
gtgtgaaaactgaacccatggaaga

SEQ ID NO: 145501 - DNA, 25 bp, Canis familiaris
gtgtgaaatcctagagcttcagggg

SEQ ID NO: 145502 - DNA, 25 bp, Canis familiaris
gtgtcaattccaggcatctttaagg

SEQ ID NO: 145503 - DNA, 25 bp, Canis familiaris
gtgtcaactccaactctcgtggagg

SEQ ID NO: 145504 - DNA, 25 bp, Canis familiaris
gtgtatactcagggctccttggaaa

SEQ ID NO: 145505 - DNA, 25 bp, Canis familiaris
gtgtatattcctgcccagtgaataa

SEQ ID NO: 145506 - DNA, 25 bp, Canis familiaris
gtggatcaacacacaccaagaacaa

SEQ ID NO: 145507 - DNA, 25 bp, Canis familiaris
gtgtgtacgcacacctacgatatgc

SEQ ID NO: 145508 - DNA, 25 bp, Canis familiaris
gtgtgatagcccactggatggcatt

SEQ ID NO: 145509 - DNA, 25 bp, Canis familiaris
gtgtgatgaccctcgtaagcactta

SEQ ID NO: 145510 - DNA, 25 bp, Canis familiaris
gtgtgtggcacgttttaagttaatt

SEQ ID NO: 145511 - DNA, 25 bp, Canis familiaris
gtgggccgcatgtttaagcagttca

SEQ ID NO: 145512 - DNA, 25 bp, Canis familiaris
gtggacacgtttcaagcagttcaac

SEQ ID NO: 145513 - DNA, 25 bp, Canis familiaris
gtgtaacgtttctggctgatgctta

SEQ ID NO: 145514 - DNA, 25 bp, Canis familiaris
gtgtgacctgatgtctgtgccaggc

SEQ ID NO: 145515 - DNA, 25 bp, Canis familiaris
gtgtcctctatggtcttgccaaaat

SEQ ID NO: 145516 - DNA, 25 bp, Canis familiaris
gtgtcagtaagtttctgtacagact

SEQ ID NO: 145517 - DNA, 25 bp, Canis familiaris
gtgtagtagatgtttctcagaagca

SEQ ID NO: 145518 - DNA, 25 bp, Canis familiaris
gtgtattatgtgttactgaaggcaa

SEQ ID NO: 145519 - DNA, 25 bp, Canis familiaris
gtgtatcttatgtgtctgttggcca

SEQ ID NO: 145520 - DNA, 25 bp, Canis familiaris
gtgtattggatgtgtgtgtgggaaa

SEQ ID NO: 145521 - DNA, 25 bp, Canis familiaris
gtgtctaggcagtcgttcattggag

SEQ ID NO: 145522 - DNA, 25 bp, Canis familiaris
gtgtctatgacgtcggtagtgcctg

SEQ ID NO: 145523 - DNA, 25 bp, Canis familiaris
gtgtctaagctgtggctcagttctg

SEQ ID NO: 145524 - DNA, 25 bp, Canis familiaris
gtgtctagcttgcaaccagttcatt

SEQ ID NO: 145525 - DNA, 25 bp, Canis familiaris
gtgtgattcctgcaaccagactact

SEQ ID NO: 145526 - DNA, 25 bp, Canis familiaris
gtggtgacccgtatcaaggagctca

SEQ ID NO: 145527 - DNA, 25 bp, Canis familiaris
gtgggaccaagtagatgcccccaca

SEQ ID NO: 145528 - DNA, 25 bp, Canis familiaris
gtgtggcaaacagtggaaccctcat

SEQ ID NO: 145529 - DNA, 25 bp, Canis familiaris
gtgtgccatccaggatggccaccct

SEQ ID NO: 145530 - DNA, 25 bp, Canis familiaris
gtgtgcaacacagtcataccaccac

SEQ ID NO: 145531 - DNA, 25 bp, Canis familiaris
gtgtgcagacacacaggagcccaaa

SEQ ID NO: 145532 - DNA, 25 bp, Canis familiaris
gtgtgcaagcacatcaagaagccca

SEQ ID NO: 145533 - DNA, 25 bp, Canis familiaris
gtgtaagactagaaagatgcatctc

SEQ ID NO: 145534 - DNA, 25 bp, Canis familiaris
gtgtgtaagctcatgaagatctgca

SEQ ID NO: 145535 - DNA, 25 bp, Canis familiaris
gtgtgtaccttataatctccaccac

SEQ ID NO: 145536 - DNA, 25 bp, Canis familiaris
gtgtactcattttaagctccgagcc

SEQ ID NO: 145537 - DNA, 25 bp, Canis familiaris
gtgtatctcattggaaacctcatgg

SEQ ID NO: 145538 - DNA, 25 bp, Canis familiaris
gtgtacttttaattagcctgtgtct

SEQ ID NO: 145539 - DNA, 25 bp, Canis familiaris
gtgtaattttcatcatcagggtttt

SEQ ID NO: 145540 - DNA, 25 bp, Canis familiaris
gtgtattttcacttctctttttttg

SEQ ID NO: 145541 - DNA, 25 bp, Canis familiaris
gtgtattctgtgcaatttttttctc

SEQ ID NO: 145542 - DNA, 25 bp, Canis familiaris
gtgtattctgttacttacttttgtt

SEQ ID NO: 145543 - DNA, 25 bp, Canis familiaris
gtgtctttttttaaatgtgctgtgt

SEQ ID NO: 145544 - DNA, 25 bp, Canis familiaris
gtgtctacgttattgtctatgcctt

SEQ ID NO: 145545 - DNA, 25 bp, Canis familiaris
gtgtctgcctgcatatgtgtctgag

SEQ ID NO: 145546 - DNA, 25 bp, Canis familiaris
gtgtctgccatttggctacggggga

SEQ ID NO: 145547 - DNA, 25 bp, Canis familiaris
gtgtccgtaatgggagcggcgggat

SEQ ID NO: 145548 - DNA, 25 bp, Canis familiaris
gtgtgccggaatatcagcaggcggc

SEQ ID NO: 145549 - DNA, 25 bp, Canis familiaris
gtgtccggagaatgccgaggtcacc

SEQ ID NO: 145550 - DNA, 25 bp, Canis familiaris
gtgtgtccggagaatgccgaggtca

SEQ ID NO: 145551 - DNA, 25 bp, Canis familiaris
gtgtgtccgtttgcgtatgtgtaaa

SEQ ID NO: 145552 - DNA, 25 bp, Canis familiaris
ggatcccagtattccagttacttaa

SEQ ID NO: 145553 - DNA, 25 bp, Canis familiaris
ggatcccgtattcattaggctaacc

SEQ ID NO: 145554 - DNA, 25 bp, Canis familiaris
gtgtcccgaatttattagtgccaga

SEQ ID NO: 145555 - DNA, 25 bp, Canis familiaris
gtgtcccggtgttttatggaagata

SEQ ID NO: 145556 - DNA, 25 bp, Canis familiaris
gtgtcttcggttctatcatggagag

SEQ ID NO: 145557 - DNA, 25 bp, Canis familiaris
gtgtctgacaggtcgcctgaaggaa

SEQ ID NO: 145558 - DNA, 25 bp, Canis familiaris
gtgtggacatggggttagaggtaat

SEQ ID NO: 145559 - DNA, 25 bp, Canis familiaris
gtgggaacagggaacaggggatcat

SEQ ID NO: 145560 - DNA, 25 bp, Canis familiaris
gtgtggaccagactgaaagttaaac

SEQ ID NO: 145561 - DNA, 25 bp, Canis familiaris
gtgtagtgtcagttaaggtctcgtt

SEQ ID NO: 145562 - DNA, 25 bp, Canis familiaris
gtgtccggagcatttgaagttcgtg

SEQ ID NO: 145563 - DNA, 25 bp, Canis familiaris
gtgtacgtgatatggaagtctctta

SEQ ID NO: 145564 - DNA, 25 bp, Canis familiaris
gtgtagcgctgttagctgtagttct

SEQ ID NO: 145565 - DNA, 25 bp, Canis familiaris
gtgtgaccatgttcattataatctc

SEQ ID NO: 145566 - DNA, 25 bp, Canis familiaris
gtgtgaccatgttcattataatctc

SEQ ID NO: 145567 - DNA, 25 bp, Canis familiaris
gtgtccatcatgtacctttataagt

SEQ ID NO: 145568 - DNA, 25 bp, Canis familiaris
gtgtccgcagatccctgggaaagcc

SEQ ID NO: 145569 - DNA, 25 bp, Canis familiaris
gtgtccccatctctaagaaatgcgc

SEQ ID NO: 145570 - DNA, 25 bp, Canis familiaris
gtgtcaccgtctccaaagaagtggg

SEQ ID NO: 145571 - DNA, 25 bp, Canis familiaris
gtgtccctgtcatgaaagagtgttg

SEQ ID NO: 145572 - DNA, 25 bp, Canis familiaris
gtgtctctcatgaataaataaaatc

SEQ ID NO: 145573 - DNA, 25 bp, Canis familiaris
gtgtcttttcatggaatagatagat

SEQ ID NO: 145574 - DNA, 25 bp, Canis familiaris
gtgtctttattggagtgatagcttt

SEQ ID NO: 145575 - DNA, 25 bp, Canis familiaris
gtgtatgtccacttaggtatgttgt

SEQ ID NO: 145576 - DNA, 25 bp, Canis familiaris
gtggtgtgctacttcagttttggta

SEQ ID NO: 145577 - DNA, 25 bp, Canis familiaris
gtgtgttgtacttatttttgtcctg

SEQ ID NO: 145578 - DNA, 25 bp, Canis familiaris
gtgtcattgtcagaatttgtttggg

SEQ ID NO: 145579 - DNA, 25 bp, Canis familiaris
gtgtcattctgttgatattgtttcg

SEQ ID NO: 145580 - DNA, 25 bp, Canis familiaris
gtgtcatttcttttggatttctacc

SEQ ID NO: 145581 - DNA, 25 bp, Canis familiaris
gtgtctgccttttatgaatttgtac

SEQ ID NO: 145582 - DNA, 25 bp, Canis familiaris
gtgtagcgctttttatctcatttat

SEQ ID NO: 145583 - DNA, 25 bp, Canis familiaris
gtgtatgggtattttatccctaggg

SEQ ID NO: 145584 - DNA, 25 bp, Canis familiaris
gtgtatcggtacttctttggtgagg

SEQ ID NO: 145585 - DNA, 25 bp, Canis familiaris
gtggtcactgtaacattttgggggg

SEQ ID NO: 145586 - DNA, 25 bp, Canis familiaris
gtgtctcactgtgatatttggtgtg

SEQ ID NO: 145587 - DNA, 25 bp, Canis familiaris
gtgtctcaatgctcataacggatca

SEQ ID NO: 145588 - DNA, 25 bp, Canis familiaris
gtgtacaacatccacttagctgtca

SEQ ID NO: 145589 - DNA, 25 bp, Canis familiaris
gtgtaccaccttggtgagcttcctt

SEQ ID NO: 145590 - DNA, 25 bp, Canis familiaris
gtgtaaaacattgtgagtcttttat

SEQ ID NO: 145591 - DNA, 25 bp, Canis familiaris
gtgtaaaaacattgtgagtcctttt

SEQ ID NO: 145592 - DNA, 25 bp, Canis familiaris
gtgtagaaaacttcttgctcctccg

SEQ ID NO: 145593 - DNA, 25 bp, Canis familiaris
gtgtagtatatagtatttctcccca

SEQ ID NO: 145594 - DNA, 25 bp, Canis familiaris
gtgtatgttcattcttttgctctaa

SEQ ID NO: 145595 - DNA, 25 bp, Canis familiaris
gtgtatgtttacaatgttgtgtata

SEQ ID NO: 145596 - DNA, 25 bp, Canis familiaris
gtgtatgcatgtttagtgacgttta

SEQ ID NO: 145597 - DNA, 25 bp, Canis familiaris
gtgtctgatacatagtgaggcttaa

SEQ ID NO: 145598 - DNA, 25 bp, Canis familiaris
gtgtgtagacggaaaggctcaaacc

SEQ ID NO: 145599 - DNA, 25 bp, Canis familiaris
gtgtgtatgactatggggaaagggc

SEQ ID NO: 145600 - DNA, 25 bp, Canis familiaris
gtgtgtgtgacatccggaaaccagg

SEQ ID NO: 145601 - DNA, 25 bp, Canis familiaris
gtgtgggagtggggagcaaacttgt

SEQ ID NO: 145602 - DNA, 25 bp, Canis familiaris
gtgggaggatactgtacaacgagtt

SEQ ID NO: 145603 - DNA, 25 bp, Canis familiaris
gtgggagagattagctgtacaacgg

SEQ ID NO: 145604 - DNA, 25 bp, Canis familiaris
gtgtgacacgtgtgttccaacagcc

SEQ ID NO: 145605 - DNA, 25 bp, Canis familiaris
gtggaacatcttcaaccgaatgcca

SEQ ID NO: 145606 - DNA, 25 bp, Canis familiaris
gtggaactttacaacgagaactcaa

SEQ ID NO: 145607 - DNA, 25 bp, Canis familiaris
gtgtgaactctgttctactgtaacc

SEQ ID NO: 145608 - DNA, 25 bp, Canis familiaris
gtgtgaagtgcgatttctgcttttc

SEQ ID NO: 145609 - DNA, 25 bp, Canis familiaris
gtgtagagggagtcttctccacctc

SEQ ID NO: 145610 - DNA, 25 bp, Canis familiaris
gtgtggatggtatttattaagcccc

SEQ ID NO: 145611 - DNA, 25 bp, Canis familiaris
gtgggtggtattttcatgcaaacaa

SEQ ID NO: 145612 - DNA, 25 bp, Canis familiaris
gtgtcctgccaacattctgcaagaa

SEQ ID NO: 145613 - DNA, 25 bp, Canis familiaris
gtgtcaacacaacattgcaaatcaa

SEQ ID NO: 145614 - DNA, 25 bp, Canis familiaris
gtgtccacatcatagattcagagtc

SEQ ID NO: 145615 - DNA, 25 bp, Canis familiaris
gtgtgccagtctcagaacagggccc

SEQ ID NO: 145616 - DNA, 25 bp, Canis familiaris
gtgtcaagatccggtgacgttgccc

SEQ ID NO: 145617 - DNA, 25 bp, Canis familiaris
gtgtcaagagccaaggcacgttcga

SEQ ID NO: 145618 - DNA, 25 bp, Canis familiaris
gtgtcacaatggaaggaccttgctc

SEQ ID NO: 145619 - DNA, 25 bp, Canis familiaris
gtgtagcatttgagcagtctttcac

SEQ ID NO: 145620 - DNA, 25 bp, Canis familiaris
gtgtgcactttgtcgatattattca

SEQ ID NO: 145621 - DNA, 25 bp, Canis familiaris
gtgtcagtggtgcagctactagtcc

SEQ ID NO: 145622 - DNA, 25 bp, Canis familiaris
gtgtctgaggtgactgtaccctcct

SEQ ID NO: 145623 - DNA, 25 bp, Canis familiaris
gtgtctgaagtacttggtcctcaca

SEQ ID NO: 145624 - DNA, 25 bp, Canis familiaris
gtgtgcgtaatactgctgtgtacca

SEQ ID NO: 145625 - DNA, 25 bp, Canis familiaris
gtgtgcagtctattgagggtgtcat

SEQ ID NO: 145626 - DNA, 25 bp, Canis familiaris
gtgtcagatctgatttgccttcatc

SEQ ID NO: 145627 - DNA, 25 bp, Canis familiaris
gtgtcatgtgatgtttgcattactt

SEQ ID NO: 145628 - DNA, 25 bp, Canis familiaris
gtgtctatatttacgattcactcta

SEQ ID NO: 145629 - DNA, 25 bp, Canis familiaris
gtgtcttgcattccttgttacaaac

SEQ ID NO: 145630 - DNA, 25 bp, Canis familiaris
gtgtcctgggacagcttcaacaacg

SEQ ID NO: 145631 - DNA, 25 bp, Canis familiaris
gtgtccggggttgaaaagtcttctg

SEQ ID NO: 145632 - DNA, 25 bp, Canis familiaris
ggtcgggccattgccaataatttgt

SEQ ID NO: 145633 - DNA, 25 bp, Canis familiaris
ggtcgagcctcattaaacgagttat

SEQ ID NO: 145634 - DNA, 25 bp, Canis familiaris
gtggccagctacgtaaagaagtttt

SEQ ID NO: 145635 - DNA, 25 bp, Canis familiaris
gtgggccccgtaggagagattttct

SEQ ID NO: 145636 - DNA, 25 bp, Canis familiaris
gtgggccactggacagggaaggtat

SEQ ID NO: 145637 - DNA, 25 bp, Canis familiaris
gtgtgtttagggcaggagaggtatg

SEQ ID NO: 145638 - DNA, 25 bp, Canis familiaris
gtgtgtttagaggggacagaagaga

SEQ ID NO: 145639 - DNA, 25 bp, Canis familiaris
gtgtgtttggaggttggaaaggtca

SEQ ID NO: 145640 - DNA, 25 bp, Canis familiaris
gggctttggaggaaggggtagtatg

SEQ ID NO: 145641 - DNA, 25 bp, Canis familiaris
gtgtgtttgtggcaaggacgtagct

SEQ ID NO: 145642 - DNA, 25 bp, Canis familiaris
gtgtgcttttgtctaagtatgtgag

SEQ ID NO: 145643 - DNA, 25 bp, Canis familiaris
gtggtgatttgtcttagttgccctg

SEQ ID NO: 145644 - DNA, 25 bp, Canis familiaris
gtgtgtggtgtaaaccagtccccga

SEQ ID NO: 145645 - DNA, 25 bp, Canis familiaris
gtgtccgttgtatccaactacgcag

SEQ ID NO: 145646 - DNA, 25 bp, Canis familiaris
gtgtcacgatgtctgaccggaaggc

SEQ ID NO: 145647 - DNA, 25 bp, Canis familiaris
gtgtacgtggtttccctaagatgtc

SEQ ID NO: 145648 - DNA, 25 bp, Canis familiaris
gtgtgacgttgacatccgtaaagac

SEQ ID NO: 145649 - DNA, 25 bp, Canis familiaris
gtgtgacgtggacatccgcaaagac

SEQ ID NO: 145650 - DNA, 25 bp, Canis familiaris
gtgtgacgtggacaagccgaggacc

SEQ ID NO: 145651 - DNA, 25 bp, Canis familiaris
gtggtcttgggaaacctggcaaaca

SEQ ID NO: 145652 - DNA, 25 bp, Canis familiaris
gtggtttagaaaggccggcaacaag

SEQ ID NO: 145653 - DNA, 25 bp, Canis familiaris
gtgtgtttcgaaagaccaccagaag

SEQ ID NO: 145654 - DNA, 25 bp, Canis familiaris
gtgtgatttgccaaggtcgacctaa

SEQ ID NO: 145655 - DNA, 25 bp, Canis familiaris
gtgtgatttctgagtgatttcctac

SEQ ID NO: 145656 - DNA, 25 bp, Canis familiaris
gtggtgtacgtggtttccctaagat

SEQ ID NO: 145657 - DNA, 25 bp, Canis familiaris
gtggttacttagttggccattcaag

SEQ ID NO: 145658 - DNA, 25 bp, Canis familiaris
gtgtctcagcagccagggttgggaa

SEQ ID NO: 145659 - DNA, 25 bp, Canis familiaris
gtgtgctcagtgccatgaagatgga

SEQ ID NO: 145660 - DNA, 25 bp, Canis familiaris
gtgtgcctggtgaacatattgatgc

SEQ ID NO: 145661 - DNA, 25 bp, Canis familiaris
gtgtgcatgtgcatcaactctttga

SEQ ID NO: 145662 - DNA, 25 bp, Canis familiaris
gtgtgatggtcaaccctcttggaaa

SEQ ID NO: 145663 - DNA, 25 bp, Canis familiaris
ggtgaatgtctctagccgtatggac

SEQ ID NO: 145664 - DNA, 25 bp, Canis familiaris
gtgtactgccccagcggagagaaat

SEQ ID NO: 145665 - DNA, 25 bp, Canis familiaris
gtgtgacatgccttcggggaagcaa

SEQ ID NO: 145666 - DNA, 25 bp, Canis familiaris
gtgtcacagcccagagatggttgac

SEQ ID NO: 145667 - DNA, 25 bp, Canis familiaris
gtgtcaccaccaaagagttgtatcc

SEQ ID NO: 145668 - DNA, 25 bp, Canis familiaris
gtgtcacccactactgagattgttc

SEQ ID NO: 145669 - DNA, 25 bp, Canis familiaris
gtgtcatctccaccacagagaagct

SEQ ID NO: 145670 - DNA, 25 bp, Canis familiaris
gtgtgcatctgcctccaaaggaggt

SEQ ID NO: 145671 - DNA, 25 bp, Canis familiaris
gtgtactgcttcttactggtgagtt

SEQ ID NO: 145672 - DNA, 25 bp, Canis familiaris
gtgtcctgcagtaatattggcggtt

SEQ ID NO: 145673 - DNA, 25 bp, Canis familiaris
gtgtctgtttaaatgtggccttttc

SEQ ID NO: 145674 - DNA, 25 bp, Canis familiaris
gtgtctgtttcttgttacttatttc

SEQ ID NO: 145675 - DNA, 25 bp, Canis familiaris
gtgtgcgttggttttgacgtaattt

SEQ ID NO: 145676 - DNA, 25 bp, Canis familiaris
gtgtccagggtacctgacgctagac

SEQ ID NO: 145677 - DNA, 25 bp, Canis familiaris
gtgtccaggtgaaacgttgtaagag

SEQ ID NO: 145678 - DNA, 25 bp, Canis familiaris
gtgtccaggtggcagagttgtacag

SEQ ID NO: 145679 - DNA, 25 bp, Canis familiaris
gtgtctcctctgagagagtttacac

SEQ ID NO: 145680 - DNA, 25 bp, Canis familiaris
gtgtctcttctttgaaatgtgctac

SEQ ID NO: 145681 - DNA, 25 bp, Canis familiaris
gtgtctgcttctgtcacagagggcc

SEQ ID NO: 145682 - DNA, 25 bp, Canis familiaris
gtgtctgctattgtacgcaccatgc

SEQ ID NO: 145683 - DNA, 25 bp, Canis familiaris
gtgtctgctggtatacagaccagtt

SEQ ID NO: 145684 - DNA, 25 bp, Canis familiaris
gtgtctgggatcaaaagccaatgct

SEQ ID NO: 145685 - DNA, 25 bp, Canis familiaris
gtgtctggaatgctcaatgtcaaat

SEQ ID NO: 145686 - DNA, 25 bp, Canis familiaris
gtgtcgagtcagatccttaatatat

SEQ ID NO: 145687 - DNA, 25 bp, Canis familiaris
gtgtcgtgtcagattcttcgtcaac

SEQ ID NO: 145688 - DNA, 25 bp, Canis familiaris
gtgtccatatccatgatttcctgaa

SEQ ID NO: 145689 - DNA, 25 bp, Canis familiaris
gtgtcctaccctacagatcgtggac

SEQ ID NO: 145690 - DNA, 25 bp, Canis familiaris
gtgtgcctaccctgcgccggcaggc

SEQ ID NO: 145691 - DNA, 25 bp, Canis familiaris
gtgtcactattccttgacggagcag

SEQ ID NO: 145692 - DNA, 25 bp, Canis familiaris
gtgtcagacttgctgtagcgtggag

SEQ ID NO: 145693 - DNA, 25 bp, Canis familiaris
gtgtctgtctgttctaagtgtggtg

SEQ ID NO: 145694 - DNA, 25 bp, Canis familiaris
gtgtgatgtcatcatgtaatcatgg

SEQ ID NO: 145695 - DNA, 25 bp, Canis familiaris
gtgtcagcacatccagtgtctgatg

SEQ ID NO: 145696 - DNA, 25 bp, Canis familiaris
gtgtgcacaccgttgtgctatggag

SEQ ID NO: 145697 - DNA, 25 bp, Canis familiaris
gtgtcacctgcatttgtgctgtgta

SEQ ID NO: 145698 - DNA, 25 bp, Canis familiaris
gtgtcacttctgctgtgtgtgtcac

SEQ ID NO: 145699 - DNA, 25 bp, Canis familiaris
gtgtctcttcaggtagtattctcca

SEQ ID NO: 145700 - DNA, 25 bp, Canis familiaris
gtgtccttggtcaagtgatttcact

SEQ ID NO: 145701 - DNA, 25 bp, Canis familiaris
gtgtcgctggtgtcaaattttcttg

SEQ ID NO: 145702 - DNA, 25 bp, Canis familiaris
gtgtcgctgcgtgcacagaatcatt

SEQ ID NO: 145703 - DNA, 25 bp, Canis familiaris
gtgtctcttgtgtacacagactctc

SEQ ID NO: 145704 - DNA, 25 bp, Canis familiaris
gtggttggaatcacagacctctggg

SEQ ID NO: 145705 - DNA, 25 bp, Canis familiaris
gtggtgaaaattacaatcgattgga

SEQ ID NO: 145706 - DNA, 25 bp, Canis familiaris
gggcgtacaacaacaataataggat

SEQ ID NO: 145707 - DNA, 25 bp, Canis familiaris
gtgtgggaaacaacctgagtcaact

SEQ ID NO: 145708 - DNA, 25 bp, Canis familiaris
gtgtcggagaacatcctggtcttta

SEQ ID NO: 145709 - DNA, 25 bp, Canis familiaris
gtgtcagatgaatctttgttgtctt

SEQ ID NO: 145710 - DNA, 25 bp, Canis familiaris
gtgtcatattgaccttttgatgcat

SEQ ID NO: 145711 - DNA, 25 bp, Canis familiaris
gtgtcatacaatctgctttgcatca

SEQ ID NO: 145712 - DNA, 25 bp, Canis familiaris
gtgtgcaagaatgtgtatgcatgca

SEQ ID NO: 145713 - DNA, 25 bp, Canis familiaris
gtgtccatgacagtggttggcatat

SEQ ID NO: 145714 - DNA, 25 bp, Canis familiaris
gtgtgcaatgactatgcctcaggct

SEQ ID NO: 145715 - DNA, 25 bp, Canis familiaris
gtgtgcatgaacttctgtgctgcct

SEQ ID NO: 145716 - DNA, 25 bp, Canis familiaris
gtgtgtgcataccacttatgcatat

SEQ ID NO: 145717 - DNA, 25 bp, Canis familiaris
gtgtctgagacgctggtcatcatat

SEQ ID NO: 145718 - DNA, 25 bp, Canis familiaris
gtgtcaggaccttgcttatatgata

SEQ ID NO: 145719 - DNA, 25 bp, Canis familiaris
gtgtgaggtcctttcagtgcatata

SEQ ID NO: 145720 - DNA, 25 bp, Canis familiaris
gtgtgaagaccaacatcgccttcct

SEQ ID NO: 145721 - DNA, 25 bp, Canis familiaris
gtgtcagaccaaagcacagttatcc

SEQ ID NO: 145722 - DNA, 25 bp, Canis familiaris
gtgtcaacgaaggtcacttcacctg

SEQ ID NO: 145723 - DNA, 25 bp, Canis familiaris
gtgtgcgggaagggcacttctgcca

SEQ ID NO: 145724 - DNA, 25 bp, Canis familiaris
gtggggtgaagtccaggtcataagt

SEQ ID NO: 145725 - DNA, 25 bp, Canis familiaris
gtggaggtggggtgttcagggattg

SEQ ID NO: 145726 - DNA, 25 bp, Canis familiaris
gtggatttggggaagtctctaagta

SEQ ID NO: 145727 - DNA, 25 bp, Canis familiaris
gtgtgtcctgagtggtgtcctaatc

SEQ ID NO: 145728 - DNA, 25 bp, Canis familiaris
gtggtccaactttcatatcctaact

SEQ ID NO: 145729 - DNA, 25 bp, Canis familiaris
gtgtgacccatttacaatcgaacgt

SEQ ID NO: 145730 - DNA, 25 bp, Canis familiaris
gtgtgaccctgttcaattataatct

SEQ ID NO: 145731 - DNA, 25 bp, Canis familiaris
gtgtgcactccctacaatagatttt

SEQ ID NO: 145732 - DNA, 25 bp, Canis familiaris
gtgtgccatcacatatcaccagatt

SEQ ID NO: 145733 - DNA, 25 bp, Canis familiaris
gtgtgcctctttagaatcagcttca

SEQ ID NO: 145734 - DNA, 25 bp, Canis familiaris
gtgtctctctgtaaatatgcgtctg

SEQ ID NO: 145735 - DNA, 25 bp, Canis familiaris
gtgtcatccactacaactggcttat

SEQ ID NO: 145736 - DNA, 25 bp, Canis familiaris
gtgtcccaggtcttctggttcattc

SEQ ID NO: 145737 - DNA, 25 bp, Canis familiaris
gtggcctatggttcctggtttaatc

SEQ ID NO: 145738 - DNA, 25 bp, Canis familiaris
gtgtgccaatgattgtcctggcttt

SEQ ID NO: 145739 - DNA, 25 bp, Canis familiaris
gtgtcctgcatatttcgattttttg

SEQ ID NO: 145740 - DNA, 25 bp, Canis familiaris
gtgtcctgtgtggtcagttgtgttt

SEQ ID NO: 145741 - DNA, 25 bp, Canis familiaris
gtgtcttgttctggatgctggttat

SEQ ID NO: 145742 - DNA, 25 bp, Canis familiaris
gtgtcttgttgctttgtggcaggat

SEQ ID NO: 145743 - DNA, 25 bp, Canis familiaris
gtgtcactggattatctctggagga

SEQ ID NO: 145744 - DNA, 25 bp, Canis familiaris
gtgtgtcattatcactctatgggca

SEQ ID NO: 145745 - DNA, 25 bp, Canis familiaris
gtggtattctagagctttacatgcc

SEQ ID NO: 145746 - DNA, 25 bp, Canis familiaris
gtgtgaaactcggctgtattaatca

SEQ ID NO: 145747 - DNA, 25 bp, Canis familiaris
gtgtgcttcagtcgtgcggattaat

SEQ ID NO: 145748 - DNA, 25 bp, Canis familiaris
gtgtgcttctcatgtacgaatcaga

SEQ ID NO: 145749 - DNA, 25 bp, Canis familiaris
gtgtgctgggcatgaagtactaggt

SEQ ID NO: 145750 - DNA, 25 bp, Canis familiaris
gtgtctgatgtgtgggtcctgagga

SEQ ID NO: 145751 - DNA, 25 bp, Canis familiaris
gtgtctgttaagggctactgatggg

SEQ ID NO: 145752 - DNA, 25 bp, Canis familiaris
gtgtccttagatgggtagctgtgca

SEQ ID NO: 145753 - DNA, 25 bp, Canis familiaris
gtgtccacattggcttggaggtgca

SEQ ID NO: 145754 - DNA, 25 bp, Canis familiaris
gtgtcctgcctggttaaggggagag

SEQ ID NO: 145755 - DNA, 25 bp, Canis familiaris
gtgtcctgctcacagggggggcagg

SEQ ID NO: 145756 - DNA, 25 bp, Canis familiaris
gtgtgttctcagcagcaggttggaa

SEQ ID NO: 145757 - DNA, 25 bp, Canis familiaris
gtgtgccgtatgcagagctggtgtg

SEQ ID NO: 145758 - DNA, 25 bp, Canis familiaris
gtgtgcacgtatgtgtgtatgggcc

SEQ ID NO: 145759 - DNA, 25 bp, Canis familiaris
gtgtccgtgcacaggcatcggagcc

SEQ ID NO: 145760 - DNA, 25 bp, Canis familiaris
gtgtctctggaatcgatcatgggca

SEQ ID NO: 145761 - DNA, 25 bp, Canis familiaris
gtgtcttgggtaattctggtgcagt

SEQ ID NO: 145762 - DNA, 25 bp, Canis familiaris
gtgtctgattggaaccctgggaatt

SEQ ID NO: 145763 - DNA, 25 bp, Canis familiaris
gtgtggcctgaggacaacggcagaa

SEQ ID NO: 145764 - DNA, 25 bp, Canis familiaris
gtgtgtgcaccagaaatccttagat

SEQ ID NO: 145765 - DNA, 25 bp, Canis familiaris
gtgtgtcacattggaaaatttatac

SEQ ID NO: 145766 - DNA, 25 bp, Canis familiaris
ggtgtccactagagcctttacagct

SEQ ID NO: 145767 - DNA, 25 bp, Canis familiaris
gtgtgtagaaacatccatttctcct

SEQ ID NO: 145768 - DNA, 25 bp, Canis familiaris
gtgtctaaagcaattctgttctgtc

SEQ ID NO: 145769 - DNA, 25 bp, Canis familiaris
gtgtctgaactatcttttgggcttt

SEQ ID NO: 145770 - DNA, 25 bp, Canis familiaris
gtgtgtatgacattcctttaaggtt

SEQ ID NO: 145771 - DNA, 25 bp, Canis familiaris
gtgtgtgtgactatcataaataaat

SEQ ID NO: 145772 - DNA, 25 bp, Canis familiaris
gtgtctctacgaataaagttgaact

SEQ ID NO: 145773 - DNA, 25 bp, Canis familiaris
gtgtcctacaggatccacttgatac

SEQ ID NO: 145774 - DNA, 25 bp, Canis familiaris
gtgtcgtgactgagtccacctgaac

SEQ ID NO: 145775 - DNA, 25 bp, Canis familiaris
gtgtgctgggtacgtaccttacaca

SEQ ID NO: 145776 - DNA, 25 bp, Canis familiaris
gtgtctgaggttttctcttttagcc

SEQ ID NO: 145777 - DNA, 25 bp, Canis familiaris
gtgtcatttttgttttttgtagcag

SEQ ID NO: 145778 - DNA, 25 bp, Canis familiaris
gtgtgtattttgagcttatttgaac

SEQ ID NO: 145779 - DNA, 25 bp, Canis familiaris
gtgtgaactttttattcttccaaag

SEQ ID NO: 145780 - DNA, 25 bp, Canis familiaris
gtgtgacctttcattttctaaagca

SEQ ID NO: 145781 - DNA, 25 bp, Canis familiaris
gtgtcaacttttcttcagctattag

SEQ ID NO: 145782 - DNA, 25 bp, Canis familiaris
gtgtgaacttttccagaacctattg

SEQ ID NO: 145783 - DNA, 25 bp, Canis familiaris
gtgtgaaatattttgctaatcctat

SEQ ID NO: 145784 - DNA, 25 bp, Canis familiaris
gtgtgtagatgcaatttgtagacta

SEQ ID NO: 145785 - DNA, 25 bp, Canis familiaris
gtgtgtagactcttggtgggctcta

SEQ ID NO: 145786 - DNA, 25 bp, Canis familiaris
gtgtgctggcaaacaggggagttag

SEQ ID NO: 145787 - DNA, 25 bp, Canis familiaris
gtgtctggtcagtgggcaagtggca

SEQ ID NO: 145788 - DNA, 25 bp, Canis familiaris
gtgtcggcctgaggaggggatgctg

SEQ ID NO: 145789 - DNA, 25 bp, Canis familiaris
gtgtctggggcagggaggtgtctgt

SEQ ID NO: 145790 - DNA, 25 bp, Canis familiaris
gtgtctgtggtggtgatggggtata

SEQ ID NO: 145791 - DNA, 25 bp, Canis familiaris
gtgtcagtggtggaagcgagggatt

SEQ ID NO: 145792 - DNA, 25 bp, Canis familiaris
gtgtgagtgtgtgagcagcggaagg

SEQ ID NO: 145793 - DNA, 25 bp, Canis familiaris
gtggagcatggctaccacatgccat

SEQ ID NO: 145794 - DNA, 25 bp, Canis familiaris
gtgggaagaggagtcatgctgatga

SEQ ID NO: 145795 - DNA, 25 bp, Canis familiaris
gtggtaagggagcccttgctgtcct

SEQ ID NO: 145796 - DNA, 25 bp, Canis familiaris
gggctagggaacacctgcatgtacc

SEQ ID NO: 145797 - DNA, 25 bp, Canis familiaris
gggtcaaggaacagccacagttttg

SEQ ID NO: 145798 - DNA, 25 bp, Canis familiaris
gggctcggggactgtacgcagcctt

SEQ ID NO: 145799 - DNA, 25 bp, Canis familiaris
gggcctggggtaatcaactgacctc

SEQ ID NO: 145800 - DNA, 25 bp, Canis familiaris
gtggaaggggccatcacatttcaca

SEQ ID NO: 145801 - DNA, 25 bp, Canis familiaris
gtggaaaaggccaagaatcctgtca

SEQ ID NO: 145802 - DNA, 25 bp, Canis familiaris
gtggacgattgggaagatatgggct

SEQ ID NO: 145803 - DNA, 25 bp, Canis familiaris
gtggggttgggtagtgatggggagg

SEQ ID NO: 145804 - DNA, 25 bp, Canis familiaris
gtggtggacggtgtgaagctcatgg

SEQ ID NO: 145805 - DNA, 25 bp, Canis familiaris
gtgtgggaggcgacgttcgtcatgg

SEQ ID NO: 145806 - DNA, 25 bp, Canis familiaris
gtgtgtacagggaggtcggcagagc

SEQ ID NO: 145807 - DNA, 25 bp, Canis familiaris
gtgtgcccagggccaggtgagggca

SEQ ID NO: 145808 - DNA, 25 bp, Canis familiaris
gtgtccacagacccaggaattcagc

SEQ ID NO: 145809 - DNA, 25 bp, Canis familiaris
gtgtccccacgagtggaatccatgc

SEQ ID NO: 145810 - DNA, 25 bp, Canis familiaris
gtgtctcccacgcagagaatgtctg

SEQ ID NO: 145811 - DNA, 25 bp, Canis familiaris
gtgtctccccagctagattgtaagc

SEQ ID NO: 145812 - DNA, 25 bp, Canis familiaris
gtgtctccaccctttatttatgagg

SEQ ID NO: 145813 - DNA, 25 bp, Canis familiaris
gtgtccccacttttgatgatatata

SEQ ID NO: 145814 - DNA, 25 bp, Canis familiaris
gtgtctctctgccctagggcaagaa

SEQ ID NO: 145815 - DNA, 25 bp, Canis familiaris
gtgtgccctctgatggggcaaagtc

SEQ ID NO: 145816 - DNA, 25 bp, Canis familiaris
gtgtgtccttgtctgttaaagtgag

SEQ ID NO: 145817 - DNA, 25 bp, Canis familiaris
gtgtgtctattgacgatttcaactc

SEQ ID NO: 145818 - DNA, 25 bp, Canis familiaris
gtgtgagcttttaatgttaagtcat

SEQ ID NO: 145819 - DNA, 25 bp, Canis familiaris
gtgggctgctaaactggtaattcta

SEQ ID NO: 145820 - DNA, 25 bp, Canis familiaris
gtgtgagtctatttctgagtttctc

SEQ ID NO: 145821 - DNA, 25 bp, Canis familiaris
gtgtgtacatttccaggtgtgcctc

SEQ ID NO: 145822 - DNA, 25 bp, Canis familiaris
gtgtgttcatttgctgtgaatcagt

SEQ ID NO: 145823 - DNA, 25 bp, Canis familiaris
gtgtgtgctcttctttgcaattgta

SEQ ID NO: 145824 - DNA, 25 bp, Canis familiaris
gtggtgaatcccattccattgtcac

SEQ ID NO: 145825 - DNA, 25 bp, Canis familiaris
gtgggattccatttaaaattcactt

SEQ ID NO: 145826 - DNA, 25 bp, Canis familiaris
gtggggggacatgaatagagtactt

SEQ ID NO: 145827 - DNA, 25 bp, Canis familiaris
gtgtgtgggtgactccctaatgtct

SEQ ID NO: 145828 - DNA, 25 bp, Canis familiaris
gtggctggaggaatctgcccaattt

SEQ ID NO: 145829 - DNA, 25 bp, Canis familiaris
gtggatgaaggaacgaccaggcctt

SEQ ID NO: 145830 - DNA, 25 bp, Canis familiaris
tgtcggaaagaaggacgaatgtccc

SEQ ID NO: 145831 - DNA, 25 bp, Canis familiaris
gtgggaaccataagggaatccctca

SEQ ID NO: 145832 - DNA, 25 bp, Canis familiaris
gtggggtccagatggggactcgagc

SEQ ID NO: 145833 - DNA, 25 bp, Canis familiaris
gtgggagtcgtctggatggtcacca

SEQ ID NO: 145834 - DNA, 25 bp, Canis familiaris
gggaattcgtcgaatatcctcccca

SEQ ID NO: 145835 - DNA, 25 bp, Canis familiaris
gtgtgaattctgtcaccatacacta

SEQ ID NO: 145836 - DNA, 25 bp, Canis familiaris
gtgtgcatttctggttaactcttat

SEQ ID NO: 145837 - DNA, 25 bp, Canis familiaris
gtgtgccttttgttcaacacagtaa

SEQ ID NO: 145838 - DNA, 25 bp, Canis familiaris
gtgtccttgtctgttaaagtgagtt

SEQ ID NO: 145839 - DNA, 25 bp, Canis familiaris
ggtcctttctacatccggatagtgt

SEQ ID NO: 145840 - DNA, 25 bp, Canis familiaris
gtgtcttttcattcattgtaggtag

SEQ ID NO: 145841 - DNA, 25 bp, Canis familiaris
gtgtcttattctttttatggctgca

SEQ ID NO: 145842 - DNA, 25 bp, Canis familiaris
gtgtcttgtcctttgtatatgtggt

SEQ ID NO: 145843 - DNA, 25 bp, Canis familiaris
gtgtctttcaactgtatctatttct

SEQ ID NO: 145844 - DNA, 25 bp, Canis familiaris
gtgtcatttagttttcattctcttt

SEQ ID NO: 145845 - DNA, 25 bp, Canis familiaris
gtgtcttcccatattttcagtttac

SEQ ID NO: 145846 - DNA, 25 bp, Canis familiaris
gtgtgttccctatttttatccatta

SEQ ID NO: 145847 - DNA, 25 bp, Canis familiaris
gtgtcggctcttattattcattgca

SEQ ID NO: 145848 - DNA, 25 bp, Canis familiaris
gtgtctggctgactttgtcctaaat

SEQ ID NO: 145849 - DNA, 25 bp, Canis familiaris
gtgtctgttggctatggctcttaaa

SEQ ID NO: 145850 - DNA, 25 bp, Canis familiaris
gtgtctctgctacatgtgctttata

SEQ ID NO: 145851 - DNA, 25 bp, Canis familiaris
gtgtctgtgttcatctgtatgttag

SEQ ID NO: 145852 - DNA, 25 bp, Canis familiaris
gtgtgctgtaccattttgttacata

SEQ ID NO: 145853 - DNA, 25 bp, Canis familiaris
gtgtcgtagctcatttgtttcaaga

SEQ ID NO: 145854 - DNA, 25 bp, Canis familiaris
gtgtggtggttgatggttctagggc

SEQ ID NO: 145855 - DNA, 25 bp, Canis familiaris
gtggtgggactaaggtccgacctct

SEQ ID NO: 145856 - DNA, 25 bp, Canis familiaris
gtgtggggtctagactccagaagct

SEQ ID NO: 145857 - DNA, 25 bp, Canis familiaris
gtggatgggttaatcccaaatactt

SEQ ID NO: 145858 - DNA, 25 bp, Canis familiaris
gtggtcgttggtgccacaagaacca

SEQ ID NO: 145859 - DNA, 25 bp, Canis familiaris
gtggtggtgtggaaaagggaggtat

SEQ ID NO: 145860 - DNA, 25 bp, Canis familiaris
gtggtatgggggcaactggggagtc

SEQ ID NO: 145861 - DNA, 25 bp, Canis familiaris
gtggaggaggtgggaccttggagag

SEQ ID NO: 145862 - DNA, 25 bp, Canis familiaris
gtgtgcggcaggtggaaggggaggg

SEQ ID NO: 145863 - DNA, 25 bp, Canis familiaris
gtgtggccacgttggaaatgtctgg

SEQ ID NO: 145864 - DNA, 25 bp, Canis familiaris
gtgtggctctggggtaaattttgtg

SEQ ID NO: 145865 - DNA, 25 bp, Canis familiaris
gtggagtccggttcaaaccacttgg

SEQ ID NO: 145866 - DNA, 25 bp, Canis familiaris
gggatttaagtgagaaacacttgga

SEQ ID NO: 145867 - DNA, 25 bp, Canis familiaris
ggtcagttaactatgaagagtttgt

SEQ ID NO: 145868 - DNA, 25 bp, Canis familiaris
gtggtgggaactataatgattttgg

SEQ ID NO: 145869 - DNA, 25 bp, Canis familiaris
gtgggggccactgtcaatatggacg

SEQ ID NO: 145870 - DNA, 25 bp, Canis familiaris
gtggtcagtgaacctatcgaaggac

SEQ ID NO: 145871 - DNA, 25 bp, Canis familiaris
gtggagattgaacgtgccgcaggga

SEQ ID NO: 145872 - DNA, 25 bp, Canis familiaris
gtgggcattaatttaccagcctccc

SEQ ID NO: 145873 - DNA, 25 bp, Canis familiaris
gtgtgcctacaaaagaccagcatcc

SEQ ID NO: 145874 - DNA, 25 bp, Canis familiaris
gtgtgcattgccaatggcagacaac

SEQ ID NO: 145875 - DNA, 25 bp, Canis familiaris
gtgtgcatgctcttagctgagatca

SEQ ID NO: 145876 - DNA, 25 bp, Canis familiaris
gtgtgtgtgcaaagtgtgaatctat

SEQ ID NO: 145877 - DNA, 25 bp, Canis familiaris
gtgtgtggaatacctatacttgtta

SEQ ID NO: 145878 - DNA, 25 bp, Canis familiaris
ggtccgaaacgttggtctgttattg

SEQ ID NO: 145879 - DNA, 25 bp, Canis familiaris
gtgtcccaaacagtttttgtttctg

SEQ ID NO: 145880 - DNA, 25 bp, Canis familiaris
gtgtcgccacagtaagtttggtttc

SEQ ID NO: 145881 - DNA, 25 bp, Canis familiaris
gtgtccctcaggaagttagtctggt

SEQ ID NO: 145882 - DNA, 25 bp, Canis familiaris
gtgtccctgctacaggctaatcgtg

SEQ ID NO: 145883 - DNA, 25 bp, Canis familiaris
gtgtccctgtcaagtgaggaaccga

SEQ ID NO: 145884 - DNA, 25 bp, Canis familiaris
gtgtcccgtgcacggaaaatacagc

SEQ ID NO: 145885 - DNA, 25 bp, Canis familiaris
gtgtgcacgcgggggcaaaacagcc

SEQ ID NO: 145886 - DNA, 25 bp, Canis familiaris
gtgggcgcagggaccaaagtcagcc

SEQ ID NO: 145887 - DNA, 25 bp, Canis familiaris
gtgggtgaagtcctgcaacttcacg

SEQ ID NO: 145888 - DNA, 25 bp, Canis familiaris
gtgtcgtggagggctacactgtctc

SEQ ID NO: 145889 - DNA, 25 bp, Canis familiaris
gtgtctgaagacagctacagtgtct

SEQ ID NO: 145890 - DNA, 25 bp, Canis familiaris
gtgtgtctgaagacagctacagtgt

SEQ ID NO: 145891 - DNA, 25 bp, Canis familiaris
gtgggtacagcaagccacggtatcc

SEQ ID NO: 145892 - DNA, 25 bp, Canis familiaris
gtgggtaagcaagactcaaatttaa

SEQ ID NO: 145893 - DNA, 25 bp, Canis familiaris
gtgtggttacatagccctttattta

SEQ ID NO: 145894 - DNA, 25 bp, Canis familiaris
gtgtgagtccctagtaattgttttt

SEQ ID NO: 145895 - DNA, 25 bp, Canis familiaris
gtgggaaccgagagtcgttttctgt

SEQ ID NO: 145896 - DNA, 25 bp, Canis familiaris
ggaggaatccgagaactagttttct

SEQ ID NO: 145897 - DNA, 25 bp, Canis familiaris
gggactccaagtgaactagtattcc

SEQ ID NO: 145898 - DNA, 25 bp, Canis familiaris
ggatgacctcggtgaacggtttctt

SEQ ID NO: 145899 - DNA, 25 bp, Canis familiaris
gggctctagccacaaagggtttctt

SEQ ID NO: 145900 - DNA, 25 bp, Canis familiaris
gtgggcttccactaaagtggttttg

SEQ ID NO: 145901 - DNA, 25 bp, Canis familiaris
gtgtgggtaacataagtgactttca

SEQ ID NO: 145902 - DNA, 25 bp, Canis familiaris
gtggggaaaccaagactggctattc

SEQ ID NO: 145903 - DNA, 25 bp, Canis familiaris
gtgggggctacggaggtggttatga

SEQ ID NO: 145904 - DNA, 25 bp, Canis familiaris
gtgtgagggtccagactggacggaa

SEQ ID NO: 145905 - DNA, 25 bp, Canis familiaris
gtgtgcagtggtgaagggggaagga

SEQ ID NO: 145906 - DNA, 25 bp, Canis familiaris
gtgtgtagtggggaggggtaataga

SEQ ID NO: 145907 - DNA, 25 bp, Canis familiaris
gtgtgtagtgggggcaagtgctgga

SEQ ID NO: 145908 - DNA, 25 bp, Canis familiaris
gtgtgttctggggcaggaggcggat

SEQ ID NO: 145909 - DNA, 25 bp, Canis familiaris
gtggatgtcatgcagcagtgtgatg

SEQ ID NO: 145910 - DNA, 25 bp, Canis familiaris
gtgtgctgtgattccatgtttgcgg

SEQ ID NO: 145911 - DNA, 25 bp, Canis familiaris
gtgtgcagaatgtaatgctcttttg

SEQ ID NO: 145912 - DNA, 25 bp, Canis familiaris
gtgtgacgagctctgctcttactac

SEQ ID NO: 145913 - DNA, 25 bp, Canis familiaris
gtggagcactgctgagtttcacttc

SEQ ID NO: 145914 - DNA, 25 bp, Canis familiaris
gtgtgacactggcctggggcaagtc

SEQ ID NO: 145915 - DNA, 25 bp, Canis familiaris
gtgtgtacagagccatggtgagcaa

SEQ ID NO: 145916 - DNA, 25 bp, Canis familiaris
gtgtgtatcctgcctgtatgagtac

SEQ ID NO: 145917 - DNA, 25 bp, Canis familiaris
gtggtgtccggtgtagtatcagttc

SEQ ID NO: 145918 - DNA, 25 bp, Canis familiaris
gtgggctccgtggcaatgaattctt

SEQ ID NO: 145919 - DNA, 25 bp, Canis familiaris
gtgtgttcacttggaattttcatgt

SEQ ID NO: 145920 - DNA, 25 bp, Canis familiaris
gtgtgtgtccgtggttttggcaaac

SEQ ID NO: 145921 - DNA, 25 bp, Canis familiaris
gtgtgtatacgtggcttgtggatga

SEQ ID NO: 145922 - DNA, 25 bp, Canis familiaris
gtgtgttcttaccttgggatttgaa

SEQ ID NO: 145923 - DNA, 25 bp, Canis familiaris
gtgtgtgttatttttggggactgaa

SEQ ID NO: 145924 - DNA, 25 bp, Canis familiaris
gtgtgagtcctttttcgaggatccc

SEQ ID NO: 145925 - DNA, 25 bp, Canis familiaris
gggcagaaggggagcgggatccgaa

SEQ ID NO: 145926 - DNA, 25 bp, Canis familiaris
gggctggtggggagttcgtcaccac

SEQ ID NO: 145927 - DNA, 25 bp, Canis familiaris
gtgtgtggtgggaaggtgtgcgtct

SEQ ID NO: 145928 - DNA, 25 bp, Canis familiaris
gtggtcgtgaaactgtcttgggtcc

SEQ ID NO: 145929 - DNA, 25 bp, Canis familiaris
gtgtcgggaaaaatgtggggtgtgc

SEQ ID NO: 145930 - DNA, 25 bp, Canis familiaris
gtgtcgttaatatattggaaggttt

SEQ ID NO: 145931 - DNA, 25 bp, Canis familiaris
gtgtctgttcctttttgacaaggga

SEQ ID NO: 145932 - DNA, 25 bp, Canis familiaris
gtgtctgttttcttttatccaagga

SEQ ID NO: 145933 - DNA, 25 bp, Canis familiaris
gtgtctgtgtttgttgacaccaaac

SEQ ID NO: 145934 - DNA, 25 bp, Canis familiaris
gtgtgtggttttcctacactaccag

SEQ ID NO: 145935 - DNA, 25 bp, Canis familiaris
ttaggagttagtccttgaccactag

SEQ ID NO: 145936 - DNA, 25 bp, Canis familiaris
gtgggagttggtcctggaaactgca

SEQ ID NO: 145937 - DNA, 25 bp, Canis familiaris
gtgtggtggggacctggaaccagga

SEQ ID NO: 145938 - DNA, 25 bp, Canis familiaris
gtgggtgggcgacaagaccacagcc

SEQ ID NO: 145939 - DNA, 25 bp, Canis familiaris
gtgggtactggacagtgtagccctc

SEQ ID NO: 145940 - DNA, 25 bp, Canis familiaris
gtgggtgaaggggggtggcacatct

SEQ ID NO: 145941 - DNA, 25 bp, Canis familiaris
gtggttcaagggaatgcctggccct

SEQ ID NO: 145942 - DNA, 25 bp, Canis familiaris
gtggtggaggggatcctggacacgt

SEQ ID NO: 145943 - DNA, 25 bp, Canis familiaris
gtggtggggcagcaacagtggacgg

SEQ ID NO: 145944 - DNA, 25 bp, Canis familiaris
gtggttgggatgtgcacgggacccg

SEQ ID NO: 145945 - DNA, 25 bp, Canis familiaris
gtgggctggcgagacaggggggccc

SEQ ID NO: 145946 - DNA, 25 bp, Canis familiaris
gtgggctgtgcggagaagtctgtgc

SEQ ID NO: 145947 - DNA, 25 bp, Canis familiaris
gtgtgtgatgggggaagctccttaa

SEQ ID NO: 145948 - DNA, 25 bp, Canis familiaris
gtgtgtattggaagaaggctgctta

SEQ ID NO: 145949 - DNA, 25 bp, Canis familiaris
gtgtgcggtcagtgtgatggcatct

SEQ ID NO: 145950 - DNA, 25 bp, Canis familiaris
gtgtcctgcacgtcgtggagcatca

SEQ ID NO: 145951 - DNA, 25 bp, Canis familiaris
gtgtcctacacacatggtgctattc

SEQ ID NO: 145952 - DNA, 25 bp, Canis familiaris
gtgtgtcctacaccatggtgctatt

SEQ ID NO: 145953 - DNA, 25 bp, Canis familiaris
gtgtgatgcccatggatggcatttt

SEQ ID NO: 145954 - DNA, 25 bp, Canis familiaris
gtgtgagcaaaacattgcatcccta

SEQ ID NO: 145955 - DNA, 25 bp, Canis familiaris
gtgtggatacaaacctgagcccagg

SEQ ID NO: 145956 - DNA, 25 bp, Canis familiaris
gtgtggattcattccggagtgcggc

SEQ ID NO: 145957 - DNA, 25 bp, Canis familiaris
gtgtgatttcaccgaggaccagacc

SEQ ID NO: 145958 - DNA, 25 bp, Canis familiaris
gtgtgactcaacagaatgacacaac

SEQ ID NO: 145959 - DNA, 25 bp, Canis familiaris
gtgtgacccatgagaagcaacgaga

SEQ ID NO: 145960 - DNA, 25 bp, Canis familiaris
gtgtggcccagttagcgctactgga

SEQ ID NO: 145961 - DNA, 25 bp, Canis familiaris
gtgtggcaaagatcaccccagagac

SEQ ID NO: 145962 - DNA, 25 bp, Canis familiaris
gtgggcaaggtcatccctgagctga

SEQ ID NO: 145963 - DNA, 25 bp, Canis familiaris
gtgggcaaggtcatccctgagctga

SEQ ID NO: 145964 - DNA, 25 bp, Canis familiaris
gtgggccactgcttatgtactggat

SEQ ID NO: 145965 - DNA, 25 bp, Canis familiaris
gtgtgtccacagatatgtcaacgtc

SEQ ID NO: 145966 - DNA, 25 bp, Canis familiaris
gtgtgtccatagctatgatccgtcc

SEQ ID NO: 145967 - DNA, 25 bp, Canis familiaris
gtgtgactctggaaagtccctcagc

SEQ ID NO: 145968 - DNA, 25 bp, Canis familiaris
gtgtgacttgatatagctccctgga

SEQ ID NO: 145969 - DNA, 25 bp, Canis familiaris
gtgtgacttcacttgagactcctta

SEQ ID NO: 145970 - DNA, 25 bp, Canis familiaris
ggtgtctatgagggagacccgtctt

SEQ ID NO: 145971 - DNA, 25 bp, Canis familiaris
gtgtgcttcagaggtaacgactgat

SEQ ID NO: 145972 - DNA, 25 bp, Canis familiaris
gtgtgttgagagcttctctgactat

SEQ ID NO: 145973 - DNA, 25 bp, Canis familiaris
gtgtgtctgtatgtgctttcacttt

SEQ ID NO: 145974 - DNA, 25 bp, Canis familiaris
gtggcaagtaactattctccttttg

SEQ ID NO: 145975 - DNA, 25 bp, Canis familiaris
gtgggttgaacatcctgccatatta

SEQ ID NO: 145976 - DNA, 25 bp, Canis familiaris
gtgtgtggtggccaagcctgagtca

SEQ ID NO: 145977 - DNA, 25 bp, Canis familiaris
gtgtgtcttgcagaatcttggatca

SEQ ID NO: 145978 - DNA, 25 bp, Canis familiaris
gtgtgtgcaatgggatatgtctgga

SEQ ID NO: 145979 - DNA, 25 bp, Canis familiaris
gtgtgctgcaggggttgtagctctc

SEQ ID NO: 145980 - DNA, 25 bp, Canis familiaris
gtgtgcgatggcaaggtgtccgtgc

SEQ ID NO: 145981 - DNA, 25 bp, Canis familiaris
gtgtcggcatgaaggagccagcgag

SEQ ID NO: 145982 - DNA, 25 bp, Canis familiaris
gtgtctggcaaccctgagaggaggc

SEQ ID NO: 145983 - DNA, 25 bp, Canis familiaris
gtggggcaacaagtagggggggcat

SEQ ID NO: 145984 - DNA, 25 bp, Canis familiaris
gtggggacctagaggaggagctgaa

SEQ ID NO: 145985 - DNA, 25 bp, Canis familiaris
gtggccatggtctgggagggactga

SEQ ID NO: 145986 - DNA, 25 bp, Canis familiaris
gtgtccgagtgaagggtggtggtca

SEQ ID NO: 145987 - DNA, 25 bp, Canis familiaris
gtgtccgagtgaaagggtgttggtc

SEQ ID NO: 145988 - DNA, 25 bp, Canis familiaris
gtgtcccctaaagtgtgtgtagcgt

SEQ ID NO: 145989 - DNA, 25 bp, Canis familiaris
gtgtcccttaatgcttggtgggtcc

SEQ ID NO: 145990 - DNA, 25 bp, Canis familiaris
gtgtccactttatctttttggtctt

SEQ ID NO: 145991 - DNA, 25 bp, Canis familiaris
gtgtggctatttattttttggccta

SEQ ID NO: 145992 - DNA, 25 bp, Canis familiaris
gtgtgcgttcttcacatttttgtca

SEQ ID NO: 145993 - DNA, 25 bp, Canis familiaris
gtgtggtgtgcgcaaactgtactta

SEQ ID NO: 145994 - DNA, 25 bp, Canis familiaris
gtgtgagtctttcaacgtgaccggc

SEQ ID NO: 145995 - DNA, 25 bp, Canis familiaris
gtgtgattttaagagcctactggtt

SEQ ID NO: 145996 - DNA, 25 bp, Canis familiaris
gtggtcttgtcttaacttttgtgtt

SEQ ID NO: 145997 - DNA, 25 bp, Canis familiaris
gtggttttgtctaataccggtatct

SEQ ID NO: 145998 - DNA, 25 bp, Canis familiaris
gtgggttttctcgaacccgaacatg

SEQ ID NO: 145999 - DNA, 25 bp, Canis familiaris
gtgtggtactttggaactcacgaga

SEQ ID NO: 146000 - DNA, 25 bp, Canis familiaris
gtgtgttacgtttatctctcagaaa

SEQ ID NO: 146001 - DNA, 25 bp, Canis familiaris
gtgtgttttgcttgtttctaaaata

SEQ ID NO: 146002 - DNA, 25 bp, Canis familiaris
gtgtgcttgtagaattctcttaaag

SEQ ID NO: 146003 - DNA, 25 bp, Canis familiaris
gtgggtgtagaccattctgtgggag

SEQ ID NO: 146004 - DNA, 25 bp, Canis familiaris
gtgggtggacaaattctggggtatt

SEQ ID NO: 146005 - DNA, 25 bp, Canis familiaris
gtgggtagaagtctggtgtggctaa

SEQ ID NO: 146006 - DNA, 25 bp, Canis familiaris
gtgggttgacacgttggtcacccaa

SEQ ID NO: 146007 - DNA, 25 bp, Canis familiaris
gtggtgttacccgtgatgagcccac

SEQ ID NO: 146008 - DNA, 25 bp, Canis familiaris
gggacttaccctgatgagcagactc

SEQ ID NO: 146009 - DNA, 25 bp, Canis familiaris
gggactaacctgctcagggttctaa

SEQ ID NO: 146010 - DNA, 25 bp, Canis familiaris
gggaaacacctgagtgccgtttatt

SEQ ID NO: 146011 - DNA, 25 bp, Canis familiaris
gggagcaaaccgagggcaactactt

SEQ ID NO: 146012 - DNA, 25 bp, Canis familiaris
gtggtcaaaacgatgtggtactggc

SEQ ID NO: 146013 - DNA, 25 bp, Canis familiaris
gtgtgccagaaagtttgctggaaag

SEQ ID NO: 146014 - DNA, 25 bp, Canis familiaris
gtgtgtaagaatgttgtgttaagtt

SEQ ID NO: 146015 - DNA, 25 bp, Canis familiaris
gtggtaagaggcgtggtgtccctga

SEQ ID NO: 146016 - DNA, 25 bp, Canis familiaris
gtggtaggaggcctgtgtgggttcc

SEQ ID NO: 146017 - DNA, 25 bp, Canis familiaris
gtggcaaaatgggtttagtctctcc

SEQ ID NO: 146018 - DNA, 25 bp, Canis familiaris
gtggaataacggtttgaacttcacg

SEQ ID NO: 146019 - DNA, 25 bp, Canis familiaris
gtgggtaccgtgttatgcgaaggca

SEQ ID NO: 146020 - DNA, 25 bp, Canis familiaris
gtgggtctgcactgttagccaagac

SEQ ID NO: 146021 - DNA, 25 bp, Canis familiaris
gtgtgcagtgcgcctggttaaagca

SEQ ID NO: 146022 - DNA, 25 bp, Canis familiaris
gtgtgcaggctgcggaggcaagatc

SEQ ID NO: 146023 - DNA, 25 bp, Canis familiaris
gtgtccagcatgtgtctgagaatct

SEQ ID NO: 146024 - DNA, 25 bp, Canis familiaris
gtgtccacagctggtatatgcaaca

SEQ ID NO: 146025 - DNA, 25 bp, Canis familiaris
gtgtccacagctggacaggagagac

SEQ ID NO: 146026 - DNA, 25 bp, Canis familiaris
gtgtcctcatgtgccagtgggacct

SEQ ID NO: 146027 - DNA, 25 bp, Canis familiaris
gtgtccatcatgttgaccgggacct

SEQ ID NO: 146028 - DNA, 25 bp, Canis familiaris
gtgtcctatgggtcctggtatcagc

SEQ ID NO: 146029 - DNA, 25 bp, Canis familiaris
gtgtgtttagcatttctggtatcag

SEQ ID NO: 146030 - DNA, 25 bp, Canis familiaris
gtgtgctgttggtttcagtgactat

SEQ ID NO: 146031 - DNA, 25 bp, Canis familiaris
gtgtgttgtggattatcagagtcga

SEQ ID NO: 146032 - DNA, 25 bp, Canis familiaris
gtgtgtttggcaattccagcacaaa

SEQ ID NO: 146033 - DNA, 25 bp, Canis familiaris
gtgtgcgtgtgtgattaccagagaa

SEQ ID NO: 146034 - DNA, 25 bp, Canis familiaris
gtggttcttgaactatccagacatt

SEQ ID NO: 146035 - DNA, 25 bp, Canis familiaris
gtggtcctacaacatccaacacaaa

SEQ ID NO: 146036 - DNA, 25 bp, Canis familiaris
gtggttcagacgttacaacacccaa

SEQ ID NO: 146037 - DNA, 25 bp, Canis familiaris
gtgtgtctcaggttaaactacccag

SEQ ID NO: 146038 - DNA, 25 bp, Canis familiaris
gtgtgtcatgagcgtttaaacccag

SEQ ID NO: 146039 - DNA, 25 bp, Canis familiaris
gtgtgccagacactgttctaatcac

SEQ ID NO: 146040 - DNA, 25 bp, Canis familiaris
gtgtccagcacacagaagatatgca

SEQ ID NO: 146041 - DNA, 25 bp, Canis familiaris
gtgtgtgacacacagacagacagac

SEQ ID NO: 146042 - DNA, 25 bp, Canis familiaris
gtgtgtgacacgcaaaatgaatcac

SEQ ID NO: 146043 - DNA, 25 bp, Canis familiaris
gtgggatgacgccaaatgccaaccc

SEQ ID NO: 146044 - DNA, 25 bp, Canis familiaris
gtggtggtgctggacaacacaaccc

SEQ ID NO: 146045 - DNA, 25 bp, Canis familiaris
gtgtgtttaccctacacacactctc

SEQ ID NO: 146046 - DNA, 25 bp, Canis familiaris
gtgtgtgaaaccaaattcaactgtc

SEQ ID NO: 146047 - DNA, 25 bp, Canis familiaris
gtgtgtgataatgtcagcatctaca

SEQ ID NO: 146048 - DNA, 25 bp, Canis familiaris
gtgtgtgtatataactgatcatcag

SEQ ID NO: 146049 - DNA, 25 bp, Canis familiaris
gtgtgtttataaatgcatcctttgt

SEQ ID NO: 146050 - DNA, 25 bp, Canis familiaris
gtgtgggtgtagggtgcctatctgt

SEQ ID NO: 146051 - DNA, 25 bp, Canis familiaris
gtgtggtggaacttgtgacccttcc

SEQ ID NO: 146052 - DNA, 25 bp, Canis familiaris
gtggtgttaaatagtaagcctgtgc

SEQ ID NO: 146053 - DNA, 25 bp, Canis familiaris
gtggtgttgaacacatgcaactttt

SEQ ID NO: 146054 - DNA, 25 bp, Canis familiaris
gtggtttctcgatcacaacctttaa

SEQ ID NO: 146055 - DNA, 25 bp, Canis familiaris
gtggttgatgttaacaattcctgat

SEQ ID NO: 146056 - DNA, 25 bp, Canis familiaris
gtgggtattggcaaagtgatcctaa

SEQ ID NO: 146057 - DNA, 25 bp, Canis familiaris
gtgtggcatttcagaagagatttaa

SEQ ID NO: 146058 - DNA, 25 bp, Canis familiaris
gtgtgagaggctgctacagtgttta

SEQ ID NO: 146059 - DNA, 25 bp, Canis familiaris
gtgtgcctggtcggtcagtatttat

SEQ ID NO: 146060 - DNA, 25 bp, Canis familiaris
gtgtgccatctgcctggatgagtat

SEQ ID NO: 146061 - DNA, 25 bp, Canis familiaris
gtgtgcatatatcggtgtgcatgta

SEQ ID NO: 146062 - DNA, 25 bp, Canis familiaris
gtgtgtatgtgcagatgacagctga

SEQ ID NO: 146063 - DNA, 25 bp, Canis familiaris
gtgtgtatgtccatgatactgtctc

SEQ ID NO: 146064 - DNA, 25 bp, Canis familiaris
gtgtgtgcatgtacagtgctcaata

SEQ ID NO: 146065 - DNA, 25 bp, Canis familiaris
gtgtgcacatgcgtgcatgtgtaca

SEQ ID NO: 146066 - DNA, 25 bp, Canis familiaris
gtgtgcatatgcgcattttcctgga

SEQ ID NO: 146067 - DNA, 25 bp, Canis familiaris
gtggctatggttgggtcagctgcga

SEQ ID NO: 146068 - DNA, 25 bp, Canis familiaris
gtgtgtatggagaggacagagcatg

SEQ ID NO: 146069 - DNA, 25 bp, Canis familiaris
gtgtgttgatcgagagcagcagagt

SEQ ID NO: 146070 - DNA, 25 bp, Canis familiaris
gtgtgcgtgcatgtgtatgcgctca

SEQ ID NO: 146071 - DNA, 25 bp, Canis familiaris
gtgtgtacatgcgtgtattctcata

SEQ ID NO: 146072 - DNA, 25 bp, Canis familiaris
gtgtgtagcacattttatttaccta

SEQ ID NO: 146073 - DNA, 25 bp, Canis familiaris
gtgtggccatcattcttattttcct

SEQ ID NO: 146074 - DNA, 25 bp, Canis familiaris
gtgggccatcatagctacattttct

SEQ ID NO: 146075 - DNA, 25 bp, Canis familiaris
gtgggaatatactcaagctgtctgc

SEQ ID NO: 146076 - DNA, 25 bp, Canis familiaris
gtgggataatgattccaccattagc

SEQ ID NO: 146077 - DNA, 25 bp, Canis familiaris
gtgggtgcaagcaatacctctgcta

SEQ ID NO: 146078 - DNA, 25 bp, Canis familiaris
gtgtgggcggccaaatttgctactc

SEQ ID NO: 146079 - DNA, 25 bp, Canis familiaris
gtgtgaggaccggaatttgccctac

SEQ ID NO: 146080 - DNA, 25 bp, Canis familiaris
gtgggggctccagtgatttggactg

SEQ ID NO: 146081 - DNA, 25 bp, Canis familiaris
gtgggaggctggaggttggccatgg

SEQ ID NO: 146082 - DNA, 25 bp, Canis familiaris
gtgggaaggtgaagagctttctcaa

SEQ ID NO: 146083 - DNA, 25 bp, Canis familiaris
gtgggacagtggaaaggatttaagg

SEQ ID NO: 146084 - DNA, 25 bp, Canis familiaris
gtgggacgtttctgcaatttgggga

SEQ ID NO: 146085 - DNA, 25 bp, Canis familiaris
gtgggaagtgttgataattttggtg

SEQ ID NO: 146086 - DNA, 25 bp, Canis familiaris
gtggggagtttgacaaatctttcaa

SEQ ID NO: 146087 - DNA, 25 bp, Canis familiaris
gtggggatctgtggtaattcttctc

SEQ ID NO: 146088 - DNA, 25 bp, Canis familiaris
gtgtgctgtgatctggtgttttttt

SEQ ID NO: 146089 - DNA, 25 bp, Canis familiaris
gtgtgtgctgtggtgtgtgtatcac

SEQ ID NO: 146090 - DNA, 25 bp, Canis familiaris
gtgtgacatgggcactgctcatcat

SEQ ID NO: 146091 - DNA, 25 bp, Canis familiaris
gtgtgaaggtgcaacagcagctcct

SEQ ID NO: 146092 - DNA, 25 bp, Canis familiaris
gtgtgagggtcaggctcagatcgtc

SEQ ID NO: 146093 - DNA, 25 bp, Canis familiaris
gtgtgcaggggtgctccagctgcac

SEQ ID NO: 146094 - DNA, 25 bp, Canis familiaris
gtgtgagggattggtccatgtgcaa

SEQ ID NO: 146095 - DNA, 25 bp, Canis familiaris
gtgtgatgggtgtgactgtgatgca

SEQ ID NO: 146096 - DNA, 25 bp, Canis familiaris
gtgtgggtgtagcactgtatgagtg

SEQ ID NO: 146097 - DNA, 25 bp, Canis familiaris
gtgtgtttgggatgctgataggatg

SEQ ID NO: 146098 - DNA, 25 bp, Canis familiaris
gtgtgtttgagcgggcgcatagggg

SEQ ID NO: 146099 - DNA, 25 bp, Canis familiaris
gtgtgtgctgggagggctagagtgg

SEQ ID NO: 146100 - DNA, 25 bp, Canis familiaris
gtgtgtcagtggagggtggggtgga

SEQ ID NO: 146101 - DNA, 25 bp, Canis familiaris
gtgtgccgtgaggatggggaggggg

SEQ ID NO: 146102 - DNA, 25 bp, Canis familiaris
gtgtggggacactggagactgggaa

SEQ ID NO: 146103 - DNA, 25 bp, Canis familiaris
gtgggcttgagagaggatacttgtg

SEQ ID NO: 146104 - DNA, 25 bp, Canis familiaris
ggagagcgagggcgagtaccggccc

SEQ ID NO: 146105 - DNA, 25 bp, Canis familiaris
tgggggggaaaagacactggaacag

SEQ ID NO: 146106 - DNA, 25 bp, Canis familiaris
ttggggtaccaataagccggaccag

SEQ ID NO: 146107 - DNA, 25 bp, Canis familiaris
tgtggggtacccacaacctgaagtc

SEQ ID NO: 146108 - DNA, 25 bp, Canis familiaris
gtggcggaacccaggaatctgtcct

SEQ ID NO: 146109 - DNA, 25 bp, Canis familiaris
gtgggaccgtccaaggaacaagcct

SEQ ID NO: 146110 - DNA, 25 bp, Canis familiaris
gtggtagggttcggtggactgagtc

SEQ ID NO: 146111 - DNA, 25 bp, Canis familiaris
gtgggagcggttgtctgaatctggc

SEQ ID NO: 146112 - DNA, 25 bp, Canis familiaris
gtgtggatcaggctacagtagtctg

SEQ ID NO: 146113 - DNA, 25 bp, Canis familiaris
gtgtgtgacctggtgagctgtgacc

SEQ ID NO: 146114 - DNA, 25 bp, Canis familiaris
gtgtgtatactaaatgcttaccctg

SEQ ID NO: 146115 - DNA, 25 bp, Canis familiaris
gtgtgcatatgtccaaagtttccct

SEQ ID NO: 146116 - DNA, 25 bp, Canis familiaris
gtgtggtcaacacagtcttcacctt

SEQ ID NO: 146117 - DNA, 25 bp, Canis familiaris
gtgtgtggcaagtaactattctcct

SEQ ID NO: 146118 - DNA, 25 bp, Canis familiaris
gtggtccaaaaactgaatcccgaca

SEQ ID NO: 146119 - DNA, 25 bp, Canis familiaris
gtggacttttagtaaaacggagcat

SEQ ID NO: 146120 - DNA, 25 bp, Canis familiaris
gtgggttttggataggatcccagat

SEQ ID NO: 146121 - DNA, 25 bp, Canis familiaris
gtggattttggtttgggatcccata

SEQ ID NO: 146122 - DNA, 25 bp, Canis familiaris
gtgtgtttttgtatgattgagccca

SEQ ID NO: 146123 - DNA, 25 bp, Canis familiaris
gtgtgttgtctgattttaatgtcca

SEQ ID NO: 146124 - DNA, 25 bp, Canis familiaris
gtggtctttggcctaatgaattcta

SEQ ID NO: 146125 - DNA, 25 bp, Canis familiaris
gtgtgttttcctgaagtattctgat

SEQ ID NO: 146126 - DNA, 25 bp, Canis familiaris
gtgtgtatttttaaaggcactcatt

SEQ ID NO: 146127 - DNA, 25 bp, Canis familiaris
gtgtgtatttgaaatgggagggttc

SEQ ID NO: 146128 - DNA, 25 bp, Canis familiaris
gtgtgattacaattatggaagtgga

SEQ ID NO: 146129 - DNA, 25 bp, Canis familiaris
gtgtgtgcccagtcacgtaagggaa

SEQ ID NO: 146130 - DNA, 25 bp, Canis familiaris
gtggacacacagtcctcaaaggtgg

SEQ ID NO: 146131 - DNA, 25 bp, Canis familiaris
gtggagaaacaccctcaaggctggt

SEQ ID NO: 146132 - DNA, 25 bp, Canis familiaris
gtgggaacacccggaagctcagggt

SEQ ID NO: 146133 - DNA, 25 bp, Canis familiaris
gtgtgtaacagcgaccgtgtgctca

SEQ ID NO: 146134 - DNA, 25 bp, Canis familiaris
gtgtgtcaagcagatctgcctggtc

SEQ ID NO: 146135 - DNA, 25 bp, Canis familiaris
gtgtgtcagagagatcctctcctgt

SEQ ID NO: 146136 - DNA, 25 bp, Canis familiaris
gtggtcgaatcttccttcaggatat

SEQ ID NO: 146137 - DNA, 25 bp, Canis familiaris
gtggtcgaatcttccttcaggatat

SEQ ID NO: 146138 - DNA, 25 bp, Canis familiaris
gtgtgactagtcatccaacaggaga

SEQ ID NO: 146139 - DNA, 25 bp, Canis familiaris
gtgtgcgttctcgccaagaggagca

SEQ ID NO: 146140 - DNA, 25 bp, Canis familiaris
gtgtggtatacctcaagaggaatga

SEQ ID NO: 146141 - DNA, 25 bp, Canis familiaris
gtgtgttttccaccaaataaatcag

SEQ ID NO: 146142 - DNA, 25 bp, Canis familiaris
gtgggaactccaacagtgaaagtca

SEQ ID NO: 146143 - DNA, 25 bp, Canis familiaris
gtgtgaaactccaaaatgcaaactg

SEQ ID NO: 146144 - DNA, 25 bp, Canis familiaris
gtggtaacctacgaacaaattgtga

SEQ ID NO: 146145 - DNA, 25 bp, Canis familiaris
gtgtgtgtccctgtaacaagcttaa

SEQ ID NO: 146146 - DNA, 25 bp, Canis familiaris
gtgtgctgcctttcaggtacaactt

SEQ ID NO: 146147 - DNA, 25 bp, Canis familiaris
gtgggtcgtgtctgtcagacctttt

SEQ ID NO: 146148 - DNA, 25 bp, Canis familiaris
gtgggccgtgtcattaagtcttagt

SEQ ID NO: 146149 - DNA, 25 bp, Canis familiaris
gtgtggaagttccttatctgactta

SEQ ID NO: 146150 - DNA, 25 bp, Canis familiaris
gggcgaagcatttttccggattaga

SEQ ID NO: 146151 - DNA, 25 bp, Canis familiaris
gtggcttttttctctcggaacagaa

SEQ ID NO: 146152 - DNA, 25 bp, Canis familiaris
gtgtgttttgttttctgggcactag

SEQ ID NO: 146153 - DNA, 25 bp, Canis familiaris
gtgtgctttgtgttttcgtgattta

SEQ ID NO: 146154 - DNA, 25 bp, Canis familiaris
gtgtgcacgtgtgtgtttggcaatt

SEQ ID NO: 146155 - DNA, 25 bp, Canis familiaris
gtgtgcacacttgtgtgtatgtcca

SEQ ID NO: 146156 - DNA, 25 bp, Canis familiaris
gtgtggcagtatgtgcgtggtccat

SEQ ID NO: 146157 - DNA, 25 bp, Canis familiaris
gtgggaggtgttctgtgtccaaaaa

SEQ ID NO: 146158 - DNA, 25 bp, Canis familiaris
gtggtacgtttgccgtgatcatgca

SEQ ID NO: 146159 - DNA, 25 bp, Canis familiaris
gtgtgtgcacgcacacgcgagtgtg

SEQ ID NO: 146160 - DNA, 25 bp, Canis familiaris
gtgtgcgcgcacacatgcgcgggaa

SEQ ID NO: 146161 - DNA, 25 bp, Canis familiaris
gtgtgcatcccggatccggggactc

SEQ ID NO: 146162 - DNA, 25 bp, Canis familiaris
gtgtgcagccccatcacataggggt

SEQ ID NO: 146163 - DNA, 25 bp, Canis familiaris
gtggagacccgttcatcggggatga

SEQ ID NO: 146164 - DNA, 25 bp, Canis familiaris
gtgtgcagacacaactacggggtga

SEQ ID NO: 146165 - DNA, 25 bp, Canis familiaris
gtgtgcagacacaactacggggtgg

SEQ ID NO: 146166 - DNA, 25 bp, Canis familiaris
gtgtgcagacacaactacgggaggg

SEQ ID NO: 146167 - DNA, 25 bp, Canis familiaris
gtgtgaggcacatggaggaagggag

SEQ ID NO: 146168 - DNA, 25 bp, Canis familiaris
gtgtgcggcaaccgcaagaagcccg

SEQ ID NO: 146169 - DNA, 25 bp, Canis familiaris
gtgtgcgtgactctaagaacctgcc

SEQ ID NO: 146170 - DNA, 25 bp, Canis familiaris
gtgtgtgatacacttagaacatcca

SEQ ID NO: 146171 - DNA, 25 bp, Canis familiaris
gtgtgtatgcctttcaaaatcctag

SEQ ID NO: 146172 - DNA, 25 bp, Canis familiaris
gtgtgtgatccattaccaagtctcc

SEQ ID NO: 146173 - DNA, 25 bp, Canis familiaris
gtgtgatccaataaagactctctgc

SEQ ID NO: 146174 - DNA, 25 bp, Canis familiaris
gtgtgcactgtaaaaccatccagcc

SEQ ID NO: 146175 - DNA, 25 bp, Canis familiaris
gtgtgcttggattaaccaaagtgta

SEQ ID NO: 146176 - DNA, 25 bp, Canis familiaris
gtgtgctttttagctgttagtgcta

SEQ ID NO: 146177 - DNA, 25 bp, Canis familiaris
gtgtgttgtttagtcttggaacttc

SEQ ID NO: 146178 - DNA, 25 bp, Canis familiaris
gtgtgtttacatgcttttaactttt

SEQ ID NO: 146179 - DNA, 25 bp, Canis familiaris
gtgtgtttgtgtgcttttaatgatg

SEQ ID NO: 146180 - DNA, 25 bp, Canis familiaris
gtgtgtttgtgtgtcggatacacat

SEQ ID NO: 146181 - DNA, 25 bp, Canis familiaris
gtgtgtactgctcttcggggaaagc

SEQ ID NO: 146182 - DNA, 25 bp, Canis familiaris
gtgtgtgccttatttcaaagagaaa

SEQ ID NO: 146183 - DNA, 25 bp, Canis familiaris
gtgtgggcggacctgcaaacagaga

SEQ ID NO: 146184 - DNA, 25 bp, Canis familiaris
gtgtgagggccagatcggacgtaag

SEQ ID NO: 146185 - DNA, 25 bp, Canis familiaris
gtgtgagggccagacggacggaagc

SEQ ID NO: 146186 - DNA, 25 bp, Canis familiaris
gtgtgagggccagacggacggaagc

SEQ ID NO: 146187 - DNA, 25 bp, Canis familiaris
gtgtgagggccagacggacggaagc

SEQ ID NO: 146188 - DNA, 25 bp, Canis familiaris
gtgtgggagaaggactggcccgcat

SEQ ID NO: 146189 - DNA, 25 bp, Canis familiaris
gtgggggtgagagtctgcccccacc

SEQ ID NO: 146190 - DNA, 25 bp, Canis familiaris
gtgggtttcaagaagcgtgcccctc

SEQ ID NO: 146191 - DNA, 25 bp, Canis familiaris
gtggggctacagtaattatggtcct

SEQ ID NO: 146192 - DNA, 25 bp, Canis familiaris
gtgtggcgccacctgaattagaaac

SEQ ID NO: 146193 - DNA, 25 bp, Canis familiaris
gtggagtccaccggtgtaggaacgc

SEQ ID NO: 146194 - DNA, 25 bp, Canis familiaris
gtgggatcggcggttggaggacatc

SEQ ID NO: 146195 - DNA, 25 bp, Canis familiaris
gtgggacgggtcttgaggagtgcca

SEQ ID NO: 146196 - DNA, 25 bp, Canis familiaris
gtgggaccgattcaagtgtgtgcta

SEQ ID NO: 146197 - DNA, 25 bp, Canis familiaris
gtgggtcacagaaagaagtgggttt

SEQ ID NO: 146198 - DNA, 25 bp, Canis familiaris
gtgtggccaggataacttgggctcc

SEQ ID NO: 146199 - DNA, 25 bp, Canis familiaris
gtgggccgtgaatagttggactctg

SEQ ID NO: 146200 - DNA, 25 bp, Canis familiaris
gtgtggcgcgtggagaagttcgacc

SEQ ID NO: 146201 - DNA, 25 bp, Canis familiaris
gtgggccgggcgaagatgtcgatga

SEQ ID NO: 146202 - DNA, 25 bp, Canis familiaris
gtgggcacaggactgtaggctctca

SEQ ID NO: 146203 - DNA, 25 bp, Canis familiaris
gtgggccagagagcctggctgcagg

SEQ ID NO: 146204 - DNA, 25 bp, Canis familiaris
gtgggccgaacgtgggcagggttgg

SEQ ID NO: 146205 - DNA, 25 bp, Canis familiaris
gtgggcctgaacctgggagtgcagg

SEQ ID NO: 146206 - DNA, 25 bp, Canis familiaris
gtgggactccagcgagacaagcagg

SEQ ID NO: 146207 - DNA, 25 bp, Canis familiaris
gtgggcactgccaggaatcagggat

SEQ ID NO: 146208 - DNA, 25 bp, Canis familiaris
gtgtgtcctctatgagacaagaact

SEQ ID NO: 146209 - DNA, 25 bp, Canis familiaris
gtgtgtctctcctgaataaatacat

SEQ ID NO: 146210 - DNA, 25 bp, Canis familiaris
gtgtgattttatgatatgtagtaat

SEQ ID NO: 146211 - DNA, 25 bp, Canis familiaris
gtgtgatttgtttgaagtagctttg

SEQ ID NO: 146212 - DNA, 25 bp, Canis familiaris
gtgtgtgctttattggagttctatt

SEQ ID NO: 146213 - DNA, 25 bp, Canis familiaris
gtgtgtgctaaattaatattcatta

SEQ ID NO: 146214 - DNA, 25 bp, Canis familiaris
gtgtgttgagaatctttctcttgac

SEQ ID NO: 146215 - DNA, 25 bp, Canis familiaris
gtgtgttagatacagcggctgcttg

SEQ ID NO: 146216 - DNA, 25 bp, Canis familiaris
gtgtgattacagtcaagcggcctct

SEQ ID NO: 146217 - DNA, 25 bp, Canis familiaris
gtggttactgctcacagacacctat

SEQ ID NO: 146218 - DNA, 25 bp, Canis familiaris
gtgtgtctgttgcaaaatcaccata

SEQ ID NO: 146219 - DNA, 25 bp, Canis familiaris
gggatcgttacccgaactgcatcag

SEQ ID NO: 146220 - DNA, 25 bp, Canis familiaris
gggacgtacgagcgggcgatagccc

SEQ ID NO: 146221 - DNA, 25 bp, Canis familiaris
gtggaatctgactgggggcgaaccc

SEQ ID NO: 146222 - DNA, 25 bp, Canis familiaris
gtgtgatctgctacggggtggagag

SEQ ID NO: 146223 - DNA, 25 bp, Canis familiaris
gtgtgttcatgcagagagagggaga

SEQ ID NO: 146224 - DNA, 25 bp, Canis familiaris
gtgtggtccacaaagctgagcgaga

SEQ ID NO: 146225 - DNA, 25 bp, Canis familiaris
gtggttctcaaatctggctaggcgt

SEQ ID NO: 146226 - DNA, 25 bp, Canis familiaris
gtggttccatacaaatttcaggatt

SEQ ID NO: 146227 - DNA, 25 bp, Canis familiaris
gtgtgttccaagtctgaactcgtgt

SEQ ID NO: 146228 - DNA, 25 bp, Canis familiaris
gtgtgtacaaaagggacttcgatac

SEQ ID NO: 146229 - DNA, 25 bp, Canis familiaris
gtgtgatatctaaaggaactctcca

SEQ ID NO: 146230 - DNA, 25 bp, Canis familiaris
gtgtgttataatgggatcagtctca

SEQ ID NO: 146231 - DNA, 25 bp, Canis familiaris
gtggttaaaccactcgttcaaatgg

SEQ ID NO: 146232 - DNA, 25 bp, Canis familiaris
gtgtgtcataaaaagcacttttaat

SEQ ID NO: 146233 - DNA, 25 bp, Canis familiaris
gtgtgtaaaacagatccttatattg

SEQ ID NO: 146234 - DNA, 25 bp, Canis familiaris
gtgtgtcggaacggatggtccatca

SEQ ID NO: 146235 - DNA, 25 bp, Canis familiaris
gtgtgtgaggagtggtggtggacga

SEQ ID NO: 146236 - DNA, 25 bp, Canis familiaris
gtgtgtgggagtggggagcaaactt

SEQ ID NO: 146237 - DNA, 25 bp, Canis familiaris
gtgtggggtgagcggagcacccact

SEQ ID NO: 146238 - DNA, 25 bp, Canis familiaris
gtgtgtgggggggtacatactgaat

SEQ ID NO: 146239 - DNA, 25 bp, Canis familiaris
gtgtggggagtgggccactcactga

SEQ ID NO: 146240 - DNA, 25 bp, Canis familiaris
gtgtggacggagggggcacacgcac

SEQ ID NO: 146241 - DNA, 25 bp, Canis familiaris
gtgtggatctgggacagggtcaccc

SEQ ID NO: 146242 - DNA, 25 bp, Canis familiaris
gtgtggactgcctgcagaggacacc

SEQ ID NO: 146243 - DNA, 25 bp, Canis familiaris
gtggtgggcgcaggctgaggaaggc

SEQ ID NO: 146244 - DNA, 25 bp, Canis familiaris
gtggtggtggctgtggtaatgtatg

SEQ ID NO: 146245 - DNA, 25 bp, Canis familiaris
gtgtggcagggtgattgtctttctt

SEQ ID NO: 146246 - DNA, 25 bp, Canis familiaris
gtgggaggcttatttttcttcagtt

SEQ ID NO: 146247 - DNA, 25 bp, Canis familiaris
gtgggagaatgtttccttgtacctt

SEQ ID NO: 146248 - DNA, 25 bp, Canis familiaris
gtgggtgaggctgtccattgtacca

SEQ ID NO: 146249 - DNA, 25 bp, Canis familiaris
gtgggagcaggtgactttgtttagt

SEQ ID NO: 146250 - DNA, 25 bp, Canis familiaris
gtgggcaaggcttcattttgtctgt

SEQ ID NO: 146251 - DNA, 25 bp, Canis familiaris
gtgtggaagatttattattgctcag

SEQ ID NO: 146252 - DNA, 25 bp, Canis familiaris
gtgtgggagcatcttatgagtatcg

SEQ ID NO: 146253 - DNA, 25 bp, Canis familiaris
gtgtggtggctctgatatagctgtt

SEQ ID NO: 146254 - DNA, 25 bp, Canis familiaris
gtgtgtgcatttttgataactgtgt

SEQ ID NO: 146255 - DNA, 25 bp, Canis familiaris
gtgtgtttgtgtacatacttttaaa

SEQ ID NO: 146256 - DNA, 25 bp, Canis familiaris
gtgtgttatggattgcatctctgta

SEQ ID NO: 146257 - DNA, 25 bp, Canis familiaris
gtgtgatgcatgtgagtgtctcttg

SEQ ID NO: 146258 - DNA, 25 bp, Canis familiaris
gtgggagatagactccctgtgcccc

SEQ ID NO: 146259 - DNA, 25 bp, Canis familiaris
gtgggataaactccttgacttccaa

SEQ ID NO: 146260 - DNA, 25 bp, Canis familiaris
gtggggacaagctagttgaccatcc

SEQ ID NO: 146261 - DNA, 25 bp, Canis familiaris
gtgggaggccagggtgttcctggca

SEQ ID NO: 146262 - DNA, 25 bp, Canis familiaris
gtgggtgcctagaggcatctcctga

SEQ ID NO: 146263 - DNA, 25 bp, Canis familiaris
gtggggattatgagagcccctagct

SEQ ID NO: 146264 - DNA, 25 bp, Canis familiaris
gtgtgtaatttaaagtccagttgtt

SEQ ID NO: 146265 - DNA, 25 bp, Canis familiaris
gtgtgtaattcttatttccagtatg

SEQ ID NO: 146266 - DNA, 25 bp, Canis familiaris
gtgtgtctggtttattccacttagc

SEQ ID NO: 146267 - DNA, 25 bp, Canis familiaris
gtgtggctggggttctgacaataga

SEQ ID NO: 146268 - DNA, 25 bp, Canis familiaris
gtgtggggctgtttctccataaatc

SEQ ID NO: 146269 - DNA, 25 bp, Canis familiaris
gtgtggggctcctagctgattaaaa

SEQ ID NO: 146270 - DNA, 25 bp, Canis familiaris
gtggtggaggccaagctgataaaac

SEQ ID NO: 146271 - DNA, 25 bp, Canis familiaris
gtgtggaggcccaaggaagccaacc

SEQ ID NO: 146272 - DNA, 25 bp, Canis familiaris
gtgtgagggccattcaggggctgca

SEQ ID NO: 146273 - DNA, 25 bp, Canis familiaris
gtgggcgaggcttcagcgagagatc

SEQ ID NO: 146274 - DNA, 25 bp, Canis familiaris
gtgtgtgctgggctcgtgaatgatg

SEQ ID NO: 146275 - DNA, 25 bp, Canis familiaris
gtgtgtctggggttggagtgagaga

SEQ ID NO: 146276 - DNA, 25 bp, Canis familiaris
gtgtgtcttgtgggggagtgggatg

SEQ ID NO: 146277 - DNA, 25 bp, Canis familiaris
gtgtgtgtatgggagcggagttaag

SEQ ID NO: 146278 - DNA, 25 bp, Canis familiaris
gtgggtcagtggtgggtttctggtc

SEQ ID NO: 146279 - DNA, 25 bp, Canis familiaris
gtgtggtctgtgtttgggtttgata

SEQ ID NO: 146280 - DNA, 25 bp, Canis familiaris
gtgtggtgtgctataggcggtttaa

SEQ ID NO: 146281 - DNA, 25 bp, Canis familiaris
gtgtggtttttaccaactgtctcca

SEQ ID NO: 146282 - DNA, 25 bp, Canis familiaris
gtgtggttattttcccaggaggcct

SEQ ID NO: 146283 - DNA, 25 bp, Canis familiaris
gtgtgtgtttgaaccacgctgggga

SEQ ID NO: 146284 - DNA, 25 bp, Canis familiaris
gtgtgttctgtaaaagcctggcaag

SEQ ID NO: 146285 - DNA, 25 bp, Canis familiaris
gtgggcaagtatgagacgctggagg

SEQ ID NO: 146286 - DNA, 25 bp, Canis familiaris
gtgggaaggtgatcaaggctggtgt

SEQ ID NO: 146287 - DNA, 25 bp, Canis familiaris
gtgggccttggaacacaggtgtgta

SEQ ID NO: 146288 - DNA, 25 bp, Canis familiaris
gtgggtctgatgcaaatcggtgatg

SEQ ID NO: 146289 - DNA, 25 bp, Canis familiaris
gtgggctccatgccaagaagggatg

SEQ ID NO: 146290 - DNA, 25 bp, Canis familiaris
gtgtggatcatctgcataaagacgg

SEQ ID NO: 146291 - DNA, 25 bp, Canis familiaris
gtgtgtgacatctggccacagcatc

SEQ ID NO: 146292 - DNA, 25 bp, Canis familiaris
gtggtggcacattgtgaccaggccc

SEQ ID NO: 146293 - DNA, 25 bp, Canis familiaris
gtgtggctactataggggcctcaga

SEQ ID NO: 146294 - DNA, 25 bp, Canis familiaris
gtgtgtgtaccagggctggggtccc

SEQ ID NO: 146295 - DNA, 25 bp, Canis familiaris
gtgtgtggcccaaggaggtggccca

SEQ ID NO: 146296 - DNA, 25 bp, Canis familiaris
gtgtgtccctgtgatagtgtggctc

SEQ ID NO: 146297 - DNA, 25 bp, Canis familiaris
gtgtgtccatttctctggtggtacc

SEQ ID NO: 146298 - DNA, 25 bp, Canis familiaris
gtggtgacttcgcccatggagggca

SEQ ID NO: 146299 - DNA, 25 bp, Canis familiaris
gtggtgacttcagccctgatagact

SEQ ID NO: 146300 - DNA, 25 bp, Canis familiaris
gtgggaccactgtcatcatgtccag

SEQ ID NO: 146301 - DNA, 25 bp, Canis familiaris
gtgtggcagccactacaagaccaaa

SEQ ID NO: 146302 - DNA, 25 bp, Canis familiaris
gtgtgggcacatcagaatggccaac

SEQ ID NO: 146303 - DNA, 25 bp, Canis familiaris
gtgggctgccatgttgatggccgtc

SEQ ID NO: 146304 - DNA, 25 bp, Canis familiaris
gtgtggctacatctagagtgcggtt

SEQ ID NO: 146305 - DNA, 25 bp, Canis familiaris
gtgggctacaatcagagtgccggtt

SEQ ID NO: 146306 - DNA, 25 bp, Canis familiaris
gtgggctacattcagagtgctgggt

SEQ ID NO: 146307 - DNA, 25 bp, Canis familiaris
gtgggctctatactcagtggggtat

SEQ ID NO: 146308 - DNA, 25 bp, Canis familiaris
gtggactctagaaattggctggata

SEQ ID NO: 146309 - DNA, 25 bp, Canis familiaris
gtggttcggttcctggcggaagaag

SEQ ID NO: 146310 - DNA, 25 bp, Canis familiaris
gtggtacgttccttggaggataacg

SEQ ID NO: 146311 - DNA, 25 bp, Canis familiaris
gtgtgtatgctttccttgggtaaaa

SEQ ID NO: 146312 - DNA, 25 bp, Canis familiaris
gtgtggagctttggactgggattaa

SEQ ID NO: 146313 - DNA, 25 bp, Canis familiaris
gtgtggcactcttggtggggaatat

SEQ ID NO: 146314 - DNA, 25 bp, Canis familiaris
gtgggagcctgatgcgggattagat

SEQ ID NO: 146315 - DNA, 25 bp, Canis familiaris
gtgggggtaaggctctgctgagaat

SEQ ID NO: 146316 - DNA, 25 bp, Canis familiaris
gtgggggataatgcacctgctgagg

SEQ ID NO: 146317 - DNA, 25 bp, Canis familiaris
gtggggtcaaatacatccctaatcg

SEQ ID NO: 146318 - DNA, 25 bp, Canis familiaris
gtgtggaattagatcatccccttca

SEQ ID NO: 146319 - DNA, 25 bp, Canis familiaris
gtggtatgattgtcttatcccagct

SEQ ID NO: 146320 - DNA, 25 bp, Canis familiaris
gtggtcagattgagtatgaccagct

SEQ ID NO: 146321 - DNA, 25 bp, Canis familiaris
gtgggacttgaactcatgaccctga

SEQ ID NO: 146322 - DNA, 25 bp, Canis familiaris
gtgtgtactctgtagtctcagtccg

SEQ ID NO: 146323 - DNA, 25 bp, Canis familiaris
gtgtggagctacagtctcacatcct

SEQ ID NO: 146324 - DNA, 25 bp, Canis familiaris
gtgtgtgagtgtgggctctacaccc

SEQ ID NO: 146325 - DNA, 25 bp, Canis familiaris
gtggatattgtcgccatcaatgacc

SEQ ID NO: 146326 - DNA, 25 bp, Canis familiaris
gggagatagtccatgccaggacccc

SEQ ID NO: 146327 - DNA, 25 bp, Canis familiaris
gtggagtcctccgtggaggacccgc

SEQ ID NO: 146328 - DNA, 25 bp, Canis familiaris
gtgtggatcctggccgacaggagca

SEQ ID NO: 146329 - DNA, 25 bp, Canis familiaris
gtgtggaagtgagagcctggtgccc

SEQ ID NO: 146330 - DNA, 25 bp, Canis familiaris
gtgtggacagggtgtctgtgtgccc

SEQ ID NO: 146331 - DNA, 25 bp, Canis familiaris
gtgtggatgtggactctgtcgggac

SEQ ID NO: 146332 - DNA, 25 bp, Canis familiaris
gtgtggcagaggttgttcgggctcc

SEQ ID NO: 146333 - DNA, 25 bp, Canis familiaris
gtgtgtccaggcctgttcaggcaga

SEQ ID NO: 146334 - DNA, 25 bp, Canis familiaris
gtgtgtccatgtgtgtgtgcaccag

SEQ ID NO: 146335 - DNA, 25 bp, Canis familiaris
gtgtgtccagatgaatgatgaaatg

SEQ ID NO: 146336 - DNA, 25 bp, Canis familiaris
gtgtgtactgcccaatgagaaattc

SEQ ID NO: 146337 - DNA, 25 bp, Canis familiaris
gtgtgtatgtgtgattgagaatatt

SEQ ID NO: 146338 - DNA, 25 bp, Canis familiaris
gtgtgtatgtgtgcaagaatgtgta

SEQ ID NO: 146339 - DNA, 25 bp, Canis familiaris
gtgtgttatgtgaagagtgtatgta

SEQ ID NO: 146340 - DNA, 25 bp, Canis familiaris
gtgtgtgtggtacatgtgtatgcat

SEQ ID NO: 146341 - DNA, 25 bp, Canis familiaris
gtgtggtgttgtctgtatatgctaa

SEQ ID NO: 146342 - DNA, 25 bp, Canis familiaris
gtgtggtgctttccagaataaaggt

SEQ ID NO: 146343 - DNA, 25 bp, Canis familiaris
gtgggcgctctataaagaacggcaa

SEQ ID NO: 146344 - DNA, 25 bp, Canis familiaris
gtggaggtcatccttaggacccgat

SEQ ID NO: 146345 - DNA, 25 bp, Canis familiaris
gtggggattcctgtgtatgtccgaa

SEQ ID NO: 146346 - DNA, 25 bp, Canis familiaris
gtgggaatgctgtctgcgttatgtc

SEQ ID NO: 146347 - DNA, 25 bp, Canis familiaris
gtgtgtgaattgtatggaatgtgac

SEQ ID NO: 146348 - DNA, 25 bp, Canis familiaris
gtgtgtgatattcctgctgtgagga

SEQ ID NO: 146349 - DNA, 25 bp, Canis familiaris
gtgtgtgtctcgatgtctgatcaat

SEQ ID NO: 146350 - DNA, 25 bp, Canis familiaris
gtgtgtgtcacaactcacttcaaag

SEQ ID NO: 146351 - DNA, 25 bp, Canis familiaris
gtgtgtgcacgcacgcatgtatcac

SEQ ID NO: 146352 - DNA, 25 bp, Canis familiaris
gtgggcatcgccacagtcataagtc

SEQ ID NO: 146353 - DNA, 25 bp, Canis familiaris
gtgggaacacgtggtcatgaagtca

SEQ ID NO: 146354 - DNA, 25 bp, Canis familiaris
gtgggaagtccaggaagcacagtat

SEQ ID NO: 146355 - DNA, 25 bp, Canis familiaris
gtgggtgttccagtgatggcaataa

SEQ ID NO: 146356 - DNA, 25 bp, Canis familiaris
gtgggctgatctaaccagaaaagca

SEQ ID NO: 146357 - DNA, 25 bp, Canis familiaris
gtgggctgacgacatcagcaaaagt

SEQ ID NO: 146358 - DNA, 25 bp, Canis familiaris
gtggtggaggatcctcagccaaggt

SEQ ID NO: 146359 - DNA, 25 bp, Canis familiaris
gtggggacataagtagctctctggt

SEQ ID NO: 146360 - DNA, 25 bp, Canis familiaris
gtggggaccaggacatttctgatgg

SEQ ID NO: 146361 - DNA, 25 bp, Canis familiaris
gtgggagaagcgctggtttgctggg

SEQ ID NO: 146362 - DNA, 25 bp, Canis familiaris
gtggtagcaaggtctagtttggact

SEQ ID NO: 146363 - DNA, 25 bp, Canis familiaris
gtgtgtggcatctgaccagttttga

SEQ ID NO: 146364 - DNA, 25 bp, Canis familiaris
gtgtgtggccatcattcttattttc

SEQ ID NO: 146365 - DNA, 25 bp, Canis familiaris
gtgtgtgcacatactatatcttctt

SEQ ID NO: 146366 - DNA, 25 bp, Canis familiaris
gtgtgtgcacatttgcacgctctct

SEQ ID NO: 146367 - DNA, 25 bp, Canis familiaris
gtgtgtacacattcactgttctttc

SEQ ID NO: 146368 - DNA, 25 bp, Canis familiaris
gtgtgtacacagacattgctggctt

SEQ ID NO: 146369 - DNA, 25 bp, Canis familiaris
gtgggcagcactgtatctgcgcatt

SEQ ID NO: 146370 - DNA, 25 bp, Canis familiaris
gtgggtcactcaaattggctctaga

SEQ ID NO: 146371 - DNA, 25 bp, Canis familiaris
gtggtcaactcaggatgtgcttcta

SEQ ID NO: 146372 - DNA, 25 bp, Canis familiaris
gtgtgtacacactgagatggatcta

SEQ ID NO: 146373 - DNA, 25 bp, Canis familiaris
gtgtgtgaaatctgacgagttttaa

SEQ ID NO: 146374 - DNA, 25 bp, Canis familiaris
gggcgaaatcgcgacgatcttagct

SEQ ID NO: 146375 - DNA, 25 bp, Canis familiaris
gtggtggtgcatggccgttcttagt

SEQ ID NO: 146376 - DNA, 25 bp, Canis familiaris
gtggtggtgcatggccgttcttagt

SEQ ID NO: 146377 - DNA, 25 bp, Canis familiaris
gtgtgggtcatcctgtgtttacaat

SEQ ID NO: 146378 - DNA, 25 bp, Canis familiaris
gtgtgggccaagttcttctgtaaag

SEQ ID NO: 146379 - DNA, 25 bp, Canis familiaris
gtgtgggcagcagatctttgtggat

SEQ ID NO: 146380 - DNA, 25 bp, Canis familiaris
gtggtgatcagcagttctctgtgga

SEQ ID NO: 146381 - DNA, 25 bp, Canis familiaris
gtgtgtgtatctgttcttctgaagc

SEQ ID NO: 146382 - DNA, 25 bp, Canis familiaris
gtgtgtgagtctgtgtgtgtgtaag

SEQ ID NO: 146383 - DNA, 25 bp, Canis familiaris
gtgtgtgtatgtttgggtgtctaga

SEQ ID NO: 146384 - DNA, 25 bp, Canis familiaris
gtgtggatattcttgagcgtctcta

SEQ ID NO: 146385 - DNA, 25 bp, Canis familiaris
gtgggatgtggcagagcttgtcatc

SEQ ID NO: 146386 - DNA, 25 bp, Canis familiaris
gtgtgtgatggggaggggtcatggg

SEQ ID NO: 146387 - DNA, 25 bp, Canis familiaris
gtgtgtgctggggagtgtgtgtgag

SEQ ID NO: 146388 - DNA, 25 bp, Canis familiaris
gtgtgtgtggtgtagtgtggtgtag

SEQ ID NO: 146389 - DNA, 25 bp, Canis familiaris
gtgtgtgtcagtcatttgggtgagc

SEQ ID NO: 146390 - DNA, 25 bp, Canis familiaris
gtgggctcaggcaatagatgggggg

SEQ ID NO: 146391 - DNA, 25 bp, Canis familiaris
gtgggctcatgccatgatggggggc

SEQ ID NO: 146392 - DNA, 25 bp, Canis familiaris
gtgtgtgaatgatgtgggggcaggg

SEQ ID NO: 146393 - DNA, 25 bp, Canis familiaris
gtgtgtggtgaggagaagggagcag

SEQ ID NO: 146394 - DNA, 25 bp, Canis familiaris
gggctaggagggtgatggaaggggc

SEQ ID NO: 146395 - DNA, 25 bp, Canis familiaris
gggcggggggatggagaaactgagt

SEQ ID NO: 146396 - DNA, 25 bp, Canis familiaris
gtgggttggggagaggaggtggtat

SEQ ID NO: 146397 - DNA, 25 bp, Canis familiaris
gtgtggtgggggtagggaggctgag

SEQ ID NO: 146398 - DNA, 25 bp, Canis familiaris
gtggtttggaacttgggaacttgtg

SEQ ID NO: 146399 - DNA, 25 bp, Canis familiaris
gtggtcctggaatcaaagaattttg

SEQ ID NO: 146400 - DNA, 25 bp, Canis familiaris
gtggtccggcattctacaagatagt

SEQ ID NO: 146401 - DNA, 25 bp, Canis familiaris
gtgtgtccccattcagaagtgagag

SEQ ID NO: 146402 - DNA, 25 bp, Canis familiaris
gtgtgtccctcattgagctaattgg

SEQ ID NO: 146403 - DNA, 25 bp, Canis familiaris
gtgtgtcaaacctctacattgtgat

SEQ ID NO: 146404 - DNA, 25 bp, Canis familiaris
gtggagataacatttctgactttca

SEQ ID NO: 146405 - DNA, 25 bp, Canis familiaris
gtgggaacacatttctattgaagca

SEQ ID NO: 146406 - DNA, 25 bp, Canis familiaris
gtggatccaatttttcattaggctt

SEQ ID NO: 146407 - DNA, 25 bp, Canis familiaris
gtggtgggattttctatctaacttc

SEQ ID NO: 146408 - DNA, 25 bp, Canis familiaris
gtggtggcgaaatacactaatccca

SEQ ID NO: 146409 - DNA, 25 bp, Canis familiaris
gtggtatagaaatccctccacctgc

SEQ ID NO: 146410 - DNA, 25 bp, Canis familiaris
gtggttatagaagcccactacccct

SEQ ID NO: 146411 - DNA, 25 bp, Canis familiaris
gtggtgtaggaagtcgtagtaacaa

SEQ ID NO: 146412 - DNA, 25 bp, Canis familiaris
gtgggtgggaagacgctgttcacag

SEQ ID NO: 146413 - DNA, 25 bp, Canis familiaris
gtgtgtgtatgacattcctttaagg

SEQ ID NO: 146414 - DNA, 25 bp, Canis familiaris
gtgtgtgtgatatgatttcttttaa

SEQ ID NO: 146415 - DNA, 25 bp, Canis familiaris
gtgtgtgggttggtatttttataat

SEQ ID NO: 146416 - DNA, 25 bp, Canis familiaris
gtgggagcgaaagttttgttgaaat

SEQ ID NO: 146417 - DNA, 25 bp, Canis familiaris
gtgggcactatatctttagcttgca

SEQ ID NO: 146418 - DNA, 25 bp, Canis familiaris
gtgtggatgtattcaccttgaggaa

SEQ ID NO: 146419 - DNA, 25 bp, Canis familiaris
gtgtgtcgcatttactttgaccaat

SEQ ID NO: 146420 - DNA, 25 bp, Canis familiaris
gtgtgtggcttttttggacctctaa

SEQ ID NO: 146421 - DNA, 25 bp, Canis familiaris
gtgtgggactatttctggactctat

SEQ ID NO: 146422 - DNA, 25 bp, Canis familiaris
gtggtggacaaattcgtgggtatca

SEQ ID NO: 146423 - DNA, 25 bp, Canis familiaris
gtggtggtcacagatctggaggaat

SEQ ID NO: 146424 - DNA, 25 bp, Canis familiaris
gtgtgtggaacatagcgtatgtgct

SEQ ID NO: 146425 - DNA, 25 bp, Canis familiaris
gtgggcggacgaggagctttgtgca

SEQ ID NO: 146426 - DNA, 25 bp, Canis familiaris
gtggagggacgagtgtctcctgaga

SEQ ID NO: 146427 - DNA, 25 bp, Canis familiaris
gtgtgtgaggtccaagtgctaggag

SEQ ID NO: 146428 - DNA, 25 bp, Canis familiaris
gtgtgtgtgcgaccagagggagggc

SEQ ID NO: 146429 - DNA, 25 bp, Canis familiaris
gtgtgtgcagtaccataggccatcc

SEQ ID NO: 146430 - DNA, 25 bp, Canis familiaris
gtgggcagcagccagtaggctgatc

SEQ ID NO: 146431 - DNA, 25 bp, Canis familiaris
gtgtggcagccatgctggcctgtgc

SEQ ID NO: 146432 - DNA, 25 bp, Canis familiaris
gtgggatgccagtctgggcaagcgc

SEQ ID NO: 146433 - DNA, 25 bp, Canis familiaris
gtgggacacaacagcgacagcagct

SEQ ID NO: 146434 - DNA, 25 bp, Canis familiaris
gtgggtccagacctggcacaatcac

SEQ ID NO: 146435 - DNA, 25 bp, Canis familiaris
gtgggcccagagctgggacaacctc

SEQ ID NO: 146436 - DNA, 25 bp, Canis familiaris
gggacctgacagcagaaggaacctt

SEQ ID NO: 146437 - DNA, 25 bp, Canis familiaris
gtgggcaatgggcgaagagcaaggc

SEQ ID NO: 146438 - DNA, 25 bp, Canis familiaris
gtgggcgttgacgtgaagtgagacg

SEQ ID NO: 146439 - DNA, 25 bp, Canis familiaris
gtgggggctgctgtaatgatgaggg

SEQ ID NO: 146440 - DNA, 25 bp, Canis familiaris
gtgggtggctggatacatgacagcc

SEQ ID NO: 146441 - DNA, 25 bp, Canis familiaris
gtggttggctctaaggctggcaaga

SEQ ID NO: 146442 - DNA, 25 bp, Canis familiaris
gtggtaggtcttgagctcgtagagc

SEQ ID NO: 146443 - DNA, 25 bp, Canis familiaris
gtggtacagttaggactcagtctac

SEQ ID NO: 146444 - DNA, 25 bp, Canis familiaris
gtggttctttaggtcatatgttgcc

SEQ ID NO: 146445 - DNA, 25 bp, Canis familiaris
gtggttattctactgtgctgtttgc

SEQ ID NO: 146446 - DNA, 25 bp, Canis familiaris
gtggtttcctgcagctgagtttgaa

SEQ ID NO: 146447 - DNA, 25 bp, Canis familiaris
gtgtggttttgtttagtggagaatt

SEQ ID NO: 146448 - DNA, 25 bp, Canis familiaris
gtggttttctctttaaggaattatg

SEQ ID NO: 146449 - DNA, 25 bp, Canis familiaris
gtgggcctccttttataaatattat

SEQ ID NO: 146450 - DNA, 25 bp, Canis familiaris
gtgggcctcctttgctgagaagaaa

SEQ ID NO: 146451 - DNA, 25 bp, Canis familiaris
gtgtggcccctgaggagcaccctgt

SEQ ID NO: 146452 - DNA, 25 bp, Canis familiaris
gtgggccttctgaagggcacaaggc

SEQ ID NO: 146453 - DNA, 25 bp, Canis familiaris
gtgggcttggtgcaggtgaacatac

SEQ ID NO: 146454 - DNA, 25 bp, Canis familiaris
gtgggcttggtgcaggtgaacatac

SEQ ID NO: 146455 - DNA, 25 bp, Canis familiaris
gtgtggtgttgtgggagctaagcta

SEQ ID NO: 146456 - DNA, 25 bp, Canis familiaris
gtgtgtggtgttgtctgtatatgct

SEQ ID NO: 146457 - DNA, 25 bp, Canis familiaris
gtgtgtggatttgattcttactatt

SEQ ID NO: 146458 - DNA, 25 bp, Canis familiaris
gtgtgggtttcaattcccatccttc

SEQ ID NO: 146459 - DNA, 25 bp, Canis familiaris
gtgtggtttttttccattccattgg

SEQ ID NO: 146460 - DNA, 25 bp, Canis familiaris
gtgtgtgttctaatttcctctttga

SEQ ID NO: 146461 - DNA, 25 bp, Canis familiaris
gtgtggttccaaggtctcaatttca

SEQ ID NO: 146462 - DNA, 25 bp, Canis familiaris
gtggagtcccacatttgagattaat

SEQ ID NO: 146463 - DNA, 25 bp, Canis familiaris
gtggtgtccacaatctttagagtca

SEQ ID NO: 146464 - DNA, 25 bp, Canis familiaris
gtggggaaattcaagtggagacaaa

SEQ ID NO: 146465 - DNA, 25 bp, Canis familiaris
gtgtggcgaggatctgagggtgaag

SEQ ID NO: 146466 - DNA, 25 bp, Canis familiaris
gtgtggggagaactgcagctttgaa

SEQ ID NO: 146467 - DNA, 25 bp, Canis familiaris
gtgtggacagagaacggtctctcac

SEQ ID NO: 146468 - DNA, 25 bp, Canis familiaris
gtgggacaggacaggcattgcccca

SEQ ID NO: 146469 - DNA, 25 bp, Canis familiaris
gtgggagaggtcaccttcctctcac

SEQ ID NO: 146470 - DNA, 25 bp, Canis familiaris
gtgggaaagtcacccatttcctact

SEQ ID NO: 146471 - DNA, 25 bp, Canis familiaris
gtgggaaagacacctacttacacct

SEQ ID NO: 146472 - DNA, 25 bp, Canis familiaris
gggggagtcacagaacttaatcctc

SEQ ID NO: 146473 - DNA, 25 bp, Canis familiaris
gggtaattccatgatacccacaccc

SEQ ID NO: 146474 - DNA, 25 bp, Canis familiaris
tggactttactcagaaccgatcccc

SEQ ID NO: 146475 - DNA, 25 bp, Canis familiaris
gtggtgttactaaaacgcgataatc

SEQ ID NO: 146476 - DNA, 25 bp, Canis familiaris
gtgggtttcatcttaactcgaacat

SEQ ID NO: 146477 - DNA, 25 bp, Canis familiaris
gtgggtttctcagacttctgactcc

SEQ ID NO: 146478 - DNA, 25 bp, Canis familiaris
gtggagtacccagagttgtgttagg

SEQ ID NO: 146479 - DNA, 25 bp, Canis familiaris
gtggtctacaaaaatgttgtttgtg

SEQ ID NO: 146480 - DNA, 25 bp, Canis familiaris
gtggtcttgagatttttatttttgc

SEQ ID NO: 146481 - DNA, 25 bp, Canis familiaris
gtggtgatcacgtgttggtttttta

SEQ ID NO: 146482 - DNA, 25 bp, Canis familiaris
gtggtgatcaagtgctttttccgtg

SEQ ID NO: 146483 - DNA, 25 bp, Canis familiaris
gtgtgtgtctatttgtttatctctc

SEQ ID NO: 146484 - DNA, 25 bp, Canis familiaris
ggtggccagatagggctttcctaca

SEQ ID NO: 146485 - DNA, 25 bp, Canis familiaris
gtgggtcgaacggtcattcagatcc

SEQ ID NO: 146486 - DNA, 25 bp, Canis familiaris
gtgtggcaggagaggtcattgagca

SEQ ID NO: 146487 - DNA, 25 bp, Canis familiaris
gtgtggatggtgttgggctgtagcc

SEQ ID NO: 146488 - DNA, 25 bp, Canis familiaris
gtgggatgggtctgaggtacaacga

SEQ ID NO: 146489 - DNA, 25 bp, Canis familiaris
gtgtgtgtgggttcatggtctaaaa

SEQ ID NO: 146490 - DNA, 25 bp, Canis familiaris
gtggtttggatatggttggagtagc

SEQ ID NO: 146491 - DNA, 25 bp, Canis familiaris
gtggtctagatttagcttggggtcc

SEQ ID NO: 146492 - DNA, 25 bp, Canis familiaris
gtgggtatcttatgcttccaagtct

SEQ ID NO: 146493 - DNA, 25 bp, Canis familiaris
gtggggacttgatcctcaacatccc

SEQ ID NO: 146494 - DNA, 25 bp, Canis familiaris
gtgggggttgaagccaaacagccaa

SEQ ID NO: 146495 - DNA, 25 bp, Canis familiaris
gtgggggtggggggaacacaggcat

SEQ ID NO: 146496 - DNA, 25 bp, Canis familiaris
gtgggggcggttgtgaagatgcggt

SEQ ID NO: 146497 - DNA, 25 bp, Canis familiaris
gtgggggcagaggaattcaaaggga

SEQ ID NO: 146498 - DNA, 25 bp, Canis familiaris
gtggggggatgggattgcaacgtgc

SEQ ID NO: 146499 - DNA, 25 bp, Canis familiaris
gtggggatgagtgacttgacctgtg

SEQ ID NO: 146500 - DNA, 25 bp, Canis familiaris
gtgggattgagttaatttgcttggt

SEQ ID NO: 146501 - DNA, 25 bp, Canis familiaris
gggaattgttataagaccattttag

SEQ ID NO: 146502 - DNA, 25 bp, Canis familiaris
gggctctttatttatgacgacttta

SEQ ID NO: 146503 - DNA, 25 bp, Canis familiaris
gtggcacttttataacgggttggag

SEQ ID NO: 146504 - DNA, 25 bp, Canis familiaris
gggccagtctttcaacctggttagt

SEQ ID NO: 146505 - DNA, 25 bp, Canis familiaris
gggccttccttgcaacttggaaatt

SEQ ID NO: 146506 - DNA, 25 bp, Canis familiaris
gggcttactattcaactgtggatca

SEQ ID NO: 146507 - DNA, 25 bp, Canis familiaris
gtggatctgacgtgccgcctggaga

SEQ ID NO: 146508 - DNA, 25 bp, Canis familiaris
gtggatcaactgtgtcaccaggtca

SEQ ID NO: 146509 - DNA, 25 bp, Canis familiaris
gtgggaacgagagtcaccagtccag

SEQ ID NO: 146510 - DNA, 25 bp, Canis familiaris
gtgggaactaggatccactctgctg

SEQ ID NO: 146511 - DNA, 25 bp, Canis familiaris
gtggatgacttcagttcagaccctg

SEQ ID NO: 146512 - DNA, 25 bp, Canis familiaris
gtggatttacggtgcagactgcctt

SEQ ID NO: 146513 - DNA, 25 bp, Canis familiaris
gtggacgataggcataatactgttt

SEQ ID NO: 146514 - DNA, 25 bp, Canis familiaris
gggacttgagcacgtaataggtatt

SEQ ID NO: 146515 - DNA, 25 bp, Canis familiaris
ggtccttggacccatttggtcttat

SEQ ID NO: 146516 - DNA, 25 bp, Canis familiaris
ggtcctagctggggttttgttgagt

SEQ ID NO: 146517 - DNA, 25 bp, Canis familiaris
gtggcagccgggggtgttagttaat

SEQ ID NO: 146518 - DNA, 25 bp, Canis familiaris
gtggccacgaagggagccttcttaa

SEQ ID NO: 146519 - DNA, 25 bp, Canis familiaris
gtgggactgcattgggagcacttcc

SEQ ID NO: 146520 - DNA, 25 bp, Canis familiaris
gtgtggccgtggagaactccaccga

SEQ ID NO: 146521 - DNA, 25 bp, Canis familiaris
gtgtgtggccgtggagaactccacc

SEQ ID NO: 146522 - DNA, 25 bp, Canis familiaris
gtggtggcggctggagcaagactca

SEQ ID NO: 146523 - DNA, 25 bp, Canis familiaris
gtggcaggtggctggtagatctaac

SEQ ID NO: 146524 - DNA, 25 bp, Canis familiaris
gtgggtgtgcagtgctgtgaggtat

SEQ ID NO: 146525 - DNA, 25 bp, Canis familiaris
gtgggcgcacagagattgagcgtct

SEQ ID NO: 146526 - DNA, 25 bp, Canis familiaris
gtggtgcgaaatcattggtggcaat

SEQ ID NO: 146527 - DNA, 25 bp, Canis familiaris
gtgggctacactctgtggttgaaac

SEQ ID NO: 146528 - DNA, 25 bp, Canis familiaris
gtggggaagcatttgttattaaact

SEQ ID NO: 146529 - DNA, 25 bp, Canis familiaris
gtgggtggcagttttttctagttct

SEQ ID NO: 146530 - DNA, 25 bp, Canis familiaris
gtgggccggtattttttggtcatga

SEQ ID NO: 146531 - DNA, 25 bp, Canis familiaris
gtgggcccgagcatttgtattgaca

SEQ ID NO: 146532 - DNA, 25 bp, Canis familiaris
gtgggccaccagatgactttagatg

SEQ ID NO: 146533 - DNA, 25 bp, Canis familiaris
gtgggccacaagagttcttatgtgc

SEQ ID NO: 146534 - DNA, 25 bp, Canis familiaris
gtgtggttcggatgttcttgcatgc

SEQ ID NO: 146535 - DNA, 25 bp, Canis familiaris
gtgtggtgtcggtggtatcgtgaat

SEQ ID NO: 146536 - DNA, 25 bp, Canis familiaris
gtggtctgtcgtgaaattatgtaat

SEQ ID NO: 146537 - DNA, 25 bp, Canis familiaris
gtgggtggggaagcatttgttatta

SEQ ID NO: 146538 - DNA, 25 bp, Canis familiaris
gtgggaggggaatcttgtgtgtact

SEQ ID NO: 146539 - DNA, 25 bp, Canis familiaris
gtggggggcagacactgtggttcaa

SEQ ID NO: 146540 - DNA, 25 bp, Canis familiaris
gtgtgggggtgtcactgtgaggcca

SEQ ID NO: 146541 - DNA, 25 bp, Canis familiaris
gtgtgggggatgatcagctggggga

SEQ ID NO: 146542 - DNA, 25 bp, Canis familiaris
gtggcagggggagcggggagaagtc

SEQ ID NO: 146543 - DNA, 25 bp, Canis familiaris
gtgggaggggaggtgggggaagctg

SEQ ID NO: 146544 - DNA, 25 bp, Canis familiaris
gtgggtggggcgggagaggaaatat

SEQ ID NO: 146545 - DNA, 25 bp, Canis familiaris
gggcttggggagggaggctcaactg

SEQ ID NO: 146546 - DNA, 25 bp, Canis familiaris
gggcttgaagccagtagggacctac

SEQ ID NO: 146547 - DNA, 25 bp, Canis familiaris
gggctcagaaaatctcgtggatcct

SEQ ID NO: 146548 - DNA, 25 bp, Canis familiaris
gggcacaattgaaagctacattatc

SEQ ID NO: 146549 - DNA, 25 bp, Canis familiaris
gtggcaaaggaactctactcttggt

SEQ ID NO: 146550 - DNA, 25 bp, Canis familiaris
gtggtacaggaactgccactacgcc

SEQ ID NO: 146551 - DNA, 25 bp, Canis familiaris
gtggttcgggttccagctgatagtc

SEQ ID NO: 146552 - DNA, 25 bp, Canis familiaris
gtgggtcgtgggtgagtattgtctc

SEQ ID NO: 146553 - DNA, 25 bp, Canis familiaris
gtgggtgggttacagcttgctgttc

SEQ ID NO: 146554 - DNA, 25 bp, Canis familiaris
gtggggaggttaagagcattttgca

SEQ ID NO: 146555 - DNA, 25 bp, Canis familiaris
gtggtagaccttatggcatttggcc

SEQ ID NO: 146556 - DNA, 25 bp, Canis familiaris
gtgggataccctgtggtgtgcccac

SEQ ID NO: 146557 - DNA, 25 bp, Canis familiaris
gtgggagactctgcttgggatccac

SEQ ID NO: 146558 - DNA, 25 bp, Canis familiaris
gtggtgttttacatggtgactcaca

SEQ ID NO: 146559 - DNA, 25 bp, Canis familiaris
gtggttttttgccttgagagtagca

SEQ ID NO: 146560 - DNA, 25 bp, Canis familiaris
gtggtctcctctaggatggaggtcc

SEQ ID NO: 146561 - DNA, 25 bp, Canis familiaris
gtgggtcagtgtctgcatggagtgt

SEQ ID NO: 146562 - DNA, 25 bp, Canis familiaris
gtgggctgagttctctggaggcccc

SEQ ID NO: 146563 - DNA, 25 bp, Canis familiaris
gtggagtgtgggaacgtgggcctgc

SEQ ID NO: 146564 - DNA, 25 bp, Canis familiaris
gtgggtgatgggatgggctggcccc

SEQ ID NO: 146565 - DNA, 25 bp, Canis familiaris
gtggggatagcgatgctgaggaccc

SEQ ID NO: 146566 - DNA, 25 bp, Canis familiaris
gtgggaaatgcaacatgtggtgaaa

SEQ ID NO: 146567 - DNA, 25 bp, Canis familiaris
gtgggaaaacagatgggagcaaaac

SEQ ID NO: 146568 - DNA, 25 bp, Canis familiaris
gtggtgacggagtttgggacagaaa

SEQ ID NO: 146569 - DNA, 25 bp, Canis familiaris
gtggtgacggtgcatctggagaaga

SEQ ID NO: 146570 - DNA, 25 bp, Canis familiaris
gtggtggggggcatcagagcagcca

SEQ ID NO: 146571 - DNA, 25 bp, Canis familiaris
gtgggggcagggaaaatgccctggg

SEQ ID NO: 146572 - DNA, 25 bp, Canis familiaris
gtgggaggtgggtagcctccctggg

SEQ ID NO: 146573 - DNA, 25 bp, Canis familiaris
gtgggggatcgggagagtccactcg

SEQ ID NO: 146574 - DNA, 25 bp, Canis familiaris
gtggtcggtccggtggataatccag

SEQ ID NO: 146575 - DNA, 25 bp, Canis familiaris
gtggtctcaccagagtggctaaagg

SEQ ID NO: 146576 - DNA, 25 bp, Canis familiaris
gtggtctacgagttctgggagacgg

SEQ ID NO: 146577 - DNA, 25 bp, Canis familiaris
gtggtcaactgggcactggagaagc

SEQ ID NO: 146578 - DNA, 25 bp, Canis familiaris
gtgggcgacgaggcccagagcaagc

SEQ ID NO: 146579 - DNA, 25 bp, Canis familiaris
gtggggcacgcaacaaaggcagagc

SEQ ID NO: 146580 - DNA, 25 bp, Canis familiaris
gtggggaacacagatctggcaagcc

SEQ ID NO: 146581 - DNA, 25 bp, Canis familiaris
gtgggtgcagatgccaactagccag

SEQ ID NO: 146582 - DNA, 25 bp, Canis familiaris
gtgggatgccatgcgaatcccacac

SEQ ID NO: 146583 - DNA, 25 bp, Canis familiaris
gtgggatctcacatgaaggccagca

SEQ ID NO: 146584 - DNA, 25 bp, Canis familiaris
gtgggattatgactgaacgcctcta

SEQ ID NO: 146585 - DNA, 25 bp, Canis familiaris
gtggtggtgtcagtgaacgctctgt

SEQ ID NO: 146586 - DNA, 25 bp, Canis familiaris
gtgggggtgactggacgtgattgac

SEQ ID NO: 146587 - DNA, 25 bp, Canis familiaris
gtgggagattgaagcccgtcttaca

SEQ ID NO: 146588 - DNA, 25 bp, Canis familiaris
gtgggacatccaagaacgttctcct

SEQ ID NO: 146589 - DNA, 25 bp, Canis familiaris
gtggtgatcacctagagacaacata

SEQ ID NO: 146590 - DNA, 25 bp, Canis familiaris
gtggtctcacaagcatgacagccag

SEQ ID NO: 146591 - DNA, 25 bp, Canis familiaris
gtgggcaacagtgctacacacgagc

SEQ ID NO: 146592 - DNA, 25 bp, Canis familiaris
gtgggagatcctggtgtcagagcgg

SEQ ID NO: 146593 - DNA, 25 bp, Canis familiaris
gtgggcatcatggtggtgtcgtgca

SEQ ID NO: 146594 - DNA, 25 bp, Canis familiaris
gtgggctcatcattgtgggtgtaac

SEQ ID NO: 146595 - DNA, 25 bp, Canis familiaris
gtgggctcatcatagtggctgtgac

SEQ ID NO: 146596 - DNA, 25 bp, Canis familiaris
gtggagctgtcagtattgcctgcaa

SEQ ID NO: 146597 - DNA, 25 bp, Canis familiaris
gtgggctgtgctgtaccacacagag

SEQ ID NO: 146598 - DNA, 25 bp, Canis familiaris
gtggatgattgtgtatcccctaccc

SEQ ID NO: 146599 - DNA, 25 bp, Canis familiaris
gtggagattgggaaccccacctata

SEQ ID NO: 146600 - DNA, 25 bp, Canis familiaris
gtggagttctggaggactccctttc

SEQ ID NO: 146601 - DNA, 25 bp, Canis familiaris
gtgggacttgacaggagtctcattt

SEQ ID NO: 146602 - DNA, 25 bp, Canis familiaris
gtggtacaagacatccaggctatgg

SEQ ID NO: 146603 - DNA, 25 bp, Canis familiaris
gtgggccaggacgacaaggctcagg

SEQ ID NO: 146604 - DNA, 25 bp, Canis familiaris
gtggacctggaggcagcatatagct

SEQ ID NO: 146605 - DNA, 25 bp, Canis familiaris
gtggacactgagcaactctgactct

SEQ ID NO: 146606 - DNA, 25 bp, Canis familiaris
gtggtactgatcgtcatattccctt

SEQ ID NO: 146607 - DNA, 25 bp, Canis familiaris
gtggtactgatcgtcatattccctt

SEQ ID NO: 146608 - DNA, 25 bp, Canis familiaris
gtggtgtgtgatggtcaaccctctt

SEQ ID NO: 146609 - DNA, 25 bp, Canis familiaris
gtgggtgattcaatctatccctctg

SEQ ID NO: 146610 - DNA, 25 bp, Canis familiaris
gtgggagtacagacctctccattct

SEQ ID NO: 146611 - DNA, 25 bp, Canis familiaris
gtggagttcaaagctttcttctaag

SEQ ID NO: 146612 - DNA, 25 bp, Canis familiaris
gtggtgttcacgaacttctgtctct

SEQ ID NO: 146613 - DNA, 25 bp, Canis familiaris
gtggtgttaatggactgtggtgctt

SEQ ID NO: 146614 - DNA, 25 bp, Canis familiaris
gtggattttatgtgtctgtggcttt

SEQ ID NO: 146615 - DNA, 25 bp, Canis familiaris
gtgggctttattatatgtgctgctg

SEQ ID NO: 146616 - DNA, 25 bp, Canis familiaris
gtgggtgctgtgattctgaaggctg

SEQ ID NO: 146617 - DNA, 25 bp, Canis familiaris
gtggggatgcaggtggctgacaggc

SEQ ID NO: 146618 - DNA, 25 bp, Canis familiaris
gtggggccagcgtggactggatgtc

SEQ ID NO: 146619 - DNA, 25 bp, Canis familiaris
gtggaatccacgatgggtggctatc

SEQ ID NO: 146620 - DNA, 25 bp, Canis familiaris
gtggaaacacgtatgaaccattcta

SEQ ID NO: 146621 - DNA, 25 bp, Canis familiaris
gtggacaagccgaggaccacggctt

SEQ ID NO: 146622 - DNA, 25 bp, Canis familiaris
gtggaaaccagaaggctcaactggt

SEQ ID NO: 146623 - DNA, 25 bp, Canis familiaris
gtggaggacagattaggtaactttt

SEQ ID NO: 146624 - DNA, 25 bp, Canis familiaris
gtgggctcaaactagctgtgaacgt

SEQ ID NO: 146625 - DNA, 25 bp, Canis familiaris
gtgggccaacatgggtgttcagatg

SEQ ID NO: 146626 - DNA, 25 bp, Canis familiaris
gtgggcctttcaggttactgtgtga

SEQ ID NO: 146627 - DNA, 25 bp, Canis familiaris
gtgggttttcatcttttgttgttgc

SEQ ID NO: 146628 - DNA, 25 bp, Canis familiaris
gtgggtgttgtgctatttaattttg

SEQ ID NO: 146629 - DNA, 25 bp, Canis familiaris
gtgggtgtttagttttcagcttaca

SEQ ID NO: 146630 - DNA, 25 bp, Canis familiaris
gtgggtttgttgtggtcactctgac

SEQ ID NO: 146631 - DNA, 25 bp, Canis familiaris
gtgggatttctacagattcacttgt

SEQ ID NO: 146632 - DNA, 25 bp, Canis familiaris
gtgggattttgagagcatttttgga

SEQ ID NO: 146633 - DNA, 25 bp, Canis familiaris
gtggttcttgttgggcttttagtgc

SEQ ID NO: 146634 - DNA, 25 bp, Canis familiaris
gtggttagtgttagagttcttaagc

SEQ ID NO: 146635 - DNA, 25 bp, Canis familiaris
gtgggctagtgtgtaattcttgaac

SEQ ID NO: 146636 - DNA, 25 bp, Canis familiaris
gtggtgtttgatgtcacctctggaa

SEQ ID NO: 146637 - DNA, 25 bp, Canis familiaris
gtggtctctgtgggtcagatctatg

SEQ ID NO: 146638 - DNA, 25 bp, Canis familiaris
gtggtgctgtggtcttgcaatggac

SEQ ID NO: 146639 - DNA, 25 bp, Canis familiaris
gtggggttgcctagcttggatagaa

SEQ ID NO: 146640 - DNA, 25 bp, Canis familiaris
gtggggtatggaatgctctggcatg

SEQ ID NO: 146641 - DNA, 25 bp, Canis familiaris
gtgggtggagggatgtggtggaaaa

SEQ ID NO: 146642 - DNA, 25 bp, Canis familiaris
gtggtgtgtgggagtggggagcaaa

SEQ ID NO: 146643 - DNA, 25 bp, Canis familiaris
gtggtgagggggcctgggagagcac

SEQ ID NO: 146644 - DNA, 25 bp, Canis familiaris
gtggttgtctgcagactcgggagca

SEQ ID NO: 146645 - DNA, 25 bp, Canis familiaris
gggattcccggatcgaaggcgaaga

SEQ ID NO: 146646 - DNA, 25 bp, Canis familiaris
gggatttcccatgccggggagaagt

SEQ ID NO: 146647 - DNA, 25 bp, Canis familiaris
gtggaggtccccatcgtggggaaca

SEQ ID NO: 146648 - DNA, 25 bp, Canis familiaris
gtggaggttcccatgggtcggagac

SEQ ID NO: 146649 - DNA, 25 bp, Canis familiaris
gtggaggtcctcactgaggtgccag

SEQ ID NO: 146650 - DNA, 25 bp, Canis familiaris
gtggaggagaacagctccttgtcag

SEQ ID NO: 146651 - DNA, 25 bp, Canis familiaris
gtggcagggaactgggtatccttgg

SEQ ID NO: 146652 - DNA, 25 bp, Canis familiaris
gtgggaggaacagggaggcctcctg

SEQ ID NO: 146653 - DNA, 25 bp, Canis familiaris
gtgggaagaaaatgggcacactttt

SEQ ID NO: 146654 - DNA, 25 bp, Canis familiaris
gtgggaagacaccaagccaactttt

SEQ ID NO: 146655 - DNA, 25 bp, Canis familiaris
gtggggcgcaaggatgagctctgac

SEQ ID NO: 146656 - DNA, 25 bp, Canis familiaris
gtgggtgcgcaaaatcctatgataa

SEQ ID NO: 146657 - DNA, 25 bp, Canis familiaris
gtgggtgagaaaacacacatatgca

SEQ ID NO: 146658 - DNA, 25 bp, Canis familiaris
gtggcagtgggagacccatgacccc

SEQ ID NO: 146659 - DNA, 25 bp, Canis familiaris
gtgggtggagatgcactccatgtct

SEQ ID NO: 146660 - DNA, 25 bp, Canis familiaris
gtggaacgatgaggtcccactcttt

SEQ ID NO: 146661 - DNA, 25 bp, Canis familiaris
gtgggacttgagcacgtaataggta

SEQ ID NO: 146662 - DNA, 25 bp, Canis familiaris
ggggcaatctagctgccttaaggac

SEQ ID NO: 146663 - DNA, 25 bp, Canis familiaris
gtgggacaaagcaaccctacacgat

SEQ ID NO: 146664 - DNA, 25 bp, Canis familiaris
gggcgactaggagacgctacgcacc

SEQ ID NO: 146665 - DNA, 25 bp, Canis familiaris
gtggtccttgtaaagctgtacagac

SEQ ID NO: 146666 - DNA, 25 bp, Canis familiaris
gtggtccttggggagcttagaaagt

SEQ ID NO: 146667 - DNA, 25 bp, Canis familiaris
gtggtggtgaaggggctgtagaaaa

SEQ ID NO: 146668 - DNA, 25 bp, Canis familiaris
gtggtggctgagtgtggctgccaga

SEQ ID NO: 146669 - DNA, 25 bp, Canis familiaris
gtgggagctaaatgagctgcagcta

SEQ ID NO: 146670 - DNA, 25 bp, Canis familiaris
gtggggtatagatcaccagcttccc

SEQ ID NO: 146671 - DNA, 25 bp, Canis familiaris
gtggggttgaagcccaacagcccaa

SEQ ID NO: 146672 - DNA, 25 bp, Canis familiaris
gtgggagaaaacgtacaggcccgat

SEQ ID NO: 146673 - DNA, 25 bp, Canis familiaris
gtggtgaaatgttcccacggccatc

SEQ ID NO: 146674 - DNA, 25 bp, Canis familiaris
gtggagaaatagactcccggcacca

SEQ ID NO: 146675 - DNA, 25 bp, Canis familiaris
gtggggaagagttgccacccacatc

SEQ ID NO: 146676 - DNA, 25 bp, Canis familiaris
gtggcggaaaggtgacatcgtaagg

SEQ ID NO: 146677 - DNA, 25 bp, Canis familiaris
gtggggaccagggaacgtgtcaacg

SEQ ID NO: 146678 - DNA, 25 bp, Canis familiaris
gtgggaacctggaaacagtaaacat

SEQ ID NO: 146679 - DNA, 25 bp, Canis familiaris
gtgggaccacattaaactgaaaagc

SEQ ID NO: 146680 - DNA, 25 bp, Canis familiaris
gtgggaccgagacaactgactagca

SEQ ID NO: 146681 - DNA, 25 bp, Canis familiaris
gtggttctggaacaaccctgagctg

SEQ ID NO: 146682 - DNA, 25 bp, Canis familiaris
gtggttgctacaaaaaccctgacac

SEQ ID NO: 146683 - DNA, 25 bp, Canis familiaris
gtgggtcgaatcaacttcccgacca

SEQ ID NO: 146684 - DNA, 25 bp, Canis familiaris
gtgggttatctcatgatctcccgac

SEQ ID NO: 146685 - DNA, 25 bp, Canis familiaris
gtgggtttatcattgtcttcagctc

SEQ ID NO: 146686 - DNA, 25 bp, Canis familiaris
gtgggatttatcttggtttgctgat

SEQ ID NO: 146687 - DNA, 25 bp, Canis familiaris
gtggtatttgtctttgcaatcctct

SEQ ID NO: 146688 - DNA, 25 bp, Canis familiaris
gtggtcaatatcgtggtaatcgcta

SEQ ID NO: 146689 - DNA, 25 bp, Canis familiaris
gtggtcaatgacagacatgaaccta

SEQ ID NO: 146690 - DNA, 25 bp, Canis familiaris
gtgggaatctccccagatacccaca

SEQ ID NO: 146691 - DNA, 25 bp, Canis familiaris
gtggtgcacatgtactccagtaccc

SEQ ID NO: 146692 - DNA, 25 bp, Canis familiaris
gtggaggcatcaactccatggtcca

SEQ ID NO: 146693 - DNA, 25 bp, Canis familiaris
gtggaggttcctacagagattcata

SEQ ID NO: 146694 - DNA, 25 bp, Canis familiaris
gtggggctgttgttcagtgttcagt

SEQ ID NO: 146695 - DNA, 25 bp, Canis familiaris
gtgggtcttagttcattttctatac

SEQ ID NO: 146696 - DNA, 25 bp, Canis familiaris
gtgggacatgtttgtttcttccata

SEQ ID NO: 146697 - DNA, 25 bp, Canis familiaris
gtggagacatttttgtcttgtccca

SEQ ID NO: 146698 - DNA, 25 bp, Canis familiaris
gtggatatcatcatactgcctatct

SEQ ID NO: 146699 - DNA, 25 bp, Canis familiaris
gtggattgctgcattctacttcact

SEQ ID NO: 146700 - DNA, 25 bp, Canis familiaris
gtggcttctgacttctagaagactt

SEQ ID NO: 146701 - DNA, 25 bp, Canis familiaris
gtggtgctctgtattgtgaaacttt

SEQ ID NO: 146702 - DNA, 25 bp, Canis familiaris
gtgggtccaatgttgtcagccactt

SEQ ID NO: 146703 - DNA, 25 bp, Canis familiaris
gtgggtgccattggagccagtagtt

SEQ ID NO: 146704 - DNA, 25 bp, Canis familiaris
gtgggagcttgtggcgaagatggtt

SEQ ID NO: 146705 - DNA, 25 bp, Canis familiaris
gtggtagtcctcgatgaagcatgtg

SEQ ID NO: 146706 - DNA, 25 bp, Canis familiaris
gtggattgccctcatgacaattgtc

SEQ ID NO: 146707 - DNA, 25 bp, Canis familiaris
gtggtctcgcctggaggcaagaggg

SEQ ID NO: 146708 - DNA, 25 bp, Canis familiaris
gtggtttccatggggaagctgactg

SEQ ID NO: 146709 - DNA, 25 bp, Canis familiaris
gtggtttggtcaatggagctgctga

SEQ ID NO: 146710 - DNA, 25 bp, Canis familiaris
gtgggttgttctagtactgtatttg

SEQ ID NO: 146711 - DNA, 25 bp, Canis familiaris
gtgggattgctcctatccattttat

SEQ ID NO: 146712 - DNA, 25 bp, Canis familiaris
gtgggatatctgcaatctgccattg

SEQ ID NO: 146713 - DNA, 25 bp, Canis familiaris
gtgggtacaggaatctgccatctac

SEQ ID NO: 146714 - DNA, 25 bp, Canis familiaris
gtgggtgtaacaattgtgatcctca

SEQ ID NO: 146715 - DNA, 25 bp, Canis familiaris
gtgggagaaataatttgcccttagc

SEQ ID NO: 146716 - DNA, 25 bp, Canis familiaris
gtgggagagcactgtgcattgcccg

SEQ ID NO: 146717 - DNA, 25 bp, Canis familiaris
gtgggagaacaatgctgtgccggag

SEQ ID NO: 146718 - DNA, 25 bp, Canis familiaris
gtggaggagacttggtgtccaacag

SEQ ID NO: 146719 - DNA, 25 bp, Canis familiaris
gtggtgaatgactggtgtgccttct

SEQ ID NO: 146720 - DNA, 25 bp, Canis familiaris
gtggtgaggaaccgaggtctctgcc

SEQ ID NO: 146721 - DNA, 25 bp, Canis familiaris
gtggggaacactcatggagctctac

SEQ ID NO: 146722 - DNA, 25 bp, Canis familiaris
gtggggaatacacttgttattacta

SEQ ID NO: 146723 - DNA, 25 bp, Canis familiaris
gtggggatgttgctttgtcatgtac

SEQ ID NO: 146724 - DNA, 25 bp, Canis familiaris
gtgggtatgtcttactttagtagct

SEQ ID NO: 146725 - DNA, 25 bp, Canis familiaris
gtggaggatgtcttccttcggaagt

SEQ ID NO: 146726 - DNA, 25 bp, Canis familiaris
gtggagttgtgttccctcatagaaa

SEQ ID NO: 146727 - DNA, 25 bp, Canis familiaris
gtggattggtgttccagctttggcc

SEQ ID NO: 146728 - DNA, 25 bp, Canis familiaris
gtggatcggtggctccatcttggcc

SEQ ID NO: 146729 - DNA, 25 bp, Canis familiaris
gtggatcggtggctccatcttggcc

SEQ ID NO: 146730 - DNA, 25 bp, Canis familiaris
gtggagtgaaggctcgtcgaggccg

SEQ ID NO: 146731 - DNA, 25 bp, Canis familiaris
gtgggtgacattatggtggcagggg

SEQ ID NO: 146732 - DNA, 25 bp, Canis familiaris
gtggaggtctcgactggtcgggatg

SEQ ID NO: 146733 - DNA, 25 bp, Canis familiaris
gtggtggtgttgacatgggcagggg

SEQ ID NO: 146734 - DNA, 25 bp, Canis familiaris
gtgggttagctgacatgggcgatgg

SEQ ID NO: 146735 - DNA, 25 bp, Canis familiaris
gtggggagagcgacagtgaggagga

SEQ ID NO: 146736 - DNA, 25 bp, Canis familiaris
gtggggagaggatgctgggagggag

SEQ ID NO: 146737 - DNA, 25 bp, Canis familiaris
gtggtggtcaggagccaggaggggc

SEQ ID NO: 146738 - DNA, 25 bp, Canis familiaris
gtggtcagtcacctaggaacgggac

SEQ ID NO: 146739 - DNA, 25 bp, Canis familiaris
gtggggtagagctaggaattgggat

SEQ ID NO: 146740 - DNA, 25 bp, Canis familiaris
gtggagttcaggggagcgatctagc

SEQ ID NO: 146741 - DNA, 25 bp, Canis familiaris
gtggtttatggcaagatctacaagg

SEQ ID NO: 146742 - DNA, 25 bp, Canis familiaris
gtggtgctttccagaataaaggttg

SEQ ID NO: 146743 - DNA, 25 bp, Canis familiaris
gtggtttctccctgcaaatagattt

SEQ ID NO: 146744 - DNA, 25 bp, Canis familiaris
gtggggtctttctatcatgactagt

SEQ ID NO: 146745 - DNA, 25 bp, Canis familiaris
gtgggactcttagacatgaccaagc

SEQ ID NO: 146746 - DNA, 25 bp, Canis familiaris
gtgggatcctacaaccaagacgatg

SEQ ID NO: 146747 - DNA, 25 bp, Canis familiaris
gtggacatcggatacccaaggagat

SEQ ID NO: 146748 - DNA, 25 bp, Canis familiaris
gtggtacgggaaaaaggctgcagct

SEQ ID NO: 146749 - DNA, 25 bp, Canis familiaris
gtggtaccgggttaagtcagcagag

SEQ ID NO: 146750 - DNA, 25 bp, Canis familiaris
gggtaggagttttacactagctagt

SEQ ID NO: 146751 - DNA, 25 bp, Canis familiaris
gtggtatggacaaccttcctagtga

SEQ ID NO: 146752 - DNA, 25 bp, Canis familiaris
gtggtatcaaccagttcctttatat

SEQ ID NO: 146753 - DNA, 25 bp, Canis familiaris
gtggtacacaactggagcctttact

SEQ ID NO: 146754 - DNA, 25 bp, Canis familiaris
gtggtacacaaaaggactaccgatt

SEQ ID NO: 146755 - DNA, 25 bp, Canis familiaris
gtggacacaaatgaggacaaccagg

SEQ ID NO: 146756 - DNA, 25 bp, Canis familiaris
gtggtcagaccaggaggcaagccca

SEQ ID NO: 146757 - DNA, 25 bp, Canis familiaris
gtgggatgactggcagggtagccta

SEQ ID NO: 146758 - DNA, 25 bp, Canis familiaris
gtggaatcgctgggtcgtatggtaa

SEQ ID NO: 146759 - DNA, 25 bp, Canis familiaris
gtggaatggtctgattatatggtta

SEQ ID NO: 146760 - DNA, 25 bp, Canis familiaris
gtgggtggtttaaatgagctctgtt

SEQ ID NO: 146761 - DNA, 25 bp, Canis familiaris
gtggagtgttgagaccagacttctt

SEQ ID NO: 146762 - DNA, 25 bp, Canis familiaris
gtgggttttttggcagccttctgat

SEQ ID NO: 146763 - DNA, 25 bp, Canis familiaris
gtggagcttttatttggacgttgtc

SEQ ID NO: 146764 - DNA, 25 bp, Canis familiaris
gtggcatttatttttggaagtgtct

SEQ ID NO: 146765 - DNA, 25 bp, Canis familiaris
gtggctgttctatctgggacagtga

SEQ ID NO: 146766 - DNA, 25 bp, Canis familiaris
gtggggatctagaccagcaaatctg

SEQ ID NO: 146767 - DNA, 25 bp, Canis familiaris
gtggagtatatcacccataatcgga

SEQ ID NO: 146768 - DNA, 25 bp, Canis familiaris
gtgggtcaaccccactgttcgagaa

SEQ ID NO: 146769 - DNA, 25 bp, Canis familiaris
gggctggaaccaggaagattcggaa

SEQ ID NO: 146770 - DNA, 25 bp, Canis familiaris
gtggggaactcaggagcatttgcca

SEQ ID NO: 146771 - DNA, 25 bp, Canis familiaris
gtggggaaatcatagatgtcttcaa

SEQ ID NO: 146772 - DNA, 25 bp, Canis familiaris
gtgggtggattatctaggtctagag

SEQ ID NO: 146773 - DNA, 25 bp, Canis familiaris
gtgggggagttgtctaatggtcata

SEQ ID NO: 146774 - DNA, 25 bp, Canis familiaris
gtggactcgtttttagatggtcgca

SEQ ID NO: 146775 - DNA, 25 bp, Canis familiaris
gtggtctccacctgaagattatcga

SEQ ID NO: 146776 - DNA, 25 bp, Canis familiaris
gtggtctccaccaaaaaccagggct

SEQ ID NO: 146777 - DNA, 25 bp, Canis familiaris
gtggttcgaccagcagaacgggcgc

SEQ ID NO: 146778 - DNA, 25 bp, Canis familiaris
gtgggttgtccatcaaagcagtgga

SEQ ID NO: 146779 - DNA, 25 bp, Canis familiaris
gtgggtacccatacaagcgaggaga

SEQ ID NO: 146780 - DNA, 25 bp, Canis familiaris
gtggaggaccctatagcaaacagta

SEQ ID NO: 146781 - DNA, 25 bp, Canis familiaris
gtggtgtgaccctgttcaattataa

SEQ ID NO: 146782 - DNA, 25 bp, Canis familiaris
gtggggtcctgagtgtagaatgtta

SEQ ID NO: 146783 - DNA, 25 bp, Canis familiaris
gtggtcactccttttaacagttgaa

SEQ ID NO: 146784 - DNA, 25 bp, Canis familiaris
gtggagacactcttttaaagtctaa

SEQ ID NO: 146785 - DNA, 25 bp, Canis familiaris
gtggatacactcttgttaaagtcta

SEQ ID NO: 146786 - DNA, 25 bp, Canis familiaris
gtggaaccatttctatcgagattac

SEQ ID NO: 146787 - DNA, 25 bp, Canis familiaris
gtggctacctttcatgtccaaaatg

SEQ ID NO: 146788 - DNA, 25 bp, Canis familiaris
gtggtctttttctattccaaatgtt

SEQ ID NO: 146789 - DNA, 25 bp, Canis familiaris
gtggttctgttattacttgcaagtt

SEQ ID NO: 146790 - DNA, 25 bp, Canis familiaris
gtggttcttttctcttgtatgttat

SEQ ID NO: 146791 - DNA, 25 bp, Canis familiaris
gtggtgtttgttttctatctgagtc

SEQ ID NO: 146792 - DNA, 25 bp, Canis familiaris
gtggtgtgattgttctgattttagt

SEQ ID NO: 146793 - DNA, 25 bp, Canis familiaris
gtggagtgtgtgttctttctccagc

SEQ ID NO: 146794 - DNA, 25 bp, Canis familiaris
gtggtgcctgtgtggtgctatccac

SEQ ID NO: 146795 - DNA, 25 bp, Canis familiaris
gtggtgacagggcagttctgcaccc

SEQ ID NO: 146796 - DNA, 25 bp, Canis familiaris
gtggtgaaggtcgtggcgcagcacc

SEQ ID NO: 146797 - DNA, 25 bp, Canis familiaris
gtggagaaggtccagtggggcaccc

SEQ ID NO: 146798 - DNA, 25 bp, Canis familiaris
gtggggaggatccagatgaggacaa

SEQ ID NO: 146799 - DNA, 25 bp, Canis familiaris
gtgggatacactgagatgggagaat

SEQ ID NO: 146800 - DNA, 25 bp, Canis familiaris
gtgggataatcttcgggatggtcat

SEQ ID NO: 146801 - DNA, 25 bp, Canis familiaris
gtggtaatattttgggtcgatcgac

SEQ ID NO: 146802 - DNA, 25 bp, Canis familiaris
gtggaagatattcaatggaagcgcg

SEQ ID NO: 146803 - DNA, 25 bp, Canis familiaris
gtggacaaaagcggctggaccggtc

SEQ ID NO: 146804 - DNA, 25 bp, Canis familiaris
gtggagctgaagggcctgaaccgcc

SEQ ID NO: 146805 - DNA, 25 bp, Canis familiaris
gtggacttcatggtggacaacgccc

SEQ ID NO: 146806 - DNA, 25 bp, Canis familiaris
gtggtttatgttgaaacacccggcg

SEQ ID NO: 146807 - DNA, 25 bp, Canis familiaris
gtggttcgtagtgaaactctcctgg

SEQ ID NO: 146808 - DNA, 25 bp, Canis familiaris
gtggtacctagtcaagatctgtcgt

SEQ ID NO: 146809 - DNA, 25 bp, Canis familiaris
gggctcacagtagcaaattcttccg

SEQ ID NO: 146810 - DNA, 25 bp, Canis familiaris
gggaaatgtgaccaaaccaaccgtg

SEQ ID NO: 146811 - DNA, 25 bp, Canis familiaris
gtggctacgtgagcacagaccaact

SEQ ID NO: 146812 - DNA, 25 bp, Canis familiaris
gtggtcagaggacaccctcaatgct

SEQ ID NO: 146813 - DNA, 25 bp, Canis familiaris
gtggtgatggtgccaacctttactc

SEQ ID NO: 146814 - DNA, 25 bp, Canis familiaris
gtggtaggaggcctagttgtccatc

SEQ ID NO: 146815 - DNA, 25 bp, Canis familiaris
gtgggtcggagcctatggattaacg

SEQ ID NO: 146816 - DNA, 25 bp, Canis familiaris
gtgggttgtgtggctcagagacata

SEQ ID NO: 146817 - DNA, 25 bp, Canis familiaris
gtggtacatcagttgctctggatcc

SEQ ID NO: 146818 - DNA, 25 bp, Canis familiaris
gtggtacatcagttctctggaatcc

SEQ ID NO: 146819 - DNA, 25 bp, Canis familiaris
gtggtcatcttactcattaacatca

SEQ ID NO: 146820 - DNA, 25 bp, Canis familiaris
gtggtgcacatacgactacacacac

SEQ ID NO: 146821 - DNA, 25 bp, Canis familiaris
gtggagctcatgagaaccaacccga

SEQ ID NO: 146822 - DNA, 25 bp, Canis familiaris
gtggggctgaaactcacaaccctga

SEQ ID NO: 146823 - DNA, 25 bp, Canis familiaris
gtggaagtggacacacagtcctcaa

SEQ ID NO: 146824 - DNA, 25 bp, Canis familiaris
gtggggggaacatgcacccatgcaa

SEQ ID NO: 146825 - DNA, 25 bp, Canis familiaris
gtggaggaggcatctgcagagcccc

SEQ ID NO: 146826 - DNA, 25 bp, Canis familiaris
gtgggtgccgcaagctgacgcaccc

SEQ ID NO: 146827 - DNA, 25 bp, Canis familiaris
ggagggccctggttaattgggaatg

SEQ ID NO: 146828 - DNA, 25 bp, Canis familiaris
gtgggtcccgattatccagcaggac

SEQ ID NO: 146829 - DNA, 25 bp, Canis familiaris
gtggtgtccctgagcaggcagggag

SEQ ID NO: 146830 - DNA, 25 bp, Canis familiaris
gtgggtctcctgactcagtcagata

SEQ ID NO: 146831 - DNA, 25 bp, Canis familiaris
gtggtgatcgactactagggcatag

SEQ ID NO: 146832 - DNA, 25 bp, Canis familiaris
gtggtgaccatcatcaagggcaagg

SEQ ID NO: 146833 - DNA, 25 bp, Canis familiaris
gtggtgacacatggtacaggcctgg

SEQ ID NO: 146834 - DNA, 25 bp, Canis familiaris
gtggtatcacattctatgcagatgc

SEQ ID NO: 146835 - DNA, 25 bp, Canis familiaris
gtgggtctgctgttatggcagctgc

SEQ ID NO: 146836 - DNA, 25 bp, Canis familiaris
gtgggtctgctgttatggcagctgc

SEQ ID NO: 146837 - DNA, 25 bp, Canis familiaris
gtggtgctcacctgtgagctgtgcc

SEQ ID NO: 146838 - DNA, 25 bp, Canis familiaris
gtggatgcagcagaggctggcctgc

SEQ ID NO: 146839 - DNA, 25 bp, Canis familiaris
gtggtgcgaatagatcgtgcatgca

SEQ ID NO: 146840 - DNA, 25 bp, Canis familiaris
gtgggtgcaaacccttgagcagtcc

SEQ ID NO: 146841 - DNA, 25 bp, Canis familiaris
gtggggccaaaggcttgtgagttcc

SEQ ID NO: 146842 - DNA, 25 bp, Canis familiaris
gtggggcccaagccgaagaaatcct

SEQ ID NO: 146843 - DNA, 25 bp, Canis familiaris
gtggggccctaggagacagaagtta

SEQ ID NO: 146844 - DNA, 25 bp, Canis familiaris
gtggaggcctccaaggacaaaggtg

SEQ ID NO: 146845 - DNA, 25 bp, Canis familiaris
gtggatggcccctctggaaagctgt

SEQ ID NO: 146846 - DNA, 25 bp, Canis familiaris
gtggaggccacatctgggcagaagg

SEQ ID NO: 146847 - DNA, 25 bp, Canis familiaris
gtggactggagctctggggatggag

SEQ ID NO: 146848 - DNA, 25 bp, Canis familiaris
gtggtctggacaatggttggatgtt

SEQ ID NO: 146849 - DNA, 25 bp, Canis familiaris
gtggtgtggaaaagggaggtatgga

SEQ ID NO: 146850 - DNA, 25 bp, Canis familiaris
gtgggtggataacgtgtaggcctca

SEQ ID NO: 146851 - DNA, 25 bp, Canis familiaris
gtggttggtaataggaagagcccca

SEQ ID NO: 146852 - DNA, 25 bp, Canis familiaris
gtggtatcggacaggagacatcgcc

SEQ ID NO: 146853 - DNA, 25 bp, Canis familiaris
gtggtatcggatcaggagacatctt

SEQ ID NO: 146854 - DNA, 25 bp, Canis familiaris
gtggtccgtgagcaatggcaccatc

SEQ ID NO: 146855 - DNA, 25 bp, Canis familiaris
gtggtgccttaacaggagccatact

SEQ ID NO: 146856 - DNA, 25 bp, Canis familiaris
gtggtgtttacagaggacgctacgg

SEQ ID NO: 146857 - DNA, 25 bp, Canis familiaris
gtggctatttacgaagcgaccaact

SEQ ID NO: 146858 - DNA, 25 bp, Canis familiaris
gtggccgataatgcaaggcaccagt

SEQ ID NO: 146859 - DNA, 25 bp, Canis familiaris
gtggcctggaaggcaagcggcagcc

SEQ ID NO: 146860 - DNA, 25 bp, Canis familiaris
gtgggtgtgactccaaagcgagctc

SEQ ID NO: 146861 - DNA, 25 bp, Canis familiaris
gtggtctgtccttcaagagaaatcg

SEQ ID NO: 146862 - DNA, 25 bp, Canis familiaris
gtggtttccctaagatgtcgatggc

SEQ ID NO: 146863 - DNA, 25 bp, Canis familiaris
gtggtccccaatgaagtcgtggtgc

SEQ ID NO: 146864 - DNA, 25 bp, Canis familiaris
gtggataccccatgaactggttgtc

SEQ ID NO: 146865 - DNA, 25 bp, Canis familiaris
gtggaacacctttaactaggcactc

SEQ ID NO: 146866 - DNA, 25 bp, Canis familiaris
gggtaacaccagtaatcttggaagc

SEQ ID NO: 146867 - DNA, 25 bp, Canis familiaris
gggttaaatcagccctgccttgaag

SEQ ID NO: 146868 - DNA, 25 bp, Canis familiaris
gtggtataaattggcccctataaga

SEQ ID NO: 146869 - DNA, 25 bp, Canis familiaris
gtggtacatcaaattcacccttcat

SEQ ID NO: 146870 - DNA, 25 bp, Canis familiaris
gtggataaaatatgacctctagcat

SEQ ID NO: 146871 - DNA, 25 bp, Canis familiaris
gtggtcaaaggaaacgctcggctac

SEQ ID NO: 146872 - DNA, 25 bp, Canis familiaris
gtggataaagggttgtctcagacta

SEQ ID NO: 146873 - DNA, 25 bp, Canis familiaris
gtggaaacaggattggagccagaca

SEQ ID NO: 146874 - DNA, 25 bp, Canis familiaris
gtggcagagacagcactggaattca

SEQ ID NO: 146875 - DNA, 25 bp, Canis familiaris
gtggtggacctcatggcctacatgg

SEQ ID NO: 146876 - DNA, 25 bp, Canis familiaris
gtggggacagctgtgtccctcaggc

SEQ ID NO: 146877 - DNA, 25 bp, Canis familiaris
gtggtaccaccatgtacccaggcat

SEQ ID NO: 146878 - DNA, 25 bp, Canis familiaris
gtggataccctatttatccctcaga

SEQ ID NO: 146879 - DNA, 25 bp, Canis familiaris
gtggctcacgcctgtaatcccagca

SEQ ID NO: 146880 - DNA, 25 bp, Canis familiaris
gtggtcatggtctcttgtacaagca

SEQ ID NO: 146881 - DNA, 25 bp, Canis familiaris
gtggcacgtggcactttaaccatat

SEQ ID NO: 146882 - DNA, 25 bp, Canis familiaris
gggccagcaggttttttacctgcat

SEQ ID NO: 146883 - DNA, 25 bp, Canis familiaris
gggctcagaggtattttcctggatc

SEQ ID NO: 146884 - DNA, 25 bp, Canis familiaris
gggctaagggcctctttcatagaag

SEQ ID NO: 146885 - DNA, 25 bp, Canis familiaris
ggacgacagaaacacttttcgacac

SEQ ID NO: 146886 - DNA, 25 bp, Canis familiaris
gtggcggaagaaagtttttcagaca

SEQ ID NO: 146887 - DNA, 25 bp, Canis familiaris
gtgggggtgcagatgtgttttcaag

SEQ ID NO: 146888 - DNA, 25 bp, Canis familiaris
gtgggtggatcaattcttgcttaac

SEQ ID NO: 146889 - DNA, 25 bp, Canis familiaris
gtggtgtccaacaatgtgctgcatt

SEQ ID NO: 146890 - DNA, 25 bp, Canis familiaris
gtggggccatgactatgattcgtgt

SEQ ID NO: 146891 - DNA, 25 bp, Canis familiaris
gtggatgccgtgtacatactgtatt

SEQ ID NO: 146892 - DNA, 25 bp, Canis familiaris
gtggagcatcatgccacacactgtt

SEQ ID NO: 146893 - DNA, 25 bp, Canis familiaris
gtggatgatgatgctgtgccagtat

SEQ ID NO: 146894 - DNA, 25 bp, Canis familiaris
gtggcagtgctggtgtccaggactg

SEQ ID NO: 146895 - DNA, 25 bp, Canis familiaris
gtggagctgcaggagctgaacgacc

SEQ ID NO: 146896 - DNA, 25 bp, Canis familiaris
gtggatggcagctcttttgatcctc

SEQ ID NO: 146897 - DNA, 25 bp, Canis familiaris
gtggtggagaacattcttgcctcgc

SEQ ID NO: 146898 - DNA, 25 bp, Canis familiaris
gtggtaggaagctcatttctctcag

SEQ ID NO: 146899 - DNA, 25 bp, Canis familiaris
gtggaagagggctcagtgcccaagg

SEQ ID NO: 146900 - DNA, 25 bp, Canis familiaris
gtggaacagggagcagggatcatgg

SEQ ID NO: 146901 - DNA, 25 bp, Canis familiaris
gtggaaagtgtaagcatcccttaga

SEQ ID NO: 146902 - DNA, 25 bp, Canis familiaris
gtggaatgatgataaaccctttgaa

SEQ ID NO: 146903 - DNA, 25 bp, Canis familiaris
gtggagctgctagaagaccttgcct

SEQ ID NO: 146904 - DNA, 25 bp, Canis familiaris
gtggagactatgtgagtccgaccac

SEQ ID NO: 146905 - DNA, 25 bp, Canis familiaris
gtggggtgatgtcggtccgaggacc

SEQ ID NO: 146906 - DNA, 25 bp, Canis familiaris
gtggggctgtagggctcagggaaca

SEQ ID NO: 146907 - DNA, 25 bp, Canis familiaris
gtggagctgctgtgtttaggtgaac

SEQ ID NO: 146908 - DNA, 25 bp, Canis familiaris
gtggcagtggcagttcttagggcag

SEQ ID NO: 146909 - DNA, 25 bp, Canis familiaris
gtggacgagcagatgctgaacgtcc

SEQ ID NO: 146910 - DNA, 25 bp, Canis familiaris
gtggatctgaaaatctgaccctgta

SEQ ID NO: 146911 - DNA, 25 bp, Canis familiaris
gtggattgaaaatcatctgcttcat

SEQ ID NO: 146912 - DNA, 25 bp, Canis familiaris
gtggttatgttttatcatctgtcat

SEQ ID NO: 146913 - DNA, 25 bp, Canis familiaris
gtggttattgcatgattatcttgat

SEQ ID NO: 146914 - DNA, 25 bp, Canis familiaris
gtggttgattgccagtttgtgtact

SEQ ID NO: 146915 - DNA, 25 bp, Canis familiaris
gtggctggattggaacttttaatat

SEQ ID NO: 146916 - DNA, 25 bp, Canis familiaris
gtggggctttcaggtgtttagagat

SEQ ID NO: 146917 - DNA, 25 bp, Canis familiaris
gtggaaatttcatgtacttgcaaac

SEQ ID NO: 146918 - DNA, 25 bp, Canis familiaris
ggcgcaaaatacaaccccgaagact

SEQ ID NO: 146919 - DNA, 25 bp, Canis familiaris
gtggagagaaatatacccgtgagag

SEQ ID NO: 146920 - DNA, 25 bp, Canis familiaris
gtggtggataatcatagcccagcca

SEQ ID NO: 146921 - DNA, 25 bp, Canis familiaris
gtggtgaagaagcatgaggccaaga

SEQ ID NO: 146922 - DNA, 25 bp, Canis familiaris
gtggtgaagcggtatggtcccatgg

SEQ ID NO: 146923 - DNA, 25 bp, Canis familiaris
gtggtgcacactgtacagttcctca

SEQ ID NO: 146924 - DNA, 25 bp, Canis familiaris
gtggattcatccataagcttcctga

SEQ ID NO: 146925 - DNA, 25 bp, Canis familiaris
gtggcagtccagactcaacatgtcc

SEQ ID NO: 146926 - DNA, 25 bp, Canis familiaris
gtggagtccgcttaagattctgttt

SEQ ID NO: 146927 - DNA, 25 bp, Canis familiaris
gtggttccttggaaatgctgcgctt

SEQ ID NO: 146928 - DNA, 25 bp, Canis familiaris
gtggatcccatagtggaatgccacc

SEQ ID NO: 146929 - DNA, 25 bp, Canis familiaris
gtggacttcatatggtggtgccctg

SEQ ID NO: 146930 - DNA, 25 bp, Canis familiaris
gtggtcgcttactttgagtgatcct

SEQ ID NO: 146931 - DNA, 25 bp, Canis familiaris
gtggacgcttattgttcgttgacca

SEQ ID NO: 146932 - DNA, 25 bp, Canis familiaris
gtggactgtctatatagttatggcc

SEQ ID NO: 146933 - DNA, 25 bp, Canis familiaris
gtggactacttagagctctttcctg

SEQ ID NO: 146934 - DNA, 25 bp, Canis familiaris
gtggtccctggagtagtttatcttt

SEQ ID NO: 146935 - DNA, 25 bp, Canis familiaris
gggctacttccacaatttgactatt

SEQ ID NO: 146936 - DNA, 25 bp, Canis familiaris
gtggaaaatccacatagaaactttt

SEQ ID NO: 146937 - DNA, 25 bp, Canis familiaris
gtggagtacttaccaggagcaactt

SEQ ID NO: 146938 - DNA, 25 bp, Canis familiaris
gtggatgtacctaccaagagcaact

SEQ ID NO: 146939 - DNA, 25 bp, Canis familiaris
gtggacataactactcaggagcttt

SEQ ID NO: 146940 - DNA, 25 bp, Canis familiaris
gggactgtcctacttggcagtacat

SEQ ID NO: 146941 - DNA, 25 bp, Canis familiaris
gggcacttcctactagagatctagc

SEQ ID NO: 146942 - DNA, 25 bp, Canis familiaris
gggccttcctctgatcgatgaagtg

SEQ ID NO: 146943 - DNA, 25 bp, Canis familiaris
gtggccttttctgtgtcaaatgtta

SEQ ID NO: 146944 - DNA, 25 bp, Canis familiaris
gtggccgtctgatatttaaagtttg

SEQ ID NO: 146945 - DNA, 25 bp, Canis familiaris
gggcctcctttatctaaaggtggag

SEQ ID NO: 146946 - DNA, 25 bp, Canis familiaris
gggcccgttcagacttacaaagagg

SEQ ID NO: 146947 - DNA, 25 bp, Canis familiaris
gggcccgtacgatgacgtcaagatc

SEQ ID NO: 146948 - DNA, 25 bp, Canis familiaris
gtggccctgatacattgggtccaaa

SEQ ID NO: 146949 - DNA, 25 bp, Canis familiaris
gtggacctgaagcttgtggagaaac

SEQ ID NO: 146950 - DNA, 25 bp, Canis familiaris
gtggaccctgaactttatgggcaac

SEQ ID NO: 146951 - DNA, 25 bp, Canis familiaris
gtggcaaccgcaagtctttgagacg

SEQ ID NO: 146952 - DNA, 25 bp, Canis familiaris
gtggcaccgtgaagtctttaggagg

SEQ ID NO: 146953 - DNA, 25 bp, Canis familiaris
gtggcaagggaagcattttggatgc

SEQ ID NO: 146954 - DNA, 25 bp, Canis familiaris
gtggcagactaacccattttctaga

SEQ ID NO: 146955 - DNA, 25 bp, Canis familiaris
gtggagacattagccagtgtttagt

SEQ ID NO: 146956 - DNA, 25 bp, Canis familiaris
gtggagatttacctggattcattag

SEQ ID NO: 146957 - DNA, 25 bp, Canis familiaris
gtggatacatttgcttgcaccaatt

SEQ ID NO: 146958 - DNA, 25 bp, Canis familiaris
gtggttcattcctttcagccatcgt

SEQ ID NO: 146959 - DNA, 25 bp, Canis familiaris
gtggttcaatctggattcagcccgg

SEQ ID NO: 146960 - DNA, 25 bp, Canis familiaris
gtggtggcagtcatgttgcaccggg

SEQ ID NO: 146961 - DNA, 25 bp, Canis familiaris
gtggatgcctacgtgttgacaatgt

SEQ ID NO: 146962 - DNA, 25 bp, Canis familiaris
gtggtggacacatttggatcacatg

SEQ ID NO: 146963 - DNA, 25 bp, Canis familiaris
gtggtgtgcccactgtgagcacaga

SEQ ID NO: 146964 - DNA, 25 bp, Canis familiaris
gtggtgttcctactgatgacgagca

SEQ ID NO: 146965 - DNA, 25 bp, Canis familiaris
gtggtgttgtctgtatatgctaact

SEQ ID NO: 146966 - DNA, 25 bp, Canis familiaris
gtggtgtcgggcagatcatccacct

SEQ ID NO: 146967 - DNA, 25 bp, Canis familiaris
gtggttggagcctagagctcaccct

SEQ ID NO: 146968 - DNA, 25 bp, Canis familiaris
gtggtatgggcctatttctgtgcct

SEQ ID NO: 146969 - DNA, 25 bp, Canis familiaris
gtggtgattgggattatttgtgtgt

SEQ ID NO: 146970 - DNA, 25 bp, Canis familiaris
gtggtttgtgtgatatagtcttttc

SEQ ID NO: 146971 - DNA, 25 bp, Canis familiaris
gtggtgttggtgaatatgggtttgt

SEQ ID NO: 146972 - DNA, 25 bp, Canis familiaris
gtggtgttggtgaattggttttgtt

SEQ ID NO: 146973 - DNA, 25 bp, Canis familiaris
gtggttcttccaattgggttatggt

SEQ ID NO: 146974 - DNA, 25 bp, Canis familiaris
gtggaatttccatgttggttagctg

SEQ ID NO: 146975 - DNA, 25 bp, Canis familiaris
gtggtgttcttatgacatggattag

SEQ ID NO: 146976 - DNA, 25 bp, Canis familiaris
gtggtgttcttatgagcatgattag

SEQ ID NO: 146977 - DNA, 25 bp, Canis familiaris
gtggtggtattcttgcagtactgag

SEQ ID NO: 146978 - DNA, 25 bp, Canis familiaris
gtggtgtgcttttgtgattatgtgg

SEQ ID NO: 146979 - DNA, 25 bp, Canis familiaris
gtggtggccttatatgaaagcgtca

SEQ ID NO: 146980 - DNA, 25 bp, Canis familiaris
gtggggctttggaagagagcacacg

SEQ ID NO: 146981 - DNA, 25 bp, Canis familiaris
gtggcaggttgggtgctgggacacc

SEQ ID NO: 146982 - DNA, 25 bp, Canis familiaris
gtggaggttggcgggatggagcagt

SEQ ID NO: 146983 - DNA, 25 bp, Canis familiaris
gtggatgagaatggccggatgaacg

SEQ ID NO: 146984 - DNA, 25 bp, Canis familiaris
gtggtgaattcactccagcagcaac

SEQ ID NO: 146985 - DNA, 25 bp, Canis familiaris
gtggtagagcgcttgcctagcaagc

SEQ ID NO: 146986 - DNA, 25 bp, Canis familiaris
gtggctacagcagttccaacatagt

SEQ ID NO: 146987 - DNA, 25 bp, Canis familiaris
gtggtcacagctgacataacgacga

SEQ ID NO: 146988 - DNA, 25 bp, Canis familiaris
gtggtgtatgtggaaaacagatgga

SEQ ID NO: 146989 - DNA, 25 bp, Canis familiaris
gtggcggtcatggaaaggagctgtc

SEQ ID NO: 146990 - DNA, 25 bp, Canis familiaris
gtggcgttcagccacccgagattga

SEQ ID NO: 146991 - DNA, 25 bp, Canis familiaris
gtggctttagccagaggcacattaa

SEQ ID NO: 146992 - DNA, 25 bp, Canis familiaris
gtggcacttggggcgaggacaaagg

SEQ ID NO: 146993 - DNA, 25 bp, Canis familiaris
gtggacgtcgggaagagcccatgca

SEQ ID NO: 146994 - DNA, 25 bp, Canis familiaris
gtggaggacctggatatggcaacca

SEQ ID NO: 146995 - DNA, 25 bp, Canis familiaris
gtggtggactctgaagatcttcctc

SEQ ID NO: 146996 - DNA, 25 bp, Canis familiaris
gtggttactcagggagcacttttgt

SEQ ID NO: 146997 - DNA, 25 bp, Canis familiaris
gggcttgactcagactgaggttaag

SEQ ID NO: 146998 - DNA, 25 bp, Canis familiaris
gggcttgacacactgcctgaatgga

SEQ ID NO: 146999 - DNA, 25 bp, Canis familiaris
gtggttgctcagatggcagtatgga

SEQ ID NO: 147000 - DNA, 25 bp, Canis familiaris
gtggttgtcatgagcacaggagtac

SEQ ID NO: 147001 - DNA, 25 bp, Canis familiaris
gtggtatgagcacagcacggttcaa

SEQ ID NO: 147002 - DNA, 25 bp, Canis familiaris
gtggtaggatgttgcactggtggca

SEQ ID NO: 147003 - DNA, 25 bp, Canis familiaris
gtggcataacttacagctgactgga

SEQ ID NO: 147004 - DNA, 25 bp, Canis familiaris
gtggatgaactgatggctgacatta

SEQ ID NO: 147005 - DNA, 25 bp, Canis familiaris
gtggtgagattgagccctgcattga

SEQ ID NO: 147006 - DNA, 25 bp, Canis familiaris
gtggaggcactgacacttctcaata

SEQ ID NO: 147007 - DNA, 25 bp, Canis familiaris
gtggaagagcccacatctcacattg

SEQ ID NO: 147008 - DNA, 25 bp, Canis familiaris
gtggacatgaccaccttactcagct

SEQ ID NO: 147009 - DNA, 25 bp, Canis familiaris
gtggtcatggccagactagtctact

SEQ ID NO: 147010 - DNA, 25 bp, Canis familiaris
gggccaggccaggccttgtatagcc

SEQ ID NO: 147011 - DNA, 25 bp, Canis familiaris
gtggaaggccagacctgtgattaca

SEQ ID NO: 147012 - DNA, 25 bp, Canis familiaris
gtggtgggctatgggctgtactact

SEQ ID NO: 147013 - DNA, 25 bp, Canis familiaris
gtggtgagactagggctttcagcca

SEQ ID NO: 147014 - DNA, 25 bp, Canis familiaris
gtggaggactatgagcctacccaag

SEQ ID NO: 147015 - DNA, 25 bp, Canis familiaris
gtggaagcagcaaaagccccgaacg

SEQ ID NO: 147016 - DNA, 25 bp, Canis familiaris
gtggaacggagaatcacccgcaggc

SEQ ID NO: 147017 - DNA, 25 bp, Canis familiaris
gtggcaaatagatttcccaccagcc

SEQ ID NO: 147018 - DNA, 25 bp, Canis familiaris
gtggcagagatccttttctaaatgc

SEQ ID NO: 147019 - DNA, 25 bp, Canis familiaris
gtggagactcgttttctgacacacg

SEQ ID NO: 147020 - DNA, 25 bp, Canis familiaris
gtggagattcgagttcttggctcat

SEQ ID NO: 147021 - DNA, 25 bp, Canis familiaris
gtggagatgtagttcccatagccat

SEQ ID NO: 147022 - DNA, 25 bp, Canis familiaris
gtggtgagtgaaacatccaggcgtg

SEQ ID NO: 147023 - DNA, 25 bp, Canis familiaris
gtggtgcagagtaaatgctcagcgt

SEQ ID NO: 147024 - DNA, 25 bp, Canis familiaris
gtggtcagatgtccacttccagacc

SEQ ID NO: 147025 - DNA, 25 bp, Canis familiaris
gtggtctgagtctagttggcatgcc

SEQ ID NO: 147026 - DNA, 25 bp, Canis familiaris
gtggtgtaccacctgatggcatggt

SEQ ID NO: 147027 - DNA, 25 bp, Canis familiaris
gtggagcatatcccggaggaggctt

SEQ ID NO: 147028 - DNA, 25 bp, Canis familiaris
gtggtgcagcatcactgagggggat

SEQ ID NO: 147029 - DNA, 25 bp, Canis familiaris
gtggtgcagcgctggagggagagtc

SEQ ID NO: 147030 - DNA, 25 bp, Canis familiaris
gggcccgagagggagagggtccaca

SEQ ID NO: 147031 - DNA, 25 bp, Canis familiaris
gtggcccaagagctaggcggactcc

SEQ ID NO: 147032 - DNA, 25 bp, Canis familiaris
gtggtccaatgtcctaaggggcatg

SEQ ID NO: 147033 - DNA, 25 bp, Canis familiaris
gtggcccaagtggaacgtgggcggg

SEQ ID NO: 147034 - DNA, 25 bp, Canis familiaris
gggccgagaagaaaagcttgccggg

SEQ ID NO: 147035 - DNA, 25 bp, Canis familiaris
gtggccgcgcaagggaagtacatcg

SEQ ID NO: 147036 - DNA, 25 bp, Canis familiaris
gggccgacgatgctgatgagtttgg

SEQ ID NO: 147037 - DNA, 25 bp, Canis familiaris
gggccttgctatcagaactttgtgc

SEQ ID NO: 147038 - DNA, 25 bp, Canis familiaris
gtggccgtgatcatggacaattttg

SEQ ID NO: 147039 - DNA, 25 bp, Canis familiaris
gtggtcaggtttggctactttgcag

SEQ ID NO: 147040 - DNA, 25 bp, Canis familiaris
gggctaactttactacaattagtat

SEQ ID NO: 147041 - DNA, 25 bp, Canis familiaris
gtggctaacctgacccaataaagtt

SEQ ID NO: 147042 - DNA, 25 bp, Canis familiaris
gtggaaacaggttcacaaacaggtg

SEQ ID NO: 147043 - DNA, 25 bp, Canis familiaris
gtggaagccaagttcatcaattatg

SEQ ID NO: 147044 - DNA, 25 bp, Canis familiaris
gtggaagccaagttccatccaatct

SEQ ID NO: 147045 - DNA, 25 bp, Canis familiaris
gtggaaacaaggttcaccaacacgg

SEQ ID NO: 147046 - DNA, 25 bp, Canis familiaris
gtggtttcaatgtttactctacccg

SEQ ID NO: 147047 - DNA, 25 bp, Canis familiaris
gtggcagttcacagttatcgtcaac

SEQ ID NO: 147048 - DNA, 25 bp, Canis familiaris
gtggagtgtggtaatttttctaaag

SEQ ID NO: 147049 - DNA, 25 bp, Canis familiaris
gggagtagacttcttttctatacat

SEQ ID NO: 147050 - DNA, 25 bp, Canis familiaris
gggctgtaagttttatttcttccag

SEQ ID NO: 147051 - DNA, 25 bp, Canis familiaris
gtggcttaagtggtttttctgtcca

SEQ ID NO: 147052 - DNA, 25 bp, Canis familiaris
gtggcttaattagttttgttttgtg

SEQ ID NO: 147053 - DNA, 25 bp, Canis familiaris
gtggtttatatacttttttgcattg

SEQ ID NO: 147054 - DNA, 25 bp, Canis familiaris
gtggtttataacctgttcaactcag

SEQ ID NO: 147055 - DNA, 25 bp, Canis familiaris
gtggcattcttaaagatttccctcg

SEQ ID NO: 147056 - DNA, 25 bp, Canis familiaris
gtggctcagctaatcgagtttcctc

SEQ ID NO: 147057 - DNA, 25 bp, Canis familiaris
gtggccagctgcttagagctttact

SEQ ID NO: 147058 - DNA, 25 bp, Canis familiaris
gtggcagactacatggcgtctacca

SEQ ID NO: 147059 - DNA, 25 bp, Canis familiaris
gtggagtgtcacagggtcacagcaa

SEQ ID NO: 147060 - DNA, 25 bp, Canis familiaris
gtggatagacacaagagaggaggaa

SEQ ID NO: 147061 - DNA, 25 bp, Canis familiaris
gtggatcagcaagcaggagtacgat

SEQ ID NO: 147062 - DNA, 25 bp, Canis familiaris
gtggcaaagcacgagtggtacgagg

SEQ ID NO: 147063 - DNA, 25 bp, Canis familiaris
gtggcaacgactgagctgtgacggg

SEQ ID NO: 147064 - DNA, 25 bp, Canis familiaris
gtggatatcgtacacgtgtggtgga

SEQ ID NO: 147065 - DNA, 25 bp, Canis familiaris
gtggtatggaaaagcctgcatgcgt

SEQ ID NO: 147066 - DNA, 25 bp, Canis familiaris
gtggtttgaccaaggctgatgcctg

SEQ ID NO: 147067 - DNA, 25 bp, Canis familiaris
gtggttagaagctgcagctggccta

SEQ ID NO: 147068 - DNA, 25 bp, Canis familiaris
gtggtctcaaactcagagggctcag

SEQ ID NO: 147069 - DNA, 25 bp, Canis familiaris
gtggtgcatccataacagacaagta

SEQ ID NO: 147070 - DNA, 25 bp, Canis familiaris
gtggctccctaatgcaataatgtac

SEQ ID NO: 147071 - DNA, 25 bp, Canis familiaris
gtggcccctaagtataatcgccctc

SEQ ID NO: 147072 - DNA, 25 bp, Canis familiaris
gggcccctagaggaagattgaccct

SEQ ID NO: 147073 - DNA, 25 bp, Canis familiaris
gggccttcaaggtgaacaagccctt

SEQ ID NO: 147074 - DNA, 25 bp, Canis familiaris
gtggcactttacccaaagattgacc

SEQ ID NO: 147075 - DNA, 25 bp, Canis familiaris
gtggcactgagctcttaacaactga

SEQ ID NO: 147076 - DNA, 25 bp, Canis familiaris
gtggcgatgacagctgtaaagcacg

SEQ ID NO: 147077 - DNA, 25 bp, Canis familiaris
gtggaatgaccacatttgatccgaa

SEQ ID NO: 147078 - DNA, 25 bp, Canis familiaris
gtggcacaagttctcttgtcgcgaa

SEQ ID NO: 147079 - DNA, 25 bp, Canis familiaris
gtggcacaaatagacctgtgcccac

SEQ ID NO: 147080 - DNA, 25 bp, Canis familiaris
gtggaacataacttcctgtcaccct

SEQ ID NO: 147081 - DNA, 25 bp, Canis familiaris
gtggacctgaacttgccattgccac

SEQ ID NO: 147082 - DNA, 25 bp, Canis familiaris
gtggacctgacctgccgtctagaaa

SEQ ID NO: 147083 - DNA, 25 bp, Canis familiaris
gtggacctgacctcagagatataga

SEQ ID NO: 147084 - DNA, 25 bp, Canis familiaris
gtggatccgcattttcatggaaaag

SEQ ID NO: 147085 - DNA, 25 bp, Canis familiaris
gtggacccgtgtctggagattgcag

SEQ ID NO: 147086 - DNA, 25 bp, Canis familiaris
gtggagcccttgcagttggagagag

SEQ ID NO: 147087 - DNA, 25 bp, Canis familiaris
gtggtctcctctgacttcaacagcg

SEQ ID NO: 147088 - DNA, 25 bp, Canis familiaris
gtggtctcctttttgatgaaaggac

SEQ ID NO: 147089 - DNA, 25 bp, Canis familiaris
gtggcatctcttatttctaagggtc

SEQ ID NO: 147090 - DNA, 25 bp, Canis familiaris
gtggcagctttgttgctacgaatct

SEQ ID NO: 147091 - DNA, 25 bp, Canis familiaris
gtggcagctttgtgctacgaatctc

SEQ ID NO: 147092 - DNA, 25 bp, Canis familiaris
gtggcagctttgtgctacgaatctc

SEQ ID NO: 147093 - DNA, 25 bp, Canis familiaris
gtggcagctttgtgctacgaatctc

SEQ ID NO: 147094 - DNA, 25 bp, Canis familiaris
gtggcagctttgtgctacgaatctc

SEQ ID NO: 147095 - DNA, 25 bp, Canis familiaris
gtggcagctttgtgctacgaatctc

SEQ ID NO: 147096 - DNA, 25 bp, Canis familiaris
gtggctgttctttgtattccatctt

SEQ ID NO: 147097 - DNA, 25 bp, Canis familiaris
gtggtcttccagatattccatttgg

SEQ ID NO: 147098 - DNA, 25 bp, Canis familiaris
gtggtcttcacatttatcccattac

SEQ ID NO: 147099 - DNA, 25 bp, Canis familiaris
gtggtttcagcagtgttctacagtt

SEQ ID NO: 147100 - DNA, 25 bp, Canis familiaris
gtggttgatccattttctaagaaag

SEQ ID NO: 147101 - DNA, 25 bp, Canis familiaris
gtggttgagccactatgtcggagaa

SEQ ID NO: 147102 - DNA, 25 bp, Canis familiaris
gtggttgggcaaaatgggtgaaggg

SEQ ID NO: 147103 - DNA, 25 bp, Canis familiaris
gtggatggggtgacggggtgacggg

SEQ ID NO: 147104 - DNA, 25 bp, Canis familiaris
gtggtccgggaaggcggtagctgga

SEQ ID NO: 147105 - DNA, 25 bp, Canis familiaris
gtggacggtcgaaacagtggaggtg

SEQ ID NO: 147106 - DNA, 25 bp, Canis familiaris
gtggacgcagtcaaagacagcggca

SEQ ID NO: 147107 - DNA, 25 bp, Canis familiaris
gtggtcagcgtgtaacatcacgtaa

SEQ ID NO: 147108 - DNA, 25 bp, Canis familiaris
ggggcctgtatagaccgtcaagggt

SEQ ID NO: 147109 - DNA, 25 bp, Canis familiaris
gggccatttataaaccgtaaagctg

SEQ ID NO: 147110 - DNA, 25 bp, Canis familiaris
gggcctttctgaacaacgttatccg

SEQ ID NO: 147111 - DNA, 25 bp, Canis familiaris
gggccttttatcacagttgccactc

SEQ ID NO: 147112 - DNA, 25 bp, Canis familiaris
gtggccttacatcgcaaagtctaca

SEQ ID NO: 147113 - DNA, 25 bp, Canis familiaris
gtggcttatggtcctcaagatctca

SEQ ID NO: 147114 - DNA, 25 bp, Canis familiaris
gtggcttggtctctaattctgcact

SEQ ID NO: 147115 - DNA, 25 bp, Canis familiaris
gtggtttctcagttaatatatagct

SEQ ID NO: 147116 - DNA, 25 bp, Canis familiaris
gtggctttacaattcttcattggtg

SEQ ID NO: 147117 - DNA, 25 bp, Canis familiaris
gtggttatcacaagtctgttgaggg

SEQ ID NO: 147118 - DNA, 25 bp, Canis familiaris
gtggtcattaatcttattgggcgag

SEQ ID NO: 147119 - DNA, 25 bp, Canis familiaris
gtggtcttactagtgtttggacagc

SEQ ID NO: 147120 - DNA, 25 bp, Canis familiaris
gtggaccataccgtatttgcttcac

SEQ ID NO: 147121 - DNA, 25 bp, Canis familiaris
gtggcacccagcagtttagcttaat

SEQ ID NO: 147122 - DNA, 25 bp, Canis familiaris
gtggacagccacagcagttgctgca

SEQ ID NO: 147123 - DNA, 25 bp, Canis familiaris
gtggacagccacatgcagaagaatg

SEQ ID NO: 147124 - DNA, 25 bp, Canis familiaris
gtggtatacctcaagaggaatgact

SEQ ID NO: 147125 - DNA, 25 bp, Canis familiaris
gtggttatgtctaagcactgatata

SEQ ID NO: 147126 - DNA, 25 bp, Canis familiaris
gtggctgttggcaacacattttatg

SEQ ID NO: 147127 - DNA, 25 bp, Canis familiaris
gtggcttaagtatgtattttgtttc

SEQ ID NO: 147128 - DNA, 25 bp, Canis familiaris
gtggtttatgtctctttaagtttga

SEQ ID NO: 147129 - DNA, 25 bp, Canis familiaris
gtggcctttgtgtgctagtaagttc

SEQ ID NO: 147130 - DNA, 25 bp, Canis familiaris
gggccctttgaacaagaaggatcac

SEQ ID NO: 147131 - DNA, 25 bp, Canis familiaris
gtggccggtgtgtcccaaataggac

SEQ ID NO: 147132 - DNA, 25 bp, Canis familiaris
gggcgggatgtggacgatgaaggga

SEQ ID NO: 147133 - DNA, 25 bp, Canis familiaris
gggcggggggatgtaagggcacaag

SEQ ID NO: 147134 - DNA, 25 bp, Canis familiaris
gggggagtgggctggtaggccaaag

SEQ ID NO: 147135 - DNA, 25 bp, Canis familiaris
gtggaggagggcgacggtcgtgatc

SEQ ID NO: 147136 - DNA, 25 bp, Canis familiaris
gtggcggggaaatgtgtggcatgca

SEQ ID NO: 147137 - DNA, 25 bp, Canis familiaris
gtggcgttggtaaggacaagacatc

SEQ ID NO: 147138 - DNA, 25 bp, Canis familiaris
gggcttgggacttgggtaacatctc

SEQ ID NO: 147139 - DNA, 25 bp, Canis familiaris
gtggcttgggggcagttgaacttta

SEQ ID NO: 147140 - DNA, 25 bp, Canis familiaris
gtggctagtgggggagcttcaggct

SEQ ID NO: 147141 - DNA, 25 bp, Canis familiaris
gggctgtgtgggccaagtttgcgat

SEQ ID NO: 147142 - DNA, 25 bp, Canis familiaris
gggctttgtgacccaatttggtata

SEQ ID NO: 147143 - DNA, 25 bp, Canis familiaris
gtggcttttgaagaactgtgccaaa

SEQ ID NO: 147144 - DNA, 25 bp, Canis familiaris
gtggctgctttgcatggaaggacta

SEQ ID NO: 147145 - DNA, 25 bp, Canis familiaris
gtggtaattggaataaggcctggcc

SEQ ID NO: 147146 - DNA, 25 bp, Canis familiaris
gtggccaacttggaaaggccttccg

SEQ ID NO: 147147 - DNA, 25 bp, Canis familiaris
gtggctcaatttcaaactagaccct

SEQ ID NO: 147148 - DNA, 25 bp, Canis familiaris
gtggtattgacataaggatagacct

SEQ ID NO: 147149 - DNA, 25 bp, Canis familiaris
gtggtatgtgaaacagatggagcag

SEQ ID NO: 147150 - DNA, 25 bp, Canis familiaris
gtggatattgagtgcatgacctgtg

SEQ ID NO: 147151 - DNA, 25 bp, Canis familiaris
gtggatattggatttgctcctgtta

SEQ ID NO: 147152 - DNA, 25 bp, Canis familiaris
gtggcatttgttgtctccagtttac

SEQ ID NO: 147153 - DNA, 25 bp, Canis familiaris
gtggctttgtccactacggtgaagt

SEQ ID NO: 147154 - DNA, 25 bp, Canis familiaris
gtggctctttgtgcctactggataa

SEQ ID NO: 147155 - DNA, 25 bp, Canis familiaris
gtggctccatcttggcctcactgtc

SEQ ID NO: 147156 - DNA, 25 bp, Canis familiaris
gtggtacctggaatctactgtcctc

SEQ ID NO: 147157 - DNA, 25 bp, Canis familiaris
gtggtacctgtgagtctgcaggccc

SEQ ID NO: 147158 - DNA, 25 bp, Canis familiaris
gtggtaccatgtatgtagcagccgt

SEQ ID NO: 147159 - DNA, 25 bp, Canis familiaris
gtggacaccgtattgtactctgagt

SEQ ID NO: 147160 - DNA, 25 bp, Canis familiaris
gtggaaacagctcgctgtactgctg

SEQ ID NO: 147161 - DNA, 25 bp, Canis familiaris
gtggaacagcatttgtgattcctgt

SEQ ID NO: 147162 - DNA, 25 bp, Canis familiaris
gtggaatgcagatgggtgctatcag

SEQ ID NO: 147163 - DNA, 25 bp, Canis familiaris
gtggcattatgatggcctgtaccca

SEQ ID NO: 147164 - DNA, 25 bp, Canis familiaris
gtggcatggatagtacctgtacccc

SEQ ID NO: 147165 - DNA, 25 bp, Canis familiaris
gtggctctggcagtacctatatcta

SEQ ID NO: 147166 - DNA, 25 bp, Canis familiaris
gtggctcagtcagtaagtgtttacc

SEQ ID NO: 147167 - DNA, 25 bp, Canis familiaris
gtggcaagctcagaaatttataatc

SEQ ID NO: 147168 - DNA, 25 bp, Canis familiaris
gtggaccacaggcagtttgaaatcg

SEQ ID NO: 147169 - DNA, 25 bp, Canis familiaris
gggccaaaacatccttctgaaatgc

SEQ ID NO: 147170 - DNA, 25 bp, Canis familiaris
gtggctaataacctgtcctaaagac

SEQ ID NO: 147171 - DNA, 25 bp, Canis familiaris
gggctaataagcaaggtcataaaag

SEQ ID NO: 147172 - DNA, 25 bp, Canis familiaris
gtggtttagagctgtgttatccaac

SEQ ID NO: 147173 - DNA, 25 bp, Canis familiaris
gtggtatggaggagtaaagacaatg

SEQ ID NO: 147174 - DNA, 25 bp, Canis familiaris
gggtatggagagaatcttaagaatc

SEQ ID NO: 147175 - DNA, 25 bp, Canis familiaris
gtggttggcaggctttaggcatgac

SEQ ID NO: 147176 - DNA, 25 bp, Canis familiaris
gtggccgggctgtttaatggtggcg

SEQ ID NO: 147177 - DNA, 25 bp, Canis familiaris
gtggttggagtgttgtggatgtggg

SEQ ID NO: 147178 - DNA, 25 bp, Canis familiaris
gtggttggagcaggtggtgttggga

SEQ ID NO: 147179 - DNA, 25 bp, Canis familiaris
gggcttctagaggctttggggaggt

SEQ ID NO: 147180 - DNA, 25 bp, Canis familiaris
gggctctggaggttttgggaaacat

SEQ ID NO: 147181 - DNA, 25 bp, Canis familiaris
gggctctcaggggcttggggaaagc

SEQ ID NO: 147182 - DNA, 25 bp, Canis familiaris
gggcttgcagctgaatggagggaac

SEQ ID NO: 147183 - DNA, 25 bp, Canis familiaris
gggcctggtaagactgcatttggac

SEQ ID NO: 147184 - DNA, 25 bp, Canis familiaris
gtggactgtgttggactccttaggc

SEQ ID NO: 147185 - DNA, 25 bp, Canis familiaris
gtggaaggtgatagatctggcctga

SEQ ID NO: 147186 - DNA, 25 bp, Canis familiaris
gtggatatgggtttcggcgagaggc

SEQ ID NO: 147187 - DNA, 25 bp, Canis familiaris
gtggatatggtgacagtggggatgg

SEQ ID NO: 147188 - DNA, 25 bp, Canis familiaris
gtggttggtgagccgggatgggaca

SEQ ID NO: 147189 - DNA, 25 bp, Canis familiaris
gtggttgggtgatgtgcctgaggac

SEQ ID NO: 147190 - DNA, 25 bp, Canis familiaris
ggagttcagggggtggtacgagcca

SEQ ID NO: 147191 - DNA, 25 bp, Canis familiaris
gtggttgagtggtgtggctacggcc

SEQ ID NO: 147192 - DNA, 25 bp, Canis familiaris
gtggctgaagcgcttggagtacggc

SEQ ID NO: 147193 - DNA, 25 bp, Canis familiaris
gtggtatgagcacgttggagttccg

SEQ ID NO: 147194 - DNA, 25 bp, Canis familiaris
gtggtatttcgcaggaggctcctgc

SEQ ID NO: 147195 - DNA, 25 bp, Canis familiaris
gtggtttatccatcgggacactgca

SEQ ID NO: 147196 - DNA, 25 bp, Canis familiaris
gtggttctcccaacagtgtgagcac

SEQ ID NO: 147197 - DNA, 25 bp, Canis familiaris
gtggaattactctcatatgtggcta

SEQ ID NO: 147198 - DNA, 25 bp, Canis familiaris
gtggacggattcacttgtggtcacc

SEQ ID NO: 147199 - DNA, 25 bp, Canis familiaris
gtggacgagaacagcaatggggatc

SEQ ID NO: 147200 - DNA, 25 bp, Canis familiaris
gtggacgatgaactggctaccaggt

SEQ ID NO: 147201 - DNA, 25 bp, Canis familiaris
gtggcacagatatatgagcgacaat

SEQ ID NO: 147202 - DNA, 25 bp, Canis familiaris
gtggacatattattgctgtgcacga

SEQ ID NO: 147203 - DNA, 25 bp, Canis familiaris
gtggacactgtcaagctggccaagc

SEQ ID NO: 147204 - DNA, 25 bp, Canis familiaris
gtggatgactgcctgacatggatca

SEQ ID NO: 147205 - DNA, 25 bp, Canis familiaris
gtggatgcacttcaatggtgactaa

SEQ ID NO: 147206 - DNA, 25 bp, Canis familiaris
gtggcacacttggacatgggaagta

SEQ ID NO: 147207 - DNA, 25 bp, Canis familiaris
gggccactggacagggaaggtatgg

SEQ ID NO: 147208 - DNA, 25 bp, Canis familiaris
gggccgatggacagggtcacagtgg

SEQ ID NO: 147209 - DNA, 25 bp, Canis familiaris
gggccgagggtgcaagacactttgc

SEQ ID NO: 147210 - DNA, 25 bp, Canis familiaris
gggccagggggccatgaatcaaccg

SEQ ID NO: 147211 - DNA, 25 bp, Canis familiaris
gggccagccgaggctaccaaaaact

SEQ ID NO: 147212 - DNA, 25 bp, Canis familiaris
gggcctgacgcctgggaataaactg

SEQ ID NO: 147213 - DNA, 25 bp, Canis familiaris
gggactacgatacgggaataggtct

SEQ ID NO: 147214 - DNA, 25 bp, Canis familiaris
gtggactaccagaggtggctacggt

SEQ ID NO: 147215 - DNA, 25 bp, Canis familiaris
gtggaccaaatgaggacgaacaggt

SEQ ID NO: 147216 - DNA, 25 bp, Canis familiaris
gtggaccaaatgagggacaacaggt

SEQ ID NO: 147217 - DNA, 25 bp, Canis familiaris
gtggagccaacataagtaaatcaac

SEQ ID NO: 147218 - DNA, 25 bp, Canis familiaris
ggagagctccccaaactaagaaggc

SEQ ID NO: 147219 - DNA, 25 bp, Canis familiaris
gggacacttccataggaaggggccg

SEQ ID NO: 147220 - DNA, 25 bp, Canis familiaris
gtggccatcttccataagtactcgg

SEQ ID NO: 147221 - DNA, 25 bp, Canis familiaris
gtggcgctgtgtgctgaaaattggg

SEQ ID NO: 147222 - DNA, 25 bp, Canis familiaris
gtggctggttgacaacggctggagc

SEQ ID NO: 147223 - DNA, 25 bp, Canis familiaris
gggctggattaaaccctcatgctca

SEQ ID NO: 147224 - DNA, 25 bp, Canis familiaris
gggcttataatttacctagctccct

SEQ ID NO: 147225 - DNA, 25 bp, Canis familiaris
gggcttctccatatgacacaacatc

SEQ ID NO: 147226 - DNA, 25 bp, Canis familiaris
gtggactcccatagagacattagca

SEQ ID NO: 147227 - DNA, 25 bp, Canis familiaris
gtggatgcccaatttagctctaaag

SEQ ID NO: 147228 - DNA, 25 bp, Canis familiaris
gtggaccatcaattttgcactttag

SEQ ID NO: 147229 - DNA, 25 bp, Canis familiaris
gtggcaccactgtttatcgtaattc

SEQ ID NO: 147230 - DNA, 25 bp, Canis familiaris
gtggacagcacttagtagctgtaga

SEQ ID NO: 147231 - DNA, 25 bp, Canis familiaris
gtggacacagtacatgatgctggag

SEQ ID NO: 147232 - DNA, 25 bp, Canis familiaris
gtggtataatatctgcatctgtgta

SEQ ID NO: 147233 - DNA, 25 bp, Canis familiaris
gtggcactgaatatgtccttgctga

SEQ ID NO: 147234 - DNA, 25 bp, Canis familiaris
gtggctctgattatgtacacgtgag

SEQ ID NO: 147235 - DNA, 25 bp, Canis familiaris
gtggccgtttttccggatggatctt

SEQ ID NO: 147236 - DNA, 25 bp, Canis familiaris
gtggctggttgtgaggttgggtccc

SEQ ID NO: 147237 - DNA, 25 bp, Canis familiaris
gtggctgtcttgacgttttcagact

SEQ ID NO: 147238 - DNA, 25 bp, Canis familiaris
gtggaacgagcctgtctgtatatct

SEQ ID NO: 147239 - DNA, 25 bp, Canis familiaris
gtggcaacagagcccgataggactc

SEQ ID NO: 147240 - DNA, 25 bp, Canis familiaris
gggccaggggcggataagcctgcat

SEQ ID NO: 147241 - DNA, 25 bp, Canis familiaris
gggccagatcggacgtaagtctcag

SEQ ID NO: 147242 - DNA, 25 bp, Canis familiaris
gggccagtggctaggtagcgtcatc

SEQ ID NO: 147243 - DNA, 25 bp, Canis familiaris
gggccagctgagcctggcatcagaa

SEQ ID NO: 147244 - DNA, 25 bp, Canis familiaris
gtggaattacgtggatcatacctaa

SEQ ID NO: 147245 - DNA, 25 bp, Canis familiaris
gtggaaaattgatgataagcctgta

SEQ ID NO: 147246 - DNA, 25 bp, Canis familiaris
gtggagagtttatattcctatgtga

SEQ ID NO: 147247 - DNA, 25 bp, Canis familiaris
gtggaggtttgacttcttccttgat

SEQ ID NO: 147248 - DNA, 25 bp, Canis familiaris
gtggatggtttgcatttctgtttta

SEQ ID NO: 147249 - DNA, 25 bp, Canis familiaris
gtggcggtttctataggtgtatata

SEQ ID NO: 147250 - DNA, 25 bp, Canis familiaris
gtggctgttggagtttagtttttat

SEQ ID NO: 147251 - DNA, 25 bp, Canis familiaris
gtggccttgaattttaactctgtat

SEQ ID NO: 147252 - DNA, 25 bp, Canis familiaris
gtggctcagtgatttatcaccacct

SEQ ID NO: 147253 - DNA, 25 bp, Canis familiaris
gtggccgtggagaactccaccgaca

SEQ ID NO: 147254 - DNA, 25 bp, Canis familiaris
gggcctgccaagaaccaaaattcaa

SEQ ID NO: 147255 - DNA, 25 bp, Canis familiaris
gtggttccaagaagcaagcggattc

SEQ ID NO: 147256 - DNA, 25 bp, Canis familiaris
gtggatcccaacaacgaagctattc

SEQ ID NO: 147257 - DNA, 25 bp, Canis familiaris
gtggatccctcaaataaagctctgc

SEQ ID NO: 147258 - DNA, 25 bp, Canis familiaris
gtggcacaactcttgcaggaaccta

SEQ ID NO: 147259 - DNA, 25 bp, Canis familiaris
gtggcatccaccctgaagtaatcca

SEQ ID NO: 147260 - DNA, 25 bp, Canis familiaris
gggcccaagccgaagaaatcctgga

SEQ ID NO: 147261 - DNA, 25 bp, Canis familiaris
gggccccacctgaaatgtcaggcta

SEQ ID NO: 147262 - DNA, 25 bp, Canis familiaris
gggacaccgacgagtgtcggtaata

SEQ ID NO: 147263 - DNA, 25 bp, Canis familiaris
gtggaccaggtcggggtctggtgga

SEQ ID NO: 147264 - DNA, 25 bp, Canis familiaris
gtggaccatggagggggttttctga

SEQ ID NO: 147265 - DNA, 25 bp, Canis familiaris
ggtacaatcccgagtcttttagagc

SEQ ID NO: 147266 - DNA, 25 bp, Canis familiaris
ggttgccaagggaggcttttgaagc

SEQ ID NO: 147267 - DNA, 25 bp, Canis familiaris
gggaaccagtggaggcgttcaaggc

SEQ ID NO: 147268 - DNA, 25 bp, Canis familiaris
gtggacatccggaaggacctttacg

SEQ ID NO: 147269 - DNA, 25 bp, Canis familiaris
gtggacatccgtaaggacctgtatg

SEQ ID NO: 147270 - DNA, 25 bp, Canis familiaris
gtggttccgatgagtgaccattcac

SEQ ID NO: 147271 - DNA, 25 bp, Canis familiaris
gtggttcctgtgaatctgggttgca

SEQ ID NO: 147272 - DNA, 25 bp, Canis familiaris
gtggattctctgacaatcaggtttg

SEQ ID NO: 147273 - DNA, 25 bp, Canis familiaris
gtggattctcacggtagcatgttaa

SEQ ID NO: 147274 - DNA, 25 bp, Canis familiaris
gtggacctcatggcctacatggcct

SEQ ID NO: 147275 - DNA, 25 bp, Canis familiaris
gtggacctcatggattttggcttag

SEQ ID NO: 147276 - DNA, 25 bp, Canis familiaris
gtggatagcttggattgttggaatt

SEQ ID NO: 147277 - DNA, 25 bp, Canis familiaris
gtggcattcttggagtgtgctgtga

SEQ ID NO: 147278 - DNA, 25 bp, Canis familiaris
gtggagtcattggttggcaggagtt

SEQ ID NO: 147279 - DNA, 25 bp, Canis familiaris
gtggatcacctgaggtcaggagttc

SEQ ID NO: 147280 - DNA, 25 bp, Canis familiaris
gtggcttccatgcgattgggcagat

SEQ ID NO: 147281 - DNA, 25 bp, Canis familiaris
gtggttccaggattcattgacattt

SEQ ID NO: 147282 - DNA, 25 bp, Canis familiaris
gggcttacctgtacactgacttgag

SEQ ID NO: 147283 - DNA, 25 bp, Canis familiaris
gggtttccctccagagcttgagggc

SEQ ID NO: 147284 - DNA, 25 bp, Canis familiaris
ggggcagtccctgttggtaaaggct

SEQ ID NO: 147285 - DNA, 25 bp, Canis familiaris
gggacggccctgtgattgtgaaggg

SEQ ID NO: 147286 - DNA, 25 bp, Canis familiaris
gtggaagagccctggcaggtctcag

SEQ ID NO: 147287 - DNA, 25 bp, Canis familiaris
gtggaagaagcagccgggcatcctg

SEQ ID NO: 147288 - DNA, 25 bp, Canis familiaris
gtggcaagaagacccagaggccccc

SEQ ID NO: 147289 - DNA, 25 bp, Canis familiaris
gtggcaggagaaatccgggcacgtc

SEQ ID NO: 147290 - DNA, 25 bp, Canis familiaris
gtggcagaaagcatacaggacactt

SEQ ID NO: 147291 - DNA, 25 bp, Canis familiaris
gtggcaacaagggacagctggcagc

SEQ ID NO: 147292 - DNA, 25 bp, Canis familiaris
gtggcggcaagtgatcagtgaagcc

SEQ ID NO: 147293 - DNA, 25 bp, Canis familiaris
gtggctggcataggatttgataaca

SEQ ID NO: 147294 - DNA, 25 bp, Canis familiaris
gtggatggcataggccaccacgaag

SEQ ID NO: 147295 - DNA, 25 bp, Canis familiaris
gtggatgctgaagccattcgcaaag

SEQ ID NO: 147296 - DNA, 25 bp, Canis familiaris
gtggaccaatgcagcattccacctg

SEQ ID NO: 147297 - DNA, 25 bp, Canis familiaris
gtggaacagatgagccgacatactg

SEQ ID NO: 147298 - DNA, 25 bp, Canis familiaris
gggaacaatagggcaccaatggtac

SEQ ID NO: 147299 - DNA, 25 bp, Canis familiaris
gtggagaaagagcgccctcaggaac

SEQ ID NO: 147300 - DNA, 25 bp, Canis familiaris
gggacaaagcaaccctacacgattc

SEQ ID NO: 147301 - DNA, 25 bp, Canis familiaris
ggtcacaaagtagtcctccaattcc

SEQ ID NO: 147302 - DNA, 25 bp, Canis familiaris
gggccaattgtagtcccaggaatac

SEQ ID NO: 147303 - DNA, 25 bp, Canis familiaris
gggccactttacctggaggaatgct

SEQ ID NO: 147304 - DNA, 25 bp, Canis familiaris
gggccctgcaaactgggacgaagct

SEQ ID NO: 147305 - DNA, 25 bp, Canis familiaris
gggccctgcaaaaccgactgagggt

SEQ ID NO: 147306 - DNA, 25 bp, Canis familiaris
gggccgctaactacacagactggca

SEQ ID NO: 147307 - DNA, 25 bp, Canis familiaris
gggctgcctaaacaaaactgcacaa

SEQ ID NO: 147308 - DNA, 25 bp, Canis familiaris
gtggccctataatttcaaagcccaa

SEQ ID NO: 147309 - DNA, 25 bp, Canis familiaris
gtggcagggattccactcagaacct

SEQ ID NO: 147310 - DNA, 25 bp, Canis familiaris
gtggaccagaagtccacaccatcct

SEQ ID NO: 147311 - DNA, 25 bp, Canis familiaris
gtggacgaactgacaccactcacac

SEQ ID NO: 147312 - DNA, 25 bp, Canis familiaris
gtggaagaagccatcgaccacatcc

SEQ ID NO: 147313 - DNA, 25 bp, Canis familiaris
gtggaaggactcatgaccacagtcc

SEQ ID NO: 147314 - DNA, 25 bp, Canis familiaris
gtggaagtcactgtagccaaacctc

SEQ ID NO: 147315 - DNA, 25 bp, Canis familiaris
gtggaaatcctcgtacagtgaccgt

SEQ ID NO: 147316 - DNA, 25 bp, Canis familiaris
gtggaaacacgagacggccgtgtag

SEQ ID NO: 147317 - DNA, 25 bp, Canis familiaris
gggaagctaaggaacaggggataag

SEQ ID NO: 147318 - DNA, 25 bp, Canis familiaris
gtggaagctactgtaaagggtaatt

SEQ ID NO: 147319 - DNA, 25 bp, Canis familiaris
gtggaacggcttgaaaggacaaaga

SEQ ID NO: 147320 - DNA, 25 bp, Canis familiaris
gtggaacagcttctgcaaaacaaca

SEQ ID NO: 147321 - DNA, 25 bp, Canis familiaris
gtggaagagcttcctcaaccacgaa

SEQ ID NO: 147322 - DNA, 25 bp, Canis familiaris
gtggaatgtcttaccaacttctgta

SEQ ID NO: 147323 - DNA, 25 bp, Canis familiaris
gtggatattcatgtacaagtttctg

SEQ ID NO: 147324 - DNA, 25 bp, Canis familiaris
gtggcaatgtatctgaaagctcttt

SEQ ID NO: 147325 - DNA, 25 bp, Canis familiaris
gtggccttgatattgaagagctttg

SEQ ID NO: 147326 - DNA, 25 bp, Canis familiaris
gggcctaatacattaatttgtgcac

SEQ ID NO: 147327 - DNA, 25 bp, Canis familiaris
gggccaatattttaattcagtgtcc

SEQ ID NO: 147328 - DNA, 25 bp, Canis familiaris
gtggccaatatttgtacttcaatcc

SEQ ID NO: 147329 - DNA, 25 bp, Canis familiaris
gtggcaacattctctagagtccaac

SEQ ID NO: 147330 - DNA, 25 bp, Canis familiaris
gtggcaactgtggtctatggtggca

SEQ ID NO: 147331 - DNA, 25 bp, Canis familiaris
gtggcacactctgtacatttgggtc

SEQ ID NO: 147332 - DNA, 25 bp, Canis familiaris
gtggaatcatctggtctttctggat

SEQ ID NO: 147333 - DNA, 25 bp, Canis familiaris
gtggagccactttctgtattgctgt

SEQ ID NO: 147334 - DNA, 25 bp, Canis familiaris
gtggacaccttcttgagtatgtttg

SEQ ID NO: 147335 - DNA, 25 bp, Canis familiaris
gtggcaccgtctttaatttcttggg

SEQ ID NO: 147336 - DNA, 25 bp, Canis familiaris
gtggatcccagtttagctttttttg

SEQ ID NO: 147337 - DNA, 25 bp, Canis familiaris
gtggactcttatttggcatttcttt

SEQ ID NO: 147338 - DNA, 25 bp, Canis familiaris
gtggactcatctttatttttgtctt

SEQ ID NO: 147339 - DNA, 25 bp, Canis familiaris
gtggacttcattgagttgatctttt

SEQ ID NO: 147340 - DNA, 25 bp, Canis familiaris
gtggatgttcgatgagttgtatttt

SEQ ID NO: 147341 - DNA, 25 bp, Canis familiaris
gtggcatttcagaagagatttaatc

SEQ ID NO: 147342 - DNA, 25 bp, Canis familiaris
gtggcataaagtgggaatatactca

SEQ ID NO: 147343 - DNA, 25 bp, Canis familiaris
gtggctgacaggcaggtcaaagtgc

SEQ ID NO: 147344 - DNA, 25 bp, Canis familiaris
gtggctacccggggaatggtgctgc

SEQ ID NO: 147345 - DNA, 25 bp, Canis familiaris
gtggcttctggctcagaactgggga

SEQ ID NO: 147346 - DNA, 25 bp, Canis familiaris
gtggcttcgtgtttggacgggagtc

SEQ ID NO: 147347 - DNA, 25 bp, Canis familiaris
gtggaatgtttgtaggatgagtgga

SEQ ID NO: 147348 - DNA, 25 bp, Canis familiaris
gtggcaatgtcaagttgggcatgta

SEQ ID NO: 147349 - DNA, 25 bp, Canis familiaris
gtggcgtacaaattcaggctgctga

SEQ ID NO: 147350 - DNA, 25 bp, Canis familiaris
gtggctgtaagcaacctggtgctaa

SEQ ID NO: 147351 - DNA, 25 bp, Canis familiaris
gtggctggtagaattctatgctcca

SEQ ID NO: 147352 - DNA, 25 bp, Canis familiaris
gtggatgttagattgcatcttcatt

SEQ ID NO: 147353 - DNA, 25 bp, Canis familiaris
gtggagtacaatggcactgtgatat

SEQ ID NO: 147354 - DNA, 25 bp, Canis familiaris
gtggagccaaacgggtcatcatctc

SEQ ID NO: 147355 - DNA, 25 bp, Canis familiaris
gtggatccaagaccactgtcttctt

SEQ ID NO: 147356 - DNA, 25 bp, Canis familiaris
gtggacatccagaacaagcgcttct

SEQ ID NO: 147357 - DNA, 25 bp, Canis familiaris
gtggacccctatgaggtgtcctacc

SEQ ID NO: 147358 - DNA, 25 bp, Canis familiaris
gtggagaccccaactggtttatgaa

SEQ ID NO: 147359 - DNA, 25 bp, Canis familiaris
gtggatgaacctggagggtattatg

SEQ ID NO: 147360 - DNA, 25 bp, Canis familiaris
gtggatgaagctgtggcggttctac

SEQ ID NO: 147361 - DNA, 25 bp, Canis familiaris
gtggcagaagctgtgggtggtgttc

SEQ ID NO: 147362 - DNA, 25 bp, Canis familiaris
gtggatgaagttctgcggctggttc

SEQ ID NO: 147363 - DNA, 25 bp, Canis familiaris
gtggatggagtgatgaatggcgagt

SEQ ID NO: 147364 - DNA, 25 bp, Canis familiaris
gtggatggggaagagctgcagatgg

SEQ ID NO: 147365 - DNA, 25 bp, Canis familiaris
gtggatggggaagagctgcagatgg

SEQ ID NO: 147366 - DNA, 25 bp, Canis familiaris
gtggagttggtaggtgtgcgcaggc

SEQ ID NO: 147367 - DNA, 25 bp, Canis familiaris
gtggagttggtaggtgtgcgcaggc

SEQ ID NO: 147368 - DNA, 25 bp, Canis familiaris
gtggagttggtaggtgtgcgcaggc

SEQ ID NO: 147369 - DNA, 25 bp, Canis familiaris
gtggagttggtaggtgtgcgcaggc

SEQ ID NO: 147370 - DNA, 25 bp, Canis familiaris
gtggagttggtaggtgtgcgcaggc

SEQ ID NO: 147371 - DNA, 25 bp, Canis familiaris
gtggagaggtgtcggatgtggggaa

SEQ ID NO: 147372 - DNA, 25 bp, Canis familiaris
gtggaggatcgaccagtgtggggac

SEQ ID NO: 147373 - DNA, 25 bp, Canis familiaris
gtggaggacaagctggtggaggacc

SEQ ID NO: 147374 - DNA, 25 bp, Canis familiaris
ggtgtagtccggtggacaggaccat

SEQ ID NO: 147375 - DNA, 25 bp, Canis familiaris
gggtggtcccaagaatcggcaaatg

SEQ ID NO: 147376 - DNA, 25 bp, Canis familiaris
gtggcatggtggcaaagaacggcaa

SEQ ID NO: 147377 - DNA, 25 bp, Canis familiaris
gggctaatggcctaaaacaagacta

SEQ ID NO: 147378 - DNA, 25 bp, Canis familiaris
gtggccttggcctgatcaaaagtca

SEQ ID NO: 147379 - DNA, 25 bp, Canis familiaris
gtggcccttctccaacaaaatgtag

SEQ ID NO: 147380 - DNA, 25 bp, Canis familiaris
gtggctcacttttaaaatcatttgg

SEQ ID NO: 147381 - DNA, 25 bp, Canis familiaris
gtggctcactcttaaacatcataaa

SEQ ID NO: 147382 - DNA, 25 bp, Canis familiaris
gtggctacagctacaaatcaataaa

SEQ ID NO: 147383 - DNA, 25 bp, Canis familiaris
gtggctatggtcaatattcctagga

SEQ ID NO: 147384 - DNA, 25 bp, Canis familiaris
gtggctcatgggaaataaccaggtc

SEQ ID NO: 147385 - DNA, 25 bp, Canis familiaris
gtggctccgcggactataacagaga

SEQ ID NO: 147386 - DNA, 25 bp, Canis familiaris
gggcccggggctgaagaagaaagct

SEQ ID NO: 147387 - DNA, 25 bp, Canis familiaris
gggctccagtggcccttagtagaca

SEQ ID NO: 147388 - DNA, 25 bp, Canis familiaris
gggctcacttgggggggtagataag

SEQ ID NO: 147389 - DNA, 25 bp, Canis familiaris
gggctactattccatgggccttata

SEQ ID NO: 147390 - DNA, 25 bp, Canis familiaris
gtggctcctaacctggtgtttgtaa

SEQ ID NO: 147391 - DNA, 25 bp, Canis familiaris
gtggcccaagaggggtcgtggagac

SEQ ID NO: 147392 - DNA, 25 bp, Canis familiaris
gtggctccaccgaggtggtggcagt

SEQ ID NO: 147393 - DNA, 25 bp, Canis familiaris
gtggcccaggtcagtttgctgagaa

SEQ ID NO: 147394 - DNA, 25 bp, Canis familiaris
gtggcctgaggtagattttggtaag

SEQ ID NO: 147395 - DNA, 25 bp, Canis familiaris
gtggcaagattgagatgttaggtag

SEQ ID NO: 147396 - DNA, 25 bp, Canis familiaris
gtggcggatttttgtttgtgtagtt

SEQ ID NO: 147397 - DNA, 25 bp, Canis familiaris
gtggcactgattatacttgtttttt

SEQ ID NO: 147398 - DNA, 25 bp, Canis familiaris
gtggcagttttttctagttcttagg

SEQ ID NO: 147399 - DNA, 25 bp, Canis familiaris
gggcttatgttaagtaacttctagg

SEQ ID NO: 147400 - DNA, 25 bp, Canis familiaris
gggctttggatgagtgaaatgtgca

SEQ ID NO: 147401 - DNA, 25 bp, Canis familiaris
gtggctttccagggggaatgcctag

SEQ ID NO: 147402 - DNA, 25 bp, Canis familiaris
gtggctcccacgggagtgagtgcct

SEQ ID NO: 147403 - DNA, 25 bp, Canis familiaris
gtggcttggcctgtatggagttcca

SEQ ID NO: 147404 - DNA, 25 bp, Canis familiaris
gtggctctttcaaaagggtccacag

SEQ ID NO: 147405 - DNA, 25 bp, Canis familiaris
gggctctaaagaaattggacctcaa

SEQ ID NO: 147406 - DNA, 25 bp, Canis familiaris
gtggcctgagggaggggtaccagca

SEQ ID NO: 147407 - DNA, 25 bp, Canis familiaris
gtggccgaaaagcggctcatcccag

SEQ ID NO: 147408 - DNA, 25 bp, Canis familiaris
gtggcctgaaaatctggtctcacta

SEQ ID NO: 147409 - DNA, 25 bp, Canis familiaris
gtggccgctcgaaacgaatgtcact

SEQ ID NO: 147410 - DNA, 25 bp, Canis familiaris
gggcctccgaatactatgagacatc

SEQ ID NO: 147411 - DNA, 25 bp, Canis familiaris
gggcctgaggccactacaggatcat

SEQ ID NO: 147412 - DNA, 25 bp, Canis familiaris
gtggccaaggcctctaaggagactc

SEQ ID NO: 147413 - DNA, 25 bp, Canis familiaris
gtggctttgagctgaccaaggagca

SEQ ID NO: 147414 - DNA, 25 bp, Canis familiaris
gtggctgtaacaccccaagggaaga

SEQ ID NO: 147415 - DNA, 25 bp, Canis familiaris
gggcctaactttccaagggccagtg

SEQ ID NO: 147416 - DNA, 25 bp, Canis familiaris
gggccgaacgttacagaacaccatg

SEQ ID NO: 147417 - DNA, 25 bp, Canis familiaris
gggcctgaccagtgaaaagcttagt

SEQ ID NO: 147418 - DNA, 25 bp, Canis familiaris
gtggcctagttgggaacaggttcac

SEQ ID NO: 147419 - DNA, 25 bp, Canis familiaris
gggccaagcctggtgtacagaggta

SEQ ID NO: 147420 - DNA, 25 bp, Canis familiaris
gggccaacatgggtgttcagatgag

SEQ ID NO: 147421 - DNA, 25 bp, Canis familiaris
gtggcaagatttctgttcctgcatt

SEQ ID NO: 147422 - DNA, 25 bp, Canis familiaris
gtggcaagatattaagcctcctgct

SEQ ID NO: 147423 - DNA, 25 bp, Canis familiaris
gtggctattatttggtctcctaact

SEQ ID NO: 147424 - DNA, 25 bp, Canis familiaris
gtggctgttatttttgtccttacta

SEQ ID NO: 147425 - DNA, 25 bp, Canis familiaris
gtggcttcattatttgttccttctc

SEQ ID NO: 147426 - DNA, 25 bp, Canis familiaris
gtggcatctattattgattttgtct

SEQ ID NO: 147427 - DNA, 25 bp, Canis familiaris
gtggcatctgttttgctgcttttaa

SEQ ID NO: 147428 - DNA, 25 bp, Canis familiaris
gtggactgaatctgcttgttgatca

SEQ ID NO: 147429 - DNA, 25 bp, Canis familiaris
gtggagcttataggcattgttgaaa

SEQ ID NO: 147430 - DNA, 25 bp, Canis familiaris
gtggacttcattcgcaatgttccca

SEQ ID NO: 147431 - DNA, 25 bp, Canis familiaris
gtggacctcattgactgcttgtccc

SEQ ID NO: 147432 - DNA, 25 bp, Canis familiaris
gtggacaccattcaagcatggcatc

SEQ ID NO: 147433 - DNA, 25 bp, Canis familiaris
gtggagtccatctgaatgcaccagc

SEQ ID NO: 147434 - DNA, 25 bp, Canis familiaris
gtggagctactaccagatgcagccc

SEQ ID NO: 147435 - DNA, 25 bp, Canis familiaris
gtggacagcctgtcacagagtgctc

SEQ ID NO: 147436 - DNA, 25 bp, Canis familiaris
gtggacacacatcacagagagtgta

SEQ ID NO: 147437 - DNA, 25 bp, Canis familiaris
gtggaatacatttcatggtttacaa

SEQ ID NO: 147438 - DNA, 25 bp, Canis familiaris
gtggcataaatattcatgattgtta

SEQ ID NO: 147439 - DNA, 25 bp, Canis familiaris
gtggcacaaaatgctgctctttggg

SEQ ID NO: 147440 - DNA, 25 bp, Canis familiaris
gtggccagagttaccagttctgtgg

SEQ ID NO: 147441 - DNA, 25 bp, Canis familiaris
gtggctggttctataggttgttgca

SEQ ID NO: 147442 - DNA, 25 bp, Canis familiaris
gtggctgttcttcaagcacttgcat

SEQ ID NO: 147443 - DNA, 25 bp, Canis familiaris
gtggctgaacttaaacctgattgtt

SEQ ID NO: 147444 - DNA, 25 bp, Canis familiaris
gggctacactgaggaacccaaggtg

SEQ ID NO: 147445 - DNA, 25 bp, Canis familiaris
ggccaaactaaatcacccggtgagg

SEQ ID NO: 147446 - DNA, 25 bp, Canis familiaris
gggcaagttcatgaaacccgggaag

SEQ ID NO: 147447 - DNA, 25 bp, Canis familiaris
gtggagagttactcacacgccattc

SEQ ID NO: 147448 - DNA, 25 bp, Canis familiaris
gtggctgggtactaccatgccaatg

SEQ ID NO: 147449 - DNA, 25 bp, Canis familiaris
gtggctgtttaattcctgatctatt

SEQ ID NO: 147450 - DNA, 25 bp, Canis familiaris
gtggctatttagtttctatttctgc

SEQ ID NO: 147451 - DNA, 25 bp, Canis familiaris
gggcgatctggtgcttctataaagc

SEQ ID NO: 147452 - DNA, 25 bp, Canis familiaris
gtggcgttgtgtgctgaaaatcagt

SEQ ID NO: 147453 - DNA, 25 bp, Canis familiaris
gtggcttgttggggatttaagtgag

SEQ ID NO: 147454 - DNA, 25 bp, Canis familiaris
gtggctacctgggctattgtaagcg

SEQ ID NO: 147455 - DNA, 25 bp, Canis familiaris
gtggcatagccatgttttgaaatgt

SEQ ID NO: 147456 - DNA, 25 bp, Canis familiaris
gtggctgagctgttgtctcatggaa

SEQ ID NO: 147457 - DNA, 25 bp, Canis familiaris
gtggcagtgtgatactcaggcaagg

SEQ ID NO: 147458 - DNA, 25 bp, Canis familiaris
gtggctggtaaaccagcaccgcgac

SEQ ID NO: 147459 - DNA, 25 bp, Canis familiaris
gtggaatgtacatcgcaaactggat

SEQ ID NO: 147460 - DNA, 25 bp, Canis familiaris
gtggacggacaaggagacagcccag

SEQ ID NO: 147461 - DNA, 25 bp, Canis familiaris
gtggaaggaaaggcagctccccagg

SEQ ID NO: 147462 - DNA, 25 bp, Canis familiaris
gtggacagaaatactgcccaccctc

SEQ ID NO: 147463 - DNA, 25 bp, Canis familiaris
gtggactgagcatttctgccaagca

SEQ ID NO: 147464 - DNA, 25 bp, Canis familiaris
gtggcctcagcatgaatcagatcag

SEQ ID NO: 147465 - DNA, 25 bp, Canis familiaris
gtggcctcagcatgaatcagatcag

SEQ ID NO: 147466 - DNA, 25 bp, Canis familiaris
gtggcctcagcatgaatcagatcag

SEQ ID NO: 147467 - DNA, 25 bp, Canis familiaris
gtggcctcagcatgaatcagatcag

SEQ ID NO: 147468 - DNA, 25 bp, Canis familiaris
gtggcccagctcaaacagaaggtca

SEQ ID NO: 147469 - DNA, 25 bp, Canis familiaris
gtggcacaacacatacagcattggt

SEQ ID NO: 147470 - DNA, 25 bp, Canis familiaris
gtggccacacaagtaccatggtgaa

SEQ ID NO: 147471 - DNA, 25 bp, Canis familiaris
gtggcaccaagagtgacctgctgga

SEQ ID NO: 147472 - DNA, 25 bp, Canis familiaris
gggcctcaggactatccagatggaa

SEQ ID NO: 147473 - DNA, 25 bp, Canis familiaris
gtggccatcagggctgtggcagaga

SEQ ID NO: 147474 - DNA, 25 bp, Canis familiaris
gggccatgcaggagcttgaagcact

SEQ ID NO: 147475 - DNA, 25 bp, Canis familiaris
gtggctcgaggtgatctaggcattg

SEQ ID NO: 147476 - DNA, 25 bp, Canis familiaris
gtggcttgtggtcactagacactac

SEQ ID NO: 147477 - DNA, 25 bp, Canis familiaris
gtggcttctgcggagaccgaaaacc

SEQ ID NO: 147478 - DNA, 25 bp, Canis familiaris
gggcccgcgaagtgcgcaataatca

SEQ ID NO: 147479 - DNA, 25 bp, Canis familiaris
gggcccgtggaaggttatacactag

SEQ ID NO: 147480 - DNA, 25 bp, Canis familiaris
gtggcaccaatgtgagcgtattccc

SEQ ID NO: 147481 - DNA, 25 bp, Canis familiaris
gtggccacaaacacgatgaactcgc

SEQ ID NO: 147482 - DNA, 25 bp, Canis familiaris
gtggccacagaacacaggaccaggg

SEQ ID NO: 147483 - DNA, 25 bp, Canis familiaris
gtggcccacagaacacaggaaccag

SEQ ID NO: 147484 - DNA, 25 bp, Canis familiaris
gtggctctaagcatacaggtacata

SEQ ID NO: 147485 - DNA, 25 bp, Canis familiaris
gtggcgcgagagagaagagttatag

SEQ ID NO: 147486 - DNA, 25 bp, Canis familiaris
gtggccagaagaaagggcttctttc

SEQ ID NO: 147487 - DNA, 25 bp, Canis familiaris
gggcctgaagaatcgaggattttct

SEQ ID NO: 147488 - DNA, 25 bp, Canis familiaris
gggcctgaggaatcggaagaatttt

SEQ ID NO: 147489 - DNA, 25 bp, Canis familiaris
gtggccgggagctgggagagtatgg

SEQ ID NO: 147490 - DNA, 25 bp, Canis familiaris
gtggccgttgaggggtaactgtgcc

SEQ ID NO: 147491 - DNA, 25 bp, Canis familiaris
gtggccgttacatggcaagaagctc

SEQ ID NO: 147492 - DNA, 25 bp, Canis familiaris
gggctttgtacatccagagcaaccc

SEQ ID NO: 147493 - DNA, 25 bp, Canis familiaris
gggctcttgttccaggctgaaaccc

SEQ ID NO: 147494 - DNA, 25 bp, Canis familiaris
gggcgtctggtccacaggaagacct

SEQ ID NO: 147495 - DNA, 25 bp, Canis familiaris
gggcgtctggtccacaggaagacct

SEQ ID NO: 147496 - DNA, 25 bp, Canis familiaris
gggcgtctggtccacaggaagacct

SEQ ID NO: 147497 - DNA, 25 bp, Canis familiaris
gggcgtctggtccacaggaagacct

SEQ ID NO: 147498 - DNA, 25 bp, Canis familiaris
gtggactttgaccaagggcagagcg

SEQ ID NO: 147499 - DNA, 25 bp, Canis familiaris
gtggacccgaccaagatgtctgagg

SEQ ID NO: 147500 - DNA, 25 bp, Canis familiaris
gtggacccacctcgagatgttgagg

SEQ ID NO: 147501 - DNA, 25 bp, Canis familiaris
gtggacgccatcgtgagcgagtgga

SEQ ID NO: 147502 - DNA, 25 bp, Canis familiaris
gtggacaggccccagagatgctgga

SEQ ID NO: 147503 - DNA, 25 bp, Canis familiaris
gtggccaaaggccagacagctggat

SEQ ID NO: 147504 - DNA, 25 bp, Canis familiaris
gggcattaagccctaactgcaaatt

SEQ ID NO: 147505 - DNA, 25 bp, Canis familiaris
gtggcttaagacatcacacatttat

SEQ ID NO: 147506 - DNA, 25 bp, Canis familiaris
gtggcatctcaacatacccacttga

SEQ ID NO: 147507 - DNA, 25 bp, Canis familiaris
gtggcatcataatacgaaccttaac

SEQ ID NO: 147508 - DNA, 25 bp, Canis familiaris
gtggaatcatccttctgtatcctaa

SEQ ID NO: 147509 - DNA, 25 bp, Canis familiaris
gtggcataaccacttgaatccagaa

SEQ ID NO: 147510 - DNA, 25 bp, Canis familiaris
gtggcaaagccacgctgagttacag

SEQ ID NO: 147511 - DNA, 25 bp, Canis familiaris
gtggaaatctcacagcagcttcagc

SEQ ID NO: 147512 - DNA, 25 bp, Canis familiaris
gtggaaatagcctgatgtccatcag

SEQ ID NO: 147513 - DNA, 25 bp, Canis familiaris
gtggaagaaccggttctccagaact

SEQ ID NO: 147514 - DNA, 25 bp, Canis familiaris
gggaggagacccacatctccaaata

SEQ ID NO: 147515 - DNA, 25 bp, Canis familiaris
gggctggaaccgaacacttaaagct

SEQ ID NO: 147516 - DNA, 25 bp, Canis familiaris
gggccggagccggaagccaagaaga

SEQ ID NO: 147517 - DNA, 25 bp, Canis familiaris
gtggcatcggagctgagacctagag

SEQ ID NO: 147518 - DNA, 25 bp, Canis familiaris
gggctcaggtcatgaacccaaggac

SEQ ID NO: 147519 - DNA, 25 bp, Canis familiaris
gggcctggagtgtgacggcaaggtc

SEQ ID NO: 147520 - DNA, 25 bp, Canis familiaris
gggccagggggacctggaattcctg

SEQ ID NO: 147521 - DNA, 25 bp, Canis familiaris
gggccagagaggaaaccgaaccgag

SEQ ID NO: 147522 - DNA, 25 bp, Canis familiaris
gggccaggaggagagctaatgaccg

SEQ ID NO: 147523 - DNA, 25 bp, Canis familiaris
gggctatcagggtctagttctacca

SEQ ID NO: 147524 - DNA, 25 bp, Canis familiaris
gggcctgagagtctgcatttctaac

SEQ ID NO: 147525 - DNA, 25 bp, Canis familiaris
gggcttggccataagctttctgaat

SEQ ID NO: 147526 - DNA, 25 bp, Canis familiaris
gtggcggccaagaagattctctgcc

SEQ ID NO: 147527 - DNA, 25 bp, Canis familiaris
gggcggattgcagaattcttccctg

SEQ ID NO: 147528 - DNA, 25 bp, Canis familiaris
gtggcggcattgcagaatcctaggc

SEQ ID NO: 147529 - DNA, 25 bp, Canis familiaris
gtggcaggcactgtgaaccgaggca

SEQ ID NO: 147530 - DNA, 25 bp, Canis familiaris
gattgttcttgttattatgctgttt

SEQ ID NO: 147531 - DNA, 25 bp, Canis familiaris
gtggcgctgcgcgagcagaaggcgc

SEQ ID NO: 147532 - DNA, 25 bp, Canis familiaris
gtggcggcgccaacatggtgagcgc

SEQ ID NO: 147533 - DNA, 25 bp, Canis familiaris
gtggctggcacctatctgggtgccc

SEQ ID NO: 147534 - DNA, 25 bp, Canis familiaris
gtggaagccacatctcagtgttctc

SEQ ID NO: 147535 - DNA, 25 bp, Canis familiaris
gtggacacggcattccagatggggc

SEQ ID NO: 147536 - DNA, 25 bp, Canis familiaris
gtggacacataccaccgagggagga

SEQ ID NO: 147537 - DNA, 25 bp, Canis familiaris
gtggacaattcgccacaaccttgag

SEQ ID NO: 147538 - DNA, 25 bp, Canis familiaris
gtggacaatagagcataagcctggc

SEQ ID NO: 147539 - DNA, 25 bp, Canis familiaris
gtggccttgaggataacctgcactg

SEQ ID NO: 147540 - DNA, 25 bp, Canis familiaris
gtggctatgtgacagtggccggcct

SEQ ID NO: 147541 - DNA, 25 bp, Canis familiaris
gggcttggaggattctcctggctac

SEQ ID NO: 147542 - DNA, 25 bp, Canis familiaris
gggctcttggccttctgaaggtcac

SEQ ID NO: 147543 - DNA, 25 bp, Canis familiaris
gtggcctctgtctttgtaaggtgtt

SEQ ID NO: 147544 - DNA, 25 bp, Canis familiaris
gtggcactgtgttttggaaagcgac

SEQ ID NO: 147545 - DNA, 25 bp, Canis familiaris
gtggcagctcgttgttgagagttgc

SEQ ID NO: 147546 - DNA, 25 bp, Canis familiaris
gtggcactggtttcaggtgttgcag

SEQ ID NO: 147547 - DNA, 25 bp, Canis familiaris
gtggaatggctctcaatggtgtcat

SEQ ID NO: 147548 - DNA, 25 bp, Canis familiaris
gtggaaggctgcacaattcctcacc

SEQ ID NO: 147549 - DNA, 25 bp, Canis familiaris
gtggaatgggcttgaatgatttcac

SEQ ID NO: 147550 - DNA, 25 bp, Canis familiaris
ggggatggacttttttgatacgaat

SEQ ID NO: 147551 - DNA, 25 bp, Canis familiaris
gggcttggactaattctttgaggaa

SEQ ID NO: 147552 - DNA, 25 bp, Canis familiaris
gggggcctccaacatttaggaactg

SEQ ID NO: 147553 - DNA, 25 bp, Canis familiaris
gggagatcgcccaggatttcaaaac

SEQ ID NO: 147554 - DNA, 25 bp, Canis familiaris
ggtacacggactataccgcacaaca

SEQ ID NO: 147555 - DNA, 25 bp, Canis familiaris
gggcgatgggattcaataccgtcaa

SEQ ID NO: 147556 - DNA, 25 bp, Canis familiaris
gggcgggagatttagtaagataaca

SEQ ID NO: 147557 - DNA, 25 bp, Canis familiaris
ggggggatgtaatattgcaaaatgc

SEQ ID NO: 147558 - DNA, 25 bp, Canis familiaris
gggcgggggacggatttatgactgg

SEQ ID NO: 147559 - DNA, 25 bp, Canis familiaris
gggcgcggtcgaggaggtttagcgg

SEQ ID NO: 147560 - DNA, 25 bp, Canis familiaris
gggcccttctagaacgtctggaggg

SEQ ID NO: 147561 - DNA, 25 bp, Canis familiaris
gggccccagctgtaaacctgggaag

SEQ ID NO: 147562 - DNA, 25 bp, Canis familiaris
gggccctagtaataccatggttagc

SEQ ID NO: 147563 - DNA, 25 bp, Canis familiaris
gggccccagtggaaactgctggtct

SEQ ID NO: 147564 - DNA, 25 bp, Canis familiaris
gggcgcccgatgggatgagcgccgc

SEQ ID NO: 147565 - DNA, 25 bp, Canis familiaris
gtggcagccaaaaggagagcccctg

SEQ ID NO: 147566 - DNA, 25 bp, Canis familiaris
gggctcagtcaatgcttgtgcccac

SEQ ID NO: 147567 - DNA, 25 bp, Canis familiaris
gggccaggccaagttgtgttaagac

SEQ ID NO: 147568 - DNA, 25 bp, Canis familiaris
gggccctgccaattaatgttaaaga

SEQ ID NO: 147569 - DNA, 25 bp, Canis familiaris
gggccttcctatttattataatcca

SEQ ID NO: 147570 - DNA, 25 bp, Canis familiaris
gggccttctacatattttcacttga

SEQ ID NO: 147571 - DNA, 25 bp, Canis familiaris
gggccttcaagaacagactcccttt

SEQ ID NO: 147572 - DNA, 25 bp, Canis familiaris
gggctattaacatcaaccaatcttt

SEQ ID NO: 147573 - DNA, 25 bp, Canis familiaris
gtggctttaaagttgaccaatccgg

SEQ ID NO: 147574 - DNA, 25 bp, Canis familiaris
gtggcattcataataaataccgatg

SEQ ID NO: 147575 - DNA, 25 bp, Canis familiaris
gtggcatctacacttaaacaggtga

SEQ ID NO: 147576 - DNA, 25 bp, Canis familiaris
gtggctcagtcagctaaacatcgga

SEQ ID NO: 147577 - DNA, 25 bp, Canis familiaris
gtggccctgcaggctgagaaactgg

SEQ ID NO: 147578 - DNA, 25 bp, Canis familiaris
gtggcctcatctccatagtaaatgg

SEQ ID NO: 147579 - DNA, 25 bp, Canis familiaris
gtggcttttccatatgataatgtcg

SEQ ID NO: 147580 - DNA, 25 bp, Canis familiaris
gtggctgctttgcatttggaaggcg

SEQ ID NO: 147581 - DNA, 25 bp, Canis familiaris
gggcctctttgaaggtgagagacag

SEQ ID NO: 147582 - DNA, 25 bp, Canis familiaris
gtggcccccttgggacaaaatggag

SEQ ID NO: 147583 - DNA, 25 bp, Canis familiaris
gggccgtccctgggagcattaagag

SEQ ID NO: 147584 - DNA, 25 bp, Canis familiaris
gggcccagaacggggcatccaagac

SEQ ID NO: 147585 - DNA, 25 bp, Canis familiaris
gggcccaaaggcaggcaaagacaac

SEQ ID NO: 147586 - DNA, 25 bp, Canis familiaris
gtggccgacgaactcaacaagaaca

SEQ ID NO: 147587 - DNA, 25 bp, Canis familiaris
gtggcgcagtcggttaagcggcaac

SEQ ID NO: 147588 - DNA, 25 bp, Canis familiaris
gtggccagcgcgggtgagaaggcgt

SEQ ID NO: 147589 - DNA, 25 bp, Canis familiaris
gtggcagggggacatgcaggggtgg

SEQ ID NO: 147590 - DNA, 25 bp, Canis familiaris
gtggctgtgggaggaacagggaggc

SEQ ID NO: 147591 - DNA, 25 bp, Canis familiaris
gggcagagaggagggacccgaacca

SEQ ID NO: 147592 - DNA, 25 bp, Canis familiaris
gggcagatgggagggttctcttagc

SEQ ID NO: 147593 - DNA, 25 bp, Canis familiaris
gtggcagagcgacagcgtgtcactt

SEQ ID NO: 147594 - DNA, 25 bp, Canis familiaris
gtggcacctgacaagcaggccaccg

SEQ ID NO: 147595 - DNA, 25 bp, Canis familiaris
gtggaacatgaccatcatctccacc

SEQ ID NO: 147596 - DNA, 25 bp, Canis familiaris
gtggaacgtctttgtcagcactgag

SEQ ID NO: 147597 - DNA, 25 bp, Canis familiaris
gtggcccaattggttgagcatctga

SEQ ID NO: 147598 - DNA, 25 bp, Canis familiaris
gtggcttcacatagttgtacgctga

SEQ ID NO: 147599 - DNA, 25 bp, Canis familiaris
gtggctgtgccatcttgatgaccat

SEQ ID NO: 147600 - DNA, 25 bp, Canis familiaris
gggctggccacaactgagacacagc

SEQ ID NO: 147601 - DNA, 25 bp, Canis familiaris
gtggctgtctactcggagcaggaca

SEQ ID NO: 147602 - DNA, 25 bp, Canis familiaris
gtggcttcccaggcgggagagagcc

SEQ ID NO: 147603 - DNA, 25 bp, Canis familiaris
gtggcaaccacttcggtgcagaaga

SEQ ID NO: 147604 - DNA, 25 bp, Canis familiaris
gtggaactcagccaaggcacagggt

SEQ ID NO: 147605 - DNA, 25 bp, Canis familiaris
gggcatgcacctcaagaacgtggac

SEQ ID NO: 147606 - DNA, 25 bp, Canis familiaris
gggctcacacttacgaactcttagc

SEQ ID NO: 147607 - DNA, 25 bp, Canis familiaris
gtggcgccttatagatcaattttag

SEQ ID NO: 147608 - DNA, 25 bp, Canis familiaris
gtggcagcctttggaatattttaca

SEQ ID NO: 147609 - DNA, 25 bp, Canis familiaris
gtggcaccttcaggaggtcttctta

SEQ ID NO: 147610 - DNA, 25 bp, Canis familiaris
gtggcatcgatgtgcagaggtgctt

SEQ ID NO: 147611 - DNA, 25 bp, Canis familiaris
gtggcatcagctccaggaaggaatg

SEQ ID NO: 147612 - DNA, 25 bp, Canis familiaris
gtggcaggctctaggggagacgacg

SEQ ID NO: 147613 - DNA, 25 bp, Canis familiaris
gggcagatgcacaggcagaaagctg

SEQ ID NO: 147614 - DNA, 25 bp, Canis familiaris
gggcatgtgctttgtgtaaagatgg

SEQ ID NO: 147615 - DNA, 25 bp, Canis familiaris
gggctgtgcctacaaaaagggcatc

SEQ ID NO: 147616 - DNA, 25 bp, Canis familiaris
gggcgtctccgggaagaacatggct

SEQ ID NO: 147617 - DNA, 25 bp, Canis familiaris
gggcgtgtccccaaaagatgattgt

SEQ ID NO: 147618 - DNA, 25 bp, Canis familiaris
gtggccccttcaggagaggtatttt

SEQ ID NO: 147619 - DNA, 25 bp, Canis familiaris
gtggcatatgcatttcaggcagcag

SEQ ID NO: 147620 - DNA, 25 bp, Canis familiaris
gtggcaatgcctatcagcacagcaa

SEQ ID NO: 147621 - DNA, 25 bp, Canis familiaris
gggcgatccacaatccaatgataca

SEQ ID NO: 147622 - DNA, 25 bp, Canis familiaris
gggccatcgattcccaagataatgg

SEQ ID NO: 147623 - DNA, 25 bp, Canis familiaris
gggccccatttgatgacaacaggac

SEQ ID NO: 147624 - DNA, 25 bp, Canis familiaris
gggccagcttccaggacagagagga

SEQ ID NO: 147625 - DNA, 25 bp, Canis familiaris
gtggcgcagtgtcaccaagaatgat

SEQ ID NO: 147626 - DNA, 25 bp, Canis familiaris
gtggcacggcatcccaagggagaga

SEQ ID NO: 147627 - DNA, 25 bp, Canis familiaris
gggctggtgatgtctcaggggaaga

SEQ ID NO: 147628 - DNA, 25 bp, Canis familiaris
gtggctgattgtgcttgggatgaaa

SEQ ID NO: 147629 - DNA, 25 bp, Canis familiaris
gtggctcatttggttggacatttga

SEQ ID NO: 147630 - DNA, 25 bp, Canis familiaris
gtggctcagccggttaggcattcac

SEQ ID NO: 147631 - DNA, 25 bp, Canis familiaris
gtggctcagcggttaagcacttgcc

SEQ ID NO: 147632 - DNA, 25 bp, Canis familiaris
gtggctctgagtccttgagccttct

SEQ ID NO: 147633 - DNA, 25 bp, Canis familiaris
gggctgcggcattcttagtgcagtt

SEQ ID NO: 147634 - DNA, 25 bp, Canis familiaris
gggctgcaggcagtgcttgaaggcg

SEQ ID NO: 147635 - DNA, 25 bp, Canis familiaris
gggctgagtgcagtgctaaactgct

SEQ ID NO: 147636 - DNA, 25 bp, Canis familiaris
gtggctgatctcattgaatccatgt

SEQ ID NO: 147637 - DNA, 25 bp, Canis familiaris
gtggctgattctaagagctagagtc

SEQ ID NO: 147638 - DNA, 25 bp, Canis familiaris
gggctgtgtctttatgctgggacta

SEQ ID NO: 147639 - DNA, 25 bp, Canis familiaris
gtggctgttatttatgctggtgtaa

SEQ ID NO: 147640 - DNA, 25 bp, Canis familiaris
gtggcatgtttgtatatctggctgt

SEQ ID NO: 147641 - DNA, 25 bp, Canis familiaris
gtggctgactatcatcatccatcgt

SEQ ID NO: 147642 - DNA, 25 bp, Canis familiaris
gtggcggcaatcaatgctgctatcc

SEQ ID NO: 147643 - DNA, 25 bp, Canis familiaris
gtggcggagatcaatgtcctcatcc

SEQ ID NO: 147644 - DNA, 25 bp, Canis familiaris
gtggcggagggagtgtctaccacca

SEQ ID NO: 147645 - DNA, 25 bp, Canis familiaris
gggcgggggtggttatccacgagat

SEQ ID NO: 147646 - DNA, 25 bp, Canis familiaris
gggcgggggtggtgatcaaacagga

SEQ ID NO: 147647 - DNA, 25 bp, Canis familiaris
gggctgggaagctctggaattacgg

SEQ ID NO: 147648 - DNA, 25 bp, Canis familiaris
gggcatgggaaccttcgagattatt

SEQ ID NO: 147649 - DNA, 25 bp, Canis familiaris
gtggcatgaggcccctcattgagct

SEQ ID NO: 147650 - DNA, 25 bp, Canis familiaris
gtggcagaggcttccacaatacctg

SEQ ID NO: 147651 - DNA, 25 bp, Canis familiaris
gtggctacagcttcaccaccacagc

SEQ ID NO: 147652 - DNA, 25 bp, Canis familiaris
gggctcagcagtgaccccaagagcc

SEQ ID NO: 147653 - DNA, 25 bp, Canis familiaris
gggcatcaatggctgccctcaagac

SEQ ID NO: 147654 - DNA, 25 bp, Canis familiaris
gtggccaatgatgagcacccatacc

SEQ ID NO: 147655 - DNA, 25 bp, Canis familiaris
gtggcgagtgagaccagaccacacc

SEQ ID NO: 147656 - DNA, 25 bp, Canis familiaris
gtggctgaggtggcctagcagcacc

SEQ ID NO: 147657 - DNA, 25 bp, Canis familiaris
gtggcagagtgaatgctccagcccc

SEQ ID NO: 147658 - DNA, 25 bp, Canis familiaris
gtggctgatgtgaatcagtcatccc

SEQ ID NO: 147659 - DNA, 25 bp, Canis familiaris
gtggctcagtgattcagcatctgcc

SEQ ID NO: 147660 - DNA, 25 bp, Canis familiaris
gtggctcagcagttgcatgtctgcc

SEQ ID NO: 147661 - DNA, 25 bp, Canis familiaris
gtggcacagcagtttggtgcctgcc

SEQ ID NO: 147662 - DNA, 25 bp, Canis familiaris
gtggcgagatgagctgggcgccagc

SEQ ID NO: 147663 - DNA, 25 bp, Canis familiaris
gtggctacacaattggacagcacag

SEQ ID NO: 147664 - DNA, 25 bp, Canis familiaris
gtggctgacacatggtaagcacttg

SEQ ID NO: 147665 - DNA, 25 bp, Canis familiaris
gtggctgcacacatgcttggtgagc

SEQ ID NO: 147666 - DNA, 25 bp, Canis familiaris
gtggctcaagatcttggtggcgacc

SEQ ID NO: 147667 - DNA, 25 bp, Canis familiaris
gtggcacaacaggttggggcaccgc

SEQ ID NO: 147668 - DNA, 25 bp, Canis familiaris
gggccaaaggttgctgagcagctca

SEQ ID NO: 147669 - DNA, 25 bp, Canis familiaris
gggccaaaggaaattgagcctgaac

SEQ ID NO: 147670 - DNA, 25 bp, Canis familiaris
gggccaaggcgaaaagactgcagga

SEQ ID NO: 147671 - DNA, 25 bp, Canis familiaris
gggccaagtcagcagtagtctgcag

SEQ ID NO: 147672 - DNA, 25 bp, Canis familiaris
gtggcccagtatccactggatatgg

SEQ ID NO: 147673 - DNA, 25 bp, Canis familiaris
gtggcccacattcacatatagtgcg

SEQ ID NO: 147674 - DNA, 25 bp, Canis familiaris
gggcccatattcacctagtgtgagg

SEQ ID NO: 147675 - DNA, 25 bp, Canis familiaris
gggccagaatggaggccagtggagg

SEQ ID NO: 147676 - DNA, 25 bp, Canis familiaris
gggctcaagtgtggagcccgggggc

SEQ ID NO: 147677 - DNA, 25 bp, Canis familiaris
gggctccaagtggtcccaaaggaga

SEQ ID NO: 147678 - DNA, 25 bp, Canis familiaris
gggccccggcttcagagaagatgag

SEQ ID NO: 147679 - DNA, 25 bp, Canis familiaris
gggccccagagttccagtgggagag

SEQ ID NO: 147680 - DNA, 25 bp, Canis familiaris
gggcttccacgttgccctaatagaa

SEQ ID NO: 147681 - DNA, 25 bp, Canis familiaris
gggttccaagaatcctaagctgagt

SEQ ID NO: 147682 - DNA, 25 bp, Canis familiaris
gggcttcacatataatcactcaacc

SEQ ID NO: 147683 - DNA, 25 bp, Canis familiaris
gtggcctccacattattaacaaagc

SEQ ID NO: 147684 - DNA, 25 bp, Canis familiaris
gtggcagtttcatatttgctaagac

SEQ ID NO: 147685 - DNA, 25 bp, Canis familiaris
gggccttctagttttgctaatgaga

SEQ ID NO: 147686 - DNA, 25 bp, Canis familiaris
gggccatgttaaatttgaaatgcct

SEQ ID NO: 147687 - DNA, 25 bp, Canis familiaris
gtggcacagcttatttttacgcccg

SEQ ID NO: 147688 - DNA, 25 bp, Canis familiaris
gggcctgacagtatttctagccccg

SEQ ID NO: 147689 - DNA, 25 bp, Canis familiaris
gggcctgaagttatctttcgacctc

SEQ ID NO: 147690 - DNA, 25 bp, Canis familiaris
gtggcttaaattatctttcccccag

SEQ ID NO: 147691 - DNA, 25 bp, Canis familiaris
gtggcatctaaagtattttatcacc

SEQ ID NO: 147692 - DNA, 25 bp, Canis familiaris
gtggcatgtggcgtctagatttatc

SEQ ID NO: 147693 - DNA, 25 bp, Canis familiaris
gtggctatggcggctatgattatac

SEQ ID NO: 147694 - DNA, 25 bp, Canis familiaris
gtggctcagctcactggagctcaac

SEQ ID NO: 147695 - DNA, 25 bp, Canis familiaris
gtggcgcagtcacttaagcatccac

SEQ ID NO: 147696 - DNA, 25 bp, Canis familiaris
gtggctcaatcggtgaagctctgcc

SEQ ID NO: 147697 - DNA, 25 bp, Canis familiaris
gggctgcaatgtctgctacttgcac

SEQ ID NO: 147698 - DNA, 25 bp, Canis familiaris
gggccaagagcacttagcttcagcc

SEQ ID NO: 147699 - DNA, 25 bp, Canis familiaris
gggccctgaagctggcttcatggca

SEQ ID NO: 147700 - DNA, 25 bp, Canis familiaris
gtggcgccggagtcggattagggcc

SEQ ID NO: 147701 - DNA, 25 bp, Canis familiaris
gtggcgccaaaacgtgtggaggccc

SEQ ID NO: 147702 - DNA, 25 bp, Canis familiaris
gggcccataccagggctgggggcca

SEQ ID NO: 147703 - DNA, 25 bp, Canis familiaris
gggcgagtaaccagctggaggccca

SEQ ID NO: 147704 - DNA, 25 bp, Canis familiaris
gggctggaaagcaacgcatgaagga

SEQ ID NO: 147705 - DNA, 25 bp, Canis familiaris
gggcgccaacagaggcaaagagggt

SEQ ID NO: 147706 - DNA, 25 bp, Canis familiaris
gggctgcccaggaagccaaaaaggc

SEQ ID NO: 147707 - DNA, 25 bp, Canis familiaris
gtggcggcgacgacccattcgaacg

SEQ ID NO: 147708 - DNA, 25 bp, Canis familiaris
gggcgtggacgtctagtcatgacat

SEQ ID NO: 147709 - DNA, 25 bp, Canis familiaris
gggctgttaagtctgaccatacatc

SEQ ID NO: 147710 - DNA, 25 bp, Canis familiaris
gtggctcttaaacctgcacatgcat

SEQ ID NO: 147711 - DNA, 25 bp, Canis familiaris
gtggctgctatacggacacacagat

SEQ ID NO: 147712 - DNA, 25 bp, Canis familiaris
gtggctgctatacggtacactcaga

SEQ ID NO: 147713 - DNA, 25 bp, Canis familiaris
gtggctcagtcacggtgaacgctga

SEQ ID NO: 147714 - DNA, 25 bp, Canis familiaris
gtggctcagttgggtgagtgtctgc

SEQ ID NO: 147715 - DNA, 25 bp, Canis familiaris
gtggctgaggtttgccagttgtgcc

SEQ ID NO: 147716 - DNA, 25 bp, Canis familiaris
gtggctgaattcatccatgctgtgg

SEQ ID NO: 147717 - DNA, 25 bp, Canis familiaris
gtggctcagttggtcaagcagctta

SEQ ID NO: 147718 - DNA, 25 bp, Canis familiaris
gtggctcagtcaggtaagcgtctga

SEQ ID NO: 147719 - DNA, 25 bp, Canis familiaris
gtggctgccctcatgaaggcttaac

SEQ ID NO: 147720 - DNA, 25 bp, Canis familiaris
gtggctgcccacatgattggcttag

SEQ ID NO: 147721 - DNA, 25 bp, Canis familiaris
gtggctcccgagaagtggatctgag

SEQ ID NO: 147722 - DNA, 25 bp, Canis familiaris
gtggcccccagtagttgaatgtgta

SEQ ID NO: 147723 - DNA, 25 bp, Canis familiaris
gggctcccgttgatctaatggtccc

SEQ ID NO: 147724 - DNA, 25 bp, Canis familiaris
gggcccctgctacttgtacagggtc

SEQ ID NO: 147725 - DNA, 25 bp, Canis familiaris
gggcccttgcttcctggaatggggc

SEQ ID NO: 147726 - DNA, 25 bp, Canis familiaris
gggcccggcaggccggaaagagccg

SEQ ID NO: 147727 - DNA, 25 bp, Canis familiaris
gggccctgggggtccagatagatgc

SEQ ID NO: 147728 - DNA, 25 bp, Canis familiaris
gggccctgggattgttcagtgtgga

SEQ ID NO: 147729 - DNA, 25 bp, Canis familiaris
gggcctcgtggatggtcacacaggc

SEQ ID NO: 147730 - DNA, 25 bp, Canis familiaris
gggcccttgagatctgtccacaagg

SEQ ID NO: 147731 - DNA, 25 bp, Canis familiaris
gggcctttgaactgtagcaccaaaa

SEQ ID NO: 147732 - DNA, 25 bp, Canis familiaris
gggccttcgacctggagcaggtgaa

SEQ ID NO: 147733 - DNA, 25 bp, Canis familiaris
gggccatatcgcgcttgaggaagct

SEQ ID NO: 147734 - DNA, 25 bp, Canis familiaris
gggccagacccaggtggtcagagtc

SEQ ID NO: 147735 - DNA, 25 bp, Canis familiaris
gggctaaacgcaatgtggaccactg

SEQ ID NO: 147736 - DNA, 25 bp, Canis familiaris
gggctatcacacctttggaggttga

SEQ ID NO: 147737 - DNA, 25 bp, Canis familiaris
gggctcaccatcattgctgagggtg

SEQ ID NO: 147738 - DNA, 25 bp, Canis familiaris
gtggctcacacttttgtggttgatg

SEQ ID NO: 147739 - DNA, 25 bp, Canis familiaris
gtggcccatcagtatggggctctga

SEQ ID NO: 147740 - DNA, 25 bp, Canis familiaris
gtggcccgagtgaaggcgctgtacg

SEQ ID NO: 147741 - DNA, 25 bp, Canis familiaris
gtggcccagtggaactattgtactc

SEQ ID NO: 147742 - DNA, 25 bp, Canis familiaris
gtggcccagggaacatgtgatggac

SEQ ID NO: 147743 - DNA, 25 bp, Canis familiaris
gtggcctctgggaatacatggtaat

SEQ ID NO: 147744 - DNA, 25 bp, Canis familiaris
gtggcctctgggacccagtgtatat

SEQ ID NO: 147745 - DNA, 25 bp, Canis familiaris
gtggcctctgggacccagtgtatat

SEQ ID NO: 147746 - DNA, 25 bp, Canis familiaris
gggctctttggggccaggtgtattg

SEQ ID NO: 147747 - DNA, 25 bp, Canis familiaris
gggcctgttgagacccaggggacaa

SEQ ID NO: 147748 - DNA, 25 bp, Canis familiaris
gggccctgtcttgaatggtggaacc

SEQ ID NO: 147749 - DNA, 25 bp, Canis familiaris
gtggcccttgcttggaatgaggcag

SEQ ID NO: 147750 - DNA, 25 bp, Canis familiaris
gggcgacatccttcagattgtggac

SEQ ID NO: 147751 - DNA, 25 bp, Canis familiaris
gggctgcaggcttggagtttgaact

SEQ ID NO: 147752 - DNA, 25 bp, Canis familiaris
gggctgggtctgcagtggaggagct

SEQ ID NO: 147753 - DNA, 25 bp, Canis familiaris
gggctgctgaaacggtggagggcgg

SEQ ID NO: 147754 - DNA, 25 bp, Canis familiaris
gggcctggaacctcaagggctggcc

SEQ ID NO: 147755 - DNA, 25 bp, Canis familiaris
gggccataaacctacttgtggcgaa

SEQ ID NO: 147756 - DNA, 25 bp, Canis familiaris
gggccaaaatctttgtatctgggga

SEQ ID NO: 147757 - DNA, 25 bp, Canis familiaris
gggccaaccttctagggcttaggag

SEQ ID NO: 147758 - DNA, 25 bp, Canis familiaris
gggccaaccttctagggcttaggag

SEQ ID NO: 147759 - DNA, 25 bp, Canis familiaris
gggccaccctctcaggaatgagggg

SEQ ID NO: 147760 - DNA, 25 bp, Canis familiaris
gggccaagcacactcaggagaactg

SEQ ID NO: 147761 - DNA, 25 bp, Canis familiaris
gtggcctgagccctcagagaacagc

SEQ ID NO: 147762 - DNA, 25 bp, Canis familiaris
gggcagcttgcctacaataacagaa

SEQ ID NO: 147763 - DNA, 25 bp, Canis familiaris
gggctgacgacatcagcaaaagtca

SEQ ID NO: 147764 - DNA, 25 bp, Canis familiaris
gggctgacccatgtgcaataagaac

SEQ ID NO: 147765 - DNA, 25 bp, Canis familiaris
gtggcccctcatgagcaatgaagac

SEQ ID NO: 147766 - DNA, 25 bp, Canis familiaris
gtggccacctctgtcaaaggaatcc

SEQ ID NO: 147767 - DNA, 25 bp, Canis familiaris
gtggccccttggaccaatggagggc

SEQ ID NO: 147768 - DNA, 25 bp, Canis familiaris
gggccccttgctaaagggtggcaca

SEQ ID NO: 147769 - DNA, 25 bp, Canis familiaris
gggagcccagatcaacgggggccac

SEQ ID NO: 147770 - DNA, 25 bp, Canis familiaris
ggaggccaggcaaaactgccggact

SEQ ID NO: 147771 - DNA, 25 bp, Canis familiaris
gggcgagaagattcacggcacggac

SEQ ID NO: 147772 - DNA, 25 bp, Canis familiaris
gggctggcgtgagccaggatcggcc

SEQ ID NO: 147773 - DNA, 25 bp, Canis familiaris
gggctgagggaattcgacattgtcc

SEQ ID NO: 147774 - DNA, 25 bp, Canis familiaris
gggctgggaacatatgcagacatgg

SEQ ID NO: 147775 - DNA, 25 bp, Canis familiaris
gggcaggaggcacagaggacagtct

SEQ ID NO: 147776 - DNA, 25 bp, Canis familiaris
gggcaaggcgtggaagtagcggttg

SEQ ID NO: 147777 - DNA, 25 bp, Canis familiaris
gggaggggatggagaatgggtatgg

SEQ ID NO: 147778 - DNA, 25 bp, Canis familiaris
gggcagcctggataccaagggtacc

SEQ ID NO: 147779 - DNA, 25 bp, Canis familiaris
gggctggggtaagagaggcgccacc

SEQ ID NO: 147780 - DNA, 25 bp, Canis familiaris
gggctggcctaataaggccccacac

SEQ ID NO: 147781 - DNA, 25 bp, Canis familiaris
gggctcgagttacaagtgtccccac

SEQ ID NO: 147782 - DNA, 25 bp, Canis familiaris
gtggccacatttactaaagtccccg

SEQ ID NO: 147783 - DNA, 25 bp, Canis familiaris
gggccagcttatttcaacaattcca

SEQ ID NO: 147784 - DNA, 25 bp, Canis familiaris
gggccagtgcaataaaaataccagg

SEQ ID NO: 147785 - DNA, 25 bp, Canis familiaris
gggctcaggcaatagatggggggca

SEQ ID NO: 147786 - DNA, 25 bp, Canis familiaris
gggccagctgcgagcagcagggggc

SEQ ID NO: 147787 - DNA, 25 bp, Canis familiaris
gtggccatgaggaaggcagccttgg

SEQ ID NO: 147788 - DNA, 25 bp, Canis familiaris
gtggcttgaggatggcccagatggg

SEQ ID NO: 147789 - DNA, 25 bp, Canis familiaris
gtggcttgaggatgtccaagatggg

SEQ ID NO: 147790 - DNA, 25 bp, Canis familiaris
gggcattaggggacacaatggtctg

SEQ ID NO: 147791 - DNA, 25 bp, Canis familiaris
gggctccctgggagcagatggtcct

SEQ ID NO: 147792 - DNA, 25 bp, Canis familiaris
gggctcctatagcaggattttcctc

SEQ ID NO: 147793 - DNA, 25 bp, Canis familiaris
gggccccatcactaggtttatagta

SEQ ID NO: 147794 - DNA, 25 bp, Canis familiaris
gggcccgctatctggcagaaaagta

SEQ ID NO: 147795 - DNA, 25 bp, Canis familiaris
gggcccaggagctgagcacaaatga

SEQ ID NO: 147796 - DNA, 25 bp, Canis familiaris
gggcccaggatgtggcaacagagcc

SEQ ID NO: 147797 - DNA, 25 bp, Canis familiaris
gtggctccagagattgtcaactatg

SEQ ID NO: 147798 - DNA, 25 bp, Canis familiaris
gtggccgagatgctgttctgaagag

SEQ ID NO: 147799 - DNA, 25 bp, Canis familiaris
gtggcgtcatcagttgtttgaaccg

SEQ ID NO: 147800 - DNA, 25 bp, Canis familiaris
gggcagtgaatcagccttatacctg

SEQ ID NO: 147801 - DNA, 25 bp, Canis familiaris
gggctgtacataaccctattacgac

SEQ ID NO: 147802 - DNA, 25 bp, Canis familiaris
gtggctaacataacttttctcaagt

SEQ ID NO: 147803 - DNA, 25 bp, Canis familiaris
gggctgtcacagagtttttaaaagg

SEQ ID NO: 147804 - DNA, 25 bp, Canis familiaris
gggcatgcccggtgtttgtataccc

SEQ ID NO: 147805 - DNA, 25 bp, Canis familiaris
gggcatcctagaacgtttaaactct

SEQ ID NO: 147806 - DNA, 25 bp, Canis familiaris
gggcaccaacacgagtttggaacca

SEQ ID NO: 147807 - DNA, 25 bp, Canis familiaris
gggccctaactattttgtgcaatgg

SEQ ID NO: 147808 - DNA, 25 bp, Canis familiaris
gtggctttgaagaactttgccaaat

SEQ ID NO: 147809 - DNA, 25 bp, Canis familiaris
gtggctttgaagaactttgccaaat

SEQ ID NO: 147810 - DNA, 25 bp, Canis familiaris
gtggctttgaagaacctgtgtccaa

SEQ ID NO: 147811 - DNA, 25 bp, Canis familiaris
gggcttgtcggagcttgatgtcgga

SEQ ID NO: 147812 - DNA, 25 bp, Canis familiaris
gggcttgggaggatgatgtgtcttg

SEQ ID NO: 147813 - DNA, 25 bp, Canis familiaris
gggcctgggaggaagatgtttacat

SEQ ID NO: 147814 - DNA, 25 bp, Canis familiaris
gggcctgggagccagggttgggcaa

SEQ ID NO: 147815 - DNA, 25 bp, Canis familiaris
gggcctaggcagccaagggggttga

SEQ ID NO: 147816 - DNA, 25 bp, Canis familiaris
gggcccaggccaagaggggccctgc

SEQ ID NO: 147817 - DNA, 25 bp, Canis familiaris
gggcctccccactagatggggacat

SEQ ID NO: 147818 - DNA, 25 bp, Canis familiaris
gggccccccaatgtgggcaacaatc

SEQ ID NO: 147819 - DNA, 25 bp, Canis familiaris
gggccaggtccctttggatgaagaa

SEQ ID NO: 147820 - DNA, 25 bp, Canis familiaris
gggcgttgtccctctatataagaga

SEQ ID NO: 147821 - DNA, 25 bp, Canis familiaris
gggcgctattttgccagacataaag

SEQ ID NO: 147822 - DNA, 25 bp, Canis familiaris
gggctgcgttgtggcccaggaaacc

SEQ ID NO: 147823 - DNA, 25 bp, Canis familiaris
gggcctgtgtgatgcccatggatgg

SEQ ID NO: 147824 - DNA, 25 bp, Canis familiaris
gggcttgggactcccaggattgcac

SEQ ID NO: 147825 - DNA, 25 bp, Canis familiaris
gggctggggataacactggaccaca

SEQ ID NO: 147826 - DNA, 25 bp, Canis familiaris
gggcgaaggatcagaggtccccagc

SEQ ID NO: 147827 - DNA, 25 bp, Canis familiaris
gggcgtatggtgggaactcgcccct

SEQ ID NO: 147828 - DNA, 25 bp, Canis familiaris
gggccaaaggcagctatgccagccc

SEQ ID NO: 147829 - DNA, 25 bp, Canis familiaris
gggccaagagggtcatcatctctgc

SEQ ID NO: 147830 - DNA, 25 bp, Canis familiaris
gggcaagggggatactcagcccagg

SEQ ID NO: 147831 - DNA, 25 bp, Canis familiaris
gggctgggaggacagctctacccag

SEQ ID NO: 147832 - DNA, 25 bp, Canis familiaris
gtggctgtggggcatcagtctgaac

SEQ ID NO: 147833 - DNA, 25 bp, Canis familiaris
gtggctgtattccgctcgtggagac

SEQ ID NO: 147834 - DNA, 25 bp, Canis familiaris
gggcatgatcttggagtcctgggat

SEQ ID NO: 147835 - DNA, 25 bp, Canis familiaris
gggcgaagtagagtcctggaggcac

SEQ ID NO: 147836 - DNA, 25 bp, Canis familiaris
gggccaagtaattgccttgaggtca

SEQ ID NO: 147837 - DNA, 25 bp, Canis familiaris
gggccaagtacatggtcatgaggtg

SEQ ID NO: 147838 - DNA, 25 bp, Canis familiaris
gggccaagtacatggcagaggtgaa

SEQ ID NO: 147839 - DNA, 25 bp, Canis familiaris
gggccgtgttgatgtgaatagaaag

SEQ ID NO: 147840 - DNA, 25 bp, Canis familiaris
gggactggcttggttggaagaaagg

SEQ ID NO: 147841 - DNA, 25 bp, Canis familiaris
gggggttttttgctgatacaatgga

SEQ ID NO: 147842 - DNA, 25 bp, Canis familiaris
gtggcgtgtctcttttgtgtgagaa

SEQ ID NO: 147843 - DNA, 25 bp, Canis familiaris
gtggccgcagcggcttgttggacaa

SEQ ID NO: 147844 - DNA, 25 bp, Canis familiaris
gtggccgaggactttgattgtacat

SEQ ID NO: 147845 - DNA, 25 bp, Canis familiaris
gtggccgaggactttgattgcacat

SEQ ID NO: 147846 - DNA, 25 bp, Canis familiaris
gtggccaacagaggtgagattgcca

SEQ ID NO: 147847 - DNA, 25 bp, Canis familiaris
gggccacaacaccagaatcagcaaa

SEQ ID NO: 147848 - DNA, 25 bp, Canis familiaris
gtggccagaaaccagcagctacagc

SEQ ID NO: 147849 - DNA, 25 bp, Canis familiaris
gggccagaccactgcagtgaaaggc

SEQ ID NO: 147850 - DNA, 25 bp, Canis familiaris
gggcctgagccagcggtgtaagggc

SEQ ID NO: 147851 - DNA, 25 bp, Canis familiaris
gggcctgagcacccagggtgtgagg

SEQ ID NO: 147852 - DNA, 25 bp, Canis familiaris
gggcctgacctgtgagggtgacaag

SEQ ID NO: 147853 - DNA, 25 bp, Canis familiaris
gggcccaccatatagtttcacaggt

SEQ ID NO: 147854 - DNA, 25 bp, Canis familiaris
gggcccccaatcagggacataggct

SEQ ID NO: 147855 - DNA, 25 bp, Canis familiaris
gtggcccccatcagggtgagtgggc

SEQ ID NO: 147856 - DNA, 25 bp, Canis familiaris
gggcttcaccacaggggagaggacc

SEQ ID NO: 147857 - DNA, 25 bp, Canis familiaris
gtggctgtagcctggagagttggga

SEQ ID NO: 147858 - DNA, 25 bp, Canis familiaris
gggcgtcatccagagagacctggcc

SEQ ID NO: 147859 - DNA, 25 bp, Canis familiaris
gggcttgcaacaaaggccctggctt

SEQ ID NO: 147860 - DNA, 25 bp, Canis familiaris
gggcatttacgaagtgtccagcgct

SEQ ID NO: 147861 - DNA, 25 bp, Canis familiaris
gggctcttcctaaatatctgactgg

SEQ ID NO: 147862 - DNA, 25 bp, Canis familiaris
gggcctcatcgctgtaattgcgtgg

SEQ ID NO: 147863 - DNA, 25 bp, Canis familiaris
gggcaccaacacctacttggtaggg

SEQ ID NO: 147864 - DNA, 25 bp, Canis familiaris
gggcaacaatcctctcattttaaag

SEQ ID NO: 147865 - DNA, 25 bp, Canis familiaris
gggcttcaaccagttgctgtttaca

SEQ ID NO: 147866 - DNA, 25 bp, Canis familiaris
gggcccgagaagacatcttcgttca

SEQ ID NO: 147867 - DNA, 25 bp, Canis familiaris
gggccacagggaatctctttgtacc

SEQ ID NO: 147868 - DNA, 25 bp, Canis familiaris
gggccacaagagttcttatgtgcta

SEQ ID NO: 147869 - DNA, 25 bp, Canis familiaris
gggcccaactttatttgctgattca

SEQ ID NO: 147870 - DNA, 25 bp, Canis familiaris
gggcccttgcttttaatggagttat

SEQ ID NO: 147871 - DNA, 25 bp, Canis familiaris
gtggccctttctttggagggtctat

SEQ ID NO: 147872 - DNA, 25 bp, Canis familiaris
gggctgcttttctgaagagggtcca

SEQ ID NO: 147873 - DNA, 25 bp, Canis familiaris
gtggctgttttgcgtagcatcgtgt

SEQ ID NO: 147874 - DNA, 25 bp, Canis familiaris
gggctgttgtcaaggtactgtgctt

SEQ ID NO: 147875 - DNA, 25 bp, Canis familiaris
gggctaagctcagtcttatgcttct

SEQ ID NO: 147876 - DNA, 25 bp, Canis familiaris
gtggccatgagccactttgagcctc

SEQ ID NO: 147877 - DNA, 25 bp, Canis familiaris
gtggctgtgacgattgtgatcctca

SEQ ID NO: 147878 - DNA, 25 bp, Canis familiaris
gggctatgcctttgatgtgcatctg

SEQ ID NO: 147879 - DNA, 25 bp, Canis familiaris
gggctgagcgctgggtgatatgcta

SEQ ID NO: 147880 - DNA, 25 bp, Canis familiaris
gtggctgacctggtggtaatcctaa

SEQ ID NO: 147881 - DNA, 25 bp, Canis familiaris
gggagagcctggagccagatgccta

SEQ ID NO: 147882 - DNA, 25 bp, Canis familiaris
gggatggccaaggtgcaaactgtct

SEQ ID NO: 147883 - DNA, 25 bp, Canis familiaris
gggggaaaggctgtacctgctaaga

SEQ ID NO: 147884 - DNA, 25 bp, Canis familiaris
gggggcattcgtattgcgccgctag

SEQ ID NO: 147885 - DNA, 25 bp, Canis familiaris
gtggcgtcatgtggtttagcgccgc

SEQ ID NO: 147886 - DNA, 25 bp, Canis familiaris
gtggcgtagaggtttagcgcctgcc

SEQ ID NO: 147887 - DNA, 25 bp, Canis familiaris
gggcctagggagccgcaccttgtca

SEQ ID NO: 147888 - DNA, 25 bp, Canis familiaris
gtggccaagggaacacagccgttaa

SEQ ID NO: 147889 - DNA, 25 bp, Canis familiaris
gtggcctgatggataacgccttccg

SEQ ID NO: 147890 - DNA, 25 bp, Canis familiaris
gggcctcatgaaatcaaccacttct

SEQ ID NO: 147891 - DNA, 25 bp, Canis familiaris
gtggccaagcacattaactttctca

SEQ ID NO: 147892 - DNA, 25 bp, Canis familiaris
gggccctgacattgttagtcttctc

SEQ ID NO: 147893 - DNA, 25 bp, Canis familiaris
gtggccgcaccatattattttgcac

SEQ ID NO: 147894 - DNA, 25 bp, Canis familiaris
gggcccatccagtttgagtataaca

SEQ ID NO: 147895 - DNA, 25 bp, Canis familiaris
gggcccatccagataaatccaggag

SEQ ID NO: 147896 - DNA, 25 bp, Canis familiaris
gtggcccattaggtaagaagcagag

SEQ ID NO: 147897 - DNA, 25 bp, Canis familiaris
gggcccatcaacttgaggaacgtgt

SEQ ID NO: 147898 - DNA, 25 bp, Canis familiaris
gggccccgatgcctgggaaggtcat

SEQ ID NO: 147899 - DNA, 25 bp, Canis familiaris
gggctacaagatctggtgtgggaca

SEQ ID NO: 147900 - DNA, 25 bp, Canis familiaris
gggctacatcagagtgcggttctac

SEQ ID NO: 147901 - DNA, 25 bp, Canis familiaris
gggctacatcagagtgcggttctac

SEQ ID NO: 147902 - DNA, 25 bp, Canis familiaris
gggctacatcagagtgcggttctac

SEQ ID NO: 147903 - DNA, 25 bp, Canis familiaris
gggctacatcagagtgcggttctac

SEQ ID NO: 147904 - DNA, 25 bp, Canis familiaris
gggctacatcagagtgcggttctac

SEQ ID NO: 147905 - DNA, 25 bp, Canis familiaris
gggctacatcagagtgcggttctac

SEQ ID NO: 147906 - DNA, 25 bp, Canis familiaris
gggctacatcagagtgcggttctac

SEQ ID NO: 147907 - DNA, 25 bp, Canis familiaris
gggctacatcagagtgcggttctac

SEQ ID NO: 147908 - DNA, 25 bp, Canis familiaris
gggctacatcagagtgcggttctac

SEQ ID NO: 147909 - DNA, 25 bp, Canis familiaris
gggctacatcagagtgcggttctac

SEQ ID NO: 147910 - DNA, 25 bp, Canis familiaris
gggctcctggcatggagccttcttc

SEQ ID NO: 147911 - DNA, 25 bp, Canis familiaris
gggcctcttgctaggaaatctcttc

SEQ ID NO: 147912 - DNA, 25 bp, Canis familiaris
gtggccttttgctgacataagctct

SEQ ID NO: 147913 - DNA, 25 bp, Canis familiaris
gggcctttgatgggacagaatggga

SEQ ID NO: 147914 - DNA, 25 bp, Canis familiaris
gggccctctgtgtgaaggtgtgtag

SEQ ID NO: 147915 - DNA, 25 bp, Canis familiaris
gggccctggtgggcaagggctgtca

SEQ ID NO: 147916 - DNA, 25 bp, Canis familiaris
gggccccgaggctagagagggacag

SEQ ID NO: 147917 - DNA, 25 bp, Canis familiaris
gggctccctaggtttagcgagtgag

SEQ ID NO: 147918 - DNA, 25 bp, Canis familiaris
gggcccccaggactgtgatgagggc

SEQ ID NO: 147919 - DNA, 25 bp, Canis familiaris
gggccttgctcagagcggagaaagc

SEQ ID NO: 147920 - DNA, 25 bp, Canis familiaris
gggcccatgtcgtagtcgagaaacg

SEQ ID NO: 147921 - DNA, 25 bp, Canis familiaris
gggcccagccagggacaaggaaggc

SEQ ID NO: 147922 - DNA, 25 bp, Canis familiaris
gggccacctcaacacaagggagtat

SEQ ID NO: 147923 - DNA, 25 bp, Canis familiaris
gggcccccagaagacagatggggaa

SEQ ID NO: 147924 - DNA, 25 bp, Canis familiaris
gggcccctgcagttcgaggaggggc

SEQ ID NO: 147925 - DNA, 25 bp, Canis familiaris
gggctcgtgtgacttcaagtgcagg

SEQ ID NO: 147926 - DNA, 25 bp, Canis familiaris
gggctggcattgctctcaatgacaa

SEQ ID NO: 147927 - DNA, 25 bp, Canis familiaris
gggctggcattgccctcaacgacca

SEQ ID NO: 147928 - DNA, 25 bp, Canis familiaris
gggctggcattgccctcaacgacca

SEQ ID NO: 147929 - DNA, 25 bp, Canis familiaris
gggctggttggactcactcagaaaa

SEQ ID NO: 147930 - DNA, 25 bp, Canis familiaris
gggctgctttcagcactgtcaaaat

SEQ ID NO: 147931 - DNA, 25 bp, Canis familiaris
gggctctttgcccagatttaaggga

SEQ ID NO: 147932 - DNA, 25 bp, Canis familiaris
gtggccaaagcagagtttagctgag

SEQ ID NO: 147933 - DNA, 25 bp, Canis familiaris
gggcaaggagctggagttctatctg

SEQ ID NO: 147934 - DNA, 25 bp, Canis familiaris
gggcaaggagctggagttctatctg

SEQ ID NO: 147935 - DNA, 25 bp, Canis familiaris
gggcaaggagctggagttctatctg

SEQ ID NO: 147936 - DNA, 25 bp, Canis familiaris
gggcaaggagctggagttctatctg

SEQ ID NO: 147937 - DNA, 25 bp, Canis familiaris
gggcagagcagactgtggcttcacc

SEQ ID NO: 147938 - DNA, 25 bp, Canis familiaris
gggcgacatgatcgatcgcctcttt

SEQ ID NO: 147939 - DNA, 25 bp, Canis familiaris
gtggcgtgcgattgactgagttgct

SEQ ID NO: 147940 - DNA, 25 bp, Canis familiaris
gtggcccatatagctgcattcagct

SEQ ID NO: 147941 - DNA, 25 bp, Canis familiaris
gtggccgcatatacattgcttaccc

SEQ ID NO: 147942 - DNA, 25 bp, Canis familiaris
gggccctaagatgctctgagccctt

SEQ ID NO: 147943 - DNA, 25 bp, Canis familiaris
gggccgagaggtgtacagacacttt

SEQ ID NO: 147944 - DNA, 25 bp, Canis familiaris
gggctgctggaaaattaaaccttat

SEQ ID NO: 147945 - DNA, 25 bp, Canis familiaris
gggctgccagaatatgctaaacctt

SEQ ID NO: 147946 - DNA, 25 bp, Canis familiaris
gggctgtcagaaggggaagcacact

SEQ ID NO: 147947 - DNA, 25 bp, Canis familiaris
gggctcatagactggctgaactaca

SEQ ID NO: 147948 - DNA, 25 bp, Canis familiaris
gggataaagtgggctcgtcaacaaa

SEQ ID NO: 147949 - DNA, 25 bp, Canis familiaris
gggaagaagtccatcacgaaaaatc

SEQ ID NO: 147950 - DNA, 25 bp, Canis familiaris
gggaagaatttgaatgccgaagtta

SEQ ID NO: 147951 - DNA, 25 bp, Canis familiaris
gggaaacttctgcattttcgcttcc

SEQ ID NO: 147952 - DNA, 25 bp, Canis familiaris
gggaaaactgcctagttcccttctg

SEQ ID NO: 147953 - DNA, 25 bp, Canis familiaris
gggaaaacatccaaaacggcatttg

SEQ ID NO: 147954 - DNA, 25 bp, Canis familiaris
gggaatgatttaaaacacggataat

SEQ ID NO: 147955 - DNA, 25 bp, Canis familiaris
gggaactgccttcttcagggagaag

SEQ ID NO: 147956 - DNA, 25 bp, Canis familiaris
gggaaggctgttttgaacccagaag

SEQ ID NO: 147957 - DNA, 25 bp, Canis familiaris
gggagacctttgcttattccagaag

SEQ ID NO: 147958 - DNA, 25 bp, Canis familiaris
gggcagacttttcatgtggcccagc

SEQ ID NO: 147959 - DNA, 25 bp, Canis familiaris
gggcagtgtttagctgctagtccag

SEQ ID NO: 147960 - DNA, 25 bp, Canis familiaris
gggcgattacattggcatctatgcc

SEQ ID NO: 147961 - DNA, 25 bp, Canis familiaris
gggccattcacaatgctgagtctct

SEQ ID NO: 147962 - DNA, 25 bp, Canis familiaris
gtggcctaatatatgatctgtcttg

SEQ ID NO: 147963 - DNA, 25 bp, Canis familiaris
gggccaatgaggatgatctgatgct

SEQ ID NO: 147964 - DNA, 25 bp, Canis familiaris
gggccaataggcttgttatggactg

SEQ ID NO: 147965 - DNA, 25 bp, Canis familiaris
gggcccatgaggtctggttgtgaat

SEQ ID NO: 147966 - DNA, 25 bp, Canis familiaris
gggccactcaggatgcagatgctgg

SEQ ID NO: 147967 - DNA, 25 bp, Canis familiaris
gggccaccgtgtacatgtgtagtgt

SEQ ID NO: 147968 - DNA, 25 bp, Canis familiaris
gggccagacggtactgttagccagg

SEQ ID NO: 147969 - DNA, 25 bp, Canis familiaris
gggccaaaggcttgtgagttcctgg

SEQ ID NO: 147970 - DNA, 25 bp, Canis familiaris
gggcccgagtcacggaatttgtgtg

SEQ ID NO: 147971 - DNA, 25 bp, Canis familiaris
gggcccgagccaggaagtttggttg

SEQ ID NO: 147972 - DNA, 25 bp, Canis familiaris
gggcttagcgtcgccaatttggttc

SEQ ID NO: 147973 - DNA, 25 bp, Canis familiaris
gggcttaatatcacacttctttttc

SEQ ID NO: 147974 - DNA, 25 bp, Canis familiaris
gggcttatgtttcagtttgttttct

SEQ ID NO: 147975 - DNA, 25 bp, Canis familiaris
gggcccatgtgtggggtgtcgtagt

SEQ ID NO: 147976 - DNA, 25 bp, Canis familiaris
gggcctagatatggggttgttgtat

SEQ ID NO: 147977 - DNA, 25 bp, Canis familiaris
gggcatctatgcttacggttttgag

SEQ ID NO: 147978 - DNA, 25 bp, Canis familiaris
gtggcccagattaaggttagtgacc

SEQ ID NO: 147979 - DNA, 25 bp, Canis familiaris
gtggcccagggtggggctagtggcc

SEQ ID NO: 147980 - DNA, 25 bp, Canis familiaris
gggctactggggatgccaagggcct

SEQ ID NO: 147981 - DNA, 25 bp, Canis familiaris
gggccctgggcaaaccaggggcact

SEQ ID NO: 147982 - DNA, 25 bp, Canis familiaris
gggccttgggatggagccgggagac

SEQ ID NO: 147983 - DNA, 25 bp, Canis familiaris
gggctatgggtgggcaggggagaac

SEQ ID NO: 147984 - DNA, 25 bp, Canis familiaris
gggctgtattgtgtggggcgggaaa

SEQ ID NO: 147985 - DNA, 25 bp, Canis familiaris
gggctttgtttgtatgtggctggag

SEQ ID NO: 147986 - DNA, 25 bp, Canis familiaris
gggctagtttacctgtgtcatgaga

SEQ ID NO: 147987 - DNA, 25 bp, Canis familiaris
gggctgcagttttgtggagctcata

SEQ ID NO: 147988 - DNA, 25 bp, Canis familiaris
gggctggtattgtttggccatggcc

SEQ ID NO: 147989 - DNA, 25 bp, Canis familiaris
gggcatggacttgctctggccatgc

SEQ ID NO: 147990 - DNA, 25 bp, Canis familiaris
gggctgctgaagcccacggcctgca

SEQ ID NO: 147991 - DNA, 25 bp, Canis familiaris
gggcatctgcaaagcatccatgagc

SEQ ID NO: 147992 - DNA, 25 bp, Canis familiaris
gggcatctcacagctttgatgcttt

SEQ ID NO: 147993 - DNA, 25 bp, Canis familiaris
gggcatccgcctggataatgcttcc

SEQ ID NO: 147994 - DNA, 25 bp, Canis familiaris
tgcggcccagttgaaggttgatctt

SEQ ID NO: 147995 - DNA, 25 bp, Canis familiaris
gggcccatttggcaggatcttcttc

SEQ ID NO: 147996 - DNA, 25 bp, Canis familiaris
gggccatttgggtatggaattcctg

SEQ ID NO: 147997 - DNA, 25 bp, Canis familiaris
gggccttttgctttgaggtgtctgt

SEQ ID NO: 147998 - DNA, 25 bp, Canis familiaris
gggcacttgttgatctactggattg

SEQ ID NO: 147999 - DNA, 25 bp, Canis familiaris
gtggcctgtgtttcttttgatattg

SEQ ID NO: 148000 - DNA, 25 bp, Canis familiaris
gggcctgtattactgttatgtgtgg

SEQ ID NO: 148001 - DNA, 25 bp, Canis familiaris
gggcaggtttcattttgcagttggt

SEQ ID NO: 148002 - DNA, 25 bp, Canis familiaris
gggctgtttatttttcacttatttg

SEQ ID NO: 148003 - DNA, 25 bp, Canis familiaris
gggctgtttttataatttgactgtt

SEQ ID NO: 148004 - DNA, 25 bp, Canis familiaris
gggctttttccatagtttggctctt

SEQ ID NO: 148005 - DNA, 25 bp, Canis familiaris
gggcttcttagggtagcttttctct

SEQ ID NO: 148006 - DNA, 25 bp, Canis familiaris
gggctgtttgggggacacatgtccc

SEQ ID NO: 148007 - DNA, 25 bp, Canis familiaris
gggagttctgggtggacaacaccac

SEQ ID NO: 148008 - DNA, 25 bp, Canis familiaris
gggaaacttgcctgtgaaagaccca

SEQ ID NO: 148009 - DNA, 25 bp, Canis familiaris
gggaagaagtctggggagatggtcc

SEQ ID NO: 148010 - DNA, 25 bp, Canis familiaris
gggctggacccagtggggaggatcc

SEQ ID NO: 148011 - DNA, 25 bp, Canis familiaris
gggctggcccctgagagaatggagc

SEQ ID NO: 148012 - DNA, 25 bp, Canis familiaris
gggctgtgccctgatagagaagaga

SEQ ID NO: 148013 - DNA, 25 bp, Canis familiaris
gggctctgcttcggaaatccaagat

SEQ ID NO: 148014 - DNA, 25 bp, Canis familiaris
gggctgcatttgggaagtaactatc

SEQ ID NO: 148015 - DNA, 25 bp, Canis familiaris
gggaatttctggtgacatagatctc

SEQ ID NO: 148016 - DNA, 25 bp, Canis familiaris
gggctttttctgtgaaactgcgcaa

SEQ ID NO: 148017 - DNA, 25 bp, Canis familiaris
gggctttctttctgtaattcatcta

SEQ ID NO: 148018 - DNA, 25 bp, Canis familiaris
gggctggccctttaataattgcatt

SEQ ID NO: 148019 - DNA, 25 bp, Canis familiaris
gggctgcgccacatttatatcaccc

SEQ ID NO: 148020 - DNA, 25 bp, Canis familiaris
gggcgctgttctattaatgagccta

SEQ ID NO: 148021 - DNA, 25 bp, Canis familiaris
gggcagcgttgttttagataggatc

SEQ ID NO: 148022 - DNA, 25 bp, Canis familiaris
gggcggctcagatggttaagcgagt

SEQ ID NO: 148023 - DNA, 25 bp, Canis familiaris
gggctctcacaaaggcttttgcaga

SEQ ID NO: 148024 - DNA, 25 bp, Canis familiaris
gggcatctactctgtgttttcagta

SEQ ID NO: 148025 - DNA, 25 bp, Canis familiaris
gggctctatcagtgttctttttatt

SEQ ID NO: 148026 - DNA, 25 bp, Canis familiaris
gggctcttcaaacttgtttgatata

SEQ ID NO: 148027 - DNA, 25 bp, Canis familiaris
gggctcttcacagaagcttcgtgga

SEQ ID NO: 148028 - DNA, 25 bp, Canis familiaris
gggctcgacctggaagttctgtcgc

SEQ ID NO: 148029 - DNA, 25 bp, Canis familiaris
gggccagacactggggcttgtgtcc

SEQ ID NO: 148030 - DNA, 25 bp, Canis familiaris
gggcccgagctgtagactcggtgct

SEQ ID NO: 148031 - DNA, 25 bp, Canis familiaris
gggccacagacacgagagccaggtc

SEQ ID NO: 148032 - DNA, 25 bp, Canis familiaris
gggcgcacaggccaggatgtgagga

SEQ ID NO: 148033 - DNA, 25 bp, Canis familiaris
gggccacatgtttgtgtgcggcgac

SEQ ID NO: 148034 - DNA, 25 bp, Canis familiaris
gggcgagctgatttagctggtgctg

SEQ ID NO: 148035 - DNA, 25 bp, Canis familiaris
gggctgagctgttctatttggcttg

SEQ ID NO: 148036 - DNA, 25 bp, Canis familiaris
gggctactgtattatccccatatgc

SEQ ID NO: 148037 - DNA, 25 bp, Canis familiaris
gggctttgtatgtctagtccaatgc

SEQ ID NO: 148038 - DNA, 25 bp, Canis familiaris
gggccttgtagtggcagtgggtgcc

SEQ ID NO: 148039 - DNA, 25 bp, Canis familiaris
gtggccattctctggaggaggtcac

SEQ ID NO: 148040 - DNA, 25 bp, Canis familiaris
gggccatacttcttcatggggcccc

SEQ ID NO: 148041 - DNA, 25 bp, Canis familiaris
gggccaaccattaattgggccacaa

SEQ ID NO: 148042 - DNA, 25 bp, Canis familiaris
gggctaacggatgggctgggcccta

SEQ ID NO: 148043 - DNA, 25 bp, Canis familiaris
gggcttcaggtggcagtgtggcccc

SEQ ID NO: 148044 - DNA, 25 bp, Canis familiaris
gggcctagtatccactgagcagccc

SEQ ID NO: 148045 - DNA, 25 bp, Canis familiaris
gggccatcgaatcactgactgcccc

SEQ ID NO: 148046 - DNA, 25 bp, Canis familiaris
gggcccgtattgtcatcattcagcc

SEQ ID NO: 148047 - DNA, 25 bp, Canis familiaris
gggccctgcttatgcacatatatgt

SEQ ID NO: 148048 - DNA, 25 bp, Canis familiaris
gggcccagctaatcatttgaggacc

SEQ ID NO: 148049 - DNA, 25 bp, Canis familiaris
gggccgcgaagagtcctcgaggccc

SEQ ID NO: 148050 - DNA, 25 bp, Canis familiaris
gggcccaacagactacgcgggccac

SEQ ID NO: 148051 - DNA, 25 bp, Canis familiaris
gggcagagaaagctcccaggagcca

SEQ ID NO: 148052 - DNA, 25 bp, Canis familiaris
gggaaggacatggtgcacaaggagc

SEQ ID NO: 148053 - DNA, 25 bp, Canis familiaris
gggccatggccagcaacataatgga

SEQ ID NO: 148054 - DNA, 25 bp, Canis familiaris
gtggccaagacagctaacaaggacc

SEQ ID NO: 148055 - DNA, 25 bp, Canis familiaris
gggccaaagatgacatcacgaaggt

SEQ ID NO: 148056 - DNA, 25 bp, Canis familiaris
gggccaaatgcagcacctggagagc

SEQ ID NO: 148057 - DNA, 25 bp, Canis familiaris
gtggccaacagagcacttacggcaa

SEQ ID NO: 148058 - DNA, 25 bp, Canis familiaris
gtggccacaagaacatctgctcact

SEQ ID NO: 148059 - DNA, 25 bp, Canis familiaris
gggctcagatcatgatcctgcatcc

SEQ ID NO: 148060 - DNA, 25 bp, Canis familiaris
gggctgcacacagacctgatcagca

SEQ ID NO: 148061 - DNA, 25 bp, Canis familiaris
gggctggcagcagaggagcttgcag

SEQ ID NO: 148062 - DNA, 25 bp, Canis familiaris
gggctgtatgccatggagttgtgca

SEQ ID NO: 148063 - DNA, 25 bp, Canis familiaris
gggctgaatgccatggagtgtgcac

SEQ ID NO: 148064 - DNA, 25 bp, Canis familiaris
gggcatgttcacagtggctggactc

SEQ ID NO: 148065 - DNA, 25 bp, Canis familiaris
gggaatcttcatcctgaggtgcaat

SEQ ID NO: 148066 - DNA, 25 bp, Canis familiaris
gggccttctatgctgagctttatca

SEQ ID NO: 148067 - DNA, 25 bp, Canis familiaris
gggcttgtgcaagaatgctgcttac

SEQ ID NO: 148068 - DNA, 25 bp, Canis familiaris
gggctcgtcatagtaatcatcctgc

SEQ ID NO: 148069 - DNA, 25 bp, Canis familiaris
gggctcgtcatagtaatcatcctgc

SEQ ID NO: 148070 - DNA, 25 bp, Canis familiaris
gggcgcattctagtatagtgccgcg

SEQ ID NO: 148071 - DNA, 25 bp, Canis familiaris
gggcagaatctgacctcaatcccaa

SEQ ID NO: 148072 - DNA, 25 bp, Canis familiaris
gggcattcagtgacctgacatccca

SEQ ID NO: 148073 - DNA, 25 bp, Canis familiaris
gggcttcactctgtggttcaattat

SEQ ID NO: 148074 - DNA, 25 bp, Canis familiaris
gggcttcacactataggtgcgtttg

SEQ ID NO: 148075 - DNA, 25 bp, Canis familiaris
gggctccacactatcagtcggggag

SEQ ID NO: 148076 - DNA, 25 bp, Canis familiaris
gggccagtagctatagttgtggggc

SEQ ID NO: 148077 - DNA, 25 bp, Canis familiaris
gggccagtagctatagttgtggggc

SEQ ID NO: 148078 - DNA, 25 bp, Canis familiaris
gggcgcatgcatagtattagttgtt

SEQ ID NO: 148079 - DNA, 25 bp, Canis familiaris
gggccataatgctatgtactggtat

SEQ ID NO: 148080 - DNA, 25 bp, Canis familiaris
gggcctgacacagtgtgacagcgtc

SEQ ID NO: 148081 - DNA, 25 bp, Canis familiaris
gggcattgggcaataacactgtcca

SEQ ID NO: 148082 - DNA, 25 bp, Canis familiaris
gggccaggtgcataaagcgacgcgg

SEQ ID NO: 148083 - DNA, 25 bp, Canis familiaris
gggccagccatccaaatagcagcca

SEQ ID NO: 148084 - DNA, 25 bp, Canis familiaris
gggccagccaccaaatctggcctgt

SEQ ID NO: 148085 - DNA, 25 bp, Canis familiaris
gggccagctaaacatgcttcatcgt

SEQ ID NO: 148086 - DNA, 25 bp, Canis familiaris
gggccctctagagtatttctctgtc

SEQ ID NO: 148087 - DNA, 25 bp, Canis familiaris
gggccacgtatcgtgttactgcggc

SEQ ID NO: 148088 - DNA, 25 bp, Canis familiaris
ggtgcccgatatccgcttaatcgga

SEQ ID NO: 148089 - DNA, 25 bp, Canis familiaris
gggctctcagaagttcttctttgga

SEQ ID NO: 148090 - DNA, 25 bp, Canis familiaris
gggcccgagcaggatttgtgtgtgg

SEQ ID NO: 148091 - DNA, 25 bp, Canis familiaris
gggccaggaggaattttgttgtcag

SEQ ID NO: 148092 - DNA, 25 bp, Canis familiaris
gggcgagtgagcaatttccttttat

SEQ ID NO: 148093 - DNA, 25 bp, Canis familiaris
gggctgagtgacaactggctctgac

SEQ ID NO: 148094 - DNA, 25 bp, Canis familiaris
gggaggtaccagggcctgactaaga

SEQ ID NO: 148095 - DNA, 25 bp, Canis familiaris
gggaggtaaactctcctctgaagat

SEQ ID NO: 148096 - DNA, 25 bp, Canis familiaris
gggagtggaacctgtccattaagaa

SEQ ID NO: 148097 - DNA, 25 bp, Canis familiaris
gggaaggacggctgtctttgcaaga

SEQ ID NO: 148098 - DNA, 25 bp, Canis familiaris
gggaaggaagcctcaccttaatgtc

SEQ ID NO: 148099 - DNA, 25 bp, Canis familiaris
gggagttaatgttgccacaccatag

SEQ ID NO: 148100 - DNA, 25 bp, Canis familiaris
gggaattgaaattgtgaacacttgc

SEQ ID NO: 148101 - DNA, 25 bp, Canis familiaris
gggaaccatccttggaaatcctgcc

SEQ ID NO: 148102 - DNA, 25 bp, Canis familiaris
gggaaagagctcatctaaacctggc

SEQ ID NO: 148103 - DNA, 25 bp, Canis familiaris
gggatgagggacaaccaacccttct

SEQ ID NO: 148104 - DNA, 25 bp, Canis familiaris
gggagaggatttacgaaggcgcttc

SEQ ID NO: 148105 - DNA, 25 bp, Canis familiaris
gggagcagacatatctggccaggcg

SEQ ID NO: 148106 - DNA, 25 bp, Canis familiaris
gggcagcaacacatgccttcagtgg

SEQ ID NO: 148107 - DNA, 25 bp, Canis familiaris
gggccagacagaatgccatcctggc

SEQ ID NO: 148108 - DNA, 25 bp, Canis familiaris
gggccgagagaagtctgccggcaaa

SEQ ID NO: 148109 - DNA, 25 bp, Canis familiaris
gggacagcggaagctggcgtgggaa

SEQ ID NO: 148110 - DNA, 25 bp, Canis familiaris
gggaaggacttcatggcgatttaac

SEQ ID NO: 148111 - DNA, 25 bp, Canis familiaris
gggacaaccattatgggcttaccct

SEQ ID NO: 148112 - DNA, 25 bp, Canis familiaris
gggccgattcttaatggtcttacac

SEQ ID NO: 148113 - DNA, 25 bp, Canis familiaris
gggcctttcttgaatggccttacca

SEQ ID NO: 148114 - DNA, 25 bp, Canis familiaris
gggccttggttatgtcagcaatatc

SEQ ID NO: 148115 - DNA, 25 bp, Canis familiaris
gggccagggtggttgtagaaatcta

SEQ ID NO: 148116 - DNA, 25 bp, Canis familiaris
gggccagaggcaggaggtagaaact

SEQ ID NO: 148117 - DNA, 25 bp, Canis familiaris
gggcccaagctcgaggatggcaaag

SEQ ID NO: 148118 - DNA, 25 bp, Canis familiaris
gggccatcacgcgtggaaggctaga

SEQ ID NO: 148119 - DNA, 25 bp, Canis familiaris
gggctcatcattgtgggtgtaacaa

SEQ ID NO: 148120 - DNA, 25 bp, Canis familiaris
gggctctagtcattccagtggaaga

SEQ ID NO: 148121 - DNA, 25 bp, Canis familiaris
gggcctaggccacagggatgatgac

SEQ ID NO: 148122 - DNA, 25 bp, Canis familiaris
gggcctggggactaggtatctatcc

SEQ ID NO: 148123 - DNA, 25 bp, Canis familiaris
gggcctgcgaggaaaggcaacccct

SEQ ID NO: 148124 - DNA, 25 bp, Canis familiaris
gggcctgggggacgacgaggcccag

SEQ ID NO: 148125 - DNA, 25 bp, Canis familiaris
gggcctggttggcaacgatggcacg

SEQ ID NO: 148126 - DNA, 25 bp, Canis familiaris
gggccagagctgggggactgagccc

SEQ ID NO: 148127 - DNA, 25 bp, Canis familiaris
gggccattcgcaggatgggcgagtc

SEQ ID NO: 148128 - DNA, 25 bp, Canis familiaris
gggcgagctccatgggaggcagatc

SEQ ID NO: 148129 - DNA, 25 bp, Canis familiaris
gggccagctcacgagcgagagggac

SEQ ID NO: 148130 - DNA, 25 bp, Canis familiaris
gggctctgctcagcagggagcctgt

SEQ ID NO: 148131 - DNA, 25 bp, Canis familiaris
gggcgctgcatatcagggcgcagct

SEQ ID NO: 148132 - DNA, 25 bp, Canis familiaris
gggcctgtgttgtaggccagctggc

SEQ ID NO: 148133 - DNA, 25 bp, Canis familiaris
gggccttggttacctattgagcttt

SEQ ID NO: 148134 - DNA, 25 bp, Canis familiaris
ggtcctaggattgagcactgggctc

SEQ ID NO: 148135 - DNA, 25 bp, Canis familiaris
gggccttgaatgatacactggacca

SEQ ID NO: 148136 - DNA, 25 bp, Canis familiaris
gggcctgtgaaccgaacagcgaaca

SEQ ID NO: 148137 - DNA, 25 bp, Canis familiaris
gggccagatgcaccggcagaaagca

SEQ ID NO: 148138 - DNA, 25 bp, Canis familiaris
gggccagtgcagttgaagaggatga

SEQ ID NO: 148139 - DNA, 25 bp, Canis familiaris
gggcatcacaagtgaatgcgagata

SEQ ID NO: 148140 - DNA, 25 bp, Canis familiaris
ggtgagccatactgaccagacaact

SEQ ID NO: 148141 - DNA, 25 bp, Canis familiaris
gggcctaaccattccagaaactaga

SEQ ID NO: 148142 - DNA, 25 bp, Canis familiaris
gggctgcatagactgcgaccagaaa

SEQ ID NO: 148143 - DNA, 25 bp, Canis familiaris
gggctcagaaatggacacaaaataa

SEQ ID NO: 148144 - DNA, 25 bp, Canis familiaris
gggccagatatataccaagctcaag

SEQ ID NO: 148145 - DNA, 25 bp, Canis familiaris
gggccagggcaatagatagctcaaa

SEQ ID NO: 148146 - DNA, 25 bp, Canis familiaris
gggccagtggcatgcgaagagccgt

SEQ ID NO: 148147 - DNA, 25 bp, Canis familiaris
gggcctgctgtcaggacagctgccc

SEQ ID NO: 148148 - DNA, 25 bp, Canis familiaris
gggcgatgctgcccaggaagcaggc

SEQ ID NO: 148149 - DNA, 25 bp, Canis familiaris
gggcgatgcacaggtgggagctggc

SEQ ID NO: 148150 - DNA, 25 bp, Canis familiaris
gggcagtgcagaaggtggacggcga

SEQ ID NO: 148151 - DNA, 25 bp, Canis familiaris
gggctggagccggtgatgacgaaga

SEQ ID NO: 148152 - DNA, 25 bp, Canis familiaris
gggctggagccggtgatgacgaaga

SEQ ID NO: 148153 - DNA, 25 bp, Canis familiaris
gggcttggccagggaggctgaggac

SEQ ID NO: 148154 - DNA, 25 bp, Canis familiaris
gggctcccccaggaggctgggagcc

SEQ ID NO: 148155 - DNA, 25 bp, Canis familiaris
gggctgcccgcattggaccgggcag

SEQ ID NO: 148156 - DNA, 25 bp, Canis familiaris
gggcctccgcttggcactggaggcc

SEQ ID NO: 148157 - DNA, 25 bp, Canis familiaris
gggcgccacagatggactggaaccg

SEQ ID NO: 148158 - DNA, 25 bp, Canis familiaris
gggcgccaatggtgagctgggagcc

SEQ ID NO: 148159 - DNA, 25 bp, Canis familiaris
gggcactcaaggtcaagcttaggct

SEQ ID NO: 148160 - DNA, 25 bp, Canis familiaris
gggccgagattgtaagctcttgcag

SEQ ID NO: 148161 - DNA, 25 bp, Canis familiaris
gggctctggctctcacactctctca

SEQ ID NO: 148162 - DNA, 25 bp, Canis familiaris
gggctcatgaccacagtccatgcca

SEQ ID NO: 148163 - DNA, 25 bp, Canis familiaris
gggccatgactatgattcgtgtacc

SEQ ID NO: 148164 - DNA, 25 bp, Canis familiaris
gggcctggtgggtacaggaatctgc

SEQ ID NO: 148165 - DNA, 25 bp, Canis familiaris
gggcctgttgtggtatcaggaacca

SEQ ID NO: 148166 - DNA, 25 bp, Canis familiaris
gggcccttctgagataagaaccatg

SEQ ID NO: 148167 - DNA, 25 bp, Canis familiaris
gggagccttcgagaaaggacgccaa

SEQ ID NO: 148168 - DNA, 25 bp, Canis familiaris
gggagtcgtcgagaaagccccagaa

SEQ ID NO: 148169 - DNA, 25 bp, Canis familiaris
gggctgggctagatagaagccctag

SEQ ID NO: 148170 - DNA, 25 bp, Canis familiaris
gggcagggctagagcagcaggttct

SEQ ID NO: 148171 - DNA, 25 bp, Canis familiaris
gggcaaggccaaggatgcaggacag

SEQ ID NO: 148172 - DNA, 25 bp, Canis familiaris
gggacaagaccattctgcaggatca

SEQ ID NO: 148173 - DNA, 25 bp, Canis familiaris
gggagacatgatcactctccctgca

SEQ ID NO: 148174 - DNA, 25 bp, Canis familiaris
gggctgcccagaacatcatccctgc

SEQ ID NO: 148175 - DNA, 25 bp, Canis familiaris
gggctgcgcagggaatgaagcgctc

SEQ ID NO: 148176 - DNA, 25 bp, Canis familiaris
gggctctgtgtgcacaggatgcgcc

SEQ ID NO: 148177 - DNA, 25 bp, Canis familiaris
gggctattgtggatgatgatgctgt

SEQ ID NO: 148178 - DNA, 25 bp, Canis familiaris
gggcctcatgggctatgtcagtggc

SEQ ID NO: 148179 - DNA, 25 bp, Canis familiaris
gggcctcattagtacatgcaagtgc

SEQ ID NO: 148180 - DNA, 25 bp, Canis familiaris
gggcaccagctaggcactgaaggaa

SEQ ID NO: 148181 - DNA, 25 bp, Canis familiaris
gggcctcgctcaggaagatggtgaa

SEQ ID NO: 148182 - DNA, 25 bp, Canis familiaris
gggccttagtggtagtgcagtgcaa

SEQ ID NO: 148183 - DNA, 25 bp, Canis familiaris
gggccttgggaaagccatgtgcaga

SEQ ID NO: 148184 - DNA, 25 bp, Canis familiaris
gggccggtgtaaccactgatgacat

SEQ ID NO: 148185 - DNA, 25 bp, Canis familiaris
gggcacggtgtagagccatgcattt

SEQ ID NO: 148186 - DNA, 25 bp, Canis familiaris
gggcagtgggaagtagttgtttatt

SEQ ID NO: 148187 - DNA, 25 bp, Canis familiaris
gggctagggccattttgttttatat

SEQ ID NO: 148188 - DNA, 25 bp, Canis familiaris
gggtatgatccctggttttggtaca

SEQ ID NO: 148189 - DNA, 25 bp, Canis familiaris
gggaaagcccttgtttctgaggaag

SEQ ID NO: 148190 - DNA, 25 bp, Canis familiaris
ggtaacggctttgtttgctaggctt

SEQ ID NO: 148191 - DNA, 25 bp, Canis familiaris
ggtgaacgtcttagtgtccgtagtg

SEQ ID NO: 148192 - DNA, 25 bp, Canis familiaris
gggaactggtcgcgattggtagatg

SEQ ID NO: 148193 - DNA, 25 bp, Canis familiaris
gggaggtgagttaggttcgtcgatc

SEQ ID NO: 148194 - DNA, 25 bp, Canis familiaris
gggcggtgcatgtgatgtgttcttc

SEQ ID NO: 148195 - DNA, 25 bp, Canis familiaris
gggcgagactgagcaggctattcac

SEQ ID NO: 148196 - DNA, 25 bp, Canis familiaris
gggcgagtctgctgagagcgatccc

SEQ ID NO: 148197 - DNA, 25 bp, Canis familiaris
gggcgagatatgaagggacccgctc

SEQ ID NO: 148198 - DNA, 25 bp, Canis familiaris
gggcgcagcaatgcagtaccaaccc

SEQ ID NO: 148199 - DNA, 25 bp, Canis familiaris
gggctggcaagtggctatccactcc

SEQ ID NO: 148200 - DNA, 25 bp, Canis familiaris
gggcagactaaggtgtcctgctggc

SEQ ID NO: 148201 - DNA, 25 bp, Canis familiaris
gggagcacataatggatcacctagc

SEQ ID NO: 148202 - DNA, 25 bp, Canis familiaris
gggcctccaggaagagctgatcgac

SEQ ID NO: 148203 - DNA, 25 bp, Canis familiaris
gggctctatcgggaatggaccagca

SEQ ID NO: 148204 - DNA, 25 bp, Canis familiaris
gggtcttcaggatcataccataggc

SEQ ID NO: 148205 - DNA, 25 bp, Canis familiaris
ggtgatcgctcacaactaactacga

SEQ ID NO: 148206 - DNA, 25 bp, Canis familiaris
ggtcaactactatgtatattacagg

SEQ ID NO: 148207 - DNA, 25 bp, Canis familiaris
ggtcaagtaaacctaattcgcctga

SEQ ID NO: 148208 - DNA, 25 bp, Canis familiaris
gggacagtaaacccaatacctcatt

SEQ ID NO: 148209 - DNA, 25 bp, Canis familiaris
gggcaatgctgagaactactacctt

SEQ ID NO: 148210 - DNA, 25 bp, Canis familiaris
gggctatcataggacttactcagac

SEQ ID NO: 148211 - DNA, 25 bp, Canis familiaris
gggctcatcatagtggctgtgacga

SEQ ID NO: 148212 - DNA, 25 bp, Canis familiaris
gggcttcatcattggccaagcaggc

SEQ ID NO: 148213 - DNA, 25 bp, Canis familiaris
gggctactcagtgctacagatggtc

SEQ ID NO: 148214 - DNA, 25 bp, Canis familiaris
gggctacatcagagtgtcggttcta

SEQ ID NO: 148215 - DNA, 25 bp, Canis familiaris
gggctactcccatgtggagattgta

SEQ ID NO: 148216 - DNA, 25 bp, Canis familiaris
gggctagtcacctatctggagctag

SEQ ID NO: 148217 - DNA, 25 bp, Canis familiaris
gggctttcactgtatgctgaggggc

SEQ ID NO: 148218 - DNA, 25 bp, Canis familiaris
gggccctcatcgtgctggagggcgt

SEQ ID NO: 148219 - DNA, 25 bp, Canis familiaris
gggcctctctttggctggaggcagc

SEQ ID NO: 148220 - DNA, 25 bp, Canis familiaris
gggcccattttcctggtgtgaagga

SEQ ID NO: 148221 - DNA, 25 bp, Canis familiaris
gggcatctcatttctttggttgcaa

SEQ ID NO: 148222 - DNA, 25 bp, Canis familiaris
gggcaggcatatgggcattggtaag

SEQ ID NO: 148223 - DNA, 25 bp, Canis familiaris
gggacgtgcgggtcagtgtgaaggc

SEQ ID NO: 148224 - DNA, 25 bp, Canis familiaris
gggcctgggcgtccaggttgaagcc

SEQ ID NO: 148225 - DNA, 25 bp, Canis familiaris
gggccggagcttggagaattggacc

SEQ ID NO: 148226 - DNA, 25 bp, Canis familiaris
gggcctggacctgagcagggaggcc

SEQ ID NO: 148227 - DNA, 25 bp, Canis familiaris
gggctctgagtgactggagaggagg

SEQ ID NO: 148228 - DNA, 25 bp, Canis familiaris
gggccgattgaagggtatgagcatg

SEQ ID NO: 148229 - DNA, 25 bp, Canis familiaris
ggggcgattagatgttaactggacc

SEQ ID NO: 148230 - DNA, 25 bp, Canis familiaris
gggacagactaatgttcaatgctgc

SEQ ID NO: 148231 - DNA, 25 bp, Canis familiaris
gggaacgtaacagttaatctccgag

SEQ ID NO: 148232 - DNA, 25 bp, Canis familiaris
ggtaactatagcattcgaactccaa

SEQ ID NO: 148233 - DNA, 25 bp, Canis familiaris
gggaagtatgcgagctcaaccccaa

SEQ ID NO: 148234 - DNA, 25 bp, Canis familiaris
gggaatgacatctacggcaacccca

SEQ ID NO: 148235 - DNA, 25 bp, Canis familiaris
gggcctggcacataggaagtcttca

SEQ ID NO: 148236 - DNA, 25 bp, Canis familiaris
gggcgtgaaccatgagaagtatgac

SEQ ID NO: 148237 - DNA, 25 bp, Canis familiaris
gggcaggagccccacagaaacatac

SEQ ID NO: 148238 - DNA, 25 bp, Canis familiaris
gggcggcagcccagagaagagaccg

SEQ ID NO: 148239 - DNA, 25 bp, Canis familiaris
gggctagccacctgaggaagaccca

SEQ ID NO: 148240 - DNA, 25 bp, Canis familiaris
gggaagcctcactgtgaacaacctg

SEQ ID NO: 148241 - DNA, 25 bp, Canis familiaris
gggaagccccatgggcacatgtagc

SEQ ID NO: 148242 - DNA, 25 bp, Canis familiaris
gggaacttgctatcactcagctatg

SEQ ID NO: 148243 - DNA, 25 bp, Canis familiaris
gggacagctctcttagacatcgctg

SEQ ID NO: 148244 - DNA, 25 bp, Canis familiaris
gggcatcatgctggtctatgacatc

SEQ ID NO: 148245 - DNA, 25 bp, Canis familiaris
gggcagctgggtggatcagtcagtt

SEQ ID NO: 148246 - DNA, 25 bp, Canis familiaris
gggctctgggagcccagtgcatact

SEQ ID NO: 148247 - DNA, 25 bp, Canis familiaris
gggcatcatggtggtgtcgtgcatc

SEQ ID NO: 148248 - DNA, 25 bp, Canis familiaris
gggcatcagcgcagagatcgtctgc

SEQ ID NO: 148249 - DNA, 25 bp, Canis familiaris
gggctaggcttgatggtggccaggc

SEQ ID NO: 148250 - DNA, 25 bp, Canis familiaris
gggcaaacattcctgggagctgggc

SEQ ID NO: 148251 - DNA, 25 bp, Canis familiaris
gggaaggtttctgtgactgggagca

SEQ ID NO: 148252 - DNA, 25 bp, Canis familiaris
gggcaagtttgtttcatacgggtca

SEQ ID NO: 148253 - DNA, 25 bp, Canis familiaris
gggcaaatgccgtttcagcaaggtt

SEQ ID NO: 148254 - DNA, 25 bp, Canis familiaris
gggaattctctttacaaatagtcta

SEQ ID NO: 148255 - DNA, 25 bp, Canis familiaris
gggaattctgtcccagggatgagtt

SEQ ID NO: 148256 - DNA, 25 bp, Canis familiaris
gggaagagttcatctggcagaggtt

SEQ ID NO: 148257 - DNA, 25 bp, Canis familiaris
gggcattcgtattgcgccgctagag

SEQ ID NO: 148258 - DNA, 25 bp, Canis familiaris
gggcattcgtattgcgccgctagag

SEQ ID NO: 148259 - DNA, 25 bp, Canis familiaris
gggcattcgtattgcgccgctagag

SEQ ID NO: 148260 - DNA, 25 bp, Canis familiaris
gggcattttcttgctcctgcaagaa

SEQ ID NO: 148261 - DNA, 25 bp, Canis familiaris
gggtacttcattggccacagataaa

SEQ ID NO: 148262 - DNA, 25 bp, Canis familiaris
gggagacttagagcccatctaaaat

SEQ ID NO: 148263 - DNA, 25 bp, Canis familiaris
gggaacttctggagtcagcaaaaca

SEQ ID NO: 148264 - DNA, 25 bp, Canis familiaris
gggcaagttgctcaagggtatcgac

SEQ ID NO: 148265 - DNA, 25 bp, Canis familiaris
gggaagttgctttgaagttaatgac

SEQ ID NO: 148266 - DNA, 25 bp, Canis familiaris
gggcaatctttttgcatagccttaa

SEQ ID NO: 148267 - DNA, 25 bp, Canis familiaris
gggaatttgttgtcatgagcctatc

SEQ ID NO: 148268 - DNA, 25 bp, Canis familiaris
gggcattttgacaacatggcttctc

SEQ ID NO: 148269 - DNA, 25 bp, Canis familiaris
gggcatctttagacatcgtcttccc

SEQ ID NO: 148270 - DNA, 25 bp, Canis familiaris
gggcacgttaacagatctgcttcca

SEQ ID NO: 148271 - DNA, 25 bp, Canis familiaris
gggaattaaaaggattgctcaccaa

SEQ ID NO: 148272 - DNA, 25 bp, Canis familiaris
gggaaatttcacgaacgtcaccaag

SEQ ID NO: 148273 - DNA, 25 bp, Canis familiaris
gggaaactcatcctgacacttaccc

SEQ ID NO: 148274 - DNA, 25 bp, Canis familiaris
gggacatacacatgtgaactccggc

SEQ ID NO: 148275 - DNA, 25 bp, Canis familiaris
gggaatagcagatgggccttctaca

SEQ ID NO: 148276 - DNA, 25 bp, Canis familiaris
gggaagaaaatggctcgttcaacct

SEQ ID NO: 148277 - DNA, 25 bp, Canis familiaris
gggcaaagaaatgctccatctcctc

SEQ ID NO: 148278 - DNA, 25 bp, Canis familiaris
gggctacaaatctcctcaggacatc

SEQ ID NO: 148279 - DNA, 25 bp, Canis familiaris
gggctggagttgtttctcaggcaat

SEQ ID NO: 148280 - DNA, 25 bp, Canis familiaris
gggctgtggatttgcttttggtgtt

SEQ ID NO: 148281 - DNA, 25 bp, Canis familiaris
gggtgctgcatgttatgcctttgaa

SEQ ID NO: 148282 - DNA, 25 bp, Canis familiaris
gggtcgggtattcttgaaactctct

SEQ ID NO: 148283 - DNA, 25 bp, Canis familiaris
gggtgggggtctcttgagacgttag

SEQ ID NO: 148284 - DNA, 25 bp, Canis familiaris
gggatccgggttgtgtacatcagtt

SEQ ID NO: 148285 - DNA, 25 bp, Canis familiaris
gggcaccatgggattcattacattt

SEQ ID NO: 148286 - DNA, 25 bp, Canis familiaris
gggcactgggtggcttagttagtta

SEQ ID NO: 148287 - DNA, 25 bp, Canis familiaris
gggcagctgaagagaaatcctcagt

SEQ ID NO: 148288 - DNA, 25 bp, Canis familiaris
gggcagagccagaagcaaacaaagt

SEQ ID NO: 148289 - DNA, 25 bp, Canis familiaris
gggcaaaggtactaagacagcatgt

SEQ ID NO: 148290 - DNA, 25 bp, Canis familiaris
gggcgcaaaggagccgacatcatgt

SEQ ID NO: 148291 - DNA, 25 bp, Canis familiaris
gggcgcaaaaggagctgacaatcat

SEQ ID NO: 148292 - DNA, 25 bp, Canis familiaris
gggcgcaagagcagtacgacctctt

SEQ ID NO: 148293 - DNA, 25 bp, Canis familiaris
gggacaagtgccatactgtcggcta

SEQ ID NO: 148294 - DNA, 25 bp, Canis familiaris
gggaagtatgatcctactgtgccca

SEQ ID NO: 148295 - DNA, 25 bp, Canis familiaris
gggcaagtatgaaggcagtggagaa

SEQ ID NO: 148296 - DNA, 25 bp, Canis familiaris
gggcagacaggcaggcttagaaagt

SEQ ID NO: 148297 - DNA, 25 bp, Canis familiaris
gggagaagggggctagagcagttct

SEQ ID NO: 148298 - DNA, 25 bp, Canis familiaris
gggaaagggggtgagctgctgtgtg

SEQ ID NO: 148299 - DNA, 25 bp, Canis familiaris
gggcaaggatggtggaggctttctg

SEQ ID NO: 148300 - DNA, 25 bp, Canis familiaris
gggaacctggagctcaggctttgcg

SEQ ID NO: 148301 - DNA, 25 bp, Canis familiaris
gggctacactgaggaccaggttgtc

SEQ ID NO: 148302 - DNA, 25 bp, Canis familiaris
gggctacactgaggaccaggtggtc

SEQ ID NO: 148303 - DNA, 25 bp, Canis familiaris
gggtaactggtagacgggcatcgaa

SEQ ID NO: 148304 - DNA, 25 bp, Canis familiaris
gggacaactgggtgacgggcattaa

SEQ ID NO: 148305 - DNA, 25 bp, Canis familiaris
gggaaccagaggtgtcgggagacaa

SEQ ID NO: 148306 - DNA, 25 bp, Canis familiaris
ggtgaaccaggtgtttgggcaagat

SEQ ID NO: 148307 - DNA, 25 bp, Canis familiaris
tccgagaccatggtaacctggcctt

SEQ ID NO: 148308 - DNA, 25 bp, Canis familiaris
gggaacaatggtatcctggcggtaa

SEQ ID NO: 148309 - DNA, 25 bp, Canis familiaris
gggaaatatgtactccctgggcgct

SEQ ID NO: 148310 - DNA, 25 bp, Canis familiaris
ggatgactaatttgaccctggtccc

SEQ ID NO: 148311 - DNA, 25 bp, Canis familiaris
gggactagattccagcggggtggac

SEQ ID NO: 148312 - DNA, 25 bp, Canis familiaris
gggcttcgattccggtagagggatg

SEQ ID NO: 148313 - DNA, 25 bp, Canis familiaris
gggctccagatcctgaggttgggga

SEQ ID NO: 148314 - DNA, 25 bp, Canis familiaris
gggctacagacatggtttctgggac

SEQ ID NO: 148315 - DNA, 25 bp, Canis familiaris
gggcccaggagcgagtcctatggga

SEQ ID NO: 148316 - DNA, 25 bp, Canis familiaris
gggcccactgaagggcatcttgggc

SEQ ID NO: 148317 - DNA, 25 bp, Canis familiaris
gggcttcactaaggttgttggtgaa

SEQ ID NO: 148318 - DNA, 25 bp, Canis familiaris
gggcttgaaaaacctgagtctgctg

SEQ ID NO: 148319 - DNA, 25 bp, Canis familiaris
gggttaagaaaccaatgcatcgtta

SEQ ID NO: 148320 - DNA, 25 bp, Canis familiaris
gggactaaaaaccacagcagaatcg

SEQ ID NO: 148321 - DNA, 25 bp, Canis familiaris
gggaaaaaaacattgccaaatatga

SEQ ID NO: 148322 - DNA, 25 bp, Canis familiaris
gggacaatttcttttggcataagta

SEQ ID NO: 148323 - DNA, 25 bp, Canis familiaris
gggcagcacattcttctgtggatac

SEQ ID NO: 148324 - DNA, 25 bp, Canis familiaris
gggcaacgtggtcctgtggaagccc

SEQ ID NO: 148325 - DNA, 25 bp, Canis familiaris
gggaccaaggacatatggaatccac

SEQ ID NO: 148326 - DNA, 25 bp, Canis familiaris
gggaggataaacattggaactctat

SEQ ID NO: 148327 - DNA, 25 bp, Canis familiaris
gggaggagaaactgctttactgtag

SEQ ID NO: 148328 - DNA, 25 bp, Canis familiaris
gggcacctaacctgttattcagtga

SEQ ID NO: 148329 - DNA, 25 bp, Canis familiaris
gggcagttaaggtctctctaccaaa

SEQ ID NO: 148330 - DNA, 25 bp, Canis familiaris
gggagtaggccttttgaacgcacaa

SEQ ID NO: 148331 - DNA, 25 bp, Canis familiaris
gggctgtggggctgagttagctaca

SEQ ID NO: 148332 - DNA, 25 bp, Canis familiaris
gggcgatgaaggtggatttgctcct

SEQ ID NO: 148333 - DNA, 25 bp, Canis familiaris
gggagtgtcgcgttgtatgttaccg

SEQ ID NO: 148334 - DNA, 25 bp, Canis familiaris
gggcagttcttctggtgctaggccc

SEQ ID NO: 148335 - DNA, 25 bp, Canis familiaris
gggcagggctattgggtgcaacacc

SEQ ID NO: 148336 - DNA, 25 bp, Canis familiaris
gggcggcgtatgtgggagtgtgcca

SEQ ID NO: 148337 - DNA, 25 bp, Canis familiaris
gggcaggctttatgggagactgtcc

SEQ ID NO: 148338 - DNA, 25 bp, Canis familiaris
gggcttctgatttcggtataggttc

SEQ ID NO: 148339 - DNA, 25 bp, Canis familiaris
gggaactaaatctgtatgaagtacc

SEQ ID NO: 148340 - DNA, 25 bp, Canis familiaris
gggaacccaatctgggaaggtcagg

SEQ ID NO: 148341 - DNA, 25 bp, Canis familiaris
gggcggccacgttcgggaatggccg

SEQ ID NO: 148342 - DNA, 25 bp, Canis familiaris
gggcggccaagtgcggcaaaggcca

SEQ ID NO: 148343 - DNA, 25 bp, Canis familiaris
gggcgttcaggtggaccagaagtcc

SEQ ID NO: 148344 - DNA, 25 bp, Canis familiaris
gggaatggcaggtgccctgaaggcc

SEQ ID NO: 148345 - DNA, 25 bp, Canis familiaris
gggcttggcagtgagcactctgaac

SEQ ID NO: 148346 - DNA, 25 bp, Canis familiaris
gggcgtgccaggagcagatcgaagc

SEQ ID NO: 148347 - DNA, 25 bp, Canis familiaris
gggcgcagcgggaggacgaggcgcc

SEQ ID NO: 148348 - DNA, 25 bp, Canis familiaris
gggcggtgcgtggagaacgagtgcg

SEQ ID NO: 148349 - DNA, 25 bp, Canis familiaris
gggcggtgaggagaaggcagctgag

SEQ ID NO: 148350 - DNA, 25 bp, Canis familiaris
gggctgtggtggagaagcggctggc

SEQ ID NO: 148351 - DNA, 25 bp, Canis familiaris
gggctgatgttgtggacgtggcagt

SEQ ID NO: 148352 - DNA, 25 bp, Canis familiaris
gggcgtattcatggaggcagtggct

SEQ ID NO: 148353 - DNA, 25 bp, Canis familiaris
gggctacattcagagtgctgggttt

SEQ ID NO: 148354 - DNA, 25 bp, Canis familiaris
gggctacaatcagagtgccggttct

SEQ ID NO: 148355 - DNA, 25 bp, Canis familiaris
gggctggacacagggtcggtggccc

SEQ ID NO: 148356 - DNA, 25 bp, Canis familiaris
gggctggacacagggtcggtggccc

SEQ ID NO: 148357 - DNA, 25 bp, Canis familiaris
gggctggacacagggtcggtggccc

SEQ ID NO: 148358 - DNA, 25 bp, Canis familiaris
gggctggacacagggtcggtggccc

SEQ ID NO: 148359 - DNA, 25 bp, Canis familiaris
gggctggacacagggtcggtggccc

SEQ ID NO: 148360 - DNA, 25 bp, Canis familiaris
gggctggacacagggtcggtggccc

SEQ ID NO: 148361 - DNA, 25 bp, Canis familiaris
gggctggacacagggtcggtggccc

SEQ ID NO: 148362 - DNA, 25 bp, Canis familiaris
gggctagtgacagtggggagggggc

SEQ ID NO: 148363 - DNA, 25 bp, Canis familiaris
gggaagatggcagtgggggaaggga

SEQ ID NO: 148364 - DNA, 25 bp, Canis familiaris
gggaattgggagaagggggctagag

SEQ ID NO: 148365 - DNA, 25 bp, Canis familiaris
gggcaatagggtaaaggagtcaagt

SEQ ID NO: 148366 - DNA, 25 bp, Canis familiaris
gggcaagggcctcaaacatgaacag

SEQ ID NO: 148367 - DNA, 25 bp, Canis familiaris
gggaaaactgataagcaacataaca

SEQ ID NO: 148368 - DNA, 25 bp, Canis familiaris
gggaaagctttcacaaggaacagga

SEQ ID NO: 148369 - DNA, 25 bp, Canis familiaris
gggaaggctttctggaggagagaga

SEQ ID NO: 148370 - DNA, 25 bp, Canis familiaris
gggcacagactttcctggaggtaga

SEQ ID NO: 148371 - DNA, 25 bp, Canis familiaris
gggctctgactttcgtggatgaggt

SEQ ID NO: 148372 - DNA, 25 bp, Canis familiaris
gggctgcagattcacgaggagcggc

SEQ ID NO: 148373 - DNA, 25 bp, Canis familiaris
gggctctactgcgagtgaggacgcc

SEQ ID NO: 148374 - DNA, 25 bp, Canis familiaris
gggcttcagcgccaggcgcgaattc

SEQ ID NO: 148375 - DNA, 25 bp, Canis familiaris
gggctccatgtcaatggggaactgc

SEQ ID NO: 148376 - DNA, 25 bp, Canis familiaris
gggctccatgctcagtgtggaatct

SEQ ID NO: 148377 - DNA, 25 bp, Canis familiaris
gggctcccagtgatgtggagatccg

SEQ ID NO: 148378 - DNA, 25 bp, Canis familiaris
gggctgcccaggaatttcaggcccc

SEQ ID NO: 148379 - DNA, 25 bp, Canis familiaris
gggctggcctggaatgattgatggg

SEQ ID NO: 148380 - DNA, 25 bp, Canis familiaris
gggcgacgctggaacagctgaggcg

SEQ ID NO: 148381 - DNA, 25 bp, Canis familiaris
gggcgcacgctgcgagcatgcgtgc

SEQ ID NO: 148382 - DNA, 25 bp, Canis familiaris
gggctcaatgctctggacagtggaa

SEQ ID NO: 148383 - DNA, 25 bp, Canis familiaris
gggatcatttaaagatcgcggaatg

SEQ ID NO: 148384 - DNA, 25 bp, Canis familiaris
gggatcatttgaatttcaggggaca

SEQ ID NO: 148385 - DNA, 25 bp, Canis familiaris
gggctcattgtgatcgatcatcggc

SEQ ID NO: 148386 - DNA, 25 bp, Canis familiaris
gggctctctctggtggagatgggca

SEQ ID NO: 148387 - DNA, 25 bp, Canis familiaris
gggcatgccatcctggagagggaat

SEQ ID NO: 148388 - DNA, 25 bp, Canis familiaris
gggctgccatttgcagtggcaaagt

SEQ ID NO: 148389 - DNA, 25 bp, Canis familiaris
gggctgctatatttcagtccagtga

SEQ ID NO: 148390 - DNA, 25 bp, Canis familiaris
gggctgtgataagcagtctttgatg

SEQ ID NO: 148391 - DNA, 25 bp, Canis familiaris
gggcatcgagaagaatctaggcatt

SEQ ID NO: 148392 - DNA, 25 bp, Canis familiaris
gggctgacgacatagcttagtcatg

SEQ ID NO: 148393 - DNA, 25 bp, Canis familiaris
gggctgaaagcacaggtggcatatg

SEQ ID NO: 148394 - DNA, 25 bp, Canis familiaris
gggctgagggcaaaggaggttagga

SEQ ID NO: 148395 - DNA, 25 bp, Canis familiaris
gggcgagcggtgaaaaggttatgtg

SEQ ID NO: 148396 - DNA, 25 bp, Canis familiaris
gggaaccctgctgaatggtaagatg

SEQ ID NO: 148397 - DNA, 25 bp, Canis familiaris
gggaatcacctgaaccaggttaatt

SEQ ID NO: 148398 - DNA, 25 bp, Canis familiaris
gggaatgcacctgcatgtctggagg

SEQ ID NO: 148399 - DNA, 25 bp, Canis familiaris
gggcagctactcctactatggagga

SEQ ID NO: 148400 - DNA, 25 bp, Canis familiaris
gggcagcctcctaaaagggccaaag

SEQ ID NO: 148401 - DNA, 25 bp, Canis familiaris
gggcattccagtccaaagggaaaag

SEQ ID NO: 148402 - DNA, 25 bp, Canis familiaris
gggaccctgtaaaagctgtaaaatg

SEQ ID NO: 148403 - DNA, 25 bp, Canis familiaris
gggaacctgttaaagctgggcatca

SEQ ID NO: 148404 - DNA, 25 bp, Canis familiaris
gggacaactgttgtcgctggggacc

SEQ ID NO: 148405 - DNA, 25 bp, Canis familiaris
gggcacacggttctttcgagtgaac

SEQ ID NO: 148406 - DNA, 25 bp, Canis familiaris
gggcatccaggtagttttgggtcca

SEQ ID NO: 148407 - DNA, 25 bp, Canis familiaris
gggcttcagggaaaggtcggtctca

SEQ ID NO: 148408 - DNA, 25 bp, Canis familiaris
gggctatcgaaacaggatcgcggcc

SEQ ID NO: 148409 - DNA, 25 bp, Canis familiaris
gggctacggagacatgtacccgcag

SEQ ID NO: 148410 - DNA, 25 bp, Canis familiaris
gggtacaggaatctgccatctacgc

SEQ ID NO: 148411 - DNA, 25 bp, Canis familiaris
gggaacggagtcaatcgatctagtt

SEQ ID NO: 148412 - DNA, 25 bp, Canis familiaris
ggtgaagggattgctggcacgtctt

SEQ ID NO: 148413 - DNA, 25 bp, Canis familiaris
gggaaggtttccatatccttttatg

SEQ ID NO: 148414 - DNA, 25 bp, Canis familiaris
gggaagacgctctctaaggtttttg

SEQ ID NO: 148415 - DNA, 25 bp, Canis familiaris
gggaaagcgctctcaactttttatt

SEQ ID NO: 148416 - DNA, 25 bp, Canis familiaris
gggaagattgtggaaacgtattttg

SEQ ID NO: 148417 - DNA, 25 bp, Canis familiaris
ggtaaattgggatatagtacaccta

SEQ ID NO: 148418 - DNA, 25 bp, Canis familiaris
ggtaagggcggataggtccacacca

SEQ ID NO: 148419 - DNA, 25 bp, Canis familiaris
ggtgaacgtccagacggaccacacg

SEQ ID NO: 148420 - DNA, 25 bp, Canis familiaris
ggtggacctagagaccgatcacctc

SEQ ID NO: 148421 - DNA, 25 bp, Canis familiaris
gggaaccaagaacctacatcaactc

SEQ ID NO: 148422 - DNA, 25 bp, Canis familiaris
gggaatgccaagaccgtgaggaacg

SEQ ID NO: 148423 - DNA, 25 bp, Canis familiaris
gggatgatcagctgggggaggagtc

SEQ ID NO: 148424 - DNA, 25 bp, Canis familiaris
gggcaggtgcatctgaggcagaggg

SEQ ID NO: 148425 - DNA, 25 bp, Canis familiaris
gggcggtgcacgaccgataggagca

SEQ ID NO: 148426 - DNA, 25 bp, Canis familiaris
gggctggcgaagacctgaaggagat

SEQ ID NO: 148427 - DNA, 25 bp, Canis familiaris
gggcttgctgaaatttaaggatttg

SEQ ID NO: 148428 - DNA, 25 bp, Canis familiaris
gggctgtgcaacatgtaccaggatg

SEQ ID NO: 148429 - DNA, 25 bp, Canis familiaris
gggctggcaatctgtagcttggagc

SEQ ID NO: 148430 - DNA, 25 bp, Canis familiaris
gggctgaaatcgggagttggacact

SEQ ID NO: 148431 - DNA, 25 bp, Canis familiaris
gggctgacgtctgggaggtgagtag

SEQ ID NO: 148432 - DNA, 25 bp, Canis familiaris
gggctgcggagcggggaaactgatg

SEQ ID NO: 148433 - DNA, 25 bp, Canis familiaris
gggatcggagggggagaccatgacc

SEQ ID NO: 148434 - DNA, 25 bp, Canis familiaris
gggatcgaggtggttcgaatcttcc

SEQ ID NO: 148435 - DNA, 25 bp, Canis familiaris
gggacaagtggcgttcagccacccg

SEQ ID NO: 148436 - DNA, 25 bp, Canis familiaris
ggggaatcagggttcgattccggag

SEQ ID NO: 148437 - DNA, 25 bp, Canis familiaris
gggggaaggaccataaccgagatga

SEQ ID NO: 148438 - DNA, 25 bp, Canis familiaris
gggaaccaacttataaactgatgta

SEQ ID NO: 148439 - DNA, 25 bp, Canis familiaris
gggcagacacgagttttcttaatga

SEQ ID NO: 148440 - DNA, 25 bp, Canis familiaris
gggcagatacctcatcttgttagct

SEQ ID NO: 148441 - DNA, 25 bp, Canis familiaris
gggaatccctgattttgctgttccg

SEQ ID NO: 148442 - DNA, 25 bp, Canis familiaris
gggaaccaggattttctatgctttg

SEQ ID NO: 148443 - DNA, 25 bp, Canis familiaris
gggaccgacacttgagtcgtcttag

SEQ ID NO: 148444 - DNA, 25 bp, Canis familiaris
gggcacctaccatggtatgacactg

SEQ ID NO: 148445 - DNA, 25 bp, Canis familiaris
gggcagcctgtggccaagtagacca

SEQ ID NO: 148446 - DNA, 25 bp, Canis familiaris
gggcactgtgtcactatgcttgacc

SEQ ID NO: 148447 - DNA, 25 bp, Canis familiaris
gggcactgtgtcactatgcttgacc

SEQ ID NO: 148448 - DNA, 25 bp, Canis familiaris
gggcaatgtctcaagtttggctccg

SEQ ID NO: 148449 - DNA, 25 bp, Canis familiaris
gggaagtgctgcaagatttgcccag

SEQ ID NO: 148450 - DNA, 25 bp, Canis familiaris
gggaagctgcgaagggctcgttgag

SEQ ID NO: 148451 - DNA, 25 bp, Canis familiaris
gggaagtccaaggggtgtcggtgtg

SEQ ID NO: 148452 - DNA, 25 bp, Canis familiaris
gggacagtccgagaggtttctgctg

SEQ ID NO: 148453 - DNA, 25 bp, Canis familiaris
tgaggaaacccagagggacctttag

SEQ ID NO: 148454 - DNA, 25 bp, Canis familiaris
gggaaactccaacgggaacttgatg

SEQ ID NO: 148455 - DNA, 25 bp, Canis familiaris
gggaaactccaacggaaccttgatg

SEQ ID NO: 148456 - DNA, 25 bp, Canis familiaris
gggaagttccaacagcttcctgtcc

SEQ ID NO: 148457 - DNA, 25 bp, Canis familiaris
gggaaatttcacatcagtacctgta

SEQ ID NO: 148458 - DNA, 25 bp, Canis familiaris
gggcaagattttactccatacttca

SEQ ID NO: 148459 - DNA, 25 bp, Canis familiaris
gggcaggtgttcagcctgctgagcc

SEQ ID NO: 148460 - DNA, 25 bp, Canis familiaris
gggcagcgtgattagtcactgtttc

SEQ ID NO: 148461 - DNA, 25 bp, Canis familiaris
gggcagggaggtgtctgttgctgct

SEQ ID NO: 148462 - DNA, 25 bp, Canis familiaris
gggcatgggggtgtcagtgcccaca

SEQ ID NO: 148463 - DNA, 25 bp, Canis familiaris
gggcagggcccagaagtgctgccag

SEQ ID NO: 148464 - DNA, 25 bp, Canis familiaris
gggcagtgatgcctgaggtagtgtc

SEQ ID NO: 148465 - DNA, 25 bp, Canis familiaris
gggcagctaagaagagctagggcac

SEQ ID NO: 148466 - DNA, 25 bp, Canis familiaris
gggagctatctggaggctatttgcc

SEQ ID NO: 148467 - DNA, 25 bp, Canis familiaris
gggagctgagaggggaactggccgg

SEQ ID NO: 148468 - DNA, 25 bp, Canis familiaris
gggaagatgtggcgtgacggccgag

SEQ ID NO: 148469 - DNA, 25 bp, Canis familiaris
gggacagttgggaaagctgccctgg

SEQ ID NO: 148470 - DNA, 25 bp, Canis familiaris
gggaatttcaggtaagtgtcacagg

SEQ ID NO: 148471 - DNA, 25 bp, Canis familiaris
gggcatattgtcagaaagggcggcg

SEQ ID NO: 148472 - DNA, 25 bp, Canis familiaris
gggctgcactggggtagagggggtg

SEQ ID NO: 148473 - DNA, 25 bp, Canis familiaris
gggctccggaacaaacgtgaggtct

SEQ ID NO: 148474 - DNA, 25 bp, Canis familiaris
gggagccaagaagaaagtggttgat

SEQ ID NO: 148475 - DNA, 25 bp, Canis familiaris
gggataaagcgagggcaggtggtaa

SEQ ID NO: 148476 - DNA, 25 bp, Canis familiaris
gggaaaagtgacagccggctgtgga

SEQ ID NO: 148477 - DNA, 25 bp, Canis familiaris
gggaccaaggcaattccgggtcagg

SEQ ID NO: 148478 - DNA, 25 bp, Canis familiaris
gggacaataggatttccggaagatg

SEQ ID NO: 148479 - DNA, 25 bp, Canis familiaris
gggaatgatatgcttgtttaaatga

SEQ ID NO: 148480 - DNA, 25 bp, Canis familiaris
gggactattgccttggtgtcaaatg

SEQ ID NO: 148481 - DNA, 25 bp, Canis familiaris
gggaaaacgtcacgctgaatatatg

SEQ ID NO: 148482 - DNA, 25 bp, Canis familiaris
gggaaaatccaactgatgagtatct

SEQ ID NO: 148483 - DNA, 25 bp, Canis familiaris
gggaaactgaatgatgatgggtctt

SEQ ID NO: 148484 - DNA, 25 bp, Canis familiaris
gggcagaccgatagaatcattggta

SEQ ID NO: 148485 - DNA, 25 bp, Canis familiaris
gggcagatcctgagcaagctgaagc

SEQ ID NO: 148486 - DNA, 25 bp, Canis familiaris
gggctgccacgaccaagtgacagca

SEQ ID NO: 148487 - DNA, 25 bp, Canis familiaris
gggctccatccactctggagaatga

SEQ ID NO: 148488 - DNA, 25 bp, Canis familiaris
gggctctcagccttcagaattatga

SEQ ID NO: 148489 - DNA, 25 bp, Canis familiaris
gggcttcagtgtgagaactgtgacc

SEQ ID NO: 148490 - DNA, 25 bp, Canis familiaris
gggcttcttttcaaatgctggaggc

SEQ ID NO: 148491 - DNA, 25 bp, Canis familiaris
gggctactccagaccaatttcagcc

SEQ ID NO: 148492 - DNA, 25 bp, Canis familiaris
gggctttcctctgcaatattacccc

SEQ ID NO: 148493 - DNA, 25 bp, Canis familiaris
gggtgttgccctgaggatgtacccc

SEQ ID NO: 148494 - DNA, 25 bp, Canis familiaris
gggcactggcccagagtgttgtacc

SEQ ID NO: 148495 - DNA, 25 bp, Canis familiaris
gggcacagaatcacaaatggttacc

SEQ ID NO: 148496 - DNA, 25 bp, Canis familiaris
gggaaaaccacacctggattcactc

SEQ ID NO: 148497 - DNA, 25 bp, Canis familiaris
gggcaaagactatggatcgagtacc

SEQ ID NO: 148498 - DNA, 25 bp, Canis familiaris
gggcaaagtctgggtgccagcagcc

SEQ ID NO: 148499 - DNA, 25 bp, Canis familiaris
gggcaaagctcatggaccgactagt

SEQ ID NO: 148500 - DNA, 25 bp, Canis familiaris
gggaaactaaccacagagctaatac

SEQ ID NO: 148501 - DNA, 25 bp, Canis familiaris
tggggaactaactgtaaaactgact

SEQ ID NO: 148502 - DNA, 25 bp, Canis familiaris
gggcttaccagtctttaatactgtg

SEQ ID NO: 148503 - DNA, 25 bp, Canis familiaris
gggaacaccaggctttagtcactac

SEQ ID NO: 148504 - DNA, 25 bp, Canis familiaris
gggacaacctggctattcagacccg

SEQ ID NO: 148505 - DNA, 25 bp, Canis familiaris
gggaaccagctgatttttgcacctc

SEQ ID NO: 148506 - DNA, 25 bp, Canis familiaris
gggcaacagactgcttttctctact

SEQ ID NO: 148507 - DNA, 25 bp, Canis familiaris
gggcaaggattccctttatgcccag

SEQ ID NO: 148508 - DNA, 25 bp, Canis familiaris
gggcatcgttgtcgtttagtcccaa

SEQ ID NO: 148509 - DNA, 25 bp, Canis familiaris
gggcatctgttttggttttaaccat

SEQ ID NO: 148510 - DNA, 25 bp, Canis familiaris
gggcattttcgtggttcttaagtca

SEQ ID NO: 148511 - DNA, 25 bp, Canis familiaris
gggctttgtctgggttggtacagtt

SEQ ID NO: 148512 - DNA, 25 bp, Canis familiaris
gggcttagatctctggcaggtcaag

SEQ ID NO: 148513 - DNA, 25 bp, Canis familiaris
gggctcggacatgcaggaggtcatc

SEQ ID NO: 148514 - DNA, 25 bp, Canis familiaris
gggctagtggtgacaggatcctgat

SEQ ID NO: 148515 - DNA, 25 bp, Canis familiaris
gggctatgagggcatttccttttaa

SEQ ID NO: 148516 - DNA, 25 bp, Canis familiaris
gggaatgatgttgccttccacttta

SEQ ID NO: 148517 - DNA, 25 bp, Canis familiaris
gggaaatgttttgtacacatttgac

SEQ ID NO: 148518 - DNA, 25 bp, Canis familiaris
gggaaattctgctgcttgacacttc

SEQ ID NO: 148519 - DNA, 25 bp, Canis familiaris
gggaagcacacttggggacagccct

SEQ ID NO: 148520 - DNA, 25 bp, Canis familiaris
gggaacaaaagctggacctccactt

SEQ ID NO: 148521 - DNA, 25 bp, Canis familiaris
gggaaaagcaactgaagtcctagaa

SEQ ID NO: 148522 - DNA, 25 bp, Canis familiaris
gggaaaagtattcaggcccttacag

SEQ ID NO: 148523 - DNA, 25 bp, Canis familiaris
gggagaaagagcagtacgccacttc

SEQ ID NO: 148524 - DNA, 25 bp, Canis familiaris
gggcagaaaagcaccctgctcaact

SEQ ID NO: 148525 - DNA, 25 bp, Canis familiaris
gggcaaagaagatccctgggattcc

SEQ ID NO: 148526 - DNA, 25 bp, Canis familiaris
gggaaatgacagtcccattgcaggt

SEQ ID NO: 148527 - DNA, 25 bp, Canis familiaris
gggaaagaattctcaagcagactcc

SEQ ID NO: 148528 - DNA, 25 bp, Canis familiaris
gggaaaacaggcacacagaccatcc

SEQ ID NO: 148529 - DNA, 25 bp, Canis familiaris
gggaagtgccagcattccagacttc

SEQ ID NO: 148530 - DNA, 25 bp, Canis familiaris
gggcacgactatgattactaccagc

SEQ ID NO: 148531 - DNA, 25 bp, Canis familiaris
gggcacgactatgattactaccagc

SEQ ID NO: 148532 - DNA, 25 bp, Canis familiaris
gggcacgactatgattactaccagc

SEQ ID NO: 148533 - DNA, 25 bp, Canis familiaris
gggcacgactatgattactaccagc

SEQ ID NO: 148534 - DNA, 25 bp, Canis familiaris
gggcacgactatgattactaccagc

SEQ ID NO: 148535 - DNA, 25 bp, Canis familiaris
gggcacgactatgattactaccagc

SEQ ID NO: 148536 - DNA, 25 bp, Canis familiaris
gggcaggagttgatctagctcaccg

SEQ ID NO: 148537 - DNA, 25 bp, Canis familiaris
gggcagaatggacttacccaccagg

SEQ ID NO: 148538 - DNA, 25 bp, Canis familiaris
gggcatggtggactcattctacacc

SEQ ID NO: 148539 - DNA, 25 bp, Canis familiaris
gggcttgtagagacctcagaacagc

SEQ ID NO: 148540 - DNA, 25 bp, Canis familiaris
gggttggagttcgtgcagtacgcct

SEQ ID NO: 148541 - DNA, 25 bp, Canis familiaris
gggttggctattgcacgtaacactg

SEQ ID NO: 148542 - DNA, 25 bp, Canis familiaris
gggcattgcctttccagttaaagct

SEQ ID NO: 148543 - DNA, 25 bp, Canis familiaris
gggctatggctttgtcagctttaag

SEQ ID NO: 148544 - DNA, 25 bp, Canis familiaris
gggcttcctgtagttctattcaagt

SEQ ID NO: 148545 - DNA, 25 bp, Canis familiaris
gggttgccgatgtattttgccaagt

SEQ ID NO: 148546 - DNA, 25 bp, Canis familiaris
gggctatgacgttgattttccccgg

SEQ ID NO: 148547 - DNA, 25 bp, Canis familiaris
gggcttgctatggtacattgtcccc

SEQ ID NO: 148548 - DNA, 25 bp, Canis familiaris
gggcttcttgtttgattatgcccca

SEQ ID NO: 148549 - DNA, 25 bp, Canis familiaris
gggcagattctgctatatcttcctt

SEQ ID NO: 148550 - DNA, 25 bp, Canis familiaris
gggaattgcgtgcattaatcagatt

SEQ ID NO: 148551 - DNA, 25 bp, Canis familiaris
gggaactcttgggttagcgtatgtt

SEQ ID NO: 148552 - DNA, 25 bp, Canis familiaris
gggaatctgctgtgactataggtta

SEQ ID NO: 148553 - DNA, 25 bp, Canis familiaris
gggcagcttcgatccattctggtta

SEQ ID NO: 148554 - DNA, 25 bp, Canis familiaris
gggcattctccagatcattcaggaa

SEQ ID NO: 148555 - DNA, 25 bp, Canis familiaris
gggcttgatccaggaccttggaact

SEQ ID NO: 148556 - DNA, 25 bp, Canis familiaris
gggcattatgccagaccaagacaaa

SEQ ID NO: 148557 - DNA, 25 bp, Canis familiaris
gggctttctgcggagccgagagccc

SEQ ID NO: 148558 - DNA, 25 bp, Canis familiaris
gggctaggcctgggcacagaggccc

SEQ ID NO: 148559 - DNA, 25 bp, Canis familiaris
gggcaaacctgtgacaagaggctgc

SEQ ID NO: 148560 - DNA, 25 bp, Canis familiaris
gggcaacccaggaaaagtgacttga

SEQ ID NO: 148561 - DNA, 25 bp, Canis familiaris
gggacagccccgaggggaggctgac

SEQ ID NO: 148562 - DNA, 25 bp, Canis familiaris
gggcacacccatttcttgggggtgg

SEQ ID NO: 148563 - DNA, 25 bp, Canis familiaris
gggaaccctgcagcggcaggtgagg

SEQ ID NO: 148564 - DNA, 25 bp, Canis familiaris
gggcaggacccaaggctccttgggc

SEQ ID NO: 148565 - DNA, 25 bp, Canis familiaris
gggcaggaccctaagatctggggaa

SEQ ID NO: 148566 - DNA, 25 bp, Canis familiaris
gggcatggttccttaactgaaatga

SEQ ID NO: 148567 - DNA, 25 bp, Canis familiaris
gggatggctatacaactctgaatat

SEQ ID NO: 148568 - DNA, 25 bp, Canis familiaris
gggcatgtcttttgcatagcctaaa

SEQ ID NO: 148569 - DNA, 25 bp, Canis familiaris
gggcattcttgcaatcaacttggaa

SEQ ID NO: 148570 - DNA, 25 bp, Canis familiaris
gggcatgtttgccaaacctctgagc

SEQ ID NO: 148571 - DNA, 25 bp, Canis familiaris
gggcagtttggggaccttgagaggc

SEQ ID NO: 148572 - DNA, 25 bp, Canis familiaris
gggagttcggaggtttgatgagatc

SEQ ID NO: 148573 - DNA, 25 bp, Canis familiaris
gggacttggtgaggattttggtgtg

SEQ ID NO: 148574 - DNA, 25 bp, Canis familiaris
gggcaggctggttccatatttgagg

SEQ ID NO: 148575 - DNA, 25 bp, Canis familiaris
gggcatgactataaccatttttgta

SEQ ID NO: 148576 - DNA, 25 bp, Canis familiaris
gggcttagcatttctattttttcac

SEQ ID NO: 148577 - DNA, 25 bp, Canis familiaris
gggctaagcagttatttctgttcga

SEQ ID NO: 148578 - DNA, 25 bp, Canis familiaris
gggctcaaactttcttagcctctga

SEQ ID NO: 148579 - DNA, 25 bp, Canis familiaris
gggctcaagaataacctggcctctt

SEQ ID NO: 148580 - DNA, 25 bp, Canis familiaris
gggctcagagagttacactgtgtct

SEQ ID NO: 148581 - DNA, 25 bp, Canis familiaris
gggctagatgtatttcctgtgacgg

SEQ ID NO: 148582 - DNA, 25 bp, Canis familiaris
gggctacacttgagcgtgtgacccg

SEQ ID NO: 148583 - DNA, 25 bp, Canis familiaris
gggctatcactcacgaggatgtcgc

SEQ ID NO: 148584 - DNA, 25 bp, Canis familiaris
gggctcaacccaagagggatgcagc

SEQ ID NO: 148585 - DNA, 25 bp, Canis familiaris
gggcacaaccgagattggaaccaga

SEQ ID NO: 148586 - DNA, 25 bp, Canis familiaris
gggaaagcccctatgtgaattcaga

SEQ ID NO: 148587 - DNA, 25 bp, Canis familiaris
gggcaagacctccttggtgaagtcc

SEQ ID NO: 148588 - DNA, 25 bp, Canis familiaris
gggcaggacctgcttaatgaagccg

SEQ ID NO: 148589 - DNA, 25 bp, Canis familiaris
gggaacacactactcaaaaagccat

SEQ ID NO: 148590 - DNA, 25 bp, Canis familiaris
gggcattccacaaccaaaaacaggt

SEQ ID NO: 148591 - DNA, 25 bp, Canis familiaris
gggaaatacatatcaaaaccacgat

SEQ ID NO: 148592 - DNA, 25 bp, Canis familiaris
gggaaacacatttcccacagccaag

SEQ ID NO: 148593 - DNA, 25 bp, Canis familiaris
gggacagactgatattaaacacaag

SEQ ID NO: 148594 - DNA, 25 bp, Canis familiaris
gggatcagaatgtctttgtgaccca

SEQ ID NO: 148595 - DNA, 25 bp, Canis familiaris
gggctaggtctattatgttgtccaa

SEQ ID NO: 148596 - DNA, 25 bp, Canis familiaris
gggctagttctaatctcattttcag

SEQ ID NO: 148597 - DNA, 25 bp, Canis familiaris
gggcaagattctttgcttatttctg

SEQ ID NO: 148598 - DNA, 25 bp, Canis familiaris
gggcatcttacttttgttcatttga

SEQ ID NO: 148599 - DNA, 25 bp, Canis familiaris
gggaattcattatttcgttgtgtac

SEQ ID NO: 148600 - DNA, 25 bp, Canis familiaris
gggaactatggatgcgtgtctggtc

SEQ ID NO: 148601 - DNA, 25 bp, Canis familiaris
gggaagatcgtgagagctgttgaac

SEQ ID NO: 148602 - DNA, 25 bp, Canis familiaris
gggcaacaaggacagcttccaagtt

SEQ ID NO: 148603 - DNA, 25 bp, Canis familiaris
gggaccattgaattacttaccactt

SEQ ID NO: 148604 - DNA, 25 bp, Canis familiaris
gggacattctggtttgggaccctag

SEQ ID NO: 148605 - DNA, 25 bp, Canis familiaris
gggaattcaggaacttggaccacgt

SEQ ID NO: 148606 - DNA, 25 bp, Canis familiaris
gggaagtcggcaagccggatccgta

SEQ ID NO: 148607 - DNA, 25 bp, Canis familiaris
gggcaaggggcaaagcaattcacag

SEQ ID NO: 148608 - DNA, 25 bp, Canis familiaris
gggcacggcggatacgtgtcgagtt

SEQ ID NO: 148609 - DNA, 25 bp, Canis familiaris
gggaagtgttagcaaatgtaagttt

SEQ ID NO: 148610 - DNA, 25 bp, Canis familiaris
gggaactattttcatgtttacttgt

SEQ ID NO: 148611 - DNA, 25 bp, Canis familiaris
gggaaaatgtttattctttctgatg

SEQ ID NO: 148612 - DNA, 25 bp, Canis familiaris
gggacacattgtctctttctttaga

SEQ ID NO: 148613 - DNA, 25 bp, Canis familiaris
gggacaacactcgtcactttttagt

SEQ ID NO: 148614 - DNA, 25 bp, Canis familiaris
gggcacggactcatggttttatggt

SEQ ID NO: 148615 - DNA, 25 bp, Canis familiaris
gggactcgcctgagggtttgatttg

SEQ ID NO: 148616 - DNA, 25 bp, Canis familiaris
gggaacactgaaagggtttgaccag

SEQ ID NO: 148617 - DNA, 25 bp, Canis familiaris
gggaaatctacgaccgttatggccg

SEQ ID NO: 148618 - DNA, 25 bp, Canis familiaris
gggaactccaaccacgttagtgact

SEQ ID NO: 148619 - DNA, 25 bp, Canis familiaris
gggaaatgccaggtcacgtggggac

SEQ ID NO: 148620 - DNA, 25 bp, Canis familiaris
gggaaggcacagcagacagtgggct

SEQ ID NO: 148621 - DNA, 25 bp, Canis familiaris
gggcagtggtgacagggctgctggc

SEQ ID NO: 148622 - DNA, 25 bp, Canis familiaris
gggcatctgtggctcaggtgaggcc

SEQ ID NO: 148623 - DNA, 25 bp, Canis familiaris
gggcacgctggaacaggaggccaca

SEQ ID NO: 148624 - DNA, 25 bp, Canis familiaris
gggcacagtggactggagagcccct

SEQ ID NO: 148625 - DNA, 25 bp, Canis familiaris
gggcacttggtgggatgagcccctg

SEQ ID NO: 148626 - DNA, 25 bp, Canis familiaris
gggcattagaggcacagcagccccg

SEQ ID NO: 148627 - DNA, 25 bp, Canis familiaris
gggcattcagaggcagaaacaccag

SEQ ID NO: 148628 - DNA, 25 bp, Canis familiaris
gggcatcttagaggacaacaggcaa

SEQ ID NO: 148629 - DNA, 25 bp, Canis familiaris
gggcatcttgggctacactgaggac

SEQ ID NO: 148630 - DNA, 25 bp, Canis familiaris
gggcatcctgggctacactgagcac

SEQ ID NO: 148631 - DNA, 25 bp, Canis familiaris
gggatcgggttttgactgagccctt

SEQ ID NO: 148632 - DNA, 25 bp, Canis familiaris
gggacgaggcttgtacatgttttgt

SEQ ID NO: 148633 - DNA, 25 bp, Canis familiaris
gggaatcggttgtttattgtctatg

SEQ ID NO: 148634 - DNA, 25 bp, Canis familiaris
gggagtcaagttttaattcctgatc

SEQ ID NO: 148635 - DNA, 25 bp, Canis familiaris
gggcagtcaagttctttagcctgct

SEQ ID NO: 148636 - DNA, 25 bp, Canis familiaris
gggaggaagtggattagccctgccc

SEQ ID NO: 148637 - DNA, 25 bp, Canis familiaris
gggaagaactggattctgctgacag

SEQ ID NO: 148638 - DNA, 25 bp, Canis familiaris
gggaagaacggaattgcatccagta

SEQ ID NO: 148639 - DNA, 25 bp, Canis familiaris
gggaagtacaggacatctcccggct

SEQ ID NO: 148640 - DNA, 25 bp, Canis familiaris
gggaaatcaagacactccacaggag

SEQ ID NO: 148641 - DNA, 25 bp, Canis familiaris
tgcggaaaaattaccattccggact

SEQ ID NO: 148642 - DNA, 25 bp, Canis familiaris
gggacacaaaggaccaggtctggac

SEQ ID NO: 148643 - DNA, 25 bp, Canis familiaris
gggcaacaagtgcaaaccctgtgaa

SEQ ID NO: 148644 - DNA, 25 bp, Canis familiaris
gggacaacgtggcaaccgtataatc

SEQ ID NO: 148645 - DNA, 25 bp, Canis familiaris
gggaaactgggcagagacgttctct

SEQ ID NO: 148646 - DNA, 25 bp, Canis familiaris
gggaaactggtgggaaggcctctct

SEQ ID NO: 148647 - DNA, 25 bp, Canis familiaris
gggaaactgcgggagacgcttccca

SEQ ID NO: 148648 - DNA, 25 bp, Canis familiaris
gggaagaccagatggacgcagcccc

SEQ ID NO: 148649 - DNA, 25 bp, Canis familiaris
gggagagcccaatgaaaagcttaca

SEQ ID NO: 148650 - DNA, 25 bp, Canis familiaris
gggcacagccaacaaactagctcaa

SEQ ID NO: 148651 - DNA, 25 bp, Canis familiaris
gggcaatgcccacatgggctactac

SEQ ID NO: 148652 - DNA, 25 bp, Canis familiaris
gggaagccctacatacatgagtgac

SEQ ID NO: 148653 - DNA, 25 bp, Canis familiaris
gggaaccccagtcacagattgatga

SEQ ID NO: 148654 - DNA, 25 bp, Canis familiaris
gggaacctccaaactcaattatctg

SEQ ID NO: 148655 - DNA, 25 bp, Canis familiaris
gggaatacccagtagtatgattact

SEQ ID NO: 148656 - DNA, 25 bp, Canis familiaris
gggaaggcccaatagatgatctcca

SEQ ID NO: 148657 - DNA, 25 bp, Canis familiaris
gggaaatcctaataaacatctcacc

SEQ ID NO: 148658 - DNA, 25 bp, Canis familiaris
gggaagtccttagtagcaacagtca

SEQ ID NO: 148659 - DNA, 25 bp, Canis familiaris
gggcaggctcttgaaaaacaggcat

SEQ ID NO: 148660 - DNA, 25 bp, Canis familiaris
gggcaggactttatgtacaagtgac

SEQ ID NO: 148661 - DNA, 25 bp, Canis familiaris
gggacgccttttctcagatatggtc

SEQ ID NO: 148662 - DNA, 25 bp, Canis familiaris
gggaccctggtttgtagcaattggc

SEQ ID NO: 148663 - DNA, 25 bp, Canis familiaris
gggcaccctatgaggaactaacgtc

SEQ ID NO: 148664 - DNA, 25 bp, Canis familiaris
gggcatcccttgtggcagatgaatg

SEQ ID NO: 148665 - DNA, 25 bp, Canis familiaris
gggcatacctagaggcagggcacct

SEQ ID NO: 148666 - DNA, 25 bp, Canis familiaris
gggcaacagcatcggggctgggccc

SEQ ID NO: 148667 - DNA, 25 bp, Canis familiaris
gggcaacagcttgtacgagggccgc

SEQ ID NO: 148668 - DNA, 25 bp, Canis familiaris
gggaagcagtatgtggccagaggcc

SEQ ID NO: 148669 - DNA, 25 bp, Canis familiaris
gggacagggctggtggccaaactaa

SEQ ID NO: 148670 - DNA, 25 bp, Canis familiaris
gggacactttgtgtgcaaaactgta

SEQ ID NO: 148671 - DNA, 25 bp, Canis familiaris
gggcaactgatcaacttaaaatctc

SEQ ID NO: 148672 - DNA, 25 bp, Canis familiaris
gggcaactgatgattaagtcacatt

SEQ ID NO: 148673 - DNA, 25 bp, Canis familiaris
gggcacctgtgtgtgaaatgtcact

SEQ ID NO: 148674 - DNA, 25 bp, Canis familiaris
gggcatcgtgaagggacatcatcca

SEQ ID NO: 148675 - DNA, 25 bp, Canis familiaris
gggcataggcaaggccaagctccgt

SEQ ID NO: 148676 - DNA, 25 bp, Canis familiaris
gggcaaggccaacaagatcaccatc

SEQ ID NO: 148677 - DNA, 25 bp, Canis familiaris
gggacagcagccagttaggagcctg

SEQ ID NO: 148678 - DNA, 25 bp, Canis familiaris
gggaaagctcatttgtgtaagacta

SEQ ID NO: 148679 - DNA, 25 bp, Canis familiaris
gggaataatcagtgctgcttgccac

SEQ ID NO: 148680 - DNA, 25 bp, Canis familiaris
gggaatagagagccgctgcggaccc

SEQ ID NO: 148681 - DNA, 25 bp, Canis familiaris
gggcacattagagcctggaacccac

SEQ ID NO: 148682 - DNA, 25 bp, Canis familiaris
gggcacccaatggaatggaacccat

SEQ ID NO: 148683 - DNA, 25 bp, Canis familiaris
gggcagcctcaagcaaggataccgc

SEQ ID NO: 148684 - DNA, 25 bp, Canis familiaris
gggacctcataaaaaacagccgaca

SEQ ID NO: 148685 - DNA, 25 bp, Canis familiaris
gggactgcctaaaaattagtacacg

SEQ ID NO: 148686 - DNA, 25 bp, Canis familiaris
gggactcctactacagaatgacttc

SEQ ID NO: 148687 - DNA, 25 bp, Canis familiaris
gggaccctactgttcaatgggcacc

SEQ ID NO: 148688 - DNA, 25 bp, Canis familiaris
gggacacctgacattcaggggctcg

SEQ ID NO: 148689 - DNA, 25 bp, Canis familiaris
gggaactgtgatcttcgaggcagct

SEQ ID NO: 148690 - DNA, 25 bp, Canis familiaris
gggcaatatctacttaccaggcata

SEQ ID NO: 148691 - DNA, 25 bp, Canis familiaris
gggcagaagtcaccattcaaggcta

SEQ ID NO: 148692 - DNA, 25 bp, Canis familiaris
gggaaagactccctcaagatctaat

SEQ ID NO: 148693 - DNA, 25 bp, Canis familiaris
ggggtaccccacaaatgatacagta

SEQ ID NO: 148694 - DNA, 25 bp, Canis familiaris
gggaaaccccataaagctatcagtg

SEQ ID NO: 148695 - DNA, 25 bp, Canis familiaris
gggaaacttcacactacttgcatgt

SEQ ID NO: 148696 - DNA, 25 bp, Canis familiaris
gggaatatctgatcggtcacccatg

SEQ ID NO: 148697 - DNA, 25 bp, Canis familiaris
gggaatgcaaaactggtgcagccac

SEQ ID NO: 148698 - DNA, 25 bp, Canis familiaris
gggaagaacaagccaggcgccagtg

SEQ ID NO: 148699 - DNA, 25 bp, Canis familiaris
gggcagagaccaatcaatgggcggt

SEQ ID NO: 148700 - DNA, 25 bp, Canis familiaris
gggcagagcacatctggatggggtg

SEQ ID NO: 148701 - DNA, 25 bp, Canis familiaris
gggagagcacagagctgggcgagta

SEQ ID NO: 148702 - DNA, 25 bp, Canis familiaris
gggaagaatgagccatggtagcgta

SEQ ID NO: 148703 - DNA, 25 bp, Canis familiaris
gggcagtgacattgcctgttttgct

SEQ ID NO: 148704 - DNA, 25 bp, Canis familiaris
gggcagtacattcctgttttgctcc

SEQ ID NO: 148705 - DNA, 25 bp, Canis familiaris
gggcaaatcattatgtcattcgtcc

SEQ ID NO: 148706 - DNA, 25 bp, Canis familiaris
gggaaatcactgtttccctgtcctt

SEQ ID NO: 148707 - DNA, 25 bp, Canis familiaris
gggacaatgcacgattacccgggct

SEQ ID NO: 148708 - DNA, 25 bp, Canis familiaris
gggcatcgagatcattggcaccctg

SEQ ID NO: 148709 - DNA, 25 bp, Canis familiaris
gggcatgagaggcactagcaccctg

SEQ ID NO: 148710 - DNA, 25 bp, Canis familiaris
gggcagtagttaatagcatccacct

SEQ ID NO: 148711 - DNA, 25 bp, Canis familiaris
ggtgtctattatttcacgccaccta

SEQ ID NO: 148712 - DNA, 25 bp, Canis familiaris
ggtgacaattcaaccaccgagtccc

SEQ ID NO: 148713 - DNA, 25 bp, Canis familiaris
ggtgacaattcaacaccaagtccct

SEQ ID NO: 148714 - DNA, 25 bp, Canis familiaris
gggacagattttccctagttctcat

SEQ ID NO: 148715 - DNA, 25 bp, Canis familiaris
gggaaaactgtcgccagttgtgcac

SEQ ID NO: 148716 - DNA, 25 bp, Canis familiaris
gggaagaactgaggagccccattgc

SEQ ID NO: 148717 - DNA, 25 bp, Canis familiaris
gggacaaaagctggagctccctctc

SEQ ID NO: 148718 - DNA, 25 bp, Canis familiaris
gggaataaactcaagctgctgcttc

SEQ ID NO: 148719 - DNA, 25 bp, Canis familiaris
gggcacatgaagtctaagggtctgg

SEQ ID NO: 148720 - DNA, 25 bp, Canis familiaris
gggcatataatacacagtatgtcga

SEQ ID NO: 148721 - DNA, 25 bp, Canis familiaris
gggcacagctaacacaatactcgac

SEQ ID NO: 148722 - DNA, 25 bp, Canis familiaris
gggacagcacaacaatcatacttga

SEQ ID NO: 148723 - DNA, 25 bp, Canis familiaris
gggaagccacatagacatccctttc

SEQ ID NO: 148724 - DNA, 25 bp, Canis familiaris
gggaatggcagaagctctccctata

SEQ ID NO: 148725 - DNA, 25 bp, Canis familiaris
gggcagggagatgctctacacaagt

SEQ ID NO: 148726 - DNA, 25 bp, Canis familiaris
gggcaaagagacctcaaccattttt

SEQ ID NO: 148727 - DNA, 25 bp, Canis familiaris
gggaactagtgccacaatgcctttt

SEQ ID NO: 148728 - DNA, 25 bp, Canis familiaris
gggaaccagtgttactgctctttcc

SEQ ID NO: 148729 - DNA, 25 bp, Canis familiaris
gggaactagttacatcttacatcac

SEQ ID NO: 148730 - DNA, 25 bp, Canis familiaris
gggagacttggcttggttgaaccac

SEQ ID NO: 148731 - DNA, 25 bp, Canis familiaris
gggaacttccgatttctgatgacca

SEQ ID NO: 148732 - DNA, 25 bp, Canis familiaris
gggaagttcctgaatttgtccaagt

SEQ ID NO: 148733 - DNA, 25 bp, Canis familiaris
gggactgatatcctgaatgttccga

SEQ ID NO: 148734 - DNA, 25 bp, Canis familiaris
gggacagagatcatgacaactacga

SEQ ID NO: 148735 - DNA, 25 bp, Canis familiaris
gggacaagtcggtgaccatctactt

SEQ ID NO: 148736 - DNA, 25 bp, Canis familiaris
gggaaaactggtattatcatcactt

SEQ ID NO: 148737 - DNA, 25 bp, Canis familiaris
gggaaaagctggtcttccacatgcg

SEQ ID NO: 148738 - DNA, 25 bp, Canis familiaris
gggaaaactgaagagccacatgcaa

SEQ ID NO: 148739 - DNA, 25 bp, Canis familiaris
gggaaaattcacgagggctgctgga

SEQ ID NO: 148740 - DNA, 25 bp, Canis familiaris
gggcaaagtcataaaaggcctagac

SEQ ID NO: 148741 - DNA, 25 bp, Canis familiaris
gggaaggtctgtaaaggccccagct

SEQ ID NO: 148742 - DNA, 25 bp, Canis familiaris
gggaaggcttgtaactggaccagca

SEQ ID NO: 148743 - DNA, 25 bp, Canis familiaris
gggaaggttatcttgtggatcctgc

SEQ ID NO: 148744 - DNA, 25 bp, Canis familiaris
gggcagagcagtagtctagggacct

SEQ ID NO: 148745 - DNA, 25 bp, Canis familiaris
gggcagtggtgggtagtgtgacatg

SEQ ID NO: 148746 - DNA, 25 bp, Canis familiaris
gggcaggggagtggagtggtgggac

SEQ ID NO: 148747 - DNA, 25 bp, Canis familiaris
gggcagagggatgccagggttctgg

SEQ ID NO: 148748 - DNA, 25 bp, Canis familiaris
gggcaacggtggacacggtgtgcag

SEQ ID NO: 148749 - DNA, 25 bp, Canis familiaris
gggcaacggtggacacggtgtgcag

SEQ ID NO: 148750 - DNA, 25 bp, Canis familiaris
ggtgccctaaggtctgggcttcacc

SEQ ID NO: 148751 - DNA, 25 bp, Canis familiaris
gggcaccaaggtgctgggcaggacc

SEQ ID NO: 148752 - DNA, 25 bp, Canis familiaris
gggaacaaggctgatctggagacac

SEQ ID NO: 148753 - DNA, 25 bp, Canis familiaris
gggaagcaagaggggcggacacacg

SEQ ID NO: 148754 - DNA, 25 bp, Canis familiaris
gggatccaataaggggagcaccaag

SEQ ID NO: 148755 - DNA, 25 bp, Canis familiaris
gggacacacaccgggaggtgccaag

SEQ ID NO: 148756 - DNA, 25 bp, Canis familiaris
gggcacacacaccgttggtgatcac

SEQ ID NO: 148757 - DNA, 25 bp, Canis familiaris
gggcacagaaccatggagcgacagc

SEQ ID NO: 148758 - DNA, 25 bp, Canis familiaris
gggcacatattcatggggcggctgc

SEQ ID NO: 148759 - DNA, 25 bp, Canis familiaris
gggcactttgcccgagaggatgtcc

SEQ ID NO: 148760 - DNA, 25 bp, Canis familiaris
gggcactcttactgagagagcccct

SEQ ID NO: 148761 - DNA, 25 bp, Canis familiaris
gggcatctgctaaagagaggaccta

SEQ ID NO: 148762 - DNA, 25 bp, Canis familiaris
gggcatctgtttctgagtaactgat

SEQ ID NO: 148763 - DNA, 25 bp, Canis familiaris
gggcacagctttctgagactgatgt

SEQ ID NO: 148764 - DNA, 25 bp, Canis familiaris
gggaccttgcagtaataatgatgta

SEQ ID NO: 148765 - DNA, 25 bp, Canis familiaris
gggactctctgcgaatgtgacataa

SEQ ID NO: 148766 - DNA, 25 bp, Canis familiaris
gggacatcattgtcagcgtgcgaca

SEQ ID NO: 148767 - DNA, 25 bp, Canis familiaris
gggactcatgagttctccagagcat

SEQ ID NO: 148768 - DNA, 25 bp, Canis familiaris
gggactgatagtcatctctgagctc

SEQ ID NO: 148769 - DNA, 25 bp, Canis familiaris
gggactatcagatacgtcctatcgt

SEQ ID NO: 148770 - DNA, 25 bp, Canis familiaris
gggcacagacgttcacgttttcttt

SEQ ID NO: 148771 - DNA, 25 bp, Canis familiaris
gggcacagaggcacacgtcgtgccc

SEQ ID NO: 148772 - DNA, 25 bp, Canis familiaris
gggcacaatgtttacaggggctcgg

SEQ ID NO: 148773 - DNA, 25 bp, Canis familiaris
gggcatcagttatacaagggacaag

SEQ ID NO: 148774 - DNA, 25 bp, Canis familiaris
gggcaagtgttggacaccggagtca

SEQ ID NO: 148775 - DNA, 25 bp, Canis familiaris
gggcaagttagggcactccaagatg

SEQ ID NO: 148776 - DNA, 25 bp, Canis familiaris
gggcacgaaaggacactacaaacca

SEQ ID NO: 148777 - DNA, 25 bp, Canis familiaris
gggaccattaaccacagaaaatcca

SEQ ID NO: 148778 - DNA, 25 bp, Canis familiaris
gggacaagcccacacatgaagattc

SEQ ID NO: 148779 - DNA, 25 bp, Canis familiaris
gggcacagtgcatccagagcatgac

SEQ ID NO: 148780 - DNA, 25 bp, Canis familiaris
gggcatgctggagcgagactgagcc

SEQ ID NO: 148781 - DNA, 25 bp, Canis familiaris
gggcatgcagaagctgagcacaccc

SEQ ID NO: 148782 - DNA, 25 bp, Canis familiaris
gggcagagaagcataggtccacaca

SEQ ID NO: 148783 - DNA, 25 bp, Canis familiaris
gggacaggagcaacaggtccctcct

SEQ ID NO: 148784 - DNA, 25 bp, Canis familiaris
gggacgatcacagtcacgtctaccc

SEQ ID NO: 148785 - DNA, 25 bp, Canis familiaris
gggaggtagactgcaacagaccccc

SEQ ID NO: 148786 - DNA, 25 bp, Canis familiaris
gggcactgtaaggccacaagccctc

SEQ ID NO: 148787 - DNA, 25 bp, Canis familiaris
gggacttaaggcgaccgaagcattc

SEQ ID NO: 148788 - DNA, 25 bp, Canis familiaris
gggcagctacaatgctacggacaga

SEQ ID NO: 148789 - DNA, 25 bp, Canis familiaris
gggcagcatcaccaagaagcgcaaa

SEQ ID NO: 148790 - DNA, 25 bp, Canis familiaris
gggaatcacgacctgagccaaagac

SEQ ID NO: 148791 - DNA, 25 bp, Canis familiaris
gggaatccgaggcagaaggcaggcg

SEQ ID NO: 148792 - DNA, 25 bp, Canis familiaris
gggcaccagcggcaaaaagcggcgc

SEQ ID NO: 148793 - DNA, 25 bp, Canis familiaris
gggaccccgtcaggaggacggtgtg

SEQ ID NO: 148794 - DNA, 25 bp, Canis familiaris
gggcactaccgtgagtttcaggtca

SEQ ID NO: 148795 - DNA, 25 bp, Canis familiaris
gggcactatccgaaaggttcatgtt

SEQ ID NO: 148796 - DNA, 25 bp, Canis familiaris
gggaccatcccaacaggtaatgact

SEQ ID NO: 148797 - DNA, 25 bp, Canis familiaris
gggaccacattaaactgaaaagctt

SEQ ID NO: 148798 - DNA, 25 bp, Canis familiaris
gggcacgactagatattgacacaga

SEQ ID NO: 148799 - DNA, 25 bp, Canis familiaris
gggacatgaccgactacatgctcca

SEQ ID NO: 148800 - DNA, 25 bp, Canis familiaris
gggaagcacatagatacattctgca

SEQ ID NO: 148801 - DNA, 25 bp, Canis familiaris
gggaagatctatgtccttccaggag

SEQ ID NO: 148802 - DNA, 25 bp, Canis familiaris
gggcaatatatatctccatttcatg

SEQ ID NO: 148803 - DNA, 25 bp, Canis familiaris
gggcagaattgtagccacacttatt

SEQ ID NO: 148804 - DNA, 25 bp, Canis familiaris
gggcagagcaggctgccaacttatt

SEQ ID NO: 148805 - DNA, 25 bp, Canis familiaris
gggagagtgggacaacagtgttaac

SEQ ID NO: 148806 - DNA, 25 bp, Canis familiaris
gggatgggggaaaatactgcttctg

SEQ ID NO: 148807 - DNA, 25 bp, Canis familiaris
gggactgggaaaacagccacttttg

SEQ ID NO: 148808 - DNA, 25 bp, Canis familiaris
gggcagcttggttaaagccacagtt

SEQ ID NO: 148809 - DNA, 25 bp, Canis familiaris
gggaattggtaatcgccacacttca

SEQ ID NO: 148810 - DNA, 25 bp, Canis familiaris
gggagttggtttctctagcagtaca

SEQ ID NO: 148811 - DNA, 25 bp, Canis familiaris
gggagctcacgtgacccataagttc

SEQ ID NO: 148812 - DNA, 25 bp, Canis familiaris
ggggcgccggaagagtaacattccg

SEQ ID NO: 148813 - DNA, 25 bp, Canis familiaris
gggtggtggggagaacaacttcgat

SEQ ID NO: 148814 - DNA, 25 bp, Canis familiaris
gggttggtgggtgagatattttttg

SEQ ID NO: 148815 - DNA, 25 bp, Canis familiaris
gggacccatgggtggagtcacttta

SEQ ID NO: 148816 - DNA, 25 bp, Canis familiaris
gggacccttgcaatgcggaatggct

SEQ ID NO: 148817 - DNA, 25 bp, Canis familiaris
gggacagcttacatgcaggagagga

SEQ ID NO: 148818 - DNA, 25 bp, Canis familiaris
gggatcgctccaaggcagtgaatgc

SEQ ID NO: 148819 - DNA, 25 bp, Canis familiaris
gggactgtacaccatcaggaatcgt

SEQ ID NO: 148820 - DNA, 25 bp, Canis familiaris
gggactttaccatgtgaggcagggc

SEQ ID NO: 148821 - DNA, 25 bp, Canis familiaris
gggacagttgtccaagttgggctgg

SEQ ID NO: 148822 - DNA, 25 bp, Canis familiaris
gggacagttgtccaagttgggctgg

SEQ ID NO: 148823 - DNA, 25 bp, Canis familiaris
gggacagttgtccaagttgggctgg

SEQ ID NO: 148824 - DNA, 25 bp, Canis familiaris
gggaagtgggcctgttgtggtatca

SEQ ID NO: 148825 - DNA, 25 bp, Canis familiaris
gggacctggcccagtttatggtgca

SEQ ID NO: 148826 - DNA, 25 bp, Canis familiaris
ggtgaactcagcccttttcaagggc

SEQ ID NO: 148827 - DNA, 25 bp, Canis familiaris
gggaaccctggaaggccaaatggct

SEQ ID NO: 148828 - DNA, 25 bp, Canis familiaris
gggaaccctggaagaccaaatcatc

SEQ ID NO: 148829 - DNA, 25 bp, Canis familiaris
gggaccgaagggcacccagaagaga

SEQ ID NO: 148830 - DNA, 25 bp, Canis familiaris
gggaatcccaggtgactcctggatg

SEQ ID NO: 148831 - DNA, 25 bp, Canis familiaris
gggagaccagcaaatcggtgcactg

SEQ ID NO: 148832 - DNA, 25 bp, Canis familiaris
gggcagacacagagacctggatcag

SEQ ID NO: 148833 - DNA, 25 bp, Canis familiaris
gggcagacacagagagcctggagtc

SEQ ID NO: 148834 - DNA, 25 bp, Canis familiaris
gggcagagacagtgcgtcttactcc

SEQ ID NO: 148835 - DNA, 25 bp, Canis familiaris
gggcagcagagacctttttgcactt

SEQ ID NO: 148836 - DNA, 25 bp, Canis familiaris
gggcagcaaggtcctaacatgctct

SEQ ID NO: 148837 - DNA, 25 bp, Canis familiaris
gggagcaaggagtcaagattctcat

SEQ ID NO: 148838 - DNA, 25 bp, Canis familiaris
gggacaagccaaaggactctgcagc

SEQ ID NO: 148839 - DNA, 25 bp, Canis familiaris
gggacaagatctacgtgttctagca

SEQ ID NO: 148840 - DNA, 25 bp, Canis familiaris
gggcactcctggtcacaattgagaa

SEQ ID NO: 148841 - DNA, 25 bp, Canis familiaris
gggcactctgggcaagtggtggagg

SEQ ID NO: 148842 - DNA, 25 bp, Canis familiaris
gggagctgcggaaaagggtcggcgg

SEQ ID NO: 148843 - DNA, 25 bp, Canis familiaris
gggagtccaaagccagggtcaggaa

SEQ ID NO: 148844 - DNA, 25 bp, Canis familiaris
gggagaccaacactctagagtaccc

SEQ ID NO: 148845 - DNA, 25 bp, Canis familiaris
gggaaagccagcactaagccatgcc

SEQ ID NO: 148846 - DNA, 25 bp, Canis familiaris
gggcaaggccagagctagaggatcc

SEQ ID NO: 148847 - DNA, 25 bp, Canis familiaris
gggaagcggcaggtgtagcagagca

SEQ ID NO: 148848 - DNA, 25 bp, Canis familiaris
gggcaagttctggtgccagctagcc

SEQ ID NO: 148849 - DNA, 25 bp, Canis familiaris
gggcaaattctggtgccagcaaccc

SEQ ID NO: 148850 - DNA, 25 bp, Canis familiaris
gggagaatctacatcaagcacccgc

SEQ ID NO: 148851 - DNA, 25 bp, Canis familiaris
gggaatgtctacagcacagcgaact

SEQ ID NO: 148852 - DNA, 25 bp, Canis familiaris
gggcacttttcaggacaggtcactg

SEQ ID NO: 148853 - DNA, 25 bp, Canis familiaris
ggatgggtttcagcaaggtcaagga

SEQ ID NO: 148854 - DNA, 25 bp, Canis familiaris
ggagggtccaactcgttcaagatga

SEQ ID NO: 148855 - DNA, 25 bp, Canis familiaris
gggaggtcaatatggtgttcaggga

SEQ ID NO: 148856 - DNA, 25 bp, Canis familiaris
gggaatcctgtgtggtgtttgcggc

SEQ ID NO: 148857 - DNA, 25 bp, Canis familiaris
gggaagctctttgggctggtgatgc

SEQ ID NO: 148858 - DNA, 25 bp, Canis familiaris
gggaagcctctgagtggagctgcac

SEQ ID NO: 148859 - DNA, 25 bp, Canis familiaris
gggaacactcctctggatgtgatca

SEQ ID NO: 148860 - DNA, 25 bp, Canis familiaris
gggaatagtgcccttgctgatcgat

SEQ ID NO: 148861 - DNA, 25 bp, Canis familiaris
gggaaggagccgacatgctcatggt

SEQ ID NO: 148862 - DNA, 25 bp, Canis familiaris
gggcagcaggaggggcagctggagc

SEQ ID NO: 148863 - DNA, 25 bp, Canis familiaris
gggcaatgggcgaagagcaaggccc

SEQ ID NO: 148864 - DNA, 25 bp, Canis familiaris
gggactggagccaagatgacaggcc

SEQ ID NO: 148865 - DNA, 25 bp, Canis familiaris
gggcagctggaggatgatgatgcag

SEQ ID NO: 148866 - DNA, 25 bp, Canis familiaris
gggagctggatgcaagactgaactt

SEQ ID NO: 148867 - DNA, 25 bp, Canis familiaris
gggacttgtcaatgtttactctttt

SEQ ID NO: 148868 - DNA, 25 bp, Canis familiaris
gggcactggtaatttgttcttattt

SEQ ID NO: 148869 - DNA, 25 bp, Canis familiaris
gggcacatgctaacctttttttaag

SEQ ID NO: 148870 - DNA, 25 bp, Canis familiaris
gggacatccatagctttcaaaaata

SEQ ID NO: 148871 - DNA, 25 bp, Canis familiaris
gggaatcctgtgcctgttaaataac

SEQ ID NO: 148872 - DNA, 25 bp, Canis familiaris
gggaattcttctctgctgaagctta

SEQ ID NO: 148873 - DNA, 25 bp, Canis familiaris
gggaatatcattgggtaaagctctg

SEQ ID NO: 148874 - DNA, 25 bp, Canis familiaris
gggactacaccagatgaaagctcag

SEQ ID NO: 148875 - DNA, 25 bp, Canis familiaris
gggaaacagccccacagtagacagt

SEQ ID NO: 148876 - DNA, 25 bp, Canis familiaris
gggacacgaccccaagaagagcggg

SEQ ID NO: 148877 - DNA, 25 bp, Canis familiaris
gggaagccccctcgagaagaggaca

SEQ ID NO: 148878 - DNA, 25 bp, Canis familiaris
gggaaccccacctataagatgtatg

SEQ ID NO: 148879 - DNA, 25 bp, Canis familiaris
gggacactccgcttagatattagtt

SEQ ID NO: 148880 - DNA, 25 bp, Canis familiaris
gggacccagcatcctgaagattatt

SEQ ID NO: 148881 - DNA, 25 bp, Canis familiaris
gggaactcagcaccatgaagctttt

SEQ ID NO: 148882 - DNA, 25 bp, Canis familiaris
gggaatgcataactgctgctgcagt

SEQ ID NO: 148883 - DNA, 25 bp, Canis familiaris
gggaatgcagaaatgctcgcacagt

SEQ ID NO: 148884 - DNA, 25 bp, Canis familiaris
gggaatgcggcaattaatcagatct

SEQ ID NO: 148885 - DNA, 25 bp, Canis familiaris
gggaatgctgctgcttcaatgaccc

SEQ ID NO: 148886 - DNA, 25 bp, Canis familiaris
gggaatgatctgtctatcactctcc

SEQ ID NO: 148887 - DNA, 25 bp, Canis familiaris
gggcaaggctgagtgctcacagttc

SEQ ID NO: 148888 - DNA, 25 bp, Canis familiaris
gggaacagtcacgtcagcagatttg

SEQ ID NO: 148889 - DNA, 25 bp, Canis familiaris
gggaaatgtttggccatgtttggtt

SEQ ID NO: 148890 - DNA, 25 bp, Canis familiaris
gggaactggtaaaatgctcatgtgg

SEQ ID NO: 148891 - DNA, 25 bp, Canis familiaris
gggaagtcctaattgtgcttgggtg

SEQ ID NO: 148892 - DNA, 25 bp, Canis familiaris
gggacattcccatctggtgggtgct

SEQ ID NO: 148893 - DNA, 25 bp, Canis familiaris
gggatgctgtcatcaagggcgggtt

SEQ ID NO: 148894 - DNA, 25 bp, Canis familiaris
gggagcagcagcagcaagatggagg

SEQ ID NO: 148895 - DNA, 25 bp, Canis familiaris
gggacagaggcagatggagagggag

SEQ ID NO: 148896 - DNA, 25 bp, Canis familiaris
gggagcagaggacactgaggcccag

SEQ ID NO: 148897 - DNA, 25 bp, Canis familiaris
gggtcaggtatggccatcaacccag

SEQ ID NO: 148898 - DNA, 25 bp, Canis familiaris
gggagcatggtcaagccaaacggcg

SEQ ID NO: 148899 - DNA, 25 bp, Canis familiaris
gggagtttcccagtgaacaggcgga

SEQ ID NO: 148900 - DNA, 25 bp, Canis familiaris
gggagatcataccccgaaaccagaa

SEQ ID NO: 148901 - DNA, 25 bp, Canis familiaris
gggaataacctgtctcaaacaagaa

SEQ ID NO: 148902 - DNA, 25 bp, Canis familiaris
gggaatatagacatacaaaactgca

SEQ ID NO: 148903 - DNA, 25 bp, Canis familiaris
gggaatataacattccagtgtacac

SEQ ID NO: 148904 - DNA, 25 bp, Canis familiaris
gggataaggaaatcagctcccccct

SEQ ID NO: 148905 - DNA, 25 bp, Canis familiaris
gggaacaggatggaccattctaccc

SEQ ID NO: 148906 - DNA, 25 bp, Canis familiaris
gggagacggggaccattaaccacag

SEQ ID NO: 148907 - DNA, 25 bp, Canis familiaris
gggagaaggaggagttatggccact

SEQ ID NO: 148908 - DNA, 25 bp, Canis familiaris
gggaagagggtgagtctccccctct

SEQ ID NO: 148909 - DNA, 25 bp, Canis familiaris
gggaagaggtgattggtctctcgac

SEQ ID NO: 148910 - DNA, 25 bp, Canis familiaris
gggcaaggattatgcctcttcacct

SEQ ID NO: 148911 - DNA, 25 bp, Canis familiaris
gggaaaatttagatcttcacctaga

SEQ ID NO: 148912 - DNA, 25 bp, Canis familiaris
gggacaagtatttttcccctgtcag

SEQ ID NO: 148913 - DNA, 25 bp, Canis familiaris
gggaagcaggttgatctccttcatg

SEQ ID NO: 148914 - DNA, 25 bp, Canis familiaris
gggaagaggtcccatattcatccag

SEQ ID NO: 148915 - DNA, 25 bp, Canis familiaris
gggaccggcaactataacatcgagg

SEQ ID NO: 148916 - DNA, 25 bp, Canis familiaris
gggaaaacacacttcaactcagagt

SEQ ID NO: 148917 - DNA, 25 bp, Canis familiaris
gggaagaaaatctaatatcgcagca

SEQ ID NO: 148918 - DNA, 25 bp, Canis familiaris
gggaatggcaattctcatattggac

SEQ ID NO: 148919 - DNA, 25 bp, Canis familiaris
gggcacggaggtgcatgctctgtac

SEQ ID NO: 148920 - DNA, 25 bp, Canis familiaris
gggacgggtgatggacttgacctac

SEQ ID NO: 148921 - DNA, 25 bp, Canis familiaris
gggaggcggagagtgaattaccaac

SEQ ID NO: 148922 - DNA, 25 bp, Canis familiaris
ggggccgtgggattattagctttct

SEQ ID NO: 148923 - DNA, 25 bp, Canis familiaris
gggactcttagggtgattattttct

SEQ ID NO: 148924 - DNA, 25 bp, Canis familiaris
ggaaccttgaggctagttagtataa

SEQ ID NO: 148925 - DNA, 25 bp, Canis familiaris
gggaccctggagcaacattttatgg

SEQ ID NO: 148926 - DNA, 25 bp, Canis familiaris
gggacctctgaacaaatcctcttta

SEQ ID NO: 148927 - DNA, 25 bp, Canis familiaris
gggtaccatccaaagaatccttatt

SEQ ID NO: 148928 - DNA, 25 bp, Canis familiaris
gggcaactatcccaagggctatttt

SEQ ID NO: 148929 - DNA, 25 bp, Canis familiaris
gggcaacaatcccaagggctatcta

SEQ ID NO: 148930 - DNA, 25 bp, Canis familiaris
gggagccaagcggaaggccatcact

SEQ ID NO: 148931 - DNA, 25 bp, Canis familiaris
gggacagaggaggagcgtttgcgct

SEQ ID NO: 148932 - DNA, 25 bp, Canis familiaris
gggacagggagactgcctttgacac

SEQ ID NO: 148933 - DNA, 25 bp, Canis familiaris
gggacatgttaaggcctattcaaat

SEQ ID NO: 148934 - DNA, 25 bp, Canis familiaris
gggaatttcaatgctgtctcactag

SEQ ID NO: 148935 - DNA, 25 bp, Canis familiaris
gggaatatccaaatctttccatatg

SEQ ID NO: 148936 - DNA, 25 bp, Canis familiaris
gggaaatgggcaacttgttgctatg

SEQ ID NO: 148937 - DNA, 25 bp, Canis familiaris
gggaagatgctgtcaagtctgagtt

SEQ ID NO: 148938 - DNA, 25 bp, Canis familiaris
gggaatgatgcccagcagtctgatt

SEQ ID NO: 148939 - DNA, 25 bp, Canis familiaris
gggaatggagagccagagctgtcaa

SEQ ID NO: 148940 - DNA, 25 bp, Canis familiaris
gggaatctgagaaagactgctaatt

SEQ ID NO: 148941 - DNA, 25 bp, Canis familiaris
gggaactatgattgacatctgtaat

SEQ ID NO: 148942 - DNA, 25 bp, Canis familiaris
gggaacatatgcagacatgggttta

SEQ ID NO: 148943 - DNA, 25 bp, Canis familiaris
gggaaaatgggcttgaggtctgtca

SEQ ID NO: 148944 - DNA, 25 bp, Canis familiaris
gggaaaatggctttattggcctcaa

SEQ ID NO: 148945 - DNA, 25 bp, Canis familiaris
gggaaccacagtagtcactggccca

SEQ ID NO: 148946 - DNA, 25 bp, Canis familiaris
gggaacacaaatattgtcaccacat

SEQ ID NO: 148947 - DNA, 25 bp, Canis familiaris
gggaaacataacctctgtacataca

SEQ ID NO: 148948 - DNA, 25 bp, Canis familiaris
gggacagactaaccctcaacaacca

SEQ ID NO: 148949 - DNA, 25 bp, Canis familiaris
gggacagacaacacagcttaacaac

SEQ ID NO: 148950 - DNA, 25 bp, Canis familiaris
gggacagaaatcaggtattggcagt

SEQ ID NO: 148951 - DNA, 25 bp, Canis familiaris
gggacaagaaggcgaagatggcggc

SEQ ID NO: 148952 - DNA, 25 bp, Canis familiaris
gggtctcaaaggggacactggggtg

SEQ ID NO: 148953 - DNA, 25 bp, Canis familiaris
gggttcaacagagccacgagggttg

SEQ ID NO: 148954 - DNA, 25 bp, Canis familiaris
gggaaatccagacccaagtggaggg

SEQ ID NO: 148955 - DNA, 25 bp, Canis familiaris
gggaacattacacatctattgggga

SEQ ID NO: 148956 - DNA, 25 bp, Canis familiaris
gggtcaaaaggattctactgggcga

SEQ ID NO: 148957 - DNA, 25 bp, Canis familiaris
gggacaaaagtatcgagtggctcta

SEQ ID NO: 148958 - DNA, 25 bp, Canis familiaris
gggaaacaattaagtgactgactct

SEQ ID NO: 148959 - DNA, 25 bp, Canis familiaris
gggaagacagataaaggcacagata

SEQ ID NO: 148960 - DNA, 25 bp, Canis familiaris
gggacgtcaatcacatcgacgtaga

SEQ ID NO: 148961 - DNA, 25 bp, Canis familiaris
gggacttcgatcacatcgaacgtga

SEQ ID NO: 148962 - DNA, 25 bp, Canis familiaris
gggagccactgaacctggaacaatg

SEQ ID NO: 148963 - DNA, 25 bp, Canis familiaris
gggagcccatggacactgaatgtaa

SEQ ID NO: 148964 - DNA, 25 bp, Canis familiaris
gggagacgaggtggctgttgtaatt

SEQ ID NO: 148965 - DNA, 25 bp, Canis familiaris
gggacggatggtatgtttacttctg

SEQ ID NO: 148966 - DNA, 25 bp, Canis familiaris
gggaccgagacaacgtagttctcca

SEQ ID NO: 148967 - DNA, 25 bp, Canis familiaris
gggacctaaaacctagcaatctagc

SEQ ID NO: 148968 - DNA, 25 bp, Canis familiaris
gggactcagtcctacttgagaccat

SEQ ID NO: 148969 - DNA, 25 bp, Canis familiaris
gggacacatttctgtttaccatacc

SEQ ID NO: 148970 - DNA, 25 bp, Canis familiaris
gggaagctagtcttgcttttgccca

SEQ ID NO: 148971 - DNA, 25 bp, Canis familiaris
gggaatgtctggctagatttgccca

SEQ ID NO: 148972 - DNA, 25 bp, Canis familiaris
gggaatggctggataatctcccccc

SEQ ID NO: 148973 - DNA, 25 bp, Canis familiaris
gggagtagttggcagatgcccctcc

SEQ ID NO: 148974 - DNA, 25 bp, Canis familiaris
gggaggcctactggtaggcctctcc

SEQ ID NO: 148975 - DNA, 25 bp, Canis familiaris
gggagccttcgggaagaggcttcct

SEQ ID NO: 148976 - DNA, 25 bp, Canis familiaris
gggagcttgtggcgaagatggtttt

SEQ ID NO: 148977 - DNA, 25 bp, Canis familiaris
gggagttttagttatatggatttat

SEQ ID NO: 148978 - DNA, 25 bp, Canis familiaris
gggcaattcttagatttgtggaaat

SEQ ID NO: 148979 - DNA, 25 bp, Canis familiaris
gggaattcatctccactttggtgat

SEQ ID NO: 148980 - DNA, 25 bp, Canis familiaris
gggaaacacatttgtctcggagacg

SEQ ID NO: 148981 - DNA, 25 bp, Canis familiaris
gggatggttcaattgcttcaggagg

SEQ ID NO: 148982 - DNA, 25 bp, Canis familiaris
gggaatggtcagaccttgagcaggg

SEQ ID NO: 148983 - DNA, 25 bp, Canis familiaris
gggcaatggttactactcagatggg

SEQ ID NO: 148984 - DNA, 25 bp, Canis familiaris
gggaatgggtctacatcacaggggc

SEQ ID NO: 148985 - DNA, 25 bp, Canis familiaris
gggaaggtgtgactaccaggggagt

SEQ ID NO: 148986 - DNA, 25 bp, Canis familiaris
gggaattgtgggtcaacaagaaaga

SEQ ID NO: 148987 - DNA, 25 bp, Canis familiaris
gggaatcttggggaagcacgtgaga

SEQ ID NO: 148988 - DNA, 25 bp, Canis familiaris
gggactgtcggggacaacgtggcaa

SEQ ID NO: 148989 - DNA, 25 bp, Canis familiaris
gggaatctctgggaatcttggggaa

SEQ ID NO: 148990 - DNA, 25 bp, Canis familiaris
gggaattgctgtgaatgctttggaa

SEQ ID NO: 148991 - DNA, 25 bp, Canis familiaris
gggactatgaggccacacttgtgga

SEQ ID NO: 148992 - DNA, 25 bp, Canis familiaris
gggaatgattctcagagctctgtgt

SEQ ID NO: 148993 - DNA, 25 bp, Canis familiaris
gggaatatactcaagctgtctgctt

SEQ ID NO: 148994 - DNA, 25 bp, Canis familiaris
gggaatattcttgttgcatgccttt

SEQ ID NO: 148995 - DNA, 25 bp, Canis familiaris
gggagcagacttgtcttgctgtctt

SEQ ID NO: 148996 - DNA, 25 bp, Canis familiaris
gggacaactatcatcggtttttccg

SEQ ID NO: 148997 - DNA, 25 bp, Canis familiaris
gggactatggaagtggggtctttct

SEQ ID NO: 148998 - DNA, 25 bp, Canis familiaris
gggacataccacatggtctgtcgtt

SEQ ID NO: 148999 - DNA, 25 bp, Canis familiaris
gggaggatccctagactatgttctt

SEQ ID NO: 149000 - DNA, 25 bp, Canis familiaris
gggagaaccactgagcaaactttgt

SEQ ID NO: 149001 - DNA, 25 bp, Canis familiaris
gggaaagccacatgagaaactccta

SEQ ID NO: 149002 - DNA, 25 bp, Canis familiaris
gggaacacgctcagaggaacccaca

SEQ ID NO: 149003 - DNA, 25 bp, Canis familiaris
gggaacaccttgtacgtgagcttac

SEQ ID NO: 149004 - DNA, 25 bp, Canis familiaris
gggaagcacctttgaactgatgatt

SEQ ID NO: 149005 - DNA, 25 bp, Canis familiaris
gggaggaccttatccaatatctggt

SEQ ID NO: 149006 - DNA, 25 bp, Canis familiaris
gggagtctcatcttaacaaaactgg

SEQ ID NO: 149007 - DNA, 25 bp, Canis familiaris
gggagcctcatctgcaatgtaggag

SEQ ID NO: 149008 - DNA, 25 bp, Canis familiaris
gggagccagcaggagcactgcttgg

SEQ ID NO: 149009 - DNA, 25 bp, Canis familiaris
gggactcagcatcacaggtgctggc

SEQ ID NO: 149010 - DNA, 25 bp, Canis familiaris
gggacacagcatcacaggtgcggtc

SEQ ID NO: 149011 - DNA, 25 bp, Canis familiaris
gggacacagcatcacaggtgcggtc

SEQ ID NO: 149012 - DNA, 25 bp, Canis familiaris
gggaaagctggcaaggtgggtgaca

SEQ ID NO: 149013 - DNA, 25 bp, Canis familiaris
gggaaagggctgactggggcaggaa

SEQ ID NO: 149014 - DNA, 25 bp, Canis familiaris
gggaacagggctgaggaggctgaaa

SEQ ID NO: 149015 - DNA, 25 bp, Canis familiaris
gggaacctgactgtgaagatgctgg

SEQ ID NO: 149016 - DNA, 25 bp, Canis familiaris
gggaaccagtctttcaagatgggaa

SEQ ID NO: 149017 - DNA, 25 bp, Canis familiaris
gggagaccagactgtccggaaatag

SEQ ID NO: 149018 - DNA, 25 bp, Canis familiaris
gggagaccaggctgtctcagacacc

SEQ ID NO: 149019 - DNA, 25 bp, Canis familiaris
gggagaccagaggactgtaatgatc

SEQ ID NO: 149020 - DNA, 25 bp, Canis familiaris
gggaactgctggaagctgagaagac

SEQ ID NO: 149021 - DNA, 25 bp, Canis familiaris
gggaagtttctactgacaggacagt

SEQ ID NO: 149022 - DNA, 25 bp, Canis familiaris
gggaacttttcattcacatgggcct

SEQ ID NO: 149023 - DNA, 25 bp, Canis familiaris
gggaacttctgatatacagctggtc

SEQ ID NO: 149024 - DNA, 25 bp, Canis familiaris
ggtgaagcttcgtgatgacaggcca

SEQ ID NO: 149025 - DNA, 25 bp, Canis familiaris
gggagagtccgaagaaggtccaatt

SEQ ID NO: 149026 - DNA, 25 bp, Canis familiaris
gggaggttcgaattgggtgtggact

SEQ ID NO: 149027 - DNA, 25 bp, Canis familiaris
gggagactaaagctggttggggcta

SEQ ID NO: 149028 - DNA, 25 bp, Canis familiaris
ggtgaaataaagagatcttggggaa

SEQ ID NO: 149029 - DNA, 25 bp, Canis familiaris
gggaatgtaaccagccagggttgac

SEQ ID NO: 149030 - DNA, 25 bp, Canis familiaris
ggaggttcaaagattagggctgtac

SEQ ID NO: 149031 - DNA, 25 bp, Canis familiaris
ggggtttgaagcagtggggctccac

SEQ ID NO: 149032 - DNA, 25 bp, Canis familiaris
ggtgttttaactttggctttctcat

SEQ ID NO: 149033 - DNA, 25 bp, Canis familiaris
gggtacttttcataggttttctgca

SEQ ID NO: 149034 - DNA, 25 bp, Canis familiaris
gggaacttttgctgaggttttctct

SEQ ID NO: 149035 - DNA, 25 bp, Canis familiaris
gggaactctgtttagggatgtacat

SEQ ID NO: 149036 - DNA, 25 bp, Canis familiaris
gggagacccacaacatgggagtcca

SEQ ID NO: 149037 - DNA, 25 bp, Canis familiaris
gggacataccatgcctggaaggcca

SEQ ID NO: 149038 - DNA, 25 bp, Canis familiaris
gggagataccatgatcacgaaggtg

SEQ ID NO: 149039 - DNA, 25 bp, Canis familiaris
gggaatccaatgctaatgaaaatga

SEQ ID NO: 149040 - DNA, 25 bp, Canis familiaris
ggtgaactgcaaagttacaacacaa

SEQ ID NO: 149041 - DNA, 25 bp, Canis familiaris
gggaaccgagagactcacacacaca

SEQ ID NO: 149042 - DNA, 25 bp, Canis familiaris
gggaaaatgtgaactcatgcaacca

SEQ ID NO: 149043 - DNA, 25 bp, Canis familiaris
gggaaagatgtgttgctaaagagca

SEQ ID NO: 149044 - DNA, 25 bp, Canis familiaris
ggtggaaattttggaccaggaccag

SEQ ID NO: 149045 - DNA, 25 bp, Canis familiaris
gggtgtcggttggaccaaggaccag

SEQ ID NO: 149046 - DNA, 25 bp, Canis familiaris
gggttcagagaagaccccgactgcc

SEQ ID NO: 149047 - DNA, 25 bp, Canis familiaris
gggttggaagagctctacacgttgc

SEQ ID NO: 149048 - DNA, 25 bp, Canis familiaris
gggtctggagaacatctacccaggc

SEQ ID NO: 149049 - DNA, 25 bp, Canis familiaris
gggtgcctagatatgtcgatttcgt

SEQ ID NO: 149050 - DNA, 25 bp, Canis familiaris
gggacactaatactgcaccattttt

SEQ ID NO: 149051 - DNA, 25 bp, Canis familiaris
gggacagctgattattattattatt

SEQ ID NO: 149052 - DNA, 25 bp, Canis familiaris
gggacagtagattggttttattttg

SEQ ID NO: 149053 - DNA, 25 bp, Canis familiaris
gggaccaggaggctctcattatttt

SEQ ID NO: 149054 - DNA, 25 bp, Canis familiaris
gggaggcagatgggttcgtttttat

SEQ ID NO: 149055 - DNA, 25 bp, Canis familiaris
gggaatgaagggatcgctgctggtc

SEQ ID NO: 149056 - DNA, 25 bp, Canis familiaris
gggaaggaggacaatcgcgtgcccc

SEQ ID NO: 149057 - DNA, 25 bp, Canis familiaris
gggaacgggatcaggcgtcagaccc

SEQ ID NO: 149058 - DNA, 25 bp, Canis familiaris
gggaacgtgaaaggggcagcgccct

SEQ ID NO: 149059 - DNA, 25 bp, Canis familiaris
gggaaggaggaaggcgaacgccact

SEQ ID NO: 149060 - DNA, 25 bp, Canis familiaris
gggacagcgggatctggacagaatc

SEQ ID NO: 149061 - DNA, 25 bp, Canis familiaris
gggagacggtgatgaggagcgcaat

SEQ ID NO: 149062 - DNA, 25 bp, Canis familiaris
gggagccagggttgggcaagatgag

SEQ ID NO: 149063 - DNA, 25 bp, Canis familiaris
ggggccgtggggtggagagattggt

SEQ ID NO: 149064 - DNA, 25 bp, Canis familiaris
gggacctggggatgggacagttctg

SEQ ID NO: 149065 - DNA, 25 bp, Canis familiaris
gggacctttatattgggaattctct

SEQ ID NO: 149066 - DNA, 25 bp, Canis familiaris
gggaccatctctcaacggaattgtc

SEQ ID NO: 149067 - DNA, 25 bp, Canis familiaris
gggaaatgccatcaagtgggacttc

SEQ ID NO: 149068 - DNA, 25 bp, Canis familiaris
gggaaagctcttcgaggggagcaat

SEQ ID NO: 149069 - DNA, 25 bp, Canis familiaris
gggaaagtctgcatgcgtgtgcgaa

SEQ ID NO: 149070 - DNA, 25 bp, Canis familiaris
gggagaatgactactctttcctgag

SEQ ID NO: 149071 - DNA, 25 bp, Canis familiaris
gggaagatgaatgcctctgttctac

SEQ ID NO: 149072 - DNA, 25 bp, Canis familiaris
gggaatgtgggttttgtattcacca

SEQ ID NO: 149073 - DNA, 25 bp, Canis familiaris
gggaagggagcttcctgcaactacc

SEQ ID NO: 149074 - DNA, 25 bp, Canis familiaris
gggaaggggtgagtccatagcctgg

SEQ ID NO: 149075 - DNA, 25 bp, Canis familiaris
gggaagaggggctttggagccgagg

SEQ ID NO: 149076 - DNA, 25 bp, Canis familiaris
gggagaacaccgtattggagacatg

SEQ ID NO: 149077 - DNA, 25 bp, Canis familiaris
ggtgtgaacccccttaataatgaat

SEQ ID NO: 149078 - DNA, 25 bp, Canis familiaris
gggatgaagccctcttactttgagt

SEQ ID NO: 149079 - DNA, 25 bp, Canis familiaris
gggagagcccgatttgtactttgga

SEQ ID NO: 149080 - DNA, 25 bp, Canis familiaris
gggacaccaagattggaccctgtgg

SEQ ID NO: 149081 - DNA, 25 bp, Canis familiaris
gggatcactgaggaagggcccttga

SEQ ID NO: 149082 - DNA, 25 bp, Canis familiaris
gggatcactgaggaagggcccttga

SEQ ID NO: 149083 - DNA, 25 bp, Canis familiaris
gggacatctgaccaggttggatcaa

SEQ ID NO: 149084 - DNA, 25 bp, Canis familiaris
gggaatggaccaggtttatcacacg

SEQ ID NO: 149085 - DNA, 25 bp, Canis familiaris
gggacaggcaacagtttgatccttg

SEQ ID NO: 149086 - DNA, 25 bp, Canis familiaris
gggaagctgagagggtttgatgcac

SEQ ID NO: 149087 - DNA, 25 bp, Canis familiaris
gggacctgcagcttgattttcagac

SEQ ID NO: 149088 - DNA, 25 bp, Canis familiaris
gggacacagcacttgagactttcaa

SEQ ID NO: 149089 - DNA, 25 bp, Canis familiaris
gggacctcacagtggtgtctgaaag

SEQ ID NO: 149090 - DNA, 25 bp, Canis familiaris
gggacccacagcacgatttagatcg

SEQ ID NO: 149091 - DNA, 25 bp, Canis familiaris
gggactcccatgatttagacagtgc

SEQ ID NO: 149092 - DNA, 25 bp, Canis familiaris
ggatagttccatatttaactttttg

SEQ ID NO: 149093 - DNA, 25 bp, Canis familiaris
gggagaattcacattaaaccttttg

SEQ ID NO: 149094 - DNA, 25 bp, Canis familiaris
gggaaattcactttacacacacttt

SEQ ID NO: 149095 - DNA, 25 bp, Canis familiaris
gggaagatgctactcttattatttt

SEQ ID NO: 149096 - DNA, 25 bp, Canis familiaris
gggaagcattcattttcagttttgt

SEQ ID NO: 149097 - DNA, 25 bp, Canis familiaris
gggagagttaatgctacttccctct

SEQ ID NO: 149098 - DNA, 25 bp, Canis familiaris
gggactttagatggtggtctcccct

SEQ ID NO: 149099 - DNA, 25 bp, Canis familiaris
ggaccatgttggtgggtccgtgcgt

SEQ ID NO: 149100 - DNA, 25 bp, Canis familiaris
ggatcaaagtggtgggactcgcgcc

SEQ ID NO: 149101 - DNA, 25 bp, Canis familiaris
ggacgacaagggcgagtttcagacc

SEQ ID NO: 149102 - DNA, 25 bp, Canis familiaris
gggagacacgggcttgatttggacc

SEQ ID NO: 149103 - DNA, 25 bp, Canis familiaris
gggagccaagtgccctgtttgggca

SEQ ID NO: 149104 - DNA, 25 bp, Canis familiaris
ggaggcctttgagctgtttgatcga

SEQ ID NO: 149105 - DNA, 25 bp, Canis familiaris
gggagcgttgggagctttacgacag

SEQ ID NO: 149106 - DNA, 25 bp, Canis familiaris
gggacctgaggagggttcaaggagg

SEQ ID NO: 149107 - DNA, 25 bp, Canis familiaris
gggacctcagctgggagggggggtg

SEQ ID NO: 149108 - DNA, 25 bp, Canis familiaris
gggacccagcaggcggagggtctgt

SEQ ID NO: 149109 - DNA, 25 bp, Canis familiaris
gggaaacgcaggactgggaggctgt

SEQ ID NO: 149110 - DNA, 25 bp, Canis familiaris
gggaaaccagcctgctggagcaggg

SEQ ID NO: 149111 - DNA, 25 bp, Canis familiaris
gggaaccaagcctcatggatgagtg

SEQ ID NO: 149112 - DNA, 25 bp, Canis familiaris
gggaccagcagacaagaggataggg

SEQ ID NO: 149113 - DNA, 25 bp, Canis familiaris
gggacacacaggacacacaggaagg

SEQ ID NO: 149114 - DNA, 25 bp, Canis familiaris
gggaagagggctgccagaatatgct

SEQ ID NO: 149115 - DNA, 25 bp, Canis familiaris
gggaagcaggaggcccagagagggc

SEQ ID NO: 149116 - DNA, 25 bp, Canis familiaris
gggacacatggaaacacgggtggca

SEQ ID NO: 149117 - DNA, 25 bp, Canis familiaris
aagcctggggttgcctaattgagtt

SEQ ID NO: 149118 - DNA, 25 bp, Canis familiaris
gggacatctggacgtgtgtcgggtt

SEQ ID NO: 149119 - DNA, 25 bp, Canis familiaris
gggactgggaagagtcacggcagat

SEQ ID NO: 149120 - DNA, 25 bp, Canis familiaris
gggactagaacacagtagccgcaac

SEQ ID NO: 149121 - DNA, 25 bp, Canis familiaris
gggacttgaactcatgaccctgaga

SEQ ID NO: 149122 - DNA, 25 bp, Canis familiaris
gggattctaagtcgtcacgcactaa

SEQ ID NO: 149123 - DNA, 25 bp, Canis familiaris
gggagtccataagtgacccactaga

SEQ ID NO: 149124 - DNA, 25 bp, Canis familiaris
gggagacagcaaactgcactgtact

SEQ ID NO: 149125 - DNA, 25 bp, Canis familiaris
gggagcacagcaggacagaagaaat

SEQ ID NO: 149126 - DNA, 25 bp, Canis familiaris
gggacacagcaggccaagaaagatt

SEQ ID NO: 149127 - DNA, 25 bp, Canis familiaris
gggaccgggtcaaacatgagcattc

SEQ ID NO: 149128 - DNA, 25 bp, Canis familiaris
gggattcggactcagaagagcaggc

SEQ ID NO: 149129 - DNA, 25 bp, Canis familiaris
gggacggagcctcaaaaggccaggc

SEQ ID NO: 149130 - DNA, 25 bp, Canis familiaris
gggatcctgggtcaaggtgcccaag

SEQ ID NO: 149131 - DNA, 25 bp, Canis familiaris
gggactttgagtaagaactaccaca

SEQ ID NO: 149132 - DNA, 25 bp, Canis familiaris
gggacatctgcttttaagcttgaac

SEQ ID NO: 149133 - DNA, 25 bp, Canis familiaris
gggagcaatattttaactcattaca

SEQ ID NO: 149134 - DNA, 25 bp, Canis familiaris
gggaaacatcctaagacgatctcaa

SEQ ID NO: 149135 - DNA, 25 bp, Canis familiaris
gggaaaacattcagccagagtgcaa

SEQ ID NO: 149136 - DNA, 25 bp, Canis familiaris
gggagaagatcgaggccgagctgca

SEQ ID NO: 149137 - DNA, 25 bp, Canis familiaris
gggaggagataatacgcaatcgcag

SEQ ID NO: 149138 - DNA, 25 bp, Canis familiaris
ggaaggactaacacccaggagtaag

SEQ ID NO: 149139 - DNA, 25 bp, Canis familiaris
gggggcactaagagtacgtactacg

SEQ ID NO: 149140 - DNA, 25 bp, Canis familiaris
gggggactaggggttcaggaatcat

SEQ ID NO: 149141 - DNA, 25 bp, Canis familiaris
gggggaaattgggtgtaggtatatg

SEQ ID NO: 149142 - DNA, 25 bp, Canis familiaris
gggaaattttgtgttcaggaatagc

SEQ ID NO: 149143 - DNA, 25 bp, Canis familiaris
gggaaatttattcttaccacatgaa

SEQ ID NO: 149144 - DNA, 25 bp, Canis familiaris
gggaaatgttcagtttttctaatga

SEQ ID NO: 149145 - DNA, 25 bp, Canis familiaris
gggaccaatttgtttttctccatga

SEQ ID NO: 149146 - DNA, 25 bp, Canis familiaris
gggaaccattgttctaacttacatg

SEQ ID NO: 149147 - DNA, 25 bp, Canis familiaris
gggactacatttgcaaactcataat

SEQ ID NO: 149148 - DNA, 25 bp, Canis familiaris
gggactggttttgatactaatattc

SEQ ID NO: 149149 - DNA, 25 bp, Canis familiaris
gggactgcagtttcaatttgtaaat

SEQ ID NO: 149150 - DNA, 25 bp, Canis familiaris
gggacatcgtattcaaaggtcagga

SEQ ID NO: 149151 - DNA, 25 bp, Canis familiaris
gggaacagcacatgcaaagggatgg

SEQ ID NO: 149152 - DNA, 25 bp, Canis familiaris
gggaacatgcactatgacaccctga

SEQ ID NO: 149153 - DNA, 25 bp, Canis familiaris
gggtcagcatgggatgactctgcca

SEQ ID NO: 149154 - DNA, 25 bp, Canis familiaris
gggacagatgagtcagcaccagcca

SEQ ID NO: 149155 - DNA, 25 bp, Canis familiaris
gggacaatgtttaggcagcatcaca

SEQ ID NO: 149156 - DNA, 25 bp, Canis familiaris
gggacaatgttgatttcacacagtt

SEQ ID NO: 149157 - DNA, 25 bp, Canis familiaris
gggacactgaatgtcttggccaatt

SEQ ID NO: 149158 - DNA, 25 bp, Canis familiaris
gggacacatcataggtctgtgcccc

SEQ ID NO: 149159 - DNA, 25 bp, Canis familiaris
gggaccaacatgttctgaactccca

SEQ ID NO: 149160 - DNA, 25 bp, Canis familiaris
gggaacacagatctggcaagcccca

SEQ ID NO: 149161 - DNA, 25 bp, Canis familiaris
gggaacaaatttggactccctcacg

SEQ ID NO: 149162 - DNA, 25 bp, Canis familiaris
gggagaaaatccagccatctcccgg

SEQ ID NO: 149163 - DNA, 25 bp, Canis familiaris
gggagaaaggacactgcctccactg

SEQ ID NO: 149164 - DNA, 25 bp, Canis familiaris
gggaaagggacttcatggtcttctg

SEQ ID NO: 149165 - DNA, 25 bp, Canis familiaris
gggagaaggatattcctggactcac

SEQ ID NO: 149166 - DNA, 25 bp, Canis familiaris
gggtgaaatgacgttgccgattcac

SEQ ID NO: 149167 - DNA, 25 bp, Canis familiaris
gggatgttcacaggtcccagattcc

SEQ ID NO: 149168 - DNA, 25 bp, Canis familiaris
gggattggaacagcagctctcttcc

SEQ ID NO: 149169 - DNA, 25 bp, Canis familiaris
gggttaaatgcagactctttcctca

SEQ ID NO: 149170 - DNA, 25 bp, Canis familiaris
ggaggttggtcagactctttctcta

SEQ ID NO: 149171 - DNA, 25 bp, Canis familiaris
gggatgttttcaaagctccccttag

SEQ ID NO: 149172 - DNA, 25 bp, Canis familiaris
gggacgtcattaattgtctcctttt

SEQ ID NO: 149173 - DNA, 25 bp, Canis familiaris
gggactgtttaacttctgaaatgtt

SEQ ID NO: 149174 - DNA, 25 bp, Canis familiaris
gggagtggagtgtgttccaaagtct

SEQ ID NO: 149175 - DNA, 25 bp, Canis familiaris
ggtggatggggagcttccaccgtga

SEQ ID NO: 149176 - DNA, 25 bp, Canis familiaris
gggaggaggagagctgttccccaga

SEQ ID NO: 149177 - DNA, 25 bp, Canis familiaris
gggaacagaagagctgggctccccc

SEQ ID NO: 149178 - DNA, 25 bp, Canis familiaris
ggagaaaatagtctggtgcccctca

SEQ ID NO: 149179 - DNA, 25 bp, Canis familiaris
gggacagaatagtttttccacaaca

SEQ ID NO: 149180 - DNA, 25 bp, Canis familiaris
gggacatgtataagcctttgaccaa

SEQ ID NO: 149181 - DNA, 25 bp, Canis familiaris
gggagcatgtgtggtgcttttggac

SEQ ID NO: 149182 - DNA, 25 bp, Canis familiaris
gggagatggtgaactgttttgtcag

SEQ ID NO: 149183 - DNA, 25 bp, Canis familiaris
gggagtgaggtatttattctgtgca

SEQ ID NO: 149184 - DNA, 25 bp, Canis familiaris
gggagctgagcttaattttcttaac

SEQ ID NO: 149185 - DNA, 25 bp, Canis familiaris
gggacttattatatatgtttaccaa

SEQ ID NO: 149186 - DNA, 25 bp, Canis familiaris
gggtttttaagtcttcttctgaatg

SEQ ID NO: 149187 - DNA, 25 bp, Canis familiaris
gggatgtgtttatgtctcctcttat

SEQ ID NO: 149188 - DNA, 25 bp, Canis familiaris
gggagttcctgattatattcttttt

SEQ ID NO: 149189 - DNA, 25 bp, Canis familiaris
gggagccatcttacaaactcttctt

SEQ ID NO: 149190 - DNA, 25 bp, Canis familiaris
gggacatcatcagtacggtccggtt

SEQ ID NO: 149191 - DNA, 25 bp, Canis familiaris
gggactctatcaacggtcgtgtgtg

SEQ ID NO: 149192 - DNA, 25 bp, Canis familiaris
gggatttattgtgcccggtgtgggt

SEQ ID NO: 149193 - DNA, 25 bp, Canis familiaris
gggatttgggaagcttggtcagagg

SEQ ID NO: 149194 - DNA, 25 bp, Canis familiaris
gggttctcctaagcaatgttcacaa

SEQ ID NO: 149195 - DNA, 25 bp, Canis familiaris
gggttctacttcaacaagcccacag

SEQ ID NO: 149196 - DNA, 25 bp, Canis familiaris
gggtttcactggtaagcagggcacg

SEQ ID NO: 149197 - DNA, 25 bp, Canis familiaris
gggagtccttgtgaaagggcactgg

SEQ ID NO: 149198 - DNA, 25 bp, Canis familiaris
gggactccctgggaaggaggcttgt

SEQ ID NO: 149199 - DNA, 25 bp, Canis familiaris
gggactcccatgggggaacactagt

SEQ ID NO: 149200 - DNA, 25 bp, Canis familiaris
gggacacccatgaggtcagaggcgg

SEQ ID NO: 149201 - DNA, 25 bp, Canis familiaris
gggaaccctggcagtagatgtctgg

SEQ ID NO: 149202 - DNA, 25 bp, Canis familiaris
gggagaacctgagtgggctttctgg

SEQ ID NO: 149203 - DNA, 25 bp, Canis familiaris
gggaggagtctgatgtactttggca

SEQ ID NO: 149204 - DNA, 25 bp, Canis familiaris
gggagggtctgtaaactctgacccg

SEQ ID NO: 149205 - DNA, 25 bp, Canis familiaris
gggagggggctaacctgtgagctcc

SEQ ID NO: 149206 - DNA, 25 bp, Canis familiaris
gggaggaggaggcacctaagcagcc

SEQ ID NO: 149207 - DNA, 25 bp, Canis familiaris
gggaaagcgaggcaggggagcccgc

SEQ ID NO: 149208 - DNA, 25 bp, Canis familiaris
gggaacgtgagacagggcagaacca

SEQ ID NO: 149209 - DNA, 25 bp, Canis familiaris
gggagggtgattcaggagtggaaca

SEQ ID NO: 149210 - DNA, 25 bp, Canis familiaris
gggacgggataacaaatgtcacaca

SEQ ID NO: 149211 - DNA, 25 bp, Canis familiaris
gggactgggataagaaatctgtcat

SEQ ID NO: 149212 - DNA, 25 bp, Canis familiaris
gggacagggtaccatagtcttcatg

SEQ ID NO: 149213 - DNA, 25 bp, Canis familiaris
gggacagaataacagactttcagaa

SEQ ID NO: 149214 - DNA, 25 bp, Canis familiaris
gggactaagtgaaagatttttgcaa

SEQ ID NO: 149215 - DNA, 25 bp, Canis familiaris
gggacataagtagctctctggtagc

SEQ ID NO: 149216 - DNA, 25 bp, Canis familiaris
gggaccaagcagggcttcaggtggc

SEQ ID NO: 149217 - DNA, 25 bp, Canis familiaris
gggacccaggcttgttagctggagg

SEQ ID NO: 149218 - DNA, 25 bp, Canis familiaris
gggaccgaggcttgccaagcagtgg

SEQ ID NO: 149219 - DNA, 25 bp, Canis familiaris
gggaccatgacacaccaaacatggg

SEQ ID NO: 149220 - DNA, 25 bp, Canis familiaris
gggacagagtcctcagcagaactgg

SEQ ID NO: 149221 - DNA, 25 bp, Canis familiaris
gggacacaggcctcagcgaggccag

SEQ ID NO: 149222 - DNA, 25 bp, Canis familiaris
gggacaaggcacacaggaacacagg

SEQ ID NO: 149223 - DNA, 25 bp, Canis familiaris
gggacggatggctgaagaaaatgtg

SEQ ID NO: 149224 - DNA, 25 bp, Canis familiaris
gggacggtgctgttggggaacgtgt

SEQ ID NO: 149225 - DNA, 25 bp, Canis familiaris
gggacgggctggtggagaaggtgca

SEQ ID NO: 149226 - DNA, 25 bp, Canis familiaris
gggacgggctggtggagaaggtgca

SEQ ID NO: 149227 - DNA, 25 bp, Canis familiaris
gggacgggctggtggagaaggtgca

SEQ ID NO: 149228 - DNA, 25 bp, Canis familiaris
gggacggacatcgaaggacaagcgg

SEQ ID NO: 149229 - DNA, 25 bp, Canis familiaris
gggacagcaagtgaaggcacagaag

SEQ ID NO: 149230 - DNA, 25 bp, Canis familiaris
gggagacaagcagacggacaaacac

SEQ ID NO: 149231 - DNA, 25 bp, Canis familiaris
gggaacaaatgcgatctgaccacaa

SEQ ID NO: 149232 - DNA, 25 bp, Canis familiaris
gggaaaatggcttctgtcacagcta

SEQ ID NO: 149233 - DNA, 25 bp, Canis familiaris
gggatgactctgccaacgtaagtaa

SEQ ID NO: 149234 - DNA, 25 bp, Canis familiaris
gggagaatctcatagtgctttggaa

SEQ ID NO: 149235 - DNA, 25 bp, Canis familiaris
gggacagtgctttgtgttgttggca

SEQ ID NO: 149236 - DNA, 25 bp, Canis familiaris
gggacatggacttgatggttatggg

SEQ ID NO: 149237 - DNA, 25 bp, Canis familiaris
gggacatgtactgacggcttgagag

SEQ ID NO: 149238 - DNA, 25 bp, Canis familiaris
gggacattggtatcggcattgcagg

SEQ ID NO: 149239 - DNA, 25 bp, Canis familiaris
gggaccaggtgatgcaggactaggc

SEQ ID NO: 149240 - DNA, 25 bp, Canis familiaris
gggacctggagggagtcagctagag

SEQ ID NO: 149241 - DNA, 25 bp, Canis familiaris
gggacctggacaaattgcattaact

SEQ ID NO: 149242 - DNA, 25 bp, Canis familiaris
gggagctagggcacacaattatact

SEQ ID NO: 149243 - DNA, 25 bp, Canis familiaris
gggacttttgcatccaagttggcag

SEQ ID NO: 149244 - DNA, 25 bp, Canis familiaris
gggacattttgagctcaagttctct

SEQ ID NO: 149245 - DNA, 25 bp, Canis familiaris
gggacaaggtggcagaagtctgttt

SEQ ID NO: 149246 - DNA, 25 bp, Canis familiaris
gggacacgggagacacaagggagtt

SEQ ID NO: 149247 - DNA, 25 bp, Canis familiaris
gggacctgtcaggaactagggagtt

SEQ ID NO: 149248 - DNA, 25 bp, Canis familiaris
gggacctgtcagcagatgaagggac

SEQ ID NO: 149249 - DNA, 25 bp, Canis familiaris
gggatccgtcagcagtctgttgaac

SEQ ID NO: 149250 - DNA, 25 bp, Canis familiaris
gggaacatgatacagtctctccttc

SEQ ID NO: 149251 - DNA, 25 bp, Canis familiaris
gggagaaaatcgttgctctcaacct

SEQ ID NO: 149252 - DNA, 25 bp, Canis familiaris
gggagggaattatggctcatcactt

SEQ ID NO: 149253 - DNA, 25 bp, Canis familiaris
gggacttacttgtggcttactatga

SEQ ID NO: 149254 - DNA, 25 bp, Canis familiaris
gggacatttattgtggttactcagg

SEQ ID NO: 149255 - DNA, 25 bp, Canis familiaris
gggacaccatcaatggtcgtttcca

SEQ ID NO: 149256 - DNA, 25 bp, Canis familiaris
gggacactaaaggacagtttgacaa

SEQ ID NO: 149257 - DNA, 25 bp, Canis familiaris
gggaaaccaagaccagcatgttaac

SEQ ID NO: 149258 - DNA, 25 bp, Canis familiaris
gggacaacaaagctcagtgtagaaa

SEQ ID NO: 149259 - DNA, 25 bp, Canis familiaris
gggacccaagggaatgttagctatc

SEQ ID NO: 149260 - DNA, 25 bp, Canis familiaris
gggaccctagtgagtttcagtcatc

SEQ ID NO: 149261 - DNA, 25 bp, Canis familiaris
gggagccctaaaggcttctgcagtt

SEQ ID NO: 149262 - DNA, 25 bp, Canis familiaris
gggagctcgctgaagatggctactc

SEQ ID NO: 149263 - DNA, 25 bp, Canis familiaris
gggactgagcatagcagggtacctg

SEQ ID NO: 149264 - DNA, 25 bp, Canis familiaris
gggacgactacacagatgaccccac

SEQ ID NO: 149265 - DNA, 25 bp, Canis familiaris
gggagaacttcacagagaccgacat

SEQ ID NO: 149266 - DNA, 25 bp, Canis familiaris
gggataaagacaagagcagatacga

SEQ ID NO: 149267 - DNA, 25 bp, Canis familiaris
gggatggcatagtgcagagcagact

SEQ ID NO: 149268 - DNA, 25 bp, Canis familiaris
gggactctatgctggcatcagagct

SEQ ID NO: 149269 - DNA, 25 bp, Canis familiaris
gggatccctgtttgacagtgtcacg

SEQ ID NO: 149270 - DNA, 25 bp, Canis familiaris
gggaccttctttacagtataatttg

SEQ ID NO: 149271 - DNA, 25 bp, Canis familiaris
gggaccacatttttcaggtattttg

SEQ ID NO: 149272 - DNA, 25 bp, Canis familiaris
gggacccatatttgtattccattta

SEQ ID NO: 149273 - DNA, 25 bp, Canis familiaris
gggactactattcgttttcacttat

SEQ ID NO: 149274 - DNA, 25 bp, Canis familiaris
gggagcttatttctacagacaccta

SEQ ID NO: 149275 - DNA, 25 bp, Canis familiaris
gggacttcaggtcattcaacacaat

SEQ ID NO: 149276 - DNA, 25 bp, Canis familiaris
gggagttggaggcattcccacttac

SEQ ID NO: 149277 - DNA, 25 bp, Canis familiaris
gggtttgggctgaattccatcttcc

SEQ ID NO: 149278 - DNA, 25 bp, Canis familiaris
gggtttcggagtgtggatcctggcc

SEQ ID NO: 149279 - DNA, 25 bp, Canis familiaris
gggatttcagatctggttgacggag

SEQ ID NO: 149280 - DNA, 25 bp, Canis familiaris
gggagcttcaggctgctgaggatcg

SEQ ID NO: 149281 - DNA, 25 bp, Canis familiaris
gggatgctaagttgatggaagtcgt

SEQ ID NO: 149282 - DNA, 25 bp, Canis familiaris
gggagccacagggatggacatcttg

SEQ ID NO: 149283 - DNA, 25 bp, Canis familiaris
gggagcgacaggatcgcatctctcg

SEQ ID NO: 149284 - DNA, 25 bp, Canis familiaris
gggagtgagtggtggcacctcagcc

SEQ ID NO: 149285 - DNA, 25 bp, Canis familiaris
gggattgactggggagacgacgccg

SEQ ID NO: 149286 - DNA, 25 bp, Canis familiaris
gggatgtctcgggaaagctccgggc

SEQ ID NO: 149287 - DNA, 25 bp, Canis familiaris
gggagatcagtcccagaagatccag

SEQ ID NO: 149288 - DNA, 25 bp, Canis familiaris
gggagtgcctcagaagagcattcga

SEQ ID NO: 149289 - DNA, 25 bp, Canis familiaris
gggatgtcccagtcaaatgtactat

SEQ ID NO: 149290 - DNA, 25 bp, Canis familiaris
gggagatggccattctaactactgt

SEQ ID NO: 149291 - DNA, 25 bp, Canis familiaris
gggacgggaccgaacaacatgtggg

SEQ ID NO: 149292 - DNA, 25 bp, Canis familiaris
gggaggaagacccacatcaacattg

SEQ ID NO: 149293 - DNA, 25 bp, Canis familiaris
gggagatacatgccctagatcagac

SEQ ID NO: 149294 - DNA, 25 bp, Canis familiaris
gggaggactcacttagaaattggcc

SEQ ID NO: 149295 - DNA, 25 bp, Canis familiaris
gggatggttccactagaaatctcca

SEQ ID NO: 149296 - DNA, 25 bp, Canis familiaris
gggacagctccatttaaaactctca

SEQ ID NO: 149297 - DNA, 25 bp, Canis familiaris
gggactgctccatttaataatagta

SEQ ID NO: 149298 - DNA, 25 bp, Canis familiaris
gggactggtctttgattagaatgta

SEQ ID NO: 149299 - DNA, 25 bp, Canis familiaris
gggactttgttttgtacagtgctgt

SEQ ID NO: 149300 - DNA, 25 bp, Canis familiaris
gggactctctatgtttgatatgttg

SEQ ID NO: 149301 - DNA, 25 bp, Canis familiaris
gggaccctatttggagatctgttgc

SEQ ID NO: 149302 - DNA, 25 bp, Canis familiaris
gggacacctgtatttgtgcatgctg

SEQ ID NO: 149303 - DNA, 25 bp, Canis familiaris
gggaccctatatctgtgcagagtgg

SEQ ID NO: 149304 - DNA, 25 bp, Canis familiaris
gggagccctggaggagtgctatgtc

SEQ ID NO: 149305 - DNA, 25 bp, Canis familiaris
gggactccaagtcgagtgagtgtcc

SEQ ID NO: 149306 - DNA, 25 bp, Canis familiaris
gggagcccaggtaggaggctggcct

SEQ ID NO: 149307 - DNA, 25 bp, Canis familiaris
gggagcccagtgtgggcggatccat

SEQ ID NO: 149308 - DNA, 25 bp, Canis familiaris
gggagcacctggtggcacaggtctt

SEQ ID NO: 149309 - DNA, 25 bp, Canis familiaris
gggacactcaggtctgggaggtctt

SEQ ID NO: 149310 - DNA, 25 bp, Canis familiaris
gggacatgccagttctagggattct

SEQ ID NO: 149311 - DNA, 25 bp, Canis familiaris
gggactgaattcctggagtgttcct

SEQ ID NO: 149312 - DNA, 25 bp, Canis familiaris
gggactgaagacctgcaagagcccc

SEQ ID NO: 149313 - DNA, 25 bp, Canis familiaris
gggactggcaagactgcaacacccc

SEQ ID NO: 149314 - DNA, 25 bp, Canis familiaris
gggactggcaagactgcaacacccc

SEQ ID NO: 149315 - DNA, 25 bp, Canis familiaris
gggagctgcagcagggctcaaggca

SEQ ID NO: 149316 - DNA, 25 bp, Canis familiaris
gggacatcagcctggtatgaggtaa

SEQ ID NO: 149317 - DNA, 25 bp, Canis familiaris
gggacatagacaactgttcaggtac

SEQ ID NO: 149318 - DNA, 25 bp, Canis familiaris
gggacagcaacaacaggatgagaaa

SEQ ID NO: 149319 - DNA, 25 bp, Canis familiaris
gggacagtatgttcatgtgaggaag

SEQ ID NO: 149320 - DNA, 25 bp, Canis familiaris
gggacatctgaactcttgagccaag

SEQ ID NO: 149321 - DNA, 25 bp, Canis familiaris
gggaggcataatctgggccacagag

SEQ ID NO: 149322 - DNA, 25 bp, Canis familiaris
gggaggtcttttttgaccagagagg

SEQ ID NO: 149323 - DNA, 25 bp, Canis familiaris
gggagtttttgctaagattcaatga

SEQ ID NO: 149324 - DNA, 25 bp, Canis familiaris
gggagatggtcccaaagtgtcttga

SEQ ID NO: 149325 - DNA, 25 bp, Canis familiaris
gggatgtggctgggccagccagtct

SEQ ID NO: 149326 - DNA, 25 bp, Canis familiaris
gggagatggtttgcggtggcttcgc

SEQ ID NO: 149327 - DNA, 25 bp, Canis familiaris
gggactgtgtatgtcggggatgctc

SEQ ID NO: 149328 - DNA, 25 bp, Canis familiaris
gggagctttagcgtatgggtggcat

SEQ ID NO: 149329 - DNA, 25 bp, Canis familiaris
gggagtaatcaggtgtaggatggaa

SEQ ID NO: 149330 - DNA, 25 bp, Canis familiaris
gggatcagcaacgctatcacgagga

SEQ ID NO: 149331 - DNA, 25 bp, Canis familiaris
gggagatctagacctcaagcagagg

SEQ ID NO: 149332 - DNA, 25 bp, Canis familiaris
gggaaatgggtttagcagctgggcc

SEQ ID NO: 149333 - DNA, 25 bp, Canis familiaris
gggaaattccaccaagaggtagctc

SEQ ID NO: 149334 - DNA, 25 bp, Canis familiaris
gggaaatgctccgaaacacgtagtt

SEQ ID NO: 149335 - DNA, 25 bp, Canis familiaris
gggagaaatgccaaaacagtgaaat

SEQ ID NO: 149336 - DNA, 25 bp, Canis familiaris
gggaaatacacatcaaagtcacaat

SEQ ID NO: 149337 - DNA, 25 bp, Canis familiaris
gggaaatcaattaataagtgctctt

SEQ ID NO: 149338 - DNA, 25 bp, Canis familiaris
gggagcaatcaactaaaacctttat

SEQ ID NO: 149339 - DNA, 25 bp, Canis familiaris
gggagaaagtgttaccacacttatt

SEQ ID NO: 149340 - DNA, 25 bp, Canis familiaris
ggtaattagggatgtcagctttttt

SEQ ID NO: 149341 - DNA, 25 bp, Canis familiaris
ggtgaattaggctggttacatttac

SEQ ID NO: 149342 - DNA, 25 bp, Canis familiaris
gggataaacgttctataattctcac

SEQ ID NO: 149343 - DNA, 25 bp, Canis familiaris
gggattaaacttctacaatgtgcca

SEQ ID NO: 149344 - DNA, 25 bp, Canis familiaris
gggattaaagtcttctacctggctt

SEQ ID NO: 149345 - DNA, 25 bp, Canis familiaris
gggtttcaagttacaccctgagctc

SEQ ID NO: 149346 - DNA, 25 bp, Canis familiaris
gggagccataagaagtacccgatcc

SEQ ID NO: 149347 - DNA, 25 bp, Canis familiaris
gggagcacaatggaaatacacctga

SEQ ID NO: 149348 - DNA, 25 bp, Canis familiaris
gggaggaatgatgaaagccccaagc

SEQ ID NO: 149349 - DNA, 25 bp, Canis familiaris
gggagccttgagaaaggacccagag

SEQ ID NO: 149350 - DNA, 25 bp, Canis familiaris
ggtgaacttgggtgagactcgtgcg

SEQ ID NO: 149351 - DNA, 25 bp, Canis familiaris
gggacttttgagtgatgactctgtt

SEQ ID NO: 149352 - DNA, 25 bp, Canis familiaris
gggactctcttcataagcacttgtt

SEQ ID NO: 149353 - DNA, 25 bp, Canis familiaris
gggactctttgtcatgcaagttgat

SEQ ID NO: 149354 - DNA, 25 bp, Canis familiaris
gggagttgtttatgccatgatgttc

SEQ ID NO: 149355 - DNA, 25 bp, Canis familiaris
gggagttttgatttacattgttcga

SEQ ID NO: 149356 - DNA, 25 bp, Canis familiaris
gggatttttgtctccttgattaata

SEQ ID NO: 149357 - DNA, 25 bp, Canis familiaris
gggagttgaaccaggttgcttaatt

SEQ ID NO: 149358 - DNA, 25 bp, Canis familiaris
gggagttaatattctggtgtgccta

SEQ ID NO: 149359 - DNA, 25 bp, Canis familiaris
gggaaattaatgactgtgtgtgtgt

SEQ ID NO: 149360 - DNA, 25 bp, Canis familiaris
gggaaattaggatatgcgtgtattc

SEQ ID NO: 149361 - DNA, 25 bp, Canis familiaris
gggatgtaccaggacctgcgtgaat

SEQ ID NO: 149362 - DNA, 25 bp, Canis familiaris
gggacatatcaagaccggctagcaa

SEQ ID NO: 149363 - DNA, 25 bp, Canis familiaris
gggatcagagaagacatccgcaagg

SEQ ID NO: 149364 - DNA, 25 bp, Canis familiaris
gggacagcacaaggacaagccataa

SEQ ID NO: 149365 - DNA, 25 bp, Canis familiaris
gggacagctgcaagtgaagacacat

SEQ ID NO: 149366 - DNA, 25 bp, Canis familiaris
gggacagcccgaaaaccattgtttg

SEQ ID NO: 149367 - DNA, 25 bp, Canis familiaris
gggataccggttatgctttattctg

SEQ ID NO: 149368 - DNA, 25 bp, Canis familiaris
gggacccttttaattattgatctcg

SEQ ID NO: 149369 - DNA, 25 bp, Canis familiaris
gggaccctttgtaaaatgtcatatg

SEQ ID NO: 149370 - DNA, 25 bp, Canis familiaris
gggacccttgttcctaagagcaagt

SEQ ID NO: 149371 - DNA, 25 bp, Canis familiaris
gggaccactctttcgttgaaaggtg

SEQ ID NO: 149372 - DNA, 25 bp, Canis familiaris
gggaccactctttcgttgaaaggtg

SEQ ID NO: 149373 - DNA, 25 bp, Canis familiaris
gggacgcacttggacgatcagaaaa

SEQ ID NO: 149374 - DNA, 25 bp, Canis familiaris
gggaccctgctggaatgttaaagaa

SEQ ID NO: 149375 - DNA, 25 bp, Canis familiaris
gggatccggctgcacgttaaataag

SEQ ID NO: 149376 - DNA, 25 bp, Canis familiaris
gggtacggcaacacttcacaaagat

SEQ ID NO: 149377 - DNA, 25 bp, Canis familiaris
gggttcaagaccagttcatgcagta

SEQ ID NO: 149378 - DNA, 25 bp, Canis familiaris
gggacctggcccagttcatggtgca

SEQ ID NO: 149379 - DNA, 25 bp, Canis familiaris
gggacttttccaaatgtctgtgaca

SEQ ID NO: 149380 - DNA, 25 bp, Canis familiaris
gggttggtttcttatgatctgctga

SEQ ID NO: 149381 - DNA, 25 bp, Canis familiaris
gggatcgagtgttccagtatctctg

SEQ ID NO: 149382 - DNA, 25 bp, Canis familiaris
gggagcgagatatctaggtgtcatg

SEQ ID NO: 149383 - DNA, 25 bp, Canis familiaris
gggacggaagcaaaggatgacagac

SEQ ID NO: 149384 - DNA, 25 bp, Canis familiaris
gggacactggagaaggtgtgggaca

SEQ ID NO: 149385 - DNA, 25 bp, Canis familiaris
gggacacggatttcggtcgagcagc

SEQ ID NO: 149386 - DNA, 25 bp, Canis familiaris
gggagtcgtgtttcagttctggcac

SEQ ID NO: 149387 - DNA, 25 bp, Canis familiaris
gggagactgcgtagtaggtgggcac

SEQ ID NO: 149388 - DNA, 25 bp, Canis familiaris
gggacacataggaccagggtggacc

SEQ ID NO: 149389 - DNA, 25 bp, Canis familiaris
gggaccatagtgggagccttggacc

SEQ ID NO: 149390 - DNA, 25 bp, Canis familiaris
gggactcaaccaagtctcttgtccc

SEQ ID NO: 149391 - DNA, 25 bp, Canis familiaris
gggaccaaccactcattagatactg

SEQ ID NO: 149392 - DNA, 25 bp, Canis familiaris
gggacccaccaaatcaatagccaag

SEQ ID NO: 149393 - DNA, 25 bp, Canis familiaris
gggaccccagacagcatgaaggaag

SEQ ID NO: 149394 - DNA, 25 bp, Canis familiaris
tgggaccccggcagaaggaatattt

SEQ ID NO: 149395 - DNA, 25 bp, Canis familiaris
gggacttccgtgggacgtgatttgt

SEQ ID NO: 149396 - DNA, 25 bp, Canis familiaris
gggattttcctggaacgtgactgga

SEQ ID NO: 149397 - DNA, 25 bp, Canis familiaris
gggagtattactgaagctgtgatca

SEQ ID NO: 149398 - DNA, 25 bp, Canis familiaris
gggagttcatgagcataagccgcac

SEQ ID NO: 149399 - DNA, 25 bp, Canis familiaris
gggatcttgatattcagaaccccag

SEQ ID NO: 149400 - DNA, 25 bp, Canis familiaris
gggacttgtatgaatggccacacga

SEQ ID NO: 149401 - DNA, 25 bp, Canis familiaris
gggacacttatcaaggactagctca

SEQ ID NO: 149402 - DNA, 25 bp, Canis familiaris
gggacacctagccaagatctatgcc

SEQ ID NO: 149403 - DNA, 25 bp, Canis familiaris
ggtacacgtcatgaatgcacatcag

SEQ ID NO: 149404 - DNA, 25 bp, Canis familiaris
gggatccgctgagaatccacgaacg

SEQ ID NO: 149405 - DNA, 25 bp, Canis familiaris
gggactctgtgataactacaatagc

SEQ ID NO: 149406 - DNA, 25 bp, Canis familiaris
gggagctctgtagatactggctacc

SEQ ID NO: 149407 - DNA, 25 bp, Canis familiaris
gggatgtctcaacatattcctaccg

SEQ ID NO: 149408 - DNA, 25 bp, Canis familiaris
gggagagcaagaccacttctccatc

SEQ ID NO: 149409 - DNA, 25 bp, Canis familiaris
gggaggcaagatgactctggccgcc

SEQ ID NO: 149410 - DNA, 25 bp, Canis familiaris
gggagacagtagcacttgagcaggc

SEQ ID NO: 149411 - DNA, 25 bp, Canis familiaris
gggacagatctactacctgaagaga

SEQ ID NO: 149412 - DNA, 25 bp, Canis familiaris
gggacagtgatacaccgaggaggct

SEQ ID NO: 149413 - DNA, 25 bp, Canis familiaris
gggacagtgtttggcacatagtagg

SEQ ID NO: 149414 - DNA, 25 bp, Canis familiaris
gggacccttgatgcactgatgaagt

SEQ ID NO: 149415 - DNA, 25 bp, Canis familiaris
gggacgcctctgagacgagaacttg

SEQ ID NO: 149416 - DNA, 25 bp, Canis familiaris
gggacggccatcagcaagaagtttg

SEQ ID NO: 149417 - DNA, 25 bp, Canis familiaris
gggagggccaagtcagcagtagtct

SEQ ID NO: 149418 - DNA, 25 bp, Canis familiaris
gggagatgcccaagaaaaggtcagt

SEQ ID NO: 149419 - DNA, 25 bp, Canis familiaris
gggagcagcccaggaaacctgctag

SEQ ID NO: 149420 - DNA, 25 bp, Canis familiaris
gggagaacagcatgaattccgtaag

SEQ ID NO: 149421 - DNA, 25 bp, Canis familiaris
ggagaggaagtcccattccgtaatg

SEQ ID NO: 149422 - DNA, 25 bp, Canis familiaris
gggagggatgtctagcatgtccagt

SEQ ID NO: 149423 - DNA, 25 bp, Canis familiaris
gggagatgagtgcctagcccaaacc

SEQ ID NO: 149424 - DNA, 25 bp, Canis familiaris
gggagcatggtcacagcgaaagcac

SEQ ID NO: 149425 - DNA, 25 bp, Canis familiaris
gggagccaatcaatccgacagacac

SEQ ID NO: 149426 - DNA, 25 bp, Canis familiaris
gggagctcaatcaatgggtctgaag

SEQ ID NO: 149427 - DNA, 25 bp, Canis familiaris
gggagccagagataagtcagaaggt

SEQ ID NO: 149428 - DNA, 25 bp, Canis familiaris
gggagcaagagataagtcaagaagg

SEQ ID NO: 149429 - DNA, 25 bp, Canis familiaris
gggactatgccaccaagacaagagt

SEQ ID NO: 149430 - DNA, 25 bp, Canis familiaris
gggacatgctgctggccaataaggt

SEQ ID NO: 149431 - DNA, 25 bp, Canis familiaris
gggacaggccgtccaagatgcacag

SEQ ID NO: 149432 - DNA, 25 bp, Canis familiaris
gggacagccctgttaatggcgcatg

SEQ ID NO: 149433 - DNA, 25 bp, Canis familiaris
gggactgcagcgaaatgacattggg

SEQ ID NO: 149434 - DNA, 25 bp, Canis familiaris
gggactgcacgccaagacgtgtatg

SEQ ID NO: 149435 - DNA, 25 bp, Canis familiaris
gggagtgctctccataagctgatta

SEQ ID NO: 149436 - DNA, 25 bp, Canis familiaris
gggaggatctgcctcagatctgccc

SEQ ID NO: 149437 - DNA, 25 bp, Canis familiaris
gggatggagcctccatcaggctccc

SEQ ID NO: 149438 - DNA, 25 bp, Canis familiaris
gggaggcacattccaagggcatcat

SEQ ID NO: 149439 - DNA, 25 bp, Canis familiaris
gggagagatcattgcccagctgttc

SEQ ID NO: 149440 - DNA, 25 bp, Canis familiaris
gggatgactcaagccaagttgcatt

SEQ ID NO: 149441 - DNA, 25 bp, Canis familiaris
gggaccagaaatccatatttattgg

SEQ ID NO: 149442 - DNA, 25 bp, Canis familiaris
gggagcatcagaaataccgattatt

SEQ ID NO: 149443 - DNA, 25 bp, Canis familiaris
gggagcaggggaaccagagtcataa

SEQ ID NO: 149444 - DNA, 25 bp, Canis familiaris
gggacggtggaactctgactcacca

SEQ ID NO: 149445 - DNA, 25 bp, Canis familiaris
gggacagggtagatcgccattcaca

SEQ ID NO: 149446 - DNA, 25 bp, Canis familiaris
gggacagggtagatgccattccagg

SEQ ID NO: 149447 - DNA, 25 bp, Canis familiaris
ggggaatggtcagaccttgagcagg

SEQ ID NO: 149448 - DNA, 25 bp, Canis familiaris
gggagacggtattccctggagcaga

SEQ ID NO: 149449 - DNA, 25 bp, Canis familiaris
tgaggaacaggtatcgtcgtccgtc

SEQ ID NO: 149450 - DNA, 25 bp, Canis familiaris
ggtacaaggtgagaaggtccgtgcc

SEQ ID NO: 149451 - DNA, 25 bp, Canis familiaris
ggttccggtggacaatttcgtcttg

SEQ ID NO: 149452 - DNA, 25 bp, Canis familiaris
gggtttggatttcaatttgcctttg

SEQ ID NO: 149453 - DNA, 25 bp, Canis familiaris
gggattctggggtaggagttgcctt

SEQ ID NO: 149454 - DNA, 25 bp, Canis familiaris
gggaggccaaggtggagttccctgg

SEQ ID NO: 149455 - DNA, 25 bp, Canis familiaris
gggaggtccacgtgtgagtctccca

SEQ ID NO: 149456 - DNA, 25 bp, Canis familiaris
gggacttccacgtggatgagcaccc

SEQ ID NO: 149457 - DNA, 25 bp, Canis familiaris
gggacgtggcctgggtgagaagccc

SEQ ID NO: 149458 - DNA, 25 bp, Canis familiaris
gggaccagggcctggagaagccgcg

SEQ ID NO: 149459 - DNA, 25 bp, Canis familiaris
gggactaagacccaggagaccttgc

SEQ ID NO: 149460 - DNA, 25 bp, Canis familiaris
gggacatggggggaggagggcattg

SEQ ID NO: 149461 - DNA, 25 bp, Canis familiaris
gggacagggctggacagcggaggcc

SEQ ID NO: 149462 - DNA, 25 bp, Canis familiaris
gggacatgaggcagagcggttgctg

SEQ ID NO: 149463 - DNA, 25 bp, Canis familiaris
gggatcttgagaggtcggttgtggt

SEQ ID NO: 149464 - DNA, 25 bp, Canis familiaris
gggtatctgaggcttgagtcttggg

SEQ ID NO: 149465 - DNA, 25 bp, Canis familiaris
ggttccttctggaggctctaaggga

SEQ ID NO: 149466 - DNA, 25 bp, Canis familiaris
gggaccttctggatgacctgaaatc

SEQ ID NO: 149467 - DNA, 25 bp, Canis familiaris
gggacctgacggactacctcatgaa

SEQ ID NO: 149468 - DNA, 25 bp, Canis familiaris
gggacctcatcaaggtgacaccatc

SEQ ID NO: 149469 - DNA, 25 bp, Canis familiaris
gggagcttcacttgggacacaaccc

SEQ ID NO: 149470 - DNA, 25 bp, Canis familiaris
gggagaataccgggaatctgaccca

SEQ ID NO: 149471 - DNA, 25 bp, Canis familiaris
gggagaatacacgctggtggtccaa

SEQ ID NO: 149472 - DNA, 25 bp, Canis familiaris
gggataaaaacctttcagtccagca

SEQ ID NO: 149473 - DNA, 25 bp, Canis familiaris
gggagtatattctctttaactcagc

SEQ ID NO: 149474 - DNA, 25 bp, Canis familiaris
gggggcagttggccttagaacctgc

SEQ ID NO: 149475 - DNA, 25 bp, Canis familiaris
ggtggctggttcccattaacaaggc

SEQ ID NO: 149476 - DNA, 25 bp, Canis familiaris
gggactgagccatccattaaggagg

SEQ ID NO: 149477 - DNA, 25 bp, Canis familiaris
gggactagcgtattcttagcaggag

SEQ ID NO: 149478 - DNA, 25 bp, Canis familiaris
gggactagcatgcactgcttgtgga

SEQ ID NO: 149479 - DNA, 25 bp, Canis familiaris
gggacttgttggcattgggacgcaa

SEQ ID NO: 149480 - DNA, 25 bp, Canis familiaris
gggacttgtggctcattgggagggg

SEQ ID NO: 149481 - DNA, 25 bp, Canis familiaris
gggagtcttatgtgcattgctgtga

SEQ ID NO: 149482 - DNA, 25 bp, Canis familiaris
gggagcatcttatgagtatcgtaga

SEQ ID NO: 149483 - DNA, 25 bp, Canis familiaris
gggagttgtcaaggctgaaaagagc

SEQ ID NO: 149484 - DNA, 25 bp, Canis familiaris
gggactgcttaaggcgacagcagat

SEQ ID NO: 149485 - DNA, 25 bp, Canis familiaris
gggagatgcttagctgctgagccac

SEQ ID NO: 149486 - DNA, 25 bp, Canis familiaris
gggagagcatctactgggagcccac

SEQ ID NO: 149487 - DNA, 25 bp, Canis familiaris
gggagcctgttgcagggctccatcc

SEQ ID NO: 149488 - DNA, 25 bp, Canis familiaris
gggatgcctgtagtacggctaccac

SEQ ID NO: 149489 - DNA, 25 bp, Canis familiaris
gggagccactgagtggccgaacccc

SEQ ID NO: 149490 - DNA, 25 bp, Canis familiaris
gggagccattggggtctgagatact

SEQ ID NO: 149491 - DNA, 25 bp, Canis familiaris
gggaggcgtgggctaagatcatgta

SEQ ID NO: 149492 - DNA, 25 bp, Canis familiaris
gggtggactgttctaaatagttaat

SEQ ID NO: 149493 - DNA, 25 bp, Canis familiaris
gggaggtagttgactgaaaattaca

SEQ ID NO: 149494 - DNA, 25 bp, Canis familiaris
gggaggtattttagtgttttgagca

SEQ ID NO: 149495 - DNA, 25 bp, Canis familiaris
gggagactactttgctgaggtcttg

SEQ ID NO: 149496 - DNA, 25 bp, Canis familiaris
gggactctatctttttgagcctggc

SEQ ID NO: 149497 - DNA, 25 bp, Canis familiaris
gggactatcacctggtgagttgagc

SEQ ID NO: 149498 - DNA, 25 bp, Canis familiaris
gggacgctcacccggtgagtgggat

SEQ ID NO: 149499 - DNA, 25 bp, Canis familiaris
gggatcgctgaccgcatgtcagaag

SEQ ID NO: 149500 - DNA, 25 bp, Canis familiaris
gggatcattggcagcttcatgctca

SEQ ID NO: 149501 - DNA, 25 bp, Canis familiaris
gggactgatgtcatcttgagctctt

SEQ ID NO: 149502 - DNA, 25 bp, Canis familiaris
gggactgtgcattttcaggcttgtg

SEQ ID NO: 149503 - DNA, 25 bp, Canis familiaris
gggactgtgagtttgcatctctgga

SEQ ID NO: 149504 - DNA, 25 bp, Canis familiaris
gggactgtggagtttgctcactgtt

SEQ ID NO: 149505 - DNA, 25 bp, Canis familiaris
gggacttgagattttgcatacatgg

SEQ ID NO: 149506 - DNA, 25 bp, Canis familiaris
gggagctggaatatgtgctgacaca

SEQ ID NO: 149507 - DNA, 25 bp, Canis familiaris
gggactggactgtctttctatcata

SEQ ID NO: 149508 - DNA, 25 bp, Canis familiaris
gggacttatatgtttatgcatcaaa

SEQ ID NO: 149509 - DNA, 25 bp, Canis familiaris
gggacttttgtgctgtctacaacac

SEQ ID NO: 149510 - DNA, 25 bp, Canis familiaris
gggatcaacttcatggtctaccaac

SEQ ID NO: 149511 - DNA, 25 bp, Canis familiaris
gggataaaccttcgatccagggatc

SEQ ID NO: 149512 - DNA, 25 bp, Canis familiaris
gggaccacaccatgacacaaaggag

SEQ ID NO: 149513 - DNA, 25 bp, Canis familiaris
gggacccagtcacggagacaaggag

SEQ ID NO: 149514 - DNA, 25 bp, Canis familiaris
gggacctgtctcactggacaaggag

SEQ ID NO: 149515 - DNA, 25 bp, Canis familiaris
gggatcggttccagggcaagagcac

SEQ ID NO: 149516 - DNA, 25 bp, Canis familiaris
gggaccctggctcagacaaggagac

SEQ ID NO: 149517 - DNA, 25 bp, Canis familiaris
gggtcctctgggaagaaccaatgga

SEQ ID NO: 149518 - DNA, 25 bp, Canis familiaris
gggtacacgggagctgccgaaggaa

SEQ ID NO: 149519 - DNA, 25 bp, Canis familiaris
ggacataacgggcacctttggggat

SEQ ID NO: 149520 - DNA, 25 bp, Canis familiaris
ggtcagaaacgtcacctgttggtgc

SEQ ID NO: 149521 - DNA, 25 bp, Canis familiaris
ggtgaaggacttcaacctgttgcgc

SEQ ID NO: 149522 - DNA, 25 bp, Canis familiaris
gggacggactcgtagacttgtacac

SEQ ID NO: 149523 - DNA, 25 bp, Canis familiaris
gggagtggaccattaacttgtgaca

SEQ ID NO: 149524 - DNA, 25 bp, Canis familiaris
gggagtgttgccttacacttgggaa

SEQ ID NO: 149525 - DNA, 25 bp, Canis familiaris
gggagtcctgactcagacttgcagg

SEQ ID NO: 149526 - DNA, 25 bp, Canis familiaris
gggactcggagatcgagctggtgtc

SEQ ID NO: 149527 - DNA, 25 bp, Canis familiaris
gggaggcagtagtcccagtgttgtc

SEQ ID NO: 149528 - DNA, 25 bp, Canis familiaris
gggagacagggatgccatttatgtg

SEQ ID NO: 149529 - DNA, 25 bp, Canis familiaris
gggatggggagaagccctgctaggt

SEQ ID NO: 149530 - DNA, 25 bp, Canis familiaris
gggagtcgcaaatgccctctctggt

SEQ ID NO: 149531 - DNA, 25 bp, Canis familiaris
gggagtcgcaaatgccctctctggt

SEQ ID NO: 149532 - DNA, 25 bp, Canis familiaris
gggagacagcaggaagggccttagg

SEQ ID NO: 149533 - DNA, 25 bp, Canis familiaris
gggagggcaggaggtgagcttggag

SEQ ID NO: 149534 - DNA, 25 bp, Canis familiaris
gggagagtgatgaggtggtgcggag

SEQ ID NO: 149535 - DNA, 25 bp, Canis familiaris
gggatgatgtggagaagcccggccg

SEQ ID NO: 149536 - DNA, 25 bp, Canis familiaris
ggggtgttggaggacccaagtcttg

SEQ ID NO: 149537 - DNA, 25 bp, Canis familiaris
ggggcttttgaggatctccaaacca

SEQ ID NO: 149538 - DNA, 25 bp, Canis familiaris
gggtggtcactaggatctctaaacc

SEQ ID NO: 149539 - DNA, 25 bp, Canis familiaris
gggttgtacaatgctgcccaagaac

SEQ ID NO: 149540 - DNA, 25 bp, Canis familiaris
ggtggtgtacctgcacaccaacaac

SEQ ID NO: 149541 - DNA, 25 bp, Canis familiaris
ggtgaagtacacaccatgcctacca

SEQ ID NO: 149542 - DNA, 25 bp, Canis familiaris
gggagattagacagcagcagccccg

SEQ ID NO: 149543 - DNA, 25 bp, Canis familiaris
gggaggatcagggctgcacctcccg

SEQ ID NO: 149544 - DNA, 25 bp, Canis familiaris
gggaggtcagtggtatgcatctctc

SEQ ID NO: 149545 - DNA, 25 bp, Canis familiaris
gggatgtggcagagcttgtcatccg

SEQ ID NO: 149546 - DNA, 25 bp, Canis familiaris
gggatcgggtggatgtcatgcagca

SEQ ID NO: 149547 - DNA, 25 bp, Canis familiaris
gggactggcggagagtctgcagcca

SEQ ID NO: 149548 - DNA, 25 bp, Canis familiaris
gggacgggcagagagatggatccaa

SEQ ID NO: 149549 - DNA, 25 bp, Canis familiaris
gggacggataaccaatttcacacag

SEQ ID NO: 149550 - DNA, 25 bp, Canis familiaris
gggacggataacaatttcacacagg

SEQ ID NO: 149551 - DNA, 25 bp, Canis familiaris
gggacggataacaatttcacacagg

SEQ ID NO: 149552 - DNA, 25 bp, Canis familiaris
gggacggataacaatttcacacagg

SEQ ID NO: 149553 - DNA, 25 bp, Canis familiaris
gggacggataacaatttcacacagg

SEQ ID NO: 149554 - DNA, 25 bp, Canis familiaris
gggacggataacaatttcacacagg

SEQ ID NO: 149555 - DNA, 25 bp, Canis familiaris
gggacggataaccatttcacacagg

SEQ ID NO: 149556 - DNA, 25 bp, Canis familiaris
gggacggataaccatttcacacagg

SEQ ID NO: 149557 - DNA, 25 bp, Canis familiaris
gggttggtgacccagttacacagga

SEQ ID NO: 149558 - DNA, 25 bp, Canis familiaris
ggggtggtacatcagttctctggaa

SEQ ID NO: 149559 - DNA, 25 bp, Canis familiaris
gggagaggtggcataaccacttgaa

SEQ ID NO: 149560 - DNA, 25 bp, Canis familiaris
gggtagttgacttaattcatttgca

SEQ ID NO: 149561 - DNA, 25 bp, Canis familiaris
gggacctacacttaatctatatgct

SEQ ID NO: 149562 - DNA, 25 bp, Canis familiaris
gggaccttactgtagagttctgtac

SEQ ID NO: 149563 - DNA, 25 bp, Canis familiaris
gggacctctatcgaaaatgtctaaa

SEQ ID NO: 149564 - DNA, 25 bp, Canis familiaris
gggagccctggcagagaattctata

SEQ ID NO: 149565 - DNA, 25 bp, Canis familiaris
gggatccctcaaaggaatctcttac

SEQ ID NO: 149566 - DNA, 25 bp, Canis familiaris
ggtgttgtctgctgaatggacttta

SEQ ID NO: 149567 - DNA, 25 bp, Canis familiaris
gggtttcgccgaatggcgaattttg

SEQ ID NO: 149568 - DNA, 25 bp, Canis familiaris
gggttacacctaatggccaactgta

SEQ ID NO: 149569 - DNA, 25 bp, Canis familiaris
gggttggccaatatggtgggttcaa

SEQ ID NO: 149570 - DNA, 25 bp, Canis familiaris
gggtcatggccattgggcctggtga

SEQ ID NO: 149571 - DNA, 25 bp, Canis familiaris
gggagcatgactttggccctttata

SEQ ID NO: 149572 - DNA, 25 bp, Canis familiaris
gggagattcaatgggccttttcgaa

SEQ ID NO: 149573 - DNA, 25 bp, Canis familiaris
gggagatcttttgcctatttcagag

SEQ ID NO: 149574 - DNA, 25 bp, Canis familiaris
gggagatatgttgacttttcatcag

SEQ ID NO: 149575 - DNA, 25 bp, Canis familiaris
gggaggtgtgtaacttcctgaatga

SEQ ID NO: 149576 - DNA, 25 bp, Canis familiaris
gggagtggcccaatcttttagatga

SEQ ID NO: 149577 - DNA, 25 bp, Canis familiaris
gggagatgtgtggaatgtttgtagg

SEQ ID NO: 149578 - DNA, 25 bp, Canis familiaris
gggagtgtcatgtagatttctttgg

SEQ ID NO: 149579 - DNA, 25 bp, Canis familiaris
gggactgtatcattcatctctttgt

SEQ ID NO: 149580 - DNA, 25 bp, Canis familiaris
gggagcaggacactgatcttctcct

SEQ ID NO: 149581 - DNA, 25 bp, Canis familiaris
gggagaggaacaatttctactatac

SEQ ID NO: 149582 - DNA, 25 bp, Canis familiaris
gggagaggaattatctctgcccgca

SEQ ID NO: 149583 - DNA, 25 bp, Canis familiaris
gggagcacaacaagtttccccagca

SEQ ID NO: 149584 - DNA, 25 bp, Canis familiaris
gggatccagaaacatgtcgaccaca

SEQ ID NO: 149585 - DNA, 25 bp, Canis familiaris
gggaccttgaggaatgtctgaccaa

SEQ ID NO: 149586 - DNA, 25 bp, Canis familiaris
gggatcccgaggggctgcgaataaa

SEQ ID NO: 149587 - DNA, 25 bp, Canis familiaris
gggacccagacttgagctgaaccaa

SEQ ID NO: 149588 - DNA, 25 bp, Canis familiaris
gggatggacctttcactaaccagat

SEQ ID NO: 149589 - DNA, 25 bp, Canis familiaris
gggatgggcctttcttgaatggcct

SEQ ID NO: 149590 - DNA, 25 bp, Canis familiaris
gggttagcacgatatctgatttgtt

SEQ ID NO: 149591 - DNA, 25 bp, Canis familiaris
gggtgtcaactgaacctttgttttg

SEQ ID NO: 149592 - DNA, 25 bp, Canis familiaris
ggagacccctgaactcattgagttg

SEQ ID NO: 149593 - DNA, 25 bp, Canis familiaris
gggagactcccattctacagagatt

SEQ ID NO: 149594 - DNA, 25 bp, Canis familiaris
gggatatgtctggattctacagtga

SEQ ID NO: 149595 - DNA, 25 bp, Canis familiaris
gggtatgaaccattctaagttttga

SEQ ID NO: 149596 - DNA, 25 bp, Canis familiaris
gggttgaacatcctgccatattatt

SEQ ID NO: 149597 - DNA, 25 bp, Canis familiaris
gggataagaatactggcctgaatgt

SEQ ID NO: 149598 - DNA, 25 bp, Canis familiaris
gggatgagggatggtgcgttcactt

SEQ ID NO: 149599 - DNA, 25 bp, Canis familiaris
gggagagtgaattaggcttagttgg

SEQ ID NO: 149600 - DNA, 25 bp, Canis familiaris
gggagggataggatgtgtagttgta

SEQ ID NO: 149601 - DNA, 25 bp, Canis familiaris
gggagggtatgttctatttgttgct

SEQ ID NO: 149602 - DNA, 25 bp, Canis familiaris
gggagggtggcatctatgtcatttc

SEQ ID NO: 149603 - DNA, 25 bp, Canis familiaris
gggaggttggagttggtcttatatc

SEQ ID NO: 149604 - DNA, 25 bp, Canis familiaris
ggggccttagagctggttttagcag

SEQ ID NO: 149605 - DNA, 25 bp, Canis familiaris
gggacgctaaagatgttcattatac

SEQ ID NO: 149606 - DNA, 25 bp, Canis familiaris
gggaccatacctctgtgaaattaca

SEQ ID NO: 149607 - DNA, 25 bp, Canis familiaris
gggatcacttctgccaataaactac

SEQ ID NO: 149608 - DNA, 25 bp, Canis familiaris
gggatagtatgagccaataataaaa

SEQ ID NO: 149609 - DNA, 25 bp, Canis familiaris
gggagctttgatgtgcaatattaga

SEQ ID NO: 149610 - DNA, 25 bp, Canis familiaris
gggattcctgtgaacactttagagt

SEQ ID NO: 149611 - DNA, 25 bp, Canis familiaris
ggtgttcacttggaggctttcagtt

SEQ ID NO: 149612 - DNA, 25 bp, Canis familiaris
gggattccattcttttttatgcttg

SEQ ID NO: 149613 - DNA, 25 bp, Canis familiaris
gggatgtttgtcttttctgagccct

SEQ ID NO: 149614 - DNA, 25 bp, Canis familiaris
ggtccttttcctgtctgaatcagaa

SEQ ID NO: 149615 - DNA, 25 bp, Canis familiaris
ggcctttgttccctttggacataat

SEQ ID NO: 149616 - DNA, 25 bp, Canis familiaris
gggtgtctgttcctttttgacaagg

SEQ ID NO: 149617 - DNA, 25 bp, Canis familiaris
gggtttctcgtcattttgaaatctg

SEQ ID NO: 149618 - DNA, 25 bp, Canis familiaris
gggatatattctgcgtttggtactg

SEQ ID NO: 149619 - DNA, 25 bp, Canis familiaris
ggtgttttcgcagcattcaggagtt

SEQ ID NO: 149620 - DNA, 25 bp, Canis familiaris
gggttcgatcccaagtgaggttgtc

SEQ ID NO: 149621 - DNA, 25 bp, Canis familiaris
gggattagatcttttcatgagggtg

SEQ ID NO: 149622 - DNA, 25 bp, Canis familiaris
gggacggtgtctcctcagaggagtc

SEQ ID NO: 149623 - DNA, 25 bp, Canis familiaris
gggacgggatcagtgacgatgtgga

SEQ ID NO: 149624 - DNA, 25 bp, Canis familiaris
gggagtggagtgacgacgagatgga

SEQ ID NO: 149625 - DNA, 25 bp, Canis familiaris
gggagctggctgtgcagagaggagg

SEQ ID NO: 149626 - DNA, 25 bp, Canis familiaris
gggagctgccgaaggaagacagagc

SEQ ID NO: 149627 - DNA, 25 bp, Canis familiaris
gggaggtgatatggagaatgaaggc

SEQ ID NO: 149628 - DNA, 25 bp, Canis familiaris
gggaggtgacaccaagctgattgtt

SEQ ID NO: 149629 - DNA, 25 bp, Canis familiaris
gggagtgatgagatgccacaattgt

SEQ ID NO: 149630 - DNA, 25 bp, Canis familiaris
gggatgcttggaatgaatagaattt

SEQ ID NO: 149631 - DNA, 25 bp, Canis familiaris
gggagctatgaactactgatgattt

SEQ ID NO: 149632 - DNA, 25 bp, Canis familiaris
gggagttatgtgtgctagatttttt

SEQ ID NO: 149633 - DNA, 25 bp, Canis familiaris
gggatttagtcattgggattttata

SEQ ID NO: 149634 - DNA, 25 bp, Canis familiaris
gggatcgaaacttgggttctgtctc

SEQ ID NO: 149635 - DNA, 25 bp, Canis familiaris
gggacgaagacacagctggtggttc

SEQ ID NO: 149636 - DNA, 25 bp, Canis familiaris
gggaggaagaccggatgtgttgtat

SEQ ID NO: 149637 - DNA, 25 bp, Canis familiaris
gggaggaggcagaaggagctgtttt

SEQ ID NO: 149638 - DNA, 25 bp, Canis familiaris
gggagctcaggacctgggtgtttgt

SEQ ID NO: 149639 - DNA, 25 bp, Canis familiaris
gggtatctggatcaggggtagtttc

SEQ ID NO: 149640 - DNA, 25 bp, Canis familiaris
gggttcaaatcccagctaaagcctt

SEQ ID NO: 149641 - DNA, 25 bp, Canis familiaris
gggttcaaattccaggaccttctct

SEQ ID NO: 149642 - DNA, 25 bp, Canis familiaris
gggttcctatgtgcaagccctatgt

SEQ ID NO: 149643 - DNA, 25 bp, Canis familiaris
gggtctcagtattaaaccatttgaa

SEQ ID NO: 149644 - DNA, 25 bp, Canis familiaris
gggaccgaatgaagaccaagaataa

SEQ ID NO: 149645 - DNA, 25 bp, Canis familiaris
gggagccaacgaggaccaggagatg

SEQ ID NO: 149646 - DNA, 25 bp, Canis familiaris
gggagccaacaagtgaggaggcgcc

SEQ ID NO: 149647 - DNA, 25 bp, Canis familiaris
gggagcgtgaaaggaggaggcccgg

SEQ ID NO: 149648 - DNA, 25 bp, Canis familiaris
ggtggacaaaagcggctggaccggt

SEQ ID NO: 149649 - DNA, 25 bp, Canis familiaris
ggttaagccaagaggggatgcccag

SEQ ID NO: 149650 - DNA, 25 bp, Canis familiaris
gggatgggggcaagggggatacctg

SEQ ID NO: 149651 - DNA, 25 bp, Canis familiaris
gggagacggggggttggatagcatc

SEQ ID NO: 149652 - DNA, 25 bp, Canis familiaris
gggatccagggctgcattcggaaat

SEQ ID NO: 149653 - DNA, 25 bp, Canis familiaris
gggatccaggaggtgaaccaggagc

SEQ ID NO: 149654 - DNA, 25 bp, Canis familiaris
gggacctgcaggtgaacaaggaccc

SEQ ID NO: 149655 - DNA, 25 bp, Canis familiaris
gggaccccagcagaaaagcatacaa

SEQ ID NO: 149656 - DNA, 25 bp, Canis familiaris
gggagctcccgagaagcacaattca

SEQ ID NO: 149657 - DNA, 25 bp, Canis familiaris
gggacccaggaacacataatctcaa

SEQ ID NO: 149658 - DNA, 25 bp, Canis familiaris
gggaccctggaattatctcatacac

SEQ ID NO: 149659 - DNA, 25 bp, Canis familiaris
gggacccttgaagatcagatcatca

SEQ ID NO: 149660 - DNA, 25 bp, Canis familiaris
gggaggtctatataagcagagctcg

SEQ ID NO: 149661 - DNA, 25 bp, Canis familiaris
gggagttttaccaagaactgctgat

SEQ ID NO: 149662 - DNA, 25 bp, Canis familiaris
gggagtcttctagtgaaacagtgga

SEQ ID NO: 149663 - DNA, 25 bp, Canis familiaris
gggggcttcatgagaagagtcggtc

SEQ ID NO: 149664 - DNA, 25 bp, Canis familiaris
gggggttcattcaaagcagtcggac

SEQ ID NO: 149665 - DNA, 25 bp, Canis familiaris
gggtagttgaagcaggcatcctgga

SEQ ID NO: 149666 - DNA, 25 bp, Canis familiaris
gggtactgaaagccagaatctgtgg

SEQ ID NO: 149667 - DNA, 25 bp, Canis familiaris
gggtaccaaactaaatcggcttgca

SEQ ID NO: 149668 - DNA, 25 bp, Canis familiaris
gggtacccatttgtaggagctctat

SEQ ID NO: 149669 - DNA, 25 bp, Canis familiaris
gggtagctttttgggggagatctat

SEQ ID NO: 149670 - DNA, 25 bp, Canis familiaris
gggtcatgttttcatggccgtgtct

SEQ ID NO: 149671 - DNA, 25 bp, Canis familiaris
gggaggagtgttcatgtgcctgttt

SEQ ID NO: 149672 - DNA, 25 bp, Canis familiaris
gggaggttttcatgatttgctttac

SEQ ID NO: 149673 - DNA, 25 bp, Canis familiaris
gggagtgttcttgagactgtgttct

SEQ ID NO: 149674 - DNA, 25 bp, Canis familiaris
gggaggatactgtacaacgagttgt

SEQ ID NO: 149675 - DNA, 25 bp, Canis familiaris
gggagagacctcacgacggatatag

SEQ ID NO: 149676 - DNA, 25 bp, Canis familiaris
gggagagcacctgtagaaaggattg

SEQ ID NO: 149677 - DNA, 25 bp, Canis familiaris
gggagagcctctgaatatagagggg

SEQ ID NO: 149678 - DNA, 25 bp, Canis familiaris
gggagaggctttgttcagggcagaa

SEQ ID NO: 149679 - DNA, 25 bp, Canis familiaris
gggagaatttgtgtccatgggcatt

SEQ ID NO: 149680 - DNA, 25 bp, Canis familiaris
gggagagttctgtgatcccgacatc

SEQ ID NO: 149681 - DNA, 25 bp, Canis familiaris
ggggggtctgcaggtcaggagaatc

SEQ ID NO: 149682 - DNA, 25 bp, Canis familiaris
gggagggttcaaggagccaggtcta

SEQ ID NO: 149683 - DNA, 25 bp, Canis familiaris
gggttgccttccggagaaggtcagg

SEQ ID NO: 149684 - DNA, 25 bp, Canis familiaris
gggttcgattccggatgtagggagc

SEQ ID NO: 149685 - DNA, 25 bp, Canis familiaris
ggtgtttatttcagctcatacgggc

SEQ ID NO: 149686 - DNA, 25 bp, Canis familiaris
gggttgcatgttagaatctcccggg

SEQ ID NO: 149687 - DNA, 25 bp, Canis familiaris
gggttgcatgtgggtacgttggaag

SEQ ID NO: 149688 - DNA, 25 bp, Canis familiaris
gggattgcattggaccatcagctct

SEQ ID NO: 149689 - DNA, 25 bp, Canis familiaris
gggataacatgttcacaactctaaa

SEQ ID NO: 149690 - DNA, 25 bp, Canis familiaris
gggtatacagtaaatgcttctaaaa

SEQ ID NO: 149691 - DNA, 25 bp, Canis familiaris
gggttgactgtcctgggcttaaaat

SEQ ID NO: 149692 - DNA, 25 bp, Canis familiaris
ggggaagtgtcctggctttaatcaa

SEQ ID NO: 149693 - DNA, 25 bp, Canis familiaris
gggtaatggtccttgggtacctgcg

SEQ ID NO: 149694 - DNA, 25 bp, Canis familiaris
gggatacaaccgtcgtggtcagccc

SEQ ID NO: 149695 - DNA, 25 bp, Canis familiaris
gggagagattcccttgggtcgatcc

SEQ ID NO: 149696 - DNA, 25 bp, Canis familiaris
gggagagggccccatgtgagttacc

SEQ ID NO: 149697 - DNA, 25 bp, Canis familiaris
gggaggggcgactaggagacgctac

SEQ ID NO: 149698 - DNA, 25 bp, Canis familiaris
gggagacagggaagggagacgcaag

SEQ ID NO: 149699 - DNA, 25 bp, Canis familiaris
gggagccaggtgatggtgaggccag

SEQ ID NO: 149700 - DNA, 25 bp, Canis familiaris
gggaggggggggaaatgcatgcagg

SEQ ID NO: 149701 - DNA, 25 bp, Canis familiaris
gggggatgggggtgaatgggtgatg

SEQ ID NO: 149702 - DNA, 25 bp, Canis familiaris
gggttatcggctctggagggggatg

SEQ ID NO: 149703 - DNA, 25 bp, Canis familiaris
gggtcttccaggtggaggagtggtt

SEQ ID NO: 149704 - DNA, 25 bp, Canis familiaris
gggttactcaggttccatggttgtt

SEQ ID NO: 149705 - DNA, 25 bp, Canis familiaris
gggattcccaaaacgtggttgatgt

SEQ ID NO: 149706 - DNA, 25 bp, Canis familiaris
gggtctgcgacctaacgggataata

SEQ ID NO: 149707 - DNA, 25 bp, Canis familiaris
gggattgcagtcctatcagggagaa

SEQ ID NO: 149708 - DNA, 25 bp, Canis familiaris
gggagtgacatcttatagttctgtc

SEQ ID NO: 149709 - DNA, 25 bp, Canis familiaris
gggagtgagtcttctctgtttgtca

SEQ ID NO: 149710 - DNA, 25 bp, Canis familiaris
gggagtgagtagactctttaggcca

SEQ ID NO: 149711 - DNA, 25 bp, Canis familiaris
gggatgggaggttttgtagtgacac

SEQ ID NO: 149712 - DNA, 25 bp, Canis familiaris
gggagtgggcgtatatgtagtaggg

SEQ ID NO: 149713 - DNA, 25 bp, Canis familiaris
gggagtggggaggattgtggggagg

SEQ ID NO: 149714 - DNA, 25 bp, Canis familiaris
gggagggaggaggaatgcctcggtc

SEQ ID NO: 149715 - DNA, 25 bp, Canis familiaris
gggagctgcagacagctggacctcc

SEQ ID NO: 149716 - DNA, 25 bp, Canis familiaris
gggagctgagaggagttgcaactgt

SEQ ID NO: 149717 - DNA, 25 bp, Canis familiaris
gggatctgagatgccttgaactttt

SEQ ID NO: 149718 - DNA, 25 bp, Canis familiaris
gggattaattgcatgtgaccacttt

SEQ ID NO: 149719 - DNA, 25 bp, Canis familiaris
gggtaaatgcatcgacgacctcttc

SEQ ID NO: 149720 - DNA, 25 bp, Canis familiaris
gggatagcgatgctgaggaccctgg

SEQ ID NO: 149721 - DNA, 25 bp, Canis familiaris
gggatatcgattcggattagttctg

SEQ ID NO: 149722 - DNA, 25 bp, Canis familiaris
gggagtggagcctgcttgagattct

SEQ ID NO: 149723 - DNA, 25 bp, Canis familiaris
gggagctggaccaagtctcagagcc

SEQ ID NO: 149724 - DNA, 25 bp, Canis familiaris
gggagccgcaccttgtcatgtacca

SEQ ID NO: 149725 - DNA, 25 bp, Canis familiaris
gggaccatgcacttggtgctgtccc

SEQ ID NO: 149726 - DNA, 25 bp, Canis familiaris
gggagcctgacatggactctatctc

SEQ ID NO: 149727 - DNA, 25 bp, Canis familiaris
gggagcactgcatgggagctctgtt

SEQ ID NO: 149728 - DNA, 25 bp, Canis familiaris
gggaccacacagtgagatcgttatc

SEQ ID NO: 149729 - DNA, 25 bp, Canis familiaris
gggagcccaatgtggaacttgatcc

SEQ ID NO: 149730 - DNA, 25 bp, Canis familiaris
ggagacctaatttggaagcaattct

SEQ ID NO: 149731 - DNA, 25 bp, Canis familiaris
ggaactcctttataagaactctctc

SEQ ID NO: 149732 - DNA, 25 bp, Canis familiaris
gggttcctataatcaagccctgctt

SEQ ID NO: 149733 - DNA, 25 bp, Canis familiaris
gggttactaatattcaccttgttag

SEQ ID NO: 149734 - DNA, 25 bp, Canis familiaris
gggttgactgaggttcagactttta

SEQ ID NO: 149735 - DNA, 25 bp, Canis familiaris
gggataactgatttctatggctttc

SEQ ID NO: 149736 - DNA, 25 bp, Canis familiaris
gggagaactatgatgctgggttccc

SEQ ID NO: 149737 - DNA, 25 bp, Canis familiaris
gggagacacttgacgagggattgtg

SEQ ID NO: 149738 - DNA, 25 bp, Canis familiaris
gggagcaactctgaggggctcgggc

SEQ ID NO: 149739 - DNA, 25 bp, Canis familiaris
gggagaagtccggggtctcggatgc

SEQ ID NO: 149740 - DNA, 25 bp, Canis familiaris
gggatgatagttgggaggttaggtc

SEQ ID NO: 149741 - DNA, 25 bp, Canis familiaris
gggagctgtcttagagggctttggg

SEQ ID NO: 149742 - DNA, 25 bp, Canis familiaris
gggggttctagactagttctgcagg

SEQ ID NO: 149743 - DNA, 25 bp, Canis familiaris
gggaggtttgagacctttctcaaga

SEQ ID NO: 149744 - DNA, 25 bp, Canis familiaris
gggaggcttggcaccttaatagagg

SEQ ID NO: 149745 - DNA, 25 bp, Canis familiaris
gggaggttgggtgtgcagaatcggg

SEQ ID NO: 149746 - DNA, 25 bp, Canis familiaris
ggtgtcgttagggttgaagatcgtt

SEQ ID NO: 149747 - DNA, 25 bp, Canis familiaris
gggttactgagtgtgtgaagggttt

SEQ ID NO: 149748 - DNA, 25 bp, Canis familiaris
gggattgactggacccgaacgagtc

SEQ ID NO: 149749 - DNA, 25 bp, Canis familiaris
gggataacgaacaacagcaacgtct

SEQ ID NO: 149750 - DNA, 25 bp, Canis familiaris
gggatagcaagctgaacgagcacgt

SEQ ID NO: 149751 - DNA, 25 bp, Canis familiaris
gggttgcaggcatacacggaagtga

SEQ ID NO: 149752 - DNA, 25 bp, Canis familiaris
gggttgagggagacacaaggcgtca

SEQ ID NO: 149753 - DNA, 25 bp, Canis familiaris
gggttatggagcacaaagccagcca

SEQ ID NO: 149754 - DNA, 25 bp, Canis familiaris
gggattcaggacactaatacgccag

SEQ ID NO: 149755 - DNA, 25 bp, Canis familiaris
gggtctaggacttgtcatcgacggg

SEQ ID NO: 149756 - DNA, 25 bp, Canis familiaris
gggtctgcgtgtgtttcgaagggta

SEQ ID NO: 149757 - DNA, 25 bp, Canis familiaris
gggtcagcagttgttggcatatggc

SEQ ID NO: 149758 - DNA, 25 bp, Canis familiaris
gggtctcaggattttcttctgtcct

SEQ ID NO: 149759 - DNA, 25 bp, Canis familiaris
gggttaggatcgagcttcagctgcc

SEQ ID NO: 149760 - DNA, 25 bp, Canis familiaris
gggttgagagagtctggctccatcc

SEQ ID NO: 149761 - DNA, 25 bp, Canis familiaris
gggatcatctaaactgagtccagcc

SEQ ID NO: 149762 - DNA, 25 bp, Canis familiaris
gggagcctatatatggtccattgca

SEQ ID NO: 149763 - DNA, 25 bp, Canis familiaris
gggagcacgatgttttgcccttata

SEQ ID NO: 149764 - DNA, 25 bp, Canis familiaris
gggaggcagatgtctgctacccact

SEQ ID NO: 149765 - DNA, 25 bp, Canis familiaris
gggatgccaatgatgtaccccatcc

SEQ ID NO: 149766 - DNA, 25 bp, Canis familiaris
gggatccggaagtcaacaccatgtc

SEQ ID NO: 149767 - DNA, 25 bp, Canis familiaris
gggtcgcggagataaaaactattca

SEQ ID NO: 149768 - DNA, 25 bp, Canis familiaris
gggtacagtgggtaagcaagactca

SEQ ID NO: 149769 - DNA, 25 bp, Canis familiaris
gggtcacttggcttaaactgaccaa

SEQ ID NO: 149770 - DNA, 25 bp, Canis familiaris
gggtctttagtatacgatgaacaaa

SEQ ID NO: 149771 - DNA, 25 bp, Canis familiaris
gggattttaacatacgagagaagac

SEQ ID NO: 149772 - DNA, 25 bp, Canis familiaris
gggatttaaccatgactaatgacat

SEQ ID NO: 149773 - DNA, 25 bp, Canis familiaris
gggattaagacaaagccatggtaag

SEQ ID NO: 149774 - DNA, 25 bp, Canis familiaris
gggatggggagtgagcctgggagac

SEQ ID NO: 149775 - DNA, 25 bp, Canis familiaris
gggatggggaggtggtgactgagtc

SEQ ID NO: 149776 - DNA, 25 bp, Canis familiaris
gggaggcaggggaaccagaggtgtc

SEQ ID NO: 149777 - DNA, 25 bp, Canis familiaris
gggggaccgctgcaatagggtcacc

SEQ ID NO: 149778 - DNA, 25 bp, Canis familiaris
gggagggccccttgatgatggggct

SEQ ID NO: 149779 - DNA, 25 bp, Canis familiaris
gggtagtcaccccaggggatggcaa

SEQ ID NO: 149780 - DNA, 25 bp, Canis familiaris
gggtttgtctcacagggatgcggaa

SEQ ID NO: 149781 - DNA, 25 bp, Canis familiaris
gggttgtgttccctcggagggcaga

SEQ ID NO: 149782 - DNA, 25 bp, Canis familiaris
gggtttgcttctgtctaattctggc

SEQ ID NO: 149783 - DNA, 25 bp, Canis familiaris
gggtttcattccacacaattcgtga

SEQ ID NO: 149784 - DNA, 25 bp, Canis familiaris
ggggcttcttccacaaggaggagtt

SEQ ID NO: 149785 - DNA, 25 bp, Canis familiaris
gggttcccccatgcaaggaggaaat

SEQ ID NO: 149786 - DNA, 25 bp, Canis familiaris
gggttactccctgaagggagatcct

SEQ ID NO: 149787 - DNA, 25 bp, Canis familiaris
gggattacggtcatatcagggataa

SEQ ID NO: 149788 - DNA, 25 bp, Canis familiaris
ggggtgcagcttataccagggtaca

SEQ ID NO: 149789 - DNA, 25 bp, Canis familiaris
gggaggcccatactaacggggatca

SEQ ID NO: 149790 - DNA, 25 bp, Canis familiaris
gggggccaaagaaatctgtgcttta

SEQ ID NO: 149791 - DNA, 25 bp, Canis familiaris
gggtgagaaacatcgtgctcgttta

SEQ ID NO: 149792 - DNA, 25 bp, Canis familiaris
gggataaagaccagagctcgattcg

SEQ ID NO: 149793 - DNA, 25 bp, Canis familiaris
gggataaatgttaggcgctctgacc

SEQ ID NO: 149794 - DNA, 25 bp, Canis familiaris
gggattttttgtcgccatcatatac

SEQ ID NO: 149795 - DNA, 25 bp, Canis familiaris
gggttttcttggcatccaaattcca

SEQ ID NO: 149796 - DNA, 25 bp, Canis familiaris
gggatttttagcatgtgtcccaccc

SEQ ID NO: 149797 - DNA, 25 bp, Canis familiaris
gggatgtttttgctgatgtcccatc

SEQ ID NO: 149798 - DNA, 25 bp, Canis familiaris
gggagagttttgcagggcacagcag

SEQ ID NO: 149799 - DNA, 25 bp, Canis familiaris
gggatggttattgatgaggacccag

SEQ ID NO: 149800 - DNA, 25 bp, Canis familiaris
gggaggtgtactgtggatactgcca

SEQ ID NO: 149801 - DNA, 25 bp, Canis familiaris
gggagggaagtctggaagatccaca

SEQ ID NO: 149802 - DNA, 25 bp, Canis familiaris
gggagacggaactcgaggatgctcg

SEQ ID NO: 149803 - DNA, 25 bp, Canis familiaris
gggattgggaaccacataggtctgt

SEQ ID NO: 149804 - DNA, 25 bp, Canis familiaris
gggatctgggataccctggttggaa

SEQ ID NO: 149805 - DNA, 25 bp, Canis familiaris
gggagatttatagcacacgttggca

SEQ ID NO: 149806 - DNA, 25 bp, Canis familiaris
gggagactaggaggacatgggtgac

SEQ ID NO: 149807 - DNA, 25 bp, Canis familiaris
gggaggtatagcggatcattggttc

SEQ ID NO: 149808 - DNA, 25 bp, Canis familiaris
gggagtcttacttgacttggtgtca

SEQ ID NO: 149809 - DNA, 25 bp, Canis familiaris
gggagttcattttagctctgggaag

SEQ ID NO: 149810 - DNA, 25 bp, Canis familiaris
gggagattcttttggttccagatat

SEQ ID NO: 149811 - DNA, 25 bp, Canis familiaris
gggagatcctgaagggcttcaaact

SEQ ID NO: 149812 - DNA, 25 bp, Canis familiaris
gggatgtggtgcggggttcagaaat

SEQ ID NO: 149813 - DNA, 25 bp, Canis familiaris
gggatgggggggtttgcatacaaga

SEQ ID NO: 149814 - DNA, 25 bp, Canis familiaris
gggaggctgagtgagctttcccagg

SEQ ID NO: 149815 - DNA, 25 bp, Canis familiaris
gggaggcagagtggcagtcacaccc

SEQ ID NO: 149816 - DNA, 25 bp, Canis familiaris
gggagaagatttgtacccgccaggc

SEQ ID NO: 149817 - DNA, 25 bp, Canis familiaris
gggagagaattgtgttccccacgcc

SEQ ID NO: 149818 - DNA, 25 bp, Canis familiaris
gggagatgaatctcatttcaccaaa

SEQ ID NO: 149819 - DNA, 25 bp, Canis familiaris
gggatgacatactgacttaggcaat

SEQ ID NO: 149820 - DNA, 25 bp, Canis familiaris
gggatggatgtgtggcttcattgca

SEQ ID NO: 149821 - DNA, 25 bp, Canis familiaris
gggaggatatgctgtgtttctggct

SEQ ID NO: 149822 - DNA, 25 bp, Canis familiaris
gggaggacacaaattgttcagacta

SEQ ID NO: 149823 - DNA, 25 bp, Canis familiaris
gggatttcactgtattgattcagcc

SEQ ID NO: 149824 - DNA, 25 bp, Canis familiaris
gggtagttttttatatcctatgaat

SEQ ID NO: 149825 - DNA, 25 bp, Canis familiaris
gggtaggttgctttaggtcttatga

SEQ ID NO: 149826 - DNA, 25 bp, Canis familiaris
gggtatgcacttgttttggctttaa

SEQ ID NO: 149827 - DNA, 25 bp, Canis familiaris
gggatacctttcatctttgcattta

SEQ ID NO: 149828 - DNA, 25 bp, Canis familiaris
gggttccatttgactgtttgcattg

SEQ ID NO: 149829 - DNA, 25 bp, Canis familiaris
gggttcactatgtacttgttttggt

SEQ ID NO: 149830 - DNA, 25 bp, Canis familiaris
gggttcgtttactatggttatggtg

SEQ ID NO: 149831 - DNA, 25 bp, Canis familiaris
gggtttggttagactctttgtgttg

SEQ ID NO: 149832 - DNA, 25 bp, Canis familiaris
gggtcttcgttgttcttgtgacagg

SEQ ID NO: 149833 - DNA, 25 bp, Canis familiaris
gggttatccctgtatttcaccagaa

SEQ ID NO: 149834 - DNA, 25 bp, Canis familiaris
gggatttcccgggattctggatgaa

SEQ ID NO: 149835 - DNA, 25 bp, Canis familiaris
gggagtcacctttggcaggggagaa

SEQ ID NO: 149836 - DNA, 25 bp, Canis familiaris
gggagtcgccattgggagggcagac

SEQ ID NO: 149837 - DNA, 25 bp, Canis familiaris
gggatgtcgtccaggggagacctgt

SEQ ID NO: 149838 - DNA, 25 bp, Canis familiaris
gggagtcctcgttgggagaatcaca

SEQ ID NO: 149839 - DNA, 25 bp, Canis familiaris
gggttcccatgtttggagaatctgg

SEQ ID NO: 149840 - DNA, 25 bp, Canis familiaris
gggatgggccttgtggcaaatttaa

SEQ ID NO: 149841 - DNA, 25 bp, Canis familiaris
gggagagtctgctgttggcaaatca

SEQ ID NO: 149842 - DNA, 25 bp, Canis familiaris
gggagatgtggcctttgtgaaagac

SEQ ID NO: 149843 - DNA, 25 bp, Canis familiaris
gggaggggcttactggaaacgctga

SEQ ID NO: 149844 - DNA, 25 bp, Canis familiaris
gggaggtgagtttatggaatacgga

SEQ ID NO: 149845 - DNA, 25 bp, Canis familiaris
gggaggtggggctatgggatacctg

SEQ ID NO: 149846 - DNA, 25 bp, Canis familiaris
gggagactggggcattgagaaactt

SEQ ID NO: 149847 - DNA, 25 bp, Canis familiaris
gggattggttggcggcagagaattt

SEQ ID NO: 149848 - DNA, 25 bp, Canis familiaris
gggtcatgagattgagcctggaggt

SEQ ID NO: 149849 - DNA, 25 bp, Canis familiaris
gggatcatggtgggatgtggcagag

SEQ ID NO: 149850 - DNA, 25 bp, Canis familiaris
gggatagaggtgcatgtgcctgccc

SEQ ID NO: 149851 - DNA, 25 bp, Canis familiaris
gggatagcagctgcaaggactctcc

SEQ ID NO: 149852 - DNA, 25 bp, Canis familiaris
gggattgcctgttaagacttcttag

SEQ ID NO: 149853 - DNA, 25 bp, Canis familiaris
gggatacctgtgtatagctccctac

SEQ ID NO: 149854 - DNA, 25 bp, Canis familiaris
gggatactctgttatcttctactcc

SEQ ID NO: 149855 - DNA, 25 bp, Canis familiaris
gggatactcgcacagtacatcccgc

SEQ ID NO: 149856 - DNA, 25 bp, Canis familiaris
gggtagctaggttgtctatccctat

SEQ ID NO: 149857 - DNA, 25 bp, Canis familiaris
gggtcagttggggccaagacttatg

SEQ ID NO: 149858 - DNA, 25 bp, Canis familiaris
gggatacgtggtgcgaaatcattgg

SEQ ID NO: 149859 - DNA, 25 bp, Canis familiaris
gggatgacgggctaccagaattgtc

SEQ ID NO: 149860 - DNA, 25 bp, Canis familiaris
ggggacaggctctcaagaatccttt

SEQ ID NO: 149861 - DNA, 25 bp, Canis familiaris
gggtaggagccacaaacatccttga

SEQ ID NO: 149862 - DNA, 25 bp, Canis familiaris
gggttggagaccccaagatcggtgc

SEQ ID NO: 149863 - DNA, 25 bp, Canis familiaris
gggagggggcatgccaagttgggca

SEQ ID NO: 149864 - DNA, 25 bp, Canis familiaris
gggagggtggaacagagatggggga

SEQ ID NO: 149865 - DNA, 25 bp, Canis familiaris
gggaggttggagggagatcgagggg

SEQ ID NO: 149866 - DNA, 25 bp, Canis familiaris
gggagggtcccgagactgagagggt

SEQ ID NO: 149867 - DNA, 25 bp, Canis familiaris
gggggtacctcgggaagagatcaga

SEQ ID NO: 149868 - DNA, 25 bp, Canis familiaris
gggtgttaacatccctacacacaca

SEQ ID NO: 149869 - DNA, 25 bp, Canis familiaris
gggttcattacaacacccatgacac

SEQ ID NO: 149870 - DNA, 25 bp, Canis familiaris
gggtatattatctcccacagcatca

SEQ ID NO: 149871 - DNA, 25 bp, Canis familiaris
gggatttactcaacagccacatgaa

SEQ ID NO: 149872 - DNA, 25 bp, Canis familiaris
gggtcctcactaaagctactgtccc

SEQ ID NO: 149873 - DNA, 25 bp, Canis familiaris
gggtcctactacaacttcttcagga

SEQ ID NO: 149874 - DNA, 25 bp, Canis familiaris
gggtttactacaagtgtccctgtga

SEQ ID NO: 149875 - DNA, 25 bp, Canis familiaris
gggtcttaggatctagtcccatgtt

SEQ ID NO: 149876 - DNA, 25 bp, Canis familiaris
gggtcttggagtcaagcctggcttt

SEQ ID NO: 149877 - DNA, 25 bp, Canis familiaris
gggtcctggattcaagcctttagtc

SEQ ID NO: 149878 - DNA, 25 bp, Canis familiaris
gggtactagaatcaagccccgtgtc

SEQ ID NO: 149879 - DNA, 25 bp, Canis familiaris
gggtcatctaaataaagccgcctgt

SEQ ID NO: 149880 - DNA, 25 bp, Canis familiaris
ggggctcgaaatgaaatccacccgg

SEQ ID NO: 149881 - DNA, 25 bp, Canis familiaris
ggggttttgttatagtctcaccgag

SEQ ID NO: 149882 - DNA, 25 bp, Canis familiaris
gggtctctttgaagtatagtctcac

SEQ ID NO: 149883 - DNA, 25 bp, Canis familiaris
gggtcgatttgttttaagctctatt

SEQ ID NO: 149884 - DNA, 25 bp, Canis familiaris
gggtaatttttgtctgaaacaatct

SEQ ID NO: 149885 - DNA, 25 bp, Canis familiaris
gggttatttagctacggtggcaatt

SEQ ID NO: 149886 - DNA, 25 bp, Canis familiaris
gggttttgtcagaacgggagcagtt

SEQ ID NO: 149887 - DNA, 25 bp, Canis familiaris
gggttttgatgaggtctgtggggta

SEQ ID NO: 149888 - DNA, 25 bp, Canis familiaris
gggtatcgatatcagatcttcggtt

SEQ ID NO: 149889 - DNA, 25 bp, Canis familiaris
gggtgtaatttatcttgcaggtttt

SEQ ID NO: 149890 - DNA, 25 bp, Canis familiaris
gggtgacacattgtccccaaattat

SEQ ID NO: 149891 - DNA, 25 bp, Canis familiaris
gggatgagccatcttggcccaaata

SEQ ID NO: 149892 - DNA, 25 bp, Canis familiaris
gggatgatgacaattctcccctaca

SEQ ID NO: 149893 - DNA, 25 bp, Canis familiaris
gggttccatttctgacagctgacat

SEQ ID NO: 149894 - DNA, 25 bp, Canis familiaris
gggatctgctccagctaagactaat

SEQ ID NO: 149895 - DNA, 25 bp, Canis familiaris
gggattgacgctgggaagagctgaa

SEQ ID NO: 149896 - DNA, 25 bp, Canis familiaris
gggatgtgaccctgtcagtgacaga

SEQ ID NO: 149897 - DNA, 25 bp, Canis familiaris
gggatgggcacactgttcataacaa

SEQ ID NO: 149898 - DNA, 25 bp, Canis familiaris
gggatggacacaggttatcacacga

SEQ ID NO: 149899 - DNA, 25 bp, Canis familiaris
gggaggaactggatgaccaagcata

SEQ ID NO: 149900 - DNA, 25 bp, Canis familiaris
gggaggtcatctaagtgcaagaatg

SEQ ID NO: 149901 - DNA, 25 bp, Canis familiaris
gggagaggcttcagggagcatgtgt

SEQ ID NO: 149902 - DNA, 25 bp, Canis familiaris
gggagagcagttggggcgtgctgtc

SEQ ID NO: 149903 - DNA, 25 bp, Canis familiaris
gggaggacttaggggtgtctcctgt

SEQ ID NO: 149904 - DNA, 25 bp, Canis familiaris
gggatgggtcaaaaggattctactg

SEQ ID NO: 149905 - DNA, 25 bp, Canis familiaris
gggatagtacaaaagcatcagccta

SEQ ID NO: 149906 - DNA, 25 bp, Canis familiaris
gggattgtatgcaaactctagcctt

SEQ ID NO: 149907 - DNA, 25 bp, Canis familiaris
gggtaacagcaaactcgtgccatcg

SEQ ID NO: 149908 - DNA, 25 bp, Canis familiaris
gggtatattaattgcctggctctcc

SEQ ID NO: 149909 - DNA, 25 bp, Canis familiaris
gggttttcacattcctgggaaccat

SEQ ID NO: 149910 - DNA, 25 bp, Canis familiaris
gggttttactctttgtgaacactat

SEQ ID NO: 149911 - DNA, 25 bp, Canis familiaris
ggtctattttctgtatttaccgtag

SEQ ID NO: 149912 - DNA, 25 bp, Canis familiaris
ggtttattttgcttatttacagtag

SEQ ID NO: 149913 - DNA, 25 bp, Canis familiaris
gggatatttcttggtttcaaagtca

SEQ ID NO: 149914 - DNA, 25 bp, Canis familiaris
gggattttctgtagattttacttga

SEQ ID NO: 149915 - DNA, 25 bp, Canis familiaris
gggattttccagtatctggtcctct

SEQ ID NO: 149916 - DNA, 25 bp, Canis familiaris
gggatttaaagtctggtgctgctgc

SEQ ID NO: 149917 - DNA, 25 bp, Canis familiaris
gggatgttgtagactttgggatggg

SEQ ID NO: 149918 - DNA, 25 bp, Canis familiaris
gggatgtgtgtcatgtgtgcatgtg

SEQ ID NO: 149919 - DNA, 25 bp, Canis familiaris
gggtctatatgctgtgcacatgtgc

SEQ ID NO: 149920 - DNA, 25 bp, Canis familiaris
gggatctaagatgtgcagttcaaag

SEQ ID NO: 149921 - DNA, 25 bp, Canis familiaris
gggatgctgaagtcgtgcagttgag

SEQ ID NO: 149922 - DNA, 25 bp, Canis familiaris
gggatgtgacgactgttgtctgggt

SEQ ID NO: 149923 - DNA, 25 bp, Canis familiaris
gggagtacgtgctggatctggagat

SEQ ID NO: 149924 - DNA, 25 bp, Canis familiaris
gggatgcttcgtgtgaacatgggag

SEQ ID NO: 149925 - DNA, 25 bp, Canis familiaris
gggataatcctggtaacatggcaaa

SEQ ID NO: 149926 - DNA, 25 bp, Canis familiaris
ggtgcacactccagaacttttaact

SEQ ID NO: 149927 - DNA, 25 bp, Canis familiaris
tgggtccccaaatctatttgttctt

SEQ ID NO: 149928 - DNA, 25 bp, Canis familiaris
tggaggccccaattccattaagttt

SEQ ID NO: 149929 - DNA, 25 bp, Canis familiaris
ggggcccaacaataggacagtgctt

SEQ ID NO: 149930 - DNA, 25 bp, Canis familiaris
gggatgtccagatcggggacattgt

SEQ ID NO: 149931 - DNA, 25 bp, Canis familiaris
gggatccacagggctggtagaccct

SEQ ID NO: 149932 - DNA, 25 bp, Canis familiaris
gggatctcaggtgttgcttgcaccc

SEQ ID NO: 149933 - DNA, 25 bp, Canis familiaris
gggtccatgtggatggcttcatcgc

SEQ ID NO: 149934 - DNA, 25 bp, Canis familiaris
gggtcagcgggactgacctcatggc

SEQ ID NO: 149935 - DNA, 25 bp, Canis familiaris
gggatcatgacgctgaaccataggc

SEQ ID NO: 149936 - DNA, 25 bp, Canis familiaris
gggatcatgacctgagccaaaggca

SEQ ID NO: 149937 - DNA, 25 bp, Canis familiaris
gggttgttcaaaggcacaaggcact

SEQ ID NO: 149938 - DNA, 25 bp, Canis familiaris
gggttttcttggacacagggagctg

SEQ ID NO: 149939 - DNA, 25 bp, Canis familiaris
gggtctcctattcttatgggtccct

SEQ ID NO: 149940 - DNA, 25 bp, Canis familiaris
ggttgccgtaagtgttggggccttg

SEQ ID NO: 149941 - DNA, 25 bp, Canis familiaris
gggtccctaagttgttgcagaggct

SEQ ID NO: 149942 - DNA, 25 bp, Canis familiaris
gggtacctgcaactactatgccaac

SEQ ID NO: 149943 - DNA, 25 bp, Canis familiaris
gggatgcatgcccaaccactaataa

SEQ ID NO: 149944 - DNA, 25 bp, Canis familiaris
gggatactgcagaagccactggcat

SEQ ID NO: 149945 - DNA, 25 bp, Canis familiaris
gggatcactcgtcagcactgtgatg

SEQ ID NO: 149946 - DNA, 25 bp, Canis familiaris
gggatgcccgaaaagcatgtgggga

SEQ ID NO: 149947 - DNA, 25 bp, Canis familiaris
gggtgcctggcaacaggcttttgga

SEQ ID NO: 149948 - DNA, 25 bp, Canis familiaris
gggatactgctcagcaaggtgttgt

SEQ ID NO: 149949 - DNA, 25 bp, Canis familiaris
gggataatcttcgggatggtcatga

SEQ ID NO: 149950 - DNA, 25 bp, Canis familiaris
gggtacattggtgtcaggccacaac

SEQ ID NO: 149951 - DNA, 25 bp, Canis familiaris
gggttgtcagcactgcttagggaca

SEQ ID NO: 149952 - DNA, 25 bp, Canis familiaris
gggtatgatcaagttctacagccca

SEQ ID NO: 149953 - DNA, 25 bp, Canis familiaris
gggatgcttgaatttccacaccaaa

SEQ ID NO: 149954 - DNA, 25 bp, Canis familiaris
gggagtcagacattcttgacctgca

SEQ ID NO: 149955 - DNA, 25 bp, Canis familiaris
gggagttgccattctctgaagtgat

SEQ ID NO: 149956 - DNA, 25 bp, Canis familiaris
gggagtgtgccattccagggaagaa

SEQ ID NO: 149957 - DNA, 25 bp, Canis familiaris
gggagttctatcccgaggaagccct

SEQ ID NO: 149958 - DNA, 25 bp, Canis familiaris
gggagtcgtgaccggagtcaatccc

SEQ ID NO: 149959 - DNA, 25 bp, Canis familiaris
gggagtcctgatggctggagagcac

SEQ ID NO: 149960 - DNA, 25 bp, Canis familiaris
gggatgtgacgagggtggtccggga

SEQ ID NO: 149961 - DNA, 25 bp, Canis familiaris
gggaggtggaggctattcctggcca

SEQ ID NO: 149962 - DNA, 25 bp, Canis familiaris
gggaggaggggaacattgcttgagg

SEQ ID NO: 149963 - DNA, 25 bp, Canis familiaris
gggagtacaggacacctgcatgtga

SEQ ID NO: 149964 - DNA, 25 bp, Canis familiaris
gggaggaagaagccagacgactatc

SEQ ID NO: 149965 - DNA, 25 bp, Canis familiaris
gggaggagaagcccagggaggtcag

SEQ ID NO: 149966 - DNA, 25 bp, Canis familiaris
gggatgtggaatgggagggggtatg

SEQ ID NO: 149967 - DNA, 25 bp, Canis familiaris
gggagtgaacggaatgggagggatg

SEQ ID NO: 149968 - DNA, 25 bp, Canis familiaris
gggatggagaccctagggtggagga

SEQ ID NO: 149969 - DNA, 25 bp, Canis familiaris
gggttggagggctaaggtgggcgct

SEQ ID NO: 149970 - DNA, 25 bp, Canis familiaris
gggatctgggttaaaggctgatggc

SEQ ID NO: 149971 - DNA, 25 bp, Canis familiaris
gggatagatggttagaagggcacgc

SEQ ID NO: 149972 - DNA, 25 bp, Canis familiaris
gggatcaagggctagaaacgaggac

SEQ ID NO: 149973 - DNA, 25 bp, Canis familiaris
gggataagaagccaaaagtggatga

SEQ ID NO: 149974 - DNA, 25 bp, Canis familiaris
gggtcagaagtccaagaattgctta

SEQ ID NO: 149975 - DNA, 25 bp, Canis familiaris
gggtgcagaatttaaggtggtgcca

SEQ ID NO: 149976 - DNA, 25 bp, Canis familiaris
gggttgatattgtataggctgggct

SEQ ID NO: 149977 - DNA, 25 bp, Canis familiaris
gggagtgacttctaaactggagcta

SEQ ID NO: 149978 - DNA, 25 bp, Canis familiaris
ggtgcgatgacagcgaagacggcct

SEQ ID NO: 149979 - DNA, 25 bp, Canis familiaris
ggtggatctgcagtctgagctacta

SEQ ID NO: 149980 - DNA, 25 bp, Canis familiaris
ggtctgacctgctagcagtgcacat

SEQ ID NO: 149981 - DNA, 25 bp, Canis familiaris
gggtatcgcatgtacaggaaaagcc

SEQ ID NO: 149982 - DNA, 25 bp, Canis familiaris
gggtacgcttcagtgttcaaaggct

SEQ ID NO: 149983 - DNA, 25 bp, Canis familiaris
gggatgttcttgggtctcaaaggct

SEQ ID NO: 149984 - DNA, 25 bp, Canis familiaris
gggaggctgttttgaccagagaggc

SEQ ID NO: 149985 - DNA, 25 bp, Canis familiaris
gggaggttctataataagcaggagc

SEQ ID NO: 149986 - DNA, 25 bp, Canis familiaris
gggaggctatatagaagtaccgagc

SEQ ID NO: 149987 - DNA, 25 bp, Canis familiaris
gggatactttattaggaccagggcg

SEQ ID NO: 149988 - DNA, 25 bp, Canis familiaris
gggatgacttctacatcatggcagc

SEQ ID NO: 149989 - DNA, 25 bp, Canis familiaris
gggaggctgtgtcacatggagctgc

SEQ ID NO: 149990 - DNA, 25 bp, Canis familiaris
gggagtgcttctcatcaatgatctg

SEQ ID NO: 149991 - DNA, 25 bp, Canis familiaris
gggatctgcttcccaaagatttggt

SEQ ID NO: 149992 - DNA, 25 bp, Canis familiaris
gggtctcttctagaacgactggagg

SEQ ID NO: 149993 - DNA, 25 bp, Canis familiaris
gggattatttgagcagccaacttgg

SEQ ID NO: 149994 - DNA, 25 bp, Canis familiaris
gggattcagttacaccacgattcaa

SEQ ID NO: 149995 - DNA, 25 bp, Canis familiaris
gggttcgtgacctcaaaattcaaca

SEQ ID NO: 149996 - DNA, 25 bp, Canis familiaris
gggttttgaccacatacctaactca

SEQ ID NO: 149997 - DNA, 25 bp, Canis familiaris
gggttgttaccatgttttaagtcat

SEQ ID NO: 149998 - DNA, 25 bp, Canis familiaris
gggttgatctgagcgattcgtctaa

SEQ ID NO: 149999 - DNA, 25 bp, Canis familiaris
gggattgaaacttttgcgcctgatg

SEQ ID NO: 150000 - DNA, 25 bp, Canis familiaris
gggatttaatgctctatggttgctg

SEQ ID NO: 150001 - DNA, 25 bp, Canis familiaris
gggtgcgtatatgtctagcgttctg

SEQ ID NO: 150002 - DNA, 25 bp, Canis familiaris
gggtcagccatttttaatgatctcg

SEQ ID NO: 150003 - DNA, 25 bp, Canis familiaris
gggtcagccatttttaatgatctcg

SEQ ID NO: 150004 - DNA, 25 bp, Canis familiaris
gggtagcctgtgctacactttcttt

SEQ ID NO: 150005 - DNA, 25 bp, Canis familiaris
gggatcccaatgtacacacattttt

SEQ ID NO: 150006 - DNA, 25 bp, Canis familiaris
gggatcccaattaaaccagtatcca

SEQ ID NO: 150007 - DNA, 25 bp, Canis familiaris
gggtcccacggatacgagatgtcca

SEQ ID NO: 150008 - DNA, 25 bp, Canis familiaris
gggtaccacggtttgaagagatcac

SEQ ID NO: 150009 - DNA, 25 bp, Canis familiaris
gggataccctgggtggtgcagcagt

SEQ ID NO: 150010 - DNA, 25 bp, Canis familiaris
gggtactcgctggaagagtgcctcg

SEQ ID NO: 150011 - DNA, 25 bp, Canis familiaris
gggtcaatggtggcaccagtttccc

SEQ ID NO: 150012 - DNA, 25 bp, Canis familiaris
gggtcaagggccagtgacttcacaa

SEQ ID NO: 150013 - DNA, 25 bp, Canis familiaris
gggtcaagccgtgttttgatcacta

SEQ ID NO: 150014 - DNA, 25 bp, Canis familiaris
gggatcacacctgcagtttcaaaaa

SEQ ID NO: 150015 - DNA, 25 bp, Canis familiaris
gggataaacccatttgtcataacat

SEQ ID NO: 150016 - DNA, 25 bp, Canis familiaris
gggatacatgcacccaatgtttata

SEQ ID NO: 150017 - DNA, 25 bp, Canis familiaris
gggatacatgcaccctgaggtttat

SEQ ID NO: 150018 - DNA, 25 bp, Canis familiaris
gggatctgctgacactgaggatatt

SEQ ID NO: 150019 - DNA, 25 bp, Canis familiaris
gggatgcgtgacaaccaggtgtaat

SEQ ID NO: 150020 - DNA, 25 bp, Canis familiaris
gggatcggcaccaatcagggtagac

SEQ ID NO: 150021 - DNA, 25 bp, Canis familiaris
gggagggaagcctgaggtaactcta

SEQ ID NO: 150022 - DNA, 25 bp, Canis familiaris
gggagggaactgtgagagggatctt

SEQ ID NO: 150023 - DNA, 25 bp, Canis familiaris
gggaggtgatcctccagacggattc

SEQ ID NO: 150024 - DNA, 25 bp, Canis familiaris
gggaggggcctggaagacatggatt

SEQ ID NO: 150025 - DNA, 25 bp, Canis familiaris
gggaggggtcaggaaatggaacaga

SEQ ID NO: 150026 - DNA, 25 bp, Canis familiaris
gggagggaggcagacagagtgacaa

SEQ ID NO: 150027 - DNA, 25 bp, Canis familiaris
ggggagaagccgtacgagtgcaaca

SEQ ID NO: 150028 - DNA, 25 bp, Canis familiaris
gggaggaagagggactgcagttacg

SEQ ID NO: 150029 - DNA, 25 bp, Canis familiaris
gggtcacaaggtcaccagttactgc

SEQ ID NO: 150030 - DNA, 25 bp, Canis familiaris
gggtacagacctatgaagtctaatg

SEQ ID NO: 150031 - DNA, 25 bp, Canis familiaris
gggttcagacccttggcagtataat

SEQ ID NO: 150032 - DNA, 25 bp, Canis familiaris
gggttcaccacgtgtgggaacttgt

SEQ ID NO: 150033 - DNA, 25 bp, Canis familiaris
gggtatcagccctcggaggaaggct

SEQ ID NO: 150034 - DNA, 25 bp, Canis familiaris
gggttccatccaccagagattgaaa

SEQ ID NO: 150035 - DNA, 25 bp, Canis familiaris
gggtttgctacccaaatgagaaact

SEQ ID NO: 150036 - DNA, 25 bp, Canis familiaris
gggtgttgtcaccagacctgaaccc

SEQ ID NO: 150037 - DNA, 25 bp, Canis familiaris
gggtcttgtcaacacagggatcctc

SEQ ID NO: 150038 - DNA, 25 bp, Canis familiaris
gggtcttgtctgcaactgatgcgtc

SEQ ID NO: 150039 - DNA, 25 bp, Canis familiaris
gggatgggattgcaacgtgcacgca

SEQ ID NO: 150040 - DNA, 25 bp, Canis familiaris
gggatgaggactccaacatgtgcac

SEQ ID NO: 150041 - DNA, 25 bp, Canis familiaris
gggatactgatctatcaagatgtca

SEQ ID NO: 150042 - DNA, 25 bp, Canis familiaris
ggtgatctgttctgcaaagctctga

SEQ ID NO: 150043 - DNA, 25 bp, Canis familiaris
gggattgtatcttgacattcctagt

SEQ ID NO: 150044 - DNA, 25 bp, Canis familiaris
gggatttatctgcagtatgactagc

SEQ ID NO: 150045 - DNA, 25 bp, Canis familiaris
gggatttcactgcattttccagatc

SEQ ID NO: 150046 - DNA, 25 bp, Canis familiaris
gggatgtctgattctagggtccagt

SEQ ID NO: 150047 - DNA, 25 bp, Canis familiaris
gggatgtctgagctgtatgggccct

SEQ ID NO: 150048 - DNA, 25 bp, Canis familiaris
gggatgtgatgagggctctgggcca

SEQ ID NO: 150049 - DNA, 25 bp, Canis familiaris
gggatgtgaagatgttgctggagca

SEQ ID NO: 150050 - DNA, 25 bp, Canis familiaris
gggatggaaagcctgtgtgggccca

SEQ ID NO: 150051 - DNA, 25 bp, Canis familiaris
gggtaagtgatgggcttggtccagc

SEQ ID NO: 150052 - DNA, 25 bp, Canis familiaris
gggatacgcgatgactgtgaccctg

SEQ ID NO: 150053 - DNA, 25 bp, Canis familiaris
gggatacgaatctgaggaccctggt

SEQ ID NO: 150054 - DNA, 25 bp, Canis familiaris
gggatagcgaagcggtgaggcgggt

SEQ ID NO: 150055 - DNA, 25 bp, Canis familiaris
gggatggatgaaataggggttgggg

SEQ ID NO: 150056 - DNA, 25 bp, Canis familiaris
gggatgagttttaagggctatgcta

SEQ ID NO: 150057 - DNA, 25 bp, Canis familiaris
gggaggcctatcttagtgtttgctg

SEQ ID NO: 150058 - DNA, 25 bp, Canis familiaris
gggaggcagctttgtaatctatgtc

SEQ ID NO: 150059 - DNA, 25 bp, Canis familiaris
gggatgcgtgcatttatcagatcaa

SEQ ID NO: 150060 - DNA, 25 bp, Canis familiaris
gggatgcgtgcatttatcagatcaa

SEQ ID NO: 150061 - DNA, 25 bp, Canis familiaris
gggaggatgcaattaagcccataag

SEQ ID NO: 150062 - DNA, 25 bp, Canis familiaris
gggaggatgctcacaaactcataga

SEQ ID NO: 150063 - DNA, 25 bp, Canis familiaris
gggaggcagtgaagcagtacttaga

SEQ ID NO: 150064 - DNA, 25 bp, Canis familiaris
gggatgcagcaaaagcagttctaag

SEQ ID NO: 150065 - DNA, 25 bp, Canis familiaris
gggtgcacacacatgacttgaaaga

SEQ ID NO: 150066 - DNA, 25 bp, Canis familiaris
gggatcaaaagccaatgctgaaaaa

SEQ ID NO: 150067 - DNA, 25 bp, Canis familiaris
gggtctgcagaacatatcaagcaca

SEQ ID NO: 150068 - DNA, 25 bp, Canis familiaris
gggatgctgccattggttgataata

SEQ ID NO: 150069 - DNA, 25 bp, Canis familiaris
gggatgtgccaataagagagcagaa

SEQ ID NO: 150070 - DNA, 25 bp, Canis familiaris
gggattgccactttaaagagagggg

SEQ ID NO: 150071 - DNA, 25 bp, Canis familiaris
gggttgcgcccataagggagtggag

SEQ ID NO: 150072 - DNA, 25 bp, Canis familiaris
gggaggctccgaagggtggagggag

SEQ ID NO: 150073 - DNA, 25 bp, Canis familiaris
gggaggacctgaaggcttggagggt

SEQ ID NO: 150074 - DNA, 25 bp, Canis familiaris
gggaggcacttgaatggttagcaat

SEQ ID NO: 150075 - DNA, 25 bp, Canis familiaris
gggatgtgactcttgtggatttcct

SEQ ID NO: 150076 - DNA, 25 bp, Canis familiaris
gggatggaatcatgcggtatccacg

SEQ ID NO: 150077 - DNA, 25 bp, Canis familiaris
gggatgagattatgctactttatta

SEQ ID NO: 150078 - DNA, 25 bp, Canis familiaris
gggatgaaatttccacatttatttt

SEQ ID NO: 150079 - DNA, 25 bp, Canis familiaris
gggattacttgaacatttaatattt

SEQ ID NO: 150080 - DNA, 25 bp, Canis familiaris
gggattagcatgtaacctgtaatat

SEQ ID NO: 150081 - DNA, 25 bp, Canis familiaris
gggattcaatggatccgtgaaatct

SEQ ID NO: 150082 - DNA, 25 bp, Canis familiaris
gggttaatggtagcagtggcaactg

SEQ ID NO: 150083 - DNA, 25 bp, Canis familiaris
gggtaacaggtttcatggccagagg

SEQ ID NO: 150084 - DNA, 25 bp, Canis familiaris
gggtaagaggattccaggccacgag

SEQ ID NO: 150085 - DNA, 25 bp, Canis familiaris
gggtgggaggaacctgtccaaggat

SEQ ID NO: 150086 - DNA, 25 bp, Canis familiaris
gggtgaggcagtgaccttgctatag

SEQ ID NO: 150087 - DNA, 25 bp, Canis familiaris
gggtcaagtttaccctgccaagatc

SEQ ID NO: 150088 - DNA, 25 bp, Canis familiaris
gggtcaagttaccctggccaagatc

SEQ ID NO: 150089 - DNA, 25 bp, Canis familiaris
gggtcacgttacaactggatataca

SEQ ID NO: 150090 - DNA, 25 bp, Canis familiaris
gggtatgcgttatactgttataatc

SEQ ID NO: 150091 - DNA, 25 bp, Canis familiaris
gggtgccagtttaactgtttaagct

SEQ ID NO: 150092 - DNA, 25 bp, Canis familiaris
gggtacagtttgcaagtttcagcct

SEQ ID NO: 150093 - DNA, 25 bp, Canis familiaris
gggtacaggttgaatgggtaacaat

SEQ ID NO: 150094 - DNA, 25 bp, Canis familiaris
gggtttggaggatttgggacaacat

SEQ ID NO: 150095 - DNA, 25 bp, Canis familiaris
gggtttgaagtgcgttggccaacgt

SEQ ID NO: 150096 - DNA, 25 bp, Canis familiaris
ggtttcgaactcaggggtcgacgtg

SEQ ID NO: 150097 - DNA, 25 bp, Canis familiaris
ggatttcgaacccaggaggccagat

SEQ ID NO: 150098 - DNA, 25 bp, Canis familiaris
gggttaggtctcaacagaggccagt

SEQ ID NO: 150099 - DNA, 25 bp, Canis familiaris
ggtgcataaggagaaaggagccaac

SEQ ID NO: 150100 - DNA, 25 bp, Canis familiaris
ggtgcaagaggagaagtagtcgaac

SEQ ID NO: 150101 - DNA, 25 bp, Canis familiaris
ggtgacttggaatttgtgaacgaac

SEQ ID NO: 150102 - DNA, 25 bp, Canis familiaris
gggtcttggatatttcagcatcgga

SEQ ID NO: 150103 - DNA, 25 bp, Canis familiaris
gggtcctgagtattgttgccttacc

SEQ ID NO: 150104 - DNA, 25 bp, Canis familiaris
gggttcttggtattcgctattacca

SEQ ID NO: 150105 - DNA, 25 bp, Canis familiaris
gggatttgtggaaaccgtatatagc

SEQ ID NO: 150106 - DNA, 25 bp, Canis familiaris
gggtcaggttgaaagccttatccct

SEQ ID NO: 150107 - DNA, 25 bp, Canis familiaris
gggtgagtttagcaggaatatatcc

SEQ ID NO: 150108 - DNA, 25 bp, Canis familiaris
gggtgagttgcccttagatatcaat

SEQ ID NO: 150109 - DNA, 25 bp, Canis familiaris
gggtaggtgcctcaaaagatcaaat

SEQ ID NO: 150110 - DNA, 25 bp, Canis familiaris
gggtaaatccccaaacagtgcaatt

SEQ ID NO: 150111 - DNA, 25 bp, Canis familiaris
gggtaaatgcccataaaatccatcg

SEQ ID NO: 150112 - DNA, 25 bp, Canis familiaris
gggtaaatgtgtttcaagaaccaca

SEQ ID NO: 150113 - DNA, 25 bp, Canis familiaris
gggtgcaatatgttgttactaaaac

SEQ ID NO: 150114 - DNA, 25 bp, Canis familiaris
gggtgcacatgtcttttcaaattca

SEQ ID NO: 150115 - DNA, 25 bp, Canis familiaris
gggatcacagtttcttctaataata

SEQ ID NO: 150116 - DNA, 25 bp, Canis familiaris
gggatagggagaatggagtggaaag

SEQ ID NO: 150117 - DNA, 25 bp, Canis familiaris
gggtagtgggattatgggtgattat

SEQ ID NO: 150118 - DNA, 25 bp, Canis familiaris
gggtatgattggggctggggtttga

SEQ ID NO: 150119 - DNA, 25 bp, Canis familiaris
gggttctgtacaggctgggtttcta

SEQ ID NO: 150120 - DNA, 25 bp, Canis familiaris
gggtctggctaaggtagttcagtct

SEQ ID NO: 150121 - DNA, 25 bp, Canis familiaris
gggtgggctacggtgtgataaactc

SEQ ID NO: 150122 - DNA, 25 bp, Canis familiaris
gggtagttcctcgtgtagagaagac

SEQ ID NO: 150123 - DNA, 25 bp, Canis familiaris
gggtagtcaaccttgtgctatggga

SEQ ID NO: 150124 - DNA, 25 bp, Canis familiaris
ggggagtctaccatcgtaggggaga

SEQ ID NO: 150125 - DNA, 25 bp, Canis familiaris
gggttctctacctggtatgagggaa

SEQ ID NO: 150126 - DNA, 25 bp, Canis familiaris
gggtttcttcaaaggataaggagca

SEQ ID NO: 150127 - DNA, 25 bp, Canis familiaris
gggtttctgacagctcagtacagga

SEQ ID NO: 150128 - DNA, 25 bp, Canis familiaris
gggtacctacagttagacaaataga

SEQ ID NO: 150129 - DNA, 25 bp, Canis familiaris
gggtcatcctgtgtttacaataaaa

SEQ ID NO: 150130 - DNA, 25 bp, Canis familiaris
gggtccttgtgtattagagtttaga

SEQ ID NO: 150131 - DNA, 25 bp, Canis familiaris
gggtagtgtgagcttttaatgttaa

SEQ ID NO: 150132 - DNA, 25 bp, Canis familiaris
gggtagtgatctattttaagctgta

SEQ ID NO: 150133 - DNA, 25 bp, Canis familiaris
gggatactacttttggttgtggata

SEQ ID NO: 150134 - DNA, 25 bp, Canis familiaris
gggtcatccatatttctggggggaa

SEQ ID NO: 150135 - DNA, 25 bp, Canis familiaris
gggtatcttacaatggatagtggga

SEQ ID NO: 150136 - DNA, 25 bp, Canis familiaris
ggggagtaatcaggtgtaggatgga

SEQ ID NO: 150137 - DNA, 25 bp, Canis familiaris
ggggactgaagggactgactgttat

SEQ ID NO: 150138 - DNA, 25 bp, Canis familiaris
gggatgaatatagtgtgttactgtt

SEQ ID NO: 150139 - DNA, 25 bp, Canis familiaris
gggatgaagcatttcgagaactttc

SEQ ID NO: 150140 - DNA, 25 bp, Canis familiaris
gggatcacaatctttcagctaattt

SEQ ID NO: 150141 - DNA, 25 bp, Canis familiaris
gggatcataagcttgagccccatgt

SEQ ID NO: 150142 - DNA, 25 bp, Canis familiaris
gggattgaagataaggctgccagct

SEQ ID NO: 150143 - DNA, 25 bp, Canis familiaris
gggatcgaggacaagatggccatcg

SEQ ID NO: 150144 - DNA, 25 bp, Canis familiaris
gggatctcagccaggatgtgcaata

SEQ ID NO: 150145 - DNA, 25 bp, Canis familiaris
gggtcatagtcttgacagtgttatc

SEQ ID NO: 150146 - DNA, 25 bp, Canis familiaris
gggatctttcattgacgtgctggac

SEQ ID NO: 150147 - DNA, 25 bp, Canis familiaris
gggatcatcatatgtggttgctcga

SEQ ID NO: 150148 - DNA, 25 bp, Canis familiaris
gggataaatatctgcttctgtgaaa

SEQ ID NO: 150149 - DNA, 25 bp, Canis familiaris
gggtacagtatcttgttccgtggac

SEQ ID NO: 150150 - DNA, 25 bp, Canis familiaris
gggtaatgttcctggccagggaatt

SEQ ID NO: 150151 - DNA, 25 bp, Canis familiaris
gggtaattgttcttggccaaggaat

SEQ ID NO: 150152 - DNA, 25 bp, Canis familiaris
gggtgcggtttctggctaaatacat

SEQ ID NO: 150153 - DNA, 25 bp, Canis familiaris
gggtgcggtttctggctaaatacat

SEQ ID NO: 150154 - DNA, 25 bp, Canis familiaris
gggtcggttcgtgaaaagatacatc

SEQ ID NO: 150155 - DNA, 25 bp, Canis familiaris
gggggccgtcgtcatacaaaggcac

SEQ ID NO: 150156 - DNA, 25 bp, Canis familiaris
gggggcccagagaacatccgaaggc

SEQ ID NO: 150157 - DNA, 25 bp, Canis familiaris
ggggggccaggacattgggaaggag

SEQ ID NO: 150158 - DNA, 25 bp, Canis familiaris
ggggttacggaatcggtattgtcag

SEQ ID NO: 150159 - DNA, 25 bp, Canis familiaris
gggtttgggggatctttcattgacg

SEQ ID NO: 150160 - DNA, 25 bp, Canis familiaris
gggtttgtgggttttattcactgct

SEQ ID NO: 150161 - DNA, 25 bp, Canis familiaris
gggtctgttggttttttaccatgtg

SEQ ID NO: 150162 - DNA, 25 bp, Canis familiaris
gggttttggcatgttttagcgactc

SEQ ID NO: 150163 - DNA, 25 bp, Canis familiaris
ggtggtcctgttgactttagcgact

SEQ ID NO: 150164 - DNA, 25 bp, Canis familiaris
ggtgggctccaagattttggctcag

SEQ ID NO: 150165 - DNA, 25 bp, Canis familiaris
gggggctggaacatttttgctaatc

SEQ ID NO: 150166 - DNA, 25 bp, Canis familiaris
gggtaagtgaacatctgtttctcat

SEQ ID NO: 150167 - DNA, 25 bp, Canis familiaris
gggtcagtgaaaattctgctacacc

SEQ ID NO: 150168 - DNA, 25 bp, Canis familiaris
gggttgctgaacatgtctttcacca

SEQ ID NO: 150169 - DNA, 25 bp, Canis familiaris
gggtgtgacaacatgacctgcatca

SEQ ID NO: 150170 - DNA, 25 bp, Canis familiaris
gggttgcacaactgcgcggtgcaag

SEQ ID NO: 150171 - DNA, 25 bp, Canis familiaris
gggttgcacaatgcgcggtgcagga

SEQ ID NO: 150172 - DNA, 25 bp, Canis familiaris
gggtcatggccagcagctgggcagg

SEQ ID NO: 150173 - DNA, 25 bp, Canis familiaris
gggtaggcagcacacagggcagtga

SEQ ID NO: 150174 - DNA, 25 bp, Canis familiaris
gggttgtgcagctgtaggtgccaga

SEQ ID NO: 150175 - DNA, 25 bp, Canis familiaris
ggggtgatggtccaaggttcaggat

SEQ ID NO: 150176 - DNA, 25 bp, Canis familiaris
ggggaagcagttctgtgtcctttcc

SEQ ID NO: 150177 - DNA, 25 bp, Canis familiaris
gggtggtgaggtcgtgattcgttcc

SEQ ID NO: 150178 - DNA, 25 bp, Canis familiaris
gggttgtgaggtggagccctgagtc

SEQ ID NO: 150179 - DNA, 25 bp, Canis familiaris
gggttgtgagactgagctcctactt

SEQ ID NO: 150180 - DNA, 25 bp, Canis familiaris
gggtttgtgacaggcacattccctt

SEQ ID NO: 150181 - DNA, 25 bp, Canis familiaris
gggtcctctgataggactcagcgcc

SEQ ID NO: 150182 - DNA, 25 bp, Canis familiaris
gggatgccatcctggaatatgctcc

SEQ ID NO: 150183 - DNA, 25 bp, Canis familiaris
gggatgccttctgggatctgacatc

SEQ ID NO: 150184 - DNA, 25 bp, Canis familiaris
gggatgcacttctgggccaagagtg

SEQ ID NO: 150185 - DNA, 25 bp, Canis familiaris
gggatccttgggcatcaagaggatg

SEQ ID NO: 150186 - DNA, 25 bp, Canis familiaris
gggatccgggatcgaagaatggtgt

SEQ ID NO: 150187 - DNA, 25 bp, Canis familiaris
gggattggggagcgtgatggagtta

SEQ ID NO: 150188 - DNA, 25 bp, Canis familiaris
gggattgggcttcagtgtgagaact

SEQ ID NO: 150189 - DNA, 25 bp, Canis familiaris
ggtgtccgacttcagcgagaggatc

SEQ ID NO: 150190 - DNA, 25 bp, Canis familiaris
gggtccaacaattggccaagtcatc

SEQ ID NO: 150191 - DNA, 25 bp, Canis familiaris
gggtccacaatgtggccaagtccaa

SEQ ID NO: 150192 - DNA, 25 bp, Canis familiaris
gggtacacgactgtgccaaggagca

SEQ ID NO: 150193 - DNA, 25 bp, Canis familiaris
gggataaggattggctctaagggct

SEQ ID NO: 150194 - DNA, 25 bp, Canis familiaris
ggggatcggagtgttaactggcttc

SEQ ID NO: 150195 - DNA, 25 bp, Canis familiaris
gggtgtggtgaggttttactggttg

SEQ ID NO: 150196 - DNA, 25 bp, Canis familiaris
gggtgctcagtaagtattacctggt

SEQ ID NO: 150197 - DNA, 25 bp, Canis familiaris
gggtgacttgattattttcctggga

SEQ ID NO: 150198 - DNA, 25 bp, Canis familiaris
gggtgaactgcacatatttaccagc

SEQ ID NO: 150199 - DNA, 25 bp, Canis familiaris
gggatttctcacagatttagctcca

SEQ ID NO: 150200 - DNA, 25 bp, Canis familiaris
gggttgtccagcttttgtattctaa

SEQ ID NO: 150201 - DNA, 25 bp, Canis familiaris
gggttgtccattatcttgtattata

SEQ ID NO: 150202 - DNA, 25 bp, Canis familiaris
gggggtccactggtattgtgttgct

SEQ ID NO: 150203 - DNA, 25 bp, Canis familiaris
gggtgtgtccagtggaagttttgta

SEQ ID NO: 150204 - DNA, 25 bp, Canis familiaris
gggttgctccaatggcaattgctgt

SEQ ID NO: 150205 - DNA, 25 bp, Canis familiaris
gggttcacctaagctaacatttggt

SEQ ID NO: 150206 - DNA, 25 bp, Canis familiaris
gggttcaccttcagcttgaatttct

SEQ ID NO: 150207 - DNA, 25 bp, Canis familiaris
gggttctcgtatgggtctaattgtc

SEQ ID NO: 150208 - DNA, 25 bp, Canis familiaris
gggttgcctggatggttcagtcagt

SEQ ID NO: 150209 - DNA, 25 bp, Canis familiaris
gggttgcctaattgagttgagctaa

SEQ ID NO: 150210 - DNA, 25 bp, Canis familiaris
gggtatctctacatctttactggtg

SEQ ID NO: 150211 - DNA, 25 bp, Canis familiaris
gggtatttgtcttttctaatggctg

SEQ ID NO: 150212 - DNA, 25 bp, Canis familiaris
gggtattgttttcttttgagctggc

SEQ ID NO: 150213 - DNA, 25 bp, Canis familiaris
gggtgacatgttagttttattgagc

SEQ ID NO: 150214 - DNA, 25 bp, Canis familiaris
gggtgccaggtatctttttgaatca

SEQ ID NO: 150215 - DNA, 25 bp, Canis familiaris
gggatccatctgaatggttttatgt

SEQ ID NO: 150216 - DNA, 25 bp, Canis familiaris
gggtcctctgaaactaattttctat

SEQ ID NO: 150217 - DNA, 25 bp, Canis familiaris
gggatcccataaattctatttttct

SEQ ID NO: 150218 - DNA, 25 bp, Canis familiaris
gggttgttaatgatgtctattcttt

SEQ ID NO: 150219 - DNA, 25 bp, Canis familiaris
gggttgttctagtactgtatttggc

SEQ ID NO: 150220 - DNA, 25 bp, Canis familiaris
gggattgtcaatgaacagttcgtgc

SEQ ID NO: 150221 - DNA, 25 bp, Canis familiaris
gggttccagatggaccagttaatcc

SEQ ID NO: 150222 - DNA, 25 bp, Canis familiaris
gggattcctaagacgcatgtgtaag

SEQ ID NO: 150223 - DNA, 25 bp, Canis familiaris
gggatatcgctggtgttgctgatgt

SEQ ID NO: 150224 - DNA, 25 bp, Canis familiaris
gggattccgaggatgatgcagaagt

SEQ ID NO: 150225 - DNA, 25 bp, Canis familiaris
gggttctcttgctgtgatgcagaca

SEQ ID NO: 150226 - DNA, 25 bp, Canis familiaris
gggtagcgccgctagtgcagctacc

SEQ ID NO: 150227 - DNA, 25 bp, Canis familiaris
gggtgagctccctatgtttaagcac

SEQ ID NO: 150228 - DNA, 25 bp, Canis familiaris
gggtgaccctttatgtctgattccc

SEQ ID NO: 150229 - DNA, 25 bp, Canis familiaris
gggtcataactgatttcattttcct

SEQ ID NO: 150230 - DNA, 25 bp, Canis familiaris
gggtccatacttttattggcttcct

SEQ ID NO: 150231 - DNA, 25 bp, Canis familiaris
ggtgtccgcagtattattgcctaag

SEQ ID NO: 150232 - DNA, 25 bp, Canis familiaris
gggattgctcagtttgctttttaag

SEQ ID NO: 150233 - DNA, 25 bp, Canis familiaris
gggattgctcctatccattttataa

SEQ ID NO: 150234 - DNA, 25 bp, Canis familiaris
gggatctctccatttaagtctttta

SEQ ID NO: 150235 - DNA, 25 bp, Canis familiaris
gggatcccaacaatagcagtttatt

SEQ ID NO: 150236 - DNA, 25 bp, Canis familiaris
gggatcccaatcatcagtatattct

SEQ ID NO: 150237 - DNA, 25 bp, Canis familiaris
gggtaccaatcacagttttccagag

SEQ ID NO: 150238 - DNA, 25 bp, Canis familiaris
gggtgcccaagactggtggttggta

SEQ ID NO: 150239 - DNA, 25 bp, Canis familiaris
gggatcgccaggcgttttctgagca

SEQ ID NO: 150240 - DNA, 25 bp, Canis familiaris
gggatcgtcggaagttgtaaggcga

SEQ ID NO: 150241 - DNA, 25 bp, Canis familiaris
gggtcagggaggctttagaggcact

SEQ ID NO: 150242 - DNA, 25 bp, Canis familiaris
gggtcggtaggtatgtgggtactgg

SEQ ID NO: 150243 - DNA, 25 bp, Canis familiaris
gggtctagaatgcttgtgttgagta

SEQ ID NO: 150244 - DNA, 25 bp, Canis familiaris
gggtctcaaacattttgtaattctc

SEQ ID NO: 150245 - DNA, 25 bp, Canis familiaris
gggttctacacattcctgaaattct

SEQ ID NO: 150246 - DNA, 25 bp, Canis familiaris
ggtgtttgtacattgcacagaaact

SEQ ID NO: 150247 - DNA, 25 bp, Canis familiaris
ggtgtattgtacgagcattgaaaga

SEQ ID NO: 150248 - DNA, 25 bp, Canis familiaris
gggtctttcagcgagcaaggcatta

SEQ ID NO: 150249 - DNA, 25 bp, Canis familiaris
gggtgcttcttggagagcaggtcca

SEQ ID NO: 150250 - DNA, 25 bp, Canis familiaris
gggtttcatgatctaatgtctctca

SEQ ID NO: 150251 - DNA, 25 bp, Canis familiaris
gggtctttgcattttatctgcccca

SEQ ID NO: 150252 - DNA, 25 bp, Canis familiaris
gggtcagttttttgcttgcgaacac

SEQ ID NO: 150253 - DNA, 25 bp, Canis familiaris
gggtcatttctactgtgaaggaata

SEQ ID NO: 150254 - DNA, 25 bp, Canis familiaris
gggtatgttctatttgttgctgtaa

SEQ ID NO: 150255 - DNA, 25 bp, Canis familiaris
gggatattgccttatttgtctgtaa

SEQ ID NO: 150256 - DNA, 25 bp, Canis familiaris
gggatattatccctgttttatgaat

SEQ ID NO: 150257 - DNA, 25 bp, Canis familiaris
gggattcttccacttgttgattatt

SEQ ID NO: 150258 - DNA, 25 bp, Canis familiaris
gggattgaatcccttgttgggctcc

SEQ ID NO: 150259 - DNA, 25 bp, Canis familiaris
gggtcgaatctgaacttgacggcca

SEQ ID NO: 150260 - DNA, 25 bp, Canis familiaris
gggtcagagtttactgtgggggctg

SEQ ID NO: 150261 - DNA, 25 bp, Canis familiaris
gggtcatggtttttgtgctggactt

SEQ ID NO: 150262 - DNA, 25 bp, Canis familiaris
gggttgcatggtgttggagaacatt

SEQ ID NO: 150263 - DNA, 25 bp, Canis familiaris
gggtctttgtcacttggaagctcag

SEQ ID NO: 150264 - DNA, 25 bp, Canis familiaris
gggtattctgaagatcgaagcctgt

SEQ ID NO: 150265 - DNA, 25 bp, Canis familiaris
gggttactgacgtataaacgctggt

SEQ ID NO: 150266 - DNA, 25 bp, Canis familiaris
gggattagctagcaatggatacggc

SEQ ID NO: 150267 - DNA, 25 bp, Canis familiaris
gggattgagccccacaggggctccc

SEQ ID NO: 150268 - DNA, 25 bp, Canis familiaris
gggattctccatcccagaggtgttc

SEQ ID NO: 150269 - DNA, 25 bp, Canis familiaris
ggtgatccatacacacctggctttc

SEQ ID NO: 150270 - DNA, 25 bp, Canis familiaris
gggatacatatcccatctctttttc

SEQ ID NO: 150271 - DNA, 25 bp, Canis familiaris
gggatacaagcacccttatgtttat

SEQ ID NO: 150272 - DNA, 25 bp, Canis familiaris
gggatagagtggcatctttgtttat

SEQ ID NO: 150273 - DNA, 25 bp, Canis familiaris
gggttggtggtgttttgtgctaata

SEQ ID NO: 150274 - DNA, 25 bp, Canis familiaris
gggtctggggtgtgtatttattcgt

SEQ ID NO: 150275 - DNA, 25 bp, Canis familiaris
gggttatgggagtgctgctttgtaa

SEQ ID NO: 150276 - DNA, 25 bp, Canis familiaris
gggtgataggatatactgtctagat

SEQ ID NO: 150277 - DNA, 25 bp, Canis familiaris
gggttgggatgaagagctggctggt

SEQ ID NO: 150278 - DNA, 25 bp, Canis familiaris
gggtctaagtctacagtggctgtat

SEQ ID NO: 150279 - DNA, 25 bp, Canis familiaris
gggttccaatggacgttgctttacg

SEQ ID NO: 150280 - DNA, 25 bp, Canis familiaris
gggttcctatcgaaccgctttgagc

SEQ ID NO: 150281 - DNA, 25 bp, Canis familiaris
gggattgcttataacaccctgttac

SEQ ID NO: 150282 - DNA, 25 bp, Canis familiaris
gggttgtgatatcaatccctgcatt

SEQ ID NO: 150283 - DNA, 25 bp, Canis familiaris
gggggttaggatttcagcgtatgat

SEQ ID NO: 150284 - DNA, 25 bp, Canis familiaris
ggggacgtagtttatcacgataaag

SEQ ID NO: 150285 - DNA, 25 bp, Canis familiaris
ggaggacgtagtcaaggcttccagg

SEQ ID NO: 150286 - DNA, 25 bp, Canis familiaris
ggaggagccggtggagggcttccgg

SEQ ID NO: 150287 - DNA, 25 bp, Canis familiaris
gggtaacgttgctagggtttcacag

SEQ ID NO: 150288 - DNA, 25 bp, Canis familiaris
gggtagacggtgcaggcagagtaca

SEQ ID NO: 150289 - DNA, 25 bp, Canis familiaris
gggtaggggtggaggagtccacctg

SEQ ID NO: 150290 - DNA, 25 bp, Canis familiaris
ggttaggggggcatccgaaacacag

SEQ ID NO: 150291 - DNA, 25 bp, Canis familiaris
gggtaaggaggacatccggaacaca

SEQ ID NO: 150292 - DNA, 25 bp, Canis familiaris
gggtttgtgggatcccaggacgcac

SEQ ID NO: 150293 - DNA, 25 bp, Canis familiaris
gggattttggggcacgcacagaacc

SEQ ID NO: 150294 - DNA, 25 bp, Canis familiaris
gggttttggataggatcccagatca

SEQ ID NO: 150295 - DNA, 25 bp, Canis familiaris
gggttgttagaagggctacattcag

SEQ ID NO: 150296 - DNA, 25 bp, Canis familiaris
gggtctttatggacgtctactacgt

SEQ ID NO: 150297 - DNA, 25 bp, Canis familiaris
gggatttttatacactacacacgat

SEQ ID NO: 150298 - DNA, 25 bp, Canis familiaris
gggttattctaattaatagacctgt

SEQ ID NO: 150299 - DNA, 25 bp, Canis familiaris
gggtctttttcttattagcacattt

SEQ ID NO: 150300 - DNA, 25 bp, Canis familiaris
gggtttttttgctataagcagaggt

SEQ ID NO: 150301 - DNA, 25 bp, Canis familiaris
gggtttcttcattcaataaactggt

SEQ ID NO: 150302 - DNA, 25 bp, Canis familiaris
gggattattttctgatgggactagc

SEQ ID NO: 150303 - DNA, 25 bp, Canis familiaris
gggatttgttcttagacgtctctac

SEQ ID NO: 150304 - DNA, 25 bp, Canis familiaris
gggatttgactttatacaattgcca

SEQ ID NO: 150305 - DNA, 25 bp, Canis familiaris
gggtttctcttataacattgtcgca

SEQ ID NO: 150306 - DNA, 25 bp, Canis familiaris
gggttttctagttacaatcgccaca

SEQ ID NO: 150307 - DNA, 25 bp, Canis familiaris
gggtttgttaatgggacacacacac

SEQ ID NO: 150308 - DNA, 25 bp, Canis familiaris
gggtttgctatagctgtggctttac

SEQ ID NO: 150309 - DNA, 25 bp, Canis familiaris
gggttatctaagtttgcctaatgtc

SEQ ID NO: 150310 - DNA, 25 bp, Canis familiaris
ggggtaccaagacatgcctgagtat

SEQ ID NO: 150311 - DNA, 25 bp, Canis familiaris
ggtggtaacagtaaactcgtgtaca

SEQ ID NO: 150312 - DNA, 25 bp, Canis familiaris
ggtggtaacggagacggtgtgcctg

SEQ ID NO: 150313 - DNA, 25 bp, Canis familiaris
ggggagaaccagggacgaagtcacg

SEQ ID NO: 150314 - DNA, 25 bp, Canis familiaris
tggggagaaacctcggaatttctat

SEQ ID NO: 150315 - DNA, 25 bp, Canis familiaris
gggggaagctcctgtagatttgttt

SEQ ID NO: 150316 - DNA, 25 bp, Canis familiaris
ggggggttccatgtacatatttatc

SEQ ID NO: 150317 - DNA, 25 bp, Canis familiaris
gggggttttctgagacatgtgtatt

SEQ ID NO: 150318 - DNA, 25 bp, Canis familiaris
gggtgaggtttggtagccaggcata

SEQ ID NO: 150319 - DNA, 25 bp, Canis familiaris
gggtgaggtagtgacgaagtataac

SEQ ID NO: 150320 - DNA, 25 bp, Canis familiaris
ggggaagactgcagcctaagttaac

SEQ ID NO: 150321 - DNA, 25 bp, Canis familiaris
ggtgtaaagtttgcaaatttgagaa

SEQ ID NO: 150322 - DNA, 25 bp, Canis familiaris
gggtaaaccttgccacatttgtgaa

SEQ ID NO: 150323 - DNA, 25 bp, Canis familiaris
ggatctaaatccctaccttttgagg

SEQ ID NO: 150324 - DNA, 25 bp, Canis familiaris
ggactacgtccgaagccttcggtgt

SEQ ID NO: 150325 - DNA, 25 bp, Canis familiaris
ggggactgtacgcagccttcgattg

SEQ ID NO: 150326 - DNA, 25 bp, Canis familiaris
gggtggctgtagaccagcctgtgaa

SEQ ID NO: 150327 - DNA, 25 bp, Canis familiaris
gggggcttcatgagagccttaaaga

SEQ ID NO: 150328 - DNA, 25 bp, Canis familiaris
ggggtgcaggttctgccattgaaaa

SEQ ID NO: 150329 - DNA, 25 bp, Canis familiaris
gggttagacttcgcctgtgaaatct

SEQ ID NO: 150330 - DNA, 25 bp, Canis familiaris
gggttaggctaagatttcaacacta

SEQ ID NO: 150331 - DNA, 25 bp, Canis familiaris
gggtatcggtctattcttcaaccca

SEQ ID NO: 150332 - DNA, 25 bp, Canis familiaris
gggtcggagcctatggattaacgcc

SEQ ID NO: 150333 - DNA, 25 bp, Canis familiaris
gggtcagaacctttgctttttcagc

SEQ ID NO: 150334 - DNA, 25 bp, Canis familiaris
gggtaaagcgcttatgtactcctcc

SEQ ID NO: 150335 - DNA, 25 bp, Canis familiaris
gggtcaggtgtgaaatggcccccaa

SEQ ID NO: 150336 - DNA, 25 bp, Canis familiaris
gggtgcttggccatatggctgaccc

SEQ ID NO: 150337 - DNA, 25 bp, Canis familiaris
ggggctggtgtcctagggagcccct

SEQ ID NO: 150338 - DNA, 25 bp, Canis familiaris
gggtcatgggtcttgggtaggccct

SEQ ID NO: 150339 - DNA, 25 bp, Canis familiaris
gggtcaggggctgtggagagtggcc

SEQ ID NO: 150340 - DNA, 25 bp, Canis familiaris
gggtttggggcagggagagtggttg

SEQ ID NO: 150341 - DNA, 25 bp, Canis familiaris
gggtcttgagatggagggctggggc

SEQ ID NO: 150342 - DNA, 25 bp, Canis familiaris
gggtcgggcatgggggaagtggtga

SEQ ID NO: 150343 - DNA, 25 bp, Canis familiaris
gggtcgggcaggaggtgttggagct

SEQ ID NO: 150344 - DNA, 25 bp, Canis familiaris
gggtgggatcggagggggagaccat

SEQ ID NO: 150345 - DNA, 25 bp, Canis familiaris
gggtattgatcgggggggataaatg

SEQ ID NO: 150346 - DNA, 25 bp, Canis familiaris
gggtaatgtcagtagggtcgtaagt

SEQ ID NO: 150347 - DNA, 25 bp, Canis familiaris
gggtatatacagtgaggtagctgca

SEQ ID NO: 150348 - DNA, 25 bp, Canis familiaris
gggtcagaatcaagtgggatgggca

SEQ ID NO: 150349 - DNA, 25 bp, Canis familiaris
gggtatgatagtcgggaagaggggc

SEQ ID NO: 150350 - DNA, 25 bp, Canis familiaris
gggtgaagggggcatgagggagggc

SEQ ID NO: 150351 - DNA, 25 bp, Canis familiaris
gggttggggggactgaggtgaggca

SEQ ID NO: 150352 - DNA, 25 bp, Canis familiaris
gggtaggcccagcagtgacctgggc

SEQ ID NO: 150353 - DNA, 25 bp, Canis familiaris
gggtgggcaaaaaggactctgtcct

SEQ ID NO: 150354 - DNA, 25 bp, Canis familiaris
ggcgtgggaaggaggggctttctat

SEQ ID NO: 150355 - DNA, 25 bp, Canis familiaris
gggggaaaggtatggactttgtgag

SEQ ID NO: 150356 - DNA, 25 bp, Canis familiaris
ggggggaaggtgtggcctgattgga

SEQ ID NO: 150357 - DNA, 25 bp, Canis familiaris
gggtgaagagatggtgtgccccggt

SEQ ID NO: 150358 - DNA, 25 bp, Canis familiaris
gggtcagccagtggtgtgcatgccc

SEQ ID NO: 150359 - DNA, 25 bp, Canis familiaris
gggtatggagctggtgctgtacgcc

SEQ ID NO: 150360 - DNA, 25 bp, Canis familiaris
gggtatgtacatagcgtggaatcgc

SEQ ID NO: 150361 - DNA, 25 bp, Canis familiaris
gggttgtcatcaagcagttggacca

SEQ ID NO: 150362 - DNA, 25 bp, Canis familiaris
gggtgtgccatccaggatggccacc

SEQ ID NO: 150363 - DNA, 25 bp, Canis familiaris
gggattgcatcggaggagctgagcc

SEQ ID NO: 150364 - DNA, 25 bp, Canis familiaris
gggttgcattgtggaagccacatct

SEQ ID NO: 150365 - DNA, 25 bp, Canis familiaris
gggttgcattgtggatcccaatctc

SEQ ID NO: 150366 - DNA, 25 bp, Canis familiaris
gggtatcattgggccacaagtctct

SEQ ID NO: 150367 - DNA, 25 bp, Canis familiaris
gggtctcctgcaggctgaaagtatt

SEQ ID NO: 150368 - DNA, 25 bp, Canis familiaris
gggtccacagaacaagatgctgcat

SEQ ID NO: 150369 - DNA, 25 bp, Canis familiaris
gggtctactcactcaaatgctaatc

SEQ ID NO: 150370 - DNA, 25 bp, Canis familiaris
gggtcaaccactaagcaatcccact

SEQ ID NO: 150371 - DNA, 25 bp, Canis familiaris
gggtaacctatctgcagacatacgc

SEQ ID NO: 150372 - DNA, 25 bp, Canis familiaris
gggtcatcagcagcattgagcagaa

SEQ ID NO: 150373 - DNA, 25 bp, Canis familiaris
gggtgatacatggctctgaggaggt

SEQ ID NO: 150374 - DNA, 25 bp, Canis familiaris
gggtatacagccttcaatggtgtgg

SEQ ID NO: 150375 - DNA, 25 bp, Canis familiaris
gggttcagcctttcaatgtgatgga

SEQ ID NO: 150376 - DNA, 25 bp, Canis familiaris
gggtgtcagcgtcatagttggagta

SEQ ID NO: 150377 - DNA, 25 bp, Canis familiaris
gggttaggtgctcagtagtagaact

SEQ ID NO: 150378 - DNA, 25 bp, Canis familiaris
gggtttgtgtgctgaggatgtagtc

SEQ ID NO: 150379 - DNA, 25 bp, Canis familiaris
gggttaattcatagacagctttgta

SEQ ID NO: 150380 - DNA, 25 bp, Canis familiaris
gggtctatttcatgatatgcttctg

SEQ ID NO: 150381 - DNA, 25 bp, Canis familiaris
gggtttactgcggagatcttctaca

SEQ ID NO: 150382 - DNA, 25 bp, Canis familiaris
gggggcataatgctggatctccaac

SEQ ID NO: 150383 - DNA, 25 bp, Canis familiaris
gggtggctcgaggatggttcaacac

SEQ ID NO: 150384 - DNA, 25 bp, Canis familiaris
gggtggctccacattaaaacatact

SEQ ID NO: 150385 - DNA, 25 bp, Canis familiaris
gggttttctcttcaaatacttctct

SEQ ID NO: 150386 - DNA, 25 bp, Canis familiaris
gggttttccttctaggaacgtgctg

SEQ ID NO: 150387 - DNA, 25 bp, Canis familiaris
gggtctttgccagtcaaggacgttc

SEQ ID NO: 150388 - DNA, 25 bp, Canis familiaris
ggagcttttgcctccaaacttacac

SEQ ID NO: 150389 - DNA, 25 bp, Canis familiaris
gggtttggctttgtagacttcaaca

SEQ ID NO: 150390 - DNA, 25 bp, Canis familiaris
gggtttggctattacttgaagctaa

SEQ ID NO: 150391 - DNA, 25 bp, Canis familiaris
gggtgttggcctcatattgaactgt

SEQ ID NO: 150392 - DNA, 25 bp, Canis familiaris
gggtgtagggtgcctatctgtatgg

SEQ ID NO: 150393 - DNA, 25 bp, Canis familiaris
gggttggggtgactgggtgatggac

SEQ ID NO: 150394 - DNA, 25 bp, Canis familiaris
gggtcagaggcccatggggatacga

SEQ ID NO: 150395 - DNA, 25 bp, Canis familiaris
gggtcaggtctgcattggaaacacg

SEQ ID NO: 150396 - DNA, 25 bp, Canis familiaris
gggtgcatatgtgttactaaaacgt

SEQ ID NO: 150397 - DNA, 25 bp, Canis familiaris
gggtattgtttgtacgacactagcg

SEQ ID NO: 150398 - DNA, 25 bp, Canis familiaris
gggtgtctgtgtggctcacatacac

SEQ ID NO: 150399 - DNA, 25 bp, Canis familiaris
ggtgcttcgtgatgctcaacagcat

SEQ ID NO: 150400 - DNA, 25 bp, Canis familiaris
gggttctgatgctttcagtccatga

SEQ ID NO: 150401 - DNA, 25 bp, Canis familiaris
gggtcctgagattacagctcagctt

SEQ ID NO: 150402 - DNA, 25 bp, Canis familiaris
gggtgccttatttagcacagctatc

SEQ ID NO: 150403 - DNA, 25 bp, Canis familiaris
gggtcctagcatttcagagcaacct

SEQ ID NO: 150404 - DNA, 25 bp, Canis familiaris
gggtcctgacataaaagctccacat

SEQ ID NO: 150405 - DNA, 25 bp, Canis familiaris
gggtctctgtgtatcaagctaactc

SEQ ID NO: 150406 - DNA, 25 bp, Canis familiaris
gggtatgatttcttagaggataacc

SEQ ID NO: 150407 - DNA, 25 bp, Canis familiaris
gggtattttcatcaaggattccaac

SEQ ID NO: 150408 - DNA, 25 bp, Canis familiaris
gggttttctacatagaattccattc

SEQ ID NO: 150409 - DNA, 25 bp, Canis familiaris
gggggtacatactgaatataactta

SEQ ID NO: 150410 - DNA, 25 bp, Canis familiaris
gggttcatacaacaagttatcactt

SEQ ID NO: 150411 - DNA, 25 bp, Canis familiaris
gggttctacaaccatgggtgtcggt

SEQ ID NO: 150412 - DNA, 25 bp, Canis familiaris
ggggcttcaaaaatggctggcttgg

SEQ ID NO: 150413 - DNA, 25 bp, Canis familiaris
gggtcttcggaagtggtgtctagcc

SEQ ID NO: 150414 - DNA, 25 bp, Canis familiaris
ggggtagcggggaccatgactagtc

SEQ ID NO: 150415 - DNA, 25 bp, Canis familiaris
ggggcgatgccgggaatcgacaagc

SEQ ID NO: 150416 - DNA, 25 bp, Canis familiaris
gggggatgccctggaatggccagga

SEQ ID NO: 150417 - DNA, 25 bp, Canis familiaris
gggggtgacacttgcgagagggtga

SEQ ID NO: 150418 - DNA, 25 bp, Canis familiaris
gggggtgagtcttccaagaggtaag

SEQ ID NO: 150419 - DNA, 25 bp, Canis familiaris
gggttgggtctctccagagagctca

SEQ ID NO: 150420 - DNA, 25 bp, Canis familiaris
gggttggtgagtccctgaagcagct

SEQ ID NO: 150421 - DNA, 25 bp, Canis familiaris
gggtgtgggcaggccctaattcact

SEQ ID NO: 150422 - DNA, 25 bp, Canis familiaris
gggtgtgaaagcccgtatctgtcca

SEQ ID NO: 150423 - DNA, 25 bp, Canis familiaris
ggggtaatcagctggtactacaatc

SEQ ID NO: 150424 - DNA, 25 bp, Canis familiaris
gggtgtatatacctagaaatagaat

SEQ ID NO: 150425 - DNA, 25 bp, Canis familiaris
gggttttagctttatcgtatgactc

SEQ ID NO: 150426 - DNA, 25 bp, Canis familiaris
gggttggtaaatttcgtgccagcca

SEQ ID NO: 150427 - DNA, 25 bp, Canis familiaris
gggttgcctaagtaacattaagcca

SEQ ID NO: 150428 - DNA, 25 bp, Canis familiaris
gggtggcagcaacaaatattataga

SEQ ID NO: 150429 - DNA, 25 bp, Canis familiaris
gggtggaaatggtcagttctggggt

SEQ ID NO: 150430 - DNA, 25 bp, Canis familiaris
gggtgcccacggtgtacatgaaggt

SEQ ID NO: 150431 - DNA, 25 bp, Canis familiaris
gggtcccagcgtggggactacaggc

SEQ ID NO: 150432 - DNA, 25 bp, Canis familiaris
gggtcctctgtgtgatggacgacat

SEQ ID NO: 150433 - DNA, 25 bp, Canis familiaris
gggtctgctttgtggaacagaatgt

SEQ ID NO: 150434 - DNA, 25 bp, Canis familiaris
gggttgtcattgttggatgccaaat

SEQ ID NO: 150435 - DNA, 25 bp, Canis familiaris
gggtttgcttttggagccttatact

SEQ ID NO: 150436 - DNA, 25 bp, Canis familiaris
gggggtgtttgtgtggtattgagtc

SEQ ID NO: 150437 - DNA, 25 bp, Canis familiaris
gggggtgtttggagctctgtaaggc

SEQ ID NO: 150438 - DNA, 25 bp, Canis familiaris
ggggtattattgttggtctggtgag

SEQ ID NO: 150439 - DNA, 25 bp, Canis familiaris
gggggatatattcctggggatggac

SEQ ID NO: 150440 - DNA, 25 bp, Canis familiaris
ggggagttatctcccgggagatcct

SEQ ID NO: 150441 - DNA, 25 bp, Canis familiaris
gggtgggataatcttcgggatggtc

SEQ ID NO: 150442 - DNA, 25 bp, Canis familiaris
gggtcgtgcaaacccagcgggaaga

SEQ ID NO: 150443 - DNA, 25 bp, Canis familiaris
gggtcattctaagcctcaggagaga

SEQ ID NO: 150444 - DNA, 25 bp, Canis familiaris
ggggaactcgacgcgagatgtagat

SEQ ID NO: 150445 - DNA, 25 bp, Canis familiaris
ggggcccatggaggccggagtaagg

SEQ ID NO: 150446 - DNA, 25 bp, Canis familiaris
gggtatccatggtgacaagagtcaa

SEQ ID NO: 150447 - DNA, 25 bp, Canis familiaris
gggtatccacccctcatagagggaa

SEQ ID NO: 150448 - DNA, 25 bp, Canis familiaris
gggtgaccttccgcagatggaggta

SEQ ID NO: 150449 - DNA, 25 bp, Canis familiaris
gggtgaccattcggacagtgcgagt

SEQ ID NO: 150450 - DNA, 25 bp, Canis familiaris
gggtcacctagggcaattctgtatc

SEQ ID NO: 150451 - DNA, 25 bp, Canis familiaris
gggtactgtgagggacttcgacatc

SEQ ID NO: 150452 - DNA, 25 bp, Canis familiaris
gggtactgtgattggtattcccact

SEQ ID NO: 150453 - DNA, 25 bp, Canis familiaris
gggtacagcgcaaggtcattcccat

SEQ ID NO: 150454 - DNA, 25 bp, Canis familiaris
gggtatagtaggatcactcccacct

SEQ ID NO: 150455 - DNA, 25 bp, Canis familiaris
gggtagagccagagtaacccagcct

SEQ ID NO: 150456 - DNA, 25 bp, Canis familiaris
gggtcagaacagcagtgattcccac

SEQ ID NO: 150457 - DNA, 25 bp, Canis familiaris
gggtagtcaagccagtgtggaccac

SEQ ID NO: 150458 - DNA, 25 bp, Canis familiaris
gggtcaataaatagtgtgagtccct

SEQ ID NO: 150459 - DNA, 25 bp, Canis familiaris
gggtcaatacaagtcttcaccattt

SEQ ID NO: 150460 - DNA, 25 bp, Canis familiaris
gggtcataacaagcattgagcagaa

SEQ ID NO: 150461 - DNA, 25 bp, Canis familiaris
gggtcaacacgaagcgtagcagccg

SEQ ID NO: 150462 - DNA, 25 bp, Canis familiaris
gggtccagactggacggaagccaag

SEQ ID NO: 150463 - DNA, 25 bp, Canis familiaris
gggtccacagcctggagaaccaagc

SEQ ID NO: 150464 - DNA, 25 bp, Canis familiaris
gggtccaagccacaggcagatcaag

SEQ ID NO: 150465 - DNA, 25 bp, Canis familiaris
gggtcacctgtcccaaagagaaggc

SEQ ID NO: 150466 - DNA, 25 bp, Canis familiaris
gggtgcccatcctcaaatacaaggc

SEQ ID NO: 150467 - DNA, 25 bp, Canis familiaris
gggtgaagtcctgcaacttcacggc

SEQ ID NO: 150468 - DNA, 25 bp, Canis familiaris
gggtatggtttgaaacttcctgact

SEQ ID NO: 150469 - DNA, 25 bp, Canis familiaris
gggtcattggttaatactttcttgg

SEQ ID NO: 150470 - DNA, 25 bp, Canis familiaris
gggtttggcattatcattttttggg

SEQ ID NO: 150471 - DNA, 25 bp, Canis familiaris
gggtttcacttgctttgatgtttga

SEQ ID NO: 150472 - DNA, 25 bp, Canis familiaris
gggtttccttatttatcatgtatgt

SEQ ID NO: 150473 - DNA, 25 bp, Canis familiaris
gggtttcctgtggagatagccaagt

SEQ ID NO: 150474 - DNA, 25 bp, Canis familiaris
gggttcctctcggaatgacgcaagc

SEQ ID NO: 150475 - DNA, 25 bp, Canis familiaris
gggttcctctcagagcgagcagact

SEQ ID NO: 150476 - DNA, 25 bp, Canis familiaris
gggttttcttgtagcgagagacgca

SEQ ID NO: 150477 - DNA, 25 bp, Canis familiaris
gggtatttcatgtcctgcgagaaca

SEQ ID NO: 150478 - DNA, 25 bp, Canis familiaris
gggtgtgtttccaggagaacttcaa

SEQ ID NO: 150479 - DNA, 25 bp, Canis familiaris
gggtgatgttgagaagggaaatttt

SEQ ID NO: 150480 - DNA, 25 bp, Canis familiaris
ggggattagatggtaggcagtcaaa

SEQ ID NO: 150481 - DNA, 25 bp, Canis familiaris
ggggtcgtgggatggagtccagagc

SEQ ID NO: 150482 - DNA, 25 bp, Canis familiaris
gggtgtggtggtaatccaatcaaac

SEQ ID NO: 150483 - DNA, 25 bp, Canis familiaris
gggtggaggtctatcaaaacacttt

SEQ ID NO: 150484 - DNA, 25 bp, Canis familiaris
gggtcacggggcacaagaaacctcg

SEQ ID NO: 150485 - DNA, 25 bp, Canis familiaris
gggtctctggggagcacagcagaca

SEQ ID NO: 150486 - DNA, 25 bp, Canis familiaris
gggttctgggagaccaggctgtctc

SEQ ID NO: 150487 - DNA, 25 bp, Canis familiaris
gggtagctgtgcagactgagtgtgg

SEQ ID NO: 150488 - DNA, 25 bp, Canis familiaris
gggtaggtctgggtgactgtttcag

SEQ ID NO: 150489 - DNA, 25 bp, Canis familiaris
gggtaggaagagggagctgtgtatc

SEQ ID NO: 150490 - DNA, 25 bp, Canis familiaris
gggtcagcagcaagatgtagttttt

SEQ ID NO: 150491 - DNA, 25 bp, Canis familiaris
gggtcatcacaattttgtctatatg

SEQ ID NO: 150492 - DNA, 25 bp, Canis familiaris
gggtatccaagtcctgtctaggatt

SEQ ID NO: 150493 - DNA, 25 bp, Canis familiaris
gggtgaccaggggcttcctggagtc

SEQ ID NO: 150494 - DNA, 25 bp, Canis familiaris
ggagtaccggaagcccattgattgg

SEQ ID NO: 150495 - DNA, 25 bp, Canis familiaris
gggtaccgatcccggaattgttgcg

SEQ ID NO: 150496 - DNA, 25 bp, Canis familiaris
gggtgaccagataccgggattcgtc

SEQ ID NO: 150497 - DNA, 25 bp, Canis familiaris
ggggccacaaacggagttttgactg

SEQ ID NO: 150498 - DNA, 25 bp, Canis familiaris
gggggcaaatacgtagactccgagg

SEQ ID NO: 150499 - DNA, 25 bp, Canis familiaris
gggggaatttgcagaaatccaaggg

SEQ ID NO: 150500 - DNA, 25 bp, Canis familiaris
ggggtgagcccgagaagaccaagga

SEQ ID NO: 150501 - DNA, 25 bp, Canis familiaris
gggtgggcgctctataaagaacggc

SEQ ID NO: 150502 - DNA, 25 bp, Canis familiaris
gggtggggaaattcaagtggagaca

SEQ ID NO: 150503 - DNA, 25 bp, Canis familiaris
gggtggggacccaattgctggaaga

SEQ ID NO: 150504 - DNA, 25 bp, Canis familiaris
gggtggggacctgacagcagaagga

SEQ ID NO: 150505 - DNA, 25 bp, Canis familiaris
gggggggagacgcagaattgatgga

SEQ ID NO: 150506 - DNA, 25 bp, Canis familiaris
gggtggaaggcctggaagtgcatgg

SEQ ID NO: 150507 - DNA, 25 bp, Canis familiaris
ggggttctggccagtagagctgatc

SEQ ID NO: 150508 - DNA, 25 bp, Canis familiaris
gggtttcagcccagcagaagcatta

SEQ ID NO: 150509 - DNA, 25 bp, Canis familiaris
gggtcgtactccttgagagcagttc

SEQ ID NO: 150510 - DNA, 25 bp, Canis familiaris
gggtggtgaccctaaatcatgtggc

SEQ ID NO: 150511 - DNA, 25 bp, Canis familiaris
gggtgctgttcaccacagtaagtgg

SEQ ID NO: 150512 - DNA, 25 bp, Canis familiaris
gggtctttcccagggacattggtca

SEQ ID NO: 150513 - DNA, 25 bp, Canis familiaris
gggtgtttcctaggaacacagtggt

SEQ ID NO: 150514 - DNA, 25 bp, Canis familiaris
gggtttctgccttggtcacacaagg

SEQ ID NO: 150515 - DNA, 25 bp, Canis familiaris
gggtctattgccttgagaaaatggg

SEQ ID NO: 150516 - DNA, 25 bp, Canis familiaris
gggtccagtgccctggtgaaggggc

SEQ ID NO: 150517 - DNA, 25 bp, Canis familiaris
gggtctcaggacagtggaccggcgc

SEQ ID NO: 150518 - DNA, 25 bp, Canis familiaris
gggtatagtagcatttatctccccg

SEQ ID NO: 150519 - DNA, 25 bp, Canis familiaris
tgtgcgtgtaatttttttggcccca

SEQ ID NO: 150520 - DNA, 25 bp, Canis familiaris
tgggttcaattcttgtaagggcctt

SEQ ID NO: 150521 - DNA, 25 bp, Canis familiaris
ggggacacttgatgaagggcccttg

SEQ ID NO: 150522 - DNA, 25 bp, Canis familiaris
ggggcataattgtgaccgacccact

SEQ ID NO: 150523 - DNA, 25 bp, Canis familiaris
gggtattattccgaccgattgccac

SEQ ID NO: 150524 - DNA, 25 bp, Canis familiaris
gggtgatttcgagacttgttgccaa

SEQ ID NO: 150525 - DNA, 25 bp, Canis familiaris
gggtttctcagactatctggactgc

SEQ ID NO: 150526 - DNA, 25 bp, Canis familiaris
gggtttctcagactttctgaactcc

SEQ ID NO: 150527 - DNA, 25 bp, Canis familiaris
gggtataaagatcttgctgcccttc

SEQ ID NO: 150528 - DNA, 25 bp, Canis familiaris
gggtcaaaaacttctgccctcataa

SEQ ID NO: 150529 - DNA, 25 bp, Canis familiaris
gggtacagaatttgagtgcccgtaa

SEQ ID NO: 150530 - DNA, 25 bp, Canis familiaris
gggtaacagctatttgtcctagcta

SEQ ID NO: 150531 - DNA, 25 bp, Canis familiaris
gggtataattcatttcatcccaatt

SEQ ID NO: 150532 - DNA, 25 bp, Canis familiaris
gggtatcagctttattctacacttt

SEQ ID NO: 150533 - DNA, 25 bp, Canis familiaris
gggtaaggccaaattgccagcattt

SEQ ID NO: 150534 - DNA, 25 bp, Canis familiaris
ggggaaagccaaattgccaaaactg

SEQ ID NO: 150535 - DNA, 25 bp, Canis familiaris
gggtgtggagccttttcagcaaacc

SEQ ID NO: 150536 - DNA, 25 bp, Canis familiaris
ggggatggacaggtttatcaaacga

SEQ ID NO: 150537 - DNA, 25 bp, Canis familiaris
ggggatgcaaccgacatgttcaaat

SEQ ID NO: 150538 - DNA, 25 bp, Canis familiaris
gggggcatctccgacttaaaaagat

SEQ ID NO: 150539 - DNA, 25 bp, Canis familiaris
gggggcctatgcacgtaataataat

SEQ ID NO: 150540 - DNA, 25 bp, Canis familiaris
gggggcctatcagagtttttgactc

SEQ ID NO: 150541 - DNA, 25 bp, Canis familiaris
gggggatctccatatttgttatagt

SEQ ID NO: 150542 - DNA, 25 bp, Canis familiaris
gggggatgtcaatgaaccagttcgt

SEQ ID NO: 150543 - DNA, 25 bp, Canis familiaris
gggtcgactcaatcacatagcagtt

SEQ ID NO: 150544 - DNA, 25 bp, Canis familiaris
gggtggaagctgtacatgcattggt

SEQ ID NO: 150545 - DNA, 25 bp, Canis familiaris
gggtagaacatgtgctcttgatctt

SEQ ID NO: 150546 - DNA, 25 bp, Canis familiaris
gggtctaatcactactgttgttttg

SEQ ID NO: 150547 - DNA, 25 bp, Canis familiaris
gggtttatccacagattgtattccg

SEQ ID NO: 150548 - DNA, 25 bp, Canis familiaris
gggtgttaccaccagatgtgctagt

SEQ ID NO: 150549 - DNA, 25 bp, Canis familiaris
gggtattattcccagttgtactgat

SEQ ID NO: 150550 - DNA, 25 bp, Canis familiaris
ggtgtcatcgactctagtttacgta

SEQ ID NO: 150551 - DNA, 25 bp, Canis familiaris
ggagtcaatcgatctagtttacgta

SEQ ID NO: 150552 - DNA, 25 bp, Canis familiaris
gggtaatattactattttacactga

SEQ ID NO: 150553 - DNA, 25 bp, Canis familiaris
gggtgtttaacatcactgtacttgg

SEQ ID NO: 150554 - DNA, 25 bp, Canis familiaris
ggtggttagaactcggtcttcagga

SEQ ID NO: 150555 - DNA, 25 bp, Canis familiaris
gggggtgaaactgtggtgtgtggga

SEQ ID NO: 150556 - DNA, 25 bp, Canis familiaris
gggtgggcaagagggggtgagggct

SEQ ID NO: 150557 - DNA, 25 bp, Canis familiaris
gggtgtacaaaccacttggcaaggc

SEQ ID NO: 150558 - DNA, 25 bp, Canis familiaris
gggtttaaagccactgcagcaggag

SEQ ID NO: 150559 - DNA, 25 bp, Canis familiaris
ggggttaagcccaatgccaaagctg

SEQ ID NO: 150560 - DNA, 25 bp, Canis familiaris
gggggaaagggctattatcaagtga

SEQ ID NO: 150561 - DNA, 25 bp, Canis familiaris
ggggaatggtgaaaatttaagtcat

SEQ ID NO: 150562 - DNA, 25 bp, Canis familiaris
ggtggatccggacaattgacaaaac

SEQ ID NO: 150563 - DNA, 25 bp, Canis familiaris
ggtggaacggcttgaaaggacaaag

SEQ ID NO: 150564 - DNA, 25 bp, Canis familiaris
ggggcacacccagaaagggcaagcg

SEQ ID NO: 150565 - DNA, 25 bp, Canis familiaris
ggggacaccacaaacagaagtaacg

SEQ ID NO: 150566 - DNA, 25 bp, Canis familiaris
gggtcacccagaatcacgtagtagg

SEQ ID NO: 150567 - DNA, 25 bp, Canis familiaris
ggggccccacaatgctgtaggggtg

SEQ ID NO: 150568 - DNA, 25 bp, Canis familiaris
gggggcccagaagctggaaagtcgg

SEQ ID NO: 150569 - DNA, 25 bp, Canis familiaris
ggggaactggaagatgaacgggcgc

SEQ ID NO: 150570 - DNA, 25 bp, Canis familiaris
ggggtccggagagtgaagggagccg

SEQ ID NO: 150571 - DNA, 25 bp, Canis familiaris
ggggattctcggttcaagagacctc

SEQ ID NO: 150572 - DNA, 25 bp, Canis familiaris
ggggatctctggaaccacaatagtt

SEQ ID NO: 150573 - DNA, 25 bp, Canis familiaris
ggggtactgggggcaacatgttgag

SEQ ID NO: 150574 - DNA, 25 bp, Canis familiaris
gggtgtagcttgggcctaaggagcc

SEQ ID NO: 150575 - DNA, 25 bp, Canis familiaris
gggtgtgactccagtaaagtggatt

SEQ ID NO: 150576 - DNA, 25 bp, Canis familiaris
gggggttcaaggccacagagggata

SEQ ID NO: 150577 - DNA, 25 bp, Canis familiaris
gggtcctgatataagcccaagggct

SEQ ID NO: 150578 - DNA, 25 bp, Canis familiaris
ggagtccattatcagtccattgggg

SEQ ID NO: 150579 - DNA, 25 bp, Canis familiaris
gggtctattctcagtgcactggagg

SEQ ID NO: 150580 - DNA, 25 bp, Canis familiaris
gggtcaatcctgatgtcttgggttt

SEQ ID NO: 150581 - DNA, 25 bp, Canis familiaris
gggtatactcgaaatcttgtggatg

SEQ ID NO: 150582 - DNA, 25 bp, Canis familiaris
gggtatgcaacaataatcatttggg

SEQ ID NO: 150583 - DNA, 25 bp, Canis familiaris
gggtctcaaagtaggctgtgtggca

SEQ ID NO: 150584 - DNA, 25 bp, Canis familiaris
gggtgctccaggaggctctggacaa

SEQ ID NO: 150585 - DNA, 25 bp, Canis familiaris
gggtgccaggaatgagcagtggtca

SEQ ID NO: 150586 - DNA, 25 bp, Canis familiaris
gggtccagcggacgtgatgtgtgtc

SEQ ID NO: 150587 - DNA, 25 bp, Canis familiaris
gggtgccctatgccagtgtggcatt

SEQ ID NO: 150588 - DNA, 25 bp, Canis familiaris
gggtgacatctgtccagtcaggtat

SEQ ID NO: 150589 - DNA, 25 bp, Canis familiaris
gggtagctcagtccattaggtgccc

SEQ ID NO: 150590 - DNA, 25 bp, Canis familiaris
gggtaatcacattcctagtgtcccc

SEQ ID NO: 150591 - DNA, 25 bp, Canis familiaris
gggtgttcaatttgtactgactcct

SEQ ID NO: 150592 - DNA, 25 bp, Canis familiaris
ggggttacaagagtcactatccgga

SEQ ID NO: 150593 - DNA, 25 bp, Canis familiaris
ggggtaccaggatacaatttgtagt

SEQ ID NO: 150594 - DNA, 25 bp, Canis familiaris
ggtggtaccttgagaaatttgaaga

SEQ ID NO: 150595 - DNA, 25 bp, Canis familiaris
gggtgttcctatgaaaactttcaca

SEQ ID NO: 150596 - DNA, 25 bp, Canis familiaris
gggtatttttgcacaaactcccaca

SEQ ID NO: 150597 - DNA, 25 bp, Canis familiaris
ggggtctctatttgtcaaccccgat

SEQ ID NO: 150598 - DNA, 25 bp, Canis familiaris
ggggttccattgtatttccagacct

SEQ ID NO: 150599 - DNA, 25 bp, Canis familiaris
gggggtccgagaacatatccagaac

SEQ ID NO: 150600 - DNA, 25 bp, Canis familiaris
gggggccagggaacttctggaagca

SEQ ID NO: 150601 - DNA, 25 bp, Canis familiaris
ggggtcaagtgtaactccatggaaa

SEQ ID NO: 150602 - DNA, 25 bp, Canis familiaris
gggggcaactgaatggctcagtcga

SEQ ID NO: 150603 - DNA, 25 bp, Canis familiaris
gggggcaagtgctggaattcgcctg

SEQ ID NO: 150604 - DNA, 25 bp, Canis familiaris
gggtgcgaagatctgtgtttggccc

SEQ ID NO: 150605 - DNA, 25 bp, Canis familiaris
gggtggcaagcacattgggatggtg

SEQ ID NO: 150606 - DNA, 25 bp, Canis familiaris
gggggagacggatgggtggatgggg

SEQ ID NO: 150607 - DNA, 25 bp, Canis familiaris
gggggagggtgatgtggggatggtc

SEQ ID NO: 150608 - DNA, 25 bp, Canis familiaris
gggtgggggagtctggatgggacac

SEQ ID NO: 150609 - DNA, 25 bp, Canis familiaris
gggtgggggagagtgtgggaggacg

SEQ ID NO: 150610 - DNA, 25 bp, Canis familiaris
gggggagggggtagtcaactgagct

SEQ ID NO: 150611 - DNA, 25 bp, Canis familiaris
ggggaggaagtggattagccctgcc

SEQ ID NO: 150612 - DNA, 25 bp, Canis familiaris
gggtgaggagggacagtcccctgcc

SEQ ID NO: 150613 - DNA, 25 bp, Canis familiaris
gggtgagggggaagggctgtcagtt

SEQ ID NO: 150614 - DNA, 25 bp, Canis familiaris
ggaggtaagggcagtgggaagtagt

SEQ ID NO: 150615 - DNA, 25 bp, Canis familiaris
ggaggtcaaggtcaagtgggtgtag

SEQ ID NO: 150616 - DNA, 25 bp, Canis familiaris
ggggaccagaccaaaattggtgaag

SEQ ID NO: 150617 - DNA, 25 bp, Canis familiaris
ggtggaccgattatccgtggtggaa

SEQ ID NO: 150618 - DNA, 25 bp, Canis familiaris
ggggacctgatatttccggtactgt

SEQ ID NO: 150619 - DNA, 25 bp, Canis familiaris
gggtagcactattcattccaagtac

SEQ ID NO: 150620 - DNA, 25 bp, Canis familiaris
gggtgagtctatgcattataacaag

SEQ ID NO: 150621 - DNA, 25 bp, Canis familiaris
ggaggcctccattagattaacaagc

SEQ ID NO: 150622 - DNA, 25 bp, Canis familiaris
gggtgcctcgttggttaagcattcc

SEQ ID NO: 150623 - DNA, 25 bp, Canis familiaris
gggtagctcagtttgttaaatgtcc

SEQ ID NO: 150624 - DNA, 25 bp, Canis familiaris
gggtggctcaattgggtaaggtcca

SEQ ID NO: 150625 - DNA, 25 bp, Canis familiaris
gggtgcctcaattggttaaacctct

SEQ ID NO: 150626 - DNA, 25 bp, Canis familiaris
gggtcgctctatttttaattcttga

SEQ ID NO: 150627 - DNA, 25 bp, Canis familiaris
gggtccctgaaatttaatgcttggt

SEQ ID NO: 150628 - DNA, 25 bp, Canis familiaris
gggtcatgcttataattgtatcttt

SEQ ID NO: 150629 - DNA, 25 bp, Canis familiaris
gggtcgctttgctgaatgtttttag

SEQ ID NO: 150630 - DNA, 25 bp, Canis familiaris
gggtactgcctcagaatgttcattt

SEQ ID NO: 150631 - DNA, 25 bp, Canis familiaris
ggtcaagtccgacgaagtgtcttcg

SEQ ID NO: 150632 - DNA, 25 bp, Canis familiaris
gggtgttcctggcaatggtttcagc

SEQ ID NO: 150633 - DNA, 25 bp, Canis familiaris
gggtgtcctggataagtgttctgag

SEQ ID NO: 150634 - DNA, 25 bp, Canis familiaris
ggggtttgagagcactgtttttggg

SEQ ID NO: 150635 - DNA, 25 bp, Canis familiaris
ggggtttcatctctctttaatataa

SEQ ID NO: 150636 - DNA, 25 bp, Canis familiaris
gggggcactgactgttttaaacaca

SEQ ID NO: 150637 - DNA, 25 bp, Canis familiaris
gggggcaggcagtgttgcttagagc

SEQ ID NO: 150638 - DNA, 25 bp, Canis familiaris
gggggcatggaacactgcttgtatc

SEQ ID NO: 150639 - DNA, 25 bp, Canis familiaris
gggggctagagcaggtcttctatac

SEQ ID NO: 150640 - DNA, 25 bp, Canis familiaris
gggtggtatggcaggacttcagtcc

SEQ ID NO: 150641 - DNA, 25 bp, Canis familiaris
gggtcgcaatacatgtactacagtg

SEQ ID NO: 150642 - DNA, 25 bp, Canis familiaris
gggtcagcaagggtccctgagggaa

SEQ ID NO: 150643 - DNA, 25 bp, Canis familiaris
gggtcagaaggattcctatgtgggc

SEQ ID NO: 150644 - DNA, 25 bp, Canis familiaris
gggtcactactttcctagatggatg

SEQ ID NO: 150645 - DNA, 25 bp, Canis familiaris
gggtcgcatacattaccaatgatgg

SEQ ID NO: 150646 - DNA, 25 bp, Canis familiaris
gggtccaactcgttcaagatgagac

SEQ ID NO: 150647 - DNA, 25 bp, Canis familiaris
gggtctccctggacatcggaggaaa

SEQ ID NO: 150648 - DNA, 25 bp, Canis familiaris
gggtctcccaggaatcaggtgttga

SEQ ID NO: 150649 - DNA, 25 bp, Canis familiaris
gggtcaaccagactacatgcaggtg

SEQ ID NO: 150650 - DNA, 25 bp, Canis familiaris
gggtgataccaacttgagcattcca

SEQ ID NO: 150651 - DNA, 25 bp, Canis familiaris
gggtcccatcaattgatggattgtc

SEQ ID NO: 150652 - DNA, 25 bp, Canis familiaris
gggtcagatctatggggatgtgctc

SEQ ID NO: 150653 - DNA, 25 bp, Canis familiaris
gggtcagaatattccttatgtctcc

SEQ ID NO: 150654 - DNA, 25 bp, Canis familiaris
gggtcagagatgttcttgatttcta

SEQ ID NO: 150655 - DNA, 25 bp, Canis familiaris
gggtcagacagtatgtgctcttgta

SEQ ID NO: 150656 - DNA, 25 bp, Canis familiaris
gggtctgatagaatatttcatgtgt

SEQ ID NO: 150657 - DNA, 25 bp, Canis familiaris
gggtgaatagatagccctgctctgt

SEQ ID NO: 150658 - DNA, 25 bp, Canis familiaris
gggtcactagataacatgtgccttg

SEQ ID NO: 150659 - DNA, 25 bp, Canis familiaris
gggtcctcaggaatcatgggctgtc

SEQ ID NO: 150660 - DNA, 25 bp, Canis familiaris
gggtgccagaggaactagaggtgct

SEQ ID NO: 150661 - DNA, 25 bp, Canis familiaris
gggtgacagagcctggtaattgtgt

SEQ ID NO: 150662 - DNA, 25 bp, Canis familiaris
ggggggactcatcaagttgctgata

SEQ ID NO: 150663 - DNA, 25 bp, Canis familiaris
gggggtgatgttcacaccctctaac

SEQ ID NO: 150664 - DNA, 25 bp, Canis familiaris
gggtggtgatatctccaccaacgaa

SEQ ID NO: 150665 - DNA, 25 bp, Canis familiaris
gggggtatacattcccacagaagca

SEQ ID NO: 150666 - DNA, 25 bp, Canis familiaris
ggggaggatcagcccccaagaatgg

SEQ ID NO: 150667 - DNA, 25 bp, Canis familiaris
gggtgcagctgggggcccaaaaaga

SEQ ID NO: 150668 - DNA, 25 bp, Canis familiaris
gggtcactggggcctgaggaaaaga

SEQ ID NO: 150669 - DNA, 25 bp, Canis familiaris
gggtccgggaccgacgatgtagaca

SEQ ID NO: 150670 - DNA, 25 bp, Canis familiaris
gggtcccgaagaaacgtatcagcgc

SEQ ID NO: 150671 - DNA, 25 bp, Canis familiaris
gggtcccgaacaagagagtccaggt

SEQ ID NO: 150672 - DNA, 25 bp, Canis familiaris
gggtctgccgtactgagaggtcagg

SEQ ID NO: 150673 - DNA, 25 bp, Canis familiaris
gggtcgcgctgagagaagagccagg

SEQ ID NO: 150674 - DNA, 25 bp, Canis familiaris
gggtgccgcctgaagagaaccagcg

SEQ ID NO: 150675 - DNA, 25 bp, Canis familiaris
gggtgcctagcgagaacagtcatcg

SEQ ID NO: 150676 - DNA, 25 bp, Canis familiaris
gggtgcaatccgaatgttcacgcat

SEQ ID NO: 150677 - DNA, 25 bp, Canis familiaris
gggtaagcatctaatgaccaagatc

SEQ ID NO: 150678 - DNA, 25 bp, Canis familiaris
gggtgaaatctgtatgaagcaagga

SEQ ID NO: 150679 - DNA, 25 bp, Canis familiaris
gggtaatgcatattcgaagatagcc

SEQ ID NO: 150680 - DNA, 25 bp, Canis familiaris
gggtctgctacaccgaagatgaagc

SEQ ID NO: 150681 - DNA, 25 bp, Canis familiaris
gggtcatgctaccttaggacagaga

SEQ ID NO: 150682 - DNA, 25 bp, Canis familiaris
gggtcttcatcttgttcgacgagga

SEQ ID NO: 150683 - DNA, 25 bp, Canis familiaris
gggtcattcactgattgcgggcagc

SEQ ID NO: 150684 - DNA, 25 bp, Canis familiaris
gggtcatactaccttgggtcatgct

SEQ ID NO: 150685 - DNA, 25 bp, Canis familiaris
gggtgtccttagatgggtagctgtg

SEQ ID NO: 150686 - DNA, 25 bp, Canis familiaris
gggtgctgagatgactttggtagga

SEQ ID NO: 150687 - DNA, 25 bp, Canis familiaris
gggtgtagaccattctgtgggagga

SEQ ID NO: 150688 - DNA, 25 bp, Canis familiaris
gggtggagaagcttgtctgtgggga

SEQ ID NO: 150689 - DNA, 25 bp, Canis familiaris
gggtcacagtgtttgtctggggtca

SEQ ID NO: 150690 - DNA, 25 bp, Canis familiaris
gggtccagagtgatggcgggaggcg

SEQ ID NO: 150691 - DNA, 25 bp, Canis familiaris
gggtgccaagtggagggagacgtgg

SEQ ID NO: 150692 - DNA, 25 bp, Canis familiaris
gggtgaaagaggtgcgagcccggct

SEQ ID NO: 150693 - DNA, 25 bp, Canis familiaris
gggtggatcaagttggctagccagg

SEQ ID NO: 150694 - DNA, 25 bp, Canis familiaris
gggtggactttctagatgagctggt

SEQ ID NO: 150695 - DNA, 25 bp, Canis familiaris
gggtggagctcgcagaattcttgta

SEQ ID NO: 150696 - DNA, 25 bp, Canis familiaris
gggtggcagtccttgtatttgttat

SEQ ID NO: 150697 - DNA, 25 bp, Canis familiaris
gggtggatggtttgcatttctgttt

SEQ ID NO: 150698 - DNA, 25 bp, Canis familiaris
gggtgagtgcgtgctgcagtgaatg

SEQ ID NO: 150699 - DNA, 25 bp, Canis familiaris
gggtggatgtgtggcttgctgaatg

SEQ ID NO: 150700 - DNA, 25 bp, Canis familiaris
gggtggatgtgtggcctcaaatgaa

SEQ ID NO: 150701 - DNA, 25 bp, Canis familiaris
gggtcagcagtcaagttctcattaa

SEQ ID NO: 150702 - DNA, 25 bp, Canis familiaris
gggtcataagcttgcgttgattaag

SEQ ID NO: 150703 - DNA, 25 bp, Canis familiaris
gggtcataagcttgcgttgattaag

SEQ ID NO: 150704 - DNA, 25 bp, Canis familiaris
gggtcataagcttgcgttgattaag

SEQ ID NO: 150705 - DNA, 25 bp, Canis familiaris
ggtgtctaaggccaattatctgtag

SEQ ID NO: 150706 - DNA, 25 bp, Canis familiaris
ggtggcttcaagggtatccgtagtt

SEQ ID NO: 150707 - DNA, 25 bp, Canis familiaris
ggggctgtaaaaataccttctgttg

SEQ ID NO: 150708 - DNA, 25 bp, Canis familiaris
gggtcacccaaaatatctttccttg

SEQ ID NO: 150709 - DNA, 25 bp, Canis familiaris
gggtgacccattaatacatatttgt

SEQ ID NO: 150710 - DNA, 25 bp, Canis familiaris
gggtgtatagtgttcaccaactgtg

SEQ ID NO: 150711 - DNA, 25 bp, Canis familiaris
ggatggatacggttcacggatcagg

SEQ ID NO: 150712 - DNA, 25 bp, Canis familiaris
ggggcaaccgtaacaagcagcagct

SEQ ID NO: 150713 - DNA, 25 bp, Canis familiaris
ggggaacctgtagctagcacagctc

SEQ ID NO: 150714 - DNA, 25 bp, Canis familiaris
gggggatcactgaggtgaccctcac

SEQ ID NO: 150715 - DNA, 25 bp, Canis familiaris
ggtggagatccgaaaggaccgtgaa

SEQ ID NO: 150716 - DNA, 25 bp, Canis familiaris
ggggtgaagccttaaaccattgcag

SEQ ID NO: 150717 - DNA, 25 bp, Canis familiaris
ggggctagagcccaaaatcactcca

SEQ ID NO: 150718 - DNA, 25 bp, Canis familiaris
ggggaaggcccaaagtatccacatc

SEQ ID NO: 150719 - DNA, 25 bp, Canis familiaris
ggggaagccaagaggtagccctaca

SEQ ID NO: 150720 - DNA, 25 bp, Canis familiaris
gggggaggaagtggattagccctgc

SEQ ID NO: 150721 - DNA, 25 bp, Canis familiaris
gggtggagaacgagtgccaccccgg

SEQ ID NO: 150722 - DNA, 25 bp, Canis familiaris
gggtgggaatacagcaggcacacgc

SEQ ID NO: 150723 - DNA, 25 bp, Canis familiaris
gggtggtgcacatacgactacacac

SEQ ID NO: 150724 - DNA, 25 bp, Canis familiaris
ggggtggcagcacaagtctacacaa

SEQ ID NO: 150725 - DNA, 25 bp, Canis familiaris
ggtgttgggccaagtctataaaagg

SEQ ID NO: 150726 - DNA, 25 bp, Canis familiaris
ggggagggtcaggatctaataaaga

SEQ ID NO: 150727 - DNA, 25 bp, Canis familiaris
gggtgggggcatctgctaaagagag

SEQ ID NO: 150728 - DNA, 25 bp, Canis familiaris
gggtgggtgccagagtcacaatgga

SEQ ID NO: 150729 - DNA, 25 bp, Canis familiaris
ggggggtctctttatcaagagctca

SEQ ID NO: 150730 - DNA, 25 bp, Canis familiaris
gggtgccacctcttaatctagaccc

SEQ ID NO: 150731 - DNA, 25 bp, Canis familiaris
gggtcaacctcactagggtgaacct

SEQ ID NO: 150732 - DNA, 25 bp, Canis familiaris
gggtaaccagcacagggggagcagg

SEQ ID NO: 150733 - DNA, 25 bp, Canis familiaris
ggggatacgaatctgaggaccctgg

SEQ ID NO: 150734 - DNA, 25 bp, Canis familiaris
ggggatcactattttgagggccgcc

SEQ ID NO: 150735 - DNA, 25 bp, Canis familiaris
ggggacacaattctggaagacgggg

SEQ ID NO: 150736 - DNA, 25 bp, Canis familiaris
gggtgaggacttcatgcaaagccgt

SEQ ID NO: 150737 - DNA, 25 bp, Canis familiaris
gggtgaatgatctccaggaagcacg

SEQ ID NO: 150738 - DNA, 25 bp, Canis familiaris
gggtgacgtgcacagtggaacgccc

SEQ ID NO: 150739 - DNA, 25 bp, Canis familiaris
ggtcgcgcggatcatgatgccaacc

SEQ ID NO: 150740 - DNA, 25 bp, Canis familiaris
gggtggctggatacatgacagccat

SEQ ID NO: 150741 - DNA, 25 bp, Canis familiaris
gggtgccatggacatgctgaccaag

SEQ ID NO: 150742 - DNA, 25 bp, Canis familiaris
gggtctcaggagcaggagcctaacc

SEQ ID NO: 150743 - DNA, 25 bp, Canis familiaris
gggtctggggcatagagcctagtcc

SEQ ID NO: 150744 - DNA, 25 bp, Canis familiaris
gggtgctggggatttacattttgac

SEQ ID NO: 150745 - DNA, 25 bp, Canis familiaris
ggggttgggagtgacatcttatagt

SEQ ID NO: 150746 - DNA, 25 bp, Canis familiaris
ggggcggtgggttcaataatacgtg

SEQ ID NO: 150747 - DNA, 25 bp, Canis familiaris
gggtctgactggcctcaataaagca

SEQ ID NO: 150748 - DNA, 25 bp, Canis familiaris
gggtggacggcaggcacagaacaga

SEQ ID NO: 150749 - DNA, 25 bp, Canis familiaris
gggtgcggtatctgctgagagacat

SEQ ID NO: 150750 - DNA, 25 bp, Canis familiaris
gggtcaggacattaggaggattcat

SEQ ID NO: 150751 - DNA, 25 bp, Canis familiaris
gggtcatggaaaggccggatctgta

SEQ ID NO: 150752 - DNA, 25 bp, Canis familiaris
gggtcatacgaatgccgcagagctt

SEQ ID NO: 150753 - DNA, 25 bp, Canis familiaris
gggtgacagttatctctgcaggtat

SEQ ID NO: 150754 - DNA, 25 bp, Canis familiaris
ggggtgggataatcttcgggatggt

SEQ ID NO: 150755 - DNA, 25 bp, Canis familiaris
gggggtgggataatcttcgggatgg

SEQ ID NO: 150756 - DNA, 25 bp, Canis familiaris
gggggatggccatagttggtgactg

SEQ ID NO: 150757 - DNA, 25 bp, Canis familiaris
gggggctgggcagatgtttgtgtgc

SEQ ID NO: 150758 - DNA, 25 bp, Canis familiaris
gggtgtggcttacagtttgctgtcc

SEQ ID NO: 150759 - DNA, 25 bp, Canis familiaris
gggtgtggcccatatcattgacccc

SEQ ID NO: 150760 - DNA, 25 bp, Canis familiaris
gggtggtcacttttattgagtcacc

SEQ ID NO: 150761 - DNA, 25 bp, Canis familiaris
gggtggtaattctacttgcagctgc

SEQ ID NO: 150762 - DNA, 25 bp, Canis familiaris
ggttgagtctcaaaacgtcgggtgc

SEQ ID NO: 150763 - DNA, 25 bp, Canis familiaris
ggttgagtgtacacctttgggtctg

SEQ ID NO: 150764 - DNA, 25 bp, Canis familiaris
ggggctatgttcacagtttggggct

SEQ ID NO: 150765 - DNA, 25 bp, Canis familiaris
gggtgttccagcacaattttgggat

SEQ ID NO: 150766 - DNA, 25 bp, Canis familiaris
gggtgttcctcaacaagaagtggga

SEQ ID NO: 150767 - DNA, 25 bp, Canis familiaris
gggtcttcaccaccatggagaaggc

SEQ ID NO: 150768 - DNA, 25 bp, Canis familiaris
gggtcttctctgatccgagaatggc

SEQ ID NO: 150769 - DNA, 25 bp, Canis familiaris
gggtctgtgctcgttattgtgaggg

SEQ ID NO: 150770 - DNA, 25 bp, Canis familiaris
gggtctcttgctgtttggagaggta

SEQ ID NO: 150771 - DNA, 25 bp, Canis familiaris
ggggtctattttcttggatggatga

SEQ ID NO: 150772 - DNA, 25 bp, Canis familiaris
ggggatattgtagccttagtggatt

SEQ ID NO: 150773 - DNA, 25 bp, Canis familiaris
ggggtctctattgcctagtgtggac

SEQ ID NO: 150774 - DNA, 25 bp, Canis familiaris
gggggttagcatgttggaggaagcc

SEQ ID NO: 150775 - DNA, 25 bp, Canis familiaris
ggtggagcccagtgagggggaagac

SEQ ID NO: 150776 - DNA, 25 bp, Canis familiaris
ggtgtgaccgagtggtccgttcaac

SEQ ID NO: 150777 - DNA, 25 bp, Canis familiaris
ggggtcctgcaaaggttggttcaga

SEQ ID NO: 150778 - DNA, 25 bp, Canis familiaris
gggtccttcaatagagtcttgtatc

SEQ ID NO: 150779 - DNA, 25 bp, Canis familiaris
ggtgtctttgactcaacattgctta

SEQ ID NO: 150780 - DNA, 25 bp, Canis familiaris
gggtggggacaaggacaggcattca

SEQ ID NO: 150781 - DNA, 25 bp, Canis familiaris
gggtgaaggacatggcagcagtatc

SEQ ID NO: 150782 - DNA, 25 bp, Canis familiaris
gggtgcgagcagttgggcgcactca

SEQ ID NO: 150783 - DNA, 25 bp, Canis familiaris
gggtcggaggctgagaggctgcagc

SEQ ID NO: 150784 - DNA, 25 bp, Canis familiaris
gggtctgtggggacagtgtgctcag

SEQ ID NO: 150785 - DNA, 25 bp, Canis familiaris
gggtctcatgacaggctttgctaga

SEQ ID NO: 150786 - DNA, 25 bp, Canis familiaris
gggtccagagaagctatcctgaggg

SEQ ID NO: 150787 - DNA, 25 bp, Canis familiaris
gggtccacagtagccacactgtggg

SEQ ID NO: 150788 - DNA, 25 bp, Canis familiaris
gggtcctgagtgggacacacgggga

SEQ ID NO: 150789 - DNA, 25 bp, Canis familiaris
gggtcctggtgtggcatacacggac

SEQ ID NO: 150790 - DNA, 25 bp, Canis familiaris
gggtcggtgtgagaccacgagtccc

SEQ ID NO: 150791 - DNA, 25 bp, Canis familiaris
ggtgaggtctggtgaacacggttcc

SEQ ID NO: 150792 - DNA, 25 bp, Canis familiaris
ggtggggatgggtcaaaaggattct

SEQ ID NO: 150793 - DNA, 25 bp, Canis familiaris
ggggagtatggttgcaaagctgaaa

SEQ ID NO: 150794 - DNA, 25 bp, Canis familiaris
ggggaaagggctcggactgatagga

SEQ ID NO: 150795 - DNA, 25 bp, Canis familiaris
ggggaaagggctgagggcaaaggag

SEQ ID NO: 150796 - DNA, 25 bp, Canis familiaris
gggtgaaggggagagggagatatag

SEQ ID NO: 150797 - DNA, 25 bp, Canis familiaris
gggggagggatagagggagagggag

SEQ ID NO: 150798 - DNA, 25 bp, Canis familiaris
ggaggacgggattaaggctagtggg

SEQ ID NO: 150799 - DNA, 25 bp, Canis familiaris
ggggtgctgggttaatggctagtac

SEQ ID NO: 150800 - DNA, 25 bp, Canis familiaris
ggggtgtggtgagaaggcgggatgc

SEQ ID NO: 150801 - DNA, 25 bp, Canis familiaris
ggggtggaggccaccgtgagtgact

SEQ ID NO: 150802 - DNA, 25 bp, Canis familiaris
gggggagggccaaggcagtgggtgc

SEQ ID NO: 150803 - DNA, 25 bp, Canis familiaris
gggggagaagtcatggttgagtgtc

SEQ ID NO: 150804 - DNA, 25 bp, Canis familiaris
gggggagtaatcaggtgtaggatgg

SEQ ID NO: 150805 - DNA, 25 bp, Canis familiaris
ggggaagtaaccgatttcactgctg

SEQ ID NO: 150806 - DNA, 25 bp, Canis familiaris
ggggatagctaccttcttatcccgg

SEQ ID NO: 150807 - DNA, 25 bp, Canis familiaris
gggtgcataaacaattctttcaaga

SEQ ID NO: 150808 - DNA, 25 bp, Canis familiaris
gggtgctacagatttcatctttcat

SEQ ID NO: 150809 - DNA, 25 bp, Canis familiaris
gggtgttatgtaatgccttgtgcct

SEQ ID NO: 150810 - DNA, 25 bp, Canis familiaris
ggggtgaatgaaactctggtagctc

SEQ ID NO: 150811 - DNA, 25 bp, Canis familiaris
ggggtgagcagagatcttggtttca

SEQ ID NO: 150812 - DNA, 25 bp, Canis familiaris
ggggatgtgcagagtttgggcctga

SEQ ID NO: 150813 - DNA, 25 bp, Canis familiaris
gggggtggactgaaaggtgtggaat

SEQ ID NO: 150814 - DNA, 25 bp, Canis familiaris
gggggtggactgatatgtgtatgtt

SEQ ID NO: 150815 - DNA, 25 bp, Canis familiaris
ggggggtcggatgaggtgatcctca

SEQ ID NO: 150816 - DNA, 25 bp, Canis familiaris
gggtgatgggcactgagggggacac

SEQ ID NO: 150817 - DNA, 25 bp, Canis familiaris
gggtgttggacgatggtcccaccca

SEQ ID NO: 150818 - DNA, 25 bp, Canis familiaris
ggggttggaaagctggccaagtcct

SEQ ID NO: 150819 - DNA, 25 bp, Canis familiaris
gggtggtggacctcatggcccacat

SEQ ID NO: 150820 - DNA, 25 bp, Canis familiaris
gggtgagtcgaaggaaggcccacgt

SEQ ID NO: 150821 - DNA, 25 bp, Canis familiaris
gggtgccttgataggaagaactaca

SEQ ID NO: 150822 - DNA, 25 bp, Canis familiaris
tggggcctggttggacaaacttgtt

SEQ ID NO: 150823 - DNA, 25 bp, Canis familiaris
gggtccacggtgtacaaattcattc

SEQ ID NO: 150824 - DNA, 25 bp, Canis familiaris
ggcgtccacggattacagtacctac

SEQ ID NO: 150825 - DNA, 25 bp, Canis familiaris
ggtgttcagggatttcctaccatta

SEQ ID NO: 150826 - DNA, 25 bp, Canis familiaris
ggtgttggtagaattcgctgctcca

SEQ ID NO: 150827 - DNA, 25 bp, Canis familiaris
gggtggagcttaattctgtgccaga

SEQ ID NO: 150828 - DNA, 25 bp, Canis familiaris
gggtggctgttaattcttcaatctt

SEQ ID NO: 150829 - DNA, 25 bp, Canis familiaris
ggggtcctatggatcctagacttcc

SEQ ID NO: 150830 - DNA, 25 bp, Canis familiaris
ggggacggtgacatgcccagtcccc

SEQ ID NO: 150831 - DNA, 25 bp, Canis familiaris
ggggacagcttgtgttccagttccc

SEQ ID NO: 150832 - DNA, 25 bp, Canis familiaris
ggggacagttgtattgggctttgga

SEQ ID NO: 150833 - DNA, 25 bp, Canis familiaris
ggggaaatggttcagacctttgtat

SEQ ID NO: 150834 - DNA, 25 bp, Canis familiaris
ggtggaggttttcagaccttggaag

SEQ ID NO: 150835 - DNA, 25 bp, Canis familiaris
ggggttgttgtatgaaccttgagac

SEQ ID NO: 150836 - DNA, 25 bp, Canis familiaris
ggggtagtgtgttagttcctatcag

SEQ ID NO: 150837 - DNA, 25 bp, Canis familiaris
ggggtttttttttcactatcatctg

SEQ ID NO: 150838 - DNA, 25 bp, Canis familiaris
ggggggtctaggtttcataatcctg

SEQ ID NO: 150839 - DNA, 25 bp, Canis familiaris
ggggtggacttgcctatttaatttg

SEQ ID NO: 150840 - DNA, 25 bp, Canis familiaris
gggggtagccttggaattaatggtg

SEQ ID NO: 150841 - DNA, 25 bp, Canis familiaris
gggtgggcaccaaggacatttgggg

SEQ ID NO: 150842 - DNA, 25 bp, Canis familiaris
gggtgtgctgcagatgaggaattga

SEQ ID NO: 150843 - DNA, 25 bp, Canis familiaris
gggtgtggcacaagagcaagggccc

SEQ ID NO: 150844 - DNA, 25 bp, Canis familiaris
gggtgcgtacatccagcagtagcgc

SEQ ID NO: 150845 - DNA, 25 bp, Canis familiaris
gggtctgctagttccagtgatggcc

SEQ ID NO: 150846 - DNA, 25 bp, Canis familiaris
gggtgctgacggtgagagcaggcca

SEQ ID NO: 150847 - DNA, 25 bp, Canis familiaris
gggtgtgctccttagagaaggctca

SEQ ID NO: 150848 - DNA, 25 bp, Canis familiaris
ggggtctcttctagaacgactggag

SEQ ID NO: 150849 - DNA, 25 bp, Canis familiaris
ggggttttcattgcactagtgcgtg

SEQ ID NO: 150850 - DNA, 25 bp, Canis familiaris
ggggtctttgttaactgaggcaggc

SEQ ID NO: 150851 - DNA, 25 bp, Canis familiaris
gggtgttttttatttcagccatgtg

SEQ ID NO: 150852 - DNA, 25 bp, Canis familiaris
gggtgccttgtaatagattctggaa

SEQ ID NO: 150853 - DNA, 25 bp, Canis familiaris
gggtctcattgtttctatatcttag

SEQ ID NO: 150854 - DNA, 25 bp, Canis familiaris
gggtctcattagatcccatttagaa

SEQ ID NO: 150855 - DNA, 25 bp, Canis familiaris
gggtccagatagatgctgtttttgt

SEQ ID NO: 150856 - DNA, 25 bp, Canis familiaris
gggtgtgcagatatgtgtggttttt

SEQ ID NO: 150857 - DNA, 25 bp, Canis familiaris
gggtggcaggtaggttgtatcttgg

SEQ ID NO: 150858 - DNA, 25 bp, Canis familiaris
gggtggaggaaagtcctccgtgcca

SEQ ID NO: 150859 - DNA, 25 bp, Canis familiaris
gggggtaataatgcacccgtccacg

SEQ ID NO: 150860 - DNA, 25 bp, Canis familiaris
gggtgtctagtactcacacccagct

SEQ ID NO: 150861 - DNA, 25 bp, Canis familiaris
gggtgactcatggatgctcggcacc

SEQ ID NO: 150862 - DNA, 25 bp, Canis familiaris
gggtgacacagttgattaagcatcc

SEQ ID NO: 150863 - DNA, 25 bp, Canis familiaris
gggtgagctcagttaatgaagacaa

SEQ ID NO: 150864 - DNA, 25 bp, Canis familiaris
gggtctctgccactgaatggctgac

SEQ ID NO: 150865 - DNA, 25 bp, Canis familiaris
gggtggctgccacagatgagtgagg

SEQ ID NO: 150866 - DNA, 25 bp, Canis familiaris
gggtgccagccctgatgggagatga

SEQ ID NO: 150867 - DNA, 25 bp, Canis familiaris
gggtccacacctaagtgatggctga

SEQ ID NO: 150868 - DNA, 25 bp, Canis familiaris
gggtcccaactcaatatgtggatgc

SEQ ID NO: 150869 - DNA, 25 bp, Canis familiaris
gggtcccagcacatttgtgcaggcc

SEQ ID NO: 150870 - DNA, 25 bp, Canis familiaris
gggtgactcagcagttgagctcagt

SEQ ID NO: 150871 - DNA, 25 bp, Canis familiaris
gggtgactggctttctagtatttag

SEQ ID NO: 150872 - DNA, 25 bp, Canis familiaris
ggggcatgggtagttagtgtttaat

SEQ ID NO: 150873 - DNA, 25 bp, Canis familiaris
ggggggcagtggtggtattgtcaat

SEQ ID NO: 150874 - DNA, 25 bp, Canis familiaris
ggggggcttcagtgcaaattacagt

SEQ ID NO: 150875 - DNA, 25 bp, Canis familiaris
ggggaagcttcagagaggttacact

SEQ ID NO: 150876 - DNA, 25 bp, Canis familiaris
ggacggacattctgagggttggttg

SEQ ID NO: 150877 - DNA, 25 bp, Canis familiaris
gggggccattgctgagttgtatggt

SEQ ID NO: 150878 - DNA, 25 bp, Canis familiaris
gggggacgatgatgttagtatggta

SEQ ID NO: 150879 - DNA, 25 bp, Canis familiaris
gggtggcctgtgacagtttggggga

SEQ ID NO: 150880 - DNA, 25 bp, Canis familiaris
gggtggcgttggatatgtggtggta

SEQ ID NO: 150881 - DNA, 25 bp, Canis familiaris
gggtggcgaaggagctggagagtct

SEQ ID NO: 150882 - DNA, 25 bp, Canis familiaris
gggtgacagaaatggagagcagagg

SEQ ID NO: 150883 - DNA, 25 bp, Canis familiaris
gggtgtcacgaaggcggcagagaag

SEQ ID NO: 150884 - DNA, 25 bp, Canis familiaris
gggtggcataaagtgggaatatact

SEQ ID NO: 150885 - DNA, 25 bp, Canis familiaris
gggtgcctggaaggaggaatctcac

SEQ ID NO: 150886 - DNA, 25 bp, Canis familiaris
gggtcctgtggagcagagcaatctt

SEQ ID NO: 150887 - DNA, 25 bp, Canis familiaris
gggtcctgcttgtcacaggatatcc

SEQ ID NO: 150888 - DNA, 25 bp, Canis familiaris
gggtcctgcacttgcagaggttccc

SEQ ID NO: 150889 - DNA, 25 bp, Canis familiaris
ggggtctgacggagatgttcccaga

SEQ ID NO: 150890 - DNA, 25 bp, Canis familiaris
ggggtttctggtggtgttgaacaca

SEQ ID NO: 150891 - DNA, 25 bp, Canis familiaris
ggggtttctgttgcataattaatat

SEQ ID NO: 150892 - DNA, 25 bp, Canis familiaris
ggggttctcagacttctgacttcaa

SEQ ID NO: 150893 - DNA, 25 bp, Canis familiaris
ggggattggaagatcattcttgaac

SEQ ID NO: 150894 - DNA, 25 bp, Canis familiaris
ggggattggacagggttatcaaccg

SEQ ID NO: 150895 - DNA, 25 bp, Canis familiaris
ggggattggacgctgctattgattc

SEQ ID NO: 150896 - DNA, 25 bp, Canis familiaris
ggggtggtcacttttattgagtcac

SEQ ID NO: 150897 - DNA, 25 bp, Canis familiaris
ggggtgtcacttttataaagtcaca

SEQ ID NO: 150898 - DNA, 25 bp, Canis familiaris
gggggtgcttattcctagaagtgcc

SEQ ID NO: 150899 - DNA, 25 bp, Canis familiaris
gggtggtgtgtttttagccatctct

SEQ ID NO: 150900 - DNA, 25 bp, Canis familiaris
gggtgtctcagtcagttgagcgttc

SEQ ID NO: 150901 - DNA, 25 bp, Canis familiaris
gggtgactcagtctgttgaactctt

SEQ ID NO: 150902 - DNA, 25 bp, Canis familiaris
ggggatcaaatcatgccagaccttg

SEQ ID NO: 150903 - DNA, 25 bp, Canis familiaris
tggggctcaaacttacaaccctaag

SEQ ID NO: 150904 - DNA, 25 bp, Canis familiaris
gggtgtcaaaggcatcagaccccga

SEQ ID NO: 150905 - DNA, 25 bp, Canis familiaris
gggtggcacaatcaatccaccccct

SEQ ID NO: 150906 - DNA, 25 bp, Canis familiaris
gggggcacgaggacagcctggtgcc

SEQ ID NO: 150907 - DNA, 25 bp, Canis familiaris
gggtgagaccaggatactccttgca

SEQ ID NO: 150908 - DNA, 25 bp, Canis familiaris
ggtgggtacaggaatctgccatcta

SEQ ID NO: 150909 - DNA, 25 bp, Canis familiaris
gggggaagggcatatgtcactaata

SEQ ID NO: 150910 - DNA, 25 bp, Canis familiaris
gggtgggagaggtcgtgatcttaat

SEQ ID NO: 150911 - DNA, 25 bp, Canis familiaris
gggtggcaggggacgagtttatcac

SEQ ID NO: 150912 - DNA, 25 bp, Canis familiaris
ggtggcacggggacgtagtttatca

SEQ ID NO: 150913 - DNA, 25 bp, Canis familiaris
ggggagtgggagatacagcttttca

SEQ ID NO: 150914 - DNA, 25 bp, Canis familiaris
ggggggaggagtatgactatattca

SEQ ID NO: 150915 - DNA, 25 bp, Canis familiaris
gggggaggtgggatgcctgtactcc

SEQ ID NO: 150916 - DNA, 25 bp, Canis familiaris
gggggaggccagaatgtggcgtccc

SEQ ID NO: 150917 - DNA, 25 bp, Canis familiaris
ggggaaccacagtagtcactggccc

SEQ ID NO: 150918 - DNA, 25 bp, Canis familiaris
gggtggcagctcagaactcagctga

SEQ ID NO: 150919 - DNA, 25 bp, Canis familiaris
gggtgagcttagaaggctgcagcag

SEQ ID NO: 150920 - DNA, 25 bp, Canis familiaris
gggtggattataagagcccaactcc

SEQ ID NO: 150921 - DNA, 25 bp, Canis familiaris
gggtggcatttaaagcactgacact

SEQ ID NO: 150922 - DNA, 25 bp, Canis familiaris
gggtggtgtgtaagcccatgagcaa

SEQ ID NO: 150923 - DNA, 25 bp, Canis familiaris
gggtgaggtgtgcactatgatcagc

SEQ ID NO: 150924 - DNA, 25 bp, Canis familiaris
ggggagcctgggactgagtctcccc

SEQ ID NO: 150925 - DNA, 25 bp, Canis familiaris
ggggcacctaggtggttcagtcagt

SEQ ID NO: 150926 - DNA, 25 bp, Canis familiaris
ggggcactcaagggggggatgtatt

SEQ ID NO: 150927 - DNA, 25 bp, Canis familiaris
gggggcaaggcaggggatggtgtta

SEQ ID NO: 150928 - DNA, 25 bp, Canis familiaris
gggggggtgcagagagctgggagta

SEQ ID NO: 150929 - DNA, 25 bp, Canis familiaris
gggtgggggtgtgagtgggaatgat

SEQ ID NO: 150930 - DNA, 25 bp, Canis familiaris
gggggtgggtgacagaaggaagctc

SEQ ID NO: 150931 - DNA, 25 bp, Canis familiaris
gggggttgaagccaaacagccaaat

SEQ ID NO: 150932 - DNA, 25 bp, Canis familiaris
ggggctttgaaataacaccacctgt

SEQ ID NO: 150933 - DNA, 25 bp, Canis familiaris
ggggtttctaacgatcacacccagc

SEQ ID NO: 150934 - DNA, 25 bp, Canis familiaris
ggggtttctaacgatcacacccagc

SEQ ID NO: 150935 - DNA, 25 bp, Canis familiaris
ggggtttctaacgatcacacccagc

SEQ ID NO: 150936 - DNA, 25 bp, Canis familiaris
ggggtttctaacgatcacacccagc

SEQ ID NO: 150937 - DNA, 25 bp, Canis familiaris
ggggtttctaacgatcacacccagc

SEQ ID NO: 150938 - DNA, 25 bp, Canis familiaris
ggggtttctaacgatcacacccagc

SEQ ID NO: 150939 - DNA, 25 bp, Canis familiaris
ggggtttctaacgatcacacccagc

SEQ ID NO: 150940 - DNA, 25 bp, Canis familiaris
ggggtttctaacgatcacacccagc

SEQ ID NO: 150941 - DNA, 25 bp, Canis familiaris
ggggtttctaacgatcacacccagc

SEQ ID NO: 150942 - DNA, 25 bp, Canis familiaris
ggggtttctaacgatcacacccagc

SEQ ID NO: 150943 - DNA, 25 bp, Canis familiaris
ggggtttctaacgatcacacccagc

SEQ ID NO: 150944 - DNA, 25 bp, Canis familiaris
ggggtttctaacgatcacacccagc

SEQ ID NO: 150945 - DNA, 25 bp, Canis familiaris
ggggtttctaacgatcacacccagc

SEQ ID NO: 150946 - DNA, 25 bp, Canis familiaris
ggggtttctaacgatcacacccagc

SEQ ID NO: 150947 - DNA, 25 bp, Canis familiaris
ggggctgtttaaaagcggcaccaga

SEQ ID NO: 150948 - DNA, 25 bp, Canis familiaris
gggggatttcaagagacgcttcaga

SEQ ID NO: 150949 - DNA, 25 bp, Canis familiaris
ggggtggttctgaggtctgttcaga

SEQ ID NO: 150950 - DNA, 25 bp, Canis familiaris
gggggagagtggagggcagaggaga

SEQ ID NO: 150951 - DNA, 25 bp, Canis familiaris
gggtgggagcttgtggcgaagatgg

SEQ ID NO: 150952 - DNA, 25 bp, Canis familiaris
gggtggggcttgagggactgaatgg

SEQ ID NO: 150953 - DNA, 25 bp, Canis familiaris
gggtggccggtgccggcgaataata

SEQ ID NO: 150954 - DNA, 25 bp, Canis familiaris
gggtgtccggctccagaaaataatc

SEQ ID NO: 150955 - DNA, 25 bp, Canis familiaris
gggtgtccagagtctccaaagatta

SEQ ID NO: 150956 - DNA, 25 bp, Canis familiaris
gggtgtatctgtttcctaatgactg

SEQ ID NO: 150957 - DNA, 25 bp, Canis familiaris
gggtgttgcgcttcttgtaagattg

SEQ ID NO: 150958 - DNA, 25 bp, Canis familiaris
ggggttgaggttgtaaattgtgctg

SEQ ID NO: 150959 - DNA, 25 bp, Canis familiaris
ggggtgtggtttgtaagtatgatct

SEQ ID NO: 150960 - DNA, 25 bp, Canis familiaris
ggggctgtagctatagtgaaggaac

SEQ ID NO: 150961 - DNA, 25 bp, Canis familiaris
ggggctgtcagcaaggctctgaaaa

SEQ ID NO: 150962 - DNA, 25 bp, Canis familiaris
gggtgcgtgcacgtggggaatagca

SEQ ID NO: 150963 - DNA, 25 bp, Canis familiaris
gggtgcctgttgggtgagattagac

SEQ ID NO: 150964 - DNA, 25 bp, Canis familiaris
gggtgttgttgttgggcaccagcca

SEQ ID NO: 150965 - DNA, 25 bp, Canis familiaris
ggggttgccatgttggaatcccaat

SEQ ID NO: 150966 - DNA, 25 bp, Canis familiaris
ggggcttgcgttgtaactgtcaaat

SEQ ID NO: 150967 - DNA, 25 bp, Canis familiaris
ggggttgtcttcatcacttacaaat

SEQ ID NO: 150968 - DNA, 25 bp, Canis familiaris
gggggtgactatgggcatttacaaa

SEQ ID NO: 150969 - DNA, 25 bp, Canis familiaris
ggggtgctgactctggttttaaaca

SEQ ID NO: 150970 - DNA, 25 bp, Canis familiaris
ggggtgtgtctcttggtgatcaata

SEQ ID NO: 150971 - DNA, 25 bp, Canis familiaris
ggggatctatccttgaggtcactaa

SEQ ID NO: 150972 - DNA, 25 bp, Canis familiaris
gggtgaatacactgagttcctctag

SEQ ID NO: 150973 - DNA, 25 bp, Canis familiaris
ggggagaagtgatagtcccccgtcg

SEQ ID NO: 150974 - DNA, 25 bp, Canis familiaris
gggtggaggtgatgacacccccagg

SEQ ID NO: 150975 - DNA, 25 bp, Canis familiaris
gggggctgagagtcatgcccccacc

SEQ ID NO: 150976 - DNA, 25 bp, Canis familiaris
gggtgggtgagacagccccacccaa

SEQ ID NO: 150977 - DNA, 25 bp, Canis familiaris
gggtgaggggaagctggagccccaa

SEQ ID NO: 150978 - DNA, 25 bp, Canis familiaris
gggtgacagagggatggatggagcc

SEQ ID NO: 150979 - DNA, 25 bp, Canis familiaris
gggtgtcagcgatgatggagggctc

SEQ ID NO: 150980 - DNA, 25 bp, Canis familiaris
gggtgaaggctactgggggcattca

SEQ ID NO: 150981 - DNA, 25 bp, Canis familiaris
ggggaaggcgctcatggggaaattt

SEQ ID NO: 150982 - DNA, 25 bp, Canis familiaris
ggggaagtactgaggagggaataat

SEQ ID NO: 150983 - DNA, 25 bp, Canis familiaris
ggggctagctactctggtggagatt

SEQ ID NO: 150984 - DNA, 25 bp, Canis familiaris
gggtgataccaccacaggattatga

SEQ ID NO: 150985 - DNA, 25 bp, Canis familiaris
gggtgaacagcaggagggttggagg

SEQ ID NO: 150986 - DNA, 25 bp, Canis familiaris
gggtgaaactgtggtgtgtgggagt

SEQ ID NO: 150987 - DNA, 25 bp, Canis familiaris
ggtctacaacgggaatatggggagt

SEQ ID NO: 150988 - DNA, 25 bp, Canis familiaris
gggtgagcaaaaggaactgggcgag

SEQ ID NO: 150989 - DNA, 25 bp, Canis familiaris
gggtgtggaggggacacaggtgttg

SEQ ID NO: 150990 - DNA, 25 bp, Canis familiaris
gggtgtggggagtagcagcaggttg

SEQ ID NO: 150991 - DNA, 25 bp, Canis familiaris
gggtgtggggaaactgagtcttgga

SEQ ID NO: 150992 - DNA, 25 bp, Canis familiaris
gggtgggaggacagtgagatctaga

SEQ ID NO: 150993 - DNA, 25 bp, Canis familiaris
gggtggccggcagcagtagatctgc

SEQ ID NO: 150994 - DNA, 25 bp, Canis familiaris
ggggaccgggggagattgtgtggca

SEQ ID NO: 150995 - DNA, 25 bp, Canis familiaris
gggtgagccaggtggggacggtgac

SEQ ID NO: 150996 - DNA, 25 bp, Canis familiaris
gggtgagcgggataagaagctggca

SEQ ID NO: 150997 - DNA, 25 bp, Canis familiaris
gggggcggaagttgtgagagcaggc

SEQ ID NO: 150998 - DNA, 25 bp, Canis familiaris
ggtgggagggagagggaagctcgaa

SEQ ID NO: 150999 - DNA, 25 bp, Canis familiaris
gggggagtctggatgggacactcaa

SEQ ID NO: 151000 - DNA, 25 bp, Canis familiaris
gggtgtgcctcttgttggtgacacc

SEQ ID NO: 151001 - DNA, 25 bp, Canis familiaris
gggtggctcagcgatttagtggcac

SEQ ID NO: 151002 - DNA, 25 bp, Canis familiaris
gggtgagccagcattatgtcgtgac

SEQ ID NO: 151003 - DNA, 25 bp, Canis familiaris
ggggacagcagctctgattcagata

SEQ ID NO: 151004 - DNA, 25 bp, Canis familiaris
ggggattgcagggtgaccagcacac

SEQ ID NO: 151005 - DNA, 25 bp, Canis familiaris
gggtgatccagacatgagaagcaac

SEQ ID NO: 151006 - DNA, 25 bp, Canis familiaris
gggtgaccagaaatggagagcaaga

SEQ ID NO: 151007 - DNA, 25 bp, Canis familiaris
gggtgagggcacaggcagaagagat

SEQ ID NO: 151008 - DNA, 25 bp, Canis familiaris
gggtggaccacttggcatgttagag

SEQ ID NO: 151009 - DNA, 25 bp, Canis familiaris
gggtggactgtctatatagttatgg

SEQ ID NO: 151010 - DNA, 25 bp, Canis familiaris
gggggagttctttcagattcaggat

SEQ ID NO: 151011 - DNA, 25 bp, Canis familiaris
gggggaccactttcagattgggcaa

SEQ ID NO: 151012 - DNA, 25 bp, Canis familiaris
gggggacagcttgacagatgggacc

SEQ ID NO: 151013 - DNA, 25 bp, Canis familiaris
gggtgtcatcacaaacacgtgggac

SEQ ID NO: 151014 - DNA, 25 bp, Canis familiaris
ggggtaccatgacattgtggtcaca

SEQ ID NO: 151015 - DNA, 25 bp, Canis familiaris
ggggttggctgagagttgactgcaa

SEQ ID NO: 151016 - DNA, 25 bp, Canis familiaris
ggggttgcggtgcaggctgtagcac

SEQ ID NO: 151017 - DNA, 25 bp, Canis familiaris
gggtgtcagcggccaatggtattca

SEQ ID NO: 151018 - DNA, 25 bp, Canis familiaris
gggtgtcacagcccagagatggttg

SEQ ID NO: 151019 - DNA, 25 bp, Canis familiaris
gggtgtgacgcgatgtgatttctgc

SEQ ID NO: 151020 - DNA, 25 bp, Canis familiaris
gggtgtaacaattgtgatcctcatc

SEQ ID NO: 151021 - DNA, 25 bp, Canis familiaris
gggtgtctagagtgtgtccctcatt

SEQ ID NO: 151022 - DNA, 25 bp, Canis familiaris
gggtgtcgagcaattgttacctcat

SEQ ID NO: 151023 - DNA, 25 bp, Canis familiaris
ggggacggtattttacctgcaatgc

SEQ ID NO: 151024 - DNA, 25 bp, Canis familiaris
ggggcccattttttaacatcagatt

SEQ ID NO: 151025 - DNA, 25 bp, Canis familiaris
ggggtccatgtcataaatgtcacaa

SEQ ID NO: 151026 - DNA, 25 bp, Canis familiaris
ggggtctcgtcagtaaaattccact

SEQ ID NO: 151027 - DNA, 25 bp, Canis familiaris
gggtgtttgttgaaattgattcctc

SEQ ID NO: 151028 - DNA, 25 bp, Canis familiaris
gggtgtttgataaatacatgactat

SEQ ID NO: 151029 - DNA, 25 bp, Canis familiaris
gggtgtgtgatgtaatgagcactga

SEQ ID NO: 151030 - DNA, 25 bp, Canis familiaris
gggtgtgtgcatgtatggtgcgttg

SEQ ID NO: 151031 - DNA, 25 bp, Canis familiaris
gggtgttgacgcgatgtgatggtct

SEQ ID NO: 151032 - DNA, 25 bp, Canis familiaris
ggggtatgtcaggaggaggtcaagc

SEQ ID NO: 151033 - DNA, 25 bp, Canis familiaris
gggtgtggtcagctggggagaaggc

SEQ ID NO: 151034 - DNA, 25 bp, Canis familiaris
ggggtggctgacatgttggaaaggg

SEQ ID NO: 151035 - DNA, 25 bp, Canis familiaris
gggtgattgctagaggtgggggggg

SEQ ID NO: 151036 - DNA, 25 bp, Canis familiaris
ggggtggtagaagggcaggagggag

SEQ ID NO: 151037 - DNA, 25 bp, Canis familiaris
ggggggatgggagacaaacgaagag

SEQ ID NO: 151038 - DNA, 25 bp, Canis familiaris
gggggagagaggcaaaaagtaagag

SEQ ID NO: 151039 - DNA, 25 bp, Canis familiaris
gggggaagggaatattcagccagga

SEQ ID NO: 151040 - DNA, 25 bp, Canis familiaris
gggggtacaagcagaagtcatccgg

SEQ ID NO: 151041 - DNA, 25 bp, Canis familiaris
ggtaagtagcaaaagggtccctgtg

SEQ ID NO: 151042 - DNA, 25 bp, Canis familiaris
ggtgacttggtaaaaattgaccttg

SEQ ID NO: 151043 - DNA, 25 bp, Canis familiaris
ggtcccaggtttaattagacttctg

SEQ ID NO: 151044 - DNA, 25 bp, Canis familiaris
ggtgcccaggtttgctagaaggttc

SEQ ID NO: 151045 - DNA, 25 bp, Canis familiaris
ggtcccacgtactggagtttattct

SEQ ID NO: 151046 - DNA, 25 bp, Canis familiaris
ggggccggtgactggaattaactgc

SEQ ID NO: 151047 - DNA, 25 bp, Canis familiaris
ggggccatttaattgtggaaagaat

SEQ ID NO: 151048 - DNA, 25 bp, Canis familiaris
ggggccaacaaccatgggctaacaa

SEQ ID NO: 151049 - DNA, 25 bp, Canis familiaris
ggtggtacacaaaaggactaccgat

SEQ ID NO: 151050 - DNA, 25 bp, Canis familiaris
ggggtatacacaaaagatttcagct

SEQ ID NO: 151051 - DNA, 25 bp, Canis familiaris
gggggtcaggaagcagttcatcact

SEQ ID NO: 151052 - DNA, 25 bp, Canis familiaris
gggtgtcacagttaccatggtcttt

SEQ ID NO: 151053 - DNA, 25 bp, Canis familiaris
gggtggagatttacctggattcatt

SEQ ID NO: 151054 - DNA, 25 bp, Canis familiaris
gggtggatgtcggacactggactcc

SEQ ID NO: 151055 - DNA, 25 bp, Canis familiaris
gggggctgcttggaagtctagcttc

SEQ ID NO: 151056 - DNA, 25 bp, Canis familiaris
ggggactgtgatgaagacaagtacc

SEQ ID NO: 151057 - DNA, 25 bp, Canis familiaris
ggggtgcgtgctgaaagaaggcatc

SEQ ID NO: 151058 - DNA, 25 bp, Canis familiaris
gggtgtggccgataatgcaaggcac

SEQ ID NO: 151059 - DNA, 25 bp, Canis familiaris
gggtggaggcaggaaaccagtgcag

SEQ ID NO: 151060 - DNA, 25 bp, Canis familiaris
gggggtgagcaggaggacgcagtga

SEQ ID NO: 151061 - DNA, 25 bp, Canis familiaris
gggggaaggtcaggaggcattagct

SEQ ID NO: 151062 - DNA, 25 bp, Canis familiaris
ggggataagggagaagcaagcagtg

SEQ ID NO: 151063 - DNA, 25 bp, Canis familiaris
ggggaataggtaactccattggtgc

SEQ ID NO: 151064 - DNA, 25 bp, Canis familiaris
ggggaagaaagaaaccagtgccatg

SEQ ID NO: 151065 - DNA, 25 bp, Canis familiaris
gggggagaaagaaacaaccacagtg

SEQ ID NO: 151066 - DNA, 25 bp, Canis familiaris
gggggagctaggaaacaatacaggt

SEQ ID NO: 151067 - DNA, 25 bp, Canis familiaris
gggtgggcaccgagtagatagagtg

SEQ ID NO: 151068 - DNA, 25 bp, Canis familiaris
gggtggccgccgaggagaagaagca

SEQ ID NO: 151069 - DNA, 25 bp, Canis familiaris
gggggctcccctgggggagcaagat

SEQ ID NO: 151070 - DNA, 25 bp, Canis familiaris
gggtggcccacagggagggaacact

SEQ ID NO: 151071 - DNA, 25 bp, Canis familiaris
ggggagctcacaggaaggggaaact

SEQ ID NO: 151072 - DNA, 25 bp, Canis familiaris
gggggccacagtgatcagcttgaac

SEQ ID NO: 151073 - DNA, 25 bp, Canis familiaris
ggggtccaaggatgagcttacactt

SEQ ID NO: 151074 - DNA, 25 bp, Canis familiaris
ggggtcataagtttgagcccaacgt

SEQ ID NO: 151075 - DNA, 25 bp, Canis familiaris
ggggtatcaccttatacctaacaga

SEQ ID NO: 151076 - DNA, 25 bp, Canis familiaris
ggggttataccacaccattaagaga

SEQ ID NO: 151077 - DNA, 25 bp, Canis familiaris
ggggttataaccacagctctaaaat

SEQ ID NO: 151078 - DNA, 25 bp, Canis familiaris
ggggtattgacccacgaggtagcaa

SEQ ID NO: 151079 - DNA, 25 bp, Canis familiaris
gggggacataagcaccagcggataa

SEQ ID NO: 151080 - DNA, 25 bp, Canis familiaris
ggggggaagatttctctgcggaaag

SEQ ID NO: 151081 - DNA, 25 bp, Canis familiaris
gggtgtgtaaatccacttgggtcac

SEQ ID NO: 151082 - DNA, 25 bp, Canis familiaris
gggggaaaacagctgatggcgacac

SEQ ID NO: 151083 - DNA, 25 bp, Canis familiaris
ggggaaacaagagctagggtcaggt

SEQ ID NO: 151084 - DNA, 25 bp, Canis familiaris
ggggattaaaagttacagtcatagg

SEQ ID NO: 151085 - DNA, 25 bp, Canis familiaris
ggggaaacgtagttcatcgtacaca

SEQ ID NO: 151086 - DNA, 25 bp, Canis familiaris
ggggaaaatgccactaggaaccaca

SEQ ID NO: 151087 - DNA, 25 bp, Canis familiaris
gggggcatactcgttcagatggaat

SEQ ID NO: 151088 - DNA, 25 bp, Canis familiaris
ggggacacaatggtctggatggatt

SEQ ID NO: 151089 - DNA, 25 bp, Canis familiaris
gggggcagatgtcttggatgcgtca

SEQ ID NO: 151090 - DNA, 25 bp, Canis familiaris
gggggcagatgctgttggcatgagc

SEQ ID NO: 151091 - DNA, 25 bp, Canis familiaris
gggggcagatgctgtgggcaacccc

SEQ ID NO: 151092 - DNA, 25 bp, Canis familiaris
gggggagtagtggggcgaggctcct

SEQ ID NO: 151093 - DNA, 25 bp, Canis familiaris
gggggatgtcaaagggggccattgc

SEQ ID NO: 151094 - DNA, 25 bp, Canis familiaris
gggggagcaagaagagtggggcggc

SEQ ID NO: 151095 - DNA, 25 bp, Canis familiaris
gggggagccagaagattgggccggc

SEQ ID NO: 151096 - DNA, 25 bp, Canis familiaris
gggggagagctggagaatgcagtcc

SEQ ID NO: 151097 - DNA, 25 bp, Canis familiaris
gggggagacagctatggtcactgct

SEQ ID NO: 151098 - DNA, 25 bp, Canis familiaris
gggggcaacgagacagtgacactac

SEQ ID NO: 151099 - DNA, 25 bp, Canis familiaris
ggggtacccagctgctgagcagcta

SEQ ID NO: 151100 - DNA, 25 bp, Canis familiaris
gggggatcccagtggaatcacagga

SEQ ID NO: 151101 - DNA, 25 bp, Canis familiaris
gggggacaccagtagggaaatatag

SEQ ID NO: 151102 - DNA, 25 bp, Canis familiaris
gggtggacaccgagggacaatgcac

SEQ ID NO: 151103 - DNA, 25 bp, Canis familiaris
gggtggacctccaggagaacagccc

SEQ ID NO: 151104 - DNA, 25 bp, Canis familiaris
gggtgtcctgtccaaggacatccag

SEQ ID NO: 151105 - DNA, 25 bp, Canis familiaris
gggtgtcatctgtgaagactcccgg

SEQ ID NO: 151106 - DNA, 25 bp, Canis familiaris
ggggatcggaagtgactgcccaggc

SEQ ID NO: 151107 - DNA, 25 bp, Canis familiaris
ggggtcgtgtagtgctgtgttatgc

SEQ ID NO: 151108 - DNA, 25 bp, Canis familiaris
ggggtttgtatgttcatattcccat

SEQ ID NO: 151109 - DNA, 25 bp, Canis familiaris
gggtgtgtatgttttctttgccttt

SEQ ID NO: 151110 - DNA, 25 bp, Canis familiaris
gggtgtgtttattttattctcatgt

SEQ ID NO: 151111 - DNA, 25 bp, Canis familiaris
gggtggtcttccagatattccattt

SEQ ID NO: 151112 - DNA, 25 bp, Canis familiaris
gggggaattccaaatcatcctaatg

SEQ ID NO: 151113 - DNA, 25 bp, Canis familiaris
gggggtcttcaaacacagactttgc

SEQ ID NO: 151114 - DNA, 25 bp, Canis familiaris
ggggttctccaaataagatcctcag

SEQ ID NO: 151115 - DNA, 25 bp, Canis familiaris
ggggtcttcagcactaaaacacatg

SEQ ID NO: 151116 - DNA, 25 bp, Canis familiaris
ggggatttaagtgagaaacacttgg

SEQ ID NO: 151117 - DNA, 25 bp, Canis familiaris
ggggtttaaatttgtaccatctgtg

SEQ ID NO: 151118 - DNA, 25 bp, Canis familiaris
ggggagtaaccagggaaccctgctg

SEQ ID NO: 151119 - DNA, 25 bp, Canis familiaris
gggtgggggctagggaacacctgca

SEQ ID NO: 151120 - DNA, 25 bp, Canis familiaris
ggggaggggtaacaacagagctgct

SEQ ID NO: 151121 - DNA, 25 bp, Canis familiaris
gggtggggagagcataaacaacttg

SEQ ID NO: 151122 - DNA, 25 bp, Canis familiaris
gggggcgggaggaagaaaccatcat

SEQ ID NO: 151123 - DNA, 25 bp, Canis familiaris
gggggatgggggacactgacccatt

SEQ ID NO: 151124 - DNA, 25 bp, Canis familiaris
gggggatgtggggagcagggcccct

SEQ ID NO: 151125 - DNA, 25 bp, Canis familiaris
gggggcatctgctaaagagaggacc

SEQ ID NO: 151126 - DNA, 25 bp, Canis familiaris
gggggcatctctgaggtgattggcc

SEQ ID NO: 151127 - DNA, 25 bp, Canis familiaris
gggggcatcacatgggatgcttgta

SEQ ID NO: 151128 - DNA, 25 bp, Canis familiaris
ggggcatgatcctgggtttccagga

SEQ ID NO: 151129 - DNA, 25 bp, Canis familiaris
ggggcagccgtgaggtttaagggtg

SEQ ID NO: 151130 - DNA, 25 bp, Canis familiaris
ggggactctgtttggtcttagaatg

SEQ ID NO: 151131 - DNA, 25 bp, Canis familiaris
ggggtgtctggttgtacttggactg

SEQ ID NO: 151132 - DNA, 25 bp, Canis familiaris
gggtgtggaggacgccacactggcc

SEQ ID NO: 151133 - DNA, 25 bp, Canis familiaris
ggggaggaagagccagcgagggccc

SEQ ID NO: 151134 - DNA, 25 bp, Canis familiaris
ggggaggaactgccacaggcctccc

SEQ ID NO: 151135 - DNA, 25 bp, Canis familiaris
ggggcagaggcaaagcgcaggacat

SEQ ID NO: 151136 - DNA, 25 bp, Canis familiaris
gggtggagccaaacgggtcatcatc

SEQ ID NO: 151137 - DNA, 25 bp, Canis familiaris
gggggaccagagtcatcaggaccat

SEQ ID NO: 151138 - DNA, 25 bp, Canis familiaris
gggggcacctgtgatgaggactagg

SEQ ID NO: 151139 - DNA, 25 bp, Canis familiaris
gggggagcctaggtagagtccagtc

SEQ ID NO: 151140 - DNA, 25 bp, Canis familiaris
gggggtcttagcatggagagccaga

SEQ ID NO: 151141 - DNA, 25 bp, Canis familiaris
ggggttattgccatgtacagacagg

SEQ ID NO: 151142 - DNA, 25 bp, Canis familiaris
gggggaaatgccaataaatgaatga

SEQ ID NO: 151143 - DNA, 25 bp, Canis familiaris
gggggcagcaagaaatataaggagt

SEQ ID NO: 151144 - DNA, 25 bp, Canis familiaris
ggtggactcacggaacataaggatg

SEQ ID NO: 151145 - DNA, 25 bp, Canis familiaris
ggggttgcactggaccaaaggctga

SEQ ID NO: 151146 - DNA, 25 bp, Canis familiaris
ggggtctcctcagcgaggacattaa

SEQ ID NO: 151147 - DNA, 25 bp, Canis familiaris
ggggttgtcgtcggagtacttgtag

SEQ ID NO: 151148 - DNA, 25 bp, Canis familiaris
ggtgagattgccatccgagtgtttc

SEQ ID NO: 151149 - DNA, 25 bp, Canis familiaris
ggggagatgagcaccggtgtctaaa

SEQ ID NO: 151150 - DNA, 25 bp, Canis familiaris
ggggatgagtccccgaggtatctac

SEQ ID NO: 151151 - DNA, 25 bp, Canis familiaris
ggggcgatatcctctgacgtatcat

SEQ ID NO: 151152 - DNA, 25 bp, Canis familiaris
gggggacatggatctgtaataacgg

SEQ ID NO: 151153 - DNA, 25 bp, Canis familiaris
gggggacatggcagtggtataagga

SEQ ID NO: 151154 - DNA, 25 bp, Canis familiaris
ggggccactagatttggtatacagg

SEQ ID NO: 151155 - DNA, 25 bp, Canis familiaris
ggggccggagtattgggaccggcag

SEQ ID NO: 151156 - DNA, 25 bp, Canis familiaris
ggccgaaaacttttggacctgactg

SEQ ID NO: 151157 - DNA, 25 bp, Canis familiaris
ggggaaaactcattggaggctttca

SEQ ID NO: 151158 - DNA, 25 bp, Canis familiaris
gggggaaacacagtgaaccaagtag

SEQ ID NO: 151159 - DNA, 25 bp, Canis familiaris
ggggggaacagagggagcacaaggg

SEQ ID NO: 151160 - DNA, 25 bp, Canis familiaris
ggggaaattcaagtggagacaaagt

SEQ ID NO: 151161 - DNA, 25 bp, Canis familiaris
ggggaaaattacccaactgagattg

SEQ ID NO: 151162 - DNA, 25 bp, Canis familiaris
ggcggattcaacagacctttggatt

SEQ ID NO: 151163 - DNA, 25 bp, Canis familiaris
ggggattaataccactgctttttat

SEQ ID NO: 151164 - DNA, 25 bp, Canis familiaris
ggggtctcataaaaccttacttgct

SEQ ID NO: 151165 - DNA, 25 bp, Canis familiaris
ggggatctgcaagtgaacctttctt

SEQ ID NO: 151166 - DNA, 25 bp, Canis familiaris
ggggaaaagtaactcgtgctcatgg

SEQ ID NO: 151167 - DNA, 25 bp, Canis familiaris
ggggcactgatgcaacagtcgggta

SEQ ID NO: 151168 - DNA, 25 bp, Canis familiaris
ggggtccctggatgacctggtgaaa

SEQ ID NO: 151169 - DNA, 25 bp, Canis familiaris
ggggttctttgaggatcacttgtaa

SEQ ID NO: 151170 - DNA, 25 bp, Canis familiaris
ggggtacttaaaccacacttcacag

SEQ ID NO: 151171 - DNA, 25 bp, Canis familiaris
gggggataaaaacctcactccacag

SEQ ID NO: 151172 - DNA, 25 bp, Canis familiaris
ggggggaaataaacacctggcactg

SEQ ID NO: 151173 - DNA, 25 bp, Canis familiaris
gggtgggagaaaatggcactccgca

SEQ ID NO: 151174 - DNA, 25 bp, Canis familiaris
ggggggtgacataatcagactccga

SEQ ID NO: 151175 - DNA, 25 bp, Canis familiaris
ggggtgagtagctgagccagccaag

SEQ ID NO: 151176 - DNA, 25 bp, Canis familiaris
ggggaagctgacagagacacctaca

SEQ ID NO: 151177 - DNA, 25 bp, Canis familiaris
ggggcattgctaggggatcattcaa

SEQ ID NO: 151178 - DNA, 25 bp, Canis familiaris
ggggatttgagccatagccatttgt

SEQ ID NO: 151179 - DNA, 25 bp, Canis familiaris
gggggctcagagcatatgtgatttt

SEQ ID NO: 151180 - DNA, 25 bp, Canis familiaris
gggggatgcgtgcatttatcagatc

SEQ ID NO: 151181 - DNA, 25 bp, Canis familiaris
gggggcagccaagttattgcgatct

SEQ ID NO: 151182 - DNA, 25 bp, Canis familiaris
ggggggctaaagtgatctgatgtat

SEQ ID NO: 151183 - DNA, 25 bp, Canis familiaris
gggggcacaataagttcatcctgta

SEQ ID NO: 151184 - DNA, 25 bp, Canis familiaris
gggggaaatattctcttcttctaag

SEQ ID NO: 151185 - DNA, 25 bp, Canis familiaris
ggggaaaccaatctctgttcgttat

SEQ ID NO: 151186 - DNA, 25 bp, Canis familiaris
ggggaaacgcactggttctgttttg

SEQ ID NO: 151187 - DNA, 25 bp, Canis familiaris
ggggaatagctgcagaacctcttta

SEQ ID NO: 151188 - DNA, 25 bp, Canis familiaris
ggggcaacagccttaaactttgtgt

SEQ ID NO: 151189 - DNA, 25 bp, Canis familiaris
ggggacaatacataaatatacctta

SEQ ID NO: 151190 - DNA, 25 bp, Canis familiaris
ggggacagattattttcctacctct

SEQ ID NO: 151191 - DNA, 25 bp, Canis familiaris
ggggacactatcattcctatcaccc

SEQ ID NO: 151192 - DNA, 25 bp, Canis familiaris
ggggatcatcaaatctttttcaaat

SEQ ID NO: 151193 - DNA, 25 bp, Canis familiaris
ggggattcacattcttatttgggtt

SEQ ID NO: 151194 - DNA, 25 bp, Canis familiaris
ggagggctaagggtatttgggtgct

SEQ ID NO: 151195 - DNA, 25 bp, Canis familiaris
ggggggaagagcacttgaggggctg

SEQ ID NO: 151196 - DNA, 25 bp, Canis familiaris
gggggttagagacctgtgagggtgg

SEQ ID NO: 151197 - DNA, 25 bp, Canis familiaris
ggggggtagcgaccagaacgagcgc

SEQ ID NO: 151198 - DNA, 25 bp, Canis familiaris
gggggaggggacaacaactgaggca

SEQ ID NO: 151199 - DNA, 25 bp, Canis familiaris
ggggggtgggataatcttcgggatg

SEQ ID NO: 151200 - DNA, 25 bp, Canis familiaris
ggggcggggaataatttccatgcgc

SEQ ID NO: 151201 - DNA, 25 bp, Canis familiaris
ggggtcggagttaattgttagccat

SEQ ID NO: 151202 - DNA, 25 bp, Canis familiaris
ggggctcgtgagtgtttgtacacgc

SEQ ID NO: 151203 - DNA, 25 bp, Canis familiaris
ggggatgagtgacttgacctgtgac

SEQ ID NO: 151204 - DNA, 25 bp, Canis familiaris
ggggggtgcagatgactctgctgag

SEQ ID NO: 151205 - DNA, 25 bp, Canis familiaris
gggggaccagcaacactgtgatgag

SEQ ID NO: 151206 - DNA, 25 bp, Canis familiaris
gggggcctcagctactctgaggaga

SEQ ID NO: 151207 - DNA, 25 bp, Canis familiaris
ggggctcctaggtttacaaggtgag

SEQ ID NO: 151208 - DNA, 25 bp, Canis familiaris
ggggcccgaggaggccacaagaagg

SEQ ID NO: 151209 - DNA, 25 bp, Canis familiaris
ggggttcagggcatataatacacag

SEQ ID NO: 151210 - DNA, 25 bp, Canis familiaris
ggggttcagggacataaataccagt

SEQ ID NO: 151211 - DNA, 25 bp, Canis familiaris
ggggctaagggacacaattctcaca

SEQ ID NO: 151212 - DNA, 25 bp, Canis familiaris
ggggctaaatccgcagcaaactgcc

SEQ ID NO: 151213 - DNA, 25 bp, Canis familiaris
ggggctacttcctagcaaaaaccag

SEQ ID NO: 151214 - DNA, 25 bp, Canis familiaris
gggggatttcacaacgacacaaaca

SEQ ID NO: 151215 - DNA, 25 bp, Canis familiaris
ggggaattttctctgccaagataac

SEQ ID NO: 151216 - DNA, 25 bp, Canis familiaris
ggggagcttttcacctaaggtagca

SEQ ID NO: 151217 - DNA, 25 bp, Canis familiaris
gggggttgtgctaacctagaggtgg

SEQ ID NO: 151218 - DNA, 25 bp, Canis familiaris
ggggtgtttgcctcaatagaggatc

SEQ ID NO: 151219 - DNA, 25 bp, Canis familiaris
ggggtttgctttaaatatcaggtca

SEQ ID NO: 151220 - DNA, 25 bp, Canis familiaris
gggggggtctcactataaaggtcag

SEQ ID NO: 151221 - DNA, 25 bp, Canis familiaris
ggggccagggtcatcataaaggtct

SEQ ID NO: 151222 - DNA, 25 bp, Canis familiaris
ggggacggtgtcgtcacggacgact

SEQ ID NO: 151223 - DNA, 25 bp, Canis familiaris
ggggaacctgatggtcatcggacta

SEQ ID NO: 151224 - DNA, 25 bp, Canis familiaris
ggtggaacctcaggctgaagtacca

SEQ ID NO: 151225 - DNA, 25 bp, Canis familiaris
ggggactctctagaggatgtctcca

SEQ ID NO: 151226 - DNA, 25 bp, Canis familiaris
ggggaatctgcttcagggttctccc

SEQ ID NO: 151227 - DNA, 25 bp, Canis familiaris
gggggactgttaatggactcctcca

SEQ ID NO: 151228 - DNA, 25 bp, Canis familiaris
ggggtgtcagttcatgagtccccca

SEQ ID NO: 151229 - DNA, 25 bp, Canis familiaris
ggggcggcacttgatactggcccca

SEQ ID NO: 151230 - DNA, 25 bp, Canis familiaris
gggggtgtttgttcagctgatgccc

SEQ ID NO: 151231 - DNA, 25 bp, Canis familiaris
gggggtgtttgttcaaagcttgtat

SEQ ID NO: 151232 - DNA, 25 bp, Canis familiaris
gggggttcttgttaaagtgtgcata

SEQ ID NO: 151233 - DNA, 25 bp, Canis familiaris
ggtgcgtttgttgaaacgttctttg

SEQ ID NO: 151234 - DNA, 25 bp, Canis familiaris
ggggtttttgcatatactgttcctc

SEQ ID NO: 151235 - DNA, 25 bp, Canis familiaris
ggggtgtttatatatgacgtccacg

SEQ ID NO: 151236 - DNA, 25 bp, Canis familiaris
gggtggcctttaagatgaccgacac

SEQ ID NO: 151237 - DNA, 25 bp, Canis familiaris
ggggcagcacttttaaatcttactc

SEQ ID NO: 151238 - DNA, 25 bp, Canis familiaris
ggggtgcacttttccaccaaaatgc

SEQ ID NO: 151239 - DNA, 25 bp, Canis familiaris
gggggctcattatcataccatgaaa

SEQ ID NO: 151240 - DNA, 25 bp, Canis familiaris
gggggctgcaggtgctgcacctgag

SEQ ID NO: 151241 - DNA, 25 bp, Canis familiaris
ggggtggatgtgtggactcaaccaa

SEQ ID NO: 151242 - DNA, 25 bp, Canis familiaris
ggggtgaggattagggctcaaccca

SEQ ID NO: 151243 - DNA, 25 bp, Canis familiaris
gggggcaggagtgtgcgcaaaccca

SEQ ID NO: 151244 - DNA, 25 bp, Canis familiaris
ggggcggctggtgtggaacttcagc

SEQ ID NO: 151245 - DNA, 25 bp, Canis familiaris
ggggaggcggctgatgttttataaa

SEQ ID NO: 151246 - DNA, 25 bp, Canis familiaris
gggggtgtggtgtcggtttatgacg

SEQ ID NO: 151247 - DNA, 25 bp, Canis familiaris
gggggttggtctttgttgataacag

SEQ ID NO: 151248 - DNA, 25 bp, Canis familiaris
gggggtgcggtcacttatacatacc

SEQ ID NO: 151249 - DNA, 25 bp, Canis familiaris
gggggtgggggataacacatctcca

SEQ ID NO: 151250 - DNA, 25 bp, Canis familiaris
ggggatgggtggctccaaatcattc

SEQ ID NO: 151251 - DNA, 25 bp, Canis familiaris
ggggatacgtggtgcgaaatcattg

SEQ ID NO: 151252 - DNA, 25 bp, Canis familiaris
ggggtacctggatggctcaattgat

SEQ ID NO: 151253 - DNA, 25 bp, Canis familiaris
ggggttcctgagtggtgatggttaa

SEQ ID NO: 151254 - DNA, 25 bp, Canis familiaris
ggggtccctctggagttgagatgta

SEQ ID NO: 151255 - DNA, 25 bp, Canis familiaris
ggggtccaggtggagtcctgatggt

SEQ ID NO: 151256 - DNA, 25 bp, Canis familiaris
ggtggtgccaaaaagttcagtaatt

SEQ ID NO: 151257 - DNA, 25 bp, Canis familiaris
ggtgtggcctaactaggaagtagag

SEQ ID NO: 151258 - DNA, 25 bp, Canis familiaris
ggtggtctcaacctgggaatccaag

SEQ ID NO: 151259 - DNA, 25 bp, Canis familiaris
ggtggttccaccaacaaactaatgt

SEQ ID NO: 151260 - DNA, 25 bp, Canis familiaris
ggtggtatacctgagtaatttcatg

SEQ ID NO: 151261 - DNA, 25 bp, Canis familiaris
ggtgacctcaccaggtacttacaaa

SEQ ID NO: 151262 - DNA, 25 bp, Canis familiaris
gggggctgcatcttgaggtaattac

SEQ ID NO: 151263 - DNA, 25 bp, Canis familiaris
ggggtgcctaatgagtgagctaact

SEQ ID NO: 151264 - DNA, 25 bp, Canis familiaris
ggggtgcacgatccaagggtaacat

SEQ ID NO: 151265 - DNA, 25 bp, Canis familiaris
gggggacgaaaaggcaggcttcatt

SEQ ID NO: 151266 - DNA, 25 bp, Canis familiaris
gggggacacagattagaggagttca

SEQ ID NO: 151267 - DNA, 25 bp, Canis familiaris
ggggttccatgatcagtgcagagtc

SEQ ID NO: 151268 - DNA, 25 bp, Canis familiaris
ggggttccatgtacatatttatctc

SEQ ID NO: 151269 - DNA, 25 bp, Canis familiaris
ggggttccaaataatgtatcttcta

SEQ ID NO: 151270 - DNA, 25 bp, Canis familiaris
tgtgggcttcctaacaagttttatt

SEQ ID NO: 151271 - DNA, 25 bp, Canis familiaris
ggggcttctgggaaagtttatgctt

SEQ ID NO: 151272 - DNA, 25 bp, Canis familiaris
ggggtatgatggggaagtttcgctt

SEQ ID NO: 151273 - DNA, 25 bp, Canis familiaris
ggggtcgatgtggtcacgttatact

SEQ ID NO: 151274 - DNA, 25 bp, Canis familiaris
gggggctgtgtgtaccttatataca

SEQ ID NO: 151275 - DNA, 25 bp, Canis familiaris
ggggagagcctattcctgatgtaaa

SEQ ID NO: 151276 - DNA, 25 bp, Canis familiaris
ggggaagtaatgtcactgatatact

SEQ ID NO: 151277 - DNA, 25 bp, Canis familiaris
ggggaggtagtgacgctaatacaat

SEQ ID NO: 151278 - DNA, 25 bp, Canis familiaris
ggggaggtagtgactgtatattaca

SEQ ID NO: 151279 - DNA, 25 bp, Canis familiaris
ggggggaattgcgtgcattaatcag

SEQ ID NO: 151280 - DNA, 25 bp, Canis familiaris
gggggaaatatgcctagaagatcag

SEQ ID NO: 151281 - DNA, 25 bp, Canis familiaris
gggggaaaattgacaagaatgcgag

SEQ ID NO: 151282 - DNA, 25 bp, Canis familiaris
ggggggaaattgacaaggatgcgag

SEQ ID NO: 151283 - DNA, 25 bp, Canis familiaris
gggggagaacataccaatccatggg

SEQ ID NO: 151284 - DNA, 25 bp, Canis familiaris
gggggcaaatcaagtacttcagggt

SEQ ID NO: 151285 - DNA, 25 bp, Canis familiaris
ggggcagaaattttactgaaggcgt

SEQ ID NO: 151286 - DNA, 25 bp, Canis familiaris
ggggcgcaacgtttatctggaagac

SEQ ID NO: 151287 - DNA, 25 bp, Canis familiaris
gggggcatccgaaacacaggaaatc

SEQ ID NO: 151288 - DNA, 25 bp, Canis familiaris
ggggatgtccaaatcacacaataca

SEQ ID NO: 151289 - DNA, 25 bp, Canis familiaris
ggggattatcaaagatgcacttaac

SEQ ID NO: 151290 - DNA, 25 bp, Canis familiaris
ggtggtattacaggtcagttgacaa

SEQ ID NO: 151291 - DNA, 25 bp, Canis familiaris
ggatgcgtaatatgcctacttggga

SEQ ID NO: 151292 - DNA, 25 bp, Canis familiaris
ggggtaatatagccagtcttctgag

SEQ ID NO: 151293 - DNA, 25 bp, Canis familiaris
ggggtgatataatctgtctgcttca

SEQ ID NO: 151294 - DNA, 25 bp, Canis familiaris
ggggtgatatgatcgtgtctgcttc

SEQ ID NO: 151295 - DNA, 25 bp, Canis familiaris
gggggaaatggtttgctgctgctcc

SEQ ID NO: 151296 - DNA, 25 bp, Canis familiaris
gggggtgagagtcaatgtgctcctc

SEQ ID NO: 151297 - DNA, 25 bp, Canis familiaris
gggggtcaggatcatcatgtcccac

SEQ ID NO: 151298 - DNA, 25 bp, Canis familiaris
gggggtcagaataatcatatccgct

SEQ ID NO: 151299 - DNA, 25 bp, Canis familiaris
ggggcttaggattgtcaattcagct

SEQ ID NO: 151300 - DNA, 25 bp, Canis familiaris
ggggttagatgttggcatttcataa

SEQ ID NO: 151301 - DNA, 25 bp, Canis familiaris
gggggggatgcgtgcatttatcaga

SEQ ID NO: 151302 - DNA, 25 bp, Canis familiaris
gggggaattgcgtgcattaatcaga

SEQ ID NO: 151303 - DNA, 25 bp, Canis familiaris
gggggatcttggggttagactgacg

SEQ ID NO: 151304 - DNA, 25 bp, Canis familiaris
gggggttgtgtggaacaaactggca

SEQ ID NO: 151305 - DNA, 25 bp, Canis familiaris
gggggtgtggtggtaaagatctgtg

SEQ ID NO: 151306 - DNA, 25 bp, Canis familiaris
ggggtgtgggtggggaagcatttgt

SEQ ID NO: 151307 - DNA, 25 bp, Canis familiaris
ggggtgggagtctgcagcagagcta

SEQ ID NO: 151308 - DNA, 25 bp, Canis familiaris
ggggggaaggcaggaggcacatcaa

SEQ ID NO: 151309 - DNA, 25 bp, Canis familiaris
gggggggaggcagaaacagagagac

SEQ ID NO: 151310 - DNA, 25 bp, Canis familiaris
ggggtgggggcatctgctaaagaga

SEQ ID NO: 151311 - DNA, 25 bp, Canis familiaris
ggggtggggtgaggtctgagaagga

SEQ ID NO: 151312 - DNA, 25 bp, Canis familiaris
ggggacggggagaactgctgaagtg

SEQ ID NO: 151313 - DNA, 25 bp, Canis familiaris
gggggatgggattgcaacgtgcacg

SEQ ID NO: 151314 - DNA, 25 bp, Canis familiaris
ggggaagacagataaaggcacagat

SEQ ID NO: 151315 - DNA, 25 bp, Canis familiaris
ggggactatctcccaaatagcaact

SEQ ID NO: 151316 - DNA, 25 bp, Canis familiaris
ggggcaccgtcatgtatgtaggact

SEQ ID NO: 151317 - DNA, 25 bp, Canis familiaris
ggggacacactatgtttagccatta

SEQ ID NO: 151318 - DNA, 25 bp, Canis familiaris
ggggatccaatatgaccccagcatt

SEQ ID NO: 151319 - DNA, 25 bp, Canis familiaris
ggggatcaaatatgacccaagcatt

SEQ ID NO: 151320 - DNA, 25 bp, Canis familiaris
ggggagatattttgacaccacgaga

SEQ ID NO: 151321 - DNA, 25 bp, Canis familiaris
ggggagatattttgagcaccagaga

SEQ ID NO: 151322 - DNA, 25 bp, Canis familiaris
ggggcaagattttgtgcagagtcaa

SEQ ID NO: 151323 - DNA, 25 bp, Canis familiaris
ggggaagcttaattgcggtgatcgg

SEQ ID NO: 151324 - DNA, 25 bp, Canis familiaris
ggggtagatgtgtattggcaggtca

SEQ ID NO: 151325 - DNA, 25 bp, Canis familiaris
ggggttgcagctgttatggtgtcat

SEQ ID NO: 151326 - DNA, 25 bp, Canis familiaris
ggggtctgatcgctttgagggatgc

SEQ ID NO: 151327 - DNA, 25 bp, Canis familiaris
ggggcctatactttctgaggtgggg

SEQ ID NO: 151328 - DNA, 25 bp, Canis familiaris
ggggccaagtctgttgagtcgtggt

SEQ ID NO: 151329 - DNA, 25 bp, Canis familiaris
gggggaggttgtggtgagacggtgt

SEQ ID NO: 151330 - DNA, 25 bp, Canis familiaris
gggggattggagaggacacaggtgt

SEQ ID NO: 151331 - DNA, 25 bp, Canis familiaris
gggggatcatggaggtgacatcagg

SEQ ID NO: 151332 - DNA, 25 bp, Canis familiaris
gggggatgcttcgtgtgaacatggg

SEQ ID NO: 151333 - DNA, 25 bp, Canis familiaris
gggggactctgtgggaataggggca

SEQ ID NO: 151334 - DNA, 25 bp, Canis familiaris
ggggtggcctatgccaattgttgga

SEQ ID NO: 151335 - DNA, 25 bp, Canis familiaris
ggggggacttggcttggattgagat

SEQ ID NO: 151336 - DNA, 25 bp, Canis familiaris
ggggagggctcctcttggaagagcc

SEQ ID NO: 151337 - DNA, 25 bp, Canis familiaris
ggggatggttccactagaaatctcc

SEQ ID NO: 151338 - DNA, 25 bp, Canis familiaris
ggggggttcatcacacagataatac

SEQ ID NO: 151339 - DNA, 25 bp, Canis familiaris
ggggggaatacatcacagtacaagc

SEQ ID NO: 151340 - DNA, 25 bp, Canis familiaris
ggggtagaaacatcaggacactggt

SEQ ID NO: 151341 - DNA, 25 bp, Canis familiaris
ggggatcagaaacccgttgcacgga

SEQ ID NO: 151342 - DNA, 25 bp, Canis familiaris
ggtgttcaaggataccttacggaca

SEQ ID NO: 151343 - DNA, 25 bp, Canis familiaris
ggggcacaatggcaactcttaagga

SEQ ID NO: 151344 - DNA, 25 bp, Canis familiaris
ggaggcaacagggtacatcttaggt

SEQ ID NO: 151345 - DNA, 25 bp, Canis familiaris
ggggcaacagaccttacttgtgatt

SEQ ID NO: 151346 - DNA, 25 bp, Canis familiaris
ggggctaccacaggtattttgcttg

SEQ ID NO: 151347 - DNA, 25 bp, Canis familiaris
ggggccaccattgatattctttgag

SEQ ID NO: 151348 - DNA, 25 bp, Canis familiaris
ggggccacgttgttgtatgtattga

SEQ ID NO: 151349 - DNA, 25 bp, Canis familiaris
ggggccaagtaaccctgatcagaag

SEQ ID NO: 151350 - DNA, 25 bp, Canis familiaris
ggggcctttttcattcatagatcac

SEQ ID NO: 151351 - DNA, 25 bp, Canis familiaris
ggggtttctttccatgtgaagcata

SEQ ID NO: 151352 - DNA, 25 bp, Canis familiaris
ggggagttcttggaatggccaacaa

SEQ ID NO: 151353 - DNA, 25 bp, Canis familiaris
ggtggtcttcggagggcctgaataa

SEQ ID NO: 151354 - DNA, 25 bp, Canis familiaris
ggtgagtcttcaatttggccttaaa

SEQ ID NO: 151355 - DNA, 25 bp, Canis familiaris
ggggctcattcagttaagtgtctaa

SEQ ID NO: 151356 - DNA, 25 bp, Canis familiaris
ggggtcattgccaatgatatggcag

SEQ ID NO: 151357 - DNA, 25 bp, Canis familiaris
ggggtcttgacgacgatggagatct

SEQ ID NO: 151358 - DNA, 25 bp, Canis familiaris
ggggagtgtacgtcgggatggttgg

SEQ ID NO: 151359 - DNA, 25 bp, Canis familiaris
ggggtgaaactgtggtgtgtgggag

SEQ ID NO: 151360 - DNA, 25 bp, Canis familiaris
ggggccaagacctaattgattcgga

SEQ ID NO: 151361 - DNA, 25 bp, Canis familiaris
ggggcgaaagactaatcgaaccatc

SEQ ID NO: 151362 - DNA, 25 bp, Canis familiaris
ggggcggccgagaaataaacagcat

SEQ ID NO: 151363 - DNA, 25 bp, Canis familiaris
ggggtggcctaaatacaaacagaag

SEQ ID NO: 151364 - DNA, 25 bp, Canis familiaris
ggggtgcacttatgatgaacaccag

SEQ ID NO: 151365 - DNA, 25 bp, Canis familiaris
ggggggcattgcagcatgtgagcac

SEQ ID NO: 151366 - DNA, 25 bp, Canis familiaris
ggggaagagctgcagatggagcctg

SEQ ID NO: 151367 - DNA, 25 bp, Canis familiaris
ggggacgactgctagagtccagggt

SEQ ID NO: 151368 - DNA, 25 bp, Canis familiaris
ggggatcctctggcagatgtttggc

SEQ ID NO: 151369 - DNA, 25 bp, Canis familiaris
ggggatactcagcccagggatgtgc

SEQ ID NO: 151370 - DNA, 25 bp, Canis familiaris
ggggatttagctcagtggtagagcg

SEQ ID NO: 151371 - DNA, 25 bp, Canis familiaris
ggggccccactgatgtggtaggtga

SEQ ID NO: 151372 - DNA, 25 bp, Canis familiaris
ggggcagcctccactggaggaggct

SEQ ID NO: 151373 - DNA, 25 bp, Canis familiaris
ggggacagacctgctggaggaggag

SEQ ID NO: 151374 - DNA, 25 bp, Canis familiaris
ggggaaaccagcctgctggagcagg

SEQ ID NO: 151375 - DNA, 25 bp, Canis familiaris
ggggaaaccagcctgctggagcagg

SEQ ID NO: 151376 - DNA, 25 bp, Canis familiaris
ggggaccaggagagctggagcccca

SEQ ID NO: 151377 - DNA, 25 bp, Canis familiaris
ggtggcccagtgatttagcactgcc

SEQ ID NO: 151378 - DNA, 25 bp, Canis familiaris
ggtggcccagtgggaccacttaagc

SEQ ID NO: 151379 - DNA, 25 bp, Canis familiaris
ggggcctaacaaacacagcttgaag

SEQ ID NO: 151380 - DNA, 25 bp, Canis familiaris
ggggccatagaccatacatacgatc

SEQ ID NO: 151381 - DNA, 25 bp, Canis familiaris
ggggcaacaacaaaatcatcgacac

SEQ ID NO: 151382 - DNA, 25 bp, Canis familiaris
ggggcaccatgccaagtaccaaacc

SEQ ID NO: 151383 - DNA, 25 bp, Canis familiaris
ggggcatagtgggactacctaacca

SEQ ID NO: 151384 - DNA, 25 bp, Canis familiaris
ggggctaggggttacattgcaccct

SEQ ID NO: 151385 - DNA, 25 bp, Canis familiaris
ggggaaagcaagacaatttgaccct

SEQ ID NO: 151386 - DNA, 25 bp, Canis familiaris
ggggtgaaggagacactactgccac

SEQ ID NO: 151387 - DNA, 25 bp, Canis familiaris
gggggtgaggcaggcaggcacccca

SEQ ID NO: 151388 - DNA, 25 bp, Canis familiaris
ggggcaggaggctaaggacttacat

SEQ ID NO: 151389 - DNA, 25 bp, Canis familiaris
ggggaaggtcaactggactcaatca

SEQ ID NO: 151390 - DNA, 25 bp, Canis familiaris
ggggatagcgatgctgaggaccctg

SEQ ID NO: 151391 - DNA, 25 bp, Canis familiaris
ggggacagcgtgaacagctacggga

SEQ ID NO: 151392 - DNA, 25 bp, Canis familiaris
ggggagagtggcagtttgcatggcg

SEQ ID NO: 151393 - DNA, 25 bp, Canis familiaris
ggggggtggttggcattcattaaag

SEQ ID NO: 151394 - DNA, 25 bp, Canis familiaris
gggggtggtggggattttgatagag

SEQ ID NO: 151395 - DNA, 25 bp, Canis familiaris
ggggggagtgaggtatttattctgt

SEQ ID NO: 151396 - DNA, 25 bp, Canis familiaris
ggggggattgaggagttgtggtgtt

SEQ ID NO: 151397 - DNA, 25 bp, Canis familiaris
ggggggatcatgcaagatcttcgtg

SEQ ID NO: 151398 - DNA, 25 bp, Canis familiaris
gggggtgtcaggaatgtgtgcttgt

SEQ ID NO: 151399 - DNA, 25 bp, Canis familiaris
ggggtagaattgtatttgctctgcc

SEQ ID NO: 151400 - DNA, 25 bp, Canis familiaris
ggggtgacaggttgatttccgactc

SEQ ID NO: 151401 - DNA, 25 bp, Canis familiaris
ggggaggaggttgtgttgctgactc

SEQ ID NO: 151402 - DNA, 25 bp, Canis familiaris
ggggtggtgggtagtattgtagtgc

SEQ ID NO: 151403 - DNA, 25 bp, Canis familiaris
ggggctgtttagatttttcagtcat

SEQ ID NO: 151404 - DNA, 25 bp, Canis familiaris
gggggtggtcacttttattgagtca

SEQ ID NO: 151405 - DNA, 25 bp, Canis familiaris
gggggtttgcactagtagacatcgt

SEQ ID NO: 151406 - DNA, 25 bp, Canis familiaris
ggtggcgttctgtcatttacacaca

SEQ ID NO: 151407 - DNA, 25 bp, Canis familiaris
ggtgttttccatttgtaccaaatag

SEQ ID NO: 151408 - DNA, 25 bp, Canis familiaris
ggtgttttccatgattctcacaagg

SEQ ID NO: 151409 - DNA, 25 bp, Canis familiaris
ggtggttctccttcaggctaataga

SEQ ID NO: 151410 - DNA, 25 bp, Canis familiaris
ggtggttcttcaacaggaagtggca

SEQ ID NO: 151411 - DNA, 25 bp, Canis familiaris
ggtggttctcttcccaaagtggaag

SEQ ID NO: 151412 - DNA, 25 bp, Canis familiaris
ggggctcttcttctgagagggtact

SEQ ID NO: 151413 - DNA, 25 bp, Canis familiaris
ggggacccctaattgcagggggcat

SEQ ID NO: 151414 - DNA, 25 bp, Canis familiaris
ggggatccccttggtgtagggacat

SEQ ID NO: 151415 - DNA, 25 bp, Canis familiaris
ggggctctcccatctttatgggaaa

SEQ ID NO: 151416 - DNA, 25 bp, Canis familiaris
ggggctcttccatttatttgttaga

SEQ ID NO: 151417 - DNA, 25 bp, Canis familiaris
ggcgtacccaacttaattgcttcga

SEQ ID NO: 151418 - DNA, 25 bp, Canis familiaris
ggagttgggaaatacttgcttcaga

SEQ ID NO: 151419 - DNA, 25 bp, Canis familiaris
ggctgttgggaagccagttcctcca

SEQ ID NO: 151420 - DNA, 25 bp, Canis familiaris
ggtggtggtgcatggccgttcttag

SEQ ID NO: 151421 - DNA, 25 bp, Canis familiaris
gggggtgatgattagctcagtatgg

SEQ ID NO: 151422 - DNA, 25 bp, Canis familiaris
ggggagtctgagaagcactgtctgg

SEQ ID NO: 151423 - DNA, 25 bp, Canis familiaris
ggggaatgaagggatcgctgctggt

SEQ ID NO: 151424 - DNA, 25 bp, Canis familiaris
ggggaagatggaatgccctctgtta

SEQ ID NO: 151425 - DNA, 25 bp, Canis familiaris
ggggatgaaggagcgctctttcatg

SEQ ID NO: 151426 - DNA, 25 bp, Canis familiaris
ggggaaggagtccctgaatctctgg

SEQ ID NO: 151427 - DNA, 25 bp, Canis familiaris
ggggcacagggtggatctagagtgt

SEQ ID NO: 151428 - DNA, 25 bp, Canis familiaris
ggggaaggcattggacacacagagc

SEQ ID NO: 151429 - DNA, 25 bp, Canis familiaris
ggggggactatgtcaacatctgagt

SEQ ID NO: 151430 - DNA, 25 bp, Canis familiaris
ggggggatttgagtacactgtgtcc

SEQ ID NO: 151431 - DNA, 25 bp, Canis familiaris
ggtgggtaagtagacctatcccgca

SEQ ID NO: 151432 - DNA, 25 bp, Canis familiaris
ggggtgaagggagaccccaccagca

SEQ ID NO: 151433 - DNA, 25 bp, Canis familiaris
ggggtcaaggtggtacccacagtca

SEQ ID NO: 151434 - DNA, 25 bp, Canis familiaris
ggtgtttgaggggtacgtcaagtca

SEQ ID NO: 151435 - DNA, 25 bp, Canis familiaris
ggtggaggcaggggtagggcagggc

SEQ ID NO: 151436 - DNA, 25 bp, Canis familiaris
ggtggagtggggatagggggcctgg

SEQ ID NO: 151437 - DNA, 25 bp, Canis familiaris
ggggttggggattaaggagtgcact

SEQ ID NO: 151438 - DNA, 25 bp, Canis familiaris
ggggttggggatgagagggagagga

SEQ ID NO: 151439 - DNA, 25 bp, Canis familiaris
ggtggcgggggtcaggtgagaagag

SEQ ID NO: 151440 - DNA, 25 bp, Canis familiaris
gggggggagcagaaagtgtgacaaa

SEQ ID NO: 151441 - DNA, 25 bp, Canis familiaris
ggtggctgggaggcatcagttgcta

SEQ ID NO: 151442 - DNA, 25 bp, Canis familiaris
ggggtgggcaaatgtgtgtgaggca

SEQ ID NO: 151443 - DNA, 25 bp, Canis familiaris
ggggcaggcaacaaggctttggtac

SEQ ID NO: 151444 - DNA, 25 bp, Canis familiaris
ggggtagcaacaaggtgttcctcac

SEQ ID NO: 151445 - DNA, 25 bp, Canis familiaris
ggggatggaatcatgcggtatccac

SEQ ID NO: 151446 - DNA, 25 bp, Canis familiaris
ggggattgcaagatcctgtacagcc

SEQ ID NO: 151447 - DNA, 25 bp, Canis familiaris
ggggtgatctagatactctacatct

SEQ ID NO: 151448 - DNA, 25 bp, Canis familiaris
ggggtcatctggactgtgttcaacc

SEQ ID NO: 151449 - DNA, 25 bp, Canis familiaris
ggggtgactggacgtgattgacttc

SEQ ID NO: 151450 - DNA, 25 bp, Canis familiaris
ggggtgactgggtgatggaccatga

SEQ ID NO: 151451 - DNA, 25 bp, Canis familiaris
ggggtgcaggggttcagtatcacag

SEQ ID NO: 151452 - DNA, 25 bp, Canis familiaris
ggggtgcttagcctatagttcatgg

SEQ ID NO: 151453 - DNA, 25 bp, Canis familiaris
ggggttgtcctttatttcagagtga

SEQ ID NO: 151454 - DNA, 25 bp, Canis familiaris
ggggttgtttgggaggctgtagtga

SEQ ID NO: 151455 - DNA, 25 bp, Canis familiaris
ggggtttttgtgggcagcagccagt

SEQ ID NO: 151456 - DNA, 25 bp, Canis familiaris
ggggctatgtgaaggcgggcccttg

SEQ ID NO: 151457 - DNA, 25 bp, Canis familiaris
ggggatttgatggcaacggcccttg

SEQ ID NO: 151458 - DNA, 25 bp, Canis familiaris
ggggcactagtgacaacgtcccatc

SEQ ID NO: 151459 - DNA, 25 bp, Canis familiaris
ggggcctgagagagaccagcacccc

SEQ ID NO: 151460 - DNA, 25 bp, Canis familiaris
ggggcctgactcttacagtgacccc

SEQ ID NO: 151461 - DNA, 25 bp, Canis familiaris
ggggcagaggtagacaggcaccccc

SEQ ID NO: 151462 - DNA, 25 bp, Canis familiaris
ggggagggctggaacagacaccttc

SEQ ID NO: 151463 - DNA, 25 bp, Canis familiaris
ggtctggggtaacccagcaactcct

SEQ ID NO: 151464 - DNA, 25 bp, Canis familiaris
ggtggggagaagatccaggaatttc

SEQ ID NO: 151465 - DNA, 25 bp, Canis familiaris
ggggcggagatatatgctctggaga

SEQ ID NO: 151466 - DNA, 25 bp, Canis familiaris
ggggtggtatgcagatcttcgtgaa

SEQ ID NO: 151467 - DNA, 25 bp, Canis familiaris
ggggcgtctatgcgatattcgtcac

SEQ ID NO: 151468 - DNA, 25 bp, Canis familiaris
ggggaacttcagtatttcctcacag

SEQ ID NO: 151469 - DNA, 25 bp, Canis familiaris
ggggaagttcactgttaccagccaa

SEQ ID NO: 151470 - DNA, 25 bp, Canis familiaris
ggggaggtcacttttgataccacca

SEQ ID NO: 151471 - DNA, 25 bp, Canis familiaris
ggggatggtagttttttcatcttca

SEQ ID NO: 151472 - DNA, 25 bp, Canis familiaris
ggtggctggaacatctatttttcta

SEQ ID NO: 151473 - DNA, 25 bp, Canis familiaris
ggggggcaaatttattcttgtctga

SEQ ID NO: 151474 - DNA, 25 bp, Canis familiaris
ggggggagattttgttcatctttgt

SEQ ID NO: 151475 - DNA, 25 bp, Canis familiaris
ggggtctgagtttcagttcatttct

SEQ ID NO: 151476 - DNA, 25 bp, Canis familiaris
ggggtgctgtttgagagtctttgtg

SEQ ID NO: 151477 - DNA, 25 bp, Canis familiaris
ggggtgctgtttgagagtctttgtg

SEQ ID NO: 151478 - DNA, 25 bp, Canis familiaris
ggggtgctgtttgagagtctttgtg

SEQ ID NO: 151479 - DNA, 25 bp, Canis familiaris
ggggtgctgtttgagagtctttgtg

SEQ ID NO: 151480 - DNA, 25 bp, Canis familiaris
ggggtgctgtttgagagtctttgtg

SEQ ID NO: 151481 - DNA, 25 bp, Canis familiaris
ggggctggactagacagactcctag

SEQ ID NO: 151482 - DNA, 25 bp, Canis familiaris
ggggcattacttcaagaccatcgag

SEQ ID NO: 151483 - DNA, 25 bp, Canis familiaris
ggggattagattcctgagcaccatc

SEQ ID NO: 151484 - DNA, 25 bp, Canis familiaris
ggggtagagcatgctctggtctcct

SEQ ID NO: 151485 - DNA, 25 bp, Canis familiaris
ggggtgcgcactggacgtggcgcac

SEQ ID NO: 151486 - DNA, 25 bp, Canis familiaris
ggggctgcggtggacgaggcagcga

SEQ ID NO: 151487 - DNA, 25 bp, Canis familiaris
ggggggcaggagacagagtgactca

SEQ ID NO: 151488 - DNA, 25 bp, Canis familiaris
ggggtgtcggatgcagagttccaag

SEQ ID NO: 151489 - DNA, 25 bp, Canis familiaris
ggggttctgtactaatttccatggc

SEQ ID NO: 151490 - DNA, 25 bp, Canis familiaris
ggggtacatgtttgaattttggtgg

SEQ ID NO: 151491 - DNA, 25 bp, Canis familiaris
ggggttctttatcatatttacttga

SEQ ID NO: 151492 - DNA, 25 bp, Canis familiaris
ggggctcttttcttaatttacatag

SEQ ID NO: 151493 - DNA, 25 bp, Canis familiaris
ggggattattggttctctttatata

SEQ ID NO: 151494 - DNA, 25 bp, Canis familiaris
ggggtagtatggatctatttctcta

SEQ ID NO: 151495 - DNA, 25 bp, Canis familiaris
ggggagcaggatgtggaatatttta

SEQ ID NO: 151496 - DNA, 25 bp, Canis familiaris
ggggagcaggctgtgttttctttgc

SEQ ID NO: 151497 - DNA, 25 bp, Canis familiaris
ggggagagtcatgaccatcccgtac

SEQ ID NO: 151498 - DNA, 25 bp, Canis familiaris
ggggaagcaatacctacaccagtaa

SEQ ID NO: 151499 - DNA, 25 bp, Canis familiaris
ggggagctcagaacatctccccagt

SEQ ID NO: 151500 - DNA, 25 bp, Canis familiaris
ggggtctgcagaacatatcaagcac

SEQ ID NO: 151501 - DNA, 25 bp, Canis familiaris
ggggacatgcaaatcagagcaacag

SEQ ID NO: 151502 - DNA, 25 bp, Canis familiaris
ggtggaatgcacagaactcacgtgt

SEQ ID NO: 151503 - DNA, 25 bp, Canis familiaris
ggagagaagctcaagaccctcaggc

SEQ ID NO: 151504 - DNA, 25 bp, Canis familiaris
ggtgatgaggacacccactgagcgc

SEQ ID NO: 151505 - DNA, 25 bp, Canis familiaris
ggtgcataaaccagacctaccagct

SEQ ID NO: 151506 - DNA, 25 bp, Canis familiaris
tgtcagtaacccagcacttgaccca

SEQ ID NO: 151507 - DNA, 25 bp, Canis familiaris
tgtttaaccctctgttgacacacac

SEQ ID NO: 151508 - DNA, 25 bp, Canis familiaris
tgttaactccccagttcatacacta

SEQ ID NO: 151509 - DNA, 25 bp, Canis familiaris
tgttagactcctgacgtttctttca

SEQ ID NO: 151510 - DNA, 25 bp, Canis familiaris
ggggcacatcgtgactgtgtttttc

SEQ ID NO: 151511 - DNA, 25 bp, Canis familiaris
ggggatcacagtaaccttatttatc

SEQ ID NO: 151512 - DNA, 25 bp, Canis familiaris
ggggcaatcgtcagccccatttttt

SEQ ID NO: 151513 - DNA, 25 bp, Canis familiaris
ggggctattgtaaatcatgccattt

SEQ ID NO: 151514 - DNA, 25 bp, Canis familiaris
ggtggatatggtagcagaaggttct

SEQ ID NO: 151515 - DNA, 25 bp, Canis familiaris
ggggttgtgcggtagagcgatgtcc

SEQ ID NO: 151516 - DNA, 25 bp, Canis familiaris
ggggtgtatgtggaagggctgctgc

SEQ ID NO: 151517 - DNA, 25 bp, Canis familiaris
ggggtgtatgatgagtgtgtgtgtg

SEQ ID NO: 151518 - DNA, 25 bp, Canis familiaris
ggggacattgtcacagtgggtgagt

SEQ ID NO: 151519 - DNA, 25 bp, Canis familiaris
ggtggacaaggttagtgggagttct

SEQ ID NO: 151520 - DNA, 25 bp, Canis familiaris
ggggatgatggtatagctgggagtg

SEQ ID NO: 151521 - DNA, 25 bp, Canis familiaris
ggggatggagagcgcaaggccaatg

SEQ ID NO: 151522 - DNA, 25 bp, Canis familiaris
ggggagagaagaggtacaagatatg

SEQ ID NO: 151523 - DNA, 25 bp, Canis familiaris
ggggagaccaggttatgcctatatg

SEQ ID NO: 151524 - DNA, 25 bp, Canis familiaris
ggggagatcaagctctgtgactttg

SEQ ID NO: 151525 - DNA, 25 bp, Canis familiaris
ggtggacatgctggactcagatggc

SEQ ID NO: 151526 - DNA, 25 bp, Canis familiaris
ggggactcacacgtcagatgtttga

SEQ ID NO: 151527 - DNA, 25 bp, Canis familiaris
ggggttcccgcatgtggttgaggaa

SEQ ID NO: 151528 - DNA, 25 bp, Canis familiaris
ggggttccggatgctgtggatggag

SEQ ID NO: 151529 - DNA, 25 bp, Canis familiaris
ggggatttgctgcatttgtggtagc

SEQ ID NO: 151530 - DNA, 25 bp, Canis familiaris
ggggatttctcttttatgtgtacac

SEQ ID NO: 151531 - DNA, 25 bp, Canis familiaris
ggggattgtccttctgttgtgaata

SEQ ID NO: 151532 - DNA, 25 bp, Canis familiaris
ggggatctgcccattgttgatatgg

SEQ ID NO: 151533 - DNA, 25 bp, Canis familiaris
ggggatctgccatggttgatatggg

SEQ ID NO: 151534 - DNA, 25 bp, Canis familiaris
ggggttctctacctggtatgaggga

SEQ ID NO: 151535 - DNA, 25 bp, Canis familiaris
ggggtctgtttactggataaggctg

SEQ ID NO: 151536 - DNA, 25 bp, Canis familiaris
ggggagttgtcgaggaaagtgcgag

SEQ ID NO: 151537 - DNA, 25 bp, Canis familiaris
ggggagttgtcgagggaagttgcga

SEQ ID NO: 151538 - DNA, 25 bp, Canis familiaris
ggggagtgagcctgggagacacttg

SEQ ID NO: 151539 - DNA, 25 bp, Canis familiaris
ggggagatgtgtcagtggaaccatt

SEQ ID NO: 151540 - DNA, 25 bp, Canis familiaris
ggggaatattcgagcagaacctgta

SEQ ID NO: 151541 - DNA, 25 bp, Canis familiaris
ggtggacaattcgccacaaccttga

SEQ ID NO: 151542 - DNA, 25 bp, Canis familiaris
ggggcacaaagcacaacgaccaaga

SEQ ID NO: 151543 - DNA, 25 bp, Canis familiaris
ggtggccaaagaaatacagcttcca

SEQ ID NO: 151544 - DNA, 25 bp, Canis familiaris
ggggaccacagttatgtcacttgcc

SEQ ID NO: 151545 - DNA, 25 bp, Canis familiaris
ggggaccacagttatgtcacttgcc

SEQ ID NO: 151546 - DNA, 25 bp, Canis familiaris
ggggaccacagttatgtcacttgcc

SEQ ID NO: 151547 - DNA, 25 bp, Canis familiaris
ggggctgcccagaacatcatccctg

SEQ ID NO: 151548 - DNA, 25 bp, Canis familiaris
ggggctcagcagctgagcagctgcc

SEQ ID NO: 151549 - DNA, 25 bp, Canis familiaris
ggggacaaggggctgcatatcgatc

SEQ ID NO: 151550 - DNA, 25 bp, Canis familiaris
ggggatcacaagggctgtccagccc

SEQ ID NO: 151551 - DNA, 25 bp, Canis familiaris
ggggacaagaaggtcatcgcaacga

SEQ ID NO: 151552 - DNA, 25 bp, Canis familiaris
ggggagaagaggctgtggcgacctt

SEQ ID NO: 151553 - DNA, 25 bp, Canis familiaris
ggggaattaggcttctggttcctct

SEQ ID NO: 151554 - DNA, 25 bp, Canis familiaris
ggggccaaaggcttgtgagttcctg

SEQ ID NO: 151555 - DNA, 25 bp, Canis familiaris
ggggtcaacaaacatgaggatgccg

SEQ ID NO: 151556 - DNA, 25 bp, Canis familiaris
ggggtcactgcagactgtagctgag

SEQ ID NO: 151557 - DNA, 25 bp, Canis familiaris
ggggccatgtgagggttgactgagc

SEQ ID NO: 151558 - DNA, 25 bp, Canis familiaris
ggggtatgtgacaactgtgctctga

SEQ ID NO: 151559 - DNA, 25 bp, Canis familiaris
ggtgtccattgccatatcggctcgc

SEQ ID NO: 151560 - DNA, 25 bp, Canis familiaris
ggggcaattgtatcctgcatggcaa

SEQ ID NO: 151561 - DNA, 25 bp, Canis familiaris
ggggtatctgtgaacctgatggagg

SEQ ID NO: 151562 - DNA, 25 bp, Canis familiaris
ggggtcctgagatccagattggccc

SEQ ID NO: 151563 - DNA, 25 bp, Canis familiaris
ggggactatcgatggcgttggagcc

SEQ ID NO: 151564 - DNA, 25 bp, Canis familiaris
ggggactacagcattggctggggta

SEQ ID NO: 151565 - DNA, 25 bp, Canis familiaris
ggggatctagccagggcttgggaga

SEQ ID NO: 151566 - DNA, 25 bp, Canis familiaris
ggggtctgggaggggttgagaggca

SEQ ID NO: 151567 - DNA, 25 bp, Canis familiaris
ggggtagggaggctgaggtgaatca

SEQ ID NO: 151568 - DNA, 25 bp, Canis familiaris
ggggaagggaggctgcttgggattc

SEQ ID NO: 151569 - DNA, 25 bp, Canis familiaris
tgttggtagggaagaatttggtgtt

SEQ ID NO: 151570 - DNA, 25 bp, Canis familiaris
ggtggctcgggcagaatttgggaag

SEQ ID NO: 151571 - DNA, 25 bp, Canis familiaris
ggggatgggagttagttatgggagg

SEQ ID NO: 151572 - DNA, 25 bp, Canis familiaris
ggggctggaagcttagagatacgga

SEQ ID NO: 151573 - DNA, 25 bp, Canis familiaris
ggggcttgatactagaagattctga

SEQ ID NO: 151574 - DNA, 25 bp, Canis familiaris
ggggcctgcaaggagaactactgtc

SEQ ID NO: 151575 - DNA, 25 bp, Canis familiaris
ggggctgctagataggacttatggc

SEQ ID NO: 151576 - DNA, 25 bp, Canis familiaris
ggggcttagatttggaattgtcagt

SEQ ID NO: 151577 - DNA, 25 bp, Canis familiaris
ggggctctagattctgaggcacatt

SEQ ID NO: 151578 - DNA, 25 bp, Canis familiaris
ggggctccagtgttgagtgtatatg

SEQ ID NO: 151579 - DNA, 25 bp, Canis familiaris
ggtgtcttcctaatgacctaattta

SEQ ID NO: 151580 - DNA, 25 bp, Canis familiaris
ggtggtatcctttatccaattaata

SEQ ID NO: 151581 - DNA, 25 bp, Canis familiaris
tggggattacttgaacatttaatat

SEQ ID NO: 151582 - DNA, 25 bp, Canis familiaris
ggggattacttgaacatttaatatt

SEQ ID NO: 151583 - DNA, 25 bp, Canis familiaris
ggggttatttcttctgtgtgactat

SEQ ID NO: 151584 - DNA, 25 bp, Canis familiaris
ggggtttattctagtgtcactgctc

SEQ ID NO: 151585 - DNA, 25 bp, Canis familiaris
ggggtatgtttgggatccacagcac

SEQ ID NO: 151586 - DNA, 25 bp, Canis familiaris
ggggctcaattagatgacaacatcc

SEQ ID NO: 151587 - DNA, 25 bp, Canis familiaris
ggtggtccttcagagatccattcca

SEQ ID NO: 151588 - DNA, 25 bp, Canis familiaris
ggggtaggtgcacagtgccatcacc

SEQ ID NO: 151589 - DNA, 25 bp, Canis familiaris
ggggctctgggaaagcatggcaccc

SEQ ID NO: 151590 - DNA, 25 bp, Canis familiaris
ggggctgtgtcttaagctggcaacc

SEQ ID NO: 151591 - DNA, 25 bp, Canis familiaris
ggggcagatccttaaatgagacgca

SEQ ID NO: 151592 - DNA, 25 bp, Canis familiaris
ggggcaccctgatagagaaatatgt

SEQ ID NO: 151593 - DNA, 25 bp, Canis familiaris
ggggatccctactaatgaagagtct

SEQ ID NO: 151594 - DNA, 25 bp, Canis familiaris
ggggatccatgcacctatgtaagga

SEQ ID NO: 151595 - DNA, 25 bp, Canis familiaris
ggggagcccttcgttgagaatgggg

SEQ ID NO: 151596 - DNA, 25 bp, Canis familiaris
ggggagcccttcgttgagaatgggg

SEQ ID NO: 151597 - DNA, 25 bp, Canis familiaris
ggggatgcctgcatggttcagcagt

SEQ ID NO: 151598 - DNA, 25 bp, Canis familiaris
ggggatggatttttttgcagtgggg

SEQ ID NO: 151599 - DNA, 25 bp, Canis familiaris
ggggagtttggtttatgatgaggtg

SEQ ID NO: 151600 - DNA, 25 bp, Canis familiaris
ggggagtagttggtggagggagttg

SEQ ID NO: 151601 - DNA, 25 bp, Canis familiaris
ggggcagttttggtggaagaagctc

SEQ ID NO: 151602 - DNA, 25 bp, Canis familiaris
ggggcctttggtgggagaacagagc

SEQ ID NO: 151603 - DNA, 25 bp, Canis familiaris
ggggcctgatcgagcggaaccaggc

SEQ ID NO: 151604 - DNA, 25 bp, Canis familiaris
ggggacttggagctagaaccggtgt

SEQ ID NO: 151605 - DNA, 25 bp, Canis familiaris
ggggacattgtacttaaacctattg

SEQ ID NO: 151606 - DNA, 25 bp, Canis familiaris
ggggcagcatcttgatgtaaaacat

SEQ ID NO: 151607 - DNA, 25 bp, Canis familiaris
ggggagcatcattacgaactgacta

SEQ ID NO: 151608 - DNA, 25 bp, Canis familiaris
ggggagtcttagcataatgacagat

SEQ ID NO: 151609 - DNA, 25 bp, Canis familiaris
ggggaactatgaatatattagcagt

SEQ ID NO: 151610 - DNA, 25 bp, Canis familiaris
ggggagaccaaaaatatacatgtga

SEQ ID NO: 151611 - DNA, 25 bp, Canis familiaris
ggggaaaaaatagctcacatgagaa

SEQ ID NO: 151612 - DNA, 25 bp, Canis familiaris
ggggagagaaaaaccagctaccata

SEQ ID NO: 151613 - DNA, 25 bp, Canis familiaris
ggtggccgaaaagcggctcatccca

SEQ ID NO: 151614 - DNA, 25 bp, Canis familiaris
ggtggccgaaaagcggctcatccca

SEQ ID NO: 151615 - DNA, 25 bp, Canis familiaris
ggtggccgaaaagcggctcatccca

SEQ ID NO: 151616 - DNA, 25 bp, Canis familiaris
ggtggccgaaaagcggctcatccca

SEQ ID NO: 151617 - DNA, 25 bp, Canis familiaris
ggtggccgttaaagcggctcatccc

SEQ ID NO: 151618 - DNA, 25 bp, Canis familiaris
ggtggccattgtttggcctgttccc

SEQ ID NO: 151619 - DNA, 25 bp, Canis familiaris
ggggcaatccttaaacatggtccac

SEQ ID NO: 151620 - DNA, 25 bp, Canis familiaris
ggggcaaagtcttggaaggatccca

SEQ ID NO: 151621 - DNA, 25 bp, Canis familiaris
ggggctatgttcaggaaggcagtcc

SEQ ID NO: 151622 - DNA, 25 bp, Canis familiaris
ggggctaactgctaacaaggagacc

SEQ ID NO: 151623 - DNA, 25 bp, Canis familiaris
ggtggctaaccgaaattgggaggca

SEQ ID NO: 151624 - DNA, 25 bp, Canis familiaris
ggtgcagaaacccggatttggagtg

SEQ ID NO: 151625 - DNA, 25 bp, Canis familiaris
ggggcaacacagtggtattggggag

SEQ ID NO: 151626 - DNA, 25 bp, Canis familiaris
ggggaaatacggaccatcacggagg

SEQ ID NO: 151627 - DNA, 25 bp, Canis familiaris
ggggaaatccagacccaagtggagg

SEQ ID NO: 151628 - DNA, 25 bp, Canis familiaris
ggggacacattagcacatcaactgg

SEQ ID NO: 151629 - DNA, 25 bp, Canis familiaris
ggggatagcattacacattgaactt

SEQ ID NO: 151630 - DNA, 25 bp, Canis familiaris
ggggctggagtgaccttgaatgtcc

SEQ ID NO: 151631 - DNA, 25 bp, Canis familiaris
ggggcaggagtgacactgtaatcac

SEQ ID NO: 151632 - DNA, 25 bp, Canis familiaris
ggggcgcaagatgactgtcaacgga

SEQ ID NO: 151633 - DNA, 25 bp, Canis familiaris
ggtgggccatgagaggaaactggtg

SEQ ID NO: 151634 - DNA, 25 bp, Canis familiaris
ggggatcctgagatgggaactggta

SEQ ID NO: 151635 - DNA, 25 bp, Canis familiaris
ggggacctgaggaagatgaacaagc

SEQ ID NO: 151636 - DNA, 25 bp, Canis familiaris
ggggccctggaaggtggagcaagca

SEQ ID NO: 151637 - DNA, 25 bp, Canis familiaris
ggggcccccactgtggagataaaga

SEQ ID NO: 151638 - DNA, 25 bp, Canis familiaris
ggggcaccccacagggagggtgaag

SEQ ID NO: 151639 - DNA, 25 bp, Canis familiaris
ggggatcccagcagggggagggcaa

SEQ ID NO: 151640 - DNA, 25 bp, Canis familiaris
ggggccccagacactgggagaggca

SEQ ID NO: 151641 - DNA, 25 bp, Canis familiaris
ggggacccaattgctggaagatggc

SEQ ID NO: 151642 - DNA, 25 bp, Canis familiaris
ggggacccacttgctggaagatggc

SEQ ID NO: 151643 - DNA, 25 bp, Canis familiaris
ggggacccacttgctggaagatggc

SEQ ID NO: 151644 - DNA, 25 bp, Canis familiaris
ggggacccacttgctggaagatggc

SEQ ID NO: 151645 - DNA, 25 bp, Canis familiaris
ggggacccacttgctggaagatggc

SEQ ID NO: 151646 - DNA, 25 bp, Canis familiaris
ggggacccacttgctggaagatggc

SEQ ID NO: 151647 - DNA, 25 bp, Canis familiaris
ggggacctgccttgagggaagaact

SEQ ID NO: 151648 - DNA, 25 bp, Canis familiaris
ggggccactttatgggatgagtact

SEQ ID NO: 151649 - DNA, 25 bp, Canis familiaris
ggtggcccttgtttacagtgaggac

SEQ ID NO: 151650 - DNA, 25 bp, Canis familiaris
ggggcccctggatcagtgaagagaa

SEQ ID NO: 151651 - DNA, 25 bp, Canis familiaris
ggggcctttggcaagagtgacgagg

SEQ ID NO: 151652 - DNA, 25 bp, Canis familiaris
ggggccctgtgagatgcatggagga

SEQ ID NO: 151653 - DNA, 25 bp, Canis familiaris
ggggcaccactgaaatctgaggtga

SEQ ID NO: 151654 - DNA, 25 bp, Canis familiaris
ggggcagccaggagatccaggtgcc

SEQ ID NO: 151655 - DNA, 25 bp, Canis familiaris
ggggctgaaggagaccaaggccgcc

SEQ ID NO: 151656 - DNA, 25 bp, Canis familiaris
ggggagcaaggggagccaggggctc

SEQ ID NO: 151657 - DNA, 25 bp, Canis familiaris
ggggcagaaggtgagcacggcccgc

SEQ ID NO: 151658 - DNA, 25 bp, Canis familiaris
tgggccaaagggagaagctcccgcg

SEQ ID NO: 151659 - DNA, 25 bp, Canis familiaris
ggggccagagggaggccccagtctc

SEQ ID NO: 151660 - DNA, 25 bp, Canis familiaris
ggggccaggaatgcgagccccatgc

SEQ ID NO: 151661 - DNA, 25 bp, Canis familiaris
ggggccagaggatgaagctgcccac

SEQ ID NO: 151662 - DNA, 25 bp, Canis familiaris
ggggctggtggatgaaccccatctt

SEQ ID NO: 151663 - DNA, 25 bp, Canis familiaris
tggggatgccggtaaaacctcttgt

SEQ ID NO: 151664 - DNA, 25 bp, Canis familiaris
ggggactggttattagacttttgat

SEQ ID NO: 151665 - DNA, 25 bp, Canis familiaris
ggggagcttgtttataagatttctt

SEQ ID NO: 151666 - DNA, 25 bp, Canis familiaris
ggggcctgttgtttaagactggctg

SEQ ID NO: 151667 - DNA, 25 bp, Canis familiaris
ggggcatttaagtttaatctcctgt

SEQ ID NO: 151668 - DNA, 25 bp, Canis familiaris
ggggatttattatttcttctctatg

SEQ ID NO: 151669 - DNA, 25 bp, Canis familiaris
ggtggaatttttcatcgtctctact

SEQ ID NO: 151670 - DNA, 25 bp, Canis familiaris
ggtgtgactgttctggtcagtcctg

SEQ ID NO: 151671 - DNA, 25 bp, Canis familiaris
ggtgcgactgaacgtgttcggggtt

SEQ ID NO: 151672 - DNA, 25 bp, Canis familiaris
ggaggccgatagctgtttgggggat

SEQ ID NO: 151673 - DNA, 25 bp, Canis familiaris
ggggagttgagatgttgggggcgat

SEQ ID NO: 151674 - DNA, 25 bp, Canis familiaris
ggggagtggaagggtgaggggtgag

SEQ ID NO: 151675 - DNA, 25 bp, Canis familiaris
ggggaggtgagtaggtatggggtgc

SEQ ID NO: 151676 - DNA, 25 bp, Canis familiaris
ggggatgggggaagtaggggatgat

SEQ ID NO: 151677 - DNA, 25 bp, Canis familiaris
ggggcagggggagtggaagggtgag

SEQ ID NO: 151678 - DNA, 25 bp, Canis familiaris
ggggagtggcagggaggagagggag

SEQ ID NO: 151679 - DNA, 25 bp, Canis familiaris
ggggagaacagcaggtggggtgagg

SEQ ID NO: 151680 - DNA, 25 bp, Canis familiaris
ggggaacaggagaggaggggcagtg

SEQ ID NO: 151681 - DNA, 25 bp, Canis familiaris
ggtggcaagggaactgggggtcagg

SEQ ID NO: 151682 - DNA, 25 bp, Canis familiaris
ggtggcacaggattaccaaaggaca

SEQ ID NO: 151683 - DNA, 25 bp, Canis familiaris
ggttcctggtccactactggaaagc

SEQ ID NO: 151684 - DNA, 25 bp, Canis familiaris
ggggcctggttcgcaggggaatagc

SEQ ID NO: 151685 - DNA, 25 bp, Canis familiaris
ggggcgtgatccagacatggggaga

SEQ ID NO: 151686 - DNA, 25 bp, Canis familiaris
ggggcaggatgaaccaaggggatga

SEQ ID NO: 151687 - DNA, 25 bp, Canis familiaris
ggggcaagatcaaccaaagctgcag

SEQ ID NO: 151688 - DNA, 25 bp, Canis familiaris
ggggcatataccaccagatgatcaa

SEQ ID NO: 151689 - DNA, 25 bp, Canis familiaris
ggtggagtacttaccaggagcaact

SEQ ID NO: 151690 - DNA, 25 bp, Canis familiaris
ggaggcgcacaaataccggaataca

SEQ ID NO: 151691 - DNA, 25 bp, Canis familiaris
ggggctgaatatttcctggagtcca

SEQ ID NO: 151692 - DNA, 25 bp, Canis familiaris
ggggcatgcagatcttcgtgaagac

SEQ ID NO: 151693 - DNA, 25 bp, Canis familiaris
ggggcatgcactttgtcagtatgag

SEQ ID NO: 151694 - DNA, 25 bp, Canis familiaris
ggggcagctgaagtgccagctcata

SEQ ID NO: 151695 - DNA, 25 bp, Canis familiaris
ctgtggctgcagggacttaatttat

SEQ ID NO: 151696 - DNA, 25 bp, Canis familiaris
ggggctgcaggaacacaatcaagca

SEQ ID NO: 151697 - DNA, 25 bp, Canis familiaris
ggggctggatgaacagacaccactc

SEQ ID NO: 151698 - DNA, 25 bp, Canis familiaris
ggggatgatgagaacagtacctgca

SEQ ID NO: 151699 - DNA, 25 bp, Canis familiaris
ggggcagaaggacagacactcagga

SEQ ID NO: 151700 - DNA, 25 bp, Canis familiaris
ggggaaagagcgtgaagtcagtgca

SEQ ID NO: 151701 - DNA, 25 bp, Canis familiaris
ggggaaaactgtcgccagttgtgca

SEQ ID NO: 151702 - DNA, 25 bp, Canis familiaris
ggggaagaatctaccacgttgtctg

SEQ ID NO: 151703 - DNA, 25 bp, Canis familiaris
ggtggaaggaggaccagcctaggag

SEQ ID NO: 151704 - DNA, 25 bp, Canis familiaris
ggggaggcgaggaccagcagataat

SEQ ID NO: 151705 - DNA, 25 bp, Canis familiaris
ggggaggtaaaggcagagagaatga

SEQ ID NO: 151706 - DNA, 25 bp, Canis familiaris
ggggaggctgacaacgaatgagagg

SEQ ID NO: 151707 - DNA, 25 bp, Canis familiaris
ggggagctggccaaggagatccaga

SEQ ID NO: 151708 - DNA, 25 bp, Canis familiaris
ggggactgcctgaggagagctagcc

SEQ ID NO: 151709 - DNA, 25 bp, Canis familiaris
ggggagctccatcaaaggtacatct

SEQ ID NO: 151710 - DNA, 25 bp, Canis familiaris
ggagttgctcctgaaagggccttta

SEQ ID NO: 151711 - DNA, 25 bp, Canis familiaris
ggtgtttccggagagggctttgata

SEQ ID NO: 151712 - DNA, 25 bp, Canis familiaris
ggtggctttacgttaagtcatttct

SEQ ID NO: 151713 - DNA, 25 bp, Canis familiaris
ggtggcagttagtattaagtcaata

SEQ ID NO: 151714 - DNA, 25 bp, Canis familiaris
ggtggattcaattgactaactacat

SEQ ID NO: 151715 - DNA, 25 bp, Canis familiaris
ggtggttaaatgattcagctagcag

SEQ ID NO: 151716 - DNA, 25 bp, Canis familiaris
ggtggctaagtcagttgagtacagg

SEQ ID NO: 151717 - DNA, 25 bp, Canis familiaris
ggtggcttcattcggagggtaacaa

SEQ ID NO: 151718 - DNA, 25 bp, Canis familiaris
ggaggcttcaagttggaatgtaaaa

SEQ ID NO: 151719 - DNA, 25 bp, Canis familiaris
ggtggtgtcaaatggtatttaacaa

SEQ ID NO: 151720 - DNA, 25 bp, Canis familiaris
ggtgtgtaagaatgttgtgttaagt

SEQ ID NO: 151721 - DNA, 25 bp, Canis familiaris
ggggaaaacatacctggcttcaggc

SEQ ID NO: 151722 - DNA, 25 bp, Canis familiaris
ggggaataaatcatatatttcaggc

SEQ ID NO: 151723 - DNA, 25 bp, Canis familiaris
ggggaaaagtcagctatcctcctgt

SEQ ID NO: 151724 - DNA, 25 bp, Canis familiaris
ggggaaatagactctacccacagga

SEQ ID NO: 151725 - DNA, 25 bp, Canis familiaris
ggtggataatatcctgactttccaa

SEQ ID NO: 151726 - DNA, 25 bp, Canis familiaris
ggggaacattgcttgaggaacctga

SEQ ID NO: 151727 - DNA, 25 bp, Canis familiaris
ggggcagacattctagctgaccagc

SEQ ID NO: 151728 - DNA, 25 bp, Canis familiaris
ggtggacgatgaactggctaccagg

SEQ ID NO: 151729 - DNA, 25 bp, Canis familiaris
ggggagcgatctagctggaaacaca

SEQ ID NO: 151730 - DNA, 25 bp, Canis familiaris
ggggagcagcttgcggaatgcactc

SEQ ID NO: 151731 - DNA, 25 bp, Canis familiaris
ggtggatcgtttggaggcagacttt

SEQ ID NO: 151732 - DNA, 25 bp, Canis familiaris
ggtggtttctatggacggagtttgg

SEQ ID NO: 151733 - DNA, 25 bp, Canis familiaris
ggggagttcgaggagtgaggtcgga

SEQ ID NO: 151734 - DNA, 25 bp, Canis familiaris
ggtgggttcaaggcaatcaggctct

SEQ ID NO: 151735 - DNA, 25 bp, Canis familiaris
ggggacaacagcatgcaacaggtgt

SEQ ID NO: 151736 - DNA, 25 bp, Canis familiaris
ggggcaccacaggatcaaatgcgga

SEQ ID NO: 151737 - DNA, 25 bp, Canis familiaris
ggggacactgaggagagggcggacc

SEQ ID NO: 151738 - DNA, 25 bp, Canis familiaris
ggtgacgaccaggagagggttacgg

SEQ ID NO: 151739 - DNA, 25 bp, Canis familiaris
ggggaagccaggcattggttgacgg

SEQ ID NO: 151740 - DNA, 25 bp, Canis familiaris
ggggaatccagtcattggtgatacc

SEQ ID NO: 151741 - DNA, 25 bp, Canis familiaris
ggtagagtccttcttaggaaactcg

SEQ ID NO: 151742 - DNA, 25 bp, Canis familiaris
ggtggaaccagtccttaggcgaatt

SEQ ID NO: 151743 - DNA, 25 bp, Canis familiaris
ggtgtacaaattcattctggccagt

SEQ ID NO: 151744 - DNA, 25 bp, Canis familiaris
ggtgtacaaaccacttggcaaggcc

SEQ ID NO: 151745 - DNA, 25 bp, Canis familiaris
ggtgtatcaacggggcgtgtagagc

SEQ ID NO: 151746 - DNA, 25 bp, Canis familiaris
ggtgatagcattgctttcgtgtaaa

SEQ ID NO: 151747 - DNA, 25 bp, Canis familiaris
ggtgaacacgcgttttgttctaagt

SEQ ID NO: 151748 - DNA, 25 bp, Canis familiaris
ggtgtacacggcgttgtttctaatg

SEQ ID NO: 151749 - DNA, 25 bp, Canis familiaris
ggggaatctgagctagtttctgggt

SEQ ID NO: 151750 - DNA, 25 bp, Canis familiaris
ggggagatcattttttgtactttgt

SEQ ID NO: 151751 - DNA, 25 bp, Canis familiaris
ggggatgacatttttttgttttgct

SEQ ID NO: 151752 - DNA, 25 bp, Canis familiaris
ggtggatccttaattgtagcttttg

SEQ ID NO: 151753 - DNA, 25 bp, Canis familiaris
ggtggcttgtttacgtatgtttctg

SEQ ID NO: 151754 - DNA, 25 bp, Canis familiaris
ggggcttggaaggcatgtgtgtatg

SEQ ID NO: 151755 - DNA, 25 bp, Canis familiaris
ggtggttgtgaagctgcgtttgatt

SEQ ID NO: 151756 - DNA, 25 bp, Canis familiaris
ggtggtatatacatgaggtttattt

SEQ ID NO: 151757 - DNA, 25 bp, Canis familiaris
ggtggtcccagcagagagttttatt

SEQ ID NO: 151758 - DNA, 25 bp, Canis familiaris
ggtggtctccagcagggattgggat

SEQ ID NO: 151759 - DNA, 25 bp, Canis familiaris
ggggctctgccaagagccggagccc

SEQ ID NO: 151760 - DNA, 25 bp, Canis familiaris
ggggccatggaggtggcggagccca

SEQ ID NO: 151761 - DNA, 25 bp, Canis familiaris
ggtgagttggggggacgatgtccac

SEQ ID NO: 151762 - DNA, 25 bp, Canis familiaris
ggtggttgggactgacgtgtcatcc

SEQ ID NO: 151763 - DNA, 25 bp, Canis familiaris
ggggaatgtaactgatcctgatcac

SEQ ID NO: 151764 - DNA, 25 bp, Canis familiaris
ggggacttttcaatgtacatgtcac

SEQ ID NO: 151765 - DNA, 25 bp, Canis familiaris
ggggagctcttggatatgtcctgta

SEQ ID NO: 151766 - DNA, 25 bp, Canis familiaris
ggggagactgaggtgtgctgccctc

SEQ ID NO: 151767 - DNA, 25 bp, Canis familiaris
ggtgagcaacgtgatctcgtcgctc

SEQ ID NO: 151768 - DNA, 25 bp, Canis familiaris
ggtggaacatgtgactcttgatctt

SEQ ID NO: 151769 - DNA, 25 bp, Canis familiaris
ggggcgttggctatcattatgctac

SEQ ID NO: 151770 - DNA, 25 bp, Canis familiaris
ggggagtgggccactcactgatggc

SEQ ID NO: 151771 - DNA, 25 bp, Canis familiaris
ggggcagggaggtgtctgttgctgc

SEQ ID NO: 151772 - DNA, 25 bp, Canis familiaris
ggggaaggactgttcctttctgctc

SEQ ID NO: 151773 - DNA, 25 bp, Canis familiaris
ggggacggcaagatcctgtatggtc

SEQ ID NO: 151774 - DNA, 25 bp, Canis familiaris
ggggagcgtgcattttactgtattt

SEQ ID NO: 151775 - DNA, 25 bp, Canis familiaris
ggtgtacagctcaattaacttttat

SEQ ID NO: 151776 - DNA, 25 bp, Canis familiaris
ggtgtcacagccttctgaacttgtg

SEQ ID NO: 151777 - DNA, 25 bp, Canis familiaris
ggggcacagtctctatgatttgggt

SEQ ID NO: 151778 - DNA, 25 bp, Canis familiaris
ggggacacttgagttgcttatgggg

SEQ ID NO: 151779 - DNA, 25 bp, Canis familiaris
ggggcatctggatcttgttatgggg

SEQ ID NO: 151780 - DNA, 25 bp, Canis familiaris
ggggcattttaatttatatggggat

SEQ ID NO: 151781 - DNA, 25 bp, Canis familiaris
tctgtggtaaatatttttggggtcg

SEQ ID NO: 151782 - DNA, 25 bp, Canis familiaris
ggtggtacaagctgtctttgggcga

SEQ ID NO: 151783 - DNA, 25 bp, Canis familiaris
ggtgagtagaagtaatccaggtgga

SEQ ID NO: 151784 - DNA, 25 bp, Canis familiaris
ggtggggacgacctcagaggtgcca

SEQ ID NO: 151785 - DNA, 25 bp, Canis familiaris
ggtgtttggctgtgctcagaagggc

SEQ ID NO: 151786 - DNA, 25 bp, Canis familiaris
ggtggtatgtgtttgctagcatagt

SEQ ID NO: 151787 - DNA, 25 bp, Canis familiaris
ggggcaatgtgtttgggtgtgctgt

SEQ ID NO: 151788 - DNA, 25 bp, Canis familiaris
ggggagtgttcttgagactgtgttc

SEQ ID NO: 151789 - DNA, 25 bp, Canis familiaris
ggggcaatatttttatctatgttcc

SEQ ID NO: 151790 - DNA, 25 bp, Canis familiaris
ggggacaattacttctttgttcata

SEQ ID NO: 151791 - DNA, 25 bp, Canis familiaris
ggggagcagaatcagtctttgtcct

SEQ ID NO: 151792 - DNA, 25 bp, Canis familiaris
ggggcacagaatcaattcgatactt

SEQ ID NO: 151793 - DNA, 25 bp, Canis familiaris
ggggcctggatatattcaacacttc

SEQ ID NO: 151794 - DNA, 25 bp, Canis familiaris
ggggaatggaattttcgacctcact

SEQ ID NO: 151795 - DNA, 25 bp, Canis familiaris
ggggaatggactattgctctcatgt

SEQ ID NO: 151796 - DNA, 25 bp, Canis familiaris
ggggaatgacagccagtgtcaacgt

SEQ ID NO: 151797 - DNA, 25 bp, Canis familiaris
ggggaacacaggcatgtacgcacat

SEQ ID NO: 151798 - DNA, 25 bp, Canis familiaris
ggggaacacagatctggcaagcccc

SEQ ID NO: 151799 - DNA, 25 bp, Canis familiaris
ggggaaagctgatgctggcaaggat

SEQ ID NO: 151800 - DNA, 25 bp, Canis familiaris
ggggaacaggaggcgagcgcagtga

SEQ ID NO: 151801 - DNA, 25 bp, Canis familiaris
ggggaatcagtaacgatccgctatt

SEQ ID NO: 151802 - DNA, 25 bp, Canis familiaris
ggggaacagataactcaatgggatt

SEQ ID NO: 151803 - DNA, 25 bp, Canis familiaris
ggggacaaagctgccactggaatgc

SEQ ID NO: 151804 - DNA, 25 bp, Canis familiaris
ggggacataagtagctctctggtag

SEQ ID NO: 151805 - DNA, 25 bp, Canis familiaris
ggggcactatggacagagttgttca

SEQ ID NO: 151806 - DNA, 25 bp, Canis familiaris
ggggctctcatggtgacatgtttac

SEQ ID NO: 151807 - DNA, 25 bp, Canis familiaris
ggggcattcatttgacattctccct

SEQ ID NO: 151808 - DNA, 25 bp, Canis familiaris
ggtggcagtgctgagtttcatcctc

SEQ ID NO: 151809 - DNA, 25 bp, Canis familiaris
ggggaatggcaagtctttcacctgc

SEQ ID NO: 151810 - DNA, 25 bp, Canis familiaris
ggtggaggagaagtgcttccccatc

SEQ ID NO: 151811 - DNA, 25 bp, Canis familiaris
ggtgaagcgaaggttctgaccctcg

SEQ ID NO: 151812 - DNA, 25 bp, Canis familiaris
ggtgaaggtgacgttcaactcggct

SEQ ID NO: 151813 - DNA, 25 bp, Canis familiaris
ggattgaggtaatgtcaacgtggta

SEQ ID NO: 151814 - DNA, 25 bp, Canis familiaris
ggtggagtgctgccaacatgaactg

SEQ ID NO: 151815 - DNA, 25 bp, Canis familiaris
ggggcatgtgctccaagatacacca

SEQ ID NO: 151816 - DNA, 25 bp, Canis familiaris
ggggaattgcacatattgcgacagc

SEQ ID NO: 151817 - DNA, 25 bp, Canis familiaris
ggggaattgcgtgcattaatcagat

SEQ ID NO: 151818 - DNA, 25 bp, Canis familiaris
ggtggttggcaggctttaggcatga

SEQ ID NO: 151819 - DNA, 25 bp, Canis familiaris
ggtggaatgtgcaagcctttgagct

SEQ ID NO: 151820 - DNA, 25 bp, Canis familiaris
ggtgtaggtgcctcatttcagttct

SEQ ID NO: 151821 - DNA, 25 bp, Canis familiaris
ggtgggactgtcttatttgtgttca

SEQ ID NO: 151822 - DNA, 25 bp, Canis familiaris
ggtgcagaacttatttttcttttct

SEQ ID NO: 151823 - DNA, 25 bp, Canis familiaris
ggggaaatcattgttctcttatttt

SEQ ID NO: 151824 - DNA, 25 bp, Canis familiaris
ggggaaacctggttgtgtctgtctt

SEQ ID NO: 151825 - DNA, 25 bp, Canis familiaris
ggggaaactgtgcatgcttttgctc

SEQ ID NO: 151826 - DNA, 25 bp, Canis familiaris
ggtggagaacggcattcctattgga

SEQ ID NO: 151827 - DNA, 25 bp, Canis familiaris
ggtggcaggaagcgaatactctggc

SEQ ID NO: 151828 - DNA, 25 bp, Canis familiaris
ggtggaggtttatctactggagccc

SEQ ID NO: 151829 - DNA, 25 bp, Canis familiaris
ggtgtaggctttagactgggatccc

SEQ ID NO: 151830 - DNA, 25 bp, Canis familiaris
ggtgtaggttttgttcgactgacgt

SEQ ID NO: 151831 - DNA, 25 bp, Canis familiaris
ggtgattcttttttttcgatccgtg

SEQ ID NO: 151832 - DNA, 25 bp, Canis familiaris
ggtcgttttggatctttgagccttg

SEQ ID NO: 151833 - DNA, 25 bp, Canis familiaris
ggggactttgcttaattgctgcagc

SEQ ID NO: 151834 - DNA, 25 bp, Canis familiaris
ggtggttattattgaattgcccggc

SEQ ID NO: 151835 - DNA, 25 bp, Canis familiaris
ggtgatttaagataattctcccaga

SEQ ID NO: 151836 - DNA, 25 bp, Canis familiaris
ggatggttaaccaattacccacgtg

SEQ ID NO: 151837 - DNA, 25 bp, Canis familiaris
tgtgtggttacccatttaatccgcg

SEQ ID NO: 151838 - DNA, 25 bp, Canis familiaris
ggtggactacactatctaaaccccg

SEQ ID NO: 151839 - DNA, 25 bp, Canis familiaris
ggtggacttgcctatttaatttgac

SEQ ID NO: 151840 - DNA, 25 bp, Canis familiaris
ggggaaggcagatgtttaattgact

SEQ ID NO: 151841 - DNA, 25 bp, Canis familiaris
ggggcttggcagtttttcagagtac

SEQ ID NO: 151842 - DNA, 25 bp, Canis familiaris
ggggctgttgtgttttatgggattc

SEQ ID NO: 151843 - DNA, 25 bp, Canis familiaris
ggtggttacgcatttctgatgggat

SEQ ID NO: 151844 - DNA, 25 bp, Canis familiaris
ggtggagcttccctttgaggagagt

SEQ ID NO: 151845 - DNA, 25 bp, Canis familiaris
ggtgcgatcgggctactacaaagtt

SEQ ID NO: 151846 - DNA, 25 bp, Canis familiaris
ggggcacggaaggaccacaaaatcg

SEQ ID NO: 151847 - DNA, 25 bp, Canis familiaris
ggggcctgggaggaggcaaaccaca

SEQ ID NO: 151848 - DNA, 25 bp, Canis familiaris
ggggcgctgaggcagaaaaacgtgc

SEQ ID NO: 151849 - DNA, 25 bp, Canis familiaris
ggggctgcagaagggaaaacctagc

SEQ ID NO: 151850 - DNA, 25 bp, Canis familiaris
ggggcgagagggttcaacaccattc

SEQ ID NO: 151851 - DNA, 25 bp, Canis familiaris
ggggctaacctggatcaaggctttc

SEQ ID NO: 151852 - DNA, 25 bp, Canis familiaris
ggggctgaagcctgagcagtggcat

SEQ ID NO: 151853 - DNA, 25 bp, Canis familiaris
ggggcagcaacagtggacggaagaa

SEQ ID NO: 151854 - DNA, 25 bp, Canis familiaris
ggggaaacacggacgacaatggcaa

SEQ ID NO: 151855 - DNA, 25 bp, Canis familiaris
ggtggagaatctgtttcacaaggca

SEQ ID NO: 151856 - DNA, 25 bp, Canis familiaris
ggggctgcgtgtgtttgacaaggag

SEQ ID NO: 151857 - DNA, 25 bp, Canis familiaris
ggtggtcattgtgatttgcccaggc

SEQ ID NO: 151858 - DNA, 25 bp, Canis familiaris
ggtgtcctagatggtgtcctaatgg

SEQ ID NO: 151859 - DNA, 25 bp, Canis familiaris
ggtgacctgggaggacctgaaggct

SEQ ID NO: 151860 - DNA, 25 bp, Canis familiaris
ggtgatggcgggatggccggagacc

SEQ ID NO: 151861 - DNA, 25 bp, Canis familiaris
ggtgaggaaggcaatttctggcatg

SEQ ID NO: 151862 - DNA, 25 bp, Canis familiaris
ggtggatgaaaccatcttcctgctg

SEQ ID NO: 151863 - DNA, 25 bp, Canis familiaris
ggtggataatacctaactcagctta

SEQ ID NO: 151864 - DNA, 25 bp, Canis familiaris
ggtggatgacaaaatcacgctacat

SEQ ID NO: 151865 - DNA, 25 bp, Canis familiaris
ggtggtatatcgacatccgcaagcc

SEQ ID NO: 151866 - DNA, 25 bp, Canis familiaris
ggtggtattggatctcttggcccac

SEQ ID NO: 151867 - DNA, 25 bp, Canis familiaris
ggtgatgctaatctccttaacccaa

SEQ ID NO: 151868 - DNA, 25 bp, Canis familiaris
ggtggtaattatgctgcgagtcccc

SEQ ID NO: 151869 - DNA, 25 bp, Canis familiaris
ggtggttatctagttcagtactccc

SEQ ID NO: 151870 - DNA, 25 bp, Canis familiaris
ggtggcttacatatacaaatgtgtc

SEQ ID NO: 151871 - DNA, 25 bp, Canis familiaris
ggtggcctattaccagaaatatgtg

SEQ ID NO: 151872 - DNA, 25 bp, Canis familiaris
ggtgggttaagtgggcattttgaca

SEQ ID NO: 151873 - DNA, 25 bp, Canis familiaris
ggtggtttaaatgagctctgttgac

SEQ ID NO: 151874 - DNA, 25 bp, Canis familiaris
ggggctgtctaattggaggccttcc

SEQ ID NO: 151875 - DNA, 25 bp, Canis familiaris
ggtggctgttgtaattgcagatcct

SEQ ID NO: 151876 - DNA, 25 bp, Canis familiaris
ggggctgatattatgtacaccggga

SEQ ID NO: 151877 - DNA, 25 bp, Canis familiaris
ggggctcatcatacattcagacacc

SEQ ID NO: 151878 - DNA, 25 bp, Canis familiaris
ggggccatgcaggagcttgaagcac

SEQ ID NO: 151879 - DNA, 25 bp, Canis familiaris
ggggaacaggacagcaagcctacat

SEQ ID NO: 151880 - DNA, 25 bp, Canis familiaris
ggtggacacggtgtgcagacacaac

SEQ ID NO: 151881 - DNA, 25 bp, Canis familiaris
ggtggacacggtgtgcagacacaac

SEQ ID NO: 151882 - DNA, 25 bp, Canis familiaris
ggtggacacggtgtgcagacacaac

SEQ ID NO: 151883 - DNA, 25 bp, Canis familiaris
ggtggacgtggtgttgtctcaacaa

SEQ ID NO: 151884 - DNA, 25 bp, Canis familiaris
ggggcccggtgagtgatttgaataa

SEQ ID NO: 151885 - DNA, 25 bp, Canis familiaris
ggggccagtttagatgctgtgaaat

SEQ ID NO: 151886 - DNA, 25 bp, Canis familiaris
ggggcttctttctgatgctataaat

SEQ ID NO: 151887 - DNA, 25 bp, Canis familiaris
ggtggttaatccaggcaataatatt

SEQ ID NO: 151888 - DNA, 25 bp, Canis familiaris
ggtggtttgcatccatggtaaaatt

SEQ ID NO: 151889 - DNA, 25 bp, Canis familiaris
ggtggaatctgcccggaaagacaat

SEQ ID NO: 151890 - DNA, 25 bp, Canis familiaris
ggtggaatctgctaaggggaaactt

SEQ ID NO: 151891 - DNA, 25 bp, Canis familiaris
ggtgaccctctgtggggatggacta

SEQ ID NO: 151892 - DNA, 25 bp, Canis familiaris
ggggctcttcttgggggaggagctg

SEQ ID NO: 151893 - DNA, 25 bp, Canis familiaris
ggggctgccactgtaggggtggctg

SEQ ID NO: 151894 - DNA, 25 bp, Canis familiaris
ggtggctcaaatttatggggtaggt

SEQ ID NO: 151895 - DNA, 25 bp, Canis familiaris
ggtggtccaatttatggaggtaagg

SEQ ID NO: 151896 - DNA, 25 bp, Canis familiaris
ggtggtccaacctataagtccgttg

SEQ ID NO: 151897 - DNA, 25 bp, Canis familiaris
ggtggtctcaatcccaaggttgggt

SEQ ID NO: 151898 - DNA, 25 bp, Canis familiaris
ggtggttaattgccttgagttggaa

SEQ ID NO: 151899 - DNA, 25 bp, Canis familiaris
ggtcctctagacacctacttggaca

SEQ ID NO: 151900 - DNA, 25 bp, Canis familiaris
ggtccggaccagggctaatctggtc

SEQ ID NO: 151901 - DNA, 25 bp, Canis familiaris
ggtctgggacttgcaggaactgact

SEQ ID NO: 151902 - DNA, 25 bp, Canis familiaris
ggtcggccaataaaggcaccgactc

SEQ ID NO: 151903 - DNA, 25 bp, Canis familiaris
ggtggggcaaataagccaacaacca

SEQ ID NO: 151904 - DNA, 25 bp, Canis familiaris
ggtgggactaaatcaaacagactct

SEQ ID NO: 151905 - DNA, 25 bp, Canis familiaris
ggtggagccgtcaatcgaacagaga

SEQ ID NO: 151906 - DNA, 25 bp, Canis familiaris
ggtgggaccttctgaacgatgagct

SEQ ID NO: 151907 - DNA, 25 bp, Canis familiaris
ggggaaccctaactcaagatgtctt

SEQ ID NO: 151908 - DNA, 25 bp, Canis familiaris
ggggcaagccctatgatgaactgtg

SEQ ID NO: 151909 - DNA, 25 bp, Canis familiaris
ggggaagcccattgtgagttagtga

SEQ ID NO: 151910 - DNA, 25 bp, Canis familiaris
ggggcagagtcctgagagtgtggca

SEQ ID NO: 151911 - DNA, 25 bp, Canis familiaris
ggggccttgcagtaagcagcttgac

SEQ ID NO: 151912 - DNA, 25 bp, Canis familiaris
ggggcctgtgcaaaactgtatcaaa

SEQ ID NO: 151913 - DNA, 25 bp, Canis familiaris
ggggcagctgctgacaagtttgcaa

SEQ ID NO: 151914 - DNA, 25 bp, Canis familiaris
ggtggcattgcctcacagatttgaa

SEQ ID NO: 151915 - DNA, 25 bp, Canis familiaris
ggggcaatggagcaagtttaatgaa

SEQ ID NO: 151916 - DNA, 25 bp, Canis familiaris
ggggaaggtggttgtgaataagaat

SEQ ID NO: 151917 - DNA, 25 bp, Canis familiaris
ggggaagtgatgaattgccaataga

SEQ ID NO: 151918 - DNA, 25 bp, Canis familiaris
ggtggagatggactacccaacaatg

SEQ ID NO: 151919 - DNA, 25 bp, Canis familiaris
ggtggtggaggatcctcagccaagg

SEQ ID NO: 151920 - DNA, 25 bp, Canis familiaris
ggtggtagataaagccctccaggtg

SEQ ID NO: 151921 - DNA, 25 bp, Canis familiaris
ggtggtatggaaactgcctcccact

SEQ ID NO: 151922 - DNA, 25 bp, Canis familiaris
ggggcagcaaaatctgcttccccta

SEQ ID NO: 151923 - DNA, 25 bp, Canis familiaris
ggtggcgacaaatctggtgcggcgc

SEQ ID NO: 151924 - DNA, 25 bp, Canis familiaris
ggtgtgcagacacaactacgggttg

SEQ ID NO: 151925 - DNA, 25 bp, Canis familiaris
ggtgtcaacttaccatactgggaca

SEQ ID NO: 151926 - DNA, 25 bp, Canis familiaris
ggtgaaattcttggaccggcgcaag

SEQ ID NO: 151927 - DNA, 25 bp, Canis familiaris
ggcatgaattccaccccagggaatt

SEQ ID NO: 151928 - DNA, 25 bp, Canis familiaris
ggtggtgcgattgcaccctgggaat

SEQ ID NO: 151929 - DNA, 25 bp, Canis familiaris
ggtggtggcttaaccatcttggtgt

SEQ ID NO: 151930 - DNA, 25 bp, Canis familiaris
ggtggggacataagtagctctctgg

SEQ ID NO: 151931 - DNA, 25 bp, Canis familiaris
ggggcgtcacaaaatatttcaggca

SEQ ID NO: 151932 - DNA, 25 bp, Canis familiaris
ggggctgtagaaaatttgctttgca

SEQ ID NO: 151933 - DNA, 25 bp, Canis familiaris
ggggccaagacaggaatgtgctttc

SEQ ID NO: 151934 - DNA, 25 bp, Canis familiaris
ggggaagtccacaaatatgttctgc

SEQ ID NO: 151935 - DNA, 25 bp, Canis familiaris
ggtgtaaccgcatagtggtcgctgc

SEQ ID NO: 151936 - DNA, 25 bp, Canis familiaris
ggtggaacacgtgactttggatctc

SEQ ID NO: 151937 - DNA, 25 bp, Canis familiaris
ggggaatcctgaagactttggtgct

SEQ ID NO: 151938 - DNA, 25 bp, Canis familiaris
ggggaatctctgaactttatgaatc

SEQ ID NO: 151939 - DNA, 25 bp, Canis familiaris
ggtgtgaccctgttcaattataatc

SEQ ID NO: 151940 - DNA, 25 bp, Canis familiaris
ggtgttcgcttctttagttgacagc

SEQ ID NO: 151941 - DNA, 25 bp, Canis familiaris
ggtgattacgatctttggatacgac

SEQ ID NO: 151942 - DNA, 25 bp, Canis familiaris
ggtggctactgactcaggggaaccc

SEQ ID NO: 151943 - DNA, 25 bp, Canis familiaris
ggggctgggatgggagggagacctc

SEQ ID NO: 151944 - DNA, 25 bp, Canis familiaris
ggggctcaggaggggacagtgacct

SEQ ID NO: 151945 - DNA, 25 bp, Canis familiaris
ggggctctggggccaaagtgtacgt

SEQ ID NO: 151946 - DNA, 25 bp, Canis familiaris
ggggctcttgctgggaaggagatcc

SEQ ID NO: 151947 - DNA, 25 bp, Canis familiaris
ggggcttaaaggcaggcagaccaaa

SEQ ID NO: 151948 - DNA, 25 bp, Canis familiaris
ggggcttacagtactgggaacacaa

SEQ ID NO: 151949 - DNA, 25 bp, Canis familiaris
ggtggccttcagtcttgttgaaaag

SEQ ID NO: 151950 - DNA, 25 bp, Canis familiaris
ggtggccttggggtctttcaaggag

SEQ ID NO: 151951 - DNA, 25 bp, Canis familiaris
ggtgggtgttgggatcacttgggga

SEQ ID NO: 151952 - DNA, 25 bp, Canis familiaris
ggtggaggacgggaatcttgacagt

SEQ ID NO: 151953 - DNA, 25 bp, Canis familiaris
ggggaagacgcgtacgcaatgaagc

SEQ ID NO: 151954 - DNA, 25 bp, Canis familiaris
ggggaagaccagaggccagaactat

SEQ ID NO: 151955 - DNA, 25 bp, Canis familiaris
ggtggaaagccgggagctacactcc

SEQ ID NO: 151956 - DNA, 25 bp, Canis familiaris
ggggccacatgccagagtggtacac

SEQ ID NO: 151957 - DNA, 25 bp, Canis familiaris
ggggctcaggcaaggatggacatca

SEQ ID NO: 151958 - DNA, 25 bp, Canis familiaris
ggggcaagacaatgtggaatctcta

SEQ ID NO: 151959 - DNA, 25 bp, Canis familiaris
ggggcacagtaatgtggcctgagtg

SEQ ID NO: 151960 - DNA, 25 bp, Canis familiaris
ggggcaagatattctgtgtcagtgt

SEQ ID NO: 151961 - DNA, 25 bp, Canis familiaris
ggggctagatctatgattcgagtac

SEQ ID NO: 151962 - DNA, 25 bp, Canis familiaris
ggggccatgactatgattcgtgtac

SEQ ID NO: 151963 - DNA, 25 bp, Canis familiaris
ggggcacagactatgatcgagtacc

SEQ ID NO: 151964 - DNA, 25 bp, Canis familiaris
ggtggaggactgcttctgtgaacct

SEQ ID NO: 151965 - DNA, 25 bp, Canis familiaris
ggggaatcacagcttctctgaagcc

SEQ ID NO: 151966 - DNA, 25 bp, Canis familiaris
ggtgaacaccttttctatgtaccta

SEQ ID NO: 151967 - DNA, 25 bp, Canis familiaris
ggtggcaggctcatgggcctgctac

SEQ ID NO: 151968 - DNA, 25 bp, Canis familiaris
ggtggactgctggaggtgtcgtagc

SEQ ID NO: 151969 - DNA, 25 bp, Canis familiaris
ggtggggtggaagtgtgcctacgga

SEQ ID NO: 151970 - DNA, 25 bp, Canis familiaris
ggtgggggccaggtatggattcggt

SEQ ID NO: 151971 - DNA, 25 bp, Canis familiaris
ggtgtgactaccaggggagtcggag

SEQ ID NO: 151972 - DNA, 25 bp, Canis familiaris
ggtgggcaaccccagcaaaggggca

SEQ ID NO: 151973 - DNA, 25 bp, Canis familiaris
ggtggaggacctgcaggtgagggac

SEQ ID NO: 151974 - DNA, 25 bp, Canis familiaris
ggtggaggatcgaccagtgtgggga

SEQ ID NO: 151975 - DNA, 25 bp, Canis familiaris
ggtggggatttgggatgtcgattgg

SEQ ID NO: 151976 - DNA, 25 bp, Canis familiaris
ggtggtggatttgtcaggagtggtc

SEQ ID NO: 151977 - DNA, 25 bp, Canis familiaris
ggtggggatctatcctggattgggc

SEQ ID NO: 151978 - DNA, 25 bp, Canis familiaris
ggtggggactaaacttgatctcagg

SEQ ID NO: 151979 - DNA, 25 bp, Canis familiaris
ggtgggcagactaagccgatcttcc

SEQ ID NO: 151980 - DNA, 25 bp, Canis familiaris
ggtggcacagactatggacttttcc

SEQ ID NO: 151981 - DNA, 25 bp, Canis familiaris
ggtgaacagacgaccatgcttttct

SEQ ID NO: 151982 - DNA, 25 bp, Canis familiaris
ggtggacgagcgtccgcatgctaat

SEQ ID NO: 151983 - DNA, 25 bp, Canis familiaris
ggtgtgcaccaggtggctgcatgca

SEQ ID NO: 151984 - DNA, 25 bp, Canis familiaris
ggtggccacacagcagcagatgaac

SEQ ID NO: 151985 - DNA, 25 bp, Canis familiaris
ggtggccacgtgaagcgcaaacatt

SEQ ID NO: 151986 - DNA, 25 bp, Canis familiaris
ggggccacggaactaatgaattact

SEQ ID NO: 151987 - DNA, 25 bp, Canis familiaris
ggggccagacgaagtactgacacta

SEQ ID NO: 151988 - DNA, 25 bp, Canis familiaris
ggggccattctaaggattcacaaac

SEQ ID NO: 151989 - DNA, 25 bp, Canis familiaris
ggggcattttatgtgatgtcaccat

SEQ ID NO: 151990 - DNA, 25 bp, Canis familiaris
ggggcagttattgatgatggcaggg

SEQ ID NO: 151991 - DNA, 25 bp, Canis familiaris
ggggcgctgcatatcagggcgcagc

SEQ ID NO: 151992 - DNA, 25 bp, Canis familiaris
ggtggctcagcaatttggtgcctgc

SEQ ID NO: 151993 - DNA, 25 bp, Canis familiaris
ggtggccagccagtatggatggtct

SEQ ID NO: 151994 - DNA, 25 bp, Canis familiaris
ggtggctcactcaaattatgtggca

SEQ ID NO: 151995 - DNA, 25 bp, Canis familiaris
ggtgacttcgcccatggagggcact

SEQ ID NO: 151996 - DNA, 25 bp, Canis familiaris
ggtgaggttgagcagggggacgatg

SEQ ID NO: 151997 - DNA, 25 bp, Canis familiaris
ggtggttggtcggggggacatgaat

SEQ ID NO: 151998 - DNA, 25 bp, Canis familiaris
ggtggttgggctcaggggtatggag

SEQ ID NO: 151999 - DNA, 25 bp, Canis familiaris
ggtggtgtggaaaagggaggtatgg

SEQ ID NO: 152000 - DNA, 25 bp, Canis familiaris
ggtggtctccaaaggtggaataaag

SEQ ID NO: 152001 - DNA, 25 bp, Canis familiaris
ggtggtcgactaaaaggcctcaata

SEQ ID NO: 152002 - DNA, 25 bp, Canis familiaris
ggtggtctataacagaagccatctt

SEQ ID NO: 152003 - DNA, 25 bp, Canis familiaris
ggtggtgctgatgctgcgagaacgc

SEQ ID NO: 152004 - DNA, 25 bp, Canis familiaris
ggtggctgccattggtgatagcaca

SEQ ID NO: 152005 - DNA, 25 bp, Canis familiaris
ggggccgatgtggtggtcacagatc

SEQ ID NO: 152006 - DNA, 25 bp, Canis familiaris
ggggccgtggacgatgtacaggcgc

SEQ ID NO: 152007 - DNA, 25 bp, Canis familiaris
ggggccgatgagaccagaatatggc

SEQ ID NO: 152008 - DNA, 25 bp, Canis familiaris
ggggcagtgtagaacagaaggcagc

SEQ ID NO: 152009 - DNA, 25 bp, Canis familiaris
ggtggcgggaggtgcatagacaggt

SEQ ID NO: 152010 - DNA, 25 bp, Canis familiaris
ggtggagtggaatagccagaaggca

SEQ ID NO: 152011 - DNA, 25 bp, Canis familiaris
ggggcaggagccctaacagaaggca

SEQ ID NO: 152012 - DNA, 25 bp, Canis familiaris
ggggctggaggaaaatctggaggca

SEQ ID NO: 152013 - DNA, 25 bp, Canis familiaris
ggggccgtccaaatgagctggaggc

SEQ ID NO: 152014 - DNA, 25 bp, Canis familiaris
ggggctcacttgaaaggcggggcca

SEQ ID NO: 152015 - DNA, 25 bp, Canis familiaris
ggggccatcctgctgagtaggggcc

SEQ ID NO: 152016 - DNA, 25 bp, Canis familiaris
ggggccactggcaaggccaggtggc

SEQ ID NO: 152017 - DNA, 25 bp, Canis familiaris
ggggcacctggatggtgcagtcagt

SEQ ID NO: 152018 - DNA, 25 bp, Canis familiaris
ggggcccagaaatacctgcagatga

SEQ ID NO: 152019 - DNA, 25 bp, Canis familiaris
ggggccggaaaaaccgcacatgcaa

SEQ ID NO: 152020 - DNA, 25 bp, Canis familiaris
ggggccagtacaccaacctgcactt

SEQ ID NO: 152021 - DNA, 25 bp, Canis familiaris
ggtggcatgacttcaccaaccatca

SEQ ID NO: 152022 - DNA, 25 bp, Canis familiaris
ggtggtggtgtcccataccatatac

SEQ ID NO: 152023 - DNA, 25 bp, Canis familiaris
ggtggtaggtagacagactcgatca

SEQ ID NO: 152024 - DNA, 25 bp, Canis familiaris
ggtggtgatgaggatgtagatttac

SEQ ID NO: 152025 - DNA, 25 bp, Canis familiaris
ggggctgaaggactcagtgctgacc

SEQ ID NO: 152026 - DNA, 25 bp, Canis familiaris
ggtggcagcaaggcctgagtgatgc

SEQ ID NO: 152027 - DNA, 25 bp, Canis familiaris
ggggcagaggccaaggtgcagccca

SEQ ID NO: 152028 - DNA, 25 bp, Canis familiaris
ggtggcaaggtcatgggatcgccct

SEQ ID NO: 152029 - DNA, 25 bp, Canis familiaris
ggtgtgaaggtttcaggtcgcagcc

SEQ ID NO: 152030 - DNA, 25 bp, Canis familiaris
ggggcactgttttttatgcaagggc

SEQ ID NO: 152031 - DNA, 25 bp, Canis familiaris
ggtgagactttttgttttatgtggg

SEQ ID NO: 152032 - DNA, 25 bp, Canis familiaris
ggtgtccttgttaggtgttattgga

SEQ ID NO: 152033 - DNA, 25 bp, Canis familiaris
ggtgtgccctaaatgaatttttgcc

SEQ ID NO: 152034 - DNA, 25 bp, Canis familiaris
ggggccagcatagggacatttgttg

SEQ ID NO: 152035 - DNA, 25 bp, Canis familiaris
ggtggcacagtagcgacttaggtgt

SEQ ID NO: 152036 - DNA, 25 bp, Canis familiaris
ggtggagtgtagggcattggtggtt

SEQ ID NO: 152037 - DNA, 25 bp, Canis familiaris
ggggcaggatatgggacggtgtctc

SEQ ID NO: 152038 - DNA, 25 bp, Canis familiaris
ggggcagcagaatattccctgcctc

SEQ ID NO: 152039 - DNA, 25 bp, Canis familiaris
ggggcagagactgatgcccctggtc

SEQ ID NO: 152040 - DNA, 25 bp, Canis familiaris
ggggcaggttgcaatgtgtatcggt

SEQ ID NO: 152041 - DNA, 25 bp, Canis familiaris
ggtggatgagatacacgtgtttttt

SEQ ID NO: 152042 - DNA, 25 bp, Canis familiaris
ggtggggagacagtttcttctttga

SEQ ID NO: 152043 - DNA, 25 bp, Canis familiaris
ggtggggatgatgctgaacttcttg

SEQ ID NO: 152044 - DNA, 25 bp, Canis familiaris
ggtgagctggctgactaactacaag

SEQ ID NO: 152045 - DNA, 25 bp, Canis familiaris
ggtgagttgcattgatctaacccaa

SEQ ID NO: 152046 - DNA, 25 bp, Canis familiaris
ggtggtgtcatattctgcttttcaa

SEQ ID NO: 152047 - DNA, 25 bp, Canis familiaris
ggtggattcatttacattgtttaca

SEQ ID NO: 152048 - DNA, 25 bp, Canis familiaris
ggtgctttgttttcttgtactgacg

SEQ ID NO: 152049 - DNA, 25 bp, Canis familiaris
ggtgtttgtttcggggactgagaag

SEQ ID NO: 152050 - DNA, 25 bp, Canis familiaris
ggagattttttcatggggcgtccac

SEQ ID NO: 152051 - DNA, 25 bp, Canis familiaris
ggagagaaccgatctcggggtcctc

SEQ ID NO: 152052 - DNA, 25 bp, Canis familiaris
ggagataaggccactcggggtgacc

SEQ ID NO: 152053 - DNA, 25 bp, Canis familiaris
ggttaaactctgttagggcagtgaa

SEQ ID NO: 152054 - DNA, 25 bp, Canis familiaris
ggtagaaaccacttagggcttagag

SEQ ID NO: 152055 - DNA, 25 bp, Canis familiaris
ggtgaaaaaacctcatcgctaacag

SEQ ID NO: 152056 - DNA, 25 bp, Canis familiaris
ggtgatcccaaagccttcttaatag

SEQ ID NO: 152057 - DNA, 25 bp, Canis familiaris
ggtgtccaaggagccaagggtgtag

SEQ ID NO: 152058 - DNA, 25 bp, Canis familiaris
ggtgttggaggacccaagtcttggg

SEQ ID NO: 152059 - DNA, 25 bp, Canis familiaris
ggtgactggaggtgccaaacctggg

SEQ ID NO: 152060 - DNA, 25 bp, Canis familiaris
ggtgaatagctggtaccgctaccgc

SEQ ID NO: 152061 - DNA, 25 bp, Canis familiaris
ggtgaaacagaggcccctgaagccc

SEQ ID NO: 152062 - DNA, 25 bp, Canis familiaris
ggtggacaagggcgccatcaagttc

SEQ ID NO: 152063 - DNA, 25 bp, Canis familiaris
ggtggcataaggccctggcaaacag

SEQ ID NO: 152064 - DNA, 25 bp, Canis familiaris
ggtggcataaagtgggaatatactc

SEQ ID NO: 152065 - DNA, 25 bp, Canis familiaris
ggggcatcaaagctgttgaagaaac

SEQ ID NO: 152066 - DNA, 25 bp, Canis familiaris
ggtggatgaagatctgtgtataaca

SEQ ID NO: 152067 - DNA, 25 bp, Canis familiaris
ggtggcagcatttcctgtaatacac

SEQ ID NO: 152068 - DNA, 25 bp, Canis familiaris
ggtggcagcagtctgcttggcaacc

SEQ ID NO: 152069 - DNA, 25 bp, Canis familiaris
ggtggagcagcaagagcaaggacaa

SEQ ID NO: 152070 - DNA, 25 bp, Canis familiaris
ggtgtatgtgcttggctgaggagcc

SEQ ID NO: 152071 - DNA, 25 bp, Canis familiaris
ggtgttgagcttagccactatgcac

SEQ ID NO: 152072 - DNA, 25 bp, Canis familiaris
ggtgttgccttcaaaccagataagt

SEQ ID NO: 152073 - DNA, 25 bp, Canis familiaris
ggtgggtcttgcaaacttaacttca

SEQ ID NO: 152074 - DNA, 25 bp, Canis familiaris
ggggcgtgtgtgggttgataactta

SEQ ID NO: 152075 - DNA, 25 bp, Canis familiaris
ggggctgtgtgacgtgtgtgataac

SEQ ID NO: 152076 - DNA, 25 bp, Canis familiaris
ggggctctgaagcttctgcaaagcc

SEQ ID NO: 152077 - DNA, 25 bp, Canis familiaris
tgggatccgtagccttaggaacccg

SEQ ID NO: 152078 - DNA, 25 bp, Canis familiaris
ggtgatcggtgaccgaaggtccccg

SEQ ID NO: 152079 - DNA, 25 bp, Canis familiaris
ggatgacgaggacacacggttccca

SEQ ID NO: 152080 - DNA, 25 bp, Canis familiaris
ggggcatgaggacaagggtcttgga

SEQ ID NO: 152081 - DNA, 25 bp, Canis familiaris
ggggctgaggaccggaagtgtatga

SEQ ID NO: 152082 - DNA, 25 bp, Canis familiaris
ggtgcgtaggacaggccagggattc

SEQ ID NO: 152083 - DNA, 25 bp, Canis familiaris
ggtggttgaaagtgcctatgaagtc

SEQ ID NO: 152084 - DNA, 25 bp, Canis familiaris
ggtggcctaaagagccagagctagc

SEQ ID NO: 152085 - DNA, 25 bp, Canis familiaris
ggtgactcaaaatagcacaggcaca

SEQ ID NO: 152086 - DNA, 25 bp, Canis familiaris
ggtggtcagcaatgtcaccagcaca

SEQ ID NO: 152087 - DNA, 25 bp, Canis familiaris
ggtggtacatatttctctcacacgt

SEQ ID NO: 152088 - DNA, 25 bp, Canis familiaris
ggtggtacatcagttgctctggatc

SEQ ID NO: 152089 - DNA, 25 bp, Canis familiaris
ggtggtgctccggatgttggataac

SEQ ID NO: 152090 - DNA, 25 bp, Canis familiaris
ggtggactccaggatgttgtgtata

SEQ ID NO: 152091 - DNA, 25 bp, Canis familiaris
ggtggacgaccttttggtctagtca

SEQ ID NO: 152092 - DNA, 25 bp, Canis familiaris
ggtggaaggcgttttgagaccagac

SEQ ID NO: 152093 - DNA, 25 bp, Canis familiaris
ggtgagacctcgattctgagaccaa

SEQ ID NO: 152094 - DNA, 25 bp, Canis familiaris
ggtggcccttgtggctagaacacaa

SEQ ID NO: 152095 - DNA, 25 bp, Canis familiaris
ggtgtgcctcttgttggtgacaccc

SEQ ID NO: 152096 - DNA, 25 bp, Canis familiaris
ggtgtcctttcaaaggtccaccact

SEQ ID NO: 152097 - DNA, 25 bp, Canis familiaris
ggtgatttgtctgaagccaccctac

SEQ ID NO: 152098 - DNA, 25 bp, Canis familiaris
ggtgttccagctggaagcaacccct

SEQ ID NO: 152099 - DNA, 25 bp, Canis familiaris
ggtggctcctgggagagcagatccc

SEQ ID NO: 152100 - DNA, 25 bp, Canis familiaris
ggtggggaggaggaagatgcccttc

SEQ ID NO: 152101 - DNA, 25 bp, Canis familiaris
ggtgggggctagggaacacctgcat

SEQ ID NO: 152102 - DNA, 25 bp, Canis familiaris
ggtgggggtccataaatgcagctct

SEQ ID NO: 152103 - DNA, 25 bp, Canis familiaris
ggtggtgggatacatggtacagcac

SEQ ID NO: 152104 - DNA, 25 bp, Canis familiaris
ggtggttagttgctgtgtcacaagg

SEQ ID NO: 152105 - DNA, 25 bp, Canis familiaris
ggtggcacttttgatgtgtccatcc

SEQ ID NO: 152106 - DNA, 25 bp, Canis familiaris
ggtgtccattttcattgtactgtgc

SEQ ID NO: 152107 - DNA, 25 bp, Canis familiaris
ggtgtccttagatgggtagctgtgc

SEQ ID NO: 152108 - DNA, 25 bp, Canis familiaris
ggtggtttaacaggtgtcactctgc

SEQ ID NO: 152109 - DNA, 25 bp, Canis familiaris
ggtggagcgtacgacgcttactctt

SEQ ID NO: 152110 - DNA, 25 bp, Canis familiaris
ggtgtagttacctgttattctgatc

SEQ ID NO: 152111 - DNA, 25 bp, Canis familiaris
ggtgatagtgacccaggtttggtga

SEQ ID NO: 152112 - DNA, 25 bp, Canis familiaris
ggtgaagcatactccagtgttgtga

SEQ ID NO: 152113 - DNA, 25 bp, Canis familiaris
ggtggcctgaattctagtctgatgg

SEQ ID NO: 152114 - DNA, 25 bp, Canis familiaris
ggtggccatcacttaattctatagg

SEQ ID NO: 152115 - DNA, 25 bp, Canis familiaris
ggtggacattcgccacaacttgagg

SEQ ID NO: 152116 - DNA, 25 bp, Canis familiaris
ggtggaatttgccagaagcctcacg

SEQ ID NO: 152117 - DNA, 25 bp, Canis familiaris
ggtggacatcttccaggagtaccct

SEQ ID NO: 152118 - DNA, 25 bp, Canis familiaris
ggtgtacatgttccagtatgattct

SEQ ID NO: 152119 - DNA, 25 bp, Canis familiaris
ggtgtatcagttggcatgttattca

SEQ ID NO: 152120 - DNA, 25 bp, Canis familiaris
ggtgtaccttggactttttagcctg

SEQ ID NO: 152121 - DNA, 25 bp, Canis familiaris
ggtgtactttgtctaccaatacctg

SEQ ID NO: 152122 - DNA, 25 bp, Canis familiaris
ggtgctaagtattttacccattcct

SEQ ID NO: 152123 - DNA, 25 bp, Canis familiaris
ggtgattcgatgatgtctaccaatg

SEQ ID NO: 152124 - DNA, 25 bp, Canis familiaris
ggtgttcagaataacgaccatgact

SEQ ID NO: 152125 - DNA, 25 bp, Canis familiaris
ggtgaagaacataacagacgcaatt

SEQ ID NO: 152126 - DNA, 25 bp, Canis familiaris
ggtgaagatcacatccaccagctct

SEQ ID NO: 152127 - DNA, 25 bp, Canis familiaris
ggtgatatgtatctcgaactcctat

SEQ ID NO: 152128 - DNA, 25 bp, Canis familiaris
ggtgaatacatgttgcgtaaaggca

SEQ ID NO: 152129 - DNA, 25 bp, Canis familiaris
ggtaaagcaaacgcaaagaagcacc

SEQ ID NO: 152130 - DNA, 25 bp, Canis familiaris
ggtacaactaatgctagacctacag

SEQ ID NO: 152131 - DNA, 25 bp, Canis familiaris
ggaccaattaagtttgccttgaaga

SEQ ID NO: 152132 - DNA, 25 bp, Canis familiaris
ggtgtaattaaagtccttagtcaga

SEQ ID NO: 152133 - DNA, 25 bp, Canis familiaris
ggtgtcatgatcaaagtccttttta

SEQ ID NO: 152134 - DNA, 25 bp, Canis familiaris
ggtgtctgaggttttctcttttagc

SEQ ID NO: 152135 - DNA, 25 bp, Canis familiaris
ggtgtgtggtgtgttaaggtctagc

SEQ ID NO: 152136 - DNA, 25 bp, Canis familiaris
ggtgtgagagtagatgtgtaggtta

SEQ ID NO: 152137 - DNA, 25 bp, Canis familiaris
ggtggagcttgaggagctgtcaggg

SEQ ID NO: 152138 - DNA, 25 bp, Canis familiaris
ggtggagctgacatcactgaagggc

SEQ ID NO: 152139 - DNA, 25 bp, Canis familiaris
ggtggacatcattatcagcgagtgg

SEQ ID NO: 152140 - DNA, 25 bp, Canis familiaris
ggtgtgaagctgctcatcgagatgg

SEQ ID NO: 152141 - DNA, 25 bp, Canis familiaris
ggtggatgcagtgtcatctcttggt

SEQ ID NO: 152142 - DNA, 25 bp, Canis familiaris
ggtggagtgtattcatcttctggct

SEQ ID NO: 152143 - DNA, 25 bp, Canis familiaris
ggtggcagatgataccaactgtttt

SEQ ID NO: 152144 - DNA, 25 bp, Canis familiaris
ggtggagatgacctctcaactttaa

SEQ ID NO: 152145 - DNA, 25 bp, Canis familiaris
ggtggtgaacctgaagcatgcttta

SEQ ID NO: 152146 - DNA, 25 bp, Canis familiaris
ggtgtaataccttcaaagttctcac

SEQ ID NO: 152147 - DNA, 25 bp, Canis familiaris
ggtgcaagtatttaccacgttcccg

SEQ ID NO: 152148 - DNA, 25 bp, Canis familiaris
ggtataggttacacacctttccagt

SEQ ID NO: 152149 - DNA, 25 bp, Canis familiaris
ggtgaacgttataccagacatttct

SEQ ID NO: 152150 - DNA, 25 bp, Canis familiaris
ggtgcaacagtgataactacttctt

SEQ ID NO: 152151 - DNA, 25 bp, Canis familiaris
ggtgtgggtgttgacatatcttcta

SEQ ID NO: 152152 - DNA, 25 bp, Canis familiaris
ggtggatggtttgcatttctgtttt

SEQ ID NO: 152153 - DNA, 25 bp, Canis familiaris
ggtggggttgtagtgccttttgatt

SEQ ID NO: 152154 - DNA, 25 bp, Canis familiaris
ggtggaggtggtagtggcttaggta

SEQ ID NO: 152155 - DNA, 25 bp, Canis familiaris
ggtgggatgtgattcagtggcttgg

SEQ ID NO: 152156 - DNA, 25 bp, Canis familiaris
ggtggtatcgtgaatgtgtgcggga

SEQ ID NO: 152157 - DNA, 25 bp, Canis familiaris
ggtggtagcaggaacatggggggac

SEQ ID NO: 152158 - DNA, 25 bp, Canis familiaris
ggtggatatggtgacagtggggatg

SEQ ID NO: 152159 - DNA, 25 bp, Canis familiaris
ggtggaggtgtggatggaggccgat

SEQ ID NO: 152160 - DNA, 25 bp, Canis familiaris
ggtggcaagttggctagggacagat

SEQ ID NO: 152161 - DNA, 25 bp, Canis familiaris
ggtggaagtacagtggggtcctgag

SEQ ID NO: 152162 - DNA, 25 bp, Canis familiaris
ggtggacatgtaggttgtttctatg

SEQ ID NO: 152163 - DNA, 25 bp, Canis familiaris
ggtgtacgtgatgcattttgccttg

SEQ ID NO: 152164 - DNA, 25 bp, Canis familiaris
ggtgaagctgtatcaatttgctatt

SEQ ID NO: 152165 - DNA, 25 bp, Canis familiaris
ggtgacgatgtacaacttctgaagg

SEQ ID NO: 152166 - DNA, 25 bp, Canis familiaris
ggtgtggtggagaaacttgatggga

SEQ ID NO: 152167 - DNA, 25 bp, Canis familiaris
ggtgtggggtgtacgctttaggacg

SEQ ID NO: 152168 - DNA, 25 bp, Canis familiaris
ggtgtgaagggtctatttgatgaga

SEQ ID NO: 152169 - DNA, 25 bp, Canis familiaris
ggtgtgggtgggatgatgtctggga

SEQ ID NO: 152170 - DNA, 25 bp, Canis familiaris
ggtgggcgagggaatagtcagaggg

SEQ ID NO: 152171 - DNA, 25 bp, Canis familiaris
ggtggcggcaagtgatcagtgaagc

SEQ ID NO: 152172 - DNA, 25 bp, Canis familiaris
ggtggcgaccatggaacggaagctg

SEQ ID NO: 152173 - DNA, 25 bp, Canis familiaris
ggtggcgactgagtacttgaaaagt

SEQ ID NO: 152174 - DNA, 25 bp, Canis familiaris
ggtggccatcaacttcgtgaagaat

SEQ ID NO: 152175 - DNA, 25 bp, Canis familiaris
ggtccctaccgtgtagagcagctac

SEQ ID NO: 152176 - DNA, 25 bp, Canis familiaris
ggtcgaaaccgtgtatcacccagtt

SEQ ID NO: 152177 - DNA, 25 bp, Canis familiaris
ggtggagaaggccacgttgccaccg

SEQ ID NO: 152178 - DNA, 25 bp, Canis familiaris
ggtgggaagggagattcacccgccg

SEQ ID NO: 152179 - DNA, 25 bp, Canis familiaris
ggtggggaaggagcagtacctctgc

SEQ ID NO: 152180 - DNA, 25 bp, Canis familiaris
ggtgacaagaagcaggcgtaccggt

SEQ ID NO: 152181 - DNA, 25 bp, Canis familiaris
ggtgtcacataagagcccatacccg

SEQ ID NO: 152182 - DNA, 25 bp, Canis familiaris
ggtgatctcaaagtttcctatcccg

SEQ ID NO: 152183 - DNA, 25 bp, Canis familiaris
ggtgattcggaggatgtccaccgcc

SEQ ID NO: 152184 - DNA, 25 bp, Canis familiaris
ggtggtcaaggactgtgccacctcc

SEQ ID NO: 152185 - DNA, 25 bp, Canis familiaris
ggtgtgtcctagttgtgccagcacc

SEQ ID NO: 152186 - DNA, 25 bp, Canis familiaris
ggtgatgctgaccagtggtgtccac

SEQ ID NO: 152187 - DNA, 25 bp, Canis familiaris
ggtgttcccaggggcatgtacgacg

SEQ ID NO: 152188 - DNA, 25 bp, Canis familiaris
ggggccacaatggggcatataccac

SEQ ID NO: 152189 - DNA, 25 bp, Canis familiaris
ggggccaactggttcaaacttgact

SEQ ID NO: 152190 - DNA, 25 bp, Canis familiaris
ggggccaaagggaagaacagtgatt

SEQ ID NO: 152191 - DNA, 25 bp, Canis familiaris
tggggccaaaactcagaatggtgtt

SEQ ID NO: 152192 - DNA, 25 bp, Canis familiaris
ggtgtcccaaagctcagatattttt

SEQ ID NO: 152193 - DNA, 25 bp, Canis familiaris
ggtggccaaactggtagaagtcatg

SEQ ID NO: 152194 - DNA, 25 bp, Canis familiaris
ggtggcccaacggtatagtgctgcc

SEQ ID NO: 152195 - DNA, 25 bp, Canis familiaris
ggtggccaaatccggaattgcccgc

SEQ ID NO: 152196 - DNA, 25 bp, Canis familiaris
ggtgtccaggtcaggatttcacccc

SEQ ID NO: 152197 - DNA, 25 bp, Canis familiaris
ggtgtccaattcaggatgctctggc

SEQ ID NO: 152198 - DNA, 25 bp, Canis familiaris
ggtgatataattctggagactggag

SEQ ID NO: 152199 - DNA, 25 bp, Canis familiaris
ggtggtcacattttggagagtgagc

SEQ ID NO: 152200 - DNA, 25 bp, Canis familiaris
ggtggtacgacactggacagatggc

SEQ ID NO: 152201 - DNA, 25 bp, Canis familiaris
ggtggtcagacaaatggaaatggtg

SEQ ID NO: 152202 - DNA, 25 bp, Canis familiaris
ggtggccggcattcacaagaaggtg

SEQ ID NO: 152203 - DNA, 25 bp, Canis familiaris
ggtggccggcattcacaagaaggtg

SEQ ID NO: 152204 - DNA, 25 bp, Canis familiaris
ggggccagcatgagcaaagtggagt

SEQ ID NO: 152205 - DNA, 25 bp, Canis familiaris
ggtggccacacaagacgaggtgtct

SEQ ID NO: 152206 - DNA, 25 bp, Canis familiaris
ggtgtgccatccagtgccgggtcac

SEQ ID NO: 152207 - DNA, 25 bp, Canis familiaris
ggtgtccacctgagctcagggacag

SEQ ID NO: 152208 - DNA, 25 bp, Canis familiaris
ggtgaccgcctagtcagcaaggaag

SEQ ID NO: 152209 - DNA, 25 bp, Canis familiaris
ggtgggcagccaaatcagacagggg

SEQ ID NO: 152210 - DNA, 25 bp, Canis familiaris
ggtggcccgaagcagacagggcgta

SEQ ID NO: 152211 - DNA, 25 bp, Canis familiaris
ggtggcccagacaaatgactcttga

SEQ ID NO: 152212 - DNA, 25 bp, Canis familiaris
ggtgtcaccgactatagagatttgg

SEQ ID NO: 152213 - DNA, 25 bp, Canis familiaris
ggtgtcccgactcaggagtctggta

SEQ ID NO: 152214 - DNA, 25 bp, Canis familiaris
ggtgggccagttcaagagtctcagg

SEQ ID NO: 152215 - DNA, 25 bp, Canis familiaris
ggtgaaccaatcaagggacttcagg

SEQ ID NO: 152216 - DNA, 25 bp, Canis familiaris
ggtgaggccagtgctggtgttgtcc

SEQ ID NO: 152217 - DNA, 25 bp, Canis familiaris
ggtgatggccgtttgggttcaccta

SEQ ID NO: 152218 - DNA, 25 bp, Canis familiaris
ggtgtgcgtcgatgtaccttcacac

SEQ ID NO: 152219 - DNA, 25 bp, Canis familiaris
ggtggtgctctgtgaacatttccag

SEQ ID NO: 152220 - DNA, 25 bp, Canis familiaris
ggtgagtgtctggtgatacttcctt

SEQ ID NO: 152221 - DNA, 25 bp, Canis familiaris
ggtgtgcttttattactgttcatct

SEQ ID NO: 152222 - DNA, 25 bp, Canis familiaris
ggtgtagtttatacttctccatcta

SEQ ID NO: 152223 - DNA, 25 bp, Canis familiaris
ggtgtatgcattttatccaccctcc

SEQ ID NO: 152224 - DNA, 25 bp, Canis familiaris
ggtgtgtttgatatccagcatttcc

SEQ ID NO: 152225 - DNA, 25 bp, Canis familiaris
ggtgttaaatagtaagcctgtgcca

SEQ ID NO: 152226 - DNA, 25 bp, Canis familiaris
ggtgtataaccagagcacttaccag

SEQ ID NO: 152227 - DNA, 25 bp, Canis familiaris
ggtgtagacaggtggactttccggg

SEQ ID NO: 152228 - DNA, 25 bp, Canis familiaris
ggtgttaatccatggttgttcctag

SEQ ID NO: 152229 - DNA, 25 bp, Canis familiaris
ggtgtgtaaccatagatgcatgtac

SEQ ID NO: 152230 - DNA, 25 bp, Canis familiaris
ggtggtaacctatgagcagagagca

SEQ ID NO: 152231 - DNA, 25 bp, Canis familiaris
ggtgtgtgacacacagacagacaga

SEQ ID NO: 152232 - DNA, 25 bp, Canis familiaris
ggtggccacacatcacacagtggag

SEQ ID NO: 152233 - DNA, 25 bp, Canis familiaris
ggtgagaccatagcccagtggcgta

SEQ ID NO: 152234 - DNA, 25 bp, Canis familiaris
ggtggacctcatggcctacatggcc

SEQ ID NO: 152235 - DNA, 25 bp, Canis familiaris
ggtggacctcatggcccacatggcc

SEQ ID NO: 152236 - DNA, 25 bp, Canis familiaris
ggtggagaccattcatccaatgccc

SEQ ID NO: 152237 - DNA, 25 bp, Canis familiaris
ggtgcagatacctgtaacattcatc

SEQ ID NO: 152238 - DNA, 25 bp, Canis familiaris
ggtgatgaatccatgccatacatat

SEQ ID NO: 152239 - DNA, 25 bp, Canis familiaris
ggtgatgttacattcctatgaagta

SEQ ID NO: 152240 - DNA, 25 bp, Canis familiaris
ggtgttattcttccttcaaatttca

SEQ ID NO: 152241 - DNA, 25 bp, Canis familiaris
ggtgtttttgtcctggtatatcttc

SEQ ID NO: 152242 - DNA, 25 bp, Canis familiaris
ggtgttttgtggtttctgtatttct

SEQ ID NO: 152243 - DNA, 25 bp, Canis familiaris
ggtggattgtgtggtttctattttt

SEQ ID NO: 152244 - DNA, 25 bp, Canis familiaris
ggtggttgtgaagcttctttgaatt

SEQ ID NO: 152245 - DNA, 25 bp, Canis familiaris
ggtggttgtagagcttctcgtgact

SEQ ID NO: 152246 - DNA, 25 bp, Canis familiaris
ggtgtgcttgtaaggttctcgaagg

SEQ ID NO: 152247 - DNA, 25 bp, Canis familiaris
ggtggcggtgaaatcttgccgagag

SEQ ID NO: 152248 - DNA, 25 bp, Canis familiaris
ggtggaatggcaaccttgcccaaga

SEQ ID NO: 152249 - DNA, 25 bp, Canis familiaris
ggtgggaaaggcttcttcaaagaca

SEQ ID NO: 152250 - DNA, 25 bp, Canis familiaris
ggtgaggaaaccacaactatcaaaa

SEQ ID NO: 152251 - DNA, 25 bp, Canis familiaris
ggtgggggaccaaagtcttcagcaa

SEQ ID NO: 152252 - DNA, 25 bp, Canis familiaris
ggtggatgcggagctgtttttaaca

SEQ ID NO: 152253 - DNA, 25 bp, Canis familiaris
ggtgaaaataggcttcatttataca

SEQ ID NO: 152254 - DNA, 25 bp, Canis familiaris
ggtggaaaacctttcagttgttcag

SEQ ID NO: 152255 - DNA, 25 bp, Canis familiaris
ggtcgcaataatgtactcagtgttg

SEQ ID NO: 152256 - DNA, 25 bp, Canis familiaris
ggtgccgatattgatgccttgtgtg

SEQ ID NO: 152257 - DNA, 25 bp, Canis familiaris
ggtccagtgtctgacccttgatttc

SEQ ID NO: 152258 - DNA, 25 bp, Canis familiaris
ggtggagagatagaccctctgatct

SEQ ID NO: 152259 - DNA, 25 bp, Canis familiaris
ggtggtgattgatacccatgtgact

SEQ ID NO: 152260 - DNA, 25 bp, Canis familiaris
ggtgggagtgcatcactcacttgca

SEQ ID NO: 152261 - DNA, 25 bp, Canis familiaris
ggtggcaggctctggtacatgtgaa

SEQ ID NO: 152262 - DNA, 25 bp, Canis familiaris
ggtggcagagcccggtaattgagta

SEQ ID NO: 152263 - DNA, 25 bp, Canis familiaris
ggtgccaacctgggttagttgttgc

SEQ ID NO: 152264 - DNA, 25 bp, Canis familiaris
ggtgtccaacagagtctaggctggg

SEQ ID NO: 152265 - DNA, 25 bp, Canis familiaris
ggttctaacaactctcactgtagtg

SEQ ID NO: 152266 - DNA, 25 bp, Canis familiaris
ggtaaacccagctctcagggaggca

SEQ ID NO: 152267 - DNA, 25 bp, Canis familiaris
ggtgagaagcaccatccgctaaaga

SEQ ID NO: 152268 - DNA, 25 bp, Canis familiaris
ggtgagggtcgtgcgtacagtacga

SEQ ID NO: 152269 - DNA, 25 bp, Canis familiaris
ggtggggtcctcaagaaagtcatcc

SEQ ID NO: 152270 - DNA, 25 bp, Canis familiaris
ggtggggaatctgggccagagcccc

SEQ ID NO: 152271 - DNA, 25 bp, Canis familiaris
ggtggcaggcagttcagttaacccc

SEQ ID NO: 152272 - DNA, 25 bp, Canis familiaris
ggtggcagggagtgacgaatcccaa

SEQ ID NO: 152273 - DNA, 25 bp, Canis familiaris
ggtggcaggccattagaggatataa

SEQ ID NO: 152274 - DNA, 25 bp, Canis familiaris
ggtggcagtgccctcatgggcaaga

SEQ ID NO: 152275 - DNA, 25 bp, Canis familiaris
ggtggcattccaccagtgggagata

SEQ ID NO: 152276 - DNA, 25 bp, Canis familiaris
ggtgtcaaacaccacgaggagtgag

SEQ ID NO: 152277 - DNA, 25 bp, Canis familiaris
ggtgtaaatacatcacatgggctcc

SEQ ID NO: 152278 - DNA, 25 bp, Canis familiaris
ggtgatgctatttctgacatgctgg

SEQ ID NO: 152279 - DNA, 25 bp, Canis familiaris
ggtgtgctattagtactatagtgga

SEQ ID NO: 152280 - DNA, 25 bp, Canis familiaris
ggtgtctttcttttttatggctaat

SEQ ID NO: 152281 - DNA, 25 bp, Canis familiaris
ggtggttttgtattgattatcctga

SEQ ID NO: 152282 - DNA, 25 bp, Canis familiaris
ggtggacttcttggttgtatccaga

SEQ ID NO: 152283 - DNA, 25 bp, Canis familiaris
ggtggacttcttggtgtaccagaca

SEQ ID NO: 152284 - DNA, 25 bp, Canis familiaris
ggtgcaccctgcaggggacaacatc

SEQ ID NO: 152285 - DNA, 25 bp, Canis familiaris
ggtgaccctgaggggcgaggacacc

SEQ ID NO: 152286 - DNA, 25 bp, Canis familiaris
ggtgaccctgaggggcgaggacacc

SEQ ID NO: 152287 - DNA, 25 bp, Canis familiaris
ggtgtccctggtgaagcgggagccc

SEQ ID NO: 152288 - DNA, 25 bp, Canis familiaris
ggtgtactccttgaacgtggtgctc

SEQ ID NO: 152289 - DNA, 25 bp, Canis familiaris
ggtgctgacttctttaacgatttcc

SEQ ID NO: 152290 - DNA, 25 bp, Canis familiaris
ggtggcacatctgggtgacacagtt

SEQ ID NO: 152291 - DNA, 25 bp, Canis familiaris
ggctgggattcggaccacagtattg

SEQ ID NO: 152292 - DNA, 25 bp, Canis familiaris
ggtgggtaggaagcatgcaggtggc

SEQ ID NO: 152293 - DNA, 25 bp, Canis familiaris
ggtgggactggagactgcaagatgg

SEQ ID NO: 152294 - DNA, 25 bp, Canis familiaris
ggtggagacgttgaaggagatgatt

SEQ ID NO: 152295 - DNA, 25 bp, Canis familiaris
ggcttgaaaggacaaagaatttggt

SEQ ID NO: 152296 - DNA, 25 bp, Canis familiaris
ggtggaaaggagcaaagcttctcat

SEQ ID NO: 152297 - DNA, 25 bp, Canis familiaris
ggtgccaagggaataaagtcgatct

SEQ ID NO: 152298 - DNA, 25 bp, Canis familiaris
ggtgctaatggggagaacccttgct

SEQ ID NO: 152299 - DNA, 25 bp, Canis familiaris
ggtgataaggctcggagaatccggg

SEQ ID NO: 152300 - DNA, 25 bp, Canis familiaris
ggtggaagatgccaagacagcccgg

SEQ ID NO: 152301 - DNA, 25 bp, Canis familiaris
ggtggaaatggaaacccagcggtgt

SEQ ID NO: 152302 - DNA, 25 bp, Canis familiaris
ggtggacctggagactctcagggtc

SEQ ID NO: 152303 - DNA, 25 bp, Canis familiaris
ggtggactcattctacaccaagttc

SEQ ID NO: 152304 - DNA, 25 bp, Canis familiaris
ggtggcccagctcaaacagaaggtc

SEQ ID NO: 152305 - DNA, 25 bp, Canis familiaris
ggtgtcccggtatgtcaactggatt

SEQ ID NO: 152306 - DNA, 25 bp, Canis familiaris
ggtgttcgtggttggatattgcctt

SEQ ID NO: 152307 - DNA, 25 bp, Canis familiaris
ggtgtaggatggaaaaactgttttg

SEQ ID NO: 152308 - DNA, 25 bp, Canis familiaris
ggtgctgggagcttagaaagtttcg

SEQ ID NO: 152309 - DNA, 25 bp, Canis familiaris
ggtggcaggcccggaaaatttcaga

SEQ ID NO: 152310 - DNA, 25 bp, Canis familiaris
ggtcaacaggacggggattttcaga

SEQ ID NO: 152311 - DNA, 25 bp, Canis familiaris
ggatcctaaggcagggggtccaaca

SEQ ID NO: 152312 - DNA, 25 bp, Canis familiaris
ggttctgaggggtgtgggtccccag

SEQ ID NO: 152313 - DNA, 25 bp, Canis familiaris
ggttcaagggaatgcctggccctga

SEQ ID NO: 152314 - DNA, 25 bp, Canis familiaris
ggtgggggggatttctgagtactga

SEQ ID NO: 152315 - DNA, 25 bp, Canis familiaris
ggtgggggggattgaggagttgtgg

SEQ ID NO: 152316 - DNA, 25 bp, Canis familiaris
ggtggatggggggatgggacaactg

SEQ ID NO: 152317 - DNA, 25 bp, Canis familiaris
ggtggggaggcaggggaaccagagg

SEQ ID NO: 152318 - DNA, 25 bp, Canis familiaris
ggtgggtggagggggagacggatgg

SEQ ID NO: 152319 - DNA, 25 bp, Canis familiaris
ggtggatctggggtcggaaggcata

SEQ ID NO: 152320 - DNA, 25 bp, Canis familiaris
ggtggctcaggggagctgggagaaa

SEQ ID NO: 152321 - DNA, 25 bp, Canis familiaris
ggtcccaggggacagacgatcaacc

SEQ ID NO: 152322 - DNA, 25 bp, Canis familiaris
ggtgctcctggattaaagggtgaaa

SEQ ID NO: 152323 - DNA, 25 bp, Canis familiaris
ggtgcccattcagatcaagggtacc

SEQ ID NO: 152324 - DNA, 25 bp, Canis familiaris
ggtcgacacctcctcaaagtggacc

SEQ ID NO: 152325 - DNA, 25 bp, Canis familiaris
ggtggcacccaagtcaaagtggtca

SEQ ID NO: 152326 - DNA, 25 bp, Canis familiaris
ggtgagcttcacagtgcacgagggt

SEQ ID NO: 152327 - DNA, 25 bp, Canis familiaris
ggtggtgtccatgtgcatcgggacc

SEQ ID NO: 152328 - DNA, 25 bp, Canis familiaris
ggtggtcaccatcatcacaggaacc

SEQ ID NO: 152329 - DNA, 25 bp, Canis familiaris
ggtggtccacaattaatgagaactt

SEQ ID NO: 152330 - DNA, 25 bp, Canis familiaris
ggtggaccttattttggaatgcttc

SEQ ID NO: 152331 - DNA, 25 bp, Canis familiaris
ggtgaacgttagttatcgcagccat

SEQ ID NO: 152332 - DNA, 25 bp, Canis familiaris
ggtggagccatttttgtcaagtcat

SEQ ID NO: 152333 - DNA, 25 bp, Canis familiaris
ggtggagctcagtattctggaaggt

SEQ ID NO: 152334 - DNA, 25 bp, Canis familiaris
ggtgtggctcagttactagactcgc

SEQ ID NO: 152335 - DNA, 25 bp, Canis familiaris
ggtgtggacagtaggcgcaccatcc

SEQ ID NO: 152336 - DNA, 25 bp, Canis familiaris
ggtggagagcatgggggcccatctc

SEQ ID NO: 152337 - DNA, 25 bp, Canis familiaris
ggtggaggcagccagggcttacctg

SEQ ID NO: 152338 - DNA, 25 bp, Canis familiaris
ggtgaaggcaccaggttgaccatca

SEQ ID NO: 152339 - DNA, 25 bp, Canis familiaris
ggtcaagaagccagtctcgttcaaa

SEQ ID NO: 152340 - DNA, 25 bp, Canis familiaris
ggtgtaaaatcttgtcatgtgtata

SEQ ID NO: 152341 - DNA, 25 bp, Canis familiaris
ggtgtcaatgcatctggtatcgtgt

SEQ ID NO: 152342 - DNA, 25 bp, Canis familiaris
ggtgtaatgcagccatttcagggaa

SEQ ID NO: 152343 - DNA, 25 bp, Canis familiaris
ggtggagaggaaatgccaggatgca

SEQ ID NO: 152344 - DNA, 25 bp, Canis familiaris
ggtgggataatcttcgggatggtca

SEQ ID NO: 152345 - DNA, 25 bp, Canis familiaris
ggtggtggaagtggtggatatggta

SEQ ID NO: 152346 - DNA, 25 bp, Canis familiaris
ggtggggaagccaggcattggttga

SEQ ID NO: 152347 - DNA, 25 bp, Canis familiaris
ggtggggtcttaagttgtggtctga

SEQ ID NO: 152348 - DNA, 25 bp, Canis familiaris
ggtgggggttcatgagttggtgcta

SEQ ID NO: 152349 - DNA, 25 bp, Canis familiaris
ggtgggtccttgccaagggggtgat

SEQ ID NO: 152350 - DNA, 25 bp, Canis familiaris
ggtgggtctattttaggtgtaggtg

SEQ ID NO: 152351 - DNA, 25 bp, Canis familiaris
ggtggttgtagggtgagcgtgtagg

SEQ ID NO: 152352 - DNA, 25 bp, Canis familiaris
ggtggttgctgaaggctgggttggc

SEQ ID NO: 152353 - DNA, 25 bp, Canis familiaris
ggctggttctggagccgactccaga

SEQ ID NO: 152354 - DNA, 25 bp, Canis familiaris
ggtggttgcggctgaaagtcacagg

SEQ ID NO: 152355 - DNA, 25 bp, Canis familiaris
ggtgggtcggaccaaggtaacagtg

SEQ ID NO: 152356 - DNA, 25 bp, Canis familiaris
ggtctggccggacgcataagtacaa

SEQ ID NO: 152357 - DNA, 25 bp, Canis familiaris
ggtggtgctgggtgattattataat

SEQ ID NO: 152358 - DNA, 25 bp, Canis familiaris
ggtggtgctgggaatttgcatttaa

SEQ ID NO: 152359 - DNA, 25 bp, Canis familiaris
ggtgggcaggagcttagtctataac

SEQ ID NO: 152360 - DNA, 25 bp, Canis familiaris
ggtgggcaagcttcttagatgttaa

SEQ ID NO: 152361 - DNA, 25 bp, Canis familiaris
ggtggtcatcgatcctaagccataa

SEQ ID NO: 152362 - DNA, 25 bp, Canis familiaris
ggtgttagcagagccaggacctgaa

SEQ ID NO: 152363 - DNA, 25 bp, Canis familiaris
ggtgaaacaagtccagctggcctga

SEQ ID NO: 152364 - DNA, 25 bp, Canis familiaris
ggtgatcaacaccttgcaactgcac

SEQ ID NO: 152365 - DNA, 25 bp, Canis familiaris
ggtgatcatacagttgtaaaccata

SEQ ID NO: 152366 - DNA, 25 bp, Canis familiaris
ggtgtcaagatgagtatgaacagct

SEQ ID NO: 152367 - DNA, 25 bp, Canis familiaris
ggtgtctggattttctacgagctac

SEQ ID NO: 152368 - DNA, 25 bp, Canis familiaris
ggtggtggtatctttcaagcaatca

SEQ ID NO: 152369 - DNA, 25 bp, Canis familiaris
tggctgccgtttttaaagaccttag

SEQ ID NO: 152370 - DNA, 25 bp, Canis familiaris
ggtgacttttcttacaagagcccgg

SEQ ID NO: 152371 - DNA, 25 bp, Canis familiaris
ggtgtgcgcattttaacgaggcccg

SEQ ID NO: 152372 - DNA, 25 bp, Canis familiaris
ggtgtggttaagtttgagtcgccag

SEQ ID NO: 152373 - DNA, 25 bp, Canis familiaris
ggtgtggattgatgttggcagccgt

SEQ ID NO: 152374 - DNA, 25 bp, Canis familiaris
ggtgtcctctgatagtaagcctgtg

SEQ ID NO: 152375 - DNA, 25 bp, Canis familiaris
ggtgggctctgacagtaacagctct

SEQ ID NO: 152376 - DNA, 25 bp, Canis familiaris
ggtggacacctgcagatacacctac

SEQ ID NO: 152377 - DNA, 25 bp, Canis familiaris
ggtgtgacccatgagaagcaacgag

SEQ ID NO: 152378 - DNA, 25 bp, Canis familiaris
ggtgtgccccagaaatagccagaag

SEQ ID NO: 152379 - DNA, 25 bp, Canis familiaris
ggtgtgtggccatatttctagaagg

SEQ ID NO: 152380 - DNA, 25 bp, Canis familiaris
ggtgttaccattttactgagcagat

SEQ ID NO: 152381 - DNA, 25 bp, Canis familiaris
ggtgtagaccattctgtgggaggat

SEQ ID NO: 152382 - DNA, 25 bp, Canis familiaris
ggtgtagaccattcttgcgaggata

SEQ ID NO: 152383 - DNA, 25 bp, Canis familiaris
ggtgataatcaatctggcgaggcat

SEQ ID NO: 152384 - DNA, 25 bp, Canis familiaris
ggtgtatataatgctgacagggaac

SEQ ID NO: 152385 - DNA, 25 bp, Canis familiaris
ggtgtacgaataccacaggccagat

SEQ ID NO: 152386 - DNA, 25 bp, Canis familiaris
ggtgtcctgggaccacaatgacaaa

SEQ ID NO: 152387 - DNA, 25 bp, Canis familiaris
ggtgtctttgggtgctgatgtcaat

SEQ ID NO: 152388 - DNA, 25 bp, Canis familiaris
ggtgtcggggtgagtggtatttatt

SEQ ID NO: 152389 - DNA, 25 bp, Canis familiaris
ggtgataaggagatggtggttttca

SEQ ID NO: 152390 - DNA, 25 bp, Canis familiaris
ggtggtcagcagtggtggagtttta

SEQ ID NO: 152391 - DNA, 25 bp, Canis familiaris
ggtggaggcatttttgtgatttttt

SEQ ID NO: 152392 - DNA, 25 bp, Canis familiaris
ggtggggcttgaattcttgttactt

SEQ ID NO: 152393 - DNA, 25 bp, Canis familiaris
ggtgggctttgaattttttctatct

SEQ ID NO: 152394 - DNA, 25 bp, Canis familiaris
ggtgtgtgcttttattgtctattgt

SEQ ID NO: 152395 - DNA, 25 bp, Canis familiaris
ggtggttagtatcattttgctgttc

SEQ ID NO: 152396 - DNA, 25 bp, Canis familiaris
ggtggttactctagtgtttgctggt

SEQ ID NO: 152397 - DNA, 25 bp, Canis familiaris
ggtgcatttttccagcagtactgct

SEQ ID NO: 152398 - DNA, 25 bp, Canis familiaris
ggtgatgccttacgtgcaggatctg

SEQ ID NO: 152399 - DNA, 25 bp, Canis familiaris
ggtgattcttaggctgatggatact

SEQ ID NO: 152400 - DNA, 25 bp, Canis familiaris
ggtcatcttcaaaatggggactcct

SEQ ID NO: 152401 - DNA, 25 bp, Canis familiaris
ggtcagaatcaaactggtccctgcc

SEQ ID NO: 152402 - DNA, 25 bp, Canis familiaris
ggtgagtatgatctcgtgtccgtgc

SEQ ID NO: 152403 - DNA, 25 bp, Canis familiaris
ggtgagggcatctcactgtcacagt

SEQ ID NO: 152404 - DNA, 25 bp, Canis familiaris
ggtgggaatgcaaactgatacagcc

SEQ ID NO: 152405 - DNA, 25 bp, Canis familiaris
ggtggtgcacatacgactacacaca

SEQ ID NO: 152406 - DNA, 25 bp, Canis familiaris
ggtgcttgcaatgacctttcaaatt

SEQ ID NO: 152407 - DNA, 25 bp, Canis familiaris
ggtgcattcattgcagtctttggca

SEQ ID NO: 152408 - DNA, 25 bp, Canis familiaris
ggtgttcaggcccttcatagagagg

SEQ ID NO: 152409 - DNA, 25 bp, Canis familiaris
ggtggtgcatggccgttcttagttg

SEQ ID NO: 152410 - DNA, 25 bp, Canis familiaris
ggtggatctgagtctttgtggagtt

SEQ ID NO: 152411 - DNA, 25 bp, Canis familiaris
ggtgacttgagagctctggggtgtg

SEQ ID NO: 152412 - DNA, 25 bp, Canis familiaris
ggtggttatggatctggtggtggaa

SEQ ID NO: 152413 - DNA, 25 bp, Canis familiaris
ggtgaaccaggagctggcgcaagga

SEQ ID NO: 152414 - DNA, 25 bp, Canis familiaris
tgttgaccacgggtgtacggtggaa

SEQ ID NO: 152415 - DNA, 25 bp, Canis familiaris
ggtgaccacgggtgacggggaatca

SEQ ID NO: 152416 - DNA, 25 bp, Canis familiaris
ggtgatccacggggtgacggggaat

SEQ ID NO: 152417 - DNA, 25 bp, Canis familiaris
ggtgtcccgtagttctcagtgggga

SEQ ID NO: 152418 - DNA, 25 bp, Canis familiaris
ggtggagcttattttctagagggga

SEQ ID NO: 152419 - DNA, 25 bp, Canis familiaris
ggtgattcttattttctttgggctt

SEQ ID NO: 152420 - DNA, 25 bp, Canis familiaris
ggtgatttctaggttttgaggtgct

SEQ ID NO: 152421 - DNA, 25 bp, Canis familiaris
ggtgtgttcaagtttctcaggggtc

SEQ ID NO: 152422 - DNA, 25 bp, Canis familiaris
ggtggtacaagacttcaggggagtg

SEQ ID NO: 152423 - DNA, 25 bp, Canis familiaris
ggtgagtcacaaactcccaggagag

SEQ ID NO: 152424 - DNA, 25 bp, Canis familiaris
ggtgagtgaaacatccaggcgtgat

SEQ ID NO: 152425 - DNA, 25 bp, Canis familiaris
ggtgaacaaggacccagaggtgatc

SEQ ID NO: 152426 - DNA, 25 bp, Canis familiaris
ggtgaagttggactccctggtatca

SEQ ID NO: 152427 - DNA, 25 bp, Canis familiaris
ggtgatagatctggcctgaagcatg

SEQ ID NO: 152428 - DNA, 25 bp, Canis familiaris
ggtggagatgatggccgatatgtac

SEQ ID NO: 152429 - DNA, 25 bp, Canis familiaris
ggtgggatgtggcagagcttgtcat

SEQ ID NO: 152430 - DNA, 25 bp, Canis familiaris
ggtggatggtgtgaagctgctcatc

SEQ ID NO: 152431 - DNA, 25 bp, Canis familiaris
ggtaatggatttcattccaccccgt

SEQ ID NO: 152432 - DNA, 25 bp, Canis familiaris
ggtggtggtgttattccacacatcc

SEQ ID NO: 152433 - DNA, 25 bp, Canis familiaris
ggtggattgctgatttgtctgccaa

SEQ ID NO: 152434 - DNA, 25 bp, Canis familiaris
ggtggttgtgaaatttcccaatatg

SEQ ID NO: 152435 - DNA, 25 bp, Canis familiaris
ggtgtttcatgagatgcttcccaat

SEQ ID NO: 152436 - DNA, 25 bp, Canis familiaris
ggtgttgctcatagagatcggcccc

SEQ ID NO: 152437 - DNA, 25 bp, Canis familiaris
ggtgttccagagtctctgctgaccc

SEQ ID NO: 152438 - DNA, 25 bp, Canis familiaris
ggtggttgagtgacctcatactgcc

SEQ ID NO: 152439 - DNA, 25 bp, Canis familiaris
ggtgtgttgtggtcctgaatctgtt

SEQ ID NO: 152440 - DNA, 25 bp, Canis familiaris
ggtgtattcgaatctcacagctgtt

SEQ ID NO: 152441 - DNA, 25 bp, Canis familiaris
ggatgcatcattggtgttgctcctg

SEQ ID NO: 152442 - DNA, 25 bp, Canis familiaris
ggtgatatgatcgtgtctgcttcga

SEQ ID NO: 152443 - DNA, 25 bp, Canis familiaris
ggtgtccatgagctctatgatctgg

SEQ ID NO: 152444 - DNA, 25 bp, Canis familiaris
ggtgtgccagatcgtgtgactctgc

SEQ ID NO: 152445 - DNA, 25 bp, Canis familiaris
ggtgtgccagatcgtgtgactctgc

SEQ ID NO: 152446 - DNA, 25 bp, Canis familiaris
ggtgtgccagatcgtgtgactctgc

SEQ ID NO: 152447 - DNA, 25 bp, Canis familiaris
ggtgtgaattggaatgaccccagtg

SEQ ID NO: 152448 - DNA, 25 bp, Canis familiaris
ggtgtggaaggtaccaaccagctga

SEQ ID NO: 152449 - DNA, 25 bp, Canis familiaris
ggtgggtaagcttcacacacaccgc

SEQ ID NO: 152450 - DNA, 25 bp, Canis familiaris
ggtgggtgtgactccaaagcgagct

SEQ ID NO: 152451 - DNA, 25 bp, Canis familiaris
ggtctggggacaatgccaaattgag

SEQ ID NO: 152452 - DNA, 25 bp, Canis familiaris
ggtgggctggaaatggcaccatcta

SEQ ID NO: 152453 - DNA, 25 bp, Canis familiaris
ggtggtgtggacaagagaacccagt

SEQ ID NO: 152454 - DNA, 25 bp, Canis familiaris
ggtggtgtggcctgaggacaacggc

SEQ ID NO: 152455 - DNA, 25 bp, Canis familiaris
ggtgggctggcctgtgtaaaatggg

SEQ ID NO: 152456 - DNA, 25 bp, Canis familiaris
ggtgggggcatctgctaaagagagg

SEQ ID NO: 152457 - DNA, 25 bp, Canis familiaris
ggtgggaggttctataataagcagg

SEQ ID NO: 152458 - DNA, 25 bp, Canis familiaris
ggtgggggtttgagtgaatgtgtgt

SEQ ID NO: 152459 - DNA, 25 bp, Canis familiaris
ggtggggtgtctttagatgtggggt

SEQ ID NO: 152460 - DNA, 25 bp, Canis familiaris
ggtgctaactttttagatggtggtt

SEQ ID NO: 152461 - DNA, 25 bp, Canis familiaris
ggtgtgaactttttgctttgggata

SEQ ID NO: 152462 - DNA, 25 bp, Canis familiaris
ggtgtgaaagtgccgagtttgggaa

SEQ ID NO: 152463 - DNA, 25 bp, Canis familiaris
ggtgtgcccacacgcgtttgtgggc

SEQ ID NO: 152464 - DNA, 25 bp, Canis familiaris
ggtgtgagacaccgatgttagctta

SEQ ID NO: 152465 - DNA, 25 bp, Canis familiaris
ggtggtgacatatgagttagcctga

SEQ ID NO: 152466 - DNA, 25 bp, Canis familiaris
ggtgtgtccagtttgctatacctga

SEQ ID NO: 152467 - DNA, 25 bp, Canis familiaris
ggtgtgtagtggtatcttaccatga

SEQ ID NO: 152468 - DNA, 25 bp, Canis familiaris
ggtgtgtggtgttgtctgtatatgc

SEQ ID NO: 152469 - DNA, 25 bp, Canis familiaris
ggtgtgtggtgttgtctgtatatgc

SEQ ID NO: 152470 - DNA, 25 bp, Canis familiaris
ggtctggggaagccctaagccccag

SEQ ID NO: 152471 - DNA, 25 bp, Canis familiaris
ggtgctgggggagcacatggtgccc

SEQ ID NO: 152472 - DNA, 25 bp, Canis familiaris
ggtgtgggcggaagtctttcccgca

SEQ ID NO: 152473 - DNA, 25 bp, Canis familiaris
ggtgagggctgtaactgtttcccaa

SEQ ID NO: 152474 - DNA, 25 bp, Canis familiaris
ggtgagaggagcttccatttgtccc

SEQ ID NO: 152475 - DNA, 25 bp, Canis familiaris
ggtgcaggcagagtacagttttcct

SEQ ID NO: 152476 - DNA, 25 bp, Canis familiaris
ggtgatacggtagctcgtacctgaa

SEQ ID NO: 152477 - DNA, 25 bp, Canis familiaris
ggtgaaccagtaccctgcataggga

SEQ ID NO: 152478 - DNA, 25 bp, Canis familiaris
ggtgcagacacacaagccttacatg

SEQ ID NO: 152479 - DNA, 25 bp, Canis familiaris
ggtgatgtcagcctaggacttctct

SEQ ID NO: 152480 - DNA, 25 bp, Canis familiaris
ggtgtgctgacattaggatcctact

SEQ ID NO: 152481 - DNA, 25 bp, Canis familiaris
ggtggtgtttgaggatcctgggctg

SEQ ID NO: 152482 - DNA, 25 bp, Canis familiaris
ggtggtgttcgaggtcgtggaggtc

SEQ ID NO: 152483 - DNA, 25 bp, Canis familiaris
ggtcgtggacgagatgttcctggcc

SEQ ID NO: 152484 - DNA, 25 bp, Canis familiaris
ggtccgggagagagcactcctggac

SEQ ID NO: 152485 - DNA, 25 bp, Canis familiaris
ggtacgctggggaaccctagcagac

SEQ ID NO: 152486 - DNA, 25 bp, Canis familiaris
ggtgacaggggtgacagcagtagca

SEQ ID NO: 152487 - DNA, 25 bp, Canis familiaris
ggtgccagcagccgcggtaattcca

SEQ ID NO: 152488 - DNA, 25 bp, Canis familiaris
ggtgcacatggcaagagggcaaccc

SEQ ID NO: 152489 - DNA, 25 bp, Canis familiaris
ggtgagcatgccacatgcaaggcac

SEQ ID NO: 152490 - DNA, 25 bp, Canis familiaris
ggtggtacaccggcagatgacatga

SEQ ID NO: 152491 - DNA, 25 bp, Canis familiaris
ggtggtgaccgcgacagtgaagtcc

SEQ ID NO: 152492 - DNA, 25 bp, Canis familiaris
tggaggtactcctccgagctgtact

SEQ ID NO: 152493 - DNA, 25 bp, Canis familiaris
ggaagtggcccagatggcagcttac

SEQ ID NO: 152494 - DNA, 25 bp, Canis familiaris
ggtgcagtgttgtaaatggccctga

SEQ ID NO: 152495 - DNA, 25 bp, Canis familiaris
ggtggtcattagctatgagccctgt

SEQ ID NO: 152496 - DNA, 25 bp, Canis familiaris
ggtgtgttaacactatcactcctac

SEQ ID NO: 152497 - DNA, 25 bp, Canis familiaris
ggtgagggaccactacattctctac

SEQ ID NO: 152498 - DNA, 25 bp, Canis familiaris
ggtgagggaggagggactgcttaag

SEQ ID NO: 152499 - DNA, 25 bp, Canis familiaris
ggtggggtgggaggatgtgcttaca

SEQ ID NO: 152500 - DNA, 25 bp, Canis familiaris
ggtgaaggaaggagagcatgcagct

SEQ ID NO: 152501 - DNA, 25 bp, Canis familiaris
ggtgatagagtaagtcaggctgatt

SEQ ID NO: 152502 - DNA, 25 bp, Canis familiaris
ggtgtagcgtatgatccttatgtca

SEQ ID NO: 152503 - DNA, 25 bp, Canis familiaris
ggtgttgtgaatttcccatatgatg

SEQ ID NO: 152504 - DNA, 25 bp, Canis familiaris
ggtgttgtatgatggccttggcggc

SEQ ID NO: 152505 - DNA, 25 bp, Canis familiaris
ggtgttgacatatcttctaaggagc

SEQ ID NO: 152506 - DNA, 25 bp, Canis familiaris
ggtgataacaagttctgtaaaggca

SEQ ID NO: 152507 - DNA, 25 bp, Canis familiaris
ggtgtctaaagccttggattagccc

SEQ ID NO: 152508 - DNA, 25 bp, Canis familiaris
ggtccataaacggggaaagtctatg

SEQ ID NO: 152509 - DNA, 25 bp, Canis familiaris
ggtgccaaattcccctaaatctgga

SEQ ID NO: 152510 - DNA, 25 bp, Canis familiaris
ggtgcagttttcttttaatgtcatg

SEQ ID NO: 152511 - DNA, 25 bp, Canis familiaris
ggtggtgtttgtattatgcttatgg

SEQ ID NO: 152512 - DNA, 25 bp, Canis familiaris
ggtggtgttggaaaaagcacattca

SEQ ID NO: 152513 - DNA, 25 bp, Canis familiaris
ggtggtgttttataagagattctcc

SEQ ID NO: 152514 - DNA, 25 bp, Canis familiaris
ggtggtgttgttactacagctttct

SEQ ID NO: 152515 - DNA, 25 bp, Canis familiaris
ggtggtttctataagcacagggact

SEQ ID NO: 152516 - DNA, 25 bp, Canis familiaris
ggtggtcttctgtctaaaggaacca

SEQ ID NO: 152517 - DNA, 25 bp, Canis familiaris
ggtgtgtttgtgtaacccgaacaga

SEQ ID NO: 152518 - DNA, 25 bp, Canis familiaris
ggtggtggtgcttattgccgccacc

SEQ ID NO: 152519 - DNA, 25 bp, Canis familiaris
ggtgggtgtgtgtttgtctggccac

SEQ ID NO: 152520 - DNA, 25 bp, Canis familiaris
ggtggggcggattatcttggcagcc

SEQ ID NO: 152521 - DNA, 25 bp, Canis familiaris
ggtggtggggattgtgctgtggaac

SEQ ID NO: 152522 - DNA, 25 bp, Canis familiaris
ggtggtgcgggcgatgtgtttgaac

SEQ ID NO: 152523 - DNA, 25 bp, Canis familiaris
ggtggggacccattgtctggaagat

SEQ ID NO: 152524 - DNA, 25 bp, Canis familiaris
ggtggggacccattgtctggaagat

SEQ ID NO: 152525 - DNA, 25 bp, Canis familiaris
ggtgtttaaccacgtctacaacatc

SEQ ID NO: 152526 - DNA, 25 bp, Canis familiaris
ggtgattgtacggccgtgcttatac

SEQ ID NO: 152527 - DNA, 25 bp, Canis familiaris
ggtgatctgagaggtcggtttgtga

SEQ ID NO: 152528 - DNA, 25 bp, Canis familiaris
ggtgatttgtgaactggttttacat

SEQ ID NO: 152529 - DNA, 25 bp, Canis familiaris
ggtgtttcttttcgttcttatcact

SEQ ID NO: 152530 - DNA, 25 bp, Canis familiaris
ggtgggttgttctagtactgtattt

SEQ ID NO: 152531 - DNA, 25 bp, Canis familiaris
ggtggtgctgttttagtatctccct

SEQ ID NO: 152532 - DNA, 25 bp, Canis familiaris
ggtggtgctgttgatgagtatttgc

SEQ ID NO: 152533 - DNA, 25 bp, Canis familiaris
ggtgtgtaggtttggtatgtgtggc

SEQ ID NO: 152534 - DNA, 25 bp, Canis familiaris
ggtggtggcggaggcagtagtgggc

SEQ ID NO: 152535 - DNA, 25 bp, Canis familiaris
ggtggtggacgagagagggagggag

SEQ ID NO: 152536 - DNA, 25 bp, Canis familiaris
ggtgttgattcgagcgggaagaggg

SEQ ID NO: 152537 - DNA, 25 bp, Canis familiaris
ggtgttattggtacgaggcattgga

SEQ ID NO: 152538 - DNA, 25 bp, Canis familiaris
ggtctccttggcagttggatctgga

SEQ ID NO: 152539 - DNA, 25 bp, Canis familiaris
ggtgtctccagccagagcattggag

SEQ ID NO: 152540 - DNA, 25 bp, Canis familiaris
ggtgtcccacgagatatgagaccac

SEQ ID NO: 152541 - DNA, 25 bp, Canis familiaris
ggtgtccccagggcatgaagacatt

SEQ ID NO: 152542 - DNA, 25 bp, Canis familiaris
ggtgcaggcccaagtgaaagacaac

SEQ ID NO: 152543 - DNA, 25 bp, Canis familiaris
ggtgaggaacgtggaaaatatgaga

SEQ ID NO: 152544 - DNA, 25 bp, Canis familiaris
ggtgacggggtcccaaattggcatc

SEQ ID NO: 152545 - DNA, 25 bp, Canis familiaris
ggcttcgggactcaaccaagtctct

SEQ ID NO: 152546 - DNA, 25 bp, Canis familiaris
ggtgtccggacggcaaacgagtgac

SEQ ID NO: 152547 - DNA, 25 bp, Canis familiaris
ggttaccccagcagattcgactgaa

SEQ ID NO: 152548 - DNA, 25 bp, Canis familiaris
ggtgtcacccccgtagtgggtgata

SEQ ID NO: 152549 - DNA, 25 bp, Canis familiaris
ggtgtcccttaacattaggctgtga

SEQ ID NO: 152550 - DNA, 25 bp, Canis familiaris
ggtgtactcgtaaaataccctgtag

SEQ ID NO: 152551 - DNA, 25 bp, Canis familiaris
ggtgtactcctagataatcctcggg

SEQ ID NO: 152552 - DNA, 25 bp, Canis familiaris
ggtgtgatgtccaacaaaactgtcc

SEQ ID NO: 152553 - DNA, 25 bp, Canis familiaris
ggtgttgatgccataaggacatgac

SEQ ID NO: 152554 - DNA, 25 bp, Canis familiaris
ggtgtctgagccatgaagtataaat

SEQ ID NO: 152555 - DNA, 25 bp, Canis familiaris
ggtggggtgctttcagctaatcaaa

SEQ ID NO: 152556 - DNA, 25 bp, Canis familiaris
ggtgggtggctggatacatgacagc

SEQ ID NO: 152557 - DNA, 25 bp, Canis familiaris
ggtgggatgcctgacatgacacagc

SEQ ID NO: 152558 - DNA, 25 bp, Canis familiaris
ggtgaggatcgggaagccaccacgg

SEQ ID NO: 152559 - DNA, 25 bp, Canis familiaris
ggtggggcagagggagagcatctca

SEQ ID NO: 152560 - DNA, 25 bp, Canis familiaris
ggtgttggcaaccaggtgctgccac

SEQ ID NO: 152561 - DNA, 25 bp, Canis familiaris
ggtgggcctgacacagtgtgacagc

SEQ ID NO: 152562 - DNA, 25 bp, Canis familiaris
ggtgcccctgtatctgttacagata

SEQ ID NO: 152563 - DNA, 25 bp, Canis familiaris
ggtccttagtcaactactctggata

SEQ ID NO: 152564 - DNA, 25 bp, Canis familiaris
ggtgtttcatgctccaaatctggaa

SEQ ID NO: 152565 - DNA, 25 bp, Canis familiaris
ggtgactgtccattccagaagagga

SEQ ID NO: 152566 - DNA, 25 bp, Canis familiaris
ggtgactggatcttgaaactggtgg

SEQ ID NO: 152567 - DNA, 25 bp, Canis familiaris
ggtgactggtgttgagtactggtgg

SEQ ID NO: 152568 - DNA, 25 bp, Canis familiaris
ggtgatcgagtttaacatgcctgtg

SEQ ID NO: 152569 - DNA, 25 bp, Canis familiaris
ggtgactggaattaactgccatatg

SEQ ID NO: 152570 - DNA, 25 bp, Canis familiaris
ggtgactggcacttagatctactat

SEQ ID NO: 152571 - DNA, 25 bp, Canis familiaris
ggtgcctggacgagatctgtggatt

SEQ ID NO: 152572 - DNA, 25 bp, Canis familiaris
ggtgatcagaatcagaatttggatt

SEQ ID NO: 152573 - DNA, 25 bp, Canis familiaris
ggtgtcacagcacaagttctgtact

SEQ ID NO: 152574 - DNA, 25 bp, Canis familiaris
ggtgtaccatgtttgatttgtccct

SEQ ID NO: 152575 - DNA, 25 bp, Canis familiaris
ggtgtaaacatatattttgccctca

SEQ ID NO: 152576 - DNA, 25 bp, Canis familiaris
ggtgatacccaatcatctttgaaca

SEQ ID NO: 152577 - DNA, 25 bp, Canis familiaris
ggtgtactgttactcagtttaacat

SEQ ID NO: 152578 - DNA, 25 bp, Canis familiaris
ggtgttctgtatatcatgcctttaa

SEQ ID NO: 152579 - DNA, 25 bp, Canis familiaris
ggtgttgcattatttcatcaatcat

SEQ ID NO: 152580 - DNA, 25 bp, Canis familiaris
ggtgtccatctaatgatcctagcaa

SEQ ID NO: 152581 - DNA, 25 bp, Canis familiaris
ggtgtccttatcttcactagatacc

SEQ ID NO: 152582 - DNA, 25 bp, Canis familiaris
ggtgtctactttccacaagtactct

SEQ ID NO: 152583 - DNA, 25 bp, Canis familiaris
ggtgtcatatttggcccaactctaa

SEQ ID NO: 152584 - DNA, 25 bp, Canis familiaris
ggtgcctatgtctgccaatgggcaa

SEQ ID NO: 152585 - DNA, 25 bp, Canis familiaris
ggtgtgtgtgtatgactatggggaa

SEQ ID NO: 152586 - DNA, 25 bp, Canis familiaris
ggtggtgtgccctctgatggggcaa

SEQ ID NO: 152587 - DNA, 25 bp, Canis familiaris
ggtggtgtcctagttgtgcaaagca

SEQ ID NO: 152588 - DNA, 25 bp, Canis familiaris
ggtgcagtgctggttgctattcaaa

SEQ ID NO: 152589 - DNA, 25 bp, Canis familiaris
ggtgagtagtttgatcattaattta

SEQ ID NO: 152590 - DNA, 25 bp, Canis familiaris
ggtgattagctcttgcctttatttt

SEQ ID NO: 152591 - DNA, 25 bp, Canis familiaris
ggtgttgagatttgctttgaacttt

SEQ ID NO: 152592 - DNA, 25 bp, Canis familiaris
ggtgctgggactatggtaccaatct

SEQ ID NO: 152593 - DNA, 25 bp, Canis familiaris
ggtgtgaaactcggctgtattaatc

SEQ ID NO: 152594 - DNA, 25 bp, Canis familiaris
ggtacacaagtggtcttttcaatct

SEQ ID NO: 152595 - DNA, 25 bp, Canis familiaris
ggtgaacgagctctgatttacaagt

SEQ ID NO: 152596 - DNA, 25 bp, Canis familiaris
ggtgcagaaagaaagatccgtcaag

SEQ ID NO: 152597 - DNA, 25 bp, Canis familiaris
ggtgggcaataaacatcctgtaatg

SEQ ID NO: 152598 - DNA, 25 bp, Canis familiaris
ggtgatggcgcacatttcttgtaag

SEQ ID NO: 152599 - DNA, 25 bp, Canis familiaris
tggccaggcgaatcccgttaagggc

SEQ ID NO: 152600 - DNA, 25 bp, Canis familiaris
ggtagcgtaatagctccttagggag

SEQ ID NO: 152601 - DNA, 25 bp, Canis familiaris
ggtgaacctattgatcctgtgaggg

SEQ ID NO: 152602 - DNA, 25 bp, Canis familiaris
ggtgacatacatacagaattttaca

SEQ ID NO: 152603 - DNA, 25 bp, Canis familiaris
ggtgggctcaagcaattctgtagca

SEQ ID NO: 152604 - DNA, 25 bp, Canis familiaris
ggtgagactcacctatttcgtacca

SEQ ID NO: 152605 - DNA, 25 bp, Canis familiaris
ggtgatgaacatcctatgtttgtag

SEQ ID NO: 152606 - DNA, 25 bp, Canis familiaris
ggtgtgcgtctggatatgtgtgtgt

SEQ ID NO: 152607 - DNA, 25 bp, Canis familiaris
ggtgggtcatgatgagctgtgtgtc

SEQ ID NO: 152608 - DNA, 25 bp, Canis familiaris
ggtgcaggtcagcacgttgctgtcg

SEQ ID NO: 152609 - DNA, 25 bp, Canis familiaris
ggtgctgagtagcatctgcttaggt

SEQ ID NO: 152610 - DNA, 25 bp, Canis familiaris
ggtgtagctcagctgtgtggacagg

SEQ ID NO: 152611 - DNA, 25 bp, Canis familiaris
ggtgaggcagcatcttgtggaaggg

SEQ ID NO: 152612 - DNA, 25 bp, Canis familiaris
ggtgtgcacagatcctggcagtatg

SEQ ID NO: 152613 - DNA, 25 bp, Canis familiaris
ggtgatccaaacctgagattctgtg

SEQ ID NO: 152614 - DNA, 25 bp, Canis familiaris
ggtgacctaactgggttgttgacat

SEQ ID NO: 152615 - DNA, 25 bp, Canis familiaris
ggtgtgtattacgggtgtgttgcaa

SEQ ID NO: 152616 - DNA, 25 bp, Canis familiaris
ggtgtgtgtatacgtggcttgtgga

SEQ ID NO: 152617 - DNA, 25 bp, Canis familiaris
ggtgtgttaaggcccatgtgagcgg

SEQ ID NO: 152618 - DNA, 25 bp, Canis familiaris
ggtgtttaatgtggctttgatctgg

SEQ ID NO: 152619 - DNA, 25 bp, Canis familiaris
ggtgtctctaatttcttctgtttga

SEQ ID NO: 152620 - DNA, 25 bp, Canis familiaris
ggtgtcatctagtacacaatctgtt

SEQ ID NO: 152621 - DNA, 25 bp, Canis familiaris
ggtgacaccagctctcagattggtc

SEQ ID NO: 152622 - DNA, 25 bp, Canis familiaris
ggtgacaccagcacgaaaaaccagc

SEQ ID NO: 152623 - DNA, 25 bp, Canis familiaris
ggtacccacttacaagagtctcaac

SEQ ID NO: 152624 - DNA, 25 bp, Canis familiaris
ggtgcacccactatggaacagtgtg

SEQ ID NO: 152625 - DNA, 25 bp, Canis familiaris
ggctaccccggtggacaaggataca

SEQ ID NO: 152626 - DNA, 25 bp, Canis familiaris
ggtattcccgggatcagagaagaca

SEQ ID NO: 152627 - DNA, 25 bp, Canis familiaris
ggtagtcttctgtgaatcccaaaca

SEQ ID NO: 152628 - DNA, 25 bp, Canis familiaris
ggtcaacttttcaaatggcctcaaa

SEQ ID NO: 152629 - DNA, 25 bp, Canis familiaris
ggcgattcctttgaagagtctaaac

SEQ ID NO: 152630 - DNA, 25 bp, Canis familiaris
ggtgttcctcttgggatgactgcaa

SEQ ID NO: 152631 - DNA, 25 bp, Canis familiaris
ggtgtacctctatgtgtgtgtgtgc

SEQ ID NO: 152632 - DNA, 25 bp, Canis familiaris
ggtgttggctctgcgtgatttggcc

SEQ ID NO: 152633 - DNA, 25 bp, Canis familiaris
ggtgtgtagtctgtggatgggcgca

SEQ ID NO: 152634 - DNA, 25 bp, Canis familiaris
ggtgttgcagtggagtgatggggtg

SEQ ID NO: 152635 - DNA, 25 bp, Canis familiaris
ggtgtagggtagaatggagagggag

SEQ ID NO: 152636 - DNA, 25 bp, Canis familiaris
ggtgtagtgggagtgggaggtggga

SEQ ID NO: 152637 - DNA, 25 bp, Canis familiaris
ggtgtgtgtggaccatggagggggt

SEQ ID NO: 152638 - DNA, 25 bp, Canis familiaris
ggtgtgtgggagtggggagcaaact

SEQ ID NO: 152639 - DNA, 25 bp, Canis familiaris
ggtgtgaggatgctgggggccaagc

SEQ ID NO: 152640 - DNA, 25 bp, Canis familiaris
ggtgtgtgtgtgcggtgatcgccaa

SEQ ID NO: 152641 - DNA, 25 bp, Canis familiaris
ggtgtgtgtgtgggcgcagcaagaa

SEQ ID NO: 152642 - DNA, 25 bp, Canis familiaris
ggtgtgtgttgggagcagcatcagc

SEQ ID NO: 152643 - DNA, 25 bp, Canis familiaris
ggtgtatagataggagcgatgcaga

SEQ ID NO: 152644 - DNA, 25 bp, Canis familiaris
ggatcataaggagagcggaattaat

SEQ ID NO: 152645 - DNA, 25 bp, Canis familiaris
ggtcatcagcagcattgagcagaaa

SEQ ID NO: 152646 - DNA, 25 bp, Canis familiaris
ggtgatcaggattgctagaagacga

SEQ ID NO: 152647 - DNA, 25 bp, Canis familiaris
ggtgacgctgttcaaaaacgccatc

SEQ ID NO: 152648 - DNA, 25 bp, Canis familiaris
ggtaccatgtcccaaatggaagcca

SEQ ID NO: 152649 - DNA, 25 bp, Canis familiaris
ggtgagctcagatgcctaaagatag

SEQ ID NO: 152650 - DNA, 25 bp, Canis familiaris
ggtgggcagggcagataaataggca

SEQ ID NO: 152651 - DNA, 25 bp, Canis familiaris
ggtgggcaggcccgataaaagagcc

SEQ ID NO: 152652 - DNA, 25 bp, Canis familiaris
ggtcggagcctatggattaacgcca

SEQ ID NO: 152653 - DNA, 25 bp, Canis familiaris
ggtcctgtccgcaggtagagacgga

SEQ ID NO: 152654 - DNA, 25 bp, Canis familiaris
ggtgcctggctggcttagtaggtag

SEQ ID NO: 152655 - DNA, 25 bp, Canis familiaris
ggtgtctcctgtgtagtatgtgctt

SEQ ID NO: 152656 - DNA, 25 bp, Canis familiaris
ggtgtatcgtgggaagctcattgag

SEQ ID NO: 152657 - DNA, 25 bp, Canis familiaris
ggtgttcggcgaaagatatttggaa

SEQ ID NO: 152658 - DNA, 25 bp, Canis familiaris
ggtgtccaggagtgagattgatttg

SEQ ID NO: 152659 - DNA, 25 bp, Canis familiaris
ggtgctaaagtgtgagacgaggctg

SEQ ID NO: 152660 - DNA, 25 bp, Canis familiaris
ggtgtacgagtttaccacaggctgc

SEQ ID NO: 152661 - DNA, 25 bp, Canis familiaris
ggtgtcagagagcttcaccaagccc

SEQ ID NO: 152662 - DNA, 25 bp, Canis familiaris
ggtgttgatagccttgatccgagcc

SEQ ID NO: 152663 - DNA, 25 bp, Canis familiaris
ggtgttgtctgtatatgctaactcc

SEQ ID NO: 152664 - DNA, 25 bp, Canis familiaris
ggtgtggaatggatcctgaactcct

SEQ ID NO: 152665 - DNA, 25 bp, Canis familiaris
ggtgcgaaaggcagctgtaaccagc

SEQ ID NO: 152666 - DNA, 25 bp, Canis familiaris
ggtgctaaagcctggataagccccc

SEQ ID NO: 152667 - DNA, 25 bp, Canis familiaris
ggtgcataaagcgacgcggacagcg

SEQ ID NO: 152668 - DNA, 25 bp, Canis familiaris
ggtgcggtgtggaagtctggcagca

SEQ ID NO: 152669 - DNA, 25 bp, Canis familiaris
ggtgtgggggcatgtgctggacaac

SEQ ID NO: 152670 - DNA, 25 bp, Canis familiaris
ggtgttgctgggtgtggtactcagc

SEQ ID NO: 152671 - DNA, 25 bp, Canis familiaris
ggtccgccgcgaggcgagtcaccgc

SEQ ID NO: 152672 - DNA, 25 bp, Canis familiaris
ggtccacacaggcagtggctgcaca

SEQ ID NO: 152673 - DNA, 25 bp, Canis familiaris
ggtccagaaggtctcctaatgctct

SEQ ID NO: 152674 - DNA, 25 bp, Canis familiaris
ggtgtcggtggtatcgtgaatgtgt

SEQ ID NO: 152675 - DNA, 25 bp, Canis familiaris
ggtgtatggtggggtcagggatcga

SEQ ID NO: 152676 - DNA, 25 bp, Canis familiaris
ggtgaatggggaggcccggatctgc

SEQ ID NO: 152677 - DNA, 25 bp, Canis familiaris
ggtgagaagggacttcccggtgctc

SEQ ID NO: 152678 - DNA, 25 bp, Canis familiaris
ggtgaagcgggaagtctccgagggc

SEQ ID NO: 152679 - DNA, 25 bp, Canis familiaris
ggtccaggattaagtcccgcattgg

SEQ ID NO: 152680 - DNA, 25 bp, Canis familiaris
ggtcggagatgacacaccggcttgc

SEQ ID NO: 152681 - DNA, 25 bp, Canis familiaris
ggtgccacgtgactaacctggtggc

SEQ ID NO: 152682 - DNA, 25 bp, Canis familiaris
ggtgctgcaccggatattccgggtg

SEQ ID NO: 152683 - DNA, 25 bp, Canis familiaris
ggttgagcatcaggcatgatcccag

SEQ ID NO: 152684 - DNA, 25 bp, Canis familiaris
ggtgtgacatcatcatcatctctgg

SEQ ID NO: 152685 - DNA, 25 bp, Canis familiaris
ggtgctgttcaaaatctctggagtg

SEQ ID NO: 152686 - DNA, 25 bp, Canis familiaris
ggtgtgattatttcatctgttagat

SEQ ID NO: 152687 - DNA, 25 bp, Canis familiaris
ggtctggtttctttgttagtcctag

SEQ ID NO: 152688 - DNA, 25 bp, Canis familiaris
ggtctttgtttgttgacctgccact

SEQ ID NO: 152689 - DNA, 25 bp, Canis familiaris
ggttacttcttgtcaaacttgcctg

SEQ ID NO: 152690 - DNA, 25 bp, Canis familiaris
tgaaaacgccttgcaaacttggaac

SEQ ID NO: 152691 - DNA, 25 bp, Canis familiaris
ggaagaccttgtgtaattcggaaca

SEQ ID NO: 152692 - DNA, 25 bp, Canis familiaris
ggaagacccaccataaatcgttcac

SEQ ID NO: 152693 - DNA, 25 bp, Canis familiaris
ggaaaccataccatacaaattttga

SEQ ID NO: 152694 - DNA, 25 bp, Canis familiaris
ggtgtcccaaccagaatcaaattta

SEQ ID NO: 152695 - DNA, 25 bp, Canis familiaris
ggttcccaaccctgagaacttggag

SEQ ID NO: 152696 - DNA, 25 bp, Canis familiaris
ggttcaccacgtgtgggaacttgtt

SEQ ID NO: 152697 - DNA, 25 bp, Canis familiaris
ggtgtcggaggagctgggagactcg

SEQ ID NO: 152698 - DNA, 25 bp, Canis familiaris
ggtgaaggcccagctggaagagccg

SEQ ID NO: 152699 - DNA, 25 bp, Canis familiaris
ggtgaactgaccgtatccataggcc

SEQ ID NO: 152700 - DNA, 25 bp, Canis familiaris
ggtgaacacagggtacccggcacac

SEQ ID NO: 152701 - DNA, 25 bp, Canis familiaris
ggtgaaccagatgattgcccggcac

SEQ ID NO: 152702 - DNA, 25 bp, Canis familiaris
ggtgtcggagatgaggctgccggaa

SEQ ID NO: 152703 - DNA, 25 bp, Canis familiaris
ggtgttggcaagggtgtggggagac

SEQ ID NO: 152704 - DNA, 25 bp, Canis familiaris
ggtgctgggaacgcgagagggcggg

SEQ ID NO: 152705 - DNA, 25 bp, Canis familiaris
ggtgccggaaatgtggattcctggc

SEQ ID NO: 152706 - DNA, 25 bp, Canis familiaris
ggtgccaggatagtcaggggaccca

SEQ ID NO: 152707 - DNA, 25 bp, Canis familiaris
ggtgccggagagcaacggacaaagg

SEQ ID NO: 152708 - DNA, 25 bp, Canis familiaris
ggtctggtggggacactggaaagga

SEQ ID NO: 152709 - DNA, 25 bp, Canis familiaris
ggtgatggtcagttaactatgaaga

SEQ ID NO: 152710 - DNA, 25 bp, Canis familiaris
ggtgctgatgactgataccattaaa

SEQ ID NO: 152711 - DNA, 25 bp, Canis familiaris
ggtgtgtgaaacctccttcaacaaa

SEQ ID NO: 152712 - DNA, 25 bp, Canis familiaris
ggtgtgtaattccctttccaacaca

SEQ ID NO: 152713 - DNA, 25 bp, Canis familiaris
ggtctggagaacgtgtttacaccca

SEQ ID NO: 152714 - DNA, 25 bp, Canis familiaris
ggtgtgaaaagcgtcctgtaccctg

SEQ ID NO: 152715 - DNA, 25 bp, Canis familiaris
ggtcaatataacgtccgaacttggg

SEQ ID NO: 152716 - DNA, 25 bp, Canis familiaris
ggtcccaaaggtgccaacggcgagc

SEQ ID NO: 152717 - DNA, 25 bp, Canis familiaris
ggtccgagtaggtgctggacggcgt

SEQ ID NO: 152718 - DNA, 25 bp, Canis familiaris
ggtgccggcagaggttgtggttgga

SEQ ID NO: 152719 - DNA, 25 bp, Canis familiaris
ggtcctggagaccctgggttgagtc

SEQ ID NO: 152720 - DNA, 25 bp, Canis familiaris
ggtccttggcctaggggatatattc

SEQ ID NO: 152721 - DNA, 25 bp, Canis familiaris
ggtcactggacggggccgaatcaat

SEQ ID NO: 152722 - DNA, 25 bp, Canis familiaris
ggtgcacacaaaagggcgcggtaca

SEQ ID NO: 152723 - DNA, 25 bp, Canis familiaris
ggtgacacagaaatggtggggaacc

SEQ ID NO: 152724 - DNA, 25 bp, Canis familiaris
ggtgaaagtgcaatgctggggagaa

SEQ ID NO: 152725 - DNA, 25 bp, Canis familiaris
ggtgataaggctattgggcaggttt

SEQ ID NO: 152726 - DNA, 25 bp, Canis familiaris
ggtgcacaagtccttcgtggaggtc

SEQ ID NO: 152727 - DNA, 25 bp, Canis familiaris
ggtgaccctgcacacttgaaggaac

SEQ ID NO: 152728 - DNA, 25 bp, Canis familiaris
ggtgatgcccccatgtagattggaa

SEQ ID NO: 152729 - DNA, 25 bp, Canis familiaris
ggtgtgcccaccatggagagggaaa

SEQ ID NO: 152730 - DNA, 25 bp, Canis familiaris
ggtgcccagcccatttggggtaaat

SEQ ID NO: 152731 - DNA, 25 bp, Canis familiaris
ggtccccacctgctttgaggtgaaa

SEQ ID NO: 152732 - DNA, 25 bp, Canis familiaris
ggatacgactttctataagggaata

SEQ ID NO: 152733 - DNA, 25 bp, Canis familiaris
ggtgaggtttatgtaaagtccacaa

SEQ ID NO: 152734 - DNA, 25 bp, Canis familiaris
ggtgaagttttataatccccatgca

SEQ ID NO: 152735 - DNA, 25 bp, Canis familiaris
ggtgagaatgtcttacggtcccacc

SEQ ID NO: 152736 - DNA, 25 bp, Canis familiaris
ggtgatgaagttcagcgtgagcccc

SEQ ID NO: 152737 - DNA, 25 bp, Canis familiaris
ggtgaaatcttgccgagagaccctc

SEQ ID NO: 152738 - DNA, 25 bp, Canis familiaris
ggtgagttgccgccaattgaccacc

SEQ ID NO: 152739 - DNA, 25 bp, Canis familiaris
ggtgagttgagcccacaggagacca

SEQ ID NO: 152740 - DNA, 25 bp, Canis familiaris
ggtgcggtggcccacagaagagtgc

SEQ ID NO: 152741 - DNA, 25 bp, Canis familiaris
ggtgcaggggacccagcaatcacac

SEQ ID NO: 152742 - DNA, 25 bp, Canis familiaris
ggtgagggacattggcactgtatca

SEQ ID NO: 152743 - DNA, 25 bp, Canis familiaris
ggtgagggactgggtgtgtgtatgg

SEQ ID NO: 152744 - DNA, 25 bp, Canis familiaris
ggtgatgttgttggtgtgcaggtac

SEQ ID NO: 152745 - DNA, 25 bp, Canis familiaris
ggtgagcactgtggggagaggacac

SEQ ID NO: 152746 - DNA, 25 bp, Canis familiaris
ggtgttcattcagcgagactacagc

SEQ ID NO: 152747 - DNA, 25 bp, Canis familiaris
ggtgcatgtttccacaggacttcac

SEQ ID NO: 152748 - DNA, 25 bp, Canis familiaris
ggtgatgtttgcacagcatgcctct

SEQ ID NO: 152749 - DNA, 25 bp, Canis familiaris
ggtgatgttatgatcatgactttgg

SEQ ID NO: 152750 - DNA, 25 bp, Canis familiaris
ggtgaggtatatcccacttctgtga

SEQ ID NO: 152751 - DNA, 25 bp, Canis familiaris
ggtgatgataatacccactccacag

SEQ ID NO: 152752 - DNA, 25 bp, Canis familiaris
ggtgctgataatatacctcccaagt

SEQ ID NO: 152753 - DNA, 25 bp, Canis familiaris
ggtctagagaagtagcccacgacac

SEQ ID NO: 152754 - DNA, 25 bp, Canis familiaris
ggtgtcattgactaaccacatccac

SEQ ID NO: 152755 - DNA, 25 bp, Canis familiaris
ggtgtaaataaactgcatctcccat

SEQ ID NO: 152756 - DNA, 25 bp, Canis familiaris
ggtgctaatcagagacatcattccc

SEQ ID NO: 152757 - DNA, 25 bp, Canis familiaris
ggtgcttagatgactggcatccctc

SEQ ID NO: 152758 - DNA, 25 bp, Canis familiaris
ggtgtattctgactggcacaactcg

SEQ ID NO: 152759 - DNA, 25 bp, Canis familiaris
ggtgtattcacaagacagaacatca

SEQ ID NO: 152760 - DNA, 25 bp, Canis familiaris
ggtgtaatgccaaaataccacagat

SEQ ID NO: 152761 - DNA, 25 bp, Canis familiaris
ggtgaatagccattattaaccagtg

SEQ ID NO: 152762 - DNA, 25 bp, Canis familiaris
tgactccaatccctttaccaaggtt

SEQ ID NO: 152763 - DNA, 25 bp, Canis familiaris
tgcactaaacccaaatcccaaggcc

SEQ ID NO: 152764 - DNA, 25 bp, Canis familiaris
ggtaaatccctagcagcacaattgc

SEQ ID NO: 152765 - DNA, 25 bp, Canis familiaris
ggtacagaaccttgtacccttcctg

SEQ ID NO: 152766 - DNA, 25 bp, Canis familiaris
ggtcacagagtcctcagtaaacctc

SEQ ID NO: 152767 - DNA, 25 bp, Canis familiaris
ggtcaaagacagcgctcaaaactcg

SEQ ID NO: 152768 - DNA, 25 bp, Canis familiaris
ggtccaagaatcagtcaaagtccag

SEQ ID NO: 152769 - DNA, 25 bp, Canis familiaris
ggtccaggtcaaggtccaattccaa

SEQ ID NO: 152770 - DNA, 25 bp, Canis familiaris
ggtccattaaaagtccatatcccac

SEQ ID NO: 152771 - DNA, 25 bp, Canis familiaris
ggtccaaaaactgaatcccgacagc

SEQ ID NO: 152772 - DNA, 25 bp, Canis familiaris
ggtgcgtaagtcttcaacacccgag

SEQ ID NO: 152773 - DNA, 25 bp, Canis familiaris
ggtccttattatcacacaccttaaa

SEQ ID NO: 152774 - DNA, 25 bp, Canis familiaris
ggtccttgttaatacatccctagta

SEQ ID NO: 152775 - DNA, 25 bp, Canis familiaris
ggtgctctgctttagatttatccca

SEQ ID NO: 152776 - DNA, 25 bp, Canis familiaris
ggtctcgtgatctgagtgcataccc

SEQ ID NO: 152777 - DNA, 25 bp, Canis familiaris
ggtgtcgcattctggagtatcggcc

SEQ ID NO: 152778 - DNA, 25 bp, Canis familiaris
ggtgctgtcactttaagttctggac

SEQ ID NO: 152779 - DNA, 25 bp, Canis familiaris
ggtgctggcattgttgctgattctg

SEQ ID NO: 152780 - DNA, 25 bp, Canis familiaris
ggtctggcagtaactatctctgtga

SEQ ID NO: 152781 - DNA, 25 bp, Canis familiaris
ggtgcgaactgcaattcttgcgtgc

SEQ ID NO: 152782 - DNA, 25 bp, Canis familiaris
ggtctggacacagtgcccgtgtcgg

SEQ ID NO: 152783 - DNA, 25 bp, Canis familiaris
ggtcggtcacctgttgagtttattg

SEQ ID NO: 152784 - DNA, 25 bp, Canis familiaris
ggtgattccacctcgatggtttaat

SEQ ID NO: 152785 - DNA, 25 bp, Canis familiaris
ggtgtattcagttttggtttccaat

SEQ ID NO: 152786 - DNA, 25 bp, Canis familiaris
ggtgtctgttttcttttatccaagg

SEQ ID NO: 152787 - DNA, 25 bp, Canis familiaris
ggtgttgtgtttttcttgtatgcca

SEQ ID NO: 152788 - DNA, 25 bp, Canis familiaris
ggtgtttatctcttacttttgtcat

SEQ ID NO: 152789 - DNA, 25 bp, Canis familiaris
ggtgcttttctgtcaatttttatgg

SEQ ID NO: 152790 - DNA, 25 bp, Canis familiaris
ggtgttgttatggcgagtttttggt

SEQ ID NO: 152791 - DNA, 25 bp, Canis familiaris
ggtgtttgattctcagttttctgtt

SEQ ID NO: 152792 - DNA, 25 bp, Canis familiaris
ggtgctttgtggtaagtctttttct

SEQ ID NO: 152793 - DNA, 25 bp, Canis familiaris
ggtgcttggtgaaattggttttgtt

SEQ ID NO: 152794 - DNA, 25 bp, Canis familiaris
ggtgtctcaccaatattgtgtattt

SEQ ID NO: 152795 - DNA, 25 bp, Canis familiaris
ggtgtattgcctacattgggtttga

SEQ ID NO: 152796 - DNA, 25 bp, Canis familiaris
ggtgctttgttcaaatcggccttga

SEQ ID NO: 152797 - DNA, 25 bp, Canis familiaris
ggtgctgaaattgttcgcgcacttc

SEQ ID NO: 152798 - DNA, 25 bp, Canis familiaris
ggtgcgaagattaaatgagctgaca

SEQ ID NO: 152799 - DNA, 25 bp, Canis familiaris
ggtgcgaagtctacttgcagcgtac

SEQ ID NO: 152800 - DNA, 25 bp, Canis familiaris
ggtgcggaagttgtgcagcgttgca

SEQ ID NO: 152801 - DNA, 25 bp, Canis familiaris
ggtgctggtgagatcagtgggtaca

SEQ ID NO: 152802 - DNA, 25 bp, Canis familiaris
ggtgatggtgaggccagtgctggtg

SEQ ID NO: 152803 - DNA, 25 bp, Canis familiaris
ggtgatcgtggtgagactggtcccg

SEQ ID NO: 152804 - DNA, 25 bp, Canis familiaris
ggtgtcgtagtggggtggacagcgc

SEQ ID NO: 152805 - DNA, 25 bp, Canis familiaris
ggtgacagtggggatggctataacg

SEQ ID NO: 152806 - DNA, 25 bp, Canis familiaris
ggtgccctggagtggcttaatgggt

SEQ ID NO: 152807 - DNA, 25 bp, Canis familiaris
ggtgaccggatggacgaaatcatgg

SEQ ID NO: 152808 - DNA, 25 bp, Canis familiaris
ggtaccgaggtgagcaattagtccc

SEQ ID NO: 152809 - DNA, 25 bp, Canis familiaris
ggtgacacggggcacagttggcccg

SEQ ID NO: 152810 - DNA, 25 bp, Canis familiaris
ggtcccagcccacacgttggtgggc

SEQ ID NO: 152811 - DNA, 25 bp, Canis familiaris
ggtcccctacatcagagttaactcc

SEQ ID NO: 152812 - DNA, 25 bp, Canis familiaris
ggtgccccaggtgaattaaattact

SEQ ID NO: 152813 - DNA, 25 bp, Canis familiaris
ggtgccctcagtaccttaaaatggt

SEQ ID NO: 152814 - DNA, 25 bp, Canis familiaris
ggtcccattcctgttataactgggc

SEQ ID NO: 152815 - DNA, 25 bp, Canis familiaris
ggtcctattgttgaataaccgtgtc

SEQ ID NO: 152816 - DNA, 25 bp, Canis familiaris
ggtgcctacggtgctaaacactttg

SEQ ID NO: 152817 - DNA, 25 bp, Canis familiaris
ggtccggggtgaataatacctgtgg

SEQ ID NO: 152818 - DNA, 25 bp, Canis familiaris
ggtccgagggtgttgtctgacctgg

SEQ ID NO: 152819 - DNA, 25 bp, Canis familiaris
ggtgcacgaggacttcttctgtacc

SEQ ID NO: 152820 - DNA, 25 bp, Canis familiaris
ggtgactaagaggtctgtttcccca

SEQ ID NO: 152821 - DNA, 25 bp, Canis familiaris
ggtgactaagagatctctgccctcc

SEQ ID NO: 152822 - DNA, 25 bp, Canis familiaris
ggtgttgacgcgatgtgatggtctg

SEQ ID NO: 152823 - DNA, 25 bp, Canis familiaris
ggtgcgtacggtctggatgcactgt

SEQ ID NO: 152824 - DNA, 25 bp, Canis familiaris
ggtgcctatctgtatggggtgcaca

SEQ ID NO: 152825 - DNA, 25 bp, Canis familiaris
ggtcctatcacagggggtatcccgg

SEQ ID NO: 152826 - DNA, 25 bp, Canis familiaris
ggtgacaacacaggtggtttctcga

SEQ ID NO: 152827 - DNA, 25 bp, Canis familiaris
ggtgatcaaggctggtgtagcaatc

SEQ ID NO: 152828 - DNA, 25 bp, Canis familiaris
ggttcaaggagggggcagttcctgc

SEQ ID NO: 152829 - DNA, 25 bp, Canis familiaris
ggtgccaaggggaggcgttgaagct

SEQ ID NO: 152830 - DNA, 25 bp, Canis familiaris
ggtccaaaggagaaagatgttaatt

SEQ ID NO: 152831 - DNA, 25 bp, Canis familiaris
ggtccaagttgacgaagtagtttgt

SEQ ID NO: 152832 - DNA, 25 bp, Canis familiaris
ggtcccagacggctatcatttttgg

SEQ ID NO: 152833 - DNA, 25 bp, Canis familiaris
ggtcccgttgtggtgaactatgtta

SEQ ID NO: 152834 - DNA, 25 bp, Canis familiaris
ggtgccaagtaatgtgaatgctaat

SEQ ID NO: 152835 - DNA, 25 bp, Canis familiaris
ggtgcaaggtcattagggcattttc

SEQ ID NO: 152836 - DNA, 25 bp, Canis familiaris
ggtgaaggtcaagtgaggcagctcc

SEQ ID NO: 152837 - DNA, 25 bp, Canis familiaris
ggtgttcgtcctggagaggcacctg

SEQ ID NO: 152838 - DNA, 25 bp, Canis familiaris
ggtgttcaccaaggagctggaccag

SEQ ID NO: 152839 - DNA, 25 bp, Canis familiaris
ggtgcttacgacaggttcatgacag

SEQ ID NO: 152840 - DNA, 25 bp, Canis familiaris
ggtgcctgacggaagaggttgagga

SEQ ID NO: 152841 - DNA, 25 bp, Canis familiaris
ggtgagcgccggacgaaggaaggat

SEQ ID NO: 152842 - DNA, 25 bp, Canis familiaris
ggtgaccctgttggaaggagtctgt

SEQ ID NO: 152843 - DNA, 25 bp, Canis familiaris
ggtgaggcacccagaatggcatttc

SEQ ID NO: 152844 - DNA, 25 bp, Canis familiaris
ggtgaagccacggtgcacatggata

SEQ ID NO: 152845 - DNA, 25 bp, Canis familiaris
ggtgacatgcactgagccaaggtga

SEQ ID NO: 152846 - DNA, 25 bp, Canis familiaris
ggtgactcctcaagcataatcgctg

SEQ ID NO: 152847 - DNA, 25 bp, Canis familiaris
ggtgatcacctcagtgaacggtggc

SEQ ID NO: 152848 - DNA, 25 bp, Canis familiaris
ggtgaccggccaggagacggtcgcc

SEQ ID NO: 152849 - DNA, 25 bp, Canis familiaris
ggtccacggagcggatgtactgtcc

SEQ ID NO: 152850 - DNA, 25 bp, Canis familiaris
ggtgaatctcgacacatatatcttc

SEQ ID NO: 152851 - DNA, 25 bp, Canis familiaris
ggtgtaggctaatcataatgtcatc

SEQ ID NO: 152852 - DNA, 25 bp, Canis familiaris
ggtgttgccatataaatttgcactg

SEQ ID NO: 152853 - DNA, 25 bp, Canis familiaris
ggtgattccaacaaagtccacactg

SEQ ID NO: 152854 - DNA, 25 bp, Canis familiaris
ggtgatggtgaacaatggctccctg

SEQ ID NO: 152855 - DNA, 25 bp, Canis familiaris
ggtgatggtgagagagacagtcgtc

SEQ ID NO: 152856 - DNA, 25 bp, Canis familiaris
ggtgaggtcagaattgagcaggggg

SEQ ID NO: 152857 - DNA, 25 bp, Canis familiaris
ggtaagtccctcagcaaggggccaa

SEQ ID NO: 152858 - DNA, 25 bp, Canis familiaris
ggtgaagtcctgcaacttcacggcc

SEQ ID NO: 152859 - DNA, 25 bp, Canis familiaris
ggtgtttgtaggaacttctcgacca

SEQ ID NO: 152860 - DNA, 25 bp, Canis familiaris
ggtgtttcatagaaccatctctcaa

SEQ ID NO: 152861 - DNA, 25 bp, Canis familiaris
ggtgtttgataatgccacgcatcta

SEQ ID NO: 152862 - DNA, 25 bp, Canis familiaris
ggtgcttcttaattcacacagcttg

SEQ ID NO: 152863 - DNA, 25 bp, Canis familiaris
ggtgctgcctatgtgaacaccttcc

SEQ ID NO: 152864 - DNA, 25 bp, Canis familiaris
ggtgccctaggaaggagccataccc

SEQ ID NO: 152865 - DNA, 25 bp, Canis familiaris
ggtccgggagaagagcgatccccac

SEQ ID NO: 152866 - DNA, 25 bp, Canis familiaris
ggttggggtcaatacgacggtcatc

SEQ ID NO: 152867 - DNA, 25 bp, Canis familiaris
ggtttgggtccatatgaaggcagta

SEQ ID NO: 152868 - DNA, 25 bp, Canis familiaris
ggtgttggggcagaagcgggcatga

SEQ ID NO: 152869 - DNA, 25 bp, Canis familiaris
ggtgctgtggaagctgaaccaggct

SEQ ID NO: 152870 - DNA, 25 bp, Canis familiaris
ggtgcagggaaactaagctcggtca

SEQ ID NO: 152871 - DNA, 25 bp, Canis familiaris
ggtcgtggaggacttcagtggttcg

SEQ ID NO: 152872 - DNA, 25 bp, Canis familiaris
ggtccatggagtcttcattttctgc

SEQ ID NO: 152873 - DNA, 25 bp, Canis familiaris
ggtcctgggttgttcacagttggcc

SEQ ID NO: 152874 - DNA, 25 bp, Canis familiaris
ggtgccagtggcttattaattccga

SEQ ID NO: 152875 - DNA, 25 bp, Canis familiaris
ggtgcttgttatcataaaatctcaa

SEQ ID NO: 152876 - DNA, 25 bp, Canis familiaris
ggtgatggttgtaaaaagttagtgt

SEQ ID NO: 152877 - DNA, 25 bp, Canis familiaris
ggtgatgttgagaagggaaattttt

SEQ ID NO: 152878 - DNA, 25 bp, Canis familiaris
ggtgcagttgctttggaagacacgt

SEQ ID NO: 152879 - DNA, 25 bp, Canis familiaris
ggtcagtaattttgatccgatccat

SEQ ID NO: 152880 - DNA, 25 bp, Canis familiaris
ggtcgagcgatggatttccgtctct

SEQ ID NO: 152881 - DNA, 25 bp, Canis familiaris
ggtgctgcaggagttgttctccatc

SEQ ID NO: 152882 - DNA, 25 bp, Canis familiaris
ggtgctggtggttgcagtgactatc

SEQ ID NO: 152883 - DNA, 25 bp, Canis familiaris
ggtgcagttggtgcagtacctgttg

SEQ ID NO: 152884 - DNA, 25 bp, Canis familiaris
ggtcctaggatcaagtctcacgttg

SEQ ID NO: 152885 - DNA, 25 bp, Canis familiaris
ggtcctaggatgagttccacatcag

SEQ ID NO: 152886 - DNA, 25 bp, Canis familiaris
ggtcctgggatagcttcctcaagat

SEQ ID NO: 152887 - DNA, 25 bp, Canis familiaris
ggtcctgggattggctttgccatca

SEQ ID NO: 152888 - DNA, 25 bp, Canis familiaris
ggtcctggccaatggtctggacaac

SEQ ID NO: 152889 - DNA, 25 bp, Canis familiaris
ggtcctggagggaaattggcccaca

SEQ ID NO: 152890 - DNA, 25 bp, Canis familiaris
ggtcgctggagtggtattctggtac

SEQ ID NO: 152891 - DNA, 25 bp, Canis familiaris
ggtcctaagtgtttttgcaaatgca

SEQ ID NO: 152892 - DNA, 25 bp, Canis familiaris
ggtgcacacaaacttactccaaaac

SEQ ID NO: 152893 - DNA, 25 bp, Canis familiaris
ggtgcagcacattacttaccagcaa

SEQ ID NO: 152894 - DNA, 25 bp, Canis familiaris
ggtgcacacagcagatctgagccgc

SEQ ID NO: 152895 - DNA, 25 bp, Canis familiaris
ggtcagccagtggctgcagaccctg

SEQ ID NO: 152896 - DNA, 25 bp, Canis familiaris
ggtgcagttgatgagcagaccacac

SEQ ID NO: 152897 - DNA, 25 bp, Canis familiaris
ggtgatgctttgggcacacacaaaa

SEQ ID NO: 152898 - DNA, 25 bp, Canis familiaris
ggtgaggattcgtcaccaaacacag

SEQ ID NO: 152899 - DNA, 25 bp, Canis familiaris
ggtgaggaatcgtcacccaacacag

SEQ ID NO: 152900 - DNA, 25 bp, Canis familiaris
ggtcaggattcgtgtctctaagaga

SEQ ID NO: 152901 - DNA, 25 bp, Canis familiaris
ggtcccacgcagtgttcatatttgc

SEQ ID NO: 152902 - DNA, 25 bp, Canis familiaris
ggtccaaccagtggtatcaaccagt

SEQ ID NO: 152903 - DNA, 25 bp, Canis familiaris
ggtccaacacagccagtcacagacc

SEQ ID NO: 152904 - DNA, 25 bp, Canis familiaris
ggtcaaatccagacaaccgatcgat

SEQ ID NO: 152905 - DNA, 25 bp, Canis familiaris
ggtcgttccagtgcacactatcaat

SEQ ID NO: 152906 - DNA, 25 bp, Canis familiaris
ggtgcggttcgtggaaagatacatc

SEQ ID NO: 152907 - DNA, 25 bp, Canis familiaris
ggtgcggttcgtggaaagatacatc

SEQ ID NO: 152908 - DNA, 25 bp, Canis familiaris
ggtgcaagttactgataccaaccga

SEQ ID NO: 152909 - DNA, 25 bp, Canis familiaris
ggtgaggatttctagttcccagctc

SEQ ID NO: 152910 - DNA, 25 bp, Canis familiaris
ggtgctgggtggtagattacctcct

SEQ ID NO: 152911 - DNA, 25 bp, Canis familiaris
ggtgctggggaggagcaagcaacta

SEQ ID NO: 152912 - DNA, 25 bp, Canis familiaris
ggtctgcgctgagggtgtatgcaga

SEQ ID NO: 152913 - DNA, 25 bp, Canis familiaris
ggtcctgtactgccagattggaaac

SEQ ID NO: 152914 - DNA, 25 bp, Canis familiaris
ggtcccagactggctcgtgggaagc

SEQ ID NO: 152915 - DNA, 25 bp, Canis familiaris
ggtcctgcatgatgcaccaggggtc

SEQ ID NO: 152916 - DNA, 25 bp, Canis familiaris
ggtgctctgcatcgagaacagcgtc

SEQ ID NO: 152917 - DNA, 25 bp, Canis familiaris
ggtgctgctcatggagtacgtgggc

SEQ ID NO: 152918 - DNA, 25 bp, Canis familiaris
ggtgctgctcatggagtacgtgggc

SEQ ID NO: 152919 - DNA, 25 bp, Canis familiaris
ggtgctgctcatggagtacgtgggc

SEQ ID NO: 152920 - DNA, 25 bp, Canis familiaris
ggtgcagtcatggcatcttgggagc

SEQ ID NO: 152921 - DNA, 25 bp, Canis familiaris
ggtgcagatctgtcttttgctaccc

SEQ ID NO: 152922 - DNA, 25 bp, Canis familiaris
ggtgcagcacgcttagcattgatga

SEQ ID NO: 152923 - DNA, 25 bp, Canis familiaris
ggtgacctgcacagcatggtgagcg

SEQ ID NO: 152924 - DNA, 25 bp, Canis familiaris
ggtgacctgcacaaaagcgagacac

SEQ ID NO: 152925 - DNA, 25 bp, Canis familiaris
ggtcccgatgcttaagcgcatgtga

SEQ ID NO: 152926 - DNA, 25 bp, Canis familiaris
ggtcctcttctataacatgattatc

SEQ ID NO: 152927 - DNA, 25 bp, Canis familiaris
ggtcccttccagataccattaaaga

SEQ ID NO: 152928 - DNA, 25 bp, Canis familiaris
ggtcccttccagataccattaaaga

SEQ ID NO: 152929 - DNA, 25 bp, Canis familiaris
ggtcccttccagataccattaaaga

SEQ ID NO: 152930 - DNA, 25 bp, Canis familiaris
ggtcccttccagataccattaaaga

SEQ ID NO: 152931 - DNA, 25 bp, Canis familiaris
ggtcccttggacatgagtaataaaa

SEQ ID NO: 152932 - DNA, 25 bp, Canis familiaris
ggttccacgtagactagaaatactt

SEQ ID NO: 152933 - DNA, 25 bp, Canis familiaris
ggttccaaatggctaaagttcccag

SEQ ID NO: 152934 - DNA, 25 bp, Canis familiaris
ggtccccaatggctaagcagttccc

SEQ ID NO: 152935 - DNA, 25 bp, Canis familiaris
ggatgacccgactggaaacttccga

SEQ ID NO: 152936 - DNA, 25 bp, Canis familiaris
ggtgccccagaataaaacttctctt

SEQ ID NO: 152937 - DNA, 25 bp, Canis familiaris
ggtataccagttgagaacctgttcc

SEQ ID NO: 152938 - DNA, 25 bp, Canis familiaris
ggacaaccaggtgaacacgcgtttt

SEQ ID NO: 152939 - DNA, 25 bp, Canis familiaris
tgtacaacttttgggatccgggttg

SEQ ID NO: 152940 - DNA, 25 bp, Canis familiaris
tggaccctttttgttcgggactgca

SEQ ID NO: 152941 - DNA, 25 bp, Canis familiaris
ggtcctctttttgcccaagagggct

SEQ ID NO: 152942 - DNA, 25 bp, Canis familiaris
ggtcacttcgtattttccaagagtc

SEQ ID NO: 152943 - DNA, 25 bp, Canis familiaris
ggtccgtaggtttgtacactgttct

SEQ ID NO: 152944 - DNA, 25 bp, Canis familiaris
ggtgactccaggaggtgtcttcttc

SEQ ID NO: 152945 - DNA, 25 bp, Canis familiaris
ggtgacgtatgggatgggttctctt

SEQ ID NO: 152946 - DNA, 25 bp, Canis familiaris
ggtgcatcctggctatgggttcctc

SEQ ID NO: 152947 - DNA, 25 bp, Canis familiaris
ggtgccctgaagacttaatttctca

SEQ ID NO: 152948 - DNA, 25 bp, Canis familiaris
ggtgctccctagatgggattttcct

SEQ ID NO: 152949 - DNA, 25 bp, Canis familiaris
ggtgcacccggaggtggagttaccg

SEQ ID NO: 152950 - DNA, 25 bp, Canis familiaris
ggtccccggtgatgtgggtgactcg

SEQ ID NO: 152951 - DNA, 25 bp, Canis familiaris
ggtccaacggctggcagtgggaatc

SEQ ID NO: 152952 - DNA, 25 bp, Canis familiaris
ggtgctggacggcgtgggagaagct

SEQ ID NO: 152953 - DNA, 25 bp, Canis familiaris
ggtgctgggggtgtggagaggtgtc

SEQ ID NO: 152954 - DNA, 25 bp, Canis familiaris
ggtgttggtggatatggtgacagtg

SEQ ID NO: 152955 - DNA, 25 bp, Canis familiaris
ggtaccgggttaagtcagcagagga

SEQ ID NO: 152956 - DNA, 25 bp, Canis familiaris
ggtgaggggagggggtctagaggag

SEQ ID NO: 152957 - DNA, 25 bp, Canis familiaris
ggtgttgtgggagtggctgttgaag

SEQ ID NO: 152958 - DNA, 25 bp, Canis familiaris
ggtgctgttgtgaaggcgcgggata

SEQ ID NO: 152959 - DNA, 25 bp, Canis familiaris
ggtccttggctaggtgcagcaggat

SEQ ID NO: 152960 - DNA, 25 bp, Canis familiaris
ggtctttggcaaggtcaaggagggc

SEQ ID NO: 152961 - DNA, 25 bp, Canis familiaris
ggtgcttgtggaaggtaaggctccc

SEQ ID NO: 152962 - DNA, 25 bp, Canis familiaris
ggtcctgctttcagtgatgggggcc

SEQ ID NO: 152963 - DNA, 25 bp, Canis familiaris
ggtccgcttcgcacagaagttggca

SEQ ID NO: 152964 - DNA, 25 bp, Canis familiaris
ggtgcggctcatggagtaacgtggg

SEQ ID NO: 152965 - DNA, 25 bp, Canis familiaris
ggtcagggtggagttcacagtggga

SEQ ID NO: 152966 - DNA, 25 bp, Canis familiaris
ggtcctggggaccccaagagcgatg

SEQ ID NO: 152967 - DNA, 25 bp, Canis familiaris
ggtccggaggaccagagacaatctt

SEQ ID NO: 152968 - DNA, 25 bp, Canis familiaris
ggtcgcgagattaactattcaagct

SEQ ID NO: 152969 - DNA, 25 bp, Canis familiaris
ggtgacagagttacactttcccgtt

SEQ ID NO: 152970 - DNA, 25 bp, Canis familiaris
ggtgacacagtgaacactgcttccc

SEQ ID NO: 152971 - DNA, 25 bp, Canis familiaris
ggtgaagcatgtgccttcagctcag

SEQ ID NO: 152972 - DNA, 25 bp, Canis familiaris
ggtgaagctgaggctcatggacccc

SEQ ID NO: 152973 - DNA, 25 bp, Canis familiaris
tggtcatcaccatcatctgcaacca

SEQ ID NO: 152974 - DNA, 25 bp, Canis familiaris
ggtgagcaatcacttgggagccaag

SEQ ID NO: 152975 - DNA, 25 bp, Canis familiaris
ggtgacgtagctaggagacccagat

SEQ ID NO: 152976 - DNA, 25 bp, Canis familiaris
ggtgcgcagtgacgtgaagtccggt

SEQ ID NO: 152977 - DNA, 25 bp, Canis familiaris
ggtcacggaccgcgtcgcggtccac

SEQ ID NO: 152978 - DNA, 25 bp, Canis familiaris
ggtacgagagctcggctctcgctga

SEQ ID NO: 152979 - DNA, 25 bp, Canis familiaris
ggtgaccaggcactgtctatagcag

SEQ ID NO: 152980 - DNA, 25 bp, Canis familiaris
ggtgaccagagcttttgctggtggt

SEQ ID NO: 152981 - DNA, 25 bp, Canis familiaris
ggtgaaaggctattggcaggtttgg

SEQ ID NO: 152982 - DNA, 25 bp, Canis familiaris
ggtagaaagaagtgagatgttgtga

SEQ ID NO: 152983 - DNA, 25 bp, Canis familiaris
ggtgctataaaatctggagttgtgt

SEQ ID NO: 152984 - DNA, 25 bp, Canis familiaris
ggtgctaaacactttggtgcggtgc

SEQ ID NO: 152985 - DNA, 25 bp, Canis familiaris
ggtgccagggagtttgttgggtcca

SEQ ID NO: 152986 - DNA, 25 bp, Canis familiaris
ggtgccggtgtacggttgggtgaat

SEQ ID NO: 152987 - DNA, 25 bp, Canis familiaris
ggttggtatttggtgttggggagat

SEQ ID NO: 152988 - DNA, 25 bp, Canis familiaris
ggttggcctttgctaagatggggtt

SEQ ID NO: 152989 - DNA, 25 bp, Canis familiaris
ggttgcccttcgagagttgttcgaa

SEQ ID NO: 152990 - DNA, 25 bp, Canis familiaris
ggtgcgctactttgaagggtgtttg

SEQ ID NO: 152991 - DNA, 25 bp, Canis familiaris
ggctagtacggtacgggctgctttc

SEQ ID NO: 152992 - DNA, 25 bp, Canis familiaris
ggtagggcggatacgatcgctcatg

SEQ ID NO: 152993 - DNA, 25 bp, Canis familiaris
ggtctggtgggagctgtggctcagt

SEQ ID NO: 152994 - DNA, 25 bp, Canis familiaris
ggtcggtctcaaactgagagcccta

SEQ ID NO: 152995 - DNA, 25 bp, Canis familiaris
tggtcggaccaggtccagacccaac

SEQ ID NO: 152996 - DNA, 25 bp, Canis familiaris
ggtcctgattgggtccaacttaatt

SEQ ID NO: 152997 - DNA, 25 bp, Canis familiaris
ggtcctgcagtcggtctgcagcatc

SEQ ID NO: 152998 - DNA, 25 bp, Canis familiaris
ggtgctgctgaggctagattgactt

SEQ ID NO: 152999 - DNA, 25 bp, Canis familiaris
ggtgatgtgggccactgtgaactgc

SEQ ID NO: 153000 - DNA, 25 bp, Canis familiaris
ggtctgtggaggagtgccagctgga

SEQ ID NO: 153001 - DNA, 25 bp, Canis familiaris
ggtgccaggaggagcatgggcgtga

SEQ ID NO: 153002 - DNA, 25 bp, Canis familiaris
ggtgctcaggatcatggtggggtgc

SEQ ID NO: 153003 - DNA, 25 bp, Canis familiaris
ggtgccacgcatcttcatgaagggc

SEQ ID NO: 153004 - DNA, 25 bp, Canis familiaris
ggtgccgtgatggtctgtgaaggcc

SEQ ID NO: 153005 - DNA, 25 bp, Canis familiaris
ggtgccaggtgttgatgtcacggcc

SEQ ID NO: 153006 - DNA, 25 bp, Canis familiaris
ggtgctgaggtgtgtgacacacaga

SEQ ID NO: 153007 - DNA, 25 bp, Canis familiaris
ggtgctgggtaaaacacatcacagg

SEQ ID NO: 153008 - DNA, 25 bp, Canis familiaris
ggcttgttgtacacccaactggagc

SEQ ID NO: 153009 - DNA, 25 bp, Canis familiaris
ggctcgttctttgaccacagaggag

SEQ ID NO: 153010 - DNA, 25 bp, Canis familiaris
ggtcgtgtcctcggagacaaagacg

SEQ ID NO: 153011 - DNA, 25 bp, Canis familiaris
ggtgctggccctaggagagcagtaa

SEQ ID NO: 153012 - DNA, 25 bp, Canis familiaris
ggtagagttgctaggaagttacaca

SEQ ID NO: 153013 - DNA, 25 bp, Canis familiaris
ggtcagagctagggagagaatccat

SEQ ID NO: 153014 - DNA, 25 bp, Canis familiaris
ggtgaggtcagagagaagtccatgt

SEQ ID NO: 153015 - DNA, 25 bp, Canis familiaris
ggtgcaggaccagtcaaagtcatgc

SEQ ID NO: 153016 - DNA, 25 bp, Canis familiaris
ggtctggccacagtccagaactcta

SEQ ID NO: 153017 - DNA, 25 bp, Canis familiaris
ggtgcttcctcagttcgatttaaaa

SEQ ID NO: 153018 - DNA, 25 bp, Canis familiaris
ggtcactatcaaattcctttaaata

SEQ ID NO: 153019 - DNA, 25 bp, Canis familiaris
ggtgcctataggcttattttgaata

SEQ ID NO: 153020 - DNA, 25 bp, Canis familiaris
ggtctttaccgttcattgcttgaaa

SEQ ID NO: 153021 - DNA, 25 bp, Canis familiaris
ggtctttaccttcacaattgtctca

SEQ ID NO: 153022 - DNA, 25 bp, Canis familiaris
ggttttacagcttgccctaagtaca

SEQ ID NO: 153023 - DNA, 25 bp, Canis familiaris
ggtcattaagcacttccacatggag

SEQ ID NO: 153024 - DNA, 25 bp, Canis familiaris
ggtctcgaagcgatgcatgcaagaa

SEQ ID NO: 153025 - DNA, 25 bp, Canis familiaris
ggtgcccaagagggtgcaggtcatc

SEQ ID NO: 153026 - DNA, 25 bp, Canis familiaris
ggtgcctaaatgtgtggtgctcctc

SEQ ID NO: 153027 - DNA, 25 bp, Canis familiaris
ggtcttaggcagtgatgggccctcc

SEQ ID NO: 153028 - DNA, 25 bp, Canis familiaris
ggtcccaggaggcatggggtcctgt

SEQ ID NO: 153029 - DNA, 25 bp, Canis familiaris
ggtctacggatacatggctcgttta

SEQ ID NO: 153030 - DNA, 25 bp, Canis familiaris
ggtctcacaggatcttagtctttgc

SEQ ID NO: 153031 - DNA, 25 bp, Canis familiaris
ggtcccttcaactggatcttgtgac

SEQ ID NO: 153032 - DNA, 25 bp, Canis familiaris
ggtgcagtcttcaactcgaatcaag

SEQ ID NO: 153033 - DNA, 25 bp, Canis familiaris
ggtgagtttctgatcttatccatgg

SEQ ID NO: 153034 - DNA, 25 bp, Canis familiaris
ggtgaatttttggccttcatctggc

SEQ ID NO: 153035 - DNA, 25 bp, Canis familiaris
ggtgaatcatttgggacttctgaga

SEQ ID NO: 153036 - DNA, 25 bp, Canis familiaris
ggtgatgtatgttggtagcttgtgt

SEQ ID NO: 153037 - DNA, 25 bp, Canis familiaris
ggtgcttcgtggcaatctgagtgtt

SEQ ID NO: 153038 - DNA, 25 bp, Canis familiaris
ggtgctattattaggcttgcttgtt

SEQ ID NO: 153039 - DNA, 25 bp, Canis familiaris
ggtcatgaaattggcgcttctgctg

SEQ ID NO: 153040 - DNA, 25 bp, Canis familiaris
ggtcatcaaatggtcctaccttggg

SEQ ID NO: 153041 - DNA, 25 bp, Canis familiaris
ggtcgaagactacctatacctgggt

SEQ ID NO: 153042 - DNA, 25 bp, Canis familiaris
ggtgcggagccttgttaaactggcg

SEQ ID NO: 153043 - DNA, 25 bp, Canis familiaris
ggtgctgtgccaattgactacaact

SEQ ID NO: 153044 - DNA, 25 bp, Canis familiaris
ggtgcttgacacatagtagatagtc

SEQ ID NO: 153045 - DNA, 25 bp, Canis familiaris
ggtgcttcaccaatattcgatgaac

SEQ ID NO: 153046 - DNA, 25 bp, Canis familiaris
ggtgcttagaaattgtcactgcaac

SEQ ID NO: 153047 - DNA, 25 bp, Canis familiaris
ggtgctaatgtactttcactttaaa

SEQ ID NO: 153048 - DNA, 25 bp, Canis familiaris
ggtgctaatgtactgttcacggtag

SEQ ID NO: 153049 - DNA, 25 bp, Canis familiaris
ggtgaatgtgtattcctctggggag

SEQ ID NO: 153050 - DNA, 25 bp, Canis familiaris
ggtgacatgtttacagctgggtgtg

SEQ ID NO: 153051 - DNA, 25 bp, Canis familiaris
ggtgagaaatgtccgtgtgggtgga

SEQ ID NO: 153052 - DNA, 25 bp, Canis familiaris
ggtgaaactgtggtgtgtgggagtg

SEQ ID NO: 153053 - DNA, 25 bp, Canis familiaris
ggtgcggcctgggaggggagagggc

SEQ ID NO: 153054 - DNA, 25 bp, Canis familiaris
ggtgagcgtctggaagtgctgctga

SEQ ID NO: 153055 - DNA, 25 bp, Canis familiaris
ggtgcgcctgctggaagatgccgat

SEQ ID NO: 153056 - DNA, 25 bp, Canis familiaris
ggtgagcactgtgaaggccgtggag

SEQ ID NO: 153057 - DNA, 25 bp, Canis familiaris
ggtgacactataggaaccaggtgtg

SEQ ID NO: 153058 - DNA, 25 bp, Canis familiaris
ggtgaatgttctggtaaaaggtgta

SEQ ID NO: 153059 - DNA, 25 bp, Canis familiaris
ggtgaatgttttttgaagaggagca

SEQ ID NO: 153060 - DNA, 25 bp, Canis familiaris
ggtgaaggttggtttgatgatgtaa

SEQ ID NO: 153061 - DNA, 25 bp, Canis familiaris
ggtgaagtttgttctctatcataga

SEQ ID NO: 153062 - DNA, 25 bp, Canis familiaris
ggtgagtttgttttctgctctgaat

SEQ ID NO: 153063 - DNA, 25 bp, Canis familiaris
ggtgagtttttgtagtttgtgattt

SEQ ID NO: 153064 - DNA, 25 bp, Canis familiaris
ggtactatttgggacctggtatgat

SEQ ID NO: 153065 - DNA, 25 bp, Canis familiaris
ggtcctgattctgggattctgggat

SEQ ID NO: 153066 - DNA, 25 bp, Canis familiaris
ggtcgtgattctgggatctgtgatc

SEQ ID NO: 153067 - DNA, 25 bp, Canis familiaris
ggtgcttgcaacaggatctggccag

SEQ ID NO: 153068 - DNA, 25 bp, Canis familiaris
ggtgcctcagcagttgagatctgcc

SEQ ID NO: 153069 - DNA, 25 bp, Canis familiaris
ggtgctcatggagttgagtgcctcc

SEQ ID NO: 153070 - DNA, 25 bp, Canis familiaris
ggtgctgtggatttgagccctatca

SEQ ID NO: 153071 - DNA, 25 bp, Canis familiaris
ggtgctcaggattaacagcctgttg

SEQ ID NO: 153072 - DNA, 25 bp, Canis familiaris
ggtctgcaagatgaaagcctggtaa

SEQ ID NO: 153073 - DNA, 25 bp, Canis familiaris
ggtcttgatgcagaagagcctggaa

SEQ ID NO: 153074 - DNA, 25 bp, Canis familiaris
ggtgctatagcagtgacaccctggc

SEQ ID NO: 153075 - DNA, 25 bp, Canis familiaris
ggtgcttatcagcaccatcatcggc

SEQ ID NO: 153076 - DNA, 25 bp, Canis familiaris
ggtgccattgggacatatcatcatc

SEQ ID NO: 153077 - DNA, 25 bp, Canis familiaris
ggtgccatgcgggagcagtacatgc

SEQ ID NO: 153078 - DNA, 25 bp, Canis familiaris
ggtgcttgctggaatcaggcagagc

SEQ ID NO: 153079 - DNA, 25 bp, Canis familiaris
ggtgcttggtcttctggcatggacc

SEQ ID NO: 153080 - DNA, 25 bp, Canis familiaris
ggtgcttgtcttttgtgtggatccc

SEQ ID NO: 153081 - DNA, 25 bp, Canis familiaris
ggtgctctatttttttggatgtaca

SEQ ID NO: 153082 - DNA, 25 bp, Canis familiaris
ggtgctccttatttattagagctgt

SEQ ID NO: 153083 - DNA, 25 bp, Canis familiaris
ggtgacgcagaatctactctgagct

SEQ ID NO: 153084 - DNA, 25 bp, Canis familiaris
ggtgcacgcacattactaccagcac

SEQ ID NO: 153085 - DNA, 25 bp, Canis familiaris
ggtccgcattgaactaccatactgg

SEQ ID NO: 153086 - DNA, 25 bp, Canis familiaris
ggtctactcaggctactatagtgga

SEQ ID NO: 153087 - DNA, 25 bp, Canis familiaris
ggtctactagggaacgagcatttac

SEQ ID NO: 153088 - DNA, 25 bp, Canis familiaris
ggtacctgagggcacggagatgttc

SEQ ID NO: 153089 - DNA, 25 bp, Canis familiaris
ggtccctgagggtcagggggcattt

SEQ ID NO: 153090 - DNA, 25 bp, Canis familiaris
ggtgccctgggataggccaggtttc

SEQ ID NO: 153091 - DNA, 25 bp, Canis familiaris
ggtgaatctggccagtcatggccaa

SEQ ID NO: 153092 - DNA, 25 bp, Canis familiaris
ggtgaaaagggtagtgctcaagcac

SEQ ID NO: 153093 - DNA, 25 bp, Canis familiaris
ggtgaaaggtgcatgggtactcatc

SEQ ID NO: 153094 - DNA, 25 bp, Canis familiaris
ggtgcaaagtgtaattttcaacagg

SEQ ID NO: 153095 - DNA, 25 bp, Canis familiaris
ggtaatagtttaagtgccaagtgta

SEQ ID NO: 153096 - DNA, 25 bp, Canis familiaris
ggtagtaggtttgtggcttgttgac

SEQ ID NO: 153097 - DNA, 25 bp, Canis familiaris
ggtctggaggctttaggtctgggta

SEQ ID NO: 153098 - DNA, 25 bp, Canis familiaris
tgggggaggttttatgtaggcttat

SEQ ID NO: 153099 - DNA, 25 bp, Canis familiaris
ggtcggattttgacaattgttcttt

SEQ ID NO: 153100 - DNA, 25 bp, Canis familiaris
ggtgctaaatgtggtcagtttcctt

SEQ ID NO: 153101 - DNA, 25 bp, Canis familiaris
ggtccacaatgctgtgcgtttggcc

SEQ ID NO: 153102 - DNA, 25 bp, Canis familiaris
ggtccacaagcaaacggtgtctgag

SEQ ID NO: 153103 - DNA, 25 bp, Canis familiaris
ggtcccaacagaactttttgagcac

SEQ ID NO: 153104 - DNA, 25 bp, Canis familiaris
ggtccaaaacattcttatcactaca

SEQ ID NO: 153105 - DNA, 25 bp, Canis familiaris
ggtaaaagccagacttatcacataa

SEQ ID NO: 153106 - DNA, 25 bp, Canis familiaris
ggtgaagacccattgctatcataca

SEQ ID NO: 153107 - DNA, 25 bp, Canis familiaris
ggtgcaagtagccagtgcttgctac

SEQ ID NO: 153108 - DNA, 25 bp, Canis familiaris
ggtctgaggatcgagtcttgcatca

SEQ ID NO: 153109 - DNA, 25 bp, Canis familiaris
ggtgctggagccggtatcatagcta

SEQ ID NO: 153110 - DNA, 25 bp, Canis familiaris
ggtgctggagctggcaggtaacgct

SEQ ID NO: 153111 - DNA, 25 bp, Canis familiaris
ggtgcatgtggcttcggagcaaacc

SEQ ID NO: 153112 - DNA, 25 bp, Canis familiaris
ggtgcagaagacctggatctagacc

SEQ ID NO: 153113 - DNA, 25 bp, Canis familiaris
ggtgctgacatgactctgtgttaga

SEQ ID NO: 153114 - DNA, 25 bp, Canis familiaris
ggtgcatagatgctctttctgagac

SEQ ID NO: 153115 - DNA, 25 bp, Canis familiaris
ggtgaactgttttgtcagaacttaa

SEQ ID NO: 153116 - DNA, 25 bp, Canis familiaris
ggtgcaacattgtctaggccaactt

SEQ ID NO: 153117 - DNA, 25 bp, Canis familiaris
ggtgcataccagtcttaccaattat

SEQ ID NO: 153118 - DNA, 25 bp, Canis familiaris
ggtgcatcgccagcatttcgatcct

SEQ ID NO: 153119 - DNA, 25 bp, Canis familiaris
ggtgacatgcctgagatactgatga

SEQ ID NO: 153120 - DNA, 25 bp, Canis familiaris
ggtgccatgcttgcagagtcaggga

SEQ ID NO: 153121 - DNA, 25 bp, Canis familiaris
ggtgccatgtatcaaagcaggccac

SEQ ID NO: 153122 - DNA, 25 bp, Canis familiaris
ggtgctcagtagtagaactgtactt

SEQ ID NO: 153123 - DNA, 25 bp, Canis familiaris
ggtgcacagtaaggacacaaccagt

SEQ ID NO: 153124 - DNA, 25 bp, Canis familiaris
ggtgcaagggggacacacactgccc

SEQ ID NO: 153125 - DNA, 25 bp, Canis familiaris
ggtgaagactggcaccatcaccacc

SEQ ID NO: 153126 - DNA, 25 bp, Canis familiaris
ggtgaagtcggtggagatgcaccac

SEQ ID NO: 153127 - DNA, 25 bp, Canis familiaris
ggtcaagctgctgctgcaggtgcag

SEQ ID NO: 153128 - DNA, 25 bp, Canis familiaris
ggtgcacagcgcactgagggggcac

SEQ ID NO: 153129 - DNA, 25 bp, Canis familiaris
ggtgacgagcgagaggagcaggagc

SEQ ID NO: 153130 - DNA, 25 bp, Canis familiaris
ggtgaagacccattggagtctggca

SEQ ID NO: 153131 - DNA, 25 bp, Canis familiaris
ggtactagcccctatattgctgtga

SEQ ID NO: 153132 - DNA, 25 bp, Canis familiaris
ggtcctttggactatgtgtctgtaa

SEQ ID NO: 153133 - DNA, 25 bp, Canis familiaris
ggtgactattccgaagtgttgtgaa

SEQ ID NO: 153134 - DNA, 25 bp, Canis familiaris
ggtgaattaccttagtttgcagata

SEQ ID NO: 153135 - DNA, 25 bp, Canis familiaris
ggtgacaaaccccaatgtacagaaa

SEQ ID NO: 153136 - DNA, 25 bp, Canis familiaris
ggtgcgcgagaaccgcaagtactac

SEQ ID NO: 153137 - DNA, 25 bp, Canis familiaris
ggtgctgggtaggccaggtttcagc

SEQ ID NO: 153138 - DNA, 25 bp, Canis familiaris
ggtgctgggtaggccaggtttcagc

SEQ ID NO: 153139 - DNA, 25 bp, Canis familiaris
ggtgctgggtaggccaggtttcagc

SEQ ID NO: 153140 - DNA, 25 bp, Canis familiaris
ggtgctgggtaggccaggtttcagc

SEQ ID NO: 153141 - DNA, 25 bp, Canis familiaris
ggtgctgaggttgtcagccactgtc

SEQ ID NO: 153142 - DNA, 25 bp, Canis familiaris
ggtgctggtattggggcacctgctc

SEQ ID NO: 153143 - DNA, 25 bp, Canis familiaris
ggtgctatttatatgtgcccatcac

SEQ ID NO: 153144 - DNA, 25 bp, Canis familiaris
ggtgctattgctaactgtggaataa

SEQ ID NO: 153145 - DNA, 25 bp, Canis familiaris
ggtgccagacaaagcttggaaagat

SEQ ID NO: 153146 - DNA, 25 bp, Canis familiaris
ggtcgaggcagaggccggaaactta

SEQ ID NO: 153147 - DNA, 25 bp, Canis familiaris
ggtccaactacaggggaacactgtc

SEQ ID NO: 153148 - DNA, 25 bp, Canis familiaris
ggtccaaaattcctgtaatactgtc

SEQ ID NO: 153149 - DNA, 25 bp, Canis familiaris
ggtcccattttccttggataatgtg

SEQ ID NO: 153150 - DNA, 25 bp, Canis familiaris
ggtcccttgctaagccaggtagaag

SEQ ID NO: 153151 - DNA, 25 bp, Canis familiaris
ggtcgcctctggcagcgaaaagacc

SEQ ID NO: 153152 - DNA, 25 bp, Canis familiaris
ggtgcgtcctggtggacactggacg

SEQ ID NO: 153153 - DNA, 25 bp, Canis familiaris
ggtcttcctgggagagatgggcctg

SEQ ID NO: 153154 - DNA, 25 bp, Canis familiaris
ggtcctccaggagagaagggcggcc

SEQ ID NO: 153155 - DNA, 25 bp, Canis familiaris
ggagttcttggagagcgggtgggcg

SEQ ID NO: 153156 - DNA, 25 bp, Canis familiaris
ggctttttggagttgccgggtggct

SEQ ID NO: 153157 - DNA, 25 bp, Canis familiaris
ggtcgttgtcgtttggtagtgtact

SEQ ID NO: 153158 - DNA, 25 bp, Canis familiaris
ggtcttttctctgttgatttgtaat

SEQ ID NO: 153159 - DNA, 25 bp, Canis familiaris
ggtccttctcttgatgtttatttac

SEQ ID NO: 153160 - DNA, 25 bp, Canis familiaris
ggtgcactagctgtccatgtgtata

SEQ ID NO: 153161 - DNA, 25 bp, Canis familiaris
ggtgctcgagctgtgagaggtctaa

SEQ ID NO: 153162 - DNA, 25 bp, Canis familiaris
ggtccgtgatcctgaggtctaggca

SEQ ID NO: 153163 - DNA, 25 bp, Canis familiaris
ggtccttgaccattggaactcaact

SEQ ID NO: 153164 - DNA, 25 bp, Canis familiaris
ggtcatttgacacaaacccacaggc

SEQ ID NO: 153165 - DNA, 25 bp, Canis familiaris
ggtctctggacacaaaccatagcgg

SEQ ID NO: 153166 - DNA, 25 bp, Canis familiaris
ggtctggtacatttcaatttcagcc

SEQ ID NO: 153167 - DNA, 25 bp, Canis familiaris
ggtccgtcaaacagtttcacaactg

SEQ ID NO: 153168 - DNA, 25 bp, Canis familiaris
ggtcggtcttacaaggagctcaaac

SEQ ID NO: 153169 - DNA, 25 bp, Canis familiaris
ggtgcggtatctgatgagagacatc

SEQ ID NO: 153170 - DNA, 25 bp, Canis familiaris
ggtgcgtactcatatgcaggacctg

SEQ ID NO: 153171 - DNA, 25 bp, Canis familiaris
ggtgctgaacctgtgaaacgctgtg

SEQ ID NO: 153172 - DNA, 25 bp, Canis familiaris
ggtctcatatccacgaaactttgct

SEQ ID NO: 153173 - DNA, 25 bp, Canis familiaris
ggtgctttccagaataaaggttgtg

SEQ ID NO: 153174 - DNA, 25 bp, Canis familiaris
ggtgctttccagaataaaggttgtg

SEQ ID NO: 153175 - DNA, 25 bp, Canis familiaris
ggtgcatttcatttataaggtttta

SEQ ID NO: 153176 - DNA, 25 bp, Canis familiaris
ggtgctctgcttttcagaaggctct

SEQ ID NO: 153177 - DNA, 25 bp, Canis familiaris
ggtccacttgttggcatagactctt

SEQ ID NO: 153178 - DNA, 25 bp, Canis familiaris
ggtgccttctcggctcttgacactt

SEQ ID NO: 153179 - DNA, 25 bp, Canis familiaris
ggtcctactcatgctcaatacagtg

SEQ ID NO: 153180 - DNA, 25 bp, Canis familiaris
ggtcccccattgcacagatgaggaa

SEQ ID NO: 153181 - DNA, 25 bp, Canis familiaris
ggtccatgcccatccggaaggatga

SEQ ID NO: 153182 - DNA, 25 bp, Canis familiaris
ggttcatgctcggacggaatcggac

SEQ ID NO: 153183 - DNA, 25 bp, Canis familiaris
ggtttgccaacaggatcttcggccc

SEQ ID NO: 153184 - DNA, 25 bp, Canis familiaris
ggtcgtccaacagatcgacgcggac

SEQ ID NO: 153185 - DNA, 25 bp, Canis familiaris
ggtctgtccggagggtgtccggacg

SEQ ID NO: 153186 - DNA, 25 bp, Canis familiaris
ggttctcccgcggaggtggggagcg

SEQ ID NO: 153187 - DNA, 25 bp, Canis familiaris
ggtccccaccaactgagctggggtc

SEQ ID NO: 153188 - DNA, 25 bp, Canis familiaris
ggtccactacctactggtggtttct

SEQ ID NO: 153189 - DNA, 25 bp, Canis familiaris
ggtcaaccctcaaagagtcgtcttt

SEQ ID NO: 153190 - DNA, 25 bp, Canis familiaris
ggtagactactgctaagtctgtcag

SEQ ID NO: 153191 - DNA, 25 bp, Canis familiaris
ggtcagcactttccataaatattct

SEQ ID NO: 153192 - DNA, 25 bp, Canis familiaris
ggtctcctgcctccaaaataaaaag

SEQ ID NO: 153193 - DNA, 25 bp, Canis familiaris
ggtgcccagtctccagaatatgaaa

SEQ ID NO: 153194 - DNA, 25 bp, Canis familiaris
ggtgcccaacacgatgaatatcaag

SEQ ID NO: 153195 - DNA, 25 bp, Canis familiaris
ggtgcagctcatccactataatcat

SEQ ID NO: 153196 - DNA, 25 bp, Canis familiaris
ggtgcacatacgactacacacacac

SEQ ID NO: 153197 - DNA, 25 bp, Canis familiaris
ggtgcactgatcgctgccaatgcac

SEQ ID NO: 153198 - DNA, 25 bp, Canis familiaris
ggtgctcagcctgctgaagatgcca

SEQ ID NO: 153199 - DNA, 25 bp, Canis familiaris
ggtctcacctgccatgaagactcaa

SEQ ID NO: 153200 - DNA, 25 bp, Canis familiaris
ggtcccgtgttgaccactaactagc

SEQ ID NO: 153201 - DNA, 25 bp, Canis familiaris
ggtcccgagttgacacaatgggtgg

SEQ ID NO: 153202 - DNA, 25 bp, Canis familiaris
ggtccccagtgtgcaagatctgtgt

SEQ ID NO: 153203 - DNA, 25 bp, Canis familiaris
ggtccaccgaatccggatctgtgag

SEQ ID NO: 153204 - DNA, 25 bp, Canis familiaris
ggtccctgggtacgtgattgaagtc

SEQ ID NO: 153205 - DNA, 25 bp, Canis familiaris
ggtcacttgcatgtagtaatctagg

SEQ ID NO: 153206 - DNA, 25 bp, Canis familiaris
ggtcactcagtctggggacgggacc

SEQ ID NO: 153207 - DNA, 25 bp, Canis familiaris
ggtcctgcaggagggtagacggtgc

SEQ ID NO: 153208 - DNA, 25 bp, Canis familiaris
ggtgctctgcagcagcaggtgtagc

SEQ ID NO: 153209 - DNA, 25 bp, Canis familiaris
ggtcatcatgcaggccaggttgagc

SEQ ID NO: 153210 - DNA, 25 bp, Canis familiaris
ggtgcatatacagagctgagtgtgt

SEQ ID NO: 153211 - DNA, 25 bp, Canis familiaris
ggtgcatcattatcacttgtccata

SEQ ID NO: 153212 - DNA, 25 bp, Canis familiaris
ggtgctatgtataactgttcctcag

SEQ ID NO: 153213 - DNA, 25 bp, Canis familiaris
ggtgctcaataaacttgtgcctccc

SEQ ID NO: 153214 - DNA, 25 bp, Canis familiaris
ggtgctaacacaaattaggctcaaa

SEQ ID NO: 153215 - DNA, 25 bp, Canis familiaris
ggtgctgaataaatatttgttgaat

SEQ ID NO: 153216 - DNA, 25 bp, Canis familiaris
ggtcttatatcagtataccttggtc

SEQ ID NO: 153217 - DNA, 25 bp, Canis familiaris
ggtccattactttatctcttagtca

SEQ ID NO: 153218 - DNA, 25 bp, Canis familiaris
ggtgccaattgtgtttctttgtccc

SEQ ID NO: 153219 - DNA, 25 bp, Canis familiaris
ggtctcctctagcttatttggtgtc

SEQ ID NO: 153220 - DNA, 25 bp, Canis familiaris
ggtcctatctatcgttcaataactc

SEQ ID NO: 153221 - DNA, 25 bp, Canis familiaris
ggtgctattctgtgtccaacacctc

SEQ ID NO: 153222 - DNA, 25 bp, Canis familiaris
ggtgctttgctatgtcaagttccct

SEQ ID NO: 153223 - DNA, 25 bp, Canis familiaris
ggtaattctacgcacgatgtctcct

SEQ ID NO: 153224 - DNA, 25 bp, Canis familiaris
ggtcctatgtacctggagagtccct

SEQ ID NO: 153225 - DNA, 25 bp, Canis familiaris
ggatcatgctttgccttggagtaac

SEQ ID NO: 153226 - DNA, 25 bp, Canis familiaris
ggtcatgaattgggctttgaggaag

SEQ ID NO: 153227 - DNA, 25 bp, Canis familiaris
ggtcgtctgtgaaccttgaggaagt

SEQ ID NO: 153228 - DNA, 25 bp, Canis familiaris
ggtgcttattgtgccttggtattgt

SEQ ID NO: 153229 - DNA, 25 bp, Canis familiaris
ggtgctctgaagtgtcctgaatatt

SEQ ID NO: 153230 - DNA, 25 bp, Canis familiaris
ggtgctctgaagtaaggctcctagt

SEQ ID NO: 153231 - DNA, 25 bp, Canis familiaris
ggtgctgtaagaaaatggcacacag

SEQ ID NO: 153232 - DNA, 25 bp, Canis familiaris
ggtcgaacagtccctgattcatcag

SEQ ID NO: 153233 - DNA, 25 bp, Canis familiaris
ggataaatcagtggttatttaggga

SEQ ID NO: 153234 - DNA, 25 bp, Canis familiaris
ggtaagtttggtgtataatatggat

SEQ ID NO: 153235 - DNA, 25 bp, Canis familiaris
ggtaccttaggtatcaccatatgtt

SEQ ID NO: 153236 - DNA, 25 bp, Canis familiaris
ggtacccatgactggtaaagatttt

SEQ ID NO: 153237 - DNA, 25 bp, Canis familiaris
ggccaaccatattcccttaagttga

SEQ ID NO: 153238 - DNA, 25 bp, Canis familiaris
ggtccacccatacccatgtaaggtg

SEQ ID NO: 153239 - DNA, 25 bp, Canis familiaris
ggtccacccattcatctggataggg

SEQ ID NO: 153240 - DNA, 25 bp, Canis familiaris
ggtgcaaacaatgacttggaagaag

SEQ ID NO: 153241 - DNA, 25 bp, Canis familiaris
ggtgcaactaactactgtgtgaggg

SEQ ID NO: 153242 - DNA, 25 bp, Canis familiaris
ggtgcagaccaagtacgtggaagcc

SEQ ID NO: 153243 - DNA, 25 bp, Canis familiaris
ggtgcagcagcacagtccgaaaagc

SEQ ID NO: 153244 - DNA, 25 bp, Canis familiaris
ggtgcacacacatgacttgaaagag

SEQ ID NO: 153245 - DNA, 25 bp, Canis familiaris
ggtcccataccactcatggatcaga

SEQ ID NO: 153246 - DNA, 25 bp, Canis familiaris
ggtcctgtaccacgtgagatgcgac

SEQ ID NO: 153247 - DNA, 25 bp, Canis familiaris
ggtgcctgatgaggagctggggctg

SEQ ID NO: 153248 - DNA, 25 bp, Canis familiaris
ggtgcctgggaggtggggtgagagg

SEQ ID NO: 153249 - DNA, 25 bp, Canis familiaris
ggtgccagggagcctagggagacag

SEQ ID NO: 153250 - DNA, 25 bp, Canis familiaris
ggtctcagaggacctggcttggcca

SEQ ID NO: 153251 - DNA, 25 bp, Canis familiaris
ggtctcaaggggccagatgtgttca

SEQ ID NO: 153252 - DNA, 25 bp, Canis familiaris
ggtctcactgagggggagctgtctt

SEQ ID NO: 153253 - DNA, 25 bp, Canis familiaris
ggtgcgcactcggcgttatgtgcgt

SEQ ID NO: 153254 - DNA, 25 bp, Canis familiaris
ggtgctgatctctagtgttttctga

SEQ ID NO: 153255 - DNA, 25 bp, Canis familiaris
ggtgcagtctccctattttgtaggg

SEQ ID NO: 153256 - DNA, 25 bp, Canis familiaris
ggtcaattcaactttgttgtcgggg

SEQ ID NO: 153257 - DNA, 25 bp, Canis familiaris
ggtcaactccagaattttcaggggg

SEQ ID NO: 153258 - DNA, 25 bp, Canis familiaris
ggtctcctccaggaggactcaccga

SEQ ID NO: 153259 - DNA, 25 bp, Canis familiaris
ggtgccccagagagcaaatgcagcc

SEQ ID NO: 153260 - DNA, 25 bp, Canis familiaris
ggtccaccagagggcgcatgaagcc

SEQ ID NO: 153261 - DNA, 25 bp, Canis familiaris
ggtccaccacaagcttgatagtcgt

SEQ ID NO: 153262 - DNA, 25 bp, Canis familiaris
ggtcacccacaacctagaagggcca

SEQ ID NO: 153263 - DNA, 25 bp, Canis familiaris
ggttgcacctactagaaaagggcca

SEQ ID NO: 153264 - DNA, 25 bp, Canis familiaris
ggttcactttcatgtaaacacgtca

SEQ ID NO: 153265 - DNA, 25 bp, Canis familiaris
ggtccacttctgtattgaaaaggga

SEQ ID NO: 153266 - DNA, 25 bp, Canis familiaris
ggtcctccatttataacacaaagca

SEQ ID NO: 153267 - DNA, 25 bp, Canis familiaris
ggtgcttcgctttttagaacatcaa

SEQ ID NO: 153268 - DNA, 25 bp, Canis familiaris
ggtcttccctttagaaatgcattga

SEQ ID NO: 153269 - DNA, 25 bp, Canis familiaris
ggtcttcaccttcctgaaggttcca

SEQ ID NO: 153270 - DNA, 25 bp, Canis familiaris
ggtccgacacaccggtaggtacaca

SEQ ID NO: 153271 - DNA, 25 bp, Canis familiaris
ggtgccaatccgggggagggcacta

SEQ ID NO: 153272 - DNA, 25 bp, Canis familiaris
ggtcatccaccctgaggaggaggtt

SEQ ID NO: 153273 - DNA, 25 bp, Canis familiaris
ggtgccctccgcagaggtagagagc

SEQ ID NO: 153274 - DNA, 25 bp, Canis familiaris
ggtgctttccagaagtggtgcagga

SEQ ID NO: 153275 - DNA, 25 bp, Canis familiaris
ggtcttcctgagaaaggtgcacgtg

SEQ ID NO: 153276 - DNA, 25 bp, Canis familiaris
ggtgcttcgtggaagagggctcagt

SEQ ID NO: 153277 - DNA, 25 bp, Canis familiaris
ggtgccctgtggtatcatggaccag

SEQ ID NO: 153278 - DNA, 25 bp, Canis familiaris
ggtccctgtgaattgctgcaggcca

SEQ ID NO: 153279 - DNA, 25 bp, Canis familiaris
ggtccagtggaaagagcatggctag

SEQ ID NO: 153280 - DNA, 25 bp, Canis familiaris
ggtctgtgaggagggctgcatggta

SEQ ID NO: 153281 - DNA, 25 bp, Canis familiaris
ggtgctgcagagacaggagctcaga

SEQ ID NO: 153282 - DNA, 25 bp, Canis familiaris
ggtcatcaggatctcagcacgactc

SEQ ID NO: 153283 - DNA, 25 bp, Canis familiaris
ggtctgcggacactgcgaggaagca

SEQ ID NO: 153284 - DNA, 25 bp, Canis familiaris
ggtctggccaaccagcaggagcaga

SEQ ID NO: 153285 - DNA, 25 bp, Canis familiaris
ggtcccgcactccaagagaagacgg

SEQ ID NO: 153286 - DNA, 25 bp, Canis familiaris
ggtaccaactggtcaggcaaacttg

SEQ ID NO: 153287 - DNA, 25 bp, Canis familiaris
ggtaccaaaagatgtaatcacctag

SEQ ID NO: 153288 - DNA, 25 bp, Canis familiaris
ggtcaccaccgagagaaacacctgg

SEQ ID NO: 153289 - DNA, 25 bp, Canis familiaris
ggtccaagaccaggaaaaatcccat

SEQ ID NO: 153290 - DNA, 25 bp, Canis familiaris
ggtccaagcccagaggtggtccgca

SEQ ID NO: 153291 - DNA, 25 bp, Canis familiaris
ggtcccagctcactggagtggtgtc

SEQ ID NO: 153292 - DNA, 25 bp, Canis familiaris
ggatcgtcagtgtatatgcagggtt

SEQ ID NO: 153293 - DNA, 25 bp, Canis familiaris
ggtcgacgatgtttcagtctctgtg

SEQ ID NO: 153294 - DNA, 25 bp, Canis familiaris
ggtcttcaagtcatcagtcagctgc

SEQ ID NO: 153295 - DNA, 25 bp, Canis familiaris
ggtcttgaaggctacactagctcat

SEQ ID NO: 153296 - DNA, 25 bp, Canis familiaris
ggtctctcgaggacaactaccacaa

SEQ ID NO: 153297 - DNA, 25 bp, Canis familiaris
ggtgcatttaatacacctaccctaa

SEQ ID NO: 153298 - DNA, 25 bp, Canis familiaris
ggtgctttattttcactaacctatg

SEQ ID NO: 153299 - DNA, 25 bp, Canis familiaris
ggtcttaatgttatccaactccatg

SEQ ID NO: 153300 - DNA, 25 bp, Canis familiaris
ggtctttgatggttcttcacaccgt

SEQ ID NO: 153301 - DNA, 25 bp, Canis familiaris
ggtctatctaggttcctatactcgt

SEQ ID NO: 153302 - DNA, 25 bp, Canis familiaris
ggtgctactagggtggtgatatctc

SEQ ID NO: 153303 - DNA, 25 bp, Canis familiaris
ggtgccaccgtgatggtgagagctc

SEQ ID NO: 153304 - DNA, 25 bp, Canis familiaris
ggtccacagcggatgggagcgtctt

SEQ ID NO: 153305 - DNA, 25 bp, Canis familiaris
ggtgctcacaggcacaggagacgtc

SEQ ID NO: 153306 - DNA, 25 bp, Canis familiaris
ggtccagaggctgggctttcgacac

SEQ ID NO: 153307 - DNA, 25 bp, Canis familiaris
ggtcgaggagggctggggcagccag

SEQ ID NO: 153308 - DNA, 25 bp, Canis familiaris
ggtctgggtggggggtggtgagcag

SEQ ID NO: 153309 - DNA, 25 bp, Canis familiaris
ggtcccgtcggagcatatgaggagc

SEQ ID NO: 153310 - DNA, 25 bp, Canis familiaris
ggtccctgtagccgggagagctgac

SEQ ID NO: 153311 - DNA, 25 bp, Canis familiaris
ggtcctataacccgcagtgaatgtc

SEQ ID NO: 153312 - DNA, 25 bp, Canis familiaris
ggtcatctgaccgcaggcgtaaggc

SEQ ID NO: 153313 - DNA, 25 bp, Canis familiaris
ggctcactggctgggagcctttacc

SEQ ID NO: 153314 - DNA, 25 bp, Canis familiaris
ggtaatggcgagcgccctatacctc

SEQ ID NO: 153315 - DNA, 25 bp, Canis familiaris
ggtacagggtgacctactcaagccc

SEQ ID NO: 153316 - DNA, 25 bp, Canis familiaris
ggtacaggaatctgccatctacgcc

SEQ ID NO: 153317 - DNA, 25 bp, Canis familiaris
ggtacaggattggggcctgtcaccc

SEQ ID NO: 153318 - DNA, 25 bp, Canis familiaris
ggtacaggaggggctcctggcacct

SEQ ID NO: 153319 - DNA, 25 bp, Canis familiaris
ggtacagaggttccacctggatcgt

SEQ ID NO: 153320 - DNA, 25 bp, Canis familiaris
ggatacaaacttcccctgagagtgt

SEQ ID NO: 153321 - DNA, 25 bp, Canis familiaris
ggatgactgaacttcctccagaaat

SEQ ID NO: 153322 - DNA, 25 bp, Canis familiaris
ggtgctgcaaaattgcctcacagaa

SEQ ID NO: 153323 - DNA, 25 bp, Canis familiaris
ggtcagcaagactcaacacagatga

SEQ ID NO: 153324 - DNA, 25 bp, Canis familiaris
ggtccacatgaatcacaccaggtgg

SEQ ID NO: 153325 - DNA, 25 bp, Canis familiaris
ggtcgcagcatttgaacttctggta

SEQ ID NO: 153326 - DNA, 25 bp, Canis familiaris
ggtccagtttatgctgcctgttagc

SEQ ID NO: 153327 - DNA, 25 bp, Canis familiaris
ggtgctagtcagaaaccttgttagt

SEQ ID NO: 153328 - DNA, 25 bp, Canis familiaris
ggtcaagaattatccataggtaatg

SEQ ID NO: 153329 - DNA, 25 bp, Canis familiaris
ggtcaagaatctttcgcaagaacag

SEQ ID NO: 153330 - DNA, 25 bp, Canis familiaris
ggtccgccacaattcgggaacaaga

SEQ ID NO: 153331 - DNA, 25 bp, Canis familiaris
ggtccacctgatgctaaagaaataa

SEQ ID NO: 153332 - DNA, 25 bp, Canis familiaris
ggtcatccctgagctgaacgggaag

SEQ ID NO: 153333 - DNA, 25 bp, Canis familiaris
ggtcatccctgagtctgacggggat

SEQ ID NO: 153334 - DNA, 25 bp, Canis familiaris
ggtgctgcccaagcgaaggagagct

SEQ ID NO: 153335 - DNA, 25 bp, Canis familiaris
ggtgctgccagatggacaaggagac

SEQ ID NO: 153336 - DNA, 25 bp, Canis familiaris
ggtgctgcatagtgtcagtagggac

SEQ ID NO: 153337 - DNA, 25 bp, Canis familiaris
ggtgctgatcgacatagatatgggg

SEQ ID NO: 153338 - DNA, 25 bp, Canis familiaris
ggtgctgcacgacaattatttgatg

SEQ ID NO: 153339 - DNA, 25 bp, Canis familiaris
ggtccactgggaatgtgtttatgtc

SEQ ID NO: 153340 - DNA, 25 bp, Canis familiaris
ggtcccggagcaggagatcttggtc

SEQ ID NO: 153341 - DNA, 25 bp, Canis familiaris
ggtcccggagcagaggctggaggac

SEQ ID NO: 153342 - DNA, 25 bp, Canis familiaris
ggtcctgggaccaaggtggacgcgg

SEQ ID NO: 153343 - DNA, 25 bp, Canis familiaris
ggtcctggaatcccaggatcgagtc

SEQ ID NO: 153344 - DNA, 25 bp, Canis familiaris
ggtccggaattcccgggatgtcctg

SEQ ID NO: 153345 - DNA, 25 bp, Canis familiaris
ggtccggaattcccgggatggccag

SEQ ID NO: 153346 - DNA, 25 bp, Canis familiaris
ggtcgggaaggccacaggtgggcga

SEQ ID NO: 153347 - DNA, 25 bp, Canis familiaris
ggtcatgggacagaaatagtgggga

SEQ ID NO: 153348 - DNA, 25 bp, Canis familiaris
ggtcatcgcaacgaaggttttggga

SEQ ID NO: 153349 - DNA, 25 bp, Canis familiaris
ggtctacaaaaatgttgtttgtgcc

SEQ ID NO: 153350 - DNA, 25 bp, Canis familiaris
ggtcttaatatttcgtttttgcatc

SEQ ID NO: 153351 - DNA, 25 bp, Canis familiaris
ggtaataattcctgttttgtgccca

SEQ ID NO: 153352 - DNA, 25 bp, Canis familiaris
ggtagaaatttctgtgttccccaca

SEQ ID NO: 153353 - DNA, 25 bp, Canis familiaris
ggtaataacgtctgcatcttctaaa

SEQ ID NO: 153354 - DNA, 25 bp, Canis familiaris
ggtcgataccggtgcatcgtacatc

SEQ ID NO: 153355 - DNA, 25 bp, Canis familiaris
ggtcagagactgggggcattacttc

SEQ ID NO: 153356 - DNA, 25 bp, Canis familiaris
ggtcagagagggcagcgccaagctg

SEQ ID NO: 153357 - DNA, 25 bp, Canis familiaris
ggtcctggcgtcacagccagagatg

SEQ ID NO: 153358 - DNA, 25 bp, Canis familiaris
ggtcctgtggttgcgcacacagaac

SEQ ID NO: 153359 - DNA, 25 bp, Canis familiaris
ggtcctgggcttgctgaaatttaag

SEQ ID NO: 153360 - DNA, 25 bp, Canis familiaris
ggtattgggtagtgtgaacttaaat

SEQ ID NO: 153361 - DNA, 25 bp, Canis familiaris
ggtatagcggctctaggaaactaaa

SEQ ID NO: 153362 - DNA, 25 bp, Canis familiaris
ggtatcacagttctacgaaagcttc

SEQ ID NO: 153363 - DNA, 25 bp, Canis familiaris
ggtcatcaaggccctcaagaaccat

SEQ ID NO: 153364 - DNA, 25 bp, Canis familiaris
ggtcaatacatccctaatcgtggcc

SEQ ID NO: 153365 - DNA, 25 bp, Canis familiaris
ggtcttttcccaggatcaaggccac

SEQ ID NO: 153366 - DNA, 25 bp, Canis familiaris
ggtcgtcctcacaagtgtcaaggtc

SEQ ID NO: 153367 - DNA, 25 bp, Canis familiaris
ggtcgaccatcacattgacaagatc

SEQ ID NO: 153368 - DNA, 25 bp, Canis familiaris
ggtctgcagcctacggtgaggagat

SEQ ID NO: 153369 - DNA, 25 bp, Canis familiaris
ggtcgcaggcattaggtatgatgga

SEQ ID NO: 153370 - DNA, 25 bp, Canis familiaris
ggtcgcatggattaggtatgatgga

SEQ ID NO: 153371 - DNA, 25 bp, Canis familiaris
ggatcgtttttggtcaatcgtaatc

SEQ ID NO: 153372 - DNA, 25 bp, Canis familiaris
ggtcgtgtttctttagtagtggatc

SEQ ID NO: 153373 - DNA, 25 bp, Canis familiaris
ggtcgagttcttttaaagctccaca

SEQ ID NO: 153374 - DNA, 25 bp, Canis familiaris
ggtgcgtcttctgtggaatggaccc

SEQ ID NO: 153375 - DNA, 25 bp, Canis familiaris
ggtcgcttatatgaggaaagcagct

SEQ ID NO: 153376 - DNA, 25 bp, Canis familiaris
ggtccatcttggtcaaggacaccca

SEQ ID NO: 153377 - DNA, 25 bp, Canis familiaris
ggtcctctgttgtccagatgttctc

SEQ ID NO: 153378 - DNA, 25 bp, Canis familiaris
ggtgccatgttttccaaaatgctca

SEQ ID NO: 153379 - DNA, 25 bp, Canis familiaris
ggtgcggtttctggcgagaagcatc

SEQ ID NO: 153380 - DNA, 25 bp, Canis familiaris
ggtgcggcttctgacgagaagcatc

SEQ ID NO: 153381 - DNA, 25 bp, Canis familiaris
ggtgcggtatctggcaagagaaatc

SEQ ID NO: 153382 - DNA, 25 bp, Canis familiaris
ggtgcgcttcctggaacagcagaac

SEQ ID NO: 153383 - DNA, 25 bp, Canis familiaris
ggtcgcctgcaccgagaacaggcac

SEQ ID NO: 153384 - DNA, 25 bp, Canis familiaris
ggtctctccactaatatactgaatc

SEQ ID NO: 153385 - DNA, 25 bp, Canis familiaris
ggtctgtctatgtaataatctcaag

SEQ ID NO: 153386 - DNA, 25 bp, Canis familiaris
ggtcctctatgaaaaatacggtcga

SEQ ID NO: 153387 - DNA, 25 bp, Canis familiaris
tcgggtttgaacactacaggtccac

SEQ ID NO: 153388 - DNA, 25 bp, Canis familiaris
tctaatgtattaacccccaggacca

SEQ ID NO: 153389 - DNA, 25 bp, Canis familiaris
tctggcttaataattaggccagggc

SEQ ID NO: 153390 - DNA, 25 bp, Canis familiaris
tggtcgtaaactatgtgccgggcac

SEQ ID NO: 153391 - DNA, 25 bp, Canis familiaris
ggtctacaaaaaattcctggagcca

SEQ ID NO: 153392 - DNA, 25 bp, Canis familiaris
ggtgccggaaaaacactctggcccg

SEQ ID NO: 153393 - DNA, 25 bp, Canis familiaris
ggtgccgtgaaggaacactattact

SEQ ID NO: 153394 - DNA, 25 bp, Canis familiaris
ggtgctgatctgtggaaattttaag

SEQ ID NO: 153395 - DNA, 25 bp, Canis familiaris
ggtctgttattgccaagcacttaaa

SEQ ID NO: 153396 - DNA, 25 bp, Canis familiaris
ggtcatttcagggccaagtaattgc

SEQ ID NO: 153397 - DNA, 25 bp, Canis familiaris
ggtcagactgaggcaccaagtatag

SEQ ID NO: 153398 - DNA, 25 bp, Canis familiaris
ggtcgacgacaatcctgtatctgat

SEQ ID NO: 153399 - DNA, 25 bp, Canis familiaris
ggtcacacccaaatcaattacgtcc

SEQ ID NO: 153400 - DNA, 25 bp, Canis familiaris
ggtcaacccttgtctttaggatcct

SEQ ID NO: 153401 - DNA, 25 bp, Canis familiaris
ggtcaaacctgtattcataattggc

SEQ ID NO: 153402 - DNA, 25 bp, Canis familiaris
ggtaaccccatatattaactgtcct

SEQ ID NO: 153403 - DNA, 25 bp, Canis familiaris
ggttcagccccattttaaacgtgtg

SEQ ID NO: 153404 - DNA, 25 bp, Canis familiaris
ggtatcagtccccaggtaaaggctt

SEQ ID NO: 153405 - DNA, 25 bp, Canis familiaris
ggtccagtcctgggtggagaaggct

SEQ ID NO: 153406 - DNA, 25 bp, Canis familiaris
ggtcctggccatgtgttagcacagc

SEQ ID NO: 153407 - DNA, 25 bp, Canis familiaris
ggtcacaggccctgtgatcgcacct

SEQ ID NO: 153408 - DNA, 25 bp, Canis familiaris
ggtccagcagctacatttacacatc

SEQ ID NO: 153409 - DNA, 25 bp, Canis familiaris
ggtccaatgcttaattaaccaagac

SEQ ID NO: 153410 - DNA, 25 bp, Canis familiaris
ggtccttgcgtttaaaccctgatgc

SEQ ID NO: 153411 - DNA, 25 bp, Canis familiaris
ggtccttgagaataagccccatctc

SEQ ID NO: 153412 - DNA, 25 bp, Canis familiaris
ggtccctactaaacatgacacccac

SEQ ID NO: 153413 - DNA, 25 bp, Canis familiaris
ggtccatctacgtatcaatgagcca

SEQ ID NO: 153414 - DNA, 25 bp, Canis familiaris
ggtctgcatgtatgttaataccgta

SEQ ID NO: 153415 - DNA, 25 bp, Canis familiaris
ggtctgtgatgcccttagatgtccg

SEQ ID NO: 153416 - DNA, 25 bp, Canis familiaris
ggtctgtgatgcccttagatgtccg

SEQ ID NO: 153417 - DNA, 25 bp, Canis familiaris
ggtcatgtgaccaatcatagatttc

SEQ ID NO: 153418 - DNA, 25 bp, Canis familiaris
ggtctgtgggcattgctatgctcaa

SEQ ID NO: 153419 - DNA, 25 bp, Canis familiaris
ggtctgtgttgcaattatctgaatg

SEQ ID NO: 153420 - DNA, 25 bp, Canis familiaris
ggtctgatgactatctgactgagat

SEQ ID NO: 153421 - DNA, 25 bp, Canis familiaris
ggtgccagaccgtctgactagttta

SEQ ID NO: 153422 - DNA, 25 bp, Canis familiaris
ggtgcccaacggagctggtgttgaa

SEQ ID NO: 153423 - DNA, 25 bp, Canis familiaris
ggtacaaagggtcctggtttcacag

SEQ ID NO: 153424 - DNA, 25 bp, Canis familiaris
ggtaaccattcgtcctattttatag

SEQ ID NO: 153425 - DNA, 25 bp, Canis familiaris
ggtaataacttgcctgcttttgtat

SEQ ID NO: 153426 - DNA, 25 bp, Canis familiaris
ggtacaagactacagcctttatgac

SEQ ID NO: 153427 - DNA, 25 bp, Canis familiaris
ggtacgcgtctacaggccgtaccag

SEQ ID NO: 153428 - DNA, 25 bp, Canis familiaris
ggtacaggtcaaagaggccctctcc

SEQ ID NO: 153429 - DNA, 25 bp, Canis familiaris
ggtccagaactatggtgttcctcgt

SEQ ID NO: 153430 - DNA, 25 bp, Canis familiaris
ggtcgaaatgtctgtggttccttgg

SEQ ID NO: 153431 - DNA, 25 bp, Canis familiaris
ggtctgagaagtcctcgaggtcctt

SEQ ID NO: 153432 - DNA, 25 bp, Canis familiaris
ggtcggcaagatctctgctggaacc

SEQ ID NO: 153433 - DNA, 25 bp, Canis familiaris
ggtctccataatctcttgggaaacg

SEQ ID NO: 153434 - DNA, 25 bp, Canis familiaris
ggttattttcatattggtcaaagcc

SEQ ID NO: 153435 - DNA, 25 bp, Canis familiaris
ggtcttattcctacttgtgtcaagc

SEQ ID NO: 153436 - DNA, 25 bp, Canis familiaris
ggtcctactacaacttcttcaggaa

SEQ ID NO: 153437 - DNA, 25 bp, Canis familiaris
ggtcctcaaacaatctactatctcg

SEQ ID NO: 153438 - DNA, 25 bp, Canis familiaris
ggtcccacaccaacaagtgttctct

SEQ ID NO: 153439 - DNA, 25 bp, Canis familiaris
ggtccctgagttttctgtgtatcat

SEQ ID NO: 153440 - DNA, 25 bp, Canis familiaris
ggtgccctgagatattcatcttctt

SEQ ID NO: 153441 - DNA, 25 bp, Canis familiaris
ggtcccatgatgtgaccattcactt

SEQ ID NO: 153442 - DNA, 25 bp, Canis familiaris
ggtcctttgtggtccataacatggt

SEQ ID NO: 153443 - DNA, 25 bp, Canis familiaris
ggtcctgttgagcatcgatggtgag

SEQ ID NO: 153444 - DNA, 25 bp, Canis familiaris
ggtctcttctagaacgactggaggg

SEQ ID NO: 153445 - DNA, 25 bp, Canis familiaris
ggtccccttggaccaatggagggct

SEQ ID NO: 153446 - DNA, 25 bp, Canis familiaris
ggtgcccctgggagcaggataggtc

SEQ ID NO: 153447 - DNA, 25 bp, Canis familiaris
ggtacaccggcgatcagacaagggg

SEQ ID NO: 153448 - DNA, 25 bp, Canis familiaris
ggtacgtggccgaacagtttgggtg

SEQ ID NO: 153449 - DNA, 25 bp, Canis familiaris
ggtacctgcaaccaacagttttggc

SEQ ID NO: 153450 - DNA, 25 bp, Canis familiaris
ggtccacatcggccaaatgtattcg

SEQ ID NO: 153451 - DNA, 25 bp, Canis familiaris
ggtctcctgcaggctgaaagtatta

SEQ ID NO: 153452 - DNA, 25 bp, Canis familiaris
ggtgccctcatgatacaaggaatgc

SEQ ID NO: 153453 - DNA, 25 bp, Canis familiaris
ggtctcgtgctgatcctcagaaagc

SEQ ID NO: 153454 - DNA, 25 bp, Canis familiaris
ggtcaagatctggtttcagaaccgg

SEQ ID NO: 153455 - DNA, 25 bp, Canis familiaris
ggtcgtgtggagacgtcgaacgcgg

SEQ ID NO: 153456 - DNA, 25 bp, Canis familiaris
ggtcgctgtgggaaccagtgacctc

SEQ ID NO: 153457 - DNA, 25 bp, Canis familiaris
ggtgcgcatttaaactctggatcaa

SEQ ID NO: 153458 - DNA, 25 bp, Canis familiaris
ggtccttgtaaagctgtacagactt

SEQ ID NO: 153459 - DNA, 25 bp, Canis familiaris
tggtcctaaatataccccaactctc

SEQ ID NO: 153460 - DNA, 25 bp, Canis familiaris
ggtcttaaatttttgtccagaatcg

SEQ ID NO: 153461 - DNA, 25 bp, Canis familiaris
ggtcattaatatcctttgtcctgcc

SEQ ID NO: 153462 - DNA, 25 bp, Canis familiaris
ggtccaaatcattgctttctcacct

SEQ ID NO: 153463 - DNA, 25 bp, Canis familiaris
ggtccaaatcattgctttctcacct

SEQ ID NO: 153464 - DNA, 25 bp, Canis familiaris
ggtcacaaacatctttctcgactac

SEQ ID NO: 153465 - DNA, 25 bp, Canis familiaris
ggtccaacagacagttacgcagcta

SEQ ID NO: 153466 - DNA, 25 bp, Canis familiaris
ggtctcaaggtcagctgtggggtag

SEQ ID NO: 153467 - DNA, 25 bp, Canis familiaris
ggtccaactgtccattcatggtgga

SEQ ID NO: 153468 - DNA, 25 bp, Canis familiaris
ggtgccagattcctgttcatgttgg

SEQ ID NO: 153469 - DNA, 25 bp, Canis familiaris
ggtctcagttttcatagtccgtttc

SEQ ID NO: 153470 - DNA, 25 bp, Canis familiaris
ggtccattttgggtagttctggttg

SEQ ID NO: 153471 - DNA, 25 bp, Canis familiaris
ggtccagctttgcttcagtgtatgg

SEQ ID NO: 153472 - DNA, 25 bp, Canis familiaris
ggtgccattttgcattggagtcttc

SEQ ID NO: 153473 - DNA, 25 bp, Canis familiaris
ggtccacaattgcacgtgcactttc

SEQ ID NO: 153474 - DNA, 25 bp, Canis familiaris
ggtcggaattgaccagtaccctgga

SEQ ID NO: 153475 - DNA, 25 bp, Canis familiaris
ggttgggtggcacagtcacccgtat

SEQ ID NO: 153476 - DNA, 25 bp, Canis familiaris
ggtttggggacgacatccctggaat

SEQ ID NO: 153477 - DNA, 25 bp, Canis familiaris
ggatttgggctgtaacttcttcgtt

SEQ ID NO: 153478 - DNA, 25 bp, Canis familiaris
ggcattagtggttgaaggtttggtc

SEQ ID NO: 153479 - DNA, 25 bp, Canis familiaris
ggcttagggtctgtttattagtcac

SEQ ID NO: 153480 - DNA, 25 bp, Canis familiaris
ggtacactgttccattttagtagtc

SEQ ID NO: 153481 - DNA, 25 bp, Canis familiaris
ggtcctcttacatttttgcagttac

SEQ ID NO: 153482 - DNA, 25 bp, Canis familiaris
ggtcactcatattttgtattgcggt

SEQ ID NO: 153483 - DNA, 25 bp, Canis familiaris
ggtcctcactgaggtgccaggtgtt

SEQ ID NO: 153484 - DNA, 25 bp, Canis familiaris
ggtgccatgcctgggtgaaaggttc

SEQ ID NO: 153485 - DNA, 25 bp, Canis familiaris
ggtgccatgcctggatgtgaaggtg

SEQ ID NO: 153486 - DNA, 25 bp, Canis familiaris
ggtgcctgcggggcagagaggaggg

SEQ ID NO: 153487 - DNA, 25 bp, Canis familiaris
ggtcctgggagggagaggggctgtc

SEQ ID NO: 153488 - DNA, 25 bp, Canis familiaris
ggtactggtggtggaatccgtcctc

SEQ ID NO: 153489 - DNA, 25 bp, Canis familiaris
ggtcacagggaagaagcgcgtcctc

SEQ ID NO: 153490 - DNA, 25 bp, Canis familiaris
ggtcaacgcggacaacgcagacgtc

SEQ ID NO: 153491 - DNA, 25 bp, Canis familiaris
ggtcaacgcggacaacgcagacgtc

SEQ ID NO: 153492 - DNA, 25 bp, Canis familiaris
ggttatggtatacaacggacgtctt

SEQ ID NO: 153493 - DNA, 25 bp, Canis familiaris
ggttatgggttgagaggtgaccctt

SEQ ID NO: 153494 - DNA, 25 bp, Canis familiaris
ggtagttgcctttacaggtgacctg

SEQ ID NO: 153495 - DNA, 25 bp, Canis familiaris
ggtaattgcccttactgcgggcgac

SEQ ID NO: 153496 - DNA, 25 bp, Canis familiaris
ggtacgtccagtcaccaaggagagc

SEQ ID NO: 153497 - DNA, 25 bp, Canis familiaris
ggtagaggccagggaccttggaaag

SEQ ID NO: 153498 - DNA, 25 bp, Canis familiaris
ggtctatggacggaaccttcacaga

SEQ ID NO: 153499 - DNA, 25 bp, Canis familiaris
ggtcttctgttgaaacttgcccaag

SEQ ID NO: 153500 - DNA, 25 bp, Canis familiaris
ggtccctgtataaatccatgctcac

SEQ ID NO: 153501 - DNA, 25 bp, Canis familiaris
ggtgccatttatttacattctcatt

SEQ ID NO: 153502 - DNA, 25 bp, Canis familiaris
ggtccattctgtatactggcatcct

SEQ ID NO: 153503 - DNA, 25 bp, Canis familiaris
ggtgccaatcgggtgaatggtcaca

SEQ ID NO: 153504 - DNA, 25 bp, Canis familiaris
ggtctacacctgggaagttccaaca

SEQ ID NO: 153505 - DNA, 25 bp, Canis familiaris
ggtccaaggctcaagaatttccaaa

SEQ ID NO: 153506 - DNA, 25 bp, Canis familiaris
ggtctactggtcaaaagttaatatt

SEQ ID NO: 153507 - DNA, 25 bp, Canis familiaris
ggtcttttggcttaattgtcctatt

SEQ ID NO: 153508 - DNA, 25 bp, Canis familiaris
ggtctagtggtgatgaattccctca

SEQ ID NO: 153509 - DNA, 25 bp, Canis familiaris
ggtctgagttgtacagggtcctctc

SEQ ID NO: 153510 - DNA, 25 bp, Canis familiaris
ggtctagttttcaagagttctgcgt

SEQ ID NO: 153511 - DNA, 25 bp, Canis familiaris
ggtcctattttttcacattctggca

SEQ ID NO: 153512 - DNA, 25 bp, Canis familiaris
ggtgccttgtattttaaatctgtga

SEQ ID NO: 153513 - DNA, 25 bp, Canis familiaris
ggtcctttttatcaaatctgtcttc

SEQ ID NO: 153514 - DNA, 25 bp, Canis familiaris
ggtccgtatttgactaattatagct

SEQ ID NO: 153515 - DNA, 25 bp, Canis familiaris
ggtagctgtgtgtgaaaaattagta

SEQ ID NO: 153516 - DNA, 25 bp, Canis familiaris
ggtagctgattctggaagcaacgtt

SEQ ID NO: 153517 - DNA, 25 bp, Canis familiaris
ggtagctaactttgtaaacgctgtg

SEQ ID NO: 153518 - DNA, 25 bp, Canis familiaris
ggtcctgacagtttctgaaaccatg

SEQ ID NO: 153519 - DNA, 25 bp, Canis familiaris
ggtcctatcactatcttatcaccac

SEQ ID NO: 153520 - DNA, 25 bp, Canis familiaris
ggtcgtgatcgtgactattcagatc

SEQ ID NO: 153521 - DNA, 25 bp, Canis familiaris
ggtcgtgtggtacctttcaatcttc

SEQ ID NO: 153522 - DNA, 25 bp, Canis familiaris
ggtcctgggttcatttgcatatttt

SEQ ID NO: 153523 - DNA, 25 bp, Canis familiaris
ggtcctggctttgtctgtggaaact

SEQ ID NO: 153524 - DNA, 25 bp, Canis familiaris
ggtcctggctttgtctgtggaaact

SEQ ID NO: 153525 - DNA, 25 bp, Canis familiaris
ggtcctggctttgtctgtggaaact

SEQ ID NO: 153526 - DNA, 25 bp, Canis familiaris
ggtcctggctttgtctgtggaaact

SEQ ID NO: 153527 - DNA, 25 bp, Canis familiaris
ggtcctggctttgtctgtggaaact

SEQ ID NO: 153528 - DNA, 25 bp, Canis familiaris
ggtcctggctttgtctgtggaaact

SEQ ID NO: 153529 - DNA, 25 bp, Canis familiaris
ggtcctgttctttgtctgtggaact

SEQ ID NO: 153530 - DNA, 25 bp, Canis familiaris
ggtcctagttgttagccggcaactc

SEQ ID NO: 153531 - DNA, 25 bp, Canis familiaris
ggtccagagttcaaatcccagcaac

SEQ ID NO: 153532 - DNA, 25 bp, Canis familiaris
ggtaagacctcaagactgccaacct

SEQ ID NO: 153533 - DNA, 25 bp, Canis familiaris
ggtcagagctgactctacaggccaa

SEQ ID NO: 153534 - DNA, 25 bp, Canis familiaris
ggtcaacaggttggagacgatgcat

SEQ ID NO: 153535 - DNA, 25 bp, Canis familiaris
ggtctactgtggggaacacagatct

SEQ ID NO: 153536 - DNA, 25 bp, Canis familiaris
ggttactgttaacaccagtctcctc

SEQ ID NO: 153537 - DNA, 25 bp, Canis familiaris
ggtcatacgattaaccccaactaat

SEQ ID NO: 153538 - DNA, 25 bp, Canis familiaris
ggtatttattaagccccaacattga

SEQ ID NO: 153539 - DNA, 25 bp, Canis familiaris
ggttttccgaagccggctatacaat

SEQ ID NO: 153540 - DNA, 25 bp, Canis familiaris
ggttggaccgcgcgggtgaacaaga

SEQ ID NO: 153541 - DNA, 25 bp, Canis familiaris
ggtcgccaccggcgtggtataataa

SEQ ID NO: 153542 - DNA, 25 bp, Canis familiaris
ggtcctacggactgtggtgatatat

SEQ ID NO: 153543 - DNA, 25 bp, Canis familiaris
ggtcccacctgacatcatgggcatt

SEQ ID NO: 153544 - DNA, 25 bp, Canis familiaris
ggtcatgcccacacaacagggctgt

SEQ ID NO: 153545 - DNA, 25 bp, Canis familiaris
ggtcacccctgccaaagagtggtga

SEQ ID NO: 153546 - DNA, 25 bp, Canis familiaris
ggtctgcgccttcaataggaccgtc

SEQ ID NO: 153547 - DNA, 25 bp, Canis familiaris
ggtcatggccttcagaatgcctcct

SEQ ID NO: 153548 - DNA, 25 bp, Canis familiaris
ggtcatgggtgtgagatggagcccc

SEQ ID NO: 153549 - DNA, 25 bp, Canis familiaris
ggtcaaaggtgccacatgatgagcc

SEQ ID NO: 153550 - DNA, 25 bp, Canis familiaris
ggtagacgttgaccgatccacggac

SEQ ID NO: 153551 - DNA, 25 bp, Canis familiaris
ggtccagttggacggtcaacaggac

SEQ ID NO: 153552 - DNA, 25 bp, Canis familiaris
ggtccaggtgaccagtgctcaaaag

SEQ ID NO: 153553 - DNA, 25 bp, Canis familiaris
ggtcacagtgctaccagactataga

SEQ ID NO: 153554 - DNA, 25 bp, Canis familiaris
ggtccagtgcctcaggcttacaaag

SEQ ID NO: 153555 - DNA, 25 bp, Canis familiaris
ggcgctttgccgcagtcattaataa

SEQ ID NO: 153556 - DNA, 25 bp, Canis familiaris
ggtctttctcgttgttctaattcat

SEQ ID NO: 153557 - DNA, 25 bp, Canis familiaris
ggtctgttcaagatggtattcttca

SEQ ID NO: 153558 - DNA, 25 bp, Canis familiaris
ggtcggccacagaggttatcttggg

SEQ ID NO: 153559 - DNA, 25 bp, Canis familiaris
ggtctgaccaggtggtggactgctg

SEQ ID NO: 153560 - DNA, 25 bp, Canis familiaris
ggtctgcaccaagctagtggagccg

SEQ ID NO: 153561 - DNA, 25 bp, Canis familiaris
ggtctacacctgccaagtggagcac

SEQ ID NO: 153562 - DNA, 25 bp, Canis familiaris
ggtctacacctgccaagtggagcac

SEQ ID NO: 153563 - DNA, 25 bp, Canis familiaris
ggtctcatcatcctctaagtagtga

SEQ ID NO: 153564 - DNA, 25 bp, Canis familiaris
ggtccatctggccaacacgagtggc

SEQ ID NO: 153565 - DNA, 25 bp, Canis familiaris
ggtacatctgcaccagacggtggag

SEQ ID NO: 153566 - DNA, 25 bp, Canis familiaris
ggtacaccaggagcagttggcaccc

SEQ ID NO: 153567 - DNA, 25 bp, Canis familiaris
tggttcccagggacagtcaaacccg

SEQ ID NO: 153568 - DNA, 25 bp, Canis familiaris
ggtccctggggaagatcatcaacac

SEQ ID NO: 153569 - DNA, 25 bp, Canis familiaris
ggtctctcgacgacacgaataaaca

SEQ ID NO: 153570 - DNA, 25 bp, Canis familiaris
ggtcgcagcacatttacggataaac

SEQ ID NO: 153571 - DNA, 25 bp, Canis familiaris
ggtccagccttctactggctggaac

SEQ ID NO: 153572 - DNA, 25 bp, Canis familiaris
ggtccaccaatcgtcatgaggagat

SEQ ID NO: 153573 - DNA, 25 bp, Canis familiaris
ggtccatccataaccaagtagatgt

SEQ ID NO: 153574 - DNA, 25 bp, Canis familiaris
ggtccatctcaaaaccaggatttgt

SEQ ID NO: 153575 - DNA, 25 bp, Canis familiaris
ggtcactccaagccacgaagattgg

SEQ ID NO: 153576 - DNA, 25 bp, Canis familiaris
ggtacccaactcttgacagtagtta

SEQ ID NO: 153577 - DNA, 25 bp, Canis familiaris
tcgtaccttggtttacctggtgttg

SEQ ID NO: 153578 - DNA, 25 bp, Canis familiaris
tcttgacgttttcagacttgggaga

SEQ ID NO: 153579 - DNA, 25 bp, Canis familiaris
tctttctttacattaacctggggag

SEQ ID NO: 153580 - DNA, 25 bp, Canis familiaris
ggtctttctaatacaatcctggcag

SEQ ID NO: 153581 - DNA, 25 bp, Canis familiaris
ggtcggttttacatcactggagtct

SEQ ID NO: 153582 - DNA, 25 bp, Canis familiaris
ggtaagttgtctgttccttaactct

SEQ ID NO: 153583 - DNA, 25 bp, Canis familiaris
ggtcagagtgacagttggtttaact

SEQ ID NO: 153584 - DNA, 25 bp, Canis familiaris
ggtcacacatgggttctggtttcct

SEQ ID NO: 153585 - DNA, 25 bp, Canis familiaris
ggtccatcagtgctcattggacagt

SEQ ID NO: 153586 - DNA, 25 bp, Canis familiaris
ggtccccaggtcttggatctgggga

SEQ ID NO: 153587 - DNA, 25 bp, Canis familiaris
ggtccccaggtacacacagcgggga

SEQ ID NO: 153588 - DNA, 25 bp, Canis familiaris
ggatccagacggtggacaactccgg

SEQ ID NO: 153589 - DNA, 25 bp, Canis familiaris
ggtccagaccgattcaaaccttggc

SEQ ID NO: 153590 - DNA, 25 bp, Canis familiaris
ggtccagactggacggaagccaagg

SEQ ID NO: 153591 - DNA, 25 bp, Canis familiaris
ggtccaggcggaagggagcggagac

SEQ ID NO: 153592 - DNA, 25 bp, Canis familiaris
ggtccagggtgaactgtgggctgtg

SEQ ID NO: 153593 - DNA, 25 bp, Canis familiaris
ggtccgagggtgcctcgggtggtag

SEQ ID NO: 153594 - DNA, 25 bp, Canis familiaris
ggtcaggaggtggggtggtttgtag

SEQ ID NO: 153595 - DNA, 25 bp, Canis familiaris
ggtcttgtgggccaggtgggcaatg

SEQ ID NO: 153596 - DNA, 25 bp, Canis familiaris
ggtctggtggacgtgatgtgggaat

SEQ ID NO: 153597 - DNA, 25 bp, Canis familiaris
ggtcgtgtagtcggcagcagtggac

SEQ ID NO: 153598 - DNA, 25 bp, Canis familiaris
ggtcgggagtccgggagtgatgcct

SEQ ID NO: 153599 - DNA, 25 bp, Canis familiaris
ggtctagtggtggctggagagttcc

SEQ ID NO: 153600 - DNA, 25 bp, Canis familiaris
ggtcatcgtattgaggaagttcctg

SEQ ID NO: 153601 - DNA, 25 bp, Canis familiaris
ggtctctatcgtcaggaagtagcac

SEQ ID NO: 153602 - DNA, 25 bp, Canis familiaris
ggtcccatctggaagtcacctggac

SEQ ID NO: 153603 - DNA, 25 bp, Canis familiaris
ggtccaggctggcagatacctaggc

SEQ ID NO: 153604 - DNA, 25 bp, Canis familiaris
ggtcactggcgggaatggcgtaggc

SEQ ID NO: 153605 - DNA, 25 bp, Canis familiaris
ggtcctggcagggagaggcacacag

SEQ ID NO: 153606 - DNA, 25 bp, Canis familiaris
ggtcctgcagaggcagcgcggacca

SEQ ID NO: 153607 - DNA, 25 bp, Canis familiaris
ggtcgctggatgtcagaggaggact

SEQ ID NO: 153608 - DNA, 25 bp, Canis familiaris
ggtcagcaggtggagacgatgcccc

SEQ ID NO: 153609 - DNA, 25 bp, Canis familiaris
ggtaaagtcatacctatccctctac

SEQ ID NO: 153610 - DNA, 25 bp, Canis familiaris
ggtacaagtagtcaagtttcttcca

SEQ ID NO: 153611 - DNA, 25 bp, Canis familiaris
ggtaatagtcttcagagtgttctaa

SEQ ID NO: 153612 - DNA, 25 bp, Canis familiaris
ggtcaaatctcatcttgagctttct

SEQ ID NO: 153613 - DNA, 25 bp, Canis familiaris
ggtactgattcatcttgggtcatct

SEQ ID NO: 153614 - DNA, 25 bp, Canis familiaris
ggtaatgtacattctttccatgctg

SEQ ID NO: 153615 - DNA, 25 bp, Canis familiaris
ggtcaaggacaagcaccctgagctc

SEQ ID NO: 153616 - DNA, 25 bp, Canis familiaris
ggtcaaacagaatgcaccgctggct

SEQ ID NO: 153617 - DNA, 25 bp, Canis familiaris
ggtcaaaagagtgtccatctgttcc

SEQ ID NO: 153618 - DNA, 25 bp, Canis familiaris
ggtcctaaagtgttgctatgctatt

SEQ ID NO: 153619 - DNA, 25 bp, Canis familiaris
ggtatcaaacgccatgtgtagcttt

SEQ ID NO: 153620 - DNA, 25 bp, Canis familiaris
ggtctaggcagcccaggtgttggta

SEQ ID NO: 153621 - DNA, 25 bp, Canis familiaris
ggtcgtgctcaatcagggtatggaa

SEQ ID NO: 153622 - DNA, 25 bp, Canis familiaris
ggtcgtggccatcatggcggagggc

SEQ ID NO: 153623 - DNA, 25 bp, Canis familiaris
ggtcaggagccaggaggggcgaggc

SEQ ID NO: 153624 - DNA, 25 bp, Canis familiaris
ggtcaggagacatggggctgggcgt

SEQ ID NO: 153625 - DNA, 25 bp, Canis familiaris
ggtcaggtacattggcgggtgctgt

SEQ ID NO: 153626 - DNA, 25 bp, Canis familiaris
ggtcaggcctcttggaaggcatctg

SEQ ID NO: 153627 - DNA, 25 bp, Canis familiaris
ggtagctgccctagatggggtctca

SEQ ID NO: 153628 - DNA, 25 bp, Canis familiaris
ggtagctgccctagaggggctcaga

SEQ ID NO: 153629 - DNA, 25 bp, Canis familiaris
ggtagctgccctagaggggctcaga

SEQ ID NO: 153630 - DNA, 25 bp, Canis familiaris
ggtagctgccctagaggggctcaga

SEQ ID NO: 153631 - DNA, 25 bp, Canis familiaris
ggtagctgccctagaggggctcaga

SEQ ID NO: 153632 - DNA, 25 bp, Canis familiaris
ggtagctgccctagaggggctcaga

SEQ ID NO: 153633 - DNA, 25 bp, Canis familiaris
ggtcatgtgaccagaagaagctcca

SEQ ID NO: 153634 - DNA, 25 bp, Canis familiaris
ggtcctgagcctgtgaagagctaat

SEQ ID NO: 153635 - DNA, 25 bp, Canis familiaris
ggtcctgagccttgatggcagagta

SEQ ID NO: 153636 - DNA, 25 bp, Canis familiaris
ggtctcatggcccagatggcaacca

SEQ ID NO: 153637 - DNA, 25 bp, Canis familiaris
ggtcttggcactcatggaaacagga

SEQ ID NO: 153638 - DNA, 25 bp, Canis familiaris
ggtctatgcctctcagcgaatgaga

SEQ ID NO: 153639 - DNA, 25 bp, Canis familiaris
ggtcatacttcagcaggagggactg

SEQ ID NO: 153640 - DNA, 25 bp, Canis familiaris
ggtctacattctagggtgtgggcca

SEQ ID NO: 153641 - DNA, 25 bp, Canis familiaris
ggtctagctctgttggggactggaa

SEQ ID NO: 153642 - DNA, 25 bp, Canis familiaris
ggtctgttttgtcgaatactggaag

SEQ ID NO: 153643 - DNA, 25 bp, Canis familiaris
ggtcttttttggtcatacgtatcgg

SEQ ID NO: 153644 - DNA, 25 bp, Canis familiaris
ggtctttcttgttgccacagaggat

SEQ ID NO: 153645 - DNA, 25 bp, Canis familiaris
ggtcttacctgttggcagcaggcac

SEQ ID NO: 153646 - DNA, 25 bp, Canis familiaris
ggttttccatgctggcgaaggcagg

SEQ ID NO: 153647 - DNA, 25 bp, Canis familiaris
ggtctttttcttgctcaaggctggt

SEQ ID NO: 153648 - DNA, 25 bp, Canis familiaris
ggtctcttaatcacactgaagtgcc

SEQ ID NO: 153649 - DNA, 25 bp, Canis familiaris
ggtctgctgttatggcagctgcagg

SEQ ID NO: 153650 - DNA, 25 bp, Canis familiaris
ggatcatggttttggcaggggacac

SEQ ID NO: 153651 - DNA, 25 bp, Canis familiaris
ggtcgttgtctctgcaggaggaaca

SEQ ID NO: 153652 - DNA, 25 bp, Canis familiaris
ggtaagtggcatttgaggactgaag

SEQ ID NO: 153653 - DNA, 25 bp, Canis familiaris
ggtcacgtggactagagaactggca

SEQ ID NO: 153654 - DNA, 25 bp, Canis familiaris
ggtctcgcctaggaagatactctca

SEQ ID NO: 153655 - DNA, 25 bp, Canis familiaris
ggtcattcctgaccataatggcttt

SEQ ID NO: 153656 - DNA, 25 bp, Canis familiaris
ggtcttcctgagtctatgatctgta

SEQ ID NO: 153657 - DNA, 25 bp, Canis familiaris
ggtcctccaggaggatgacctgaag

SEQ ID NO: 153658 - DNA, 25 bp, Canis familiaris
ggtcttcgagaagtaccactgcaag

SEQ ID NO: 153659 - DNA, 25 bp, Canis familiaris
ggtcttctggagttctcgcaaaaaa

SEQ ID NO: 153660 - DNA, 25 bp, Canis familiaris
ggtcttagctcacacgagccttaaa

SEQ ID NO: 153661 - DNA, 25 bp, Canis familiaris
ggtctcattgtaaatccagtgttaa

SEQ ID NO: 153662 - DNA, 25 bp, Canis familiaris
ggtctgctaccagtatcctggatat

SEQ ID NO: 153663 - DNA, 25 bp, Canis familiaris
ggtcatgacccagagcctctgtatg

SEQ ID NO: 153664 - DNA, 25 bp, Canis familiaris
ggtcagatcccagggccctgggatg

SEQ ID NO: 153665 - DNA, 25 bp, Canis familiaris
ggtctgtccagcaggtggtggtgta

SEQ ID NO: 153666 - DNA, 25 bp, Canis familiaris
ggtcggcagagccttgtgtgagggc

SEQ ID NO: 153667 - DNA, 25 bp, Canis familiaris
ggtagaagatgacttgaggcatcag

SEQ ID NO: 153668 - DNA, 25 bp, Canis familiaris
ggtaaaggatcatccgccatgtccg

SEQ ID NO: 153669 - DNA, 25 bp, Canis familiaris
ggtacgaaatacacgcaatctgcgg

SEQ ID NO: 153670 - DNA, 25 bp, Canis familiaris
ggtagtgaagtagcatccatattgc

SEQ ID NO: 153671 - DNA, 25 bp, Canis familiaris
ggatagttgggggctccatttctaa

SEQ ID NO: 153672 - DNA, 25 bp, Canis familiaris
ggtaatctgggacgcccattgtgat

SEQ ID NO: 153673 - DNA, 25 bp, Canis familiaris
ggtacaaggagtggcctcagtggct

SEQ ID NO: 153674 - DNA, 25 bp, Canis familiaris
ggtcacaattaggcacgtagagggt

SEQ ID NO: 153675 - DNA, 25 bp, Canis familiaris
ggctataattgggaactgaagtttt

SEQ ID NO: 153676 - DNA, 25 bp, Canis familiaris
ggttgaacttgcacttagcgtttgc

SEQ ID NO: 153677 - DNA, 25 bp, Canis familiaris
ggtcgaatctttcttcaggatatta

SEQ ID NO: 153678 - DNA, 25 bp, Canis familiaris
ggtcgaatctttccttcagggataa

SEQ ID NO: 153679 - DNA, 25 bp, Canis familiaris
ggtcgaacttgactatctagaggaa

SEQ ID NO: 153680 - DNA, 25 bp, Canis familiaris
ggtcttatcttaccttagcacgaga

SEQ ID NO: 153681 - DNA, 25 bp, Canis familiaris
ggtctccctgtgacttcaaacaagt

SEQ ID NO: 153682 - DNA, 25 bp, Canis familiaris
ggatccccacgtgggacaataagcc

SEQ ID NO: 153683 - DNA, 25 bp, Canis familiaris
ggtcgagccacgaggcaggaaacta

SEQ ID NO: 153684 - DNA, 25 bp, Canis familiaris
ggtcttgccaaaatgaaagaaattg

SEQ ID NO: 153685 - DNA, 25 bp, Canis familiaris
ggtctctgccactttaaagttctat

SEQ ID NO: 153686 - DNA, 25 bp, Canis familiaris
ggtcatccatcctgttaagttttcc

SEQ ID NO: 153687 - DNA, 25 bp, Canis familiaris
ggacaggctgactctctaagttagg

SEQ ID NO: 153688 - DNA, 25 bp, Canis familiaris
ggagacgctattttacaagtaccag

SEQ ID NO: 153689 - DNA, 25 bp, Canis familiaris
ggagaccatgttttaaccgcgtcag

SEQ ID NO: 153690 - DNA, 25 bp, Canis familiaris
ggtaccagttcttacacgggtcagc

SEQ ID NO: 153691 - DNA, 25 bp, Canis familiaris
ggtcccatttcctagagtggggagc

SEQ ID NO: 153692 - DNA, 25 bp, Canis familiaris
ggtctgccatttattagctgtgcgg

SEQ ID NO: 153693 - DNA, 25 bp, Canis familiaris
ggtcccatgtctattactttggatc

SEQ ID NO: 153694 - DNA, 25 bp, Canis familiaris
ggatcacacttccaatttcttcggt

SEQ ID NO: 153695 - DNA, 25 bp, Canis familiaris
ggtaccttcctgttgtttgtgggat

SEQ ID NO: 153696 - DNA, 25 bp, Canis familiaris
ggtagcttttagtgttcttggagag

SEQ ID NO: 153697 - DNA, 25 bp, Canis familiaris
ggtatagtttttctgtgttggaggg

SEQ ID NO: 153698 - DNA, 25 bp, Canis familiaris
ggtcaagagttcgtgtgggttgtgg

SEQ ID NO: 153699 - DNA, 25 bp, Canis familiaris
ggataatgggtttgtcgtcttgagg

SEQ ID NO: 153700 - DNA, 25 bp, Canis familiaris
ggtaacgtattatggtgcttgcaat

SEQ ID NO: 153701 - DNA, 25 bp, Canis familiaris
ggtagacgctttgtggttggaataa

SEQ ID NO: 153702 - DNA, 25 bp, Canis familiaris
ggtagacgctttgtggttggaataa

SEQ ID NO: 153703 - DNA, 25 bp, Canis familiaris
ggtaaattctatgtgcctgtgggta

SEQ ID NO: 153704 - DNA, 25 bp, Canis familiaris
ggtagatatactagtttctgatgga

SEQ ID NO: 153705 - DNA, 25 bp, Canis familiaris
ggtaaatacggcatttcagggaaat

SEQ ID NO: 153706 - DNA, 25 bp, Canis familiaris
tttcccaaagagatttctaggtaag

SEQ ID NO: 153707 - DNA, 25 bp, Canis familiaris
tgggcctaaaaggtccctagtgtag

SEQ ID NO: 153708 - DNA, 25 bp, Canis familiaris
ggtttgaaaagcagccccagtggga

SEQ ID NO: 153709 - DNA, 25 bp, Canis familiaris
ggtctctgatatggagtaccccagg

SEQ ID NO: 153710 - DNA, 25 bp, Canis familiaris
ggtctgtgacattctgtaagcccgt

SEQ ID NO: 153711 - DNA, 25 bp, Canis familiaris
ggtcatggcacttctgaaagcacat

SEQ ID NO: 153712 - DNA, 25 bp, Canis familiaris
ggtctgcatcaactctgagcacagc

SEQ ID NO: 153713 - DNA, 25 bp, Canis familiaris
ggtctccacagagggcatcaggatg

SEQ ID NO: 153714 - DNA, 25 bp, Canis familiaris
ggtccctgagcaaggcagctcagag

SEQ ID NO: 153715 - DNA, 25 bp, Canis familiaris
ggtcccagatgctgggctgcacatc

SEQ ID NO: 153716 - DNA, 25 bp, Canis familiaris
ggtccgcatgattcagcgcggcacc

SEQ ID NO: 153717 - DNA, 25 bp, Canis familiaris
ggtcgctgctgcaacaggagtacca

SEQ ID NO: 153718 - DNA, 25 bp, Canis familiaris
ggtaatctatactggtcaccgacca

SEQ ID NO: 153719 - DNA, 25 bp, Canis familiaris
ggtcacttttattgagtcaccgatc

SEQ ID NO: 153720 - DNA, 25 bp, Canis familiaris
ggtcacttttgagaatctgactgca

SEQ ID NO: 153721 - DNA, 25 bp, Canis familiaris
ggtacaatcctgagaatctggccac

SEQ ID NO: 153722 - DNA, 25 bp, Canis familiaris
ggtctcaagttgatgaagctccata

SEQ ID NO: 153723 - DNA, 25 bp, Canis familiaris
ggtcgtgatcttaatgtagccctag

SEQ ID NO: 153724 - DNA, 25 bp, Canis familiaris
ggtctggttgtgaataatctcctag

SEQ ID NO: 153725 - DNA, 25 bp, Canis familiaris
ggtcggtcagtatttattgcctcca

SEQ ID NO: 153726 - DNA, 25 bp, Canis familiaris
ggtctttcgttgttcaatgtcatta

SEQ ID NO: 153727 - DNA, 25 bp, Canis familiaris
ggtctttggttcttgcacagagttt

SEQ ID NO: 153728 - DNA, 25 bp, Canis familiaris
ggtccctgggtgaatgccaattatt

SEQ ID NO: 153729 - DNA, 25 bp, Canis familiaris
ggaacctggggtcacaattatatgg

SEQ ID NO: 153730 - DNA, 25 bp, Canis familiaris
ggtacttagggacagcaacaacagg

SEQ ID NO: 153731 - DNA, 25 bp, Canis familiaris
tgtgtaattggtttgggtacccagg

SEQ ID NO: 153732 - DNA, 25 bp, Canis familiaris
ggtaatcatggttagtgctttcccc

SEQ ID NO: 153733 - DNA, 25 bp, Canis familiaris
ggtaagcagttctgtattcttccaa

SEQ ID NO: 153734 - DNA, 25 bp, Canis familiaris
ggtagggttttctattctagagcca

SEQ ID NO: 153735 - DNA, 25 bp, Canis familiaris
ggattgggattggtcaagtcggccg

SEQ ID NO: 153736 - DNA, 25 bp, Canis familiaris
ggttgaggggttgagcatcggcctt

SEQ ID NO: 153737 - DNA, 25 bp, Canis familiaris
ggtaagggatttgaatgtgtagttc

SEQ ID NO: 153738 - DNA, 25 bp, Canis familiaris
ggtctagggtttgttggaagctttg

SEQ ID NO: 153739 - DNA, 25 bp, Canis familiaris
ggtctcaggttgtttttaggcactt

SEQ ID NO: 153740 - DNA, 25 bp, Canis familiaris
ggtcgccgtgtgtttgtgatatcgc

SEQ ID NO: 153741 - DNA, 25 bp, Canis familiaris
ggtcccagtgcatttcagtacaagc

SEQ ID NO: 153742 - DNA, 25 bp, Canis familiaris
ggtcccagagtcatcgctaatactc

SEQ ID NO: 153743 - DNA, 25 bp, Canis familiaris
ggtcagggattcttctgtaacagcc

SEQ ID NO: 153744 - DNA, 25 bp, Canis familiaris
ggtcacaatttcatctgtcaaagca

SEQ ID NO: 153745 - DNA, 25 bp, Canis familiaris
ggtcgactatgtcttgtctcaactt

SEQ ID NO: 153746 - DNA, 25 bp, Canis familiaris
ggtctacgacgcttttataacattc

SEQ ID NO: 153747 - DNA, 25 bp, Canis familiaris
ggtctagatgaactttaacttctgt

SEQ ID NO: 153748 - DNA, 25 bp, Canis familiaris
ggtctggatgattctattaagtgta

SEQ ID NO: 153749 - DNA, 25 bp, Canis familiaris
ggtctggctgcatctgcgatgaagt

SEQ ID NO: 153750 - DNA, 25 bp, Canis familiaris
ggtcagcagagctcggacaagtctc

SEQ ID NO: 153751 - DNA, 25 bp, Canis familiaris
ggtctcatatgctctcgaaagatcc

SEQ ID NO: 153752 - DNA, 25 bp, Canis familiaris
ggtctcatatggtttcatacagtct

SEQ ID NO: 153753 - DNA, 25 bp, Canis familiaris
ggtcaattgtcactgtcatcagaat

SEQ ID NO: 153754 - DNA, 25 bp, Canis familiaris
ggatcaattactagcatgtcatact

SEQ ID NO: 153755 - DNA, 25 bp, Canis familiaris
ggatctatccagactgctgtactct

SEQ ID NO: 153756 - DNA, 25 bp, Canis familiaris
ggtcttgccaaattccatatcatct

SEQ ID NO: 153757 - DNA, 25 bp, Canis familiaris
ggtcactccatcgatgttcttcttc

SEQ ID NO: 153758 - DNA, 25 bp, Canis familiaris
ggtctcatccactatgtgtcattga

SEQ ID NO: 153759 - DNA, 25 bp, Canis familiaris
ggtctgccaaaaatgtcagtgccaa

SEQ ID NO: 153760 - DNA, 25 bp, Canis familiaris
ggtctccaaacctgctggatcataa

SEQ ID NO: 153761 - DNA, 25 bp, Canis familiaris
ggtcaccaaagccatgggcaccatg

SEQ ID NO: 153762 - DNA, 25 bp, Canis familiaris
ggtcagcccgattatagtgcagcct

SEQ ID NO: 153763 - DNA, 25 bp, Canis familiaris
ggttgcacgcagtgacagtgcccag

SEQ ID NO: 153764 - DNA, 25 bp, Canis familiaris
ggtcatgagtcaggtgcacttggcc

SEQ ID NO: 153765 - DNA, 25 bp, Canis familiaris
ggtcgactcaattgtcttgtgcacc

SEQ ID NO: 153766 - DNA, 25 bp, Canis familiaris
ggtctagacagaagcctggtccatc

SEQ ID NO: 153767 - DNA, 25 bp, Canis familiaris
ggtcacagacagaggaggattgcac

SEQ ID NO: 153768 - DNA, 25 bp, Canis familiaris
ggtcatagacatcaaggtggcagca

SEQ ID NO: 153769 - DNA, 25 bp, Canis familiaris
ggtacaagcaaacactgagcagcag

SEQ ID NO: 153770 - DNA, 25 bp, Canis familiaris
ggtcccacaggacagtgacagcgat

SEQ ID NO: 153771 - DNA, 25 bp, Canis familiaris
ggtcccaagaagcatctgaagcgtg

SEQ ID NO: 153772 - DNA, 25 bp, Canis familiaris
ggtcccaccaacatctttagatttt

SEQ ID NO: 153773 - DNA, 25 bp, Canis familiaris
ggtcccatccaaagtcttgatagta

SEQ ID NO: 153774 - DNA, 25 bp, Canis familiaris
ggtcccatgccagggttctagagtc

SEQ ID NO: 153775 - DNA, 25 bp, Canis familiaris
ggtctccacgcggggattagatctc

SEQ ID NO: 153776 - DNA, 25 bp, Canis familiaris
ggtcgatccacggtggttgtgtgtc

SEQ ID NO: 153777 - DNA, 25 bp, Canis familiaris
ggtcgatgcaacgagtgatgaggtt

SEQ ID NO: 153778 - DNA, 25 bp, Canis familiaris
ggtagtaacacactgaagtttttat

SEQ ID NO: 153779 - DNA, 25 bp, Canis familiaris
ggtagcaacatacgggatcttttta

SEQ ID NO: 153780 - DNA, 25 bp, Canis familiaris
ggtcaccaatgactgtcgattttat

SEQ ID NO: 153781 - DNA, 25 bp, Canis familiaris
ggtctccctgtttctgacattatga

SEQ ID NO: 153782 - DNA, 25 bp, Canis familiaris
ggtctccctgttttccaattaatca

SEQ ID NO: 153783 - DNA, 25 bp, Canis familiaris
ggttcccgcctgctgtgaaaaaaat

SEQ ID NO: 153784 - DNA, 25 bp, Canis familiaris
ggttcctggtcgtcttaacaaagca

SEQ ID NO: 153785 - DNA, 25 bp, Canis familiaris
ggtcttcgttcggttcaaacaccat

SEQ ID NO: 153786 - DNA, 25 bp, Canis familiaris
ggtctatcttttgttcaaagttctt

SEQ ID NO: 153787 - DNA, 25 bp, Canis familiaris
ggtcgccgtcttgtgaacaagaatt

SEQ ID NO: 153788 - DNA, 25 bp, Canis familiaris
ggtacctgtaagaccaagccgtatt

SEQ ID NO: 153789 - DNA, 25 bp, Canis familiaris
ggtaccagtggagtccaccggtgta

SEQ ID NO: 153790 - DNA, 25 bp, Canis familiaris
ggtaggagggagcccaacttctgta

SEQ ID NO: 153791 - DNA, 25 bp, Canis familiaris
ggttgtggggacccagattcctgtt

SEQ ID NO: 153792 - DNA, 25 bp, Canis familiaris
ggttttcggaactgaggccatgatt

SEQ ID NO: 153793 - DNA, 25 bp, Canis familiaris
ggttttcggaactgaggccatgatt

SEQ ID NO: 153794 - DNA, 25 bp, Canis familiaris
ggttttcggaggcggcggtgattat

SEQ ID NO: 153795 - DNA, 25 bp, Canis familiaris
ggtaatttggtggggacaggtgatt

SEQ ID NO: 153796 - DNA, 25 bp, Canis familiaris
ggtattactcgtgcgtacacgttat

SEQ ID NO: 153797 - DNA, 25 bp, Canis familiaris
ggtcatgtgacttttctgtactgtt

SEQ ID NO: 153798 - DNA, 25 bp, Canis familiaris
ggtaattcttgttctgtttgccata

SEQ ID NO: 153799 - DNA, 25 bp, Canis familiaris
ggtctttcattttgctttaaaacat

SEQ ID NO: 153800 - DNA, 25 bp, Canis familiaris
ggtctatgccatcgcaatgtttcga

SEQ ID NO: 153801 - DNA, 25 bp, Canis familiaris
ggtctcatgccccaattggtttgag

SEQ ID NO: 153802 - DNA, 25 bp, Canis familiaris
ggtcttggaacaattggttggatgt

SEQ ID NO: 153803 - DNA, 25 bp, Canis familiaris
ggtctctgctgaaggttgtaagtgg

SEQ ID NO: 153804 - DNA, 25 bp, Canis familiaris
ggtctgtggagctgtagttatgtgg

SEQ ID NO: 153805 - DNA, 25 bp, Canis familiaris
ggtcgatgtgggctggtttaggttt

SEQ ID NO: 153806 - DNA, 25 bp, Canis familiaris
ggtagatgacggctaggtgccctga

SEQ ID NO: 153807 - DNA, 25 bp, Canis familiaris
ggtcaggacccggggttgtctgaat

SEQ ID NO: 153808 - DNA, 25 bp, Canis familiaris
ggtcattatcccagggttctgggat

SEQ ID NO: 153809 - DNA, 25 bp, Canis familiaris
ggtctctgtcccaaggggttggagg

SEQ ID NO: 153810 - DNA, 25 bp, Canis familiaris
ggtctcgtgcacacagaggagtagg

SEQ ID NO: 153811 - DNA, 25 bp, Canis familiaris
ggtctttcatcttagagtcattggt

SEQ ID NO: 153812 - DNA, 25 bp, Canis familiaris
ggtcttcatccttagagtcattggt

SEQ ID NO: 153813 - DNA, 25 bp, Canis familiaris
ggtcatttcgcaattagtccgtgta

SEQ ID NO: 153814 - DNA, 25 bp, Canis familiaris
ggtcatgtgtttttaggcctaataa

SEQ ID NO: 153815 - DNA, 25 bp, Canis familiaris
ggtatttatttccaggaccacaagt

SEQ ID NO: 153816 - DNA, 25 bp, Canis familiaris
ggtttacaacctcggactcagtagg

SEQ ID NO: 153817 - DNA, 25 bp, Canis familiaris
ggtactaaagcccagaacacgaata

SEQ ID NO: 153818 - DNA, 25 bp, Canis familiaris
ggttgtcacaactctggaaggaata

SEQ ID NO: 153819 - DNA, 25 bp, Canis familiaris
ggtacccaagacctggaagtcaaag

SEQ ID NO: 153820 - DNA, 25 bp, Canis familiaris
ggtaacatccatccagtggaagcta

SEQ ID NO: 153821 - DNA, 25 bp, Canis familiaris
ggtcaacatcgacatgctggagcag

SEQ ID NO: 153822 - DNA, 25 bp, Canis familiaris
ggtcataacaagcattgagcagaaa

SEQ ID NO: 153823 - DNA, 25 bp, Canis familiaris
ggtcaggattaccgtgatgtgagaa

SEQ ID NO: 153824 - DNA, 25 bp, Canis familiaris
ggtctgtgagggcgtggtggaaagg

SEQ ID NO: 153825 - DNA, 25 bp, Canis familiaris
ggtctccaggtgtgggtgtgaagtc

SEQ ID NO: 153826 - DNA, 25 bp, Canis familiaris
ggtcaccagggctgcttttaactct

SEQ ID NO: 153827 - DNA, 25 bp, Canis familiaris
ggtcaccagggctgccatttgcagt

SEQ ID NO: 153828 - DNA, 25 bp, Canis familiaris
ggtcaagcagaagtgggcatctcga

SEQ ID NO: 153829 - DNA, 25 bp, Canis familiaris
ggtcacacagacatcatgtgcccta

SEQ ID NO: 153830 - DNA, 25 bp, Canis familiaris
ggtacagatacagctgtgccttcgg

SEQ ID NO: 153831 - DNA, 25 bp, Canis familiaris
ggtctcaaagcaaatgcctcttagc

SEQ ID NO: 153832 - DNA, 25 bp, Canis familiaris
ggtacacaatcaagtgccttctagg

SEQ ID NO: 153833 - DNA, 25 bp, Canis familiaris
ggtcacaagtaaatcctctttgggt

SEQ ID NO: 153834 - DNA, 25 bp, Canis familiaris
ggtcaaaatacaatccctaatcgtg

SEQ ID NO: 153835 - DNA, 25 bp, Canis familiaris
ggtactaatagcaatccaggaactg

SEQ ID NO: 153836 - DNA, 25 bp, Canis familiaris
ggtacttacagttagaaaatagaga

SEQ ID NO: 153837 - DNA, 25 bp, Canis familiaris
ggtctctcctcgtttggacaataaa

SEQ ID NO: 153838 - DNA, 25 bp, Canis familiaris
ggatcccctgggagagccaatacac

SEQ ID NO: 153839 - DNA, 25 bp, Canis familiaris
ggaggccctgggacaggggtggcct

SEQ ID NO: 153840 - DNA, 25 bp, Canis familiaris
tgtaactttgggtcagtaatgggcc

SEQ ID NO: 153841 - DNA, 25 bp, Canis familiaris
ggagactttggatcggttggtgcca

SEQ ID NO: 153842 - DNA, 25 bp, Canis familiaris
ggtacctgggtaggctttggtctat

SEQ ID NO: 153843 - DNA, 25 bp, Canis familiaris
ggtaaatgtctgtatgtctttggtg

SEQ ID NO: 153844 - DNA, 25 bp, Canis familiaris
ggtaaagactggtttattggtggca

SEQ ID NO: 153845 - DNA, 25 bp, Canis familiaris
ggtaaaacatggcttgttgctggtg

SEQ ID NO: 153846 - DNA, 25 bp, Canis familiaris
ggtaccaacaggccttgatggtccg

SEQ ID NO: 153847 - DNA, 25 bp, Canis familiaris
ggtacccacggtctagtgtgtgttg

SEQ ID NO: 153848 - DNA, 25 bp, Canis familiaris
ggtaacccagtgcactgaggttttc

SEQ ID NO: 153849 - DNA, 25 bp, Canis familiaris
ggtaacctagtgctgtactggtccc

SEQ ID NO: 153850 - DNA, 25 bp, Canis familiaris
ggtctactgcggtcgttacatcagt

SEQ ID NO: 153851 - DNA, 25 bp, Canis familiaris
ggtctaatgaggtcagttcacaata

SEQ ID NO: 153852 - DNA, 25 bp, Canis familiaris
ggtctattgaggcatttccttaaaa

SEQ ID NO: 153853 - DNA, 25 bp, Canis familiaris
ggttttgagaattttgcctgaagaa

SEQ ID NO: 153854 - DNA, 25 bp, Canis familiaris
ggtagttggacttcattctcttagt

SEQ ID NO: 153855 - DNA, 25 bp, Canis familiaris
ggtcagatttttacatctctttcga

SEQ ID NO: 153856 - DNA, 25 bp, Canis familiaris
ggtcattgtttattttcttctttct

SEQ ID NO: 153857 - DNA, 25 bp, Canis familiaris
ggtctgccttatgagttttgttttg

SEQ ID NO: 153858 - DNA, 25 bp, Canis familiaris
ggtctgctattttatacttctgtga

SEQ ID NO: 153859 - DNA, 25 bp, Canis familiaris
ggtttatctggaatacctcgtcgat

SEQ ID NO: 153860 - DNA, 25 bp, Canis familiaris
ggtttatctggaatacctcgtcgat

SEQ ID NO: 153861 - DNA, 25 bp, Canis familiaris
ggtctagtctgatttacctgcttcc

SEQ ID NO: 153862 - DNA, 25 bp, Canis familiaris
ggtctcctctgacttcaacagcgac

SEQ ID NO: 153863 - DNA, 25 bp, Canis familiaris
ggtctcacttgacataactgatgcg

SEQ ID NO: 153864 - DNA, 25 bp, Canis familiaris
ggtctgcacctgcaaaatcgaggaa

SEQ ID NO: 153865 - DNA, 25 bp, Canis familiaris
ggtctcccatggaacctgtgggacc

SEQ ID NO: 153866 - DNA, 25 bp, Canis familiaris
ggtcttcctggtgctgttggaacta

SEQ ID NO: 153867 - DNA, 25 bp, Canis familiaris
ggtctctcacatctttatttaatct

SEQ ID NO: 153868 - DNA, 25 bp, Canis familiaris
ggtctccaagagaaaaattcactca

SEQ ID NO: 153869 - DNA, 25 bp, Canis familiaris
ggtcattcaacacaatggagtcgct

SEQ ID NO: 153870 - DNA, 25 bp, Canis familiaris
ggtcattagtgacacaggttcgcct

SEQ ID NO: 153871 - DNA, 25 bp, Canis familiaris
ggtcattagggcattttctcgtgtg

SEQ ID NO: 153872 - DNA, 25 bp, Canis familiaris
ggtctttgctggatgtttggtttgt

SEQ ID NO: 153873 - DNA, 25 bp, Canis familiaris
ggtaattgcggaggttgcccttttg

SEQ ID NO: 153874 - DNA, 25 bp, Canis familiaris
ggtatattcgagaggtgccctttgg

SEQ ID NO: 153875 - DNA, 25 bp, Canis familiaris
ggtacgatcgaagggactacgtctt

SEQ ID NO: 153876 - DNA, 25 bp, Canis familiaris
ggtacgatggtgtgaactttttgct

SEQ ID NO: 153877 - DNA, 25 bp, Canis familiaris
ggtcaccttgtcgaagacgttttgt

SEQ ID NO: 153878 - DNA, 25 bp, Canis familiaris
ggtacttcgtcccaatcgataatct

SEQ ID NO: 153879 - DNA, 25 bp, Canis familiaris
ggtagcttttacactgagtttctaa

SEQ ID NO: 153880 - DNA, 25 bp, Canis familiaris
ggtcagcttcatgagggtagttcct

SEQ ID NO: 153881 - DNA, 25 bp, Canis familiaris
ggtcagtcctgcagggctagaactc

SEQ ID NO: 153882 - DNA, 25 bp, Canis familiaris
ggtcagcataccagcgggcaagaca

SEQ ID NO: 153883 - DNA, 25 bp, Canis familiaris
ggtactagcctgctggagaaaagta

SEQ ID NO: 153884 - DNA, 25 bp, Canis familiaris
ggtactctgcttcctgtggaaaggg

SEQ ID NO: 153885 - DNA, 25 bp, Canis familiaris
ggtacttgcagctgctctggaagga

SEQ ID NO: 153886 - DNA, 25 bp, Canis familiaris
ggtcatctgtgccaactctaggcag

SEQ ID NO: 153887 - DNA, 25 bp, Canis familiaris
ggtctctggtaaataaggcatcatc

SEQ ID NO: 153888 - DNA, 25 bp, Canis familiaris
ggtcactgaggagtccaaggctctc

SEQ ID NO: 153889 - DNA, 25 bp, Canis familiaris
ggtacgggcagaacgagtgcgcctt

SEQ ID NO: 153890 - DNA, 25 bp, Canis familiaris
ggtctctgaggctgaaagtgccact

SEQ ID NO: 153891 - DNA, 25 bp, Canis familiaris
ggtctctgggtaggcaagtggtatt

SEQ ID NO: 153892 - DNA, 25 bp, Canis familiaris
ggtctcaggcagccaggtttggtaa

SEQ ID NO: 153893 - DNA, 25 bp, Canis familiaris
ggtctcagtccaggtgtgtgtgtgt

SEQ ID NO: 153894 - DNA, 25 bp, Canis familiaris
ggtcacattctcaggttttgggggt

SEQ ID NO: 153895 - DNA, 25 bp, Canis familiaris
ggtagacaccttggtttcaggggag

SEQ ID NO: 153896 - DNA, 25 bp, Canis familiaris
ggtaccccactgagtccagaggtgg

SEQ ID NO: 153897 - DNA, 25 bp, Canis familiaris
ggtcagctccgagtgacatgtccat

SEQ ID NO: 153898 - DNA, 25 bp, Canis familiaris
ggtctgctccaagtacttctatgac

SEQ ID NO: 153899 - DNA, 25 bp, Canis familiaris
ggaggcctcaaatctttcattctcc

SEQ ID NO: 153900 - DNA, 25 bp, Canis familiaris
ggtagcccaaagttatggctccttc

SEQ ID NO: 153901 - DNA, 25 bp, Canis familiaris
ggtacctaaaattcaccttgattct

SEQ ID NO: 153902 - DNA, 25 bp, Canis familiaris
ggtacctttgacaacaactgtgaac

SEQ ID NO: 153903 - DNA, 25 bp, Canis familiaris
ggtacactttgggacacttgtgggc

SEQ ID NO: 153904 - DNA, 25 bp, Canis familiaris
ggtacctattctgatccctgaggaa

SEQ ID NO: 153905 - DNA, 25 bp, Canis familiaris
ggtactccttgctctacgtgcaagg

SEQ ID NO: 153906 - DNA, 25 bp, Canis familiaris
ggtacttcctcatggagcgtgggaa

SEQ ID NO: 153907 - DNA, 25 bp, Canis familiaris
ggtaccacctaccagagagtggccc

SEQ ID NO: 153908 - DNA, 25 bp, Canis familiaris
ggtacacacctcaccaaggaagaca

SEQ ID NO: 153909 - DNA, 25 bp, Canis familiaris
ggtagcaacctgacttaaaggaaca

SEQ ID NO: 153910 - DNA, 25 bp, Canis familiaris
ggtagcccctccaatcaaatggatt

SEQ ID NO: 153911 - DNA, 25 bp, Canis familiaris
ggtattccttccacgtcagaagttg

SEQ ID NO: 153912 - DNA, 25 bp, Canis familiaris
ggtcattcccatgctctatgtggaa

SEQ ID NO: 153913 - DNA, 25 bp, Canis familiaris
ggtctttgctgtgcgcagtgggaag

SEQ ID NO: 153914 - DNA, 25 bp, Canis familiaris
ggtattctgtggaccagctaggttg

SEQ ID NO: 153915 - DNA, 25 bp, Canis familiaris
ggtagttgtcgtccagcgaagtgga

SEQ ID NO: 153916 - DNA, 25 bp, Canis familiaris
ggtagcttgtgtgaccaggcaagga

SEQ ID NO: 153917 - DNA, 25 bp, Canis familiaris
ggtcagctgttgttaaagcctggga

SEQ ID NO: 153918 - DNA, 25 bp, Canis familiaris
ggtacatgtcgaatggtcagcgctg

SEQ ID NO: 153919 - DNA, 25 bp, Canis familiaris
ggtagcagagccaggtcagctttcc

SEQ ID NO: 153920 - DNA, 25 bp, Canis familiaris
ggtataggccataagctcaactctc

SEQ ID NO: 153921 - DNA, 25 bp, Canis familiaris
ggtcaagatccaagatgcgcaccgg

SEQ ID NO: 153922 - DNA, 25 bp, Canis familiaris
ggtagagcatcaaagcaccaccgac

SEQ ID NO: 153923 - DNA, 25 bp, Canis familiaris
ggtaactcaaagaaatccacacatc

SEQ ID NO: 153924 - DNA, 25 bp, Canis familiaris
ggtcagatctgaaaacacacacaca

SEQ ID NO: 153925 - DNA, 25 bp, Canis familiaris
ggtcatgctcatcagaacagtccaa

SEQ ID NO: 153926 - DNA, 25 bp, Canis familiaris
ggtaccatgctgcagaagtcctagc

SEQ ID NO: 153927 - DNA, 25 bp, Canis familiaris
ggtacacatcacaatcgagtcttac

SEQ ID NO: 153928 - DNA, 25 bp, Canis familiaris
ggtacaactccatatgctttaacag

SEQ ID NO: 153929 - DNA, 25 bp, Canis familiaris
ggtactactagatgtctttaggcag

SEQ ID NO: 153930 - DNA, 25 bp, Canis familiaris
ggtagtatctggtgttgggctgtgc

SEQ ID NO: 153931 - DNA, 25 bp, Canis familiaris
ggtaggcctgtaacctgaagcttga

SEQ ID NO: 153932 - DNA, 25 bp, Canis familiaris
ggtagagtactcaacggaggcctgg

SEQ ID NO: 153933 - DNA, 25 bp, Canis familiaris
ggtagagtactcttaaaggcacttt

SEQ ID NO: 153934 - DNA, 25 bp, Canis familiaris
ggtcaggtgaccttactcaggagta

SEQ ID NO: 153935 - DNA, 25 bp, Canis familiaris
ggtcaggaggccacacttggaggac

SEQ ID NO: 153936 - DNA, 25 bp, Canis familiaris
ggttgtgggacgcacttggacgatc

SEQ ID NO: 153937 - DNA, 25 bp, Canis familiaris
ggttaggagattcttctcgaccata

SEQ ID NO: 153938 - DNA, 25 bp, Canis familiaris
ggttcaaaattggccaccggccaat

SEQ ID NO: 153939 - DNA, 25 bp, Canis familiaris
ggttaaagtgtgggccaagacctat

SEQ ID NO: 153940 - DNA, 25 bp, Canis familiaris
ggtctaatactttttcaagcacttt

SEQ ID NO: 153941 - DNA, 25 bp, Canis familiaris
ggtcataagtttcatgtttgccttt

SEQ ID NO: 153942 - DNA, 25 bp, Canis familiaris
ggtatcaagtttcctcaaagccttt

SEQ ID NO: 153943 - DNA, 25 bp, Canis familiaris
ggtcacaagtgtactctaaggggct

SEQ ID NO: 153944 - DNA, 25 bp, Canis familiaris
ggtcaacgagcaacggtgtagaaaa

SEQ ID NO: 153945 - DNA, 25 bp, Canis familiaris
ggtcaaggaaggtggcatagaaggc

SEQ ID NO: 153946 - DNA, 25 bp, Canis familiaris
ggatatagggagggggcggaagttg

SEQ ID NO: 153947 - DNA, 25 bp, Canis familiaris
ggtaagcgaggcaggacgaggcagc

SEQ ID NO: 153948 - DNA, 25 bp, Canis familiaris
ggtcattgcaggcctggggagaggg

SEQ ID NO: 153949 - DNA, 25 bp, Canis familiaris
ggtcaacataatcctgggggggagc

SEQ ID NO: 153950 - DNA, 25 bp, Canis familiaris
ggtcacctcaagcctgagttgggaa

SEQ ID NO: 153951 - DNA, 25 bp, Canis familiaris
ggtcttccactggcatgtgttggga

SEQ ID NO: 153952 - DNA, 25 bp, Canis familiaris
ggtcatcggcatcagcattgcttgt

SEQ ID NO: 153953 - DNA, 25 bp, Canis familiaris
ggtcatggtgcgtccattgttcatc

SEQ ID NO: 153954 - DNA, 25 bp, Canis familiaris
ggtctagcagacgctgacttcatct

SEQ ID NO: 153955 - DNA, 25 bp, Canis familiaris
ggtatcaaaaccacttcctggaatt

SEQ ID NO: 153956 - DNA, 25 bp, Canis familiaris
ggttccagaaccattaaggggatat

SEQ ID NO: 153957 - DNA, 25 bp, Canis familiaris
ggtctaagcgatctttaaaggattt

SEQ ID NO: 153958 - DNA, 25 bp, Canis familiaris
ggtaaccgatgccttaatgaaggta

SEQ ID NO: 153959 - DNA, 25 bp, Canis familiaris
ggtaatgcatcgtaagatcttgaag

SEQ ID NO: 153960 - DNA, 25 bp, Canis familiaris
ggtaatccaagagactgcataagaa

SEQ ID NO: 153961 - DNA, 25 bp, Canis familiaris
ggctaaccaagaggaccaagtcacg

SEQ ID NO: 153962 - DNA, 25 bp, Canis familiaris
ggtacactcagatggagaccatgtc

SEQ ID NO: 153963 - DNA, 25 bp, Canis familiaris
ggtatagtctgaggcaggaccaggg

SEQ ID NO: 153964 - DNA, 25 bp, Canis familiaris
ggtaggtgtaactgctctagttggt

SEQ ID NO: 153965 - DNA, 25 bp, Canis familiaris
ggtaagtggtacagccagatgtctg

SEQ ID NO: 153966 - DNA, 25 bp, Canis familiaris
ggtctagggtacagaatgctccaaa

SEQ ID NO: 153967 - DNA, 25 bp, Canis familiaris
ggtctagccagtctggggtccagaa

SEQ ID NO: 153968 - DNA, 25 bp, Canis familiaris
ggtcagaggcccatggggatacgaa

SEQ ID NO: 153969 - DNA, 25 bp, Canis familiaris
ggtcaagccccatgaggagtaccag

SEQ ID NO: 153970 - DNA, 25 bp, Canis familiaris
ggtcagactccctaaagaagccaat

SEQ ID NO: 153971 - DNA, 25 bp, Canis familiaris
ggtcacactcaccttaggaagaaca

SEQ ID NO: 153972 - DNA, 25 bp, Canis familiaris
ggtcaacgccagtaagtgaaaaccg

SEQ ID NO: 153973 - DNA, 25 bp, Canis familiaris
ggctaaaggcggcactaaaccctga

SEQ ID NO: 153974 - DNA, 25 bp, Canis familiaris
ggtaaagacgtccactaatatagtt

SEQ ID NO: 153975 - DNA, 25 bp, Canis familiaris
ggtaacgcctgtgttcagattcagt

SEQ ID NO: 153976 - DNA, 25 bp, Canis familiaris
ggtaagctgaggttttctgcattag

SEQ ID NO: 153977 - DNA, 25 bp, Canis familiaris
ggtatcctgaggatcgtgctttcag

SEQ ID NO: 153978 - DNA, 25 bp, Canis familiaris
ggtactctaacttctgttggataca

SEQ ID NO: 153979 - DNA, 25 bp, Canis familiaris
ggtcacccgataccgcaatggagac

SEQ ID NO: 153980 - DNA, 25 bp, Canis familiaris
ggtcatcgggatttcccatcacaac

SEQ ID NO: 153981 - DNA, 25 bp, Canis familiaris
ggtcaaggagactgccaccagaaga

SEQ ID NO: 153982 - DNA, 25 bp, Canis familiaris
ggtcagggggtcctacacagaaact

SEQ ID NO: 153983 - DNA, 25 bp, Canis familiaris
ggtcagctgggattgccttaatgaa

SEQ ID NO: 153984 - DNA, 25 bp, Canis familiaris
ggtagctaggaggctcttgagatga

SEQ ID NO: 153985 - DNA, 25 bp, Canis familiaris
ggtagctggggcctcttaggaaaat

SEQ ID NO: 153986 - DNA, 25 bp, Canis familiaris
tggtatggtgggggtttctaacgat

SEQ ID NO: 153987 - DNA, 25 bp, Canis familiaris
ggtaggtctgacagtggaaaccgac

SEQ ID NO: 153988 - DNA, 25 bp, Canis familiaris
ggtaggcttggtaggcgtgcaaccc

SEQ ID NO: 153989 - DNA, 25 bp, Canis familiaris
ggtaggcatagataccaggtccccc

SEQ ID NO: 153990 - DNA, 25 bp, Canis familiaris
ggatgacaataagagcccattcccc

SEQ ID NO: 153991 - DNA, 25 bp, Canis familiaris
ggtacatataattggccacattccc

SEQ ID NO: 153992 - DNA, 25 bp, Canis familiaris
ggtagtaatttgcccatttcatctc

SEQ ID NO: 153993 - DNA, 25 bp, Canis familiaris
ggtagtagatttgttcatcgttcaa

SEQ ID NO: 153994 - DNA, 25 bp, Canis familiaris
ggtaggcagggtacttccagatgta

SEQ ID NO: 153995 - DNA, 25 bp, Canis familiaris
ggtagtggtggttcatatctcaggt

SEQ ID NO: 153996 - DNA, 25 bp, Canis familiaris
ggtagtcgggttcatcctgacaaac

SEQ ID NO: 153997 - DNA, 25 bp, Canis familiaris
ggtacttgctggatccacactaaca

SEQ ID NO: 153998 - DNA, 25 bp, Canis familiaris
ggtaatgagctggaatgcccacaga

SEQ ID NO: 153999 - DNA, 25 bp, Canis familiaris
ggctttcgggaatgccaagaccgtg

SEQ ID NO: 154000 - DNA, 25 bp, Canis familiaris
ggttcgcggtgacactaaacgccac

SEQ ID NO: 154001 - DNA, 25 bp, Canis familiaris
tggttccaggtgacccaaacactca

SEQ ID NO: 154002 - DNA, 25 bp, Canis familiaris
ggtcacaagtatgccaaagacatcc

SEQ ID NO: 154003 - DNA, 25 bp, Canis familiaris
ggtcatatatataccctaaatgccc

SEQ ID NO: 154004 - DNA, 25 bp, Canis familiaris
ggtagtctatgcccttaacatgtcc

SEQ ID NO: 154005 - DNA, 25 bp, Canis familiaris
ggtatcttgcaggctgttaaaatgc

SEQ ID NO: 154006 - DNA, 25 bp, Canis familiaris
ggtatgcccagtcatgtcaagaagc

SEQ ID NO: 154007 - DNA, 25 bp, Canis familiaris
ggtcaccgagtgtgtcaagcagatc

SEQ ID NO: 154008 - DNA, 25 bp, Canis familiaris
ggtcagcgctgattaagttggcaca

SEQ ID NO: 154009 - DNA, 25 bp, Canis familiaris
ggtcacctttagccttggcaaatca

SEQ ID NO: 154010 - DNA, 25 bp, Canis familiaris
ggtcattcttaaccttatcatttga

SEQ ID NO: 154011 - DNA, 25 bp, Canis familiaris
ggtaatttatctataaccttgggat

SEQ ID NO: 154012 - DNA, 25 bp, Canis familiaris
ggtagttgttcctgaagccactgga

SEQ ID NO: 154013 - DNA, 25 bp, Canis familiaris
ggtcagtttctcaggaaggcagatg

SEQ ID NO: 154014 - DNA, 25 bp, Canis familiaris
ggtaatgtgttcaaggacacagcgg

SEQ ID NO: 154015 - DNA, 25 bp, Canis familiaris
ggtagagcgcttgcctagcaagcgc

SEQ ID NO: 154016 - DNA, 25 bp, Canis familiaris
ggtaggggaaccaagcatagcaggg

SEQ ID NO: 154017 - DNA, 25 bp, Canis familiaris
ggtagagggatgcctgtagtacggc

SEQ ID NO: 154018 - DNA, 25 bp, Canis familiaris
ggtagagcggtcccagatgtaccac

SEQ ID NO: 154019 - DNA, 25 bp, Canis familiaris
ggtagcaggcgtttcagatggtccc

SEQ ID NO: 154020 - DNA, 25 bp, Canis familiaris
ggtagagaggctctccagcaggcac

SEQ ID NO: 154021 - DNA, 25 bp, Canis familiaris
ggtcatggtggcaggctcatgggcc

SEQ ID NO: 154022 - DNA, 25 bp, Canis familiaris
ggtcttgctggtcaacatggcgatc

SEQ ID NO: 154023 - DNA, 25 bp, Canis familiaris
ggtctatgaggaagcatccatcgca

SEQ ID NO: 154024 - DNA, 25 bp, Canis familiaris
ggtcacatgggaagcaactactggg

SEQ ID NO: 154025 - DNA, 25 bp, Canis familiaris
ggtaatggagacccacattctgtgg

SEQ ID NO: 154026 - DNA, 25 bp, Canis familiaris
ggtcaatgagtaacccacctgtgag

SEQ ID NO: 154027 - DNA, 25 bp, Canis familiaris
ggtcacagtattatccacgcaggag

SEQ ID NO: 154028 - DNA, 25 bp, Canis familiaris
ggtcacactatgatgcttctggcag

SEQ ID NO: 154029 - DNA, 25 bp, Canis familiaris
ggtcagaatcagtcctttggtgaaa

SEQ ID NO: 154030 - DNA, 25 bp, Canis familiaris
ggtcaaataaaaactggtgtcagcc

SEQ ID NO: 154031 - DNA, 25 bp, Canis familiaris
ggtcaacttaccaaccgtgaagcac

SEQ ID NO: 154032 - DNA, 25 bp, Canis familiaris
ggtaacatctgggcacaacttaagc

SEQ ID NO: 154033 - DNA, 25 bp, Canis familiaris
ggtataaattggcccctataagaag

SEQ ID NO: 154034 - DNA, 25 bp, Canis familiaris
ggtacaccaaggaccgcttattaga

SEQ ID NO: 154035 - DNA, 25 bp, Canis familiaris
ggtagactcaacatccagtggttaa

SEQ ID NO: 154036 - DNA, 25 bp, Canis familiaris
ggtcagaaactcaagcacagctggt

SEQ ID NO: 154037 - DNA, 25 bp, Canis familiaris
ggtcacaacacacttccatgtggtg

SEQ ID NO: 154038 - DNA, 25 bp, Canis familiaris
ggtcagaacctagcctgagagtgat

SEQ ID NO: 154039 - DNA, 25 bp, Canis familiaris
ggtaaactctcctctgaagataagg

SEQ ID NO: 154040 - DNA, 25 bp, Canis familiaris
ggtaaatcccatttggaatgataat

SEQ ID NO: 154041 - DNA, 25 bp, Canis familiaris
ggtactatgcccaaattcaagtggt

SEQ ID NO: 154042 - DNA, 25 bp, Canis familiaris
ggtaccccaacaatgtcaaggagcc

SEQ ID NO: 154043 - DNA, 25 bp, Canis familiaris
ggtacagcaccagtttcacagggag

SEQ ID NO: 154044 - DNA, 25 bp, Canis familiaris
ggtacagaccatattgatcagttga

SEQ ID NO: 154045 - DNA, 25 bp, Canis familiaris
ggtcacagcagacagcttgtagatt

SEQ ID NO: 154046 - DNA, 25 bp, Canis familiaris
ggtacatgggcctttaagcatcttc

SEQ ID NO: 154047 - DNA, 25 bp, Canis familiaris
ggtacggtactttctacagtgtgca

SEQ ID NO: 154048 - DNA, 25 bp, Canis familiaris
ggtactggtccaaatcagaagtcta

SEQ ID NO: 154049 - DNA, 25 bp, Canis familiaris
ggtactggaaatatcgcacgttcta

SEQ ID NO: 154050 - DNA, 25 bp, Canis familiaris
ggtcacggcacataggagggttcac

SEQ ID NO: 154051 - DNA, 25 bp, Canis familiaris
ggtcaggctctccaagggatgggta

SEQ ID NO: 154052 - DNA, 25 bp, Canis familiaris
ggtcagtttcagtacggacgtgatc

SEQ ID NO: 154053 - DNA, 25 bp, Canis familiaris
ggtcttcttagaagcttgaaggatc

SEQ ID NO: 154054 - DNA, 25 bp, Canis familiaris
ggtcttctcaagatctttcatggca

SEQ ID NO: 154055 - DNA, 25 bp, Canis familiaris
ggtcattgagcacgagatccttatg

SEQ ID NO: 154056 - DNA, 25 bp, Canis familiaris
ggtaaggcagcaggctgcgcataat

SEQ ID NO: 154057 - DNA, 25 bp, Canis familiaris
ggtacagtgccaactgcagtgacat

SEQ ID NO: 154058 - DNA, 25 bp, Canis familiaris
ggtagagacctgatgcatgctttga

SEQ ID NO: 154059 - DNA, 25 bp, Canis familiaris
ggtaagtctctgctacttcaggata

SEQ ID NO: 154060 - DNA, 25 bp, Canis familiaris
ggtaaatctcgtgtattagtgtgac

SEQ ID NO: 154061 - DNA, 25 bp, Canis familiaris
ggtaaagccatgttttgacttgcta

SEQ ID NO: 154062 - DNA, 25 bp, Canis familiaris
ggtaccagcctgcttttttgtacaa

SEQ ID NO: 154063 - DNA, 25 bp, Canis familiaris
ggtagaatccggttttgccagtaca

SEQ ID NO: 154064 - DNA, 25 bp, Canis familiaris
ggtagtccccagaagttacattact

SEQ ID NO: 154065 - DNA, 25 bp, Canis familiaris
ggtagattcccaaagttacttctcg

SEQ ID NO: 154066 - DNA, 25 bp, Canis familiaris
ggtaaggccaattagtccaggtctc

SEQ ID NO: 154067 - DNA, 25 bp, Canis familiaris
ggttatgaacaacggcctatcgttc

SEQ ID NO: 154068 - DNA, 25 bp, Canis familiaris
ggtaaaacaacagagctacatttct

SEQ ID NO: 154069 - DNA, 25 bp, Canis familiaris
ggtcataaatagaactcagctcctt

SEQ ID NO: 154070 - DNA, 25 bp, Canis familiaris
ggtcaacagaagacctcgtcgcgct

SEQ ID NO: 154071 - DNA, 25 bp, Canis familiaris
ggtcatcgaaatgcctcttgggtta

SEQ ID NO: 154072 - DNA, 25 bp, Canis familiaris
ggtttgcaaatctactctgtgggga

SEQ ID NO: 154073 - DNA, 25 bp, Canis familiaris
ggtttcaacccgtggtgggacacag

SEQ ID NO: 154074 - DNA, 25 bp, Canis familiaris
ggtttaagccccacgttgaggatag

SEQ ID NO: 154075 - DNA, 25 bp, Canis familiaris
ggttacaaacccactgtctggtgaa

SEQ ID NO: 154076 - DNA, 25 bp, Canis familiaris
ggtatccagtacacaacgtttctaa

SEQ ID NO: 154077 - DNA, 25 bp, Canis familiaris
ggtatcacggatcaacctttttaat

SEQ ID NO: 154078 - DNA, 25 bp, Canis familiaris
ggttctctggcacaacctatgtgtt

SEQ ID NO: 154079 - DNA, 25 bp, Canis familiaris
ggtcatctgggacatccaacagctt

SEQ ID NO: 154080 - DNA, 25 bp, Canis familiaris
ggtcttggaaggaccaagacatgcc

SEQ ID NO: 154081 - DNA, 25 bp, Canis familiaris
ggtcatcggaagtattcggattcta

SEQ ID NO: 154082 - DNA, 25 bp, Canis familiaris
ggtcatcgggagcagatgcgctggg

SEQ ID NO: 154083 - DNA, 25 bp, Canis familiaris
ggtcatcaccattggcaatgagcgg

SEQ ID NO: 154084 - DNA, 25 bp, Canis familiaris
ggtcaacctggtcatgagctgtggc

SEQ ID NO: 154085 - DNA, 25 bp, Canis familiaris
ggtcaacctggtcatttgagattag

SEQ ID NO: 154086 - DNA, 25 bp, Canis familiaris
ggtcaactcatcctgtatctggtat

SEQ ID NO: 154087 - DNA, 25 bp, Canis familiaris
ggtagaccaaattctctggtattga

SEQ ID NO: 154088 - DNA, 25 bp, Canis familiaris
ggtaatccaagctgtgtggtctcag

SEQ ID NO: 154089 - DNA, 25 bp, Canis familiaris
ggtagttggagctggtggcgtaggc

SEQ ID NO: 154090 - DNA, 25 bp, Canis familiaris
ggtcatttgagattagagtgggcta

SEQ ID NO: 154091 - DNA, 25 bp, Canis familiaris
ggtacactgctggtaagagggtagt

SEQ ID NO: 154092 - DNA, 25 bp, Canis familiaris
ggtacagcttcttagaatcaggata

SEQ ID NO: 154093 - DNA, 25 bp, Canis familiaris
ggtagaggtcagtgattcatcaatc

SEQ ID NO: 154094 - DNA, 25 bp, Canis familiaris
ggtagggcatggtggactcattcta

SEQ ID NO: 154095 - DNA, 25 bp, Canis familiaris
ggtagtggcatcccatggactgaga

SEQ ID NO: 154096 - DNA, 25 bp, Canis familiaris
ggtagcttgctacaggcttgaagag

SEQ ID NO: 154097 - DNA, 25 bp, Canis familiaris
ggtcagtttgatcagagctccagaa

SEQ ID NO: 154098 - DNA, 25 bp, Canis familiaris
ggtcattttatctcactggcttaag

SEQ ID NO: 154099 - DNA, 25 bp, Canis familiaris
ggtcattttatctcactggcttaag

SEQ ID NO: 154100 - DNA, 25 bp, Canis familiaris
ggtaatgttggcccagctggtaaag

SEQ ID NO: 154101 - DNA, 25 bp, Canis familiaris
ggtacagtagtcgtggtggtttgag

SEQ ID NO: 154102 - DNA, 25 bp, Canis familiaris
ggtaagatagtattcctggcattta

SEQ ID NO: 154103 - DNA, 25 bp, Canis familiaris
ggtaacattgtttctttcttgatag

SEQ ID NO: 154104 - DNA, 25 bp, Canis familiaris
ggtcatacagtaattctatttttaa

SEQ ID NO: 154105 - DNA, 25 bp, Canis familiaris
ggtaatcgctaattgtactgattgt

SEQ ID NO: 154106 - DNA, 25 bp, Canis familiaris
ggtaattctacattggcacttgggt

SEQ ID NO: 154107 - DNA, 25 bp, Canis familiaris
ggtaattctcaagttaatgtggatt

SEQ ID NO: 154108 - DNA, 25 bp, Canis familiaris
ggtaaatctaccttaagtgtattat

SEQ ID NO: 154109 - DNA, 25 bp, Canis familiaris
ggtagaagatagtttttggtatgtt

SEQ ID NO: 154110 - DNA, 25 bp, Canis familiaris
ggtagtcagctagatttttgttttt

SEQ ID NO: 154111 - DNA, 25 bp, Canis familiaris
ggtcagaccttgtattgtgtttttg

SEQ ID NO: 154112 - DNA, 25 bp, Canis familiaris
ggtaccagctgacaatgtatttttg

SEQ ID NO: 154113 - DNA, 25 bp, Canis familiaris
ggtcagacagtgtgagttccttgtt

SEQ ID NO: 154114 - DNA, 25 bp, Canis familiaris
ggtcaagggaagcttctctcttaga

SEQ ID NO: 154115 - DNA, 25 bp, Canis familiaris
ggtacttggaagcgtctgtcttgta

SEQ ID NO: 154116 - DNA, 25 bp, Canis familiaris
ggtatttgggggactctgtatttgc

SEQ ID NO: 154117 - DNA, 25 bp, Canis familiaris
ggttcataggccagttctattttta

SEQ ID NO: 154118 - DNA, 25 bp, Canis familiaris
ggtcatccaggttttctcatatatt

SEQ ID NO: 154119 - DNA, 25 bp, Canis familiaris
ggtcaccatggtttcatttgttttg

SEQ ID NO: 154120 - DNA, 25 bp, Canis familiaris
ggtaccagaatctttatgtcttttt

SEQ ID NO: 154121 - DNA, 25 bp, Canis familiaris
ggtagctccatttttaactctttgg

SEQ ID NO: 154122 - DNA, 25 bp, Canis familiaris
ggtacccataatctggttctgctag

SEQ ID NO: 154123 - DNA, 25 bp, Canis familiaris
ggtacagccaaattggatgtttcca

SEQ ID NO: 154124 - DNA, 25 bp, Canis familiaris
ggtacagtgaaactgcgaatggctc

SEQ ID NO: 154125 - DNA, 25 bp, Canis familiaris
ggtcacggacaaccggtgagtgcgc

SEQ ID NO: 154126 - DNA, 25 bp, Canis familiaris
ggttcgcagtcatcagggatagggc

SEQ ID NO: 154127 - DNA, 25 bp, Canis familiaris
ggtcatcgcagataacgtgaaggac

SEQ ID NO: 154128 - DNA, 25 bp, Canis familiaris
ggtatcagcagatcccagcaaaaga

SEQ ID NO: 154129 - DNA, 25 bp, Canis familiaris
ggtagagggacgcgctacatcagca

SEQ ID NO: 154130 - DNA, 25 bp, Canis familiaris
ggtaagggagcagcggtgagcacac

SEQ ID NO: 154131 - DNA, 25 bp, Canis familiaris
ggtcagtgtggaccatcggggcacc

SEQ ID NO: 154132 - DNA, 25 bp, Canis familiaris
ggtagtgactaccatactggccagc

SEQ ID NO: 154133 - DNA, 25 bp, Canis familiaris
ggtagatactatgaactgagcccag

SEQ ID NO: 154134 - DNA, 25 bp, Canis familiaris
ggtacagactctgaactgcactcag

SEQ ID NO: 154135 - DNA, 25 bp, Canis familiaris
ggtacaatccacagatctcattcag

SEQ ID NO: 154136 - DNA, 25 bp, Canis familiaris
ggtatatgtcccagattcattaagt

SEQ ID NO: 154137 - DNA, 25 bp, Canis familiaris
ggtattcttcactatcccaaaagat

SEQ ID NO: 154138 - DNA, 25 bp, Canis familiaris
ggtatagcttaatttccactaaata

SEQ ID NO: 154139 - DNA, 25 bp, Canis familiaris
ggtcaagtctattaatccactccat

SEQ ID NO: 154140 - DNA, 25 bp, Canis familiaris
ggtacagtgctaaaatcgagtctcc

SEQ ID NO: 154141 - DNA, 25 bp, Canis familiaris
ggtaccattgaacgatctcagatcc

SEQ ID NO: 154142 - DNA, 25 bp, Canis familiaris
ggtacaattccaagaggagacactg

SEQ ID NO: 154143 - DNA, 25 bp, Canis familiaris
ggtacaagtcccaaggttgccgact

SEQ ID NO: 154144 - DNA, 25 bp, Canis familiaris
ggtacaattcctctggtaaatgtct

SEQ ID NO: 154145 - DNA, 25 bp, Canis familiaris
ggtacatcttcctgtggtatctatt

SEQ ID NO: 154146 - DNA, 25 bp, Canis familiaris
ggtagttgtcagtttagttctcctc

SEQ ID NO: 154147 - DNA, 25 bp, Canis familiaris
ggtagtggctgccattttgtttccc

SEQ ID NO: 154148 - DNA, 25 bp, Canis familiaris
ggtttgtcttctctgagtattcccc

SEQ ID NO: 154149 - DNA, 25 bp, Canis familiaris
ggtttgtttgccagaaaagcctatt

SEQ ID NO: 154150 - DNA, 25 bp, Canis familiaris
ggtactagttgccattgaaattgtt

SEQ ID NO: 154151 - DNA, 25 bp, Canis familiaris
ggtttcagtcggatatcaacgtccc

SEQ ID NO: 154152 - DNA, 25 bp, Canis familiaris
ggttctcgacgtttactttgatgcg

SEQ ID NO: 154153 - DNA, 25 bp, Canis familiaris
ggtactctgcagctaatagtttagg

SEQ ID NO: 154154 - DNA, 25 bp, Canis familiaris
ggtcacttcacacgccatagtaaag

SEQ ID NO: 154155 - DNA, 25 bp, Canis familiaris
ggtatgctgtacacaaagtagaata

SEQ ID NO: 154156 - DNA, 25 bp, Canis familiaris
ggtatctgtactctggaaatgaatc

SEQ ID NO: 154157 - DNA, 25 bp, Canis familiaris
ggtttgatgcacagtggaagtccac

SEQ ID NO: 154158 - DNA, 25 bp, Canis familiaris
ggtactgcgctgaagggaagtgtct

SEQ ID NO: 154159 - DNA, 25 bp, Canis familiaris
ggttctggaaagggtgaatgtttgc

SEQ ID NO: 154160 - DNA, 25 bp, Canis familiaris
ggtttggagtcacaagccatctgtt

SEQ ID NO: 154161 - DNA, 25 bp, Canis familiaris
ggagtctgagttaaaaccatcctta

SEQ ID NO: 154162 - DNA, 25 bp, Canis familiaris
ggttatgagttcaaaccccacgttg

SEQ ID NO: 154163 - DNA, 25 bp, Canis familiaris
ggtttctggataaaccacccttctg

SEQ ID NO: 154164 - DNA, 25 bp, Canis familiaris
ggtacttgtatatacctggcctctg

SEQ ID NO: 154165 - DNA, 25 bp, Canis familiaris
ggtacctgttcatctttgaggtcaa

SEQ ID NO: 154166 - DNA, 25 bp, Canis familiaris
ggtactgtttactttctgatcgata

SEQ ID NO: 154167 - DNA, 25 bp, Canis familiaris
ggtcactttttgttcttcacagatt

SEQ ID NO: 154168 - DNA, 25 bp, Canis familiaris
ggtcacaagttgttctttgcacaga

SEQ ID NO: 154169 - DNA, 25 bp, Canis familiaris
ggtcacaagttgatactgccacagc

SEQ ID NO: 154170 - DNA, 25 bp, Canis familiaris
ggtcacaaactattgttccacagcc

SEQ ID NO: 154171 - DNA, 25 bp, Canis familiaris
ggtcagcgatagttatttccacccg

SEQ ID NO: 154172 - DNA, 25 bp, Canis familiaris
ggtactgatgagttactgtgctaga

SEQ ID NO: 154173 - DNA, 25 bp, Canis familiaris
ggtaatgatctgttactttagtgac

SEQ ID NO: 154174 - DNA, 25 bp, Canis familiaris
ggtaatctcgaattttgtagctttt

SEQ ID NO: 154175 - DNA, 25 bp, Canis familiaris
ggtaactttatgctgttccttttgc

SEQ ID NO: 154176 - DNA, 25 bp, Canis familiaris
ggaaacgtttcactttccttcagtg

SEQ ID NO: 154177 - DNA, 25 bp, Canis familiaris
ggtacctgattgaagtttccttgtg

SEQ ID NO: 154178 - DNA, 25 bp, Canis familiaris
ggtagctgcagaaggggttacttgg

SEQ ID NO: 154179 - DNA, 25 bp, Canis familiaris
ggtactcaaagttgtgttttgtaca

SEQ ID NO: 154180 - DNA, 25 bp, Canis familiaris
ggtcactaaataaatgtctttggtc

SEQ ID NO: 154181 - DNA, 25 bp, Canis familiaris
ggtaccaacagcaaatgtcgtccgt

SEQ ID NO: 154182 - DNA, 25 bp, Canis familiaris
ggtactcaaaaacatagctgccgca

SEQ ID NO: 154183 - DNA, 25 bp, Canis familiaris
ggtactcgccctaaagagctgaaga

SEQ ID NO: 154184 - DNA, 25 bp, Canis familiaris
ggtcactccatcctgtaagattaca

SEQ ID NO: 154185 - DNA, 25 bp, Canis familiaris
ggtcaagccaagactccagtctaca

SEQ ID NO: 154186 - DNA, 25 bp, Canis familiaris
ggtcaacaagacaatcaggattcca

SEQ ID NO: 154187 - DNA, 25 bp, Canis familiaris
ggtcaacaaacatgaggatgccgat

SEQ ID NO: 154188 - DNA, 25 bp, Canis familiaris
ggtaagcaacaaacacagtccaggg

SEQ ID NO: 154189 - DNA, 25 bp, Canis familiaris
ggtcaagaaattccctgctcatagg

SEQ ID NO: 154190 - DNA, 25 bp, Canis familiaris
ggtacaaaattggcgcagtcaacaa

SEQ ID NO: 154191 - DNA, 25 bp, Canis familiaris
ggtcacacactactgggagctatac

SEQ ID NO: 154192 - DNA, 25 bp, Canis familiaris
ggttgcaacttcctggactaaccgt

SEQ ID NO: 154193 - DNA, 25 bp, Canis familiaris
ggttctcactacggtaccaaaagat

SEQ ID NO: 154194 - DNA, 25 bp, Canis familiaris
ggattttctactgtaacaaaagcta

SEQ ID NO: 154195 - DNA, 25 bp, Canis familiaris
ggtacttctaaagaacacccatgta

SEQ ID NO: 154196 - DNA, 25 bp, Canis familiaris
ggtacttccagatgtattcccttga

SEQ ID NO: 154197 - DNA, 25 bp, Canis familiaris
ggatactatcaaacgctggtcccag

SEQ ID NO: 154198 - DNA, 25 bp, Canis familiaris
ggtagctacaaggactggggccagg

SEQ ID NO: 154199 - DNA, 25 bp, Canis familiaris
ggtagcccagcagcagtgaagatcc

SEQ ID NO: 154200 - DNA, 25 bp, Canis familiaris
ggtagccccactagttgaatactca

SEQ ID NO: 154201 - DNA, 25 bp, Canis familiaris
ggtcaactccttggtggacaagccc

SEQ ID NO: 154202 - DNA, 25 bp, Canis familiaris
ggtcacagccctgggaggaataccc

SEQ ID NO: 154203 - DNA, 25 bp, Canis familiaris
ggtaagccttagcagtgaatagtct

SEQ ID NO: 154204 - DNA, 25 bp, Canis familiaris
ggtagaccatggtgtctcagaagcc

SEQ ID NO: 154205 - DNA, 25 bp, Canis familiaris
ggtacctctgagttttagggccagg

SEQ ID NO: 154206 - DNA, 25 bp, Canis familiaris
ggtttgttgcaggttgtaggaccct

SEQ ID NO: 154207 - DNA, 25 bp, Canis familiaris
ggtattttcgtgcatttgtgagcca

SEQ ID NO: 154208 - DNA, 25 bp, Canis familiaris
ggtatgtttacttctggttgagcca

SEQ ID NO: 154209 - DNA, 25 bp, Canis familiaris
ggtaatttgacaacggctctacctc

SEQ ID NO: 154210 - DNA, 25 bp, Canis familiaris
ggtaatttgaattctagtgcccatt

SEQ ID NO: 154211 - DNA, 25 bp, Canis familiaris
ggtaattctggcacttggagactat

SEQ ID NO: 154212 - DNA, 25 bp, Canis familiaris
ggtacatccaggaacttcagcagcc

SEQ ID NO: 154213 - DNA, 25 bp, Canis familiaris
ggtcacccatgaaaatagccactgt

SEQ ID NO: 154214 - DNA, 25 bp, Canis familiaris
ggtagctcactaaaatgacctcagt

SEQ ID NO: 154215 - DNA, 25 bp, Canis familiaris
ggtagctgttgaaagtacactcgta

SEQ ID NO: 154216 - DNA, 25 bp, Canis familiaris
ggtaattctgttttgccaatttaga

SEQ ID NO: 154217 - DNA, 25 bp, Canis familiaris
ggtactctgtggatatccctttgga

SEQ ID NO: 154218 - DNA, 25 bp, Canis familiaris
ggtcactctgctttgatgaccctgg

SEQ ID NO: 154219 - DNA, 25 bp, Canis familiaris
ggtagctatgctttgaattcctggg

SEQ ID NO: 154220 - DNA, 25 bp, Canis familiaris
ggtatgaatgctgctttgctgcctg

SEQ ID NO: 154221 - DNA, 25 bp, Canis familiaris
ggtaaatacatggcttgctgcctgt

SEQ ID NO: 154222 - DNA, 25 bp, Canis familiaris
ggtataggaagctttgtgctctgtg

SEQ ID NO: 154223 - DNA, 25 bp, Canis familiaris
ggttattggggttgtgccattggca

SEQ ID NO: 154224 - DNA, 25 bp, Canis familiaris
ggttttgagggtgtgtctggagcta

SEQ ID NO: 154225 - DNA, 25 bp, Canis familiaris
ggcttccggggagatccgtagatac

SEQ ID NO: 154226 - DNA, 25 bp, Canis familiaris
ggcttccaggccacgaaagttaagg

SEQ ID NO: 154227 - DNA, 25 bp, Canis familiaris
ggttacacctcatcaaacactataa

SEQ ID NO: 154228 - DNA, 25 bp, Canis familiaris
ggtagagccctcaagacaagactaa

SEQ ID NO: 154229 - DNA, 25 bp, Canis familiaris
ggtagagcgctggaaggcagaacca

SEQ ID NO: 154230 - DNA, 25 bp, Canis familiaris
ggtacacaggtgaaggcatggacga

SEQ ID NO: 154231 - DNA, 25 bp, Canis familiaris
ggtacacagtggtgacagagtctgg

SEQ ID NO: 154232 - DNA, 25 bp, Canis familiaris
ggtaccatggtgctggagagcttgg

SEQ ID NO: 154233 - DNA, 25 bp, Canis familiaris
ggttgactttgccttgaagttatgg

SEQ ID NO: 154234 - DNA, 25 bp, Canis familiaris
ggtaatgctttgcctggttgtctaa

SEQ ID NO: 154235 - DNA, 25 bp, Canis familiaris
ggtattgtcttgccaggatggttag

SEQ ID NO: 154236 - DNA, 25 bp, Canis familiaris
ggtatagtctatctagtgggatgac

SEQ ID NO: 154237 - DNA, 25 bp, Canis familiaris
ggttcagtttcagtacggcgtgatc

SEQ ID NO: 154238 - DNA, 25 bp, Canis familiaris
tccttcagtttagaacctaccaaag

SEQ ID NO: 154239 - DNA, 25 bp, Canis familiaris
tccttctggcgtggtaacctggcca

SEQ ID NO: 154240 - DNA, 25 bp, Canis familiaris
tgacccttgggcctaactttccaag

SEQ ID NO: 154241 - DNA, 25 bp, Canis familiaris
tggtcttgggcccagaacttttaag

SEQ ID NO: 154242 - DNA, 25 bp, Canis familiaris
tggttcctggcctaaagttcaaaag

SEQ ID NO: 154243 - DNA, 25 bp, Canis familiaris
ggtaggggccagaagagtcatacaa

SEQ ID NO: 154244 - DNA, 25 bp, Canis familiaris
ggtaggggccagctgtgacaatgaa

SEQ ID NO: 154245 - DNA, 25 bp, Canis familiaris
ggtatgcgaggcaggacgagcagct

SEQ ID NO: 154246 - DNA, 25 bp, Canis familiaris
ggtagcgcttgcagcatggctgacc

SEQ ID NO: 154247 - DNA, 25 bp, Canis familiaris
ggtaggctgtcaggcacctacctgc

SEQ ID NO: 154248 - DNA, 25 bp, Canis familiaris
ggtaggcttagtgcactcacaggca

SEQ ID NO: 154249 - DNA, 25 bp, Canis familiaris
ggtagtggtcgataccggtgcatcg

SEQ ID NO: 154250 - DNA, 25 bp, Canis familiaris
ggtagggagcaaactcgcagggcgc

SEQ ID NO: 154251 - DNA, 25 bp, Canis familiaris
ggtaggctgtcatcctaatggccag

SEQ ID NO: 154252 - DNA, 25 bp, Canis familiaris
ggtaactacatgtttcaagtgctat

SEQ ID NO: 154253 - DNA, 25 bp, Canis familiaris
ggtcaactacaggtccaagcagatt

SEQ ID NO: 154254 - DNA, 25 bp, Canis familiaris
ggtaactctgaggaccatactgctt

SEQ ID NO: 154255 - DNA, 25 bp, Canis familiaris
ggtcaacattgtcagcactttgctt

SEQ ID NO: 154256 - DNA, 25 bp, Canis familiaris
ggtacaatcttgaatcacttcctct

SEQ ID NO: 154257 - DNA, 25 bp, Canis familiaris
ggtacaaatatgccacattttcttt

SEQ ID NO: 154258 - DNA, 25 bp, Canis familiaris
ggtacctgaatgcactggatttgtt

SEQ ID NO: 154259 - DNA, 25 bp, Canis familiaris
ggtagattgaatcatcaggtttgta

SEQ ID NO: 154260 - DNA, 25 bp, Canis familiaris
ggtagactgtgacttcagatgtttg

SEQ ID NO: 154261 - DNA, 25 bp, Canis familiaris
ggtagtgcttagtattgtcatttga

SEQ ID NO: 154262 - DNA, 25 bp, Canis familiaris
ggttgcgtctagttgggttgctgca

SEQ ID NO: 154263 - DNA, 25 bp, Canis familiaris
ggtagcccaagattgcctgttggag

SEQ ID NO: 154264 - DNA, 25 bp, Canis familiaris
ggttgtccaataggccttttagttg

SEQ ID NO: 154265 - DNA, 25 bp, Canis familiaris
ggtttccagaagccacttagtttga

SEQ ID NO: 154266 - DNA, 25 bp, Canis familiaris
ggttaccaatggccaatttcctata

SEQ ID NO: 154267 - DNA, 25 bp, Canis familiaris
ggtaaccaatccaactaatcctgta

SEQ ID NO: 154268 - DNA, 25 bp, Canis familiaris
ggtactcgatcacaaataaacatta

SEQ ID NO: 154269 - DNA, 25 bp, Canis familiaris
ggtacccatcaggattagacaacct

SEQ ID NO: 154270 - DNA, 25 bp, Canis familiaris
ggtacccatcacgtggtacatgcac

SEQ ID NO: 154271 - DNA, 25 bp, Canis familiaris
ggtatggaacctggccaactgccag

SEQ ID NO: 154272 - DNA, 25 bp, Canis familiaris
ggtcaacgagcctggcaagtgccaa

SEQ ID NO: 154273 - DNA, 25 bp, Canis familiaris
ggtcaagaaggctgtaaatgccaag

SEQ ID NO: 154274 - DNA, 25 bp, Canis familiaris
ggagacgagggattggaaacgaact

SEQ ID NO: 154275 - DNA, 25 bp, Canis familiaris
ggtactgagaggtatggatatactg

SEQ ID NO: 154276 - DNA, 25 bp, Canis familiaris
ggtatctagactcaggactccattc

SEQ ID NO: 154277 - DNA, 25 bp, Canis familiaris
ggtattcataacccgacctattgcc

SEQ ID NO: 154278 - DNA, 25 bp, Canis familiaris
ggtttagaaggtgcctgctactgca

SEQ ID NO: 154279 - DNA, 25 bp, Canis familiaris
ggttaaaaatgtgcgctgttttgtc

SEQ ID NO: 154280 - DNA, 25 bp, Canis familiaris
ggtttacctggtgttgatagttgtt

SEQ ID NO: 154281 - DNA, 25 bp, Canis familiaris
ggtttcctgggtggtccatttaatg

SEQ ID NO: 154282 - DNA, 25 bp, Canis familiaris
ggtttgacgggtcgacgatctgaga

SEQ ID NO: 154283 - DNA, 25 bp, Canis familiaris
ggtttacgcaatagcgacgcgctgg

SEQ ID NO: 154284 - DNA, 25 bp, Canis familiaris
ggttgttactaaaggccgcttggtg

SEQ ID NO: 154285 - DNA, 25 bp, Canis familiaris
tggttttactaccatagcctttttg

SEQ ID NO: 154286 - DNA, 25 bp, Canis familiaris
ggttctacaccccaaggtgttctca

SEQ ID NO: 154287 - DNA, 25 bp, Canis familiaris
ggctttagaccagtcaacgtttgtc

SEQ ID NO: 154288 - DNA, 25 bp, Canis familiaris
ggtagttgcctcacaatcagttcat

SEQ ID NO: 154289 - DNA, 25 bp, Canis familiaris
ggtacttcctcaatcacatagaaaa

SEQ ID NO: 154290 - DNA, 25 bp, Canis familiaris
ggtacttcccaatttatgcaggaac

SEQ ID NO: 154291 - DNA, 25 bp, Canis familiaris
ggtactgtccgcaaggttcatgtga

SEQ ID NO: 154292 - DNA, 25 bp, Canis familiaris
ggtactcttagaaagcttcttactt

SEQ ID NO: 154293 - DNA, 25 bp, Canis familiaris
ggtaactccagttcagttcttagcc

SEQ ID NO: 154294 - DNA, 25 bp, Canis familiaris
ggtaagttcaatttttctcttctca

SEQ ID NO: 154295 - DNA, 25 bp, Canis familiaris
ggtacatttcaatttcagcctgatt

SEQ ID NO: 154296 - DNA, 25 bp, Canis familiaris
ggtcaattgtgataagcgccgatgt

SEQ ID NO: 154297 - DNA, 25 bp, Canis familiaris
ggtcaattgtaagtccccagaatac

SEQ ID NO: 154298 - DNA, 25 bp, Canis familiaris
ggacgttgtgaaaccctctgttaat

SEQ ID NO: 154299 - DNA, 25 bp, Canis familiaris
ggttttggaaatccctctggtgaat

SEQ ID NO: 154300 - DNA, 25 bp, Canis familiaris
ggtttatggcaagatctacaaggaa

SEQ ID NO: 154301 - DNA, 25 bp, Canis familiaris
ggttatctgggagaccaagatggga

SEQ ID NO: 154302 - DNA, 25 bp, Canis familiaris
ggtaatccgtgatcacaccaaagga

SEQ ID NO: 154303 - DNA, 25 bp, Canis familiaris
ggtaatcctgctcagtacgagagga

SEQ ID NO: 154304 - DNA, 25 bp, Canis familiaris
ggtacacgtgcgtgtgtctgtgcgg

SEQ ID NO: 154305 - DNA, 25 bp, Canis familiaris
ggtagctcagtggttatgtctgcat

SEQ ID NO: 154306 - DNA, 25 bp, Canis familiaris
ggtacaccgtgaatcatgtctgctg

SEQ ID NO: 154307 - DNA, 25 bp, Canis familiaris
ggtaagcaccgaactgtggctcgaa

SEQ ID NO: 154308 - DNA, 25 bp, Canis familiaris
ggtaagataggtggtgggctaggtg

SEQ ID NO: 154309 - DNA, 25 bp, Canis familiaris
ggttcaggatggggtggttagtgtc

SEQ ID NO: 154310 - DNA, 25 bp, Canis familiaris
ggattagctggggagtagattggta

SEQ ID NO: 154311 - DNA, 25 bp, Canis familiaris
ggatgaacaccctgtaatctcgtaa

SEQ ID NO: 154312 - DNA, 25 bp, Canis familiaris
ggtagaagctcctctagattgggta

SEQ ID NO: 154313 - DNA, 25 bp, Canis familiaris
ggtaccagtggctaaaatcggagtt

SEQ ID NO: 154314 - DNA, 25 bp, Canis familiaris
ggtatccagtcctgatgaaccgcag

SEQ ID NO: 154315 - DNA, 25 bp, Canis familiaris
ggtagctcagtcatttcacatacta

SEQ ID NO: 154316 - DNA, 25 bp, Canis familiaris
ggtagtcactctcttgcaataggaa

SEQ ID NO: 154317 - DNA, 25 bp, Canis familiaris
ggtactcactttctcaaccgagatt

SEQ ID NO: 154318 - DNA, 25 bp, Canis familiaris
ggtacaacttgtcttagcacgagat

SEQ ID NO: 154319 - DNA, 25 bp, Canis familiaris
ggttaactggctctccaacatggaa

SEQ ID NO: 154320 - DNA, 25 bp, Canis familiaris
ggttacacggtgggaaactcaggag

SEQ ID NO: 154321 - DNA, 25 bp, Canis familiaris
ggtaacccggggtagattccgcatg

SEQ ID NO: 154322 - DNA, 25 bp, Canis familiaris
ggtagacccgggagatgagcacctc

SEQ ID NO: 154323 - DNA, 25 bp, Canis familiaris
ggtactcccagggggtaatcagctg

SEQ ID NO: 154324 - DNA, 25 bp, Canis familiaris
ggtagctctcgcatgcggttttatt

SEQ ID NO: 154325 - DNA, 25 bp, Canis familiaris
ggatcccgatcaagccgattttaat

SEQ ID NO: 154326 - DNA, 25 bp, Canis familiaris
ggtatccggaaggctttgtaaatct

SEQ ID NO: 154327 - DNA, 25 bp, Canis familiaris
ggagattagtaagtcagagggaaat

SEQ ID NO: 154328 - DNA, 25 bp, Canis familiaris
ggtatgttgtatagtctagggaaag

SEQ ID NO: 154329 - DNA, 25 bp, Canis familiaris
ggtttctttgaaatagggctaatgg

SEQ ID NO: 154330 - DNA, 25 bp, Canis familiaris
ggttttttaaatgccctgcctgaag

SEQ ID NO: 154331 - DNA, 25 bp, Canis familiaris
ggttacgttaaaaattcatactgca

SEQ ID NO: 154332 - DNA, 25 bp, Canis familiaris
ggttgtttagaataaatctgacagc

SEQ ID NO: 154333 - DNA, 25 bp, Canis familiaris
ggttcttttgagtgtagttcacgct

SEQ ID NO: 154334 - DNA, 25 bp, Canis familiaris
ggttcttttgaatgtagttcaaccg

SEQ ID NO: 154335 - DNA, 25 bp, Canis familiaris
ggttgctttgtataccagtcaaacc

SEQ ID NO: 154336 - DNA, 25 bp, Canis familiaris
ggtacaacttccagcaaccaaatcc

SEQ ID NO: 154337 - DNA, 25 bp, Canis familiaris
ggtaagaagtacaagcccctggatc

SEQ ID NO: 154338 - DNA, 25 bp, Canis familiaris
ggtaatggatgttctgacctccgaa

SEQ ID NO: 154339 - DNA, 25 bp, Canis familiaris
ggtaatgactatttatcgtcgatac

SEQ ID NO: 154340 - DNA, 25 bp, Canis familiaris
ggtaatatgctatatatgctgatat

SEQ ID NO: 154341 - DNA, 25 bp, Canis familiaris
ggtaacagccattctagcagatgtg

SEQ ID NO: 154342 - DNA, 25 bp, Canis familiaris
ggtaactccattggtgcatcttgaa

SEQ ID NO: 154343 - DNA, 25 bp, Canis familiaris
ggtaagtacaggctgctgctctaaa

SEQ ID NO: 154344 - DNA, 25 bp, Canis familiaris
ggtttctaagagctttctcaaagtt

SEQ ID NO: 154345 - DNA, 25 bp, Canis familiaris
ggtttgttcaactctttaatcaatc

SEQ ID NO: 154346 - DNA, 25 bp, Canis familiaris
ggctttgaataacactttggaccag

SEQ ID NO: 154347 - DNA, 25 bp, Canis familiaris
ggtttgaatatagagcccttgatta

SEQ ID NO: 154348 - DNA, 25 bp, Canis familiaris
ggataagaatactggcctgaatgtt

SEQ ID NO: 154349 - DNA, 25 bp, Canis familiaris
ggtaagacatagtaacaccacatta

SEQ ID NO: 154350 - DNA, 25 bp, Canis familiaris
ggttgtaaggtgaactccctgtcag

SEQ ID NO: 154351 - DNA, 25 bp, Canis familiaris
ggttctacaggctcatcatgccaag

SEQ ID NO: 154352 - DNA, 25 bp, Canis familiaris
ggttcatcagagccgcagataccaa

SEQ ID NO: 154353 - DNA, 25 bp, Canis familiaris
ggttgaccccatgagaccatgaatc

SEQ ID NO: 154354 - DNA, 25 bp, Canis familiaris
ggttggcccaaggggcacagcgtgc

SEQ ID NO: 154355 - DNA, 25 bp, Canis familiaris
ggttggggcactggggaccagatga

SEQ ID NO: 154356 - DNA, 25 bp, Canis familiaris
ggtatttgacacaggaacggattgg

SEQ ID NO: 154357 - DNA, 25 bp, Canis familiaris
ggtactggtttgggaacaggactgg

SEQ ID NO: 154358 - DNA, 25 bp, Canis familiaris
ggtactggttttggcacaacaactg

SEQ ID NO: 154359 - DNA, 25 bp, Canis familiaris
ggtacataatttttcctctaacgca

SEQ ID NO: 154360 - DNA, 25 bp, Canis familiaris
ggataaaattctccaccttctacct

SEQ ID NO: 154361 - DNA, 25 bp, Canis familiaris
ggtaagtattcatcagcatttctag

SEQ ID NO: 154362 - DNA, 25 bp, Canis familiaris
ggtaagtttcattatctctgcatat

SEQ ID NO: 154363 - DNA, 25 bp, Canis familiaris
ggtagattttaattgcctgttgccc

SEQ ID NO: 154364 - DNA, 25 bp, Canis familiaris
ggtatattgtgttttccagttgggt

SEQ ID NO: 154365 - DNA, 25 bp, Canis familiaris
ggtatgttgaccttgatccattttc

SEQ ID NO: 154366 - DNA, 25 bp, Canis familiaris
ggtattgctgggttctgccaagttc

SEQ ID NO: 154367 - DNA, 25 bp, Canis familiaris
ggttgtgctgggcatccaaagtcca

SEQ ID NO: 154368 - DNA, 25 bp, Canis familiaris
ggttctttggaagcagcaactcccc

SEQ ID NO: 154369 - DNA, 25 bp, Canis familiaris
ggtttccgctatataaacccaagca

SEQ ID NO: 154370 - DNA, 25 bp, Canis familiaris
ggtttccgctgagctttagaccaaa

SEQ ID NO: 154371 - DNA, 25 bp, Canis familiaris
ggtttccttactgtgatttccagaa

SEQ ID NO: 154372 - DNA, 25 bp, Canis familiaris
ggatttttgtttgtccatacccaat

SEQ ID NO: 154373 - DNA, 25 bp, Canis familiaris
ggtttccatgtgaaaatcctcaccc

SEQ ID NO: 154374 - DNA, 25 bp, Canis familiaris
ggttttatggagtcaatcagcattg

SEQ ID NO: 154375 - DNA, 25 bp, Canis familiaris
ggtacttaggtctagacagaagcct

SEQ ID NO: 154376 - DNA, 25 bp, Canis familiaris
ggtaagtcgttctaaagagagacct

SEQ ID NO: 154377 - DNA, 25 bp, Canis familiaris
ggtaacctgttctgaatggaacctt

SEQ ID NO: 154378 - DNA, 25 bp, Canis familiaris
ggtagacctttcttagagatgcaca

SEQ ID NO: 154379 - DNA, 25 bp, Canis familiaris
ggtacaccatgttcttgaatagcag

SEQ ID NO: 154380 - DNA, 25 bp, Canis familiaris
ggtaccacattcctcaggttgaacc

SEQ ID NO: 154381 - DNA, 25 bp, Canis familiaris
ggtagcaccatccttattttaaact

SEQ ID NO: 154382 - DNA, 25 bp, Canis familiaris
ggtagccttcgcatttaacaaacta

SEQ ID NO: 154383 - DNA, 25 bp, Canis familiaris
ggtacctttgtgggtatacaatcca

SEQ ID NO: 154384 - DNA, 25 bp, Canis familiaris
ggtacctcagttggttaaacattca

SEQ ID NO: 154385 - DNA, 25 bp, Canis familiaris
ggtacctcagatataattactataa

SEQ ID NO: 154386 - DNA, 25 bp, Canis familiaris
ggtatttcattcattaagccttaaa

SEQ ID NO: 154387 - DNA, 25 bp, Canis familiaris
ggtactgcgcatatattatagcacg

SEQ ID NO: 154388 - DNA, 25 bp, Canis familiaris
ggtatctgcctacaaatggctcggt

SEQ ID NO: 154389 - DNA, 25 bp, Canis familiaris
ggttctgcactagaaccacctggtc

SEQ ID NO: 154390 - DNA, 25 bp, Canis familiaris
ggtttacatagttacaagactggtt

SEQ ID NO: 154391 - DNA, 25 bp, Canis familiaris
ggtttcatatttgatcgaactcggt

SEQ ID NO: 154392 - DNA, 25 bp, Canis familiaris
ggttttatgtgtgtcgcatttactt

SEQ ID NO: 154393 - DNA, 25 bp, Canis familiaris
ggtatgtgtatgtctgtgtatgcgt

SEQ ID NO: 154394 - DNA, 25 bp, Canis familiaris
ggtatgatgtgaaagcgccagctat

SEQ ID NO: 154395 - DNA, 25 bp, Canis familiaris
ggtagagtgcatcaagatcatcctt

SEQ ID NO: 154396 - DNA, 25 bp, Canis familiaris
ggtagaggcaactgacttcatttgt

SEQ ID NO: 154397 - DNA, 25 bp, Canis familiaris
ggtaggaaatatggcatctgtgcaa

SEQ ID NO: 154398 - DNA, 25 bp, Canis familiaris
ggtactgtggatacagcactggcaa

SEQ ID NO: 154399 - DNA, 25 bp, Canis familiaris
ggtactgagacaagactgctgtgaa

SEQ ID NO: 154400 - DNA, 25 bp, Canis familiaris
ggtagcgtcacaagatctctgatat

SEQ ID NO: 154401 - DNA, 25 bp, Canis familiaris
ggtagcatccaaaactgcagacata

SEQ ID NO: 154402 - DNA, 25 bp, Canis familiaris
ggtagatcatcaatcgcgcatggga

SEQ ID NO: 154403 - DNA, 25 bp, Canis familiaris
ggtacacatctacttcactggaccg

SEQ ID NO: 154404 - DNA, 25 bp, Canis familiaris
ggtaacattgaactcacagccaaca

SEQ ID NO: 154405 - DNA, 25 bp, Canis familiaris
ggtagacaatgaatttggtacagca

SEQ ID NO: 154406 - DNA, 25 bp, Canis familiaris
ggtagagcataggtcacgtttcaga

SEQ ID NO: 154407 - DNA, 25 bp, Canis familiaris
ggtaccaagaccagtgtgtgcagtg

SEQ ID NO: 154408 - DNA, 25 bp, Canis familiaris
ggtacatgcacatgcacacgtgtgt

SEQ ID NO: 154409 - DNA, 25 bp, Canis familiaris
ggtacatcaagggcatcgtgaaggg

SEQ ID NO: 154410 - DNA, 25 bp, Canis familiaris
ggtacacacagacctgctggatggc

SEQ ID NO: 154411 - DNA, 25 bp, Canis familiaris
ggtacctgctgacctgtgagtggtc

SEQ ID NO: 154412 - DNA, 25 bp, Canis familiaris
ggtaccagctgctgtgtggggtctg

SEQ ID NO: 154413 - DNA, 25 bp, Canis familiaris
ggtacagcaccgaggggctgtctgc

SEQ ID NO: 154414 - DNA, 25 bp, Canis familiaris
ggtaccacacgaatggtgtcgggcc

SEQ ID NO: 154415 - DNA, 25 bp, Canis familiaris
ggtagctcccgaaagcagggggctc

SEQ ID NO: 154416 - DNA, 25 bp, Canis familiaris
ggtagaaccaattcagggtgaggcg

SEQ ID NO: 154417 - DNA, 25 bp, Canis familiaris
ggtacaagcacagacaggcctgggc

SEQ ID NO: 154418 - DNA, 25 bp, Canis familiaris
ggtacaagagaactcaggccttatg

SEQ ID NO: 154419 - DNA, 25 bp, Canis familiaris
ggtaccagcagaagtcagccgcttc

SEQ ID NO: 154420 - DNA, 25 bp, Canis familiaris
ggtactcgtgattatcactcagttc

SEQ ID NO: 154421 - DNA, 25 bp, Canis familiaris
ggtaccagtgcacaactgcagtgac

SEQ ID NO: 154422 - DNA, 25 bp, Canis familiaris
ggtacacgtcatcatcctgacagac

SEQ ID NO: 154423 - DNA, 25 bp, Canis familiaris
ggttacttcactacctgacaaccat

SEQ ID NO: 154424 - DNA, 25 bp, Canis familiaris
ggtatacttcttacgaaaacttgag

SEQ ID NO: 154425 - DNA, 25 bp, Canis familiaris
ggttacttctatctgaaataattta

SEQ ID NO: 154426 - DNA, 25 bp, Canis familiaris
ggttacttctatctgcaatcattta

SEQ ID NO: 154427 - DNA, 25 bp, Canis familiaris
ggtacagtgtctttctaatcatgtg

SEQ ID NO: 154428 - DNA, 25 bp, Canis familiaris
ggtacactggtatttatattgcaag

SEQ ID NO: 154429 - DNA, 25 bp, Canis familiaris
ggtacctggtaagtgacacgctact

SEQ ID NO: 154430 - DNA, 25 bp, Canis familiaris
ggtacctgaccgaagcaaccatgac

SEQ ID NO: 154431 - DNA, 25 bp, Canis familiaris
ggttcctgaccgaatccaggtgacc

SEQ ID NO: 154432 - DNA, 25 bp, Canis familiaris
ggtttatagcccagcaaggaggact

SEQ ID NO: 154433 - DNA, 25 bp, Canis familiaris
ggtttaacttgtcaattgggactgg

SEQ ID NO: 154434 - DNA, 25 bp, Canis familiaris
ggtttaccatttctaaggagcttga

SEQ ID NO: 154435 - DNA, 25 bp, Canis familiaris
ggtttgtttttcatatcctactaag

SEQ ID NO: 154436 - DNA, 25 bp, Canis familiaris
ggtaaattttacattttcacaacag

SEQ ID NO: 154437 - DNA, 25 bp, Canis familiaris
ggttttttctagcttatacacacac

SEQ ID NO: 154438 - DNA, 25 bp, Canis familiaris
ggttttttccagtctgcattaatag

SEQ ID NO: 154439 - DNA, 25 bp, Canis familiaris
ggtttggtttcacaattggatagct

SEQ ID NO: 154440 - DNA, 25 bp, Canis familiaris
ggtttgagtttctggtatggttgac

SEQ ID NO: 154441 - DNA, 25 bp, Canis familiaris
ggtattgctttgtgggattttatga

SEQ ID NO: 154442 - DNA, 25 bp, Canis familiaris
ggtttcttgcggtgtgttttgtgaa

SEQ ID NO: 154443 - DNA, 25 bp, Canis familiaris
ggtattgggggtgtttgtgtggtat

SEQ ID NO: 154444 - DNA, 25 bp, Canis familiaris
ggtttgggaacttttactctgagct

SEQ ID NO: 154445 - DNA, 25 bp, Canis familiaris
ggatttggaccctggtcctcaactc

SEQ ID NO: 154446 - DNA, 25 bp, Canis familiaris
ggtttttacctgagtcttcaactgc

SEQ ID NO: 154447 - DNA, 25 bp, Canis familiaris
ggttttacaccggtacattagacat

SEQ ID NO: 154448 - DNA, 25 bp, Canis familiaris
ggttcttgccacagggaaattgtaa

SEQ ID NO: 154449 - DNA, 25 bp, Canis familiaris
ggtacttcagcctgggaggatggtg

SEQ ID NO: 154450 - DNA, 25 bp, Canis familiaris
ggtacaatcccatgggtgagggtga

SEQ ID NO: 154451 - DNA, 25 bp, Canis familiaris
ggtacggcggtatgcttggtgagga

SEQ ID NO: 154452 - DNA, 25 bp, Canis familiaris
ggtaggccgagatgggtgcgtacaa

SEQ ID NO: 154453 - DNA, 25 bp, Canis familiaris
ggtagtctctggtctgggggaggaa

SEQ ID NO: 154454 - DNA, 25 bp, Canis familiaris
ggttgactctccctgaaggacagga

SEQ ID NO: 154455 - DNA, 25 bp, Canis familiaris
ggtagcacaatcttgaagggaccta

SEQ ID NO: 154456 - DNA, 25 bp, Canis familiaris
ggtagccaatggtggcggcaagtga

SEQ ID NO: 154457 - DNA, 25 bp, Canis familiaris
ggtatcaaatggtgtggagcccaaa

SEQ ID NO: 154458 - DNA, 25 bp, Canis familiaris
ggttcgactatctgtggaccaacaa

SEQ ID NO: 154459 - DNA, 25 bp, Canis familiaris
ggtagagacaactagatggaacatt

SEQ ID NO: 154460 - DNA, 25 bp, Canis familiaris
ggtatacacacatatgtgccacaca

SEQ ID NO: 154461 - DNA, 25 bp, Canis familiaris
ggtacacactattaggcactccata

SEQ ID NO: 154462 - DNA, 25 bp, Canis familiaris
ggtttcacgttaagagtccatacag

SEQ ID NO: 154463 - DNA, 25 bp, Canis familiaris
ggattttggtttgggatcccatagg

SEQ ID NO: 154464 - DNA, 25 bp, Canis familiaris
ggtattggagtacggtatcccagac

SEQ ID NO: 154465 - DNA, 25 bp, Canis familiaris
ggtatgtgcaaggcgggcttcgccg

SEQ ID NO: 154466 - DNA, 25 bp, Canis familiaris
ggtagtgcagatctgggttgctcca

SEQ ID NO: 154467 - DNA, 25 bp, Canis familiaris
ggtagaagagccagagtgtcccaag

SEQ ID NO: 154468 - DNA, 25 bp, Canis familiaris
ggtagaagtccacggcgaagccgaa

SEQ ID NO: 154469 - DNA, 25 bp, Canis familiaris
ggtatagaaccattgggaagcccat

SEQ ID NO: 154470 - DNA, 25 bp, Canis familiaris
ggtacagcgcccttggaggaaacat

SEQ ID NO: 154471 - DNA, 25 bp, Canis familiaris
ggtacagtagcctgattgggagact

SEQ ID NO: 154472 - DNA, 25 bp, Canis familiaris
ggtacatgtaaatacttgctgcagc

SEQ ID NO: 154473 - DNA, 25 bp, Canis familiaris
ggtactgtaacattccatattatct

SEQ ID NO: 154474 - DNA, 25 bp, Canis familiaris
ggtactgttacctgcaacaatacag

SEQ ID NO: 154475 - DNA, 25 bp, Canis familiaris
ggtagttttgcacataacacaccaa

SEQ ID NO: 154476 - DNA, 25 bp, Canis familiaris
ggtagcttttggggagatcataccc

SEQ ID NO: 154477 - DNA, 25 bp, Canis familiaris
ggttgcttcttaggagaggaactgg

SEQ ID NO: 154478 - DNA, 25 bp, Canis familiaris
ggttgtgtttgaaaggagaagctac

SEQ ID NO: 154479 - DNA, 25 bp, Canis familiaris
ggtacttttagtggggaggctcact

SEQ ID NO: 154480 - DNA, 25 bp, Canis familiaris
ggtaccctgtcgaagggacgtcaat

SEQ ID NO: 154481 - DNA, 25 bp, Canis familiaris
ggtaccctgttgaggatggagcgca

SEQ ID NO: 154482 - DNA, 25 bp, Canis familiaris
ggtagccgctttcaggatgaagctg

SEQ ID NO: 154483 - DNA, 25 bp, Canis familiaris
ggtagccagtttcctctgtaatgga

SEQ ID NO: 154484 - DNA, 25 bp, Canis familiaris
ggtacagcagttctcttggaatccg

SEQ ID NO: 154485 - DNA, 25 bp, Canis familiaris
ggttcacctcgttatcatggaatcc

SEQ ID NO: 154486 - DNA, 25 bp, Canis familiaris
ggtatccctacttcattagattcac

SEQ ID NO: 154487 - DNA, 25 bp, Canis familiaris
ggtacaccatcctagatttgtttct

SEQ ID NO: 154488 - DNA, 25 bp, Canis familiaris
ggtatgaccaatgaatttttggctt

SEQ ID NO: 154489 - DNA, 25 bp, Canis familiaris
ggatatcccgggatttattgtgccc

SEQ ID NO: 154490 - DNA, 25 bp, Canis familiaris
ggtattcttcggattaatagggcac

SEQ ID NO: 154491 - DNA, 25 bp, Canis familiaris
ggtattttccggttagcataggcta

SEQ ID NO: 154492 - DNA, 25 bp, Canis familiaris
ggtatctttcacacaaggtatgagc

SEQ ID NO: 154493 - DNA, 25 bp, Canis familiaris
ggtatgatttaagcatctcgttttt

SEQ ID NO: 154494 - DNA, 25 bp, Canis familiaris
ggtatagttagattcgtcctttctt

SEQ ID NO: 154495 - DNA, 25 bp, Canis familiaris
ggtatggtttgctgcgtttattcct

SEQ ID NO: 154496 - DNA, 25 bp, Canis familiaris
ggtagatatttcaagccttttgtct

SEQ ID NO: 154497 - DNA, 25 bp, Canis familiaris
ggtagataatctatgctttgtttgt

SEQ ID NO: 154498 - DNA, 25 bp, Canis familiaris
ggtattagcttttctgattcttttg

SEQ ID NO: 154499 - DNA, 25 bp, Canis familiaris
ggtagccatttttacattgttttgt

SEQ ID NO: 154500 - DNA, 25 bp, Canis familiaris
ggttcagcgtttgacataccgtcgt

SEQ ID NO: 154501 - DNA, 25 bp, Canis familiaris
ggttcacggatcaggatccctgtct

SEQ ID NO: 154502 - DNA, 25 bp, Canis familiaris
ggtagcacccagaggatgtgactga

SEQ ID NO: 154503 - DNA, 25 bp, Canis familiaris
ggttgccccagtagagttagctgac

SEQ ID NO: 154504 - DNA, 25 bp, Canis familiaris
ggtttcctacttgttgatgtgagct

SEQ ID NO: 154505 - DNA, 25 bp, Canis familiaris
ggtactgccaacattttctgttctc

SEQ ID NO: 154506 - DNA, 25 bp, Canis familiaris
ggttccactattgtttctttacttg

SEQ ID NO: 154507 - DNA, 25 bp, Canis familiaris
ggttaacttaatatatttgcttttg

SEQ ID NO: 154508 - DNA, 25 bp, Canis familiaris
ggattcaactgataagtttcccgta

SEQ ID NO: 154509 - DNA, 25 bp, Canis familiaris
ggttcgacgacctaattacagccgt

SEQ ID NO: 154510 - DNA, 25 bp, Canis familiaris
ggtttgttatgcagaattaagtcag

SEQ ID NO: 154511 - DNA, 25 bp, Canis familiaris
ggtttctcattcagtattacaatag

SEQ ID NO: 154512 - DNA, 25 bp, Canis familiaris
ggtttcctagtatcttcaaatctgg

SEQ ID NO: 154513 - DNA, 25 bp, Canis familiaris
ggttttcgcaggatttcaagacatg

SEQ ID NO: 154514 - DNA, 25 bp, Canis familiaris
ggtatcttgggttttgtctagactt

SEQ ID NO: 154515 - DNA, 25 bp, Canis familiaris
ggtacttagtttattcttactgatc

SEQ ID NO: 154516 - DNA, 25 bp, Canis familiaris
ggtactgtcattttaattaacctat

SEQ ID NO: 154517 - DNA, 25 bp, Canis familiaris
ggtactgctttggttttaagctcat

SEQ ID NO: 154518 - DNA, 25 bp, Canis familiaris
ggtatttcttggattggataatgca

SEQ ID NO: 154519 - DNA, 25 bp, Canis familiaris
ggtatgtgcttcagtggtggtaaac

SEQ ID NO: 154520 - DNA, 25 bp, Canis familiaris
ggtatgctttgtctggtggaggaac

SEQ ID NO: 154521 - DNA, 25 bp, Canis familiaris
ggtatgtgggtgtgggctgaagcag

SEQ ID NO: 154522 - DNA, 25 bp, Canis familiaris
ggtagtggtgcgagcctgtaatcag

SEQ ID NO: 154523 - DNA, 25 bp, Canis familiaris
ggtaggtgtctgagccatgaagtat

SEQ ID NO: 154524 - DNA, 25 bp, Canis familiaris
ggtagggtagggctgaggtgttatt

SEQ ID NO: 154525 - DNA, 25 bp, Canis familiaris
ggtagtggtaggggaggatggtata

SEQ ID NO: 154526 - DNA, 25 bp, Canis familiaris
ggtattgttcttgccaggatggtta

SEQ ID NO: 154527 - DNA, 25 bp, Canis familiaris
ggttttcacattccgagtgcggctc

SEQ ID NO: 154528 - DNA, 25 bp, Canis familiaris
ggttcgattccggagagggagcctg

SEQ ID NO: 154529 - DNA, 25 bp, Canis familiaris
ggtatcatttaccggagggttctgt

SEQ ID NO: 154530 - DNA, 25 bp, Canis familiaris
ggttcaccaacacggtggttgaccg

SEQ ID NO: 154531 - DNA, 25 bp, Canis familiaris
ggttgaccttgccgggatggtcacc

SEQ ID NO: 154532 - DNA, 25 bp, Canis familiaris
ggattcaacttgaggaaggggccct

SEQ ID NO: 154533 - DNA, 25 bp, Canis familiaris
ggttgaactgttcgtgaaggccggc

SEQ ID NO: 154534 - DNA, 25 bp, Canis familiaris
ggttcgaacttctgacatgggtggc

SEQ ID NO: 154535 - DNA, 25 bp, Canis familiaris
ggttgagaacccctactgaggaggc

SEQ ID NO: 154536 - DNA, 25 bp, Canis familiaris
ggttaaactgggcactgggcaatct

SEQ ID NO: 154537 - DNA, 25 bp, Canis familiaris
ggttggaacgtatatttgtcttctt

SEQ ID NO: 154538 - DNA, 25 bp, Canis familiaris
ttctttggagcccaggatgccggca

SEQ ID NO: 154539 - DNA, 25 bp, Canis familiaris
ggttgaggaccatgtagggtgttgt

SEQ ID NO: 154540 - DNA, 25 bp, Canis familiaris
ggttcagaggttagtcagggtcaac

SEQ ID NO: 154541 - DNA, 25 bp, Canis familiaris
ggttcaattaatatactctgtagac

SEQ ID NO: 154542 - DNA, 25 bp, Canis familiaris
ggtactatatttgctagactctaga

SEQ ID NO: 154543 - DNA, 25 bp, Canis familiaris
ggtactaaatgctgctatcaccatg

SEQ ID NO: 154544 - DNA, 25 bp, Canis familiaris
ggtactaactgatgtcatgcaatgg

SEQ ID NO: 154545 - DNA, 25 bp, Canis familiaris
ggtacctcctcatgtcagactggag

SEQ ID NO: 154546 - DNA, 25 bp, Canis familiaris
ggtacctcagcatgcctcaaagagg

SEQ ID NO: 154547 - DNA, 25 bp, Canis familiaris
ggtatgttcacttcccaacaatgga

SEQ ID NO: 154548 - DNA, 25 bp, Canis familiaris
ggtagtccttacccatacatatggt

SEQ ID NO: 154549 - DNA, 25 bp, Canis familiaris
ggtagtttctacccaatcaacagtt

SEQ ID NO: 154550 - DNA, 25 bp, Canis familiaris
ggtagtatccatgtaaattagcttt

SEQ ID NO: 154551 - DNA, 25 bp, Canis familiaris
ggttgatactctgtagacgatagct

SEQ ID NO: 154552 - DNA, 25 bp, Canis familiaris
ggttttcttgttggcactgcaggat

SEQ ID NO: 154553 - DNA, 25 bp, Canis familiaris
ggtagatgtttttgatcagatcagg

SEQ ID NO: 154554 - DNA, 25 bp, Canis familiaris
ggtagtttttaatgtctgagctggt

SEQ ID NO: 154555 - DNA, 25 bp, Canis familiaris
ggtagtctcttgtaaactctatggt

SEQ ID NO: 154556 - DNA, 25 bp, Canis familiaris
ggtattctatattgtaactccatgg

SEQ ID NO: 154557 - DNA, 25 bp, Canis familiaris
ggtattcagaatggtatcagctact

SEQ ID NO: 154558 - DNA, 25 bp, Canis familiaris
ggtatggtgacaggtgcacacgccc

SEQ ID NO: 154559 - DNA, 25 bp, Canis familiaris
ggtatggtccattggaagacccctg

SEQ ID NO: 154560 - DNA, 25 bp, Canis familiaris
ggttggtcagggaccagaccacctg

SEQ ID NO: 154561 - DNA, 25 bp, Canis familiaris
ggtatcgtcaagcccaaacacagat

SEQ ID NO: 154562 - DNA, 25 bp, Canis familiaris
ggtatgcagaaaggaaacacacaca

SEQ ID NO: 154563 - DNA, 25 bp, Canis familiaris
ggttaaacaacagaactacatttct

SEQ ID NO: 154564 - DNA, 25 bp, Canis familiaris
tcgtatgaaaaagtaaactatcctt

SEQ ID NO: 154565 - DNA, 25 bp, Canis familiaris
tggtaaacaaacaaaagtctcgtgt

SEQ ID NO: 154566 - DNA, 25 bp, Canis familiaris
ggataaaaacctttcagtccagcat

SEQ ID NO: 154567 - DNA, 25 bp, Canis familiaris
ggtagcaaatgtgctttatttcaca

SEQ ID NO: 154568 - DNA, 25 bp, Canis familiaris
ggtagcaacaggttttctgatcttc

SEQ ID NO: 154569 - DNA, 25 bp, Canis familiaris
ggtagagcacgggactcttgatctc

SEQ ID NO: 154570 - DNA, 25 bp, Canis familiaris
ggtaggaccctattattgaggcaaa

SEQ ID NO: 154571 - DNA, 25 bp, Canis familiaris
ggtactgagcccttgtttgacagca

SEQ ID NO: 154572 - DNA, 25 bp, Canis familiaris
ggtactgcggaaattcttgtgcgca

SEQ ID NO: 154573 - DNA, 25 bp, Canis familiaris
ggtagtgttaacatcgctggcagca

SEQ ID NO: 154574 - DNA, 25 bp, Canis familiaris
ggtagtcatcgaagctgtctgtggc

SEQ ID NO: 154575 - DNA, 25 bp, Canis familiaris
ggtatgttgataggtggcttgtgca

SEQ ID NO: 154576 - DNA, 25 bp, Canis familiaris
ggtatggagaaggtgcttcgtggaa

SEQ ID NO: 154577 - DNA, 25 bp, Canis familiaris
ggtatgaggcaagcctacgctggcc

SEQ ID NO: 154578 - DNA, 25 bp, Canis familiaris
ggtatgaacaaaactacagatactg

SEQ ID NO: 154579 - DNA, 25 bp, Canis familiaris
ggttgaccaatgagatgacagtgac

SEQ ID NO: 154580 - DNA, 25 bp, Canis familiaris
ggttcacgactattgtctcagtact

SEQ ID NO: 154581 - DNA, 25 bp, Canis familiaris
ggtagcacaggtttctctagtagat

SEQ ID NO: 154582 - DNA, 25 bp, Canis familiaris
ggtatttgagtacagtatcccagac

SEQ ID NO: 154583 - DNA, 25 bp, Canis familiaris
ggtatattgaaatcgttgaagcgag

SEQ ID NO: 154584 - DNA, 25 bp, Canis familiaris
ggattttgatcctcagggacgggac

SEQ ID NO: 154585 - DNA, 25 bp, Canis familiaris
ggagtattgggaccggcagacgcgg

SEQ ID NO: 154586 - DNA, 25 bp, Canis familiaris
ggacttgaagggggtagggcaggtg

SEQ ID NO: 154587 - DNA, 25 bp, Canis familiaris
ggtttgggggcaggtgggagtgagg

SEQ ID NO: 154588 - DNA, 25 bp, Canis familiaris
tggtttgtggggggttatagatagg

SEQ ID NO: 154589 - DNA, 25 bp, Canis familiaris
ggttttgcgggctgcttaggatttg

SEQ ID NO: 154590 - DNA, 25 bp, Canis familiaris
ggttcttggaagtcagcattaggat

SEQ ID NO: 154591 - DNA, 25 bp, Canis familiaris
ggttggcatggcacatagcattagc

SEQ ID NO: 154592 - DNA, 25 bp, Canis familiaris
ggttggcaggctttaggcatgacca

SEQ ID NO: 154593 - DNA, 25 bp, Canis familiaris
ggttagcaggtatttgtgaccgacg

SEQ ID NO: 154594 - DNA, 25 bp, Canis familiaris
ggttaaggttcatttctcaggtagg

SEQ ID NO: 154595 - DNA, 25 bp, Canis familiaris
ggttaaggctttcttgaagttgccg

SEQ ID NO: 154596 - DNA, 25 bp, Canis familiaris
ggttaagggcttgtatggagtgtca

SEQ ID NO: 154597 - DNA, 25 bp, Canis familiaris
ggttatcgggatactttgccagtgc

SEQ ID NO: 154598 - DNA, 25 bp, Canis familiaris
ggtttccgcgctgatatacacggct

SEQ ID NO: 154599 - DNA, 25 bp, Canis familiaris
ggtattcttcagactatagaaggag

SEQ ID NO: 154600 - DNA, 25 bp, Canis familiaris
ggtatcccttgagtatgagcaagtt

SEQ ID NO: 154601 - DNA, 25 bp, Canis familiaris
ggtataacttagatgtgccagacat

SEQ ID NO: 154602 - DNA, 25 bp, Canis familiaris
ggtataaccagatagtctcatgact

SEQ ID NO: 154603 - DNA, 25 bp, Canis familiaris
ggttcaatcactaccagtctagact

SEQ ID NO: 154604 - DNA, 25 bp, Canis familiaris
ggttcaatgcaattgctctatctgc

SEQ ID NO: 154605 - DNA, 25 bp, Canis familiaris
ggtttcacaattggatagctgcaca

SEQ ID NO: 154606 - DNA, 25 bp, Canis familiaris
ggtttgcgaaatggacacgacacac

SEQ ID NO: 154607 - DNA, 25 bp, Canis familiaris
ggttagcagctaaagaaggccacaa

SEQ ID NO: 154608 - DNA, 25 bp, Canis familiaris
ggttatggctgtggcaaaggcaaaa

SEQ ID NO: 154609 - DNA, 25 bp, Canis familiaris
ggtattccgctcgaaagtactgatg

SEQ ID NO: 154610 - DNA, 25 bp, Canis familiaris
ggtagtcccatcgcatggtggatga

SEQ ID NO: 154611 - DNA, 25 bp, Canis familiaris
ggtagacaccagggctgttggcaca

SEQ ID NO: 154612 - DNA, 25 bp, Canis familiaris
ggtagacaaagttcttcaggctcaa

SEQ ID NO: 154613 - DNA, 25 bp, Canis familiaris
ggtatacattatttctacacctaca

SEQ ID NO: 154614 - DNA, 25 bp, Canis familiaris
ggtataactgtgtacccagcaccta

SEQ ID NO: 154615 - DNA, 25 bp, Canis familiaris
ggtatatctaggtatagctctccca

SEQ ID NO: 154616 - DNA, 25 bp, Canis familiaris
ggttatctaattaccttctgacaat

SEQ ID NO: 154617 - DNA, 25 bp, Canis familiaris
ggtacctctgtacatcttcatgaaa

SEQ ID NO: 154618 - DNA, 25 bp, Canis familiaris
ggtatccatggtgtgagcccaaagg

SEQ ID NO: 154619 - DNA, 25 bp, Canis familiaris
ggttcctgggcaaaatcgagtagag

SEQ ID NO: 154620 - DNA, 25 bp, Canis familiaris
ggttgacgggcatcagagccgggag

SEQ ID NO: 154621 - DNA, 25 bp, Canis familiaris
ggttcatgtgggaaaacagatggga

SEQ ID NO: 154622 - DNA, 25 bp, Canis familiaris
ggttgcatgtgggtacgttggaaga

SEQ ID NO: 154623 - DNA, 25 bp, Canis familiaris
ggttggtggccgagtctgtgaaaac

SEQ ID NO: 154624 - DNA, 25 bp, Canis familiaris
ggttttggcgtcatttttaatcagc

SEQ ID NO: 154625 - DNA, 25 bp, Canis familiaris
ggttagcacggtattttgacccacg

SEQ ID NO: 154626 - DNA, 25 bp, Canis familiaris
ggttctgccggcagagttggacctc

SEQ ID NO: 154627 - DNA, 25 bp, Canis familiaris
ggtttccaggccaaatgggacttcg

SEQ ID NO: 154628 - DNA, 25 bp, Canis familiaris
ggtttcaaaggcatcagcggacctc

SEQ ID NO: 154629 - DNA, 25 bp, Canis familiaris
ggttatatagggatagtatgagcca

SEQ ID NO: 154630 - DNA, 25 bp, Canis familiaris
ggtattgcatagctagtacttcacc

SEQ ID NO: 154631 - DNA, 25 bp, Canis familiaris
ggttttagcattaatacttgtcgaa

SEQ ID NO: 154632 - DNA, 25 bp, Canis familiaris
ggtttctgagttaaacaagcaggaa

SEQ ID NO: 154633 - DNA, 25 bp, Canis familiaris
ggtttgggtgtcaaatgccactggg

SEQ ID NO: 154634 - DNA, 25 bp, Canis familiaris
ggtttgggctgggtcttcagctgaa

SEQ ID NO: 154635 - DNA, 25 bp, Canis familiaris
ggttccgtctggcccaatcaggaac

SEQ ID NO: 154636 - DNA, 25 bp, Canis familiaris
ggtatcgctgatgaggcacagacag

SEQ ID NO: 154637 - DNA, 25 bp, Canis familiaris
ggtatgcctgccaagagacgcaagc

SEQ ID NO: 154638 - DNA, 25 bp, Canis familiaris
ggttcctcctagtactaagtcctag

SEQ ID NO: 154639 - DNA, 25 bp, Canis familiaris
ggttccatctgagaacttaacctca

SEQ ID NO: 154640 - DNA, 25 bp, Canis familiaris
ggtttgcagtgagaagtgaagcacc

SEQ ID NO: 154641 - DNA, 25 bp, Canis familiaris
ggtttgctgggcctcggagatagcc

SEQ ID NO: 154642 - DNA, 25 bp, Canis familiaris
ggttgcctgggcccagaattaccag

SEQ ID NO: 154643 - DNA, 25 bp, Canis familiaris
ggttattgcccacaaatttccaagg

SEQ ID NO: 154644 - DNA, 25 bp, Canis familiaris
ggttcagggtcatatttccccaagg

SEQ ID NO: 154645 - DNA, 25 bp, Canis familiaris
ggttcatcggtcagtgttctaccaa

SEQ ID NO: 154646 - DNA, 25 bp, Canis familiaris
ggttacgtgagctggatatgaaaaa

SEQ ID NO: 154647 - DNA, 25 bp, Canis familiaris
ggtaccagtcactgtttagactaca

SEQ ID NO: 154648 - DNA, 25 bp, Canis familiaris
ggtatctgttcatactttaacataa

SEQ ID NO: 154649 - DNA, 25 bp, Canis familiaris
ggtagtctctaatcttttcctgaaa

SEQ ID NO: 154650 - DNA, 25 bp, Canis familiaris
ggtagtttagttgtagcagcctgaa

SEQ ID NO: 154651 - DNA, 25 bp, Canis familiaris
ggtattattggttttcagagacaga

SEQ ID NO: 154652 - DNA, 25 bp, Canis familiaris
ggtagctcatttttgtgtagcagaa

SEQ ID NO: 154653 - DNA, 25 bp, Canis familiaris
ggtagcatatgcatctgggtagtca

SEQ ID NO: 154654 - DNA, 25 bp, Canis familiaris
ggtagctcaggccatgggtgtgtat

SEQ ID NO: 154655 - DNA, 25 bp, Canis familiaris
ggtagcagaggctggtgtgattcta

SEQ ID NO: 154656 - DNA, 25 bp, Canis familiaris
ggtagcagcttgggagggcggtgag

SEQ ID NO: 154657 - DNA, 25 bp, Canis familiaris
ggtatcacttggttgggggtgacca

SEQ ID NO: 154658 - DNA, 25 bp, Canis familiaris
ggttcctggatgaagtcgggtccca

SEQ ID NO: 154659 - DNA, 25 bp, Canis familiaris
ggtatacggatagtgcctgcggtcc

SEQ ID NO: 154660 - DNA, 25 bp, Canis familiaris
ggttactagtaccactgggaccagg

SEQ ID NO: 154661 - DNA, 25 bp, Canis familiaris
ggttaccagtggtctcttggaatcg

SEQ ID NO: 154662 - DNA, 25 bp, Canis familiaris
ggtttcaccttgcttgttgaactct

SEQ ID NO: 154663 - DNA, 25 bp, Canis familiaris
ggtatccgctgcatggttattaggt

SEQ ID NO: 154664 - DNA, 25 bp, Canis familiaris
ggttctggctctgtgtatgcttatg

SEQ ID NO: 154665 - DNA, 25 bp, Canis familiaris
ggttcatgtgcattgtttaccaagc

SEQ ID NO: 154666 - DNA, 25 bp, Canis familiaris
ggttcactcatgttcatggtggcat

SEQ ID NO: 154667 - DNA, 25 bp, Canis familiaris
ggttgacactgatctcgttgtccga

SEQ ID NO: 154668 - DNA, 25 bp, Canis familiaris
ggtatcaagtctttggttgtccagt

SEQ ID NO: 154669 - DNA, 25 bp, Canis familiaris
ggtatacagttctgactggtccaga

SEQ ID NO: 154670 - DNA, 25 bp, Canis familiaris
ggttgagcatttcacactggtaaaa

SEQ ID NO: 154671 - DNA, 25 bp, Canis familiaris
ggttggaatttactaggctaagatg

SEQ ID NO: 154672 - DNA, 25 bp, Canis familiaris
ggttcggtttatccacgttagattg

SEQ ID NO: 154673 - DNA, 25 bp, Canis familiaris
ggtttttctctttcaagttagtatg

SEQ ID NO: 154674 - DNA, 25 bp, Canis familiaris
ggttcttatcctaggaggttatggg

SEQ ID NO: 154675 - DNA, 25 bp, Canis familiaris
ggtttaacctatcgagcagttgtac

SEQ ID NO: 154676 - DNA, 25 bp, Canis familiaris
ggttgtagactactgctagaaagca

SEQ ID NO: 154677 - DNA, 25 bp, Canis familiaris
ggtttagcaccactttaagccgagg

SEQ ID NO: 154678 - DNA, 25 bp, Canis familiaris
ggtatcaaacagcttctgaaccaag

SEQ ID NO: 154679 - DNA, 25 bp, Canis familiaris
ggtattactcgatttctaagtccat

SEQ ID NO: 154680 - DNA, 25 bp, Canis familiaris
ggtatccccagacattacagattat

SEQ ID NO: 154681 - DNA, 25 bp, Canis familiaris
ggtatctcccaggcgcataatagaa

SEQ ID NO: 154682 - DNA, 25 bp, Canis familiaris
ggttcataccattccacagtagggg

SEQ ID NO: 154683 - DNA, 25 bp, Canis familiaris
ggtatcatagctgagcccaagagtg

SEQ ID NO: 154684 - DNA, 25 bp, Canis familiaris
ggtatatcatcggacctcggattca

SEQ ID NO: 154685 - DNA, 25 bp, Canis familiaris
ggaatatttggcttcctggttcctc

SEQ ID NO: 154686 - DNA, 25 bp, Canis familiaris
ggtatttggccatttctggttcttc

SEQ ID NO: 154687 - DNA, 25 bp, Canis familiaris
ggtatcttacgattttgcagtttgt

SEQ ID NO: 154688 - DNA, 25 bp, Canis familiaris
ggattttacaaacagagttttgcta

SEQ ID NO: 154689 - DNA, 25 bp, Canis familiaris
ggtattcccaaacaggcaactatga

SEQ ID NO: 154690 - DNA, 25 bp, Canis familiaris
ggtattacccaaccacacatttgta

SEQ ID NO: 154691 - DNA, 25 bp, Canis familiaris
ggttattcctcatggctacttgtta

SEQ ID NO: 154692 - DNA, 25 bp, Canis familiaris
ggttttccagctaacttcggtgtga

SEQ ID NO: 154693 - DNA, 25 bp, Canis familiaris
ggtttgtccgcatgttgtaattgtg

SEQ ID NO: 154694 - DNA, 25 bp, Canis familiaris
ggtatgagtccaactgtttaatcct

SEQ ID NO: 154695 - DNA, 25 bp, Canis familiaris
ggtagtgtccagtctttgaaagctt

SEQ ID NO: 154696 - DNA, 25 bp, Canis familiaris
ggtaggtccagtgctttgtatctgt

SEQ ID NO: 154697 - DNA, 25 bp, Canis familiaris
ggtaggttctgtgtgttcaatcata

SEQ ID NO: 154698 - DNA, 25 bp, Canis familiaris
ggtagtttagtgccttgtattatga

SEQ ID NO: 154699 - DNA, 25 bp, Canis familiaris
ggtagtgatcggagcttattgtata

SEQ ID NO: 154700 - DNA, 25 bp, Canis familiaris
ggtaggcatcggaggcttgttgaat

SEQ ID NO: 154701 - DNA, 25 bp, Canis familiaris
ggtaggctttgtgtttgttgaatct

SEQ ID NO: 154702 - DNA, 25 bp, Canis familiaris
ggtaggtcattgtttattttcttct

SEQ ID NO: 154703 - DNA, 25 bp, Canis familiaris
ggtatgttttaaatatttgtctgct

SEQ ID NO: 154704 - DNA, 25 bp, Canis familiaris
ggtatggtttaaaatcctgttcatc

SEQ ID NO: 154705 - DNA, 25 bp, Canis familiaris
ggttgagtttacgacagccagttgt

SEQ ID NO: 154706 - DNA, 25 bp, Canis familiaris
ggttactaatcacctcagaggcttt

SEQ ID NO: 154707 - DNA, 25 bp, Canis familiaris
ggttcgctaagctacctagtgctat

SEQ ID NO: 154708 - DNA, 25 bp, Canis familiaris
ggtatacaaagcaacctgatagcat

SEQ ID NO: 154709 - DNA, 25 bp, Canis familiaris
ggtatcaaccagaatcctagatcag

SEQ ID NO: 154710 - DNA, 25 bp, Canis familiaris
ggttacaccttaccttgtatgggtg

SEQ ID NO: 154711 - DNA, 25 bp, Canis familiaris
ggttttcgccatgccttgtaatggg

SEQ ID NO: 154712 - DNA, 25 bp, Canis familiaris
ggttcgtaggctgcctcattaaccc

SEQ ID NO: 154713 - DNA, 25 bp, Canis familiaris
ggttcgaagtgatcttctcctacct

SEQ ID NO: 154714 - DNA, 25 bp, Canis familiaris
ggttggaatctttctttcctactgc

SEQ ID NO: 154715 - DNA, 25 bp, Canis familiaris
ggtttagagtgacttttcctcctgc

SEQ ID NO: 154716 - DNA, 25 bp, Canis familiaris
ggtttcagggacatccttctgcgag

SEQ ID NO: 154717 - DNA, 25 bp, Canis familiaris
ggtttaacagtattgccctctggtc

SEQ ID NO: 154718 - DNA, 25 bp, Canis familiaris
ggtttgagaagtgaccctctccatc

SEQ ID NO: 154719 - DNA, 25 bp, Canis familiaris
ggttgggaaattcccctttgctgct

SEQ ID NO: 154720 - DNA, 25 bp, Canis familiaris
ggttggggagggcagccttgagtcc

SEQ ID NO: 154721 - DNA, 25 bp, Canis familiaris
ggttggggtggctgggtaggtagca

SEQ ID NO: 154722 - DNA, 25 bp, Canis familiaris
ggtaggttgtggcagggtgtgggag

SEQ ID NO: 154723 - DNA, 25 bp, Canis familiaris
ggtagttctggtgattggtgtcgga

SEQ ID NO: 154724 - DNA, 25 bp, Canis familiaris
ggctttcctggttacggtatcggag

SEQ ID NO: 154725 - DNA, 25 bp, Canis familiaris
ggttatcctgagggcacgtgtagag

SEQ ID NO: 154726 - DNA, 25 bp, Canis familiaris
ggtattcacaacagccagggacatg

SEQ ID NO: 154727 - DNA, 25 bp, Canis familiaris
ggtatgtaaaaaaaggattcagagt

SEQ ID NO: 154728 - DNA, 25 bp, Canis familiaris
ggttttcaacaatttggaataagct

SEQ ID NO: 154729 - DNA, 25 bp, Canis familiaris
ggtttctcacacaattgggaataac

SEQ ID NO: 154730 - DNA, 25 bp, Canis familiaris
ggttcttatcacaaccctggatcac

SEQ ID NO: 154731 - DNA, 25 bp, Canis familiaris
ggtatttgtcacacacctgtgatgt

SEQ ID NO: 154732 - DNA, 25 bp, Canis familiaris
ggttttggtgcatccactatactgc

SEQ ID NO: 154733 - DNA, 25 bp, Canis familiaris
ggtttggtggagtgctgccaacatg

SEQ ID NO: 154734 - DNA, 25 bp, Canis familiaris
ggtttgagctggagcctctcagaat

SEQ ID NO: 154735 - DNA, 25 bp, Canis familiaris
ggtatagtgtgagcatgccttctga

SEQ ID NO: 154736 - DNA, 25 bp, Canis familiaris
ggtatatgggaattctctgcactat

SEQ ID NO: 154737 - DNA, 25 bp, Canis familiaris
ggtttggacatattatcatccttaa

SEQ ID NO: 154738 - DNA, 25 bp, Canis familiaris
ggtttggactcgaacataatgaaca

SEQ ID NO: 154739 - DNA, 25 bp, Canis familiaris
ggtattgagacccaagaaatagcaa

SEQ ID NO: 154740 - DNA, 25 bp, Canis familiaris
ggtatgcgaagcctgcaaaaataaa

SEQ ID NO: 154741 - DNA, 25 bp, Canis familiaris
ggataggagggtgactgttgcgaca

SEQ ID NO: 154742 - DNA, 25 bp, Canis familiaris
ggttgtgggtgtgactttgctccca

SEQ ID NO: 154743 - DNA, 25 bp, Canis familiaris
ggtttggtttctcctggacatatcc

SEQ ID NO: 154744 - DNA, 25 bp, Canis familiaris
ggtttgttttgcactaaagttcctg

SEQ ID NO: 154745 - DNA, 25 bp, Canis familiaris
ggttagcttttgtattcagaagtct

SEQ ID NO: 154746 - DNA, 25 bp, Canis familiaris
ggttcaattcttgtaagggcctttg

SEQ ID NO: 154747 - DNA, 25 bp, Canis familiaris
ggttcaaatcttatacagacttttc

SEQ ID NO: 154748 - DNA, 25 bp, Canis familiaris
ggtttgaccttcagagggttgctct

SEQ ID NO: 154749 - DNA, 25 bp, Canis familiaris
ggttaggccttcttagattattgct

SEQ ID NO: 154750 - DNA, 25 bp, Canis familiaris
ggttaccttgtccataataatttgt

SEQ ID NO: 154751 - DNA, 25 bp, Canis familiaris
ggtatccgatagtcctgtagaattt

SEQ ID NO: 154752 - DNA, 25 bp, Canis familiaris
ggtatccgcacagtggctgtctact

SEQ ID NO: 154753 - DNA, 25 bp, Canis familiaris
ggtatctgtcacatgctggttttgt

SEQ ID NO: 154754 - DNA, 25 bp, Canis familiaris
ggtatttgatgctttgtttcctgct

SEQ ID NO: 154755 - DNA, 25 bp, Canis familiaris
ggtattttgaccattttgccatttg

SEQ ID NO: 154756 - DNA, 25 bp, Canis familiaris
ggtttgggtctattttgttatcttg

SEQ ID NO: 154757 - DNA, 25 bp, Canis familiaris
ggtttgtggtgtgttcatttgtgtt

SEQ ID NO: 154758 - DNA, 25 bp, Canis familiaris
ggtattgccagtctcttttactgtt

SEQ ID NO: 154759 - DNA, 25 bp, Canis familiaris
ggtttgcacatgtggttattgcctt

SEQ ID NO: 154760 - DNA, 25 bp, Canis familiaris
ggtttccataatctgtcatctgcac

SEQ ID NO: 154761 - DNA, 25 bp, Canis familiaris
ggttcccaaagatgtcaatgctgcc

SEQ ID NO: 154762 - DNA, 25 bp, Canis familiaris
ggttccaacacagtctgacagatct

SEQ ID NO: 154763 - DNA, 25 bp, Canis familiaris
ggttcgtgaccagtccacatatagc

SEQ ID NO: 154764 - DNA, 25 bp, Canis familiaris
ggttcagacccttggcagtataata

SEQ ID NO: 154765 - DNA, 25 bp, Canis familiaris
ggttatgacaactatggaggaggaa

SEQ ID NO: 154766 - DNA, 25 bp, Canis familiaris
ggttaaagacacccaggccatgaag

SEQ ID NO: 154767 - DNA, 25 bp, Canis familiaris
ggttgaaggcacacctagtgctaaa

SEQ ID NO: 154768 - DNA, 25 bp, Canis familiaris
ggcttgtaggaatccgggctcagga

SEQ ID NO: 154769 - DNA, 25 bp, Canis familiaris
ggttttggagattctcgtggtggtg

SEQ ID NO: 154770 - DNA, 25 bp, Canis familiaris
ggtttgcgaagaagacggagtgcgg

SEQ ID NO: 154771 - DNA, 25 bp, Canis familiaris
ggtattcgctattaccagtagccaa

SEQ ID NO: 154772 - DNA, 25 bp, Canis familiaris
ggtatgccctggtacaagttggaaa

SEQ ID NO: 154773 - DNA, 25 bp, Canis familiaris
ggtatggacattctaatttggaaga

SEQ ID NO: 154774 - DNA, 25 bp, Canis familiaris
ggtatgaaccatttagtttggagag

SEQ ID NO: 154775 - DNA, 25 bp, Canis familiaris
ggtagtccagagcttgtttgcgcag

SEQ ID NO: 154776 - DNA, 25 bp, Canis familiaris
ggtatgtctagaggctttggtgtca

SEQ ID NO: 154777 - DNA, 25 bp, Canis familiaris
ggtttgcttgatggttacaatgcaa

SEQ ID NO: 154778 - DNA, 25 bp, Canis familiaris
ggttagctgtgtggtaccatgctgc

SEQ ID NO: 154779 - DNA, 25 bp, Canis familiaris
ggttgacttgatggtgatccattca

SEQ ID NO: 154780 - DNA, 25 bp, Canis familiaris
ggtatacttgtttatcgatcacacc

SEQ ID NO: 154781 - DNA, 25 bp, Canis familiaris
ggtatatgttttaatggtctcccct

SEQ ID NO: 154782 - DNA, 25 bp, Canis familiaris
ggtatttctcctaagtgtacgcacc

SEQ ID NO: 154783 - DNA, 25 bp, Canis familiaris
ggtatttgttcttttgtgactggct

SEQ ID NO: 154784 - DNA, 25 bp, Canis familiaris
ggtttcgtatcatttggtttgtcta

SEQ ID NO: 154785 - DNA, 25 bp, Canis familiaris
ggtatacttgatttttggctttcta

SEQ ID NO: 154786 - DNA, 25 bp, Canis familiaris
ggtatctatctgtttttcttttctt

SEQ ID NO: 154787 - DNA, 25 bp, Canis familiaris
ggtttatttcttatctatatcgcta

SEQ ID NO: 154788 - DNA, 25 bp, Canis familiaris
ggtttaattcctttgcaattggcta

SEQ ID NO: 154789 - DNA, 25 bp, Canis familiaris
ggtatggaattgcctttcaccattc

SEQ ID NO: 154790 - DNA, 25 bp, Canis familiaris
ggtattgaattgttttctacattga

SEQ ID NO: 154791 - DNA, 25 bp, Canis familiaris
ggtttgtattgcctattttgattat

SEQ ID NO: 154792 - DNA, 25 bp, Canis familiaris
ggtttgtcatgaatttcttctgaat

SEQ ID NO: 154793 - DNA, 25 bp, Canis familiaris
ggtttgtgcatgttttctgctgggt

SEQ ID NO: 154794 - DNA, 25 bp, Canis familiaris
ggtattgtcatggactctggggatg

SEQ ID NO: 154795 - DNA, 25 bp, Canis familiaris
ggtttggtccagtctgtgagtgcga

SEQ ID NO: 154796 - DNA, 25 bp, Canis familiaris
ggtatggctgtcagagtgaggggca

SEQ ID NO: 154797 - DNA, 25 bp, Canis familiaris
ggtatgtgtgtcacaggggcttccc

SEQ ID NO: 154798 - DNA, 25 bp, Canis familiaris
ggttgggttctcaggacttctgact

SEQ ID NO: 154799 - DNA, 25 bp, Canis familiaris
ggttccgttgcaaaggactttcagc

SEQ ID NO: 154800 - DNA, 25 bp, Canis familiaris
ggtttcgtctcaaatcgactctttg

SEQ ID NO: 154801 - DNA, 25 bp, Canis familiaris
ggtttgtgtaacatccactcttctt

SEQ ID NO: 154802 - DNA, 25 bp, Canis familiaris
ggtttttcaaatagacctttgctgt

SEQ ID NO: 154803 - DNA, 25 bp, Canis familiaris
ggttaatttaagcacatctgttctg

SEQ ID NO: 154804 - DNA, 25 bp, Canis familiaris
ggtttgatttgatgttagctggggg

SEQ ID NO: 154805 - DNA, 25 bp, Canis familiaris
ggtttgaatttgtttgagctgctga

SEQ ID NO: 154806 - DNA, 25 bp, Canis familiaris
ggtatgacatttagtttgagagcca

SEQ ID NO: 154807 - DNA, 25 bp, Canis familiaris
ggtatggttcgtatcatgagacaca

SEQ ID NO: 154808 - DNA, 25 bp, Canis familiaris
ggttggagggctactccagaccaat

SEQ ID NO: 154809 - DNA, 25 bp, Canis familiaris
ggttgccaagagtattgccagatcc

SEQ ID NO: 154810 - DNA, 25 bp, Canis familiaris
ggtttctcagactttctgaactccc

SEQ ID NO: 154811 - DNA, 25 bp, Canis familiaris
ggtttctcagtctctaacaggcacc

SEQ ID NO: 154812 - DNA, 25 bp, Canis familiaris
ggttgtctcagaccatctaactgga

SEQ ID NO: 154813 - DNA, 25 bp, Canis familiaris
ggtatgccgcataccttgatatctc

SEQ ID NO: 154814 - DNA, 25 bp, Canis familiaris
ggtatctggatttctgaatattcat

SEQ ID NO: 154815 - DNA, 25 bp, Canis familiaris
ggtatgcttgatcacagatggattt

SEQ ID NO: 154816 - DNA, 25 bp, Canis familiaris
ggttcatatgatggccgaggtgata

SEQ ID NO: 154817 - DNA, 25 bp, Canis familiaris
ggtatccatgctggctggactttga

SEQ ID NO: 154818 - DNA, 25 bp, Canis familiaris
ggtatccagtatcccactgttgata

SEQ ID NO: 154819 - DNA, 25 bp, Canis familiaris
ggtatcctatattcacatcatctct

SEQ ID NO: 154820 - DNA, 25 bp, Canis familiaris
ggtatccaatgcaaagtgtccttcc

SEQ ID NO: 154821 - DNA, 25 bp, Canis familiaris
ggtatctgaccaaaagtagcttctg

SEQ ID NO: 154822 - DNA, 25 bp, Canis familiaris
ggtatcttcataattagtagctccc

SEQ ID NO: 154823 - DNA, 25 bp, Canis familiaris
ggttcttgtaactagcagaccacgt

SEQ ID NO: 154824 - DNA, 25 bp, Canis familiaris
ggttttcaacaagcagactccaatc

SEQ ID NO: 154825 - DNA, 25 bp, Canis familiaris
ggttttaacgagggtcctgaagctg

SEQ ID NO: 154826 - DNA, 25 bp, Canis familiaris
ggtttctagaccaatggccctggaa

SEQ ID NO: 154827 - DNA, 25 bp, Canis familiaris
ggatgggatagagcggtccctgggc

SEQ ID NO: 154828 - DNA, 25 bp, Canis familiaris
ggttatgaagatgccgttcactcgg

SEQ ID NO: 154829 - DNA, 25 bp, Canis familiaris
ggtttgacagagacctattccaagg

SEQ ID NO: 154830 - DNA, 25 bp, Canis familiaris
tggttttacccaggacttcaaggag

SEQ ID NO: 154831 - DNA, 25 bp, Canis familiaris
ggtatttcctccagagtatacgaga

SEQ ID NO: 154832 - DNA, 25 bp, Canis familiaris
ggattttcccctagaataccacaga

SEQ ID NO: 154833 - DNA, 25 bp, Canis familiaris
ggttcttccaactatttgagctcca

SEQ ID NO: 154834 - DNA, 25 bp, Canis familiaris
ggttcttccaaatgttatccacgtg

SEQ ID NO: 154835 - DNA, 25 bp, Canis familiaris
ggtttcttcagaacggtactctagt

SEQ ID NO: 154836 - DNA, 25 bp, Canis familiaris
ggttttcaagctactggtacccagg

SEQ ID NO: 154837 - DNA, 25 bp, Canis familiaris
ggttggtcaggtactgggcatctct

SEQ ID NO: 154838 - DNA, 25 bp, Canis familiaris
ggttgtgaagcttctttgaattctg

SEQ ID NO: 154839 - DNA, 25 bp, Canis familiaris
ggttttacatggttgctgaattgca

SEQ ID NO: 154840 - DNA, 25 bp, Canis familiaris
ggttatccacatcgcaaggaaaggc

SEQ ID NO: 154841 - DNA, 25 bp, Canis familiaris
ggtatacctcaagaggaatgactgt

SEQ ID NO: 154842 - DNA, 25 bp, Canis familiaris
ggatgagactcttactattataact

SEQ ID NO: 154843 - DNA, 25 bp, Canis familiaris
ggataactgtggtaattctagagct

SEQ ID NO: 154844 - DNA, 25 bp, Canis familiaris
ggatttcttgtgtgttcaaatgttt

SEQ ID NO: 154845 - DNA, 25 bp, Canis familiaris
ggtatttttttggtcaattgcattt

SEQ ID NO: 154846 - DNA, 25 bp, Canis familiaris
ggtttgtttttttgccatgtacttg

SEQ ID NO: 154847 - DNA, 25 bp, Canis familiaris
ggtttaattttctagcgcatccact

SEQ ID NO: 154848 - DNA, 25 bp, Canis familiaris
ggtattattggttctatgctcccct

SEQ ID NO: 154849 - DNA, 25 bp, Canis familiaris
ggtattactgtgtcatgctatgctt

SEQ ID NO: 154850 - DNA, 25 bp, Canis familiaris
ggtttactgctgtcattgtccatgc

SEQ ID NO: 154851 - DNA, 25 bp, Canis familiaris
ggtattccctgtatgtccatgattc

SEQ ID NO: 154852 - DNA, 25 bp, Canis familiaris
ggtatataccttatcaggctgatct

SEQ ID NO: 154853 - DNA, 25 bp, Canis familiaris
ggtatgtttcactagtagcacttct

SEQ ID NO: 154854 - DNA, 25 bp, Canis familiaris
ggttttataccctcaatgtcttaga

SEQ ID NO: 154855 - DNA, 25 bp, Canis familiaris
ggtttttacttctctgattctgtat

SEQ ID NO: 154856 - DNA, 25 bp, Canis familiaris
ggtattggtattgttctcatttaat

SEQ ID NO: 154857 - DNA, 25 bp, Canis familiaris
ggtttggtatctgtcctaatttgtt

SEQ ID NO: 154858 - DNA, 25 bp, Canis familiaris
ggttacgttctgggtctaatttgtg

SEQ ID NO: 154859 - DNA, 25 bp, Canis familiaris
ggttatcttcttcagtgttttggtt

SEQ ID NO: 154860 - DNA, 25 bp, Canis familiaris
ggtatatcttaccgacatttttggt

SEQ ID NO: 154861 - DNA, 25 bp, Canis familiaris
ggtatgtttacatgactttttgcag

SEQ ID NO: 154862 - DNA, 25 bp, Canis familiaris
ggttgtttgttgaccaatttggcaa

SEQ ID NO: 154863 - DNA, 25 bp, Canis familiaris
ggttattttggagccgttggagcac

SEQ ID NO: 154864 - DNA, 25 bp, Canis familiaris
ggttacttgggagcctggtcttaga

SEQ ID NO: 154865 - DNA, 25 bp, Canis familiaris
ggttacacttgttaggctggtctta

SEQ ID NO: 154866 - DNA, 25 bp, Canis familiaris
ggttatcctgggaagcctcggaata

SEQ ID NO: 154867 - DNA, 25 bp, Canis familiaris
ggtttcgcggtgatcgtaggtacag

SEQ ID NO: 154868 - DNA, 25 bp, Canis familiaris
ggtttgctgggtgaggggagccaag

SEQ ID NO: 154869 - DNA, 25 bp, Canis familiaris
ggttttgggatccaggagcacatcg

SEQ ID NO: 154870 - DNA, 25 bp, Canis familiaris
ggtttgtggtgttgttggcagcagc

SEQ ID NO: 154871 - DNA, 25 bp, Canis familiaris
ggttcgtggacggtaagcagatgca

SEQ ID NO: 154872 - DNA, 25 bp, Canis familiaris
ggttcgtggatagtaagcaggtgca

SEQ ID NO: 154873 - DNA, 25 bp, Canis familiaris
ggtatctgtcggtctacaggttgca

SEQ ID NO: 154874 - DNA, 25 bp, Canis familiaris
ggtattccgcgcttgagcaggagta

SEQ ID NO: 154875 - DNA, 25 bp, Canis familiaris
ggttcctcccttggagatgcagtct

SEQ ID NO: 154876 - DNA, 25 bp, Canis familiaris
ggttcctgaccaagatgtggcaccc

SEQ ID NO: 154877 - DNA, 25 bp, Canis familiaris
ggttctctacctggtatgagggaaa

SEQ ID NO: 154878 - DNA, 25 bp, Canis familiaris
ggttcaattcagcttagaggtacaa

SEQ ID NO: 154879 - DNA, 25 bp, Canis familiaris
ggtattattccacttaacctacaag

SEQ ID NO: 154880 - DNA, 25 bp, Canis familiaris
ggtttattcccaagtatgccttaag

SEQ ID NO: 154881 - DNA, 25 bp, Canis familiaris
ggttggattcctaagttcttaatgg

SEQ ID NO: 154882 - DNA, 25 bp, Canis familiaris
ggttggctaactctttcctgagaac

SEQ ID NO: 154883 - DNA, 25 bp, Canis familiaris
ggatatggaacccttctaccaagaa

SEQ ID NO: 154884 - DNA, 25 bp, Canis familiaris
ggttggaacggagctgatggatatg

SEQ ID NO: 154885 - DNA, 25 bp, Canis familiaris
ggcttggaaaggcaaatgtctaggc

SEQ ID NO: 154886 - DNA, 25 bp, Canis familiaris
ggttgggaaggtctaatataagcag

SEQ ID NO: 154887 - DNA, 25 bp, Canis familiaris
ggttgggggggactagattccagcg

SEQ ID NO: 154888 - DNA, 25 bp, Canis familiaris
ggtttggaggatcgatgctggcttc

SEQ ID NO: 154889 - DNA, 25 bp, Canis familiaris
ggtttcagagcgccgccattggcgc

SEQ ID NO: 154890 - DNA, 25 bp, Canis familiaris
ggttcccagctgcggctggagtgga

SEQ ID NO: 154891 - DNA, 25 bp, Canis familiaris
ggattatcgaggcggtgagaggtaa

SEQ ID NO: 154892 - DNA, 25 bp, Canis familiaris
ggttccaagagtcttcgtgcattaa

SEQ ID NO: 154893 - DNA, 25 bp, Canis familiaris
ggttaaaggttttggctgctgtaca

SEQ ID NO: 154894 - DNA, 25 bp, Canis familiaris
ggttaaactggcactggccatcttc

SEQ ID NO: 154895 - DNA, 25 bp, Canis familiaris
ggttgagacctggtagtatccatgt

SEQ ID NO: 154896 - DNA, 25 bp, Canis familiaris
ggttggaactggttttgctatgtaa

SEQ ID NO: 154897 - DNA, 25 bp, Canis familiaris
ggttgaaactggtgcctgtaggagg

SEQ ID NO: 154898 - DNA, 25 bp, Canis familiaris
ggttgcaaagctgaaacttaaagga

SEQ ID NO: 154899 - DNA, 25 bp, Canis familiaris
ggttcattatctcaccactttaaaa

SEQ ID NO: 154900 - DNA, 25 bp, Canis familiaris
ggttatgatattgagcccttcatca

SEQ ID NO: 154901 - DNA, 25 bp, Canis familiaris
ggtataatagtttccactctggcag

SEQ ID NO: 154902 - DNA, 25 bp, Canis familiaris
ggattaaagtcttctacctggcttt

SEQ ID NO: 154903 - DNA, 25 bp, Canis familiaris
ggtattatgactatgattcctggtt

SEQ ID NO: 154904 - DNA, 25 bp, Canis familiaris
ggtatatataggtttatccaggctt

SEQ ID NO: 154905 - DNA, 25 bp, Canis familiaris
ggtattaagtcatttctccacctct

SEQ ID NO: 154906 - DNA, 25 bp, Canis familiaris
ggattgaaggcatattctccccgta

SEQ ID NO: 154907 - DNA, 25 bp, Canis familiaris
ggttatcgctcacatatcttcgacg

SEQ ID NO: 154908 - DNA, 25 bp, Canis familiaris
ggttaggctacctgtcacatactgc

SEQ ID NO: 154909 - DNA, 25 bp, Canis familiaris
ggtttgagtacttttcacccatgcc

SEQ ID NO: 154910 - DNA, 25 bp, Canis familiaris
ggttgtagttctatcaaaacacctt

SEQ ID NO: 154911 - DNA, 25 bp, Canis familiaris
ggatctagaaccaattaaaatacca

SEQ ID NO: 154912 - DNA, 25 bp, Canis familiaris
ggatctagaacaaattaaaatacaa

SEQ ID NO: 154913 - DNA, 25 bp, Canis familiaris
ggttacaaaaatttatacatagcaa

SEQ ID NO: 154914 - DNA, 25 bp, Canis familiaris
ggttccagaaacattatcaattgac

SEQ ID NO: 154915 - DNA, 25 bp, Canis familiaris
ggttccagaaaggcctcttgtgtga

SEQ ID NO: 154916 - DNA, 25 bp, Canis familiaris
ggtttcagaattcaccttttgagca

SEQ ID NO: 154917 - DNA, 25 bp, Canis familiaris
ggtttccatattcaccatgtttctc

SEQ ID NO: 154918 - DNA, 25 bp, Canis familiaris
ggttctgcacaatcaaccgggtttt

SEQ ID NO: 154919 - DNA, 25 bp, Canis familiaris
ggtttcctctgagagcacggtgttt

SEQ ID NO: 154920 - DNA, 25 bp, Canis familiaris
ggtatctatccgttagcagtttgta

SEQ ID NO: 154921 - DNA, 25 bp, Canis familiaris
ggttctacgtgttggcagtggttca

SEQ ID NO: 154922 - DNA, 25 bp, Canis familiaris
ggtttcatcgtgtcaggagctgcgt

SEQ ID NO: 154923 - DNA, 25 bp, Canis familiaris
ggtttatggatacaatgctgcctac

SEQ ID NO: 154924 - DNA, 25 bp, Canis familiaris
ggtttaaaatccatgtatcttcttc

SEQ ID NO: 154925 - DNA, 25 bp, Canis familiaris
ggtttaaaatcctgttcatctgcac

SEQ ID NO: 154926 - DNA, 25 bp, Canis familiaris
ggtttaatttgtttggtctctctct

SEQ ID NO: 154927 - DNA, 25 bp, Canis familiaris
ggtttcactttttatggaattagtg

SEQ ID NO: 154928 - DNA, 25 bp, Canis familiaris
ggtttccctatggtattgatttaag

SEQ ID NO: 154929 - DNA, 25 bp, Canis familiaris
ggttttgccttggacattattcata

SEQ ID NO: 154930 - DNA, 25 bp, Canis familiaris
ggtattttcattgtcacatttctca

SEQ ID NO: 154931 - DNA, 25 bp, Canis familiaris
ggtattctgaattcccttttatcca

SEQ ID NO: 154932 - DNA, 25 bp, Canis familiaris
ggatcaattaaatagttgtgttaca

SEQ ID NO: 154933 - DNA, 25 bp, Canis familiaris
ggatttatacaagagttcatttacg

SEQ ID NO: 154934 - DNA, 25 bp, Canis familiaris
ggatttgataaatacctgacgtgaa

SEQ ID NO: 154935 - DNA, 25 bp, Canis familiaris
ggaattgaaacctccgacggatcga

SEQ ID NO: 154936 - DNA, 25 bp, Canis familiaris
ggaattaatttctcccatgggtctc

SEQ ID NO: 154937 - DNA, 25 bp, Canis familiaris
ggtttatgtcgttacccatgaggtt

SEQ ID NO: 154938 - DNA, 25 bp, Canis familiaris
ggttccagaggtcaagccaggttca

SEQ ID NO: 154939 - DNA, 25 bp, Canis familiaris
ggttcactacttcaatccaggactt

SEQ ID NO: 154940 - DNA, 25 bp, Canis familiaris
ggttatccgtattcaaccaggatgt

SEQ ID NO: 154941 - DNA, 25 bp, Canis familiaris
ggttatccgttatcacaaagatgtt

SEQ ID NO: 154942 - DNA, 25 bp, Canis familiaris
ggttgacaaggtgaccggcaggttc

SEQ ID NO: 154943 - DNA, 25 bp, Canis familiaris
ggttgaattggttacttgacggctt

SEQ ID NO: 154944 - DNA, 25 bp, Canis familiaris
ggttattcttgatcacttgggcagt

SEQ ID NO: 154945 - DNA, 25 bp, Canis familiaris
ggtttgcctcaatcctggcagagca

SEQ ID NO: 154946 - DNA, 25 bp, Canis familiaris
ggtttgccgtgatgcagggctgagc

SEQ ID NO: 154947 - DNA, 25 bp, Canis familiaris
ggttgcgacgtgtagagtgtgtgtg

SEQ ID NO: 154948 - DNA, 25 bp, Canis familiaris
ggtttgggatggccagctatgtggt

SEQ ID NO: 154949 - DNA, 25 bp, Canis familiaris
ggtttggtgctagactactgcagta

SEQ ID NO: 154950 - DNA, 25 bp, Canis familiaris
ggttgtggtctagggttgtgagttc

SEQ ID NO: 154951 - DNA, 25 bp, Canis familiaris
ggtttttcttcggtatcgcagatta

SEQ ID NO: 154952 - DNA, 25 bp, Canis familiaris
ggtttttctactgaatccagggtat

SEQ ID NO: 154953 - DNA, 25 bp, Canis familiaris
ggtattatcatcacttattgtcggg

SEQ ID NO: 154954 - DNA, 25 bp, Canis familiaris
ggtattttcaacgtctgtgtgggtg

SEQ ID NO: 154955 - DNA, 25 bp, Canis familiaris
ggtttctccataggctttggggtgg

SEQ ID NO: 154956 - DNA, 25 bp, Canis familiaris
ggtttcttctgaggttggactggga

SEQ ID NO: 154957 - DNA, 25 bp, Canis familiaris
ggtttttgtgggcagcagccagtag

SEQ ID NO: 154958 - DNA, 25 bp, Canis familiaris
ggtattcctgcttgggagagtccta

SEQ ID NO: 154959 - DNA, 25 bp, Canis familiaris
ggtttcacagcctggaagacctcat

SEQ ID NO: 154960 - DNA, 25 bp, Canis familiaris
ggtttcatcaacaggaatgacacca

SEQ ID NO: 154961 - DNA, 25 bp, Canis familiaris
ggttcccaacagtggtatcaccagt

SEQ ID NO: 154962 - DNA, 25 bp, Canis familiaris
tgggacccctagtggtataaattgg

SEQ ID NO: 154963 - DNA, 25 bp, Canis familiaris
ggttccccaaatcgtatcataagtc

SEQ ID NO: 154964 - DNA, 25 bp, Canis familiaris
ggtttctccaaccttagcaagactc

SEQ ID NO: 154965 - DNA, 25 bp, Canis familiaris
ggtttcttcaaccttaagtcctgat

SEQ ID NO: 154966 - DNA, 25 bp, Canis familiaris
ggttctgttcaagccaaggtactga

SEQ ID NO: 154967 - DNA, 25 bp, Canis familiaris
tgtattctttacctaaaggatacta

SEQ ID NO: 154968 - DNA, 25 bp, Canis familiaris
ggatctcttttacaaacggtctaca

SEQ ID NO: 154969 - DNA, 25 bp, Canis familiaris
ggttttttaaaatctgtacagcaag

SEQ ID NO: 154970 - DNA, 25 bp, Canis familiaris
ggtttctcttaataatcttgagcat

SEQ ID NO: 154971 - DNA, 25 bp, Canis familiaris
ggatttctaaacaagcatttggaga

SEQ ID NO: 154972 - DNA, 25 bp, Canis familiaris
ggttaataaacaagccattgcagcg

SEQ ID NO: 154973 - DNA, 25 bp, Canis familiaris
ggttgttttcaatgccattagccaa

SEQ ID NO: 154974 - DNA, 25 bp, Canis familiaris
ggttaatttctatcaatccactgac

SEQ ID NO: 154975 - DNA, 25 bp, Canis familiaris
ggtattttgttatgacagccctagc

SEQ ID NO: 154976 - DNA, 25 bp, Canis familiaris
ggtattttgtatgaccacccaagct

SEQ ID NO: 154977 - DNA, 25 bp, Canis familiaris
tgtgtttttgtaccggcacgtatcc

SEQ ID NO: 154978 - DNA, 25 bp, Canis familiaris
ggttttgtgatcccaggcaaggtag

SEQ ID NO: 154979 - DNA, 25 bp, Canis familiaris
ggttctcggacctggatggcaagag

SEQ ID NO: 154980 - DNA, 25 bp, Canis familiaris
ggttcccgaatctggcatggcagag

SEQ ID NO: 154981 - DNA, 25 bp, Canis familiaris
ggttccccacaggggagagagaggg

SEQ ID NO: 154982 - DNA, 25 bp, Canis familiaris
ggttccacaccggttggacaaagct

SEQ ID NO: 154983 - DNA, 25 bp, Canis familiaris
ggttcacattccggttttaagcact

SEQ ID NO: 154984 - DNA, 25 bp, Canis familiaris
ggtttcatattcctaccttaacact

SEQ ID NO: 154985 - DNA, 25 bp, Canis familiaris
ggtattctttcactatcccatagat

SEQ ID NO: 154986 - DNA, 25 bp, Canis familiaris
ggattacagtacctacagccaagct

SEQ ID NO: 154987 - DNA, 25 bp, Canis familiaris
ggttgaaatttaacatgcccatgta

SEQ ID NO: 154988 - DNA, 25 bp, Canis familiaris
ggttcagcaatgcattactcctctg

SEQ ID NO: 154989 - DNA, 25 bp, Canis familiaris
ggttacatataaggtctgcctctgc

SEQ ID NO: 154990 - DNA, 25 bp, Canis familiaris
ggttctcagtagacatgtacgcctc

SEQ ID NO: 154991 - DNA, 25 bp, Canis familiaris
ggttcacgtggtaaacgcactgcac

SEQ ID NO: 154992 - DNA, 25 bp, Canis familiaris
ggttaagtcgctacacacagacctc

SEQ ID NO: 154993 - DNA, 25 bp, Canis familiaris
ggttggaggcctgctaatggcgtcc

SEQ ID NO: 154994 - DNA, 25 bp, Canis familiaris
ggatctggagacccgtaagaagcta

SEQ ID NO: 154995 - DNA, 25 bp, Canis familiaris
ggattgtgtgaaccgtaatatacgc

SEQ ID NO: 154996 - DNA, 25 bp, Canis familiaris
ggttctggaactcgtcataagacac

SEQ ID NO: 154997 - DNA, 25 bp, Canis familiaris
ggttgtcggagtcgttccagaacga

SEQ ID NO: 154998 - DNA, 25 bp, Canis familiaris
ggttgtaagatcgagccctaaatcg

SEQ ID NO: 154999 - DNA, 25 bp, Canis familiaris
ggttgtaagatcaagcccttcattc

SEQ ID NO: 155000 - DNA, 25 bp, Canis familiaris
ggtttcaagctcaaggtctaatctc

SEQ ID NO: 155001 - DNA, 25 bp, Canis familiaris
ggttttcagctcaggctgcattctc

SEQ ID NO: 155002 - DNA, 25 bp, Canis familiaris
ggtttctcattcagtcatcatagtc

SEQ ID NO: 155003 - DNA, 25 bp, Canis familiaris
ggtttgctcacatgtgtcacacgtc

SEQ ID NO: 155004 - DNA, 25 bp, Canis familiaris
ggtattgttcaaatctccatgtgtg

SEQ ID NO: 155005 - DNA, 25 bp, Canis familiaris
ggtttttgcagtacatccatgggcg

SEQ ID NO: 155006 - DNA, 25 bp, Canis familiaris
ggttttctgactaagccatagccat

SEQ ID NO: 155007 - DNA, 25 bp, Canis familiaris
ggttttctcctgaagctatacgctc

SEQ ID NO: 155008 - DNA, 25 bp, Canis familiaris
ggttttatcttgcatttctcacagc

SEQ ID NO: 155009 - DNA, 25 bp, Canis familiaris
ggtttattttccatgattgactgca

SEQ ID NO: 155010 - DNA, 25 bp, Canis familiaris
ggtttacatgttccaatatgattcc

SEQ ID NO: 155011 - DNA, 25 bp, Canis familiaris
ggtttacatgttccaatatgattcc

SEQ ID NO: 155012 - DNA, 25 bp, Canis familiaris
ggtttgaagaggtcaacaggcccct

SEQ ID NO: 155013 - DNA, 25 bp, Canis familiaris
ggttttagcatttcaagaagccctc

SEQ ID NO: 155014 - DNA, 25 bp, Canis familiaris
ggtttactgcataacacaaaagcgc

SEQ ID NO: 155015 - DNA, 25 bp, Canis familiaris
ggtttctttatatgcacacatacac

SEQ ID NO: 155016 - DNA, 25 bp, Canis familiaris
ggtttgcttcaattctgagcacaac

SEQ ID NO: 155017 - DNA, 25 bp, Canis familiaris
ggttatgctttattctgagatcggg

SEQ ID NO: 155018 - DNA, 25 bp, Canis familiaris
ggttatctatttttggatcaagtcc

SEQ ID NO: 155019 - DNA, 25 bp, Canis familiaris
ggttactcatttttaaagacacaca

SEQ ID NO: 155020 - DNA, 25 bp, Canis familiaris
ggttgccttctgtttaaagcactac

SEQ ID NO: 155021 - DNA, 25 bp, Canis familiaris
ggtttttgtataattctactctaca

SEQ ID NO: 155022 - DNA, 25 bp, Canis familiaris
ggtttcttggatatgttcccatgta

SEQ ID NO: 155023 - DNA, 25 bp, Canis familiaris
ggtttattggtggcagttagtatta

SEQ ID NO: 155024 - DNA, 25 bp, Canis familiaris
ggtttcattttgcagttggttcaag

SEQ ID NO: 155025 - DNA, 25 bp, Canis familiaris
ggtttctttcagattacgttcatcg

SEQ ID NO: 155026 - DNA, 25 bp, Canis familiaris
ggttcttttcatattaaggatatcc

SEQ ID NO: 155027 - DNA, 25 bp, Canis familiaris
ggtttccttagtaatctgggcattt

SEQ ID NO: 155028 - DNA, 25 bp, Canis familiaris
ggtttccttgtgcttctagggtata

SEQ ID NO: 155029 - DNA, 25 bp, Canis familiaris
ggttttctttgccttatgaagttgt

SEQ ID NO: 155030 - DNA, 25 bp, Canis familiaris
ggttttatttcacctgacaactcta

SEQ ID NO: 155031 - DNA, 25 bp, Canis familiaris
ggttgctttttatttggagatcttc

SEQ ID NO: 155032 - DNA, 25 bp, Canis familiaris
ggttgccttaacgctgtggtttgcg

SEQ ID NO: 155033 - DNA, 25 bp, Canis familiaris
ggtttgttaagcgtctggctgttgg

SEQ ID NO: 155034 - DNA, 25 bp, Canis familiaris
ggtttctggaagtcacttgctttgc

SEQ ID NO: 155035 - DNA, 25 bp, Canis familiaris
ggtttctgtatattcctctggattc

SEQ ID NO: 155036 - DNA, 25 bp, Canis familiaris
ggtttctgtctctccaagaatgctc

SEQ ID NO: 155037 - DNA, 25 bp, Canis familiaris
ggttcattgctgccgacggaggacc

SEQ ID NO: 155038 - DNA, 25 bp, Canis familiaris
ggttgattcatgtctgcacagggag

SEQ ID NO: 155039 - DNA, 25 bp, Canis familiaris
ggttgtccatgagcatcgaggcaca

SEQ ID NO: 155040 - DNA, 25 bp, Canis familiaris
ggtttgcctggggctgtggaaacca

SEQ ID NO: 155041 - DNA, 25 bp, Canis familiaris
ggttttctgaggttcggagagagcc

SEQ ID NO: 155042 - DNA, 25 bp, Canis familiaris
ggtttcgtgaggtcgggaacactag

SEQ ID NO: 155043 - DNA, 25 bp, Canis familiaris
ggtttctggtggtgttgaacacatg

SEQ ID NO: 155044 - DNA, 25 bp, Canis familiaris
ggttgtcatggatattttgtaaatt

SEQ ID NO: 155045 - DNA, 25 bp, Canis familiaris
ggctgtccaagaacaagggtaattg

SEQ ID NO: 155046 - DNA, 25 bp, Canis familiaris
ggattcccggaatgtgcgtacaagt

SEQ ID NO: 155047 - DNA, 25 bp, Canis familiaris
ggattcccgggatgtgagcaagaca

SEQ ID NO: 155048 - DNA, 25 bp, Canis familiaris
ggttcgcccaggccatggagaagga

SEQ ID NO: 155049 - DNA, 25 bp, Canis familiaris
ggttcttgcgcgtctatcgcaggag

SEQ ID NO: 155050 - DNA, 25 bp, Canis familiaris
ggttctcccgtcactgatggacgaa

SEQ ID NO: 155051 - DNA, 25 bp, Canis familiaris
ggtttacctctaactgtgcaaagca

SEQ ID NO: 155052 - DNA, 25 bp, Canis familiaris
ggttgtagtcgtgcgctgtgaaggc

SEQ ID NO: 155053 - DNA, 25 bp, Canis familiaris
ggttgtagtcgtgcgctgtgaaggc

SEQ ID NO: 155054 - DNA, 25 bp, Canis familiaris
ggattgataggcagcagtttgaaga

SEQ ID NO: 155055 - DNA, 25 bp, Canis familiaris
ggatttgacagcaccattcattcag

SEQ ID NO: 155056 - DNA, 25 bp, Canis familiaris
ggtttgcaatatcctttctgtcaga

SEQ ID NO: 155057 - DNA, 25 bp, Canis familiaris
ggtttgataatcttctcctggacat

SEQ ID NO: 155058 - DNA, 25 bp, Canis familiaris
ggtttcacagtctgcacaaggcaca

SEQ ID NO: 155059 - DNA, 25 bp, Canis familiaris
ggttcttcagtctgccacaggaacc

SEQ ID NO: 155060 - DNA, 25 bp, Canis familiaris
ggatctttcgtgaactctaggaccg

SEQ ID NO: 155061 - DNA, 25 bp, Canis familiaris
ggttttgagttctttgaggccagcg

SEQ ID NO: 155062 - DNA, 25 bp, Canis familiaris
ggttttactcttttgattgtgggca

SEQ ID NO: 155063 - DNA, 25 bp, Canis familiaris
ggttttcctttattccattgtgcca

SEQ ID NO: 155064 - DNA, 25 bp, Canis familiaris
ggattttcgttgttccacatttgcc

SEQ ID NO: 155065 - DNA, 25 bp, Canis familiaris
ggctctctgcggagactaactttcc

SEQ ID NO: 155066 - DNA, 25 bp, Canis familiaris
ggttcagcgagtaagtccacttcat

SEQ ID NO: 155067 - DNA, 25 bp, Canis familiaris
ggttggggtatgactgacacctgca

SEQ ID NO: 155068 - DNA, 25 bp, Canis familiaris
ggttgagcaggatgactgcccttac

SEQ ID NO: 155069 - DNA, 25 bp, Canis familiaris
ggttactgtaaattgacctgtatca

SEQ ID NO: 155070 - DNA, 25 bp, Canis familiaris
ggttgatttattttgacaggtgcag

SEQ ID NO: 155071 - DNA, 25 bp, Canis familiaris
ggttaactcttatgaagtgggcaag

SEQ ID NO: 155072 - DNA, 25 bp, Canis familiaris
ggttagactctttgtgttgggagca

SEQ ID NO: 155073 - DNA, 25 bp, Canis familiaris
ggttaaccctttgtgcaggagcaga

SEQ ID NO: 155074 - DNA, 25 bp, Canis familiaris
ggttcaatttctacttttggacgca

SEQ ID NO: 155075 - DNA, 25 bp, Canis familiaris
ggattcctagtttctgtttgggctc

SEQ ID NO: 155076 - DNA, 25 bp, Canis familiaris
ggttcttgcagtcacgttttatctt

SEQ ID NO: 155077 - DNA, 25 bp, Canis familiaris
ggttgttcctagtgtttgttattat

SEQ ID NO: 155078 - DNA, 25 bp, Canis familiaris
ggttgtttctatgttttggttattg

SEQ ID NO: 155079 - DNA, 25 bp, Canis familiaris
ggttgtgtattatctagttgtctta

SEQ ID NO: 155080 - DNA, 25 bp, Canis familiaris
ggttgttggttttgagtattctgtg

SEQ ID NO: 155081 - DNA, 25 bp, Canis familiaris
ggttgtgggttgttattttatatag

SEQ ID NO: 155082 - DNA, 25 bp, Canis familiaris
ggtttgctgcaggttgttttttagg

SEQ ID NO: 155083 - DNA, 25 bp, Canis familiaris
ggtttccatgcagctttttcattag

SEQ ID NO: 155084 - DNA, 25 bp, Canis familiaris
ggttacatccaactgttttgcttaa

SEQ ID NO: 155085 - DNA, 25 bp, Canis familiaris
ggttagtcatagccttattttcgaa

SEQ ID NO: 155086 - DNA, 25 bp, Canis familiaris
ggttaccatcgtttgttttcagtat

SEQ ID NO: 155087 - DNA, 25 bp, Canis familiaris
ggcttcacccgaggtttattctgga

SEQ ID NO: 155088 - DNA, 25 bp, Canis familiaris
ggttcaacgccaagtttgccgtgga

SEQ ID NO: 155089 - DNA, 25 bp, Canis familiaris
ggattcaacagggtaggtaggtgga

SEQ ID NO: 155090 - DNA, 25 bp, Canis familiaris
ggttagcacgtgaagggtcaggagg

SEQ ID NO: 155091 - DNA, 25 bp, Canis familiaris
ggttagcaccgcaggtgtagagaag

SEQ ID NO: 155092 - DNA, 25 bp, Canis familiaris
ggattagcaccctgagggaagggcc

SEQ ID NO: 155093 - DNA, 25 bp, Canis familiaris
ggcttgaaacttatgggaatggacc

SEQ ID NO: 155094 - DNA, 25 bp, Canis familiaris
ggatagaaactttggctggcctgga

SEQ ID NO: 155095 - DNA, 25 bp, Canis familiaris
ggaggctaacgttggtactggctac

SEQ ID NO: 155096 - DNA, 25 bp, Canis familiaris
ggttgtaacgtaggtgcccaatcac

SEQ ID NO: 155097 - DNA, 25 bp, Canis familiaris
ggtttaacactaggatgactcaggt

SEQ ID NO: 155098 - DNA, 25 bp, Canis familiaris
ggtttcaaacactgaagctgcatga

SEQ ID NO: 155099 - DNA, 25 bp, Canis familiaris
ggtttcaaatcattgcgctacctga

SEQ ID NO: 155100 - DNA, 25 bp, Canis familiaris
ggtttcaatatttcagcttcgctgt

SEQ ID NO: 155101 - DNA, 25 bp, Canis familiaris
ggtttctcattgcatagttccttag

SEQ ID NO: 155102 - DNA, 25 bp, Canis familiaris
ggttattgcttcgaacattctgctt

SEQ ID NO: 155103 - DNA, 25 bp, Canis familiaris
ggtttctgttaaatgcatcttgcct

SEQ ID NO: 155104 - DNA, 25 bp, Canis familiaris
ggttatatttttagactgtgcctcc

SEQ ID NO: 155105 - DNA, 25 bp, Canis familiaris
ggttcataactttatatttgtataa

SEQ ID NO: 155106 - DNA, 25 bp, Canis familiaris
ggatcaaatacttgtctttcctaaa

SEQ ID NO: 155107 - DNA, 25 bp, Canis familiaris
ggatcaaaacagcataccctctaaa

SEQ ID NO: 155108 - DNA, 25 bp, Canis familiaris
ggctaaggaccattaggcctattaa

SEQ ID NO: 155109 - DNA, 25 bp, Canis familiaris
ggttagataccatatgttccattta

SEQ ID NO: 155110 - DNA, 25 bp, Canis familiaris
ggtttctacacatcagtttatcttt

SEQ ID NO: 155111 - DNA, 25 bp, Canis familiaris
ggttttaaccattgtcttattctgt

SEQ ID NO: 155112 - DNA, 25 bp, Canis familiaris
ggttattcaaacagtctcagtacag

SEQ ID NO: 155113 - DNA, 25 bp, Canis familiaris
ggtttatgaagaaagcccaggagca

SEQ ID NO: 155114 - DNA, 25 bp, Canis familiaris
ggttttatgatgaccatgcactcgt

SEQ ID NO: 155115 - DNA, 25 bp, Canis familiaris
ggttttgatgagatgcagccaacag

SEQ ID NO: 155116 - DNA, 25 bp, Canis familiaris
ggttttgagaaacgccacaagaaca

SEQ ID NO: 155117 - DNA, 25 bp, Canis familiaris
ggtttatagtaactcctcatgataa

SEQ ID NO: 155118 - DNA, 25 bp, Canis familiaris
ggttgaacgtaaccttctcaattca

SEQ ID NO: 155119 - DNA, 25 bp, Canis familiaris
ggttgttcggacactgttcagaaag

SEQ ID NO: 155120 - DNA, 25 bp, Canis familiaris
ggttcaatcgaacactttagcagaa

SEQ ID NO: 155121 - DNA, 25 bp, Canis familiaris
ggttccatcgtacagttttgcgacc

SEQ ID NO: 155122 - DNA, 25 bp, Canis familiaris
ggttccatcagtgtatttttcctcc

SEQ ID NO: 155123 - DNA, 25 bp, Canis familiaris
ggttcacagagtacttcagttccac

SEQ ID NO: 155124 - DNA, 25 bp, Canis familiaris
ggttcatatcagactatacttcccc

SEQ ID NO: 155125 - DNA, 25 bp, Canis familiaris
ggttattcagccttatatgtcctat

SEQ ID NO: 155126 - DNA, 25 bp, Canis familiaris
ggttcagtcagccaattagtcttac

SEQ ID NO: 155127 - DNA, 25 bp, Canis familiaris
ggttcttgggaaatctgtctatggt

SEQ ID NO: 155128 - DNA, 25 bp, Canis familiaris
ggttgttgggagacttggcttggtt

SEQ ID NO: 155129 - DNA, 25 bp, Canis familiaris
ggttgtttgaggattggtgggctac

SEQ ID NO: 155130 - DNA, 25 bp, Canis familiaris
ggttctttcactagcggttgaggct

SEQ ID NO: 155131 - DNA, 25 bp, Canis familiaris
ggtttttgcactcgtggtggtgtgt

SEQ ID NO: 155132 - DNA, 25 bp, Canis familiaris
ggttatttgactggtttgagttctc

SEQ ID NO: 155133 - DNA, 25 bp, Canis familiaris
ggttgtttacttatttattctctgc

SEQ ID NO: 155134 - DNA, 25 bp, Canis familiaris
ggttttctcattgtctttttgcatc

SEQ ID NO: 155135 - DNA, 25 bp, Canis familiaris
ggttattcactttcctatgtgttgt

SEQ ID NO: 155136 - DNA, 25 bp, Canis familiaris
ggatgaaacacttcctattttttgt

SEQ ID NO: 155137 - DNA, 25 bp, Canis familiaris
ggatcagcccttgttattttttgtg

SEQ ID NO: 155138 - DNA, 25 bp, Canis familiaris
ggatcccttaccaaaattcttgtgc

SEQ ID NO: 155139 - DNA, 25 bp, Canis familiaris
ggttccgtgtttgacatttgtgtga

SEQ ID NO: 155140 - DNA, 25 bp, Canis familiaris
ggttacgtggtgcgaatcagtggtg

SEQ ID NO: 155141 - DNA, 25 bp, Canis familiaris
ggcttcgtccgggagaacgtgtgga

SEQ ID NO: 155142 - DNA, 25 bp, Canis familiaris
ggttctcctcctgggaacgtgagga

SEQ ID NO: 155143 - DNA, 25 bp, Canis familiaris
ggttctccaccttataactggtgtg

SEQ ID NO: 155144 - DNA, 25 bp, Canis familiaris
ggttctccatcgggatgtgactctt

SEQ ID NO: 155145 - DNA, 25 bp, Canis familiaris
ggttacatcacggagctgaacctgc

SEQ ID NO: 155146 - DNA, 25 bp, Canis familiaris
ggtttagctgcaacaggagacactc

SEQ ID NO: 155147 - DNA, 25 bp, Canis familiaris
ggtttactgagccaggactcttgcc

SEQ ID NO: 155148 - DNA, 25 bp, Canis familiaris
ggtttatcacacggaacttctcagc

SEQ ID NO: 155149 - DNA, 25 bp, Canis familiaris
ggtttaccactagtgatctaccctg

SEQ ID NO: 155150 - DNA, 25 bp, Canis familiaris
ggtttcagccaaagtgttgtcctct

SEQ ID NO: 155151 - DNA, 25 bp, Canis familiaris
ggttccagccaatgtcataaccatt

SEQ ID NO: 155152 - DNA, 25 bp, Canis familiaris
ggttcgaggagctgtgctccgacct

SEQ ID NO: 155153 - DNA, 25 bp, Canis familiaris
ggttgcgttgaatgatgtcttcctt

SEQ ID NO: 155154 - DNA, 25 bp, Canis familiaris
ggttggattaaattgcttcctcttt

SEQ ID NO: 155155 - DNA, 25 bp, Canis familiaris
ggttagttttattgctatactgctt

SEQ ID NO: 155156 - DNA, 25 bp, Canis familiaris
ggttaggttgtttgctgtgggtgac

SEQ ID NO: 155157 - DNA, 25 bp, Canis familiaris
ggttagtttgttgattcgtgatgac

SEQ ID NO: 155158 - DNA, 25 bp, Canis familiaris
ggttaattgattagaatgtgcgtta

SEQ ID NO: 155159 - DNA, 25 bp, Canis familiaris
ggttctcttgtatgagattcagact

SEQ ID NO: 155160 - DNA, 25 bp, Canis familiaris
ggttctcttcgaagcctatcagata

SEQ ID NO: 155161 - DNA, 25 bp, Canis familiaris
ggttgctgtttgttgcctgacagac

SEQ ID NO: 155162 - DNA, 25 bp, Canis familiaris
ggttcattatggtgccgagtgggaa

SEQ ID NO: 155163 - DNA, 25 bp, Canis familiaris
ggttattgtggaacacgatggggca

SEQ ID NO: 155164 - DNA, 25 bp, Canis familiaris
ggttttgtggatcccatagtggaat

SEQ ID NO: 155165 - DNA, 25 bp, Canis familiaris
ggtttataggataccaatgctgcgc

SEQ ID NO: 155166 - DNA, 25 bp, Canis familiaris
ggttctataataagcaggagctcgt

SEQ ID NO: 155167 - DNA, 25 bp, Canis familiaris
ggtttattacaggagtgacacttct

SEQ ID NO: 155168 - DNA, 25 bp, Canis familiaris
ggttttaactgatgtaccagccttt

SEQ ID NO: 155169 - DNA, 25 bp, Canis familiaris
ggttttaagattttgagctccctag

SEQ ID NO: 155170 - DNA, 25 bp, Canis familiaris
ggtttttgagatataagccatcccg

SEQ ID NO: 155171 - DNA, 25 bp, Canis familiaris
ggttatgatgtgatcgctcaagccc

SEQ ID NO: 155172 - DNA, 25 bp, Canis familiaris
ggttgtgagatcaagctccgcatcc

SEQ ID NO: 155173 - DNA, 25 bp, Canis familiaris
ggattggcaatgacacagggacgaa

SEQ ID NO: 155174 - DNA, 25 bp, Canis familiaris
ggttgaaattcaagtgtgctggcaa

SEQ ID NO: 155175 - DNA, 25 bp, Canis familiaris
ggttggattctaaggtctgcattat

SEQ ID NO: 155176 - DNA, 25 bp, Canis familiaris
ggttttctgtaaggtgcatgtctat

SEQ ID NO: 155177 - DNA, 25 bp, Canis familiaris
ggttattgtaaagtctgagtgttgt

SEQ ID NO: 155178 - DNA, 25 bp, Canis familiaris
ggttcttgatactgatcaggtcttg

SEQ ID NO: 155179 - DNA, 25 bp, Canis familiaris
ggttcaagtacatctcaatctcatt

SEQ ID NO: 155180 - DNA, 25 bp, Canis familiaris
ggttcaatgtatttctaagctcctt

SEQ ID NO: 155181 - DNA, 25 bp, Canis familiaris
ggttaagcaagagcaaagtgccatt

SEQ ID NO: 155182 - DNA, 25 bp, Canis familiaris
ggttgaagagagtaaagatgctggt

SEQ ID NO: 155183 - DNA, 25 bp, Canis familiaris
ggttaatgatgacaaatgcactcgt

SEQ ID NO: 155184 - DNA, 25 bp, Canis familiaris
ggtttatgataaccaagcatctgtt

SEQ ID NO: 155185 - DNA, 25 bp, Canis familiaris
ggttttcatcaaaagaactgctctt

SEQ ID NO: 155186 - DNA, 25 bp, Canis familiaris
ggttcttgtccttgagaaactctct

SEQ ID NO: 155187 - DNA, 25 bp, Canis familiaris
ggatttatgtccaaggccaaacttc

SEQ ID NO: 155188 - DNA, 25 bp, Canis familiaris
ggtttttccaacttctgagacttct

SEQ ID NO: 155189 - DNA, 25 bp, Canis familiaris
ggttattgtccctaagctaatttcg

SEQ ID NO: 155190 - DNA, 25 bp, Canis familiaris
ggttttctattctagagccagtttt

SEQ ID NO: 155191 - DNA, 25 bp, Canis familiaris
ggttcagtcattaggtggcctgttt

SEQ ID NO: 155192 - DNA, 25 bp, Canis familiaris
ggttcagttattttggcctttgtca

SEQ ID NO: 155193 - DNA, 25 bp, Canis familiaris
ggttcagtattttaagccatttcct

SEQ ID NO: 155194 - DNA, 25 bp, Canis familiaris
ggttcgagactttcaaccaacgcct

SEQ ID NO: 155195 - DNA, 25 bp, Canis familiaris
ggttctgaaatgctatcccaatcac

SEQ ID NO: 155196 - DNA, 25 bp, Canis familiaris
ggatacgaagtgcctagaacaacaa

SEQ ID NO: 155197 - DNA, 25 bp, Canis familiaris
ggataggacccccagataaacattc

SEQ ID NO: 155198 - DNA, 25 bp, Canis familiaris
ggttggaccgtgccaatggtccctc

SEQ ID NO: 155199 - DNA, 25 bp, Canis familiaris
ggttggtgcccaaaataatgccctg

SEQ ID NO: 155200 - DNA, 25 bp, Canis familiaris
ggttgaagccactagaaaagccagg

SEQ ID NO: 155201 - DNA, 25 bp, Canis familiaris
ggattcaacacctgaagaaccggtt

SEQ ID NO: 155202 - DNA, 25 bp, Canis familiaris
ggatcaagaacgcagaaacccccag

SEQ ID NO: 155203 - DNA, 25 bp, Canis familiaris
ggatccagtcatggtggaaggcccc

SEQ ID NO: 155204 - DNA, 25 bp, Canis familiaris
ggataagtccctcgtggatgcttgc

SEQ ID NO: 155205 - DNA, 25 bp, Canis familiaris
ggttagaaactgctgggtctgctga

SEQ ID NO: 155206 - DNA, 25 bp, Canis familiaris
ggatttaatgtccagtggcttttca

SEQ ID NO: 155207 - DNA, 25 bp, Canis familiaris
ggatataaagtgtagcctgttttca

SEQ ID NO: 155208 - DNA, 25 bp, Canis familiaris
ggatatacacctgaaagattttcca

SEQ ID NO: 155209 - DNA, 25 bp, Canis familiaris
ggatcgccaccgactaaatagtccc

SEQ ID NO: 155210 - DNA, 25 bp, Canis familiaris
ggatccctcgacatatatatggacc

SEQ ID NO: 155211 - DNA, 25 bp, Canis familiaris
ggatcctgaaacctaactggacatt

SEQ ID NO: 155212 - DNA, 25 bp, Canis familiaris
ggatcctgaaacccctgggttctga

SEQ ID NO: 155213 - DNA, 25 bp, Canis familiaris
ggatcgtgactaggggtgggaccgg

SEQ ID NO: 155214 - DNA, 25 bp, Canis familiaris
ggatttagtggggggcaggaggcgg

SEQ ID NO: 155215 - DNA, 25 bp, Canis familiaris
ggatttggtggggattgcggactgg

SEQ ID NO: 155216 - DNA, 25 bp, Canis familiaris
ggttatgcccaagattcaaccatag

SEQ ID NO: 155217 - DNA, 25 bp, Canis familiaris
ggttacggctctgcattcaatcgaa

SEQ ID NO: 155218 - DNA, 25 bp, Canis familiaris
ggttaatgtgcttttgataatggaa

SEQ ID NO: 155219 - DNA, 25 bp, Canis familiaris
ggttagcattgtttcctacagctga

SEQ ID NO: 155220 - DNA, 25 bp, Canis familiaris
ggatataaactagatttcactgatt

SEQ ID NO: 155221 - DNA, 25 bp, Canis familiaris
ggaatagtacccctgataacaactt

SEQ ID NO: 155222 - DNA, 25 bp, Canis familiaris
ggattttactctgtgaagaccttta

SEQ ID NO: 155223 - DNA, 25 bp, Canis familiaris
ggttattcgttactgtcgacacaat

SEQ ID NO: 155224 - DNA, 25 bp, Canis familiaris
ggttcttcagttcttcaacacagtc

SEQ ID NO: 155225 - DNA, 25 bp, Canis familiaris
ggttcattcatgttgtcaaacagca

SEQ ID NO: 155226 - DNA, 25 bp, Canis familiaris
ggttcatgtgagggctacaagctgg

SEQ ID NO: 155227 - DNA, 25 bp, Canis familiaris
ggttatatgatttcccaagctgagt

SEQ ID NO: 155228 - DNA, 25 bp, Canis familiaris
ggttatttttcccatggtagctgtt

SEQ ID NO: 155229 - DNA, 25 bp, Canis familiaris
ggttactgtttctcatgagtcacgt

SEQ ID NO: 155230 - DNA, 25 bp, Canis familiaris
ggttaagtttcttagaacacaggtg

SEQ ID NO: 155231 - DNA, 25 bp, Canis familiaris
ggttatagtttttataccagcaagt

SEQ ID NO: 155232 - DNA, 25 bp, Canis familiaris
ggttcatggactttttacacacgag

SEQ ID NO: 155233 - DNA, 25 bp, Canis familiaris
ggttatgagtcttctgttcatcgct

SEQ ID NO: 155234 - DNA, 25 bp, Canis familiaris
ggttatatcatttgtttcacgtttg

SEQ ID NO: 155235 - DNA, 25 bp, Canis familiaris
ggttatgtggtctttgtattgcttt

SEQ ID NO: 155236 - DNA, 25 bp, Canis familiaris
ggttataggtcatttttgctctctt

SEQ ID NO: 155237 - DNA, 25 bp, Canis familiaris
ggttatatttcatattagcactgga

SEQ ID NO: 155238 - DNA, 25 bp, Canis familiaris
ggttttctccactttacagctggga

SEQ ID NO: 155239 - DNA, 25 bp, Canis familiaris
ggttttctctccattatctgtgaag

SEQ ID NO: 155240 - DNA, 25 bp, Canis familiaris
ggttcttggcccattatcattactg

SEQ ID NO: 155241 - DNA, 25 bp, Canis familiaris
ggttttccctgagttcatatcactt

SEQ ID NO: 155242 - DNA, 25 bp, Canis familiaris
ggttgttcccagtttcagctgaatt

SEQ ID NO: 155243 - DNA, 25 bp, Canis familiaris
ggttgtttaagctaccatcaaagtc

SEQ ID NO: 155244 - DNA, 25 bp, Canis familiaris
tcgctttttaccgccagatgaaatc

SEQ ID NO: 155245 - DNA, 25 bp, Canis familiaris
tggttctgtgtaccccccagaacca

SEQ ID NO: 155246 - DNA, 25 bp, Canis familiaris
ggttatgggaaccctggcaaactgc

SEQ ID NO: 155247 - DNA, 25 bp, Canis familiaris
ggttattggaaccagatggacaaga

SEQ ID NO: 155248 - DNA, 25 bp, Canis familiaris
ggttaattgaatccagttaagaact

SEQ ID NO: 155249 - DNA, 25 bp, Canis familiaris
ggattaattcttcccttataaattg

SEQ ID NO: 155250 - DNA, 25 bp, Canis familiaris
ggttaaaactccctctacatatttg

SEQ ID NO: 155251 - DNA, 25 bp, Canis familiaris
ggattgaataatgtcccacctaaat

SEQ ID NO: 155252 - DNA, 25 bp, Canis familiaris
ggatatgaaatttaccccatctcaa

SEQ ID NO: 155253 - DNA, 25 bp, Canis familiaris
ggattgtacaggtacccattcgaag

SEQ ID NO: 155254 - DNA, 25 bp, Canis familiaris
ggttgtgaagagctcctttggaatt

SEQ ID NO: 155255 - DNA, 25 bp, Canis familiaris
ggatccttactcatcactttggaat

SEQ ID NO: 155256 - DNA, 25 bp, Canis familiaris
ggctacttcattctgaacttaaacc

SEQ ID NO: 155257 - DNA, 25 bp, Canis familiaris
ggatcactaattctactcctgaaac

SEQ ID NO: 155258 - DNA, 25 bp, Canis familiaris
ggttgtcaaggcacaggcactggat

SEQ ID NO: 155259 - DNA, 25 bp, Canis familiaris
ggttctagggattcaggtgtggaca

SEQ ID NO: 155260 - DNA, 25 bp, Canis familiaris
ggttccattctggtcaggatgtggc

SEQ ID NO: 155261 - DNA, 25 bp, Canis familiaris
ggttgctttcaggtagatcatgttg

SEQ ID NO: 155262 - DNA, 25 bp, Canis familiaris
ggttatctggctgtagatctgttca

SEQ ID NO: 155263 - DNA, 25 bp, Canis familiaris
ggttactgggcaatttctatatcag

SEQ ID NO: 155264 - DNA, 25 bp, Canis familiaris
ggttcctgggcaatgtttttccaag

SEQ ID NO: 155265 - DNA, 25 bp, Canis familiaris
ggattcccggatgggagtttccaag

SEQ ID NO: 155266 - DNA, 25 bp, Canis familiaris
ggattctccaaagtacaccttccaa

SEQ ID NO: 155267 - DNA, 25 bp, Canis familiaris
ggatttgcaagaacctaccatccca

SEQ ID NO: 155268 - DNA, 25 bp, Canis familiaris
ggttgctgctataacaaattaccac

SEQ ID NO: 155269 - DNA, 25 bp, Canis familiaris
ggttgtccaatattaaataccagac

SEQ ID NO: 155270 - DNA, 25 bp, Canis familiaris
ggttgttgcaattccaaaccccaat

SEQ ID NO: 155271 - DNA, 25 bp, Canis familiaris
ggttctgtgctttcaacaagcgccc

SEQ ID NO: 155272 - DNA, 25 bp, Canis familiaris
ggttctggatgctaccaaacagcct

SEQ ID NO: 155273 - DNA, 25 bp, Canis familiaris
ggttctcccagagcaaacagtcatg

SEQ ID NO: 155274 - DNA, 25 bp, Canis familiaris
ggttctcgaagaactcaccgcagaa

SEQ ID NO: 155275 - DNA, 25 bp, Canis familiaris
ggttttggataagtcccagagccga

SEQ ID NO: 155276 - DNA, 25 bp, Canis familiaris
ggttttggataggatcccagatcat

SEQ ID NO: 155277 - DNA, 25 bp, Canis familiaris
ggttcctgagatcaagtcccatatt

SEQ ID NO: 155278 - DNA, 25 bp, Canis familiaris
ggttctcaggtgctagtgtgctgca

SEQ ID NO: 155279 - DNA, 25 bp, Canis familiaris
ggattctcaagtctgcagcctgagc

SEQ ID NO: 155280 - DNA, 25 bp, Canis familiaris
ggttctgcatagtcctatgccataa

SEQ ID NO: 155281 - DNA, 25 bp, Canis familiaris
ggttctgaaccatatgcagcatatt

SEQ ID NO: 155282 - DNA, 25 bp, Canis familiaris
ggttccagaccatcatacttgatct

SEQ ID NO: 155283 - DNA, 25 bp, Canis familiaris
ggttcaaggcaatcaggctcttctc

SEQ ID NO: 155284 - DNA, 25 bp, Canis familiaris
ggcttagggagcccaagtgctttag

SEQ ID NO: 155285 - DNA, 25 bp, Canis familiaris
ggttccaggagccactttttatagc

SEQ ID NO: 155286 - DNA, 25 bp, Canis familiaris
ggttcagataaccctttatttcagg

SEQ ID NO: 155287 - DNA, 25 bp, Canis familiaris
ggttcagtcaaccgtgttaccatac

SEQ ID NO: 155288 - DNA, 25 bp, Canis familiaris
ggttaccagaactgatccacctgac

SEQ ID NO: 155289 - DNA, 25 bp, Canis familiaris
ggttacttaacacatccatcacctc

SEQ ID NO: 155290 - DNA, 25 bp, Canis familiaris
ggttacatttactgatataatcctc

SEQ ID NO: 155291 - DNA, 25 bp, Canis familiaris
ggattcaaactcataaatgaaccat

SEQ ID NO: 155292 - DNA, 25 bp, Canis familiaris
ggatgccatcaagttaagcttgtac

SEQ ID NO: 155293 - DNA, 25 bp, Canis familiaris
ggatgagcaaaaatggcagtttaca

SEQ ID NO: 155294 - DNA, 25 bp, Canis familiaris
ggatagccaagcaccagtgttccac

SEQ ID NO: 155295 - DNA, 25 bp, Canis familiaris
ggataccagatgggccgggggagcc

SEQ ID NO: 155296 - DNA, 25 bp, Canis familiaris
ggttctagtggtgggtggggagctc

SEQ ID NO: 155297 - DNA, 25 bp, Canis familiaris
ggttggggtcaaggtggtggcagcc

SEQ ID NO: 155298 - DNA, 25 bp, Canis familiaris
ggttgggggcaatcttgtggcaagc

SEQ ID NO: 155299 - DNA, 25 bp, Canis familiaris
ggttggcgtggtgtgcttggtaagc

SEQ ID NO: 155300 - DNA, 25 bp, Canis familiaris
ggttctggctttgtgctgtggaaac

SEQ ID NO: 155301 - DNA, 25 bp, Canis familiaris
ggttcttcgaatgtgtggtatggag

SEQ ID NO: 155302 - DNA, 25 bp, Canis familiaris
ggttcgtgccgaatcgtggtagagg

SEQ ID NO: 155303 - DNA, 25 bp, Canis familiaris
ggttcgtgccaaattccgaagcaac

SEQ ID NO: 155304 - DNA, 25 bp, Canis familiaris
ggttccgaattcccggattgcaact

SEQ ID NO: 155305 - DNA, 25 bp, Canis familiaris
ggttccggattccgggatctgctac

SEQ ID NO: 155306 - DNA, 25 bp, Canis familiaris
ggttcctgtgaatctgggttgcatg

SEQ ID NO: 155307 - DNA, 25 bp, Canis familiaris
ggttccttgtattgcatttctttgc

SEQ ID NO: 155308 - DNA, 25 bp, Canis familiaris
ggttccattgccagaatgtgttgtc

SEQ ID NO: 155309 - DNA, 25 bp, Canis familiaris
ggttccgatgccctgaggctctttt

SEQ ID NO: 155310 - DNA, 25 bp, Canis familiaris
ggttcaggtccactggtgagttctt

SEQ ID NO: 155311 - DNA, 25 bp, Canis familiaris
ggagttttccagagcggtattcata

SEQ ID NO: 155312 - DNA, 25 bp, Canis familiaris
ggatttttccaagcagggctgtgcc

SEQ ID NO: 155313 - DNA, 25 bp, Canis familiaris
ggattcatttcataggggtctgtac

SEQ ID NO: 155314 - DNA, 25 bp, Canis familiaris
ggttgcatcaactcgagaggttgta

SEQ ID NO: 155315 - DNA, 25 bp, Canis familiaris
ggttctacacaacacaggatgctct

SEQ ID NO: 155316 - DNA, 25 bp, Canis familiaris
ggttaaacattttctgaagccatat

SEQ ID NO: 155317 - DNA, 25 bp, Canis familiaris
ggttaaagcccttctgaacttcttg

SEQ ID NO: 155318 - DNA, 25 bp, Canis familiaris
ggttcacacaggctttatatctatt

SEQ ID NO: 155319 - DNA, 25 bp, Canis familiaris
ggttgccacaagggtttcatcacac

SEQ ID NO: 155320 - DNA, 25 bp, Canis familiaris
ggttccaccagcagcttgctgtaaa

SEQ ID NO: 155321 - DNA, 25 bp, Canis familiaris
ggttcagtccctcgcatatgggaaa

SEQ ID NO: 155322 - DNA, 25 bp, Canis familiaris
ggttaccaccattctctggagagaa

SEQ ID NO: 155323 - DNA, 25 bp, Canis familiaris
ggttatcccattttctggagcacct

SEQ ID NO: 155324 - DNA, 25 bp, Canis familiaris
ggttactggatttttgattgtctct

SEQ ID NO: 155325 - DNA, 25 bp, Canis familiaris
ggttaccagcataatttcatttcct

SEQ ID NO: 155326 - DNA, 25 bp, Canis familiaris
ggttactctacatgtatctgttctt

SEQ ID NO: 155327 - DNA, 25 bp, Canis familiaris
ggttactctacatgtatctgttctt

SEQ ID NO: 155328 - DNA, 25 bp, Canis familiaris
ggttactctacatgtatctgttctt

SEQ ID NO: 155329 - DNA, 25 bp, Canis familiaris
ggttactctacatgtatctgttctt

SEQ ID NO: 155330 - DNA, 25 bp, Canis familiaris
ggttactctagtgtttgctggtgtt

SEQ ID NO: 155331 - DNA, 25 bp, Canis familiaris
ggttactaagccctttgcaatggct

SEQ ID NO: 155332 - DNA, 25 bp, Canis familiaris
ggattattgagggcccttacaagtc

SEQ ID NO: 155333 - DNA, 25 bp, Canis familiaris
ggttaatgaatgtccctggggagtc

SEQ ID NO: 155334 - DNA, 25 bp, Canis familiaris
ggttaatgtttcagtgtccaggtct

SEQ ID NO: 155335 - DNA, 25 bp, Canis familiaris
ggttactgtttccagttgaatggtt

SEQ ID NO: 155336 - DNA, 25 bp, Canis familiaris
ggttactccattgggttaagagctt

SEQ ID NO: 155337 - DNA, 25 bp, Canis familiaris
ggttacatcgttggtgtccacagcc

SEQ ID NO: 155338 - DNA, 25 bp, Canis familiaris
ggttactcgttggttacagcagata

SEQ ID NO: 155339 - DNA, 25 bp, Canis familiaris
ggttcagctaatatttgatccagta

SEQ ID NO: 155340 - DNA, 25 bp, Canis familiaris
ggttagctcaaaatactgatttcta

SEQ ID NO: 155341 - DNA, 25 bp, Canis familiaris
ggttactacacacacagatcttccc

SEQ ID NO: 155342 - DNA, 25 bp, Canis familiaris
ggatatagctactactaaccctcct

SEQ ID NO: 155343 - DNA, 25 bp, Canis familiaris
ggattaggtagaacagtccaccgtt

SEQ ID NO: 155344 - DNA, 25 bp, Canis familiaris
ggattaaatagaagcacccctcctc

SEQ ID NO: 155345 - DNA, 25 bp, Canis familiaris
ggattagaagagagcacatgtactg

SEQ ID NO: 155346 - DNA, 25 bp, Canis familiaris
ggattatatatccagtgccagatac

SEQ ID NO: 155347 - DNA, 25 bp, Canis familiaris
ggattcatactcggacacatataga

SEQ ID NO: 155348 - DNA, 25 bp, Canis familiaris
ggttctcagctcttgatgtacaata

SEQ ID NO: 155349 - DNA, 25 bp, Canis familiaris
ggattgtcatccttcagtattctaa

SEQ ID NO: 155350 - DNA, 25 bp, Canis familiaris
ggttctctccctggagttctgaaca

SEQ ID NO: 155351 - DNA, 25 bp, Canis familiaris
ggttgtctcctgcgacttcaacagc

SEQ ID NO: 155352 - DNA, 25 bp, Canis familiaris
ggttgctgttttagacttaactccg

SEQ ID NO: 155353 - DNA, 25 bp, Canis familiaris
ggttctgattgtggtgacttatccc

SEQ ID NO: 155354 - DNA, 25 bp, Canis familiaris
ggttcattgggactagtcttcctcg

SEQ ID NO: 155355 - DNA, 25 bp, Canis familiaris
ggttcttgagggatgccagccctcc

SEQ ID NO: 155356 - DNA, 25 bp, Canis familiaris
ggatttagaactccatccagtcctc

SEQ ID NO: 155357 - DNA, 25 bp, Canis familiaris
ggatttgcgataatccccacgactc

SEQ ID NO: 155358 - DNA, 25 bp, Canis familiaris
ggttgggtagatgacatgcaaatcc

SEQ ID NO: 155359 - DNA, 25 bp, Canis familiaris
ggttgatggggaagacagataaagg

SEQ ID NO: 155360 - DNA, 25 bp, Canis familiaris
ggttggtggcgaggatgaggtgggg

SEQ ID NO: 155361 - DNA, 25 bp, Canis familiaris
ggttgagtggggaggtgggggcatc

SEQ ID NO: 155362 - DNA, 25 bp, Canis familiaris
ggattcggtgagaggctggggggac

SEQ ID NO: 155363 - DNA, 25 bp, Canis familiaris
ggttcctggaggcacgggagggagc

SEQ ID NO: 155364 - DNA, 25 bp, Canis familiaris
ggttccatgggggccaaggacaggg

SEQ ID NO: 155365 - DNA, 25 bp, Canis familiaris
ggttgaaagagggccagcagggcag

SEQ ID NO: 155366 - DNA, 25 bp, Canis familiaris
ggttaagcacaggcagccagagctt

SEQ ID NO: 155367 - DNA, 25 bp, Canis familiaris
ggttacacagagtcaatgctggtat

SEQ ID NO: 155368 - DNA, 25 bp, Canis familiaris
ggttactatatgtcttatgcagtga

SEQ ID NO: 155369 - DNA, 25 bp, Canis familiaris
ggttaatgatacccatgcatcgtga

SEQ ID NO: 155370 - DNA, 25 bp, Canis familiaris
ggttaatgatcaccatgccatctgt

SEQ ID NO: 155371 - DNA, 25 bp, Canis familiaris
ggttcagatgatgccacctgcaggc

SEQ ID NO: 155372 - DNA, 25 bp, Canis familiaris
ggattcatgagtggctacctgggct

SEQ ID NO: 155373 - DNA, 25 bp, Canis familiaris
ggatcgtggatgcccatcttatggt

SEQ ID NO: 155374 - DNA, 25 bp, Canis familiaris
ggatcagaggaagaattcacgcgtg

SEQ ID NO: 155375 - DNA, 25 bp, Canis familiaris
ggataagcttcaactgcattcaggg

SEQ ID NO: 155376 - DNA, 25 bp, Canis familiaris
ggatagaggcacattgtcacagatg

SEQ ID NO: 155377 - DNA, 25 bp, Canis familiaris
ggatagtcgcctgcagtgaaatccc

SEQ ID NO: 155378 - DNA, 25 bp, Canis familiaris
ggattgctcccatcaggaaaaaggc

SEQ ID NO: 155379 - DNA, 25 bp, Canis familiaris
ggatctccgcgttcggcggaaaggg

SEQ ID NO: 155380 - DNA, 25 bp, Canis familiaris
ggattggggttccctggagactagg

SEQ ID NO: 155381 - DNA, 25 bp, Canis familiaris
ggagggggttttctgagacatgtgt

SEQ ID NO: 155382 - DNA, 25 bp, Canis familiaris
ggttggtgtgtttttctaagcattt

SEQ ID NO: 155383 - DNA, 25 bp, Canis familiaris
ggttggttttgttgtctgtagttgc

SEQ ID NO: 155384 - DNA, 25 bp, Canis familiaris
ggttcgtttttttctgtggtgagct

SEQ ID NO: 155385 - DNA, 25 bp, Canis familiaris
ggttccatttttttctgactttcat

SEQ ID NO: 155386 - DNA, 25 bp, Canis familiaris
ggttaatttgttttgctgcctactt

SEQ ID NO: 155387 - DNA, 25 bp, Canis familiaris
ggttgatatttttttcttcttgcta

SEQ ID NO: 155388 - DNA, 25 bp, Canis familiaris
ggttacagtctttttcttatcttct

SEQ ID NO: 155389 - DNA, 25 bp, Canis familiaris
ggttactgatattacttctattttc

SEQ ID NO: 155390 - DNA, 25 bp, Canis familiaris
ggttactgatattacttctattttc

SEQ ID NO: 155391 - DNA, 25 bp, Canis familiaris
ggttgagtgctattccattgtgtgt

SEQ ID NO: 155392 - DNA, 25 bp, Canis familiaris
ggttcagatgtcatccatttttctg

SEQ ID NO: 155393 - DNA, 25 bp, Canis familiaris
ggttcaattgttttttctgtcatat

SEQ ID NO: 155394 - DNA, 25 bp, Canis familiaris
ggttcagacctttgtattgtggttt

SEQ ID NO: 155395 - DNA, 25 bp, Canis familiaris
ggttgcagggttctgcttgtttttc

SEQ ID NO: 155396 - DNA, 25 bp, Canis familiaris
ggttcaggttatctaattaccttct

SEQ ID NO: 155397 - DNA, 25 bp, Canis familiaris
ggaccaggaattctaactttcttct

SEQ ID NO: 155398 - DNA, 25 bp, Canis familiaris
ggatccattgatatcgtaagcttga

SEQ ID NO: 155399 - DNA, 25 bp, Canis familiaris
ggatccctactaatgaagagtctga

SEQ ID NO: 155400 - DNA, 25 bp, Canis familiaris
ggaccactgacatttttcagacggt

SEQ ID NO: 155401 - DNA, 25 bp, Canis familiaris
ggaccagctaccatttctaagggtt

SEQ ID NO: 155402 - DNA, 25 bp, Canis familiaris
ggataactatcctcaccattagggt

SEQ ID NO: 155403 - DNA, 25 bp, Canis familiaris
ggataaaatccagtcaggcttgaag

SEQ ID NO: 155404 - DNA, 25 bp, Canis familiaris
ggttcacaaacaggtggttgacagt

SEQ ID NO: 155405 - DNA, 25 bp, Canis familiaris
ggttccaaggcaggggcaagcacag

SEQ ID NO: 155406 - DNA, 25 bp, Canis familiaris
ggttctgcgtggcagggctagcagc

SEQ ID NO: 155407 - DNA, 25 bp, Canis familiaris
ggttctgggatggagcccgacatgg

SEQ ID NO: 155408 - DNA, 25 bp, Canis familiaris
ggttgctggaggggaaggagatggg

SEQ ID NO: 155409 - DNA, 25 bp, Canis familiaris
ggatatctcgttgtaaggagaaggg

SEQ ID NO: 155410 - DNA, 25 bp, Canis familiaris
ggatgacccgacagccagggaagag

SEQ ID NO: 155411 - DNA, 25 bp, Canis familiaris
ggatgcaaacaaaaccaggtaagta

SEQ ID NO: 155412 - DNA, 25 bp, Canis familiaris
ggaaaatcaacttcatgggtaaacg

SEQ ID NO: 155413 - DNA, 25 bp, Canis familiaris
ggacaagctcaaccggtttaacaag

SEQ ID NO: 155414 - DNA, 25 bp, Canis familiaris
ggatgacatccaacactttttaacc

SEQ ID NO: 155415 - DNA, 25 bp, Canis familiaris
ggatgatcattattacctatgtgat

SEQ ID NO: 155416 - DNA, 25 bp, Canis familiaris
ggttcataatattcactatgtgcta

SEQ ID NO: 155417 - DNA, 25 bp, Canis familiaris
ggttaaatattcgttgcttcagcaa

SEQ ID NO: 155418 - DNA, 25 bp, Canis familiaris
ggttacaatgcaagacttgttgcca

SEQ ID NO: 155419 - DNA, 25 bp, Canis familiaris
ggattacaaccggctaggctacacg

SEQ ID NO: 155420 - DNA, 25 bp, Canis familiaris
ggataaccaccgttgcgtggaccgt

SEQ ID NO: 155421 - DNA, 25 bp, Canis familiaris
ggattccccttagtggtggaggcgt

SEQ ID NO: 155422 - DNA, 25 bp, Canis familiaris
ggttcacccacgactggatggtgtt

SEQ ID NO: 155423 - DNA, 25 bp, Canis familiaris
ggttccagatccattgtgtggttta

SEQ ID NO: 155424 - DNA, 25 bp, Canis familiaris
ggttccatgtacatatttatctctc

SEQ ID NO: 155425 - DNA, 25 bp, Canis familiaris
ggttctcattaccttttatatcaac

SEQ ID NO: 155426 - DNA, 25 bp, Canis familiaris
ggttctactacattgacttattaca

SEQ ID NO: 155427 - DNA, 25 bp, Canis familiaris
ggttccactagaaatctccatgatt

SEQ ID NO: 155428 - DNA, 25 bp, Canis familiaris
ggttcctctggaatgaccatggatg

SEQ ID NO: 155429 - DNA, 25 bp, Canis familiaris
ggttctgctcatggagtacttggca

SEQ ID NO: 155430 - DNA, 25 bp, Canis familiaris
ggttcgctagagctagctagagctc

SEQ ID NO: 155431 - DNA, 25 bp, Canis familiaris
ggattcttagagattgccatggtct

SEQ ID NO: 155432 - DNA, 25 bp, Canis familiaris
ggttcttatggattctgcgaggcta

SEQ ID NO: 155433 - DNA, 25 bp, Canis familiaris
ggttctggaagcttctggtgtgtgg

SEQ ID NO: 155434 - DNA, 25 bp, Canis familiaris
ggttctggtggcactggaagggcga

SEQ ID NO: 155435 - DNA, 25 bp, Canis familiaris
ggttgcctgttgcagttaactggct

SEQ ID NO: 155436 - DNA, 25 bp, Canis familiaris
ggttccttgggagctgacagctgga

SEQ ID NO: 155437 - DNA, 25 bp, Canis familiaris
ggattccttgtccagatcatgaagt

SEQ ID NO: 155438 - DNA, 25 bp, Canis familiaris
ggattccctgtgagtgctgaggtta

SEQ ID NO: 155439 - DNA, 25 bp, Canis familiaris
ggattgggcttcagtgtgagaactg

SEQ ID NO: 155440 - DNA, 25 bp, Canis familiaris
ggatttgtaatgacggaagctactt

SEQ ID NO: 155441 - DNA, 25 bp, Canis familiaris
ggatttcaattgaggaaccacttga

SEQ ID NO: 155442 - DNA, 25 bp, Canis familiaris
ggatttaagtgagaaacacttggaa

SEQ ID NO: 155443 - DNA, 25 bp, Canis familiaris
ggatttatcagttatcagacacttc

SEQ ID NO: 155444 - DNA, 25 bp, Canis familiaris
ggttgtcatcacatatcaactccct

SEQ ID NO: 155445 - DNA, 25 bp, Canis familiaris
ggttgttaatgttacatccccattt

SEQ ID NO: 155446 - DNA, 25 bp, Canis familiaris
ggttaataatgtggcctctgctcca

SEQ ID NO: 155447 - DNA, 25 bp, Canis familiaris
ggttcggacagtggcgatcatgacc

SEQ ID NO: 155448 - DNA, 25 bp, Canis familiaris
ggatcataggagtgcggctgctggc

SEQ ID NO: 155449 - DNA, 25 bp, Canis familiaris
ggatataggccagatgctgctaggc

SEQ ID NO: 155450 - DNA, 25 bp, Canis familiaris
ggattgagggaccatctgctaatag

SEQ ID NO: 155451 - DNA, 25 bp, Canis familiaris
ggattgatgccgtcctatgtaatgc

SEQ ID NO: 155452 - DNA, 25 bp, Canis familiaris
ggcttcatcggctccatgtaattag

SEQ ID NO: 155453 - DNA, 25 bp, Canis familiaris
ggttgcatcgtctccaagagttcaa

SEQ ID NO: 155454 - DNA, 25 bp, Canis familiaris
ggttcatttttccgactgtacatat

SEQ ID NO: 155455 - DNA, 25 bp, Canis familiaris
ggttcacttatctgtgacttgagaa

SEQ ID NO: 155456 - DNA, 25 bp, Canis familiaris
ggttcctctagatctggttaaatgc

SEQ ID NO: 155457 - DNA, 25 bp, Canis familiaris
ggttcctctattacttttactgcag

SEQ ID NO: 155458 - DNA, 25 bp, Canis familiaris
ggttgcttagacactgttttccagc

SEQ ID NO: 155459 - DNA, 25 bp, Canis familiaris
ggttgctgcaaattccagttcttcc

SEQ ID NO: 155460 - DNA, 25 bp, Canis familiaris
ggttccataaagccactgactatcc

SEQ ID NO: 155461 - DNA, 25 bp, Canis familiaris
ggattccatgagcagatcaggaccc

SEQ ID NO: 155462 - DNA, 25 bp, Canis familiaris
ggttcctgatgttatcagcagcata

SEQ ID NO: 155463 - DNA, 25 bp, Canis familiaris
ggttgttgacattgacgctgatcac

SEQ ID NO: 155464 - DNA, 25 bp, Canis familiaris
ggttgggagcaattattacacttta

SEQ ID NO: 155465 - DNA, 25 bp, Canis familiaris
ggttgtgtacatcagtttctctggt

SEQ ID NO: 155466 - DNA, 25 bp, Canis familiaris
ggttggtacagcagttctcttggaa

SEQ ID NO: 155467 - DNA, 25 bp, Canis familiaris
ggttgataaagtggtgttcgaggga

SEQ ID NO: 155468 - DNA, 25 bp, Canis familiaris
ggttgccaaattgttctccaggatg

SEQ ID NO: 155469 - DNA, 25 bp, Canis familiaris
ggttcctagtctgtgtccaagtgaa

SEQ ID NO: 155470 - DNA, 25 bp, Canis familiaris
ggattggcttttgtgaccaaggaac

SEQ ID NO: 155471 - DNA, 25 bp, Canis familiaris
ggatttttaatcatgtgccatcagg

SEQ ID NO: 155472 - DNA, 25 bp, Canis familiaris
ggattttacagacctgcgtagcgcg

SEQ ID NO: 155473 - DNA, 25 bp, Canis familiaris
ggattcttccactcctgaattgagt

SEQ ID NO: 155474 - DNA, 25 bp, Canis familiaris
ggttcttgtcacttgcttaacagtt

SEQ ID NO: 155475 - DNA, 25 bp, Canis familiaris
ggttgttgctagtgtatagccatct

SEQ ID NO: 155476 - DNA, 25 bp, Canis familiaris
ggttgtctgcttttgttattcactg

SEQ ID NO: 155477 - DNA, 25 bp, Canis familiaris
ggatcttccaagtagttgaatacat

SEQ ID NO: 155478 - DNA, 25 bp, Canis familiaris
ggactaccgattccggaatagttct

SEQ ID NO: 155479 - DNA, 25 bp, Canis familiaris
ggatcaaagcgtaccgagatgcaga

SEQ ID NO: 155480 - DNA, 25 bp, Canis familiaris
ggatactcgctggtctcagcaggag

SEQ ID NO: 155481 - DNA, 25 bp, Canis familiaris
ggatcgggtggctcacacaagccat

SEQ ID NO: 155482 - DNA, 25 bp, Canis familiaris
ggacggttggaccactcaacaaacg

SEQ ID NO: 155483 - DNA, 25 bp, Canis familiaris
ggatcaggtttgtgtctcagaaata

SEQ ID NO: 155484 - DNA, 25 bp, Canis familiaris
ggataatgtttctgctaagactgtt

SEQ ID NO: 155485 - DNA, 25 bp, Canis familiaris
ggattattaccacgaaaactgttca

SEQ ID NO: 155486 - DNA, 25 bp, Canis familiaris
ggattcattcacaaaacaaactgca

SEQ ID NO: 155487 - DNA, 25 bp, Canis familiaris
ggattgtcttctaaacagctattca

SEQ ID NO: 155488 - DNA, 25 bp, Canis familiaris
ggatatatgcccttaattccttccc

SEQ ID NO: 155489 - DNA, 25 bp, Canis familiaris
ggattctgcccattgatatcagctt

SEQ ID NO: 155490 - DNA, 25 bp, Canis familiaris
ggttcatgcccttgattgagtcagc

SEQ ID NO: 155491 - DNA, 25 bp, Canis familiaris
ggttgtcaccagcattgagaatctt

SEQ ID NO: 155492 - DNA, 25 bp, Canis familiaris
ggatcactccccattggagattttg

SEQ ID NO: 155493 - DNA, 25 bp, Canis familiaris
ggattcctacagcatatgggagttt

SEQ ID NO: 155494 - DNA, 25 bp, Canis familiaris
ggttcctacaccaacgaatgaatat

SEQ ID NO: 155495 - DNA, 25 bp, Canis familiaris
ggttccatccatctactaaaatttt

SEQ ID NO: 155496 - DNA, 25 bp, Canis familiaris
ggttcctgacatcctcgtaaaaact

SEQ ID NO: 155497 - DNA, 25 bp, Canis familiaris
ggttgtcatgactctggctggaaaa

SEQ ID NO: 155498 - DNA, 25 bp, Canis familiaris
ggttgttgtctttcacattaaaaga

SEQ ID NO: 155499 - DNA, 25 bp, Canis familiaris
ggttgatttcaccacatttaaaagt

SEQ ID NO: 155500 - DNA, 25 bp, Canis familiaris
ggttgtattccttcatgctaaatta

SEQ ID NO: 155501 - DNA, 25 bp, Canis familiaris
ggttgtcgtcctactaagttagaca

SEQ ID NO: 155502 - DNA, 25 bp, Canis familiaris
ggttgtcgtgactctttgttataac

SEQ ID NO: 155503 - DNA, 25 bp, Canis familiaris
tggtttagctattttgggttattca

SEQ ID NO: 155504 - DNA, 25 bp, Canis familiaris
ggttcttcttgcatgtggggtttac

SEQ ID NO: 155505 - DNA, 25 bp, Canis familiaris
ggttcctctgttctggtgagtttat

SEQ ID NO: 155506 - DNA, 25 bp, Canis familiaris
ggatttccgtctctggtgtagctga

SEQ ID NO: 155507 - DNA, 25 bp, Canis familiaris
ggatttccacttaggccgtgatcag

SEQ ID NO: 155508 - DNA, 25 bp, Canis familiaris
ggatttgaacgtagagtagtgcagc

SEQ ID NO: 155509 - DNA, 25 bp, Canis familiaris
ggatttaacgtagagtatgcagcag

SEQ ID NO: 155510 - DNA, 25 bp, Canis familiaris
ggatttagacgttagagtaatgcac

SEQ ID NO: 155511 - DNA, 25 bp, Canis familiaris
ggatttagtgatctagttttgccct

SEQ ID NO: 155512 - DNA, 25 bp, Canis familiaris
ggatttggtgctctcaggttgtgag

SEQ ID NO: 155513 - DNA, 25 bp, Canis familiaris
tggatatgttcccatgtaggaggta

SEQ ID NO: 155514 - DNA, 25 bp, Canis familiaris
ggattgagtcccagagtggagtccc

SEQ ID NO: 155515 - DNA, 25 bp, Canis familiaris
ggttgatgtagctcaggggacccaa

SEQ ID NO: 155516 - DNA, 25 bp, Canis familiaris
ggacatggataggaaagggggaaat

SEQ ID NO: 155517 - DNA, 25 bp, Canis familiaris
ggaaggttagcatcttaaggacaat

SEQ ID NO: 155518 - DNA, 25 bp, Canis familiaris
ggttggttcctacttaaggctaatg

SEQ ID NO: 155519 - DNA, 25 bp, Canis familiaris
ggttggttcctctactagatgtgaa

SEQ ID NO: 155520 - DNA, 25 bp, Canis familiaris
ggttgggtccatgactcgggaacaa

SEQ ID NO: 155521 - DNA, 25 bp, Canis familiaris
ggttcggagctagacagcccaagaa

SEQ ID NO: 155522 - DNA, 25 bp, Canis familiaris
ggttgggtgctatactgccaatagt

SEQ ID NO: 155523 - DNA, 25 bp, Canis familiaris
ggttggagcctatattccttagagc

SEQ ID NO: 155524 - DNA, 25 bp, Canis familiaris
ggttggagcttatatgtctttaggc

SEQ ID NO: 155525 - DNA, 25 bp, Canis familiaris
ggttggcactccggatgtatttagg

SEQ ID NO: 155526 - DNA, 25 bp, Canis familiaris
ggttgatgagctggctggatgctgt

SEQ ID NO: 155527 - DNA, 25 bp, Canis familiaris
ggttgcagagcagggatgtcttggc

SEQ ID NO: 155528 - DNA, 25 bp, Canis familiaris
ggatctggccagggacttggggaag

SEQ ID NO: 155529 - DNA, 25 bp, Canis familiaris
ggttgaccagtggcgctggagggta

SEQ ID NO: 155530 - DNA, 25 bp, Canis familiaris
ggatcaacacggtcgtggttgtgtg

SEQ ID NO: 155531 - DNA, 25 bp, Canis familiaris
ggataacaggagttattggggaggt

SEQ ID NO: 155532 - DNA, 25 bp, Canis familiaris
ggatcaaagtctgttctggcggcat

SEQ ID NO: 155533 - DNA, 25 bp, Canis familiaris
ggatcaagtcctgcgttgggtttcc

SEQ ID NO: 155534 - DNA, 25 bp, Canis familiaris
ggatcaaggccttcctgtaagttat

SEQ ID NO: 155535 - DNA, 25 bp, Canis familiaris
ggatcaagaaatttacagaagttac

SEQ ID NO: 155536 - DNA, 25 bp, Canis familiaris
ggatacgacttctataaggaaatag

SEQ ID NO: 155537 - DNA, 25 bp, Canis familiaris
ggatacacagctcaaaacgcaaaca

SEQ ID NO: 155538 - DNA, 25 bp, Canis familiaris
ggatcagtagttcaacagctaaaca

SEQ ID NO: 155539 - DNA, 25 bp, Canis familiaris
ggattcagagttccaaaataaaaat

SEQ ID NO: 155540 - DNA, 25 bp, Canis familiaris
ggattaagtctagctcaaaggaagt

SEQ ID NO: 155541 - DNA, 25 bp, Canis familiaris
ggattaagtccttttatcgtatcag

SEQ ID NO: 155542 - DNA, 25 bp, Canis familiaris
ggattaatccacttacttggttctg

SEQ ID NO: 155543 - DNA, 25 bp, Canis familiaris
ggattcaacctagtattccttctcg

SEQ ID NO: 155544 - DNA, 25 bp, Canis familiaris
ggattcgactatagtgttcctcgtt

SEQ ID NO: 155545 - DNA, 25 bp, Canis familiaris
ggttctagatatgctgtttctcagt

SEQ ID NO: 155546 - DNA, 25 bp, Canis familiaris
ggttctgagaattcttattgccctg

SEQ ID NO: 155547 - DNA, 25 bp, Canis familiaris
ggttctggaaatatctcactggtga

SEQ ID NO: 155548 - DNA, 25 bp, Canis familiaris
ggttctggatttacttcaatatctt

SEQ ID NO: 155549 - DNA, 25 bp, Canis familiaris
ggttctgattttattttgatgtctg

SEQ ID NO: 155550 - DNA, 25 bp, Canis familiaris
ggttggtgattattttttatactgt

SEQ ID NO: 155551 - DNA, 25 bp, Canis familiaris
ggttggtgattattttttatactgt

SEQ ID NO: 155552 - DNA, 25 bp, Canis familiaris
ggttcgctgttatttaatgatttgt

SEQ ID NO: 155553 - DNA, 25 bp, Canis familiaris
ggttccttgtgagttttgatgtctt

SEQ ID NO: 155554 - DNA, 25 bp, Canis familiaris
ggttcttttgtgatttgttctattt

SEQ ID NO: 155555 - DNA, 25 bp, Canis familiaris
ggattgttttaaaggtgttctcatt

SEQ ID NO: 155556 - DNA, 25 bp, Canis familiaris
ggttgtgttaacagagcaagttttg

SEQ ID NO: 155557 - DNA, 25 bp, Canis familiaris
ggttgtcctttctagtaagttggtg

SEQ ID NO: 155558 - DNA, 25 bp, Canis familiaris
ggatctctctctctcaagtaaatat

SEQ ID NO: 155559 - DNA, 25 bp, Canis familiaris
ggatctcctgccgtaaggtaaagga

SEQ ID NO: 155560 - DNA, 25 bp, Canis familiaris
ggatcacctgaggtcaggagttcaa

SEQ ID NO: 155561 - DNA, 25 bp, Canis familiaris
ggatactcagcccagggatgtgcca

SEQ ID NO: 155562 - DNA, 25 bp, Canis familiaris
ggatcagtcacttaggccatgtagc

SEQ ID NO: 155563 - DNA, 25 bp, Canis familiaris
ggatcgtagaaatgccgtcgctggc

SEQ ID NO: 155564 - DNA, 25 bp, Canis familiaris
ggattgtagaacttccctatctgta

SEQ ID NO: 155565 - DNA, 25 bp, Canis familiaris
ggttgtatgtatttatctgcttaga

SEQ ID NO: 155566 - DNA, 25 bp, Canis familiaris
ggttgtattagatgttctctatcat

SEQ ID NO: 155567 - DNA, 25 bp, Canis familiaris
ggttgtatagcagccatcttcttca

SEQ ID NO: 155568 - DNA, 25 bp, Canis familiaris
ggttgtattcactttcattttcact

SEQ ID NO: 155569 - DNA, 25 bp, Canis familiaris
ggttgtcataaatctcagtttcaca

SEQ ID NO: 155570 - DNA, 25 bp, Canis familiaris
ggattgctgacagaacggatgttca

SEQ ID NO: 155571 - DNA, 25 bp, Canis familiaris
ggttgtgtgcacaccgttgtgctat

SEQ ID NO: 155572 - DNA, 25 bp, Canis familiaris
ggttgattgacgaccacctggtatt

SEQ ID NO: 155573 - DNA, 25 bp, Canis familiaris
ggattttggtggcacctggtttcat

SEQ ID NO: 155574 - DNA, 25 bp, Canis familiaris
tggatattttggcacctacggttca

SEQ ID NO: 155575 - DNA, 25 bp, Canis familiaris
ggattattgtcgtaccaactcggtc

SEQ ID NO: 155576 - DNA, 25 bp, Canis familiaris
ggattgttctggttcaaccctggat

SEQ ID NO: 155577 - DNA, 25 bp, Canis familiaris
ggattccgcttgtaattctccaggt

SEQ ID NO: 155578 - DNA, 25 bp, Canis familiaris
ggattccgtagtaagaccaagtgtt

SEQ ID NO: 155579 - DNA, 25 bp, Canis familiaris
ggattccctcatcaaggctacaatt

SEQ ID NO: 155580 - DNA, 25 bp, Canis familiaris
ggttccaacagccaaggctacctgc

SEQ ID NO: 155581 - DNA, 25 bp, Canis familiaris
ggttccttcgtatgagttcactggt

SEQ ID NO: 155582 - DNA, 25 bp, Canis familiaris
ggttcgtccagaccagatgtatacg

SEQ ID NO: 155583 - DNA, 25 bp, Canis familiaris
ggattggctgctggaacaggttagc

SEQ ID NO: 155584 - DNA, 25 bp, Canis familiaris
ggttgtagcggatctgagcttcagc

SEQ ID NO: 155585 - DNA, 25 bp, Canis familiaris
ggttggacaagatctgacagtgagg

SEQ ID NO: 155586 - DNA, 25 bp, Canis familiaris
ggttgcgataagttcatcagcaggg

SEQ ID NO: 155587 - DNA, 25 bp, Canis familiaris
ggattgctataaacacacatggcga

SEQ ID NO: 155588 - DNA, 25 bp, Canis familiaris
ggattgctggcaaccacagaagcta

SEQ ID NO: 155589 - DNA, 25 bp, Canis familiaris
ggttgctggttatcaaggctgcatg

SEQ ID NO: 155590 - DNA, 25 bp, Canis familiaris
ggttgcttatctaatcatagttcaa

SEQ ID NO: 155591 - DNA, 25 bp, Canis familiaris
ggttgttctcaactgcatttggaat

SEQ ID NO: 155592 - DNA, 25 bp, Canis familiaris
ggattttctccaggaattggaagtt

SEQ ID NO: 155593 - DNA, 25 bp, Canis familiaris
ggattgtccttgagaggtggggtta

SEQ ID NO: 155594 - DNA, 25 bp, Canis familiaris
ggatgtaccttgacggacgacggaa

SEQ ID NO: 155595 - DNA, 25 bp, Canis familiaris
ggttgagtcttgtagtgacgctcgg

SEQ ID NO: 155596 - DNA, 25 bp, Canis familiaris
ggttgtgtgttggttgactgtgacg

SEQ ID NO: 155597 - DNA, 25 bp, Canis familiaris
ggttcctgtgagcttaggtgagaca

SEQ ID NO: 155598 - DNA, 25 bp, Canis familiaris
ggttccagaaccgcagagctaagca

SEQ ID NO: 155599 - DNA, 25 bp, Canis familiaris
ggctaccgggaggacggcatcagga

SEQ ID NO: 155600 - DNA, 25 bp, Canis familiaris
ggatcaccggggggggacgaatatg

SEQ ID NO: 155601 - DNA, 25 bp, Canis familiaris
ggacccgaaggctgcaaacgtaagg

SEQ ID NO: 155602 - DNA, 25 bp, Canis familiaris
ggacccgctgaagagccaacagtac

SEQ ID NO: 155603 - DNA, 25 bp, Canis familiaris
ggatccccggactataaaagaatgg

SEQ ID NO: 155604 - DNA, 25 bp, Canis familiaris
ggatacccttactgaacagaaatac

SEQ ID NO: 155605 - DNA, 25 bp, Canis familiaris
ggataccctcatttttaggaatcta

SEQ ID NO: 155606 - DNA, 25 bp, Canis familiaris
ggattcagccatttctctaaagagc

SEQ ID NO: 155607 - DNA, 25 bp, Canis familiaris
ggattcccatttcaacaccaggaaa

SEQ ID NO: 155608 - DNA, 25 bp, Canis familiaris
ggattacctttccaacaatctgagg

SEQ ID NO: 155609 - DNA, 25 bp, Canis familiaris
ggattccctgtgaccaacattggtg

SEQ ID NO: 155610 - DNA, 25 bp, Canis familiaris
ggatcccacgcagctagtcagggag

SEQ ID NO: 155611 - DNA, 25 bp, Canis familiaris
ggatcaccctatgtacctgtgggaa

SEQ ID NO: 155612 - DNA, 25 bp, Canis familiaris
ggatcaacttatatacctcgaagac

SEQ ID NO: 155613 - DNA, 25 bp, Canis familiaris
ggataacgatttcacaccaggaaca

SEQ ID NO: 155614 - DNA, 25 bp, Canis familiaris
ggatttggatttccccgggaagatg

SEQ ID NO: 155615 - DNA, 25 bp, Canis familiaris
ggattttgtgtcacctccagaaagt

SEQ ID NO: 155616 - DNA, 25 bp, Canis familiaris
ggttgttgtgatagatgcttccagg

SEQ ID NO: 155617 - DNA, 25 bp, Canis familiaris
ggttgattggtttgtgttgcatggt

SEQ ID NO: 155618 - DNA, 25 bp, Canis familiaris
ggattacggcactgcagttcacggt

SEQ ID NO: 155619 - DNA, 25 bp, Canis familiaris
ggattacccagagcagttgccacat

SEQ ID NO: 155620 - DNA, 25 bp, Canis familiaris
ggattgccctcatgacaattgtcaa

SEQ ID NO: 155621 - DNA, 25 bp, Canis familiaris
ggattgctcctatccattttataaa

SEQ ID NO: 155622 - DNA, 25 bp, Canis familiaris
ggatctctcgtaccttacttatagg

SEQ ID NO: 155623 - DNA, 25 bp, Canis familiaris
ggttccatttggatactctatcagg

SEQ ID NO: 155624 - DNA, 25 bp, Canis familiaris
ggttcctctcggaatgacgcaagca

SEQ ID NO: 155625 - DNA, 25 bp, Canis familiaris
ggcatggccttccgtgtccccactg

SEQ ID NO: 155626 - DNA, 25 bp, Canis familiaris
ggattctctgtaaatgtcccgcttt

SEQ ID NO: 155627 - DNA, 25 bp, Canis familiaris
ggatacaggataagctgctgccccc

SEQ ID NO: 155628 - DNA, 25 bp, Canis familiaris
ggatacatgcaattcacatgagcac

SEQ ID NO: 155629 - DNA, 25 bp, Canis familiaris
ggatacatgacagccataagcccct

SEQ ID NO: 155630 - DNA, 25 bp, Canis familiaris
ggatacaatgctgcctacaatcgct

SEQ ID NO: 155631 - DNA, 25 bp, Canis familiaris
ggatacaatgctgcctacaatcgct

SEQ ID NO: 155632 - DNA, 25 bp, Canis familiaris
ggttgcgcagtatgttcacatctgt

SEQ ID NO: 155633 - DNA, 25 bp, Canis familiaris
ggctggggtaggagaatccaatcca

SEQ ID NO: 155634 - DNA, 25 bp, Canis familiaris
ggttgggctcaggggtatggagacc

SEQ ID NO: 155635 - DNA, 25 bp, Canis familiaris
ggttggggcagggctggcaggaacc

SEQ ID NO: 155636 - DNA, 25 bp, Canis familiaris
ggttgctgggcatttgatggcagga

SEQ ID NO: 155637 - DNA, 25 bp, Canis familiaris
ggttccgtgcattgctgagtgcagc

SEQ ID NO: 155638 - DNA, 25 bp, Canis familiaris
ggttccattgtaggatgtgccttca

SEQ ID NO: 155639 - DNA, 25 bp, Canis familiaris
ggattccagctgttcagagtcctta

SEQ ID NO: 155640 - DNA, 25 bp, Canis familiaris
ggattccaggcttggagttctccaa

SEQ ID NO: 155641 - DNA, 25 bp, Canis familiaris
ggataccgcagctaggaataatgga

SEQ ID NO: 155642 - DNA, 25 bp, Canis familiaris
ggataccgcagctaggaataatgga

SEQ ID NO: 155643 - DNA, 25 bp, Canis familiaris
ggattctcccattgttgataatggg

SEQ ID NO: 155644 - DNA, 25 bp, Canis familiaris
ggatttctgccctctttgagggaaa

SEQ ID NO: 155645 - DNA, 25 bp, Canis familiaris
ggttgtctcctctggttgaggtgca

SEQ ID NO: 155646 - DNA, 25 bp, Canis familiaris
ggttgtggccactgtgtttggagca

SEQ ID NO: 155647 - DNA, 25 bp, Canis familiaris
ggatcctggttctctgtttggaaag

SEQ ID NO: 155648 - DNA, 25 bp, Canis familiaris
ggatcttggttcgctgttatttaat

SEQ ID NO: 155649 - DNA, 25 bp, Canis familiaris
ggatattgagtctccatattaaaat

SEQ ID NO: 155650 - DNA, 25 bp, Canis familiaris
ggatattgttgccatcaatgacccc

SEQ ID NO: 155651 - DNA, 25 bp, Canis familiaris
ggatattgtcgccatcaatgacccc

SEQ ID NO: 155652 - DNA, 25 bp, Canis familiaris
ggatttgacacattcaggaccacgg

SEQ ID NO: 155653 - DNA, 25 bp, Canis familiaris
ggataggagccttccaagacactgg

SEQ ID NO: 155654 - DNA, 25 bp, Canis familiaris
ggatcaggcctcaggctgaagtcgg

SEQ ID NO: 155655 - DNA, 25 bp, Canis familiaris
ggatcaggacctaagctgaaggcag

SEQ ID NO: 155656 - DNA, 25 bp, Canis familiaris
ggattgtcatcctaaagtagaatgt

SEQ ID NO: 155657 - DNA, 25 bp, Canis familiaris
ggatttctcccttaggaagatctcc

SEQ ID NO: 155658 - DNA, 25 bp, Canis familiaris
ggttcctcctggttaggtgatgtcc

SEQ ID NO: 155659 - DNA, 25 bp, Canis familiaris
ggattcctttggactagggtatctc

SEQ ID NO: 155660 - DNA, 25 bp, Canis familiaris
ggatgttcttttgttttctacctat

SEQ ID NO: 155661 - DNA, 25 bp, Canis familiaris
ggttccatatttgtgaattctactc

SEQ ID NO: 155662 - DNA, 25 bp, Canis familiaris
ggttcctatactggttattctgtcc

SEQ ID NO: 155663 - DNA, 25 bp, Canis familiaris
ggttccttatctctgtatacatgta

SEQ ID NO: 155664 - DNA, 25 bp, Canis familiaris
ggattcctttcttttacaaattgtg

SEQ ID NO: 155665 - DNA, 25 bp, Canis familiaris
ggttgttgttgttttagcccaagat

SEQ ID NO: 155666 - DNA, 25 bp, Canis familiaris
ggttgcttttgggtgtccatccaaa

SEQ ID NO: 155667 - DNA, 25 bp, Canis familiaris
ggatctgctgatctgtgcgttgaac

SEQ ID NO: 155668 - DNA, 25 bp, Canis familiaris
ggatcatgccataattgaggtaaat

SEQ ID NO: 155669 - DNA, 25 bp, Canis familiaris
ggatatgccatttattttaaaagca

SEQ ID NO: 155670 - DNA, 25 bp, Canis familiaris
ggattctcacttttgttggtttcac

SEQ ID NO: 155671 - DNA, 25 bp, Canis familiaris
ggatatctactcactgatttgtctt

SEQ ID NO: 155672 - DNA, 25 bp, Canis familiaris
ggatatcatcatactgcctatctta

SEQ ID NO: 155673 - DNA, 25 bp, Canis familiaris
ggatattcatgtgccatcagcttgc

SEQ ID NO: 155674 - DNA, 25 bp, Canis familiaris
ggattttgtccaaccatatgttgcc

SEQ ID NO: 155675 - DNA, 25 bp, Canis familiaris
ggattttgcttcttccaagtttgtt

SEQ ID NO: 155676 - DNA, 25 bp, Canis familiaris
ggattgcagtcttcccaaagttttg

SEQ ID NO: 155677 - DNA, 25 bp, Canis familiaris
ggattgagtccaagctctagacctt

SEQ ID NO: 155678 - DNA, 25 bp, Canis familiaris
ggatcttgtcgaagctgctaagccg

SEQ ID NO: 155679 - DNA, 25 bp, Canis familiaris
ggatcttgtctcagttcgggaggtc

SEQ ID NO: 155680 - DNA, 25 bp, Canis familiaris
ggattacatttgctcctgggaggcc

SEQ ID NO: 155681 - DNA, 25 bp, Canis familiaris
ggattcgtctgtgtcctatggagtt

SEQ ID NO: 155682 - DNA, 25 bp, Canis familiaris
ggatttactgagatttatatgagat

SEQ ID NO: 155683 - DNA, 25 bp, Canis familiaris
ggattacactggatcattggaaatt

SEQ ID NO: 155684 - DNA, 25 bp, Canis familiaris
ggttgctgccgaattctgggaacaa

SEQ ID NO: 155685 - DNA, 25 bp, Canis familiaris
ggattggccgcttgtcgggaaaatc

SEQ ID NO: 155686 - DNA, 25 bp, Canis familiaris
ggattggcactcagggtcgagacca

SEQ ID NO: 155687 - DNA, 25 bp, Canis familiaris
ggattgaatctcacattggggtccc

SEQ ID NO: 155688 - DNA, 25 bp, Canis familiaris
ggattagatctcgcctgggggcgtc

SEQ ID NO: 155689 - DNA, 25 bp, Canis familiaris
ggattcaatccctctggttggacac

SEQ ID NO: 155690 - DNA, 25 bp, Canis familiaris
ggattccaactcactggcttactac

SEQ ID NO: 155691 - DNA, 25 bp, Canis familiaris
ggattcccattgatcgtgtgtaccc

SEQ ID NO: 155692 - DNA, 25 bp, Canis familiaris
ggattggctttgatgggtgaaccta

SEQ ID NO: 155693 - DNA, 25 bp, Canis familiaris
ggattggtgcttttgggtacatgga

SEQ ID NO: 155694 - DNA, 25 bp, Canis familiaris
ggttgttgaatgtctgtggaacagg

SEQ ID NO: 155695 - DNA, 25 bp, Canis familiaris
ggattgttgagtttgctccagtcat

SEQ ID NO: 155696 - DNA, 25 bp, Canis familiaris
ggattgttcaaggacccagtcaagc

SEQ ID NO: 155697 - DNA, 25 bp, Canis familiaris
ggattctttcaggagccacagctaa

SEQ ID NO: 155698 - DNA, 25 bp, Canis familiaris
ggatctgctgtttgaagcgcagcag

SEQ ID NO: 155699 - DNA, 25 bp, Canis familiaris
ggattctctttgtcactggagtcca

SEQ ID NO: 155700 - DNA, 25 bp, Canis familiaris
ggatttgcttcctctgtgagtgaca

SEQ ID NO: 155701 - DNA, 25 bp, Canis familiaris
ggattatttttttaatgtgacacgt

SEQ ID NO: 155702 - DNA, 25 bp, Canis familiaris
ggattcttttttcaattgtcacctg

SEQ ID NO: 155703 - DNA, 25 bp, Canis familiaris
ggattcccgttcagaagcttacctg

SEQ ID NO: 155704 - DNA, 25 bp, Canis familiaris
ggattccagccgtacgaactatact

SEQ ID NO: 155705 - DNA, 25 bp, Canis familiaris
ggttgccagggctcagaagtgcaag

SEQ ID NO: 155706 - DNA, 25 bp, Canis familiaris
ggttgccagggctcatgaagtgtca

SEQ ID NO: 155707 - DNA, 25 bp, Canis familiaris
ggattacggacaaatgacgatgtat

SEQ ID NO: 155708 - DNA, 25 bp, Canis familiaris
ggatttcggaagcagacgcagtcta

SEQ ID NO: 155709 - DNA, 25 bp, Canis familiaris
ggcatttgggaaggaactcgggact

SEQ ID NO: 155710 - DNA, 25 bp, Canis familiaris
ggatttggggggatgtgcagggacc

SEQ ID NO: 155711 - DNA, 25 bp, Canis familiaris
ggatcctggggttgacttcggagag

SEQ ID NO: 155712 - DNA, 25 bp, Canis familiaris
ggattctgtgctttagactttggct

SEQ ID NO: 155713 - DNA, 25 bp, Canis familiaris
ggatatcaggctttcaattttttta

SEQ ID NO: 155714 - DNA, 25 bp, Canis familiaris
ggatccaagcactcaggtttctttt

SEQ ID NO: 155715 - DNA, 25 bp, Canis familiaris
ggattctccagctactttttattgt

SEQ ID NO: 155716 - DNA, 25 bp, Canis familiaris
ggttgatcttgctgtttttgtttct

SEQ ID NO: 155717 - DNA, 25 bp, Canis familiaris
ggttgttctcattgttaatcatttt

SEQ ID NO: 155718 - DNA, 25 bp, Canis familiaris
ggttgtctttgactactgtcttttg

SEQ ID NO: 155719 - DNA, 25 bp, Canis familiaris
ggttgcttttgcttacttgtatatt

SEQ ID NO: 155720 - DNA, 25 bp, Canis familiaris
ggttgctttcttgatcttgtttgcc

SEQ ID NO: 155721 - DNA, 25 bp, Canis familiaris
ggatttttgagtgtgtgtctttgcc

SEQ ID NO: 155722 - DNA, 25 bp, Canis familiaris
ggattcattcgtgccttgttgttcc

SEQ ID NO: 155723 - DNA, 25 bp, Canis familiaris
ggaaattccatctctttttggactt

SEQ ID NO: 155724 - DNA, 25 bp, Canis familiaris
ggacacctatttctttttggatact

SEQ ID NO: 155725 - DNA, 25 bp, Canis familiaris
ggatccctaaagcatttaaggaaga

SEQ ID NO: 155726 - DNA, 25 bp, Canis familiaris
ggatagccccgatgttgtaagaaga

SEQ ID NO: 155727 - DNA, 25 bp, Canis familiaris
ggatcacctctggtcgttgtaaata

SEQ ID NO: 155728 - DNA, 25 bp, Canis familiaris
ggatccctagagattttcataaagc

SEQ ID NO: 155729 - DNA, 25 bp, Canis familiaris
ggatcacgaaggaatctgctgtata

SEQ ID NO: 155730 - DNA, 25 bp, Canis familiaris
ggatacaggcacaatcatgcgggaa

SEQ ID NO: 155731 - DNA, 25 bp, Canis familiaris
ggatatccataccatatggggcagc

SEQ ID NO: 155732 - DNA, 25 bp, Canis familiaris
ggatcaccagcacacaggggatgtc

SEQ ID NO: 155733 - DNA, 25 bp, Canis familiaris
ggatcaccagcacacaggggatgtc

SEQ ID NO: 155734 - DNA, 25 bp, Canis familiaris
ggatcagtaatcccacgctggtata

SEQ ID NO: 155735 - DNA, 25 bp, Canis familiaris
ggatcatatacacgcgcacgtttga

SEQ ID NO: 155736 - DNA, 25 bp, Canis familiaris
ggatcaagctcatcgactttggcat

SEQ ID NO: 155737 - DNA, 25 bp, Canis familiaris
ggatctagtaactgcatttgtgcca

SEQ ID NO: 155738 - DNA, 25 bp, Canis familiaris
ggattggcaaactgttgtgatcttg

SEQ ID NO: 155739 - DNA, 25 bp, Canis familiaris
ggttggttcagttggtgtagcatgt

SEQ ID NO: 155740 - DNA, 25 bp, Canis familiaris
ggttggtgtgtggatgtgtgtgtct

SEQ ID NO: 155741 - DNA, 25 bp, Canis familiaris
ggttgttgtgtgctctgatgtggcc

SEQ ID NO: 155742 - DNA, 25 bp, Canis familiaris
ggttgtgtgttttctgagcgagcct

SEQ ID NO: 155743 - DNA, 25 bp, Canis familiaris
ggattttggcttttgactgtcctca

SEQ ID NO: 155744 - DNA, 25 bp, Canis familiaris
ggataaattgttttgactgccctga

SEQ ID NO: 155745 - DNA, 25 bp, Canis familiaris
ggatgaaggaacgaccaggccttga

SEQ ID NO: 155746 - DNA, 25 bp, Canis familiaris
ggaggaggacaagcggggcttcacc

SEQ ID NO: 155747 - DNA, 25 bp, Canis familiaris
ggatggggacactggggtcaacgac

SEQ ID NO: 155748 - DNA, 25 bp, Canis familiaris
ggattctggaaaaggcgttccctgg

SEQ ID NO: 155749 - DNA, 25 bp, Canis familiaris
ggattggaaacgaactcttccctgg

SEQ ID NO: 155750 - DNA, 25 bp, Canis familiaris
ggattgggaacacaggccctgacag

SEQ ID NO: 155751 - DNA, 25 bp, Canis familiaris
ggttggatgacaaggcggcctgtga

SEQ ID NO: 155752 - DNA, 25 bp, Canis familiaris
ggttgggagcatgtgtggctcatgg

SEQ ID NO: 155753 - DNA, 25 bp, Canis familiaris
ggttgtgagggcgtgtgtgcgccgc

SEQ ID NO: 155754 - DNA, 25 bp, Canis familiaris
ggttgagaggagacggctccacatc

SEQ ID NO: 155755 - DNA, 25 bp, Canis familiaris
ggttgttaaaagcctccagcacaaa

SEQ ID NO: 155756 - DNA, 25 bp, Canis familiaris
ggattgttaatcaagtctcacacca

SEQ ID NO: 155757 - DNA, 25 bp, Canis familiaris
ggatagtgttgtaggctctttcgcc

SEQ ID NO: 155758 - DNA, 25 bp, Canis familiaris
ggttgtgtatgttgtccttattatc

SEQ ID NO: 155759 - DNA, 25 bp, Canis familiaris
ggattggagcatctgtcactttgat

SEQ ID NO: 155760 - DNA, 25 bp, Canis familiaris
ggatgcccagatcttacttgttagc

SEQ ID NO: 155761 - DNA, 25 bp, Canis familiaris
ggattcgcagtgatttcgtggatga

SEQ ID NO: 155762 - DNA, 25 bp, Canis familiaris
ggattacatgtgcttggcgattaag

SEQ ID NO: 155763 - DNA, 25 bp, Canis familiaris
ggattcagcttgcttgatcctctag

SEQ ID NO: 155764 - DNA, 25 bp, Canis familiaris
ggattcgctgaagtttagtctaccc

SEQ ID NO: 155765 - DNA, 25 bp, Canis familiaris
ggatctcctgaatttccattttctc

SEQ ID NO: 155766 - DNA, 25 bp, Canis familiaris
ggattcctgtgttgttatgttgcat

SEQ ID NO: 155767 - DNA, 25 bp, Canis familiaris
ggatagcttttggagtatgtgtgat

SEQ ID NO: 155768 - DNA, 25 bp, Canis familiaris
ggatagtctccagagttgtctttat

SEQ ID NO: 155769 - DNA, 25 bp, Canis familiaris
ggattcttccaccagttggagtttg

SEQ ID NO: 155770 - DNA, 25 bp, Canis familiaris
ggattatgaggagagttgtgtttgg

SEQ ID NO: 155771 - DNA, 25 bp, Canis familiaris
ggttggagtaattgtctgtgttttg

SEQ ID NO: 155772 - DNA, 25 bp, Canis familiaris
ggttggagactatctctgggttcat

SEQ ID NO: 155773 - DNA, 25 bp, Canis familiaris
ggttggcaaattacttagctgttat

SEQ ID NO: 155774 - DNA, 25 bp, Canis familiaris
ggttgagctcataatattttttgta

SEQ ID NO: 155775 - DNA, 25 bp, Canis familiaris
ggattgtgtcaattataaccagtta

SEQ ID NO: 155776 - DNA, 25 bp, Canis familiaris
ggatccgtccagtatagaacacttt

SEQ ID NO: 155777 - DNA, 25 bp, Canis familiaris
ggatccctggcttagtgaacattgt

SEQ ID NO: 155778 - DNA, 25 bp, Canis familiaris
ggatacgtggtgcgaaatcattggt

SEQ ID NO: 155779 - DNA, 25 bp, Canis familiaris
ggatccggcgtgggaaaattggcca

SEQ ID NO: 155780 - DNA, 25 bp, Canis familiaris
ggatccggcccttcaataatgtggc

SEQ ID NO: 155781 - DNA, 25 bp, Canis familiaris
ggttgaggccaccccaaatggggat

SEQ ID NO: 155782 - DNA, 25 bp, Canis familiaris
ggttgaggagcctgctgcaactgag

SEQ ID NO: 155783 - DNA, 25 bp, Canis familiaris
ggatgctaagggcagctgcaatctg

SEQ ID NO: 155784 - DNA, 25 bp, Canis familiaris
ggatcttactgccaagtaatcgctc

SEQ ID NO: 155785 - DNA, 25 bp, Canis familiaris
ggatttagctcagtggtagagcgct

SEQ ID NO: 155786 - DNA, 25 bp, Canis familiaris
ggatttgaccaacataggcctgatg

SEQ ID NO: 155787 - DNA, 25 bp, Canis familiaris
ggatcttgacattttctaggcctct

SEQ ID NO: 155788 - DNA, 25 bp, Canis familiaris
ggatttgccaaatgctatggccatc

SEQ ID NO: 155789 - DNA, 25 bp, Canis familiaris
ggatttcaacagaagcctacctcta

SEQ ID NO: 155790 - DNA, 25 bp, Canis familiaris
ggatttgaaggtagcactcctatct

SEQ ID NO: 155791 - DNA, 25 bp, Canis familiaris
ggattggagggcttcacacctatac

SEQ ID NO: 155792 - DNA, 25 bp, Canis familiaris
ggttggcagtggtgagacacatcta

SEQ ID NO: 155793 - DNA, 25 bp, Canis familiaris
ggattctcagggtatcacagcaact

SEQ ID NO: 155794 - DNA, 25 bp, Canis familiaris
ggattccttggcttcagctgaatta

SEQ ID NO: 155795 - DNA, 25 bp, Canis familiaris
ggattggctagtttgagtaattcag

SEQ ID NO: 155796 - DNA, 25 bp, Canis familiaris
ggttggtggcatttgaggatctttg

SEQ ID NO: 155797 - DNA, 25 bp, Canis familiaris
ggattggattgtaagcaggaccttg

SEQ ID NO: 155798 - DNA, 25 bp, Canis familiaris
ggattgtgatttgagccaacgtctg

SEQ ID NO: 155799 - DNA, 25 bp, Canis familiaris
ggatttttgtgcaatgcccacagtt

SEQ ID NO: 155800 - DNA, 25 bp, Canis familiaris
ggattctgctggagagcccacagct

SEQ ID NO: 155801 - DNA, 25 bp, Canis familiaris
ggattggctggatggcaagcacgtg

SEQ ID NO: 155802 - DNA, 25 bp, Canis familiaris
ggttggtgagaatgcaaactggtgc

SEQ ID NO: 155803 - DNA, 25 bp, Canis familiaris
ggttggtagcaattcaaggctttta

SEQ ID NO: 155804 - DNA, 25 bp, Canis familiaris
ggattttataattcaggagccttta

SEQ ID NO: 155805 - DNA, 25 bp, Canis familiaris
ggatcttgagtatctcggacctttc

SEQ ID NO: 155806 - DNA, 25 bp, Canis familiaris
ggatttcaacaagagaaccattctc

SEQ ID NO: 155807 - DNA, 25 bp, Canis familiaris
ggatttaataaccagggcaacccag

SEQ ID NO: 155808 - DNA, 25 bp, Canis familiaris
ggattcttaagtgacctgaacccag

SEQ ID NO: 155809 - DNA, 25 bp, Canis familiaris
ggattgcaattattccccatgaacg

SEQ ID NO: 155810 - DNA, 25 bp, Canis familiaris
ggattgcagaattcttccctgatgc

SEQ ID NO: 155811 - DNA, 25 bp, Canis familiaris
ggattgaaaatcatctgcttcatgt

SEQ ID NO: 155812 - DNA, 25 bp, Canis familiaris
ggattgaagaacttggtggctgatc

SEQ ID NO: 155813 - DNA, 25 bp, Canis familiaris
ggattgtgggagtatcgtggcagta

SEQ ID NO: 155814 - DNA, 25 bp, Canis familiaris
ggatctggttaatttgtggactcat

SEQ ID NO: 155815 - DNA, 25 bp, Canis familiaris
ggatatgggtattttcggtctcttt

SEQ ID NO: 155816 - DNA, 25 bp, Canis familiaris
ggagtacgatatcggatagttcttt

SEQ ID NO: 155817 - DNA, 25 bp, Canis familiaris
ggatgaccgatagcttcagttccct

SEQ ID NO: 155818 - DNA, 25 bp, Canis familiaris
ggattactttccatcagtatcccca

SEQ ID NO: 155819 - DNA, 25 bp, Canis familiaris
ggatgtatagtaaataggaacccaa

SEQ ID NO: 155820 - DNA, 25 bp, Canis familiaris
ggatttaccacatcagtaactgccc

SEQ ID NO: 155821 - DNA, 25 bp, Canis familiaris
ggatattaacactaacatacgctcc

SEQ ID NO: 155822 - DNA, 25 bp, Canis familiaris
ggatattcaaatggaaattctgctc

SEQ ID NO: 155823 - DNA, 25 bp, Canis familiaris
ggatttttatgggaattctgcttat

SEQ ID NO: 155824 - DNA, 25 bp, Canis familiaris
ggattatttctttaatgtgaccaat

SEQ ID NO: 155825 - DNA, 25 bp, Canis familiaris
ggattgttaccatctagataaatat

SEQ ID NO: 155826 - DNA, 25 bp, Canis familiaris
ggattttcaccccatttatagatat

SEQ ID NO: 155827 - DNA, 25 bp, Canis familiaris
ggattttcatcctacaattattttc

SEQ ID NO: 155828 - DNA, 25 bp, Canis familiaris
ggatcatttccatgacaaaaccgtc

SEQ ID NO: 155829 - DNA, 25 bp, Canis familiaris
ggatctttacatcattgaaataccc

SEQ ID NO: 155830 - DNA, 25 bp, Canis familiaris
ggatcttttctctactacggaacct

SEQ ID NO: 155831 - DNA, 25 bp, Canis familiaris
ggatcttggtcttataccgaaaccg

SEQ ID NO: 155832 - DNA, 25 bp, Canis familiaris
ggatctggagtttaaccgacctctc

SEQ ID NO: 155833 - DNA, 25 bp, Canis familiaris
ggatggggttccaacccaacatctc

SEQ ID NO: 155834 - DNA, 25 bp, Canis familiaris
ggaggaaggattgagtccaagctct

SEQ ID NO: 155835 - DNA, 25 bp, Canis familiaris
ggaggttggcacaggaccaagctcg

SEQ ID NO: 155836 - DNA, 25 bp, Canis familiaris
ggaggctttcgggaatgccaagacc

SEQ ID NO: 155837 - DNA, 25 bp, Canis familiaris
ggaggcgttcggcaatgccaagacg

SEQ ID NO: 155838 - DNA, 25 bp, Canis familiaris
ggatttcttccgcaagacaagccgc

SEQ ID NO: 155839 - DNA, 25 bp, Canis familiaris
ggattcttttctggaagagccccgt

SEQ ID NO: 155840 - DNA, 25 bp, Canis familiaris
ggatttgttcttccaaatctccctg

SEQ ID NO: 155841 - DNA, 25 bp, Canis familiaris
ggatgtggtcctggaaaattccctg

SEQ ID NO: 155842 - DNA, 25 bp, Canis familiaris
ggatgtcaggccgggaaccatcctt

SEQ ID NO: 155843 - DNA, 25 bp, Canis familiaris
ggagtagtggggcgaggctcctgat

SEQ ID NO: 155844 - DNA, 25 bp, Canis familiaris
ggatattgaatgtgggaggctttga

SEQ ID NO: 155845 - DNA, 25 bp, Canis familiaris
ggatgactgaagtggacaccttctt

SEQ ID NO: 155846 - DNA, 25 bp, Canis familiaris
ggatcagcaacttaggaaacttcat

SEQ ID NO: 155847 - DNA, 25 bp, Canis familiaris
ggatccatacacgaggacatagctt

SEQ ID NO: 155848 - DNA, 25 bp, Canis familiaris
ggatgcctgacaccactatatagat

SEQ ID NO: 155849 - DNA, 25 bp, Canis familiaris
ggatgcactgtactgaccaatgaaa

SEQ ID NO: 155850 - DNA, 25 bp, Canis familiaris
ggatgcctaaaactgccaaagccac

SEQ ID NO: 155851 - DNA, 25 bp, Canis familiaris
ggatccccagcagggtatggagtct

SEQ ID NO: 155852 - DNA, 25 bp, Canis familiaris
ggatcccctggggagtggggtcatc

SEQ ID NO: 155853 - DNA, 25 bp, Canis familiaris
ggattctcgggagaggggagctctg

SEQ ID NO: 155854 - DNA, 25 bp, Canis familiaris
ggattcccggatctgagcaggagcc

SEQ ID NO: 155855 - DNA, 25 bp, Canis familiaris
ggataactcggtcttcagtgagcac

SEQ ID NO: 155856 - DNA, 25 bp, Canis familiaris
ggatccaacaacccttcaggaatca

SEQ ID NO: 155857 - DNA, 25 bp, Canis familiaris
ggatcacagatatcacctctgcaca

SEQ ID NO: 155858 - DNA, 25 bp, Canis familiaris
ggattatgcatatacacctgtagaa

SEQ ID NO: 155859 - DNA, 25 bp, Canis familiaris
ggcgggaataccacaataagacgag

SEQ ID NO: 155860 - DNA, 25 bp, Canis familiaris
ggagggaagaccagaattcccctga

SEQ ID NO: 155861 - DNA, 25 bp, Canis familiaris
ggaggcaaaaccggaagaccttatg

SEQ ID NO: 155862 - DNA, 25 bp, Canis familiaris
ggaggcctgcaatgggtcaacctct

SEQ ID NO: 155863 - DNA, 25 bp, Canis familiaris
ggatgtggacaaaggggaaccctct

SEQ ID NO: 155864 - DNA, 25 bp, Canis familiaris
ggatgactggacagggtacacccct

SEQ ID NO: 155865 - DNA, 25 bp, Canis familiaris
ggatgcacgtgagccggtacaatgg

SEQ ID NO: 155866 - DNA, 25 bp, Canis familiaris
ggatctttgagtctggtgtcacatg

SEQ ID NO: 155867 - DNA, 25 bp, Canis familiaris
ggattcattagggtggagcccaggt

SEQ ID NO: 155868 - DNA, 25 bp, Canis familiaris
ggattattaagcttattcaccaaat

SEQ ID NO: 155869 - DNA, 25 bp, Canis familiaris
ggattatcataagctttaccaggtg

SEQ ID NO: 155870 - DNA, 25 bp, Canis familiaris
ggatatattaatatttaccacgatt

SEQ ID NO: 155871 - DNA, 25 bp, Canis familiaris
ggattttttagtatcacactctcta

SEQ ID NO: 155872 - DNA, 25 bp, Canis familiaris
ggattttcttttttcacatttgctg

SEQ ID NO: 155873 - DNA, 25 bp, Canis familiaris
ggatttgcctttgtctgaactatgg

SEQ ID NO: 155874 - DNA, 25 bp, Canis familiaris
ggatgtccggagagtcttactgttg

SEQ ID NO: 155875 - DNA, 25 bp, Canis familiaris
ggatccaccgtgaagtttaccagtc

SEQ ID NO: 155876 - DNA, 25 bp, Canis familiaris
ggattaccagtgaaactgacccatt

SEQ ID NO: 155877 - DNA, 25 bp, Canis familiaris
ggattaccggtattgtgacctcagg

SEQ ID NO: 155878 - DNA, 25 bp, Canis familiaris
ggattacaggtgcatttgacattac

SEQ ID NO: 155879 - DNA, 25 bp, Canis familiaris
ggatttcctgtgctgttacactacc

SEQ ID NO: 155880 - DNA, 25 bp, Canis familiaris
ggatctttcttcatttagcagttca

SEQ ID NO: 155881 - DNA, 25 bp, Canis familiaris
ggatttcctataactacaagtcttc

SEQ ID NO: 155882 - DNA, 25 bp, Canis familiaris
ggattttctactccataatataccc

SEQ ID NO: 155883 - DNA, 25 bp, Canis familiaris
ggagtaatttgctcaataaacccca

SEQ ID NO: 155884 - DNA, 25 bp, Canis familiaris
ggagttggcaagcttaacaaaccca

SEQ ID NO: 155885 - DNA, 25 bp, Canis familiaris
ggagttggaaccagtgaacaggcac

SEQ ID NO: 155886 - DNA, 25 bp, Canis familiaris
ggagattttcccgggataacacacg

SEQ ID NO: 155887 - DNA, 25 bp, Canis familiaris
ggagtaaccttcaacgtaaccactg

SEQ ID NO: 155888 - DNA, 25 bp, Canis familiaris
ggagtacaaccatggtctgaacccg

SEQ ID NO: 155889 - DNA, 25 bp, Canis familiaris
ggattaaacacatggtccccagtcg

SEQ ID NO: 155890 - DNA, 25 bp, Canis familiaris
ggattaagagcctatgtgtccccgt

SEQ ID NO: 155891 - DNA, 25 bp, Canis familiaris
ggatctgaagaggaaggcggcccgg

SEQ ID NO: 155892 - DNA, 25 bp, Canis familiaris
ggatctctgaagagagccttccgcc

SEQ ID NO: 155893 - DNA, 25 bp, Canis familiaris
ggatttgagagctggcacttccggt

SEQ ID NO: 155894 - DNA, 25 bp, Canis familiaris
ggatcctgatattgggacctcacag

SEQ ID NO: 155895 - DNA, 25 bp, Canis familiaris
ggatcactatattgtaacacctgaa

SEQ ID NO: 155896 - DNA, 25 bp, Canis familiaris
ggatctctaagggcaacacaattga

SEQ ID NO: 155897 - DNA, 25 bp, Canis familiaris
ggatccagagggaacccagattgtt

SEQ ID NO: 155898 - DNA, 25 bp, Canis familiaris
ggatccagatccatgacactgcttt

SEQ ID NO: 155899 - DNA, 25 bp, Canis familiaris
ggatccaatgtcatgcagaccttca

SEQ ID NO: 155900 - DNA, 25 bp, Canis familiaris
ggattactgcctagctgagccaaac

SEQ ID NO: 155901 - DNA, 25 bp, Canis familiaris
ggattttccagggatcacatcacac

SEQ ID NO: 155902 - DNA, 25 bp, Canis familiaris
ggatctgccccaggaatgctatacc

SEQ ID NO: 155903 - DNA, 25 bp, Canis familiaris
ggatgccagcaccaggagatgcaat

SEQ ID NO: 155904 - DNA, 25 bp, Canis familiaris
ggatctcagcaaaggagtccatctt

SEQ ID NO: 155905 - DNA, 25 bp, Canis familiaris
ggattaaattggatactgcttctaa

SEQ ID NO: 155906 - DNA, 25 bp, Canis familiaris
ggattcacgctgtgattactgcctt

SEQ ID NO: 155907 - DNA, 25 bp, Canis familiaris
ggatctgtcctacaatacagcctct

SEQ ID NO: 155908 - DNA, 25 bp, Canis familiaris
ggatcaccctaataaagacttcaga

SEQ ID NO: 155909 - DNA, 25 bp, Canis familiaris
ggataccttacggacaagagctaca

SEQ ID NO: 155910 - DNA, 25 bp, Canis familiaris
ggatcacctagctccaaaggttaga

SEQ ID NO: 155911 - DNA, 25 bp, Canis familiaris
ggatgtcctacatccaaaccttgcc

SEQ ID NO: 155912 - DNA, 25 bp, Canis familiaris
ggatatcccaatagcaatacccatt

SEQ ID NO: 155913 - DNA, 25 bp, Canis familiaris
ggattccatggataaagctgccaat

SEQ ID NO: 155914 - DNA, 25 bp, Canis familiaris
ggatttttaaattgcagctcagaat

SEQ ID NO: 155915 - DNA, 25 bp, Canis familiaris
ggattttaagtgtagcactcctatc

SEQ ID NO: 155916 - DNA, 25 bp, Canis familiaris
ggattcttaaggtgacctgagaccc

SEQ ID NO: 155917 - DNA, 25 bp, Canis familiaris
ggattcttgattttgggcatctggt

SEQ ID NO: 155918 - DNA, 25 bp, Canis familiaris
ggatcttggattgatgactgccatg

SEQ ID NO: 155919 - DNA, 25 bp, Canis familiaris
ggatccgagatttgaacgactgcca

SEQ ID NO: 155920 - DNA, 25 bp, Canis familiaris
ggatccgagatttgatcgtctgcca

SEQ ID NO: 155921 - DNA, 25 bp, Canis familiaris
ggattctgagtctagtcctgaaacc

SEQ ID NO: 155922 - DNA, 25 bp, Canis familiaris
ggatttgaggagctctcgcgagacc

SEQ ID NO: 155923 - DNA, 25 bp, Canis familiaris
ggagaagacgggttccaagcaccgg

SEQ ID NO: 155924 - DNA, 25 bp, Canis familiaris
ggattaacaaatttcgaacaccagg

SEQ ID NO: 155925 - DNA, 25 bp, Canis familiaris
ggataaggcaaacatggtacacaca

SEQ ID NO: 155926 - DNA, 25 bp, Canis familiaris
ggatgaacgaagatattctacacac

SEQ ID NO: 155927 - DNA, 25 bp, Canis familiaris
ggattacgctttctatatacaactt

SEQ ID NO: 155928 - DNA, 25 bp, Canis familiaris
ggataatcttttcaacaaatggtat

SEQ ID NO: 155929 - DNA, 25 bp, Canis familiaris
ggataacagtctatatacaaaagta

SEQ ID NO: 155930 - DNA, 25 bp, Canis familiaris
ggatacacagtctctagatcaaaca

SEQ ID NO: 155931 - DNA, 25 bp, Canis familiaris
ggattgcatgagtctggctgtgtct

SEQ ID NO: 155932 - DNA, 25 bp, Canis familiaris
ggattgcaggacacattattcttac

SEQ ID NO: 155933 - DNA, 25 bp, Canis familiaris
ggattccagaaggcactgttctaac

SEQ ID NO: 155934 - DNA, 25 bp, Canis familiaris
ggattctcagagagccctctggggc

SEQ ID NO: 155935 - DNA, 25 bp, Canis familiaris
ggatcctcagataacaattcttggt

SEQ ID NO: 155936 - DNA, 25 bp, Canis familiaris
ggatctgctactgacaactttgagg

SEQ ID NO: 155937 - DNA, 25 bp, Canis familiaris
ggatatctggtgagcaactatgtga

SEQ ID NO: 155938 - DNA, 25 bp, Canis familiaris
ggatcctggtgaatcccttgtgtca

SEQ ID NO: 155939 - DNA, 25 bp, Canis familiaris
ggattattgtgttccacgtgcttta

SEQ ID NO: 155940 - DNA, 25 bp, Canis familiaris
ggattcatgcttcttcatttttcta

SEQ ID NO: 155941 - DNA, 25 bp, Canis familiaris
ggatctcagctgctatttttaaccc

SEQ ID NO: 155942 - DNA, 25 bp, Canis familiaris
ggatgctcctggatcttggatgcac

SEQ ID NO: 155943 - DNA, 25 bp, Canis familiaris
ggatgatcctgcttggttgtgactc

SEQ ID NO: 155944 - DNA, 25 bp, Canis familiaris
ggatactgctggggtatgcggtctg

SEQ ID NO: 155945 - DNA, 25 bp, Canis familiaris
ggataggcgcagagtcgctttctga

SEQ ID NO: 155946 - DNA, 25 bp, Canis familiaris
ggattggtggttacgcatttctgat

SEQ ID NO: 155947 - DNA, 25 bp, Canis familiaris
ggatatggtggtggaggacctggat

SEQ ID NO: 155948 - DNA, 25 bp, Canis familiaris
ggatatggtgacagtggggatggct

SEQ ID NO: 155949 - DNA, 25 bp, Canis familiaris
ggatagtgtcgcaggggagctccaa

SEQ ID NO: 155950 - DNA, 25 bp, Canis familiaris
ggatcaggtgccatattgggctccc

SEQ ID NO: 155951 - DNA, 25 bp, Canis familiaris
ggattgattccttcatagggctctg

SEQ ID NO: 155952 - DNA, 25 bp, Canis familiaris
ggattgatccacagtaggccattaa

SEQ ID NO: 155953 - DNA, 25 bp, Canis familiaris
ggattaccaaaggacaggatatgta

SEQ ID NO: 155954 - DNA, 25 bp, Canis familiaris
ggatctcacacatactacgcaatat

SEQ ID NO: 155955 - DNA, 25 bp, Canis familiaris
ggatccaaatgttccactcaatctc

SEQ ID NO: 155956 - DNA, 25 bp, Canis familiaris
ggatctgagaggatgccccatattc

SEQ ID NO: 155957 - DNA, 25 bp, Canis familiaris
ggatcagaaaggtccggattctctg

SEQ ID NO: 155958 - DNA, 25 bp, Canis familiaris
ggatcagaacatttccctatgtccg

SEQ ID NO: 155959 - DNA, 25 bp, Canis familiaris
ggataattcagactccagctatgaa

SEQ ID NO: 155960 - DNA, 25 bp, Canis familiaris
ggatactgccagtaccagttgaaga

SEQ ID NO: 155961 - DNA, 25 bp, Canis familiaris
ggatcctgccaaatttcctgaagca

SEQ ID NO: 155962 - DNA, 25 bp, Canis familiaris
ggatttggcacatcttcttgaagga

SEQ ID NO: 155963 - DNA, 25 bp, Canis familiaris
ggattttgagcattctttaaagacc

SEQ ID NO: 155964 - DNA, 25 bp, Canis familiaris
ggattttgagacatgttttggacgg

SEQ ID NO: 155965 - DNA, 25 bp, Canis familiaris
ggattgttgaacaagatgcttttca

SEQ ID NO: 155966 - DNA, 25 bp, Canis familiaris
ggattttgacaattgttctttcaac

SEQ ID NO: 155967 - DNA, 25 bp, Canis familiaris
ggattttgtcaaatgctctttctga

SEQ ID NO: 155968 - DNA, 25 bp, Canis familiaris
ggattgttataatttcatttgcttt

SEQ ID NO: 155969 - DNA, 25 bp, Canis familiaris
ggattttatacccttgtgtctgtgt

SEQ ID NO: 155970 - DNA, 25 bp, Canis familiaris
ggattaaaccgggctgttcagtctt

SEQ ID NO: 155971 - DNA, 25 bp, Canis familiaris
ggattcacaaccaacctgttaacca

SEQ ID NO: 155972 - DNA, 25 bp, Canis familiaris
ggattcacaaccaacctgttaacca

SEQ ID NO: 155973 - DNA, 25 bp, Canis familiaris
ggatgcttaaacaccttgggagcct

SEQ ID NO: 155974 - DNA, 25 bp, Canis familiaris
ggattttacattgccttcaggtgcc

SEQ ID NO: 155975 - DNA, 25 bp, Canis familiaris
ggattttcatctcggctttgagact

SEQ ID NO: 155976 - DNA, 25 bp, Canis familiaris
ggattcatccatgtggtgcatctag

SEQ ID NO: 155977 - DNA, 25 bp, Canis familiaris
ggattcatgccttcaggcttatgaa

SEQ ID NO: 155978 - DNA, 25 bp, Canis familiaris
ggatatcccaacaggtatgacacca

SEQ ID NO: 155979 - DNA, 25 bp, Canis familiaris
ggattcccacacgtggtgatgttac

SEQ ID NO: 155980 - DNA, 25 bp, Canis familiaris
ggatacacccacctcagaggttaca

SEQ ID NO: 155981 - DNA, 25 bp, Canis familiaris
ggattccccagtgagaggagtcaga

SEQ ID NO: 155982 - DNA, 25 bp, Canis familiaris
ggattccctgagttgaggagaccaa

SEQ ID NO: 155983 - DNA, 25 bp, Canis familiaris
ggattacactcagttcacgaaccag

SEQ ID NO: 155984 - DNA, 25 bp, Canis familiaris
ggattgccctacatggcacaaccag

SEQ ID NO: 155985 - DNA, 25 bp, Canis familiaris
ggatatgcagactacagtggccaac

SEQ ID NO: 155986 - DNA, 25 bp, Canis familiaris
ggatatggatgctactgaggaagga

SEQ ID NO: 155987 - DNA, 25 bp, Canis familiaris
ggatatggtgctatgggatggctat

SEQ ID NO: 155988 - DNA, 25 bp, Canis familiaris
ggatatgtgtccttgggattaaaaa

SEQ ID NO: 155989 - DNA, 25 bp, Canis familiaris
ggattcagtctcctgtggtctaaag

SEQ ID NO: 155990 - DNA, 25 bp, Canis familiaris
ggatttgattcacgagatttaaacc

SEQ ID NO: 155991 - DNA, 25 bp, Canis familiaris
ggatttgagcgtccgctttctaacc

SEQ ID NO: 155992 - DNA, 25 bp, Canis familiaris
ggatttgaaggacctgttctccgcc

SEQ ID NO: 155993 - DNA, 25 bp, Canis familiaris
ggatttggaggaggcgctggatccc

SEQ ID NO: 155994 - DNA, 25 bp, Canis familiaris
ggatcttggataatgggctcagtca

SEQ ID NO: 155995 - DNA, 25 bp, Canis familiaris
ggatctgggatatgagtcccacatc

SEQ ID NO: 155996 - DNA, 25 bp, Canis familiaris
ggatgagaggattcaggctagcaaa

SEQ ID NO: 155997 - DNA, 25 bp, Canis familiaris
ggatgaagccatttctaagcataat

SEQ ID NO: 155998 - DNA, 25 bp, Canis familiaris
ggataagcctgtacaaacgagtttg

SEQ ID NO: 155999 - DNA, 25 bp, Canis familiaris
ggatcaggttggaaaggtcgtttgc

SEQ ID NO: 156000 - DNA, 25 bp, Canis familiaris
ggacggtgattgggtagccgttggc

SEQ ID NO: 156001 - DNA, 25 bp, Canis familiaris
ggatgccggaggggacgggtggagc

SEQ ID NO: 156002 - DNA, 25 bp, Canis familiaris
ggatccggaagcgtccagggaagag

SEQ ID NO: 156003 - DNA, 25 bp, Canis familiaris
ggatccaggacaagtccagtggtca

SEQ ID NO: 156004 - DNA, 25 bp, Canis familiaris
ggatcaaggctcaagtccagttttg

SEQ ID NO: 156005 - DNA, 25 bp, Canis familiaris
ggataagcatccaaccaattgttta

SEQ ID NO: 156006 - DNA, 25 bp, Canis familiaris
ggataaatctatgctgcaggctttt

SEQ ID NO: 156007 - DNA, 25 bp, Canis familiaris
ggatcataatcttttcaggtggtgc

SEQ ID NO: 156008 - DNA, 25 bp, Canis familiaris
ggatcacaatttaccacctaggcct

SEQ ID NO: 156009 - DNA, 25 bp, Canis familiaris
ggatccaatatgaccccagcattgg

SEQ ID NO: 156010 - DNA, 25 bp, Canis familiaris
ggatgccagagatcaccaggttgtt

SEQ ID NO: 156011 - DNA, 25 bp, Canis familiaris
ggatcctgagattgccagcttgtcg

SEQ ID NO: 156012 - DNA, 25 bp, Canis familiaris
ggatctggatgcttccacttaaggg

SEQ ID NO: 156013 - DNA, 25 bp, Canis familiaris
ggatcgtgatgttccagtacaaggg

SEQ ID NO: 156014 - DNA, 25 bp, Canis familiaris
ggatccgagtctccagtgacaatgt

SEQ ID NO: 156015 - DNA, 25 bp, Canis familiaris
ggatctggcggttatgctgacaatg

SEQ ID NO: 156016 - DNA, 25 bp, Canis familiaris
ggattgccgagttttcacaaggaat

SEQ ID NO: 156017 - DNA, 25 bp, Canis familiaris
ggatccacggtgttcacggaggact

SEQ ID NO: 156018 - DNA, 25 bp, Canis familiaris
ggatatccgtctaacaccagaggac

SEQ ID NO: 156019 - DNA, 25 bp, Canis familiaris
ggatacggtatttactcagagtata

SEQ ID NO: 156020 - DNA, 25 bp, Canis familiaris
ggatacggtttgttatgcagaatta

SEQ ID NO: 156021 - DNA, 25 bp, Canis familiaris
ggatttggtattttattgagtgcac

SEQ ID NO: 156022 - DNA, 25 bp, Canis familiaris
ggattttatatatttactcacgaga

SEQ ID NO: 156023 - DNA, 25 bp, Canis familiaris
ggattttagtgtttgccatcaccag

SEQ ID NO: 156024 - DNA, 25 bp, Canis familiaris
ggattttggctatttgcagcaccta

SEQ ID NO: 156025 - DNA, 25 bp, Canis familiaris
ggattctttccatttgcatttgttt

SEQ ID NO: 156026 - DNA, 25 bp, Canis familiaris
ggatatgctttgtgttgctttatta

SEQ ID NO: 156027 - DNA, 25 bp, Canis familiaris
ggattctttttgattctttatttgt

SEQ ID NO: 156028 - DNA, 25 bp, Canis familiaris
ggattttgatttctctctcaatttt

SEQ ID NO: 156029 - DNA, 25 bp, Canis familiaris
ggattacttgaacatttaatatttg

SEQ ID NO: 156030 - DNA, 25 bp, Canis familiaris
ggattagcatgtaacctgtaatatt

SEQ ID NO: 156031 - DNA, 25 bp, Canis familiaris
ggattcacattggtttgtagcattt

SEQ ID NO: 156032 - DNA, 25 bp, Canis familiaris
ggattcagaccttcttggagttttt

SEQ ID NO: 156033 - DNA, 25 bp, Canis familiaris
ggatctgaactttttcagtttatat

SEQ ID NO: 156034 - DNA, 25 bp, Canis familiaris
ggatccacgccttttgagggctatt

SEQ ID NO: 156035 - DNA, 25 bp, Canis familiaris
ggatccggacttgccataactattt

SEQ ID NO: 156036 - DNA, 25 bp, Canis familiaris
ggatccctgtttgccattattgata

SEQ ID NO: 156037 - DNA, 25 bp, Canis familiaris
ggatgccggtttgccagatgggacc

SEQ ID NO: 156038 - DNA, 25 bp, Canis familiaris
ggatgccagcggttccaaagtgggc

SEQ ID NO: 156039 - DNA, 25 bp, Canis familiaris
ggatccagcttccttctgaaaaggc

SEQ ID NO: 156040 - DNA, 25 bp, Canis familiaris
ggatcccttgtccctgataataggc

SEQ ID NO: 156041 - DNA, 25 bp, Canis familiaris
ggatacctattcccttgaagcagtc

SEQ ID NO: 156042 - DNA, 25 bp, Canis familiaris
ggatccctattacaggaacagcatg

SEQ ID NO: 156043 - DNA, 25 bp, Canis familiaris
ggagtcctcccactggagtaaatgc

SEQ ID NO: 156044 - DNA, 25 bp, Canis familiaris
ggatgcccttactggatgtcaagac

SEQ ID NO: 156045 - DNA, 25 bp, Canis familiaris
ggatcccaaatctctgcagtgaaca

SEQ ID NO: 156046 - DNA, 25 bp, Canis familiaris
ggatctctaagacactgcagcggac

SEQ ID NO: 156047 - DNA, 25 bp, Canis familiaris
ggatctcaagtactatcgaccaact

SEQ ID NO: 156048 - DNA, 25 bp, Canis familiaris
ggatccagactccgtggagcgaatc

SEQ ID NO: 156049 - DNA, 25 bp, Canis familiaris
ggatcacatcacagtttcaggagat

SEQ ID NO: 156050 - DNA, 25 bp, Canis familiaris
ggataatcatcatcctccgggtgaa

SEQ ID NO: 156051 - DNA, 25 bp, Canis familiaris
ggataagctctagacacggtggata

SEQ ID NO: 156052 - DNA, 25 bp, Canis familiaris
ggatattctctaagacaccctgaaa

SEQ ID NO: 156053 - DNA, 25 bp, Canis familiaris
ggatgcttgcacaaaactgccttaa

SEQ ID NO: 156054 - DNA, 25 bp, Canis familiaris
ggatttccgcatacagctggtacaa

SEQ ID NO: 156055 - DNA, 25 bp, Canis familiaris
ggatttcattcattcgctcaacaaa

SEQ ID NO: 156056 - DNA, 25 bp, Canis familiaris
ggatttcagtcattcgctctgacgc

SEQ ID NO: 156057 - DNA, 25 bp, Canis familiaris
ggatttctgtcaccacttgatggct

SEQ ID NO: 156058 - DNA, 25 bp, Canis familiaris
ggatttgctgccagactgtgggctc

SEQ ID NO: 156059 - DNA, 25 bp, Canis familiaris
ggatcttccccgatgtgggtggatt

SEQ ID NO: 156060 - DNA, 25 bp, Canis familiaris
ggatcctcccatttggagggggatc

SEQ ID NO: 156061 - DNA, 25 bp, Canis familiaris
ggacctcaagcttgcttgcgggacc

SEQ ID NO: 156062 - DNA, 25 bp, Canis familiaris
ggatcgtgaagaactcgtggggccc

SEQ ID NO: 156063 - DNA, 25 bp, Canis familiaris
ggatctgtcactaacttgctgcgtg

SEQ ID NO: 156064 - DNA, 25 bp, Canis familiaris
ggatgttcctacatcatctcgctta

SEQ ID NO: 156065 - DNA, 25 bp, Canis familiaris
ggatttcacatattgtgtctccttc

SEQ ID NO: 156066 - DNA, 25 bp, Canis familiaris
ggatattctatattgttccctctgc

SEQ ID NO: 156067 - DNA, 25 bp, Canis familiaris
ggatttctttgggatcacatcttcg

SEQ ID NO: 156068 - DNA, 25 bp, Canis familiaris
ggatttcttcatccggcagattcac

SEQ ID NO: 156069 - DNA, 25 bp, Canis familiaris
ggattttgtgcctgtgcagattgca

SEQ ID NO: 156070 - DNA, 25 bp, Canis familiaris
ggatgctgttgagcacattgcagct

SEQ ID NO: 156071 - DNA, 25 bp, Canis familiaris
ggatgggctgaaacacatgcgtgtg

SEQ ID NO: 156072 - DNA, 25 bp, Canis familiaris
ggatgcctggatggctcaatggttg

SEQ ID NO: 156073 - DNA, 25 bp, Canis familiaris
ggatgcaatggcttctcagatcata

SEQ ID NO: 156074 - DNA, 25 bp, Canis familiaris
ggatcacattgctcaagcctgagcc

SEQ ID NO: 156075 - DNA, 25 bp, Canis familiaris
ggatggcacatctcacatgtctgag

SEQ ID NO: 156076 - DNA, 25 bp, Canis familiaris
ggatgcccagatccgggctgaggat

SEQ ID NO: 156077 - DNA, 25 bp, Canis familiaris
ggatctcgcagttctgctgagtgga

SEQ ID NO: 156078 - DNA, 25 bp, Canis familiaris
ggatcatcatcacactcatggtaca

SEQ ID NO: 156079 - DNA, 25 bp, Canis familiaris
ggatctctaaaccaagtacattttt

SEQ ID NO: 156080 - DNA, 25 bp, Canis familiaris
ggatcttaaataatattacttttgg

SEQ ID NO: 156081 - DNA, 25 bp, Canis familiaris
ggatttgaaaatatattgtcttatg

SEQ ID NO: 156082 - DNA, 25 bp, Canis familiaris
ggatttacaaatgctttccttctcc

SEQ ID NO: 156083 - DNA, 25 bp, Canis familiaris
ggatttggatagcactgttcctatt

SEQ ID NO: 156084 - DNA, 25 bp, Canis familiaris
ggatttggcacagtagggctgccta

SEQ ID NO: 156085 - DNA, 25 bp, Canis familiaris
ggagtcggacctgggtctgagtgca

SEQ ID NO: 156086 - DNA, 25 bp, Canis familiaris
ggatgtcaggaaatggggctagcta

SEQ ID NO: 156087 - DNA, 25 bp, Canis familiaris
ggatgtatagttattgccttgctaa

SEQ ID NO: 156088 - DNA, 25 bp, Canis familiaris
ggatatccagctgtttaaatgtgaa

SEQ ID NO: 156089 - DNA, 25 bp, Canis familiaris
ggatatctcattgctttcagatagg

SEQ ID NO: 156090 - DNA, 25 bp, Canis familiaris
ggatacttttcttctctgataatca

SEQ ID NO: 156091 - DNA, 25 bp, Canis familiaris
ggatacttcctccaacgagattgca

SEQ ID NO: 156092 - DNA, 25 bp, Canis familiaris
ggatacttttcacagaattggaagg

SEQ ID NO: 156093 - DNA, 25 bp, Canis familiaris
ggatagacctaacaatcattggaaa

SEQ ID NO: 156094 - DNA, 25 bp, Canis familiaris
ggatagccctaatatttctgacaat

SEQ ID NO: 156095 - DNA, 25 bp, Canis familiaris
ggatttcccaaattatcttacgtat

SEQ ID NO: 156096 - DNA, 25 bp, Canis familiaris
ggatttcctcacttatgatgtcttg

SEQ ID NO: 156097 - DNA, 25 bp, Canis familiaris
ggatcctcgtatttgtgattctctg

SEQ ID NO: 156098 - DNA, 25 bp, Canis familiaris
ggagcacatgctgaaggattacctg

SEQ ID NO: 156099 - DNA, 25 bp, Canis familiaris
ggatcctgtagaatgaagcgcacgt

SEQ ID NO: 156100 - DNA, 25 bp, Canis familiaris
ggatccattatgggagagccacagt

SEQ ID NO: 156101 - DNA, 25 bp, Canis familiaris
ggatccattactaagcatgtcatac

SEQ ID NO: 156102 - DNA, 25 bp, Canis familiaris
ggatgccaggatcaatgcttacatt

SEQ ID NO: 156103 - DNA, 25 bp, Canis familiaris
ggatgcccagattgattctaaatta

SEQ ID NO: 156104 - DNA, 25 bp, Canis familiaris
ggatcccatgcaggctatttctatt

SEQ ID NO: 156105 - DNA, 25 bp, Canis familiaris
ggatcccagggccattgtccctgga

SEQ ID NO: 156106 - DNA, 25 bp, Canis familiaris
ggataccaggatggttaccacggat

SEQ ID NO: 156107 - DNA, 25 bp, Canis familiaris
ggatacctatgaggcattgactcag

SEQ ID NO: 156108 - DNA, 25 bp, Canis familiaris
ggataggctatggctagtcctcagc

SEQ ID NO: 156109 - DNA, 25 bp, Canis familiaris
ggatattcttgagcgtctctatcct

SEQ ID NO: 156110 - DNA, 25 bp, Canis familiaris
ggattatttgcaggtgtcttccctc

SEQ ID NO: 156111 - DNA, 25 bp, Canis familiaris
ggatttttagcagtccttatcctca

SEQ ID NO: 156112 - DNA, 25 bp, Canis familiaris
ggattttctgaaatggttactccat

SEQ ID NO: 156113 - DNA, 25 bp, Canis familiaris
ggattttctacgaatgtttgctcac

SEQ ID NO: 156114 - DNA, 25 bp, Canis familiaris
ggatttcttacattgagtttcatat

SEQ ID NO: 156115 - DNA, 25 bp, Canis familiaris
ggattttcatacttgggcttacaga

SEQ ID NO: 156116 - DNA, 25 bp, Canis familiaris
ggattaccattctgggcctgaggaa

SEQ ID NO: 156117 - DNA, 25 bp, Canis familiaris
ggatctcaccatgtgtggagcctga

SEQ ID NO: 156118 - DNA, 25 bp, Canis familiaris
ggatatgcacctgtgctgggattgt

SEQ ID NO: 156119 - DNA, 25 bp, Canis familiaris
ggatataccttgccctgaattttcc

SEQ ID NO: 156120 - DNA, 25 bp, Canis familiaris
ggatcatagtctattatactatttc

SEQ ID NO: 156121 - DNA, 25 bp, Canis familiaris
ggatatggtttcatcaacaggaatg

SEQ ID NO: 156122 - DNA, 25 bp, Canis familiaris
ggatagttttaagagcaggccaatg

SEQ ID NO: 156123 - DNA, 25 bp, Canis familiaris
ggataattttagaaccagcccgtgg

SEQ ID NO: 156124 - DNA, 25 bp, Canis familiaris
ggatccattgtctttaagcagccct

SEQ ID NO: 156125 - DNA, 25 bp, Canis familiaris
ggatatcttgtcttaaactgttctt

SEQ ID NO: 156126 - DNA, 25 bp, Canis familiaris
ggatatttctcatacagtcttttgc

SEQ ID NO: 156127 - DNA, 25 bp, Canis familiaris
ggatatttgtcaagagggtcttcgg

SEQ ID NO: 156128 - DNA, 25 bp, Canis familiaris
ggattatcttctggagagagtcccg

SEQ ID NO: 156129 - DNA, 25 bp, Canis familiaris
ggatgttccctcggatatataccag

SEQ ID NO: 156130 - DNA, 25 bp, Canis familiaris
ggatgactccccgagatacgagaag

SEQ ID NO: 156131 - DNA, 25 bp, Canis familiaris
ggatcagcccccaagaatgggtgca

SEQ ID NO: 156132 - DNA, 25 bp, Canis familiaris
ggatcgccagcctggaagtggagaa

SEQ ID NO: 156133 - DNA, 25 bp, Canis familiaris
ggatcagcactccggaagactggat

SEQ ID NO: 156134 - DNA, 25 bp, Canis familiaris
ggatgcagcactgggctgccaggat

SEQ ID NO: 156135 - DNA, 25 bp, Canis familiaris
ggatcagatgcagtcacagccaggg

SEQ ID NO: 156136 - DNA, 25 bp, Canis familiaris
ggatcagatggatgcagacattatc

SEQ ID NO: 156137 - DNA, 25 bp, Canis familiaris
ggatcagctgttccgtatattctcc

SEQ ID NO: 156138 - DNA, 25 bp, Canis familiaris
ggatcgttttctaatctgtatgctt

SEQ ID NO: 156139 - DNA, 25 bp, Canis familiaris
ggatttatttcttaatatacttgga

SEQ ID NO: 156140 - DNA, 25 bp, Canis familiaris
ggattttgttccttatatcactaag

SEQ ID NO: 156141 - DNA, 25 bp, Canis familiaris
ggattttgtttcttgaatatctttc

SEQ ID NO: 156142 - DNA, 25 bp, Canis familiaris
ggatttttctttggaggcttcttct

SEQ ID NO: 156143 - DNA, 25 bp, Canis familiaris
ggatacctaattgctggtgtgtttt

SEQ ID NO: 156144 - DNA, 25 bp, Canis familiaris
ggatccctgagactggggtgtgggg

SEQ ID NO: 156145 - DNA, 25 bp, Canis familiaris
ggatcagtcatgcactgttggtggg

SEQ ID NO: 156146 - DNA, 25 bp, Canis familiaris
ggatcagctagtgcagtgtgttgaa

SEQ ID NO: 156147 - DNA, 25 bp, Canis familiaris
ggatgtcttgctgatgatatttgat

SEQ ID NO: 156148 - DNA, 25 bp, Canis familiaris
ggatttctgtgcatatagtgtagta

SEQ ID NO: 156149 - DNA, 25 bp, Canis familiaris
ggatcttctgtggggacttgggcac

SEQ ID NO: 156150 - DNA, 25 bp, Canis familiaris
ggatttgctgacggtgatttgtgga

SEQ ID NO: 156151 - DNA, 25 bp, Canis familiaris
ggatttgtgatgtctgtaaagtgta

SEQ ID NO: 156152 - DNA, 25 bp, Canis familiaris
ggcttcttagcctgtaagtgtccag

SEQ ID NO: 156153 - DNA, 25 bp, Canis familiaris
ggctgttggacctttaggttccaca

SEQ ID NO: 156154 - DNA, 25 bp, Canis familiaris
ggagagttgactgtaaggcccaaca

SEQ ID NO: 156155 - DNA, 25 bp, Canis familiaris
ggagggtgactggaaggtacccaag

SEQ ID NO: 156156 - DNA, 25 bp, Canis familiaris
ggatgggggcttcaaggacttaaga

SEQ ID NO: 156157 - DNA, 25 bp, Canis familiaris
ggaggagacgggcaccgaagtgaaa

SEQ ID NO: 156158 - DNA, 25 bp, Canis familiaris
ggagggaggccctcctggtgaaaga

SEQ ID NO: 156159 - DNA, 25 bp, Canis familiaris
ggataagaagccaaaagtggatgag

SEQ ID NO: 156160 - DNA, 25 bp, Canis familiaris
ggataaaagtttcagcatggagagc

SEQ ID NO: 156161 - DNA, 25 bp, Canis familiaris
ggacgaccagtcatggacgtgtggg

SEQ ID NO: 156162 - DNA, 25 bp, Canis familiaris
ggaggacacgttgcgttgttgggcc

SEQ ID NO: 156163 - DNA, 25 bp, Canis familiaris
ggacgacaccgtgatgtttcgaccg

SEQ ID NO: 156164 - DNA, 25 bp, Canis familiaris
ggaggcatccctggaacttttgaac

SEQ ID NO: 156165 - DNA, 25 bp, Canis familiaris
ggaggccacactgagttatggtgct

SEQ ID NO: 156166 - DNA, 25 bp, Canis familiaris
ggaggcctagaggagctgtctggga

SEQ ID NO: 156167 - DNA, 25 bp, Canis familiaris
ggaggaatttgcagctgtcagggaa

SEQ ID NO: 156168 - DNA, 25 bp, Canis familiaris
ggagtaatcaggtgtaggatggaaa

SEQ ID NO: 156169 - DNA, 25 bp, Canis familiaris
ggatgtcaaaactttaaaggacaga

SEQ ID NO: 156170 - DNA, 25 bp, Canis familiaris
ggatgtcaaactttaaagtacagaa

SEQ ID NO: 156171 - DNA, 25 bp, Canis familiaris
ggatataaacttcacaagggaggac

SEQ ID NO: 156172 - DNA, 25 bp, Canis familiaris
ggataaagactaccccaggctgata

SEQ ID NO: 156173 - DNA, 25 bp, Canis familiaris
ggatcaacatgacattctccggctt

SEQ ID NO: 156174 - DNA, 25 bp, Canis familiaris
ggatcaggatcgcaagtctcgtctt

SEQ ID NO: 156175 - DNA, 25 bp, Canis familiaris
ggatcaggcatagaaggccttccca

SEQ ID NO: 156176 - DNA, 25 bp, Canis familiaris
ggatcagccaagaacggccttgacc

SEQ ID NO: 156177 - DNA, 25 bp, Canis familiaris
ggatctacacgaacgaccttacacc

SEQ ID NO: 156178 - DNA, 25 bp, Canis familiaris
ggatgtaaagtgacctcctggcacc

SEQ ID NO: 156179 - DNA, 25 bp, Canis familiaris
ggatgaaaatggtttccggctccgt

SEQ ID NO: 156180 - DNA, 25 bp, Canis familiaris
ggataacaagaactccctggtccgc

SEQ ID NO: 156181 - DNA, 25 bp, Canis familiaris
ggataagaaacacgcactcggtccc

SEQ ID NO: 156182 - DNA, 25 bp, Canis familiaris
ggatatcgaacagctcaccagtctg

SEQ ID NO: 156183 - DNA, 25 bp, Canis familiaris
ggatatgcgaatgttcagctagtag

SEQ ID NO: 156184 - DNA, 25 bp, Canis familiaris
ggatgctgctgaatgtcttactatg

SEQ ID NO: 156185 - DNA, 25 bp, Canis familiaris
ggatgccattaggttatgctatttg

SEQ ID NO: 156186 - DNA, 25 bp, Canis familiaris
ggaggctgccaggattattatttcc

SEQ ID NO: 156187 - DNA, 25 bp, Canis familiaris
ggatagctgcccattgttgaaatgg

SEQ ID NO: 156188 - DNA, 25 bp, Canis familiaris
ggatagctgcccatttgttgataat

SEQ ID NO: 156189 - DNA, 25 bp, Canis familiaris
ggatgcattgctgcttatatttgta

SEQ ID NO: 156190 - DNA, 25 bp, Canis familiaris
ggatcatggatgtctctactttgtc

SEQ ID NO: 156191 - DNA, 25 bp, Canis familiaris
ggatctggaggctggattttactct

SEQ ID NO: 156192 - DNA, 25 bp, Canis familiaris
ggatctgggtagggcagtcttactt

SEQ ID NO: 156193 - DNA, 25 bp, Canis familiaris
ggatagggctgggaggttctgtcct

SEQ ID NO: 156194 - DNA, 25 bp, Canis familiaris
tgtaagggtgggtgtccagcttctg

SEQ ID NO: 156195 - DNA, 25 bp, Canis familiaris
ggctaaggtgggcttccagttgcct

SEQ ID NO: 156196 - DNA, 25 bp, Canis familiaris
ggatcaatggggcagtcattagatt

SEQ ID NO: 156197 - DNA, 25 bp, Canis familiaris
ggatacatggctcgtttagtaatgt

SEQ ID NO: 156198 - DNA, 25 bp, Canis familiaris
ggatcacagccacgttggattcaag

SEQ ID NO: 156199 - DNA, 25 bp, Canis familiaris
ggatagcacctggctgggatgtcac

SEQ ID NO: 156200 - DNA, 25 bp, Canis familiaris
ggatcaggactgccttgaggtcatc

SEQ ID NO: 156201 - DNA, 25 bp, Canis familiaris
ggatgaggaatcgctgctggtcaga

SEQ ID NO: 156202 - DNA, 25 bp, Canis familiaris
ggataggagaggcccgactgagcat

SEQ ID NO: 156203 - DNA, 25 bp, Canis familiaris
ggatctgagagtagcacccactaga

SEQ ID NO: 156204 - DNA, 25 bp, Canis familiaris
ggatatggatgttcacagccctaga

SEQ ID NO: 156205 - DNA, 25 bp, Canis familiaris
ggatatgtatgttccccagtatgta

SEQ ID NO: 156206 - DNA, 25 bp, Canis familiaris
ggatcgttttcccacatgattgata

SEQ ID NO: 156207 - DNA, 25 bp, Canis familiaris
ggatcttctattgcactaattctac

SEQ ID NO: 156208 - DNA, 25 bp, Canis familiaris
ggatattgcattcattctaatttat

SEQ ID NO: 156209 - DNA, 25 bp, Canis familiaris
ggatttgcatttttgtattttgtac

SEQ ID NO: 156210 - DNA, 25 bp, Canis familiaris
ggatttcttctatttatatcgtatt

SEQ ID NO: 156211 - DNA, 25 bp, Canis familiaris
ggatttcttttgtgtgtgcttttta

SEQ ID NO: 156212 - DNA, 25 bp, Canis familiaris
ggatatattgtttgattgttttttg

SEQ ID NO: 156213 - DNA, 25 bp, Canis familiaris
ggatattttttaacttttgattgct

SEQ ID NO: 156214 - DNA, 25 bp, Canis familiaris
ggagctttttaaagacccgacgctg

SEQ ID NO: 156215 - DNA, 25 bp, Canis familiaris
ggagttttctagttacctgtaggct

SEQ ID NO: 156216 - DNA, 25 bp, Canis familiaris
ggagaactttgttgctgaccatcca

SEQ ID NO: 156217 - DNA, 25 bp, Canis familiaris
ggagcaccattactcaggactaccc

SEQ ID NO: 156218 - DNA, 25 bp, Canis familiaris
ggatctccaatacaaactcacacac

SEQ ID NO: 156219 - DNA, 25 bp, Canis familiaris
ggatctccatctccaataagctctc

SEQ ID NO: 156220 - DNA, 25 bp, Canis familiaris
ggatcatcagcccagatatacctcc

SEQ ID NO: 156221 - DNA, 25 bp, Canis familiaris
ggatcaagctctggaatggctccct

SEQ ID NO: 156222 - DNA, 25 bp, Canis familiaris
ggatcttgagctggtcatcctacac

SEQ ID NO: 156223 - DNA, 25 bp, Canis familiaris
ggatcagtagacctcttgcagacaa

SEQ ID NO: 156224 - DNA, 25 bp, Canis familiaris
ggatggctagggacgtcgacaagga

SEQ ID NO: 156225 - DNA, 25 bp, Canis familiaris
ggatagctgacgtccgacgacgtga

SEQ ID NO: 156226 - DNA, 25 bp, Canis familiaris
ggatctggcaagtctccaggaccga

SEQ ID NO: 156227 - DNA, 25 bp, Canis familiaris
ggatgctggaattatccagagccca

SEQ ID NO: 156228 - DNA, 25 bp, Canis familiaris
ggatgctgctgctcttcgcaagctg

SEQ ID NO: 156229 - DNA, 25 bp, Canis familiaris
ggatgctatttcagccaatctggac

SEQ ID NO: 156230 - DNA, 25 bp, Canis familiaris
ggatgatttcttggccaacgaggca

SEQ ID NO: 156231 - DNA, 25 bp, Canis familiaris
ggatattcctggccagaagtctaga

SEQ ID NO: 156232 - DNA, 25 bp, Canis familiaris
ggatttgccttgtctgaagctatgg

SEQ ID NO: 156233 - DNA, 25 bp, Canis familiaris
ggatttgcctggtcatgtgatctca

SEQ ID NO: 156234 - DNA, 25 bp, Canis familiaris
ggatattggtggctgctgactgata

SEQ ID NO: 156235 - DNA, 25 bp, Canis familiaris
ggatttgctgtgtgtgccagaaagt

SEQ ID NO: 156236 - DNA, 25 bp, Canis familiaris
ggatttctgaacgtccagaccaggc

SEQ ID NO: 156237 - DNA, 25 bp, Canis familiaris
ggatgattctaagacctgggcagga

SEQ ID NO: 156238 - DNA, 25 bp, Canis familiaris
ggatattctcgacacagcaggtcaa

SEQ ID NO: 156239 - DNA, 25 bp, Canis familiaris
ggatcttccaaacagacagctcaaa

SEQ ID NO: 156240 - DNA, 25 bp, Canis familiaris
ggatcttcggaatgatgagcacaca

SEQ ID NO: 156241 - DNA, 25 bp, Canis familiaris
ggatgatctcagacaaagatagaac

SEQ ID NO: 156242 - DNA, 25 bp, Canis familiaris
ggatgaccacatcaaaaggcaattt

SEQ ID NO: 156243 - DNA, 25 bp, Canis familiaris
ggatacccaaaacagagtcagtcta

SEQ ID NO: 156244 - DNA, 25 bp, Canis familiaris
ggatacccaacatctgagacacagc

SEQ ID NO: 156245 - DNA, 25 bp, Canis familiaris
ggatactccaatagctcgtacacac

SEQ ID NO: 156246 - DNA, 25 bp, Canis familiaris
ggatacccaaggagatgaagctgaa

SEQ ID NO: 156247 - DNA, 25 bp, Canis familiaris
ggatgctgcccttggtggataatgg

SEQ ID NO: 156248 - DNA, 25 bp, Canis familiaris
ggatcgcaggcggcagatttgaagg

SEQ ID NO: 156249 - DNA, 25 bp, Canis familiaris
ggatcagcgagaacagcatgccaag

SEQ ID NO: 156250 - DNA, 25 bp, Canis familiaris
ggatctgcagagaaaagcccggaga

SEQ ID NO: 156251 - DNA, 25 bp, Canis familiaris
ggatccagctgttatagttgggatg

SEQ ID NO: 156252 - DNA, 25 bp, Canis familiaris
ggatcactgcttttgaggactatgt

SEQ ID NO: 156253 - DNA, 25 bp, Canis familiaris
ggatcactgcttttgaggactatgt

SEQ ID NO: 156254 - DNA, 25 bp, Canis familiaris
ggatcactgcttttgaggactatgt

SEQ ID NO: 156255 - DNA, 25 bp, Canis familiaris
ggatatcttgagttgatggttttgt

SEQ ID NO: 156256 - DNA, 25 bp, Canis familiaris
ggatatcttacacagagtcttcgag

SEQ ID NO: 156257 - DNA, 25 bp, Canis familiaris
ggatatcatctataaggtgcctcac

SEQ ID NO: 156258 - DNA, 25 bp, Canis familiaris
ggatatgacttccaggagtcctctg

SEQ ID NO: 156259 - DNA, 25 bp, Canis familiaris
ggatattattcattggattccagct

SEQ ID NO: 156260 - DNA, 25 bp, Canis familiaris
ggatattttagtctttctgcatgtg

SEQ ID NO: 156261 - DNA, 25 bp, Canis familiaris
ggatcgttttggcaacttcatgctg

SEQ ID NO: 156262 - DNA, 25 bp, Canis familiaris
ggatgaatctccagggacttatgct

SEQ ID NO: 156263 - DNA, 25 bp, Canis familiaris
ggatgacatcttagtaggccctttg

SEQ ID NO: 156264 - DNA, 25 bp, Canis familiaris
ggatccatttggagggcaaattctg

SEQ ID NO: 156265 - DNA, 25 bp, Canis familiaris
ggatagcaagctgaacgagcacgtt

SEQ ID NO: 156266 - DNA, 25 bp, Canis familiaris
ggatacgacggactgaacacgattt

SEQ ID NO: 156267 - DNA, 25 bp, Canis familiaris
ggatagcagatcagacccacagaac

SEQ ID NO: 156268 - DNA, 25 bp, Canis familiaris
ggatcaagcatgagttacaagcaaa

SEQ ID NO: 156269 - DNA, 25 bp, Canis familiaris
ggatcacagtggcttactagcgaca

SEQ ID NO: 156270 - DNA, 25 bp, Canis familiaris
ggatccaggaggactatccactgta

SEQ ID NO: 156271 - DNA, 25 bp, Canis familiaris
ggatcaaggaggatcggcccatcac

SEQ ID NO: 156272 - DNA, 25 bp, Canis familiaris
ggatcgagcgggagcttgcggaagc

SEQ ID NO: 156273 - DNA, 25 bp, Canis familiaris
ggagggagggaacacgggagctctg

SEQ ID NO: 156274 - DNA, 25 bp, Canis familiaris
ggaggaggctgagcaacctggggcc

SEQ ID NO: 156275 - DNA, 25 bp, Canis familiaris
ggatgaaggcagagcgaccgcagtg

SEQ ID NO: 156276 - DNA, 25 bp, Canis familiaris
ggatagcgatgctgaggaccctggt

SEQ ID NO: 156277 - DNA, 25 bp, Canis familiaris
ggatcaggacttgggcatatctttt

SEQ ID NO: 156278 - DNA, 25 bp, Canis familiaris
ggatctggagctggacgatgtcatc

SEQ ID NO: 156279 - DNA, 25 bp, Canis familiaris
ggatatgtggcattgacctgctcgc

SEQ ID NO: 156280 - DNA, 25 bp, Canis familiaris
ggatattgctgcatatcgcgccaag

SEQ ID NO: 156281 - DNA, 25 bp, Canis familiaris
ggatcagttgctaacattgctaagt

SEQ ID NO: 156282 - DNA, 25 bp, Canis familiaris
ggatcatgcttcttgaccattacag

SEQ ID NO: 156283 - DNA, 25 bp, Canis familiaris
ggatctcgctcaagaacatttgctg

SEQ ID NO: 156284 - DNA, 25 bp, Canis familiaris
ggatctggctgcaagaaactgcctg

SEQ ID NO: 156285 - DNA, 25 bp, Canis familiaris
ggatctgctgtgttgaagttgctct

SEQ ID NO: 156286 - DNA, 25 bp, Canis familiaris
ggatctggggtgacactttcagttc

SEQ ID NO: 156287 - DNA, 25 bp, Canis familiaris
ggatcaggaggcaacagccattaaa

SEQ ID NO: 156288 - DNA, 25 bp, Canis familiaris
ggatcggagccatcatcgcgccaaa

SEQ ID NO: 156289 - DNA, 25 bp, Canis familiaris
ggatcagtatccagacatgagtcaa

SEQ ID NO: 156290 - DNA, 25 bp, Canis familiaris
ggatcaggccacagaagcaggacag

SEQ ID NO: 156291 - DNA, 25 bp, Canis familiaris
ggatcaacacacaccaagaacaagg

SEQ ID NO: 156292 - DNA, 25 bp, Canis familiaris
ggatgccaagccaccaaagaaaaaa

SEQ ID NO: 156293 - DNA, 25 bp, Canis familiaris
ggatgacagagacagcgccaatggc

SEQ ID NO: 156294 - DNA, 25 bp, Canis familiaris
ggatgactgaccaagaggctattca

SEQ ID NO: 156295 - DNA, 25 bp, Canis familiaris
ggatgacagccctacagaggaacac

SEQ ID NO: 156296 - DNA, 25 bp, Canis familiaris
ggatgtcgcccacagggatacagag

SEQ ID NO: 156297 - DNA, 25 bp, Canis familiaris
ggatgctcctcatgaaccagatgga

SEQ ID NO: 156298 - DNA, 25 bp, Canis familiaris
ggatcagtctcatgatgagcaccat

SEQ ID NO: 156299 - DNA, 25 bp, Canis familiaris
ggatctgaccatgtgtcacacagca

SEQ ID NO: 156300 - DNA, 25 bp, Canis familiaris
ggatcttcaatgaaggcaaagcacc

SEQ ID NO: 156301 - DNA, 25 bp, Canis familiaris
ggatctccaatatgcctaagagctc

SEQ ID NO: 156302 - DNA, 25 bp, Canis familiaris
ggatcatcaaattccctagcacacg

SEQ ID NO: 156303 - DNA, 25 bp, Canis familiaris
ggatgctcagttaccactagactcc

SEQ ID NO: 156304 - DNA, 25 bp, Canis familiaris
ggatctttgtatccctgcaagtgcc

SEQ ID NO: 156305 - DNA, 25 bp, Canis familiaris
ggatctgcttttaggctccaatgcc

SEQ ID NO: 156306 - DNA, 25 bp, Canis familiaris
ggatctgcttatacttgctacctcc

SEQ ID NO: 156307 - DNA, 25 bp, Canis familiaris
ggatatctgcttattcaacaccacc

SEQ ID NO: 156308 - DNA, 25 bp, Canis familiaris
ggatacatgttatctcttaccaaca

SEQ ID NO: 156309 - DNA, 25 bp, Canis familiaris
ggatacatttcatcatgcatttgcc

SEQ ID NO: 156310 - DNA, 25 bp, Canis familiaris
ggataaactgactagctttcatcaa

SEQ ID NO: 156311 - DNA, 25 bp, Canis familiaris
ggatataacatattcgcctgtgcaa

SEQ ID NO: 156312 - DNA, 25 bp, Canis familiaris
ggatgaaacacattacccattattt

SEQ ID NO: 156313 - DNA, 25 bp, Canis familiaris
ggaggatgactctaaccctctttga

SEQ ID NO: 156314 - DNA, 25 bp, Canis familiaris
ggagggattcaaatgcctactttaa

SEQ ID NO: 156315 - DNA, 25 bp, Canis familiaris
ggatggtattatttccaaccctggt

SEQ ID NO: 156316 - DNA, 25 bp, Canis familiaris
ggatcatttgtatgttaaccactgt

SEQ ID NO: 156317 - DNA, 25 bp, Canis familiaris
ggatgtcttgtttttaattaggctc

SEQ ID NO: 156318 - DNA, 25 bp, Canis familiaris
ggatctgactttgttttctcaaggc

SEQ ID NO: 156319 - DNA, 25 bp, Canis familiaris
ggataaccatttctttgctgagttc

SEQ ID NO: 156320 - DNA, 25 bp, Canis familiaris
ggataaattcttcttcagcatgcat

SEQ ID NO: 156321 - DNA, 25 bp, Canis familiaris
ggataatcacttagctttggatgaa

SEQ ID NO: 156322 - DNA, 25 bp, Canis familiaris
ggatgtatcacctgttgtcctaact

SEQ ID NO: 156323 - DNA, 25 bp, Canis familiaris
ggatgtgcccgatatttccaaatct

SEQ ID NO: 156324 - DNA, 25 bp, Canis familiaris
ggatcccatctatagttcacaagtt

SEQ ID NO: 156325 - DNA, 25 bp, Canis familiaris
ggatcccattccagtggagcaacta

SEQ ID NO: 156326 - DNA, 25 bp, Canis familiaris
ggatcgaatcccacttggcaagttt

SEQ ID NO: 156327 - DNA, 25 bp, Canis familiaris
ggatcgaaccctgtgtggaggagac

SEQ ID NO: 156328 - DNA, 25 bp, Canis familiaris
ggagcggcccgtgtatgaacgaagc

SEQ ID NO: 156329 - DNA, 25 bp, Canis familiaris
ggaggcttctctgtccaaacaaagc

SEQ ID NO: 156330 - DNA, 25 bp, Canis familiaris
ggaggggtctttgcagtgaaggatg

SEQ ID NO: 156331 - DNA, 25 bp, Canis familiaris
ggagggggttggctggaagagacgt

SEQ ID NO: 156332 - DNA, 25 bp, Canis familiaris
ggaggttgcgggtggagaaagattg

SEQ ID NO: 156333 - DNA, 25 bp, Canis familiaris
ggagtttctttggtgcagaaaaaca

SEQ ID NO: 156334 - DNA, 25 bp, Canis familiaris
ggatgtttgtttctggaagcccatg

SEQ ID NO: 156335 - DNA, 25 bp, Canis familiaris
ggatgtctgtgtcctcgtgaaagct

SEQ ID NO: 156336 - DNA, 25 bp, Canis familiaris
ggatctctttactggcagggctgat

SEQ ID NO: 156337 - DNA, 25 bp, Canis familiaris
ggatctgctaaaaggggtggctgac

SEQ ID NO: 156338 - DNA, 25 bp, Canis familiaris
ggatcgttcaacaatggtgggccaa

SEQ ID NO: 156339 - DNA, 25 bp, Canis familiaris
ggatcctccagaaatgggtgtccaa

SEQ ID NO: 156340 - DNA, 25 bp, Canis familiaris
ggatctctctaaggaggcggctgcc

SEQ ID NO: 156341 - DNA, 25 bp, Canis familiaris
ggatctctcatgctctgagggaggc

SEQ ID NO: 156342 - DNA, 25 bp, Canis familiaris
ggatgctctcagtggagccaggggt

SEQ ID NO: 156343 - DNA, 25 bp, Canis familiaris
ggatcactagggaagcacatggcac

SEQ ID NO: 156344 - DNA, 25 bp, Canis familiaris
ggatcaatagggaaggcacaaggca

SEQ ID NO: 156345 - DNA, 25 bp, Canis familiaris
ggatccataggggaggcacagccac

SEQ ID NO: 156346 - DNA, 25 bp, Canis familiaris
ggatcccatagtggaatgccaccac

SEQ ID NO: 156347 - DNA, 25 bp, Canis familiaris
ggatccattagggaagccccaggcc

SEQ ID NO: 156348 - DNA, 25 bp, Canis familiaris
ggatgctttgggaaagtcctagtga

SEQ ID NO: 156349 - DNA, 25 bp, Canis familiaris
ggatgctttgtgtgtggatggggga

SEQ ID NO: 156350 - DNA, 25 bp, Canis familiaris
ggatgatgtctgggagggtgccggc

SEQ ID NO: 156351 - DNA, 25 bp, Canis familiaris
ggatgagccagctgtgggtgggtta

SEQ ID NO: 156352 - DNA, 25 bp, Canis familiaris
ggatgccccaggaggagaggctttc

SEQ ID NO: 156353 - DNA, 25 bp, Canis familiaris
ggatcgcaacatgggttaaggcttt

SEQ ID NO: 156354 - DNA, 25 bp, Canis familiaris
ggatctcaattctgtttggctttct

SEQ ID NO: 156355 - DNA, 25 bp, Canis familiaris
ggatcatgcctttggtgttgtattt

SEQ ID NO: 156356 - DNA, 25 bp, Canis familiaris
ggatagctctatttttagttttttg

SEQ ID NO: 156357 - DNA, 25 bp, Canis familiaris
ggatactctgttaattaggattttt

SEQ ID NO: 156358 - DNA, 25 bp, Canis familiaris
ggatcattcgtttcacttggtttct

SEQ ID NO: 156359 - DNA, 25 bp, Canis familiaris
ggatcctactgttctttggcatttc

SEQ ID NO: 156360 - DNA, 25 bp, Canis familiaris
ggatgcctttgtctttggctatctg

SEQ ID NO: 156361 - DNA, 25 bp, Canis familiaris
ggagttttctccatttttctgaggt

SEQ ID NO: 156362 - DNA, 25 bp, Canis familiaris
ggagataaactcctttgtcttcaag

SEQ ID NO: 156363 - DNA, 25 bp, Canis familiaris
ggatacaaatgaccgatttctacga

SEQ ID NO: 156364 - DNA, 25 bp, Canis familiaris
ggatagccaagattcgattctcaaa

SEQ ID NO: 156365 - DNA, 25 bp, Canis familiaris
ggatccacgacttctattgtcaaag

SEQ ID NO: 156366 - DNA, 25 bp, Canis familiaris
ggatgccacaggactttttcaagag

SEQ ID NO: 156367 - DNA, 25 bp, Canis familiaris
ggatccaatggatactcctatagaa

SEQ ID NO: 156368 - DNA, 25 bp, Canis familiaris
ggatcatgaagcctaagtttaagaa

SEQ ID NO: 156369 - DNA, 25 bp, Canis familiaris
ggatcagaaccgtatgtttgagccc

SEQ ID NO: 156370 - DNA, 25 bp, Canis familiaris
ggatcaggatcccagggtctagcca

SEQ ID NO: 156371 - DNA, 25 bp, Canis familiaris
ggatcggcaccaatcagggtagacc

SEQ ID NO: 156372 - DNA, 25 bp, Canis familiaris
ggatcttcacctttgagggacaccg

SEQ ID NO: 156373 - DNA, 25 bp, Canis familiaris
ggatgcttccaatctgggttcaatc

SEQ ID NO: 156374 - DNA, 25 bp, Canis familiaris
ggatctccacagtgtcttttcattc

SEQ ID NO: 156375 - DNA, 25 bp, Canis familiaris
ggatcacaccaggcatggttttctt

SEQ ID NO: 156376 - DNA, 25 bp, Canis familiaris
ggatccccaactatctgtgtttatc

SEQ ID NO: 156377 - DNA, 25 bp, Canis familiaris
ggatccgtaagcttgtcttaatcta

SEQ ID NO: 156378 - DNA, 25 bp, Canis familiaris
ggatctttaatctgtatgtaccgac

SEQ ID NO: 156379 - DNA, 25 bp, Canis familiaris
ggatctttgatttgcctttaaccag

SEQ ID NO: 156380 - DNA, 25 bp, Canis familiaris
ggatgctgtttttccattctacacc

SEQ ID NO: 156381 - DNA, 25 bp, Canis familiaris
ggataatcattttactttgacacac

SEQ ID NO: 156382 - DNA, 25 bp, Canis familiaris
ggataatttgtttgatttccaccaa

SEQ ID NO: 156383 - DNA, 25 bp, Canis familiaris
ggatacgttaaccagtttctccaca

SEQ ID NO: 156384 - DNA, 25 bp, Canis familiaris
ggatactgtacaacgagttgtccca

SEQ ID NO: 156385 - DNA, 25 bp, Canis familiaris
ggatgggtacttgagttgtatccat

SEQ ID NO: 156386 - DNA, 25 bp, Canis familiaris
ggatgggtattaaactcttcaggca

SEQ ID NO: 156387 - DNA, 25 bp, Canis familiaris
ggatcggataatcacagccatctac

SEQ ID NO: 156388 - DNA, 25 bp, Canis familiaris
ggatcaggaaaggacctctccataa

SEQ ID NO: 156389 - DNA, 25 bp, Canis familiaris
ggatcagaagacttactcccgagaa

SEQ ID NO: 156390 - DNA, 25 bp, Canis familiaris
ggatcaggagacatcttccgcgata

SEQ ID NO: 156391 - DNA, 25 bp, Canis familiaris
ggagaatgaggcatctccacgcgca

SEQ ID NO: 156392 - DNA, 25 bp, Canis familiaris
ggagaatgaggcatctccacgcgca

SEQ ID NO: 156393 - DNA, 25 bp, Canis familiaris
ggatgaatttgctgccatcccagcc

SEQ ID NO: 156394 - DNA, 25 bp, Canis familiaris
ggatgagattaaccgtcgcacagcc

SEQ ID NO: 156395 - DNA, 25 bp, Canis familiaris
ggatgagatcttgtcatttgcaaca

SEQ ID NO: 156396 - DNA, 25 bp, Canis familiaris
ggatcaactgatttttgtctacaaa

SEQ ID NO: 156397 - DNA, 25 bp, Canis familiaris
ggatgaagatgctaccttttaaaga

SEQ ID NO: 156398 - DNA, 25 bp, Canis familiaris
ggatgacactgggaattttataaat

SEQ ID NO: 156399 - DNA, 25 bp, Canis familiaris
ggatgacctggttatcttgatttgc

SEQ ID NO: 156400 - DNA, 25 bp, Canis familiaris
ggatgacctggtgaaagtctggaag

SEQ ID NO: 156401 - DNA, 25 bp, Canis familiaris
ggatgtcgttggtatcaattgcacg

SEQ ID NO: 156402 - DNA, 25 bp, Canis familiaris
ggatgtcgcaataatacaaaccagt

SEQ ID NO: 156403 - DNA, 25 bp, Canis familiaris
ggatgaccagataatacaatcagtt

SEQ ID NO: 156404 - DNA, 25 bp, Canis familiaris
ggatggtcgatttgcaagacagtat

SEQ ID NO: 156405 - DNA, 25 bp, Canis familiaris
ggatgcatgttttccaagaccttgc

SEQ ID NO: 156406 - DNA, 25 bp, Canis familiaris
ggatgtgtagtctgaaatcatctcg

SEQ ID NO: 156407 - DNA, 25 bp, Canis familiaris
ggatgatgctattcacgttctccgg

SEQ ID NO: 156408 - DNA, 25 bp, Canis familiaris
ggatcatgatgccaacctcttacgt

SEQ ID NO: 156409 - DNA, 25 bp, Canis familiaris
ggatctatgccatctgaattactga

SEQ ID NO: 156410 - DNA, 25 bp, Canis familiaris
ggagtcatctagtctgactatagct

SEQ ID NO: 156411 - DNA, 25 bp, Canis familiaris
ggatgaggctattctattctagttt

SEQ ID NO: 156412 - DNA, 25 bp, Canis familiaris
ggatgagcgctattctattcttacg

SEQ ID NO: 156413 - DNA, 25 bp, Canis familiaris
ggatcagctgtgaagaattctttgg

SEQ ID NO: 156414 - DNA, 25 bp, Canis familiaris
ggatctgcagtctgagctactatct

SEQ ID NO: 156415 - DNA, 25 bp, Canis familiaris
ggatgccactcaaattagttcttta

SEQ ID NO: 156416 - DNA, 25 bp, Canis familiaris
ggatcgccctaatggtctttgtggc

SEQ ID NO: 156417 - DNA, 25 bp, Canis familiaris
ggaggcctgtaaaggatctatttgc

SEQ ID NO: 156418 - DNA, 25 bp, Canis familiaris
ggaggcttaagctgcagaaatttct

SEQ ID NO: 156419 - DNA, 25 bp, Canis familiaris
ggaggcctaatgggaaaattggaat

SEQ ID NO: 156420 - DNA, 25 bp, Canis familiaris
ggaggcaaaaggcggaccaggaata

SEQ ID NO: 156421 - DNA, 25 bp, Canis familiaris
ggaggaacgggcggtatcacgtgaa

SEQ ID NO: 156422 - DNA, 25 bp, Canis familiaris
ggaggaacgggcggtatcacgtgaa

SEQ ID NO: 156423 - DNA, 25 bp, Canis familiaris
ggaggaacgcctgatttccaggaaa

SEQ ID NO: 156424 - DNA, 25 bp, Canis familiaris
ggaggaagtctagattttccaagag

SEQ ID NO: 156425 - DNA, 25 bp, Canis familiaris
ggaggaaaaaccaagttcaccatag

SEQ ID NO: 156426 - DNA, 25 bp, Canis familiaris
ggagtattaaagatagcccacctaa

SEQ ID NO: 156427 - DNA, 25 bp, Canis familiaris
ggaccagaaaatataccctctaaca

SEQ ID NO: 156428 - DNA, 25 bp, Canis familiaris
ggacttaaagatgaaccctgttaat

SEQ ID NO: 156429 - DNA, 25 bp, Canis familiaris
ggacgggcagaagctgaccttgttt

SEQ ID NO: 156430 - DNA, 25 bp, Canis familiaris
ggatcggagtgatagtgacaccttc

SEQ ID NO: 156431 - DNA, 25 bp, Canis familiaris
ggatcgtatggattatgttccctag

SEQ ID NO: 156432 - DNA, 25 bp, Canis familiaris
ggatcctgggtcaaggtgcccaagt

SEQ ID NO: 156433 - DNA, 25 bp, Canis familiaris
ggatccgggttgtgtacatcagttt

SEQ ID NO: 156434 - DNA, 25 bp, Canis familiaris
ggatgggggtctgagtatcctgctg

SEQ ID NO: 156435 - DNA, 25 bp, Canis familiaris
ggatgggaaatctcagtataggtgg

SEQ ID NO: 156436 - DNA, 25 bp, Canis familiaris
ggatgtccaacctctggaactgtga

SEQ ID NO: 156437 - DNA, 25 bp, Canis familiaris
ggatccccaccaacgtgaaggtggc

SEQ ID NO: 156438 - DNA, 25 bp, Canis familiaris
ggatgcacgccacaacgggagcgtg

SEQ ID NO: 156439 - DNA, 25 bp, Canis familiaris
ggatcacgccatgagccaaaggcag

SEQ ID NO: 156440 - DNA, 25 bp, Canis familiaris
ggatccgcatatgaagagactagca

SEQ ID NO: 156441 - DNA, 25 bp, Canis familiaris
ggatgcaatctagaagagaactcaa

SEQ ID NO: 156442 - DNA, 25 bp, Canis familiaris
ggataatttctatgaaatcgcgctt

SEQ ID NO: 156443 - DNA, 25 bp, Canis familiaris
ggctgctatggtgatcggaacggta

SEQ ID NO: 156444 - DNA, 25 bp, Canis familiaris
ggctgctgcggagacgaaaacctgc

SEQ ID NO: 156445 - DNA, 25 bp, Canis familiaris
ggctggcgtacaaccaaataaacct

SEQ ID NO: 156446 - DNA, 25 bp, Canis familiaris
ggaggcattacttccaaaataccca

SEQ ID NO: 156447 - DNA, 25 bp, Canis familiaris
ggaggcctactatagccaaactttg

SEQ ID NO: 156448 - DNA, 25 bp, Canis familiaris
ggatggaaagtacagccaggtcctg

SEQ ID NO: 156449 - DNA, 25 bp, Canis familiaris
ggaggacatagtacacacctaccgg

SEQ ID NO: 156450 - DNA, 25 bp, Canis familiaris
ggatgagacagacacaacctgcaca

SEQ ID NO: 156451 - DNA, 25 bp, Canis familiaris
ggatgagctgggattgagcctgaca

SEQ ID NO: 156452 - DNA, 25 bp, Canis familiaris
ggatgacgtgtgtcctacggagttc

SEQ ID NO: 156453 - DNA, 25 bp, Canis familiaris
ggatgcagggtgtcagaacggtgtg

SEQ ID NO: 156454 - DNA, 25 bp, Canis familiaris
ggatgaaagccatgaacgagtgttc

SEQ ID NO: 156455 - DNA, 25 bp, Canis familiaris
ggagatccctaacgtccaggattct

SEQ ID NO: 156456 - DNA, 25 bp, Canis familiaris
ggaatgacctatacgtcctatcctg

SEQ ID NO: 156457 - DNA, 25 bp, Canis familiaris
ggagagggctacattgacttccgaa

SEQ ID NO: 156458 - DNA, 25 bp, Canis familiaris
ggagacagtccctaaacttccaaca

SEQ ID NO: 156459 - DNA, 25 bp, Canis familiaris
ggaggatgttcctaaagtctacaag

SEQ ID NO: 156460 - DNA, 25 bp, Canis familiaris
ggatggttccactagaaatctccat

SEQ ID NO: 156461 - DNA, 25 bp, Canis familiaris
ggaggttaagcccaatatcccaaag

SEQ ID NO: 156462 - DNA, 25 bp, Canis familiaris
ggaggattgttcgtactaccacagt

SEQ ID NO: 156463 - DNA, 25 bp, Canis familiaris
ggaggattgccctttacataatggt

SEQ ID NO: 156464 - DNA, 25 bp, Canis familiaris
ggaggctttcccagattatatgcaa

SEQ ID NO: 156465 - DNA, 25 bp, Canis familiaris
ggaccttcttccagactaactggga

SEQ ID NO: 156466 - DNA, 25 bp, Canis familiaris
ggactttccacgcggaagcgcggaa

SEQ ID NO: 156467 - DNA, 25 bp, Canis familiaris
ggagttcccaggaggactagtcgac

SEQ ID NO: 156468 - DNA, 25 bp, Canis familiaris
ggagcttccgacgggtacttgtaca

SEQ ID NO: 156469 - DNA, 25 bp, Canis familiaris
ggagcaaccgtccgggaaagtccag

SEQ ID NO: 156470 - DNA, 25 bp, Canis familiaris
ggatcgaccagtgtggggacagacc

SEQ ID NO: 156471 - DNA, 25 bp, Canis familiaris
ggatggcctggtccatggggaaacc

SEQ ID NO: 156472 - DNA, 25 bp, Canis familiaris
ggatggcctggtccatggggaaacc

SEQ ID NO: 156473 - DNA, 25 bp, Canis familiaris
ggaggcctgggcaggaggtactcca

SEQ ID NO: 156474 - DNA, 25 bp, Canis familiaris
ggaggggggctggcaagaccctcca

SEQ ID NO: 156475 - DNA, 25 bp, Canis familiaris
ggatggggagtgggactgagcccgc

SEQ ID NO: 156476 - DNA, 25 bp, Canis familiaris
ggagagggttacccagagatccccg

SEQ ID NO: 156477 - DNA, 25 bp, Canis familiaris
ggagggcagatagctccaggtcctc

SEQ ID NO: 156478 - DNA, 25 bp, Canis familiaris
ggaggatggagagctaaagtcccag

SEQ ID NO: 156479 - DNA, 25 bp, Canis familiaris
ggatgtagggagcctggagaaaccg

SEQ ID NO: 156480 - DNA, 25 bp, Canis familiaris
ggatgagacgggccggaagctcact

SEQ ID NO: 156481 - DNA, 25 bp, Canis familiaris
ggatgagaatggccggatgaacgcc

SEQ ID NO: 156482 - DNA, 25 bp, Canis familiaris
ggatggtgcaatcctgggagtccca

SEQ ID NO: 156483 - DNA, 25 bp, Canis familiaris
ggatgtccaagatgggatccccata

SEQ ID NO: 156484 - DNA, 25 bp, Canis familiaris
ggaggccaagaaggacgagcccaag

SEQ ID NO: 156485 - DNA, 25 bp, Canis familiaris
ggaggccaaggaaatgagggaccag

SEQ ID NO: 156486 - DNA, 25 bp, Canis familiaris
ggatgcccaaggcacaaaagcccag

SEQ ID NO: 156487 - DNA, 25 bp, Canis familiaris
ggagggctagggccaaagagttaga

SEQ ID NO: 156488 - DNA, 25 bp, Canis familiaris
ggaggtgaaggaggccatcaaccca

SEQ ID NO: 156489 - DNA, 25 bp, Canis familiaris
ggatgggggcacagaatcaattcga

SEQ ID NO: 156490 - DNA, 25 bp, Canis familiaris
ggatgggggaaatatagcacgtttt

SEQ ID NO: 156491 - DNA, 25 bp, Canis familiaris
ggagggggagaagagatacggggct

SEQ ID NO: 156492 - DNA, 25 bp, Canis familiaris
ggcgttcggcaatgccaagacggtc

SEQ ID NO: 156493 - DNA, 25 bp, Canis familiaris
ggagtacggctatcttcaaagaatc

SEQ ID NO: 156494 - DNA, 25 bp, Canis familiaris
ggaggcacaatgagacttgaaaaaa

SEQ ID NO: 156495 - DNA, 25 bp, Canis familiaris
ggatgaaatggaagcctctgcaaag

SEQ ID NO: 156496 - DNA, 25 bp, Canis familiaris
ggatgaacaactacactcgacagga

SEQ ID NO: 156497 - DNA, 25 bp, Canis familiaris
ggatggagaagaccccgatcttgac

SEQ ID NO: 156498 - DNA, 25 bp, Canis familiaris
ggaggaaaacccctcagctttgcta

SEQ ID NO: 156499 - DNA, 25 bp, Canis familiaris
ggaggaaaaactgtcagttcaagtc

SEQ ID NO: 156500 - DNA, 25 bp, Canis familiaris
ggaggaacaacctgtcaaacggact

SEQ ID NO: 156501 - DNA, 25 bp, Canis familiaris
ggatgtaacacctgagtaaactaga

SEQ ID NO: 156502 - DNA, 25 bp, Canis familiaris
ggatgagaaccggaagttcaaccaa

SEQ ID NO: 156503 - DNA, 25 bp, Canis familiaris
ggagcatggacccgaaaacaatccg

SEQ ID NO: 156504 - DNA, 25 bp, Canis familiaris
ggatccgagcgcctggattagcaat

SEQ ID NO: 156505 - DNA, 25 bp, Canis familiaris
ggatcgcctgggggatatagccatg

SEQ ID NO: 156506 - DNA, 25 bp, Canis familiaris
ggatggccttgggctttagtctggc

SEQ ID NO: 156507 - DNA, 25 bp, Canis familiaris
ggatgggcctttcttgaatggcctt

SEQ ID NO: 156508 - DNA, 25 bp, Canis familiaris
ggaggaccattctttgtaaccaatt

SEQ ID NO: 156509 - DNA, 25 bp, Canis familiaris
ggacccacttttataagccctggtg

SEQ ID NO: 156510 - DNA, 25 bp, Canis familiaris
ggatctaccttttttatagccactg

SEQ ID NO: 156511 - DNA, 25 bp, Canis familiaris
ggatctaccttttttatagccactg

SEQ ID NO: 156512 - DNA, 25 bp, Canis familiaris
ggatctaccttttttatagccactg

SEQ ID NO: 156513 - DNA, 25 bp, Canis familiaris
ggatctaccttttttatagccactg

SEQ ID NO: 156514 - DNA, 25 bp, Canis familiaris
ggatctaccttttttatagccactg

SEQ ID NO: 156515 - DNA, 25 bp, Canis familiaris
ggatctaccttttttatagccacct

SEQ ID NO: 156516 - DNA, 25 bp, Canis familiaris
ggatctacctctttttatagccacc

SEQ ID NO: 156517 - DNA, 25 bp, Canis familiaris
ggatctacctctttttatagccacc

SEQ ID NO: 156518 - DNA, 25 bp, Canis familiaris
ggatctaccttgtttgtatagccac

SEQ ID NO: 156519 - DNA, 25 bp, Canis familiaris
ggaatcccattgatcttctagctac

SEQ ID NO: 156520 - DNA, 25 bp, Canis familiaris
ggaattccattgtgttataaaccct

SEQ ID NO: 156521 - DNA, 25 bp, Canis familiaris
ggagcttctttgagaccataacccc

SEQ ID NO: 156522 - DNA, 25 bp, Canis familiaris
ggagttctgggtggacaacaccacc

SEQ ID NO: 156523 - DNA, 25 bp, Canis familiaris
ggagtccgaggagtcagacgacgac

SEQ ID NO: 156524 - DNA, 25 bp, Canis familiaris
ggagatccgggatcgaatcccgcgt

SEQ ID NO: 156525 - DNA, 25 bp, Canis familiaris
ggagtacctgtgtaccatttttctt

SEQ ID NO: 156526 - DNA, 25 bp, Canis familiaris
ggagtaaattactttctttgtcctg

SEQ ID NO: 156527 - DNA, 25 bp, Canis familiaris
ggatggaaaaactgttttgttgctt

SEQ ID NO: 156528 - DNA, 25 bp, Canis familiaris
ggaggaaaagccagctcttccttgc

SEQ ID NO: 156529 - DNA, 25 bp, Canis familiaris
ggaggaacagggaggcctcctgggc

SEQ ID NO: 156530 - DNA, 25 bp, Canis familiaris
ggaggaaggaggagccctcctttga

SEQ ID NO: 156531 - DNA, 25 bp, Canis familiaris
ggatgcagaaggagatcactgccct

SEQ ID NO: 156532 - DNA, 25 bp, Canis familiaris
ggatgcaagaagaatgccctgtcac

SEQ ID NO: 156533 - DNA, 25 bp, Canis familiaris
ggatgcaaaatgttggcacgtcata

SEQ ID NO: 156534 - DNA, 25 bp, Canis familiaris
ggatgaagaagattcgagcccacag

SEQ ID NO: 156535 - DNA, 25 bp, Canis familiaris
ggatgaagaggaggcgctgccgcac

SEQ ID NO: 156536 - DNA, 25 bp, Canis familiaris
ggatgaagtggtggcctcagctgcc

SEQ ID NO: 156537 - DNA, 25 bp, Canis familiaris
ggatgcaagcaggtgctccatccgg

SEQ ID NO: 156538 - DNA, 25 bp, Canis familiaris
ggatgatcacagacgtgcagctcgc

SEQ ID NO: 156539 - DNA, 25 bp, Canis familiaris
ggatgatctcgaaggcatgcttgac

SEQ ID NO: 156540 - DNA, 25 bp, Canis familiaris
ggatgaccgcagtgatgtggaaagc

SEQ ID NO: 156541 - DNA, 25 bp, Canis familiaris
ggatgggcaaatagatgctgatgaa

SEQ ID NO: 156542 - DNA, 25 bp, Canis familiaris
ggatggcacaaacttgctgaatggc

SEQ ID NO: 156543 - DNA, 25 bp, Canis familiaris
ggatggcagagacgcagctgcgacc

SEQ ID NO: 156544 - DNA, 25 bp, Canis familiaris
ggatggcacagctgcagctgcagca

SEQ ID NO: 156545 - DNA, 25 bp, Canis familiaris
ggatgctgagctttggtcagagctg

SEQ ID NO: 156546 - DNA, 25 bp, Canis familiaris
ggatgcagacattatcttggcagcg

SEQ ID NO: 156547 - DNA, 25 bp, Canis familiaris
ggatgaatatgttcctgacaggtca

SEQ ID NO: 156548 - DNA, 25 bp, Canis familiaris
ggatgacaatccgctgcaagggaga

SEQ ID NO: 156549 - DNA, 25 bp, Canis familiaris
ggatgacctcacagccaagcatggg

SEQ ID NO: 156550 - DNA, 25 bp, Canis familiaris
ggaggcctcaaaccatgagcctgag

SEQ ID NO: 156551 - DNA, 25 bp, Canis familiaris
ggaggccccaagaaagcttactgag

SEQ ID NO: 156552 - DNA, 25 bp, Canis familiaris
ggaggcgggaatatcagctctcgga

SEQ ID NO: 156553 - DNA, 25 bp, Canis familiaris
ggaggctgaaagaatcatcccctga

SEQ ID NO: 156554 - DNA, 25 bp, Canis familiaris
ggaggccataagaatgtacccgacc

SEQ ID NO: 156555 - DNA, 25 bp, Canis familiaris
ggagatcctgaaacatgaaaccaaa

SEQ ID NO: 156556 - DNA, 25 bp, Canis familiaris
ggatgacgtggacctgaagcaggac

SEQ ID NO: 156557 - DNA, 25 bp, Canis familiaris
ggatgaagagtgagtaagatgatga

SEQ ID NO: 156558 - DNA, 25 bp, Canis familiaris
ggaggcgagttggtcaatgctgcat

SEQ ID NO: 156559 - DNA, 25 bp, Canis familiaris
ggaggcgaattgtatccacagaaat

SEQ ID NO: 156560 - DNA, 25 bp, Canis familiaris
ggatggctgagcaactaccagcaga

SEQ ID NO: 156561 - DNA, 25 bp, Canis familiaris
ggagggagccacaagtctgcaaccc

SEQ ID NO: 156562 - DNA, 25 bp, Canis familiaris
ggatgggaccatatgctagcacccc

SEQ ID NO: 156563 - DNA, 25 bp, Canis familiaris
tggctgggacccaactataccaagg

SEQ ID NO: 156564 - DNA, 25 bp, Canis familiaris
ggatgaaagccctatcttaccaagc

SEQ ID NO: 156565 - DNA, 25 bp, Canis familiaris
ggatggatgagctgcttttaccaaa

SEQ ID NO: 156566 - DNA, 25 bp, Canis familiaris
ggatggtccagtatttcagcaaaat

SEQ ID NO: 156567 - DNA, 25 bp, Canis familiaris
ggagtggccaattctgtaactgaca

SEQ ID NO: 156568 - DNA, 25 bp, Canis familiaris
ggatgacaccaaccttacaatgcaa

SEQ ID NO: 156569 - DNA, 25 bp, Canis familiaris
ggagtacatgaccctgtgacggaat

SEQ ID NO: 156570 - DNA, 25 bp, Canis familiaris
ggatgtcaatgaaccagttcgtgct

SEQ ID NO: 156571 - DNA, 25 bp, Canis familiaris
ggatgtaaaagccatgcttgcctat

SEQ ID NO: 156572 - DNA, 25 bp, Canis familiaris
ggatgtgcagaagtggctttccctc

SEQ ID NO: 156573 - DNA, 25 bp, Canis familiaris
ggatgggggaagatccccttcccat

SEQ ID NO: 156574 - DNA, 25 bp, Canis familiaris
ggatggagccgaaaacctcactccc

SEQ ID NO: 156575 - DNA, 25 bp, Canis familiaris
ggacaggccgtaaacttggccacca

SEQ ID NO: 156576 - DNA, 25 bp, Canis familiaris
tggaagtgggaacatttggaaccgg

SEQ ID NO: 156577 - DNA, 25 bp, Canis familiaris
ggatgatttggggccatttgagaca

SEQ ID NO: 156578 - DNA, 25 bp, Canis familiaris
ggatctttctgggtcttgtaactta

SEQ ID NO: 156579 - DNA, 25 bp, Canis familiaris
ggacctgtctgggttttcagaccaa

SEQ ID NO: 156580 - DNA, 25 bp, Canis familiaris
ggaggctgacgggtgtggtcagagg

SEQ ID NO: 156581 - DNA, 25 bp, Canis familiaris
ggaggcaacctggttggctctggtt

SEQ ID NO: 156582 - DNA, 25 bp, Canis familiaris
ggaggcattccttctataatgggtt

SEQ ID NO: 156583 - DNA, 25 bp, Canis familiaris
ggaggcccactttagaggagaatat

SEQ ID NO: 156584 - DNA, 25 bp, Canis familiaris
ggagacggtatttcaggtagcatat

SEQ ID NO: 156585 - DNA, 25 bp, Canis familiaris
ggatcgaggagacaaggtacatata

SEQ ID NO: 156586 - DNA, 25 bp, Canis familiaris
ggatgcgggaggcactgagtgagaa

SEQ ID NO: 156587 - DNA, 25 bp, Canis familiaris
ggatctggagggctgctggatcacc

SEQ ID NO: 156588 - DNA, 25 bp, Canis familiaris
ggatctggaagccacatcggagcac

SEQ ID NO: 156589 - DNA, 25 bp, Canis familiaris
ggatctgggaggtagaggccatgcc

SEQ ID NO: 156590 - DNA, 25 bp, Canis familiaris
ggatctggccaccatggaaggcatg

SEQ ID NO: 156591 - DNA, 25 bp, Canis familiaris
ggatgcctctcgcatggaagaagtc

SEQ ID NO: 156592 - DNA, 25 bp, Canis familiaris
ggatgccctttttaagaagatcagc

SEQ ID NO: 156593 - DNA, 25 bp, Canis familiaris
ggaggagttcttgcacgaagctcgg

SEQ ID NO: 156594 - DNA, 25 bp, Canis familiaris
ggatgtgaatccttgaccgacacct

SEQ ID NO: 156595 - DNA, 25 bp, Canis familiaris
ggatctgaaccagttcaaaacagat

SEQ ID NO: 156596 - DNA, 25 bp, Canis familiaris
ggaggaaaacctcaatgacaggaaa

SEQ ID NO: 156597 - DNA, 25 bp, Canis familiaris
ggaggaaacacccagctttatgtaa

SEQ ID NO: 156598 - DNA, 25 bp, Canis familiaris
ggaggccaatacatagtttggaaca

SEQ ID NO: 156599 - DNA, 25 bp, Canis familiaris
ggaggccagcaagctagctggtggc

SEQ ID NO: 156600 - DNA, 25 bp, Canis familiaris
ggaggacaggacttcaggctgaggc

SEQ ID NO: 156601 - DNA, 25 bp, Canis familiaris
ggaggagcggacagagacggagacc

SEQ ID NO: 156602 - DNA, 25 bp, Canis familiaris
ggaggagggaattgaaattgtgaac

SEQ ID NO: 156603 - DNA, 25 bp, Canis familiaris
ggatcgtggggaaggtcattggaac

SEQ ID NO: 156604 - DNA, 25 bp, Canis familiaris
ggatctatggtggtggttttcaaac

SEQ ID NO: 156605 - DNA, 25 bp, Canis familiaris
ggatgttgggtttcttcattcaata

SEQ ID NO: 156606 - DNA, 25 bp, Canis familiaris
ggagttcggtttgattgtcacttca

SEQ ID NO: 156607 - DNA, 25 bp, Canis familiaris
ggatgttcttttggtattctcagct

SEQ ID NO: 156608 - DNA, 25 bp, Canis familiaris
ggatgtatcttcttggttaccgatt

SEQ ID NO: 156609 - DNA, 25 bp, Canis familiaris
ggatggatcccgtaattccacgttc

SEQ ID NO: 156610 - DNA, 25 bp, Canis familiaris
ggatgacaactctttttgtcacagt

SEQ ID NO: 156611 - DNA, 25 bp, Canis familiaris
ggatgacaaatccctatctatagga

SEQ ID NO: 156612 - DNA, 25 bp, Canis familiaris
ggatgtcatttacaatcttcaggcc

SEQ ID NO: 156613 - DNA, 25 bp, Canis familiaris
ggatgttttcataattttcagagat

SEQ ID NO: 156614 - DNA, 25 bp, Canis familiaris
ggatgtcatttgcatttatctaaga

SEQ ID NO: 156615 - DNA, 25 bp, Canis familiaris
ggatgatcatcatgtagtttctcaa

SEQ ID NO: 156616 - DNA, 25 bp, Canis familiaris
ggatgatgcatttatcttttacata

SEQ ID NO: 156617 - DNA, 25 bp, Canis familiaris
ggatgtgactgatttattcatactc

SEQ ID NO: 156618 - DNA, 25 bp, Canis familiaris
ggaggactcagtttaatagcttaca

SEQ ID NO: 156619 - DNA, 25 bp, Canis familiaris
ggagggacatttaaatttgctaatt

SEQ ID NO: 156620 - DNA, 25 bp, Canis familiaris
ggatgaggactgggtgttatactat

SEQ ID NO: 156621 - DNA, 25 bp, Canis familiaris
ggaggaactggctgtaatcatgaat

SEQ ID NO: 156622 - DNA, 25 bp, Canis familiaris
ggaggaacttgtctcagaactattt

SEQ ID NO: 156623 - DNA, 25 bp, Canis familiaris
ggatgtacctaccaagagcaactat

SEQ ID NO: 156624 - DNA, 25 bp, Canis familiaris
ggatgtgattaacttaacacctttg

SEQ ID NO: 156625 - DNA, 25 bp, Canis familiaris
ggatggcttattagaaaaccttatt

SEQ ID NO: 156626 - DNA, 25 bp, Canis familiaris
ggatggtgttttatagccctctaat

SEQ ID NO: 156627 - DNA, 25 bp, Canis familiaris
ggatgctggttgttttttatttgaa

SEQ ID NO: 156628 - DNA, 25 bp, Canis familiaris
ggatggagttggaatttctcattac

SEQ ID NO: 156629 - DNA, 25 bp, Canis familiaris
ggaggcagaaggagctgttttaaaa

SEQ ID NO: 156630 - DNA, 25 bp, Canis familiaris
ggaggctgaaggaggcttgtgcacg

SEQ ID NO: 156631 - DNA, 25 bp, Canis familiaris
ggaggtaagggcggtttccacatgg

SEQ ID NO: 156632 - DNA, 25 bp, Canis familiaris
ggagagggagggggttctcactacg

SEQ ID NO: 156633 - DNA, 25 bp, Canis familiaris
ggaggggggggtgaggcaagagtga

SEQ ID NO: 156634 - DNA, 25 bp, Canis familiaris
ggagggtgggggtggtgcaagacca

SEQ ID NO: 156635 - DNA, 25 bp, Canis familiaris
ggatggggcggtcaaggacgacacc

SEQ ID NO: 156636 - DNA, 25 bp, Canis familiaris
ggatgagggggtcaagggagcttgc

SEQ ID NO: 156637 - DNA, 25 bp, Canis familiaris
ggacggggtgtcagagctggggtcc

SEQ ID NO: 156638 - DNA, 25 bp, Canis familiaris
ggatcgggagttgggagcggtggtc

SEQ ID NO: 156639 - DNA, 25 bp, Canis familiaris
ggatcgcagaggaggggcggggcag

SEQ ID NO: 156640 - DNA, 25 bp, Canis familiaris
ggatgcgagaagggatgggaggcgt

SEQ ID NO: 156641 - DNA, 25 bp, Canis familiaris
ggatggggatctggatcggcgggac

SEQ ID NO: 156642 - DNA, 25 bp, Canis familiaris
ggatgctgggacaagctccagccgg

SEQ ID NO: 156643 - DNA, 25 bp, Canis familiaris
ggatgcagggccaactcagaggagt

SEQ ID NO: 156644 - DNA, 25 bp, Canis familiaris
ggatgagagtcctttcagtggaata

SEQ ID NO: 156645 - DNA, 25 bp, Canis familiaris
ggatgaagctttctcgtgggcatcc

SEQ ID NO: 156646 - DNA, 25 bp, Canis familiaris
ggatgaaagcttctcgtgggccatc

SEQ ID NO: 156647 - DNA, 25 bp, Canis familiaris
ggatccaagattctgtgagtacctc

SEQ ID NO: 156648 - DNA, 25 bp, Canis familiaris
ggatccaagactcgcgcagagatga

SEQ ID NO: 156649 - DNA, 25 bp, Canis familiaris
ggatccatgagagacagagagagag

SEQ ID NO: 156650 - DNA, 25 bp, Canis familiaris
ggatcctgagcagagccaagaggcc

SEQ ID NO: 156651 - DNA, 25 bp, Canis familiaris
ggatgtctctgagagccatcaaggc

SEQ ID NO: 156652 - DNA, 25 bp, Canis familiaris
ggatgtgctcatcaacaatgccggc

SEQ ID NO: 156653 - DNA, 25 bp, Canis familiaris
ggatgctggataaactgaccggcgt

SEQ ID NO: 156654 - DNA, 25 bp, Canis familiaris
ggatggagtttgctgatcacggcga

SEQ ID NO: 156655 - DNA, 25 bp, Canis familiaris
ggaggaggttgaggtctgaagagca

SEQ ID NO: 156656 - DNA, 25 bp, Canis familiaris
ggaggaagcagctacccgaatacct

SEQ ID NO: 156657 - DNA, 25 bp, Canis familiaris
ggaggccacgttggccgaagactcc

SEQ ID NO: 156658 - DNA, 25 bp, Canis familiaris
ggaatgggctttgggtggaactcca

SEQ ID NO: 156659 - DNA, 25 bp, Canis familiaris
ggaggggtagtcagttgccctcctc

SEQ ID NO: 156660 - DNA, 25 bp, Canis familiaris
ggatggtttaccatttgccgtcatt

SEQ ID NO: 156661 - DNA, 25 bp, Canis familiaris
ggatgtgttgtatcctgtttccaac

SEQ ID NO: 156662 - DNA, 25 bp, Canis familiaris
ggatgcctgtagtacggctaccaca

SEQ ID NO: 156663 - DNA, 25 bp, Canis familiaris
ggacctgaaaagtgcttttccgcca

SEQ ID NO: 156664 - DNA, 25 bp, Canis familiaris
ggactggaagaagacttttcttgcc

SEQ ID NO: 156665 - DNA, 25 bp, Canis familiaris
ggacgacaggttgttctttcttcct

SEQ ID NO: 156666 - DNA, 25 bp, Canis familiaris
ggatgggaggtcgatttgctttctt

SEQ ID NO: 156667 - DNA, 25 bp, Canis familiaris
ggaggaaaggctattttatgctctt

SEQ ID NO: 156668 - DNA, 25 bp, Canis familiaris
ggatggaaagcgacttcttgcttgt

SEQ ID NO: 156669 - DNA, 25 bp, Canis familiaris
ggatggaacatgcttatttgacttt

SEQ ID NO: 156670 - DNA, 25 bp, Canis familiaris
ggatgtgagtccattttctattttc

SEQ ID NO: 156671 - DNA, 25 bp, Canis familiaris
ggagtagacttcttttctatacatc

SEQ ID NO: 156672 - DNA, 25 bp, Canis familiaris
ggagctacctccttcaaagtaattg

SEQ ID NO: 156673 - DNA, 25 bp, Canis familiaris
ggatgaaccactttctaagcataat

SEQ ID NO: 156674 - DNA, 25 bp, Canis familiaris
ggatgaaccatctacacaaactatt

SEQ ID NO: 156675 - DNA, 25 bp, Canis familiaris
ggatgacgggctaccagaattgtct

SEQ ID NO: 156676 - DNA, 25 bp, Canis familiaris
ggatgctcagggaatctcagtcttg

SEQ ID NO: 156677 - DNA, 25 bp, Canis familiaris
ggatgtcaaggggtcagactgtgta

SEQ ID NO: 156678 - DNA, 25 bp, Canis familiaris
ggatgtccaagagacgatacatgtc

SEQ ID NO: 156679 - DNA, 25 bp, Canis familiaris
ggatgttaatagcgacaaagtgcat

SEQ ID NO: 156680 - DNA, 25 bp, Canis familiaris
ggagttcaatcgaaagaaagccatg

SEQ ID NO: 156681 - DNA, 25 bp, Canis familiaris
ggatgtccactttaagaaacctgat

SEQ ID NO: 156682 - DNA, 25 bp, Canis familiaris
ggatgttgccttcaaagacctggat

SEQ ID NO: 156683 - DNA, 25 bp, Canis familiaris
ggatgtgctccttaaagcagatcag

SEQ ID NO: 156684 - DNA, 25 bp, Canis familiaris
ggatgatgtcctggcaactgaggct

SEQ ID NO: 156685 - DNA, 25 bp, Canis familiaris
ggatcgagcagctgaacgagtgcaa

SEQ ID NO: 156686 - DNA, 25 bp, Canis familiaris
ggatcgccatccggatcacggcaat

SEQ ID NO: 156687 - DNA, 25 bp, Canis familiaris
ggatggtcatcctgtatcagtcaat

SEQ ID NO: 156688 - DNA, 25 bp, Canis familiaris
ggatgtgcgcacgatgatttgttca

SEQ ID NO: 156689 - DNA, 25 bp, Canis familiaris
ggatgtggcagctgattccatgtct

SEQ ID NO: 156690 - DNA, 25 bp, Canis familiaris
ggatgagccatgtgaatcctcctga

SEQ ID NO: 156691 - DNA, 25 bp, Canis familiaris
ggatgcccagtggaatgcttgtctg

SEQ ID NO: 156692 - DNA, 25 bp, Canis familiaris
ggatcctctggcagatgtttggccc

SEQ ID NO: 156693 - DNA, 25 bp, Canis familiaris
ggatgcttcctgaggttcattaccg

SEQ ID NO: 156694 - DNA, 25 bp, Canis familiaris
ggatgatctacttaagattctctcc

SEQ ID NO: 156695 - DNA, 25 bp, Canis familiaris
ggatgctctttatatggatcttcca

SEQ ID NO: 156696 - DNA, 25 bp, Canis familiaris
ggagttttaaagctgcagcccacag

SEQ ID NO: 156697 - DNA, 25 bp, Canis familiaris
ggacttgtccaaagtgtccgtaaca

SEQ ID NO: 156698 - DNA, 25 bp, Canis familiaris
ggacctgtccaaatgaggagtttta

SEQ ID NO: 156699 - DNA, 25 bp, Canis familiaris
ggagacaccctttgtggagtctggg

SEQ ID NO: 156700 - DNA, 25 bp, Canis familiaris
ggatgaaccagagcttggggctgct

SEQ ID NO: 156701 - DNA, 25 bp, Canis familiaris
ggaggacaagctggtggaggacctg

SEQ ID NO: 156702 - DNA, 25 bp, Canis familiaris
ggagaacaagtttcgggaccgctcg

SEQ ID NO: 156703 - DNA, 25 bp, Canis familiaris
ggagttaaattatgggccgcgccag

SEQ ID NO: 156704 - DNA, 25 bp, Canis familiaris
ggcaggttaaggttgggtctggcca

SEQ ID NO: 156705 - DNA, 25 bp, Canis familiaris
ggaggtcacaaggttgggttgggat

SEQ ID NO: 156706 - DNA, 25 bp, Canis familiaris
ggagacatcggagcggtgtttgggc

SEQ ID NO: 156707 - DNA, 25 bp, Canis familiaris
ggatgtcacatggacaaggtgattc

SEQ ID NO: 156708 - DNA, 25 bp, Canis familiaris
ggatgtcctgcggcagatcgaggcc

SEQ ID NO: 156709 - DNA, 25 bp, Canis familiaris
ggatgtggcatggtctggcagagtg

SEQ ID NO: 156710 - DNA, 25 bp, Canis familiaris
ggatgttgctatagtgacatgcagt

SEQ ID NO: 156711 - DNA, 25 bp, Canis familiaris
ggatgcctgccaaagcacagatttc

SEQ ID NO: 156712 - DNA, 25 bp, Canis familiaris
ggatggcccagccatcaactattca

SEQ ID NO: 156713 - DNA, 25 bp, Canis familiaris
ggaggctctagccacagagtaataa

SEQ ID NO: 156714 - DNA, 25 bp, Canis familiaris
ggaggctatgtgtcccactaaaata

SEQ ID NO: 156715 - DNA, 25 bp, Canis familiaris
ggatgatgaggttgcccagctcaag

SEQ ID NO: 156716 - DNA, 25 bp, Canis familiaris
ggatgatgagggcttcactgcagac

SEQ ID NO: 156717 - DNA, 25 bp, Canis familiaris
ggatgtgtcgagctctcatccatca

SEQ ID NO: 156718 - DNA, 25 bp, Canis familiaris
ggatgttcatatctgctatgtcctt

SEQ ID NO: 156719 - DNA, 25 bp, Canis familiaris
ggatgatctcataaccctgtgtttt

SEQ ID NO: 156720 - DNA, 25 bp, Canis familiaris
ggatgatgctcaaaacccttgtttt

SEQ ID NO: 156721 - DNA, 25 bp, Canis familiaris
ggagtgctagttacacgttttttca

SEQ ID NO: 156722 - DNA, 25 bp, Canis familiaris
ggaggggcagataacgttgcttatt

SEQ ID NO: 156723 - DNA, 25 bp, Canis familiaris
ggaggctgggataacctgcggaatg

SEQ ID NO: 156724 - DNA, 25 bp, Canis familiaris
ggatgtcaaggtcagcctctacaag

SEQ ID NO: 156725 - DNA, 25 bp, Canis familiaris
ggatgtcaaggtctacagccaccaa

SEQ ID NO: 156726 - DNA, 25 bp, Canis familiaris
ggatgtcaagacctaaccagacccc

SEQ ID NO: 156727 - DNA, 25 bp, Canis familiaris
ggatgctgagcaacacttgaccaac

SEQ ID NO: 156728 - DNA, 25 bp, Canis familiaris
ggatgcgtgcatttatcagatcaaa

SEQ ID NO: 156729 - DNA, 25 bp, Canis familiaris
ggatgctctattttagccaagatta

SEQ ID NO: 156730 - DNA, 25 bp, Canis familiaris
ggatgctctctatttagcggagaaa

SEQ ID NO: 156731 - DNA, 25 bp, Canis familiaris
ggatgccctcaattacagacagatg

SEQ ID NO: 156732 - DNA, 25 bp, Canis familiaris
ggatcccctatataagttcttttca

SEQ ID NO: 156733 - DNA, 25 bp, Canis familiaris
ggatgggcctaagaagttcccttat

SEQ ID NO: 156734 - DNA, 25 bp, Canis familiaris
ggaggctgcctagctaatgtatttt

SEQ ID NO: 156735 - DNA, 25 bp, Canis familiaris
ggaggtcccatttgtactatttttg

SEQ ID NO: 156736 - DNA, 25 bp, Canis familiaris
ggagagacccaaagtttcgtccttg

SEQ ID NO: 156737 - DNA, 25 bp, Canis familiaris
tcgggaccgacacttgagtcgtctt

SEQ ID NO: 156738 - DNA, 25 bp, Canis familiaris
ggaggtcccacgagagtcgtgttgt

SEQ ID NO: 156739 - DNA, 25 bp, Canis familiaris
ggaggtttcattaaagttcttggct

SEQ ID NO: 156740 - DNA, 25 bp, Canis familiaris
ggaggctttcacaactagcttctgt

SEQ ID NO: 156741 - DNA, 25 bp, Canis familiaris
ggatgtttgacatactcgccatctt

SEQ ID NO: 156742 - DNA, 25 bp, Canis familiaris
ggatgttgtacagattggccactac

SEQ ID NO: 156743 - DNA, 25 bp, Canis familiaris
ggagtaggatcagagtgaaccccca

SEQ ID NO: 156744 - DNA, 25 bp, Canis familiaris
ggatgcccaactgattgaaccacct

SEQ ID NO: 156745 - DNA, 25 bp, Canis familiaris
ggatgcccagcatgaatctggacgg

SEQ ID NO: 156746 - DNA, 25 bp, Canis familiaris
ggatgagcacaacgaagcggacgta

SEQ ID NO: 156747 - DNA, 25 bp, Canis familiaris
ggcatgatgaactgaaccgtcctga

SEQ ID NO: 156748 - DNA, 25 bp, Canis familiaris
ggaggtacctggtcttgacctgagg

SEQ ID NO: 156749 - DNA, 25 bp, Canis familiaris
ggatgagtgacttgacctgtgacct

SEQ ID NO: 156750 - DNA, 25 bp, Canis familiaris
ggatggtggcagtaggtggtactta

SEQ ID NO: 156751 - DNA, 25 bp, Canis familiaris
ggatgggccatgtgtgtttacaaca

SEQ ID NO: 156752 - DNA, 25 bp, Canis familiaris
ggatgctgtgttcggctgttattaa

SEQ ID NO: 156753 - DNA, 25 bp, Canis familiaris
ggatgctgtttctaggttacttgag

SEQ ID NO: 156754 - DNA, 25 bp, Canis familiaris
ggatgctttatctcgggactatgaa

SEQ ID NO: 156755 - DNA, 25 bp, Canis familiaris
ggagcttgattctggggactggaaa

SEQ ID NO: 156756 - DNA, 25 bp, Canis familiaris
ggagggattaatgtggacgtgaacc

SEQ ID NO: 156757 - DNA, 25 bp, Canis familiaris
ggaggactttgagatggccgtagcc

SEQ ID NO: 156758 - DNA, 25 bp, Canis familiaris
ggaggagtcttgtttggctggttcc

SEQ ID NO: 156759 - DNA, 25 bp, Canis familiaris
ggaggagttggcctaactagcttcc

SEQ ID NO: 156760 - DNA, 25 bp, Canis familiaris
ggatgagtttcccatcaactagctc

SEQ ID NO: 156761 - DNA, 25 bp, Canis familiaris
ggatgagttactatacactggcctt

SEQ ID NO: 156762 - DNA, 25 bp, Canis familiaris
ggatgagtatgtggaaacgctgagc

SEQ ID NO: 156763 - DNA, 25 bp, Canis familiaris
ggatgagttgctggctacggtggtc

SEQ ID NO: 156764 - DNA, 25 bp, Canis familiaris
ggatgactccaatacgtggtgtcgg

SEQ ID NO: 156765 - DNA, 25 bp, Canis familiaris
ggatgcctccattggacaggcttgt

SEQ ID NO: 156766 - DNA, 25 bp, Canis familiaris
ggatgtccactgtagggcgtgttca

SEQ ID NO: 156767 - DNA, 25 bp, Canis familiaris
ggatggctccagtgggggtgtcatc

SEQ ID NO: 156768 - DNA, 25 bp, Canis familiaris
ggagtctgtacacggagcagggaac

SEQ ID NO: 156769 - DNA, 25 bp, Canis familiaris
ggagctgagttccctgacgggagag

SEQ ID NO: 156770 - DNA, 25 bp, Canis familiaris
ggaggagttcaccagggtggagaca

SEQ ID NO: 156771 - DNA, 25 bp, Canis familiaris
ggaggagttcagcaggtggagacga

SEQ ID NO: 156772 - DNA, 25 bp, Canis familiaris
ggaggaaggcagtcagcatgtgctc

SEQ ID NO: 156773 - DNA, 25 bp, Canis familiaris
ggatgagaattctacgcaggctgct

SEQ ID NO: 156774 - DNA, 25 bp, Canis familiaris
ggatgaaatgaggaccagagttaac

SEQ ID NO: 156775 - DNA, 25 bp, Canis familiaris
ggatgagaatctggccccatttcac

SEQ ID NO: 156776 - DNA, 25 bp, Canis familiaris
ggaggaatttgcttcttgtgcctgc

SEQ ID NO: 156777 - DNA, 25 bp, Canis familiaris
ggaggactttgtgttatgctgctat

SEQ ID NO: 156778 - DNA, 25 bp, Canis familiaris
ggatggatttctccttaattgctta

SEQ ID NO: 156779 - DNA, 25 bp, Canis familiaris
ggagactgttgggttaaactgtaca

SEQ ID NO: 156780 - DNA, 25 bp, Canis familiaris
ggagttttgtctttaatctcttaat

SEQ ID NO: 156781 - DNA, 25 bp, Canis familiaris
ggagtagattttcagagacctttat

SEQ ID NO: 156782 - DNA, 25 bp, Canis familiaris
ggaggaattggtcataggctttgtt

SEQ ID NO: 156783 - DNA, 25 bp, Canis familiaris
ggatggccattgatgaatgaggctc

SEQ ID NO: 156784 - DNA, 25 bp, Canis familiaris
ggatggctcagtcatttgagtgtct

SEQ ID NO: 156785 - DNA, 25 bp, Canis familiaris
ggatgccttgtgccataagagagtc

SEQ ID NO: 156786 - DNA, 25 bp, Canis familiaris
ggatgacatgttaataaggcagact

SEQ ID NO: 156787 - DNA, 25 bp, Canis familiaris
ggatgacagttcatggagactcatt

SEQ ID NO: 156788 - DNA, 25 bp, Canis familiaris
ggatgatcagtccggggcgctgcat

SEQ ID NO: 156789 - DNA, 25 bp, Canis familiaris
ggatgctcaggacctgtatgaggct

SEQ ID NO: 156790 - DNA, 25 bp, Canis familiaris
ggatgccgcagaccattatctggcg

SEQ ID NO: 156791 - DNA, 25 bp, Canis familiaris
ggatgggaaacattctctgggtgaa

SEQ ID NO: 156792 - DNA, 25 bp, Canis familiaris
ggccggaattttgtgtgggacactt

SEQ ID NO: 156793 - DNA, 25 bp, Canis familiaris
ggagggaatttcaggtgggagagtt

SEQ ID NO: 156794 - DNA, 25 bp, Canis familiaris
ggaggggtttccagaaggtacattg

SEQ ID NO: 156795 - DNA, 25 bp, Canis familiaris
ggaggagggactgcttaaggcgaca

SEQ ID NO: 156796 - DNA, 25 bp, Canis familiaris
ggagggggacggagctgaggaacaa

SEQ ID NO: 156797 - DNA, 25 bp, Canis familiaris
ggagacgggaacactgctgagaaac

SEQ ID NO: 156798 - DNA, 25 bp, Canis familiaris
ggaggcgaactaatttcaggcaacc

SEQ ID NO: 156799 - DNA, 25 bp, Canis familiaris
ggaggcaaacttgtccatgtgcaga

SEQ ID NO: 156800 - DNA, 25 bp, Canis familiaris
ggagagaaacctcccgatgaggccc

SEQ ID NO: 156801 - DNA, 25 bp, Canis familiaris
ggatggaaagcctgtgtgggcccag

SEQ ID NO: 156802 - DNA, 25 bp, Canis familiaris
ggatggaagcgcgagtactcctatc

SEQ ID NO: 156803 - DNA, 25 bp, Canis familiaris
ggaggacacctgttatctcgtattc

SEQ ID NO: 156804 - DNA, 25 bp, Canis familiaris
ggatggacacggtgatatttgttgt

SEQ ID NO: 156805 - DNA, 25 bp, Canis familiaris
ggaggacctgtgtgttggggtgggt

SEQ ID NO: 156806 - DNA, 25 bp, Canis familiaris
ggaggggcatggtagggtaggtggg

SEQ ID NO: 156807 - DNA, 25 bp, Canis familiaris
ggaggaagcggaaggccgaggcggc

SEQ ID NO: 156808 - DNA, 25 bp, Canis familiaris
ggaggaaggggacgagagggctgag

SEQ ID NO: 156809 - DNA, 25 bp, Canis familiaris
ggagagaagtaagatgagagggggc

SEQ ID NO: 156810 - DNA, 25 bp, Canis familiaris
ggaggacccaagtcttggggagctc

SEQ ID NO: 156811 - DNA, 25 bp, Canis familiaris
ggagtactcccatttaagagggcac

SEQ ID NO: 156812 - DNA, 25 bp, Canis familiaris
ggatgggccccaattcaaggagtgt

SEQ ID NO: 156813 - DNA, 25 bp, Canis familiaris
ggagggcacctcagaaaggcgtagg

SEQ ID NO: 156814 - DNA, 25 bp, Canis familiaris
ggaggcgccgtgagagattggtgtc

SEQ ID NO: 156815 - DNA, 25 bp, Canis familiaris
ggaccgacgacacgagttgttgcac

SEQ ID NO: 156816 - DNA, 25 bp, Canis familiaris
ggaggtcacgagtgggttcagcacc

SEQ ID NO: 156817 - DNA, 25 bp, Canis familiaris
ggagggagggaagtggtataccagt

SEQ ID NO: 156818 - DNA, 25 bp, Canis familiaris
ggagggggtggacagtatggccgag

SEQ ID NO: 156819 - DNA, 25 bp, Canis familiaris
ggaggaggaaggagtctggtccggc

SEQ ID NO: 156820 - DNA, 25 bp, Canis familiaris
ggaagggaaggtctcgggatcacac

SEQ ID NO: 156821 - DNA, 25 bp, Canis familiaris
ggagcgggacggcgtgaaggtgccc

SEQ ID NO: 156822 - DNA, 25 bp, Canis familiaris
ggatgggagggcttgccttaggtcc

SEQ ID NO: 156823 - DNA, 25 bp, Canis familiaris
ggatgcgtggggtgtctattatttc

SEQ ID NO: 156824 - DNA, 25 bp, Canis familiaris
ggagggctaggtttgatcatttttc

SEQ ID NO: 156825 - DNA, 25 bp, Canis familiaris
ggaggccatacacgatatgcatttg

SEQ ID NO: 156826 - DNA, 25 bp, Canis familiaris
ggaggccataatcctgtttatagag

SEQ ID NO: 156827 - DNA, 25 bp, Canis familiaris
ggaggcgccaatcatggcgagtcag

SEQ ID NO: 156828 - DNA, 25 bp, Canis familiaris
ggatgtggccattcttgtgggctcc

SEQ ID NO: 156829 - DNA, 25 bp, Canis familiaris
ggatggagtccagagctgggctccc

SEQ ID NO: 156830 - DNA, 25 bp, Canis familiaris
ggatggggacaggacttgccttccc

SEQ ID NO: 156831 - DNA, 25 bp, Canis familiaris
ggatgaggctttcagttgcctggcc

SEQ ID NO: 156832 - DNA, 25 bp, Canis familiaris
ggatgaggtgtgtgtttcctctgcc

SEQ ID NO: 156833 - DNA, 25 bp, Canis familiaris
ggatgaggggttggttgcactggtc

SEQ ID NO: 156834 - DNA, 25 bp, Canis familiaris
ggatgaggtggaacgtgtgatcact

SEQ ID NO: 156835 - DNA, 25 bp, Canis familiaris
ggaggtggggacggtgaattggttg

SEQ ID NO: 156836 - DNA, 25 bp, Canis familiaris
ggaggatggggaggtgtaacggtct

SEQ ID NO: 156837 - DNA, 25 bp, Canis familiaris
ggaggagggtgggttgtgaccgact

SEQ ID NO: 156838 - DNA, 25 bp, Canis familiaris
ggatgtgattctggggtttgacgga

SEQ ID NO: 156839 - DNA, 25 bp, Canis familiaris
ggatggatactggttgttttatgga

SEQ ID NO: 156840 - DNA, 25 bp, Canis familiaris
ggatgagtactgggtgttatgctat

SEQ ID NO: 156841 - DNA, 25 bp, Canis familiaris
ggagagctcaaggatggcaaggatt

SEQ ID NO: 156842 - DNA, 25 bp, Canis familiaris
ggaggcgagcaggaggcagtggttc

SEQ ID NO: 156843 - DNA, 25 bp, Canis familiaris
ggatgcaggagcccggcagatactc

SEQ ID NO: 156844 - DNA, 25 bp, Canis familiaris
ggatgatgtgaggcccgaatgtctc

SEQ ID NO: 156845 - DNA, 25 bp, Canis familiaris
ggatgatgatgctgtgccagtatta

SEQ ID NO: 156846 - DNA, 25 bp, Canis familiaris
ggagtcagtcgtgcaatttaatatg

SEQ ID NO: 156847 - DNA, 25 bp, Canis familiaris
ggagtggagcctgcggcttaatttg

SEQ ID NO: 156848 - DNA, 25 bp, Canis familiaris
ggacttagccggcgcctgcacgtgt

SEQ ID NO: 156849 - DNA, 25 bp, Canis familiaris
ggaactacctggagacgacgtgcgt

SEQ ID NO: 156850 - DNA, 25 bp, Canis familiaris
ggaacgttttgcagccaacgtcgtc

SEQ ID NO: 156851 - DNA, 25 bp, Canis familiaris
ggaggtgttttgagacgttgttgtc

SEQ ID NO: 156852 - DNA, 25 bp, Canis familiaris
ggagggtacttgatgacgtctggtg

SEQ ID NO: 156853 - DNA, 25 bp, Canis familiaris
ggagggttcaagtcaacgtctgggc

SEQ ID NO: 156854 - DNA, 25 bp, Canis familiaris
ggagggtgtagggcagacgccaggc

SEQ ID NO: 156855 - DNA, 25 bp, Canis familiaris
ggaggagttatggccactcctcccc

SEQ ID NO: 156856 - DNA, 25 bp, Canis familiaris
ggaggccattgggcaactcctatgc

SEQ ID NO: 156857 - DNA, 25 bp, Canis familiaris
ggaggacacagacgcaaaccgatgt

SEQ ID NO: 156858 - DNA, 25 bp, Canis familiaris
ggaggcagccagggcttacctgtac

SEQ ID NO: 156859 - DNA, 25 bp, Canis familiaris
ggaggcagcctgggatgtcatctcc

SEQ ID NO: 156860 - DNA, 25 bp, Canis familiaris
ggatggctgcttcggatactacacc

SEQ ID NO: 156861 - DNA, 25 bp, Canis familiaris
ggatggcagcttggagcatagcaaa

SEQ ID NO: 156862 - DNA, 25 bp, Canis familiaris
ggaggcagctgagggcagtgcagaa

SEQ ID NO: 156863 - DNA, 25 bp, Canis familiaris
ggaggagctgaccaaagcagcccta

SEQ ID NO: 156864 - DNA, 25 bp, Canis familiaris
ggagaagtggagcacaacaactgaa

SEQ ID NO: 156865 - DNA, 25 bp, Canis familiaris
ggagggctgaacccagaattcgcta

SEQ ID NO: 156866 - DNA, 25 bp, Canis familiaris
ggaggtgctgacggacatatttgcc

SEQ ID NO: 156867 - DNA, 25 bp, Canis familiaris
ggaggttggcagcataattgggaag

SEQ ID NO: 156868 - DNA, 25 bp, Canis familiaris
ggaggttggtggtttagaggcaagt

SEQ ID NO: 156869 - DNA, 25 bp, Canis familiaris
ggaggtatttggtatgtgaggagat

SEQ ID NO: 156870 - DNA, 25 bp, Canis familiaris
ggaggcgacttgaagatggagtggt

SEQ ID NO: 156871 - DNA, 25 bp, Canis familiaris
ggaggccagtgaagcgtacctggtg

SEQ ID NO: 156872 - DNA, 25 bp, Canis familiaris
ggatggcacttggtgcgtacctgag

SEQ ID NO: 156873 - DNA, 25 bp, Canis familiaris
ggatggttctgtagggagcctggtc

SEQ ID NO: 156874 - DNA, 25 bp, Canis familiaris
ggatgtgtatagttcaggggtcgtc

SEQ ID NO: 156875 - DNA, 25 bp, Canis familiaris
ggagttctgagcactagaggtcgga

SEQ ID NO: 156876 - DNA, 25 bp, Canis familiaris
ggatgtttccttccagagaggcatg

SEQ ID NO: 156877 - DNA, 25 bp, Canis familiaris
ggatgtttccatttggcaaggaagg

SEQ ID NO: 156878 - DNA, 25 bp, Canis familiaris
ggatgttgctcactgtttcagcagt

SEQ ID NO: 156879 - DNA, 25 bp, Canis familiaris
ggatgtctcagcctgggatcagggc

SEQ ID NO: 156880 - DNA, 25 bp, Canis familiaris
ggatggccagagcggtcagtgacgc

SEQ ID NO: 156881 - DNA, 25 bp, Canis familiaris
ggaggcccagagggaatggaccccg

SEQ ID NO: 156882 - DNA, 25 bp, Canis familiaris
ggaggtctagactcagatgctaccc

SEQ ID NO: 156883 - DNA, 25 bp, Canis familiaris
ggaggactcaagtctagaaaatcct

SEQ ID NO: 156884 - DNA, 25 bp, Canis familiaris
ggaggactcaagctaatgaaggcca

SEQ ID NO: 156885 - DNA, 25 bp, Canis familiaris
ggaggattcagaggttgataatgtc

SEQ ID NO: 156886 - DNA, 25 bp, Canis familiaris
ggaggagaagctggttgtgaatgtg

SEQ ID NO: 156887 - DNA, 25 bp, Canis familiaris
ggaggctgagatgctgcgggaagtg

SEQ ID NO: 156888 - DNA, 25 bp, Canis familiaris
ggaggctggaggacaggcggaggct

SEQ ID NO: 156889 - DNA, 25 bp, Canis familiaris
ggatggcatggaggttctggggagc

SEQ ID NO: 156890 - DNA, 25 bp, Canis familiaris
ggatggcatataagtctcaaccgac

SEQ ID NO: 156891 - DNA, 25 bp, Canis familiaris
ggaggcatgatcctgttgatacctg

SEQ ID NO: 156892 - DNA, 25 bp, Canis familiaris
ggaggctgccttggtgagagcctgg

SEQ ID NO: 156893 - DNA, 25 bp, Canis familiaris
ggatgagtcacgactggcagaccgg

SEQ ID NO: 156894 - DNA, 25 bp, Canis familiaris
ggatgaggcaagagtcagaccccag

SEQ ID NO: 156895 - DNA, 25 bp, Canis familiaris
ggaggccaagatccatcagacacac

SEQ ID NO: 156896 - DNA, 25 bp, Canis familiaris
ggagtgcacttgtcataagtacacg

SEQ ID NO: 156897 - DNA, 25 bp, Canis familiaris
ggatgtcacatttttgagatacaca

SEQ ID NO: 156898 - DNA, 25 bp, Canis familiaris
ggatgtatattatgtgttatcactc

SEQ ID NO: 156899 - DNA, 25 bp, Canis familiaris
ggaggtgcatttcggatttcactct

SEQ ID NO: 156900 - DNA, 25 bp, Canis familiaris
ggatgggcctgtcgtgattggcttt

SEQ ID NO: 156901 - DNA, 25 bp, Canis familiaris
ggagtatcacttcctgtcgccctat

SEQ ID NO: 156902 - DNA, 25 bp, Canis familiaris
ggagtatttggttgggcaccttggc

SEQ ID NO: 156903 - DNA, 25 bp, Canis familiaris
ggagtgacgttgtgggatcgctttg

SEQ ID NO: 156904 - DNA, 25 bp, Canis familiaris
ggaggagccctaggaatgaccttgt

SEQ ID NO: 156905 - DNA, 25 bp, Canis familiaris
ggaggagtccaagacaatccctaat

SEQ ID NO: 156906 - DNA, 25 bp, Canis familiaris
ggaggacataacacaaacctctcaa

SEQ ID NO: 156907 - DNA, 25 bp, Canis familiaris
ggaggaatgctgactcgacaaccct

SEQ ID NO: 156908 - DNA, 25 bp, Canis familiaris
ggagaaaggaatcctcaaccttcct

SEQ ID NO: 156909 - DNA, 25 bp, Canis familiaris
ggaggaaggaatatgagccttctct

SEQ ID NO: 156910 - DNA, 25 bp, Canis familiaris
ggatggaggaggatggtggtttgct

SEQ ID NO: 156911 - DNA, 25 bp, Canis familiaris
ggatggaggaccaggtagtcggctc

SEQ ID NO: 156912 - DNA, 25 bp, Canis familiaris
ggaggagtacaatagccgtcaggct

SEQ ID NO: 156913 - DNA, 25 bp, Canis familiaris
ggatggaggacaaggagcggctgcg

SEQ ID NO: 156914 - DNA, 25 bp, Canis familiaris
ggatggggacgatgacctggtgatc

SEQ ID NO: 156915 - DNA, 25 bp, Canis familiaris
ggatggggcctaggccacagggatg

SEQ ID NO: 156916 - DNA, 25 bp, Canis familiaris
ggatgtgctcccgggatccgggatc

SEQ ID NO: 156917 - DNA, 25 bp, Canis familiaris
ggatgtgattctggagttccgggat

SEQ ID NO: 156918 - DNA, 25 bp, Canis familiaris
ggatgatcatttattaccaatgtga

SEQ ID NO: 156919 - DNA, 25 bp, Canis familiaris
ggatgagttgatcttcacttagtca

SEQ ID NO: 156920 - DNA, 25 bp, Canis familiaris
ggaaggtccagaccacttcactagc

SEQ ID NO: 156921 - DNA, 25 bp, Canis familiaris
ggaggttccagaccatcatacttga

SEQ ID NO: 156922 - DNA, 25 bp, Canis familiaris
ggaggttgtgaaccagtgcctgtca

SEQ ID NO: 156923 - DNA, 25 bp, Canis familiaris
ggaggcctggaaccagatgctgctc

SEQ ID NO: 156924 - DNA, 25 bp, Canis familiaris
ggatgggggataaatatctgcttct

SEQ ID NO: 156925 - DNA, 25 bp, Canis familiaris
ggatgggggtgacatcctcaatccg

SEQ ID NO: 156926 - DNA, 25 bp, Canis familiaris
ggatgggggtagtacgcacgaccac

SEQ ID NO: 156927 - DNA, 25 bp, Canis familiaris
ggatggctgaagtggacgccgacac

SEQ ID NO: 156928 - DNA, 25 bp, Canis familiaris
ggaggctgacagtgaaactaccaca

SEQ ID NO: 156929 - DNA, 25 bp, Canis familiaris
ggagacctcaggcaaataacccaaa

SEQ ID NO: 156930 - DNA, 25 bp, Canis familiaris
ggagtgactcgctgacaaaaaaaaa

SEQ ID NO: 156931 - DNA, 25 bp, Canis familiaris
ggaggacaagaagcgcaaggaagaa

SEQ ID NO: 156932 - DNA, 25 bp, Canis familiaris
ggaggtcaaggagggcaaggacatc

SEQ ID NO: 156933 - DNA, 25 bp, Canis familiaris
ggagtgccggcgggaaaggagccct

SEQ ID NO: 156934 - DNA, 25 bp, Canis familiaris
ggagtcacccgggaaaagatggagg

SEQ ID NO: 156935 - DNA, 25 bp, Canis familiaris
ggatgacctgggagaaaggaggcag

SEQ ID NO: 156936 - DNA, 25 bp, Canis familiaris
ggaggcccaggaacaaagggagagg

SEQ ID NO: 156937 - DNA, 25 bp, Canis familiaris
ggaggccctctagcaaaaggagacc

SEQ ID NO: 156938 - DNA, 25 bp, Canis familiaris
ggaggccgtgtagcagaacagttgt

SEQ ID NO: 156939 - DNA, 25 bp, Canis familiaris
ggagtccagatgtcagccaaaggtc

SEQ ID NO: 156940 - DNA, 25 bp, Canis familiaris
ggagatgcacttccatcccaaggct

SEQ ID NO: 156941 - DNA, 25 bp, Canis familiaris
ggatgatgattctccctcatcaggc

SEQ ID NO: 156942 - DNA, 25 bp, Canis familiaris
ggatgatgttgctccacacatgatt

SEQ ID NO: 156943 - DNA, 25 bp, Canis familiaris
ggatgatgatgttccagatctcgta

SEQ ID NO: 156944 - DNA, 25 bp, Canis familiaris
ggatgagtgtggcgatgtcctggtc

SEQ ID NO: 156945 - DNA, 25 bp, Canis familiaris
ggatgagtggtgaaagccactgtta

SEQ ID NO: 156946 - DNA, 25 bp, Canis familiaris
ggatgaggtgtgaaagccactgcta

SEQ ID NO: 156947 - DNA, 25 bp, Canis familiaris
ggatggctctgtaaatgcctatgcc

SEQ ID NO: 156948 - DNA, 25 bp, Canis familiaris
ggaggcctcatgaagatgccttcca

SEQ ID NO: 156949 - DNA, 25 bp, Canis familiaris
ggatgtcctcaaattccttgcagca

SEQ ID NO: 156950 - DNA, 25 bp, Canis familiaris
ggatgtaccataatttctgtaacca

SEQ ID NO: 156951 - DNA, 25 bp, Canis familiaris
ggagtacctagtgagcttaagaaga

SEQ ID NO: 156952 - DNA, 25 bp, Canis familiaris
ggaggacagcaacgggctaataggg

SEQ ID NO: 156953 - DNA, 25 bp, Canis familiaris
ggaggggagaagccctacagggtgt

SEQ ID NO: 156954 - DNA, 25 bp, Canis familiaris
ggatgtggagaataccaacaaggga

SEQ ID NO: 156955 - DNA, 25 bp, Canis familiaris
tgaagttggttattttacaagggat

SEQ ID NO: 156956 - DNA, 25 bp, Canis familiaris
ggaggctgtgttattttccagggaa

SEQ ID NO: 156957 - DNA, 25 bp, Canis familiaris
ggaggacgcctgattttcagggaag

SEQ ID NO: 156958 - DNA, 25 bp, Canis familiaris
ggagtcatacctagtttatcagatg

SEQ ID NO: 156959 - DNA, 25 bp, Canis familiaris
ggaggcatgaccatcgtctacaaga

SEQ ID NO: 156960 - DNA, 25 bp, Canis familiaris
ggatggatgaaaaggctgtactgag

SEQ ID NO: 156961 - DNA, 25 bp, Canis familiaris
ggaggaagatgaagatgcttacaag

SEQ ID NO: 156962 - DNA, 25 bp, Canis familiaris
ggaggtatgaaagtctgcaacaagc

SEQ ID NO: 156963 - DNA, 25 bp, Canis familiaris
ggatggggacaagctgcgagtactg

SEQ ID NO: 156964 - DNA, 25 bp, Canis familiaris
ggaggtgacacattgcctgcagatg

SEQ ID NO: 156965 - DNA, 25 bp, Canis familiaris
ggaggacaccaactctgagagataa

SEQ ID NO: 156966 - DNA, 25 bp, Canis familiaris
ggaggtccagcagcctgaggacaga

SEQ ID NO: 156967 - DNA, 25 bp, Canis familiaris
ggagtttcacgctctaaaatgggaa

SEQ ID NO: 156968 - DNA, 25 bp, Canis familiaris
ggaggtgttctgaagcttaaaggga

SEQ ID NO: 156969 - DNA, 25 bp, Canis familiaris
ggagggctttgtgtatcaatacgtg

SEQ ID NO: 156970 - DNA, 25 bp, Canis familiaris
ggaggaggccgtgtagcagaacagt

SEQ ID NO: 156971 - DNA, 25 bp, Canis familiaris
ggagggggagctgtactgcgaaact

SEQ ID NO: 156972 - DNA, 25 bp, Canis familiaris
ggagggccggtgagaatggcaccct

SEQ ID NO: 156973 - DNA, 25 bp, Canis familiaris
ggaggacgggtgagaaggcagaggt

SEQ ID NO: 156974 - DNA, 25 bp, Canis familiaris
ggaggtgctggagttggcaagacag

SEQ ID NO: 156975 - DNA, 25 bp, Canis familiaris
ggaggtcagcaggtggagacgatgc

SEQ ID NO: 156976 - DNA, 25 bp, Canis familiaris
ggaggtcagcaggtggagacgatgc

SEQ ID NO: 156977 - DNA, 25 bp, Canis familiaris
ggaggtcagcaggtggagacgatgc

SEQ ID NO: 156978 - DNA, 25 bp, Canis familiaris
ggaggtcagcaggtggagacgatgc

SEQ ID NO: 156979 - DNA, 25 bp, Canis familiaris
ggaggtcagcaggtggagacgatgc

SEQ ID NO: 156980 - DNA, 25 bp, Canis familiaris
ggaggtcagcaggtggagacgatgc

SEQ ID NO: 156981 - DNA, 25 bp, Canis familiaris
ggaggtcagcaggtggagacgatgc

SEQ ID NO: 156982 - DNA, 25 bp, Canis familiaris
ggaggtcagcaggtggagacgatgc

SEQ ID NO: 156983 - DNA, 25 bp, Canis familiaris
ggaggtcatgcaggtggagacgatg

SEQ ID NO: 156984 - DNA, 25 bp, Canis familiaris
ggagtgatcatgttgataatgctcg

SEQ ID NO: 156985 - DNA, 25 bp, Canis familiaris
ggaggctatttaaatgcctaatcca

SEQ ID NO: 156986 - DNA, 25 bp, Canis familiaris
ggaggctgttggaaaggctgcccca

SEQ ID NO: 156987 - DNA, 25 bp, Canis familiaris
ggatggtgttggaggtgcttctgaa

SEQ ID NO: 156988 - DNA, 25 bp, Canis familiaris
ggatgggtttgttgggctttccaga

SEQ ID NO: 156989 - DNA, 25 bp, Canis familiaris
ggagtgcggttgtagcgagggtcct

SEQ ID NO: 156990 - DNA, 25 bp, Canis familiaris
ggagtgggggctatggaggctccag

SEQ ID NO: 156991 - DNA, 25 bp, Canis familiaris
ggaggagggagcagtaagggcctgg

SEQ ID NO: 156992 - DNA, 25 bp, Canis familiaris
ggactcaggtgaaggtttggggttg

SEQ ID NO: 156993 - DNA, 25 bp, Canis familiaris
ggatgtcgattgggtttgtgggggg

SEQ ID NO: 156994 - DNA, 25 bp, Canis familiaris
ggatgttgtatgggtgtgtctgaat

SEQ ID NO: 156995 - DNA, 25 bp, Canis familiaris
ggatggtttcatttgctgtctcaag

SEQ ID NO: 156996 - DNA, 25 bp, Canis familiaris
ggatggtgagtcaaccttcttgctg

SEQ ID NO: 156997 - DNA, 25 bp, Canis familiaris
ggagttgaggctccagttcttgtgc

SEQ ID NO: 156998 - DNA, 25 bp, Canis familiaris
ggatgttaggtgctgttatattgtc

SEQ ID NO: 156999 - DNA, 25 bp, Canis familiaris
ggaggtggttagtttacattgtcaa

SEQ ID NO: 157000 - DNA, 25 bp, Canis familiaris
ggagtaggtcggtatattctgttaa

SEQ ID NO: 157001 - DNA, 25 bp, Canis familiaris
ggaaggcgtcgtcttctcttaaaat

SEQ ID NO: 157002 - DNA, 25 bp, Canis familiaris
ggacgacgacgtcattgtgctcaat

SEQ ID NO: 157003 - DNA, 25 bp, Canis familiaris
ggaggacgaggatgtatgagccaat

SEQ ID NO: 157004 - DNA, 25 bp, Canis familiaris
ggagggctcagttttgataccaatg

SEQ ID NO: 157005 - DNA, 25 bp, Canis familiaris
ggaggcaataggatatcttcaaagt

SEQ ID NO: 157006 - DNA, 25 bp, Canis familiaris
ggaggctgtagtatccttcagaaaa

SEQ ID NO: 157007 - DNA, 25 bp, Canis familiaris
ggatggattgacctaccttagcaga

SEQ ID NO: 157008 - DNA, 25 bp, Canis familiaris
ggaggttccgtagctcataagcact

SEQ ID NO: 157009 - DNA, 25 bp, Canis familiaris
ggaggttccgttatctatgacatca

SEQ ID NO: 157010 - DNA, 25 bp, Canis familiaris
ggactttcctacttggcagtacatc

SEQ ID NO: 157011 - DNA, 25 bp, Canis familiaris
ggactttcctacttggcagtacatc

SEQ ID NO: 157012 - DNA, 25 bp, Canis familiaris
ggactttccaatgttcgtacaactc

SEQ ID NO: 157013 - DNA, 25 bp, Canis familiaris
ggactattccctgttgattactcaa

SEQ ID NO: 157014 - DNA, 25 bp, Canis familiaris
ggaggattacctgcttggctattat

SEQ ID NO: 157015 - DNA, 25 bp, Canis familiaris
ggaggattatacttattaggattat

SEQ ID NO: 157016 - DNA, 25 bp, Canis familiaris
ggagctgattaaaaagttgaaacat

SEQ ID NO: 157017 - DNA, 25 bp, Canis familiaris
ggactgttctaaatagttaatggcc

SEQ ID NO: 157018 - DNA, 25 bp, Canis familiaris
ggagatttccaatcgttaattcctc

SEQ ID NO: 157019 - DNA, 25 bp, Canis familiaris
ggaggatttgacaaccttttacctg

SEQ ID NO: 157020 - DNA, 25 bp, Canis familiaris
ggagggtctgtttattttacacatc

SEQ ID NO: 157021 - DNA, 25 bp, Canis familiaris
ggagggattgttctggttcaaccct

SEQ ID NO: 157022 - DNA, 25 bp, Canis familiaris
ggatggaattttttggttcttctcg

SEQ ID NO: 157023 - DNA, 25 bp, Canis familiaris
ggatggaattttgccctgtacttgc

SEQ ID NO: 157024 - DNA, 25 bp, Canis familiaris
ggatgtattatttaaccttattgtg

SEQ ID NO: 157025 - DNA, 25 bp, Canis familiaris
ggatgggctattttcttctttttga

SEQ ID NO: 157026 - DNA, 25 bp, Canis familiaris
ggatgggtgatatttcttgcttctc

SEQ ID NO: 157027 - DNA, 25 bp, Canis familiaris
ggatggtttgcatttctgttttaaa

SEQ ID NO: 157028 - DNA, 25 bp, Canis familiaris
ggaggccagatctttctttttaaag

SEQ ID NO: 157029 - DNA, 25 bp, Canis familiaris
ggaggtcaagcaattgattttttta

SEQ ID NO: 157030 - DNA, 25 bp, Canis familiaris
ggaggtaactttctccagctttcag

SEQ ID NO: 157031 - DNA, 25 bp, Canis familiaris
ggagtggaagtttctgtccagccct

SEQ ID NO: 157032 - DNA, 25 bp, Canis familiaris
ggaggtgtcctgcattgacaagccc

SEQ ID NO: 157033 - DNA, 25 bp, Canis familiaris
ggatggttggcacatgtgatcagtc

SEQ ID NO: 157034 - DNA, 25 bp, Canis familiaris
ggaggttgacaccatgtggatttaa

SEQ ID NO: 157035 - DNA, 25 bp, Canis familiaris
ggaggagtacctagtgagcttaaga

SEQ ID NO: 157036 - DNA, 25 bp, Canis familiaris
ggagcacctgagctaagccttaagg

SEQ ID NO: 157037 - DNA, 25 bp, Canis familiaris
ggagaccatggaaaaagctgtagag

SEQ ID NO: 157038 - DNA, 25 bp, Canis familiaris
ggaggcctggtgcaaagctggaagc

SEQ ID NO: 157039 - DNA, 25 bp, Canis familiaris
ggaggcctgggttggactcagggtc

SEQ ID NO: 157040 - DNA, 25 bp, Canis familiaris
ggagtgtcggtcgtcgagacgggtc

SEQ ID NO: 157041 - DNA, 25 bp, Canis familiaris
ggcaggtccctaactgacctgggct

SEQ ID NO: 157042 - DNA, 25 bp, Canis familiaris
ggatggttgcactatacaacactgg

SEQ ID NO: 157043 - DNA, 25 bp, Canis familiaris
ggatgggttcaaacaacagctggga

SEQ ID NO: 157044 - DNA, 25 bp, Canis familiaris
ggaggacttcaacagacacttggac

SEQ ID NO: 157045 - DNA, 25 bp, Canis familiaris
ggatgtgccttcagaaacctgctgc

SEQ ID NO: 157046 - DNA, 25 bp, Canis familiaris
ggaggccattcacgcaaaacagctt

SEQ ID NO: 157047 - DNA, 25 bp, Canis familiaris
ggagtccctaggtcaaacctttgat

SEQ ID NO: 157048 - DNA, 25 bp, Canis familiaris
ggagtcttgtaggaccaatccctta

SEQ ID NO: 157049 - DNA, 25 bp, Canis familiaris
ggagttttattatcattacccttat

SEQ ID NO: 157050 - DNA, 25 bp, Canis familiaris
ggaggtgttatttacttccgacatg

SEQ ID NO: 157051 - DNA, 25 bp, Canis familiaris
ggagggttttattctttatggatga

SEQ ID NO: 157052 - DNA, 25 bp, Canis familiaris
ggagggtttggatctatgctccgtg

SEQ ID NO: 157053 - DNA, 25 bp, Canis familiaris
ggaggcagctttcagactattttat

SEQ ID NO: 157054 - DNA, 25 bp, Canis familiaris
ggaggcccattgatgactttgtgga

SEQ ID NO: 157055 - DNA, 25 bp, Canis familiaris
ggagtgcaccattttaatcttttac

SEQ ID NO: 157056 - DNA, 25 bp, Canis familiaris
ggagtgcggcaaaggttttcgtcac

SEQ ID NO: 157057 - DNA, 25 bp, Canis familiaris
ggagatgcgtacaggttttcactaa

SEQ ID NO: 157058 - DNA, 25 bp, Canis familiaris
ggagggataccagatttccactcct

SEQ ID NO: 157059 - DNA, 25 bp, Canis familiaris
ggagggaaactctttgctccagttc

SEQ ID NO: 157060 - DNA, 25 bp, Canis familiaris
ggagtgggaacctgttccagttaag

SEQ ID NO: 157061 - DNA, 25 bp, Canis familiaris
ggaggaggaaactgtcccaacttct

SEQ ID NO: 157062 - DNA, 25 bp, Canis familiaris
ggaggcaggatgtacattctccccg

SEQ ID NO: 157063 - DNA, 25 bp, Canis familiaris
ggaggcaggatgtacattctccccg

SEQ ID NO: 157064 - DNA, 25 bp, Canis familiaris
ggagatgtggaacaactccccgttt

SEQ ID NO: 157065 - DNA, 25 bp, Canis familiaris
ggaggatggaactagacccctctct

SEQ ID NO: 157066 - DNA, 25 bp, Canis familiaris
ggacgaaattgataacccctgctgt

SEQ ID NO: 157067 - DNA, 25 bp, Canis familiaris
ggagagaaacgtttgtcctcctgtt

SEQ ID NO: 157068 - DNA, 25 bp, Canis familiaris
ggaggtaaccattgtgtcttctgtg

SEQ ID NO: 157069 - DNA, 25 bp, Canis familiaris
ggaggctatgagttatgagtctttt

SEQ ID NO: 157070 - DNA, 25 bp, Canis familiaris
ggaggctcagagtgattgtgcacta

SEQ ID NO: 157071 - DNA, 25 bp, Canis familiaris
ggaggctggagatgatgctggaaag

SEQ ID NO: 157072 - DNA, 25 bp, Canis familiaris
ggaggcaggaaaccagtgcagaatg

SEQ ID NO: 157073 - DNA, 25 bp, Canis familiaris
ggaggaacaaacaagatgtgatctt

SEQ ID NO: 157074 - DNA, 25 bp, Canis familiaris
ggaggacacgaacaactatcttaca

SEQ ID NO: 157075 - DNA, 25 bp, Canis familiaris
ggaggcccagtataacttgtgccaa

SEQ ID NO: 157076 - DNA, 25 bp, Canis familiaris
tgggacccagactcagacgttggta

SEQ ID NO: 157077 - DNA, 25 bp, Canis familiaris
ggagaccaccacccagattggtgat

SEQ ID NO: 157078 - DNA, 25 bp, Canis familiaris
ggagtcgatcccaacagcaggaata

SEQ ID NO: 157079 - DNA, 25 bp, Canis familiaris
ggaggacatccggaacacaggaaac

SEQ ID NO: 157080 - DNA, 25 bp, Canis familiaris
ggaggacaccaggaacaaacccatg

SEQ ID NO: 157081 - DNA, 25 bp, Canis familiaris
ggaggacctccatagaaaggccatg

SEQ ID NO: 157082 - DNA, 25 bp, Canis familiaris
ggaggaccgctcaggaagtggcagc

SEQ ID NO: 157083 - DNA, 25 bp, Canis familiaris
ggaggggctgcttggaaactggctc

SEQ ID NO: 157084 - DNA, 25 bp, Canis familiaris
ggaggctggccttcaggaatcaagc

SEQ ID NO: 157085 - DNA, 25 bp, Canis familiaris
ggagacggcccagaaacaagtgttg

SEQ ID NO: 157086 - DNA, 25 bp, Canis familiaris
ggagaggggccgagccaagaggtga

SEQ ID NO: 157087 - DNA, 25 bp, Canis familiaris
ggaagacggcggagcgctacattgg

SEQ ID NO: 157088 - DNA, 25 bp, Canis familiaris
ggaggcatctggggtacctgaagtc

SEQ ID NO: 157089 - DNA, 25 bp, Canis familiaris
ggaggtttgggatgctctgacagac

SEQ ID NO: 157090 - DNA, 25 bp, Canis familiaris
ggaggatttgatgcgagttactgac

SEQ ID NO: 157091 - DNA, 25 bp, Canis familiaris
ggaggactggtggggatgttcgatc

SEQ ID NO: 157092 - DNA, 25 bp, Canis familiaris
ggaggacatcctgaacatgtttgtc

SEQ ID NO: 157093 - DNA, 25 bp, Canis familiaris
ggagatggaccaaaacactggagtt

SEQ ID NO: 157094 - DNA, 25 bp, Canis familiaris
ggaggagatccaaaggctcgaagct

SEQ ID NO: 157095 - DNA, 25 bp, Canis familiaris
ggatggagactcttcaagatcgaca

SEQ ID NO: 157096 - DNA, 25 bp, Canis familiaris
ggaggaggcgtttgagcatctgacc

SEQ ID NO: 157097 - DNA, 25 bp, Canis familiaris
ggaggagtggaggaggcatctgcag

SEQ ID NO: 157098 - DNA, 25 bp, Canis familiaris
ggaggagaggaggggcacctgagtg

SEQ ID NO: 157099 - DNA, 25 bp, Canis familiaris
ggaggaacagcagagacaacagcag

SEQ ID NO: 157100 - DNA, 25 bp, Canis familiaris
ggaggaatacatgcaccatacacta

SEQ ID NO: 157101 - DNA, 25 bp, Canis familiaris
ggaggaagacccacatcaacattgt

SEQ ID NO: 157102 - DNA, 25 bp, Canis familiaris
ggacgaaaccccgacgacaatattg

SEQ ID NO: 157103 - DNA, 25 bp, Canis familiaris
ggaccaaacccttcaggacttggag

SEQ ID NO: 157104 - DNA, 25 bp, Canis familiaris
ggaccagtaaccgcaggcaggacgg

SEQ ID NO: 157105 - DNA, 25 bp, Canis familiaris
ggaggcttaaggagggcaggacaga

SEQ ID NO: 157106 - DNA, 25 bp, Canis familiaris
ggagttggaacacggggcaggagaa

SEQ ID NO: 157107 - DNA, 25 bp, Canis familiaris
ggaggctgagggccaaggtcgggaa

SEQ ID NO: 157108 - DNA, 25 bp, Canis familiaris
ggaggagacgtgaccggtctgtaga

SEQ ID NO: 157109 - DNA, 25 bp, Canis familiaris
ggaggtcacgtgacccagactgagc

SEQ ID NO: 157110 - DNA, 25 bp, Canis familiaris
ggaggtcacgtgacccagactgagc

SEQ ID NO: 157111 - DNA, 25 bp, Canis familiaris
ggaggtcacgtgacccagactgagc

SEQ ID NO: 157112 - DNA, 25 bp, Canis familiaris
ggaggtcacgtgacccagactgagc

SEQ ID NO: 157113 - DNA, 25 bp, Canis familiaris
ggaggataggttttgccagctagcg

SEQ ID NO: 157114 - DNA, 25 bp, Canis familiaris
ggagtatggtgtattcacaagacag

SEQ ID NO: 157115 - DNA, 25 bp, Canis familiaris
ggagtacggtatcccagacatacgg

SEQ ID NO: 157116 - DNA, 25 bp, Canis familiaris
ggaggcacagtgaacctaggcacca

SEQ ID NO: 157117 - DNA, 25 bp, Canis familiaris
ggatggcgatggaactataacaaca

SEQ ID NO: 157118 - DNA, 25 bp, Canis familiaris
ggaggaatctgatgtttccagacat

SEQ ID NO: 157119 - DNA, 25 bp, Canis familiaris
ggatggaatcatgcggtatccacga

SEQ ID NO: 157120 - DNA, 25 bp, Canis familiaris
ggagactatgatgctggttcccagg

SEQ ID NO: 157121 - DNA, 25 bp, Canis familiaris
ggagattcgcatgcgaggatggtcg

SEQ ID NO: 157122 - DNA, 25 bp, Canis familiaris
ggagtccagcgatgaggagagccag

SEQ ID NO: 157123 - DNA, 25 bp, Canis familiaris
ggagtcctgcaagactgggtcattg

SEQ ID NO: 157124 - DNA, 25 bp, Canis familiaris
ggagtccggggactcggagatcgag

SEQ ID NO: 157125 - DNA, 25 bp, Canis familiaris
ggaggcgggagggaaggaattggat

SEQ ID NO: 157126 - DNA, 25 bp, Canis familiaris
ggaggcgggcagaccaaaaacgagg

SEQ ID NO: 157127 - DNA, 25 bp, Canis familiaris
ggaggcgggaccaacaaagtctgag

SEQ ID NO: 157128 - DNA, 25 bp, Canis familiaris
ggagggtggaacacaaggtgggatc

SEQ ID NO: 157129 - DNA, 25 bp, Canis familiaris
ggaggggggacttcagagagggagg

SEQ ID NO: 157130 - DNA, 25 bp, Canis familiaris
ggaggatgtggggcagatacagagg

SEQ ID NO: 157131 - DNA, 25 bp, Canis familiaris
ggaggagggggccattggtggatcc

SEQ ID NO: 157132 - DNA, 25 bp, Canis familiaris
ggaggacaggggacctgccagtacc

SEQ ID NO: 157133 - DNA, 25 bp, Canis familiaris
ggaggcaagtgttgccctgtcagaa

SEQ ID NO: 157134 - DNA, 25 bp, Canis familiaris
ggagtgaaaagcttccatactacaa

SEQ ID NO: 157135 - DNA, 25 bp, Canis familiaris
ggagggaacagtttcaactaatact

SEQ ID NO: 157136 - DNA, 25 bp, Canis familiaris
ggaggggaaggcatccctagagcct

SEQ ID NO: 157137 - DNA, 25 bp, Canis familiaris
ggaggaggaagagccacctgcaaga

SEQ ID NO: 157138 - DNA, 25 bp, Canis familiaris
ggaggcaggaaggacgagaagaagg

SEQ ID NO: 157139 - DNA, 25 bp, Canis familiaris
ggaggagcccaggatggagacagac

SEQ ID NO: 157140 - DNA, 25 bp, Canis familiaris
ggaggacacctgggatgagctcctc

SEQ ID NO: 157141 - DNA, 25 bp, Canis familiaris
ggaggcccacatggagaaacttctc

SEQ ID NO: 157142 - DNA, 25 bp, Canis familiaris
ggaggcccaggtggagaacctcatc

SEQ ID NO: 157143 - DNA, 25 bp, Canis familiaris
ggaggccgcggaggctgaggcctct

SEQ ID NO: 157144 - DNA, 25 bp, Canis familiaris
ggaggatcctggcatctagagcctt

SEQ ID NO: 157145 - DNA, 25 bp, Canis familiaris
ggagggcctggacttcaagccctct

SEQ ID NO: 157146 - DNA, 25 bp, Canis familiaris
ggagggccagaagttttgccctttg

SEQ ID NO: 157147 - DNA, 25 bp, Canis familiaris
ggaggtgaaaaccttgtccttcctg

SEQ ID NO: 157148 - DNA, 25 bp, Canis familiaris
ggaggtaaatagctttagtatggta

SEQ ID NO: 157149 - DNA, 25 bp, Canis familiaris
ggagggaaacatctactgagtttgt

SEQ ID NO: 157150 - DNA, 25 bp, Canis familiaris
ggaggtggaaatcattcgggctcgt

SEQ ID NO: 157151 - DNA, 25 bp, Canis familiaris
ggagtagagaaacacttggacctct

SEQ ID NO: 157152 - DNA, 25 bp, Canis familiaris
ggagggaacaagctcctggacttcc

SEQ ID NO: 157153 - DNA, 25 bp, Canis familiaris
ggaggagaataacctctctacctct

SEQ ID NO: 157154 - DNA, 25 bp, Canis familiaris
ggaggatgaatataccattgatggt

SEQ ID NO: 157155 - DNA, 25 bp, Canis familiaris
ggaggatgatgctaaggtttgggaa

SEQ ID NO: 157156 - DNA, 25 bp, Canis familiaris
ggatggattatgcactgtttgggtc

SEQ ID NO: 157157 - DNA, 25 bp, Canis familiaris
ggaggcttgtggtatgtttgtccct

SEQ ID NO: 157158 - DNA, 25 bp, Canis familiaris
ggagtctactggtgtcttcaccacc

SEQ ID NO: 157159 - DNA, 25 bp, Canis familiaris
ggagttcaccgaagctgagagcaac

SEQ ID NO: 157160 - DNA, 25 bp, Canis familiaris
ggagtctcacagcacagtgctactt

SEQ ID NO: 157161 - DNA, 25 bp, Canis familiaris
ggagtccaagcggggcattcgagaa

SEQ ID NO: 157162 - DNA, 25 bp, Canis familiaris
ggagtacgggtccagaatctgacga

SEQ ID NO: 157163 - DNA, 25 bp, Canis familiaris
ggaggagctggtgcacatgttcaac

SEQ ID NO: 157164 - DNA, 25 bp, Canis familiaris
ggagttgctggtggcatttgtacag

SEQ ID NO: 157165 - DNA, 25 bp, Canis familiaris
ggagtgtcctgggcacttttcagga

SEQ ID NO: 157166 - DNA, 25 bp, Canis familiaris
ggaggttgctgactaattttacggt

SEQ ID NO: 157167 - DNA, 25 bp, Canis familiaris
ggaggtacggtactttctacagtgt

SEQ ID NO: 157168 - DNA, 25 bp, Canis familiaris
ggagggagggtatgttctatttgtt

SEQ ID NO: 157169 - DNA, 25 bp, Canis familiaris
ggagcggcgggatatagtctttttt

SEQ ID NO: 157170 - DNA, 25 bp, Canis familiaris
ggagaggcccagggctatctctttc

SEQ ID NO: 157171 - DNA, 25 bp, Canis familiaris
ggagggaccagtgaattctttccta

SEQ ID NO: 157172 - DNA, 25 bp, Canis familiaris
ggaggggtcagtttcttttgctcca

SEQ ID NO: 157173 - DNA, 25 bp, Canis familiaris
ggaggggatctatctgtttctctcc

SEQ ID NO: 157174 - DNA, 25 bp, Canis familiaris
ggaggagtgatcgaactgattgtat

SEQ ID NO: 157175 - DNA, 25 bp, Canis familiaris
ggaggagatgcttaccatgtagtgt

SEQ ID NO: 157176 - DNA, 25 bp, Canis familiaris
ggaggatgagcttccttcatggatc

SEQ ID NO: 157177 - DNA, 25 bp, Canis familiaris
ggaggatgcagtgtgctgttagacc

SEQ ID NO: 157178 - DNA, 25 bp, Canis familiaris
ggatggccaggcctgttctaatgac

SEQ ID NO: 157179 - DNA, 25 bp, Canis familiaris
ggaggcctggctattgtcaagctta

SEQ ID NO: 157180 - DNA, 25 bp, Canis familiaris
ggatggctattttttgctcatcagc

SEQ ID NO: 157181 - DNA, 25 bp, Canis familiaris
ggaggcttagccttgtcatgacagc

SEQ ID NO: 157182 - DNA, 25 bp, Canis familiaris
ggaggcactcaggatgtggcaactc

SEQ ID NO: 157183 - DNA, 25 bp, Canis familiaris
ggaggatcataggagtgcggctgct

SEQ ID NO: 157184 - DNA, 25 bp, Canis familiaris
ggaggactgagagtctgctggctcc

SEQ ID NO: 157185 - DNA, 25 bp, Canis familiaris
ggaggcgtggaggcctcgagatcgc

SEQ ID NO: 157186 - DNA, 25 bp, Canis familiaris
ggagggtctgagtcactgatagtag

SEQ ID NO: 157187 - DNA, 25 bp, Canis familiaris
ggaggcgtcggctgcaaatgcagag

SEQ ID NO: 157188 - DNA, 25 bp, Canis familiaris
ggaggctttggctcaagcatggatt

SEQ ID NO: 157189 - DNA, 25 bp, Canis familiaris
ggaggctctgtgcaggaagtctgat

SEQ ID NO: 157190 - DNA, 25 bp, Canis familiaris
ggagtgcctgcgaaagggcctgaag

SEQ ID NO: 157191 - DNA, 25 bp, Canis familiaris
ggaggcgcgcagaaatagtgctaaa

SEQ ID NO: 157192 - DNA, 25 bp, Canis familiaris
ggagggcgagatgtacgaagatgac

SEQ ID NO: 157193 - DNA, 25 bp, Canis familiaris
ggaggccgagatcaaggtcgagaaa

SEQ ID NO: 157194 - DNA, 25 bp, Canis familiaris
ggaggcctggttagaggtcagacaa

SEQ ID NO: 157195 - DNA, 25 bp, Canis familiaris
ggaggcacgtgttctaagtgctgac

SEQ ID NO: 157196 - DNA, 25 bp, Canis familiaris
ggagagcatagtgcagatgacaggg

SEQ ID NO: 157197 - DNA, 25 bp, Canis familiaris
ggaggacagttcaatgcacaggttc

SEQ ID NO: 157198 - DNA, 25 bp, Canis familiaris
ggaggaactgatccagcagctgagg

SEQ ID NO: 157199 - DNA, 25 bp, Canis familiaris
ggaggacagtgactctgactctggc

SEQ ID NO: 157200 - DNA, 25 bp, Canis familiaris
ggaggaacgaatgcctcttgccacg

SEQ ID NO: 157201 - DNA, 25 bp, Canis familiaris
ggagggaggactccaccaatcgagc

SEQ ID NO: 157202 - DNA, 25 bp, Canis familiaris
ggaggtagcggatctcacaactggg

SEQ ID NO: 157203 - DNA, 25 bp, Canis familiaris
ggaggtaaagatttccatacttgac

SEQ ID NO: 157204 - DNA, 25 bp, Canis familiaris
ggcagagtacagttttcctggggca

SEQ ID NO: 157205 - DNA, 25 bp, Canis familiaris
ggagagtgacaaagttcctagacta

SEQ ID NO: 157206 - DNA, 25 bp, Canis familiaris
ggagtcgagcacttgttacgagaca

SEQ ID NO: 157207 - DNA, 25 bp, Canis familiaris
ggactctgagacattggacttcaaa

SEQ ID NO: 157208 - DNA, 25 bp, Canis familiaris
ggagctattgagatagtaccgtaag

SEQ ID NO: 157209 - DNA, 25 bp, Canis familiaris
ggagtaatagttggctatcgcctta

SEQ ID NO: 157210 - DNA, 25 bp, Canis familiaris
ggagtatgaagctcttctcagagtt

SEQ ID NO: 157211 - DNA, 25 bp, Canis familiaris
ggaggtgacattattcacaggttcc

SEQ ID NO: 157212 - DNA, 25 bp, Canis familiaris
ggaggtgaagtcattcttcgtgctc

SEQ ID NO: 157213 - DNA, 25 bp, Canis familiaris
ggagggccacatattgttcggctcc

SEQ ID NO: 157214 - DNA, 25 bp, Canis familiaris
ggaagatgccgtacttttcgttcct

SEQ ID NO: 157215 - DNA, 25 bp, Canis familiaris
ggaggaccggttattcagcttctcc

SEQ ID NO: 157216 - DNA, 25 bp, Canis familiaris
ggaggacctggtgtttatcttctgg

SEQ ID NO: 157217 - DNA, 25 bp, Canis familiaris
ggagggtcttgatgttttttctggg

SEQ ID NO: 157218 - DNA, 25 bp, Canis familiaris
ggaggattttacttgagattatttt

SEQ ID NO: 157219 - DNA, 25 bp, Canis familiaris
ggagtggagcctgcttgagattctt

SEQ ID NO: 157220 - DNA, 25 bp, Canis familiaris
gcaggtcagcacgttgctgtcgatt

SEQ ID NO: 157221 - DNA, 25 bp, Canis familiaris
ggaggatgccctggaaaatgggggc

SEQ ID NO: 157222 - DNA, 25 bp, Canis familiaris
ggaggaaccttgaactgggccagac

SEQ ID NO: 157223 - DNA, 25 bp, Canis familiaris
ggagggagccaagacgggcatcaag

SEQ ID NO: 157224 - DNA, 25 bp, Canis familiaris
ggaggcggccaacaagggcgatgtg

SEQ ID NO: 157225 - DNA, 25 bp, Canis familiaris
ggagggggaacaggatggaccattc

SEQ ID NO: 157226 - DNA, 25 bp, Canis familiaris
ggagggacggacagatggacagcag

SEQ ID NO: 157227 - DNA, 25 bp, Canis familiaris
ggaggtgagggaatccagcgggagg

SEQ ID NO: 157228 - DNA, 25 bp, Canis familiaris
ggagtggaacagaggcaaagtgagg

SEQ ID NO: 157229 - DNA, 25 bp, Canis familiaris
ggagtctccatatcaggcaaagtat

SEQ ID NO: 157230 - DNA, 25 bp, Canis familiaris
ggaggctgcctttaatgaaatgatg

SEQ ID NO: 157231 - DNA, 25 bp, Canis familiaris
ggagtctactcttcaactaaagaaa

SEQ ID NO: 157232 - DNA, 25 bp, Canis familiaris
ggagttgaccattatgaccaaactg

SEQ ID NO: 157233 - DNA, 25 bp, Canis familiaris
ggagtgagaccattctacacaatca

SEQ ID NO: 157234 - DNA, 25 bp, Canis familiaris
ggaggtcctcaaagagcaaatcaaa

SEQ ID NO: 157235 - DNA, 25 bp, Canis familiaris
ggaggaccatccaaggataccagga

SEQ ID NO: 157236 - DNA, 25 bp, Canis familiaris
ggaggagtctcctatgagaacttgg

SEQ ID NO: 157237 - DNA, 25 bp, Canis familiaris
ggagagaatcctgtgacaatgcttt

SEQ ID NO: 157238 - DNA, 25 bp, Canis familiaris
ggaggaatgcccatacatgtgtata

SEQ ID NO: 157239 - DNA, 25 bp, Canis familiaris
ggagtggattccatatggtgtatag

SEQ ID NO: 157240 - DNA, 25 bp, Canis familiaris
ggaggatgatatggctttctttgaa

SEQ ID NO: 157241 - DNA, 25 bp, Canis familiaris
ggagggatgggcctttcttgaatgg

SEQ ID NO: 157242 - DNA, 25 bp, Canis familiaris
ggaggaaggtggctatttactggtg

SEQ ID NO: 157243 - DNA, 25 bp, Canis familiaris
ggaggaatgcctggaggctttcctg

SEQ ID NO: 157244 - DNA, 25 bp, Canis familiaris
ggaggagacctgattgctttccgta

SEQ ID NO: 157245 - DNA, 25 bp, Canis familiaris
ggaggacactttgtgatttccatta

SEQ ID NO: 157246 - DNA, 25 bp, Canis familiaris
tgcgggaaccttgtacaccgatcat

SEQ ID NO: 157247 - DNA, 25 bp, Canis familiaris
ggaggaacacagacaaacaacgaca

SEQ ID NO: 157248 - DNA, 25 bp, Canis familiaris
ggaggacaccagagattggaccaca

SEQ ID NO: 157249 - DNA, 25 bp, Canis familiaris
ggagggaattgaaattgtgaacact

SEQ ID NO: 157250 - DNA, 25 bp, Canis familiaris
ggagtatggttgcaaagctgaaact

SEQ ID NO: 157251 - DNA, 25 bp, Canis familiaris
ggaggatggtgttaagagctgcagg

SEQ ID NO: 157252 - DNA, 25 bp, Canis familiaris
ggaggtgaggtgaggagctcagcct

SEQ ID NO: 157253 - DNA, 25 bp, Canis familiaris
ggaggctcacttaagacatgctaca

SEQ ID NO: 157254 - DNA, 25 bp, Canis familiaris
ggaggaccttctagatatgtatcac

SEQ ID NO: 157255 - DNA, 25 bp, Canis familiaris
ggaggacctgatggcaggaatcatc

SEQ ID NO: 157256 - DNA, 25 bp, Canis familiaris
ggaggacttgatgctggagcctaca

SEQ ID NO: 157257 - DNA, 25 bp, Canis familiaris
ggaggaactgtattgaagcctgcca

SEQ ID NO: 157258 - DNA, 25 bp, Canis familiaris
ggaggtgactgcggaacaccagcct

SEQ ID NO: 157259 - DNA, 25 bp, Canis familiaris
ggagtgtgacggcaaggtcaacatc

SEQ ID NO: 157260 - DNA, 25 bp, Canis familiaris
ggaggaacttccaaggtccaatggg

SEQ ID NO: 157261 - DNA, 25 bp, Canis familiaris
ggagtgatagctttgaaggttcata

SEQ ID NO: 157262 - DNA, 25 bp, Canis familiaris
ggagtaacaaatgcagtgatacata

SEQ ID NO: 157263 - DNA, 25 bp, Canis familiaris
ggagatgaagaattggattccctca

SEQ ID NO: 157264 - DNA, 25 bp, Canis familiaris
ggagatgataagtgtgtcccttcta

SEQ ID NO: 157265 - DNA, 25 bp, Canis familiaris
ggagagataaaattttgccagttaa

SEQ ID NO: 157266 - DNA, 25 bp, Canis familiaris
ggaggcatcgtatttttggcatttg

SEQ ID NO: 157267 - DNA, 25 bp, Canis familiaris
ggaggcagccaatttgtctgttttg

SEQ ID NO: 157268 - DNA, 25 bp, Canis familiaris
ggaggcaggggttacatgttcatgt

SEQ ID NO: 157269 - DNA, 25 bp, Canis familiaris
ggaggagggcggttctgtatctgcc

SEQ ID NO: 157270 - DNA, 25 bp, Canis familiaris
ggagctgggtggctttattcagccc

SEQ ID NO: 157271 - DNA, 25 bp, Canis familiaris
ggagggggaggtgctttacagccca

SEQ ID NO: 157272 - DNA, 25 bp, Canis familiaris
ggaggtggtcagaggcgttgaagcc

SEQ ID NO: 157273 - DNA, 25 bp, Canis familiaris
ggaggtggttgagtggtgtggctac

SEQ ID NO: 157274 - DNA, 25 bp, Canis familiaris
ggaggtgggaggggtgtcagttcat

SEQ ID NO: 157275 - DNA, 25 bp, Canis familiaris
ggaggtaggtggggggatggatgaa

SEQ ID NO: 157276 - DNA, 25 bp, Canis familiaris
ggagggaggaaggggcgtgaggagc

SEQ ID NO: 157277 - DNA, 25 bp, Canis familiaris
ggaggaagaggagaggggcaggagc

SEQ ID NO: 157278 - DNA, 25 bp, Canis familiaris
ggaggaagaggacgaggagggagtg

SEQ ID NO: 157279 - DNA, 25 bp, Canis familiaris
ggaggaggatgagccgggaggaggg

SEQ ID NO: 157280 - DNA, 25 bp, Canis familiaris
ggaggagacataggcacctgggggg

SEQ ID NO: 157281 - DNA, 25 bp, Canis familiaris
ggaggagatgaatgccctgcgaggc

SEQ ID NO: 157282 - DNA, 25 bp, Canis familiaris
ggaggaagccgagcagctgctagac

SEQ ID NO: 157283 - DNA, 25 bp, Canis familiaris
ggaggagatctccatgaaggaagag

SEQ ID NO: 157284 - DNA, 25 bp, Canis familiaris
ggaggagcaaccacaggaacaatcc

SEQ ID NO: 157285 - DNA, 25 bp, Canis familiaris
ggaggacatacgatcggagccactc

SEQ ID NO: 157286 - DNA, 25 bp, Canis familiaris
ggagtgaagacgagcaggccacctc

SEQ ID NO: 157287 - DNA, 25 bp, Canis familiaris
ggaggcaagctggggcagagccacc

SEQ ID NO: 157288 - DNA, 25 bp, Canis familiaris
ggagtcctgctggggagacactcca

SEQ ID NO: 157289 - DNA, 25 bp, Canis familiaris
ggagtcggagacggagacctacacg

SEQ ID NO: 157290 - DNA, 25 bp, Canis familiaris
ggagttccaggcaagaagcccacgg

SEQ ID NO: 157291 - DNA, 25 bp, Canis familiaris
ggagttcaaggaggagggccgcaag

SEQ ID NO: 157292 - DNA, 25 bp, Canis familiaris
ggagttcctggagatcatggcgctc

SEQ ID NO: 157293 - DNA, 25 bp, Canis familiaris
ggagtacgtgtgagtctgcacgccc

SEQ ID NO: 157294 - DNA, 25 bp, Canis familiaris
ggaggtcgcgaaagctcgaggcgtc

SEQ ID NO: 157295 - DNA, 25 bp, Canis familiaris
ggagtcccagcatctgttgagggtc

SEQ ID NO: 157296 - DNA, 25 bp, Canis familiaris
ggagtggctgggtcttctgggaccc

SEQ ID NO: 157297 - DNA, 25 bp, Canis familiaris
ggagggtgtgactttggggaggatc

SEQ ID NO: 157298 - DNA, 25 bp, Canis familiaris
ggaggttggaccttgttatggtgat

SEQ ID NO: 157299 - DNA, 25 bp, Canis familiaris
ggagttttaccctattgcatggcaa

SEQ ID NO: 157300 - DNA, 25 bp, Canis familiaris
ggagttttgcaccgtaatagcagca

SEQ ID NO: 157301 - DNA, 25 bp, Canis familiaris
ggagttgtctgcaaaggaatttcat

SEQ ID NO: 157302 - DNA, 25 bp, Canis familiaris
ggagtggttgcgggaatttcttttg

SEQ ID NO: 157303 - DNA, 25 bp, Canis familiaris
ggagattggtggtgttctcctttcc

SEQ ID NO: 157304 - DNA, 25 bp, Canis familiaris
ggagttcgggaagttcctgctctcc

SEQ ID NO: 157305 - DNA, 25 bp, Canis familiaris
ggagtcttgggattgagtccccatc

SEQ ID NO: 157306 - DNA, 25 bp, Canis familiaris
ggagttgatgggtttgacgccaccg

SEQ ID NO: 157307 - DNA, 25 bp, Canis familiaris
ggagtctacgtgtttagccactcgg

SEQ ID NO: 157308 - DNA, 25 bp, Canis familiaris
ggagttgactgttccaaccatttgc

SEQ ID NO: 157309 - DNA, 25 bp, Canis familiaris
ggagattacttcatagaccacaaca

SEQ ID NO: 157310 - DNA, 25 bp, Canis familiaris
ggaattcccttgtaaccagtaagca

SEQ ID NO: 157311 - DNA, 25 bp, Canis familiaris
ggagatgacccttcaaaccattaag

SEQ ID NO: 157312 - DNA, 25 bp, Canis familiaris
ggaggatcctcttgaacatcactat

SEQ ID NO: 157313 - DNA, 25 bp, Canis familiaris
ggagctactgacttcaactacttcg

SEQ ID NO: 157314 - DNA, 25 bp, Canis familiaris
ggaggaagatgttcaacgacgtcgc

SEQ ID NO: 157315 - DNA, 25 bp, Canis familiaris
ggaggaagagctgtcaggcctgtcg

SEQ ID NO: 157316 - DNA, 25 bp, Canis familiaris
ggaggaaaggcacagagagcagatc

SEQ ID NO: 157317 - DNA, 25 bp, Canis familiaris
ggaggagatcaggaacatgggcagc

SEQ ID NO: 157318 - DNA, 25 bp, Canis familiaris
ggaggtatcataaatcggtcacgtg

SEQ ID NO: 157319 - DNA, 25 bp, Canis familiaris
ggagtgatacatctacgagctcaag

SEQ ID NO: 157320 - DNA, 25 bp, Canis familiaris
ggaggtcttcttaaagctcaaggat

SEQ ID NO: 157321 - DNA, 25 bp, Canis familiaris
ggaggtgcttttccagagatccatg

SEQ ID NO: 157322 - DNA, 25 bp, Canis familiaris
ggagtgtgctttacattatccctga

SEQ ID NO: 157323 - DNA, 25 bp, Canis familiaris
ggaggactgataactctcactcagc

SEQ ID NO: 157324 - DNA, 25 bp, Canis familiaris
ggaggactgatgactctcacctcag

SEQ ID NO: 157325 - DNA, 25 bp, Canis familiaris
ggaggtgcatgctctgtacatgtca

SEQ ID NO: 157326 - DNA, 25 bp, Canis familiaris
ggagggcatgcttgatgcagccttc

SEQ ID NO: 157327 - DNA, 25 bp, Canis familiaris
ggaggacatgctggacatggcaccc

SEQ ID NO: 157328 - DNA, 25 bp, Canis familiaris
ggagggcatgctcaaagacctgcag

SEQ ID NO: 157329 - DNA, 25 bp, Canis familiaris
ggagggcattgccaacatcactgcc

SEQ ID NO: 157330 - DNA, 25 bp, Canis familiaris
ggaggtcatggacagctcttggcat

SEQ ID NO: 157331 - DNA, 25 bp, Canis familiaris
ggagttcacagacagattttaccag

SEQ ID NO: 157332 - DNA, 25 bp, Canis familiaris
ggagttaagtcatgcttttccagta

SEQ ID NO: 157333 - DNA, 25 bp, Canis familiaris
ggagttttatctatcttacaagttc

SEQ ID NO: 157334 - DNA, 25 bp, Canis familiaris
ggagtttgctaatgtttccaactta

SEQ ID NO: 157335 - DNA, 25 bp, Canis familiaris
ggagttgtcgaatgttcctttgtta

SEQ ID NO: 157336 - DNA, 25 bp, Canis familiaris
ggagttgattagtgtgggattttta

SEQ ID NO: 157337 - DNA, 25 bp, Canis familiaris
ggagactcttttgtggtactgtttc

SEQ ID NO: 157338 - DNA, 25 bp, Canis familiaris
ggagaccttgattttcaggcagttt

SEQ ID NO: 157339 - DNA, 25 bp, Canis familiaris
ggaggtcctcaagtacagcgagttc

SEQ ID NO: 157340 - DNA, 25 bp, Canis familiaris
ggaggttctcaacagaggtgtcccg

SEQ ID NO: 157341 - DNA, 25 bp, Canis familiaris
ggagagaacccgcagacgttgctcc

SEQ ID NO: 157342 - DNA, 25 bp, Canis familiaris
ggaggaacctgtccaaggattccgc

SEQ ID NO: 157343 - DNA, 25 bp, Canis familiaris
ggagtgacacttcttaggttctggt

SEQ ID NO: 157344 - DNA, 25 bp, Canis familiaris
ggcatgtacctgtggggtttctggg

SEQ ID NO: 157345 - DNA, 25 bp, Canis familiaris
ggagtccttgacggggaactccagg

SEQ ID NO: 157346 - DNA, 25 bp, Canis familiaris
ggagtccttccaggggatatcctta

SEQ ID NO: 157347 - DNA, 25 bp, Canis familiaris
ggagttatctcccgggagatcctct

SEQ ID NO: 157348 - DNA, 25 bp, Canis familiaris
ggagttgtttctcaggcaatcctgt

SEQ ID NO: 157349 - DNA, 25 bp, Canis familiaris
ggagttgtagaagcaggcctcgctg

SEQ ID NO: 157350 - DNA, 25 bp, Canis familiaris
ttagttggtggagcgatttgtctgg

SEQ ID NO: 157351 - DNA, 25 bp, Canis familiaris
ggagatttgggaggtgttatttggg

SEQ ID NO: 157352 - DNA, 25 bp, Canis familiaris
ggagatttcagatggactaattttg

SEQ ID NO: 157353 - DNA, 25 bp, Canis familiaris
ggagtctgggatgggcgctaatttc

SEQ ID NO: 157354 - DNA, 25 bp, Canis familiaris
ggaggggggggtcatgtattcaatt

SEQ ID NO: 157355 - DNA, 25 bp, Canis familiaris
ggaggtggggagcctccagttctac

SEQ ID NO: 157356 - DNA, 25 bp, Canis familiaris
ggaggtgtccgttcaccaattttca

SEQ ID NO: 157357 - DNA, 25 bp, Canis familiaris
ggaggttccttattctgaagtttct

SEQ ID NO: 157358 - DNA, 25 bp, Canis familiaris
ggaggttcccaactataagcttata

SEQ ID NO: 157359 - DNA, 25 bp, Canis familiaris
ggaggttgtccataattgactttaa

SEQ ID NO: 157360 - DNA, 25 bp, Canis familiaris
ggaggaagcccatacttgagtgatt

SEQ ID NO: 157361 - DNA, 25 bp, Canis familiaris
ggaggtagaagatgacttgaggcat

SEQ ID NO: 157362 - DNA, 25 bp, Canis familiaris
ggaggaggaagacgactaggagcta

SEQ ID NO: 157363 - DNA, 25 bp, Canis familiaris
ggaggagctgtgagggccacaacaa

SEQ ID NO: 157364 - DNA, 25 bp, Canis familiaris
ggagtcctttgccagagccaaaaac

SEQ ID NO: 157365 - DNA, 25 bp, Canis familiaris
ggagggcttacctagccaaaagctc

SEQ ID NO: 157366 - DNA, 25 bp, Canis familiaris
ggaggtgtctttctccaacaagcct

SEQ ID NO: 157367 - DNA, 25 bp, Canis familiaris
ggaggttcatgaccctccagaacac

SEQ ID NO: 157368 - DNA, 25 bp, Canis familiaris
ggagaggtcgaaggcccagaaagca

SEQ ID NO: 157369 - DNA, 25 bp, Canis familiaris
ggaggttcgaagacgatcagatacc

SEQ ID NO: 157370 - DNA, 25 bp, Canis familiaris
ggaggttctataataagcaggagct

SEQ ID NO: 157371 - DNA, 25 bp, Canis familiaris
ggagggtcataacaagcattgagca

SEQ ID NO: 157372 - DNA, 25 bp, Canis familiaris
ggagggcaacaaggacagcttccaa

SEQ ID NO: 157373 - DNA, 25 bp, Canis familiaris
ggaggtctatcaaaacactttattt

SEQ ID NO: 157374 - DNA, 25 bp, Canis familiaris
ggaggtcatacaaagtattttcctt

SEQ ID NO: 157375 - DNA, 25 bp, Canis familiaris
ggaggtcacaccaggatgtagtcct

SEQ ID NO: 157376 - DNA, 25 bp, Canis familiaris
ggagggaacacgggagctctgtccc

SEQ ID NO: 157377 - DNA, 25 bp, Canis familiaris
ggagggtcatagggcaggtctctac

SEQ ID NO: 157378 - DNA, 25 bp, Canis familiaris
ggagggttactactgcacactctcc

SEQ ID NO: 157379 - DNA, 25 bp, Canis familiaris
ggagggtaacaactgcacactctcc

SEQ ID NO: 157380 - DNA, 25 bp, Canis familiaris
ggagggtaacaactgcacactctcc

SEQ ID NO: 157381 - DNA, 25 bp, Canis familiaris
ggagggtaacaactgcacactctcc

SEQ ID NO: 157382 - DNA, 25 bp, Canis familiaris
ggagggaacatctacatatcacccc

SEQ ID NO: 157383 - DNA, 25 bp, Canis familiaris
ggaggagcacacaaacagacagccc

SEQ ID NO: 157384 - DNA, 25 bp, Canis familiaris
ggaggaccacatggacgacggttcc

SEQ ID NO: 157385 - DNA, 25 bp, Canis familiaris
ggaggaccagctggacaactcgtcc

SEQ ID NO: 157386 - DNA, 25 bp, Canis familiaris
ggactatccactgtaactcaggccc

SEQ ID NO: 157387 - DNA, 25 bp, Canis familiaris
ggacatggccaaaccggatcagtgc

SEQ ID NO: 157388 - DNA, 25 bp, Canis familiaris
ggagatggccaaatccagtcgcctt

SEQ ID NO: 157389 - DNA, 25 bp, Canis familiaris
ggaggagccagagctcagcatcacc

SEQ ID NO: 157390 - DNA, 25 bp, Canis familiaris
ggaggagacagagctgcagcagcaa

SEQ ID NO: 157391 - DNA, 25 bp, Canis familiaris
ggaggagaatctggcgacagcacca

SEQ ID NO: 157392 - DNA, 25 bp, Canis familiaris
ggaggagagatcccaggagatccct

SEQ ID NO: 157393 - DNA, 25 bp, Canis familiaris
ggaggaggatcataggagtgcggct

SEQ ID NO: 157394 - DNA, 25 bp, Canis familiaris
ggaggagaaatggagggcctggcta

SEQ ID NO: 157395 - DNA, 25 bp, Canis familiaris
ggagatgggttggaggtgtctggcc

SEQ ID NO: 157396 - DNA, 25 bp, Canis familiaris
ggagggtttcaggaatggtggcctt

SEQ ID NO: 157397 - DNA, 25 bp, Canis familiaris
ggagggtttaagagactgtccattt

SEQ ID NO: 157398 - DNA, 25 bp, Canis familiaris
ggaggtgttaaagttcgagtgccat

SEQ ID NO: 157399 - DNA, 25 bp, Canis familiaris
ggagtattaatatcccagaatccat

SEQ ID NO: 157400 - DNA, 25 bp, Canis familiaris
ggagaattttaaccaggagatcctg

SEQ ID NO: 157401 - DNA, 25 bp, Canis familiaris
ggagagcattcaagaaggagggtca

SEQ ID NO: 157402 - DNA, 25 bp, Canis familiaris
ggagataactcagaagtgggtgctg

SEQ ID NO: 157403 - DNA, 25 bp, Canis familiaris
ggagtcttgtcattaaggtgtgtgt

SEQ ID NO: 157404 - DNA, 25 bp, Canis familiaris
ggagtgtgtgggagggtgtggtagt

SEQ ID NO: 157405 - DNA, 25 bp, Canis familiaris
ggaggtgtcagggggaggttgtggt

SEQ ID NO: 157406 - DNA, 25 bp, Canis familiaris
ggaggtctaccaggggaatagggat

SEQ ID NO: 157407 - DNA, 25 bp, Canis familiaris
ggaggtctacaacgggaatatgggg

SEQ ID NO: 157408 - DNA, 25 bp, Canis familiaris
ggagtgtatccaagcagggggaggg

SEQ ID NO: 157409 - DNA, 25 bp, Canis familiaris
ggaggagcatcctggtggggaagaa

SEQ ID NO: 157410 - DNA, 25 bp, Canis familiaris
ggaggacgacaaggtggggacagac

SEQ ID NO: 157411 - DNA, 25 bp, Canis familiaris
ggaaacctcagaggcggccaaacct

SEQ ID NO: 157412 - DNA, 25 bp, Canis familiaris
ggcaaagaccaatcgtcctaactac

SEQ ID NO: 157413 - DNA, 25 bp, Canis familiaris
ggagcaagaccaactgcttttaagt

SEQ ID NO: 157414 - DNA, 25 bp, Canis familiaris
ggagaatccgagacatcttgcctac

SEQ ID NO: 157415 - DNA, 25 bp, Canis familiaris
ggagaatgtccagcttttctcccaa

SEQ ID NO: 157416 - DNA, 25 bp, Canis familiaris
ggagtgttcattgatattttcctca

SEQ ID NO: 157417 - DNA, 25 bp, Canis familiaris
ggagtctttggcatttttccactgc

SEQ ID NO: 157418 - DNA, 25 bp, Canis familiaris
ggagttttgttttgtattgtattgc

SEQ ID NO: 157419 - DNA, 25 bp, Canis familiaris
ggagttgtgtttgctattttgatta

SEQ ID NO: 157420 - DNA, 25 bp, Canis familiaris
ggagtgttggctgttatcatttatt

SEQ ID NO: 157421 - DNA, 25 bp, Canis familiaris
ggaggttggtgtggattctgttgaa

SEQ ID NO: 157422 - DNA, 25 bp, Canis familiaris
ggaggtggtggtgatctgtttggaa

SEQ ID NO: 157423 - DNA, 25 bp, Canis familiaris
ggaggtggtgacggagtttgggaca

SEQ ID NO: 157424 - DNA, 25 bp, Canis familiaris
ggaggtgttgcagtggagtgatggg

SEQ ID NO: 157425 - DNA, 25 bp, Canis familiaris
ggaggacctcactgagatcagggac

SEQ ID NO: 157426 - DNA, 25 bp, Canis familiaris
ggagagatcccctggcttgcagaaa

SEQ ID NO: 157427 - DNA, 25 bp, Canis familiaris
ggaggagctcgcagaggatgtggaa

SEQ ID NO: 157428 - DNA, 25 bp, Canis familiaris
ggaggagcagctcagagattaggaa

SEQ ID NO: 157429 - DNA, 25 bp, Canis familiaris
ggaggagctgctgaacctgaggaag

SEQ ID NO: 157430 - DNA, 25 bp, Canis familiaris
ggagcacactctgatatcgggggag

SEQ ID NO: 157431 - DNA, 25 bp, Canis familiaris
ggagaacgttttcgaggtggagcat

SEQ ID NO: 157432 - DNA, 25 bp, Canis familiaris
ggagaaagttatttaggctggctaa

SEQ ID NO: 157433 - DNA, 25 bp, Canis familiaris
ggagaagaatggttttttggcgatg

SEQ ID NO: 157434 - DNA, 25 bp, Canis familiaris
ggagcaagggctcctttttgtggca

SEQ ID NO: 157435 - DNA, 25 bp, Canis familiaris
ggagacgcaggcacaactctttata

SEQ ID NO: 157436 - DNA, 25 bp, Canis familiaris
ggagcaaaggcttgagacccaaaaa

SEQ ID NO: 157437 - DNA, 25 bp, Canis familiaris
ggagagaaacttgtccgagaacaac

SEQ ID NO: 157438 - DNA, 25 bp, Canis familiaris
ggagagaaacctatccagaggaaac

SEQ ID NO: 157439 - DNA, 25 bp, Canis familiaris
ggaggatcgaccagtgtggggacag

SEQ ID NO: 157440 - DNA, 25 bp, Canis familiaris
ggaggataggtcaggtgcgttatct

SEQ ID NO: 157441 - DNA, 25 bp, Canis familiaris
ggaggataggtcaggtgcgttatct

SEQ ID NO: 157442 - DNA, 25 bp, Canis familiaris
ggaggagggagcagtgatggttcta

SEQ ID NO: 157443 - DNA, 25 bp, Canis familiaris
ggaggaggagacagttgcagttcat

SEQ ID NO: 157444 - DNA, 25 bp, Canis familiaris
ggaggggaagtaatgtcactgatat

SEQ ID NO: 157445 - DNA, 25 bp, Canis familiaris
ggaggaggctgagaaggcagctgac

SEQ ID NO: 157446 - DNA, 25 bp, Canis familiaris
ggagtggggacagagggagagcttg

SEQ ID NO: 157447 - DNA, 25 bp, Canis familiaris
ggagggtggaattgggggtgctggc

SEQ ID NO: 157448 - DNA, 25 bp, Canis familiaris
ggagggtgtggggaggaggtgtgac

SEQ ID NO: 157449 - DNA, 25 bp, Canis familiaris
ggagggcattcggtagggcagggcc

SEQ ID NO: 157450 - DNA, 25 bp, Canis familiaris
ggagggcatctcggtagaggaggcg

SEQ ID NO: 157451 - DNA, 25 bp, Canis familiaris
ggaggagaccctgcaggatgaggag

SEQ ID NO: 157452 - DNA, 25 bp, Canis familiaris
ggaggaggccttggatttcagtgag

SEQ ID NO: 157453 - DNA, 25 bp, Canis familiaris
ggagggagtgcaaggactttgtggg

SEQ ID NO: 157454 - DNA, 25 bp, Canis familiaris
ggagtccgtgaacgcagcttttgaa

SEQ ID NO: 157455 - DNA, 25 bp, Canis familiaris
ggagccaagtaaaggccttagccct

SEQ ID NO: 157456 - DNA, 25 bp, Canis familiaris
ggaccaaggtggggcttaagccctg

SEQ ID NO: 157457 - DNA, 25 bp, Canis familiaris
ggacgggaatgtccgcttgtactcc

SEQ ID NO: 157458 - DNA, 25 bp, Canis familiaris
ggaggggaaggagtggctgtccacc

SEQ ID NO: 157459 - DNA, 25 bp, Canis familiaris
ggaggaggagcggagggtggccgcc

SEQ ID NO: 157460 - DNA, 25 bp, Canis familiaris
ggaggagggcaacgaggtggcacac

SEQ ID NO: 157461 - DNA, 25 bp, Canis familiaris
ggaggagggcgacggtcgtgatcga

SEQ ID NO: 157462 - DNA, 25 bp, Canis familiaris
ggaggatttgtgtggatctgatatt

SEQ ID NO: 157463 - DNA, 25 bp, Canis familiaris
ggagtgactagttgttgcctatgag

SEQ ID NO: 157464 - DNA, 25 bp, Canis familiaris
ggaggtaagtggttgcctaaggctc

SEQ ID NO: 157465 - DNA, 25 bp, Canis familiaris
ggagggcagagttttgcctttgtct

SEQ ID NO: 157466 - DNA, 25 bp, Canis familiaris
ggagggcagtgacattgcctgtttt

SEQ ID NO: 157467 - DNA, 25 bp, Canis familiaris
ggaggaggatgaccctgagctgttc

SEQ ID NO: 157468 - DNA, 25 bp, Canis familiaris
ggaggaggaatgcctcggtcactct

SEQ ID NO: 157469 - DNA, 25 bp, Canis familiaris
ggagggtgaatggccctgagccctc

SEQ ID NO: 157470 - DNA, 25 bp, Canis familiaris
ggaggagggcaggccctcatgtccc

SEQ ID NO: 157471 - DNA, 25 bp, Canis familiaris
ggaggaggagctgcagtgctaggac

SEQ ID NO: 157472 - DNA, 25 bp, Canis familiaris
ggaggaggacaccaggttcaacaaa

SEQ ID NO: 157473 - DNA, 25 bp, Canis familiaris
ggaggattgatacctgggtcaagaa

SEQ ID NO: 157474 - DNA, 25 bp, Canis familiaris
ggaggaggtgaactggccatcaagc

SEQ ID NO: 157475 - DNA, 25 bp, Canis familiaris
ggaggggcaatgtctggtgccagca

SEQ ID NO: 157476 - DNA, 25 bp, Canis familiaris
ggaggtggacgagcagatgctgaac

SEQ ID NO: 157477 - DNA, 25 bp, Canis familiaris
ggaggtagaactgcctctgagaggg

SEQ ID NO: 157478 - DNA, 25 bp, Canis familiaris
ggaggtagccctggttatggaggag

SEQ ID NO: 157479 - DNA, 25 bp, Canis familiaris
ggaggtgaccctgaggatctggggg

SEQ ID NO: 157480 - DNA, 25 bp, Canis familiaris
ggagtggaccacaggggcttggaag

SEQ ID NO: 157481 - DNA, 25 bp, Canis familiaris
ggagtggtgaccatggagacctgga

SEQ ID NO: 157482 - DNA, 25 bp, Canis familiaris
ggagaggcaggctggaagtcctgga

SEQ ID NO: 157483 - DNA, 25 bp, Canis familiaris
ggaggtcaggtttacagtccttgga

SEQ ID NO: 157484 - DNA, 25 bp, Canis familiaris
ggaggatcaggtcatccaactaatg

SEQ ID NO: 157485 - DNA, 25 bp, Canis familiaris
ggagggaggatgcatccagccatag

SEQ ID NO: 157486 - DNA, 25 bp, Canis familiaris
ggagatggaactggaagccctacgt

SEQ ID NO: 157487 - DNA, 25 bp, Canis familiaris
ggagaagacactggagtccgaccgg

SEQ ID NO: 157488 - DNA, 25 bp, Canis familiaris
ggagaagagaatgaaccaggccctt

SEQ ID NO: 157489 - DNA, 25 bp, Canis familiaris
ggagggaggagagcctctggatcct

SEQ ID NO: 157490 - DNA, 25 bp, Canis familiaris
ggagggagtggagtgagcccgtcgc

SEQ ID NO: 157491 - DNA, 25 bp, Canis familiaris
ggagggggagaccatgacctccagc

SEQ ID NO: 157492 - DNA, 25 bp, Canis familiaris
ggagggtgacaagttcaagctcaac

SEQ ID NO: 157493 - DNA, 25 bp, Canis familiaris
ggagtagttaactgctagcaatcca

SEQ ID NO: 157494 - DNA, 25 bp, Canis familiaris
ggagtacttaccaggagcaacttat

SEQ ID NO: 157495 - DNA, 25 bp, Canis familiaris
ggaggatggtaggcacaggaaaatt

SEQ ID NO: 157496 - DNA, 25 bp, Canis familiaris
ggaggatgtggaaacgctgaagaag

SEQ ID NO: 157497 - DNA, 25 bp, Canis familiaris
ggaggtgggataactgctgctagaa

SEQ ID NO: 157498 - DNA, 25 bp, Canis familiaris
ggaggtgggaagatgctgctcatag

SEQ ID NO: 157499 - DNA, 25 bp, Canis familiaris
ggaggatgatggagcgttgccaaga

SEQ ID NO: 157500 - DNA, 25 bp, Canis familiaris
ggaggtatgcagggagttccagcga

SEQ ID NO: 157501 - DNA, 25 bp, Canis familiaris
ggagtctgcagagagaagcccggag

SEQ ID NO: 157502 - DNA, 25 bp, Canis familiaris
ggcattagcggtaaaagctcaaagg

SEQ ID NO: 157503 - DNA, 25 bp, Canis familiaris
ggagtagctcccgaagagtaagagt

SEQ ID NO: 157504 - DNA, 25 bp, Canis familiaris
ggagttgcctcctgaattatggtta

SEQ ID NO: 157505 - DNA, 25 bp, Canis familiaris
ggaggatccctctgtaagatggctc

SEQ ID NO: 157506 - DNA, 25 bp, Canis familiaris
ggagggcctcttatggagtgacttt

SEQ ID NO: 157507 - DNA, 25 bp, Canis familiaris
ggaggggcttggaggagtcatcgat

SEQ ID NO: 157508 - DNA, 25 bp, Canis familiaris
ggagggagcttttcaggagatctgc

SEQ ID NO: 157509 - DNA, 25 bp, Canis familiaris
ggaggatactgtacaacgagttgtc

SEQ ID NO: 157510 - DNA, 25 bp, Canis familiaris
ggaggattatcttcatccagacttg

SEQ ID NO: 157511 - DNA, 25 bp, Canis familiaris
ggaggatttgattcacgagatttaa

SEQ ID NO: 157512 - DNA, 25 bp, Canis familiaris
ggaggtcctgattcaagaggtctga

SEQ ID NO: 157513 - DNA, 25 bp, Canis familiaris
ggagttcagcattcccagggtatag

SEQ ID NO: 157514 - DNA, 25 bp, Canis familiaris
ggaggtcagccctcagggtgaaggt

SEQ ID NO: 157515 - DNA, 25 bp, Canis familiaris
ggaggatgagccgggaggagggagg

SEQ ID NO: 157516 - DNA, 25 bp, Canis familiaris
ggaggtgatggtgctgggagaggtg

SEQ ID NO: 157517 - DNA, 25 bp, Canis familiaris
ggagggaggaggctgaggagcgtga

SEQ ID NO: 157518 - DNA, 25 bp, Canis familiaris
ggagagtgggggcgagctagggccg

SEQ ID NO: 157519 - DNA, 25 bp, Canis familiaris
ggaggtgagagctggaacggtcccg

SEQ ID NO: 157520 - DNA, 25 bp, Canis familiaris
ggaggtgcaagaacaagacggccca

SEQ ID NO: 157521 - DNA, 25 bp, Canis familiaris
ggagagctacgaactcaactcccac

SEQ ID NO: 157522 - DNA, 25 bp, Canis familiaris
ggagagaactttccatattcccagc

SEQ ID NO: 157523 - DNA, 25 bp, Canis familiaris
ggagaaacttgttcaattccctaag

SEQ ID NO: 157524 - DNA, 25 bp, Canis familiaris
ggagaaacctgtatgctaccctaag

SEQ ID NO: 157525 - DNA, 25 bp, Canis familiaris
ggagacgacacggtaggacagctta

SEQ ID NO: 157526 - DNA, 25 bp, Canis familiaris
ggagtctgaccgtttggtttctagc

SEQ ID NO: 157527 - DNA, 25 bp, Canis familiaris
ggagtgcttccgatgatggttgacc

SEQ ID NO: 157528 - DNA, 25 bp, Canis familiaris
ggagtgatggacatgctgaagttcc

SEQ ID NO: 157529 - DNA, 25 bp, Canis familiaris
ggaggtagtctgcctgataggcccc

SEQ ID NO: 157530 - DNA, 25 bp, Canis familiaris
ggaggtgacaagccgcatacgcacc

SEQ ID NO: 157531 - DNA, 25 bp, Canis familiaris
ggagggcacagtctgattctgcaca

SEQ ID NO: 157532 - DNA, 25 bp, Canis familiaris
ggagggcacagtctgattctgcaca

SEQ ID NO: 157533 - DNA, 25 bp, Canis familiaris
ggagggcacagtctgattctgcaca

SEQ ID NO: 157534 - DNA, 25 bp, Canis familiaris
ggagggcaagtctggtgccagcagc

SEQ ID NO: 157535 - DNA, 25 bp, Canis familiaris
ggagggcaagtctggtgccagcagc

SEQ ID NO: 157536 - DNA, 25 bp, Canis familiaris
ggagtccacagtgatggttctgcgc

SEQ ID NO: 157537 - DNA, 25 bp, Canis familiaris
ggagtctgccttgagatttctctgc

SEQ ID NO: 157538 - DNA, 25 bp, Canis familiaris
ggaggtgccttttgcttagcagatg

SEQ ID NO: 157539 - DNA, 25 bp, Canis familiaris
ggagaacacttcacttcacaatgat

SEQ ID NO: 157540 - DNA, 25 bp, Canis familiaris
ggaagaaatggctcgtcaccttcgg

SEQ ID NO: 157541 - DNA, 25 bp, Canis familiaris
ggaagaaatggctcgtcaccttcgg

SEQ ID NO: 157542 - DNA, 25 bp, Canis familiaris
ggagaagaagtaacgtactcttcgt

SEQ ID NO: 157543 - DNA, 25 bp, Canis familiaris
ggagcaaaacttgattaccgccgat

SEQ ID NO: 157544 - DNA, 25 bp, Canis familiaris
ggagaacaaccttattgaccggcgc

SEQ ID NO: 157545 - DNA, 25 bp, Canis familiaris
ggagaacaggctccaagcaaccggg

SEQ ID NO: 157546 - DNA, 25 bp, Canis familiaris
ggagatacatgccctagatcagacc

SEQ ID NO: 157547 - DNA, 25 bp, Canis familiaris
ggagtcacatcaacatcgctcagac

SEQ ID NO: 157548 - DNA, 25 bp, Canis familiaris
ggagtccacagatctgtcagaccat

SEQ ID NO: 157549 - DNA, 25 bp, Canis familiaris
ggagtccgcagactgcgagcgaccc

SEQ ID NO: 157550 - DNA, 25 bp, Canis familiaris
ggagtcgtaatgagagccacctctc

SEQ ID NO: 157551 - DNA, 25 bp, Canis familiaris
ggagggtcaagggaccctgccatcg

SEQ ID NO: 157552 - DNA, 25 bp, Canis familiaris
ggagtggcacaagtacccactgcca

SEQ ID NO: 157553 - DNA, 25 bp, Canis familiaris
ggagggatcagtaatcccacgctgg

SEQ ID NO: 157554 - DNA, 25 bp, Canis familiaris
ggagtggtcaacgatgcacacggtt

SEQ ID NO: 157555 - DNA, 25 bp, Canis familiaris
ggaggtgtcttggatatcctggttc

SEQ ID NO: 157556 - DNA, 25 bp, Canis familiaris
ggagaatattttagacctgggtgaa

SEQ ID NO: 157557 - DNA, 25 bp, Canis familiaris
ggagaatatggtgtcctctcggaat

SEQ ID NO: 157558 - DNA, 25 bp, Canis familiaris
ggaggtctgaaggaacctgcttact

SEQ ID NO: 157559 - DNA, 25 bp, Canis familiaris
ggagtgtctgaagacagctacagtg

SEQ ID NO: 157560 - DNA, 25 bp, Canis familiaris
ggaggtcgaaggccctgacagaaac

SEQ ID NO: 157561 - DNA, 25 bp, Canis familiaris
ggagactctgagggccagtgaagga

SEQ ID NO: 157562 - DNA, 25 bp, Canis familiaris
ggagatataggcttccagttatgga

SEQ ID NO: 157563 - DNA, 25 bp, Canis familiaris
ggagaatccggactagtctctggat

SEQ ID NO: 157564 - DNA, 25 bp, Canis familiaris
ggagagacgctgccaacatgtagtg

SEQ ID NO: 157565 - DNA, 25 bp, Canis familiaris
ggagcagcacacacagaagtcggtc

SEQ ID NO: 157566 - DNA, 25 bp, Canis familiaris
ggagaagcagcagcgcaaacgcctc

SEQ ID NO: 157567 - DNA, 25 bp, Canis familiaris
ggagatcacgcccatgataacacct

SEQ ID NO: 157568 - DNA, 25 bp, Canis familiaris
ggagtcacagcgacgtcaaagacct

SEQ ID NO: 157569 - DNA, 25 bp, Canis familiaris
ggagctaaagccaacaaacaccatt

SEQ ID NO: 157570 - DNA, 25 bp, Canis familiaris
ggagtataagcccatcaagaaagtc

SEQ ID NO: 157571 - DNA, 25 bp, Canis familiaris
ggagtcaagaagcctaccaaagccc

SEQ ID NO: 157572 - DNA, 25 bp, Canis familiaris
ggagtcagatcttggtctacaacag

SEQ ID NO: 157573 - DNA, 25 bp, Canis familiaris
ggagtctgtcttgagcttaataaat

SEQ ID NO: 157574 - DNA, 25 bp, Canis familiaris
ggagggtcatcagcagcattgagca

SEQ ID NO: 157575 - DNA, 25 bp, Canis familiaris
ggagggagcacagacacaggcaaac

SEQ ID NO: 157576 - DNA, 25 bp, Canis familiaris
ggaggggtgagggcacaggcagaag

SEQ ID NO: 157577 - DNA, 25 bp, Canis familiaris
ggagtggtggaacctcaggctgaag

SEQ ID NO: 157578 - DNA, 25 bp, Canis familiaris
ggagcggctgggtgtcagcgatgat

SEQ ID NO: 157579 - DNA, 25 bp, Canis familiaris
ggagaggctgggaaacattggttag

SEQ ID NO: 157580 - DNA, 25 bp, Canis familiaris
ggagattgggccaaaaggctgttga

SEQ ID NO: 157581 - DNA, 25 bp, Canis familiaris
ggagtatggcctaattctggttaag

SEQ ID NO: 157582 - DNA, 25 bp, Canis familiaris
ggagttggcagaggattcggttacg

SEQ ID NO: 157583 - DNA, 25 bp, Canis familiaris
ggcagttgactgtgttcagctttat

SEQ ID NO: 157584 - DNA, 25 bp, Canis familiaris
ggagtataattctctcagctgtatt

SEQ ID NO: 157585 - DNA, 25 bp, Canis familiaris
ggagtcaatttatgcacattccttg

SEQ ID NO: 157586 - DNA, 25 bp, Canis familiaris
ggagtcaatcagcattgacaggact

SEQ ID NO: 157587 - DNA, 25 bp, Canis familiaris
ggagatcagatcagctatgaccagg

SEQ ID NO: 157588 - DNA, 25 bp, Canis familiaris
ggagaagcatcttgtctgcacagct

SEQ ID NO: 157589 - DNA, 25 bp, Canis familiaris
ggagaccctcgtggacatttacggg

SEQ ID NO: 157590 - DNA, 25 bp, Canis familiaris
ggagagccgacgtgacgtacgcggc

SEQ ID NO: 157591 - DNA, 25 bp, Canis familiaris
ggagagggagaaggtcgtacggaga

SEQ ID NO: 157592 - DNA, 25 bp, Canis familiaris
ggagactggaaagaattaccggatt

SEQ ID NO: 157593 - DNA, 25 bp, Canis familiaris
ggagaagtaaaggaatagccacggg

SEQ ID NO: 157594 - DNA, 25 bp, Canis familiaris
ggagagagtatatttgacaaccgcg

SEQ ID NO: 157595 - DNA, 25 bp, Canis familiaris
ggagcagacttttaaagacccgcac

SEQ ID NO: 157596 - DNA, 25 bp, Canis familiaris
ggagaatattcctgtgaagcccgta

SEQ ID NO: 157597 - DNA, 25 bp, Canis familiaris
ggagtatactcgtgtacaccaaggg

SEQ ID NO: 157598 - DNA, 25 bp, Canis familiaris
ggagtaaatgcagcttccacgcaga

SEQ ID NO: 157599 - DNA, 25 bp, Canis familiaris
ggagggaagaggtaccagcagcagc

SEQ ID NO: 157600 - DNA, 25 bp, Canis familiaris
ggagggcaggaggggctacaggccc

SEQ ID NO: 157601 - DNA, 25 bp, Canis familiaris
ggagggagccagaggccaggatgcc

SEQ ID NO: 157602 - DNA, 25 bp, Canis familiaris
ggagcaggactgcttagccagtaga

SEQ ID NO: 157603 - DNA, 25 bp, Canis familiaris
ggagggactgcttaaggcgacagca

SEQ ID NO: 157604 - DNA, 25 bp, Canis familiaris
ggagggcctggctaagggagagaaa

SEQ ID NO: 157605 - DNA, 25 bp, Canis familiaris
ggaggtctcgaatagagggatttaa

SEQ ID NO: 157606 - DNA, 25 bp, Canis familiaris
ggagtttctccaaagaagccattta

SEQ ID NO: 157607 - DNA, 25 bp, Canis familiaris
ggagttctgttaaaaagagattgtt

SEQ ID NO: 157608 - DNA, 25 bp, Canis familiaris
ggagtttctttgcaaaaacatcata

SEQ ID NO: 157609 - DNA, 25 bp, Canis familiaris
ggagcttagtttccttcagaaaaat

SEQ ID NO: 157610 - DNA, 25 bp, Canis familiaris
ggaggtcgtgttcccaattataaca

SEQ ID NO: 157611 - DNA, 25 bp, Canis familiaris
ggagagtcaggtttcccttataagt

SEQ ID NO: 157612 - DNA, 25 bp, Canis familiaris
ggaggtctggtgttgttttcagcaa

SEQ ID NO: 157613 - DNA, 25 bp, Canis familiaris
ggagtgccatgggattgccaggtcc

SEQ ID NO: 157614 - DNA, 25 bp, Canis familiaris
ggagggatgcctttatcaggtcttt

SEQ ID NO: 157615 - DNA, 25 bp, Canis familiaris
ggaggggcgctgcatatcagggcgc

SEQ ID NO: 157616 - DNA, 25 bp, Canis familiaris
ggaggggtcagagctcagtgaggct

SEQ ID NO: 157617 - DNA, 25 bp, Canis familiaris
ggagtgggacagggctggtggccaa

SEQ ID NO: 157618 - DNA, 25 bp, Canis familiaris
ggagggcgacggtcgtgatcgagca

SEQ ID NO: 157619 - DNA, 25 bp, Canis familiaris
ggagggcagggaggcatgttcaaag

SEQ ID NO: 157620 - DNA, 25 bp, Canis familiaris
ggagggctgggaacatatgcagaca

SEQ ID NO: 157621 - DNA, 25 bp, Canis familiaris
ggagggtgctggatggatggattaa

SEQ ID NO: 157622 - DNA, 25 bp, Canis familiaris
ggagatggatgctcagttgtcacat

SEQ ID NO: 157623 - DNA, 25 bp, Canis familiaris
ggagatgcatctgtcaattgccctg

SEQ ID NO: 157624 - DNA, 25 bp, Canis familiaris
ggagctgctatgtacacatgtgcac

SEQ ID NO: 157625 - DNA, 25 bp, Canis familiaris
ggagcatatatgactgcacgtcact

SEQ ID NO: 157626 - DNA, 25 bp, Canis familiaris
ggagcaaaagctaaccctttccaag

SEQ ID NO: 157627 - DNA, 25 bp, Canis familiaris
ggagaaagcagtgaccagcctctct

SEQ ID NO: 157628 - DNA, 25 bp, Canis familiaris
ggagatgtgaggacttccagccttt

SEQ ID NO: 157629 - DNA, 25 bp, Canis familiaris
ggagagcaggctactttcgactgta

SEQ ID NO: 157630 - DNA, 25 bp, Canis familiaris
ggagtgaggtgtgttgctggatgtg

SEQ ID NO: 157631 - DNA, 25 bp, Canis familiaris
ggagtggtggcaggttgatggtgtg

SEQ ID NO: 157632 - DNA, 25 bp, Canis familiaris
ggagtggatgtcagtggtcgtgcat

SEQ ID NO: 157633 - DNA, 25 bp, Canis familiaris
ggaggtgattctgtgttcgatctgc

SEQ ID NO: 157634 - DNA, 25 bp, Canis familiaris
ggagagtatagtgcttttactgagc

SEQ ID NO: 157635 - DNA, 25 bp, Canis familiaris
ggagggagatgatgcatttcttctg

SEQ ID NO: 157636 - DNA, 25 bp, Canis familiaris
ggaggggatggggtgctcatcctgg

SEQ ID NO: 157637 - DNA, 25 bp, Canis familiaris
ggagtggtgtttgatgtcacctctg

SEQ ID NO: 157638 - DNA, 25 bp, Canis familiaris
ggagagggtgtaaatctcgcgccgg

SEQ ID NO: 157639 - DNA, 25 bp, Canis familiaris
ggagatgggtgctgagacttccacg

SEQ ID NO: 157640 - DNA, 25 bp, Canis familiaris
ggagtgatgggatggccttctgtgc

SEQ ID NO: 157641 - DNA, 25 bp, Canis familiaris
ggaggggagcatggtgtctcccgct

SEQ ID NO: 157642 - DNA, 25 bp, Canis familiaris
ggaggtgggcaattgtgtaccgatg

SEQ ID NO: 157643 - DNA, 25 bp, Canis familiaris
ggagggagtgatttggattctaagt

SEQ ID NO: 157644 - DNA, 25 bp, Canis familiaris
ggagcggaggcattgtttttaagaa

SEQ ID NO: 157645 - DNA, 25 bp, Canis familiaris
ggagggatactaattattactcaga

SEQ ID NO: 157646 - DNA, 25 bp, Canis familiaris
ggagggaagcttttcttacctattg

SEQ ID NO: 157647 - DNA, 25 bp, Canis familiaris
ggagggcaacttttctaaccagatt

SEQ ID NO: 157648 - DNA, 25 bp, Canis familiaris
ggagggccatctttttataccaaat

SEQ ID NO: 157649 - DNA, 25 bp, Canis familiaris
ggagggagatgcagctttaaaccaa

SEQ ID NO: 157650 - DNA, 25 bp, Canis familiaris
ggcacttggcacactttactaaaca

SEQ ID NO: 157651 - DNA, 25 bp, Canis familiaris
ggacgtgcccatttttactgtaaat

SEQ ID NO: 157652 - DNA, 25 bp, Canis familiaris
ggagacctcctttttattgtatact

SEQ ID NO: 157653 - DNA, 25 bp, Canis familiaris
ggagacttgagaaatattagtgtaa

SEQ ID NO: 157654 - DNA, 25 bp, Canis familiaris
ggagtttggacttttgtgttaattg

SEQ ID NO: 157655 - DNA, 25 bp, Canis familiaris
ggagtttgaagcttttttggttgct

SEQ ID NO: 157656 - DNA, 25 bp, Canis familiaris
ggagtttccaatgtatttggtcctg

SEQ ID NO: 157657 - DNA, 25 bp, Canis familiaris
ggagtttgtcaaggccttttacctg

SEQ ID NO: 157658 - DNA, 25 bp, Canis familiaris
ggagtcactatcaacctcctttact

SEQ ID NO: 157659 - DNA, 25 bp, Canis familiaris
ggagactctgtaacctggttctgac

SEQ ID NO: 157660 - DNA, 25 bp, Canis familiaris
ggagttcctgaaccagagttctccc

SEQ ID NO: 157661 - DNA, 25 bp, Canis familiaris
ggagtgtttgatcccacagagatcc

SEQ ID NO: 157662 - DNA, 25 bp, Canis familiaris
ggagtgtatagatgcagccgttgca

SEQ ID NO: 157663 - DNA, 25 bp, Canis familiaris
ggaggtggagaagtgctgtgtgtgc

SEQ ID NO: 157664 - DNA, 25 bp, Canis familiaris
ggaggtggcaaagtccgagtgctat

SEQ ID NO: 157665 - DNA, 25 bp, Canis familiaris
ggagtggagacaaccctgtgtatat

SEQ ID NO: 157666 - DNA, 25 bp, Canis familiaris
ggagttcgaatatcctgtctaaaca

SEQ ID NO: 157667 - DNA, 25 bp, Canis familiaris
ggagtttgacttattgtcccatatt

SEQ ID NO: 157668 - DNA, 25 bp, Canis familiaris
ggagtgttaatttttgctaccatcg

SEQ ID NO: 157669 - DNA, 25 bp, Canis familiaris
ggagtgtaagctcattccacaccac

SEQ ID NO: 157670 - DNA, 25 bp, Canis familiaris
ggagggagcagtcactgcagcaccc

SEQ ID NO: 157671 - DNA, 25 bp, Canis familiaris
ggagggagaagcttctgtgcagact

SEQ ID NO: 157672 - DNA, 25 bp, Canis familiaris
ggagtctggaagctcgtgaagtcag

SEQ ID NO: 157673 - DNA, 25 bp, Canis familiaris
ggaggggaggtttgagatatctcag

SEQ ID NO: 157674 - DNA, 25 bp, Canis familiaris
ggagggtgaggggtgggatccagag

SEQ ID NO: 157675 - DNA, 25 bp, Canis familiaris
ggaggggagtggtatgaggtagggc

SEQ ID NO: 157676 - DNA, 25 bp, Canis familiaris
ggagtacccggatgaggtggagcac

SEQ ID NO: 157677 - DNA, 25 bp, Canis familiaris
ggagtaccgggaggtcacggagctc

SEQ ID NO: 157678 - DNA, 25 bp, Canis familiaris
ggagtaccgggcggtgacacggatc

SEQ ID NO: 157679 - DNA, 25 bp, Canis familiaris
ggagaaccgcggtgagctacggatc

SEQ ID NO: 157680 - DNA, 25 bp, Canis familiaris
ggagaacccggagacatcaaggata

SEQ ID NO: 157681 - DNA, 25 bp, Canis familiaris
ggagaagcccggtgacacagggcaa

SEQ ID NO: 157682 - DNA, 25 bp, Canis familiaris
ggagctatgacctgggaccaatgga

SEQ ID NO: 157683 - DNA, 25 bp, Canis familiaris
ggagtcaagctccaaaaccgagaat

SEQ ID NO: 157684 - DNA, 25 bp, Canis familiaris
ggagtcaaccatagagatgccccaa

SEQ ID NO: 157685 - DNA, 25 bp, Canis familiaris
ggagtagctccaagagttctcactg

SEQ ID NO: 157686 - DNA, 25 bp, Canis familiaris
ggagtacttcaagatcaccctctat

SEQ ID NO: 157687 - DNA, 25 bp, Canis familiaris
ggagatattatcttcttcaaattta

SEQ ID NO: 157688 - DNA, 25 bp, Canis familiaris
ggagactttttctgcaacattagat

SEQ ID NO: 157689 - DNA, 25 bp, Canis familiaris
ggagacttacgagaccctgaagcat

SEQ ID NO: 157690 - DNA, 25 bp, Canis familiaris
ggagtttcacaaggacacacacaag

SEQ ID NO: 157691 - DNA, 25 bp, Canis familiaris
ggagttctactagtgccatcagtgt

SEQ ID NO: 157692 - DNA, 25 bp, Canis familiaris
ggagtcttactagccattggattca

SEQ ID NO: 157693 - DNA, 25 bp, Canis familiaris
ggagtcagtctcaaccaattggaag

SEQ ID NO: 157694 - DNA, 25 bp, Canis familiaris
ggagattccgaagatattgagagag

SEQ ID NO: 157695 - DNA, 25 bp, Canis familiaris
ggagattctcctgaaattaagaaac

SEQ ID NO: 157696 - DNA, 25 bp, Canis familiaris
ggagattctcctgaatttacaaacg

SEQ ID NO: 157697 - DNA, 25 bp, Canis familiaris
ggagttctccaatgttaatgcaaac

SEQ ID NO: 157698 - DNA, 25 bp, Canis familiaris
ggagtcttaaactattatgctcact

SEQ ID NO: 157699 - DNA, 25 bp, Canis familiaris
ggagttctaaaaaccatgctaattt

SEQ ID NO: 157700 - DNA, 25 bp, Canis familiaris
ggagttgtacctagttctctgaatg

SEQ ID NO: 157701 - DNA, 25 bp, Canis familiaris
ggagtctgtagctgattttctcaat

SEQ ID NO: 157702 - DNA, 25 bp, Canis familiaris
ggagagccatatcaatcttcccaag

SEQ ID NO: 157703 - DNA, 25 bp, Canis familiaris
ggagagcgcgattaaattggcctca

SEQ ID NO: 157704 - DNA, 25 bp, Canis familiaris
ggagcagttgtaacaattcccacca

SEQ ID NO: 157705 - DNA, 25 bp, Canis familiaris
ggagcgcttgacatcaagtggccct

SEQ ID NO: 157706 - DNA, 25 bp, Canis familiaris
ggagtgtgcagacacacaggagccc

SEQ ID NO: 157707 - DNA, 25 bp, Canis familiaris
ggagtgtgcagagcagccaggttcc

SEQ ID NO: 157708 - DNA, 25 bp, Canis familiaris
ggagttcgtgaggccgtgattgcac

SEQ ID NO: 157709 - DNA, 25 bp, Canis familiaris
ggagtcaaggaggccaggacatcat

SEQ ID NO: 157710 - DNA, 25 bp, Canis familiaris
ggagtcagtggtgaaggccagcagg

SEQ ID NO: 157711 - DNA, 25 bp, Canis familiaris
ggagtatacgtacaggccagatgtg

SEQ ID NO: 157712 - DNA, 25 bp, Canis familiaris
ggagaacacggacgagacctactgc

SEQ ID NO: 157713 - DNA, 25 bp, Canis familiaris
ggagacccgaagataccttcatcgc

SEQ ID NO: 157714 - DNA, 25 bp, Canis familiaris
ggagaccaagagcaagaccatttac

SEQ ID NO: 157715 - DNA, 25 bp, Canis familiaris
ggagcccaacgccaaattttgctcc

SEQ ID NO: 157716 - DNA, 25 bp, Canis familiaris
ggaccagaccgtcaagtactacacc

SEQ ID NO: 157717 - DNA, 25 bp, Canis familiaris
ggactggaccagccctagtaaaagc

SEQ ID NO: 157718 - DNA, 25 bp, Canis familiaris
ggagggatcagcccccaaagaaatg

SEQ ID NO: 157719 - DNA, 25 bp, Canis familiaris
ggagcaagacccccgaaaggatagt

SEQ ID NO: 157720 - DNA, 25 bp, Canis familiaris
ggagaaccccggagataagcatacc

SEQ ID NO: 157721 - DNA, 25 bp, Canis familiaris
ggagaactccgagcagttggagcta

SEQ ID NO: 157722 - DNA, 25 bp, Canis familiaris
ggagaatttcagcagagtcaggact

SEQ ID NO: 157723 - DNA, 25 bp, Canis familiaris
ggagaacttcaccgaaactgacatc

SEQ ID NO: 157724 - DNA, 25 bp, Canis familiaris
ggagaacttcctcgaggatggaact

SEQ ID NO: 157725 - DNA, 25 bp, Canis familiaris
ggagcaaactccagggtcgaaggga

SEQ ID NO: 157726 - DNA, 25 bp, Canis familiaris
ggagaaaatctcctgcaggctccat

SEQ ID NO: 157727 - DNA, 25 bp, Canis familiaris
ggagaaaacctggatcctgccattc

SEQ ID NO: 157728 - DNA, 25 bp, Canis familiaris
ggagaaatagttttgcctgccattt

SEQ ID NO: 157729 - DNA, 25 bp, Canis familiaris
ggagagaatagtcatggcttcccct

SEQ ID NO: 157730 - DNA, 25 bp, Canis familiaris
ggagagtaactgcatgagatttcac

SEQ ID NO: 157731 - DNA, 25 bp, Canis familiaris
ggagggcaacatagagagttgtgaa

SEQ ID NO: 157732 - DNA, 25 bp, Canis familiaris
ggagggctgattttggcattgtgaa

SEQ ID NO: 157733 - DNA, 25 bp, Canis familiaris
ggagaggctttcttatgacctcaaa

SEQ ID NO: 157734 - DNA, 25 bp, Canis familiaris
ggagaaggtctgtgagaagctcaag

SEQ ID NO: 157735 - DNA, 25 bp, Canis familiaris
ggagaaggccttcgagtactgccag

SEQ ID NO: 157736 - DNA, 25 bp, Canis familiaris
ggagggagacagttggtcactggaa

SEQ ID NO: 157737 - DNA, 25 bp, Canis familiaris
ggagggagaccttttcattggacca

SEQ ID NO: 157738 - DNA, 25 bp, Canis familiaris
ggagagtatatcccctgatttggag

SEQ ID NO: 157739 - DNA, 25 bp, Canis familiaris
ggagctgcttactctgctgtaaaag

SEQ ID NO: 157740 - DNA, 25 bp, Canis familiaris
ggactgttactgagctgcgttttac

SEQ ID NO: 157741 - DNA, 25 bp, Canis familiaris
ggacttccctgcagcacgtcgctta

SEQ ID NO: 157742 - DNA, 25 bp, Canis familiaris
ggaccatccaatacaacgtcgtctc

SEQ ID NO: 157743 - DNA, 25 bp, Canis familiaris
ggagtcccagataaaggcctgcgac

SEQ ID NO: 157744 - DNA, 25 bp, Canis familiaris
ggagtactcaatatagagcacccag

SEQ ID NO: 157745 - DNA, 25 bp, Canis familiaris
ggagttgataatacatgaagccgaa

SEQ ID NO: 157746 - DNA, 25 bp, Canis familiaris
ggagattgataattcaggacttctt

SEQ ID NO: 157747 - DNA, 25 bp, Canis familiaris
ggagattacacttgccgatcgtgcc

SEQ ID NO: 157748 - DNA, 25 bp, Canis familiaris
ggagttacattcgttgaaggcacag

SEQ ID NO: 157749 - DNA, 25 bp, Canis familiaris
ggagttactcccttgaagatgtttg

SEQ ID NO: 157750 - DNA, 25 bp, Canis familiaris
ggacttcaccccacaaaattgtaag

SEQ ID NO: 157751 - DNA, 25 bp, Canis familiaris
ggcgtaaccctcactcaaaggtgat

SEQ ID NO: 157752 - DNA, 25 bp, Canis familiaris
ggagaaacttttgcacaacctgtga

SEQ ID NO: 157753 - DNA, 25 bp, Canis familiaris
tggaactccttcaccgaaacggagg

SEQ ID NO: 157754 - DNA, 25 bp, Canis familiaris
ggctacaacttccccagagaaagga

SEQ ID NO: 157755 - DNA, 25 bp, Canis familiaris
ggctacgtcgtccacaaacaattgg

SEQ ID NO: 157756 - DNA, 25 bp, Canis familiaris
ggaagccttgtccaaattaattgga

SEQ ID NO: 157757 - DNA, 25 bp, Canis familiaris
ggagacttcgatgagaatctgaatt

SEQ ID NO: 157758 - DNA, 25 bp, Canis familiaris
ggagacctcggattgaatcccatgt

SEQ ID NO: 157759 - DNA, 25 bp, Canis familiaris
ggagacccgtgaggaagcggctgat

SEQ ID NO: 157760 - DNA, 25 bp, Canis familiaris
ggagatccacctagtcacagggagt

SEQ ID NO: 157761 - DNA, 25 bp, Canis familiaris
ggagtccagactggtcgctggtaga

SEQ ID NO: 157762 - DNA, 25 bp, Canis familiaris
ggagttaaaggatctggaagtatcg

SEQ ID NO: 157763 - DNA, 25 bp, Canis familiaris
ggagaaaggggactcggaagttgcg

SEQ ID NO: 157764 - DNA, 25 bp, Canis familiaris
ggagaggagtgttggcgggtagctt

SEQ ID NO: 157765 - DNA, 25 bp, Canis familiaris
tgccaattcggcacgccagttagct

SEQ ID NO: 157766 - DNA, 25 bp, Canis familiaris
tccaatgtgggagcagccaagtata

SEQ ID NO: 157767 - DNA, 25 bp, Canis familiaris
tcataattggggacccaagacagat

SEQ ID NO: 157768 - DNA, 25 bp, Canis familiaris
tcatgaccgggtccgtaacacactt

SEQ ID NO: 157769 - DNA, 25 bp, Canis familiaris
tctgtccggggtggaggccacccac

SEQ ID NO: 157770 - DNA, 25 bp, Canis familiaris
tccttctggggagagtgtgcccccc

SEQ ID NO: 157771 - DNA, 25 bp, Canis familiaris
tccgttgtcaggatcgttccgacac

SEQ ID NO: 157772 - DNA, 25 bp, Canis familiaris
ggagtctgggaatcagtgcactgag

SEQ ID NO: 157773 - DNA, 25 bp, Canis familiaris
ggagttgagcaagaacacagtcagc

SEQ ID NO: 157774 - DNA, 25 bp, Canis familiaris
ggagttggcaagacagtactgatca

SEQ ID NO: 157775 - DNA, 25 bp, Canis familiaris
ggagtgggcacactcaggagctcca

SEQ ID NO: 157776 - DNA, 25 bp, Canis familiaris
ggagtgcgagaagatgtggcccata

SEQ ID NO: 157777 - DNA, 25 bp, Canis familiaris
ggagagcagaaacaggagcccatct

SEQ ID NO: 157778 - DNA, 25 bp, Canis familiaris
ggagagcacaattggagcggccttc

SEQ ID NO: 157779 - DNA, 25 bp, Canis familiaris
ggagtcctatattgagagcaccatg

SEQ ID NO: 157780 - DNA, 25 bp, Canis familiaris
ggagactcgcaattgcaagcaccaa

SEQ ID NO: 157781 - DNA, 25 bp, Canis familiaris
ggagtgctctgctatataagttcaa

SEQ ID NO: 157782 - DNA, 25 bp, Canis familiaris
ggagtgctgcctagagtacttcaaa

SEQ ID NO: 157783 - DNA, 25 bp, Canis familiaris
ggagcagcatgccttgaagcactat

SEQ ID NO: 157784 - DNA, 25 bp, Canis familiaris
ggagagtccatgtagagcctgctcc

SEQ ID NO: 157785 - DNA, 25 bp, Canis familiaris
ggagagtgacatcatgcacctgcgc

SEQ ID NO: 157786 - DNA, 25 bp, Canis familiaris
ggagcgtgatattactgcttccttt

SEQ ID NO: 157787 - DNA, 25 bp, Canis familiaris
ggagaaaatatattgcctctgcttt

SEQ ID NO: 157788 - DNA, 25 bp, Canis familiaris
ggagtgtagttaattctctgcttaa

SEQ ID NO: 157789 - DNA, 25 bp, Canis familiaris
ggagtgattgtgtgttccgaaaatt

SEQ ID NO: 157790 - DNA, 25 bp, Canis familiaris
ggagtgacgtgaggttcctgaatcc

SEQ ID NO: 157791 - DNA, 25 bp, Canis familiaris
ggagatccgtagatacctgtcactc

SEQ ID NO: 157792 - DNA, 25 bp, Canis familiaris
ggagacttatagatgcccaatattc

SEQ ID NO: 157793 - DNA, 25 bp, Canis familiaris
ggagatgttatcaaggctgcctata

SEQ ID NO: 157794 - DNA, 25 bp, Canis familiaris
ggagatgtgtatggatgtgctttta

SEQ ID NO: 157795 - DNA, 25 bp, Canis familiaris
ggagattacatgggtgcttcctgcc

SEQ ID NO: 157796 - DNA, 25 bp, Canis familiaris
ggagatctatctgttttctctgccc

SEQ ID NO: 157797 - DNA, 25 bp, Canis familiaris
ggagcatctactgcatgtctcacat

SEQ ID NO: 157798 - DNA, 25 bp, Canis familiaris
ggagtcatacatgctatgcgatatt

SEQ ID NO: 157799 - DNA, 25 bp, Canis familiaris
ggagtcagccatggcttgagtttga

SEQ ID NO: 157800 - DNA, 25 bp, Canis familiaris
ggagtccctcgttggatgtggagct

SEQ ID NO: 157801 - DNA, 25 bp, Canis familiaris
ggagtccccatggaggtgtggagcc

SEQ ID NO: 157802 - DNA, 25 bp, Canis familiaris
ggagtagccctcaagtgtgtgggga

SEQ ID NO: 157803 - DNA, 25 bp, Canis familiaris
ggagatgaccacgtgagttgctgag

SEQ ID NO: 157804 - DNA, 25 bp, Canis familiaris
ggagtgcgtccgaagcatttaggca

SEQ ID NO: 157805 - DNA, 25 bp, Canis familiaris
ggagtgcgtccgaagcacttcaggc

SEQ ID NO: 157806 - DNA, 25 bp, Canis familiaris
ggagtctgttagaaatccacatggt

SEQ ID NO: 157807 - DNA, 25 bp, Canis familiaris
ggagatggtgggacaatccccgttt

SEQ ID NO: 157808 - DNA, 25 bp, Canis familiaris
ggagatgtataagaaagcgcacgct

SEQ ID NO: 157809 - DNA, 25 bp, Canis familiaris
ggagttcatcaagcgggctgaggtg

SEQ ID NO: 157810 - DNA, 25 bp, Canis familiaris
ggagttcaccagggtggagacaagt

SEQ ID NO: 157811 - DNA, 25 bp, Canis familiaris
ggagttcctcagagctggatccaat

SEQ ID NO: 157812 - DNA, 25 bp, Canis familiaris
ggagatatcctaaagtgtatccaag

SEQ ID NO: 157813 - DNA, 25 bp, Canis familiaris
ggagtttgctaggaatgttacacag

SEQ ID NO: 157814 - DNA, 25 bp, Canis familiaris
ggagtttgaaccaacctgagcaagc

SEQ ID NO: 157815 - DNA, 25 bp, Canis familiaris
ggagatatctgatcactgacctggc

SEQ ID NO: 157816 - DNA, 25 bp, Canis familiaris
ggagatcattgaccttgtcttggac

SEQ ID NO: 157817 - DNA, 25 bp, Canis familiaris
ggagacattagccagtgtttagttt

SEQ ID NO: 157818 - DNA, 25 bp, Canis familiaris
ggagatttggccttctgaccagaat

SEQ ID NO: 157819 - DNA, 25 bp, Canis familiaris
ggagatttagtctgctacatcacct

SEQ ID NO: 157820 - DNA, 25 bp, Canis familiaris
ggagtgttcagattacatccctcct

SEQ ID NO: 157821 - DNA, 25 bp, Canis familiaris
ggagatggtcaactatgtcctgtcc

SEQ ID NO: 157822 - DNA, 25 bp, Canis familiaris
ggagtagatagacagctgcctccca

SEQ ID NO: 157823 - DNA, 25 bp, Canis familiaris
ggagtgcttatagcagctccacacc

SEQ ID NO: 157824 - DNA, 25 bp, Canis familiaris
ggagtgctatgctaggacttcaacc

SEQ ID NO: 157825 - DNA, 25 bp, Canis familiaris
ggagtctgtcattgacgttaactct

SEQ ID NO: 157826 - DNA, 25 bp, Canis familiaris
ggagtttcatagtttaatcattcat

SEQ ID NO: 157827 - DNA, 25 bp, Canis familiaris
ggagtttgcaggtgaagatacatct

SEQ ID NO: 157828 - DNA, 25 bp, Canis familiaris
ggagttctcacgtgatggcaaggct

SEQ ID NO: 157829 - DNA, 25 bp, Canis familiaris
ggagttcctgaccatgatggccaga

SEQ ID NO: 157830 - DNA, 25 bp, Canis familiaris
ggagttctctgcagtgatggaaatg

SEQ ID NO: 157831 - DNA, 25 bp, Canis familiaris
ggagtctctcttggtatgtgaatac

SEQ ID NO: 157832 - DNA, 25 bp, Canis familiaris
ggagactcgtttacagtgttcacaa

SEQ ID NO: 157833 - DNA, 25 bp, Canis familiaris
ggagacatggttttgctgctttgac

SEQ ID NO: 157834 - DNA, 25 bp, Canis familiaris
ggagaaggccttgccagttgatgcc

SEQ ID NO: 157835 - DNA, 25 bp, Canis familiaris
ggagaacgtgcctgtcagttagctc

SEQ ID NO: 157836 - DNA, 25 bp, Canis familiaris
ggagaacctgctgtgacagttgccc

SEQ ID NO: 157837 - DNA, 25 bp, Canis familiaris
ggagtgagcctgggagacacttgac

SEQ ID NO: 157838 - DNA, 25 bp, Canis familiaris
ggagtaatctgactgatgccttatg

SEQ ID NO: 157839 - DNA, 25 bp, Canis familiaris
ggagatcaaagacatccttatccag

SEQ ID NO: 157840 - DNA, 25 bp, Canis familiaris
ggagaaagcaggctccattgcaccg

SEQ ID NO: 157841 - DNA, 25 bp, Canis familiaris
ggagatacaaagccttctccacctg

SEQ ID NO: 157842 - DNA, 25 bp, Canis familiaris
ggagataagcaagtctttcagacct

SEQ ID NO: 157843 - DNA, 25 bp, Canis familiaris
ggagattgagaaggtggccaacttg

SEQ ID NO: 157844 - DNA, 25 bp, Canis familiaris
ggagtctggcaccagtggcacaact

SEQ ID NO: 157845 - DNA, 25 bp, Canis familiaris
ggagttgcgcactgtgtgatttgat

SEQ ID NO: 157846 - DNA, 25 bp, Canis familiaris
ggagtttgcatcttttagctatatt

SEQ ID NO: 157847 - DNA, 25 bp, Canis familiaris
ggagtttcaatatccagcttcatct

SEQ ID NO: 157848 - DNA, 25 bp, Canis familiaris
ggagttatcaacagctatattattt

SEQ ID NO: 157849 - DNA, 25 bp, Canis familiaris
ggagttacttcataaattcatctta

SEQ ID NO: 157850 - DNA, 25 bp, Canis familiaris
ggagttccctagtatatgaatgtct

SEQ ID NO: 157851 - DNA, 25 bp, Canis familiaris
ggagatcttcactaatatgagattg

SEQ ID NO: 157852 - DNA, 25 bp, Canis familiaris
ggagacctccatctcagaagtgtct

SEQ ID NO: 157853 - DNA, 25 bp, Canis familiaris
ggagagtctctctagataggggcac

SEQ ID NO: 157854 - DNA, 25 bp, Canis familiaris
ggagaactttgacgagctggacacc

SEQ ID NO: 157855 - DNA, 25 bp, Canis familiaris
ggagtgttcttgagactgtgttctc

SEQ ID NO: 157856 - DNA, 25 bp, Canis familiaris
ggagtgcttttgaagatggatttct

SEQ ID NO: 157857 - DNA, 25 bp, Canis familiaris
ggagctggaatcattaggtttcttc

SEQ ID NO: 157858 - DNA, 25 bp, Canis familiaris
ggagatggcctcattaagctttatg

SEQ ID NO: 157859 - DNA, 25 bp, Canis familiaris
ggagaggccctacaagtgtgatgag

SEQ ID NO: 157860 - DNA, 25 bp, Canis familiaris
ggcagaggaattcaaagggaggcct

SEQ ID NO: 157861 - DNA, 25 bp, Canis familiaris
ggacgtggtgttcaagggactccgt

SEQ ID NO: 157862 - DNA, 25 bp, Canis familiaris
ggagcgtgagtgaggaaggggtttt

SEQ ID NO: 157863 - DNA, 25 bp, Canis familiaris
ggactggggtggtgggaatgtttgt

SEQ ID NO: 157864 - DNA, 25 bp, Canis familiaris
ggagaggtcgtggtcgggacagttt

SEQ ID NO: 157865 - DNA, 25 bp, Canis familiaris
ggagaggtgggtttgggacagagct

SEQ ID NO: 157866 - DNA, 25 bp, Canis familiaris
ggagctggtctgttcggagaactgg

SEQ ID NO: 157867 - DNA, 25 bp, Canis familiaris
ggagtctgtgtgacccgaaagctgt

SEQ ID NO: 157868 - DNA, 25 bp, Canis familiaris
ggagtctgcgtttccaagagatgtg

SEQ ID NO: 157869 - DNA, 25 bp, Canis familiaris
ggagtttgtgattccactgagctta

SEQ ID NO: 157870 - DNA, 25 bp, Canis familiaris
ggagattgggcttcacacagataat

SEQ ID NO: 157871 - DNA, 25 bp, Canis familiaris
ggagatgtagcctgtcaccagagat

SEQ ID NO: 157872 - DNA, 25 bp, Canis familiaris
ggagatgtgacaatttggcaagaat

SEQ ID NO: 157873 - DNA, 25 bp, Canis familiaris
ggagattgccatctctgacaagaga

SEQ ID NO: 157874 - DNA, 25 bp, Canis familiaris
ggagagtgtctcctctgagagagtt

SEQ ID NO: 157875 - DNA, 25 bp, Canis familiaris
ggagtttgcgctttgcaaatttgtc

SEQ ID NO: 157876 - DNA, 25 bp, Canis familiaris
ggagtagtcgcttggagaactgatt

SEQ ID NO: 157877 - DNA, 25 bp, Canis familiaris
ggagtcaatccgggaggatgcttaa

SEQ ID NO: 157878 - DNA, 25 bp, Canis familiaris
ggagacaatccgtgaaatttatgga

SEQ ID NO: 157879 - DNA, 25 bp, Canis familiaris
ggagaaattggagaatctttagtta

SEQ ID NO: 157880 - DNA, 25 bp, Canis familiaris
ggagaaatctggactttttatatgg

SEQ ID NO: 157881 - DNA, 25 bp, Canis familiaris
ggagacaactgtaaattttcacatg

SEQ ID NO: 157882 - DNA, 25 bp, Canis familiaris
ggagaaactaaaggtgttcacttgg

SEQ ID NO: 157883 - DNA, 25 bp, Canis familiaris
ggagaaaatttggtgttcctcttgg

SEQ ID NO: 157884 - DNA, 25 bp, Canis familiaris
ggagaaaggctctgttgccctgatt

SEQ ID NO: 157885 - DNA, 25 bp, Canis familiaris
ggagaataacttcttgctacagcat

SEQ ID NO: 157886 - DNA, 25 bp, Canis familiaris
ggagaagaacgtgaggctgaccaag

SEQ ID NO: 157887 - DNA, 25 bp, Canis familiaris
ggagaaaatcccacggcacgaagga

SEQ ID NO: 157888 - DNA, 25 bp, Canis familiaris
ggagaagaaccagtacaagatcgac

SEQ ID NO: 157889 - DNA, 25 bp, Canis familiaris
ggagaggaaccactagaatcacaga

SEQ ID NO: 157890 - DNA, 25 bp, Canis familiaris
ggagaggaaggcttttctgcacagt

SEQ ID NO: 157891 - DNA, 25 bp, Canis familiaris
ggagagaatatgactttactagcag

SEQ ID NO: 157892 - DNA, 25 bp, Canis familiaris
ggagtaatgattcttatcttgctgg

SEQ ID NO: 157893 - DNA, 25 bp, Canis familiaris
ggagcgaagctgcgttgactactgc

SEQ ID NO: 157894 - DNA, 25 bp, Canis familiaris
ggagtacactgctgctgtgactcac

SEQ ID NO: 157895 - DNA, 25 bp, Canis familiaris
ggagtaactgcagctgcaggcctcc

SEQ ID NO: 157896 - DNA, 25 bp, Canis familiaris
ggagattactgctctggctcctagc

SEQ ID NO: 157897 - DNA, 25 bp, Canis familiaris
ggacttgactgctgctggtaaacca

SEQ ID NO: 157898 - DNA, 25 bp, Canis familiaris
ggagcttatttgccgcagtacacac

SEQ ID NO: 157899 - DNA, 25 bp, Canis familiaris
ggagatgctatgcctgggtgaacca

SEQ ID NO: 157900 - DNA, 25 bp, Canis familiaris
ggagatggtgacatgcctgagatac

SEQ ID NO: 157901 - DNA, 25 bp, Canis familiaris
ggagatcgtgcacgacctggatacc

SEQ ID NO: 157902 - DNA, 25 bp, Canis familiaris
ggagatgctggagactctctttcct

SEQ ID NO: 157903 - DNA, 25 bp, Canis familiaris
ggagagagcaaaacttctgtccctt

SEQ ID NO: 157904 - DNA, 25 bp, Canis familiaris
ggagagctccaaggcgttgtctcct

SEQ ID NO: 157905 - DNA, 25 bp, Canis familiaris
ggagatcccaagttggtgattccaa

SEQ ID NO: 157906 - DNA, 25 bp, Canis familiaris
ggagatcaccaagttcgaggagcac

SEQ ID NO: 157907 - DNA, 25 bp, Canis familiaris
ggagacgcccagactctgggaggct

SEQ ID NO: 157908 - DNA, 25 bp, Canis familiaris
ggagcatggccgggtctatgtgggc

SEQ ID NO: 157909 - DNA, 25 bp, Canis familiaris
ggagatgccgtgggtatttctgaga

SEQ ID NO: 157910 - DNA, 25 bp, Canis familiaris
ggagaccctgatggagtatttggag

SEQ ID NO: 157911 - DNA, 25 bp, Canis familiaris
ggagaacctttgcctatgtttgatg

SEQ ID NO: 157912 - DNA, 25 bp, Canis familiaris
ggagaggccatgagctgggattttc

SEQ ID NO: 157913 - DNA, 25 bp, Canis familiaris
ggagatggcctttgctgggatttgt

SEQ ID NO: 157914 - DNA, 25 bp, Canis familiaris
ggagatggccgattttggtgctatg

SEQ ID NO: 157915 - DNA, 25 bp, Canis familiaris
ggagaggaggacttcattgctgttc

SEQ ID NO: 157916 - DNA, 25 bp, Canis familiaris
ggagatgaaggccgtgtgcgtgttg

SEQ ID NO: 157917 - DNA, 25 bp, Canis familiaris
ggagtaaggctttgcctgtctcagg

SEQ ID NO: 157918 - DNA, 25 bp, Canis familiaris
ggagtacaggttctgctgacactgg

SEQ ID NO: 157919 - DNA, 25 bp, Canis familiaris
ggagtactgagaaccatcatgaaag

SEQ ID NO: 157920 - DNA, 25 bp, Canis familiaris
ggagaaagtgcaagccacatgaagg

SEQ ID NO: 157921 - DNA, 25 bp, Canis familiaris
ggagaggcaggcaaacagctgagga

SEQ ID NO: 157922 - DNA, 25 bp, Canis familiaris
ggagaagcaggagttcagatgtgga

SEQ ID NO: 157923 - DNA, 25 bp, Canis familiaris
ggagatccaggtcttgttggtccta

SEQ ID NO: 157924 - DNA, 25 bp, Canis familiaris
ggagttctgggttgagctgggtcct

SEQ ID NO: 157925 - DNA, 25 bp, Canis familiaris
ggagtactgtgggataccctgtggt

SEQ ID NO: 157926 - DNA, 25 bp, Canis familiaris
ggagtaccagggaccctgctggaat

SEQ ID NO: 157927 - DNA, 25 bp, Canis familiaris
ggagtagcacagactggatccggga

SEQ ID NO: 157928 - DNA, 25 bp, Canis familiaris
ggagtaccccatggagagggcaaca

SEQ ID NO: 157929 - DNA, 25 bp, Canis familiaris
ggagtctaggcctcatggggcaaca

SEQ ID NO: 157930 - DNA, 25 bp, Canis familiaris
ggagtcaaggggccaggggctactg

SEQ ID NO: 157931 - DNA, 25 bp, Canis familiaris
ggagtcaagtgtttctggagaccag

SEQ ID NO: 157932 - DNA, 25 bp, Canis familiaris
ggagtaagagaatttgtgtggcgag

SEQ ID NO: 157933 - DNA, 25 bp, Canis familiaris
ggagtcacaagccatctgttggcga

SEQ ID NO: 157934 - DNA, 25 bp, Canis familiaris
ggctgatccatgtgcatttgtggct

SEQ ID NO: 157935 - DNA, 25 bp, Canis familiaris
ggagagcatatctgccttgatggct

SEQ ID NO: 157936 - DNA, 25 bp, Canis familiaris
ggagcaagtgcagtccttggtgctg

SEQ ID NO: 157937 - DNA, 25 bp, Canis familiaris
ggagacgtcctccatgatgattgcc

SEQ ID NO: 157938 - DNA, 25 bp, Canis familiaris
ggagacgcttcccagttatctggaa

SEQ ID NO: 157939 - DNA, 25 bp, Canis familiaris
ggagaatgttccacgtatgcttgaa

SEQ ID NO: 157940 - DNA, 25 bp, Canis familiaris
ggagatggtcccaaagtgtcttgaa

SEQ ID NO: 157941 - DNA, 25 bp, Canis familiaris
ggagatccacctagtatgttcttga

SEQ ID NO: 157942 - DNA, 25 bp, Canis familiaris
ggagataccctgttggttttgactg

SEQ ID NO: 157943 - DNA, 25 bp, Canis familiaris
ggagattcccatttggttgctggca

SEQ ID NO: 157944 - DNA, 25 bp, Canis familiaris
ggagagattcctgttgttgctatca

SEQ ID NO: 157945 - DNA, 25 bp, Canis familiaris
ggagattgtagttttgtagcttcac

SEQ ID NO: 157946 - DNA, 25 bp, Canis familiaris
ggagctattagttaatctatcttcc

SEQ ID NO: 157947 - DNA, 25 bp, Canis familiaris
ggagtttgagtttagctgctcctcc

SEQ ID NO: 157948 - DNA, 25 bp, Canis familiaris
ggagcttggagttctagccttacca

SEQ ID NO: 157949 - DNA, 25 bp, Canis familiaris
ggagaagtgatggaccagcccttcc

SEQ ID NO: 157950 - DNA, 25 bp, Canis familiaris
ggagaagatctggcaccacaccttc

SEQ ID NO: 157951 - DNA, 25 bp, Canis familiaris
ggagaaatatggtacacctctttac

SEQ ID NO: 157952 - DNA, 25 bp, Canis familiaris
ggagaaatatgtgtacggtgttccc

SEQ ID NO: 157953 - DNA, 25 bp, Canis familiaris
ggagactacagtctaggccgtttcc

SEQ ID NO: 157954 - DNA, 25 bp, Canis familiaris
ggagagctacaacggagcgactgtt

SEQ ID NO: 157955 - DNA, 25 bp, Canis familiaris
ggagagatacatcctggaggccagg

SEQ ID NO: 157956 - DNA, 25 bp, Canis familiaris
ggagctgacatcactgaagggcagg

SEQ ID NO: 157957 - DNA, 25 bp, Canis familiaris
ggagatgagatcactgggttcagat

SEQ ID NO: 157958 - DNA, 25 bp, Canis familiaris
ggcgtggtttcggactgtcaattga

SEQ ID NO: 157959 - DNA, 25 bp, Canis familiaris
ggcgtggtttctgacgaacatctgg

SEQ ID NO: 157960 - DNA, 25 bp, Canis familiaris
ggagttgtttttaatgcagccatgg

SEQ ID NO: 157961 - DNA, 25 bp, Canis familiaris
ggagacgtttttggctgccacagct

SEQ ID NO: 157962 - DNA, 25 bp, Canis familiaris
ggagagtcgatttatggaccaacat

SEQ ID NO: 157963 - DNA, 25 bp, Canis familiaris
ggagttagattttgaatgactacat

SEQ ID NO: 157964 - DNA, 25 bp, Canis familiaris
ggagttcagcaaagtcgtgaccaca

SEQ ID NO: 157965 - DNA, 25 bp, Canis familiaris
ggagttgcagattggatggaacatc

SEQ ID NO: 157966 - DNA, 25 bp, Canis familiaris
ggagttgagatctgatggcaccgtg

SEQ ID NO: 157967 - DNA, 25 bp, Canis familiaris
ggagcttcaggctaactacagcgtg

SEQ ID NO: 157968 - DNA, 25 bp, Canis familiaris
ggacgatcatattaactcaccgctg

SEQ ID NO: 157969 - DNA, 25 bp, Canis familiaris
ggactgtctatatagttatggccgg

SEQ ID NO: 157970 - DNA, 25 bp, Canis familiaris
ggacctgaatagacagttttccaaa

SEQ ID NO: 157971 - DNA, 25 bp, Canis familiaris
ggagacttttgttgttctttgaaga

SEQ ID NO: 157972 - DNA, 25 bp, Canis familiaris
ggagatgctttttgggtctggtgaa

SEQ ID NO: 157973 - DNA, 25 bp, Canis familiaris
ggagagctatatacggctgttgcag

SEQ ID NO: 157974 - DNA, 25 bp, Canis familiaris
ggagttatatcagccatgttatttg

SEQ ID NO: 157975 - DNA, 25 bp, Canis familiaris
ggagatctgtatgcctgattttcat

SEQ ID NO: 157976 - DNA, 25 bp, Canis familiaris
ggagcactgcttgtctggaggacat

SEQ ID NO: 157977 - DNA, 25 bp, Canis familiaris
ggagacctatcattggtgatggggt

SEQ ID NO: 157978 - DNA, 25 bp, Canis familiaris
ggagacctaatcagtggggagccca

SEQ ID NO: 157979 - DNA, 25 bp, Canis familiaris
ggagacaaactcagcaggggacttc

SEQ ID NO: 157980 - DNA, 25 bp, Canis familiaris
ggagactcccttgctgggaatcttc

SEQ ID NO: 157981 - DNA, 25 bp, Canis familiaris
ggagatctccctgtctagattattc

SEQ ID NO: 157982 - DNA, 25 bp, Canis familiaris
ggagatcccgattttcaattatgtt

SEQ ID NO: 157983 - DNA, 25 bp, Canis familiaris
ggagatgaccgatcttcattactaa

SEQ ID NO: 157984 - DNA, 25 bp, Canis familiaris
ggagatgagccgtgtctgtagacca

SEQ ID NO: 157985 - DNA, 25 bp, Canis familiaris
ggcgaggccagtacctgaaacgcat

SEQ ID NO: 157986 - DNA, 25 bp, Canis familiaris
ggagaggtttatgctcaacccatgt

SEQ ID NO: 157987 - DNA, 25 bp, Canis familiaris
ggagaagttatgaccctcccaagtg

SEQ ID NO: 157988 - DNA, 25 bp, Canis familiaris
ggagactgtcataatcccatccaga

SEQ ID NO: 157989 - DNA, 25 bp, Canis familiaris
ggcattcgtattgcgccgctagagg

SEQ ID NO: 157990 - DNA, 25 bp, Canis familiaris
ggcattcgtattgcgccgctagagg

SEQ ID NO: 157991 - DNA, 25 bp, Canis familiaris
ggagtaggatttggccctagattta

SEQ ID NO: 157992 - DNA, 25 bp, Canis familiaris
tgaaccggttccatcactaggtttt

SEQ ID NO: 157993 - DNA, 25 bp, Canis familiaris
ggacttgagttcaactcctgggtat

SEQ ID NO: 157994 - DNA, 25 bp, Canis familiaris
ggagctttgtagaagtccaaggttt

SEQ ID NO: 157995 - DNA, 25 bp, Canis familiaris
ggagagattccggagctcagagagg

SEQ ID NO: 157996 - DNA, 25 bp, Canis familiaris
ggagaattactcaaccaagaggaga

SEQ ID NO: 157997 - DNA, 25 bp, Canis familiaris
ggaccattatcctactccaagatta

SEQ ID NO: 157998 - DNA, 25 bp, Canis familiaris
ggaccaagtcttcatctcaagttca

SEQ ID NO: 157999 - DNA, 25 bp, Canis familiaris
ggagctgaagacaccatttagccca

SEQ ID NO: 158000 - DNA, 25 bp, Canis familiaris
ggagctgggaaagcactgggccaaa

SEQ ID NO: 158001 - DNA, 25 bp, Canis familiaris
ggctgtgggtaggtactccaggcag

SEQ ID NO: 158002 - DNA, 25 bp, Canis familiaris
ggctggggtagtgctgcccagaact

SEQ ID NO: 158003 - DNA, 25 bp, Canis familiaris
ggctcgggggttggccgagaagccg

SEQ ID NO: 158004 - DNA, 25 bp, Canis familiaris
ggctcgggtggctcccgagaagtgg

SEQ ID NO: 158005 - DNA, 25 bp, Canis familiaris
ggcatcggagggacccctcaaaggc

SEQ ID NO: 158006 - DNA, 25 bp, Canis familiaris
ggcatcggagggacccctcaaaggc

SEQ ID NO: 158007 - DNA, 25 bp, Canis familiaris
ggagaaatggagacaccccaagccc

SEQ ID NO: 158008 - DNA, 25 bp, Canis familiaris
ggagaaattaccacacatcacagac

SEQ ID NO: 158009 - DNA, 25 bp, Canis familiaris
ggagatccatgataccccatataga

SEQ ID NO: 158010 - DNA, 25 bp, Canis familiaris
ggagagacagaacctgctccactag

SEQ ID NO: 158011 - DNA, 25 bp, Canis familiaris
ggagatgtaaaccccagcagtagga

SEQ ID NO: 158012 - DNA, 25 bp, Canis familiaris
ggcatggtaaacactggaataggat

SEQ ID NO: 158013 - DNA, 25 bp, Canis familiaris
ggcaggtttgacacggaaattctga

SEQ ID NO: 158014 - DNA, 25 bp, Canis familiaris
ggacggttacgagggactttctcag

SEQ ID NO: 158015 - DNA, 25 bp, Canis familiaris
ggagcagtttagcctgggttgttcc

SEQ ID NO: 158016 - DNA, 25 bp, Canis familiaris
ggagagtcttcaggcaaagcttccc

SEQ ID NO: 158017 - DNA, 25 bp, Canis familiaris
ggagagttcatcacaaccgtgcagc

SEQ ID NO: 158018 - DNA, 25 bp, Canis familiaris
ggagatgccaaaacagaccaggcac

SEQ ID NO: 158019 - DNA, 25 bp, Canis familiaris
ggagatcgaagaaacccagcgcact

SEQ ID NO: 158020 - DNA, 25 bp, Canis familiaris
ggagatcgacagtcagactcagacc

SEQ ID NO: 158021 - DNA, 25 bp, Canis familiaris
ggagattaacattgaccatcaccgc

SEQ ID NO: 158022 - DNA, 25 bp, Canis familiaris
ggagatctgcaaaataccatcccga

SEQ ID NO: 158023 - DNA, 25 bp, Canis familiaris
ggagcatctcaaaaagtattcttgt

SEQ ID NO: 158024 - DNA, 25 bp, Canis familiaris
ggactattagccagtctccattgct

SEQ ID NO: 158025 - DNA, 25 bp, Canis familiaris
ggactgtacgcagccttcgattgca

SEQ ID NO: 158026 - DNA, 25 bp, Canis familiaris
ggagttcacacctctttgattgacc

SEQ ID NO: 158027 - DNA, 25 bp, Canis familiaris
ggagaccaacactctagagtaccct

SEQ ID NO: 158028 - DNA, 25 bp, Canis familiaris
ggagacgaagactcctggcaagcgc

SEQ ID NO: 158029 - DNA, 25 bp, Canis familiaris
ggagttcaagaccagcctggccaac

SEQ ID NO: 158030 - DNA, 25 bp, Canis familiaris
ggagctaaaatgaacctggcccact

SEQ ID NO: 158031 - DNA, 25 bp, Canis familiaris
ggacttctgaggaactcgaccgatt

SEQ ID NO: 158032 - DNA, 25 bp, Canis familiaris
ggagttcaaactaatcgagcctgag

SEQ ID NO: 158033 - DNA, 25 bp, Canis familiaris
ggagaactgatactaaggccctggg

SEQ ID NO: 158034 - DNA, 25 bp, Canis familiaris
ggagaaagttcttatgagccagtag

SEQ ID NO: 158035 - DNA, 25 bp, Canis familiaris
ggagagaacttttgaggccgctttt

SEQ ID NO: 158036 - DNA, 25 bp, Canis familiaris
ggagaggatttttgtttgatttgtt

SEQ ID NO: 158037 - DNA, 25 bp, Canis familiaris
ggagattatttttttgcttcattgt

SEQ ID NO: 158038 - DNA, 25 bp, Canis familiaris
ggagattttgtatgattgcctcttt

SEQ ID NO: 158039 - DNA, 25 bp, Canis familiaris
ggagattttgctacatgttcaccca

SEQ ID NO: 158040 - DNA, 25 bp, Canis familiaris
ggagattgttgccatcaacgacccc

SEQ ID NO: 158041 - DNA, 25 bp, Canis familiaris
ggagttttgcatcatatgcgtcatc

SEQ ID NO: 158042 - DNA, 25 bp, Canis familiaris
ggagattatatgccaacgtgtgtaa

SEQ ID NO: 158043 - DNA, 25 bp, Canis familiaris
ggagagtcatcgagcgaggtgtcaa

SEQ ID NO: 158044 - DNA, 25 bp, Canis familiaris
ggagagccagctgcaggagggaaag

SEQ ID NO: 158045 - DNA, 25 bp, Canis familiaris
ggagcagccaccgggggaagaagtc

SEQ ID NO: 158046 - DNA, 25 bp, Canis familiaris
ggagcagtcccgcaggagaagtggc

SEQ ID NO: 158047 - DNA, 25 bp, Canis familiaris
ggagcagacccttggggatggtgga

SEQ ID NO: 158048 - DNA, 25 bp, Canis familiaris
ggagcaacgccagcgtggaggctac

SEQ ID NO: 158049 - DNA, 25 bp, Canis familiaris
tggaaaagccccaggaggatcccaa

SEQ ID NO: 158050 - DNA, 25 bp, Canis familiaris
ggaaagtgccccagcagggaacgat

SEQ ID NO: 158051 - DNA, 25 bp, Canis familiaris
ggagaaatgccaaaacagtgaaatc

SEQ ID NO: 158052 - DNA, 25 bp, Canis familiaris
ggagagaatgggcccacatgtgaaa

SEQ ID NO: 158053 - DNA, 25 bp, Canis familiaris
ggagcaattgaccccagtgtaaaac

SEQ ID NO: 158054 - DNA, 25 bp, Canis familiaris
ggagcatttacacctttgttgaaat

SEQ ID NO: 158055 - DNA, 25 bp, Canis familiaris
ggagcaggttcaccagctttatgat

SEQ ID NO: 158056 - DNA, 25 bp, Canis familiaris
ggagagattctcatcgactttgtgt

SEQ ID NO: 158057 - DNA, 25 bp, Canis familiaris
ggagagtttagtgcacttacattta

SEQ ID NO: 158058 - DNA, 25 bp, Canis familiaris
ggagatgatgtttcttcctcgactt

SEQ ID NO: 158059 - DNA, 25 bp, Canis familiaris
ggagatgaggcttctgtggcctact

SEQ ID NO: 158060 - DNA, 25 bp, Canis familiaris
ggagatgatgtcaactgctgtgcgt

SEQ ID NO: 158061 - DNA, 25 bp, Canis familiaris
ggagagatgtcactctgctgagctt

SEQ ID NO: 158062 - DNA, 25 bp, Canis familiaris
ggagttgtcagctgctgagtgctca

SEQ ID NO: 158063 - DNA, 25 bp, Canis familiaris
ggagttccattaatgagtgtcagcg

SEQ ID NO: 158064 - DNA, 25 bp, Canis familiaris
ggactgtccctcagcagattagctg

SEQ ID NO: 158065 - DNA, 25 bp, Canis familiaris
ggacgtgccatcttacctaagtagt

SEQ ID NO: 158066 - DNA, 25 bp, Canis familiaris
ggacctgaatgttacaaagggcatt

SEQ ID NO: 158067 - DNA, 25 bp, Canis familiaris
ggacatcgttgtcaaaatccgagtt

SEQ ID NO: 158068 - DNA, 25 bp, Canis familiaris
ggaccacgttgtaacagatccggtt

SEQ ID NO: 158069 - DNA, 25 bp, Canis familiaris
ggaccaggtttatcacacggaactt

SEQ ID NO: 158070 - DNA, 25 bp, Canis familiaris
ggaccaggttggaagacggcggagc

SEQ ID NO: 158071 - DNA, 25 bp, Canis familiaris
ggcacgggttggtatttggtgttgg

SEQ ID NO: 158072 - DNA, 25 bp, Canis familiaris
ggacagggttgactagttcttcttg

SEQ ID NO: 158073 - DNA, 25 bp, Canis familiaris
ggaccagggctaatctggtctttag

SEQ ID NO: 158074 - DNA, 25 bp, Canis familiaris
ggaccccctactgtgggatcaatgg

SEQ ID NO: 158075 - DNA, 25 bp, Canis familiaris
ggacctaccttctgtcaggtatctg

SEQ ID NO: 158076 - DNA, 25 bp, Canis familiaris
ggacctaagttctgtaaggaagaca

SEQ ID NO: 158077 - DNA, 25 bp, Canis familiaris
ggacctcagggctcggaaagcaagg

SEQ ID NO: 158078 - DNA, 25 bp, Canis familiaris
ggacccaatggacaggcaggaaagg

SEQ ID NO: 158079 - DNA, 25 bp, Canis familiaris
ggacccacccagagacaggaagaag

SEQ ID NO: 158080 - DNA, 25 bp, Canis familiaris
ggactccggaaaggccaagacaaag

SEQ ID NO: 158081 - DNA, 25 bp, Canis familiaris
ggagaactggaatcctcacaccaag

SEQ ID NO: 158082 - DNA, 25 bp, Canis familiaris
ggagacagggggttctacttcaaca

SEQ ID NO: 158083 - DNA, 25 bp, Canis familiaris
ggagaagagctacgaactacccgac

SEQ ID NO: 158084 - DNA, 25 bp, Canis familiaris
ggagagggatactaaataccacttc

SEQ ID NO: 158085 - DNA, 25 bp, Canis familiaris
ggagagtggtagcagggggccttgc

SEQ ID NO: 158086 - DNA, 25 bp, Canis familiaris
ggagatgggatgttaggtgtgggtg

SEQ ID NO: 158087 - DNA, 25 bp, Canis familiaris
ggagagagtgtatatggtgggggaa

SEQ ID NO: 158088 - DNA, 25 bp, Canis familiaris
ggagagcctggaccatggatgatga

SEQ ID NO: 158089 - DNA, 25 bp, Canis familiaris
ggagagagctacccattgaatgact

SEQ ID NO: 158090 - DNA, 25 bp, Canis familiaris
ggagaactactgtcttatgatcacg

SEQ ID NO: 158091 - DNA, 25 bp, Canis familiaris
ggagaacttcttgatttgctgggag

SEQ ID NO: 158092 - DNA, 25 bp, Canis familiaris
ggagacatttgacaatttctggaga

SEQ ID NO: 158093 - DNA, 25 bp, Canis familiaris
ggagaccctggataattctggtgta

SEQ ID NO: 158094 - DNA, 25 bp, Canis familiaris
ggaccccgatctgacttaggtgttg

SEQ ID NO: 158095 - DNA, 25 bp, Canis familiaris
ggagcgtgccagattactgttggtg

SEQ ID NO: 158096 - DNA, 25 bp, Canis familiaris
ggagcgtgccagattactgttggtg

SEQ ID NO: 158097 - DNA, 25 bp, Canis familiaris
ggagaagccagccagttctgcttcg

SEQ ID NO: 158098 - DNA, 25 bp, Canis familiaris
ggagaactacaagatctgctgtcac

SEQ ID NO: 158099 - DNA, 25 bp, Canis familiaris
ggagaacgaccaggtgtggctccag

SEQ ID NO: 158100 - DNA, 25 bp, Canis familiaris
ggagaagcggccaggatctgtgcct

SEQ ID NO: 158101 - DNA, 25 bp, Canis familiaris
ggagatagcagagtctggcccttcc

SEQ ID NO: 158102 - DNA, 25 bp, Canis familiaris
ggagaggagatggggctcctaccca

SEQ ID NO: 158103 - DNA, 25 bp, Canis familiaris
ggagaggaggggcttcacctcctgt

SEQ ID NO: 158104 - DNA, 25 bp, Canis familiaris
ggagaggaggggttgctcttcttcc

SEQ ID NO: 158105 - DNA, 25 bp, Canis familiaris
ggagaactgggtgtgtctctcttgc

SEQ ID NO: 158106 - DNA, 25 bp, Canis familiaris
ggagagagagggtccttgtcaccag

SEQ ID NO: 158107 - DNA, 25 bp, Canis familiaris
ggagaagatggacccttgtcctcca

SEQ ID NO: 158108 - DNA, 25 bp, Canis familiaris
ggagaagtggcactctgcgtagcct

SEQ ID NO: 158109 - DNA, 25 bp, Canis familiaris
ggagaaggagacgagctgctgcagc

SEQ ID NO: 158110 - DNA, 25 bp, Canis familiaris
ggagacaggtgaccaggtgctccca

SEQ ID NO: 158111 - DNA, 25 bp, Canis familiaris
ggagacatggttccagtcctccaaa

SEQ ID NO: 158112 - DNA, 25 bp, Canis familiaris
ggagacatggatgactggcctccag

SEQ ID NO: 158113 - DNA, 25 bp, Canis familiaris
ggagatgggagtgctgagccccaga

SEQ ID NO: 158114 - DNA, 25 bp, Canis familiaris
ggagatggaggtggcagcaggctgc

SEQ ID NO: 158115 - DNA, 25 bp, Canis familiaris
ggagctgagcaggctccctatgatc

SEQ ID NO: 158116 - DNA, 25 bp, Canis familiaris
ggagatggagccacactgtgctctg

SEQ ID NO: 158117 - DNA, 25 bp, Canis familiaris
ggagatgtgccacacaatcctcatt

SEQ ID NO: 158118 - DNA, 25 bp, Canis familiaris
ggagatgctcccaaactctggatat

SEQ ID NO: 158119 - DNA, 25 bp, Canis familiaris
ggagatgttgaaactcttggacttt

SEQ ID NO: 158120 - DNA, 25 bp, Canis familiaris
ggagagccatatacccttggacttt

SEQ ID NO: 158121 - DNA, 25 bp, Canis familiaris
ggagaccagattccccaatactgtt

SEQ ID NO: 158122 - DNA, 25 bp, Canis familiaris
ggagagtggactgcaccaatatctt

SEQ ID NO: 158123 - DNA, 25 bp, Canis familiaris
ggagcagcggtgtgtccagctgatc

SEQ ID NO: 158124 - DNA, 25 bp, Canis familiaris
ggagagcgcagaatctgctcgtcgt

SEQ ID NO: 158125 - DNA, 25 bp, Canis familiaris
ggagagtgcagattcgctctacagg

SEQ ID NO: 158126 - DNA, 25 bp, Canis familiaris
ggagaagcagattccatgcaggaag

SEQ ID NO: 158127 - DNA, 25 bp, Canis familiaris
ggagaagaagacacacgagaggctg

SEQ ID NO: 158128 - DNA, 25 bp, Canis familiaris
ggagaaggggtgggggcagatgctg

SEQ ID NO: 158129 - DNA, 25 bp, Canis familiaris
ggagagggaggtcatgatggccgca

SEQ ID NO: 158130 - DNA, 25 bp, Canis familiaris
ggagagggcagattctttagctaag

SEQ ID NO: 158131 - DNA, 25 bp, Canis familiaris
ggagactgtaaactgttcagcaaag

SEQ ID NO: 158132 - DNA, 25 bp, Canis familiaris
ggagaagtaaacctctgcagcaact

SEQ ID NO: 158133 - DNA, 25 bp, Canis familiaris
ggagagggaacatgctgagaaactg

SEQ ID NO: 158134 - DNA, 25 bp, Canis familiaris
ggagagggaacatgctgagaaactg

SEQ ID NO: 158135 - DNA, 25 bp, Canis familiaris
ggagaggaaacatctggctggcgct

SEQ ID NO: 158136 - DNA, 25 bp, Canis familiaris
ggagaagaagaaactgggcctgaga

SEQ ID NO: 158137 - DNA, 25 bp, Canis familiaris
ggagcaaaacaaactggtcaggcga

SEQ ID NO: 158138 - DNA, 25 bp, Canis familiaris
ggagcgggatcagattaccaggaac

SEQ ID NO: 158139 - DNA, 25 bp, Canis familiaris
ggagcggcagacaggattccaggag

SEQ ID NO: 158140 - DNA, 25 bp, Canis familiaris
ggagaactgagctcgataccaaagg

SEQ ID NO: 158141 - DNA, 25 bp, Canis familiaris
ggagacatcgccgcgatagacaaac

SEQ ID NO: 158142 - DNA, 25 bp, Canis familiaris
ggagactcccctggcaatggagaga

SEQ ID NO: 158143 - DNA, 25 bp, Canis familiaris
ggagacccctcaatgcaagaaatgg

SEQ ID NO: 158144 - DNA, 25 bp, Canis familiaris
ggagaagccctgagcaagaacctgg

SEQ ID NO: 158145 - DNA, 25 bp, Canis familiaris
ggagcaaccttgcaaaagagcctgg

SEQ ID NO: 158146 - DNA, 25 bp, Canis familiaris
ggagctccactgggaaatatggccc

SEQ ID NO: 158147 - DNA, 25 bp, Canis familiaris
ggcacccaggcaaagaaggtcctcc

SEQ ID NO: 158148 - DNA, 25 bp, Canis familiaris
ggagcccaggatactgataccttca

SEQ ID NO: 158149 - DNA, 25 bp, Canis familiaris
ggagcatccggtacgagctccaatt

SEQ ID NO: 158150 - DNA, 25 bp, Canis familiaris
ggagcagtctggtataagcggaatg

SEQ ID NO: 158151 - DNA, 25 bp, Canis familiaris
ggagattctgtgctgaacgcggagc

SEQ ID NO: 158152 - DNA, 25 bp, Canis familiaris
ggagatacgctgctgaggggtgaat

SEQ ID NO: 158153 - DNA, 25 bp, Canis familiaris
ggagaagccggcgagcggcaggaag

SEQ ID NO: 158154 - DNA, 25 bp, Canis familiaris
ggagatggccgacctggagaagaag

SEQ ID NO: 158155 - DNA, 25 bp, Canis familiaris
ggagagtttgagccgtgaaagggtt

SEQ ID NO: 158156 - DNA, 25 bp, Canis familiaris
ggagagttggagggtggaggtgatg

SEQ ID NO: 158157 - DNA, 25 bp, Canis familiaris
ggagatcttggagcaggagcgggca

SEQ ID NO: 158158 - DNA, 25 bp, Canis familiaris
ggagatcttggagcagaggcgggcc

SEQ ID NO: 158159 - DNA, 25 bp, Canis familiaris
ggagactatggcctctgaaggcccc

SEQ ID NO: 158160 - DNA, 25 bp, Canis familiaris
ggagaaaggctgctttggcaccagt

SEQ ID NO: 158161 - DNA, 25 bp, Canis familiaris
ggagaaatgttgactttaccacaga

SEQ ID NO: 158162 - DNA, 25 bp, Canis familiaris
ggagaatattagtttcgacgactga

SEQ ID NO: 158163 - DNA, 25 bp, Canis familiaris
ggagcaaaccgagttctgacgactt

SEQ ID NO: 158164 - DNA, 25 bp, Canis familiaris
ggagccaacctggattgggtgtttg

SEQ ID NO: 158165 - DNA, 25 bp, Canis familiaris
ggagccattccagagtgggttcctt

SEQ ID NO: 158166 - DNA, 25 bp, Canis familiaris
ggagcatatcccggaggaggcttcc

SEQ ID NO: 158167 - DNA, 25 bp, Canis familiaris
ggagaagggggctagagcagttctt

SEQ ID NO: 158168 - DNA, 25 bp, Canis familiaris
ggagagatggggcccaagagctcgt

SEQ ID NO: 158169 - DNA, 25 bp, Canis familiaris
ggagaaggaggcacagcggctaatg

SEQ ID NO: 158170 - DNA, 25 bp, Canis familiaris
ggagcaagaatcgtaagcggcattt

SEQ ID NO: 158171 - DNA, 25 bp, Canis familiaris
ggagcacagacagaggaagccactt

SEQ ID NO: 158172 - DNA, 25 bp, Canis familiaris
ggagaagacaggagcatagcccatg

SEQ ID NO: 158173 - DNA, 25 bp, Canis familiaris
ggagaggaatgatggctcagccgag

SEQ ID NO: 158174 - DNA, 25 bp, Canis familiaris
ggagcaccctgtgctgctcaccgag

SEQ ID NO: 158175 - DNA, 25 bp, Canis familiaris
ggagcagccactgaagacacctggc

SEQ ID NO: 158176 - DNA, 25 bp, Canis familiaris
ggagagccacagttgcagatgacag

SEQ ID NO: 158177 - DNA, 25 bp, Canis familiaris
ggagaccatggcttgatggacaaag

SEQ ID NO: 158178 - DNA, 25 bp, Canis familiaris
ggagactcattggagggacactgac

SEQ ID NO: 158179 - DNA, 25 bp, Canis familiaris
ggagactcacaaagttgacagtgtc

SEQ ID NO: 158180 - DNA, 25 bp, Canis familiaris
ggagaccagcaaatcggtgcactga

SEQ ID NO: 158181 - DNA, 25 bp, Canis familiaris
ggagaccagcaagccggaggagagc

SEQ ID NO: 158182 - DNA, 25 bp, Canis familiaris
ggagccatcaaacccggaggctagc

SEQ ID NO: 158183 - DNA, 25 bp, Canis familiaris
ggagaatcagagctttgcgaggttc

SEQ ID NO: 158184 - DNA, 25 bp, Canis familiaris
ggagaatcagagcttcgaggtttcg

SEQ ID NO: 158185 - DNA, 25 bp, Canis familiaris
ggagaacaaccacccaggaattggt

SEQ ID NO: 158186 - DNA, 25 bp, Canis familiaris
ggacaggccaaacccaggagattga

SEQ ID NO: 158187 - DNA, 25 bp, Canis familiaris
ggagcaacgcagtgacctggacaaa

SEQ ID NO: 158188 - DNA, 25 bp, Canis familiaris
ggagagggcagatgagccccaccat

SEQ ID NO: 158189 - DNA, 25 bp, Canis familiaris
ggagaggtcacaggagacccgtcca

SEQ ID NO: 158190 - DNA, 25 bp, Canis familiaris
ggagaggcagaagcagactccctgc

SEQ ID NO: 158191 - DNA, 25 bp, Canis familiaris
ggagcaggaagtggcaggctcccgg

SEQ ID NO: 158192 - DNA, 25 bp, Canis familiaris
ggagaaaggatccagagtctcaggt

SEQ ID NO: 158193 - DNA, 25 bp, Canis familiaris
ggagaagttcaccaagctctacgac

SEQ ID NO: 158194 - DNA, 25 bp, Canis familiaris
ggagaagttctactcatctctcagg

SEQ ID NO: 158195 - DNA, 25 bp, Canis familiaris
ggagacagggtcattttcagcagag

SEQ ID NO: 158196 - DNA, 25 bp, Canis familiaris
ggagactgtggtgacttcgcccatg

SEQ ID NO: 158197 - DNA, 25 bp, Canis familiaris
ggagactggcgagacgtgcgtctac

SEQ ID NO: 158198 - DNA, 25 bp, Canis familiaris
ggagagtagcgaggaggcagcagtc

SEQ ID NO: 158199 - DNA, 25 bp, Canis familiaris
ggagaatgagagccaagcgcgagtc

SEQ ID NO: 158200 - DNA, 25 bp, Canis familiaris
ggagcaagagagactcaggcctggg

SEQ ID NO: 158201 - DNA, 25 bp, Canis familiaris
ggagaaggaggttgagcctgccctg

SEQ ID NO: 158202 - DNA, 25 bp, Canis familiaris
ggagaaggagcgtcagactcgcctg

SEQ ID NO: 158203 - DNA, 25 bp, Canis familiaris
ggagagggaggaggacatgctggac

SEQ ID NO: 158204 - DNA, 25 bp, Canis familiaris
ggagaggcggcggaggtgcagagcc

SEQ ID NO: 158205 - DNA, 25 bp, Canis familiaris
ggagatgaggcctaagagtatgatc

SEQ ID NO: 158206 - DNA, 25 bp, Canis familiaris
ggagaaggcctaggctgggtctgct

SEQ ID NO: 158207 - DNA, 25 bp, Canis familiaris
ggagatgaggccgtatctgggccct

SEQ ID NO: 158208 - DNA, 25 bp, Canis familiaris
ggagatgaaccgcatgcatgagagc

SEQ ID NO: 158209 - DNA, 25 bp, Canis familiaris
ggagcatcacaacggcatagcagaa

SEQ ID NO: 158210 - DNA, 25 bp, Canis familiaris
ggagctggatcattggattcaaatc

SEQ ID NO: 158211 - DNA, 25 bp, Canis familiaris
ggagcatgcttctgcagatgtcgaa

SEQ ID NO: 158212 - DNA, 25 bp, Canis familiaris
ggagcatggttgacaatatagagag

SEQ ID NO: 158213 - DNA, 25 bp, Canis familiaris
ggagctggtgctgaagtctgcagtg

SEQ ID NO: 158214 - DNA, 25 bp, Canis familiaris
ggagatgtggtggaagctgtgaggc

SEQ ID NO: 158215 - DNA, 25 bp, Canis familiaris
ggagactgagtgggggtggctcctg

SEQ ID NO: 158216 - DNA, 25 bp, Canis familiaris
ggagccgagggacggcgcaaactgc

SEQ ID NO: 158217 - DNA, 25 bp, Canis familiaris
ggagcacggggaccagcagaacgtg

SEQ ID NO: 158218 - DNA, 25 bp, Canis familiaris
ggagcctggttccaacagaactgga

SEQ ID NO: 158219 - DNA, 25 bp, Canis familiaris
ggaccgtgtagcctttgaacatgga

SEQ ID NO: 158220 - DNA, 25 bp, Canis familiaris
ggagccggatggattatgttctggg

SEQ ID NO: 158221 - DNA, 25 bp, Canis familiaris
ggagctttatctatttttctaagtc

SEQ ID NO: 158222 - DNA, 25 bp, Canis familiaris
ggagcttttctcagcttctgtaaca

SEQ ID NO: 158223 - DNA, 25 bp, Canis familiaris
ggagcatcttctggaatgcactctg

SEQ ID NO: 158224 - DNA, 25 bp, Canis familiaris
ggagacagtgctggacatgctccga

SEQ ID NO: 158225 - DNA, 25 bp, Canis familiaris
ggagacagagctgcttcaactgaaa

SEQ ID NO: 158226 - DNA, 25 bp, Canis familiaris
ggagcaaagcttctcatacttgaaa

SEQ ID NO: 158227 - DNA, 25 bp, Canis familiaris
ggagcagcggcttgttgaacttgaa

SEQ ID NO: 158228 - DNA, 25 bp, Canis familiaris
ggagagcggaattaataatcatgac

SEQ ID NO: 158229 - DNA, 25 bp, Canis familiaris
ggagacccgcattcaggagtctggc

SEQ ID NO: 158230 - DNA, 25 bp, Canis familiaris
ggagacagccatcaaggttctccgg

SEQ ID NO: 158231 - DNA, 25 bp, Canis familiaris
ttgagcacgtaataggtattcagga

SEQ ID NO: 158232 - DNA, 25 bp, Canis familiaris
ggagcatagtagtagtggtggtcag

SEQ ID NO: 158233 - DNA, 25 bp, Canis familiaris
ggagcagatctacaaactggccaag

SEQ ID NO: 158234 - DNA, 25 bp, Canis familiaris
ggagcaaccctcagaaggccaagac

SEQ ID NO: 158235 - DNA, 25 bp, Canis familiaris
ggagctacacccagcaatgggcaaa

SEQ ID NO: 158236 - DNA, 25 bp, Canis familiaris
ggagctacactcattgccagaagat

SEQ ID NO: 158237 - DNA, 25 bp, Canis familiaris
ggagagacacagagacgcagacaca

SEQ ID NO: 158238 - DNA, 25 bp, Canis familiaris
ggagaggcacagagggctcagcaga

SEQ ID NO: 158239 - DNA, 25 bp, Canis familiaris
ggagatggcagtctgggtcatggtt

SEQ ID NO: 158240 - DNA, 25 bp, Canis familiaris
ggagaggcagtgcctgttgccagga

SEQ ID NO: 158241 - DNA, 25 bp, Canis familiaris
ggacttcctgggttgccaggaccta

SEQ ID NO: 158242 - DNA, 25 bp, Canis familiaris
tggttttctggggtcgcggagataa

SEQ ID NO: 158243 - DNA, 25 bp, Canis familiaris
tggtctgttcggagaactggtttac

SEQ ID NO: 158244 - DNA, 25 bp, Canis familiaris
tgtacttatcggtgaatcattgatg

SEQ ID NO: 158245 - DNA, 25 bp, Canis familiaris
ggcagctttaagtgaatattggttt

SEQ ID NO: 158246 - DNA, 25 bp, Canis familiaris
ggcactttaatggggaaatgtcctt

SEQ ID NO: 158247 - DNA, 25 bp, Canis familiaris
ggactttttagtcacagttccagtt

SEQ ID NO: 158248 - DNA, 25 bp, Canis familiaris
tggagccctttctgggagttccagg

SEQ ID NO: 158249 - DNA, 25 bp, Canis familiaris
ggagagtctttcaaggattcttcaa

SEQ ID NO: 158250 - DNA, 25 bp, Canis familiaris
ggagaactggtgaagaatttcgcga

SEQ ID NO: 158251 - DNA, 25 bp, Canis familiaris
ggagacctgggatatgcttgtcctg

SEQ ID NO: 158252 - DNA, 25 bp, Canis familiaris
ggagacctggatgaagggctcactc

SEQ ID NO: 158253 - DNA, 25 bp, Canis familiaris
ggagctcctggtgcatctggagacc

SEQ ID NO: 158254 - DNA, 25 bp, Canis familiaris
ggagctcaatcgaactctgaagaag

SEQ ID NO: 158255 - DNA, 25 bp, Canis familiaris
ggaccagtggaagtgctgaatttgc

SEQ ID NO: 158256 - DNA, 25 bp, Canis familiaris
ggaccagtacaagtggtatcggatc

SEQ ID NO: 158257 - DNA, 25 bp, Canis familiaris
ggaccaagacaagtggtatcggaca

SEQ ID NO: 158258 - DNA, 25 bp, Canis familiaris
ggacctatgaagttcttaccaatat

SEQ ID NO: 158259 - DNA, 25 bp, Canis familiaris
ggacgcgtgggttcttagacataat

SEQ ID NO: 158260 - DNA, 25 bp, Canis familiaris
ggactggggcaccctgatagagaaa

SEQ ID NO: 158261 - DNA, 25 bp, Canis familiaris
ggacctgtggaccctggttgtaaag

SEQ ID NO: 158262 - DNA, 25 bp, Canis familiaris
ggagcacttcaatgccatggtggta

SEQ ID NO: 158263 - DNA, 25 bp, Canis familiaris
ggagcactctgattgtgccttcatg

SEQ ID NO: 158264 - DNA, 25 bp, Canis familiaris
ggagcacaataattgcccttagccg

SEQ ID NO: 158265 - DNA, 25 bp, Canis familiaris
ggagaagaatgaccacctccatgcc

SEQ ID NO: 158266 - DNA, 25 bp, Canis familiaris
ggagaagaagctgactcccatcacc

SEQ ID NO: 158267 - DNA, 25 bp, Canis familiaris
ggagacaatcatcaactgacccctc

SEQ ID NO: 158268 - DNA, 25 bp, Canis familiaris
ggagaacaagtaggtgaccgccgcc

SEQ ID NO: 158269 - DNA, 25 bp, Canis familiaris
ggagcagtacagtggtaccgccacc

SEQ ID NO: 158270 - DNA, 25 bp, Canis familiaris
ggagctaagagatggtcgacccacc

SEQ ID NO: 158271 - DNA, 25 bp, Canis familiaris
ggagctcaattatgtggccaggaac

SEQ ID NO: 158272 - DNA, 25 bp, Canis familiaris
ggagcatattcatggggtcaaaagc

SEQ ID NO: 158273 - DNA, 25 bp, Canis familiaris
ggactgtggcattggtggtcactaa

SEQ ID NO: 158274 - DNA, 25 bp, Canis familiaris
ggagctggcgcaaggagcgcatccg

SEQ ID NO: 158275 - DNA, 25 bp, Canis familiaris
ggagctgagctgagcacaggagccc

SEQ ID NO: 158276 - DNA, 25 bp, Canis familiaris
ggagcataggcttctgcagcaactc

SEQ ID NO: 158277 - DNA, 25 bp, Canis familiaris
ggagcagcaggccctgcagacagtc

SEQ ID NO: 158278 - DNA, 25 bp, Canis familiaris
ggagcagcatggcaagaccacagcg

SEQ ID NO: 158279 - DNA, 25 bp, Canis familiaris
ggagcagatggatagatcctcagcc

SEQ ID NO: 158280 - DNA, 25 bp, Canis familiaris
ggagcagtgggaactctccaggctt

SEQ ID NO: 158281 - DNA, 25 bp, Canis familiaris
ggagcagggagaggtgtcgatggag

SEQ ID NO: 158282 - DNA, 25 bp, Canis familiaris
ggagcaagggcaggccatcgataac

SEQ ID NO: 158283 - DNA, 25 bp, Canis familiaris
ggacacagtgcctcgtagtagacgc

SEQ ID NO: 158284 - DNA, 25 bp, Canis familiaris
ggacacgggtgtatactacacgcgg

SEQ ID NO: 158285 - DNA, 25 bp, Canis familiaris
ggactctggtcttttgaaacctggg

SEQ ID NO: 158286 - DNA, 25 bp, Canis familiaris
ggagcagcatgtcgctttctgaata

SEQ ID NO: 158287 - DNA, 25 bp, Canis familiaris
ggagcagctggctctgcttgtagaa

SEQ ID NO: 158288 - DNA, 25 bp, Canis familiaris
ggagcatctggcaacatctggagac

SEQ ID NO: 158289 - DNA, 25 bp, Canis familiaris
ggagcagctgtcaatctgtgcgatg

SEQ ID NO: 158290 - DNA, 25 bp, Canis familiaris
ggagagctgcatcatttgtgggtgt

SEQ ID NO: 158291 - DNA, 25 bp, Canis familiaris
ggagactgtctattggtgcgatggt

SEQ ID NO: 158292 - DNA, 25 bp, Canis familiaris
ggagactcgctactgtgcagtgtgc

SEQ ID NO: 158293 - DNA, 25 bp, Canis familiaris
ggagagtcattggattcagcttgct

SEQ ID NO: 158294 - DNA, 25 bp, Canis familiaris
ggagagtttgacggatttgcttttt

SEQ ID NO: 158295 - DNA, 25 bp, Canis familiaris
ggagagctttcacatgattttttta

SEQ ID NO: 158296 - DNA, 25 bp, Canis familiaris
ggacaccttcatgaactctttttaa

SEQ ID NO: 158297 - DNA, 25 bp, Canis familiaris
ggagcaccttagaatctcttttctc

SEQ ID NO: 158298 - DNA, 25 bp, Canis familiaris
ggagctactataaatctactacacc

SEQ ID NO: 158299 - DNA, 25 bp, Canis familiaris
ggagctaattacgatccaggccacc

SEQ ID NO: 158300 - DNA, 25 bp, Canis familiaris
ggagctgtttgatggccagcggctc

SEQ ID NO: 158301 - DNA, 25 bp, Canis familiaris
ggagcatttatgacggaacatggcc

SEQ ID NO: 158302 - DNA, 25 bp, Canis familiaris
ggacattaaaggtcgaatgatgcaa

SEQ ID NO: 158303 - DNA, 25 bp, Canis familiaris
ggagcactgtactgaccagatgtaa

SEQ ID NO: 158304 - DNA, 25 bp, Canis familiaris
ggagcacgctaaaggcacaactaag

SEQ ID NO: 158305 - DNA, 25 bp, Canis familiaris
ggagcttccacttggacgagcataa

SEQ ID NO: 158306 - DNA, 25 bp, Canis familiaris
ggagctgtcacaatgttattgcaga

SEQ ID NO: 158307 - DNA, 25 bp, Canis familiaris
ggagctgtcagcttgtgtcttcagc

SEQ ID NO: 158308 - DNA, 25 bp, Canis familiaris
ggagaatgctgcatggtctctcccc

SEQ ID NO: 158309 - DNA, 25 bp, Canis familiaris
ggaccatgctgggagttgctcaacc

SEQ ID NO: 158310 - DNA, 25 bp, Canis familiaris
ggaccattgcacggattgaacactc

SEQ ID NO: 158311 - DNA, 25 bp, Canis familiaris
ggcccatctaccgtggaaagccagt

SEQ ID NO: 158312 - DNA, 25 bp, Canis familiaris
ggacgtgcgaccctggaaagcacag

SEQ ID NO: 158313 - DNA, 25 bp, Canis familiaris
ggagcgggagctgcggaaaagggtc

SEQ ID NO: 158314 - DNA, 25 bp, Canis familiaris
ggagccggtgatgacgaagaggagg

SEQ ID NO: 158315 - DNA, 25 bp, Canis familiaris
ggagcccagagagacgctttgggtg

SEQ ID NO: 158316 - DNA, 25 bp, Canis familiaris
ggaaccaacaccagttcttggtgac

SEQ ID NO: 158317 - DNA, 25 bp, Canis familiaris
ggacctcaccccagttataggaggc

SEQ ID NO: 158318 - DNA, 25 bp, Canis familiaris
ggacccctcagcaggtctagggaac

SEQ ID NO: 158319 - DNA, 25 bp, Canis familiaris
ggaccggccaggatccaaggtgaac

SEQ ID NO: 158320 - DNA, 25 bp, Canis familiaris
ggaccaggccaagctgggacggaga

SEQ ID NO: 158321 - DNA, 25 bp, Canis familiaris
ggaccaggccgatcctggtcacagt

SEQ ID NO: 158322 - DNA, 25 bp, Canis familiaris
ggacccccagtatgtggtcaactcc

SEQ ID NO: 158323 - DNA, 25 bp, Canis familiaris
ggagctccttcataggtgcaacgac

SEQ ID NO: 158324 - DNA, 25 bp, Canis familiaris
ggagcccttaacctatgaggccaat

SEQ ID NO: 158325 - DNA, 25 bp, Canis familiaris
ggagctgtttttgctactgaccaat

SEQ ID NO: 158326 - DNA, 25 bp, Canis familiaris
ggagcagtcttttgcttttatccag

SEQ ID NO: 158327 - DNA, 25 bp, Canis familiaris
ggagccttgtaagatccttcacagg

SEQ ID NO: 158328 - DNA, 25 bp, Canis familiaris
ggaccatagtaagtaccctcacgtt

SEQ ID NO: 158329 - DNA, 25 bp, Canis familiaris
ggacgctaggaacactcagaccttt

SEQ ID NO: 158330 - DNA, 25 bp, Canis familiaris
ggaccttttatgtacgtgacacttt

SEQ ID NO: 158331 - DNA, 25 bp, Canis familiaris
ggaccaggttgtctcctgcgacttc

SEQ ID NO: 158332 - DNA, 25 bp, Canis familiaris
ggagccagagccaggatttggaccc

SEQ ID NO: 158333 - DNA, 25 bp, Canis familiaris
ggagcttaccttcagctatggaaac

SEQ ID NO: 158334 - DNA, 25 bp, Canis familiaris
ggaccatcacctggaagattgaaag

SEQ ID NO: 158335 - DNA, 25 bp, Canis familiaris
ggagctcacaccaaaatcttaataa

SEQ ID NO: 158336 - DNA, 25 bp, Canis familiaris
ggacccatcatccagaatactagat

SEQ ID NO: 158337 - DNA, 25 bp, Canis familiaris
ggagcaccatacaatgtaccatgga

SEQ ID NO: 158338 - DNA, 25 bp, Canis familiaris
ggagaatctctaggtactatagcaa

SEQ ID NO: 158339 - DNA, 25 bp, Canis familiaris
ggagacaccgcaggtatctttcaca

SEQ ID NO: 158340 - DNA, 25 bp, Canis familiaris
ggagaccagtcagaacattgtcaag

SEQ ID NO: 158341 - DNA, 25 bp, Canis familiaris
ggagacctgtagtgatagtgctgca

SEQ ID NO: 158342 - DNA, 25 bp, Canis familiaris
ggagactatgtgtaaacaggcatca

SEQ ID NO: 158343 - DNA, 25 bp, Canis familiaris
ggagacattagttgagagcaagcaa

SEQ ID NO: 158344 - DNA, 25 bp, Canis familiaris
ggagacacaccttgaagaagcaacg

SEQ ID NO: 158345 - DNA, 25 bp, Canis familiaris
ggagagcgacctgcaagactgacac

SEQ ID NO: 158346 - DNA, 25 bp, Canis familiaris
ggagagcagtttggcaatacttgac

SEQ ID NO: 158347 - DNA, 25 bp, Canis familiaris
ggagacaggttggacaagatctgac

SEQ ID NO: 158348 - DNA, 25 bp, Canis familiaris
ggaacggcttgaaaggacaaagaat

SEQ ID NO: 158349 - DNA, 25 bp, Canis familiaris
ggaccagttgaaaaggaaacagcct

SEQ ID NO: 158350 - DNA, 25 bp, Canis familiaris
ggctcctttgggtgacataacggct

SEQ ID NO: 158351 - DNA, 25 bp, Canis familiaris
ggcttctttaggtaacacccaactg

SEQ ID NO: 158352 - DNA, 25 bp, Canis familiaris
ggaaccataagggaatccctcacct

SEQ ID NO: 158353 - DNA, 25 bp, Canis familiaris
ggcaccttaacgaaactcctgagcc

SEQ ID NO: 158354 - DNA, 25 bp, Canis familiaris
ggactcggaaggacaactaaacaag

SEQ ID NO: 158355 - DNA, 25 bp, Canis familiaris
ggagccgacggtacaagaataacga

SEQ ID NO: 158356 - DNA, 25 bp, Canis familiaris
ggagcgagatccctccaaaatcaag

SEQ ID NO: 158357 - DNA, 25 bp, Canis familiaris
ggagcgagaccccactaacatcaaa

SEQ ID NO: 158358 - DNA, 25 bp, Canis familiaris
ggagcgaggccgggtatacaactac

SEQ ID NO: 158359 - DNA, 25 bp, Canis familiaris
ggagaaggccagagtcatcacagaa

SEQ ID NO: 158360 - DNA, 25 bp, Canis familiaris
ggagaaggccagagtcatcacagaa

SEQ ID NO: 158361 - DNA, 25 bp, Canis familiaris
ggagaaggccagagtcatcacagaa

SEQ ID NO: 158362 - DNA, 25 bp, Canis familiaris
ggagaatgttccatgtgcacttgaa

SEQ ID NO: 158363 - DNA, 25 bp, Canis familiaris
ggagcaatgcctgcaggtgactcta

SEQ ID NO: 158364 - DNA, 25 bp, Canis familiaris
ggagcaacttcggaatgcactcttg

SEQ ID NO: 158365 - DNA, 25 bp, Canis familiaris
ggagaagattctgtcagcctttgcg

SEQ ID NO: 158366 - DNA, 25 bp, Canis familiaris
ggagaagctggtggacgtcttgtcg

SEQ ID NO: 158367 - DNA, 25 bp, Canis familiaris
ggagcattgtagagcacgttgcttc

SEQ ID NO: 158368 - DNA, 25 bp, Canis familiaris
ggagcaggtagaggccttggtgccc

SEQ ID NO: 158369 - DNA, 25 bp, Canis familiaris
ggagcaggtagatgagtggacggtc

SEQ ID NO: 158370 - DNA, 25 bp, Canis familiaris
ggagcaggtgactagggaatgagag

SEQ ID NO: 158371 - DNA, 25 bp, Canis familiaris
ggagcaggtcctgagagaagcagca

SEQ ID NO: 158372 - DNA, 25 bp, Canis familiaris
ggagcagttcctccaggataccatc

SEQ ID NO: 158373 - DNA, 25 bp, Canis familiaris
ggagcagttcgtggcagaacacccg

SEQ ID NO: 158374 - DNA, 25 bp, Canis familiaris
ggagcagatctgcgtggatatccgg

SEQ ID NO: 158375 - DNA, 25 bp, Canis familiaris
ggagcaggtgagcggtatcattgga

SEQ ID NO: 158376 - DNA, 25 bp, Canis familiaris
ggagcaggagatcttggtcttggac

SEQ ID NO: 158377 - DNA, 25 bp, Canis familiaris
ggagctgtgagaccttggtaaagtc

SEQ ID NO: 158378 - DNA, 25 bp, Canis familiaris
ggagctgatggacctggctgtgctc

SEQ ID NO: 158379 - DNA, 25 bp, Canis familiaris
ggagctcaggacctgggtgtttgta

SEQ ID NO: 158380 - DNA, 25 bp, Canis familiaris
ggaccagttcccaactgttgttgaa

SEQ ID NO: 158381 - DNA, 25 bp, Canis familiaris
ggaccagaccgtggacgttgtagct

SEQ ID NO: 158382 - DNA, 25 bp, Canis familiaris
ggaccaatccactacaggtttcagc

SEQ ID NO: 158383 - DNA, 25 bp, Canis familiaris
ggagacagaacacaaggccttgacc

SEQ ID NO: 158384 - DNA, 25 bp, Canis familiaris
ggagcaagcaataccgggcgcttac

SEQ ID NO: 158385 - DNA, 25 bp, Canis familiaris
ggaaagaattaccggatttcatcaa

SEQ ID NO: 158386 - DNA, 25 bp, Canis familiaris
ggaattaattcctgagtgcttaaca

SEQ ID NO: 158387 - DNA, 25 bp, Canis familiaris
ggagcctatattccttagagctata

SEQ ID NO: 158388 - DNA, 25 bp, Canis familiaris
ggagcttatatgtctttaggctata

SEQ ID NO: 158389 - DNA, 25 bp, Canis familiaris
tgggttaaggctttcttgaagttgc

SEQ ID NO: 158390 - DNA, 25 bp, Canis familiaris
tggggaatttcaaccttgacagtta

SEQ ID NO: 158391 - DNA, 25 bp, Canis familiaris
ggagaaatcttaagctttgacaaaa

SEQ ID NO: 158392 - DNA, 25 bp, Canis familiaris
ggagcaagtttgtagccggaatagc

SEQ ID NO: 158393 - DNA, 25 bp, Canis familiaris
ggagaagtagtcgaacagaaaacag

SEQ ID NO: 158394 - DNA, 25 bp, Canis familiaris
ggaccactgagaggaaaaaatactg

SEQ ID NO: 158395 - DNA, 25 bp, Canis familiaris
ggagccctgcagagagaaatgaaat

SEQ ID NO: 158396 - DNA, 25 bp, Canis familiaris
ggaccccagggaacaatctgcatga

SEQ ID NO: 158397 - DNA, 25 bp, Canis familiaris
ggagcaccgggggaagtctggatgg

SEQ ID NO: 158398 - DNA, 25 bp, Canis familiaris
ggagctacggttgcagaactgggcc

SEQ ID NO: 158399 - DNA, 25 bp, Canis familiaris
ggagaacgactcgatcgtactgggt

SEQ ID NO: 158400 - DNA, 25 bp, Canis familiaris
ggagaacaactggaacgcattgagg

SEQ ID NO: 158401 - DNA, 25 bp, Canis familiaris
ggagacaaagtgggatgccatgcga

SEQ ID NO: 158402 - DNA, 25 bp, Canis familiaris
ggagacaatggggtgaccgctggct

SEQ ID NO: 158403 - DNA, 25 bp, Canis familiaris
ggagcaatcaggtgtacacggcgtt

SEQ ID NO: 158404 - DNA, 25 bp, Canis familiaris
ggagacaaggagtaaaaggcttatg

SEQ ID NO: 158405 - DNA, 25 bp, Canis familiaris
ggagcaggggagaaaaagtggtagc

SEQ ID NO: 158406 - DNA, 25 bp, Canis familiaris
ggagccgggaggcataatctgggcc

SEQ ID NO: 158407 - DNA, 25 bp, Canis familiaris
ggcacgaggggaataccttaggcct

SEQ ID NO: 158408 - DNA, 25 bp, Canis familiaris
tgcccggtggtaacacttcgtggtc

SEQ ID NO: 158409 - DNA, 25 bp, Canis familiaris
tcctggttcagtttcagtacggcgt

SEQ ID NO: 158410 - DNA, 25 bp, Canis familiaris
ggaccaccatggtctcagagacttg

SEQ ID NO: 158411 - DNA, 25 bp, Canis familiaris
ggaccttcacagttaacgttcttgt

SEQ ID NO: 158412 - DNA, 25 bp, Canis familiaris
ggagccaaccagctaatcagattct

SEQ ID NO: 158413 - DNA, 25 bp, Canis familiaris
ggagcaaagccagcatttggaaatt

SEQ ID NO: 158414 - DNA, 25 bp, Canis familiaris
ggagcagaactcagattgggacaac

SEQ ID NO: 158415 - DNA, 25 bp, Canis familiaris
ggagaagcaggcatgatgtgggact

SEQ ID NO: 158416 - DNA, 25 bp, Canis familiaris
ggagaacagccagtgaggggccgcg

SEQ ID NO: 158417 - DNA, 25 bp, Canis familiaris
ggagcagtatgccagcaaggtcctg

SEQ ID NO: 158418 - DNA, 25 bp, Canis familiaris
ggagcatgttgattggaggccctac

SEQ ID NO: 158419 - DNA, 25 bp, Canis familiaris
ggagctgatggagaatggccctgtc

SEQ ID NO: 158420 - DNA, 25 bp, Canis familiaris
ggagcttgaattatgccaccatgct

SEQ ID NO: 158421 - DNA, 25 bp, Canis familiaris
ggagcactggagaaagcacaccctt

SEQ ID NO: 158422 - DNA, 25 bp, Canis familiaris
ggagcagaggaggacaaaccccttg

SEQ ID NO: 158423 - DNA, 25 bp, Canis familiaris
ggagcagaggtggagccaccccatc

SEQ ID NO: 158424 - DNA, 25 bp, Canis familiaris
ggagcaggagtgtcaggctcctcct

SEQ ID NO: 158425 - DNA, 25 bp, Canis familiaris
ggagcgggtatcaagcacacgctaa

SEQ ID NO: 158426 - DNA, 25 bp, Canis familiaris
ggagcggattataaagcactttgat

SEQ ID NO: 158427 - DNA, 25 bp, Canis familiaris
ggagcaggattctgaacttcttacc

SEQ ID NO: 158428 - DNA, 25 bp, Canis familiaris
ggagcagatggtcctgaagcgggta

SEQ ID NO: 158429 - DNA, 25 bp, Canis familiaris
ggagcagatcgtctactgccaggac

SEQ ID NO: 158430 - DNA, 25 bp, Canis familiaris
ggagcagcatttcttgctatcacga

SEQ ID NO: 158431 - DNA, 25 bp, Canis familiaris
ggacgatttgggtcttcatcgtaga

SEQ ID NO: 158432 - DNA, 25 bp, Canis familiaris
ggacgttaggactttcatagctaga

SEQ ID NO: 158433 - DNA, 25 bp, Canis familiaris
ggacgctaagcgttgtcttgagtaa

SEQ ID NO: 158434 - DNA, 25 bp, Canis familiaris
ggaccatactgctttatctagagct

SEQ ID NO: 158435 - DNA, 25 bp, Canis familiaris
ggagcaatatctcatttctgaattt

SEQ ID NO: 158436 - DNA, 25 bp, Canis familiaris
ggagcaattttcttatcctgtttgt

SEQ ID NO: 158437 - DNA, 25 bp, Canis familiaris
ggagctagtgtagtttcctgctatg

SEQ ID NO: 158438 - DNA, 25 bp, Canis familiaris
ggagcacctggaggagtctcctatg

SEQ ID NO: 158439 - DNA, 25 bp, Canis familiaris
ggagcccaagcagtcaggctccttc

SEQ ID NO: 158440 - DNA, 25 bp, Canis familiaris
ggagcctggcaggtgcaggtgtgat

SEQ ID NO: 158441 - DNA, 25 bp, Canis familiaris
ggagcacccatcctaactgatgatg

SEQ ID NO: 158442 - DNA, 25 bp, Canis familiaris
ggagaatcctcattgacactggaga

SEQ ID NO: 158443 - DNA, 25 bp, Canis familiaris
ggagaagctgcttgtgactatggca

SEQ ID NO: 158444 - DNA, 25 bp, Canis familiaris
ggagacagctgcaagttcctccatg

SEQ ID NO: 158445 - DNA, 25 bp, Canis familiaris
ggagcaggatgctgatcctctcctg

SEQ ID NO: 158446 - DNA, 25 bp, Canis familiaris
ggagcagaatcatgaccactccttt

SEQ ID NO: 158447 - DNA, 25 bp, Canis familiaris
ggagccaatcaaccaaacctgtaat

SEQ ID NO: 158448 - DNA, 25 bp, Canis familiaris
ggagaaatacatccaagcaatttag

SEQ ID NO: 158449 - DNA, 25 bp, Canis familiaris
ggagaacattctcaagattggcttc

SEQ ID NO: 158450 - DNA, 25 bp, Canis familiaris
ggagaatccctgggtgttggcttcc

SEQ ID NO: 158451 - DNA, 25 bp, Canis familiaris
tggaaccaaggcaagtttggccccg

SEQ ID NO: 158452 - DNA, 25 bp, Canis familiaris
ggagaacaaggtcgttcgggcaccg

SEQ ID NO: 158453 - DNA, 25 bp, Canis familiaris
ggagaacagggtcgtctgaggctgc

SEQ ID NO: 158454 - DNA, 25 bp, Canis familiaris
ggagcagacagctggtgtcgtgtcc

SEQ ID NO: 158455 - DNA, 25 bp, Canis familiaris
ggagcaccatagaagtgtctgtact

SEQ ID NO: 158456 - DNA, 25 bp, Canis familiaris
ggactgactggcaagtgcacgctga

SEQ ID NO: 158457 - DNA, 25 bp, Canis familiaris
ggagcaaatgcggagatcaacagag

SEQ ID NO: 158458 - DNA, 25 bp, Canis familiaris
ggagcagccaagtatatcaatcaac

SEQ ID NO: 158459 - DNA, 25 bp, Canis familiaris
ggagcaccaggagttgatcatcaga

SEQ ID NO: 158460 - DNA, 25 bp, Canis familiaris
ggagcaagaggcaggactcaatctc

SEQ ID NO: 158461 - DNA, 25 bp, Canis familiaris
ggagccagatggaggactctacccc

SEQ ID NO: 158462 - DNA, 25 bp, Canis familiaris
ggagcctgatgcagggcctgatctc

SEQ ID NO: 158463 - DNA, 25 bp, Canis familiaris
ggagctctgtgcaggaaccagatac

SEQ ID NO: 158464 - DNA, 25 bp, Canis familiaris
ggagcttaggggtgctgcatgttcc

SEQ ID NO: 158465 - DNA, 25 bp, Canis familiaris
ggagcattagggggactggtgccag

SEQ ID NO: 158466 - DNA, 25 bp, Canis familiaris
ggagcacttgggagaggcaatgcca

SEQ ID NO: 158467 - DNA, 25 bp, Canis familiaris
ggagcaatgtggttggtggcttggc

SEQ ID NO: 158468 - DNA, 25 bp, Canis familiaris
ggagctttggcagttggctttggga

SEQ ID NO: 158469 - DNA, 25 bp, Canis familiaris
ggagctgctttgtttattggatggg

SEQ ID NO: 158470 - DNA, 25 bp, Canis familiaris
ggagcacatttctcatcatgggaag

SEQ ID NO: 158471 - DNA, 25 bp, Canis familiaris
ggcagcctgataagaccgggaagac

SEQ ID NO: 158472 - DNA, 25 bp, Canis familiaris
ggagccacaaacatccttgaagagc

SEQ ID NO: 158473 - DNA, 25 bp, Canis familiaris
ggagcacaccggaaacctgagacac

SEQ ID NO: 158474 - DNA, 25 bp, Canis familiaris
ggagctcagcaggttaaactggcac

SEQ ID NO: 158475 - DNA, 25 bp, Canis familiaris
ggagctgggctatgaaggctggcag

SEQ ID NO: 158476 - DNA, 25 bp, Canis familiaris
ggagctgtgatctgaggaggctaga

SEQ ID NO: 158477 - DNA, 25 bp, Canis familiaris
ggagcatgtgatcttggggtcataa

SEQ ID NO: 158478 - DNA, 25 bp, Canis familiaris
ggagcatggattatgtcagtgccaa

SEQ ID NO: 158479 - DNA, 25 bp, Canis familiaris
ggagaatacatttgtcaggcacaga

SEQ ID NO: 158480 - DNA, 25 bp, Canis familiaris
ggagaacagcatgtgtgacgtgcaa

SEQ ID NO: 158481 - DNA, 25 bp, Canis familiaris
ggagcaacagctggtggtgcagaga

SEQ ID NO: 158482 - DNA, 25 bp, Canis familiaris
ggagccatcagcaaagcgcaggaga

SEQ ID NO: 158483 - DNA, 25 bp, Canis familiaris
ggagcctgctgcaactgagaggcct

SEQ ID NO: 158484 - DNA, 25 bp, Canis familiaris
ggagccatgtgtatgaattgcaatc

SEQ ID NO: 158485 - DNA, 25 bp, Canis familiaris
ggagctcagtaacatagctgcttct

SEQ ID NO: 158486 - DNA, 25 bp, Canis familiaris
ggagctctaagacagatctcttctt

SEQ ID NO: 158487 - DNA, 25 bp, Canis familiaris
ggagctgtacgctatacaacttttg

SEQ ID NO: 158488 - DNA, 25 bp, Canis familiaris
tggactctgcctttaaacgtttgac

SEQ ID NO: 158489 - DNA, 25 bp, Canis familiaris
ggagctctggctgtatataagtagg

SEQ ID NO: 158490 - DNA, 25 bp, Canis familiaris
ggagcagctgctctttgacaagcat

SEQ ID NO: 158491 - DNA, 25 bp, Canis familiaris
ggagcaggctctcagaggcagactc

SEQ ID NO: 158492 - DNA, 25 bp, Canis familiaris
ggagcagacatctcagatgggacac

SEQ ID NO: 158493 - DNA, 25 bp, Canis familiaris
ggagcagacactcagagggacaccg

SEQ ID NO: 158494 - DNA, 25 bp, Canis familiaris
ggagcagcccttggaggagaacttg

SEQ ID NO: 158495 - DNA, 25 bp, Canis familiaris
ggagcggccttggcaggagtactta

SEQ ID NO: 158496 - DNA, 25 bp, Canis familiaris
ggacgtcagcctccaggagtttgtc

SEQ ID NO: 158497 - DNA, 25 bp, Canis familiaris
ggagcgctacctccaaaggtggtcc

SEQ ID NO: 158498 - DNA, 25 bp, Canis familiaris
ggagcgctaccgaaacaagcagggc

SEQ ID NO: 158499 - DNA, 25 bp, Canis familiaris
ggagcgcttccgtaacatggacaag

SEQ ID NO: 158500 - DNA, 25 bp, Canis familiaris
ggagcttgtccggaagattgcaaat

SEQ ID NO: 158501 - DNA, 25 bp, Canis familiaris
ggagctttcgaggagtctctgaatt

SEQ ID NO: 158502 - DNA, 25 bp, Canis familiaris
ggagctttatggacattctggaatg

SEQ ID NO: 158503 - DNA, 25 bp, Canis familiaris
ggagcatgtgtggtgcttttggacg

SEQ ID NO: 158504 - DNA, 25 bp, Canis familiaris
ggactgtgtctgactcattcttgca

SEQ ID NO: 158505 - DNA, 25 bp, Canis familiaris
ggagctgtgtggatcctttacacgt

SEQ ID NO: 158506 - DNA, 25 bp, Canis familiaris
ggagcagctgggctcctatgatcca

SEQ ID NO: 158507 - DNA, 25 bp, Canis familiaris
ggagctgtgcttgctccatgtacca

SEQ ID NO: 158508 - DNA, 25 bp, Canis familiaris
ggagcttcagctggacaatgccatc

SEQ ID NO: 158509 - DNA, 25 bp, Canis familiaris
ggagcttcactatgatgctgtctgc

SEQ ID NO: 158510 - DNA, 25 bp, Canis familiaris
ggagcattgactggtctgtgtctgc

SEQ ID NO: 158511 - DNA, 25 bp, Canis familiaris
ggagcagattctggtcagatttctg

SEQ ID NO: 158512 - DNA, 25 bp, Canis familiaris
ggagcagttctgggctatctgaggt

SEQ ID NO: 158513 - DNA, 25 bp, Canis familiaris
ggagccctcggagatctagttggat

SEQ ID NO: 158514 - DNA, 25 bp, Canis familiaris
ggagccgacgtagcatgtagtatgg

SEQ ID NO: 158515 - DNA, 25 bp, Canis familiaris
ggaccgtgttcggcatgtcatctaa

SEQ ID NO: 158516 - DNA, 25 bp, Canis familiaris
ggagcacagcttccaactgtatctc

SEQ ID NO: 158517 - DNA, 25 bp, Canis familiaris
ggagcccttcgagcagtagctcaaa

SEQ ID NO: 158518 - DNA, 25 bp, Canis familiaris
ggacccttcttcatggaccaaagaa

SEQ ID NO: 158519 - DNA, 25 bp, Canis familiaris
ggacgacattgtaacggaccgagga

SEQ ID NO: 158520 - DNA, 25 bp, Canis familiaris
ggagcctcaattaaagtggccaagg

SEQ ID NO: 158521 - DNA, 25 bp, Canis familiaris
ggagccctatgtggctagtggccgc

SEQ ID NO: 158522 - DNA, 25 bp, Canis familiaris
ggagcaccaggaggctcagtgcagc

SEQ ID NO: 158523 - DNA, 25 bp, Canis familiaris
ggagcaacaggattcctgggccgct

SEQ ID NO: 158524 - DNA, 25 bp, Canis familiaris
ggagcagaagcgcagcgcgaggccc

SEQ ID NO: 158525 - DNA, 25 bp, Canis familiaris
ggagcaggtggccatgacgctggcc

SEQ ID NO: 158526 - DNA, 25 bp, Canis familiaris
ggagcagctgctggaatgcactctt

SEQ ID NO: 158527 - DNA, 25 bp, Canis familiaris
ggagcacgctgccaatgatgtttca

SEQ ID NO: 158528 - DNA, 25 bp, Canis familiaris
ggagcactgagtttattgttcacat

SEQ ID NO: 158529 - DNA, 25 bp, Canis familiaris
ggagccttgatatttgggtagcatg

SEQ ID NO: 158530 - DNA, 25 bp, Canis familiaris
ggagctctatgttttgccattacgg

SEQ ID NO: 158531 - DNA, 25 bp, Canis familiaris
ggacctagtaattccctacaggatt

SEQ ID NO: 158532 - DNA, 25 bp, Canis familiaris
ggaccaactaactctaagggctatt

SEQ ID NO: 158533 - DNA, 25 bp, Canis familiaris
ggaccaaccaactaaagagcccaga

SEQ ID NO: 158534 - DNA, 25 bp, Canis familiaris
ggaccaaggcattctcttgaacccg

SEQ ID NO: 158535 - DNA, 25 bp, Canis familiaris
ggagcattaggaatttcttaaccgt

SEQ ID NO: 158536 - DNA, 25 bp, Canis familiaris
ggagctttgcgcttttgtacagacc

SEQ ID NO: 158537 - DNA, 25 bp, Canis familiaris
ggagcttaagcactttgaagcccca

SEQ ID NO: 158538 - DNA, 25 bp, Canis familiaris
ggagcatgggaacttcaggcacccc

SEQ ID NO: 158539 - DNA, 25 bp, Canis familiaris
ggagctcggaaaccaggatggccct

SEQ ID NO: 158540 - DNA, 25 bp, Canis familiaris
ggagcttggaaacaagtgtgccaat

SEQ ID NO: 158541 - DNA, 25 bp, Canis familiaris
ggagcttctaaagtacagtggtaat

SEQ ID NO: 158542 - DNA, 25 bp, Canis familiaris
ggagcttctaactttcagctactgt

SEQ ID NO: 158543 - DNA, 25 bp, Canis familiaris
ggagctctcatgcaattaacttctg

SEQ ID NO: 158544 - DNA, 25 bp, Canis familiaris
ggagcatcctgaaatcattttgtct

SEQ ID NO: 158545 - DNA, 25 bp, Canis familiaris
ggagcccatggcatcatagttgtgt

SEQ ID NO: 158546 - DNA, 25 bp, Canis familiaris
ggagcatgccagattctatgctgct

SEQ ID NO: 158547 - DNA, 25 bp, Canis familiaris
ggagcagcagagatttatgttcagc

SEQ ID NO: 158548 - DNA, 25 bp, Canis familiaris
ggagccatagtggctatccttcagc

SEQ ID NO: 158549 - DNA, 25 bp, Canis familiaris
ggaccatacttaatctcttccagga

SEQ ID NO: 158550 - DNA, 25 bp, Canis familiaris
ggaccatacttttctaactccaatc

SEQ ID NO: 158551 - DNA, 25 bp, Canis familiaris
ggaccaattgtaactatattgtctt

SEQ ID NO: 158552 - DNA, 25 bp, Canis familiaris
ggagctgaaaagaacattgttgatc

SEQ ID NO: 158553 - DNA, 25 bp, Canis familiaris
ggagcaaataggatatctggtgagc

SEQ ID NO: 158554 - DNA, 25 bp, Canis familiaris
ggacataagtagctctctggtagcc

SEQ ID NO: 158555 - DNA, 25 bp, Canis familiaris
ggagcagaaggacgctcgctttcct

SEQ ID NO: 158556 - DNA, 25 bp, Canis familiaris
ggagaatcagtgtgtctgtttcttg

SEQ ID NO: 158557 - DNA, 25 bp, Canis familiaris
ggagaagatggatgtctttctgtgt

SEQ ID NO: 158558 - DNA, 25 bp, Canis familiaris
ggagaaggatgaagctcctgttgct

SEQ ID NO: 158559 - DNA, 25 bp, Canis familiaris
ggagaagtgattatctgctgtgagt

SEQ ID NO: 158560 - DNA, 25 bp, Canis familiaris
ggagaaggtgacagcagtgggttgg

SEQ ID NO: 158561 - DNA, 25 bp, Canis familiaris
ggagaaggaagctggtggggctgga

SEQ ID NO: 158562 - DNA, 25 bp, Canis familiaris
ggagaagtgggtaggtgggtgggtg

SEQ ID NO: 158563 - DNA, 25 bp, Canis familiaris
ggagaagggggcgaagggtgggatg

SEQ ID NO: 158564 - DNA, 25 bp, Canis familiaris
tggagtaggggagctcagcgggttg

SEQ ID NO: 158565 - DNA, 25 bp, Canis familiaris
ggacgggcgacagatccgggtagac

SEQ ID NO: 158566 - DNA, 25 bp, Canis familiaris
ggagctaggccaacgatgacgcggc

SEQ ID NO: 158567 - DNA, 25 bp, Canis familiaris
ggagaaggctgacgctgtgggggcc

SEQ ID NO: 158568 - DNA, 25 bp, Canis familiaris
ggagctcagggacctggggtgtttg

SEQ ID NO: 158569 - DNA, 25 bp, Canis familiaris
ggagctcagggaacagtgtgtgtgg

SEQ ID NO: 158570 - DNA, 25 bp, Canis familiaris
ggaccaaggcagacacgtggtgctg

SEQ ID NO: 158571 - DNA, 25 bp, Canis familiaris
ggagctcacagccaggctggtgggc

SEQ ID NO: 158572 - DNA, 25 bp, Canis familiaris
ggacctcatgccaagtggcggtcga

SEQ ID NO: 158573 - DNA, 25 bp, Canis familiaris
ggagccattggtggtggcggctcca

SEQ ID NO: 158574 - DNA, 25 bp, Canis familiaris
ggagcagcagttacagctacggccc

SEQ ID NO: 158575 - DNA, 25 bp, Canis familiaris
ggagcactgttactgctgatgcagg

SEQ ID NO: 158576 - DNA, 25 bp, Canis familiaris
ggagcacagctggaagcttcacgga

SEQ ID NO: 158577 - DNA, 25 bp, Canis familiaris
ggagcagctctggaaatctgcccga

SEQ ID NO: 158578 - DNA, 25 bp, Canis familiaris
ggacatgctgctgagtacgtccggc

SEQ ID NO: 158579 - DNA, 25 bp, Canis familiaris
ggagcagcatcagctctaggaccgg

SEQ ID NO: 158580 - DNA, 25 bp, Canis familiaris
ggagcgaccctttgctgatagggat

SEQ ID NO: 158581 - DNA, 25 bp, Canis familiaris
ggagcaagacctgtctgcttggtga

SEQ ID NO: 158582 - DNA, 25 bp, Canis familiaris
ggagcaaaactggctatttctgtga

SEQ ID NO: 158583 - DNA, 25 bp, Canis familiaris
ggagccagctttgctttttgtactt

SEQ ID NO: 158584 - DNA, 25 bp, Canis familiaris
ggagcctgtgttggtactaatggac

SEQ ID NO: 158585 - DNA, 25 bp, Canis familiaris
ggcaccttgactgtgacgatctggg

SEQ ID NO: 158586 - DNA, 25 bp, Canis familiaris
ggagctgttgaggactaccacatgg

SEQ ID NO: 158587 - DNA, 25 bp, Canis familiaris
ggagctgttcatcaattctcaagcc

SEQ ID NO: 158588 - DNA, 25 bp, Canis familiaris
ggactcctttgacatcatcaagcgc

SEQ ID NO: 158589 - DNA, 25 bp, Canis familiaris
ggaccacttgtcaacagccgatggt

SEQ ID NO: 158590 - DNA, 25 bp, Canis familiaris
ggagcaaacttccacactgtgtgtg

SEQ ID NO: 158591 - DNA, 25 bp, Canis familiaris
ggagcaagagcgggcaacggtggac

SEQ ID NO: 158592 - DNA, 25 bp, Canis familiaris
ggagcaggagcgggcagaggtggac

SEQ ID NO: 158593 - DNA, 25 bp, Canis familiaris
ggagctggagctggtcaagtgcggc

SEQ ID NO: 158594 - DNA, 25 bp, Canis familiaris
ggagcatcagaggctatacagtgca

SEQ ID NO: 158595 - DNA, 25 bp, Canis familiaris
ggagcagcagatgttcagcctgaaa

SEQ ID NO: 158596 - DNA, 25 bp, Canis familiaris
ggacgcagatttgcacataaaaaaa

SEQ ID NO: 158597 - DNA, 25 bp, Canis familiaris
ggacgagtttatcacgaaaaagcac

SEQ ID NO: 158598 - DNA, 25 bp, Canis familiaris
ggactgttttcatcccataaagaca

SEQ ID NO: 158599 - DNA, 25 bp, Canis familiaris
ggacgtgttttctccaaacatgttc

SEQ ID NO: 158600 - DNA, 25 bp, Canis familiaris
ggagcgtttttcaacccaagatcat

SEQ ID NO: 158601 - DNA, 25 bp, Canis familiaris
ggagctttgttctaactgcctaatg

SEQ ID NO: 158602 - DNA, 25 bp, Canis familiaris
ggaccttggtcagcctgagctgaac

SEQ ID NO: 158603 - DNA, 25 bp, Canis familiaris
ggacctaggactgccaggaggacca

SEQ ID NO: 158604 - DNA, 25 bp, Canis familiaris
ggaccataaaccacagaactgcacc

SEQ ID NO: 158605 - DNA, 25 bp, Canis familiaris
ggaccagtaaaaccaaatgctttgc

SEQ ID NO: 158606 - DNA, 25 bp, Canis familiaris
ggaccaaaataatagtgctgtgtgg

SEQ ID NO: 158607 - DNA, 25 bp, Canis familiaris
ggaccataaacacccgatgggcggt

SEQ ID NO: 158608 - DNA, 25 bp, Canis familiaris
ggagcctaaacaagccgatgtgcct

SEQ ID NO: 158609 - DNA, 25 bp, Canis familiaris
ggagccttattctcagtgtgtggcc

SEQ ID NO: 158610 - DNA, 25 bp, Canis familiaris
ggagctctgtttggaattgggcccc

SEQ ID NO: 158611 - DNA, 25 bp, Canis familiaris
ggaccactttgggtttgagctctct

SEQ ID NO: 158612 - DNA, 25 bp, Canis familiaris
ggagctactttccacgattgtgttt

SEQ ID NO: 158613 - DNA, 25 bp, Canis familiaris
ggagcatattatgaacatttattgt

SEQ ID NO: 158614 - DNA, 25 bp, Canis familiaris
ggagcagtttctttgatatttcatt

SEQ ID NO: 158615 - DNA, 25 bp, Canis familiaris
ggagcagctttgattcttctcaact

SEQ ID NO: 158616 - DNA, 25 bp, Canis familiaris
ggagcactatcgattctggggatca

SEQ ID NO: 158617 - DNA, 25 bp, Canis familiaris
ggagcagctactgttggtggtgacc

SEQ ID NO: 158618 - DNA, 25 bp, Canis familiaris
ggagcacttcatttttggggagccc

SEQ ID NO: 158619 - DNA, 25 bp, Canis familiaris
ggagcaccaatttttaaagaacact

SEQ ID NO: 158620 - DNA, 25 bp, Canis familiaris
ggagcacaaatttttagagaacatt

SEQ ID NO: 158621 - DNA, 25 bp, Canis familiaris
ggaccaaaaattaaaatcatcagat

SEQ ID NO: 158622 - DNA, 25 bp, Canis familiaris
ggagcccaaaatctgtatattatct

SEQ ID NO: 158623 - DNA, 25 bp, Canis familiaris
ggaaccctagctctgtaaacatgta

SEQ ID NO: 158624 - DNA, 25 bp, Canis familiaris
ggaaccctagctctgtaaacatgta

SEQ ID NO: 158625 - DNA, 25 bp, Canis familiaris
ggaccactctttcgttgaaaggtga

SEQ ID NO: 158626 - DNA, 25 bp, Canis familiaris
ggagccagtttaggcccaagagact

SEQ ID NO: 158627 - DNA, 25 bp, Canis familiaris
ggacctattcaaggcccaaaacctg

SEQ ID NO: 158628 - DNA, 25 bp, Canis familiaris
ggacctgaacctaaaccaaagcctg

SEQ ID NO: 158629 - DNA, 25 bp, Canis familiaris
ggagccagaatcttgtctcccaata

SEQ ID NO: 158630 - DNA, 25 bp, Canis familiaris
ggaccaatatcttattcccaatgct

SEQ ID NO: 158631 - DNA, 25 bp, Canis familiaris
ggacgagaatctgtttcatccagtg

SEQ ID NO: 158632 - DNA, 25 bp, Canis familiaris
ggagccgatgaagaattatccgtgt

SEQ ID NO: 158633 - DNA, 25 bp, Canis familiaris
ggagccagtgggcaacttacagtgt

SEQ ID NO: 158634 - DNA, 25 bp, Canis familiaris
ggagccaagcgtcaactatcgatga

SEQ ID NO: 158635 - DNA, 25 bp, Canis familiaris
ggaccaataagccactctatcagta

SEQ ID NO: 158636 - DNA, 25 bp, Canis familiaris
ggaccaacaagctcgcacagagcta

SEQ ID NO: 158637 - DNA, 25 bp, Canis familiaris
ggagcagaacaagacagcagccact

SEQ ID NO: 158638 - DNA, 25 bp, Canis familiaris
ggagcagagtgaaccagcaggggct

SEQ ID NO: 158639 - DNA, 25 bp, Canis familiaris
ggagcagggcaacagcacctgagcc

SEQ ID NO: 158640 - DNA, 25 bp, Canis familiaris
ggagcagggaaggccacactgagca

SEQ ID NO: 158641 - DNA, 25 bp, Canis familiaris
ggagcagagagaggggaccatggca

SEQ ID NO: 158642 - DNA, 25 bp, Canis familiaris
ggagcagacatatctggccaggcga

SEQ ID NO: 158643 - DNA, 25 bp, Canis familiaris
ggagcatccataggcttgccagacc

SEQ ID NO: 158644 - DNA, 25 bp, Canis familiaris
ggagcaggcatgagtctgccgcaac

SEQ ID NO: 158645 - DNA, 25 bp, Canis familiaris
ggagcatatgctgagtctcccaagg

SEQ ID NO: 158646 - DNA, 25 bp, Canis familiaris
ggagcggcgctatttcaaacagcag

SEQ ID NO: 158647 - DNA, 25 bp, Canis familiaris
ggagctggtgcatatgcctacaaga

SEQ ID NO: 158648 - DNA, 25 bp, Canis familiaris
ggagcatgtgctttactcttacaga

SEQ ID NO: 158649 - DNA, 25 bp, Canis familiaris
ggagctgtcttgtcatctgttaaag

SEQ ID NO: 158650 - DNA, 25 bp, Canis familiaris
ggagcgacctggacgagctgaaagc

SEQ ID NO: 158651 - DNA, 25 bp, Canis familiaris
ggactgacctggagggtattttgct

SEQ ID NO: 158652 - DNA, 25 bp, Canis familiaris
ggaccctgttgtacgggatctttcg

SEQ ID NO: 158653 - DNA, 25 bp, Canis familiaris
ggaccgagtttctggagatggttct

SEQ ID NO: 158654 - DNA, 25 bp, Canis familiaris
ggacgccttttctcagatatggtcc

SEQ ID NO: 158655 - DNA, 25 bp, Canis familiaris
ggaccttttcccaagaatagctagc

SEQ ID NO: 158656 - DNA, 25 bp, Canis familiaris
ggaccttacccatccagtagaagat

SEQ ID NO: 158657 - DNA, 25 bp, Canis familiaris
ggaccttaaacagaagatagccgaa

SEQ ID NO: 158658 - DNA, 25 bp, Canis familiaris
ggacccttcaagataacacagccca

SEQ ID NO: 158659 - DNA, 25 bp, Canis familiaris
tgataccccatatgacgtaccatcc

SEQ ID NO: 158660 - DNA, 25 bp, Canis familiaris
taacccaaaagacatacctgttttg

SEQ ID NO: 158661 - DNA, 25 bp, Canis familiaris
taacccaaaaacagtgcaagtttcg

SEQ ID NO: 158662 - DNA, 25 bp, Canis familiaris
tgaagcctaaccaccgaaagtttgc

SEQ ID NO: 158663 - DNA, 25 bp, Canis familiaris
ggacctcaagccacttaaagcttcg

SEQ ID NO: 158664 - DNA, 25 bp, Canis familiaris
ggagcccaacacacttttagattgc

SEQ ID NO: 158665 - DNA, 25 bp, Canis familiaris
ggacccaacactattcttgtggaat

SEQ ID NO: 158666 - DNA, 25 bp, Canis familiaris
ggacccaactaattctcggtggcta

SEQ ID NO: 158667 - DNA, 25 bp, Canis familiaris
ggacccagagtatctcctgaggatc

SEQ ID NO: 158668 - DNA, 25 bp, Canis familiaris
ggaccagaagaatcttagaggaggc

SEQ ID NO: 158669 - DNA, 25 bp, Canis familiaris
ggaccttgaaaacttgaagtgacca

SEQ ID NO: 158670 - DNA, 25 bp, Canis familiaris
ggaccttggaacttatgacctgagc

SEQ ID NO: 158671 - DNA, 25 bp, Canis familiaris
ggagccttaaaacataccgatgccc

SEQ ID NO: 158672 - DNA, 25 bp, Canis familiaris
ggagcttgaccataatataacagtg

SEQ ID NO: 158673 - DNA, 25 bp, Canis familiaris
ggagcttcatctttagaaaccagtg

SEQ ID NO: 158674 - DNA, 25 bp, Canis familiaris
ggagcttcatctttcaagataaccc

SEQ ID NO: 158675 - DNA, 25 bp, Canis familiaris
ggagcattctcttagcaaacaagtc

SEQ ID NO: 158676 - DNA, 25 bp, Canis familiaris
ggagcagttattagagaacaagatt

SEQ ID NO: 158677 - DNA, 25 bp, Canis familiaris
ggagcagtattagagaacacagatt

SEQ ID NO: 158678 - DNA, 25 bp, Canis familiaris
ggagcagatgttcctctaagacttt

SEQ ID NO: 158679 - DNA, 25 bp, Canis familiaris
ggagctgctttggcaaatggtcctt

SEQ ID NO: 158680 - DNA, 25 bp, Canis familiaris
ggagctctgttggtagtgttgttct

SEQ ID NO: 158681 - DNA, 25 bp, Canis familiaris
ggacttctcgtggaggacgttgctc

SEQ ID NO: 158682 - DNA, 25 bp, Canis familiaris
tggactggccgggggatggagttca

SEQ ID NO: 158683 - DNA, 25 bp, Canis familiaris
ggagctcgccaagcaggatgttgta

SEQ ID NO: 158684 - DNA, 25 bp, Canis familiaris
ggagcggcagcagtgaaggatttga

SEQ ID NO: 158685 - DNA, 25 bp, Canis familiaris
ggagcgccacagataggatttggaa

SEQ ID NO: 158686 - DNA, 25 bp, Canis familiaris
ggacgacctgctgaagtttgaaaag

SEQ ID NO: 158687 - DNA, 25 bp, Canis familiaris
ggacccctgtgccaaggcttaaagg

SEQ ID NO: 158688 - DNA, 25 bp, Canis familiaris
ggcaccgaccggtggttgagacggg

SEQ ID NO: 158689 - DNA, 25 bp, Canis familiaris
ggaccgacactgggtcgcttagaaa

SEQ ID NO: 158690 - DNA, 25 bp, Canis familiaris
ggaccgcaattgtgctaggaactaa

SEQ ID NO: 158691 - DNA, 25 bp, Canis familiaris
ggaccctggagattccggaactgat

SEQ ID NO: 158692 - DNA, 25 bp, Canis familiaris
ggcatccctggaacttttgaacttc

SEQ ID NO: 158693 - DNA, 25 bp, Canis familiaris
ggacccgtaatcatgcattgaattt

SEQ ID NO: 158694 - DNA, 25 bp, Canis familiaris
ggacagctcctggacttatttcttt

SEQ ID NO: 158695 - DNA, 25 bp, Canis familiaris
ggagccccagaagatatttctactc

SEQ ID NO: 158696 - DNA, 25 bp, Canis familiaris
ggaccacaaacaaagatttctcacc

SEQ ID NO: 158697 - DNA, 25 bp, Canis familiaris
ggagccaaaaatgggactcaatccc

SEQ ID NO: 158698 - DNA, 25 bp, Canis familiaris
ggagccatacaatctgtatctccag

SEQ ID NO: 158699 - DNA, 25 bp, Canis familiaris
ggagccataattgctggtctcttgg

SEQ ID NO: 158700 - DNA, 25 bp, Canis familiaris
ggagctcatgaatcctgaggcccag

SEQ ID NO: 158701 - DNA, 25 bp, Canis familiaris
ggagctctgtgtgcttagggcaagc

SEQ ID NO: 158702 - DNA, 25 bp, Canis familiaris
ggagctctgttgtctaagtgtgcgg

SEQ ID NO: 158703 - DNA, 25 bp, Canis familiaris
ggagctctccaacacatctggagct

SEQ ID NO: 158704 - DNA, 25 bp, Canis familiaris
ggacctacatgatgaatgcgcgatc

SEQ ID NO: 158705 - DNA, 25 bp, Canis familiaris
ggacctgactgtggtgaacgaaccc

SEQ ID NO: 158706 - DNA, 25 bp, Canis familiaris
ggacctacttccaaaggatctccct

SEQ ID NO: 158707 - DNA, 25 bp, Canis familiaris
ggaccagcctctgaaggttattgcc

SEQ ID NO: 158708 - DNA, 25 bp, Canis familiaris
ggaccacctctagaggccttatacc

SEQ ID NO: 158709 - DNA, 25 bp, Canis familiaris
ggaccaacctagaagatgcctgagt

SEQ ID NO: 158710 - DNA, 25 bp, Canis familiaris
ggacccagttacaatttctactcga

SEQ ID NO: 158711 - DNA, 25 bp, Canis familiaris
ggagcccagggatatttctattgga

SEQ ID NO: 158712 - DNA, 25 bp, Canis familiaris
ggaccgtgggttatggctacgagaa

SEQ ID NO: 158713 - DNA, 25 bp, Canis familiaris
ggaccggggctctcgggataaaatg

SEQ ID NO: 158714 - DNA, 25 bp, Canis familiaris
ggacctgggacctcaagggcaagaa

SEQ ID NO: 158715 - DNA, 25 bp, Canis familiaris
ggagccgggcttttaagggcaagtg

SEQ ID NO: 158716 - DNA, 25 bp, Canis familiaris
ggagccgggcttttagggaagagtg

SEQ ID NO: 158717 - DNA, 25 bp, Canis familiaris
ggagccacctgctcatacagggaag

SEQ ID NO: 158718 - DNA, 25 bp, Canis familiaris
ggaccacgtcacctcgatgaggaac

SEQ ID NO: 158719 - DNA, 25 bp, Canis familiaris
ggaccaagttaacgtgaagccagca

SEQ ID NO: 158720 - DNA, 25 bp, Canis familiaris
ggaccaaggacatatggaatccaca

SEQ ID NO: 158721 - DNA, 25 bp, Canis familiaris
ggaccggcgcaagacggaccagagc

SEQ ID NO: 158722 - DNA, 25 bp, Canis familiaris
ggacgggaagacatagtgcaccggg

SEQ ID NO: 158723 - DNA, 25 bp, Canis familiaris
ggagcgtgaaaggaggaggcccggg

SEQ ID NO: 158724 - DNA, 25 bp, Canis familiaris
ggagcttgaggtccggaaggccgga

SEQ ID NO: 158725 - DNA, 25 bp, Canis familiaris
ggagctgtagttatgtgggaggggt

SEQ ID NO: 158726 - DNA, 25 bp, Canis familiaris
ggagctgccggtcattggaggagtg

SEQ ID NO: 158727 - DNA, 25 bp, Canis familiaris
ggagcctcgatgacgttggacagat

SEQ ID NO: 158728 - DNA, 25 bp, Canis familiaris
ggagcccttgatgttctgcaaatga

SEQ ID NO: 158729 - DNA, 25 bp, Canis familiaris
ggagccactttttatagccaataca

SEQ ID NO: 158730 - DNA, 25 bp, Canis familiaris
ggagcctttacttatttaagaccat

SEQ ID NO: 158731 - DNA, 25 bp, Canis familiaris
ggagcctgttagatattgttagatg

SEQ ID NO: 158732 - DNA, 25 bp, Canis familiaris
ggagccctaggaatatctgtatgtt

SEQ ID NO: 158733 - DNA, 25 bp, Canis familiaris
ggagccagctagtcaaatagatatg

SEQ ID NO: 158734 - DNA, 25 bp, Canis familiaris
ggagcttgctacttactagttgtgt

SEQ ID NO: 158735 - DNA, 25 bp, Canis familiaris
ggagcctgttaaactagctttagtg

SEQ ID NO: 158736 - DNA, 25 bp, Canis familiaris
ggacctgctcaaagccatagttcga

SEQ ID NO: 158737 - DNA, 25 bp, Canis familiaris
ggagcatttgcagtcagccataggt

SEQ ID NO: 158738 - DNA, 25 bp, Canis familiaris
ggagctctgctggtcagtggaggtt

SEQ ID NO: 158739 - DNA, 25 bp, Canis familiaris
ggagccgcaagcggtgctgggttca

SEQ ID NO: 158740 - DNA, 25 bp, Canis familiaris
ggagcccagtttgctgagatttcac

SEQ ID NO: 158741 - DNA, 25 bp, Canis familiaris
ggagcccagtgtgggcggatccatc

SEQ ID NO: 158742 - DNA, 25 bp, Canis familiaris
ggagcccaatgcaggctccatctca

SEQ ID NO: 158743 - DNA, 25 bp, Canis familiaris
ggagccagcttgaagagttctctct

SEQ ID NO: 158744 - DNA, 25 bp, Canis familiaris
ggagccagctggaggctgttttcct

SEQ ID NO: 158745 - DNA, 25 bp, Canis familiaris
ggagctggtggttgactttctctcc

SEQ ID NO: 158746 - DNA, 25 bp, Canis familiaris
ggagctggtggagccagcttgcctc

SEQ ID NO: 158747 - DNA, 25 bp, Canis familiaris
ggagctggaggctctgagcactgct

SEQ ID NO: 158748 - DNA, 25 bp, Canis familiaris
ggagccgatgagtgtgagcacccaa

SEQ ID NO: 158749 - DNA, 25 bp, Canis familiaris
ggagccacagagctgtttctccaag

SEQ ID NO: 158750 - DNA, 25 bp, Canis familiaris
ggagctaagcagatgatgtccctga

SEQ ID NO: 158751 - DNA, 25 bp, Canis familiaris
ggagctggagagactaggcacccat

SEQ ID NO: 158752 - DNA, 25 bp, Canis familiaris
ggagctgctcaaactcagggatctc

SEQ ID NO: 158753 - DNA, 25 bp, Canis familiaris
ggagctggatatcacctggatctct

SEQ ID NO: 158754 - DNA, 25 bp, Canis familiaris
ggagctggagtggattctggcattc

SEQ ID NO: 158755 - DNA, 25 bp, Canis familiaris
ggagctggagagagacatggaattg

SEQ ID NO: 158756 - DNA, 25 bp, Canis familiaris
ggagctgtcagacgatgacacggag

SEQ ID NO: 158757 - DNA, 25 bp, Canis familiaris
ggagctgacaatcatgtacaagggg

SEQ ID NO: 158758 - DNA, 25 bp, Canis familiaris
ggaccccattatcagcaaggtggcc

SEQ ID NO: 158759 - DNA, 25 bp, Canis familiaris
ggaccaattgttcccaatttgggct

SEQ ID NO: 158760 - DNA, 25 bp, Canis familiaris
ggaccagttcagacccaatattgtg

SEQ ID NO: 158761 - DNA, 25 bp, Canis familiaris
ggagcctgcttggacccaaatattc

SEQ ID NO: 158762 - DNA, 25 bp, Canis familiaris
ggagctggagaggaccaacaagttc

SEQ ID NO: 158763 - DNA, 25 bp, Canis familiaris
ggagctggtgaagccatgaacgtgc

SEQ ID NO: 158764 - DNA, 25 bp, Canis familiaris
ggagcggtgcatttcaaggactgtg

SEQ ID NO: 158765 - DNA, 25 bp, Canis familiaris
ggagccaggcatgtctagcggggct

SEQ ID NO: 158766 - DNA, 25 bp, Canis familiaris
ggagctagagagcctccgaggggct

SEQ ID NO: 158767 - DNA, 25 bp, Canis familiaris
ggagcaggaaggggtaggggccagc

SEQ ID NO: 158768 - DNA, 25 bp, Canis familiaris
ggagcgggaggttgatgggggccta

SEQ ID NO: 158769 - DNA, 25 bp, Canis familiaris
ggagcggcccagagggtgggatgct

SEQ ID NO: 158770 - DNA, 25 bp, Canis familiaris
ggaccactccgaagtgtgtgggttg

SEQ ID NO: 158771 - DNA, 25 bp, Canis familiaris
ggacccgagccaagtagtggagggc

SEQ ID NO: 158772 - DNA, 25 bp, Canis familiaris
ggagcccccaaagtagagttgcgac

SEQ ID NO: 158773 - DNA, 25 bp, Canis familiaris
ggacccccacagggaggtggtactg

SEQ ID NO: 158774 - DNA, 25 bp, Canis familiaris
ggaccccaacaccagggaatggacg

SEQ ID NO: 158775 - DNA, 25 bp, Canis familiaris
ggaccagtcaacacggtgatacgac

SEQ ID NO: 158776 - DNA, 25 bp, Canis familiaris
ggagccagttcaaagaccatgaact

SEQ ID NO: 158777 - DNA, 25 bp, Canis familiaris
ggagcgctgttttagcaccagagag

SEQ ID NO: 158778 - DNA, 25 bp, Canis familiaris
ggacctgcttaatgaagccgaaaga

SEQ ID NO: 158779 - DNA, 25 bp, Canis familiaris
ggacccttagatcatgacctgaact

SEQ ID NO: 158780 - DNA, 25 bp, Canis familiaris
ggacccttcaatcagcaggtgaaat

SEQ ID NO: 158781 - DNA, 25 bp, Canis familiaris
ggagcccttcaaagcaggtggcacc

SEQ ID NO: 158782 - DNA, 25 bp, Canis familiaris
ggaccccttgctggaagatggcacc

SEQ ID NO: 158783 - DNA, 25 bp, Canis familiaris
ggaccccttgctggaagatggcacc

SEQ ID NO: 158784 - DNA, 25 bp, Canis familiaris
ggaccccttgctggaagatggcacc

SEQ ID NO: 158785 - DNA, 25 bp, Canis familiaris
ggaccccttgctggaagatggcacc

SEQ ID NO: 158786 - DNA, 25 bp, Canis familiaris
ggaccccttgctggaagatggcacc

SEQ ID NO: 158787 - DNA, 25 bp, Canis familiaris
ggagctcccggtggaggtgaatccg

SEQ ID NO: 158788 - DNA, 25 bp, Canis familiaris
ggagccggggaggtgggcagaccgg

SEQ ID NO: 158789 - DNA, 25 bp, Canis familiaris
ggaccacgtagagagggtgcacctc

SEQ ID NO: 158790 - DNA, 25 bp, Canis familiaris
ggagcccggtggcataggtgtcact

SEQ ID NO: 158791 - DNA, 25 bp, Canis familiaris
ggagcccgaggctttgaggggacat

SEQ ID NO: 158792 - DNA, 25 bp, Canis familiaris
ggaccccagagccttagcagaaggt

SEQ ID NO: 158793 - DNA, 25 bp, Canis familiaris
ggagcccatctaggtgggaggagag

SEQ ID NO: 158794 - DNA, 25 bp, Canis familiaris
ggagctcttccagtgagtgggggag

SEQ ID NO: 158795 - DNA, 25 bp, Canis familiaris
ggagctcttggagcagaggcgggcc

SEQ ID NO: 158796 - DNA, 25 bp, Canis familiaris
ggagctcttggagcagaggcgggcc

SEQ ID NO: 158797 - DNA, 25 bp, Canis familiaris
ggagctcttggagcagaggcgggcc

SEQ ID NO: 158798 - DNA, 25 bp, Canis familiaris
ggagcctgggagggcaggggtggcc

SEQ ID NO: 158799 - DNA, 25 bp, Canis familiaris
ggagccatttggctctggggggcac

SEQ ID NO: 158800 - DNA, 25 bp, Canis familiaris
ggacgtttctgcaatttggggacct

SEQ ID NO: 158801 - DNA, 25 bp, Canis familiaris
ggacgaatttgaagatatggtggcc

SEQ ID NO: 158802 - DNA, 25 bp, Canis familiaris
ggacgacaaatctgctcaggttgca

SEQ ID NO: 158803 - DNA, 25 bp, Canis familiaris
ggagctgagcacaaatgagtacgtt

SEQ ID NO: 158804 - DNA, 25 bp, Canis familiaris
ggagctgcacccagatgtagcacat

SEQ ID NO: 158805 - DNA, 25 bp, Canis familiaris
ggactacgatgtggagatcagcctc

SEQ ID NO: 158806 - DNA, 25 bp, Canis familiaris
ggagctgctgggaaggcacagcctc

SEQ ID NO: 158807 - DNA, 25 bp, Canis familiaris
ggagcgtgtggtggagcagatgtgt

SEQ ID NO: 158808 - DNA, 25 bp, Canis familiaris
ggactgatgagttaccatgcttgct

SEQ ID NO: 158809 - DNA, 25 bp, Canis familiaris
ggacgatcaggttccagacagcatc

SEQ ID NO: 158810 - DNA, 25 bp, Canis familiaris
ggacagtcaggttgaaagcatattc

SEQ ID NO: 158811 - DNA, 25 bp, Canis familiaris
ggagcgtcatggcagtaagcactac

SEQ ID NO: 158812 - DNA, 25 bp, Canis familiaris
ggagctctattgcctggaacacggc

SEQ ID NO: 158813 - DNA, 25 bp, Canis familiaris
ggagctctattgcctggaacacggc

SEQ ID NO: 158814 - DNA, 25 bp, Canis familiaris
ggagctctactgtctggaacatggg

SEQ ID NO: 158815 - DNA, 25 bp, Canis familiaris
ggagctccagagactgagacatcat

SEQ ID NO: 158816 - DNA, 25 bp, Canis familiaris
ggagctccagtctatgtgtctcaaa

SEQ ID NO: 158817 - DNA, 25 bp, Canis familiaris
ggagcctcagatttatttgaagcat

SEQ ID NO: 158818 - DNA, 25 bp, Canis familiaris
ggagcccagtgcatactagctgaga

SEQ ID NO: 158819 - DNA, 25 bp, Canis familiaris
ggagctccgtgcgcaggaggaaggc

SEQ ID NO: 158820 - DNA, 25 bp, Canis familiaris
ggagctccgtcagaagacccaggag

SEQ ID NO: 158821 - DNA, 25 bp, Canis familiaris
ggagcttcgacagagtaaccaccgg

SEQ ID NO: 158822 - DNA, 25 bp, Canis familiaris
ggacctagagcggcggaagctaccg

SEQ ID NO: 158823 - DNA, 25 bp, Canis familiaris
ggagccccagcctggaagtgactac

SEQ ID NO: 158824 - DNA, 25 bp, Canis familiaris
ggagccacccgaaggcagaagtcta

SEQ ID NO: 158825 - DNA, 25 bp, Canis familiaris
ggaccagccaagtggggaggatcag

SEQ ID NO: 158826 - DNA, 25 bp, Canis familiaris
ggagccccgtgaggacggaggacac

SEQ ID NO: 158827 - DNA, 25 bp, Canis familiaris
ggaccagccgtgtgaccacaggtcc

SEQ ID NO: 158828 - DNA, 25 bp, Canis familiaris
ggagccccaagaggcctaaggtgcc

SEQ ID NO: 158829 - DNA, 25 bp, Canis familiaris
ggagctaaaagctggctacgggcca

SEQ ID NO: 158830 - DNA, 25 bp, Canis familiaris
ggacgagatcgaggggtacggggcg

SEQ ID NO: 158831 - DNA, 25 bp, Canis familiaris
ggacgagctgtaggggctacactgc

SEQ ID NO: 158832 - DNA, 25 bp, Canis familiaris
ggaccagttacactgacagatacga

SEQ ID NO: 158833 - DNA, 25 bp, Canis familiaris
ggaccagtcctacaaataagagcta

SEQ ID NO: 158834 - DNA, 25 bp, Canis familiaris
ggacaaggccttagcagttaaatta

SEQ ID NO: 158835 - DNA, 25 bp, Canis familiaris
ggacagggcctttcgagacaacctg

SEQ ID NO: 158836 - DNA, 25 bp, Canis familiaris
ggacagtggtccaaacagtcttcct

SEQ ID NO: 158837 - DNA, 25 bp, Canis familiaris
ggacagatcactccagagcatcagg

SEQ ID NO: 158838 - DNA, 25 bp, Canis familiaris
ggaccacacagctgagctggggcgt

SEQ ID NO: 158839 - DNA, 25 bp, Canis familiaris
ggagccaacatgtgaaaagcctgtg

SEQ ID NO: 158840 - DNA, 25 bp, Canis familiaris
ggaccaaatgaggagcaatcaggtg

SEQ ID NO: 158841 - DNA, 25 bp, Canis familiaris
ggagcgccagaggaggaacgagctg

SEQ ID NO: 158842 - DNA, 25 bp, Canis familiaris
ggagctggaggaggaagacgactag

SEQ ID NO: 158843 - DNA, 25 bp, Canis familiaris
ggagctgggtcaggagcaggtgact

SEQ ID NO: 158844 - DNA, 25 bp, Canis familiaris
ggagcgagtgtcagagagtggacta

SEQ ID NO: 158845 - DNA, 25 bp, Canis familiaris
ggagctcgactcagacgtggataaa

SEQ ID NO: 158846 - DNA, 25 bp, Canis familiaris
ggagctcaacacattcactggaaac

SEQ ID NO: 158847 - DNA, 25 bp, Canis familiaris
ggagctcagaaactacctggagaaa

SEQ ID NO: 158848 - DNA, 25 bp, Canis familiaris
ggagctagtaagtcacctgcaagag

SEQ ID NO: 158849 - DNA, 25 bp, Canis familiaris
ggagctcagtaagacgtgacgcatc

SEQ ID NO: 158850 - DNA, 25 bp, Canis familiaris
ggagctcagcaatctgatcagtaaa

SEQ ID NO: 158851 - DNA, 25 bp, Canis familiaris
ggagctagaatgtattatgccaaat

SEQ ID NO: 158852 - DNA, 25 bp, Canis familiaris
ggagctagagtgtattatgctaagc

SEQ ID NO: 158853 - DNA, 25 bp, Canis familiaris
ggagcctgagtgcatctggctcccg

SEQ ID NO: 158854 - DNA, 25 bp, Canis familiaris
ggagctctgcataaagttctacctg

SEQ ID NO: 158855 - DNA, 25 bp, Canis familiaris
ggagccacacacagtttgacctgat

SEQ ID NO: 158856 - DNA, 25 bp, Canis familiaris
ggaccagactaggattggaccgtgg

SEQ ID NO: 158857 - DNA, 25 bp, Canis familiaris
ggacgaagctgatattggaccctgg

SEQ ID NO: 158858 - DNA, 25 bp, Canis familiaris
ggaccaatgtattttgtgatccttg

SEQ ID NO: 158859 - DNA, 25 bp, Canis familiaris
ggagctcaatttttttgtccaatca

SEQ ID NO: 158860 - DNA, 25 bp, Canis familiaris
ggagctcaatttttgttttgaagct

SEQ ID NO: 158861 - DNA, 25 bp, Canis familiaris
ggagccactttatttctctagaacc

SEQ ID NO: 158862 - DNA, 25 bp, Canis familiaris
ggaccctcttgacttctttgaagtc

SEQ ID NO: 158863 - DNA, 25 bp, Canis familiaris
ggacttgcctatttaatttgacaac

SEQ ID NO: 158864 - DNA, 25 bp, Canis familiaris
ggacgtcactagttgaagctagacc

SEQ ID NO: 158865 - DNA, 25 bp, Canis familiaris
ggagctctcctaattgaacatatga

SEQ ID NO: 158866 - DNA, 25 bp, Canis familiaris
ggagctcataaaacacaaatcatac

SEQ ID NO: 158867 - DNA, 25 bp, Canis familiaris
ggagccaagcgaagccaacactggc

SEQ ID NO: 158868 - DNA, 25 bp, Canis familiaris
ggagccacgagaagtcagaccggag

SEQ ID NO: 158869 - DNA, 25 bp, Canis familiaris
ggacctcgagcaaggggaccgagcc

SEQ ID NO: 158870 - DNA, 25 bp, Canis familiaris
ggagctgcaaggatgtgggactcga

SEQ ID NO: 158871 - DNA, 25 bp, Canis familiaris
ggagctgaaagatgtggtgtccaca

SEQ ID NO: 158872 - DNA, 25 bp, Canis familiaris
ggagctgaaatcctttgtgctgccc

SEQ ID NO: 158873 - DNA, 25 bp, Canis familiaris
ggaccatagctcatgtcttgtgcct

SEQ ID NO: 158874 - DNA, 25 bp, Canis familiaris
ggagccaactcagtgtgtagtacac

SEQ ID NO: 158875 - DNA, 25 bp, Canis familiaris
ggagcgaacaacattgatgctacac

SEQ ID NO: 158876 - DNA, 25 bp, Canis familiaris
ggagctggacagtttcatctcttgc

SEQ ID NO: 158877 - DNA, 25 bp, Canis familiaris
ggagctgcaggttttctgctttgtg

SEQ ID NO: 158878 - DNA, 25 bp, Canis familiaris
ggagctgagctgttcttttagggag

SEQ ID NO: 158879 - DNA, 25 bp, Canis familiaris
ggagctggagaggctgccttaggga

SEQ ID NO: 158880 - DNA, 25 bp, Canis familiaris
ggagctggccaggtgtgtttgagga

SEQ ID NO: 158881 - DNA, 25 bp, Canis familiaris
ggagctgtggcggtggtatggagac

SEQ ID NO: 158882 - DNA, 25 bp, Canis familiaris
ggactgcggcggaggaagaggcggc

SEQ ID NO: 158883 - DNA, 25 bp, Canis familiaris
ggcatggcagggctgggaaagggtc

SEQ ID NO: 158884 - DNA, 25 bp, Canis familiaris
ggcacgggcgcatgggaaagagttt

SEQ ID NO: 158885 - DNA, 25 bp, Canis familiaris
ggacccctgagagggaaaatactgt

SEQ ID NO: 158886 - DNA, 25 bp, Canis familiaris
ggagctcccttaggaaaagttctgg

SEQ ID NO: 158887 - DNA, 25 bp, Canis familiaris
ggacttatcttcatggaaacttctg

SEQ ID NO: 158888 - DNA, 25 bp, Canis familiaris
ggactttcttttcacaagatgcctg

SEQ ID NO: 158889 - DNA, 25 bp, Canis familiaris
ggacttctttgaagccaaatggctt

SEQ ID NO: 158890 - DNA, 25 bp, Canis familiaris
ggaccacatgtttaccaaatgcctt

SEQ ID NO: 158891 - DNA, 25 bp, Canis familiaris
ggagcctcaggattacagcaagtac

SEQ ID NO: 158892 - DNA, 25 bp, Canis familiaris
ggagccagggttgggcaagatgaga

SEQ ID NO: 158893 - DNA, 25 bp, Canis familiaris
ggagccagggcatggatggaggtca

SEQ ID NO: 158894 - DNA, 25 bp, Canis familiaris
ggagctcaggccagatcacgaaagc

SEQ ID NO: 158895 - DNA, 25 bp, Canis familiaris
ggaccatgagcctctagtagaagca

SEQ ID NO: 158896 - DNA, 25 bp, Canis familiaris
ggacctgcatcctctttagaaatgt

SEQ ID NO: 158897 - DNA, 25 bp, Canis familiaris
ggacctcccgctatgtggaaaggaa

SEQ ID NO: 158898 - DNA, 25 bp, Canis familiaris
ggacgtcccgatcttgagagagaac

SEQ ID NO: 158899 - DNA, 25 bp, Canis familiaris
ggacttcccggagtggttggaatgc

SEQ ID NO: 158900 - DNA, 25 bp, Canis familiaris
ggcctctcccgtgacggggatatct

SEQ ID NO: 158901 - DNA, 25 bp, Canis familiaris
ggacctcccagtgacatgattgaga

SEQ ID NO: 158902 - DNA, 25 bp, Canis familiaris
ggaccttccagattcctggtgatgc

SEQ ID NO: 158903 - DNA, 25 bp, Canis familiaris
ggaccttccagatcctggtgatgct

SEQ ID NO: 158904 - DNA, 25 bp, Canis familiaris
ggaacatgtcacctgactcagtcta

SEQ ID NO: 158905 - DNA, 25 bp, Canis familiaris
ggaccattcaatcactggatggaat

SEQ ID NO: 158906 - DNA, 25 bp, Canis familiaris
ggagccagacaaacctggcaggcga

SEQ ID NO: 158907 - DNA, 25 bp, Canis familiaris
ggaccagaaaagcaggcgtggaccg

SEQ ID NO: 158908 - DNA, 25 bp, Canis familiaris
ggaccagaagaagagaggccccagg

SEQ ID NO: 158909 - DNA, 25 bp, Canis familiaris
ggaccagggaatggcagcagcatgc

SEQ ID NO: 158910 - DNA, 25 bp, Canis familiaris
ggagccaagatgacaggccagagca

SEQ ID NO: 158911 - DNA, 25 bp, Canis familiaris
ggagccatatcattcagggacacat

SEQ ID NO: 158912 - DNA, 25 bp, Canis familiaris
ggagcgcatgatgtgcgcggagagc

SEQ ID NO: 158913 - DNA, 25 bp, Canis familiaris
ggagcgcattaaggcggagcgcaag

SEQ ID NO: 158914 - DNA, 25 bp, Canis familiaris
ggagcgcgtgaaggagctgcaggcc

SEQ ID NO: 158915 - DNA, 25 bp, Canis familiaris
ggagctgcgcaagctgaagcggcgc

SEQ ID NO: 158916 - DNA, 25 bp, Canis familiaris
ggagctccgcagcgagagtgtcact

SEQ ID NO: 158917 - DNA, 25 bp, Canis familiaris
ggagcctcgggattgagtaccacat

SEQ ID NO: 158918 - DNA, 25 bp, Canis familiaris
ggagcgtcagggcctagtaatgctt

SEQ ID NO: 158919 - DNA, 25 bp, Canis familiaris
ggagcctagagtctgggagagcctc

SEQ ID NO: 158920 - DNA, 25 bp, Canis familiaris
ggagccgtgaagctgcaggaagccc

SEQ ID NO: 158921 - DNA, 25 bp, Canis familiaris
ggagccggaagcagatgaggacgca

SEQ ID NO: 158922 - DNA, 25 bp, Canis familiaris
ggaccaggacttgacagagacgccc

SEQ ID NO: 158923 - DNA, 25 bp, Canis familiaris
ggaccggcgttgttgaggactcgcc

SEQ ID NO: 158924 - DNA, 25 bp, Canis familiaris
ggacggcatctgctactaaaccgcc

SEQ ID NO: 158925 - DNA, 25 bp, Canis familiaris
ggacctgcattgtcggttgaagccc

SEQ ID NO: 158926 - DNA, 25 bp, Canis familiaris
ggagcctgtctgggatggtgaagtc

SEQ ID NO: 158927 - DNA, 25 bp, Canis familiaris
ggagccgtcatcaattgtgctgaca

SEQ ID NO: 158928 - DNA, 25 bp, Canis familiaris
ggagccatggcatgattgtgcatga

SEQ ID NO: 158929 - DNA, 25 bp, Canis familiaris
ggagcctgctgagaagtgctgagga

SEQ ID NO: 158930 - DNA, 25 bp, Canis familiaris
ggagccctggcagtatgtggacgac

SEQ ID NO: 158931 - DNA, 25 bp, Canis familiaris
ggacctcatggcctacatggcctcc

SEQ ID NO: 158932 - DNA, 25 bp, Canis familiaris
ggacctaggactgcatcaggcttca

SEQ ID NO: 158933 - DNA, 25 bp, Canis familiaris
ggagcctcaaaaggccaggcttcca

SEQ ID NO: 158934 - DNA, 25 bp, Canis familiaris
ggagccccaaagaaagctgcattct

SEQ ID NO: 158935 - DNA, 25 bp, Canis familiaris
ggagcccgaggactcggtgctgttc

SEQ ID NO: 158936 - DNA, 25 bp, Canis familiaris
ggacttcgggactggatcacattcc

SEQ ID NO: 158937 - DNA, 25 bp, Canis familiaris
ggacgtgtttgacaggatccaccct

SEQ ID NO: 158938 - DNA, 25 bp, Canis familiaris
ggagcgtcttttcaggtggatacaa

SEQ ID NO: 158939 - DNA, 25 bp, Canis familiaris
ggagctgtcttctgagactctggat

SEQ ID NO: 158940 - DNA, 25 bp, Canis familiaris
ggacgttgtcggaaccattgatgta

SEQ ID NO: 158941 - DNA, 25 bp, Canis familiaris
ggactagcagtcagaaccaggagaa

SEQ ID NO: 158942 - DNA, 25 bp, Canis familiaris
ggacttcttgtagcaccaggagagc

SEQ ID NO: 158943 - DNA, 25 bp, Canis familiaris
ggaaattcctgcagtccaggggctc

SEQ ID NO: 158944 - DNA, 25 bp, Canis familiaris
ggaaaggcctgtgtttgggatgctc

SEQ ID NO: 158945 - DNA, 25 bp, Canis familiaris
ggacgaccctggcattcaggagtgc

SEQ ID NO: 158946 - DNA, 25 bp, Canis familiaris
ggacgagcacttcgagtttgaggtc

SEQ ID NO: 158947 - DNA, 25 bp, Canis familiaris
ggacccagctctgggtttcggatct

SEQ ID NO: 158948 - DNA, 25 bp, Canis familiaris
ggaccacgttgcttgtttgcatgta

SEQ ID NO: 158949 - DNA, 25 bp, Canis familiaris
ggacgcacgatcttcgatttgtgag

SEQ ID NO: 158950 - DNA, 25 bp, Canis familiaris
ggacgcaccctcagttggagaaggg

SEQ ID NO: 158951 - DNA, 25 bp, Canis familiaris
ggactgcggacctgtgtggaattgg

SEQ ID NO: 158952 - DNA, 25 bp, Canis familiaris
ggacgggtactcgctggaagagtgc

SEQ ID NO: 158953 - DNA, 25 bp, Canis familiaris
ggacggcaaacgagtgacaaaggca

SEQ ID NO: 158954 - DNA, 25 bp, Canis familiaris
ggacaggaaacccagtgacctcatt

SEQ ID NO: 158955 - DNA, 25 bp, Canis familiaris
ggaactttgaccaggacttgcattt

SEQ ID NO: 158956 - DNA, 25 bp, Canis familiaris
ggaactactacaaggatactatcat

SEQ ID NO: 158957 - DNA, 25 bp, Canis familiaris
ggacctcctcagaggatactcttga

SEQ ID NO: 158958 - DNA, 25 bp, Canis familiaris
ggaccgcttcggctgaagcatttga

SEQ ID NO: 158959 - DNA, 25 bp, Canis familiaris
ggacccctcaggtgggttctgattc

SEQ ID NO: 158960 - DNA, 25 bp, Canis familiaris
ggacccccaggaggaagctttatca

SEQ ID NO: 158961 - DNA, 25 bp, Canis familiaris
ggacccccagtgagagcagtcattt

SEQ ID NO: 158962 - DNA, 25 bp, Canis familiaris
ggaccccacgtgtgatggtctggat

SEQ ID NO: 158963 - DNA, 25 bp, Canis familiaris
ggacgttccgtgttattgttcgtag

SEQ ID NO: 158964 - DNA, 25 bp, Canis familiaris
ggaagcttccaggttattaatcggg

SEQ ID NO: 158965 - DNA, 25 bp, Canis familiaris
ggaagtcccaaagtaacaaaggatg

SEQ ID NO: 158966 - DNA, 25 bp, Canis familiaris
ggactgctccccgaaagaagaaggt

SEQ ID NO: 158967 - DNA, 25 bp, Canis familiaris
ggagcgccccgaggaggaggaaatt

SEQ ID NO: 158968 - DNA, 25 bp, Canis familiaris
ggaccccagtgtgacgggcaagatt

SEQ ID NO: 158969 - DNA, 25 bp, Canis familiaris
ggacctacagggcatccgaattgat

SEQ ID NO: 158970 - DNA, 25 bp, Canis familiaris
ggagccaaaggtgacttgagaatac

SEQ ID NO: 158971 - DNA, 25 bp, Canis familiaris
ggagccaaagttgacttgaaaatac

SEQ ID NO: 158972 - DNA, 25 bp, Canis familiaris
ggagccaaggatatcaatgctacaa

SEQ ID NO: 158973 - DNA, 25 bp, Canis familiaris
ggaccagatggatttaacagacata

SEQ ID NO: 158974 - DNA, 25 bp, Canis familiaris
ggaccagcaggtacaaaggactcag

SEQ ID NO: 158975 - DNA, 25 bp, Canis familiaris
ggaccagaggctggctacgtggcta

SEQ ID NO: 158976 - DNA, 25 bp, Canis familiaris
ggagccagcgtcaactacgatgact

SEQ ID NO: 158977 - DNA, 25 bp, Canis familiaris
ggagccagcgtcaactacgatgact

SEQ ID NO: 158978 - DNA, 25 bp, Canis familiaris
ggagccagcgtcaactacgatgact

SEQ ID NO: 158979 - DNA, 25 bp, Canis familiaris
ggagccactgaaagctctcggcatc

SEQ ID NO: 158980 - DNA, 25 bp, Canis familiaris
ggagccaggaagaatctcggatcca

SEQ ID NO: 158981 - DNA, 25 bp, Canis familiaris
ggagccggaataactgggagaccat

SEQ ID NO: 158982 - DNA, 25 bp, Canis familiaris
ggactcgggtcaagctggaaagcct

SEQ ID NO: 158983 - DNA, 25 bp, Canis familiaris
ggaccagggctccttggagaaccaa

SEQ ID NO: 158984 - DNA, 25 bp, Canis familiaris
ggaccagggctccaagtggtcccaa

SEQ ID NO: 158985 - DNA, 25 bp, Canis familiaris
ggaccagggtgcgagacggaaccac

SEQ ID NO: 158986 - DNA, 25 bp, Canis familiaris
ggaccagggtggaccagaaaagcag

SEQ ID NO: 158987 - DNA, 25 bp, Canis familiaris
ggaccaggtctggacaaaaaagcag

SEQ ID NO: 158988 - DNA, 25 bp, Canis familiaris
ggcacctttctggacaatttgaggc

SEQ ID NO: 158989 - DNA, 25 bp, Canis familiaris
ggacctttgatggaacagatgggag

SEQ ID NO: 158990 - DNA, 25 bp, Canis familiaris
ggacctttatgccaacaacgtgcta

SEQ ID NO: 158991 - DNA, 25 bp, Canis familiaris
ggaccattttctcaatacttcacag

SEQ ID NO: 158992 - DNA, 25 bp, Canis familiaris
ggacccttttgtacaatttccatat

SEQ ID NO: 158993 - DNA, 25 bp, Canis familiaris
ggacctcatgtctgttttgattcct

SEQ ID NO: 158994 - DNA, 25 bp, Canis familiaris
ggagcctctctatcatttagatcct

SEQ ID NO: 158995 - DNA, 25 bp, Canis familiaris
ggactggcctaaatttcaagactca

SEQ ID NO: 158996 - DNA, 25 bp, Canis familiaris
ggaaacctggtaattcataagtaag

SEQ ID NO: 158997 - DNA, 25 bp, Canis familiaris
ggacgacctgcgtgaccaaatgtca

SEQ ID NO: 158998 - DNA, 25 bp, Canis familiaris
ggagccatccatgttgtcacaaatg

SEQ ID NO: 158999 - DNA, 25 bp, Canis familiaris
ggaccacgcagagttgtaaagatgt

SEQ ID NO: 159000 - DNA, 25 bp, Canis familiaris
ggaccagctggaggagttcaaggag

SEQ ID NO: 159001 - DNA, 25 bp, Canis familiaris
ggaccaggaataagtgatccggagg

SEQ ID NO: 159002 - DNA, 25 bp, Canis familiaris
ggaccaggttcaaggcattcgttgc

SEQ ID NO: 159003 - DNA, 25 bp, Canis familiaris
ggaccaggttcaaggcattcgttgc

SEQ ID NO: 159004 - DNA, 25 bp, Canis familiaris
ggaccacggttcagattcgtttctt

SEQ ID NO: 159005 - DNA, 25 bp, Canis familiaris
ggactcaccaattcctttggttttg

SEQ ID NO: 159006 - DNA, 25 bp, Canis familiaris
ggactggactattcctctttgtata

SEQ ID NO: 159007 - DNA, 25 bp, Canis familiaris
ggactttctttagatgtcgtatccg

SEQ ID NO: 159008 - DNA, 25 bp, Canis familiaris
ggacttgtttggggtgccaggagcc

SEQ ID NO: 159009 - DNA, 25 bp, Canis familiaris
ggacattgtcctcaggacctgggcc

SEQ ID NO: 159010 - DNA, 25 bp, Canis familiaris
ggacatttcccatatacctgtgagg

SEQ ID NO: 159011 - DNA, 25 bp, Canis familiaris
ggacatttcccgataagcgtcctgg

SEQ ID NO: 159012 - DNA, 25 bp, Canis familiaris
ggaccttcttgttataagtgttcat

SEQ ID NO: 159013 - DNA, 25 bp, Canis familiaris
ggacctgtgaagtcactaatgtgct

SEQ ID NO: 159014 - DNA, 25 bp, Canis familiaris
ggacccgaagtccagaactgcttta

SEQ ID NO: 159015 - DNA, 25 bp, Canis familiaris
ggactgggaagtggagagagacatt

SEQ ID NO: 159016 - DNA, 25 bp, Canis familiaris
ggactgggacaagcattggcctgtc

SEQ ID NO: 159017 - DNA, 25 bp, Canis familiaris
ggaccagtgacttctgattggtctg

SEQ ID NO: 159018 - DNA, 25 bp, Canis familiaris
ggacgagggctactatttctgctct

SEQ ID NO: 159019 - DNA, 25 bp, Canis familiaris
ggaccagaactatgacatcttcctt

SEQ ID NO: 159020 - DNA, 25 bp, Canis familiaris
ggactgcagtaccatcaaatcattt

SEQ ID NO: 159021 - DNA, 25 bp, Canis familiaris
ggactgagtttagagacatttctcc

SEQ ID NO: 159022 - DNA, 25 bp, Canis familiaris
ggactgagtttagagacatttctcc

SEQ ID NO: 159023 - DNA, 25 bp, Canis familiaris
ggactgagttttctactctcgtaca

SEQ ID NO: 159024 - DNA, 25 bp, Canis familiaris
ggactggtttttcaatccctgagct

SEQ ID NO: 159025 - DNA, 25 bp, Canis familiaris
ggactttgatttgataacgcccaga

SEQ ID NO: 159026 - DNA, 25 bp, Canis familiaris
ggactttacttctaatgacttcaac

SEQ ID NO: 159027 - DNA, 25 bp, Canis familiaris
ggactttacctgtatttcaagctac

SEQ ID NO: 159028 - DNA, 25 bp, Canis familiaris
ggacgactctcctaatttaatgcta

SEQ ID NO: 159029 - DNA, 25 bp, Canis familiaris
ggactggatttctgattttatgtaa

SEQ ID NO: 159030 - DNA, 25 bp, Canis familiaris
ggactggtttgatgggggttaatca

SEQ ID NO: 159031 - DNA, 25 bp, Canis familiaris
ggaagtgttcttctagaggttttgg

SEQ ID NO: 159032 - DNA, 25 bp, Canis familiaris
ggacggtacactctggcagtgttca

SEQ ID NO: 159033 - DNA, 25 bp, Canis familiaris
ggaccggatgcacggaggattttaa

SEQ ID NO: 159034 - DNA, 25 bp, Canis familiaris
ggacctggatggcgtggactgatgc

SEQ ID NO: 159035 - DNA, 25 bp, Canis familiaris
ggacctgtgggggggcattgggtct

SEQ ID NO: 159036 - DNA, 25 bp, Canis familiaris
ggagccagtgccgcacaggaatggg

SEQ ID NO: 159037 - DNA, 25 bp, Canis familiaris
ggacccgaaccatggaaggggcgag

SEQ ID NO: 159038 - DNA, 25 bp, Canis familiaris
ggacccaggcccttggcaaggggag

SEQ ID NO: 159039 - DNA, 25 bp, Canis familiaris
ggaccagcacctcatgggaggggct

SEQ ID NO: 159040 - DNA, 25 bp, Canis familiaris
ggagccagaggaccagtcgtgggtc

SEQ ID NO: 159041 - DNA, 25 bp, Canis familiaris
ggaccacagggtgctcgtggtttcc

SEQ ID NO: 159042 - DNA, 25 bp, Canis familiaris
ggacctggggctgctatgttttgat

SEQ ID NO: 159043 - DNA, 25 bp, Canis familiaris
ggacttggggtacagattcctctgt

SEQ ID NO: 159044 - DNA, 25 bp, Canis familiaris
ggactaggaggccagaagatctttc

SEQ ID NO: 159045 - DNA, 25 bp, Canis familiaris
ggacgacacggccaaggccaagatc

SEQ ID NO: 159046 - DNA, 25 bp, Canis familiaris
tgcttcgaaaggcaaggaggaagct

SEQ ID NO: 159047 - DNA, 25 bp, Canis familiaris
tgcctggaaattcccggcaaccgtt

SEQ ID NO: 159048 - DNA, 25 bp, Canis familiaris
ggaccacctgcttgactgtggtgag

SEQ ID NO: 159049 - DNA, 25 bp, Canis familiaris
ggaccagcgccagtgggaggatact

SEQ ID NO: 159050 - DNA, 25 bp, Canis familiaris
ggaccagtgccaggtggacagtcac

SEQ ID NO: 159051 - DNA, 25 bp, Canis familiaris
ggacctgagccagatgaccagcatc

SEQ ID NO: 159052 - DNA, 25 bp, Canis familiaris
ggactcatgaccacagtccatgcca

SEQ ID NO: 159053 - DNA, 25 bp, Canis familiaris
ggagccagagccttcgtcaggctcc

SEQ ID NO: 159054 - DNA, 25 bp, Canis familiaris
ggagccaagccaataggtggccccc

SEQ ID NO: 159055 - DNA, 25 bp, Canis familiaris
ggaccaagctataaggaggcacctc

SEQ ID NO: 159056 - DNA, 25 bp, Canis familiaris
ggaagtggtcatgagggaggccctt

SEQ ID NO: 159057 - DNA, 25 bp, Canis familiaris
ggacgtggtgctgcagtggggagag

SEQ ID NO: 159058 - DNA, 25 bp, Canis familiaris
ggactatgactttcagtgggagatg

SEQ ID NO: 159059 - DNA, 25 bp, Canis familiaris
ggagcctggtcttagatgtgaaatg

SEQ ID NO: 159060 - DNA, 25 bp, Canis familiaris
ggagccgggccaaagatgacatcac

SEQ ID NO: 159061 - DNA, 25 bp, Canis familiaris
ggacgtgaggtcctagagaccccga

SEQ ID NO: 159062 - DNA, 25 bp, Canis familiaris
ggacgtggatgtcgtcggactccac

SEQ ID NO: 159063 - DNA, 25 bp, Canis familiaris
ggacgaagtcatcgacttctcccac

SEQ ID NO: 159064 - DNA, 25 bp, Canis familiaris
ggacgagagtctcgtcctgcttaac

SEQ ID NO: 159065 - DNA, 25 bp, Canis familiaris
ggacctgatgtcggatctctttaac

SEQ ID NO: 159066 - DNA, 25 bp, Canis familiaris
ggacctgatggggacccttgatgca

SEQ ID NO: 159067 - DNA, 25 bp, Canis familiaris
ggacctggaggctttgccttacaac

SEQ ID NO: 159068 - DNA, 25 bp, Canis familiaris
ggacccagtttttgccattaatggg

SEQ ID NO: 159069 - DNA, 25 bp, Canis familiaris
ggacccagtttcttgccattatggg

SEQ ID NO: 159070 - DNA, 25 bp, Canis familiaris
ggactccttctggcagtgctaatat

SEQ ID NO: 159071 - DNA, 25 bp, Canis familiaris
ggactcagctccgaattctatatag

SEQ ID NO: 159072 - DNA, 25 bp, Canis familiaris
ggactacatcgcattgtgctttttg

SEQ ID NO: 159073 - DNA, 25 bp, Canis familiaris
ggaccactggattttctgggtcggg

SEQ ID NO: 159074 - DNA, 25 bp, Canis familiaris
ggaccatatggttctttttggtggg

SEQ ID NO: 159075 - DNA, 25 bp, Canis familiaris
ggaccttggatcttttcattggccc

SEQ ID NO: 159076 - DNA, 25 bp, Canis familiaris
ggacctgttgttagttctctgtatc

SEQ ID NO: 159077 - DNA, 25 bp, Canis familiaris
ggaccctagttcaaatcctatctct

SEQ ID NO: 159078 - DNA, 25 bp, Canis familiaris
ggagccttggtgtatattgtttttt

SEQ ID NO: 159079 - DNA, 25 bp, Canis familiaris
ggaccttgcagtaataatgatgtat

SEQ ID NO: 159080 - DNA, 25 bp, Canis familiaris
ggacctctccataaagatggtatac

SEQ ID NO: 159081 - DNA, 25 bp, Canis familiaris
ggacctctgccacaaatggtaccag

SEQ ID NO: 159082 - DNA, 25 bp, Canis familiaris
ggacaccccgttacaggaacgagag

SEQ ID NO: 159083 - DNA, 25 bp, Canis familiaris
ggacccgggcaattctggaaggaag

SEQ ID NO: 159084 - DNA, 25 bp, Canis familiaris
ggacccaaggaccctggaagaactg

SEQ ID NO: 159085 - DNA, 25 bp, Canis familiaris
ggacccagaaaaccttacaaatcat

SEQ ID NO: 159086 - DNA, 25 bp, Canis familiaris
ggacccataaaaaatatcctaatgc

SEQ ID NO: 159087 - DNA, 25 bp, Canis familiaris
ggacctgctgaagaagttccagacc

SEQ ID NO: 159088 - DNA, 25 bp, Canis familiaris
ggacttcgaagcacgttgcacgtga

SEQ ID NO: 159089 - DNA, 25 bp, Canis familiaris
ggacttggaagcccttctaggtcta

SEQ ID NO: 159090 - DNA, 25 bp, Canis familiaris
ggactgctgtgatcggtttcagtac

SEQ ID NO: 159091 - DNA, 25 bp, Canis familiaris
ggacggatgtgagggtttggcctct

SEQ ID NO: 159092 - DNA, 25 bp, Canis familiaris
ggactgaagttgctttgtggctcct

SEQ ID NO: 159093 - DNA, 25 bp, Canis familiaris
ggactctgaatccgctttttgtcgg

SEQ ID NO: 159094 - DNA, 25 bp, Canis familiaris
ggactggcagactagcttttttccg

SEQ ID NO: 159095 - DNA, 25 bp, Canis familiaris
ggactggacctcgatcttctggtcc

SEQ ID NO: 159096 - DNA, 25 bp, Canis familiaris
ggacgatacaaccatgctgtgctgt

SEQ ID NO: 159097 - DNA, 25 bp, Canis familiaris
ggaccataagtcctgtgctctgatt

SEQ ID NO: 159098 - DNA, 25 bp, Canis familiaris
ggaccatagtgtctgtgtagaccaa

SEQ ID NO: 159099 - DNA, 25 bp, Canis familiaris
ggaccaagcggcttggatcccacca

SEQ ID NO: 159100 - DNA, 25 bp, Canis familiaris
ggaccagagggctaaatccctgaag

SEQ ID NO: 159101 - DNA, 25 bp, Canis familiaris
ggacctggtgactaaatccatgtga

SEQ ID NO: 159102 - DNA, 25 bp, Canis familiaris
ggacctgtggagtaaagctagtggc

SEQ ID NO: 159103 - DNA, 25 bp, Canis familiaris
ggacctgcttgagtaggggatgggg

SEQ ID NO: 159104 - DNA, 25 bp, Canis familiaris
ggagccatgctctactagggaggaa

SEQ ID NO: 159105 - DNA, 25 bp, Canis familiaris
ggaccactcacaggcagggagggca

SEQ ID NO: 159106 - DNA, 25 bp, Canis familiaris
ggaccctgaggcgggtgaggcagcc

SEQ ID NO: 159107 - DNA, 25 bp, Canis familiaris
ggacttcatggggtttgcagaggct

SEQ ID NO: 159108 - DNA, 25 bp, Canis familiaris
ggactttgtactaattcagagccat

SEQ ID NO: 159109 - DNA, 25 bp, Canis familiaris
ggactctggtagggcatggtggact

SEQ ID NO: 159110 - DNA, 25 bp, Canis familiaris
ggaccaagaaggccagcttggagct

SEQ ID NO: 159111 - DNA, 25 bp, Canis familiaris
ggaccagagataatcacagcttgaa

SEQ ID NO: 159112 - DNA, 25 bp, Canis familiaris
ggaccagagcgaaagcatttgccaa

SEQ ID NO: 159113 - DNA, 25 bp, Canis familiaris
ggacctgtcataaaattctcagcaa

SEQ ID NO: 159114 - DNA, 25 bp, Canis familiaris
ggaccctgattgcattgtgtcacag

SEQ ID NO: 159115 - DNA, 25 bp, Canis familiaris
ggacttctgatttgtctgttcggcc

SEQ ID NO: 159116 - DNA, 25 bp, Canis familiaris
ggaccactgagtgtccttcaggctc

SEQ ID NO: 159117 - DNA, 25 bp, Canis familiaris
ggagccaagattatgcctccagccc

SEQ ID NO: 159118 - DNA, 25 bp, Canis familiaris
ggaccaagtcaaagtcatgccgcac

SEQ ID NO: 159119 - DNA, 25 bp, Canis familiaris
ggaccacagttaatgtcacttgccc

SEQ ID NO: 159120 - DNA, 25 bp, Canis familiaris
ggaccacatggaagtaccacgcacc

SEQ ID NO: 159121 - DNA, 25 bp, Canis familiaris
tgaacctgcaggagaaccctaaccc

SEQ ID NO: 159122 - DNA, 25 bp, Canis familiaris
ggacctgagagttgatactccttac

SEQ ID NO: 159123 - DNA, 25 bp, Canis familiaris
ggactctacagctaaagtcctccca

SEQ ID NO: 159124 - DNA, 25 bp, Canis familiaris
ggacctatgagatccagttctccgc

SEQ ID NO: 159125 - DNA, 25 bp, Canis familiaris
ggaccatagagactccaacttctcg

SEQ ID NO: 159126 - DNA, 25 bp, Canis familiaris
ggactcaacttctcaaatgttcgat

SEQ ID NO: 159127 - DNA, 25 bp, Canis familiaris
ggactgctacctttcaaagcttggg

SEQ ID NO: 159128 - DNA, 25 bp, Canis familiaris
ggactcttccatttgtaacttgaat

SEQ ID NO: 159129 - DNA, 25 bp, Canis familiaris
ggaccatttgctttttctccaaata

SEQ ID NO: 159130 - DNA, 25 bp, Canis familiaris
ggaccaactctgttttctcaataaa

SEQ ID NO: 159131 - DNA, 25 bp, Canis familiaris
ggaccaattgcgtctgatgtctcaa

SEQ ID NO: 159132 - DNA, 25 bp, Canis familiaris
ggacctataagatgtgctctaacac

SEQ ID NO: 159133 - DNA, 25 bp, Canis familiaris
ggacctaatgacagcccatatcaag

SEQ ID NO: 159134 - DNA, 25 bp, Canis familiaris
ggacctatatccatcctatatcaaa

SEQ ID NO: 159135 - DNA, 25 bp, Canis familiaris
ggaactatatccctaaaattaactg

SEQ ID NO: 159136 - DNA, 25 bp, Canis familiaris
ggacctatagccctacaaggtgtca

SEQ ID NO: 159137 - DNA, 25 bp, Canis familiaris
ggaccttcgctgcaaaggactgctc

SEQ ID NO: 159138 - DNA, 25 bp, Canis familiaris
ggacctgtcagaccaagatgacatc

SEQ ID NO: 159139 - DNA, 25 bp, Canis familiaris
ggacctgatggacatctctgaccag

SEQ ID NO: 159140 - DNA, 25 bp, Canis familiaris
ggacattggagttcccatgaccagc

SEQ ID NO: 159141 - DNA, 25 bp, Canis familiaris
ggacatggagtttggcacaggtgcg

SEQ ID NO: 159142 - DNA, 25 bp, Canis familiaris
ggacattgatctgggatccggctgc

SEQ ID NO: 159143 - DNA, 25 bp, Canis familiaris
ggactggatgtggaaccgcgtcctc

SEQ ID NO: 159144 - DNA, 25 bp, Canis familiaris
ggacggagatggcactatcaccacc

SEQ ID NO: 159145 - DNA, 25 bp, Canis familiaris
ggacggataacgatttcacaccagg

SEQ ID NO: 159146 - DNA, 25 bp, Canis familiaris
ggaccaaacaccaggttcatcgagg

SEQ ID NO: 159147 - DNA, 25 bp, Canis familiaris
ggacttgaaccggggtctccaagat

SEQ ID NO: 159148 - DNA, 25 bp, Canis familiaris
ggactgtgaacttgggtggcctaaa

SEQ ID NO: 159149 - DNA, 25 bp, Canis familiaris
ggactggaatcgagctgttcaccat

SEQ ID NO: 159150 - DNA, 25 bp, Canis familiaris
ggactgtcaggcaggttgtcagcac

SEQ ID NO: 159151 - DNA, 25 bp, Canis familiaris
ggacatccagacccagtattacatc

SEQ ID NO: 159152 - DNA, 25 bp, Canis familiaris
ggacccagaaaccttacagatcatg

SEQ ID NO: 159153 - DNA, 25 bp, Canis familiaris
ggaccacactaaccttgatcatgat

SEQ ID NO: 159154 - DNA, 25 bp, Canis familiaris
ggaccagttacatctcatggcttta

SEQ ID NO: 159155 - DNA, 25 bp, Canis familiaris
ggaccagttccttcagctggattca

SEQ ID NO: 159156 - DNA, 25 bp, Canis familiaris
ggacgcagttctgtgcggaatcgag

SEQ ID NO: 159157 - DNA, 25 bp, Canis familiaris
ggactgggtcgcttttgaccgagtc

SEQ ID NO: 159158 - DNA, 25 bp, Canis familiaris
ggacgctggttcatttgaccaagtg

SEQ ID NO: 159159 - DNA, 25 bp, Canis familiaris
ggactctgggtcacagtgcccaatt

SEQ ID NO: 159160 - DNA, 25 bp, Canis familiaris
ggacctgggtctgagtgcagtcctt

SEQ ID NO: 159161 - DNA, 25 bp, Canis familiaris
ggaccttggtctggcagggtcttgc

SEQ ID NO: 159162 - DNA, 25 bp, Canis familiaris
ggaccacaggggacaggtgcctatg

SEQ ID NO: 159163 - DNA, 25 bp, Canis familiaris
ggaccaagggaaagtatcctctgtg

SEQ ID NO: 159164 - DNA, 25 bp, Canis familiaris
ggactcctggagtaatgttcacttt

SEQ ID NO: 159165 - DNA, 25 bp, Canis familiaris
ggacctgggcagaaagctatacttt

SEQ ID NO: 159166 - DNA, 25 bp, Canis familiaris
ggacctgcagacggaagccatatgt

SEQ ID NO: 159167 - DNA, 25 bp, Canis familiaris
ggacctgccacatggagactgagtc

SEQ ID NO: 159168 - DNA, 25 bp, Canis familiaris
ggaccacagatagatggactgaggg

SEQ ID NO: 159169 - DNA, 25 bp, Canis familiaris
ggaccactatgagacagactacacg

SEQ ID NO: 159170 - DNA, 25 bp, Canis familiaris
ggaccacaaagcacaacaagccgct

SEQ ID NO: 159171 - DNA, 25 bp, Canis familiaris
ggaagaaagatcacaaattgcccaa

SEQ ID NO: 159172 - DNA, 25 bp, Canis familiaris
ggacgaacatgtatataaagcaccc

SEQ ID NO: 159173 - DNA, 25 bp, Canis familiaris
ggacgaatgaagtttacacgacctc

SEQ ID NO: 159174 - DNA, 25 bp, Canis familiaris
ggacgtaacagtaatctccgactcc

SEQ ID NO: 159175 - DNA, 25 bp, Canis familiaris
ggacgacaagctgagttccgagccc

SEQ ID NO: 159176 - DNA, 25 bp, Canis familiaris
ggaccagataatgaaaccagaccca

SEQ ID NO: 159177 - DNA, 25 bp, Canis familiaris
ggaccggaagtgtatgagctcaata

SEQ ID NO: 159178 - DNA, 25 bp, Canis familiaris
ggacctgtgaggtctttgctgcgga

SEQ ID NO: 159179 - DNA, 25 bp, Canis familiaris
ggacatttgcagctgcctttggaag

SEQ ID NO: 159180 - DNA, 25 bp, Canis familiaris
ggacatatagcagcgttgggggagg

SEQ ID NO: 159181 - DNA, 25 bp, Canis familiaris
ggactttggccagtctggtggcatt

SEQ ID NO: 159182 - DNA, 25 bp, Canis familiaris
ggacctgcatggtgttggtggcttc

SEQ ID NO: 159183 - DNA, 25 bp, Canis familiaris
ggacctctgatgtgtgtgtttgtgt

SEQ ID NO: 159184 - DNA, 25 bp, Canis familiaris
ggaccatcgtgtccgtgtgtttcac

SEQ ID NO: 159185 - DNA, 25 bp, Canis familiaris
ggaccatgttgtcaaagctgcccac

SEQ ID NO: 159186 - DNA, 25 bp, Canis familiaris
ggaccaacatgttctgaactcccat

SEQ ID NO: 159187 - DNA, 25 bp, Canis familiaris
ggaccaacagttagtcaacttgcac

SEQ ID NO: 159188 - DNA, 25 bp, Canis familiaris
ggaccaacagtatgtcaacttgccc

SEQ ID NO: 159189 - DNA, 25 bp, Canis familiaris
ggaccacagttatgttcacttgccc

SEQ ID NO: 159190 - DNA, 25 bp, Canis familiaris
ggaccacaggttatgtcacttgccc

SEQ ID NO: 159191 - DNA, 25 bp, Canis familiaris
ggacctcaggttatgatctccaggt

SEQ ID NO: 159192 - DNA, 25 bp, Canis familiaris
ggactcttaggtttttgtaggatgt

SEQ ID NO: 159193 - DNA, 25 bp, Canis familiaris
ggaccttgagggtattatgctaagt

SEQ ID NO: 159194 - DNA, 25 bp, Canis familiaris
ggactttggtggtatctttcacaca

SEQ ID NO: 159195 - DNA, 25 bp, Canis familiaris
ggacctattggttatttcattcatc

SEQ ID NO: 159196 - DNA, 25 bp, Canis familiaris
ggacctgttatttcttgtcatctag

SEQ ID NO: 159197 - DNA, 25 bp, Canis familiaris
ggacttgcctatttctggacatttc

SEQ ID NO: 159198 - DNA, 25 bp, Canis familiaris
ggacatgtgtcttggtttaagtcat

SEQ ID NO: 159199 - DNA, 25 bp, Canis familiaris
ggacagtgctaacgtggtaggcctc

SEQ ID NO: 159200 - DNA, 25 bp, Canis familiaris
ggctcacttgaaaggcggggccaag

SEQ ID NO: 159201 - DNA, 25 bp, Canis familiaris
ggacgtggagaaggcggcggaggag

SEQ ID NO: 159202 - DNA, 25 bp, Canis familiaris
ggacctggagtcagccagtggggag

SEQ ID NO: 159203 - DNA, 25 bp, Canis familiaris
ggaccagggagcagaaggggaagcc

SEQ ID NO: 159204 - DNA, 25 bp, Canis familiaris
ggaccgggagcacgtgagccggaac

SEQ ID NO: 159205 - DNA, 25 bp, Canis familiaris
ggaccgggagcacgtgagccggaac

SEQ ID NO: 159206 - DNA, 25 bp, Canis familiaris
ggaccagtggaaaaggccaagaatc

SEQ ID NO: 159207 - DNA, 25 bp, Canis familiaris
ggactgagggtgcaagccccagaat

SEQ ID NO: 159208 - DNA, 25 bp, Canis familiaris
ggaccaggagtgcaatgtgcccatc

SEQ ID NO: 159209 - DNA, 25 bp, Canis familiaris
ggaccagcggaggagcgtggacatc

SEQ ID NO: 159210 - DNA, 25 bp, Canis familiaris
ggaccagtggatcgagcagctgaac

SEQ ID NO: 159211 - DNA, 25 bp, Canis familiaris
ggaccagttatgtggcatgatatgc

SEQ ID NO: 159212 - DNA, 25 bp, Canis familiaris
ggacgcagtttcagagctgcaggca

SEQ ID NO: 159213 - DNA, 25 bp, Canis familiaris
ggaccagttcatgcgcaagaggatc

SEQ ID NO: 159214 - DNA, 25 bp, Canis familiaris
ggaccagcacctggatcaagagcca

SEQ ID NO: 159215 - DNA, 25 bp, Canis familiaris
ggacgacattcaagatagggtagtt

SEQ ID NO: 159216 - DNA, 25 bp, Canis familiaris
ggacgctttctttagtcgaagtttg

SEQ ID NO: 159217 - DNA, 25 bp, Canis familiaris
ggacccgtctgtaaacgaagaactg

SEQ ID NO: 159218 - DNA, 25 bp, Canis familiaris
ggaccacgactttcaactgggaaat

SEQ ID NO: 159219 - DNA, 25 bp, Canis familiaris
ggacctggccatctaaggagcgaga

SEQ ID NO: 159220 - DNA, 25 bp, Canis familiaris
ggacctgcacttcctaatgtttgag

SEQ ID NO: 159221 - DNA, 25 bp, Canis familiaris
ggacctgcacttcctaatgtttgag

SEQ ID NO: 159222 - DNA, 25 bp, Canis familiaris
ggacctcctgtggtctcagttgaag

SEQ ID NO: 159223 - DNA, 25 bp, Canis familiaris
ggacgtcggatccttagatgagaag

SEQ ID NO: 159224 - DNA, 25 bp, Canis familiaris
ggactttgagtccttcagagtaatg

SEQ ID NO: 159225 - DNA, 25 bp, Canis familiaris
ggaatgttagtagttgcaggtagaa

SEQ ID NO: 159226 - DNA, 25 bp, Canis familiaris
ggacgcttattagatcacctgagaa

SEQ ID NO: 159227 - DNA, 25 bp, Canis familiaris
ggacgtcttattagagtctctgaga

SEQ ID NO: 159228 - DNA, 25 bp, Canis familiaris
ggacgccttattagaatcactgaga

SEQ ID NO: 159229 - DNA, 25 bp, Canis familiaris
ggactggtcagctcagtatcacgga

SEQ ID NO: 159230 - DNA, 25 bp, Canis familiaris
ggacgtgtcagcacattaaggaata

SEQ ID NO: 159231 - DNA, 25 bp, Canis familiaris
ggacagtgagagcctcttcaaggat

SEQ ID NO: 159232 - DNA, 25 bp, Canis familiaris
ggacctgctgtgccatcaacaaggt

SEQ ID NO: 159233 - DNA, 25 bp, Canis familiaris
ggacctcatgttccacatgcagaga

SEQ ID NO: 159234 - DNA, 25 bp, Canis familiaris
ggacctcgatgggcacaggaaacat

SEQ ID NO: 159235 - DNA, 25 bp, Canis familiaris
ggacaccaagggacacaaaacattc

SEQ ID NO: 159236 - DNA, 25 bp, Canis familiaris
ggacatcaatttgggcccaaatttg

SEQ ID NO: 159237 - DNA, 25 bp, Canis familiaris
ggacagtagtttgcccacagttggt

SEQ ID NO: 159238 - DNA, 25 bp, Canis familiaris
ggacgaggcctttaacaacttgtgc

SEQ ID NO: 159239 - DNA, 25 bp, Canis familiaris
ggaaggaactttactgcttttgtgc

SEQ ID NO: 159240 - DNA, 25 bp, Canis familiaris
ggacctggacttctctgagtttgtc

SEQ ID NO: 159241 - DNA, 25 bp, Canis familiaris
ggaccatggacaccgtctgatatgc

SEQ ID NO: 159242 - DNA, 25 bp, Canis familiaris
ggacctgaaactctcaagcagctgt

SEQ ID NO: 159243 - DNA, 25 bp, Canis familiaris
ggacagtgttaacataagccagttg

SEQ ID NO: 159244 - DNA, 25 bp, Canis familiaris
ggaccttgcttatatgatagccgat

SEQ ID NO: 159245 - DNA, 25 bp, Canis familiaris
ggaccatggccctgatggaggagtt

SEQ ID NO: 159246 - DNA, 25 bp, Canis familiaris
ggacgcgacccatgggatggtgtac

SEQ ID NO: 159247 - DNA, 25 bp, Canis familiaris
ggacgcgaccatgtcggaggtgctg

SEQ ID NO: 159248 - DNA, 25 bp, Canis familiaris
ggaccgtcctggaggaggtcagccg

SEQ ID NO: 159249 - DNA, 25 bp, Canis familiaris
ggaccgtcctggaggaggtcatgca

SEQ ID NO: 159250 - DNA, 25 bp, Canis familiaris
ggacggttcggacagtggcgatcat

SEQ ID NO: 159251 - DNA, 25 bp, Canis familiaris
ggactgtttcggactattgcgcttt

SEQ ID NO: 159252 - DNA, 25 bp, Canis familiaris
ggactgtttcgactattgcgtttgt

SEQ ID NO: 159253 - DNA, 25 bp, Canis familiaris
ggaccatttccattttcatttttga

SEQ ID NO: 159254 - DNA, 25 bp, Canis familiaris
ggacctccttatttttatattacat

SEQ ID NO: 159255 - DNA, 25 bp, Canis familiaris
ggacacctgcttttggtttttggat

SEQ ID NO: 159256 - DNA, 25 bp, Canis familiaris
ggacctttttggttgtggttgcagt

SEQ ID NO: 159257 - DNA, 25 bp, Canis familiaris
ggacacttttgtatgatgggcccgt

SEQ ID NO: 159258 - DNA, 25 bp, Canis familiaris
tgtgaacgttttttgatggaaaagt

SEQ ID NO: 159259 - DNA, 25 bp, Canis familiaris
tcgcaacgaaggttttgggaacagt

SEQ ID NO: 159260 - DNA, 25 bp, Canis familiaris
ggacccaaggctccttgggctacag

SEQ ID NO: 159261 - DNA, 25 bp, Canis familiaris
ggacccacagtgccaagtatggccc

SEQ ID NO: 159262 - DNA, 25 bp, Canis familiaris
ggaccccattgacggtataatgccc

SEQ ID NO: 159263 - DNA, 25 bp, Canis familiaris
ggacccctctttctgaaatgcaggc

SEQ ID NO: 159264 - DNA, 25 bp, Canis familiaris
ggaccctctttgcaggcaaaatctc

SEQ ID NO: 159265 - DNA, 25 bp, Canis familiaris
ggacctcttcttcattcataaacag

SEQ ID NO: 159266 - DNA, 25 bp, Canis familiaris
ggacctcaacttcataccatagaca

SEQ ID NO: 159267 - DNA, 25 bp, Canis familiaris
ggactcacaatctttaatccctcca

SEQ ID NO: 159268 - DNA, 25 bp, Canis familiaris
ggaccatatgatgattaatctttcc

SEQ ID NO: 159269 - DNA, 25 bp, Canis familiaris
ggactgaatcacatatatttttctc

SEQ ID NO: 159270 - DNA, 25 bp, Canis familiaris
ggacgacagcaaggaatacttctcc

SEQ ID NO: 159271 - DNA, 25 bp, Canis familiaris
ggccgaagaaaggaagttcctgttg

SEQ ID NO: 159272 - DNA, 25 bp, Canis familiaris
ggcccaaagggaacagacttctggt

SEQ ID NO: 159273 - DNA, 25 bp, Canis familiaris
ggcaatcaatgaaggatccagatcc

SEQ ID NO: 159274 - DNA, 25 bp, Canis familiaris
ggactcatatcagggactccatccc

SEQ ID NO: 159275 - DNA, 25 bp, Canis familiaris
ggaccagtcaaagtcatgcctgcac

SEQ ID NO: 159276 - DNA, 25 bp, Canis familiaris
ggacgcagacataatctgacttcac

SEQ ID NO: 159277 - DNA, 25 bp, Canis familiaris
ggacccaattgcagactgtgctgcc

SEQ ID NO: 159278 - DNA, 25 bp, Canis familiaris
ggaccatggaggggagctgctggcc

SEQ ID NO: 159279 - DNA, 25 bp, Canis familiaris
ggaccaggcagggaggcctagctgg

SEQ ID NO: 159280 - DNA, 25 bp, Canis familiaris
ggaccctgaaggggccacgatggta

SEQ ID NO: 159281 - DNA, 25 bp, Canis familiaris
ggaccttaagtgggcaatgggcgaa

SEQ ID NO: 159282 - DNA, 25 bp, Canis familiaris
ggaaactttggcagcaaggggagat

SEQ ID NO: 159283 - DNA, 25 bp, Canis familiaris
ggacaaccttggacctcaagggaca

SEQ ID NO: 159284 - DNA, 25 bp, Canis familiaris
ggacatgtcgccagttcaaaggtat

SEQ ID NO: 159285 - DNA, 25 bp, Canis familiaris
ggactttgagcaagcccacaaggga

SEQ ID NO: 159286 - DNA, 25 bp, Canis familiaris
ggactacgagaactcacgaaggctt

SEQ ID NO: 159287 - DNA, 25 bp, Canis familiaris
ggacggcgagatttactgcaaagga

SEQ ID NO: 159288 - DNA, 25 bp, Canis familiaris
ggacggcgtggtggagataactggc

SEQ ID NO: 159289 - DNA, 25 bp, Canis familiaris
ggacggcctctgtggaatacaaggg

SEQ ID NO: 159290 - DNA, 25 bp, Canis familiaris
ggactggcttggttggaagaaagga

SEQ ID NO: 159291 - DNA, 25 bp, Canis familiaris
ggactggcttggaactggaggaata

SEQ ID NO: 159292 - DNA, 25 bp, Canis familiaris
ggactggcggttattgagatacttg

SEQ ID NO: 159293 - DNA, 25 bp, Canis familiaris
ggacttctggttacttatgtagttg

SEQ ID NO: 159294 - DNA, 25 bp, Canis familiaris
ggacttttcctgagtgtgtttcatg

SEQ ID NO: 159295 - DNA, 25 bp, Canis familiaris
ggaccatttacgacgttgcttggtg

SEQ ID NO: 159296 - DNA, 25 bp, Canis familiaris
ggacctttaggcttggatgcgggag

SEQ ID NO: 159297 - DNA, 25 bp, Canis familiaris
ggaactgttagagctgagacggggt

SEQ ID NO: 159298 - DNA, 25 bp, Canis familiaris
ggaacgctttgagtctagccaggag

SEQ ID NO: 159299 - DNA, 25 bp, Canis familiaris
ggacagtgtttggcacatagtaggt

SEQ ID NO: 159300 - DNA, 25 bp, Canis familiaris
ggacagtttatctgtagtaactttt

SEQ ID NO: 159301 - DNA, 25 bp, Canis familiaris
ggaaagttccaagtctttacatttg

SEQ ID NO: 159302 - DNA, 25 bp, Canis familiaris
ggaaactcacctatatgttagattc

SEQ ID NO: 159303 - DNA, 25 bp, Canis familiaris
tggaaaacacctgcgtttggttcaa

SEQ ID NO: 159304 - DNA, 25 bp, Canis familiaris
ggacgacacaccaatcgtttggccg

SEQ ID NO: 159305 - DNA, 25 bp, Canis familiaris
ggacgacaatttcctgtttgcatca

SEQ ID NO: 159306 - DNA, 25 bp, Canis familiaris
ggactgccagtttggttgttgacag

SEQ ID NO: 159307 - DNA, 25 bp, Canis familiaris
ggacctcagttgagtttggccgagc

SEQ ID NO: 159308 - DNA, 25 bp, Canis familiaris
ggacccaagtggcctctatgggggc

SEQ ID NO: 159309 - DNA, 25 bp, Canis familiaris
ggacctaaggagcgactgggtgccc

SEQ ID NO: 159310 - DNA, 25 bp, Canis familiaris
ggacctcatcagccatgacgagatg

SEQ ID NO: 159311 - DNA, 25 bp, Canis familiaris
ggactctatcacatatccagctggt

SEQ ID NO: 159312 - DNA, 25 bp, Canis familiaris
ggaccatatcatattcacctttgta

SEQ ID NO: 159313 - DNA, 25 bp, Canis familiaris
ggacctatctttggaggccattaga

SEQ ID NO: 159314 - DNA, 25 bp, Canis familiaris
ggaccttgttgagatgaacattgag

SEQ ID NO: 159315 - DNA, 25 bp, Canis familiaris
ggaccatttaaaagcagccatatca

SEQ ID NO: 159316 - DNA, 25 bp, Canis familiaris
ggaccatttggttacagcctacaac

SEQ ID NO: 159317 - DNA, 25 bp, Canis familiaris
ggacttgttggcaaagagtgctaca

SEQ ID NO: 159318 - DNA, 25 bp, Canis familiaris
ggacgtgattgacttcggtgtcctt

SEQ ID NO: 159319 - DNA, 25 bp, Canis familiaris
ggacttcagtggttcgaggtgcttc

SEQ ID NO: 159320 - DNA, 25 bp, Canis familiaris
ggacttcctggctggaggggtataa

SEQ ID NO: 159321 - DNA, 25 bp, Canis familiaris
ggactgccctacacgagagtggttt

SEQ ID NO: 159322 - DNA, 25 bp, Canis familiaris
ggactgcccttctgagaatgtatgt

SEQ ID NO: 159323 - DNA, 25 bp, Canis familiaris
ggaccccagtataggcattgtagac

SEQ ID NO: 159324 - DNA, 25 bp, Canis familiaris
ggacccactctaggatgctcctaga

SEQ ID NO: 159325 - DNA, 25 bp, Canis familiaris
ggacctgatctggatgggtgcctag

SEQ ID NO: 159326 - DNA, 25 bp, Canis familiaris
ggaccgtgtggaagatggccacgtc

SEQ ID NO: 159327 - DNA, 25 bp, Canis familiaris
ggaccggctctgatgaggctgccgg

SEQ ID NO: 159328 - DNA, 25 bp, Canis familiaris
ggacctgagtccatgtgatgccagc

SEQ ID NO: 159329 - DNA, 25 bp, Canis familiaris
ggacttcagtccatgatgaggcagt

SEQ ID NO: 159330 - DNA, 25 bp, Canis familiaris
ggacctcagctgtttcatatggacc

SEQ ID NO: 159331 - DNA, 25 bp, Canis familiaris
ggacttcgggatcatcatggacagc

SEQ ID NO: 159332 - DNA, 25 bp, Canis familiaris
ggacatctcgatggactaatgacta

SEQ ID NO: 159333 - DNA, 25 bp, Canis familiaris
ggacccagatcgatatatgcagcaa

SEQ ID NO: 159334 - DNA, 25 bp, Canis familiaris
ggacgatcagaaaataaagccatat

SEQ ID NO: 159335 - DNA, 25 bp, Canis familiaris
ggacgtcgacaaggaccacgatctc

SEQ ID NO: 159336 - DNA, 25 bp, Canis familiaris
ggacctggaggaggaccatgcgtgc

SEQ ID NO: 159337 - DNA, 25 bp, Canis familiaris
ggacctcagtgggaggcgtgggcta

SEQ ID NO: 159338 - DNA, 25 bp, Canis familiaris
ggaccgcagacagaggcgcggggcc

SEQ ID NO: 159339 - DNA, 25 bp, Canis familiaris
ggactcggaagttgcggggaggcca

SEQ ID NO: 159340 - DNA, 25 bp, Canis familiaris
ggacttggtggctacagtgggaggc

SEQ ID NO: 159341 - DNA, 25 bp, Canis familiaris
ggacttgagcacgtaataggtattc

SEQ ID NO: 159342 - DNA, 25 bp, Canis familiaris
ggactgtgacatatcaattgctgtt

SEQ ID NO: 159343 - DNA, 25 bp, Canis familiaris
ggacgtaattcatatatcattttta

SEQ ID NO: 159344 - DNA, 25 bp, Canis familiaris
ggaagtacttcctaattcctcttca

SEQ ID NO: 159345 - DNA, 25 bp, Canis familiaris
ggaaaactccagtgattttcaatca

SEQ ID NO: 159346 - DNA, 25 bp, Canis familiaris
ggaaacagcccagatgtccaacaac

SEQ ID NO: 159347 - DNA, 25 bp, Canis familiaris
ggactaatcccaaagcacacacaaa

SEQ ID NO: 159348 - DNA, 25 bp, Canis familiaris
ggactctacaggaacctcagcagca

SEQ ID NO: 159349 - DNA, 25 bp, Canis familiaris
ggacctgatgaggacacaatctgca

SEQ ID NO: 159350 - DNA, 25 bp, Canis familiaris
ggacccgagcatttcagatctgctt

SEQ ID NO: 159351 - DNA, 25 bp, Canis familiaris
ggacccggtgcagtagttgtatcag

SEQ ID NO: 159352 - DNA, 25 bp, Canis familiaris
ggaatacgttccaagtgcttcaaaa

SEQ ID NO: 159353 - DNA, 25 bp, Canis familiaris
ggaaacgttaaacagtgtgaaatca

SEQ ID NO: 159354 - DNA, 25 bp, Canis familiaris
ggaaacggaaacagagtggccagtc

SEQ ID NO: 159355 - DNA, 25 bp, Canis familiaris
ggaaacgcggacgcgagggaggaag

SEQ ID NO: 159356 - DNA, 25 bp, Canis familiaris
ggaaacctgggcccaggatggacca

SEQ ID NO: 159357 - DNA, 25 bp, Canis familiaris
ggacctcctgagggccgaggtcagc

SEQ ID NO: 159358 - DNA, 25 bp, Canis familiaris
ggacctcctgagcaataatattcac

SEQ ID NO: 159359 - DNA, 25 bp, Canis familiaris
ggacgctccgaggaactggactatc

SEQ ID NO: 159360 - DNA, 25 bp, Canis familiaris
ggacgaacgggagcagatggccatc

SEQ ID NO: 159361 - DNA, 25 bp, Canis familiaris
ggacgagagggccagggagatcctg

SEQ ID NO: 159362 - DNA, 25 bp, Canis familiaris
ggacgtgcagggcggaggagacggc

SEQ ID NO: 159363 - DNA, 25 bp, Canis familiaris
ggacttcctggggaggtggatctgg

SEQ ID NO: 159364 - DNA, 25 bp, Canis familiaris
ggactcccgggcacgatggaatggg

SEQ ID NO: 159365 - DNA, 25 bp, Canis familiaris
ggaccccaggagcacgggttagcag

SEQ ID NO: 159366 - DNA, 25 bp, Canis familiaris
ggaacactaggggaccggaatcacg

SEQ ID NO: 159367 - DNA, 25 bp, Canis familiaris
ggacccggagctggaagcgatcaaa

SEQ ID NO: 159368 - DNA, 25 bp, Canis familiaris
ggacccgcaagctgcaaggagcaac

SEQ ID NO: 159369 - DNA, 25 bp, Canis familiaris
ggaccccgcacttgagggaagcagc

SEQ ID NO: 159370 - DNA, 25 bp, Canis familiaris
ggacccaggccttgggaagatcctg

SEQ ID NO: 159371 - DNA, 25 bp, Canis familiaris
ggaccgtggtcatgggatagtctag

SEQ ID NO: 159372 - DNA, 25 bp, Canis familiaris
ggacttgtgccctggagatagcttt

SEQ ID NO: 159373 - DNA, 25 bp, Canis familiaris
ggacggttcttcagagatagcggtg

SEQ ID NO: 159374 - DNA, 25 bp, Canis familiaris
ggactgagcttctctaagtcccgga

SEQ ID NO: 159375 - DNA, 25 bp, Canis familiaris
ggactgcatttctcacagagttctc

SEQ ID NO: 159376 - DNA, 25 bp, Canis familiaris
ggacgcttgccatagctatttgtgg

SEQ ID NO: 159377 - DNA, 25 bp, Canis familiaris
ggacctgcatacttagctgttttgg

SEQ ID NO: 159378 - DNA, 25 bp, Canis familiaris
ggacctgatgtctaagtggttgggg

SEQ ID NO: 159379 - DNA, 25 bp, Canis familiaris
ggactgggacattggggtctgtggg

SEQ ID NO: 159380 - DNA, 25 bp, Canis familiaris
ggacggcatgactgtgggtattgtg

SEQ ID NO: 159381 - DNA, 25 bp, Canis familiaris
ggacggcaagcatgtggtctttggc

SEQ ID NO: 159382 - DNA, 25 bp, Canis familiaris
ggacgatgcaggttggattcttatg

SEQ ID NO: 159383 - DNA, 25 bp, Canis familiaris
ggactgtggagactcgttttctgac

SEQ ID NO: 159384 - DNA, 25 bp, Canis familiaris
ggactctggatgcccatttattctc

SEQ ID NO: 159385 - DNA, 25 bp, Canis familiaris
ggactcttgatgcggtacatgctgc

SEQ ID NO: 159386 - DNA, 25 bp, Canis familiaris
ggacattgctgggagaggcctgcag

SEQ ID NO: 159387 - DNA, 25 bp, Canis familiaris
ggactgagatgggcatgggtctgga

SEQ ID NO: 159388 - DNA, 25 bp, Canis familiaris
ggactgaatgaggatgggtatatac

SEQ ID NO: 159389 - DNA, 25 bp, Canis familiaris
ggactggtcagtccaggctcatacc

SEQ ID NO: 159390 - DNA, 25 bp, Canis familiaris
ggactacacaagacaggtctcatcc

SEQ ID NO: 159391 - DNA, 25 bp, Canis familiaris
ggacgcacagaggtagtgtctcagc

SEQ ID NO: 159392 - DNA, 25 bp, Canis familiaris
ggacgacgcaggcatgtacatctgc

SEQ ID NO: 159393 - DNA, 25 bp, Canis familiaris
ggactgcgagcagatgcgtagcatt

SEQ ID NO: 159394 - DNA, 25 bp, Canis familiaris
ggacgcagctgagagagcctgtgct

SEQ ID NO: 159395 - DNA, 25 bp, Canis familiaris
ggacctgtacaatgccatggcggtg

SEQ ID NO: 159396 - DNA, 25 bp, Canis familiaris
ggacacgtacactcagagggctggt

SEQ ID NO: 159397 - DNA, 25 bp, Canis familiaris
ggacacaggtcttccaaggtcatgg

SEQ ID NO: 159398 - DNA, 25 bp, Canis familiaris
ggaccggtctacaacatggtttcac

SEQ ID NO: 159399 - DNA, 25 bp, Canis familiaris
ggccctggggacacaggaattccca

SEQ ID NO: 159400 - DNA, 25 bp, Canis familiaris
ggacgcggggacacagacaagtacc

SEQ ID NO: 159401 - DNA, 25 bp, Canis familiaris
ggacgtggcggcgccaacatggtga

SEQ ID NO: 159402 - DNA, 25 bp, Canis familiaris
ggacggtcgggacacagtgagctac

SEQ ID NO: 159403 - DNA, 25 bp, Canis familiaris
ggaccgggagtacacggacatcatc

SEQ ID NO: 159404 - DNA, 25 bp, Canis familiaris
ggactcggggaacagctatgacatc

SEQ ID NO: 159405 - DNA, 25 bp, Canis familiaris
ggacctgaggtcacaagttgccatc

SEQ ID NO: 159406 - DNA, 25 bp, Canis familiaris
ggacgcatagggaccatggtgcccc

SEQ ID NO: 159407 - DNA, 25 bp, Canis familiaris
ggactgcagaggaaccagaaaacct

SEQ ID NO: 159408 - DNA, 25 bp, Canis familiaris
ggactcaggagcatgccaggtaggc

SEQ ID NO: 159409 - DNA, 25 bp, Canis familiaris
ggacccagatcttgctgctgagaag

SEQ ID NO: 159410 - DNA, 25 bp, Canis familiaris
ggaccccacacacgtgtgacagggg

SEQ ID NO: 159411 - DNA, 25 bp, Canis familiaris
ggaccccaagcaggcatgtggggga

SEQ ID NO: 159412 - DNA, 25 bp, Canis familiaris
ggacgcctgaacgacttggagcagt

SEQ ID NO: 159413 - DNA, 25 bp, Canis familiaris
ggaccgtcaactgctgatgggcagc

SEQ ID NO: 159414 - DNA, 25 bp, Canis familiaris
ggaccgagccaggcatggatgaggc

SEQ ID NO: 159415 - DNA, 25 bp, Canis familiaris
ggacgaggcctgggctgatgagagg

SEQ ID NO: 159416 - DNA, 25 bp, Canis familiaris
ggactagtgctgagtgtatgtggag

SEQ ID NO: 159417 - DNA, 25 bp, Canis familiaris
ggactacatctgagcctgttccaga

SEQ ID NO: 159418 - DNA, 25 bp, Canis familiaris
ggactcaattttttctggccatgga

SEQ ID NO: 159419 - DNA, 25 bp, Canis familiaris
ggaacctttgtacagtgcgatgcta

SEQ ID NO: 159420 - DNA, 25 bp, Canis familiaris
ggaacccttgaagaaggatggacca

SEQ ID NO: 159421 - DNA, 25 bp, Canis familiaris
ggaacctttgattctaaatatggag

SEQ ID NO: 159422 - DNA, 25 bp, Canis familiaris
ggacccttggatttcagtcattcgc

SEQ ID NO: 159423 - DNA, 25 bp, Canis familiaris
ggacccttggaccagaggatcacgc

SEQ ID NO: 159424 - DNA, 25 bp, Canis familiaris
ggacagccttgggcgaggttgaccc

SEQ ID NO: 159425 - DNA, 25 bp, Canis familiaris
ggaaccataggggaagtggatccgg

SEQ ID NO: 159426 - DNA, 25 bp, Canis familiaris
ggactcgagggggaggggagccagg

SEQ ID NO: 159427 - DNA, 25 bp, Canis familiaris
ggacccagtgggggggtggagctgg

SEQ ID NO: 159428 - DNA, 25 bp, Canis familiaris
ggacccaaatggggggatatcagtg

SEQ ID NO: 159429 - DNA, 25 bp, Canis familiaris
ggaccccaaggcagcagtgagtact

SEQ ID NO: 159430 - DNA, 25 bp, Canis familiaris
ggaccccaggacctagtgatgtgac

SEQ ID NO: 159431 - DNA, 25 bp, Canis familiaris
ggaccccgtatcgggcgatgtacca

SEQ ID NO: 159432 - DNA, 25 bp, Canis familiaris
ggaccctcagtgtggggagtgggcc

SEQ ID NO: 159433 - DNA, 25 bp, Canis familiaris
ggaccgctcgttcagcgagaacggc

SEQ ID NO: 159434 - DNA, 25 bp, Canis familiaris
ggacggcaggttcacagcagacgcc

SEQ ID NO: 159435 - DNA, 25 bp, Canis familiaris
ggacgcgagcagatgaacgaacaga

SEQ ID NO: 159436 - DNA, 25 bp, Canis familiaris
ggacgctgtgcgagaaggctaagga

SEQ ID NO: 159437 - DNA, 25 bp, Canis familiaris
ggacgttgtgcgggaggtcaaggac

SEQ ID NO: 159438 - DNA, 25 bp, Canis familiaris
ggacagcttggtggggaaccggagc

SEQ ID NO: 159439 - DNA, 25 bp, Canis familiaris
ggacacgtggatgcagacaggccgg

SEQ ID NO: 159440 - DNA, 25 bp, Canis familiaris
ggaccgacgatgtagacaggtcgac

SEQ ID NO: 159441 - DNA, 25 bp, Canis familiaris
ggaccgcaggtgaggagagcttgat

SEQ ID NO: 159442 - DNA, 25 bp, Canis familiaris
ggaccgacgtcaatggatgatgcat

SEQ ID NO: 159443 - DNA, 25 bp, Canis familiaris
ggaccggcagtttgcatatgagcca

SEQ ID NO: 159444 - DNA, 25 bp, Canis familiaris
ggacgcaggcgtagacactgcagcc

SEQ ID NO: 159445 - DNA, 25 bp, Canis familiaris
ggacgagtgctggcagagcgatgct

SEQ ID NO: 159446 - DNA, 25 bp, Canis familiaris
ggacagaatgtgaagcaatgatcat

SEQ ID NO: 159447 - DNA, 25 bp, Canis familiaris
ggacagaatgggcaaatcagtgtgc

SEQ ID NO: 159448 - DNA, 25 bp, Canis familiaris
ggacgcaaggagctgtgccagagtc

SEQ ID NO: 159449 - DNA, 25 bp, Canis familiaris
ggacggggagagcatcagccatgtc

SEQ ID NO: 159450 - DNA, 25 bp, Canis familiaris
ggactgatgggcttagccagcacag

SEQ ID NO: 159451 - DNA, 25 bp, Canis familiaris
ggacatgctgtgcgctggcaacagc

SEQ ID NO: 159452 - DNA, 25 bp, Canis familiaris
ggacatctatgtgcaggagaaggat

SEQ ID NO: 159453 - DNA, 25 bp, Canis familiaris
ggactgctcttgtcagagaactgtg

SEQ ID NO: 159454 - DNA, 25 bp, Canis familiaris
ggactgcatcctcagtgatgtctga

SEQ ID NO: 159455 - DNA, 25 bp, Canis familiaris
ggactgatccatgctattgccaaca

SEQ ID NO: 159456 - DNA, 25 bp, Canis familiaris
ggacgtggctgcttttaataagatc

SEQ ID NO: 159457 - DNA, 25 bp, Canis familiaris
ggacagtcatgtctgcttaaaagtg

SEQ ID NO: 159458 - DNA, 25 bp, Canis familiaris
ggacatgtcttcctccaaaagcagc

SEQ ID NO: 159459 - DNA, 25 bp, Canis familiaris
ggacttctgtcctaacaacacaggc

SEQ ID NO: 159460 - DNA, 25 bp, Canis familiaris
ggacttccaccttgagaaatcacca

SEQ ID NO: 159461 - DNA, 25 bp, Canis familiaris
ggacttgcaccgagtaagcatccga

SEQ ID NO: 159462 - DNA, 25 bp, Canis familiaris
ggactccctgagtgcagcaagcacc

SEQ ID NO: 159463 - DNA, 25 bp, Canis familiaris
ggaccccgatgatgcgatgcagggc

SEQ ID NO: 159464 - DNA, 25 bp, Canis familiaris
ggaccccgatgatgaagacgcgacc

SEQ ID NO: 159465 - DNA, 25 bp, Canis familiaris
ggacgaccacaatatcgacgcggac

SEQ ID NO: 159466 - DNA, 25 bp, Canis familiaris
ggacgaccagaaccttcagtcaagg

SEQ ID NO: 159467 - DNA, 25 bp, Canis familiaris
ggccgaaaagcggctcatcccagat

SEQ ID NO: 159468 - DNA, 25 bp, Canis familiaris
ggccgaaaagcggctcatcccagat

SEQ ID NO: 159469 - DNA, 25 bp, Canis familiaris
ggacgcacagatacggagacccaga

SEQ ID NO: 159470 - DNA, 25 bp, Canis familiaris
ggactggaaccggaagcgcgagatc

SEQ ID NO: 159471 - DNA, 25 bp, Canis familiaris
ggacggagcaggcccagaagggagc

SEQ ID NO: 159472 - DNA, 25 bp, Canis familiaris
ggacgaggcctccaagaaggagatc

SEQ ID NO: 159473 - DNA, 25 bp, Canis familiaris
ggaaaggccttccaaagccagatgg

SEQ ID NO: 159474 - DNA, 25 bp, Canis familiaris
ggaattggccctccaaaatcctgat

SEQ ID NO: 159475 - DNA, 25 bp, Canis familiaris
ggacatgatgactctggaacctctc

SEQ ID NO: 159476 - DNA, 25 bp, Canis familiaris
aaaggatcatatacacgcgcacgtt

SEQ ID NO: 159477 - DNA, 25 bp, Canis familiaris
ggacgatcaagccaagaacctcaag

SEQ ID NO: 159478 - DNA, 25 bp, Canis familiaris
ggacgatcacaacagcctattacag

SEQ ID NO: 159479 - DNA, 25 bp, Canis familiaris
ggacgacacaaaactcttagagcga

SEQ ID NO: 159480 - DNA, 25 bp, Canis familiaris
ggacgagaaggcagtctggagctgg

SEQ ID NO: 159481 - DNA, 25 bp, Canis familiaris
ggacgatgagcaccaatgcctggac

SEQ ID NO: 159482 - DNA, 25 bp, Canis familiaris
ggactatggttcgtgccgaatcgtg

SEQ ID NO: 159483 - DNA, 25 bp, Canis familiaris
ggactcgccatcggtaggaacagtg

SEQ ID NO: 159484 - DNA, 25 bp, Canis familiaris
ggactgtacaccatcaggaatcgtg

SEQ ID NO: 159485 - DNA, 25 bp, Canis familiaris
ggacatcaagcagaccgggatcgtg

SEQ ID NO: 159486 - DNA, 25 bp, Canis familiaris
ggacatctgtagaacacgggacgtt

SEQ ID NO: 159487 - DNA, 25 bp, Canis familiaris
ggacatggtggacatctgagctgcc

SEQ ID NO: 159488 - DNA, 25 bp, Canis familiaris
ggactcggagatcgagctggtgtcc

SEQ ID NO: 159489 - DNA, 25 bp, Canis familiaris
ggactcgaggattgtctggtcaccc

SEQ ID NO: 159490 - DNA, 25 bp, Canis familiaris
ggactcagaggttctttgactcctt

SEQ ID NO: 159491 - DNA, 25 bp, Canis familiaris
ggactcaagtattctgagtggctct

SEQ ID NO: 159492 - DNA, 25 bp, Canis familiaris
ggactcacggatactactgtgcctc

SEQ ID NO: 159493 - DNA, 25 bp, Canis familiaris
ggactcacggatactactgtgcctc

SEQ ID NO: 159494 - DNA, 25 bp, Canis familiaris
ggactcacggatactactgtgcctc

SEQ ID NO: 159495 - DNA, 25 bp, Canis familiaris
ggactcgtggacatggtgatcccga

SEQ ID NO: 159496 - DNA, 25 bp, Canis familiaris
ggactctgtgagtttcctagatgcc

SEQ ID NO: 159497 - DNA, 25 bp, Canis familiaris
ggactatgttaatcctcgtccggag

SEQ ID NO: 159498 - DNA, 25 bp, Canis familiaris
ggacttttctattttcttcaaggag

SEQ ID NO: 159499 - DNA, 25 bp, Canis familiaris
ggactcttttagtttcctaatctcg

SEQ ID NO: 159500 - DNA, 25 bp, Canis familiaris
ggactctgttacattatcttagtgt

SEQ ID NO: 159501 - DNA, 25 bp, Canis familiaris
ggacgctgttgaattttctgtacat

SEQ ID NO: 159502 - DNA, 25 bp, Canis familiaris
ggacgcctcacagtagttttatcat

SEQ ID NO: 159503 - DNA, 25 bp, Canis familiaris
ggacgactccatggtgtccattgta

SEQ ID NO: 159504 - DNA, 25 bp, Canis familiaris
ggactactacatgcctgagcttgga

SEQ ID NO: 159505 - DNA, 25 bp, Canis familiaris
ggacccatacgtctgactgaggacg

SEQ ID NO: 159506 - DNA, 25 bp, Canis familiaris
ggactcctatgtgggtgacgaggcc

SEQ ID NO: 159507 - DNA, 25 bp, Canis familiaris
ggaccctatgattggttgaatggcc

SEQ ID NO: 159508 - DNA, 25 bp, Canis familiaris
ggactctgcttattggtgctttgct

SEQ ID NO: 159509 - DNA, 25 bp, Canis familiaris
ggactcttatcaggatgagcttctc

SEQ ID NO: 159510 - DNA, 25 bp, Canis familiaris
ggactcgatcacggcatagtgctgc

SEQ ID NO: 159511 - DNA, 25 bp, Canis familiaris
ggactgtgtcagggtattgtgcttg

SEQ ID NO: 159512 - DNA, 25 bp, Canis familiaris
ggacgagatacatgctcattttaga

SEQ ID NO: 159513 - DNA, 25 bp, Canis familiaris
ggactgagaccaccatatttacgca

SEQ ID NO: 159514 - DNA, 25 bp, Canis familiaris
ggactgagagcaagcctcattctcc

SEQ ID NO: 159515 - DNA, 25 bp, Canis familiaris
ggactgaagtagacccttcgcatga

SEQ ID NO: 159516 - DNA, 25 bp, Canis familiaris
ggactgacagtagctacttgtggca

SEQ ID NO: 159517 - DNA, 25 bp, Canis familiaris
ggactgagagtccctgaggattgtg

SEQ ID NO: 159518 - DNA, 25 bp, Canis familiaris
ggactgatggtctgtgggattctaa

SEQ ID NO: 159519 - DNA, 25 bp, Canis familiaris
ggactgtggtgcttctactatttaa

SEQ ID NO: 159520 - DNA, 25 bp, Canis familiaris
ggacgggaatcttgacagtttatag

SEQ ID NO: 159521 - DNA, 25 bp, Canis familiaris
ggcacgggcaagtggaaatctacac

SEQ ID NO: 159522 - DNA, 25 bp, Canis familiaris
ggcacgggtgaggacgaaacctcct

SEQ ID NO: 159523 - DNA, 25 bp, Canis familiaris
ggacaggttatcaacgaaacttctc

SEQ ID NO: 159524 - DNA, 25 bp, Canis familiaris
ggacaggttatcaacgaaacttctc

SEQ ID NO: 159525 - DNA, 25 bp, Canis familiaris
tggccaggttttcgccaaacacgtt

SEQ ID NO: 159526 - DNA, 25 bp, Canis familiaris
ggaatggttttgcaagaataagtta

SEQ ID NO: 159527 - DNA, 25 bp, Canis familiaris
ggaaggctcttccaaggaatccgca

SEQ ID NO: 159528 - DNA, 25 bp, Canis familiaris
ggactacctaaatgcagaatctcga

SEQ ID NO: 159529 - DNA, 25 bp, Canis familiaris
ggactcacaggaaaggcgagaacca

SEQ ID NO: 159530 - DNA, 25 bp, Canis familiaris
ggactccaagtacagcagcagcaac

SEQ ID NO: 159531 - DNA, 25 bp, Canis familiaris
ggacccaagcaacatgagagccaat

SEQ ID NO: 159532 - DNA, 25 bp, Canis familiaris
ggactccactcatatccagacataa

SEQ ID NO: 159533 - DNA, 25 bp, Canis familiaris
ggactcgaccagcatctatggagat

SEQ ID NO: 159534 - DNA, 25 bp, Canis familiaris
ggacatctgaccaggttggatcaag

SEQ ID NO: 159535 - DNA, 25 bp, Canis familiaris
ggacatgttcctctggggatcatat

SEQ ID NO: 159536 - DNA, 25 bp, Canis familiaris
ggacgatgccctggatggggacgat

SEQ ID NO: 159537 - DNA, 25 bp, Canis familiaris
ggacggccccaatgaggatggagag

SEQ ID NO: 159538 - DNA, 25 bp, Canis familiaris
ggacactgccccacaagggggagtc

SEQ ID NO: 159539 - DNA, 25 bp, Canis familiaris
ggaccctcgcacagcagagggcagg

SEQ ID NO: 159540 - DNA, 25 bp, Canis familiaris
ggcatccctccgagaaggcgatgta

SEQ ID NO: 159541 - DNA, 25 bp, Canis familiaris
ggacacgtcggaggtcggtgactcc

SEQ ID NO: 159542 - DNA, 25 bp, Canis familiaris
ggacaagatccgtgtggtgctgaac

SEQ ID NO: 159543 - DNA, 25 bp, Canis familiaris
ggaagcatattttagctggcgctaa

SEQ ID NO: 159544 - DNA, 25 bp, Canis familiaris
ggacgaactatttgtagctgatatc

SEQ ID NO: 159545 - DNA, 25 bp, Canis familiaris
ggacgagatctttctgaagcttgtc

SEQ ID NO: 159546 - DNA, 25 bp, Canis familiaris
ggacgagaagtattggagccgacgg

SEQ ID NO: 159547 - DNA, 25 bp, Canis familiaris
ggactgaagactacatggaccccat

SEQ ID NO: 159548 - DNA, 25 bp, Canis familiaris
ggactgaaagtactgtgcacctcgt

SEQ ID NO: 159549 - DNA, 25 bp, Canis familiaris
ggacagaacgtccagtcaactcagc

SEQ ID NO: 159550 - DNA, 25 bp, Canis familiaris
ggacagagttgttcagaaaagcagc

SEQ ID NO: 159551 - DNA, 25 bp, Canis familiaris
ggacggtaagcagatgcaaacagcc

SEQ ID NO: 159552 - DNA, 25 bp, Canis familiaris
ggacgatgtagaccaacatggcccc

SEQ ID NO: 159553 - DNA, 25 bp, Canis familiaris
ggactgtcaagacgtactgagcctc

SEQ ID NO: 159554 - DNA, 25 bp, Canis familiaris
ggacttccaggaaagctgatgtctg

SEQ ID NO: 159555 - DNA, 25 bp, Canis familiaris
ggactctagcggtacactgaattgt

SEQ ID NO: 159556 - DNA, 25 bp, Canis familiaris
ggacccagggcagcagtagtttacc

SEQ ID NO: 159557 - DNA, 25 bp, Canis familiaris
ggacgccgggcagagtgaaatcgca

SEQ ID NO: 159558 - DNA, 25 bp, Canis familiaris
ggacgcctggacagaggacagtggc

SEQ ID NO: 159559 - DNA, 25 bp, Canis familiaris
ggacgcgcgagagcgaggagcagcg

SEQ ID NO: 159560 - DNA, 25 bp, Canis familiaris
ggacgcgtggggcagagatgacaaa

SEQ ID NO: 159561 - DNA, 25 bp, Canis familiaris
ggacacggtgtgcagacacaactac

SEQ ID NO: 159562 - DNA, 25 bp, Canis familiaris
ggacgggttgtactctaagccatcc

SEQ ID NO: 159563 - DNA, 25 bp, Canis familiaris
ggacggtgtcatcgactctagttta

SEQ ID NO: 159564 - DNA, 25 bp, Canis familiaris
ggacttgtccatggacccagatctt

SEQ ID NO: 159565 - DNA, 25 bp, Canis familiaris
ggacggctcacaagatgcccaatct

SEQ ID NO: 159566 - DNA, 25 bp, Canis familiaris
ggactagtgacaagctctgctgacc

SEQ ID NO: 159567 - DNA, 25 bp, Canis familiaris
ggacatagtcacgctgggaccagag

SEQ ID NO: 159568 - DNA, 25 bp, Canis familiaris
ggacaggtacttagggacagcaaca

SEQ ID NO: 159569 - DNA, 25 bp, Canis familiaris
ggacattgatatatgtgggccatcg

SEQ ID NO: 159570 - DNA, 25 bp, Canis familiaris
ggacattttgattgagggccttccc

SEQ ID NO: 159571 - DNA, 25 bp, Canis familiaris
ggacttcaccaaggaggtcttgccc

SEQ ID NO: 159572 - DNA, 25 bp, Canis familiaris
ggacttcaccaaggaggtcttgccc

SEQ ID NO: 159573 - DNA, 25 bp, Canis familiaris
ggacttcaccaaggaggtcttgccc

SEQ ID NO: 159574 - DNA, 25 bp, Canis familiaris
ggacatctccctggggagttctccc

SEQ ID NO: 159575 - DNA, 25 bp, Canis familiaris
ggactctgctcactggggagtctcc

SEQ ID NO: 159576 - DNA, 25 bp, Canis familiaris
ggacgtgtccttgagagatctgcag

SEQ ID NO: 159577 - DNA, 25 bp, Canis familiaris
ggacggtcctgtgcaagctgataaa

SEQ ID NO: 159578 - DNA, 25 bp, Canis familiaris
ggactggtctcttgctcaagatgta

SEQ ID NO: 159579 - DNA, 25 bp, Canis familiaris
ggactgagcatttctgccaagcatg

SEQ ID NO: 159580 - DNA, 25 bp, Canis familiaris
ggactccttcttccatagcatgagt

SEQ ID NO: 159581 - DNA, 25 bp, Canis familiaris
ggacatgttcctgcttagacagtca

SEQ ID NO: 159582 - DNA, 25 bp, Canis familiaris
ggaataacctgtctgaaatgtacca

SEQ ID NO: 159583 - DNA, 25 bp, Canis familiaris
ggacaagtccgaggtgatagttaca

SEQ ID NO: 159584 - DNA, 25 bp, Canis familiaris
ggacaggctccgtgtctggagtgac

SEQ ID NO: 159585 - DNA, 25 bp, Canis familiaris
ggacagggtcaaggagctagggcac

SEQ ID NO: 159586 - DNA, 25 bp, Canis familiaris
ggacacggtaaatgcctgagccagg

SEQ ID NO: 159587 - DNA, 25 bp, Canis familiaris
ggacaggtgtaaaatgacatatggg

SEQ ID NO: 159588 - DNA, 25 bp, Canis familiaris
ggacgtgctgccttaacacaagaga

SEQ ID NO: 159589 - DNA, 25 bp, Canis familiaris
ggacttggccaatgaaatgaatgat

SEQ ID NO: 159590 - DNA, 25 bp, Canis familiaris
ggactgggccaatacgagagaagac

SEQ ID NO: 159591 - DNA, 25 bp, Canis familiaris
ggactgtggccctataggaggaaag

SEQ ID NO: 159592 - DNA, 25 bp, Canis familiaris
ggacttggcttgctagaaggctcaa

SEQ ID NO: 159593 - DNA, 25 bp, Canis familiaris
ggactggagtgtgtaagaggtggca

SEQ ID NO: 159594 - DNA, 25 bp, Canis familiaris
ggactcgagcgtgtgtggaggtgat

SEQ ID NO: 159595 - DNA, 25 bp, Canis familiaris
ggactcgatcctgggtcgccaggat

SEQ ID NO: 159596 - DNA, 25 bp, Canis familiaris
ggactcatatttgggcttggggggg

SEQ ID NO: 159597 - DNA, 25 bp, Canis familiaris
ggactcttaactcggggagtagttg

SEQ ID NO: 159598 - DNA, 25 bp, Canis familiaris
ggacttcggacctgacatttagtat

SEQ ID NO: 159599 - DNA, 25 bp, Canis familiaris
ggactaacaacctgacacttttgat

SEQ ID NO: 159600 - DNA, 25 bp, Canis familiaris
ggactcaaacggtccacacttgttt

SEQ ID NO: 159601 - DNA, 25 bp, Canis familiaris
ggacacggaccgttcaactttcgtg

SEQ ID NO: 159602 - DNA, 25 bp, Canis familiaris
ggaacagtgaccacttacctgggtg

SEQ ID NO: 159603 - DNA, 25 bp, Canis familiaris
ggacttggacatacctttttgaggg

SEQ ID NO: 159604 - DNA, 25 bp, Canis familiaris
ggaatggaacccatcttgggaggtc

SEQ ID NO: 159605 - DNA, 25 bp, Canis familiaris
ggacaggaacccagaaggagcaagt

SEQ ID NO: 159606 - DNA, 25 bp, Canis familiaris
ggacgatgaagggaaaaggcacaga

SEQ ID NO: 159607 - DNA, 25 bp, Canis familiaris
ggaaagaaggcatgaacagacattt

SEQ ID NO: 159608 - DNA, 25 bp, Canis familiaris
ggaaatggggggtccaacacaatat

SEQ ID NO: 159609 - DNA, 25 bp, Canis familiaris
ggaaaatggggccacggaactaatg

SEQ ID NO: 159610 - DNA, 25 bp, Canis familiaris
ggacaaaggagagcaacggacaaag

SEQ ID NO: 159611 - DNA, 25 bp, Canis familiaris
ggacagacggactcaaaggattagg

SEQ ID NO: 159612 - DNA, 25 bp, Canis familiaris
ggacatggaggacaacggcaattcg

SEQ ID NO: 159613 - DNA, 25 bp, Canis familiaris
ggactagtggaccacagcccaaacg

SEQ ID NO: 159614 - DNA, 25 bp, Canis familiaris
ggactccaggacctgagcctaaggc

SEQ ID NO: 159615 - DNA, 25 bp, Canis familiaris
ggacatccgtaaggacctgtatgcc

SEQ ID NO: 159616 - DNA, 25 bp, Canis familiaris
ggacactggtcaaccaccagttcca

SEQ ID NO: 159617 - DNA, 25 bp, Canis familiaris
ggactatgagacagccaccatctcc

SEQ ID NO: 159618 - DNA, 25 bp, Canis familiaris
ggacaagtggcgttcagccacccga

SEQ ID NO: 159619 - DNA, 25 bp, Canis familiaris
ggacaacggcaattcgggtcaggac

SEQ ID NO: 159620 - DNA, 25 bp, Canis familiaris
ggacacaaccaatgcggggtggccg

SEQ ID NO: 159621 - DNA, 25 bp, Canis familiaris
ggacatcaaggcctagggggtgacc

SEQ ID NO: 159622 - DNA, 25 bp, Canis familiaris
ggacgacaggcccgagggctgggcc

SEQ ID NO: 159623 - DNA, 25 bp, Canis familiaris
ggacaacatgtctcaagggtccccc

SEQ ID NO: 159624 - DNA, 25 bp, Canis familiaris
ggaaacggtacacagactccaccgc

SEQ ID NO: 159625 - DNA, 25 bp, Canis familiaris
ggaaagtttccagaactgccagcgc

SEQ ID NO: 159626 - DNA, 25 bp, Canis familiaris
ggcaacttttcccaaagctggacta

SEQ ID NO: 159627 - DNA, 25 bp, Canis familiaris
ggacaattattctccaagcatggac

SEQ ID NO: 159628 - DNA, 25 bp, Canis familiaris
ggactgagttttaaccagcattctc

SEQ ID NO: 159629 - DNA, 25 bp, Canis familiaris
ggacaagcttcatttataccatatc

SEQ ID NO: 159630 - DNA, 25 bp, Canis familiaris
ggacattcagtcttctatactttta

SEQ ID NO: 159631 - DNA, 25 bp, Canis familiaris
ggacttcttagtttaatattctcac

SEQ ID NO: 159632 - DNA, 25 bp, Canis familiaris
ggactcttaaactttgtattctgct

SEQ ID NO: 159633 - DNA, 25 bp, Canis familiaris
ggactttcacaatgttaacctgttt

SEQ ID NO: 159634 - DNA, 25 bp, Canis familiaris
ggacagttaccattttaaagctttg

SEQ ID NO: 159635 - DNA, 25 bp, Canis familiaris
ggacatggctatttatgactaaggt

SEQ ID NO: 159636 - DNA, 25 bp, Canis familiaris
ggactctctatgtttgatatgttgt

SEQ ID NO: 159637 - DNA, 25 bp, Canis familiaris
ggactcctaggttttgtggttcaat

SEQ ID NO: 159638 - DNA, 25 bp, Canis familiaris
ggacaccttggtgttgtccttcaac

SEQ ID NO: 159639 - DNA, 25 bp, Canis familiaris
ggactcctggttttattctctaaca

SEQ ID NO: 159640 - DNA, 25 bp, Canis familiaris
ggacttgttgttaaatcgcctaaag

SEQ ID NO: 159641 - DNA, 25 bp, Canis familiaris
ggaaatgtttttgcccttggtgaga

SEQ ID NO: 159642 - DNA, 25 bp, Canis familiaris
ggaacactttttgaacttattctgg

SEQ ID NO: 159643 - DNA, 25 bp, Canis familiaris
ggaacacgttatcctctagtttttg

SEQ ID NO: 159644 - DNA, 25 bp, Canis familiaris
ggacaaagtcaacttccacatgttt

SEQ ID NO: 159645 - DNA, 25 bp, Canis familiaris
ggactcaaattgtcttctcgagttc

SEQ ID NO: 159646 - DNA, 25 bp, Canis familiaris
ggactcacttggtatttctacatat

SEQ ID NO: 159647 - DNA, 25 bp, Canis familiaris
ggactcttcttggaatgtctgaatt

SEQ ID NO: 159648 - DNA, 25 bp, Canis familiaris
ggacatttcattcatagccttgctt

SEQ ID NO: 159649 - DNA, 25 bp, Canis familiaris
ggacatttgactcttgattgctgct

SEQ ID NO: 159650 - DNA, 25 bp, Canis familiaris
ggactttgattgcacattgttgttt

SEQ ID NO: 159651 - DNA, 25 bp, Canis familiaris
ggactttggagccggtgttgtttgt

SEQ ID NO: 159652 - DNA, 25 bp, Canis familiaris
ggactcttctagtgttactgctttg

SEQ ID NO: 159653 - DNA, 25 bp, Canis familiaris
ggacttgtcaagtgaattctttgca

SEQ ID NO: 159654 - DNA, 25 bp, Canis familiaris
ggactgagctaatctgttcctcttt

SEQ ID NO: 159655 - DNA, 25 bp, Canis familiaris
ggactatcataaactcttgctgcct

SEQ ID NO: 159656 - DNA, 25 bp, Canis familiaris
ggactagctgtgacttttctgctgc

SEQ ID NO: 159657 - DNA, 25 bp, Canis familiaris
ggactaatggcttttatctatgctt

SEQ ID NO: 159658 - DNA, 25 bp, Canis familiaris
ggactgatttgctacaccattattt

SEQ ID NO: 159659 - DNA, 25 bp, Canis familiaris
ggacagtagacatagccattagtga

SEQ ID NO: 159660 - DNA, 25 bp, Canis familiaris
ggacgatgaaattgcggcgctagtt

SEQ ID NO: 159661 - DNA, 25 bp, Canis familiaris
ggacgatgaagatctctgccatggg

SEQ ID NO: 159662 - DNA, 25 bp, Canis familiaris
ggacatgagaaggtcgccaatgggc

SEQ ID NO: 159663 - DNA, 25 bp, Canis familiaris
ggaatgaacagctcatgcaaaggcc

SEQ ID NO: 159664 - DNA, 25 bp, Canis familiaris
ggacattgacacggcagccaagttc

SEQ ID NO: 159665 - DNA, 25 bp, Canis familiaris
ggacatgtacctggacaacagctcc

SEQ ID NO: 159666 - DNA, 25 bp, Canis familiaris
ggacaggttctggagcagtccacac

SEQ ID NO: 159667 - DNA, 25 bp, Canis familiaris
ggacaggatttcatgttgagcaatt

SEQ ID NO: 159668 - DNA, 25 bp, Canis familiaris
ggaagaatttgaatgccgaagttac

SEQ ID NO: 159669 - DNA, 25 bp, Canis familiaris
ggaaaattttggggccagttcagtg

SEQ ID NO: 159670 - DNA, 25 bp, Canis familiaris
ggaatagcatttggactggcggtta

SEQ ID NO: 159671 - DNA, 25 bp, Canis familiaris
ggaaagttcagggtgctcaggatta

SEQ ID NO: 159672 - DNA, 25 bp, Canis familiaris
ggacttgtaacggcatctcacgatt

SEQ ID NO: 159673 - DNA, 25 bp, Canis familiaris
ggacttgtcagagccctgacgagga

SEQ ID NO: 159674 - DNA, 25 bp, Canis familiaris
ggactattgtttgcctgacgggatt

SEQ ID NO: 159675 - DNA, 25 bp, Canis familiaris
ggaagagtgtttgccggggtggtgt

SEQ ID NO: 159676 - DNA, 25 bp, Canis familiaris
ggcaagtgggggcaggaaggggaga

SEQ ID NO: 159677 - DNA, 25 bp, Canis familiaris
ggcaaccgggagtaggaaggagctt

SEQ ID NO: 159678 - DNA, 25 bp, Canis familiaris
ggaacggtagatttagaggtgactg

SEQ ID NO: 159679 - DNA, 25 bp, Canis familiaris
ggaacggggatcacagggttctcgc

SEQ ID NO: 159680 - DNA, 25 bp, Canis familiaris
ggaagggaggccggaatcggtctcg

SEQ ID NO: 159681 - DNA, 25 bp, Canis familiaris
ggaacggtgtccacaatcggttggt

SEQ ID NO: 159682 - DNA, 25 bp, Canis familiaris
ggaaagggggagtaatcaggtgtag

SEQ ID NO: 159683 - DNA, 25 bp, Canis familiaris
ggaaagggaggaaagtgatgaggaa

SEQ ID NO: 159684 - DNA, 25 bp, Canis familiaris
tgtggaaaagggaggtatggaaaag

SEQ ID NO: 159685 - DNA, 25 bp, Canis familiaris
tctggaaaagggacggcaccgagga

SEQ ID NO: 159686 - DNA, 25 bp, Canis familiaris
ggacacggtataagccattcagggc

SEQ ID NO: 159687 - DNA, 25 bp, Canis familiaris
ggacgtggtagtttattgctgaggc

SEQ ID NO: 159688 - DNA, 25 bp, Canis familiaris
ggacgtgagctacgggagagcgcgc

SEQ ID NO: 159689 - DNA, 25 bp, Canis familiaris
ggactgtcagctgagagtggcaccc

SEQ ID NO: 159690 - DNA, 25 bp, Canis familiaris
ggactgcgtgctgacatgtgacaca

SEQ ID NO: 159691 - DNA, 25 bp, Canis familiaris
ggactttgccatgcagctgagcagc

SEQ ID NO: 159692 - DNA, 25 bp, Canis familiaris
ggactcttgccaagcagggagcaag

SEQ ID NO: 159693 - DNA, 25 bp, Canis familiaris
ggacttgtgctttcagggagcctgt

SEQ ID NO: 159694 - DNA, 25 bp, Canis familiaris
ggactcagtctccagtgggagcagc

SEQ ID NO: 159695 - DNA, 25 bp, Canis familiaris
ggacacagtacatgatgctggagca

SEQ ID NO: 159696 - DNA, 25 bp, Canis familiaris
ggactcagtcctggatgtggtgcgg

SEQ ID NO: 159697 - DNA, 25 bp, Canis familiaris
ggactctggcctgaagatgctgaag

SEQ ID NO: 159698 - DNA, 25 bp, Canis familiaris
ggactcacaccctaagagcaacagc

SEQ ID NO: 159699 - DNA, 25 bp, Canis familiaris
ggactgatctgagcaaagtgtcaca

SEQ ID NO: 159700 - DNA, 25 bp, Canis familiaris
ggacgtgcggcagaaggtccagctc

SEQ ID NO: 159701 - DNA, 25 bp, Canis familiaris
ggacgtgaagcagaacgccaaggcc

SEQ ID NO: 159702 - DNA, 25 bp, Canis familiaris
ggacagtggagatgaggcctaagag

SEQ ID NO: 159703 - DNA, 25 bp, Canis familiaris
ggacttggagaccgatcctggcaag

SEQ ID NO: 159704 - DNA, 25 bp, Canis familiaris
ggactcttagacatgaccaagcaga

SEQ ID NO: 159705 - DNA, 25 bp, Canis familiaris
ggactcttagccattcacaggataa

SEQ ID NO: 159706 - DNA, 25 bp, Canis familiaris
ggactgccaggccattttctggaat

SEQ ID NO: 159707 - DNA, 25 bp, Canis familiaris
ggacttcagggttttctgtcacttc

SEQ ID NO: 159708 - DNA, 25 bp, Canis familiaris
ggacttcaaaggcctttatcactcc

SEQ ID NO: 159709 - DNA, 25 bp, Canis familiaris
ggacttactcagacgctttacaggt

SEQ ID NO: 159710 - DNA, 25 bp, Canis familiaris
ggacttaccgatggttattgccttc

SEQ ID NO: 159711 - DNA, 25 bp, Canis familiaris
ggactttctagcagtttctgccacc

SEQ ID NO: 159712 - DNA, 25 bp, Canis familiaris
ggcacctttaagggtttggcaagca

SEQ ID NO: 159713 - DNA, 25 bp, Canis familiaris
ggacagcttttattgcttttggcaa

SEQ ID NO: 159714 - DNA, 25 bp, Canis familiaris
ggacagatttgtttatcgatctcga

SEQ ID NO: 159715 - DNA, 25 bp, Canis familiaris
ggacagttagcatttacccacatgt

SEQ ID NO: 159716 - DNA, 25 bp, Canis familiaris
ggacagttgttgaaacatccacgtg

SEQ ID NO: 159717 - DNA, 25 bp, Canis familiaris
ggacatttgtcgtaaatctcgtgcc

SEQ ID NO: 159718 - DNA, 25 bp, Canis familiaris
ggacattcccagtaaagccgtggca

SEQ ID NO: 159719 - DNA, 25 bp, Canis familiaris
ggactcccctggacacagaggtgcc

SEQ ID NO: 159720 - DNA, 25 bp, Canis familiaris
ggaaacccatgtgcacgggtgccaa

SEQ ID NO: 159721 - DNA, 25 bp, Canis familiaris
ggaagactccggaatgggacccaag

SEQ ID NO: 159722 - DNA, 25 bp, Canis familiaris
ggacaactccggtgagtgtcggaac

SEQ ID NO: 159723 - DNA, 25 bp, Canis familiaris
ggacaaccccgaaacatggcaagat

SEQ ID NO: 159724 - DNA, 25 bp, Canis familiaris
ggaaccacttaaacaatggccaaca

SEQ ID NO: 159725 - DNA, 25 bp, Canis familiaris
ggacagcctctacaacaaaaaagcc

SEQ ID NO: 159726 - DNA, 25 bp, Canis familiaris
ggacttctagcacaaccatctaaca

SEQ ID NO: 159727 - DNA, 25 bp, Canis familiaris
ggacttccagatcatttaccgactg

SEQ ID NO: 159728 - DNA, 25 bp, Canis familiaris
ggacatttaatccatttctctaact

SEQ ID NO: 159729 - DNA, 25 bp, Canis familiaris
ggacatggtaggccacttttatcct

SEQ ID NO: 159730 - DNA, 25 bp, Canis familiaris
ggacatgagggctgtcggtttccta

SEQ ID NO: 159731 - DNA, 25 bp, Canis familiaris
ggaaggggcttcagttgttcctaca

SEQ ID NO: 159732 - DNA, 25 bp, Canis familiaris
ggaagtacctatgtgctcttatcct

SEQ ID NO: 159733 - DNA, 25 bp, Canis familiaris
ggaaatacacgcgtttcttgtctca

SEQ ID NO: 159734 - DNA, 25 bp, Canis familiaris
ggaaatagaccgttatgccagtgaa

SEQ ID NO: 159735 - DNA, 25 bp, Canis familiaris
ggaaaggcaacgttctgcgttagga

SEQ ID NO: 159736 - DNA, 25 bp, Canis familiaris
ggaaatggggaatctggtctgagga

SEQ ID NO: 159737 - DNA, 25 bp, Canis familiaris
ggaaaggggatacgtggtgcgaaat

SEQ ID NO: 159738 - DNA, 25 bp, Canis familiaris
ggaaagcaagtactcatgtggtcag

SEQ ID NO: 159739 - DNA, 25 bp, Canis familiaris
ggactatgcagggagctgtgggaag

SEQ ID NO: 159740 - DNA, 25 bp, Canis familiaris
ggacttgcgggactttgtgaggagc

SEQ ID NO: 159741 - DNA, 25 bp, Canis familiaris
ggacttcctggccagattggcaggg

SEQ ID NO: 159742 - DNA, 25 bp, Canis familiaris
ggactagctctgtggagggcaggac

SEQ ID NO: 159743 - DNA, 25 bp, Canis familiaris
ggacttgctgactgggctgagtgaa

SEQ ID NO: 159744 - DNA, 25 bp, Canis familiaris
ggacttatactaccctgggacgtag

SEQ ID NO: 159745 - DNA, 25 bp, Canis familiaris
ggacatttacgggtcggtacctgag

SEQ ID NO: 159746 - DNA, 25 bp, Canis familiaris
ggacatttaactgattgagccacct

SEQ ID NO: 159747 - DNA, 25 bp, Canis familiaris
ggacatttaacatatcccagcagcc

SEQ ID NO: 159748 - DNA, 25 bp, Canis familiaris
ggacatcgaaactgcccagcagacc

SEQ ID NO: 159749 - DNA, 25 bp, Canis familiaris
ggacattaggaaccagcccagaacc

SEQ ID NO: 159750 - DNA, 25 bp, Canis familiaris
ggactagaggattgactcccagaga

SEQ ID NO: 159751 - DNA, 25 bp, Canis familiaris
ggactatggagttgcacattcacag

SEQ ID NO: 159752 - DNA, 25 bp, Canis familiaris
ggactcagcgtggagcacgtgcaca

SEQ ID NO: 159753 - DNA, 25 bp, Canis familiaris
ggactcatggtgggcggtgttgtca

SEQ ID NO: 159754 - DNA, 25 bp, Canis familiaris
ggacttggattttggcttttgactg

SEQ ID NO: 159755 - DNA, 25 bp, Canis familiaris
ggactagagttttctcagcttctga

SEQ ID NO: 159756 - DNA, 25 bp, Canis familiaris
ggactcagcagatatattcacccca

SEQ ID NO: 159757 - DNA, 25 bp, Canis familiaris
ggactcacagatttcaagcctggct

SEQ ID NO: 159758 - DNA, 25 bp, Canis familiaris
ggactgcatcggtggacactggtat

SEQ ID NO: 159759 - DNA, 25 bp, Canis familiaris
ggacttagatgatgctacctgtgtt

SEQ ID NO: 159760 - DNA, 25 bp, Canis familiaris
ggacttatgatttctgatccaatgt

SEQ ID NO: 159761 - DNA, 25 bp, Canis familiaris
ggacttcattttcaacctgtactct

SEQ ID NO: 159762 - DNA, 25 bp, Canis familiaris
ggacttcttcttcaatatctaccat

SEQ ID NO: 159763 - DNA, 25 bp, Canis familiaris
ggacttctgacttccaatgtgtccc

SEQ ID NO: 159764 - DNA, 25 bp, Canis familiaris
ggactgtctggcaatcgactgtgtt

SEQ ID NO: 159765 - DNA, 25 bp, Canis familiaris
ggactctctgcgaatgtgacataac

SEQ ID NO: 159766 - DNA, 25 bp, Canis familiaris
ggacttctgcagaaatggaagatcc

SEQ ID NO: 159767 - DNA, 25 bp, Canis familiaris
ggactattcagggagctgcaaatgc

SEQ ID NO: 159768 - DNA, 25 bp, Canis familiaris
ggacttctcggatgctggattgacg

SEQ ID NO: 159769 - DNA, 25 bp, Canis familiaris
ggacatgactctggaaggcgacgac

SEQ ID NO: 159770 - DNA, 25 bp, Canis familiaris
ggaacactacaggaatcgacgacgg

SEQ ID NO: 159771 - DNA, 25 bp, Canis familiaris
ggaaatacaggttatccacgacgta

SEQ ID NO: 159772 - DNA, 25 bp, Canis familiaris
ggcaaaaaggcaactccaaaggtca

SEQ ID NO: 159773 - DNA, 25 bp, Canis familiaris
ggaaatgtagctgaccagaaaagac

SEQ ID NO: 159774 - DNA, 25 bp, Canis familiaris
ggaaactagcaggccaaaggtacac

SEQ ID NO: 159775 - DNA, 25 bp, Canis familiaris
ggacaattcctggaaggaggtcaac

SEQ ID NO: 159776 - DNA, 25 bp, Canis familiaris
ggaaattcacccgagtggcacttga

SEQ ID NO: 159777 - DNA, 25 bp, Canis familiaris
ggaaatatggcccaggtcatccgtg

SEQ ID NO: 159778 - DNA, 25 bp, Canis familiaris
ggaaattgtgctcacttaccctaaa

SEQ ID NO: 159779 - DNA, 25 bp, Canis familiaris
ggaaacagtgcagaccaggtcctaa

SEQ ID NO: 159780 - DNA, 25 bp, Canis familiaris
ggacaaaatcaccaccaggacactg

SEQ ID NO: 159781 - DNA, 25 bp, Canis familiaris
ggactaaatgaattctcaggacctc

SEQ ID NO: 159782 - DNA, 25 bp, Canis familiaris
ggactaacagtaatctccgactccc

SEQ ID NO: 159783 - DNA, 25 bp, Canis familiaris
ggactaatgagtctttggacgccag

SEQ ID NO: 159784 - DNA, 25 bp, Canis familiaris
ggcactaaactgctaagccacccag

SEQ ID NO: 159785 - DNA, 25 bp, Canis familiaris
ggacttgagactttaaatcagccta

SEQ ID NO: 159786 - DNA, 25 bp, Canis familiaris
ggacttcagcactggaagtgcctta

SEQ ID NO: 159787 - DNA, 25 bp, Canis familiaris
ggactgtacacgcggagattcctga

SEQ ID NO: 159788 - DNA, 25 bp, Canis familiaris
ggactgtaacagtagtagtggccta

SEQ ID NO: 159789 - DNA, 25 bp, Canis familiaris
ggactgaaacagtacatatttgctc

SEQ ID NO: 159790 - DNA, 25 bp, Canis familiaris
ggactaagtgcatacaatactcaca

SEQ ID NO: 159791 - DNA, 25 bp, Canis familiaris
ggacatacagttagccaagacacat

SEQ ID NO: 159792 - DNA, 25 bp, Canis familiaris
ggactacagttaaccagagctctaa

SEQ ID NO: 159793 - DNA, 25 bp, Canis familiaris
ggacaccattccacacagaggtcat

SEQ ID NO: 159794 - DNA, 25 bp, Canis familiaris
ggactccattccaagaaagctctga

SEQ ID NO: 159795 - DNA, 25 bp, Canis familiaris
ggactacttcctggaatgctcctgt

SEQ ID NO: 159796 - DNA, 25 bp, Canis familiaris
ggactattctccagcaatgcatggc

SEQ ID NO: 159797 - DNA, 25 bp, Canis familiaris
ggactactcccaacctgatgagaaa

SEQ ID NO: 159798 - DNA, 25 bp, Canis familiaris
ggacttatcccaatacagatgtgtg

SEQ ID NO: 159799 - DNA, 25 bp, Canis familiaris
ggacattttcccagaatgttggcac

SEQ ID NO: 159800 - DNA, 25 bp, Canis familiaris
ggaaattaagccagttgttgaaaat

SEQ ID NO: 159801 - DNA, 25 bp, Canis familiaris
ggaaagaaagcctgttttgccataa

SEQ ID NO: 159802 - DNA, 25 bp, Canis familiaris
ggacatatattaacttttttctctg

SEQ ID NO: 159803 - DNA, 25 bp, Canis familiaris
ggactatttgactgttattctgcta

SEQ ID NO: 159804 - DNA, 25 bp, Canis familiaris
ggacttttcacggatgcacatttgt

SEQ ID NO: 159805 - DNA, 25 bp, Canis familiaris
ggacatcttcactggacacatttca

SEQ ID NO: 159806 - DNA, 25 bp, Canis familiaris
ggacactctagcaggacactggtgc

SEQ ID NO: 159807 - DNA, 25 bp, Canis familiaris
ggacactctagcaggacactggtgc

SEQ ID NO: 159808 - DNA, 25 bp, Canis familiaris
ggacacccagcctgaattgcagttt

SEQ ID NO: 159809 - DNA, 25 bp, Canis familiaris
ggaagacccgttgagtgtgttttga

SEQ ID NO: 159810 - DNA, 25 bp, Canis familiaris
ggaagacgctctctaaggtttttgt

SEQ ID NO: 159811 - DNA, 25 bp, Canis familiaris
ggaaacgttcttgtctgttcctatg

SEQ ID NO: 159812 - DNA, 25 bp, Canis familiaris
ggaaaagttagatgcttgtatccgt

SEQ ID NO: 159813 - DNA, 25 bp, Canis familiaris
ggcacaacaactggaagtagtactg

SEQ ID NO: 159814 - DNA, 25 bp, Canis familiaris
ggcaccacaaatcaacgggacgttc

SEQ ID NO: 159815 - DNA, 25 bp, Canis familiaris
ggaaaaaagtaaggtggcacaggat

SEQ ID NO: 159816 - DNA, 25 bp, Canis familiaris
ggaaacagcggccaaagtggacgga

SEQ ID NO: 159817 - DNA, 25 bp, Canis familiaris
ggaaatccagacccaagtggagggg

SEQ ID NO: 159818 - DNA, 25 bp, Canis familiaris
ggaaaaccctaccaatgtggaggag

SEQ ID NO: 159819 - DNA, 25 bp, Canis familiaris
ggaattttcctgtggtggaggcgag

SEQ ID NO: 159820 - DNA, 25 bp, Canis familiaris
ggaatacttaccaggtggacggaga

SEQ ID NO: 159821 - DNA, 25 bp, Canis familiaris
ggacaatttgaggcagtggttatag

SEQ ID NO: 159822 - DNA, 25 bp, Canis familiaris
ggacacgtggaccgtgggtatcagc

SEQ ID NO: 159823 - DNA, 25 bp, Canis familiaris
ggacacctgtgatggctggtactcc

SEQ ID NO: 159824 - DNA, 25 bp, Canis familiaris
ggacacaatgtccagcggagtcccc

SEQ ID NO: 159825 - DNA, 25 bp, Canis familiaris
ggacactgatcaacacgaagctccc

SEQ ID NO: 159826 - DNA, 25 bp, Canis familiaris
ggacatcttcccgaagactcagctc

SEQ ID NO: 159827 - DNA, 25 bp, Canis familiaris
ggacatgttgtcagaacccagctcc

SEQ ID NO: 159828 - DNA, 25 bp, Canis familiaris
ggaagtcagttgtgtcccagttccg

SEQ ID NO: 159829 - DNA, 25 bp, Canis familiaris
ggaagccagctgtgtggcatccatg

SEQ ID NO: 159830 - DNA, 25 bp, Canis familiaris
ggacactctgtgtatgggtcccacg

SEQ ID NO: 159831 - DNA, 25 bp, Canis familiaris
ggacattctggatgtggatggatac

SEQ ID NO: 159832 - DNA, 25 bp, Canis familiaris
ggacattctgtaacaggcatttcac

SEQ ID NO: 159833 - DNA, 25 bp, Canis familiaris
ggactttgtcaatcagcctatcctg

SEQ ID NO: 159834 - DNA, 25 bp, Canis familiaris
ggacttgttatattctcactactca

SEQ ID NO: 159835 - DNA, 25 bp, Canis familiaris
ggacattatcttattcaatcttcat

SEQ ID NO: 159836 - DNA, 25 bp, Canis familiaris
ggacatctttttcatagagttcaga

SEQ ID NO: 159837 - DNA, 25 bp, Canis familiaris
ggacagcctggtgctaaaggtgcta

SEQ ID NO: 159838 - DNA, 25 bp, Canis familiaris
ggacacattggggctaaacccacag

SEQ ID NO: 159839 - DNA, 25 bp, Canis familiaris
ggacatcttggagatccaccgtcca

SEQ ID NO: 159840 - DNA, 25 bp, Canis familiaris
ggaatttgggtcacagcaagtatca

SEQ ID NO: 159841 - DNA, 25 bp, Canis familiaris
ggaaatggaaacccagcggtgtcac

SEQ ID NO: 159842 - DNA, 25 bp, Canis familiaris
ggacaaggaggaccctccgtgggca

SEQ ID NO: 159843 - DNA, 25 bp, Canis familiaris
ggacatggcgatggacatcctcttg

SEQ ID NO: 159844 - DNA, 25 bp, Canis familiaris
ggacatggtgtgctatacagctcag

SEQ ID NO: 159845 - DNA, 25 bp, Canis familiaris
ggacaagagtgggctgcagcctctg

SEQ ID NO: 159846 - DNA, 25 bp, Canis familiaris
ggacactgagcaagagaggccctat

SEQ ID NO: 159847 - DNA, 25 bp, Canis familiaris
ggacagcgagcacacgagggagata

SEQ ID NO: 159848 - DNA, 25 bp, Canis familiaris
ggacatggacattgacaaggtggat

SEQ ID NO: 159849 - DNA, 25 bp, Canis familiaris
ggacttgacctacaggagctgcagg

SEQ ID NO: 159850 - DNA, 25 bp, Canis familiaris
ggactctgtcctcaaaggcatgcag

SEQ ID NO: 159851 - DNA, 25 bp, Canis familiaris
ggacttgttcatcaagagacttgac

SEQ ID NO: 159852 - DNA, 25 bp, Canis familiaris
ggacttgcaactcagcatggcatct

SEQ ID NO: 159853 - DNA, 25 bp, Canis familiaris
ggactatcaccactgagcaggaagg

SEQ ID NO: 159854 - DNA, 25 bp, Canis familiaris
ggactaaccgtgaaggaacggtgtg

SEQ ID NO: 159855 - DNA, 25 bp, Canis familiaris
ggaaaaccattaaggcaaccagttg

SEQ ID NO: 159856 - DNA, 25 bp, Canis familiaris
ggaaaaacttgaagccaccataaat

SEQ ID NO: 159857 - DNA, 25 bp, Canis familiaris
ggaaaggacttatccatcaatataa

SEQ ID NO: 159858 - DNA, 25 bp, Canis familiaris
ggaaaggattggtatatttattata

SEQ ID NO: 159859 - DNA, 25 bp, Canis familiaris
ggaaaggatttcgaagcttgtcgga

SEQ ID NO: 159860 - DNA, 25 bp, Canis familiaris
ggactatgtcatttcgacagctctt

SEQ ID NO: 159861 - DNA, 25 bp, Canis familiaris
ggacatcaccttttacagcatcgga

SEQ ID NO: 159862 - DNA, 25 bp, Canis familiaris
ggcaatgaccttttgggggagggct

SEQ ID NO: 159863 - DNA, 25 bp, Canis familiaris
ggcaaacctttcctggaaggaatcg

SEQ ID NO: 159864 - DNA, 25 bp, Canis familiaris
ggaaagccctacgtgaccaaggagg

SEQ ID NO: 159865 - DNA, 25 bp, Canis familiaris
ggaaaccagtcctgacctggtggga

SEQ ID NO: 159866 - DNA, 25 bp, Canis familiaris
ggaaatctaaactcacctacatgtg

SEQ ID NO: 159867 - DNA, 25 bp, Canis familiaris
ggacacatgccagaattgcccaact

SEQ ID NO: 159868 - DNA, 25 bp, Canis familiaris
ggacagagccaagctctccaagacc

SEQ ID NO: 159869 - DNA, 25 bp, Canis familiaris
ggacagtccacagatccggaagaca

SEQ ID NO: 159870 - DNA, 25 bp, Canis familiaris
ggacaggtcatcgaaacagaaaatc

SEQ ID NO: 159871 - DNA, 25 bp, Canis familiaris
ggaaactgcacattgcaaacaaaac

SEQ ID NO: 159872 - DNA, 25 bp, Canis familiaris
ggaacatgcaacttcaaattgaaca

SEQ ID NO: 159873 - DNA, 25 bp, Canis familiaris
ggacaccacatataaatcataactt

SEQ ID NO: 159874 - DNA, 25 bp, Canis familiaris
ggacacaacatataaatcatactta

SEQ ID NO: 159875 - DNA, 25 bp, Canis familiaris
ggcaaaccatttccttaagttgatg

SEQ ID NO: 159876 - DNA, 25 bp, Canis familiaris
ggcacaatcccttggctaaatttca

SEQ ID NO: 159877 - DNA, 25 bp, Canis familiaris
ggaaagaccatctctcaaacttcag

SEQ ID NO: 159878 - DNA, 25 bp, Canis familiaris
ggaactgagcctttttaactgtcgc

SEQ ID NO: 159879 - DNA, 25 bp, Canis familiaris
ggaaagagtctgggttaagcctgcc

SEQ ID NO: 159880 - DNA, 25 bp, Canis familiaris
ggaaataaagctgttacagttgtca

SEQ ID NO: 159881 - DNA, 25 bp, Canis familiaris
ggaaataaaagttgtacagaccaga

SEQ ID NO: 159882 - DNA, 25 bp, Canis familiaris
ggaaattcaaagacagaagcccaag

SEQ ID NO: 159883 - DNA, 25 bp, Canis familiaris
ggaaattgccaaaacatcatcccaa

SEQ ID NO: 159884 - DNA, 25 bp, Canis familiaris
ggaaaggatcctaagcttgggctag

SEQ ID NO: 159885 - DNA, 25 bp, Canis familiaris
ggacacggtctctttcgtggggaat

SEQ ID NO: 159886 - DNA, 25 bp, Canis familiaris
ggaaagttgctgtattttggtgagt

SEQ ID NO: 159887 - DNA, 25 bp, Canis familiaris
ggacaagtcctgctatctcagttga

SEQ ID NO: 159888 - DNA, 25 bp, Canis familiaris
ggaaatgttttgtacacatttgact

SEQ ID NO: 159889 - DNA, 25 bp, Canis familiaris
ggaaattcttgtgcgcacacttgat

SEQ ID NO: 159890 - DNA, 25 bp, Canis familiaris
ggacagattctagctcagagccttt

SEQ ID NO: 159891 - DNA, 25 bp, Canis familiaris
ggaaatttcaccagctcactttcct

SEQ ID NO: 159892 - DNA, 25 bp, Canis familiaris
ggaacttcctcgagtcattttattt

SEQ ID NO: 159893 - DNA, 25 bp, Canis familiaris
ggaaatctctccctttattattatt

SEQ ID NO: 159894 - DNA, 25 bp, Canis familiaris
ggaaatctcccgtacaaagttgaag

SEQ ID NO: 159895 - DNA, 25 bp, Canis familiaris
ggaacatcccctttagaaatcgtgt

SEQ ID NO: 159896 - DNA, 25 bp, Canis familiaris
ggaaagccctcattgttgtactcct

SEQ ID NO: 159897 - DNA, 25 bp, Canis familiaris
ggaaataattcattttggccttcaa

SEQ ID NO: 159898 - DNA, 25 bp, Canis familiaris
ggaactacagtctcattacctgaaa

SEQ ID NO: 159899 - DNA, 25 bp, Canis familiaris
ggacactacaggtatctgtccccag

SEQ ID NO: 159900 - DNA, 25 bp, Canis familiaris
ggacacaacagcgacagcagctcaa

SEQ ID NO: 159901 - DNA, 25 bp, Canis familiaris
ggacacccatgccatgagcttgaag

SEQ ID NO: 159902 - DNA, 25 bp, Canis familiaris
ggacaacctcgccagtgtgaaggac

SEQ ID NO: 159903 - DNA, 25 bp, Canis familiaris
ggacaacgcctgcaacgacatgggc

SEQ ID NO: 159904 - DNA, 25 bp, Canis familiaris
ggacacacagtcctcaaaggtggaa

SEQ ID NO: 159905 - DNA, 25 bp, Canis familiaris
ggacacctatggatgtatggtgcca

SEQ ID NO: 159906 - DNA, 25 bp, Canis familiaris
ggacacctgaggaaaatcctccttc

SEQ ID NO: 159907 - DNA, 25 bp, Canis familiaris
ggacatcatctatggcaagtacttc

SEQ ID NO: 159908 - DNA, 25 bp, Canis familiaris
ggcacaatctgaaggaaacatttac

SEQ ID NO: 159909 - DNA, 25 bp, Canis familiaris
ggaaacataattaaagttgtcatat

SEQ ID NO: 159910 - DNA, 25 bp, Canis familiaris
ggcaaacaagtttaggattggctag

SEQ ID NO: 159911 - DNA, 25 bp, Canis familiaris
ggaacgaaatggtgctatgtgggag

SEQ ID NO: 159912 - DNA, 25 bp, Canis familiaris
ggaacaaacgtgaggtctggagggt

SEQ ID NO: 159913 - DNA, 25 bp, Canis familiaris
ggacacaaaggaccaggtctggaca

SEQ ID NO: 159914 - DNA, 25 bp, Canis familiaris
ggacacagtaattccacttatagga

SEQ ID NO: 159915 - DNA, 25 bp, Canis familiaris
ggacaataaatatgactctgcctag

SEQ ID NO: 159916 - DNA, 25 bp, Canis familiaris
ggacaaaacatccagatccttccac

SEQ ID NO: 159917 - DNA, 25 bp, Canis familiaris
ggacacaaagcacaacagctccggc

SEQ ID NO: 159918 - DNA, 25 bp, Canis familiaris
ggacataacacaaacctctcaagag

SEQ ID NO: 159919 - DNA, 25 bp, Canis familiaris
ggacattgacataaacctcctcagc

SEQ ID NO: 159920 - DNA, 25 bp, Canis familiaris
ggacatggacttaaacccttggata

SEQ ID NO: 159921 - DNA, 25 bp, Canis familiaris
ggaaagcctttagccatcgtggata

SEQ ID NO: 159922 - DNA, 25 bp, Canis familiaris
ggaaagcctggggcccgatgtatat

SEQ ID NO: 159923 - DNA, 25 bp, Canis familiaris
ggacaacactgaggcgtccgggaga

SEQ ID NO: 159924 - DNA, 25 bp, Canis familiaris
ggacaactagacttgctcttggaga

SEQ ID NO: 159925 - DNA, 25 bp, Canis familiaris
ggaaactatgaaacactgctgaaag

SEQ ID NO: 159926 - DNA, 25 bp, Canis familiaris
ggacaagtataacaggcacaaggct

SEQ ID NO: 159927 - DNA, 25 bp, Canis familiaris
ggaagggagacaccaacaaaagctg

SEQ ID NO: 159928 - DNA, 25 bp, Canis familiaris
ggaatgtttggcccccataagaagg

SEQ ID NO: 159929 - DNA, 25 bp, Canis familiaris
ggaaacttgactctccattaaaggt

SEQ ID NO: 159930 - DNA, 25 bp, Canis familiaris
ggaaattgaatccctgtcattaaca

SEQ ID NO: 159931 - DNA, 25 bp, Canis familiaris
ggaaattgaatcttgctgtcgccaa

SEQ ID NO: 159932 - DNA, 25 bp, Canis familiaris
ggaaattgaatcttgctgtcgccaa

SEQ ID NO: 159933 - DNA, 25 bp, Canis familiaris
ggaaattgaatcttgctgtcgccaa

SEQ ID NO: 159934 - DNA, 25 bp, Canis familiaris
ggaaatatcgacttgtccccattcc

SEQ ID NO: 159935 - DNA, 25 bp, Canis familiaris
ggaaatgacgactgttgtccaccac

SEQ ID NO: 159936 - DNA, 25 bp, Canis familiaris
ggaaattgcaaatcttggccccatc

SEQ ID NO: 159937 - DNA, 25 bp, Canis familiaris
ggaaatggctactcaactcgccttc

SEQ ID NO: 159938 - DNA, 25 bp, Canis familiaris
ggaaaacccaggacactgcgacttt

SEQ ID NO: 159939 - DNA, 25 bp, Canis familiaris
ggaaaactgtcgccagttgtgcact

SEQ ID NO: 159940 - DNA, 25 bp, Canis familiaris
ggaaaaattagccacgatgccacgt

SEQ ID NO: 159941 - DNA, 25 bp, Canis familiaris
ggaaaatctaagccctttctcgtat

SEQ ID NO: 159942 - DNA, 25 bp, Canis familiaris
ggaaactcatactgttttccacagt

SEQ ID NO: 159943 - DNA, 25 bp, Canis familiaris
ggacaacaataaagctttttactga

SEQ ID NO: 159944 - DNA, 25 bp, Canis familiaris
ggaagagacttaatatttttgacct

SEQ ID NO: 159945 - DNA, 25 bp, Canis familiaris
ggaaagacttgtatactggaaacta

SEQ ID NO: 159946 - DNA, 25 bp, Canis familiaris
ggaaaacagtgtcattctgttaaaa

SEQ ID NO: 159947 - DNA, 25 bp, Canis familiaris
ggaaataaggttgactggtagatat

SEQ ID NO: 159948 - DNA, 25 bp, Canis familiaris
ggaaaaaggctatcattggttgttg

SEQ ID NO: 159949 - DNA, 25 bp, Canis familiaris
ggacttaattctatatgtggatctg

SEQ ID NO: 159950 - DNA, 25 bp, Canis familiaris
ggacattaattctttctcttagctg

SEQ ID NO: 159951 - DNA, 25 bp, Canis familiaris
ggacttacttgctgtactaatgtgt

SEQ ID NO: 159952 - DNA, 25 bp, Canis familiaris
ggacttatttgccaccagtttgtgc

SEQ ID NO: 159953 - DNA, 25 bp, Canis familiaris
ggacattactagcgccagtttggtg

SEQ ID NO: 159954 - DNA, 25 bp, Canis familiaris
ggaagtttgctgggcacgttcaggt

SEQ ID NO: 159955 - DNA, 25 bp, Canis familiaris
ggacagtcctggaggaggtcagcag

SEQ ID NO: 159956 - DNA, 25 bp, Canis familiaris
ggacagtcctggaggaggtcagcag

SEQ ID NO: 159957 - DNA, 25 bp, Canis familiaris
ggacagtcctggaggaggtcagcag

SEQ ID NO: 159958 - DNA, 25 bp, Canis familiaris
ggacagtcctggaggaggtcagcag

SEQ ID NO: 159959 - DNA, 25 bp, Canis familiaris
ggacagtcctggaggaggtcagcag

SEQ ID NO: 159960 - DNA, 25 bp, Canis familiaris
ggacagtcctggaggaggtcagcag

SEQ ID NO: 159961 - DNA, 25 bp, Canis familiaris
ggacagtcctggaggaggtcagcag

SEQ ID NO: 159962 - DNA, 25 bp, Canis familiaris
ggacagtcctggaggaggtcagcag

SEQ ID NO: 159963 - DNA, 25 bp, Canis familiaris
ggacagtcctggaggaggtcagcag

SEQ ID NO: 159964 - DNA, 25 bp, Canis familiaris
ggacagtcctggaggaggtcagcag

SEQ ID NO: 159965 - DNA, 25 bp, Canis familiaris
ggacagtcctggaggaggtcagcag

SEQ ID NO: 159966 - DNA, 25 bp, Canis familiaris
ggacagtcctggaggaggtcagcag

SEQ ID NO: 159967 - DNA, 25 bp, Canis familiaris
ggacttccacgtgggatggagcaca

SEQ ID NO: 159968 - DNA, 25 bp, Canis familiaris
ggacttccgctggtcagatggacac

SEQ ID NO: 159969 - DNA, 25 bp, Canis familiaris
ggacatccgctgggtatgtgaggac

SEQ ID NO: 159970 - DNA, 25 bp, Canis familiaris
ggacagccagatctgtgagctagaa

SEQ ID NO: 159971 - DNA, 25 bp, Canis familiaris
ggacacatcaacctctgatgctcca

SEQ ID NO: 159972 - DNA, 25 bp, Canis familiaris
ggacttcaggatctgatgaccctgg

SEQ ID NO: 159973 - DNA, 25 bp, Canis familiaris
ggacattagagcattaagccctggc

SEQ ID NO: 159974 - DNA, 25 bp, Canis familiaris
ggacatctagggactacttcctgga

SEQ ID NO: 159975 - DNA, 25 bp, Canis familiaris
ggaactaggggattctcccgtagag

SEQ ID NO: 159976 - DNA, 25 bp, Canis familiaris
ggaaccggtaggaccaggcgtatga

SEQ ID NO: 159977 - DNA, 25 bp, Canis familiaris
ggcacccggagaagcaccgggcttc

SEQ ID NO: 159978 - DNA, 25 bp, Canis familiaris
ggacaacagtgacagcctggggctc

SEQ ID NO: 159979 - DNA, 25 bp, Canis familiaris
ggacacacaccactagtcggggtgt

SEQ ID NO: 159980 - DNA, 25 bp, Canis familiaris
ggacatctacctgagactgttggtt

SEQ ID NO: 159981 - DNA, 25 bp, Canis familiaris
ggaaatatcactgagcacgttgttt

SEQ ID NO: 159982 - DNA, 25 bp, Canis familiaris
ggacacatccctcatcaggtatttt

SEQ ID NO: 159983 - DNA, 25 bp, Canis familiaris
ggaaacaccttatagtattggtcac

SEQ ID NO: 159984 - DNA, 25 bp, Canis familiaris
ggaaaccacctatgatcgtaggaca

SEQ ID NO: 159985 - DNA, 25 bp, Canis familiaris
ggaaaacctcaatgacaggaaaaag

SEQ ID NO: 159986 - DNA, 25 bp, Canis familiaris
ggacatgacaccaaaagcacaggca

SEQ ID NO: 159987 - DNA, 25 bp, Canis familiaris
ggacacgctcctaaatgcatctgat

SEQ ID NO: 159988 - DNA, 25 bp, Canis familiaris
ggaacctactgacattctatccgtg

SEQ ID NO: 159989 - DNA, 25 bp, Canis familiaris
ggacacctgggaccaggtcttcgtc

SEQ ID NO: 159990 - DNA, 25 bp, Canis familiaris
ggacatgttgggactagcgtattct

SEQ ID NO: 159991 - DNA, 25 bp, Canis familiaris
ggaagttcaggccaatgcgaaatta

SEQ ID NO: 159992 - DNA, 25 bp, Canis familiaris
ggacagaagcgggcactagaaaact

SEQ ID NO: 159993 - DNA, 25 bp, Canis familiaris
ggaaacctggaccgagcatacgagt

SEQ ID NO: 159994 - DNA, 25 bp, Canis familiaris
ggaaagccggggccaaaggcagcta

SEQ ID NO: 159995 - DNA, 25 bp, Canis familiaris
ggaaatccgcagagaccagagtcga

SEQ ID NO: 159996 - DNA, 25 bp, Canis familiaris
ggaaaccctgtgaaccaatgtctgg

SEQ ID NO: 159997 - DNA, 25 bp, Canis familiaris
ggaaacccagtcactgtgagctgcg

SEQ ID NO: 159998 - DNA, 25 bp, Canis familiaris
ggacaagaggcggaacgggctccgg

SEQ ID NO: 159999 - DNA, 25 bp, Canis familiaris
ggacaaaaggaatccctcacctggt

SEQ ID NO: 160000 - DNA, 25 bp, Canis familiaris
ggaaacaaggttcaccaacacggtg

SEQ ID NO: 160001 - DNA, 25 bp, Canis familiaris
ggcaaccactggtgccaggaacacg

SEQ ID NO: 160002 - DNA, 25 bp, Canis familiaris
ggaacgcctgatttccaggaaagtc

SEQ ID NO: 160003 - DNA, 25 bp, Canis familiaris
ggaacaccagaatccagtactctcc

SEQ ID NO: 160004 - DNA, 25 bp, Canis familiaris
ggaaactacaaaaccgagcttctcg

SEQ ID NO: 160005 - DNA, 25 bp, Canis familiaris
ggaaaatgaaaaaagggcagcccag

SEQ ID NO: 160006 - DNA, 25 bp, Canis familiaris
ggaaaaaaaaacatatcccacattg

SEQ ID NO: 160007 - DNA, 25 bp, Canis familiaris
ggacagtaaacaaggcccactacaa

SEQ ID NO: 160008 - DNA, 25 bp, Canis familiaris
ggacaggaggacaggcttctccctg

SEQ ID NO: 160009 - DNA, 25 bp, Canis familiaris
ggaaagggtgaatgtttgccctggg

SEQ ID NO: 160010 - DNA, 25 bp, Canis familiaris
ggaaaggggcagcaggaagctcctg

SEQ ID NO: 160011 - DNA, 25 bp, Canis familiaris
ggacaaggtggacaaaagcggctgg

SEQ ID NO: 160012 - DNA, 25 bp, Canis familiaris
ggacaaattcttcagaaagaccagg

SEQ ID NO: 160013 - DNA, 25 bp, Canis familiaris
ggaaaattcccaatgagcccatccg

SEQ ID NO: 160014 - DNA, 25 bp, Canis familiaris
ggaaatctctctgagtggaccatga

SEQ ID NO: 160015 - DNA, 25 bp, Canis familiaris
ggacaattcctgttcttacatctgt

SEQ ID NO: 160016 - DNA, 25 bp, Canis familiaris
ggacacattgcccctttgaaggtat

SEQ ID NO: 160017 - DNA, 25 bp, Canis familiaris
ggaaacgtcggtaggaatgcgtatt

SEQ ID NO: 160018 - DNA, 25 bp, Canis familiaris
ggaacactacaggatgggactggtt

SEQ ID NO: 160019 - DNA, 25 bp, Canis familiaris
ggacaagcccatgtgagtgttggtc

SEQ ID NO: 160020 - DNA, 25 bp, Canis familiaris
ggacagagaccataatatttgagat

SEQ ID NO: 160021 - DNA, 25 bp, Canis familiaris
ggacagcagggcatcctatttcaat

SEQ ID NO: 160022 - DNA, 25 bp, Canis familiaris
ggacactggtgcttttttatacaag

SEQ ID NO: 160023 - DNA, 25 bp, Canis familiaris
ggacatctggtgttttgtcataccg

SEQ ID NO: 160024 - DNA, 25 bp, Canis familiaris
ggacatttgtgttgtttctacttta

SEQ ID NO: 160025 - DNA, 25 bp, Canis familiaris
ggacatgttgtcatttgtgctaatt

SEQ ID NO: 160026 - DNA, 25 bp, Canis familiaris
ggacagactgaaacggtgctgatct

SEQ ID NO: 160027 - DNA, 25 bp, Canis familiaris
ggacagctgctggaccaggtctatg

SEQ ID NO: 160028 - DNA, 25 bp, Canis familiaris
ggacagcctgtcacagagtgctctc

SEQ ID NO: 160029 - DNA, 25 bp, Canis familiaris
ggacagcactgaacgaggtttgcaa

SEQ ID NO: 160030 - DNA, 25 bp, Canis familiaris
ggacagactcaagtgattccttcag

SEQ ID NO: 160031 - DNA, 25 bp, Canis familiaris
ggacatggccaaggagtctgcattt

SEQ ID NO: 160032 - DNA, 25 bp, Canis familiaris
ggacaggctcagaccatttgtgttt

SEQ ID NO: 160033 - DNA, 25 bp, Canis familiaris
ggacacacatacagccttgggttcc

SEQ ID NO: 160034 - DNA, 25 bp, Canis familiaris
ggacagccataatcccatgaatgat

SEQ ID NO: 160035 - DNA, 25 bp, Canis familiaris
ggacatcgatgagtcccgagactga

SEQ ID NO: 160036 - DNA, 25 bp, Canis familiaris
ggacatcgatgagtgccgagagctg

SEQ ID NO: 160037 - DNA, 25 bp, Canis familiaris
ggacatcgatggacgcgaggtgaac

SEQ ID NO: 160038 - DNA, 25 bp, Canis familiaris
ggacatgtgggcccagagctgggac

SEQ ID NO: 160039 - DNA, 25 bp, Canis familiaris
ggacattgagccactactgcaagac

SEQ ID NO: 160040 - DNA, 25 bp, Canis familiaris
ggacatgtggcaaaatcaccagatg

SEQ ID NO: 160041 - DNA, 25 bp, Canis familiaris
ggacaatgccaatatcctgctgcag

SEQ ID NO: 160042 - DNA, 25 bp, Canis familiaris
ggacacagagctgggacctggaggg

SEQ ID NO: 160043 - DNA, 25 bp, Canis familiaris
ggaacagactgccctcagaggggct

SEQ ID NO: 160044 - DNA, 25 bp, Canis familiaris
ggaacaactgggccaaggccactac

SEQ ID NO: 160045 - DNA, 25 bp, Canis familiaris
ggacacacacttaccaatgtgacct

SEQ ID NO: 160046 - DNA, 25 bp, Canis familiaris
ggacagcagtgatagccagagtgac

SEQ ID NO: 160047 - DNA, 25 bp, Canis familiaris
ggacacgctgagtcagcctgaggcc

SEQ ID NO: 160048 - DNA, 25 bp, Canis familiaris
ggacacctgcaatgcaattggctgt

SEQ ID NO: 160049 - DNA, 25 bp, Canis familiaris
ggacacccacagtcacttgtgtggt

SEQ ID NO: 160050 - DNA, 25 bp, Canis familiaris
ggacacttaagcagtctgtggcagt

SEQ ID NO: 160051 - DNA, 25 bp, Canis familiaris
ggacattgtcaagttggctgtggct

SEQ ID NO: 160052 - DNA, 25 bp, Canis familiaris
ggaaagccagaaatgctgcggatgt

SEQ ID NO: 160053 - DNA, 25 bp, Canis familiaris
ggaaagacagtcatctgagtgcaga

SEQ ID NO: 160054 - DNA, 25 bp, Canis familiaris
ggaaatacgtttggagtcagactct

SEQ ID NO: 160055 - DNA, 25 bp, Canis familiaris
ggaaattctgttgtcccacagcttc

SEQ ID NO: 160056 - DNA, 25 bp, Canis familiaris
ggaaattttatgcctcttcacatta

SEQ ID NO: 160057 - DNA, 25 bp, Canis familiaris
ggacatttttatctttcaattatcg

SEQ ID NO: 160058 - DNA, 25 bp, Canis familiaris
tggactttttacactttattgacgt

SEQ ID NO: 160059 - DNA, 25 bp, Canis familiaris
ggaattttgtacagtctttgtgaaa

SEQ ID NO: 160060 - DNA, 25 bp, Canis familiaris
ggaaactgtaatttgtccttgaaca

SEQ ID NO: 160061 - DNA, 25 bp, Canis familiaris
ggacaagctttcattggacttccaa

SEQ ID NO: 160062 - DNA, 25 bp, Canis familiaris
ggacagagtttcctcaaggcgtcca

SEQ ID NO: 160063 - DNA, 25 bp, Canis familiaris
ggaaagtggtcctaagggtgccaga

SEQ ID NO: 160064 - DNA, 25 bp, Canis familiaris
ggaaaaggatccgtggctggttcta

SEQ ID NO: 160065 - DNA, 25 bp, Canis familiaris
ggaaaaggatccagcttccttctga

SEQ ID NO: 160066 - DNA, 25 bp, Canis familiaris
ggaaacaggtccttctggcttaatt

SEQ ID NO: 160067 - DNA, 25 bp, Canis familiaris
ggacaacaggcaacttgtgtgtgtg

SEQ ID NO: 160068 - DNA, 25 bp, Canis familiaris
ggaaacagctgatctttggggaagg

SEQ ID NO: 160069 - DNA, 25 bp, Canis familiaris
ggaaaactctaccgtgagcggcacc

SEQ ID NO: 160070 - DNA, 25 bp, Canis familiaris
ggaacactcatccacgggaggtgat

SEQ ID NO: 160071 - DNA, 25 bp, Canis familiaris
ggaaaacaatgtagggagaggtggc

SEQ ID NO: 160072 - DNA, 25 bp, Canis familiaris
ggacagacctctggggtgtgagttg

SEQ ID NO: 160073 - DNA, 25 bp, Canis familiaris
ggctgcagtccctgtgggtgaagtc

SEQ ID NO: 160074 - DNA, 25 bp, Canis familiaris
ggacagcttagctaggggtgacgct

SEQ ID NO: 160075 - DNA, 25 bp, Canis familiaris
ggacagtctctgtgacaggttgcgt

SEQ ID NO: 160076 - DNA, 25 bp, Canis familiaris
ggacatgtcctggaggagttcagca

SEQ ID NO: 160077 - DNA, 25 bp, Canis familiaris
ggacagctcctgaagctgcactgta

SEQ ID NO: 160078 - DNA, 25 bp, Canis familiaris
ggacattgtcgcaagtcacagaatt

SEQ ID NO: 160079 - DNA, 25 bp, Canis familiaris
ggacacgtgcgcggtagcgagtggt

SEQ ID NO: 160080 - DNA, 25 bp, Canis familiaris
ggacacagacgcaaaccgatgtggg

SEQ ID NO: 160081 - DNA, 25 bp, Canis familiaris
ggacaacaggattgaccgacgacga

SEQ ID NO: 160082 - DNA, 25 bp, Canis familiaris
ggaaaagctataacttgcaccctga

SEQ ID NO: 160083 - DNA, 25 bp, Canis familiaris
ggaagagacttctcttgtcccggaa

SEQ ID NO: 160084 - DNA, 25 bp, Canis familiaris
ggaaaagcctgctttgttccatcgt

SEQ ID NO: 160085 - DNA, 25 bp, Canis familiaris
ggaataaggagctatcctcccatag

SEQ ID NO: 160086 - DNA, 25 bp, Canis familiaris
ggaaaagaagtgtcccagttcgact

SEQ ID NO: 160087 - DNA, 25 bp, Canis familiaris
ggaaagggagtgcacgcttgttgcc

SEQ ID NO: 160088 - DNA, 25 bp, Canis familiaris
ggaaagttgacttcaccctgattct

SEQ ID NO: 160089 - DNA, 25 bp, Canis familiaris
ggaaagtgtgactcaagctgtgtcc

SEQ ID NO: 160090 - DNA, 25 bp, Canis familiaris
ggaacatgatgtcagcaaccttgtc

SEQ ID NO: 160091 - DNA, 25 bp, Canis familiaris
ggaacaattcagcagtactcatgta

SEQ ID NO: 160092 - DNA, 25 bp, Canis familiaris
ggaacatttcagaagcaatcgggat

SEQ ID NO: 160093 - DNA, 25 bp, Canis familiaris
ggacagcatcttcgtatcaatccca

SEQ ID NO: 160094 - DNA, 25 bp, Canis familiaris
ggacagctttccatgatcattctga

SEQ ID NO: 160095 - DNA, 25 bp, Canis familiaris
ggacatcttatggcatgcttcacgt

SEQ ID NO: 160096 - DNA, 25 bp, Canis familiaris
ggaactctgctgacatcttaactgc

SEQ ID NO: 160097 - DNA, 25 bp, Canis familiaris
ggaatccctaatggtaaccgccagt

SEQ ID NO: 160098 - DNA, 25 bp, Canis familiaris
ggaaaaataataccaatcccacatt

SEQ ID NO: 160099 - DNA, 25 bp, Canis familiaris
ggaaatgataaatccacacccaaga

SEQ ID NO: 160100 - DNA, 25 bp, Canis familiaris
ggaaggaatgaatgaaagcccaaaa

SEQ ID NO: 160101 - DNA, 25 bp, Canis familiaris
ggacaggcacgaaacagatacaccc

SEQ ID NO: 160102 - DNA, 25 bp, Canis familiaris
ggacagagccctgagaagtccccaa

SEQ ID NO: 160103 - DNA, 25 bp, Canis familiaris
ggacagacccacaagaagctggcgg

SEQ ID NO: 160104 - DNA, 25 bp, Canis familiaris
ggaaagcccacagaatcggcgagga

SEQ ID NO: 160105 - DNA, 25 bp, Canis familiaris
ggaaaacatccaaaacggcatttga

SEQ ID NO: 160106 - DNA, 25 bp, Canis familiaris
ggaaaattacccaactgagattgat

SEQ ID NO: 160107 - DNA, 25 bp, Canis familiaris
ggaaaaattccgtaccaggatgatt

SEQ ID NO: 160108 - DNA, 25 bp, Canis familiaris
tggaagagttcccgaaccggattct

SEQ ID NO: 160109 - DNA, 25 bp, Canis familiaris
ggcacggtcctgagaaacggagact

SEQ ID NO: 160110 - DNA, 25 bp, Canis familiaris
ggacaggagcgcaggaaccgaggac

SEQ ID NO: 160111 - DNA, 25 bp, Canis familiaris
ggaaagtggcacagctagccgaaga

SEQ ID NO: 160112 - DNA, 25 bp, Canis familiaris
ggaaaagcccattctaaccagagat

SEQ ID NO: 160113 - DNA, 25 bp, Canis familiaris
ggacataaacttttagactccatat

SEQ ID NO: 160114 - DNA, 25 bp, Canis familiaris
ggacaacaaatatctatgatctctc

SEQ ID NO: 160115 - DNA, 25 bp, Canis familiaris
ggacagcacagacttcaccagcacc

SEQ ID NO: 160116 - DNA, 25 bp, Canis familiaris
ggacatcacaacagatcccatgaac

SEQ ID NO: 160117 - DNA, 25 bp, Canis familiaris
ggaatacacacaatgcacaccgaca

SEQ ID NO: 160118 - DNA, 25 bp, Canis familiaris
ggaaatcagacagtacctggcacag

SEQ ID NO: 160119 - DNA, 25 bp, Canis familiaris
ggaaatgaaaaatctggcacactgg

SEQ ID NO: 160120 - DNA, 25 bp, Canis familiaris
ggaaatgaggcaccattctggctcc

SEQ ID NO: 160121 - DNA, 25 bp, Canis familiaris
ggaaaggagccctattttcctgctg

SEQ ID NO: 160122 - DNA, 25 bp, Canis familiaris
ggacaaggagcgctatgtctccctg

SEQ ID NO: 160123 - DNA, 25 bp, Canis familiaris
ggaaaggcagggtctgcctccgagc

SEQ ID NO: 160124 - DNA, 25 bp, Canis familiaris
ggacaaggcagatcctggtcacagt

SEQ ID NO: 160125 - DNA, 25 bp, Canis familiaris
ggacacactgcaggttgggtgccag

SEQ ID NO: 160126 - DNA, 25 bp, Canis familiaris
ggaacccgtggtcatgatgcacatg

SEQ ID NO: 160127 - DNA, 25 bp, Canis familiaris
ggaacatctcgatgtccaatcagcc

SEQ ID NO: 160128 - DNA, 25 bp, Canis familiaris
ggaacacatcgatggctttggccag

SEQ ID NO: 160129 - DNA, 25 bp, Canis familiaris
ggaaaatgccaacgttctggcccgt

SEQ ID NO: 160130 - DNA, 25 bp, Canis familiaris
ggaaaggaaagctctctggctcctg

SEQ ID NO: 160131 - DNA, 25 bp, Canis familiaris
tggagacgggaagtgtccggtcggt

SEQ ID NO: 160132 - DNA, 25 bp, Canis familiaris
ggaacagggaacaggggatcatgga

SEQ ID NO: 160133 - DNA, 25 bp, Canis familiaris
ggacagcattggaagatgggtcgac

SEQ ID NO: 160134 - DNA, 25 bp, Canis familiaris
ggacagcttggaaggcgtgtgccca

SEQ ID NO: 160135 - DNA, 25 bp, Canis familiaris
ggacagttaagaggcactgcgtgcc

SEQ ID NO: 160136 - DNA, 25 bp, Canis familiaris
ggacagtgatgagatccctgggaca

SEQ ID NO: 160137 - DNA, 25 bp, Canis familiaris
ggacagctgtaaattcctcctggac

SEQ ID NO: 160138 - DNA, 25 bp, Canis familiaris
ggacatctatattttcttctttggc

SEQ ID NO: 160139 - DNA, 25 bp, Canis familiaris
ggaactgatatgtgtcttcttcggg

SEQ ID NO: 160140 - DNA, 25 bp, Canis familiaris
ggacactgcatatggctgtttttgc

SEQ ID NO: 160141 - DNA, 25 bp, Canis familiaris
ggacactgagaattgcttcctttga

SEQ ID NO: 160142 - DNA, 25 bp, Canis familiaris
ggacatcatcgacatctttcttgta

SEQ ID NO: 160143 - DNA, 25 bp, Canis familiaris
ggacagcaccatctctttaatgttc

SEQ ID NO: 160144 - DNA, 25 bp, Canis familiaris
ggacacaccattccttcaaggtggg

SEQ ID NO: 160145 - DNA, 25 bp, Canis familiaris
ggacacacactgaggacaacaggtg

SEQ ID NO: 160146 - DNA, 25 bp, Canis familiaris
ggacaacctaatcaacagcagcgtg

SEQ ID NO: 160147 - DNA, 25 bp, Canis familiaris
ggaaacctataagaccatctgtatc

SEQ ID NO: 160148 - DNA, 25 bp, Canis familiaris
ggaaagcccatggaggactctcttc

SEQ ID NO: 160149 - DNA, 25 bp, Canis familiaris
ggacatcgcccaggacatggtcctg

SEQ ID NO: 160150 - DNA, 25 bp, Canis familiaris
ggacacactccagatcatgaacctg

SEQ ID NO: 160151 - DNA, 25 bp, Canis familiaris
ggacaacggcagaaagatgatcctt

SEQ ID NO: 160152 - DNA, 25 bp, Canis familiaris
ggacaaccagagatgttgcactctc

SEQ ID NO: 160153 - DNA, 25 bp, Canis familiaris
ggacaaccatggactattgacttag

SEQ ID NO: 160154 - DNA, 25 bp, Canis familiaris
ggacatgactacattctcttttaga

SEQ ID NO: 160155 - DNA, 25 bp, Canis familiaris
ggacagacacccatactagttcaag

SEQ ID NO: 160156 - DNA, 25 bp, Canis familiaris
ggacaacccacctctatgtgtagaa

SEQ ID NO: 160157 - DNA, 25 bp, Canis familiaris
ggacaaccaactgcacttttaagga

SEQ ID NO: 160158 - DNA, 25 bp, Canis familiaris
ggacaaagcaaaatcacctcttaag

SEQ ID NO: 160159 - DNA, 25 bp, Canis familiaris
ggacagaaacatatccccaaacacc

SEQ ID NO: 160160 - DNA, 25 bp, Canis familiaris
ggacagaaacagactcacactcaca

SEQ ID NO: 160161 - DNA, 25 bp, Canis familiaris
ggacaggaatcaatcacctatcaca

SEQ ID NO: 160162 - DNA, 25 bp, Canis familiaris
ggacaaaatacattctcttacatac

SEQ ID NO: 160163 - DNA, 25 bp, Canis familiaris
ggacaaaatacatgccagccaaata

SEQ ID NO: 160164 - DNA, 25 bp, Canis familiaris
ggacaggaattcttgaggccatagt

SEQ ID NO: 160165 - DNA, 25 bp, Canis familiaris
ggaaatatcatttggggcaatcgtc

SEQ ID NO: 160166 - DNA, 25 bp, Canis familiaris
ggacaagatctgacagtgaggaatc

SEQ ID NO: 160167 - DNA, 25 bp, Canis familiaris
ggacaaatatgtagtgcggccccgc

SEQ ID NO: 160168 - DNA, 25 bp, Canis familiaris
ggacaagaatgagtgcatctggccc

SEQ ID NO: 160169 - DNA, 25 bp, Canis familiaris
ggacacacacaaggattgagacgca

SEQ ID NO: 160170 - DNA, 25 bp, Canis familiaris
ggacacctgaagaattgagagccat

SEQ ID NO: 160171 - DNA, 25 bp, Canis familiaris
ggacacctgaggacattctgagact

SEQ ID NO: 160172 - DNA, 25 bp, Canis familiaris
ggacaccatataccaggcaggaccc

SEQ ID NO: 160173 - DNA, 25 bp, Canis familiaris
ggacaacctcatcctggaggaccta

SEQ ID NO: 160174 - DNA, 25 bp, Canis familiaris
ggacagaacttcagctcagtagcca

SEQ ID NO: 160175 - DNA, 25 bp, Canis familiaris
ggacagacctatcaccagtcataga

SEQ ID NO: 160176 - DNA, 25 bp, Canis familiaris
ggaagagcctccacaagttaaacta

SEQ ID NO: 160177 - DNA, 25 bp, Canis familiaris
ggcaacgcccgcagacagggaaatc

SEQ ID NO: 160178 - DNA, 25 bp, Canis familiaris
ggcaagaccctaggaaggcgatgaa

SEQ ID NO: 160179 - DNA, 25 bp, Canis familiaris
ggaaacacctgaagttgggcaatat

SEQ ID NO: 160180 - DNA, 25 bp, Canis familiaris
ggaaacttgtgaacattggccaaac

SEQ ID NO: 160181 - DNA, 25 bp, Canis familiaris
ggaacaatttgtcagggccaactta

SEQ ID NO: 160182 - DNA, 25 bp, Canis familiaris
ggaaatttggtcaatggcccaactc

SEQ ID NO: 160183 - DNA, 25 bp, Canis familiaris
ggacaagttggtatggcatgtgcca

SEQ ID NO: 160184 - DNA, 25 bp, Canis familiaris
ggacagagtctgctttgggggcagc

SEQ ID NO: 160185 - DNA, 25 bp, Canis familiaris
ggacaatagcagcggtgggggaggt

SEQ ID NO: 160186 - DNA, 25 bp, Canis familiaris
ggaaaagggtcggcggccatggagt

SEQ ID NO: 160187 - DNA, 25 bp, Canis familiaris
ggaaaagggacttcactggcagtgg

SEQ ID NO: 160188 - DNA, 25 bp, Canis familiaris
ggacaactgggacagcctgagcagc

SEQ ID NO: 160189 - DNA, 25 bp, Canis familiaris
ggacaactaccacagctgtaagctg

SEQ ID NO: 160190 - DNA, 25 bp, Canis familiaris
ggacacgaacaacgacggcaagctg

SEQ ID NO: 160191 - DNA, 25 bp, Canis familiaris
ggaacagaacaacacgtggaagcta

SEQ ID NO: 160192 - DNA, 25 bp, Canis familiaris
ggacaagcacaagccaagggaagca

SEQ ID NO: 160193 - DNA, 25 bp, Canis familiaris
ggacactacaaaccatgtgggaaga

SEQ ID NO: 160194 - DNA, 25 bp, Canis familiaris
ggacagctacaggatacatgtgagt

SEQ ID NO: 160195 - DNA, 25 bp, Canis familiaris
ggacagcccgtgacagcagaagatt

SEQ ID NO: 160196 - DNA, 25 bp, Canis familiaris
ggacacagccggtcaagagcgattc

SEQ ID NO: 160197 - DNA, 25 bp, Canis familiaris
ggacacagcgggccaggaggagtac

SEQ ID NO: 160198 - DNA, 25 bp, Canis familiaris
ggacagccgtgggggcagcaagaaa

SEQ ID NO: 160199 - DNA, 25 bp, Canis familiaris
ggacaggctgcattggggccaaaca

SEQ ID NO: 160200 - DNA, 25 bp, Canis familiaris
ggacaggctgcattggggccaaaca

SEQ ID NO: 160201 - DNA, 25 bp, Canis familiaris
ggacaggctgcattggggccaaaca

SEQ ID NO: 160202 - DNA, 25 bp, Canis familiaris
ggacagtgagcagtggtgtgccaga

SEQ ID NO: 160203 - DNA, 25 bp, Canis familiaris
ggacagtgagcagtggtgtgccaga

SEQ ID NO: 160204 - DNA, 25 bp, Canis familiaris
ggacagtgagcagtggtgtgccaga

SEQ ID NO: 160205 - DNA, 25 bp, Canis familiaris
ggacacaggcaatctggcacagacc

SEQ ID NO: 160206 - DNA, 25 bp, Canis familiaris
ggacacaggaattcccaaagcagcc

SEQ ID NO: 160207 - DNA, 25 bp, Canis familiaris
ggaacaggaaactggactggcccgg

SEQ ID NO: 160208 - DNA, 25 bp, Canis familiaris
ggaatttaataagggccaggccaag

SEQ ID NO: 160209 - DNA, 25 bp, Canis familiaris
ggaagtaaacatctcccaggggagt

SEQ ID NO: 160210 - DNA, 25 bp, Canis familiaris
ggaactaaacatgtcaccaaggtga

SEQ ID NO: 160211 - DNA, 25 bp, Canis familiaris
ggaacaacgtcctaactcaacggat

SEQ ID NO: 160212 - DNA, 25 bp, Canis familiaris
ggaacccagggatcctcagaaggca

SEQ ID NO: 160213 - DNA, 25 bp, Canis familiaris
ggaaccacagtgggacgtaggatgg

SEQ ID NO: 160214 - DNA, 25 bp, Canis familiaris
ggaacttcagcctcacgtaggtgat

SEQ ID NO: 160215 - DNA, 25 bp, Canis familiaris
ggaactcctccagaagtatgctagt

SEQ ID NO: 160216 - DNA, 25 bp, Canis familiaris
ggacaccctccaggaagcgagaatg

SEQ ID NO: 160217 - DNA, 25 bp, Canis familiaris
ggacactttcaccagataggatttg

SEQ ID NO: 160218 - DNA, 25 bp, Canis familiaris
ggacacctgctcttcgatagtgatt

SEQ ID NO: 160219 - DNA, 25 bp, Canis familiaris
ggaaccgctttcttgagatgatttg

SEQ ID NO: 160220 - DNA, 25 bp, Canis familiaris
ggaaatccctctggtgaatattggc

SEQ ID NO: 160221 - DNA, 25 bp, Canis familiaris
ggaacacttcattgttgttttgggg

SEQ ID NO: 160222 - DNA, 25 bp, Canis familiaris
ggaaccttgctatatcgttttcagg

SEQ ID NO: 160223 - DNA, 25 bp, Canis familiaris
ggacaccttccattacgatgttggg

SEQ ID NO: 160224 - DNA, 25 bp, Canis familiaris
ggaacctcccaaacgtgtgggcatc

SEQ ID NO: 160225 - DNA, 25 bp, Canis familiaris
ggcaaagtggaaaaccattggacaa

SEQ ID NO: 160226 - DNA, 25 bp, Canis familiaris
ggaacaggcaaaaacctcggacatg

SEQ ID NO: 160227 - DNA, 25 bp, Canis familiaris
ggaacggcagaaagacactgactac

SEQ ID NO: 160228 - DNA, 25 bp, Canis familiaris
ggaaaggcgagaaccaggagccaca

SEQ ID NO: 160229 - DNA, 25 bp, Canis familiaris
ggaaattgtcaactccagaagaaca

SEQ ID NO: 160230 - DNA, 25 bp, Canis familiaris
ggaaatattccttcacagaaaacag

SEQ ID NO: 160231 - DNA, 25 bp, Canis familiaris
ggacacagagactttatcaaaaaca

SEQ ID NO: 160232 - DNA, 25 bp, Canis familiaris
ggaactgacatggcttatcaataac

SEQ ID NO: 160233 - DNA, 25 bp, Canis familiaris
ggaactgacctggaatcaaaggccc

SEQ ID NO: 160234 - DNA, 25 bp, Canis familiaris
ggaactagttggttctgcaggtcag

SEQ ID NO: 160235 - DNA, 25 bp, Canis familiaris
ggaattgtttgggttgggtcgtatg

SEQ ID NO: 160236 - DNA, 25 bp, Canis familiaris
ggcagttttggtggtatggttcgta

SEQ ID NO: 160237 - DNA, 25 bp, Canis familiaris
ggaatttgtcttgtaggtttctctt

SEQ ID NO: 160238 - DNA, 25 bp, Canis familiaris
ggaacgttctgtttacgactgtctt

SEQ ID NO: 160239 - DNA, 25 bp, Canis familiaris
ggaattgttcttttaaactgtcaca

SEQ ID NO: 160240 - DNA, 25 bp, Canis familiaris
ggaaagtactttctaattaccatgt

SEQ ID NO: 160241 - DNA, 25 bp, Canis familiaris
ggaaagtactttctatttacagtgt

SEQ ID NO: 160242 - DNA, 25 bp, Canis familiaris
ggaagaacctttattggccaagttg

SEQ ID NO: 160243 - DNA, 25 bp, Canis familiaris
ggaaaaccttgtgctaggaatactt

SEQ ID NO: 160244 - DNA, 25 bp, Canis familiaris
ggaaacagttcattttaggagcata

SEQ ID NO: 160245 - DNA, 25 bp, Canis familiaris
ggaaacacttatttatagtcatcaa

SEQ ID NO: 160246 - DNA, 25 bp, Canis familiaris
ggaaagtcgtaattggtgtccaata

SEQ ID NO: 160247 - DNA, 25 bp, Canis familiaris
ggaacagtggaaacaggttcacaaa

SEQ ID NO: 160248 - DNA, 25 bp, Canis familiaris
ggaaagtgggctgacgacatcagca

SEQ ID NO: 160249 - DNA, 25 bp, Canis familiaris
ggaaaggaggcaacaccaaggaggg

SEQ ID NO: 160250 - DNA, 25 bp, Canis familiaris
ggaaaggagccagctcgcaagtttg

SEQ ID NO: 160251 - DNA, 25 bp, Canis familiaris
ggctggaggaatctgcccaattttc

SEQ ID NO: 160252 - DNA, 25 bp, Canis familiaris
ggctgttggagggtgcctcttttta

SEQ ID NO: 160253 - DNA, 25 bp, Canis familiaris
ggcttcgagactgtcgttgttctct

SEQ ID NO: 160254 - DNA, 25 bp, Canis familiaris
ggctacagaacagctccaggttcta

SEQ ID NO: 160255 - DNA, 25 bp, Canis familiaris
ggaacatgaggagcccagtttgctg

SEQ ID NO: 160256 - DNA, 25 bp, Canis familiaris
ggaacttggagcacagcatctgcct

SEQ ID NO: 160257 - DNA, 25 bp, Canis familiaris
ggaaatatgggttaggcagctttaa

SEQ ID NO: 160258 - DNA, 25 bp, Canis familiaris
ggaaatcaggacagtggcagttgga

SEQ ID NO: 160259 - DNA, 25 bp, Canis familiaris
ggaaacggccgagggtgcttgagcc

SEQ ID NO: 160260 - DNA, 25 bp, Canis familiaris
ggaaacggccgagggtgcttgagcc

SEQ ID NO: 160261 - DNA, 25 bp, Canis familiaris
ggaaacgagccctggatcattacct

SEQ ID NO: 160262 - DNA, 25 bp, Canis familiaris
ggaacatcaacccttggacaaacca

SEQ ID NO: 160263 - DNA, 25 bp, Canis familiaris
ggaacaacattcaacggacacaaac

SEQ ID NO: 160264 - DNA, 25 bp, Canis familiaris
ggaaacacactgacatgcaaaacaa

SEQ ID NO: 160265 - DNA, 25 bp, Canis familiaris
ggaaatcaaggcatggcaaatcaga

SEQ ID NO: 160266 - DNA, 25 bp, Canis familiaris
ggaaatgttgatcttgcaaatgctt

SEQ ID NO: 160267 - DNA, 25 bp, Canis familiaris
ggacaagcaagactgtcgcaaattt

SEQ ID NO: 160268 - DNA, 25 bp, Canis familiaris
ggaaagcacaggtctacattactta

SEQ ID NO: 160269 - DNA, 25 bp, Canis familiaris
ggaaataaagttcttacatctagca

SEQ ID NO: 160270 - DNA, 25 bp, Canis familiaris
ggaaaaatagctatttacttgagta

SEQ ID NO: 160271 - DNA, 25 bp, Canis familiaris
ggaaacattcagacttttaactgtt

SEQ ID NO: 160272 - DNA, 25 bp, Canis familiaris
ggaaaaactcatacttctaacttat

SEQ ID NO: 160273 - DNA, 25 bp, Canis familiaris
ggaaatacatcttattctgaaagtt

SEQ ID NO: 160274 - DNA, 25 bp, Canis familiaris
ggacaaatatcttcttctacctttc

SEQ ID NO: 160275 - DNA, 25 bp, Canis familiaris
ggaaactgatctacaccttttccac

SEQ ID NO: 160276 - DNA, 25 bp, Canis familiaris
ggacaaagtccagcttgtttcctct

SEQ ID NO: 160277 - DNA, 25 bp, Canis familiaris
ggacaagagtcccactattttaacg

SEQ ID NO: 160278 - DNA, 25 bp, Canis familiaris
ggaaatggatctgtctttggtaaag

SEQ ID NO: 160279 - DNA, 25 bp, Canis familiaris
ggaaatggaatcttcttgggtcgca

SEQ ID NO: 160280 - DNA, 25 bp, Canis familiaris
ggaaaaagaattgtggtctctgccc

SEQ ID NO: 160281 - DNA, 25 bp, Canis familiaris
ggaaagcggggtgtgcgtttccatc

SEQ ID NO: 160282 - DNA, 25 bp, Canis familiaris
ggaaaacagggtgccagtggtcccg

SEQ ID NO: 160283 - DNA, 25 bp, Canis familiaris
ggacaactgcaatgtcccggtgtcc

SEQ ID NO: 160284 - DNA, 25 bp, Canis familiaris
ggaaatctgattttccctggtgtcc

SEQ ID NO: 160285 - DNA, 25 bp, Canis familiaris
ggaaatgtgctttatcttccctgtc

SEQ ID NO: 160286 - DNA, 25 bp, Canis familiaris
ggaaatcttgtgctgttccttgctg

SEQ ID NO: 160287 - DNA, 25 bp, Canis familiaris
ggaaatcggtgtctgacctatcttc

SEQ ID NO: 160288 - DNA, 25 bp, Canis familiaris
ggaaaagtggtactcctcttcctga

SEQ ID NO: 160289 - DNA, 25 bp, Canis familiaris
ggaaatgtgggcaagaccgtcttcg

SEQ ID NO: 160290 - DNA, 25 bp, Canis familiaris
ggaaatgcttggaggtttgcttgga

SEQ ID NO: 160291 - DNA, 25 bp, Canis familiaris
ggaaacctgagttagttctcttgca

SEQ ID NO: 160292 - DNA, 25 bp, Canis familiaris
ggacaactggagatcttctttggca

SEQ ID NO: 160293 - DNA, 25 bp, Canis familiaris
ggacacagcattagttccctttggc

SEQ ID NO: 160294 - DNA, 25 bp, Canis familiaris
ggaaactatagtctctgctatggac

SEQ ID NO: 160295 - DNA, 25 bp, Canis familiaris
ggaaatgctactgcttctctagtga

SEQ ID NO: 160296 - DNA, 25 bp, Canis familiaris
ggaaattaatccccttcagtaacag

SEQ ID NO: 160297 - DNA, 25 bp, Canis familiaris
ggaaactaacactcataaggacagg

SEQ ID NO: 160298 - DNA, 25 bp, Canis familiaris
ggacaccaatacctactcaagtagc

SEQ ID NO: 160299 - DNA, 25 bp, Canis familiaris
ggaacggatagaccactgatagtta

SEQ ID NO: 160300 - DNA, 25 bp, Canis familiaris
ggaacagagctaagccctaggtcca

SEQ ID NO: 160301 - DNA, 25 bp, Canis familiaris
ggaacaagccaacagatgggtcacc

SEQ ID NO: 160302 - DNA, 25 bp, Canis familiaris
ggacacataccaccgagggaggact

SEQ ID NO: 160303 - DNA, 25 bp, Canis familiaris
ggacactaccatggcgggtgtggcc

SEQ ID NO: 160304 - DNA, 25 bp, Canis familiaris
ggacacgactctgagaattgcccca

SEQ ID NO: 160305 - DNA, 25 bp, Canis familiaris
ggaatccgactgtgaataaaccaag

SEQ ID NO: 160306 - DNA, 25 bp, Canis familiaris
ggaaccaggtgtgtacaaaaaagcg

SEQ ID NO: 160307 - DNA, 25 bp, Canis familiaris
ggaacaacgcggggacaacaagagg

SEQ ID NO: 160308 - DNA, 25 bp, Canis familiaris
ggaataagctgtcaacacaagaagg

SEQ ID NO: 160309 - DNA, 25 bp, Canis familiaris
ggaaatgatcttcaatgccgagagg

SEQ ID NO: 160310 - DNA, 25 bp, Canis familiaris
ggaaatgtctggggatcttgggtaa

SEQ ID NO: 160311 - DNA, 25 bp, Canis familiaris
ggaaatgttgagtgttatggtctga

SEQ ID NO: 160312 - DNA, 25 bp, Canis familiaris
ggaaaggtggacattattggctgaa

SEQ ID NO: 160313 - DNA, 25 bp, Canis familiaris
ggaaaggtttgcactctgaggctga

SEQ ID NO: 160314 - DNA, 25 bp, Canis familiaris
ggaaagttgaagacacctggggatt

SEQ ID NO: 160315 - DNA, 25 bp, Canis familiaris
ggaatacggaaaagcttggggcatt

SEQ ID NO: 160316 - DNA, 25 bp, Canis familiaris
ggcaacccaaaaatgcacggggact

SEQ ID NO: 160317 - DNA, 25 bp, Canis familiaris
ggaacccaagagaacaagcgtctac

SEQ ID NO: 160318 - DNA, 25 bp, Canis familiaris
ggacaacagatacccaaagcttcta

SEQ ID NO: 160319 - DNA, 25 bp, Canis familiaris
tgtcagacaagttcagtaaagcttt

SEQ ID NO: 160320 - DNA, 25 bp, Canis familiaris
tgtcgctgcacacaggtaacctgga

SEQ ID NO: 160321 - DNA, 25 bp, Canis familiaris
tccagctaaggaccttaagtgggca

SEQ ID NO: 160322 - DNA, 25 bp, Canis familiaris
ttcctaaggcccttgaccaggggtg

SEQ ID NO: 160323 - DNA, 25 bp, Canis familiaris
tcttcaaagcagcgactaccggggc

SEQ ID NO: 160324 - DNA, 25 bp, Canis familiaris
ggacacctggaacgcttgttattgc

SEQ ID NO: 160325 - DNA, 25 bp, Canis familiaris
ggacacggccgtttatttatgtgcg

SEQ ID NO: 160326 - DNA, 25 bp, Canis familiaris
ggaacgtggtgttggcacttcagcc

SEQ ID NO: 160327 - DNA, 25 bp, Canis familiaris
tgtaagcaagggaggacccccggct

SEQ ID NO: 160328 - DNA, 25 bp, Canis familiaris
ttcagaccggcgtggacaacccggg

SEQ ID NO: 160329 - DNA, 25 bp, Canis familiaris
tgctaaacctggcgtgaaaccgggg

SEQ ID NO: 160330 - DNA, 25 bp, Canis familiaris
tgtaactctcctaggtaacaccggg

SEQ ID NO: 160331 - DNA, 25 bp, Canis familiaris
ggaactcttctgaagggaactctgg

SEQ ID NO: 160332 - DNA, 25 bp, Canis familiaris
ggaacgtgttgcagtgggtcctgtt

SEQ ID NO: 160333 - DNA, 25 bp, Canis familiaris
ggaacaggcagcacgtgtgtgtccg

SEQ ID NO: 160334 - DNA, 25 bp, Canis familiaris
ggaacaggtgctagaggcggctgcc

SEQ ID NO: 160335 - DNA, 25 bp, Canis familiaris
ggacaaggtcatggagacactggac

SEQ ID NO: 160336 - DNA, 25 bp, Canis familiaris
ggacaaagaatcaaagcatcggcct

SEQ ID NO: 160337 - DNA, 25 bp, Canis familiaris
ggaaacatatatctacaactgccat

SEQ ID NO: 160338 - DNA, 25 bp, Canis familiaris
ggaagacattccattgctcacggat

SEQ ID NO: 160339 - DNA, 25 bp, Canis familiaris
ggaaccatagctgtatcccgaagcg

SEQ ID NO: 160340 - DNA, 25 bp, Canis familiaris
ggaaccatcaccaactccaagatgg

SEQ ID NO: 160341 - DNA, 25 bp, Canis familiaris
ggaaaaacactagtcacaagaactc

SEQ ID NO: 160342 - DNA, 25 bp, Canis familiaris
ggacacaagacaaggtgacaagaag

SEQ ID NO: 160343 - DNA, 25 bp, Canis familiaris
ggacacatagacaagttgacaaaaa

SEQ ID NO: 160344 - DNA, 25 bp, Canis familiaris
ggaacaaagcaaattgatctgtcaa

SEQ ID NO: 160345 - DNA, 25 bp, Canis familiaris
ggacacatatagagaattcttcaca

SEQ ID NO: 160346 - DNA, 25 bp, Canis familiaris
ggacactaaaggacagtttgacaaa

SEQ ID NO: 160347 - DNA, 25 bp, Canis familiaris
ggacaaaattggccagtttcagaaa

SEQ ID NO: 160348 - DNA, 25 bp, Canis familiaris
ggacaaaatattcttcttagggcaa

SEQ ID NO: 160349 - DNA, 25 bp, Canis familiaris
ggaacatttagtctttctacaacaa

SEQ ID NO: 160350 - DNA, 25 bp, Canis familiaris
tgtgaacttttcactttaaagaata

SEQ ID NO: 160351 - DNA, 25 bp, Canis familiaris
ggaactttcttttccctgcaagaat

SEQ ID NO: 160352 - DNA, 25 bp, Canis familiaris
ggaaatttttattcggctcaacaga

SEQ ID NO: 160353 - DNA, 25 bp, Canis familiaris
ggaaatttgttctcattccaaagaa

SEQ ID NO: 160354 - DNA, 25 bp, Canis familiaris
ggaaatttactattgattgccctaa

SEQ ID NO: 160355 - DNA, 25 bp, Canis familiaris
ggacacagtttcaaaatgccctaaa

SEQ ID NO: 160356 - DNA, 25 bp, Canis familiaris
ggacaaggactaagaagccaccaac

SEQ ID NO: 160357 - DNA, 25 bp, Canis familiaris
ggacaaagacaattgaaccacatca

SEQ ID NO: 160358 - DNA, 25 bp, Canis familiaris
ggaaaaggccatggcagcagccgct

SEQ ID NO: 160359 - DNA, 25 bp, Canis familiaris
ggaaagaagccaggcgagggcccgg

SEQ ID NO: 160360 - DNA, 25 bp, Canis familiaris
ggaaaccagcctgctggagcagggg

SEQ ID NO: 160361 - DNA, 25 bp, Canis familiaris
ggacaaccccatgtactggggcagc

SEQ ID NO: 160362 - DNA, 25 bp, Canis familiaris
ggaacacaccggtaaatggggcaga

SEQ ID NO: 160363 - DNA, 25 bp, Canis familiaris
ggaacacctagtgatatataaggga

SEQ ID NO: 160364 - DNA, 25 bp, Canis familiaris
ggcaaacctggagaatcctatccga

SEQ ID NO: 160365 - DNA, 25 bp, Canis familiaris
ggaaaccagtgctaagaacgcaacg

SEQ ID NO: 160366 - DNA, 25 bp, Canis familiaris
ggaagttcactgttaccagccaatt

SEQ ID NO: 160367 - DNA, 25 bp, Canis familiaris
ggaagttcacagtcccaagttcgtg

SEQ ID NO: 160368 - DNA, 25 bp, Canis familiaris
ggaaatttgcgggccaagtacctgg

SEQ ID NO: 160369 - DNA, 25 bp, Canis familiaris
ggacaactttcttcaaattacctgg

SEQ ID NO: 160370 - DNA, 25 bp, Canis familiaris
ggaagacatttcctgttattacctg

SEQ ID NO: 160371 - DNA, 25 bp, Canis familiaris
ggaacacaacttggctaattacctg

SEQ ID NO: 160372 - DNA, 25 bp, Canis familiaris
ggaaaaacttttactcagagctcat

SEQ ID NO: 160373 - DNA, 25 bp, Canis familiaris
ggacaaatcagtctttctaggcttc

SEQ ID NO: 160374 - DNA, 25 bp, Canis familiaris
ggacaaacagtgtatgttctcatac

SEQ ID NO: 160375 - DNA, 25 bp, Canis familiaris
ggaaaactggatatccacatgcaaa

SEQ ID NO: 160376 - DNA, 25 bp, Canis familiaris
ggaaaatatgtggctctgccctcga

SEQ ID NO: 160377 - DNA, 25 bp, Canis familiaris
ggaaatgtcagtgctgtgccttgga

SEQ ID NO: 160378 - DNA, 25 bp, Canis familiaris
ggaacgccagatgcggtgcaatgga

SEQ ID NO: 160379 - DNA, 25 bp, Canis familiaris
ggctcgcccagtgtggggagggtta

SEQ ID NO: 160380 - DNA, 25 bp, Canis familiaris
ggcttgtccaactcagggggagccc

SEQ ID NO: 160381 - DNA, 25 bp, Canis familiaris
ggcttctccaaacagatggtggcca

SEQ ID NO: 160382 - DNA, 25 bp, Canis familiaris
ggaagtccacaacaagcgaaccaca

SEQ ID NO: 160383 - DNA, 25 bp, Canis familiaris
ggcaatcccaaacaaggaactggtc

SEQ ID NO: 160384 - DNA, 25 bp, Canis familiaris
ggaacccaaggtatgagatatctgc

SEQ ID NO: 160385 - DNA, 25 bp, Canis familiaris
ggaaccacatacttttggaatccac

SEQ ID NO: 160386 - DNA, 25 bp, Canis familiaris
ggaactataacttctcgaaactcac

SEQ ID NO: 160387 - DNA, 25 bp, Canis familiaris
ggaagtcattaacctaaacccactg

SEQ ID NO: 160388 - DNA, 25 bp, Canis familiaris
ggaaggatgaaccccaaacaaactg

SEQ ID NO: 160389 - DNA, 25 bp, Canis familiaris
ggaaagcataaacaaaatcagaagc

SEQ ID NO: 160390 - DNA, 25 bp, Canis familiaris
ggaacacaatcaagcaaaacatcgc

SEQ ID NO: 160391 - DNA, 25 bp, Canis familiaris
ggaacatcctgtagcaagtatcatt

SEQ ID NO: 160392 - DNA, 25 bp, Canis familiaris
ggaaatgcccacaaagttcattcct

SEQ ID NO: 160393 - DNA, 25 bp, Canis familiaris
ggaaatggctgacaagtgctcatcc

SEQ ID NO: 160394 - DNA, 25 bp, Canis familiaris
ggaaatgaccagacactgaccaccc

SEQ ID NO: 160395 - DNA, 25 bp, Canis familiaris
ggaagaagccagtcaccaagacctc

SEQ ID NO: 160396 - DNA, 25 bp, Canis familiaris
ggaagaggcaagcgtccgcaatgct

SEQ ID NO: 160397 - DNA, 25 bp, Canis familiaris
ggacaagagcaacctgaccacaaca

SEQ ID NO: 160398 - DNA, 25 bp, Canis familiaris
ggaagcgagcagagctatccagggc

SEQ ID NO: 160399 - DNA, 25 bp, Canis familiaris
ggaagcgcaaatctgttcggggttg

SEQ ID NO: 160400 - DNA, 25 bp, Canis familiaris
ggaagccaaccaaggaccgggattg

SEQ ID NO: 160401 - DNA, 25 bp, Canis familiaris
ggaaacaactcaagtgtccttcaat

SEQ ID NO: 160402 - DNA, 25 bp, Canis familiaris
ggaaataactcttgttggcttgttt

SEQ ID NO: 160403 - DNA, 25 bp, Canis familiaris
ggaaatagcatctgtgttggtggtt

SEQ ID NO: 160404 - DNA, 25 bp, Canis familiaris
ggaaatagcactcttggactgggcg

SEQ ID NO: 160405 - DNA, 25 bp, Canis familiaris
ggaaatcgagctcctgagtacagga

SEQ ID NO: 160406 - DNA, 25 bp, Canis familiaris
ggaaactggctgaccagtgcacggg

SEQ ID NO: 160407 - DNA, 25 bp, Canis familiaris
ggaaatgtcagccaaggtccgggtg

SEQ ID NO: 160408 - DNA, 25 bp, Canis familiaris
ggaaagtcaccaagtccctgtggta

SEQ ID NO: 160409 - DNA, 25 bp, Canis familiaris
ggaaaggctgacaagtcccaaggaa

SEQ ID NO: 160410 - DNA, 25 bp, Canis familiaris
ggaagagggctcagtgcccaaggca

SEQ ID NO: 160411 - DNA, 25 bp, Canis familiaris
ggaaagggtcaactcgtccagatga

SEQ ID NO: 160412 - DNA, 25 bp, Canis familiaris
ggaaagcgagtcaccgttggaacaa

SEQ ID NO: 160413 - DNA, 25 bp, Canis familiaris
ggaaatgtagtcacccagtgtgaaa

SEQ ID NO: 160414 - DNA, 25 bp, Canis familiaris
ggaaatgtattcactgctgctttaa

SEQ ID NO: 160415 - DNA, 25 bp, Canis familiaris
ggaaattcctgcaagttttctataa

SEQ ID NO: 160416 - DNA, 25 bp, Canis familiaris
ggaacatcttagggatttcctagta

SEQ ID NO: 160417 - DNA, 25 bp, Canis familiaris
ggaacttcgatgggacccactcagc

SEQ ID NO: 160418 - DNA, 25 bp, Canis familiaris
ggaactccagagggaccattactgc

SEQ ID NO: 160419 - DNA, 25 bp, Canis familiaris
ggaacaaaagctggacctccacttc

SEQ ID NO: 160420 - DNA, 25 bp, Canis familiaris
ggaacaaacatcagatccttgcccc

SEQ ID NO: 160421 - DNA, 25 bp, Canis familiaris
ggaaatagaatctggctgtgtgccc

SEQ ID NO: 160422 - DNA, 25 bp, Canis familiaris
ggaaaaaatactgctggatgcccag

SEQ ID NO: 160423 - DNA, 25 bp, Canis familiaris
ggaaaggaaggtggggagcgtcagc

SEQ ID NO: 160424 - DNA, 25 bp, Canis familiaris
ggaaacgacaggactgggagcttgt

SEQ ID NO: 160425 - DNA, 25 bp, Canis familiaris
ggaaaggccaagactgagcagactg

SEQ ID NO: 160426 - DNA, 25 bp, Canis familiaris
ggaacagcgaagttctcacaggcag

SEQ ID NO: 160427 - DNA, 25 bp, Canis familiaris
ggaaatccagagcaccacatggtgg

SEQ ID NO: 160428 - DNA, 25 bp, Canis familiaris
ggaaatcctgagaaccaaccttggt

SEQ ID NO: 160429 - DNA, 25 bp, Canis familiaris
ggaacaactggaacctgactatttt

SEQ ID NO: 160430 - DNA, 25 bp, Canis familiaris
ggaaaggcagtgacccagagatttt

SEQ ID NO: 160431 - DNA, 25 bp, Canis familiaris
ggaagcgaggtgcccaaaagtctta

SEQ ID NO: 160432 - DNA, 25 bp, Canis familiaris
ggaacgggttgagcaaaggcatgga

SEQ ID NO: 160433 - DNA, 25 bp, Canis familiaris
ggaacaggttctcagatacggcaga

SEQ ID NO: 160434 - DNA, 25 bp, Canis familiaris
ggaaacgcctctccagggaggcaga

SEQ ID NO: 160435 - DNA, 25 bp, Canis familiaris
ggacaacgccctgcgggatgagatg

SEQ ID NO: 160436 - DNA, 25 bp, Canis familiaris
ggaaatgccccagcatgggagcaga

SEQ ID NO: 160437 - DNA, 25 bp, Canis familiaris
ggaaagcagtccgcgaggagagccc

SEQ ID NO: 160438 - DNA, 25 bp, Canis familiaris
ggaacgggagcagcgttccagcctc

SEQ ID NO: 160439 - DNA, 25 bp, Canis familiaris
ggaaaggggcgaggactgtccctca

SEQ ID NO: 160440 - DNA, 25 bp, Canis familiaris
ggaaagagagagatggatttcttcc

SEQ ID NO: 160441 - DNA, 25 bp, Canis familiaris
ggaaatggatagtagtgatggttgc

SEQ ID NO: 160442 - DNA, 25 bp, Canis familiaris
ggaaatgtgtcatcttgtcgctctg

SEQ ID NO: 160443 - DNA, 25 bp, Canis familiaris
ggaaatgtgtatattgggcctgatg

SEQ ID NO: 160444 - DNA, 25 bp, Canis familiaris
ggaaaagtgatattagagcggagta

SEQ ID NO: 160445 - DNA, 25 bp, Canis familiaris
ggaacactactattaagccgcgtca

SEQ ID NO: 160446 - DNA, 25 bp, Canis familiaris
ggaaccgacatcgtgaaggggtcag

SEQ ID NO: 160447 - DNA, 25 bp, Canis familiaris
ggaacactattcttgaagaggcctt

SEQ ID NO: 160448 - DNA, 25 bp, Canis familiaris
ggaaccgcgtcttgaagcgtgactt

SEQ ID NO: 160449 - DNA, 25 bp, Canis familiaris
ggaacactagtttggtcgtggttga

SEQ ID NO: 160450 - DNA, 25 bp, Canis familiaris
ggaatcctcgttgggttggtgtggt

SEQ ID NO: 160451 - DNA, 25 bp, Canis familiaris
ggaacatccgtcgtcgattggtcgg

SEQ ID NO: 160452 - DNA, 25 bp, Canis familiaris
ggaactccgtttaatctggtcagtg

SEQ ID NO: 160453 - DNA, 25 bp, Canis familiaris
ggaaccaccattttgatgtggtcag

SEQ ID NO: 160454 - DNA, 25 bp, Canis familiaris
ggaagccaagttcattgtagatgaa

SEQ ID NO: 160455 - DNA, 25 bp, Canis familiaris
ggaatcctcaaccttcctgaagaag

SEQ ID NO: 160456 - DNA, 25 bp, Canis familiaris
ggaaagtcaaccatcctggatggga

SEQ ID NO: 160457 - DNA, 25 bp, Canis familiaris
ggcaagagtaacagacgggtccgaa

SEQ ID NO: 160458 - DNA, 25 bp, Canis familiaris
ggaagagtaacattccggggcggcg

SEQ ID NO: 160459 - DNA, 25 bp, Canis familiaris
ggaacgtaaccggtgtgggtgccag

SEQ ID NO: 160460 - DNA, 25 bp, Canis familiaris
ggaagtatcgaaagttggggagcca

SEQ ID NO: 160461 - DNA, 25 bp, Canis familiaris
ggaagtctcgaaatttaaggcaacg

SEQ ID NO: 160462 - DNA, 25 bp, Canis familiaris
ggaagtcccaacagtgaccttcagg

SEQ ID NO: 160463 - DNA, 25 bp, Canis familiaris
ggaaatattcaattaggaccctcat

SEQ ID NO: 160464 - DNA, 25 bp, Canis familiaris
ggaaattcccacagaagtctctctc

SEQ ID NO: 160465 - DNA, 25 bp, Canis familiaris
ggaaatctgcccgatgaaagacatc

SEQ ID NO: 160466 - DNA, 25 bp, Canis familiaris
ggaaatatgtccaagtctagagata

SEQ ID NO: 160467 - DNA, 25 bp, Canis familiaris
ggaaatcatgctactgaggctccat

SEQ ID NO: 160468 - DNA, 25 bp, Canis familiaris
ggaacatgtgtaggtggcaccaggt

SEQ ID NO: 160469 - DNA, 25 bp, Canis familiaris
ggaacatggttggtgcaggagaggt

SEQ ID NO: 160470 - DNA, 25 bp, Canis familiaris
ggaaatcgtgcgctcgcaggagagc

SEQ ID NO: 160471 - DNA, 25 bp, Canis familiaris
ggaaatcttgcgcacagagcgtatc

SEQ ID NO: 160472 - DNA, 25 bp, Canis familiaris
ggacaatcttgaaactacgatcaaa

SEQ ID NO: 160473 - DNA, 25 bp, Canis familiaris
ggaactattgtactctaagtcaaga

SEQ ID NO: 160474 - DNA, 25 bp, Canis familiaris
ggaactctgtttctaagtgccaagc

SEQ ID NO: 160475 - DNA, 25 bp, Canis familiaris
ggaactcgtgatctccaacgacaag

SEQ ID NO: 160476 - DNA, 25 bp, Canis familiaris
ggaacacggttcttagtctacacga

SEQ ID NO: 160477 - DNA, 25 bp, Canis familiaris
ggaatcatcggatcaaacctcgttg

SEQ ID NO: 160478 - DNA, 25 bp, Canis familiaris
ggaactcagggtccaacctggtgca

SEQ ID NO: 160479 - DNA, 25 bp, Canis familiaris
ggaactcgagggtgcacttggtgcc

SEQ ID NO: 160480 - DNA, 25 bp, Canis familiaris
ggaaaggggatgttgcattctgggc

SEQ ID NO: 160481 - DNA, 25 bp, Canis familiaris
ggaaagcctggagcctgacgaggcc

SEQ ID NO: 160482 - DNA, 25 bp, Canis familiaris
ggaaatgttggtgagctgcacagat

SEQ ID NO: 160483 - DNA, 25 bp, Canis familiaris
ggaaaggctggatacctcgattatt

SEQ ID NO: 160484 - DNA, 25 bp, Canis familiaris
ggaaaagttgaaggcttctcttagt

SEQ ID NO: 160485 - DNA, 25 bp, Canis familiaris
ggaagcagaccaaactgtttttatg

SEQ ID NO: 160486 - DNA, 25 bp, Canis familiaris
ggaagaacacaaactctgggattgg

SEQ ID NO: 160487 - DNA, 25 bp, Canis familiaris
ggaaagcatctcaaaacaggcgttt

SEQ ID NO: 160488 - DNA, 25 bp, Canis familiaris
ggaatttgatcttacaaggcgtggt

SEQ ID NO: 160489 - DNA, 25 bp, Canis familiaris
ggaatttcctatgcactactgtagc

SEQ ID NO: 160490 - DNA, 25 bp, Canis familiaris
ggaaattcactaatcagcttcttga

SEQ ID NO: 160491 - DNA, 25 bp, Canis familiaris
ggaaataatctgtcatccagtctta

SEQ ID NO: 160492 - DNA, 25 bp, Canis familiaris
ggaactaattggtccaatgcttaat

SEQ ID NO: 160493 - DNA, 25 bp, Canis familiaris
ggaactgcaacaagactccagccta

SEQ ID NO: 160494 - DNA, 25 bp, Canis familiaris
ggaaagaataagttctccacttgca

SEQ ID NO: 160495 - DNA, 25 bp, Canis familiaris
ggaaatgaaatcctcatctcccttc

SEQ ID NO: 160496 - DNA, 25 bp, Canis familiaris
ggaaatgagcagtcttacttttgta

SEQ ID NO: 160497 - DNA, 25 bp, Canis familiaris
ggaaatggccttacctctgttatga

SEQ ID NO: 160498 - DNA, 25 bp, Canis familiaris
ggaaatggccattcagcaatcactg

SEQ ID NO: 160499 - DNA, 25 bp, Canis familiaris
ggaacacccatatgctatccgagat

SEQ ID NO: 160500 - DNA, 25 bp, Canis familiaris
ggaaatcccatattgccagtgaagt

SEQ ID NO: 160501 - DNA, 25 bp, Canis familiaris
ggaacatcccatttcctgagggaat

SEQ ID NO: 160502 - DNA, 25 bp, Canis familiaris
ggaaccccagcctgaggaggaatgt

SEQ ID NO: 160503 - DNA, 25 bp, Canis familiaris
ggaaccgagcccagggactggcatt

SEQ ID NO: 160504 - DNA, 25 bp, Canis familiaris
ggaaatggacccagagtatctcctg

SEQ ID NO: 160505 - DNA, 25 bp, Canis familiaris
ggaaatgggtccagcagttcctgct

SEQ ID NO: 160506 - DNA, 25 bp, Canis familiaris
ggaaatgagttcatctcgtacccta

SEQ ID NO: 160507 - DNA, 25 bp, Canis familiaris
ggaaatgacaccattctaggcctct

SEQ ID NO: 160508 - DNA, 25 bp, Canis familiaris
ggaagaacccgaactatgacctcta

SEQ ID NO: 160509 - DNA, 25 bp, Canis familiaris
ggaagaacctaaatccgatcctgcc

SEQ ID NO: 160510 - DNA, 25 bp, Canis familiaris
ggaaatcacgatgaatgccctccag

SEQ ID NO: 160511 - DNA, 25 bp, Canis familiaris
ggaaacaagtggaatcgtctgcctg

SEQ ID NO: 160512 - DNA, 25 bp, Canis familiaris
ggaacaaaaggaatatctccctgaa

SEQ ID NO: 160513 - DNA, 25 bp, Canis familiaris
ggaacaacatagtggtccccaatgg

SEQ ID NO: 160514 - DNA, 25 bp, Canis familiaris
ggaacagttcaaagtgtcccctggc

SEQ ID NO: 160515 - DNA, 25 bp, Canis familiaris
ggaaccttaaagtaccaccattgct

SEQ ID NO: 160516 - DNA, 25 bp, Canis familiaris
ggaacctgtgaagacctaccactac

SEQ ID NO: 160517 - DNA, 25 bp, Canis familiaris
ggaactctgtgatcaactgaacctc

SEQ ID NO: 160518 - DNA, 25 bp, Canis familiaris
ggaaaggggacattctcacagcctc

SEQ ID NO: 160519 - DNA, 25 bp, Canis familiaris
ggaaatacgagtcatccacagcctc

SEQ ID NO: 160520 - DNA, 25 bp, Canis familiaris
ggaaatcatacacttatccccacaa

SEQ ID NO: 160521 - DNA, 25 bp, Canis familiaris
ggaaatctgcagcggatctcttcca

SEQ ID NO: 160522 - DNA, 25 bp, Canis familiaris
ggaaatcatgcacatggtctctgtg

SEQ ID NO: 160523 - DNA, 25 bp, Canis familiaris
ggaactctatgccagtgatcctgag

SEQ ID NO: 160524 - DNA, 25 bp, Canis familiaris
ggaagtaatctggctgttcgcagga

SEQ ID NO: 160525 - DNA, 25 bp, Canis familiaris
ggaagaagcatcttctttctaggaa

SEQ ID NO: 160526 - DNA, 25 bp, Canis familiaris
ggaataaccattcatactgcggtga

SEQ ID NO: 160527 - DNA, 25 bp, Canis familiaris
ggaaagatacatccataaccgggag

SEQ ID NO: 160528 - DNA, 25 bp, Canis familiaris
ggaaagatacatccataaccgggag

SEQ ID NO: 160529 - DNA, 25 bp, Canis familiaris
ggaaagatacatccataaccgggag

SEQ ID NO: 160530 - DNA, 25 bp, Canis familiaris
aagtcgatatattattgtgctggta

SEQ ID NO: 160531 - DNA, 25 bp, Canis familiaris
ggaacagacaccttcattcataagt

SEQ ID NO: 160532 - DNA, 25 bp, Canis familiaris
ggaagtatcccagacctaagtaaat

SEQ ID NO: 160533 - DNA, 25 bp, Canis familiaris
ggaacttccaagcactgaaaatgaa

SEQ ID NO: 160534 - DNA, 25 bp, Canis familiaris
ggaactctctccagaatagaccaca

SEQ ID NO: 160535 - DNA, 25 bp, Canis familiaris
ggaacccttccacaagactgaagta

SEQ ID NO: 160536 - DNA, 25 bp, Canis familiaris
ggaactcccacctgaagacgaagga

SEQ ID NO: 160537 - DNA, 25 bp, Canis familiaris
ggaactaaaccatgtcacccaaggt

SEQ ID NO: 160538 - DNA, 25 bp, Canis familiaris
ggaacaaataactgtcatgtccctg

SEQ ID NO: 160539 - DNA, 25 bp, Canis familiaris
ggaacacgtggacgcgaagatcgcc

SEQ ID NO: 160540 - DNA, 25 bp, Canis familiaris
ggaacacgatggggcaaacatactg

SEQ ID NO: 160541 - DNA, 25 bp, Canis familiaris
ggaaacagctgggaaagacattaaa

SEQ ID NO: 160542 - DNA, 25 bp, Canis familiaris
ggaacacagccgttaaatatgtcaa

SEQ ID NO: 160543 - DNA, 25 bp, Canis familiaris
ggaaccctagtttttgattcataat

SEQ ID NO: 160544 - DNA, 25 bp, Canis familiaris
ggaacctgggcttatttgaccaaca

SEQ ID NO: 160545 - DNA, 25 bp, Canis familiaris
ggaacactggggtgttgatcccaaa

SEQ ID NO: 160546 - DNA, 25 bp, Canis familiaris
ggaaatctggggaatgttgttcaca

SEQ ID NO: 160547 - DNA, 25 bp, Canis familiaris
ggaaatccagcgttctgattcgtcc

SEQ ID NO: 160548 - DNA, 25 bp, Canis familiaris
ggaaatccacgtctatgattgcccc

SEQ ID NO: 160549 - DNA, 25 bp, Canis familiaris
ggaaagtcacatgcagtatttgggc

SEQ ID NO: 160550 - DNA, 25 bp, Canis familiaris
ggaagaatcaagaggcttctgcagg

SEQ ID NO: 160551 - DNA, 25 bp, Canis familiaris
ggaaagcacagagccaggcctggga

SEQ ID NO: 160552 - DNA, 25 bp, Canis familiaris
ggaacaggcagagccatccttggaa

SEQ ID NO: 160553 - DNA, 25 bp, Canis familiaris
ggaacaggcagacgagcttctcgga

SEQ ID NO: 160554 - DNA, 25 bp, Canis familiaris
ggaacacctgatggattacttgagc

SEQ ID NO: 160555 - DNA, 25 bp, Canis familiaris
ggaagcaattgagcattaccggcat

SEQ ID NO: 160556 - DNA, 25 bp, Canis familiaris
ggaagccattagaatccaccaggcg

SEQ ID NO: 160557 - DNA, 25 bp, Canis familiaris
ggaagccacttgaacggtcatggcc

SEQ ID NO: 160558 - DNA, 25 bp, Canis familiaris
ggaagcccttctaggtctaagcgat

SEQ ID NO: 160559 - DNA, 25 bp, Canis familiaris
ggaaccacttccaactcaaatgtat

SEQ ID NO: 160560 - DNA, 25 bp, Canis familiaris
ggaaagaatcccaagccaactctac

SEQ ID NO: 160561 - DNA, 25 bp, Canis familiaris
ggaaagaagaccatccaacctacct

SEQ ID NO: 160562 - DNA, 25 bp, Canis familiaris
ggaagaataaacgccagaacccgct

SEQ ID NO: 160563 - DNA, 25 bp, Canis familiaris
ggctcaaaataatccgaaaccctca

SEQ ID NO: 160564 - DNA, 25 bp, Canis familiaris
ggcacaagaaaatacccaactctct

SEQ ID NO: 160565 - DNA, 25 bp, Canis familiaris
ggaaatggcaaatacccacactgtc

SEQ ID NO: 160566 - DNA, 25 bp, Canis familiaris
ggaaaagcataatgccctcagcctc

SEQ ID NO: 160567 - DNA, 25 bp, Canis familiaris
ggaaagactacatggccttggagac

SEQ ID NO: 160568 - DNA, 25 bp, Canis familiaris
ggaaaacacatctgtacttgaagac

SEQ ID NO: 160569 - DNA, 25 bp, Canis familiaris
ggaatattacttagccactagaaag

SEQ ID NO: 160570 - DNA, 25 bp, Canis familiaris
ggaaactgactactgccgctaataa

SEQ ID NO: 160571 - DNA, 25 bp, Canis familiaris
ggaaaccatctcctggcttaacaac

SEQ ID NO: 160572 - DNA, 25 bp, Canis familiaris
ggaaagatgatcctctggcttccac

SEQ ID NO: 160573 - DNA, 25 bp, Canis familiaris
ggaaaatgatgcctcttttgctact

SEQ ID NO: 160574 - DNA, 25 bp, Canis familiaris
ggaaaatatgtcactgttgcccact

SEQ ID NO: 160575 - DNA, 25 bp, Canis familiaris
ggaagaatattttggcctcgccatt

SEQ ID NO: 160576 - DNA, 25 bp, Canis familiaris
ggaagaaatgttgtccgctgccatt

SEQ ID NO: 160577 - DNA, 25 bp, Canis familiaris
ggaaaagtgttgaccacgtcgctcg

SEQ ID NO: 160578 - DNA, 25 bp, Canis familiaris
ggaaaagagatacgccaggtctgcc

SEQ ID NO: 160579 - DNA, 25 bp, Canis familiaris
ggaaaaagaagcctcgctttggcgt

SEQ ID NO: 160580 - DNA, 25 bp, Canis familiaris
ggaaacaatggactgtacatttagg

SEQ ID NO: 160581 - DNA, 25 bp, Canis familiaris
ggaacacaattctggaggttagggg

SEQ ID NO: 160582 - DNA, 25 bp, Canis familiaris
ggaaacagatcctgaagatttatgg

SEQ ID NO: 160583 - DNA, 25 bp, Canis familiaris
ggaaaactcgctcaagctgtcatgt

SEQ ID NO: 160584 - DNA, 25 bp, Canis familiaris
ggaaacctctgaaaactgtcatgga

SEQ ID NO: 160585 - DNA, 25 bp, Canis familiaris
ggaaccgccagaaggacgagatcga

SEQ ID NO: 160586 - DNA, 25 bp, Canis familiaris
ggaaccgggaagaccgagtggtctg

SEQ ID NO: 160587 - DNA, 25 bp, Canis familiaris
ggaacttgggaacttgtgtgaggtg

SEQ ID NO: 160588 - DNA, 25 bp, Canis familiaris
ggaactgaggccatgattaagaggg

SEQ ID NO: 160589 - DNA, 25 bp, Canis familiaris
ggaactcagttcagatttaatgggt

SEQ ID NO: 160590 - DNA, 25 bp, Canis familiaris
ggaaccatcctaaatttagtggaga

SEQ ID NO: 160591 - DNA, 25 bp, Canis familiaris
ggaacttccaaggtccaatgggatg

SEQ ID NO: 160592 - DNA, 25 bp, Canis familiaris
ggaacagttacagacctcattggag

SEQ ID NO: 160593 - DNA, 25 bp, Canis familiaris
ggcaaaaatgtccagccctacggag

SEQ ID NO: 160594 - DNA, 25 bp, Canis familiaris
ggaacagcatcagtgagagccctcc

SEQ ID NO: 160595 - DNA, 25 bp, Canis familiaris
ggaaagtcagctgtgttgccatcat

SEQ ID NO: 160596 - DNA, 25 bp, Canis familiaris
ggaaagagccggcttggcatctgca

SEQ ID NO: 160597 - DNA, 25 bp, Canis familiaris
ggaaaatgccagagctttgatatga

SEQ ID NO: 160598 - DNA, 25 bp, Canis familiaris
ggaaacaccagaagtcacagaatca

SEQ ID NO: 160599 - DNA, 25 bp, Canis familiaris
ggaaacagaagctcaccagaacaag

SEQ ID NO: 160600 - DNA, 25 bp, Canis familiaris
ggaaaccaacagtcacacatgtaca

SEQ ID NO: 160601 - DNA, 25 bp, Canis familiaris
ggaaagcactaaggaccgtagacag

SEQ ID NO: 160602 - DNA, 25 bp, Canis familiaris
ggaacagcaggaccaacaggtaaca

SEQ ID NO: 160603 - DNA, 25 bp, Canis familiaris
ggaaacggagtccaggagttcacta

SEQ ID NO: 160604 - DNA, 25 bp, Canis familiaris
ggaaccagatgataggggtattcta

SEQ ID NO: 160605 - DNA, 25 bp, Canis familiaris
ggaactcagtgatttctggggcata

SEQ ID NO: 160606 - DNA, 25 bp, Canis familiaris
ggaagctaggtctattgtaatgcaa

SEQ ID NO: 160607 - DNA, 25 bp, Canis familiaris
ggaactcatgcttatatttagccca

SEQ ID NO: 160608 - DNA, 25 bp, Canis familiaris
ggaaacatctattctactgagacaa

SEQ ID NO: 160609 - DNA, 25 bp, Canis familiaris
ggaacatatcacttctattgaacaa

SEQ ID NO: 160610 - DNA, 25 bp, Canis familiaris
ggaacaaggctgatctggagacaca

SEQ ID NO: 160611 - DNA, 25 bp, Canis familiaris
ggaaaagcctgacctacgatgaagt

SEQ ID NO: 160612 - DNA, 25 bp, Canis familiaris
ggaagtcgtcggcatttgatgaagt

SEQ ID NO: 160613 - DNA, 25 bp, Canis familiaris
ggaagccgtgggcttctgctggaac

SEQ ID NO: 160614 - DNA, 25 bp, Canis familiaris
ggaacctggggcgtgcttcaggtac

SEQ ID NO: 160615 - DNA, 25 bp, Canis familiaris
ggaacctgcaggagactccaggaat

SEQ ID NO: 160616 - DNA, 25 bp, Canis familiaris
ggaacactcgtgagagctacgatga

SEQ ID NO: 160617 - DNA, 25 bp, Canis familiaris
ggaacacatccacaagctgaaggca

SEQ ID NO: 160618 - DNA, 25 bp, Canis familiaris
ggaacaagatcccgagcgataggca

SEQ ID NO: 160619 - DNA, 25 bp, Canis familiaris
ggaaaagaagccacagctagctgat

SEQ ID NO: 160620 - DNA, 25 bp, Canis familiaris
ggaacaagcaaactgggctattgaa

SEQ ID NO: 160621 - DNA, 25 bp, Canis familiaris
ggaagcaagggctggagcaatttat

SEQ ID NO: 160622 - DNA, 25 bp, Canis familiaris
ggaagccaagctcagcaagtattta

SEQ ID NO: 160623 - DNA, 25 bp, Canis familiaris
ggaacttgactctagaactagtcta

SEQ ID NO: 160624 - DNA, 25 bp, Canis familiaris
ggaactatgactaagacatcagaga

SEQ ID NO: 160625 - DNA, 25 bp, Canis familiaris
ggaagcattggtggaggatatgatg

SEQ ID NO: 160626 - DNA, 25 bp, Canis familiaris
ggaagcttgtctggaagtcgaggag

SEQ ID NO: 160627 - DNA, 25 bp, Canis familiaris
ggaagcctgctgggaaggcggaggg

SEQ ID NO: 160628 - DNA, 25 bp, Canis familiaris
ggaagtctgtggacaaggctcctga

SEQ ID NO: 160629 - DNA, 25 bp, Canis familiaris
ggaagtttgggttggcatccaccag

SEQ ID NO: 160630 - DNA, 25 bp, Canis familiaris
ggaagtatcgggaatataccaacct

SEQ ID NO: 160631 - DNA, 25 bp, Canis familiaris
ggaagaacaggtcaatcagcccttg

SEQ ID NO: 160632 - DNA, 25 bp, Canis familiaris
ggaagaacgcgggacaggcaacagt

SEQ ID NO: 160633 - DNA, 25 bp, Canis familiaris
ggaaaacgtcacgctgaatatatga

SEQ ID NO: 160634 - DNA, 25 bp, Canis familiaris
ggaaaactcgactgcataatttgtg

SEQ ID NO: 160635 - DNA, 25 bp, Canis familiaris
ggaataaccaactcttattggccaa

SEQ ID NO: 160636 - DNA, 25 bp, Canis familiaris
ggaaaaggaacatttgagagtggcc

SEQ ID NO: 160637 - DNA, 25 bp, Canis familiaris
ggaaaaaaaatcttgcacatctgcc

SEQ ID NO: 160638 - DNA, 25 bp, Canis familiaris
ggaaaaagatgctttggcctctcct

SEQ ID NO: 160639 - DNA, 25 bp, Canis familiaris
ggaacacaaggctttagtcactact

SEQ ID NO: 160640 - DNA, 25 bp, Canis familiaris
ggaacagctagaccattaggcctat

SEQ ID NO: 160641 - DNA, 25 bp, Canis familiaris
ggaacagctatgaccattagcctat

SEQ ID NO: 160642 - DNA, 25 bp, Canis familiaris
ggaacagtttgcttggagacatttc

SEQ ID NO: 160643 - DNA, 25 bp, Canis familiaris
ggaacagattacctgggaaacatcc

SEQ ID NO: 160644 - DNA, 25 bp, Canis familiaris
ggaaacacagaccgggtattccaca

SEQ ID NO: 160645 - DNA, 25 bp, Canis familiaris
ggaaagcacaacttcgtatactaca

SEQ ID NO: 160646 - DNA, 25 bp, Canis familiaris
ggaaagaccatctcatgactaccac

SEQ ID NO: 160647 - DNA, 25 bp, Canis familiaris
ggaacagcgtataacgacgacctcc

SEQ ID NO: 160648 - DNA, 25 bp, Canis familiaris
ggaacgcttattaagatcgacttcg

SEQ ID NO: 160649 - DNA, 25 bp, Canis familiaris
ggaaagccttttacaggacgcctgg

SEQ ID NO: 160650 - DNA, 25 bp, Canis familiaris
ggaaaatcttttacagagactccag

SEQ ID NO: 160651 - DNA, 25 bp, Canis familiaris
ggaaaatttatacagacactttgaa

SEQ ID NO: 160652 - DNA, 25 bp, Canis familiaris
ggaaacatttccttgagacactagt

SEQ ID NO: 160653 - DNA, 25 bp, Canis familiaris
ggaaaaatctaattgaacagctatg

SEQ ID NO: 160654 - DNA, 25 bp, Canis familiaris
ggaacacagttgttttccacaatgt

SEQ ID NO: 160655 - DNA, 25 bp, Canis familiaris
ggaaagctggtgttttgcactccaa

SEQ ID NO: 160656 - DNA, 25 bp, Canis familiaris
ggaaactgcaattacttgcctatca

SEQ ID NO: 160657 - DNA, 25 bp, Canis familiaris
ggaagaccacatcatcttcctgtcc

SEQ ID NO: 160658 - DNA, 25 bp, Canis familiaris
ggaaaatacagcgtttcttgtctca

SEQ ID NO: 160659 - DNA, 25 bp, Canis familiaris
ggaacaaagagccactctcacgttc

SEQ ID NO: 160660 - DNA, 25 bp, Canis familiaris
ggaaaatgaactcctccaagctgcc

SEQ ID NO: 160661 - DNA, 25 bp, Canis familiaris
ggaagaaagcctctggcaacttccc

SEQ ID NO: 160662 - DNA, 25 bp, Canis familiaris
ggaaaaatcggactgccaatcattc

SEQ ID NO: 160663 - DNA, 25 bp, Canis familiaris
ggaatgacagtccaattgcaggttt

SEQ ID NO: 160664 - DNA, 25 bp, Canis familiaris
ggaaacaccacagatggagctgctt

SEQ ID NO: 160665 - DNA, 25 bp, Canis familiaris
ggaacaactgccggtgatactggta

SEQ ID NO: 160666 - DNA, 25 bp, Canis familiaris
ggaactacatctgccatgtgacttg

SEQ ID NO: 160667 - DNA, 25 bp, Canis familiaris
ggaacccctgctagcaggcattctt

SEQ ID NO: 160668 - DNA, 25 bp, Canis familiaris
ggaatgctgcctagtatacgtcctt

SEQ ID NO: 160669 - DNA, 25 bp, Canis familiaris
ggaacccttggcacagctttgtgtt

SEQ ID NO: 160670 - DNA, 25 bp, Canis familiaris
ggaactccctggatatctatctgtg

SEQ ID NO: 160671 - DNA, 25 bp, Canis familiaris
ggaacatcatacggagtttacttgt

SEQ ID NO: 160672 - DNA, 25 bp, Canis familiaris
ggaagtcaacaactgtctacatttg

SEQ ID NO: 160673 - DNA, 25 bp, Canis familiaris
ggaagttggctctccatgagcattt

SEQ ID NO: 160674 - DNA, 25 bp, Canis familiaris
ggaatgttggttgcctgttgcagtt

SEQ ID NO: 160675 - DNA, 25 bp, Canis familiaris
ggaaactggtctgcacagccaagtt

SEQ ID NO: 160676 - DNA, 25 bp, Canis familiaris
ggaaagcgtgccaatcaacatgctg

SEQ ID NO: 160677 - DNA, 25 bp, Canis familiaris
ggaaacagcttcctcaagcagtgtc

SEQ ID NO: 160678 - DNA, 25 bp, Canis familiaris
ggaacagcagagacaacagcagcag

SEQ ID NO: 160679 - DNA, 25 bp, Canis familiaris
ggaaagccaacaagactgcacaggt

SEQ ID NO: 160680 - DNA, 25 bp, Canis familiaris
ggaacccacaagacactcactggga

SEQ ID NO: 160681 - DNA, 25 bp, Canis familiaris
ggaaggcgtcaatcctacgggatca

SEQ ID NO: 160682 - DNA, 25 bp, Canis familiaris
ggaaaagtgacagccggctgtggat

SEQ ID NO: 160683 - DNA, 25 bp, Canis familiaris
ggaagaagcttcctcctggagggat

SEQ ID NO: 160684 - DNA, 25 bp, Canis familiaris
ggaagaattgacccttgaaggaatc

SEQ ID NO: 160685 - DNA, 25 bp, Canis familiaris
ggaacttgtgaccttatgttggaag

SEQ ID NO: 160686 - DNA, 25 bp, Canis familiaris
ggaacttgcattctttgtagtgagc

SEQ ID NO: 160687 - DNA, 25 bp, Canis familiaris
ggaacttgcatttctctaggggtcc

SEQ ID NO: 160688 - DNA, 25 bp, Canis familiaris
ggaacattcttagttgggaattgct

SEQ ID NO: 160689 - DNA, 25 bp, Canis familiaris
ggaacttccttctggggatactgcc

SEQ ID NO: 160690 - DNA, 25 bp, Canis familiaris
ggaactcctttctctggaatgtata

SEQ ID NO: 160691 - DNA, 25 bp, Canis familiaris
ggaacattcggtgacaggagattat

SEQ ID NO: 160692 - DNA, 25 bp, Canis familiaris
ggaactttgctttaagtgacactat

SEQ ID NO: 160693 - DNA, 25 bp, Canis familiaris
ggaaaattgctttatttgatcctta

SEQ ID NO: 160694 - DNA, 25 bp, Canis familiaris
ggaacaatctgctctttttcagtaa

SEQ ID NO: 160695 - DNA, 25 bp, Canis familiaris
ggaacacactgtgcttttgacacta

SEQ ID NO: 160696 - DNA, 25 bp, Canis familiaris
ggaactagtcatgctgcacctgaac

SEQ ID NO: 160697 - DNA, 25 bp, Canis familiaris
ggaacttggattccacctcaaggaa

SEQ ID NO: 160698 - DNA, 25 bp, Canis familiaris
ggaacctgagtagccctgcaaaaac

SEQ ID NO: 160699 - DNA, 25 bp, Canis familiaris
ggaaacagaggtgctcctggacaaa

SEQ ID NO: 160700 - DNA, 25 bp, Canis familiaris
ggaaaaggctggttgccttgccaca

SEQ ID NO: 160701 - DNA, 25 bp, Canis familiaris
ggaagaaggtgctaatgtttggcca

SEQ ID NO: 160702 - DNA, 25 bp, Canis familiaris
ggaaaatgcctatcgatttggtgat

SEQ ID NO: 160703 - DNA, 25 bp, Canis familiaris
ggaaaagaacttgcatgttggtgaa

SEQ ID NO: 160704 - DNA, 25 bp, Canis familiaris
ggaaacgctgtctttcagttgagaa

SEQ ID NO: 160705 - DNA, 25 bp, Canis familiaris
ggaacataggtctttttgtcagaga

SEQ ID NO: 160706 - DNA, 25 bp, Canis familiaris
ggaaaagatctataatgtggcgaag

SEQ ID NO: 160707 - DNA, 25 bp, Canis familiaris
ggaaacaacatatgggatactgaag

SEQ ID NO: 160708 - DNA, 25 bp, Canis familiaris
ggaacagaacatactgggcaggcga

SEQ ID NO: 160709 - DNA, 25 bp, Canis familiaris
ggaacaaactgtcgtggggcgtgga

SEQ ID NO: 160710 - DNA, 25 bp, Canis familiaris
ggaagccacctgaggctgggtggag

SEQ ID NO: 160711 - DNA, 25 bp, Canis familiaris
ggaagccccagagggcctgggatag

SEQ ID NO: 160712 - DNA, 25 bp, Canis familiaris
ggaacgtccagatggcgtgaaatgg

SEQ ID NO: 160713 - DNA, 25 bp, Canis familiaris
ggaacgtccaaatagatttgtggtc

SEQ ID NO: 160714 - DNA, 25 bp, Canis familiaris
ggaactccgcaaagacatttatggg

SEQ ID NO: 160715 - DNA, 25 bp, Canis familiaris
ggaagctgtggaacccttttaggat

SEQ ID NO: 160716 - DNA, 25 bp, Canis familiaris
ggaactgtgcgtaacagcttttaaa

SEQ ID NO: 160717 - DNA, 25 bp, Canis familiaris
ggaagtgggttctaccattgtaata

SEQ ID NO: 160718 - DNA, 25 bp, Canis familiaris
ggaaggaggtcttgtcaatttagaa

SEQ ID NO: 160719 - DNA, 25 bp, Canis familiaris
ggaaggggagggccagatcttccag

SEQ ID NO: 160720 - DNA, 25 bp, Canis familiaris
ggaacgggcagaaggagatcttgga

SEQ ID NO: 160721 - DNA, 25 bp, Canis familiaris
ggaacgagcccagaggtgcctggaa

SEQ ID NO: 160722 - DNA, 25 bp, Canis familiaris
ggaaaacccagcaaggtcacgtgtg

SEQ ID NO: 160723 - DNA, 25 bp, Canis familiaris
ggaaacacaacactcacgatccttg

SEQ ID NO: 160724 - DNA, 25 bp, Canis familiaris
ggaaacacaattgcactcttcttcc

SEQ ID NO: 160725 - DNA, 25 bp, Canis familiaris
ggaaacaggtatggcctcttctcac

SEQ ID NO: 160726 - DNA, 25 bp, Canis familiaris
ggaaactgagtaagccctttgcctg

SEQ ID NO: 160727 - DNA, 25 bp, Canis familiaris
ggaacgcttggaagcccttgatgcc

SEQ ID NO: 160728 - DNA, 25 bp, Canis familiaris
ggaaaattgtgtggcactcttggtg

SEQ ID NO: 160729 - DNA, 25 bp, Canis familiaris
ggaaaattgctgagctcatgcctgg

SEQ ID NO: 160730 - DNA, 25 bp, Canis familiaris
ggaacaaatgttggctcagcagtgg

SEQ ID NO: 160731 - DNA, 25 bp, Canis familiaris
ggaagcagactagagctcacagctc

SEQ ID NO: 160732 - DNA, 25 bp, Canis familiaris
ggaagcttctgaaagtcctgctggt

SEQ ID NO: 160733 - DNA, 25 bp, Canis familiaris
ggaaggcgatgaatcagtccctgaa

SEQ ID NO: 160734 - DNA, 25 bp, Canis familiaris
ggaaggccatgctatgcctatccgt

SEQ ID NO: 160735 - DNA, 25 bp, Canis familiaris
ggaatcccaattcttccagtggttc

SEQ ID NO: 160736 - DNA, 25 bp, Canis familiaris
ggaacctagaatcttcacactgagc

SEQ ID NO: 160737 - DNA, 25 bp, Canis familiaris
ggaagtctagaacaccacactcaac

SEQ ID NO: 160738 - DNA, 25 bp, Canis familiaris
ggaagtagtgcttctgaaccccaac

SEQ ID NO: 160739 - DNA, 25 bp, Canis familiaris
ggaactgaggttggagtcacccaca

SEQ ID NO: 160740 - DNA, 25 bp, Canis familiaris
ggaacatggcctgaagtacccggca

SEQ ID NO: 160741 - DNA, 25 bp, Canis familiaris
ggaacagcccccagtgcactgggga

SEQ ID NO: 160742 - DNA, 25 bp, Canis familiaris
ggaagagccttgctttgcaggggag

SEQ ID NO: 160743 - DNA, 25 bp, Canis familiaris
ggaagaggcattcttcccgaggagc

SEQ ID NO: 160744 - DNA, 25 bp, Canis familiaris
ggaagggtagctcacccatgattga

SEQ ID NO: 160745 - DNA, 25 bp, Canis familiaris
ggaatgggtctttgacaccagattt

SEQ ID NO: 160746 - DNA, 25 bp, Canis familiaris
ggaagagagtttcacgggatcatct

SEQ ID NO: 160747 - DNA, 25 bp, Canis familiaris
ggaaggttctacccaggtggagcaa

SEQ ID NO: 160748 - DNA, 25 bp, Canis familiaris
ggaagggttacgtggtgcgaatcag

SEQ ID NO: 160749 - DNA, 25 bp, Canis familiaris
ggaactgagggactgtcggggacaa

SEQ ID NO: 160750 - DNA, 25 bp, Canis familiaris
ggaacgacgcagcttcattgggaac

SEQ ID NO: 160751 - DNA, 25 bp, Canis familiaris
ggaacagcaccatgacttgttggaa

SEQ ID NO: 160752 - DNA, 25 bp, Canis familiaris
ggaacagacccagctgtgtgtgcag

SEQ ID NO: 160753 - DNA, 25 bp, Canis familiaris
ggaacagagatttcctgctggtctg

SEQ ID NO: 160754 - DNA, 25 bp, Canis familiaris
ggaacagtgttgtgcgtgtgtgtgt

SEQ ID NO: 160755 - DNA, 25 bp, Canis familiaris
ggaacatcatctttacctgtttatg

SEQ ID NO: 160756 - DNA, 25 bp, Canis familiaris
ggaactgatatttacctgacctgaa

SEQ ID NO: 160757 - DNA, 25 bp, Canis familiaris
ggaactgtattgaagcctgccagga

SEQ ID NO: 160758 - DNA, 25 bp, Canis familiaris
tggagagcgagcagttcctgacgga

SEQ ID NO: 160759 - DNA, 25 bp, Canis familiaris
ggcagagcaggctgggttaccgatt

SEQ ID NO: 160760 - DNA, 25 bp, Canis familiaris
ggaacgcgaggggattacggtcata

SEQ ID NO: 160761 - DNA, 25 bp, Canis familiaris
ggaatggggggagttactggtcaca

SEQ ID NO: 160762 - DNA, 25 bp, Canis familiaris
ggaagtggagttcctgtccacgtcc

SEQ ID NO: 160763 - DNA, 25 bp, Canis familiaris
ggaatccgcaggattgatcccgtct

SEQ ID NO: 160764 - DNA, 25 bp, Canis familiaris
ggaaccttggttgaccagcagatct

SEQ ID NO: 160765 - DNA, 25 bp, Canis familiaris
ggaaggcgttttgagaccagacggg

SEQ ID NO: 160766 - DNA, 25 bp, Canis familiaris
tggaacccttaaagagatcctgggg

SEQ ID NO: 160767 - DNA, 25 bp, Canis familiaris
ggaacacacttatttagcctcttgg

SEQ ID NO: 160768 - DNA, 25 bp, Canis familiaris
ggaacaagacatcttaccgcttggt

SEQ ID NO: 160769 - DNA, 25 bp, Canis familiaris
ggaacaaggcaacttccaacttctt

SEQ ID NO: 160770 - DNA, 25 bp, Canis familiaris
ggaacagaggacatgtcgccagttc

SEQ ID NO: 160771 - DNA, 25 bp, Canis familiaris
ggaacactgaggagttctgcagtcc

SEQ ID NO: 160772 - DNA, 25 bp, Canis familiaris
ggaacagtgtggagtttcctcacaa

SEQ ID NO: 160773 - DNA, 25 bp, Canis familiaris
ggaacagtgatgaaccattgtaccc

SEQ ID NO: 160774 - DNA, 25 bp, Canis familiaris
ggaaggtgatgcatgcacagctgaa

SEQ ID NO: 160775 - DNA, 25 bp, Canis familiaris
ggaagcagtttccagagctgcacaa

SEQ ID NO: 160776 - DNA, 25 bp, Canis familiaris
ggaacagctgtttgacgcattcaga

SEQ ID NO: 160777 - DNA, 25 bp, Canis familiaris
ggaacgctgcatgcgagtgctttat

SEQ ID NO: 160778 - DNA, 25 bp, Canis familiaris
ggaacgtgcattctgtttgtctgtg

SEQ ID NO: 160779 - DNA, 25 bp, Canis familiaris
ggaacgtatatttgtcttcttgagg

SEQ ID NO: 160780 - DNA, 25 bp, Canis familiaris
ggaacttagtgtttctgtttgtgct

SEQ ID NO: 160781 - DNA, 25 bp, Canis familiaris
ggaacttatttattctgttttcatg

SEQ ID NO: 160782 - DNA, 25 bp, Canis familiaris
ggaacttgtttcttcaagctcttct

SEQ ID NO: 160783 - DNA, 25 bp, Canis familiaris
ggaactatttctacaaatctttctt

SEQ ID NO: 160784 - DNA, 25 bp, Canis familiaris
ggaactccttgcaaaacgtcggttg

SEQ ID NO: 160785 - DNA, 25 bp, Canis familiaris
ggaacctcagcggaaacttctggtg

SEQ ID NO: 160786 - DNA, 25 bp, Canis familiaris
ggaacacgcagaaggaactcttgga

SEQ ID NO: 160787 - DNA, 25 bp, Canis familiaris
ggaacatgctggaggaactgtattg

SEQ ID NO: 160788 - DNA, 25 bp, Canis familiaris
ggaacatgctggagaaactggatga

SEQ ID NO: 160789 - DNA, 25 bp, Canis familiaris
ggaacagctccaggaagaccatgta

SEQ ID NO: 160790 - DNA, 25 bp, Canis familiaris
ggaagacttcatgaaagcaggtcag

SEQ ID NO: 160791 - DNA, 25 bp, Canis familiaris
ggaagaccttgtaacggttcagcaa

SEQ ID NO: 160792 - DNA, 25 bp, Canis familiaris
ggaagacttgcttaaccttacaaag

SEQ ID NO: 160793 - DNA, 25 bp, Canis familiaris
ggaagacttctctaagcacctaaga

SEQ ID NO: 160794 - DNA, 25 bp, Canis familiaris
ggaacactttcctacttgcttaggc

SEQ ID NO: 160795 - DNA, 25 bp, Canis familiaris
ggaacattatctccaagttttactc

SEQ ID NO: 160796 - DNA, 25 bp, Canis familiaris
ggaacacaatttccacttccattcc

SEQ ID NO: 160797 - DNA, 25 bp, Canis familiaris
ggaaccatatagtccttatcctatc

SEQ ID NO: 160798 - DNA, 25 bp, Canis familiaris
ggaactgcaaagcctagatgaccgt

SEQ ID NO: 160799 - DNA, 25 bp, Canis familiaris
ggaactgccacagcaggatctccac

SEQ ID NO: 160800 - DNA, 25 bp, Canis familiaris
ggaacaccgacaagtgatgcccacc

SEQ ID NO: 160801 - DNA, 25 bp, Canis familiaris
ggaagaccaaatcatcagcgccaac

SEQ ID NO: 160802 - DNA, 25 bp, Canis familiaris
ggaagaaaatctaatatcgcagcat

SEQ ID NO: 160803 - DNA, 25 bp, Canis familiaris
ggaagatcaacctaatgtcctctga

SEQ ID NO: 160804 - DNA, 25 bp, Canis familiaris
ggaacagcagatgcaaaggccctga

SEQ ID NO: 160805 - DNA, 25 bp, Canis familiaris
ggaagaatgaaatgcaggccctacc

SEQ ID NO: 160806 - DNA, 25 bp, Canis familiaris
ggaagaactagtgacgctccttccg

SEQ ID NO: 160807 - DNA, 25 bp, Canis familiaris
ggaagaacggtctcagaactgtttg

SEQ ID NO: 160808 - DNA, 25 bp, Canis familiaris
ggaacccggtcacagaagatgacta

SEQ ID NO: 160809 - DNA, 25 bp, Canis familiaris
ggaaccgtggtcttcaaactgaata

SEQ ID NO: 160810 - DNA, 25 bp, Canis familiaris
ggaaccctgcaaactgcaaagctga

SEQ ID NO: 160811 - DNA, 25 bp, Canis familiaris
ggaacctcagcagcatggcaaacaa

SEQ ID NO: 160812 - DNA, 25 bp, Canis familiaris
ggaacttcatcccagtgcaaatcca

SEQ ID NO: 160813 - DNA, 25 bp, Canis familiaris
ggaatcttaagccagtcagtctcga

SEQ ID NO: 160814 - DNA, 25 bp, Canis familiaris
ggaacatggaaccttcagatctcaa

SEQ ID NO: 160815 - DNA, 25 bp, Canis familiaris
ggaatcaggactccgttgtccaaag

SEQ ID NO: 160816 - DNA, 25 bp, Canis familiaris
tgtaagaccaagccgtattccaaag

SEQ ID NO: 160817 - DNA, 25 bp, Canis familiaris
ggaagatcctagtctgtcttgccat

SEQ ID NO: 160818 - DNA, 25 bp, Canis familiaris
ggaagacttcagttgcattgactat

SEQ ID NO: 160819 - DNA, 25 bp, Canis familiaris
ggaagcacagtcctatgcagatgac

SEQ ID NO: 160820 - DNA, 25 bp, Canis familiaris
ggaagcaggtgccgctagtagcata

SEQ ID NO: 160821 - DNA, 25 bp, Canis familiaris
ggcaatgcagtccactgatagtatg

SEQ ID NO: 160822 - DNA, 25 bp, Canis familiaris
ggcagaggtcgaggcagagggttac

SEQ ID NO: 160823 - DNA, 25 bp, Canis familiaris
ggcaatggtcgtggaggccgagggc

SEQ ID NO: 160824 - DNA, 25 bp, Canis familiaris
ggaacagactgaggaggccgctggg

SEQ ID NO: 160825 - DNA, 25 bp, Canis familiaris
ggaagaagtgagggctgcgcaggga

SEQ ID NO: 160826 - DNA, 25 bp, Canis familiaris
ggaacaggtggaggtctgctgacag

SEQ ID NO: 160827 - DNA, 25 bp, Canis familiaris
ggaacggttgcagtgtctctgagtg

SEQ ID NO: 160828 - DNA, 25 bp, Canis familiaris
ggaactgagatccctgttgcatatg

SEQ ID NO: 160829 - DNA, 25 bp, Canis familiaris
ggaaccagatcctgtctgtgctggc

SEQ ID NO: 160830 - DNA, 25 bp, Canis familiaris
ggaactgagaactttgctgggatgc

SEQ ID NO: 160831 - DNA, 25 bp, Canis familiaris
ggaactaacacttctgggtcagcag

SEQ ID NO: 160832 - DNA, 25 bp, Canis familiaris
ggaagctatcacttagcctggtaca

SEQ ID NO: 160833 - DNA, 25 bp, Canis familiaris
ggaactccatcacaagtggtgcctt

SEQ ID NO: 160834 - DNA, 25 bp, Canis familiaris
ggaactccttgcacagtggtacgtg

SEQ ID NO: 160835 - DNA, 25 bp, Canis familiaris
ggaacgccttgcacagtatgagtca

SEQ ID NO: 160836 - DNA, 25 bp, Canis familiaris
ggaacgccttgcacagtatgagtca

SEQ ID NO: 160837 - DNA, 25 bp, Canis familiaris
ggaacgccttgcacagtatgagtca

SEQ ID NO: 160838 - DNA, 25 bp, Canis familiaris
ggaatatcctataccagttggagcc

SEQ ID NO: 160839 - DNA, 25 bp, Canis familiaris
ggaagctactttgagtgctggaagc

SEQ ID NO: 160840 - DNA, 25 bp, Canis familiaris
ggaagtgactttgactgcgagttga

SEQ ID NO: 160841 - DNA, 25 bp, Canis familiaris
ggaactgaggttcatagaggttagc

SEQ ID NO: 160842 - DNA, 25 bp, Canis familiaris
ggaactggagtcctacataggctaa

SEQ ID NO: 160843 - DNA, 25 bp, Canis familiaris
ggaacagggtgactccatcggtcaa

SEQ ID NO: 160844 - DNA, 25 bp, Canis familiaris
ggaactgggtatccttgggaccagc

SEQ ID NO: 160845 - DNA, 25 bp, Canis familiaris
ggaattcggaaagtgggctgacgac

SEQ ID NO: 160846 - DNA, 25 bp, Canis familiaris
ggaatcccgaaaggactgagcagct

SEQ ID NO: 160847 - DNA, 25 bp, Canis familiaris
ggaacccaaacactgatctcagcga

SEQ ID NO: 160848 - DNA, 25 bp, Canis familiaris
ggaacccataacttgattccaggtt

SEQ ID NO: 160849 - DNA, 25 bp, Canis familiaris
ggaaccccaatagacaccaggtgta

SEQ ID NO: 160850 - DNA, 25 bp, Canis familiaris
ggaaccccacgagggcaagcagagt

SEQ ID NO: 160851 - DNA, 25 bp, Canis familiaris
ggaagcccccagaaagatggcagag

SEQ ID NO: 160852 - DNA, 25 bp, Canis familiaris
ggaacctgtccattaagaaggaggt

SEQ ID NO: 160853 - DNA, 25 bp, Canis familiaris
ggaactcagacccagaaggaggtgg

SEQ ID NO: 160854 - DNA, 25 bp, Canis familiaris
ggaactcagccaaggcacagggtgg

SEQ ID NO: 160855 - DNA, 25 bp, Canis familiaris
ggaagccccggggagtatgtgctgc

SEQ ID NO: 160856 - DNA, 25 bp, Canis familiaris
ggaattccccggggatcagtcatgc

SEQ ID NO: 160857 - DNA, 25 bp, Canis familiaris
ggaattcccccaggagatgtggcat

SEQ ID NO: 160858 - DNA, 25 bp, Canis familiaris
ggaactcactcctttgaatttgcac

SEQ ID NO: 160859 - DNA, 25 bp, Canis familiaris
ggaactttccatttgcatattttaa

SEQ ID NO: 160860 - DNA, 25 bp, Canis familiaris
ggaattcttccatcccatattaaaa

SEQ ID NO: 160861 - DNA, 25 bp, Canis familiaris
ggaacctaccatcatcacaataaag

SEQ ID NO: 160862 - DNA, 25 bp, Canis familiaris
ggaacctcaccctacagagttgtat

SEQ ID NO: 160863 - DNA, 25 bp, Canis familiaris
ggaaccccagtcacagattgatgaa

SEQ ID NO: 160864 - DNA, 25 bp, Canis familiaris
ggaaccccaactcacttgatatgtt

SEQ ID NO: 160865 - DNA, 25 bp, Canis familiaris
ggaaccgaaatcacctgttgcatgt

SEQ ID NO: 160866 - DNA, 25 bp, Canis familiaris
ggaaccgagaatcccttttagcttg

SEQ ID NO: 160867 - DNA, 25 bp, Canis familiaris
ggaaccggattgtctgtttctactc

SEQ ID NO: 160868 - DNA, 25 bp, Canis familiaris
ggaacactggctcggcatggtaaac

SEQ ID NO: 160869 - DNA, 25 bp, Canis familiaris
ggaacatgtccaagaaggataaacc

SEQ ID NO: 160870 - DNA, 25 bp, Canis familiaris
ggctaccccacaaatggtaaccctg

SEQ ID NO: 160871 - DNA, 25 bp, Canis familiaris
ggctatccccaaaaggacagcccca

SEQ ID NO: 160872 - DNA, 25 bp, Canis familiaris
ggaaccaccaagctgggatccatta

SEQ ID NO: 160873 - DNA, 25 bp, Canis familiaris
ggaactgaaaagcattggggattga

SEQ ID NO: 160874 - DNA, 25 bp, Canis familiaris
ggaacgtagagactgttttctttga

SEQ ID NO: 160875 - DNA, 25 bp, Canis familiaris
ggaacgtggatctttttattttgca

SEQ ID NO: 160876 - DNA, 25 bp, Canis familiaris
ggaacttggctctgtgtttttgcag

SEQ ID NO: 160877 - DNA, 25 bp, Canis familiaris
ggaattgagtcccgtttcatttcaa

SEQ ID NO: 160878 - DNA, 25 bp, Canis familiaris
ggaaggagacccgtgtacagtatca

SEQ ID NO: 160879 - DNA, 25 bp, Canis familiaris
ggaaggatgatcgtgggaacactga

SEQ ID NO: 160880 - DNA, 25 bp, Canis familiaris
ggaacgtcacggttgatggcacaga

SEQ ID NO: 160881 - DNA, 25 bp, Canis familiaris
ggaaccaacggatgattaaagtctg

SEQ ID NO: 160882 - DNA, 25 bp, Canis familiaris
ggaaccaactggtcgtctagacagt

SEQ ID NO: 160883 - DNA, 25 bp, Canis familiaris
ggaaccactctttcgttgaaaggtg

SEQ ID NO: 160884 - DNA, 25 bp, Canis familiaris
ggaacaggtcttctgttgaaacttg

SEQ ID NO: 160885 - DNA, 25 bp, Canis familiaris
ggaacagcggttccgttgcaaagga

SEQ ID NO: 160886 - DNA, 25 bp, Canis familiaris
ggaacagcatgggctgccatgggcc

SEQ ID NO: 160887 - DNA, 25 bp, Canis familiaris
ggaacagatgagccgacatactggc

SEQ ID NO: 160888 - DNA, 25 bp, Canis familiaris
ggaacaggatgcccacatactgtct

SEQ ID NO: 160889 - DNA, 25 bp, Canis familiaris
ggaacatgtgaacccatatgctttc

SEQ ID NO: 160890 - DNA, 25 bp, Canis familiaris
ggaacagtaagttagtgctgagcat

SEQ ID NO: 160891 - DNA, 25 bp, Canis familiaris
ggaacagctacagccatttggttta

SEQ ID NO: 160892 - DNA, 25 bp, Canis familiaris
ggaacgataagctctgttgggtttc

SEQ ID NO: 160893 - DNA, 25 bp, Canis familiaris
ggaactcatggactctctggtttgt

SEQ ID NO: 160894 - DNA, 25 bp, Canis familiaris
ggaactatagtgcctgcagcggtgt

SEQ ID NO: 160895 - DNA, 25 bp, Canis familiaris
ggaactaatctagcagggtgtattc

SEQ ID NO: 160896 - DNA, 25 bp, Canis familiaris
ggaactatattctgagggacctgtc

SEQ ID NO: 160897 - DNA, 25 bp, Canis familiaris
ggaactgaatctttagcttcccccg

SEQ ID NO: 160898 - DNA, 25 bp, Canis familiaris
ggaacatgacttctctgcttatccc

SEQ ID NO: 160899 - DNA, 25 bp, Canis familiaris
ggaacttctcaaactgctattgccc

SEQ ID NO: 160900 - DNA, 25 bp, Canis familiaris
ggaacttacacaactgtaaccgtat

SEQ ID NO: 160901 - DNA, 25 bp, Canis familiaris
tggaagcctttttcggaatccttat

SEQ ID NO: 160902 - DNA, 25 bp, Canis familiaris
tggagaccttttgggaacacgcttt

SEQ ID NO: 160903 - DNA, 25 bp, Canis familiaris
tggaaccaatccaggacacatcgcc

SEQ ID NO: 160904 - DNA, 25 bp, Canis familiaris
ggaaccaattacggacacatgctgc

SEQ ID NO: 160905 - DNA, 25 bp, Canis familiaris
ggaagccaagttccatccaatctat

SEQ ID NO: 160906 - DNA, 25 bp, Canis familiaris
ggaaccaaatggaccacaactatca

SEQ ID NO: 160907 - DNA, 25 bp, Canis familiaris
ggaaccaaaggtggatcaacttgac

SEQ ID NO: 160908 - DNA, 25 bp, Canis familiaris
ggaacacgaagtgtgtctcatttga

SEQ ID NO: 160909 - DNA, 25 bp, Canis familiaris
ggcaacaccaacactttcaatgcta

SEQ ID NO: 160910 - DNA, 25 bp, Canis familiaris
ggaacccaacttctcatcgatggat

SEQ ID NO: 160911 - DNA, 25 bp, Canis familiaris
ggaataaaacttctgatccaggatc

SEQ ID NO: 160912 - DNA, 25 bp, Canis familiaris
ggaagaaaccgttcagaccatggac

SEQ ID NO: 160913 - DNA, 25 bp, Canis familiaris
ggaagagaacattgttcgtacccac

SEQ ID NO: 160914 - DNA, 25 bp, Canis familiaris
ggaagagagaccactcttctccaac

SEQ ID NO: 160915 - DNA, 25 bp, Canis familiaris
ggaagagaatgctcctgttcttaga

SEQ ID NO: 160916 - DNA, 25 bp, Canis familiaris
ggaagggatgaccgcgtttgtggaa

SEQ ID NO: 160917 - DNA, 25 bp, Canis familiaris
ggaagtgaaataccagtaggttgga

SEQ ID NO: 160918 - DNA, 25 bp, Canis familiaris
ggaagtgaaggcccaggggacatgg

SEQ ID NO: 160919 - DNA, 25 bp, Canis familiaris
ggaactgggtggacgtggtgaagca

SEQ ID NO: 160920 - DNA, 25 bp, Canis familiaris
ggaactgaggggtgggtgcagggcc

SEQ ID NO: 160921 - DNA, 25 bp, Canis familiaris
tgtttcggttggaggtgccaggacc

SEQ ID NO: 160922 - DNA, 25 bp, Canis familiaris
tggatttgtgttggaccgtccggac

SEQ ID NO: 160923 - DNA, 25 bp, Canis familiaris
ggaacggttggatcagcccgatgac

SEQ ID NO: 160924 - DNA, 25 bp, Canis familiaris
ggaacttagtgatttggcccgtgac

SEQ ID NO: 160925 - DNA, 25 bp, Canis familiaris
ggaactgtagtgcttacactgcctt

SEQ ID NO: 160926 - DNA, 25 bp, Canis familiaris
ggaaccacagtgtatgtcaactgcc

SEQ ID NO: 160927 - DNA, 25 bp, Canis familiaris
ggaacccatggatgtcctgagacca

SEQ ID NO: 160928 - DNA, 25 bp, Canis familiaris
ggaagtcctggattgtgactgtgac

SEQ ID NO: 160929 - DNA, 25 bp, Canis familiaris
ggaagcccttgataactttctgaat

SEQ ID NO: 160930 - DNA, 25 bp, Canis familiaris
ggaagttgttggtgatctttgcaaa

SEQ ID NO: 160931 - DNA, 25 bp, Canis familiaris
ggaaggtttctgtgactgggagcaa

SEQ ID NO: 160932 - DNA, 25 bp, Canis familiaris
ggcaaaatttctgttgtggaggcac

SEQ ID NO: 160933 - DNA, 25 bp, Canis familiaris
ggaactttcactctgttgggtgcac

SEQ ID NO: 160934 - DNA, 25 bp, Canis familiaris
ggaactctaacctatttgtgtcata

SEQ ID NO: 160935 - DNA, 25 bp, Canis familiaris
ggaaccgaacacttaaagctgcaga

SEQ ID NO: 160936 - DNA, 25 bp, Canis familiaris
ggaaccaaacacttaacgctgcaga

SEQ ID NO: 160937 - DNA, 25 bp, Canis familiaris
ggaaccgaatagtcacaacgcgagg

SEQ ID NO: 160938 - DNA, 25 bp, Canis familiaris
ggaacgtgtcatgggcaacaccggg

SEQ ID NO: 160939 - DNA, 25 bp, Canis familiaris
ggaacgtgctgttggaatacctggc

SEQ ID NO: 160940 - DNA, 25 bp, Canis familiaris
ggaagcgggtgaggagcagcccatg

SEQ ID NO: 160941 - DNA, 25 bp, Canis familiaris
ggaactgaggtgtggtgccgatgcc

SEQ ID NO: 160942 - DNA, 25 bp, Canis familiaris
ggaatcagagtccgggatctgggcg

SEQ ID NO: 160943 - DNA, 25 bp, Canis familiaris
ggaatcatcattgcgggctgggacc

SEQ ID NO: 160944 - DNA, 25 bp, Canis familiaris
ggaactctagccctggtaggaaagc

SEQ ID NO: 160945 - DNA, 25 bp, Canis familiaris
ggaacttggacactgggagaccaga

SEQ ID NO: 160946 - DNA, 25 bp, Canis familiaris
ggaacattctgggttcaagaccagt

SEQ ID NO: 160947 - DNA, 25 bp, Canis familiaris
ggaactagctgttttactgcaccag

SEQ ID NO: 160948 - DNA, 25 bp, Canis familiaris
ggaactgagggaatgctccagcaac

SEQ ID NO: 160949 - DNA, 25 bp, Canis familiaris
ggaacgtgatggttctccaggacga

SEQ ID NO: 160950 - DNA, 25 bp, Canis familiaris
ggaacagtgtgttttacctcagcca

SEQ ID NO: 160951 - DNA, 25 bp, Canis familiaris
ggaacagtgtttgattcccctgctt

SEQ ID NO: 160952 - DNA, 25 bp, Canis familiaris
ggaataggtttgagaccttcgtttg

SEQ ID NO: 160953 - DNA, 25 bp, Canis familiaris
ggcaacaagttagggacgtgtcgtt

SEQ ID NO: 160954 - DNA, 25 bp, Canis familiaris
ggaaggactccaggaacgtgggctg

SEQ ID NO: 160955 - DNA, 25 bp, Canis familiaris
ggaagcccataagcaaaggtactga

SEQ ID NO: 160956 - DNA, 25 bp, Canis familiaris
ggaagcccggccaaaagatgtacag

SEQ ID NO: 160957 - DNA, 25 bp, Canis familiaris
ggcggccctacaataaagatctcca

SEQ ID NO: 160958 - DNA, 25 bp, Canis familiaris
ggcgtgccctagagaagattgacct

SEQ ID NO: 160959 - DNA, 25 bp, Canis familiaris
tttgttccttgtcaagttggcccct

SEQ ID NO: 160960 - DNA, 25 bp, Canis familiaris
taggtccactttcttgtaggtgccc

SEQ ID NO: 160961 - DNA, 25 bp, Canis familiaris
tttgtaagacttgttccagggccac

SEQ ID NO: 160962 - DNA, 25 bp, Canis familiaris
ggaacgggcagaaggagatcttgga

SEQ ID NO: 160963 - DNA, 25 bp, Canis familiaris
ggaacgggcagaaggagatcttgga

SEQ ID NO: 160964 - DNA, 25 bp, Canis familiaris
ggaacgggcagaaggagctcttgga

SEQ ID NO: 160965 - DNA, 25 bp, Canis familiaris
ggaacgggcagaaggagctcttgga

SEQ ID NO: 160966 - DNA, 25 bp, Canis familiaris
ggaacgggcagaaggagctcttgga

SEQ ID NO: 160967 - DNA, 25 bp, Canis familiaris
ggaactgggctgagtgggcatgtgt

SEQ ID NO: 160968 - DNA, 25 bp, Canis familiaris
ggaacttggcttgtgtagactttgg

SEQ ID NO: 160969 - DNA, 25 bp, Canis familiaris
ggaacgttttctgctgagactattg

SEQ ID NO: 160970 - DNA, 25 bp, Canis familiaris
ggaatccgattctgttgagacaagt

SEQ ID NO: 160971 - DNA, 25 bp, Canis familiaris
ggaatccgtaagcctaggaagagga

SEQ ID NO: 160972 - DNA, 25 bp, Canis familiaris
ggaacatcgagaaggctgaggaact

SEQ ID NO: 160973 - DNA, 25 bp, Canis familiaris
ggaacataggatgggcccgatgcag

SEQ ID NO: 160974 - DNA, 25 bp, Canis familiaris
ggaatcaatgaagtacctcgcgcag

SEQ ID NO: 160975 - DNA, 25 bp, Canis familiaris
ggaagaataattacccagccaacta

SEQ ID NO: 160976 - DNA, 25 bp, Canis familiaris
ggaagttttttccatcaccagttga

SEQ ID NO: 160977 - DNA, 25 bp, Canis familiaris
ggaacctttttacagctgggtgaag

SEQ ID NO: 160978 - DNA, 25 bp, Canis familiaris
ggaacctttattgacgctgagggtc

SEQ ID NO: 160979 - DNA, 25 bp, Canis familiaris
ggaagccttttatcactggggttct

SEQ ID NO: 160980 - DNA, 25 bp, Canis familiaris
ggaaccgctatattagcactgtggg

SEQ ID NO: 160981 - DNA, 25 bp, Canis familiaris
ggaaccctttgtagacttagcagcc

SEQ ID NO: 160982 - DNA, 25 bp, Canis familiaris
ggaacctccttctttcattagagca

SEQ ID NO: 160983 - DNA, 25 bp, Canis familiaris
ggaaccttgtttatttgagatcttt

SEQ ID NO: 160984 - DNA, 25 bp, Canis familiaris
ggaaggctttttgtttgagtcagac

SEQ ID NO: 160985 - DNA, 25 bp, Canis familiaris
ggaagagtttccttttctagacaga

SEQ ID NO: 160986 - DNA, 25 bp, Canis familiaris
ggaagatggttccctttaagaagca

SEQ ID NO: 160987 - DNA, 25 bp, Canis familiaris
ggaagctttctcccttaataagcca

SEQ ID NO: 160988 - DNA, 25 bp, Canis familiaris
ggaactcttcttgcttagaaagaca

SEQ ID NO: 160989 - DNA, 25 bp, Canis familiaris
ggaatcctgtcatttttaacaacat

SEQ ID NO: 160990 - DNA, 25 bp, Canis familiaris
ggaactcttcatttttgactctgcc

SEQ ID NO: 160991 - DNA, 25 bp, Canis familiaris
ggaactctctcttcaaagactcagc

SEQ ID NO: 160992 - DNA, 25 bp, Canis familiaris
ggaactctatcctaagggcctgtaa

SEQ ID NO: 160993 - DNA, 25 bp, Canis familiaris
ggaatctttccaaaagcccatgaat

SEQ ID NO: 160994 - DNA, 25 bp, Canis familiaris
ggaatctaaactgaagccagcaaca

SEQ ID NO: 160995 - DNA, 25 bp, Canis familiaris
ggaactaacaattaaacacatacaa

SEQ ID NO: 160996 - DNA, 25 bp, Canis familiaris
ggaaccaacacagggaaccaacaca

SEQ ID NO: 160997 - DNA, 25 bp, Canis familiaris
ggaagccaagaagggggcccaagcg

SEQ ID NO: 160998 - DNA, 25 bp, Canis familiaris
ggaattcacagactcggggggaact

SEQ ID NO: 160999 - DNA, 25 bp, Canis familiaris
ggaattccaggatataggggtcatc

SEQ ID NO: 161000 - DNA, 25 bp, Canis familiaris
ggaagtccaggacaaagaggtcgtc

SEQ ID NO: 161001 - DNA, 25 bp, Canis familiaris
ggaagctccaggtccaattaacttt

SEQ ID NO: 161002 - DNA, 25 bp, Canis familiaris
ggaagcccggacaaatctatacgga

SEQ ID NO: 161003 - DNA, 25 bp, Canis familiaris
ggaagccctggacagacttggaggc

SEQ ID NO: 161004 - DNA, 25 bp, Canis familiaris
ggaagcccaggagttgacatctgga

SEQ ID NO: 161005 - DNA, 25 bp, Canis familiaris
ggaatgcccagcgagttaactacca

SEQ ID NO: 161006 - DNA, 25 bp, Canis familiaris
ggaatgcccagcgagttaactacaa

SEQ ID NO: 161007 - DNA, 25 bp, Canis familiaris
ggaaggtcacttctcaactacagaa

SEQ ID NO: 161008 - DNA, 25 bp, Canis familiaris
ggaatccatcacaggtaattaggta

SEQ ID NO: 161009 - DNA, 25 bp, Canis familiaris
ggaaccagaatggcagtaactaggc

SEQ ID NO: 161010 - DNA, 25 bp, Canis familiaris
ggaactggtatctagctacttagtc

SEQ ID NO: 161011 - DNA, 25 bp, Canis familiaris
ggaacgtgtgatcactattatgcag

SEQ ID NO: 161012 - DNA, 25 bp, Canis familiaris
ggaaccttgatgaattatctcaaca

SEQ ID NO: 161013 - DNA, 25 bp, Canis familiaris
ggcataacacgtgatttccataaat

SEQ ID NO: 161014 - DNA, 25 bp, Canis familiaris
ggcacaaccgagattggaaccagat

SEQ ID NO: 161015 - DNA, 25 bp, Canis familiaris
ggcatttcggagcctgtggaaggag

SEQ ID NO: 161016 - DNA, 25 bp, Canis familiaris
ggaaccacagccctggagaaggagc

SEQ ID NO: 161017 - DNA, 25 bp, Canis familiaris
ggaaccatcagccttggaggtggag

SEQ ID NO: 161018 - DNA, 25 bp, Canis familiaris
ggcaaccacgggtgggaggaacctg

SEQ ID NO: 161019 - DNA, 25 bp, Canis familiaris
ggaagtccaaggtgatggggccccg

SEQ ID NO: 161020 - DNA, 25 bp, Canis familiaris
ggaagctccaaaggtatgcgaagcc

SEQ ID NO: 161021 - DNA, 25 bp, Canis familiaris
ggaactccaaaagtatgcgaacgtg

SEQ ID NO: 161022 - DNA, 25 bp, Canis familiaris
ggaactcagcaaccagctagctact

SEQ ID NO: 161023 - DNA, 25 bp, Canis familiaris
ggaagccaagatcaccatgctgaca

SEQ ID NO: 161024 - DNA, 25 bp, Canis familiaris
ggaagctcagaaacactgctggcag

SEQ ID NO: 161025 - DNA, 25 bp, Canis familiaris
ggaagctcagaatcaatggagaagc

SEQ ID NO: 161026 - DNA, 25 bp, Canis familiaris
ggaagccaagaagagcaagactgca

SEQ ID NO: 161027 - DNA, 25 bp, Canis familiaris
ggaagccaaacacctcaaaagcatt

SEQ ID NO: 161028 - DNA, 25 bp, Canis familiaris
ggaactcaaagccctcaaagatctt

SEQ ID NO: 161029 - DNA, 25 bp, Canis familiaris
ggaactaccggtacaccagattgtg

SEQ ID NO: 161030 - DNA, 25 bp, Canis familiaris
tggaaggaccggaacctggacgtgg

SEQ ID NO: 161031 - DNA, 25 bp, Canis familiaris
ggaaggactagacatcctaccgctg

SEQ ID NO: 161032 - DNA, 25 bp, Canis familiaris
ggaaggactagacatcctaccgctg

SEQ ID NO: 161033 - DNA, 25 bp, Canis familiaris
ggaaggacaagacatcctaccgctg

SEQ ID NO: 161034 - DNA, 25 bp, Canis familiaris
ggaaggacaagacatcctaccgctg

SEQ ID NO: 161035 - DNA, 25 bp, Canis familiaris
ggaaggacaagacatcctaccgctg

SEQ ID NO: 161036 - DNA, 25 bp, Canis familiaris
ggaactacaagactgtgcccttccc

SEQ ID NO: 161037 - DNA, 25 bp, Canis familiaris
ggaacgacaacactggaccatgacc

SEQ ID NO: 161038 - DNA, 25 bp, Canis familiaris
ggaagctaaacacgaacgcattgaa

SEQ ID NO: 161039 - DNA, 25 bp, Canis familiaris
ggaattcaaaatagcacacagcatt

SEQ ID NO: 161040 - DNA, 25 bp, Canis familiaris
ggaagatagaacttgcaagcaatga

SEQ ID NO: 161041 - DNA, 25 bp, Canis familiaris
ggaagtgagaatctcgaactgagtc

SEQ ID NO: 161042 - DNA, 25 bp, Canis familiaris
ggaagcctgcttgtcaaagctggtc

SEQ ID NO: 161043 - DNA, 25 bp, Canis familiaris
ggaagctctagtttcacaagggccc

SEQ ID NO: 161044 - DNA, 25 bp, Canis familiaris
ggaagccatgaatccaattgggcgt

SEQ ID NO: 161045 - DNA, 25 bp, Canis familiaris
ggaactgggcaagctttgggcttcc

SEQ ID NO: 161046 - DNA, 25 bp, Canis familiaris
ggaacgtgaggagcccttggattcc

SEQ ID NO: 161047 - DNA, 25 bp, Canis familiaris
ggaactgaagagactcccgtggaat

SEQ ID NO: 161048 - DNA, 25 bp, Canis familiaris
ggaatctaaggagctgcccatgaaa

SEQ ID NO: 161049 - DNA, 25 bp, Canis familiaris
ggaagtaatggaggacgccaagcta

SEQ ID NO: 161050 - DNA, 25 bp, Canis familiaris
ggaattgcaaaagacctagagtatc

SEQ ID NO: 161051 - DNA, 25 bp, Canis familiaris
ggaactgaccactgacttatgaaag

SEQ ID NO: 161052 - DNA, 25 bp, Canis familiaris
ggaactgtcctcttacttattcaaa

SEQ ID NO: 161053 - DNA, 25 bp, Canis familiaris
ggaactcccttttctttcagaatat

SEQ ID NO: 161054 - DNA, 25 bp, Canis familiaris
ggcaattccactcaacttttgagtt

SEQ ID NO: 161055 - DNA, 25 bp, Canis familiaris
ggaatatctccctgaattctttttc

SEQ ID NO: 161056 - DNA, 25 bp, Canis familiaris
ggaactgcttcctgatgtatcgttg

SEQ ID NO: 161057 - DNA, 25 bp, Canis familiaris
ggaagtctcatcacggtatctatct

SEQ ID NO: 161058 - DNA, 25 bp, Canis familiaris
ggaagctctccaccagagttaggct

SEQ ID NO: 161059 - DNA, 25 bp, Canis familiaris
ggaattcggcacgaggtttggcgcc

SEQ ID NO: 161060 - DNA, 25 bp, Canis familiaris
ggaatacgaactgtggtatcccagg

SEQ ID NO: 161061 - DNA, 25 bp, Canis familiaris
ggaattggaaaggattttctccagg

SEQ ID NO: 161062 - DNA, 25 bp, Canis familiaris
ggaactggtcaaggttgcttcttag

SEQ ID NO: 161063 - DNA, 25 bp, Canis familiaris
ggaattggtgaggccttgaccttaa

SEQ ID NO: 161064 - DNA, 25 bp, Canis familiaris
ggaactgcgtgtgtcctacacaatg

SEQ ID NO: 161065 - DNA, 25 bp, Canis familiaris
ggaactgcgtgtgtcctacacaatg

SEQ ID NO: 161066 - DNA, 25 bp, Canis familiaris
ggaactgcgtgtgtcctacacaatg

SEQ ID NO: 161067 - DNA, 25 bp, Canis familiaris
ggaactgcgtgtgtcctacacaatg

SEQ ID NO: 161068 - DNA, 25 bp, Canis familiaris
ggaactgcgtgtgtcctacacaatg

SEQ ID NO: 161069 - DNA, 25 bp, Canis familiaris
ggaactgcgtgtgtcctacacaatg

SEQ ID NO: 161070 - DNA, 25 bp, Canis familiaris
ggaactgcgtgtgtcctacacaatg

SEQ ID NO: 161071 - DNA, 25 bp, Canis familiaris
ggaactgcgtgtgtcctacacaatg

SEQ ID NO: 161072 - DNA, 25 bp, Canis familiaris
ggaactgcgtgtgtcctacacaatg

SEQ ID NO: 161073 - DNA, 25 bp, Canis familiaris
ggaaggcgcttcaccatcaagataa

SEQ ID NO: 161074 - DNA, 25 bp, Canis familiaris
ggaagagccgacatcgaaggatcaa

SEQ ID NO: 161075 - DNA, 25 bp, Canis familiaris
ggaagaagtgccctcgagaggccaa

SEQ ID NO: 161076 - DNA, 25 bp, Canis familiaris
ggaagcgagtccactcagaactgcc

SEQ ID NO: 161077 - DNA, 25 bp, Canis familiaris
ggaacgggtgctgctgaagacgccc

SEQ ID NO: 161078 - DNA, 25 bp, Canis familiaris
ggaagccggagctagagaatacccc

SEQ ID NO: 161079 - DNA, 25 bp, Canis familiaris
ggaagctcagggaagatgatgtatc

SEQ ID NO: 161080 - DNA, 25 bp, Canis familiaris
ggaagctgcggagttgaatgtgggg

SEQ ID NO: 161081 - DNA, 25 bp, Canis familiaris
ggaactggaatttaatggctatatg

SEQ ID NO: 161082 - DNA, 25 bp, Canis familiaris
ggaactggatgatctcaaagctgaa

SEQ ID NO: 161083 - DNA, 25 bp, Canis familiaris
ggaacggcatgccagtgaaatgcgg

SEQ ID NO: 161084 - DNA, 25 bp, Canis familiaris
ggaactggctgcaagctgaactgat

SEQ ID NO: 161085 - DNA, 25 bp, Canis familiaris
ggaagctgctgctcagagaacattc

SEQ ID NO: 161086 - DNA, 25 bp, Canis familiaris
ggaactgtggccaatttcatctacc

SEQ ID NO: 161087 - DNA, 25 bp, Canis familiaris
ggaactgtgtcttcattttcttcct

SEQ ID NO: 161088 - DNA, 25 bp, Canis familiaris
ggaagcactttaactttttctcatg

SEQ ID NO: 161089 - DNA, 25 bp, Canis familiaris
ggaagtacttcacctgttttttgca

SEQ ID NO: 161090 - DNA, 25 bp, Canis familiaris
ggaagcccagctgttgtttattgaa

SEQ ID NO: 161091 - DNA, 25 bp, Canis familiaris
ggaagccccatcggatgtgggttga

SEQ ID NO: 161092 - DNA, 25 bp, Canis familiaris
ggaagccgtgcatctatgggagtga

SEQ ID NO: 161093 - DNA, 25 bp, Canis familiaris
ggaagcctagcaagcttgggaagca

SEQ ID NO: 161094 - DNA, 25 bp, Canis familiaris
ggaagcctgagaccttccagaactc

SEQ ID NO: 161095 - DNA, 25 bp, Canis familiaris
ggaagcctgaagatgacgatgagat

SEQ ID NO: 161096 - DNA, 25 bp, Canis familiaris
ggaagctgtgaaagtccgtcatctc

SEQ ID NO: 161097 - DNA, 25 bp, Canis familiaris
ggaagctgtgagttagcgctgtcct

SEQ ID NO: 161098 - DNA, 25 bp, Canis familiaris
ggaaggagagttttctgaggcccgt

SEQ ID NO: 161099 - DNA, 25 bp, Canis familiaris
ggaagttctttttctgaggctcctg

SEQ ID NO: 161100 - DNA, 25 bp, Canis familiaris
ggaagtcacttttgagtgagcggat

SEQ ID NO: 161101 - DNA, 25 bp, Canis familiaris
ggaattagcatttcagaggaccgtg

SEQ ID NO: 161102 - DNA, 25 bp, Canis familiaris
ggaattacattacaggcattgcact

SEQ ID NO: 161103 - DNA, 25 bp, Canis familiaris
ggaatggaccccgatggtgtcatcg

SEQ ID NO: 161104 - DNA, 25 bp, Canis familiaris
ggaagaagccctgatggcagacatc

SEQ ID NO: 161105 - DNA, 25 bp, Canis familiaris
ggaagagtgcctcgagttcattgcc

SEQ ID NO: 161106 - DNA, 25 bp, Canis familiaris
ggaagcagctgttggcatgttcagt

SEQ ID NO: 161107 - DNA, 25 bp, Canis familiaris
ggaagctgtgattgtgtgctacatt

SEQ ID NO: 161108 - DNA, 25 bp, Canis familiaris
ggaatcctggtgctcgaatttccct

SEQ ID NO: 161109 - DNA, 25 bp, Canis familiaris
ggaaccggtggcaggttgacctagt

SEQ ID NO: 161110 - DNA, 25 bp, Canis familiaris
ggcaccctggtggtgggtaaccaag

SEQ ID NO: 161111 - DNA, 25 bp, Canis familiaris
ggcccagtttcctgggaaaagagat

SEQ ID NO: 161112 - DNA, 25 bp, Canis familiaris
ggcccttgggtgtgtggccaaaagt

SEQ ID NO: 161113 - DNA, 25 bp, Canis familiaris
ggccccgtgggtctgggagaagaga

SEQ ID NO: 161114 - DNA, 25 bp, Canis familiaris
ggcacaccgtggcgttggtaaggac

SEQ ID NO: 161115 - DNA, 25 bp, Canis familiaris
ggccaacggaaccagggtgcaaggc

SEQ ID NO: 161116 - DNA, 25 bp, Canis familiaris
ggaagcctgaggaccgggtggaggc

SEQ ID NO: 161117 - DNA, 25 bp, Canis familiaris
ggaagccagaggctggttgggcccg

SEQ ID NO: 161118 - DNA, 25 bp, Canis familiaris
ggaagcgagggattgtgttgggaga

SEQ ID NO: 161119 - DNA, 25 bp, Canis familiaris
ggaagaggggaacatgctggagaaa

SEQ ID NO: 161120 - DNA, 25 bp, Canis familiaris
ggaagatgagggtccagtctacaga

SEQ ID NO: 161121 - DNA, 25 bp, Canis familiaris
ggaaggatgggaaattctccgtata

SEQ ID NO: 161122 - DNA, 25 bp, Canis familiaris
ggaagtgagggaagctttctcttaa

SEQ ID NO: 161123 - DNA, 25 bp, Canis familiaris
ggaaggaggaaacatttgctattta

SEQ ID NO: 161124 - DNA, 25 bp, Canis familiaris
ggaaggacagaatccattgtgactt

SEQ ID NO: 161125 - DNA, 25 bp, Canis familiaris
ggaagatcatagctacctcatggtt

SEQ ID NO: 161126 - DNA, 25 bp, Canis familiaris
ggaagacatagtgcaccgggaggtg

SEQ ID NO: 161127 - DNA, 25 bp, Canis familiaris
ggaatgccagggttccaggggagtt

SEQ ID NO: 161128 - DNA, 25 bp, Canis familiaris
ggaaccagcttgttcacggtgtgag

SEQ ID NO: 161129 - DNA, 25 bp, Canis familiaris
ggaaccacattctatcacggtctat

SEQ ID NO: 161130 - DNA, 25 bp, Canis familiaris
ggaaccagacctgagcaggctctct

SEQ ID NO: 161131 - DNA, 25 bp, Canis familiaris
ggaacctacaggaatccagctcttt

SEQ ID NO: 161132 - DNA, 25 bp, Canis familiaris
ggaagagcaaaggttcggcctcatt

SEQ ID NO: 161133 - DNA, 25 bp, Canis familiaris
ggaagtggaatggtttgccctaatc

SEQ ID NO: 161134 - DNA, 25 bp, Canis familiaris
ggaatgaagaaagctctccctatat

SEQ ID NO: 161135 - DNA, 25 bp, Canis familiaris
ggaatggcagaagctctccctatat

SEQ ID NO: 161136 - DNA, 25 bp, Canis familiaris
ggaagagccataggccgccatttag

SEQ ID NO: 161137 - DNA, 25 bp, Canis familiaris
ggaagcagctctttgccaatttaca

SEQ ID NO: 161138 - DNA, 25 bp, Canis familiaris
ggaagctgctcataggcactttata

SEQ ID NO: 161139 - DNA, 25 bp, Canis familiaris
ggaagcctctctaggcatgtggtag

SEQ ID NO: 161140 - DNA, 25 bp, Canis familiaris
ggaagcgcctcaacctggaggagtg

SEQ ID NO: 161141 - DNA, 25 bp, Canis familiaris
ggaagctgcttacttctgggaagat

SEQ ID NO: 161142 - DNA, 25 bp, Canis familiaris
ggaaggttactcaggtgcagacatt

SEQ ID NO: 161143 - DNA, 25 bp, Canis familiaris
ggaagcgggttggtggcataccatt

SEQ ID NO: 161144 - DNA, 25 bp, Canis familiaris
ggaaggaggatttttgcatacattt

SEQ ID NO: 161145 - DNA, 25 bp, Canis familiaris
ggaaggacttcaatgttctagcaac

SEQ ID NO: 161146 - DNA, 25 bp, Canis familiaris
ggaaggaatcaactttctgccacca

SEQ ID NO: 161147 - DNA, 25 bp, Canis familiaris
ggaagctcaagctgtttctgaacga

SEQ ID NO: 161148 - DNA, 25 bp, Canis familiaris
ggaagctcaaggctgtgttcctcaa

SEQ ID NO: 161149 - DNA, 25 bp, Canis familiaris
ggaagtgaggcgtgtgtgtgcccag

SEQ ID NO: 161150 - DNA, 25 bp, Canis familiaris
ggaagggagcgtgtgcattaccgaa

SEQ ID NO: 161151 - DNA, 25 bp, Canis familiaris
ggaagggagcagaggccaactaggg

SEQ ID NO: 161152 - DNA, 25 bp, Canis familiaris
ggaagtcctagttttcacactggtg

SEQ ID NO: 161153 - DNA, 25 bp, Canis familiaris
ggaagtctaaaatgtacgcgttgcc

SEQ ID NO: 161154 - DNA, 25 bp, Canis familiaris
ggaagtttaaattctagccctagat

SEQ ID NO: 161155 - DNA, 25 bp, Canis familiaris
ggaagtttataataacagagctcgt

SEQ ID NO: 161156 - DNA, 25 bp, Canis familiaris
ggaagtctgctatcaaatcaaggtc

SEQ ID NO: 161157 - DNA, 25 bp, Canis familiaris
ggaagtctggaagatccacaggctg

SEQ ID NO: 161158 - DNA, 25 bp, Canis familiaris
ggaagtctgggttagtacaatcatc

SEQ ID NO: 161159 - DNA, 25 bp, Canis familiaris
ggaagatgcggtaccagtgcacaac

SEQ ID NO: 161160 - DNA, 25 bp, Canis familiaris
ggaagctgcacaattccctatcaca

SEQ ID NO: 161161 - DNA, 25 bp, Canis familiaris
ggaagctgcattgttgacactcaac

SEQ ID NO: 161162 - DNA, 25 bp, Canis familiaris
ggaagcagcttggcttcacagctca

SEQ ID NO: 161163 - DNA, 25 bp, Canis familiaris
ggaagcaagctggcttcacagctca

SEQ ID NO: 161164 - DNA, 25 bp, Canis familiaris
ggaagaacactcttacgctcaagca

SEQ ID NO: 161165 - DNA, 25 bp, Canis familiaris
ggaagacaattgcctactcatccag

SEQ ID NO: 161166 - DNA, 25 bp, Canis familiaris
ggaagacatttacatcaccacagaa

SEQ ID NO: 161167 - DNA, 25 bp, Canis familiaris
ggaagagaatcttccccgtcgaagc

SEQ ID NO: 161168 - DNA, 25 bp, Canis familiaris
ggaaggaagctgtcctgctagatgg

SEQ ID NO: 161169 - DNA, 25 bp, Canis familiaris
ggaagaactatgaccctcagaagga

SEQ ID NO: 161170 - DNA, 25 bp, Canis familiaris
ggaattactctgatcacccaagatg

SEQ ID NO: 161171 - DNA, 25 bp, Canis familiaris
ggaatcttcttgggtcgcaatacat

SEQ ID NO: 161172 - DNA, 25 bp, Canis familiaris
ggaattttcactggtgcatcctacc

SEQ ID NO: 161173 - DNA, 25 bp, Canis familiaris
ggaattttatcccttcattaaccag

SEQ ID NO: 161174 - DNA, 25 bp, Canis familiaris
ggaatttttgtccattaaagaagca

SEQ ID NO: 161175 - DNA, 25 bp, Canis familiaris
ggaattaacccgatcaacactgcca

SEQ ID NO: 161176 - DNA, 25 bp, Canis familiaris
ggaattaaaatccttccatcccttg

SEQ ID NO: 161177 - DNA, 25 bp, Canis familiaris
ggaaccaggatagctgatgctcccc

SEQ ID NO: 161178 - DNA, 25 bp, Canis familiaris
ggaaccagaacatgctggcagcccc

SEQ ID NO: 161179 - DNA, 25 bp, Canis familiaris
ggaagcgaatactctggcaatgcct

SEQ ID NO: 161180 - DNA, 25 bp, Canis familiaris
ggaagctgacctggttacaactcat

SEQ ID NO: 161181 - DNA, 25 bp, Canis familiaris
ggaagctgtcctgctagatggaaca

SEQ ID NO: 161182 - DNA, 25 bp, Canis familiaris
ggaatcgtgttggtagggaagaatt

SEQ ID NO: 161183 - DNA, 25 bp, Canis familiaris
ggaattcgattggggggattgtcct

SEQ ID NO: 161184 - DNA, 25 bp, Canis familiaris
ggcacttcgagggtgaggactttct

SEQ ID NO: 161185 - DNA, 25 bp, Canis familiaris
ggaattcgactctgaagacttctcc

SEQ ID NO: 161186 - DNA, 25 bp, Canis familiaris
ggaagtctacttgaattctctccct

SEQ ID NO: 161187 - DNA, 25 bp, Canis familiaris
ggaagtaacttggctttcctggcca

SEQ ID NO: 161188 - DNA, 25 bp, Canis familiaris
ggaagtaattttgtgtctgctggta

SEQ ID NO: 161189 - DNA, 25 bp, Canis familiaris
ggaagtcaaacatttggtttagcta

SEQ ID NO: 161190 - DNA, 25 bp, Canis familiaris
ggaagacacaagtcattttttcgta

SEQ ID NO: 161191 - DNA, 25 bp, Canis familiaris
ggaagacacgtggcagcttctttaa

SEQ ID NO: 161192 - DNA, 25 bp, Canis familiaris
ggaagacctggcggaaattgccaaa

SEQ ID NO: 161193 - DNA, 25 bp, Canis familiaris
ggaagacctgagagtactcatggaa

SEQ ID NO: 161194 - DNA, 25 bp, Canis familiaris
ggaagagcctggatttctcatcaag

SEQ ID NO: 161195 - DNA, 25 bp, Canis familiaris
ggaataccgtgacctggatgctcca

SEQ ID NO: 161196 - DNA, 25 bp, Canis familiaris
ggaatcactcagttcgtggtcttga

SEQ ID NO: 161197 - DNA, 25 bp, Canis familiaris
ggaatcactcgtttgatgcccaatg

SEQ ID NO: 161198 - DNA, 25 bp, Canis familiaris
ggaagcctcgtaagagttacatatt

SEQ ID NO: 161199 - DNA, 25 bp, Canis familiaris
ggcacccagcagtttagcttaattt

SEQ ID NO: 161200 - DNA, 25 bp, Canis familiaris
ggcaccggactactggttatattcc

SEQ ID NO: 161201 - DNA, 25 bp, Canis familiaris
ggcaacgtacttatgaattactacc

SEQ ID NO: 161202 - DNA, 25 bp, Canis familiaris
tggaacgtacaattttatgggtgtc

SEQ ID NO: 161203 - DNA, 25 bp, Canis familiaris
ggaatggtgaaaatttaagtcattt

SEQ ID NO: 161204 - DNA, 25 bp, Canis familiaris
ggcctactgtaaaccaagcactttt

SEQ ID NO: 161205 - DNA, 25 bp, Canis familiaris
ggcaaagttcaaggaccaccatggt

SEQ ID NO: 161206 - DNA, 25 bp, Canis familiaris
ggcaaagatagatcgtccttctgga

SEQ ID NO: 161207 - DNA, 25 bp, Canis familiaris
ggcaaagtaattggccctgctaaat

SEQ ID NO: 161208 - DNA, 25 bp, Canis familiaris
ggaatttcagataatccctctacct

SEQ ID NO: 161209 - DNA, 25 bp, Canis familiaris
ggaatctgtactaatccgacaagca

SEQ ID NO: 161210 - DNA, 25 bp, Canis familiaris
ggaatttacatttcagttaagcatc

SEQ ID NO: 161211 - DNA, 25 bp, Canis familiaris
ggaatttacttcaatttgttcactt

SEQ ID NO: 161212 - DNA, 25 bp, Canis familiaris
ggaattttattccatttgtcttagg

SEQ ID NO: 161213 - DNA, 25 bp, Canis familiaris
ggaatccttattacaatcatggcct

SEQ ID NO: 161214 - DNA, 25 bp, Canis familiaris
ggaaccttattttaatggctttgca

SEQ ID NO: 161215 - DNA, 25 bp, Canis familiaris
ggcaatcctgtattttaattttaga

SEQ ID NO: 161216 - DNA, 25 bp, Canis familiaris
ggaaccggcagaaggagttcttgga

SEQ ID NO: 161217 - DNA, 25 bp, Canis familiaris
ggaaccggcagaaggagctcttgga

SEQ ID NO: 161218 - DNA, 25 bp, Canis familiaris
ggaaccggcagaaggagctcttgga

SEQ ID NO: 161219 - DNA, 25 bp, Canis familiaris
ggaaccggcagaaggagctcttgga

SEQ ID NO: 161220 - DNA, 25 bp, Canis familiaris
ggaaccggcagaaggagctcttgga

SEQ ID NO: 161221 - DNA, 25 bp, Canis familiaris
ggaaccggcagaaggagctcttgga

SEQ ID NO: 161222 - DNA, 25 bp, Canis familiaris
ggaaccggcagaaggagctcttgga

SEQ ID NO: 161223 - DNA, 25 bp, Canis familiaris
ggaaccggcagaaggagctcttgga

SEQ ID NO: 161224 - DNA, 25 bp, Canis familiaris
ggaaccggcagaaggagctcttgga

SEQ ID NO: 161225 - DNA, 25 bp, Canis familiaris
ggaagccgtggagggttcagtggtg

SEQ ID NO: 161226 - DNA, 25 bp, Canis familiaris
ggaatcactctacagttactggggc

SEQ ID NO: 161227 - DNA, 25 bp, Canis familiaris
ggaacctctcatcagctttgtttcc

SEQ ID NO: 161228 - DNA, 25 bp, Canis familiaris
ggaatcctctaaacatttttgtatc

SEQ ID NO: 161229 - DNA, 25 bp, Canis familiaris
ggaacctctcagtaaatctttgtag

SEQ ID NO: 161230 - DNA, 25 bp, Canis familiaris
ggaatgacttcgatacactctttag

SEQ ID NO: 161231 - DNA, 25 bp, Canis familiaris
ggcaatgactttaaaccccagtgga

SEQ ID NO: 161232 - DNA, 25 bp, Canis familiaris
ggaatgcctatgtgaaccacctttg

SEQ ID NO: 161233 - DNA, 25 bp, Canis familiaris
ggaatgcgatagtcgtactcgattt

SEQ ID NO: 161234 - DNA, 25 bp, Canis familiaris
ggaagagatagtcgttccgggtcac

SEQ ID NO: 161235 - DNA, 25 bp, Canis familiaris
ggaaggattttgttccttatatcac

SEQ ID NO: 161236 - DNA, 25 bp, Canis familiaris
ggaagcgattgcctttgcacgtaac

SEQ ID NO: 161237 - DNA, 25 bp, Canis familiaris
ggaagcaaagacattcacgtagccg

SEQ ID NO: 161238 - DNA, 25 bp, Canis familiaris
ggaagcacaagacattcacgtaccg

SEQ ID NO: 161239 - DNA, 25 bp, Canis familiaris
ggaaccaagatgctggctgcgtacc

SEQ ID NO: 161240 - DNA, 25 bp, Canis familiaris
ggcaacctaagactgcagggtacgc

SEQ ID NO: 161241 - DNA, 25 bp, Canis familiaris
ggaacctatgagcctgggttccctg

SEQ ID NO: 161242 - DNA, 25 bp, Canis familiaris
ggcagatcttaagagggaacccggg

SEQ ID NO: 161243 - DNA, 25 bp, Canis familiaris
ggaatgttacacagaggaccaacgc

SEQ ID NO: 161244 - DNA, 25 bp, Canis familiaris
ggaagctgaaccaggctgtccaaga

SEQ ID NO: 161245 - DNA, 25 bp, Canis familiaris
ggaagcttctaaatggtgctgccaa

SEQ ID NO: 161246 - DNA, 25 bp, Canis familiaris
ggaagctgtgccagttgtaccagga

SEQ ID NO: 161247 - DNA, 25 bp, Canis familiaris
ggaagtggccgtctatgacaaggac

SEQ ID NO: 161248 - DNA, 25 bp, Canis familiaris
ggaagtggaggtcctcaaagagcaa

SEQ ID NO: 161249 - DNA, 25 bp, Canis familiaris
ggaaggtggttggcccagagaggtg

SEQ ID NO: 161250 - DNA, 25 bp, Canis familiaris
ggaatggcttttccgtaggcagggc

SEQ ID NO: 161251 - DNA, 25 bp, Canis familiaris
ggaagtttcttcagtaggcagatga

SEQ ID NO: 161252 - DNA, 25 bp, Canis familiaris
ggaagtgatgggatcctatggaatg

SEQ ID NO: 161253 - DNA, 25 bp, Canis familiaris
ggaaccagggacagctagagagata

SEQ ID NO: 161254 - DNA, 25 bp, Canis familiaris
ggaaccacagtggggctcacaagaa

SEQ ID NO: 161255 - DNA, 25 bp, Canis familiaris
ggaagccaagaggtagccctacact

SEQ ID NO: 161256 - DNA, 25 bp, Canis familiaris
ggaagacagagctgaaggcctgaca

SEQ ID NO: 161257 - DNA, 25 bp, Canis familiaris
ggaagagcaggagcagggcgagatc

SEQ ID NO: 161258 - DNA, 25 bp, Canis familiaris
ggaagaaggcaagggacgatacaac

SEQ ID NO: 161259 - DNA, 25 bp, Canis familiaris
ggaagcaagaacggtcgctgctcca

SEQ ID NO: 161260 - DNA, 25 bp, Canis familiaris
ggaatcatagtgtccgtgaggtcca

SEQ ID NO: 161261 - DNA, 25 bp, Canis familiaris
ggaagctactactggactgagccca

SEQ ID NO: 161262 - DNA, 25 bp, Canis familiaris
ggaagctcagcctacgagactggca

SEQ ID NO: 161263 - DNA, 25 bp, Canis familiaris
ggaagaatggatttggaatggcaca

SEQ ID NO: 161264 - DNA, 25 bp, Canis familiaris
ggaagcctgatgaggagcctggccc

SEQ ID NO: 161265 - DNA, 25 bp, Canis familiaris
ggaagaggagttggagcgtggcccg

SEQ ID NO: 161266 - DNA, 25 bp, Canis familiaris
ggaagcggagtgcagagcggggcgc

SEQ ID NO: 161267 - DNA, 25 bp, Canis familiaris
ggaaggtggggagcgtcagccaccg

SEQ ID NO: 161268 - DNA, 25 bp, Canis familiaris
ggaaggtggggtatctcccagcttc

SEQ ID NO: 161269 - DNA, 25 bp, Canis familiaris
ggaagaaaggcgatctcccacgcct

SEQ ID NO: 161270 - DNA, 25 bp, Canis familiaris
ggaagaagaggggatcccaccgctc

SEQ ID NO: 161271 - DNA, 25 bp, Canis familiaris
ggaagaagcagatgccctaccaact

SEQ ID NO: 161272 - DNA, 25 bp, Canis familiaris
ggaatatacaacccactaaaagtga

SEQ ID NO: 161273 - DNA, 25 bp, Canis familiaris
ggaatcatgacctgaaccaaaggga

SEQ ID NO: 161274 - DNA, 25 bp, Canis familiaris
ggcattctgaaacacccaggaagcc

SEQ ID NO: 161275 - DNA, 25 bp, Canis familiaris
ggaagctgaaaggaccaaggcacga

SEQ ID NO: 161276 - DNA, 25 bp, Canis familiaris
ggaaggaagcaggattcacaccagg

SEQ ID NO: 161277 - DNA, 25 bp, Canis familiaris
ggaagtgctaggtttacctcaaagc

SEQ ID NO: 161278 - DNA, 25 bp, Canis familiaris
ggaatgtctgactagtatacaccat

SEQ ID NO: 161279 - DNA, 25 bp, Canis familiaris
ggaagacttcacctgtactacatcc

SEQ ID NO: 161280 - DNA, 25 bp, Canis familiaris
ggaagagttacacaatatacatgcc

SEQ ID NO: 161281 - DNA, 25 bp, Canis familiaris
ggaaggttacagtgatcccacagga

SEQ ID NO: 161282 - DNA, 25 bp, Canis familiaris
ggcacggggacgtagtttatcacga

SEQ ID NO: 161283 - DNA, 25 bp, Canis familiaris
ggccgtgggacagaggttccccacg

SEQ ID NO: 161284 - DNA, 25 bp, Canis familiaris
ggccaaggtcaagatgtctaaccaa

SEQ ID NO: 161285 - DNA, 25 bp, Canis familiaris
ggaataggtacgatttaactgcaga

SEQ ID NO: 161286 - DNA, 25 bp, Canis familiaris
ggaatacttattctattgaactatt

SEQ ID NO: 161287 - DNA, 25 bp, Canis familiaris
ggaatccttgattactaaatactta

SEQ ID NO: 161288 - DNA, 25 bp, Canis familiaris
ggaatcttaggctttaaaccatata

SEQ ID NO: 161289 - DNA, 25 bp, Canis familiaris
ggaatgcttaaattaccaacactat

SEQ ID NO: 161290 - DNA, 25 bp, Canis familiaris
ggaagattaaagaacagtactgatg

SEQ ID NO: 161291 - DNA, 25 bp, Canis familiaris
ggaagggtatagaaaagactggaag

SEQ ID NO: 161292 - DNA, 25 bp, Canis familiaris
tggaaggcgtttgtaaaatgttatg

SEQ ID NO: 161293 - DNA, 25 bp, Canis familiaris
ggcaaggtggttgtgaaatttccca

SEQ ID NO: 161294 - DNA, 25 bp, Canis familiaris
ggaatttggttgtgacaatcgggcc

SEQ ID NO: 161295 - DNA, 25 bp, Canis familiaris
ggaagttcaaccttgagccaggggc

SEQ ID NO: 161296 - DNA, 25 bp, Canis familiaris
ggcaagttaccttttctcagggtct

SEQ ID NO: 161297 - DNA, 25 bp, Canis familiaris
ggaagtttgacttttctgcagaatg

SEQ ID NO: 161298 - DNA, 25 bp, Canis familiaris
ggaattatagaccctcacttgagat

SEQ ID NO: 161299 - DNA, 25 bp, Canis familiaris
ggaatacaagcctactatgttagat

SEQ ID NO: 161300 - DNA, 25 bp, Canis familiaris
ggaatacaatccaagctctgcaata

SEQ ID NO: 161301 - DNA, 25 bp, Canis familiaris
ggaatgaccccagtgtcagattgat

SEQ ID NO: 161302 - DNA, 25 bp, Canis familiaris
ggaagaccctcagtaaatatatgac

SEQ ID NO: 161303 - DNA, 25 bp, Canis familiaris
ggaagaagctccctgaagacaagac

SEQ ID NO: 161304 - DNA, 25 bp, Canis familiaris
ggaataaatcacctatagactaaga

SEQ ID NO: 161305 - DNA, 25 bp, Canis familiaris
ggaatctgaagctttatttctcaaa

SEQ ID NO: 161306 - DNA, 25 bp, Canis familiaris
ggaagctaaatttatttctgctatt

SEQ ID NO: 161307 - DNA, 25 bp, Canis familiaris
ggaagctgacataatttctgttgtt

SEQ ID NO: 161308 - DNA, 25 bp, Canis familiaris
ggaatctgagatcattgactttttc

SEQ ID NO: 161309 - DNA, 25 bp, Canis familiaris
ggaatctgagatctcgacttttctt

SEQ ID NO: 161310 - DNA, 25 bp, Canis familiaris
ggaatctggatcacgtcaacatgtc

SEQ ID NO: 161311 - DNA, 25 bp, Canis familiaris
ggaattgcgtgcattaatcagattc

SEQ ID NO: 161312 - DNA, 25 bp, Canis familiaris
ggaattgcggttaatattgacattt

SEQ ID NO: 161313 - DNA, 25 bp, Canis familiaris
ggaatactggttgcatcaaattatt

SEQ ID NO: 161314 - DNA, 25 bp, Canis familiaris
ggaatactggtctgcatcaaattta

SEQ ID NO: 161315 - DNA, 25 bp, Canis familiaris
ggaatgattttctcaaggatttgaa

SEQ ID NO: 161316 - DNA, 25 bp, Canis familiaris
ggaattcaattccacacatggtttg

SEQ ID NO: 161317 - DNA, 25 bp, Canis familiaris
ggaagatccttccagcagcaggagt

SEQ ID NO: 161318 - DNA, 25 bp, Canis familiaris
ggaatgctcctcttgagcagctgga

SEQ ID NO: 161319 - DNA, 25 bp, Canis familiaris
ggaagtcctgcaatacctggattgg

SEQ ID NO: 161320 - DNA, 25 bp, Canis familiaris
ggaagtttcttaatctggcagtggt

SEQ ID NO: 161321 - DNA, 25 bp, Canis familiaris
ggcacagttttaacacaggggcttt

SEQ ID NO: 161322 - DNA, 25 bp, Canis familiaris
ggaaggttccaaagggggctcattg

SEQ ID NO: 161323 - DNA, 25 bp, Canis familiaris
tggaagtttcccttgggggcttgca

SEQ ID NO: 161324 - DNA, 25 bp, Canis familiaris
ggaagttggcccttgtgggaatggc

SEQ ID NO: 161325 - DNA, 25 bp, Canis familiaris
ggaatggttgtactttgggaatggg

SEQ ID NO: 161326 - DNA, 25 bp, Canis familiaris
ggaagttctgcaaccttgggaatca

SEQ ID NO: 161327 - DNA, 25 bp, Canis familiaris
ggaagcttgtcatcaacgggaagcc

SEQ ID NO: 161328 - DNA, 25 bp, Canis familiaris
ggaagtcttcatttccttggaacca

SEQ ID NO: 161329 - DNA, 25 bp, Canis familiaris
ggaagtttagcccacattgagaata

SEQ ID NO: 161330 - DNA, 25 bp, Canis familiaris
ggaagagtatccccactgtggatta

SEQ ID NO: 161331 - DNA, 25 bp, Canis familiaris
ggaagagtctcctgtttgtcttaag

SEQ ID NO: 161332 - DNA, 25 bp, Canis familiaris
ggaagagtgcaccatacatttgtaa

SEQ ID NO: 161333 - DNA, 25 bp, Canis familiaris
ggaataatctcctacttgtgaaaat

SEQ ID NO: 161334 - DNA, 25 bp, Canis familiaris
ggaataattccaaccatgatgaact

SEQ ID NO: 161335 - DNA, 25 bp, Canis familiaris
ggaatctgtgtcaatgagccctgaa

SEQ ID NO: 161336 - DNA, 25 bp, Canis familiaris
ggaagctgctggaaggcgaggagag

SEQ ID NO: 161337 - DNA, 25 bp, Canis familiaris
ggaaggggccagcctaggggtatgc

SEQ ID NO: 161338 - DNA, 25 bp, Canis familiaris
ggaaggggtagtaattggcctgctc

SEQ ID NO: 161339 - DNA, 25 bp, Canis familiaris
ggaagtggcgtacagtggatcggct

SEQ ID NO: 161340 - DNA, 25 bp, Canis familiaris
ggaatggggtaacaggatgatggac

SEQ ID NO: 161341 - DNA, 25 bp, Canis familiaris
ggaagggaatcatgccatttattac

SEQ ID NO: 161342 - DNA, 25 bp, Canis familiaris
ggaaggagatcctgccatttatgga

SEQ ID NO: 161343 - DNA, 25 bp, Canis familiaris
ggaagtgaagctcctaattctctgg

SEQ ID NO: 161344 - DNA, 25 bp, Canis familiaris
ggaaggaaatccaaagctcacgaga

SEQ ID NO: 161345 - DNA, 25 bp, Canis familiaris
ggaaggaaccaggaggcccagaaag

SEQ ID NO: 161346 - DNA, 25 bp, Canis familiaris
ggaagagaaccagaagcccaggctt

SEQ ID NO: 161347 - DNA, 25 bp, Canis familiaris
ggaagaatattcgaggacccaggcc

SEQ ID NO: 161348 - DNA, 25 bp, Canis familiaris
ggaagaatttcataagcacccgccc

SEQ ID NO: 161349 - DNA, 25 bp, Canis familiaris
ggaagaatcctaaagcagactcgct

SEQ ID NO: 161350 - DNA, 25 bp, Canis familiaris
ggaagcatcaccaaggagaactaca

SEQ ID NO: 161351 - DNA, 25 bp, Canis familiaris
ggaagcatatccaggcacaatgtat

SEQ ID NO: 161352 - DNA, 25 bp, Canis familiaris
ggaatgacaccaaggaagatgtatt

SEQ ID NO: 161353 - DNA, 25 bp, Canis familiaris
ggcaaggccaagggcattatgtgtt

SEQ ID NO: 161354 - DNA, 25 bp, Canis familiaris
ggcacagtacaattcctgtttttgc

SEQ ID NO: 161355 - DNA, 25 bp, Canis familiaris
ggaagtacatattctggcccttccc

SEQ ID NO: 161356 - DNA, 25 bp, Canis familiaris
ggaagtgggcatttggcccttctca

SEQ ID NO: 161357 - DNA, 25 bp, Canis familiaris
ggaagtgggatcagggctttctcca

SEQ ID NO: 161358 - DNA, 25 bp, Canis familiaris
ggaagtgagtgtggggccttttgcc

SEQ ID NO: 161359 - DNA, 25 bp, Canis familiaris
ggaagggtaagtgggcgctaagcct

SEQ ID NO: 161360 - DNA, 25 bp, Canis familiaris
ggaagatggtacagcaggcctaggg

SEQ ID NO: 161361 - DNA, 25 bp, Canis familiaris
ggaagaagaagcagaggcctgttgg

SEQ ID NO: 161362 - DNA, 25 bp, Canis familiaris
ggaatgaagaactgttgcctaattg

SEQ ID NO: 161363 - DNA, 25 bp, Canis familiaris
ggaagaggagcctttctcactaagt

SEQ ID NO: 161364 - DNA, 25 bp, Canis familiaris
ggaagagaggtcttttgcttgaagt

SEQ ID NO: 161365 - DNA, 25 bp, Canis familiaris
ggaagagagggaggctcctcgacga

SEQ ID NO: 161366 - DNA, 25 bp, Canis familiaris
ggaagcagagggaatgatcctctag

SEQ ID NO: 161367 - DNA, 25 bp, Canis familiaris
ggaagagtggaactacagtctcatt

SEQ ID NO: 161368 - DNA, 25 bp, Canis familiaris
ggaagcagtggacctgctcagtttc

SEQ ID NO: 161369 - DNA, 25 bp, Canis familiaris
ggaagtggctggtcagctcattatt

SEQ ID NO: 161370 - DNA, 25 bp, Canis familiaris
ggaagtggctggtcagctcattatt

SEQ ID NO: 161371 - DNA, 25 bp, Canis familiaris
ggaagcatggtttgactcattctat

SEQ ID NO: 161372 - DNA, 25 bp, Canis familiaris
ggcactagaatactgcctgctcctt

SEQ ID NO: 161373 - DNA, 25 bp, Canis familiaris
ggcagcctgcaaatatggggccttt

SEQ ID NO: 161374 - DNA, 25 bp, Canis familiaris
ggaagcagcaatcaagggcctgggc

SEQ ID NO: 161375 - DNA, 25 bp, Canis familiaris
ggaagctgcgaacggggcttggacc

SEQ ID NO: 161376 - DNA, 25 bp, Canis familiaris
ggcaactgaggctggggccagaacc

SEQ ID NO: 161377 - DNA, 25 bp, Canis familiaris
ggaatatggggggaggcccactgcc

SEQ ID NO: 161378 - DNA, 25 bp, Canis familiaris
ggaattgacggaagggcaccactaa

SEQ ID NO: 161379 - DNA, 25 bp, Canis familiaris
ggaatgtcccggagtcctagatgga

SEQ ID NO: 161380 - DNA, 25 bp, Canis familiaris
ggaattccgggatggccaaggtgca

SEQ ID NO: 161381 - DNA, 25 bp, Canis familiaris
ggaagtgtctggtaaggtcgaggag

SEQ ID NO: 161382 - DNA, 25 bp, Canis familiaris
ggaagttgtgtgtcatgcagtttag

SEQ ID NO: 161383 - DNA, 25 bp, Canis familiaris
ggaagtcgtgtgtagaccattcatt

SEQ ID NO: 161384 - DNA, 25 bp, Canis familiaris
ggaaggcgttgtaacctctatcttt

SEQ ID NO: 161385 - DNA, 25 bp, Canis familiaris
ggaagaggttgaggagcctgctgca

SEQ ID NO: 161386 - DNA, 25 bp, Canis familiaris
ggaagaggactgctgatgctggctc

SEQ ID NO: 161387 - DNA, 25 bp, Canis familiaris
ggaatggaagggctctggctgcccg

SEQ ID NO: 161388 - DNA, 25 bp, Canis familiaris
ggaaggtaggagctctgtgtgctta

SEQ ID NO: 161389 - DNA, 25 bp, Canis familiaris
ggaaggtcaggaggctttgccgggc

SEQ ID NO: 161390 - DNA, 25 bp, Canis familiaris
ggaagtgacatggcaccttgtccag

SEQ ID NO: 161391 - DNA, 25 bp, Canis familiaris
ggaagtgtctgatcagctggtgccg

SEQ ID NO: 161392 - DNA, 25 bp, Canis familiaris
ggaagtgttcatgtgcagtgtgctc

SEQ ID NO: 161393 - DNA, 25 bp, Canis familiaris
ggaaggcttcacttggattgataga

SEQ ID NO: 161394 - DNA, 25 bp, Canis familiaris
ggaattgttcacctggtttgaaata

SEQ ID NO: 161395 - DNA, 25 bp, Canis familiaris
ggaatcttctcttgattttcataaa

SEQ ID NO: 161396 - DNA, 25 bp, Canis familiaris
ggaagtgttctattctgttcaaaag

SEQ ID NO: 161397 - DNA, 25 bp, Canis familiaris
ggaagatggtcgacgcttcccaaag

SEQ ID NO: 161398 - DNA, 25 bp, Canis familiaris
ggaagtggacacacagtcctcaaag

SEQ ID NO: 161399 - DNA, 25 bp, Canis familiaris
ggaaggggaattttctctgccaaga

SEQ ID NO: 161400 - DNA, 25 bp, Canis familiaris
ggaatagggtttggcatccccacag

SEQ ID NO: 161401 - DNA, 25 bp, Canis familiaris
ggaaggtggatggctggatctccca

SEQ ID NO: 161402 - DNA, 25 bp, Canis familiaris
ggaagcacccatgtaatctcctaat

SEQ ID NO: 161403 - DNA, 25 bp, Canis familiaris
ggaaggttatttcaatcatctaatc

SEQ ID NO: 161404 - DNA, 25 bp, Canis familiaris
ggaagcagtttattcatacatctct

SEQ ID NO: 161405 - DNA, 25 bp, Canis familiaris
ggaagtgctttatctcaagctgcaa

SEQ ID NO: 161406 - DNA, 25 bp, Canis familiaris
ggaagtcatttctttaagctgcttt

SEQ ID NO: 161407 - DNA, 25 bp, Canis familiaris
ggaagagatattagttacagatttt

SEQ ID NO: 161408 - DNA, 25 bp, Canis familiaris
ggaagcagaatcatttggacatgtt

SEQ ID NO: 161409 - DNA, 25 bp, Canis familiaris
ggaagagagctgtttgtgtgatttg

SEQ ID NO: 161410 - DNA, 25 bp, Canis familiaris
ggaagcaagtggttattgacgggga

SEQ ID NO: 161411 - DNA, 25 bp, Canis familiaris
ggcatctaaggtgtttgggggctga

SEQ ID NO: 161412 - DNA, 25 bp, Canis familiaris
ggcattccagaaggactggggggtg

SEQ ID NO: 161413 - DNA, 25 bp, Canis familiaris
ggcaagccaatacacgtaggcttgt

SEQ ID NO: 161414 - DNA, 25 bp, Canis familiaris
ggaagcaaaaaaggctaagcaagca

SEQ ID NO: 161415 - DNA, 25 bp, Canis familiaris
ggaagcaacatttaggtattacaag

SEQ ID NO: 161416 - DNA, 25 bp, Canis familiaris
ggaagtcctgcttgatggaaacgaa

SEQ ID NO: 161417 - DNA, 25 bp, Canis familiaris
ggaagtcacacttgaggccaactag

SEQ ID NO: 161418 - DNA, 25 bp, Canis familiaris
ggaagtacatcattgaactcaacca

SEQ ID NO: 161419 - DNA, 25 bp, Canis familiaris
ggaagattctcttgaactacctccc

SEQ ID NO: 161420 - DNA, 25 bp, Canis familiaris
ggaagatgttcaacgacgtcgctcc

SEQ ID NO: 161421 - DNA, 25 bp, Canis familiaris
ggaagtgttcacttcacaactgccc

SEQ ID NO: 161422 - DNA, 25 bp, Canis familiaris
ggcaaggagtactccacctgtacca

SEQ ID NO: 161423 - DNA, 25 bp, Canis familiaris
ggaaggtgttgcgcaacttcttccc

SEQ ID NO: 161424 - DNA, 25 bp, Canis familiaris
ggaaggtgtgtagaccctcttccta

SEQ ID NO: 161425 - DNA, 25 bp, Canis familiaris
ggaaggtgttactcactcctaaagt

SEQ ID NO: 161426 - DNA, 25 bp, Canis familiaris
ggaaggctgttttgaacccagaaga

SEQ ID NO: 161427 - DNA, 25 bp, Canis familiaris
ggaaggctttcttgagatacttgat

SEQ ID NO: 161428 - DNA, 25 bp, Canis familiaris
ggaaggctctcttagtgcatttgtt

SEQ ID NO: 161429 - DNA, 25 bp, Canis familiaris
ggaaggcctggaagtgcatggggaa

SEQ ID NO: 161430 - DNA, 25 bp, Canis familiaris
ggaagacactgagaacatggctgag

SEQ ID NO: 161431 - DNA, 25 bp, Canis familiaris
ggcacagaattaaaagctaccagta

SEQ ID NO: 161432 - DNA, 25 bp, Canis familiaris
ggcaagccatgcacgcaactttagt

SEQ ID NO: 161433 - DNA, 25 bp, Canis familiaris
ggcaagctttgggaacttttcattc

SEQ ID NO: 161434 - DNA, 25 bp, Canis familiaris
ggaatgatttgagacactttcatat

SEQ ID NO: 161435 - DNA, 25 bp, Canis familiaris
ggaattatataatcacttgggtaat

SEQ ID NO: 161436 - DNA, 25 bp, Canis familiaris
ggaattttgaagtaggggtgtgtgt

SEQ ID NO: 161437 - DNA, 25 bp, Canis familiaris
ggaattgttgagaaaggtgtgcctt

SEQ ID NO: 161438 - DNA, 25 bp, Canis familiaris
ggaattgttgagagtggcacaactc

SEQ ID NO: 161439 - DNA, 25 bp, Canis familiaris
ggaagtggtgtgtgatggtcaaccc

SEQ ID NO: 161440 - DNA, 25 bp, Canis familiaris
ggaaggaggatgtcctggccaactc

SEQ ID NO: 161441 - DNA, 25 bp, Canis familiaris
ggaagagactgcacttgagccaagt

SEQ ID NO: 161442 - DNA, 25 bp, Canis familiaris
ggaagaccatgtaaagacacagagt

SEQ ID NO: 161443 - DNA, 25 bp, Canis familiaris
ggaagaacagaataactcgtgacca

SEQ ID NO: 161444 - DNA, 25 bp, Canis familiaris
ggaagacaccaataaccagatgccc

SEQ ID NO: 161445 - DNA, 25 bp, Canis familiaris
ggaagacccacatcaacattgtggt

SEQ ID NO: 161446 - DNA, 25 bp, Canis familiaris
ggaagaccattgtacacagaatgtg

SEQ ID NO: 161447 - DNA, 25 bp, Canis familiaris
ggaagaacttaaactgtactgtgta

SEQ ID NO: 161448 - DNA, 25 bp, Canis familiaris
ggaagtctcttatacttacattaaa

SEQ ID NO: 161449 - DNA, 25 bp, Canis familiaris
ggaagttgctaatacaaaaatccaa

SEQ ID NO: 161450 - DNA, 25 bp, Canis familiaris
ggaagtatgtacacacaccaaccaa

SEQ ID NO: 161451 - DNA, 25 bp, Canis familiaris
ggaatatcattaagtcacaaaagga

SEQ ID NO: 161452 - DNA, 25 bp, Canis familiaris
ggaagaggctgaagtcatcaaccag

SEQ ID NO: 161453 - DNA, 25 bp, Canis familiaris
ggaagagatgccagtgtgctagcca

SEQ ID NO: 161454 - DNA, 25 bp, Canis familiaris
ggaagatgtcatcagcatgtttgct

SEQ ID NO: 161455 - DNA, 25 bp, Canis familiaris
ggaagatccgcaagctgctatcgtc

SEQ ID NO: 161456 - DNA, 25 bp, Canis familiaris
ggaatctccagaatctgctgatcct

SEQ ID NO: 161457 - DNA, 25 bp, Canis familiaris
ggaatcgctagagttgcgctgtctg

SEQ ID NO: 161458 - DNA, 25 bp, Canis familiaris
ggaaggtctgcagtcatggctttgc

SEQ ID NO: 161459 - DNA, 25 bp, Canis familiaris
ggaagactctgctttgcagctattg

SEQ ID NO: 161460 - DNA, 25 bp, Canis familiaris
ggaagagctgcagatggagcctgtg

SEQ ID NO: 161461 - DNA, 25 bp, Canis familiaris
ggaagagctctgtgagaacttgaac

SEQ ID NO: 161462 - DNA, 25 bp, Canis familiaris
ggaagactcagaagaaaccgtagaa

SEQ ID NO: 161463 - DNA, 25 bp, Canis familiaris
ggaagaccagggccagaacgtcaga

SEQ ID NO: 161464 - DNA, 25 bp, Canis familiaris
ggaagaggggactagcagaggctgc

SEQ ID NO: 161465 - DNA, 25 bp, Canis familiaris
ggaagatgcggtacagtgccaactg

SEQ ID NO: 161466 - DNA, 25 bp, Canis familiaris
ggaagatggcaccatgcgtggctac

SEQ ID NO: 161467 - DNA, 25 bp, Canis familiaris
ggaaggcgctcgccgatgagtacga

SEQ ID NO: 161468 - DNA, 25 bp, Canis familiaris
ggaagggagcggcagcagtgaagga

SEQ ID NO: 161469 - DNA, 25 bp, Canis familiaris
ggaaggacacacggacagagaaagt

SEQ ID NO: 161470 - DNA, 25 bp, Canis familiaris
ggaagagacacacttgccaagagaa

SEQ ID NO: 161471 - DNA, 25 bp, Canis familiaris
ggaagatacatcccttaagatcagc

SEQ ID NO: 161472 - DNA, 25 bp, Canis familiaris
ggaagtagctctgctaaatgcaccg

SEQ ID NO: 161473 - DNA, 25 bp, Canis familiaris
ggaagagactctcttccatcctctg

SEQ ID NO: 161474 - DNA, 25 bp, Canis familiaris
ggaagaggctctctcttctctattc

SEQ ID NO: 161475 - DNA, 25 bp, Canis familiaris
ggcaagggttgactctttgttttat

SEQ ID NO: 161476 - DNA, 25 bp, Canis familiaris
ggcacagacgttcacgttttctttt

SEQ ID NO: 161477 - DNA, 25 bp, Canis familiaris
ggaagacctatgctggttttatctt

SEQ ID NO: 161478 - DNA, 25 bp, Canis familiaris
ggaagattcttgccagggcgttctg

SEQ ID NO: 161479 - DNA, 25 bp, Canis familiaris
ggaagtgtcattccactgggttctg

SEQ ID NO: 161480 - DNA, 25 bp, Canis familiaris
ggaaggacatggccattgttttcag

SEQ ID NO: 161481 - DNA, 25 bp, Canis familiaris
ggaatggactgggaccttgtctcac

SEQ ID NO: 161482 - DNA, 25 bp, Canis familiaris
ggaattggcgggacttggctgtagc

SEQ ID NO: 161483 - DNA, 25 bp, Canis familiaris
ggaaggcaggtggacattggcgggc

SEQ ID NO: 161484 - DNA, 25 bp, Canis familiaris
ggaaggcgcagaacacttggggctg

SEQ ID NO: 161485 - DNA, 25 bp, Canis familiaris
ggaagtgcacagacactgggggagc

SEQ ID NO: 161486 - DNA, 25 bp, Canis familiaris
ggaagatccagagtaagttgcgcag

SEQ ID NO: 161487 - DNA, 25 bp, Canis familiaris
ggaagatggcaacacagcatttcgg

SEQ ID NO: 161488 - DNA, 25 bp, Canis familiaris
ggaaggcccaaaccatgttcagggt

SEQ ID NO: 161489 - DNA, 25 bp, Canis familiaris
ggaagagccccaagtgcatttcggc

SEQ ID NO: 161490 - DNA, 25 bp, Canis familiaris
ggaagagacccaactgcaaagagaa

SEQ ID NO: 161491 - DNA, 25 bp, Canis familiaris
ggaagagcaacccacatgaagatga

SEQ ID NO: 161492 - DNA, 25 bp, Canis familiaris
ggaagagcagagcgtctgagggagg

SEQ ID NO: 161493 - DNA, 25 bp, Canis familiaris
ggaagagcagggcagccagagccag

SEQ ID NO: 161494 - DNA, 25 bp, Canis familiaris
ggaaggcaggcaggccaatggccac

SEQ ID NO: 161495 - DNA, 25 bp, Canis familiaris
ggaagggccacaacaagggcaactt

SEQ ID NO: 161496 - DNA, 25 bp, Canis familiaris
ggaatttgcccaataacgggctcta

SEQ ID NO: 161497 - DNA, 25 bp, Canis familiaris
ggcttttccccacaagaggatctag

SEQ ID NO: 161498 - DNA, 25 bp, Canis familiaris
ggcattttttaaccccatggattag

SEQ ID NO: 161499 - DNA, 25 bp, Canis familiaris
ggcttgtttcaatttcaccattatg

SEQ ID NO: 161500 - DNA, 25 bp, Canis familiaris
ggcacctttaccatcaccaggtgac

SEQ ID NO: 161501 - DNA, 25 bp, Canis familiaris
ggcttcccacccacaaagattgagc

SEQ ID NO: 161502 - DNA, 25 bp, Canis familiaris
ggcccccaacctgaagcagttcagg

SEQ ID NO: 161503 - DNA, 25 bp, Canis familiaris
ggcaccccagtggttaagtggacgc

SEQ ID NO: 161504 - DNA, 25 bp, Canis familiaris
ggcagccaccagtgtggtttgggca

SEQ ID NO: 161505 - DNA, 25 bp, Canis familiaris
ggcagctccaggttggtttctgggt

SEQ ID NO: 161506 - DNA, 25 bp, Canis familiaris
ggcagttcagtgttgtatggttgga

SEQ ID NO: 161507 - DNA, 25 bp, Canis familiaris
ggaattcctatttatggcatttcgt

SEQ ID NO: 161508 - DNA, 25 bp, Canis familiaris
ggaattcccatggaagaggttcctc

SEQ ID NO: 161509 - DNA, 25 bp, Canis familiaris
ggaattgcccaatttgggccaacca

SEQ ID NO: 161510 - DNA, 25 bp, Canis familiaris
ggaatgtgcccacggatgggcccac

SEQ ID NO: 161511 - DNA, 25 bp, Canis familiaris
ggaagtaaagagaactgagcacaaa

SEQ ID NO: 161512 - DNA, 25 bp, Canis familiaris
ggaagtaccaggaagctgagcttct

SEQ ID NO: 161513 - DNA, 25 bp, Canis familiaris
ggaagtatggatcctgatggagatt

SEQ ID NO: 161514 - DNA, 25 bp, Canis familiaris
ggaagtttatcactggagaaattat

SEQ ID NO: 161515 - DNA, 25 bp, Canis familiaris
ggaatgatcctgggctggaaatttt

SEQ ID NO: 161516 - DNA, 25 bp, Canis familiaris
ggaatgctccggcgggaaggctgtt

SEQ ID NO: 161517 - DNA, 25 bp, Canis familiaris
ggaagtgagcatccggggagggctg

SEQ ID NO: 161518 - DNA, 25 bp, Canis familiaris
ggaaggagctgtgcaggggagcctc

SEQ ID NO: 161519 - DNA, 25 bp, Canis familiaris
ggaagggtctgcaggctggagtcta

SEQ ID NO: 161520 - DNA, 25 bp, Canis familiaris
ggaagggttggggtggacagctgac

SEQ ID NO: 161521 - DNA, 25 bp, Canis familiaris
ggaagggttaatgtgtggcatctgg

SEQ ID NO: 161522 - DNA, 25 bp, Canis familiaris
ggaagaggattattggttggaataa

SEQ ID NO: 161523 - DNA, 25 bp, Canis familiaris
ggaagggtctattgccttgagaaaa

SEQ ID NO: 161524 - DNA, 25 bp, Canis familiaris
ggaagagagggttctcgggaagaga

SEQ ID NO: 161525 - DNA, 25 bp, Canis familiaris
ggaagagagcgacactcgtctggga

SEQ ID NO: 161526 - DNA, 25 bp, Canis familiaris
ggaagagagaggccctcagctgctg

SEQ ID NO: 161527 - DNA, 25 bp, Canis familiaris
ggaagagtaggcctctgcagggtca

SEQ ID NO: 161528 - DNA, 25 bp, Canis familiaris
ggaagtgaagagggcgctggagatc

SEQ ID NO: 161529 - DNA, 25 bp, Canis familiaris
ggaagggaggctgcttgggattctc

SEQ ID NO: 161530 - DNA, 25 bp, Canis familiaris
ggaagaggaggcaactttggttttg

SEQ ID NO: 161531 - DNA, 25 bp, Canis familiaris
ggaagaggaggatatggtggtggag

SEQ ID NO: 161532 - DNA, 25 bp, Canis familiaris
ggaatgaggtgggagaggggggaag

SEQ ID NO: 161533 - DNA, 25 bp, Canis familiaris
ggaagggccagagagggagagagac

SEQ ID NO: 161534 - DNA, 25 bp, Canis familiaris
ggaagggctcagaggccgtggtgtc

SEQ ID NO: 161535 - DNA, 25 bp, Canis familiaris
ggaagggctgtgatgggggaatttg

SEQ ID NO: 161536 - DNA, 25 bp, Canis familiaris
ggaagggcttgcttgggcaggaact

SEQ ID NO: 161537 - DNA, 25 bp, Canis familiaris
ggaagtccacctttgtgcaggaaca

SEQ ID NO: 161538 - DNA, 25 bp, Canis familiaris
ggaagttcaccatctacagacaagt

SEQ ID NO: 161539 - DNA, 25 bp, Canis familiaris
ggaaggtccttattatcacacacct

SEQ ID NO: 161540 - DNA, 25 bp, Canis familiaris
ggaatgtccctggaatgtccacagt

SEQ ID NO: 161541 - DNA, 25 bp, Canis familiaris
ggaagtccatgttctcagaccaagt

SEQ ID NO: 161542 - DNA, 25 bp, Canis familiaris
ggaagtgaatcatcatcgatccggc

SEQ ID NO: 161543 - DNA, 25 bp, Canis familiaris
ggaagtgagaaaccgctcttggcaa

SEQ ID NO: 161544 - DNA, 25 bp, Canis familiaris
ggaaggaactaaaggagctgatcaa

SEQ ID NO: 161545 - DNA, 25 bp, Canis familiaris
ggaagtacattgcaagaaccatgaa

SEQ ID NO: 161546 - DNA, 25 bp, Canis familiaris
ggcacaactcttgcaggaacctaaa

SEQ ID NO: 161547 - DNA, 25 bp, Canis familiaris
ggcacaaaccccagaatcctaatag

SEQ ID NO: 161548 - DNA, 25 bp, Canis familiaris
ggcaaaacccacagaaactcatcac

SEQ ID NO: 161549 - DNA, 25 bp, Canis familiaris
ggcaaaacccaatgaaatttatagt

SEQ ID NO: 161550 - DNA, 25 bp, Canis familiaris
ggaataccaccctgagttttgatag

SEQ ID NO: 161551 - DNA, 25 bp, Canis familiaris
ggaataaccatccggagtttctcat

SEQ ID NO: 161552 - DNA, 25 bp, Canis familiaris
ggaatggactcctgggatttcactg

SEQ ID NO: 161553 - DNA, 25 bp, Canis familiaris
ggaaggcagagccggggtctgatcg

SEQ ID NO: 161554 - DNA, 25 bp, Canis familiaris
ggaagggggctgggagactgttgga

SEQ ID NO: 161555 - DNA, 25 bp, Canis familiaris
ggcacaggttggcgtaggtgttggc

SEQ ID NO: 161556 - DNA, 25 bp, Canis familiaris
ggcaagaaagcctgtgggttatgac

SEQ ID NO: 161557 - DNA, 25 bp, Canis familiaris
ggcacattgaaggaaggggttaact

SEQ ID NO: 161558 - DNA, 25 bp, Canis familiaris
tggaaaaggaagatgtggtatacac

SEQ ID NO: 161559 - DNA, 25 bp, Canis familiaris
tggaaaagggttatccgcctcacca

SEQ ID NO: 161560 - DNA, 25 bp, Canis familiaris
tggttaaggtgttcccaggccaaag

SEQ ID NO: 161561 - DNA, 25 bp, Canis familiaris
ggctgtagggggtgaccctcagcaa

SEQ ID NO: 161562 - DNA, 25 bp, Canis familiaris
ggcagggggtggggaacctgtagct

SEQ ID NO: 161563 - DNA, 25 bp, Canis familiaris
ggcagacccagggggaaactgtgga

SEQ ID NO: 161564 - DNA, 25 bp, Canis familiaris
ggaatctcacagttctgagaaccag

SEQ ID NO: 161565 - DNA, 25 bp, Canis familiaris
ggaatgcctatgttctgaagtctga

SEQ ID NO: 161566 - DNA, 25 bp, Canis familiaris
ggaatcctatggaatgtaatcccgg

SEQ ID NO: 161567 - DNA, 25 bp, Canis familiaris
ggaatcctagtgaattaatgccctt

SEQ ID NO: 161568 - DNA, 25 bp, Canis familiaris
ggaatcctatggaaattgaatccct

SEQ ID NO: 161569 - DNA, 25 bp, Canis familiaris
ggaatcgctttagaggcagacccat

SEQ ID NO: 161570 - DNA, 25 bp, Canis familiaris
ggaaggctttaggatctcagattgc

SEQ ID NO: 161571 - DNA, 25 bp, Canis familiaris
ggaagtgttccaggactggaagccc

SEQ ID NO: 161572 - DNA, 25 bp, Canis familiaris
ggaagtgtacctggtgctgtgggcc

SEQ ID NO: 161573 - DNA, 25 bp, Canis familiaris
ggaaggtgatcaaggctggtgtagc

SEQ ID NO: 161574 - DNA, 25 bp, Canis familiaris
ggaaggatgtaaccttgcccatgca

SEQ ID NO: 161575 - DNA, 25 bp, Canis familiaris
ggaaggttataggctgctggcccac

SEQ ID NO: 161576 - DNA, 25 bp, Canis familiaris
ggaaggcctaggggtgagcccaaga

SEQ ID NO: 161577 - DNA, 25 bp, Canis familiaris
ggcaatgggctgagggtgccctagg

SEQ ID NO: 161578 - DNA, 25 bp, Canis familiaris
ggaagtggatggagggccctctggc

SEQ ID NO: 161579 - DNA, 25 bp, Canis familiaris
ggaaggatggagaggagcgcccgtc

SEQ ID NO: 161580 - DNA, 25 bp, Canis familiaris
ggaagatattcaatggaagcgcggg

SEQ ID NO: 161581 - DNA, 25 bp, Canis familiaris
ggaatgatcattctgtggggaggag

SEQ ID NO: 161582 - DNA, 25 bp, Canis familiaris
ggaagttagcatggctggggcagga

SEQ ID NO: 161583 - DNA, 25 bp, Canis familiaris
ggaagtgggcaggctgggggatggc

SEQ ID NO: 161584 - DNA, 25 bp, Canis familiaris
ggaaggctgctgggttggaagatgg

SEQ ID NO: 161585 - DNA, 25 bp, Canis familiaris
ggcaagttcttggttgcccagctag

SEQ ID NO: 161586 - DNA, 25 bp, Canis familiaris
ggcaagtttgtggtgtccacgacac

SEQ ID NO: 161587 - DNA, 25 bp, Canis familiaris
ggcaaccactctgtctacaagagcg

SEQ ID NO: 161588 - DNA, 25 bp, Canis familiaris
ggaatactcgtgaactacttgtcgc

SEQ ID NO: 161589 - DNA, 25 bp, Canis familiaris
ggaatacaaggaactgacctttgat

SEQ ID NO: 161590 - DNA, 25 bp, Canis familiaris
ggaataagattcactaccatagttt

SEQ ID NO: 161591 - DNA, 25 bp, Canis familiaris
ggaatgaagagtccgtggcctggct

SEQ ID NO: 161592 - DNA, 25 bp, Canis familiaris
ggaaggaggtggctggcctggtgac

SEQ ID NO: 161593 - DNA, 25 bp, Canis familiaris
ggaaggcggtagctggagtggcggt

SEQ ID NO: 161594 - DNA, 25 bp, Canis familiaris
ggaagtgcacctggatccaagtggg

SEQ ID NO: 161595 - DNA, 25 bp, Canis familiaris
ggaaggactcatgaccacagtccat

SEQ ID NO: 161596 - DNA, 25 bp, Canis familiaris
ggcactggacttcacccagtggctt

SEQ ID NO: 161597 - DNA, 25 bp, Canis familiaris
tgaccgtactgtgcgtatctggcgc

SEQ ID NO: 161598 - DNA, 25 bp, Canis familiaris
tgacggacttggtgttctaggcccg

SEQ ID NO: 161599 - DNA, 25 bp, Canis familiaris
tgagcatgcgacggttctttctagg

SEQ ID NO: 161600 - DNA, 25 bp, Canis familiaris
ggaatcaccagcaatgagcgaggga

SEQ ID NO: 161601 - DNA, 25 bp, Canis familiaris
ggaatgagcctgtgactactggaac

SEQ ID NO: 161602 - DNA, 25 bp, Canis familiaris
ggcaatggtctgatgactatctgac

SEQ ID NO: 161603 - DNA, 25 bp, Canis familiaris
ggaatggtcagccgttatcagagca

SEQ ID NO: 161604 - DNA, 25 bp, Canis familiaris
ggaagtgtgagcgtgtcttgctggc

SEQ ID NO: 161605 - DNA, 25 bp, Canis familiaris
ggaagtggctgctgtgagcctgtgc

SEQ ID NO: 161606 - DNA, 25 bp, Canis familiaris
ggaagtggctgctcttgtcatgagc

SEQ ID NO: 161607 - DNA, 25 bp, Canis familiaris
ggaatgcatgtgttttctgtaactt

SEQ ID NO: 161608 - DNA, 25 bp, Canis familiaris
ggaatatctgtatgttggatgactt

SEQ ID NO: 161609 - DNA, 25 bp, Canis familiaris
ggaatctgcttatatttagccaggc

SEQ ID NO: 161610 - DNA, 25 bp, Canis familiaris
ggaatctctatgttgtttagctact

SEQ ID NO: 161611 - DNA, 25 bp, Canis familiaris
ggaatcatctggtctttctggatac

SEQ ID NO: 161612 - DNA, 25 bp, Canis familiaris
ggctacttggactattcagggagtc

SEQ ID NO: 161613 - DNA, 25 bp, Canis familiaris
ggcaactagaatctccatggggccc

SEQ ID NO: 161614 - DNA, 25 bp, Canis familiaris
ggcaaaagactgtatcgtggccccc

SEQ ID NO: 161615 - DNA, 25 bp, Canis familiaris
ggcagaaggactccattgtttcccc

SEQ ID NO: 161616 - DNA, 25 bp, Canis familiaris
ggcacaacggaacagtttcctctcc

SEQ ID NO: 161617 - DNA, 25 bp, Canis familiaris
ggcagcactttgtgaaatttcccct

SEQ ID NO: 161618 - DNA, 25 bp, Canis familiaris
ggaatccctatggaattttatccct

SEQ ID NO: 161619 - DNA, 25 bp, Canis familiaris
ggaatccactgcaaaattttctact

SEQ ID NO: 161620 - DNA, 25 bp, Canis familiaris
ggcactccagtttaattttctcgga

SEQ ID NO: 161621 - DNA, 25 bp, Canis familiaris
ggaatccgagaactagttttctgga

SEQ ID NO: 161622 - DNA, 25 bp, Canis familiaris
ggaaggggactttattgttgtggtg

SEQ ID NO: 161623 - DNA, 25 bp, Canis familiaris
ggaagtaaacttattgttgtgccag

SEQ ID NO: 161624 - DNA, 25 bp, Canis familiaris
ggaagtccccttcatggacatgtcc

SEQ ID NO: 161625 - DNA, 25 bp, Canis familiaris
ggaatgatcccctcgataacaggag

SEQ ID NO: 161626 - DNA, 25 bp, Canis familiaris
ggaatctctttcttccacaaagaag

SEQ ID NO: 161627 - DNA, 25 bp, Canis familiaris
ggaatctgtgttctcataaaataga

SEQ ID NO: 161628 - DNA, 25 bp, Canis familiaris
ggaatctggcctataaacacatcaa

SEQ ID NO: 161629 - DNA, 25 bp, Canis familiaris
ggaattcgcctacttaagaactcag

SEQ ID NO: 161630 - DNA, 25 bp, Canis familiaris
ggcaatactcctgttaagccattag

SEQ ID NO: 161631 - DNA, 25 bp, Canis familiaris
ggaatttcacttttgctaccttgat

SEQ ID NO: 161632 - DNA, 25 bp, Canis familiaris
ggaattgaaattgtgaacacttgct

SEQ ID NO: 161633 - DNA, 25 bp, Canis familiaris
tgaaactaaagggatggacacaggt

SEQ ID NO: 161634 - DNA, 25 bp, Canis familiaris
ggcagactaacagcttggaacctta

SEQ ID NO: 161635 - DNA, 25 bp, Canis familiaris
ggctgagaaaaggccggcaaacttc

SEQ ID NO: 161636 - DNA, 25 bp, Canis familiaris
ggcgaggacaaaggcccaagaattc

SEQ ID NO: 161637 - DNA, 25 bp, Canis familiaris
ggcaaggaacgagaccaagatgacc

SEQ ID NO: 161638 - DNA, 25 bp, Canis familiaris
ggaaggagcaaaaagccagcagatg

SEQ ID NO: 161639 - DNA, 25 bp, Canis familiaris
ggaaggcagcaaggcagcgcaacat

SEQ ID NO: 161640 - DNA, 25 bp, Canis familiaris
ggaaggcctggggacagacatcacg

SEQ ID NO: 161641 - DNA, 25 bp, Canis familiaris
ggaaggccggaggcacatccataaa

SEQ ID NO: 161642 - DNA, 25 bp, Canis familiaris
ggaatagccaggtccatctcaaaac

SEQ ID NO: 161643 - DNA, 25 bp, Canis familiaris
ggaatactcagccattaccaaaaaa

SEQ ID NO: 161644 - DNA, 25 bp, Canis familiaris
ggaatagccacttttccagaaaatt

SEQ ID NO: 161645 - DNA, 25 bp, Canis familiaris
ggaaggcagccttttctcaagaaaa

SEQ ID NO: 161646 - DNA, 25 bp, Canis familiaris
ggcaagaggctcaagttacaaagaa

SEQ ID NO: 161647 - DNA, 25 bp, Canis familiaris
tggccaatgtaaggttaaatagtaa

SEQ ID NO: 161648 - DNA, 25 bp, Canis familiaris
ggcacatagttagggttacagcagt

SEQ ID NO: 161649 - DNA, 25 bp, Canis familiaris
ggcacaagtagagtggaattcgctc

SEQ ID NO: 161650 - DNA, 25 bp, Canis familiaris
ggcacatgccgaacgtaattccgcc

SEQ ID NO: 161651 - DNA, 25 bp, Canis familiaris
ggcaagcacgcaactataatcctga

SEQ ID NO: 161652 - DNA, 25 bp, Canis familiaris
ggcatagaagcaacctaagtgtccg

SEQ ID NO: 161653 - DNA, 25 bp, Canis familiaris
ggcaatgtcgagggttatggtccag

SEQ ID NO: 161654 - DNA, 25 bp, Canis familiaris
ggcaatattagttttagggcataga

SEQ ID NO: 161655 - DNA, 25 bp, Canis familiaris
ggcaacttagtcttgtagtggctga

SEQ ID NO: 161656 - DNA, 25 bp, Canis familiaris
tggcaaccagggtgggggctacgga

SEQ ID NO: 161657 - DNA, 25 bp, Canis familiaris
ggcaaccgggtgatggtggtgctgg

SEQ ID NO: 161658 - DNA, 25 bp, Canis familiaris
ggaatggccgggatggtgaacgagg

SEQ ID NO: 161659 - DNA, 25 bp, Canis familiaris
ggaattgccgtgatcaggtaagggt

SEQ ID NO: 161660 - DNA, 25 bp, Canis familiaris
ggaattcactgaccatcttgtaaag

SEQ ID NO: 161661 - DNA, 25 bp, Canis familiaris
ggaattcactgaccatcttgtaaag

SEQ ID NO: 161662 - DNA, 25 bp, Canis familiaris
ggcacagtgccatgaactatgaaaa

SEQ ID NO: 161663 - DNA, 25 bp, Canis familiaris
ggcacagctgcagctgcagcagcaa

SEQ ID NO: 161664 - DNA, 25 bp, Canis familiaris
ggcactatcaccaccaaggagttgg

SEQ ID NO: 161665 - DNA, 25 bp, Canis familiaris
ggcaatacactcacaaggaggggga

SEQ ID NO: 161666 - DNA, 25 bp, Canis familiaris
ggaatccaccacgagtgagcagagt

SEQ ID NO: 161667 - DNA, 25 bp, Canis familiaris
ggaattccccattggagctggtttg

SEQ ID NO: 161668 - DNA, 25 bp, Canis familiaris
ggaatcttcaccttggagtggagtt

SEQ ID NO: 161669 - DNA, 25 bp, Canis familiaris
ggcaacttgcatcactggagggtgg

SEQ ID NO: 161670 - DNA, 25 bp, Canis familiaris
ggcaacctctgctccagatagatgg

SEQ ID NO: 161671 - DNA, 25 bp, Canis familiaris
ggcaaccttgcccaagaagttaatc

SEQ ID NO: 161672 - DNA, 25 bp, Canis familiaris
ggcaagtcttaacaaaccaacatct

SEQ ID NO: 161673 - DNA, 25 bp, Canis familiaris
ggctaggcttaagaattccctgagc

SEQ ID NO: 161674 - DNA, 25 bp, Canis familiaris
ggcgaggttagagcacctttctgcg

SEQ ID NO: 161675 - DNA, 25 bp, Canis familiaris
ggaaggagaagagcgaccgtctgct

SEQ ID NO: 161676 - DNA, 25 bp, Canis familiaris
ggaatgggaaaccagcaggctttga

SEQ ID NO: 161677 - DNA, 25 bp, Canis familiaris
ggaatggagaactacacagctttaa

SEQ ID NO: 161678 - DNA, 25 bp, Canis familiaris
ggaatggatgactttcaagagtata

SEQ ID NO: 161679 - DNA, 25 bp, Canis familiaris
ggaatatggacgttaacattgaaat

SEQ ID NO: 161680 - DNA, 25 bp, Canis familiaris
ggaataagcgctttgaaaagaaatt

SEQ ID NO: 161681 - DNA, 25 bp, Canis familiaris
ggaattcatcctataaataagactt

SEQ ID NO: 161682 - DNA, 25 bp, Canis familiaris
ggaatgatgcatgctacaaattaaa

SEQ ID NO: 161683 - DNA, 25 bp, Canis familiaris
ggaattgcatacacagactgattag

SEQ ID NO: 161684 - DNA, 25 bp, Canis familiaris
ggaatcttagcagcaccctgtgatc

SEQ ID NO: 161685 - DNA, 25 bp, Canis familiaris
ggaatatgaggtgtccgctgtgccc

SEQ ID NO: 161686 - DNA, 25 bp, Canis familiaris
ggaatgtggcagctttctgcttccc

SEQ ID NO: 161687 - DNA, 25 bp, Canis familiaris
ggaattggagaacatctgcctggcc

SEQ ID NO: 161688 - DNA, 25 bp, Canis familiaris
ggaatttagaactatagccatggtt

SEQ ID NO: 161689 - DNA, 25 bp, Canis familiaris
ggaattcttgaattgattctgatgg

SEQ ID NO: 161690 - DNA, 25 bp, Canis familiaris
ggaatgtctctttatgagtctgatt

SEQ ID NO: 161691 - DNA, 25 bp, Canis familiaris
ggaatttcatgttgtgttttttgtt

SEQ ID NO: 161692 - DNA, 25 bp, Canis familiaris
ggaatgttcttactgctttttgtgc

SEQ ID NO: 161693 - DNA, 25 bp, Canis familiaris
ggaatattccgatgctttttgtccg

SEQ ID NO: 161694 - DNA, 25 bp, Canis familiaris
ggaatttctagatcatttcttctgg

SEQ ID NO: 161695 - DNA, 25 bp, Canis familiaris
ggaattgtctacattcttttcccta

SEQ ID NO: 161696 - DNA, 25 bp, Canis familiaris
ggaattttcatctgttttctgctcc

SEQ ID NO: 161697 - DNA, 25 bp, Canis familiaris
ggaattatttcttgttttgtgctat

SEQ ID NO: 161698 - DNA, 25 bp, Canis familiaris
ggaattacttccttgctgttgtttt

SEQ ID NO: 161699 - DNA, 25 bp, Canis familiaris
ggcaattagaagctttgttttcatt

SEQ ID NO: 161700 - DNA, 25 bp, Canis familiaris
ggcaatctcgaacacttgctgttta

SEQ ID NO: 161701 - DNA, 25 bp, Canis familiaris
ggaattcaaaatatatctacttaaa

SEQ ID NO: 161702 - DNA, 25 bp, Canis familiaris
ggaattccaggaatcttcttcggac

SEQ ID NO: 161703 - DNA, 25 bp, Canis familiaris
tgggattccaaggttccaacgtgcc

SEQ ID NO: 161704 - DNA, 25 bp, Canis familiaris
ggccattcctagtaaccaggttcct

SEQ ID NO: 161705 - DNA, 25 bp, Canis familiaris
ggcagttcctggtgcaaaagtcagc

SEQ ID NO: 161706 - DNA, 25 bp, Canis familiaris
ggcgtcttgcgtcaccaagaactgc

SEQ ID NO: 161707 - DNA, 25 bp, Canis familiaris
tgacgacgtcgacaccaagaagcag

SEQ ID NO: 161708 - DNA, 25 bp, Canis familiaris
ggcagagcccgagcctaagaaggaa

SEQ ID NO: 161709 - DNA, 25 bp, Canis familiaris
ggcactcctttcgcttcgaaggaga

SEQ ID NO: 161710 - DNA, 25 bp, Canis familiaris
ggaatccaggtcgctggccaaagga

SEQ ID NO: 161711 - DNA, 25 bp, Canis familiaris
ggaataaagtccatgtgccacacca

SEQ ID NO: 161712 - DNA, 25 bp, Canis familiaris
ggaatatagcctcactgtctccaaa

SEQ ID NO: 161713 - DNA, 25 bp, Canis familiaris
ggaatgaagcgctcagtgtggtcaa

SEQ ID NO: 161714 - DNA, 25 bp, Canis familiaris
ggaatatactcaagctgtctgcttc

SEQ ID NO: 161715 - DNA, 25 bp, Canis familiaris
ggcaagctcctgtatgctgtggaac

SEQ ID NO: 161716 - DNA, 25 bp, Canis familiaris
ggcacagcctctggattgggtactc

SEQ ID NO: 161717 - DNA, 25 bp, Canis familiaris
ggcaagacatctgaccaagtactat

SEQ ID NO: 161718 - DNA, 25 bp, Canis familiaris
ggcaagttctggtgccagctagccg

SEQ ID NO: 161719 - DNA, 25 bp, Canis familiaris
ggcaagtactattggaccatgaatc

SEQ ID NO: 161720 - DNA, 25 bp, Canis familiaris
ggaattactaactatcaagccatct

SEQ ID NO: 161721 - DNA, 25 bp, Canis familiaris
ggaattacatgaacataccacctta

SEQ ID NO: 161722 - DNA, 25 bp, Canis familiaris
ggaattatctgaactccacagcgct

SEQ ID NO: 161723 - DNA, 25 bp, Canis familiaris
ggaatctgctctgagacacagcctg

SEQ ID NO: 161724 - DNA, 25 bp, Canis familiaris
ggaatctctcactacatgaatacat

SEQ ID NO: 161725 - DNA, 25 bp, Canis familiaris
ggaatgcttctcgaatgcaaactcc

SEQ ID NO: 161726 - DNA, 25 bp, Canis familiaris
ggaatgcatgttgttcagggtccgc

SEQ ID NO: 161727 - DNA, 25 bp, Canis familiaris
ggaatgaatcttatcgtttctacca

SEQ ID NO: 161728 - DNA, 25 bp, Canis familiaris
ggaatgaacttcctgctgttttaga

SEQ ID NO: 161729 - DNA, 25 bp, Canis familiaris
ggaaggccttccgtgtggattgaaa

SEQ ID NO: 161730 - DNA, 25 bp, Canis familiaris
ggaatgggctatgcctttgatgtgc

SEQ ID NO: 161731 - DNA, 25 bp, Canis familiaris
ggcaagtttcattttttgatgactg

SEQ ID NO: 161732 - DNA, 25 bp, Canis familiaris
ggcaagttatagttctctcagacaa

SEQ ID NO: 161733 - DNA, 25 bp, Canis familiaris
ggaatgtcgtagctatgtcagagat

SEQ ID NO: 161734 - DNA, 25 bp, Canis familiaris
ggaatgttggcacctatcctaatcc

SEQ ID NO: 161735 - DNA, 25 bp, Canis familiaris
ggaatttgtgtgtcatgcaccttct

SEQ ID NO: 161736 - DNA, 25 bp, Canis familiaris
ggaatttggtgtggacatcgggccc

SEQ ID NO: 161737 - DNA, 25 bp, Canis familiaris
ggcaattttggtggacaacgcccct

SEQ ID NO: 161738 - DNA, 25 bp, Canis familiaris
ggcacattcattggttaactccgtc

SEQ ID NO: 161739 - DNA, 25 bp, Canis familiaris
ggaatattttgttcaacgtcgcatt

SEQ ID NO: 161740 - DNA, 25 bp, Canis familiaris
ggaatatttatggtcagtctgcttt

SEQ ID NO: 161741 - DNA, 25 bp, Canis familiaris
ggaatatatgcatcagccagatctg

SEQ ID NO: 161742 - DNA, 25 bp, Canis familiaris
ggcaataatgccctctcagacaaag

SEQ ID NO: 161743 - DNA, 25 bp, Canis familiaris
ggcaaggttcctaagagcaatcagc

SEQ ID NO: 161744 - DNA, 25 bp, Canis familiaris
ggcaaaattgccttatgaccaacta

SEQ ID NO: 161745 - DNA, 25 bp, Canis familiaris
ggcaagatttcatttatgactgaat

SEQ ID NO: 161746 - DNA, 25 bp, Canis familiaris
ggcaaatgtatctattgagaatatt

SEQ ID NO: 161747 - DNA, 25 bp, Canis familiaris
ggcaagcagctggaacggaatttgg

SEQ ID NO: 161748 - DNA, 25 bp, Canis familiaris
ggcaaactggtgttgggatttagca

SEQ ID NO: 161749 - DNA, 25 bp, Canis familiaris
ggcaaactttagctggttaacacca

SEQ ID NO: 161750 - DNA, 25 bp, Canis familiaris
ggcaaaagaagtctggttgacccca

SEQ ID NO: 161751 - DNA, 25 bp, Canis familiaris
ggcaaaactggtgtgtgttttccca

SEQ ID NO: 161752 - DNA, 25 bp, Canis familiaris
ggcaaaactgccggactattttcca

SEQ ID NO: 161753 - DNA, 25 bp, Canis familiaris
ggcaaacccccggggcaatggagca

SEQ ID NO: 161754 - DNA, 25 bp, Canis familiaris
ggcaaagtgaggaggggcaagagga

SEQ ID NO: 161755 - DNA, 25 bp, Canis familiaris
ggcacaagaaggaggagggcgcgga

SEQ ID NO: 161756 - DNA, 25 bp, Canis familiaris
ggcacataagaggctgggggcgggg

SEQ ID NO: 161757 - DNA, 25 bp, Canis familiaris
ggcacgaagctgggggactgggcca

SEQ ID NO: 161758 - DNA, 25 bp, Canis familiaris
ggcactatgggggtctgactggcct

SEQ ID NO: 161759 - DNA, 25 bp, Canis familiaris
ggcactcgggtgcaggaagagccag

SEQ ID NO: 161760 - DNA, 25 bp, Canis familiaris
ggcactgggagggaaagaagcatct

SEQ ID NO: 161761 - DNA, 25 bp, Canis familiaris
ggaaggagatgacacagatgatagt

SEQ ID NO: 161762 - DNA, 25 bp, Canis familiaris
ggaaggagtggttcatggtgtgaca

SEQ ID NO: 161763 - DNA, 25 bp, Canis familiaris
ggaatgaagggatcgctgctggtca

SEQ ID NO: 161764 - DNA, 25 bp, Canis familiaris
ggcaatgactagtcaccctgggtgc

SEQ ID NO: 161765 - DNA, 25 bp, Canis familiaris
ggcaatggttactactcagatggga

SEQ ID NO: 161766 - DNA, 25 bp, Canis familiaris
ggaatgagattaggtatcagtgtaa

SEQ ID NO: 161767 - DNA, 25 bp, Canis familiaris
ggaatcacatcttggtacaggacca

SEQ ID NO: 161768 - DNA, 25 bp, Canis familiaris
ggcaacacaatttggacagcccctt

SEQ ID NO: 161769 - DNA, 25 bp, Canis familiaris
tggtacacaaaaggactaccgattc

SEQ ID NO: 161770 - DNA, 25 bp, Canis familiaris
ggaatcatcaaagctactgtcctga

SEQ ID NO: 161771 - DNA, 25 bp, Canis familiaris
ggaattgcagaattgcgttgccctg

SEQ ID NO: 161772 - DNA, 25 bp, Canis familiaris
ggaattcagagatggctgtcagaca

SEQ ID NO: 161773 - DNA, 25 bp, Canis familiaris
ggaatcttgatgagctgcccaaatt

SEQ ID NO: 161774 - DNA, 25 bp, Canis familiaris
ggcagtcttcagagtccgacattga

SEQ ID NO: 161775 - DNA, 25 bp, Canis familiaris
ggcaatccaagaatccctgacttac

SEQ ID NO: 161776 - DNA, 25 bp, Canis familiaris
ggcaagccaagaaacagactcttca

SEQ ID NO: 161777 - DNA, 25 bp, Canis familiaris
ggcacacctctagacagagtttccg

SEQ ID NO: 161778 - DNA, 25 bp, Canis familiaris
ggcaacagctcatcagacaggtaat

SEQ ID NO: 161779 - DNA, 25 bp, Canis familiaris
ggcaaagctcatggatcttttcata

SEQ ID NO: 161780 - DNA, 25 bp, Canis familiaris
ggcacatagtgaacgcttggtcatt

SEQ ID NO: 161781 - DNA, 25 bp, Canis familiaris
ggcagtggttcactgcttcctgcat

SEQ ID NO: 161782 - DNA, 25 bp, Canis familiaris
ggcaatgtgggacgtttctgcaatt

SEQ ID NO: 161783 - DNA, 25 bp, Canis familiaris
ggaattgcctgatgttttcatattt

SEQ ID NO: 161784 - DNA, 25 bp, Canis familiaris
ggaattgcctatcagttttcagcgt

SEQ ID NO: 161785 - DNA, 25 bp, Canis familiaris
ggaattctattttgttctacacaga

SEQ ID NO: 161786 - DNA, 25 bp, Canis familiaris
ggaatcttattcatctttctcactg

SEQ ID NO: 161787 - DNA, 25 bp, Canis familiaris
ggaatgcgttatttgctttccctgg

SEQ ID NO: 161788 - DNA, 25 bp, Canis familiaris
ggaatggtgaagtgtggctcccgga

SEQ ID NO: 161789 - DNA, 25 bp, Canis familiaris
ggcactgggaagtaagcccctagga

SEQ ID NO: 161790 - DNA, 25 bp, Canis familiaris
ggcagtgggaggtaactaactccta

SEQ ID NO: 161791 - DNA, 25 bp, Canis familiaris
ggcaagggggaatctcaaaaatctc

SEQ ID NO: 161792 - DNA, 25 bp, Canis familiaris
ggcaagggggctcattatcatacca

SEQ ID NO: 161793 - DNA, 25 bp, Canis familiaris
ggaatggggccaacatgccctacca

SEQ ID NO: 161794 - DNA, 25 bp, Canis familiaris
ggcaatgggccctagaggcctgtcc

SEQ ID NO: 161795 - DNA, 25 bp, Canis familiaris
ggaattcatgatccaaacccgtcgc

SEQ ID NO: 161796 - DNA, 25 bp, Canis familiaris
ggcaatatctgtgaacaccacctcc

SEQ ID NO: 161797 - DNA, 25 bp, Canis familiaris
ggaattctgtgatcatcagaaaatc

SEQ ID NO: 161798 - DNA, 25 bp, Canis familiaris
ggaatctgctggcatccatgaaaca

SEQ ID NO: 161799 - DNA, 25 bp, Canis familiaris
ggaatcatgcggtatccacgagacc

SEQ ID NO: 161800 - DNA, 25 bp, Canis familiaris
ggaatcagtggttagcattgccgct

SEQ ID NO: 161801 - DNA, 25 bp, Canis familiaris
ggaatggatgtttgttcctcctgac

SEQ ID NO: 161802 - DNA, 25 bp, Canis familiaris
ggaattataatatttcccacagaaa

SEQ ID NO: 161803 - DNA, 25 bp, Canis familiaris
ggaatccatttgttatgtaaagcaa

SEQ ID NO: 161804 - DNA, 25 bp, Canis familiaris
ggaatcacatctagatacagaacaa

SEQ ID NO: 161805 - DNA, 25 bp, Canis familiaris
ggcgaacattcacacagacagctag

SEQ ID NO: 161806 - DNA, 25 bp, Canis familiaris
ggaaggcatatctacaagacagcat

SEQ ID NO: 161807 - DNA, 25 bp, Canis familiaris
ggaatgagactatcaagcaccaatg

SEQ ID NO: 161808 - DNA, 25 bp, Canis familiaris
ggaatgcaggccgacaaaccagagc

SEQ ID NO: 161809 - DNA, 25 bp, Canis familiaris
ggaatcacgctagaaatcaatgaca

SEQ ID NO: 161810 - DNA, 25 bp, Canis familiaris
ggaatctaggactaagactggacac

SEQ ID NO: 161811 - DNA, 25 bp, Canis familiaris
ggcaatttgggataactggaagaac

SEQ ID NO: 161812 - DNA, 25 bp, Canis familiaris
ggaattgtgggtcaacaagaaagaa

SEQ ID NO: 161813 - DNA, 25 bp, Canis familiaris
ggaattgaagttctaatacctggag

SEQ ID NO: 161814 - DNA, 25 bp, Canis familiaris
ggaattaacacatgtaacccgtatg

SEQ ID NO: 161815 - DNA, 25 bp, Canis familiaris
ggcaattaatcagatctaagccaac

SEQ ID NO: 161816 - DNA, 25 bp, Canis familiaris
ggcaattactattcatctgagagaa

SEQ ID NO: 161817 - DNA, 25 bp, Canis familiaris
ggcagcatctacaaccctgaagtgc

SEQ ID NO: 161818 - DNA, 25 bp, Canis familiaris
ggcagcatctacaaccctgaagtgc

SEQ ID NO: 161819 - DNA, 25 bp, Canis familiaris
ggaatgctgagtgcccagagtatgg

SEQ ID NO: 161820 - DNA, 25 bp, Canis familiaris
ggaatgctgggatcgaggctcagga

SEQ ID NO: 161821 - DNA, 25 bp, Canis familiaris
ggaatgctcaagttggaggataggt

SEQ ID NO: 161822 - DNA, 25 bp, Canis familiaris
ggcaatgccaagactgtgaggaacg

SEQ ID NO: 161823 - DNA, 25 bp, Canis familiaris
ggcaacccacacaatgtctacatgc

SEQ ID NO: 161824 - DNA, 25 bp, Canis familiaris
ggcaaccgccagatgactgtgatcc

SEQ ID NO: 161825 - DNA, 25 bp, Canis familiaris
ggaattaccagttactattgtcctg

SEQ ID NO: 161826 - DNA, 25 bp, Canis familiaris
ggaattatccagatcctgtgttgcc

SEQ ID NO: 161827 - DNA, 25 bp, Canis familiaris
ggcaagttccacaacatcgttcgcc

SEQ ID NO: 161828 - DNA, 25 bp, Canis familiaris
ggcaagctcccagagttgttacagc

SEQ ID NO: 161829 - DNA, 25 bp, Canis familiaris
ggcaaaccaggtacttgtctacaac

SEQ ID NO: 161830 - DNA, 25 bp, Canis familiaris
ggcaaatccctgttgcactgttaaa

SEQ ID NO: 161831 - DNA, 25 bp, Canis familiaris
ggcaatcttcctgtttgttggataa

SEQ ID NO: 161832 - DNA, 25 bp, Canis familiaris
ggaatcacattttgtttcttggatg

SEQ ID NO: 161833 - DNA, 25 bp, Canis familiaris
ggaatagatcttatattgtggcgaa

SEQ ID NO: 161834 - DNA, 25 bp, Canis familiaris
ggaatcttgcttatatttagcgcag

SEQ ID NO: 161835 - DNA, 25 bp, Canis familiaris
ggaattctctctatgtttgcagcta

SEQ ID NO: 161836 - DNA, 25 bp, Canis familiaris
ggcagctttcctatgatttcgtgca

SEQ ID NO: 161837 - DNA, 25 bp, Canis familiaris
ggcaccatctccaaatacttcgtga

SEQ ID NO: 161838 - DNA, 25 bp, Canis familiaris
ggcccagtcacaaataggtttcatt

SEQ ID NO: 161839 - DNA, 25 bp, Canis familiaris
ggcacttgtgcacaattagtttctt

SEQ ID NO: 161840 - DNA, 25 bp, Canis familiaris
ggcttgttgacatgtttgggacttt

SEQ ID NO: 161841 - DNA, 25 bp, Canis familiaris
ggctcttggaaatcttaggtctctt

SEQ ID NO: 161842 - DNA, 25 bp, Canis familiaris
ggctcttggaaatcttaggtctctt

SEQ ID NO: 161843 - DNA, 25 bp, Canis familiaris
tggtttgtgaaagccttcctttgga

SEQ ID NO: 161844 - DNA, 25 bp, Canis familiaris
ggcaatgggaaagctcttcgagggg

SEQ ID NO: 161845 - DNA, 25 bp, Canis familiaris
ggcaatgggagaacccctcgagtgg

SEQ ID NO: 161846 - DNA, 25 bp, Canis familiaris
ggcaatgggaatgttccttggctcc

SEQ ID NO: 161847 - DNA, 25 bp, Canis familiaris
ggcaattggatctttacccgtgacc

SEQ ID NO: 161848 - DNA, 25 bp, Canis familiaris
ggaataggtctttttatcggatcag

SEQ ID NO: 161849 - DNA, 25 bp, Canis familiaris
ggaatagttctttttatcgtatcag

SEQ ID NO: 161850 - DNA, 25 bp, Canis familiaris
ggaattttcaatataatcctatctg

SEQ ID NO: 161851 - DNA, 25 bp, Canis familiaris
ggaatcttttcaagtcaactctaca

SEQ ID NO: 161852 - DNA, 25 bp, Canis familiaris
ggaatgctcctgtattataacttaa

SEQ ID NO: 161853 - DNA, 25 bp, Canis familiaris
ggcaatgcaacaacttaaacccaag

SEQ ID NO: 161854 - DNA, 25 bp, Canis familiaris
ggcaagcaatcttacgaaccctgaa

SEQ ID NO: 161855 - DNA, 25 bp, Canis familiaris
ggcaacgacattctgggctttgaca

SEQ ID NO: 161856 - DNA, 25 bp, Canis familiaris
ggcagcaaaattctggcctcttgcc

SEQ ID NO: 161857 - DNA, 25 bp, Canis familiaris
ggcagcaactgtaattggtcctccc

SEQ ID NO: 161858 - DNA, 25 bp, Canis familiaris
ggcacagattcgatctattggcccc

SEQ ID NO: 161859 - DNA, 25 bp, Canis familiaris
ggcacagcgtggccattgagggggc

SEQ ID NO: 161860 - DNA, 25 bp, Canis familiaris
ggcaacggtgtctgcagcttgaacc

SEQ ID NO: 161861 - DNA, 25 bp, Canis familiaris
ggcaacggttgactgtcttcgacac

SEQ ID NO: 161862 - DNA, 25 bp, Canis familiaris
ggcaaccgaagattgtggctcaggc

SEQ ID NO: 161863 - DNA, 25 bp, Canis familiaris
ggcacccagaggacttaccagtggg

SEQ ID NO: 161864 - DNA, 25 bp, Canis familiaris
ggcagccgcagcaaggtaatcgggg

SEQ ID NO: 161865 - DNA, 25 bp, Canis familiaris
ggcaaccagctgcagctattcaggt

SEQ ID NO: 161866 - DNA, 25 bp, Canis familiaris
ggcaaatcattatgtcattcgtcca

SEQ ID NO: 161867 - DNA, 25 bp, Canis familiaris
ggaatatctttactcatgttttgca

SEQ ID NO: 161868 - DNA, 25 bp, Canis familiaris
ggaatacttcttttgttctatgcag

SEQ ID NO: 161869 - DNA, 25 bp, Canis familiaris
ggcagaggttgttaggttctacgtg

SEQ ID NO: 161870 - DNA, 25 bp, Canis familiaris
ggcagggcttggtgagctgcctggt

SEQ ID NO: 161871 - DNA, 25 bp, Canis familiaris
ggcaagattatcccaactcgaggtt

SEQ ID NO: 161872 - DNA, 25 bp, Canis familiaris
ggcagggaatgccctaaaagccatt

SEQ ID NO: 161873 - DNA, 25 bp, Canis familiaris
ggcaggggccttaaacatgaccatc

SEQ ID NO: 161874 - DNA, 25 bp, Canis familiaris
ggcagggtgccaattacctacttag

SEQ ID NO: 161875 - DNA, 25 bp, Canis familiaris
ggcagaggccggaaacttactggtg

SEQ ID NO: 161876 - DNA, 25 bp, Canis familiaris
ggcaaaggcaccaaacttaggcagc

SEQ ID NO: 161877 - DNA, 25 bp, Canis familiaris
ggcaaaggcaccgttgttgggacac

SEQ ID NO: 161878 - DNA, 25 bp, Canis familiaris
ggcacacattccatttgttgggccc

SEQ ID NO: 161879 - DNA, 25 bp, Canis familiaris
ggcaactctatctttggtctggccc

SEQ ID NO: 161880 - DNA, 25 bp, Canis familiaris
ggcaaactacaaagggcatacctgg

SEQ ID NO: 161881 - DNA, 25 bp, Canis familiaris
ggaatatcaaatcagggatccctgg

SEQ ID NO: 161882 - DNA, 25 bp, Canis familiaris
ggaatatataccaaggtgtcccggt

SEQ ID NO: 161883 - DNA, 25 bp, Canis familiaris
ggaataatcctcatggatgcccctc

SEQ ID NO: 161884 - DNA, 25 bp, Canis familiaris
ggaatacctatcatgagtcagacct

SEQ ID NO: 161885 - DNA, 25 bp, Canis familiaris
ggaattgcacatattgcgacagccc

SEQ ID NO: 161886 - DNA, 25 bp, Canis familiaris
ggaattggaagtatcacagccctga

SEQ ID NO: 161887 - DNA, 25 bp, Canis familiaris
ggccttaaagttcccagccttgagc

SEQ ID NO: 161888 - DNA, 25 bp, Canis familiaris
ggccctaacttgggccagccttggt

SEQ ID NO: 161889 - DNA, 25 bp, Canis familiaris
tggcgttatcctttggctaccaagg

SEQ ID NO: 161890 - DNA, 25 bp, Canis familiaris
ggcgttatcctttggctaccaagga

SEQ ID NO: 161891 - DNA, 25 bp, Canis familiaris
ggcggtatgtttttaagacaagagt

SEQ ID NO: 161892 - DNA, 25 bp, Canis familiaris
ggcaggtagcttctggaatacataa

SEQ ID NO: 161893 - DNA, 25 bp, Canis familiaris
ggcagcggagggctgccttcagcat

SEQ ID NO: 161894 - DNA, 25 bp, Canis familiaris
ggcacccggagctaggtgccagcaa

SEQ ID NO: 161895 - DNA, 25 bp, Canis familiaris
ggcacgctaggatatggtcctgtca

SEQ ID NO: 161896 - DNA, 25 bp, Canis familiaris
ggcacagagggaagaggaccattca

SEQ ID NO: 161897 - DNA, 25 bp, Canis familiaris
ggcacagaagggcaggcagcctcga

SEQ ID NO: 161898 - DNA, 25 bp, Canis familiaris
ggcaatgcagggctgaggcaggctc

SEQ ID NO: 161899 - DNA, 25 bp, Canis familiaris
tgtctggaagccctgcaggatggcc

SEQ ID NO: 161900 - DNA, 25 bp, Canis familiaris
ggcaaggagcacgtgctggactcca

SEQ ID NO: 161901 - DNA, 25 bp, Canis familiaris
ggcacagaaggactgctgggagaca

SEQ ID NO: 161902 - DNA, 25 bp, Canis familiaris
ggcaactatgtgggcgactcagacc

SEQ ID NO: 161903 - DNA, 25 bp, Canis familiaris
ggcagacggcaggaaactaacctgg

SEQ ID NO: 161904 - DNA, 25 bp, Canis familiaris
ggcaccaggcaggggatcgaaacac

SEQ ID NO: 161905 - DNA, 25 bp, Canis familiaris
ggcaagggatgggttcgtgacctca

SEQ ID NO: 161906 - DNA, 25 bp, Canis familiaris
ggcaagtggagggcctttgccacac

SEQ ID NO: 161907 - DNA, 25 bp, Canis familiaris
ggcacagggaaggcggttcacaccc

SEQ ID NO: 161908 - DNA, 25 bp, Canis familiaris
ggcaacagggaggcaatcagtaccc

SEQ ID NO: 161909 - DNA, 25 bp, Canis familiaris
ggcaatgagggaggacgcgtcagcc

SEQ ID NO: 161910 - DNA, 25 bp, Canis familiaris
ggcaagaggcaaggagcctggcagg

SEQ ID NO: 161911 - DNA, 25 bp, Canis familiaris
ggcagatcagaccgtgaactggaag

SEQ ID NO: 161912 - DNA, 25 bp, Canis familiaris
ggcttcgaggggtgtggaggggaca

SEQ ID NO: 161913 - DNA, 25 bp, Canis familiaris
ggctacgggggacatgctgagggcc

SEQ ID NO: 161914 - DNA, 25 bp, Canis familiaris
ggcacttggggcgaggacaaaggcc

SEQ ID NO: 161915 - DNA, 25 bp, Canis familiaris
tggtgttctgggggaacctggactc

SEQ ID NO: 161916 - DNA, 25 bp, Canis familiaris
tggccttcaggcagtaaccgtaatc

SEQ ID NO: 161917 - DNA, 25 bp, Canis familiaris
ggcacttctgccatgataaccagac

SEQ ID NO: 161918 - DNA, 25 bp, Canis familiaris
ggcacattgcactaattaaaaagcg

SEQ ID NO: 161919 - DNA, 25 bp, Canis familiaris
ggcacatgtccaagagttcacgaac

SEQ ID NO: 161920 - DNA, 25 bp, Canis familiaris
ggcacgtccaggttgaacagacgcc

SEQ ID NO: 161921 - DNA, 25 bp, Canis familiaris
ggcacctggaggcccaagaaggccc

SEQ ID NO: 161922 - DNA, 25 bp, Canis familiaris
ggcacctacatgctcaataaaccca

SEQ ID NO: 161923 - DNA, 25 bp, Canis familiaris
ggcacttagaggaaatttgaaccag

SEQ ID NO: 161924 - DNA, 25 bp, Canis familiaris
ggcgctttaggagtcttctgaacgg

SEQ ID NO: 161925 - DNA, 25 bp, Canis familiaris
ggcagatgttaacattcctacccga

SEQ ID NO: 161926 - DNA, 25 bp, Canis familiaris
ggcaatttaagaattcctgtcctct

SEQ ID NO: 161927 - DNA, 25 bp, Canis familiaris
ggaattaaaacatcacctgccttat

SEQ ID NO: 161928 - DNA, 25 bp, Canis familiaris
ggaatataacagcctaaccatcttt

SEQ ID NO: 161929 - DNA, 25 bp, Canis familiaris
tggaaatggcaaaggaacacagttg

SEQ ID NO: 161930 - DNA, 25 bp, Canis familiaris
tggaggggatcctggacacgttgga

SEQ ID NO: 161931 - DNA, 25 bp, Canis familiaris
ggcacgaggacctgttcaagcttgc

SEQ ID NO: 161932 - DNA, 25 bp, Canis familiaris
ggcaccagagatgtcggataatctt

SEQ ID NO: 161933 - DNA, 25 bp, Canis familiaris
ggaataatgcatcgctcgtgaacct

SEQ ID NO: 161934 - DNA, 25 bp, Canis familiaris
ggcactgcattgagccagtacacgg

SEQ ID NO: 161935 - DNA, 25 bp, Canis familiaris
ggcacagtttgaccaatatctgggt

SEQ ID NO: 161936 - DNA, 25 bp, Canis familiaris
ggaatcgcaatgcccagttctgggt

SEQ ID NO: 161937 - DNA, 25 bp, Canis familiaris
ggaatagaaatccagtgacatatgg

SEQ ID NO: 161938 - DNA, 25 bp, Canis familiaris
ggcaataataatggcacttcaatag

SEQ ID NO: 161939 - DNA, 25 bp, Canis familiaris
ggaatactcctggcaatatcagcat

SEQ ID NO: 161940 - DNA, 25 bp, Canis familiaris
ggaatcaccacctagatcaagatct

SEQ ID NO: 161941 - DNA, 25 bp, Canis familiaris
ggaattcaccaccagatacagaacc

SEQ ID NO: 161942 - DNA, 25 bp, Canis familiaris
ggaattcaccacgtggaccaaatga

SEQ ID NO: 161943 - DNA, 25 bp, Canis familiaris
ggcaattctctattgaggaccacaa

SEQ ID NO: 161944 - DNA, 25 bp, Canis familiaris
ggcagaatgactttggatttcgaac

SEQ ID NO: 161945 - DNA, 25 bp, Canis familiaris
ggcagcttactatgcacatcgtcta

SEQ ID NO: 161946 - DNA, 25 bp, Canis familiaris
ggcagcattaccttaatcgttttgc

SEQ ID NO: 161947 - DNA, 25 bp, Canis familiaris
ggcagctctagggtagtgcttttgt

SEQ ID NO: 161948 - DNA, 25 bp, Canis familiaris
ggcactcatatggggcatttacttt

SEQ ID NO: 161949 - DNA, 25 bp, Canis familiaris
ggcaatatttgcccattctggtgta

SEQ ID NO: 161950 - DNA, 25 bp, Canis familiaris
ggcaaatcgatgctcagtcactgag

SEQ ID NO: 161951 - DNA, 25 bp, Canis familiaris
ggcaacatcattttgcattcctgca

SEQ ID NO: 161952 - DNA, 25 bp, Canis familiaris
ggcaaacatgctttgatcatctatg

SEQ ID NO: 161953 - DNA, 25 bp, Canis familiaris
ggaatattttcttcttgcattgccc

SEQ ID NO: 161954 - DNA, 25 bp, Canis familiaris
ggcaattcggtcaattgtcactgtc

SEQ ID NO: 161955 - DNA, 25 bp, Canis familiaris
ggcaattcaggtcttctgattctca

SEQ ID NO: 161956 - DNA, 25 bp, Canis familiaris
ggcaattagtgatatagtgtaccaa

SEQ ID NO: 161957 - DNA, 25 bp, Canis familiaris
ggcaattactgattatttctgattt

SEQ ID NO: 161958 - DNA, 25 bp, Canis familiaris
ggcaatatcacttgttgttgtctat

SEQ ID NO: 161959 - DNA, 25 bp, Canis familiaris
ggcaagctcaaccttgtatgccttg

SEQ ID NO: 161960 - DNA, 25 bp, Canis familiaris
ggcaaggcacactttgttcctattt

SEQ ID NO: 161961 - DNA, 25 bp, Canis familiaris
ggcaaatagcactgtggcctttttc

SEQ ID NO: 161962 - DNA, 25 bp, Canis familiaris
ggaattccagcaagatacctttttc

SEQ ID NO: 161963 - DNA, 25 bp, Canis familiaris
ggaattccaaagtgtctatatctga

SEQ ID NO: 161964 - DNA, 25 bp, Canis familiaris
ggaattcctgggtgctcagtatcca

SEQ ID NO: 161965 - DNA, 25 bp, Canis familiaris
ggaattctgctgcatgtagcctttg

SEQ ID NO: 161966 - DNA, 25 bp, Canis familiaris
ggcaacctgcagtattacctgttac

SEQ ID NO: 161967 - DNA, 25 bp, Canis familiaris
ggcagtccgagaactacctgcagtt

SEQ ID NO: 161968 - DNA, 25 bp, Canis familiaris
ggcactagctggttaagctctgcgt

SEQ ID NO: 161969 - DNA, 25 bp, Canis familiaris
ggcagaagtgatgaaagtcgcattt

SEQ ID NO: 161970 - DNA, 25 bp, Canis familiaris
ggcaagagtctgaaccagttgtcat

SEQ ID NO: 161971 - DNA, 25 bp, Canis familiaris
ggcagacacctaaccaactgagcat

SEQ ID NO: 161972 - DNA, 25 bp, Canis familiaris
ggcaacattgtaaaccagctgaacc

SEQ ID NO: 161973 - DNA, 25 bp, Canis familiaris
ggcaactgtttgtagctactgtgac

SEQ ID NO: 161974 - DNA, 25 bp, Canis familiaris
ggcaacttggtaagccggtagcgtg

SEQ ID NO: 161975 - DNA, 25 bp, Canis familiaris
ggcaacttgtcctccagaaaggtgg

SEQ ID NO: 161976 - DNA, 25 bp, Canis familiaris
tggcaagggcccttaagggaattgg

SEQ ID NO: 161977 - DNA, 25 bp, Canis familiaris
tggcggggcccatttgtggaaagct

SEQ ID NO: 161978 - DNA, 25 bp, Canis familiaris
ggcagtggggcccgctaggaaattc

SEQ ID NO: 161979 - DNA, 25 bp, Canis familiaris
ggcagggtggcctcaggtaaattcc

SEQ ID NO: 161980 - DNA, 25 bp, Canis familiaris
ggcacggagaccagcggtctaaata

SEQ ID NO: 161981 - DNA, 25 bp, Canis familiaris
ggcacggtgtcccaggaggacagag

SEQ ID NO: 161982 - DNA, 25 bp, Canis familiaris
ggcacaggattaccaaaggacagga

SEQ ID NO: 161983 - DNA, 25 bp, Canis familiaris
tggagcaccggggcaaaggccgggg

SEQ ID NO: 161984 - DNA, 25 bp, Canis familiaris
ggcaaccaggtcctaaggccgaggc

SEQ ID NO: 161985 - DNA, 25 bp, Canis familiaris
ggaattcaggggaaacaccaggaca

SEQ ID NO: 161986 - DNA, 25 bp, Canis familiaris
ggcaaggcggggaaacatccacgta

SEQ ID NO: 161987 - DNA, 25 bp, Canis familiaris
tggaagagggccacgaagccggtca

SEQ ID NO: 161988 - DNA, 25 bp, Canis familiaris
ggcagtggttccagaaagccggccg

SEQ ID NO: 161989 - DNA, 25 bp, Canis familiaris
ggcaatgagttcttggacatgacac

SEQ ID NO: 161990 - DNA, 25 bp, Canis familiaris
ggcaatgtgactgctggcaaggatg

SEQ ID NO: 161991 - DNA, 25 bp, Canis familiaris
ggcaatagggcaggacacatgaatg

SEQ ID NO: 161992 - DNA, 25 bp, Canis familiaris
ggcactgaaccaggcacagcatttg

SEQ ID NO: 161993 - DNA, 25 bp, Canis familiaris
ggcactgagccctcaaagctcattg

SEQ ID NO: 161994 - DNA, 25 bp, Canis familiaris
ggcaatatcatcaccacacgcactt

SEQ ID NO: 161995 - DNA, 25 bp, Canis familiaris
ggcaagatcttggctatcctgttat

SEQ ID NO: 161996 - DNA, 25 bp, Canis familiaris
ggcaagtactgtgtccatttaagct

SEQ ID NO: 161997 - DNA, 25 bp, Canis familiaris
ggcaaaactatcacccttgaggtcg

SEQ ID NO: 161998 - DNA, 25 bp, Canis familiaris
ggcaaacactaaagtccctggcctc

SEQ ID NO: 161999 - DNA, 25 bp, Canis familiaris
ggcaagtacgactgtggccatgtgc

SEQ ID NO: 162000 - DNA, 25 bp, Canis familiaris
ggcacagtagcgacttaggtgtgag

SEQ ID NO: 162001 - DNA, 25 bp, Canis familiaris
ggcaagggaggctcaggatctgggc

SEQ ID NO: 162002 - DNA, 25 bp, Canis familiaris
ggcagagaaagacacttgcttgggc

SEQ ID NO: 162003 - DNA, 25 bp, Canis familiaris
ggcaggagacgtggactctgcccct

SEQ ID NO: 162004 - DNA, 25 bp, Canis familiaris
ggcaacgagcggttccgatgccctg

SEQ ID NO: 162005 - DNA, 25 bp, Canis familiaris
ggcaacgagcggttccgatgccctg

SEQ ID NO: 162006 - DNA, 25 bp, Canis familiaris
ggcaaggacaggtctccagtgagcc

SEQ ID NO: 162007 - DNA, 25 bp, Canis familiaris
ggcacagacatgtttcttcttagcc

SEQ ID NO: 162008 - DNA, 25 bp, Canis familiaris
ggcaagcagcagtatctgcagtcca

SEQ ID NO: 162009 - DNA, 25 bp, Canis familiaris
ggcaatcatgagtttggtctctgtg

SEQ ID NO: 162010 - DNA, 25 bp, Canis familiaris
ggcagcttggattgggatgtaggat

SEQ ID NO: 162011 - DNA, 25 bp, Canis familiaris
ggcagctctggctcagagagtcaag

SEQ ID NO: 162012 - DNA, 25 bp, Canis familiaris
ggcactcatggaaacaggaccagta

SEQ ID NO: 162013 - DNA, 25 bp, Canis familiaris
ggcaatgtggactatggtgcaacag

SEQ ID NO: 162014 - DNA, 25 bp, Canis familiaris
ggaattcgagcaaggcaaggatgta

SEQ ID NO: 162015 - DNA, 25 bp, Canis familiaris
ggcaattctggaaggaagggcgcca

SEQ ID NO: 162016 - DNA, 25 bp, Canis familiaris
ggaattgctgggaagcaggggcgcc

SEQ ID NO: 162017 - DNA, 25 bp, Canis familiaris
ggaattcccagtaagtgcggcttcg

SEQ ID NO: 162018 - DNA, 25 bp, Canis familiaris
ggaattcccagtaagtgcgggtcat

SEQ ID NO: 162019 - DNA, 25 bp, Canis familiaris
ggaattcccagtaagtgcgggtcat

SEQ ID NO: 162020 - DNA, 25 bp, Canis familiaris
ggaattcttttaagtcctgagtatt

SEQ ID NO: 162021 - DNA, 25 bp, Canis familiaris
ggaattattttcattactctgtttc

SEQ ID NO: 162022 - DNA, 25 bp, Canis familiaris
ggaattgttgtgtactagccttttt

SEQ ID NO: 162023 - DNA, 25 bp, Canis familiaris
ggaattcttgtaacatacacttgtg

SEQ ID NO: 162024 - DNA, 25 bp, Canis familiaris
ggcagtcctttagagacgctcattg

SEQ ID NO: 162025 - DNA, 25 bp, Canis familiaris
ggcacacctttagccaggctttgga

SEQ ID NO: 162026 - DNA, 25 bp, Canis familiaris
ggcacaacttgttcaactgattttg

SEQ ID NO: 162027 - DNA, 25 bp, Canis familiaris
ggcacattcttcacaatttccggaa

SEQ ID NO: 162028 - DNA, 25 bp, Canis familiaris
ggcaatgtttcttagttgtcctggg

SEQ ID NO: 162029 - DNA, 25 bp, Canis familiaris
ggaatttatgcaaatgggacctgag

SEQ ID NO: 162030 - DNA, 25 bp, Canis familiaris
ggcaagttctatgaggctgactgct

SEQ ID NO: 162031 - DNA, 25 bp, Canis familiaris
ggcagagttctcaggttgggcaatg

SEQ ID NO: 162032 - DNA, 25 bp, Canis familiaris
ggcagtttgtcggtggtgtggaatg

SEQ ID NO: 162033 - DNA, 25 bp, Canis familiaris
ggcagtttgtcacatgggcagttcc

SEQ ID NO: 162034 - DNA, 25 bp, Canis familiaris
ggcaaggtgccacattgggcttcca

SEQ ID NO: 162035 - DNA, 25 bp, Canis familiaris
ggcacatggtgtcagtttggcctcc

SEQ ID NO: 162036 - DNA, 25 bp, Canis familiaris
ggcatcaggtgaacgtcttagtgtc

SEQ ID NO: 162037 - DNA, 25 bp, Canis familiaris
ggcaatgggtggtgcttattgtgcc

SEQ ID NO: 162038 - DNA, 25 bp, Canis familiaris
ggcaagcggtgttgggtgacggcca

SEQ ID NO: 162039 - DNA, 25 bp, Canis familiaris
ggcaacaggagctgctggtgacggc

SEQ ID NO: 162040 - DNA, 25 bp, Canis familiaris
ggcacagaagcctctattgcctggc

SEQ ID NO: 162041 - DNA, 25 bp, Canis familiaris
ggcacagagtcctttgagtacttgg

SEQ ID NO: 162042 - DNA, 25 bp, Canis familiaris
ggcacagatgccttttattatcagc

SEQ ID NO: 162043 - DNA, 25 bp, Canis familiaris
ggcaagcgccaggttcttatcaggc

SEQ ID NO: 162044 - DNA, 25 bp, Canis familiaris
ggcaagcctatttttgtgacatggc

SEQ ID NO: 162045 - DNA, 25 bp, Canis familiaris
ggcaagagctgtgtttatggcggca

SEQ ID NO: 162046 - DNA, 25 bp, Canis familiaris
ggcaaggtgctgctcatcgagaatg

SEQ ID NO: 162047 - DNA, 25 bp, Canis familiaris
ggcaatggtgcgcctgctggaagat

SEQ ID NO: 162048 - DNA, 25 bp, Canis familiaris
ggcaatgcggctgcactggtggaag

SEQ ID NO: 162049 - DNA, 25 bp, Canis familiaris
ggcaatgcagaggtcactggggaca

SEQ ID NO: 162050 - DNA, 25 bp, Canis familiaris
ggcaatcatgcggaacaggcggcag

SEQ ID NO: 162051 - DNA, 25 bp, Canis familiaris
ggcaatgcagcaagagacaacaaga

SEQ ID NO: 162052 - DNA, 25 bp, Canis familiaris
ggcaggcaaagacaaccaacggctc

SEQ ID NO: 162053 - DNA, 25 bp, Canis familiaris
ggcagccaacaacaagccattccta

SEQ ID NO: 162054 - DNA, 25 bp, Canis familiaris
ggcaaatgtccccaaagatcagcct

SEQ ID NO: 162055 - DNA, 25 bp, Canis familiaris
ggcaattatgcctgagaatgaccgt

SEQ ID NO: 162056 - DNA, 25 bp, Canis familiaris
ggcaaatcagcctcatgaaaacaga

SEQ ID NO: 162057 - DNA, 25 bp, Canis familiaris
ggcaaacctcgaaacaacaagacca

SEQ ID NO: 162058 - DNA, 25 bp, Canis familiaris
ggcagaagtctatcaaaacccaccc

SEQ ID NO: 162059 - DNA, 25 bp, Canis familiaris
ggcagttctaaaaccaactccacca

SEQ ID NO: 162060 - DNA, 25 bp, Canis familiaris
ggcaactataaagctcagtcttcac

SEQ ID NO: 162061 - DNA, 25 bp, Canis familiaris
ggcaagttgaaagcacattccttct

SEQ ID NO: 162062 - DNA, 25 bp, Canis familiaris
ggcacaggggaaggacctcttcttc

SEQ ID NO: 162063 - DNA, 25 bp, Canis familiaris
ggcagagggagagaacctttcaagc

SEQ ID NO: 162064 - DNA, 25 bp, Canis familiaris
ggcaaggtgtgccgaacctgggaac

SEQ ID NO: 162065 - DNA, 25 bp, Canis familiaris
ggcagggtagcctaaccatgggtag

SEQ ID NO: 162066 - DNA, 25 bp, Canis familiaris
ggcagaggtactgctagcctgccct

SEQ ID NO: 162067 - DNA, 25 bp, Canis familiaris
ggcacaggtgccgatatgactgctg

SEQ ID NO: 162068 - DNA, 25 bp, Canis familiaris
ggcacgtggcccgaaattgctatga

SEQ ID NO: 162069 - DNA, 25 bp, Canis familiaris
ggcacaggtatttgaaatggtaaat

SEQ ID NO: 162070 - DNA, 25 bp, Canis familiaris
ggcaatggtatcagaattcctcaaa

SEQ ID NO: 162071 - DNA, 25 bp, Canis familiaris
ggcacgctttccaaaatcttcaaac

SEQ ID NO: 162072 - DNA, 25 bp, Canis familiaris
ggcactgcatttataaccttctgaa

SEQ ID NO: 162073 - DNA, 25 bp, Canis familiaris
ggcactgaattcttaacctattaaa

SEQ ID NO: 162074 - DNA, 25 bp, Canis familiaris
ggcacgaggtaaaacaggatgtaaa

SEQ ID NO: 162075 - DNA, 25 bp, Canis familiaris
ggcaacagcagtttacaaggtgtca

SEQ ID NO: 162076 - DNA, 25 bp, Canis familiaris
ggcagacagcttctctaaggagtac

SEQ ID NO: 162077 - DNA, 25 bp, Canis familiaris
ggcacacctgactcttaggactagc

SEQ ID NO: 162078 - DNA, 25 bp, Canis familiaris
ggcaaaagatgctaagatgggaaaa

SEQ ID NO: 162079 - DNA, 25 bp, Canis familiaris
ggcaagacagagtcctaagctcaaa

SEQ ID NO: 162080 - DNA, 25 bp, Canis familiaris
ggcaatgaagtgtcctatgaaacaa

SEQ ID NO: 162081 - DNA, 25 bp, Canis familiaris
ggcagattgacaacccagattacaa

SEQ ID NO: 162082 - DNA, 25 bp, Canis familiaris
ggcagattgaagccaaaacctattg

SEQ ID NO: 162083 - DNA, 25 bp, Canis familiaris
ggcagaggacccaaatacacatttt

SEQ ID NO: 162084 - DNA, 25 bp, Canis familiaris
ggcccagccctaagagcaaattttt

SEQ ID NO: 162085 - DNA, 25 bp, Canis familiaris
ggcaccacctgtaattcaaattcta

SEQ ID NO: 162086 - DNA, 25 bp, Canis familiaris
ggcaaagcgtggaattcaatactct

SEQ ID NO: 162087 - DNA, 25 bp, Canis familiaris
ggcaaccaggctaatatcaaacatt

SEQ ID NO: 162088 - DNA, 25 bp, Canis familiaris
ggcaacgcatggccttccaataaaa

SEQ ID NO: 162089 - DNA, 25 bp, Canis familiaris
ggcaatccatgtgcgccacaaaaaa

SEQ ID NO: 162090 - DNA, 25 bp, Canis familiaris
ggcactcgtgttggaccaaccagac

SEQ ID NO: 162091 - DNA, 25 bp, Canis familiaris
ggcacggatgtttgaccatacacca

SEQ ID NO: 162092 - DNA, 25 bp, Canis familiaris
ggcaagagtgtatcatcctcagccc

SEQ ID NO: 162093 - DNA, 25 bp, Canis familiaris
ggcagagcagtgtcaagcacacccc

SEQ ID NO: 162094 - DNA, 25 bp, Canis familiaris
ggcaagcttgcagaaccacagcatc

SEQ ID NO: 162095 - DNA, 25 bp, Canis familiaris
ggcaagcttcagggagctgctgcac

SEQ ID NO: 162096 - DNA, 25 bp, Canis familiaris
ggcacagccatctggatgagctgca

SEQ ID NO: 162097 - DNA, 25 bp, Canis familiaris
ggcaagtgcatgcaggaggctattt

SEQ ID NO: 162098 - DNA, 25 bp, Canis familiaris
ggcaagtgccaggctgatggttttg

SEQ ID NO: 162099 - DNA, 25 bp, Canis familiaris
ggcaacagccagcctgagagtggtc

SEQ ID NO: 162100 - DNA, 25 bp, Canis familiaris
ggcaagagccggaaggggccggaag

SEQ ID NO: 162101 - DNA, 25 bp, Canis familiaris
ggcaaaccagggccagggcctggaa

SEQ ID NO: 162102 - DNA, 25 bp, Canis familiaris
ggcaccaccaggagtggagcctgcg

SEQ ID NO: 162103 - DNA, 25 bp, Canis familiaris
ggcaccgtggttctggagtaggccg

SEQ ID NO: 162104 - DNA, 25 bp, Canis familiaris
ggccccgcgtagagggagattccga

SEQ ID NO: 162105 - DNA, 25 bp, Canis familiaris
ggcaccccaacgaggggatgccttc

SEQ ID NO: 162106 - DNA, 25 bp, Canis familiaris
ggcaagcacgaagagaggcaggatg

SEQ ID NO: 162107 - DNA, 25 bp, Canis familiaris
ggcaacaagcgagaccaagtgatgg

SEQ ID NO: 162108 - DNA, 25 bp, Canis familiaris
ggcacgaggccagaacacaggtgtc

SEQ ID NO: 162109 - DNA, 25 bp, Canis familiaris
ggcaccaagtctgctcaaagtgttc

SEQ ID NO: 162110 - DNA, 25 bp, Canis familiaris
ggcaaaagctatccttatcgagttt

SEQ ID NO: 162111 - DNA, 25 bp, Canis familiaris
ggcacaaagcgaggtgttgcttttt

SEQ ID NO: 162112 - DNA, 25 bp, Canis familiaris
ggcacaaagcgaggtgttgcttttt

SEQ ID NO: 162113 - DNA, 25 bp, Canis familiaris
ggcacaaagcgaggtgttgcttttt

SEQ ID NO: 162114 - DNA, 25 bp, Canis familiaris
ggcacacaagcgaggtgttgctttt

SEQ ID NO: 162115 - DNA, 25 bp, Canis familiaris
ggcacacaagcgaggtgttgctttt

SEQ ID NO: 162116 - DNA, 25 bp, Canis familiaris
ggcaaacagctgaggagcggcaggt

SEQ ID NO: 162117 - DNA, 25 bp, Canis familiaris
ggcaacacagcatttcggtggggct

SEQ ID NO: 162118 - DNA, 25 bp, Canis familiaris
ggcaacaggctgtaccgtgagggcc

SEQ ID NO: 162119 - DNA, 25 bp, Canis familiaris
ggcaatagtgcttgaggccttggcc

SEQ ID NO: 162120 - DNA, 25 bp, Canis familiaris
ggcaatggctgttggctgccagttt

SEQ ID NO: 162121 - DNA, 25 bp, Canis familiaris
ggcacggtgtagagccatgcatttg

SEQ ID NO: 162122 - DNA, 25 bp, Canis familiaris
tggcacaggttagcctcaggttgct

SEQ ID NO: 162123 - DNA, 25 bp, Canis familiaris
ggcacgatgtgcaccaggggtatgt

SEQ ID NO: 162124 - DNA, 25 bp, Canis familiaris
ggcacagcaggaacgcaggaggcaa

SEQ ID NO: 162125 - DNA, 25 bp, Canis familiaris
ggcactgaggaaatgcgccgccaac

SEQ ID NO: 162126 - DNA, 25 bp, Canis familiaris
ggcacatgggaccaagccggaacct

SEQ ID NO: 162127 - DNA, 25 bp, Canis familiaris
ggcacatgggcccaactttatttgc

SEQ ID NO: 162128 - DNA, 25 bp, Canis familiaris
ggcacaccagcccaacatggtaatt

SEQ ID NO: 162129 - DNA, 25 bp, Canis familiaris
ggcaactcatcccgttggattatgc

SEQ ID NO: 162130 - DNA, 25 bp, Canis familiaris
ggcacactacgttctctgagatttg

SEQ ID NO: 162131 - DNA, 25 bp, Canis familiaris
ggcacaggcacgtgtctagatgtct

SEQ ID NO: 162132 - DNA, 25 bp, Canis familiaris
ggcaaggagggcccagcatgtgtct

SEQ ID NO: 162133 - DNA, 25 bp, Canis familiaris
ggcagagtcaggcttcacataggca

SEQ ID NO: 162134 - DNA, 25 bp, Canis familiaris
ggcaagcaagaacttccatcaggtc

SEQ ID NO: 162135 - DNA, 25 bp, Canis familiaris
ggcagagaagaccaaccacaagatc

SEQ ID NO: 162136 - DNA, 25 bp, Canis familiaris
ggcaatagaaatagacccactgata

SEQ ID NO: 162137 - DNA, 25 bp, Canis familiaris
ggcaattggctaatcctccattgta

SEQ ID NO: 162138 - DNA, 25 bp, Canis familiaris
ggcactatggctaaacatcatccgg

SEQ ID NO: 162139 - DNA, 25 bp, Canis familiaris
ggcacttgctctaacaccagagggc

SEQ ID NO: 162140 - DNA, 25 bp, Canis familiaris
ggcagctatcttacagacgcatgaa

SEQ ID NO: 162141 - DNA, 25 bp, Canis familiaris
ggcaggactaatgcctggagacctc

SEQ ID NO: 162142 - DNA, 25 bp, Canis familiaris
ggcaggagctaaggggtggggtgtg

SEQ ID NO: 162143 - DNA, 25 bp, Canis familiaris
ggcagtggcgtgagggggatgggga

SEQ ID NO: 162144 - DNA, 25 bp, Canis familiaris
tgacgattcgggggaggctttggga

SEQ ID NO: 162145 - DNA, 25 bp, Canis familiaris
ggcagaggccggggaggctttggag

SEQ ID NO: 162146 - DNA, 25 bp, Canis familiaris
ggcacaggcctgcgggcaggtgtgc

SEQ ID NO: 162147 - DNA, 25 bp, Canis familiaris
ggcactgcagcccaggtgggtgggc

SEQ ID NO: 162148 - DNA, 25 bp, Canis familiaris
ggcagctactctagggctggggaca

SEQ ID NO: 162149 - DNA, 25 bp, Canis familiaris
ggcagcctatggagtgggagagtca

SEQ ID NO: 162150 - DNA, 25 bp, Canis familiaris
ggcacctgaggcatggagctgagct

SEQ ID NO: 162151 - DNA, 25 bp, Canis familiaris
ggcaaatggttgagactgagctaaa

SEQ ID NO: 162152 - DNA, 25 bp, Canis familiaris
ggcaagattttctatgactaaataa

SEQ ID NO: 162153 - DNA, 25 bp, Canis familiaris
ggcaagtcttctcgtgttaacatta

SEQ ID NO: 162154 - DNA, 25 bp, Canis familiaris
ggcagtgattttatgtcaaacctat

SEQ ID NO: 162155 - DNA, 25 bp, Canis familiaris
ggcaggatttgggggcgatatcgtg

SEQ ID NO: 162156 - DNA, 25 bp, Canis familiaris
ggcagcagatacccagggggaggtg

SEQ ID NO: 162157 - DNA, 25 bp, Canis familiaris
ggcagaggccccaaggagaagccat

SEQ ID NO: 162158 - DNA, 25 bp, Canis familiaris
ggcagaggccagtggggatagcgat

SEQ ID NO: 162159 - DNA, 25 bp, Canis familiaris
ggcagaagcccttggcagtaacctg

SEQ ID NO: 162160 - DNA, 25 bp, Canis familiaris
ggcaacacctcatagccatgaaact

SEQ ID NO: 162161 - DNA, 25 bp, Canis familiaris
ggcagccagggcttacctgtacact

SEQ ID NO: 162162 - DNA, 25 bp, Canis familiaris
ggcagccaagaggtcccgagatgcc

SEQ ID NO: 162163 - DNA, 25 bp, Canis familiaris
ggcacgagatgagcttccgagacgc

SEQ ID NO: 162164 - DNA, 25 bp, Canis familiaris
ggcaatgagtacctcttccaagcca

SEQ ID NO: 162165 - DNA, 25 bp, Canis familiaris
ggcaagaaagagcttcctgattcaa

SEQ ID NO: 162166 - DNA, 25 bp, Canis familiaris
ggcacatgaaaaaccatcctgaaca

SEQ ID NO: 162167 - DNA, 25 bp, Canis familiaris
ggcacatagaatagccactacggaa

SEQ ID NO: 162168 - DNA, 25 bp, Canis familiaris
ggcactcagaatccatatgctactg

SEQ ID NO: 162169 - DNA, 25 bp, Canis familiaris
ggcaccgagcatgcatgcatgttgg

SEQ ID NO: 162170 - DNA, 25 bp, Canis familiaris
ggcaacaagctggccatgcaggagt

SEQ ID NO: 162171 - DNA, 25 bp, Canis familiaris
ggcacacacagcagggcagggtggg

SEQ ID NO: 162172 - DNA, 25 bp, Canis familiaris
ggcaccccacagggagggtgaagcg

SEQ ID NO: 162173 - DNA, 25 bp, Canis familiaris
ggcacactgtgcccgaagggtacac

SEQ ID NO: 162174 - DNA, 25 bp, Canis familiaris
ggcacacggccacgagtggggagac

SEQ ID NO: 162175 - DNA, 25 bp, Canis familiaris
ggcaccttcagcctggtggtaagag

SEQ ID NO: 162176 - DNA, 25 bp, Canis familiaris
ggcacgttccaacgtggaacacagt

SEQ ID NO: 162177 - DNA, 25 bp, Canis familiaris
ggcaagtttctacatgaaacacagt

SEQ ID NO: 162178 - DNA, 25 bp, Canis familiaris
ggctagatacttcaattataccgtg

SEQ ID NO: 162179 - DNA, 25 bp, Canis familiaris
ggcaagatccttcaagtagaacatc

SEQ ID NO: 162180 - DNA, 25 bp, Canis familiaris
ggcaatgcttccacagcgtaaatac

SEQ ID NO: 162181 - DNA, 25 bp, Canis familiaris
ggcaatgcgggcacacgctcttaca

SEQ ID NO: 162182 - DNA, 25 bp, Canis familiaris
ggcagtcgggcagcttggttaaagc

SEQ ID NO: 162183 - DNA, 25 bp, Canis familiaris
ggcgtcgagtcagatcaggtttgga

SEQ ID NO: 162184 - DNA, 25 bp, Canis familiaris
ggcaatcggtctggacacgttccgt

SEQ ID NO: 162185 - DNA, 25 bp, Canis familiaris
ggcagcatcgagtctcaggaggttc

SEQ ID NO: 162186 - DNA, 25 bp, Canis familiaris
ggcagccaaaccagaggttgcctgg

SEQ ID NO: 162187 - DNA, 25 bp, Canis familiaris
ggcaccaaagtaggttttcctgtcg

SEQ ID NO: 162188 - DNA, 25 bp, Canis familiaris
ggcaacaaaccatggatttctcttc

SEQ ID NO: 162189 - DNA, 25 bp, Canis familiaris
ggcaacaaaccatggatttctcttc

SEQ ID NO: 162190 - DNA, 25 bp, Canis familiaris
ggcacacaaaccagggatttctctt

SEQ ID NO: 162191 - DNA, 25 bp, Canis familiaris
ggcaacacaaccactggatttctct

SEQ ID NO: 162192 - DNA, 25 bp, Canis familiaris
ggcaacctgcccaaggaatctgttc

SEQ ID NO: 162193 - DNA, 25 bp, Canis familiaris
ggcacaccccaagggaattttcctg

SEQ ID NO: 162194 - DNA, 25 bp, Canis familiaris
tgccaccctaaaagggtaaatcctg

SEQ ID NO: 162195 - DNA, 25 bp, Canis familiaris
ggccctgctaaatgtggaaagacac

SEQ ID NO: 162196 - DNA, 25 bp, Canis familiaris
ggccttaagaatttggggagaccat

SEQ ID NO: 162197 - DNA, 25 bp, Canis familiaris
ggcctaattaattttcctggccaag

SEQ ID NO: 162198 - DNA, 25 bp, Canis familiaris
ggctctaaaattttccgaggcccag

SEQ ID NO: 162199 - DNA, 25 bp, Canis familiaris
ggcttgaaagttatcccttgacaac

SEQ ID NO: 162200 - DNA, 25 bp, Canis familiaris
ggcggaaagagtctgagccttggaa

SEQ ID NO: 162201 - DNA, 25 bp, Canis familiaris
ggcaggccagggcgtgggaatggaa

SEQ ID NO: 162202 - DNA, 25 bp, Canis familiaris
ggcagcccacacgctgtgggaagga

SEQ ID NO: 162203 - DNA, 25 bp, Canis familiaris
ggcactgcccaggccagagggcaga

SEQ ID NO: 162204 - DNA, 25 bp, Canis familiaris
ggcagctgcccgtgacatagtgcag

SEQ ID NO: 162205 - DNA, 25 bp, Canis familiaris
ggcactcctggtcacaattgagaat

SEQ ID NO: 162206 - DNA, 25 bp, Canis familiaris
ggcactcctgtcacacattgagaat

SEQ ID NO: 162207 - DNA, 25 bp, Canis familiaris
ggcacaggctgtcgacagcattgag

SEQ ID NO: 162208 - DNA, 25 bp, Canis familiaris
ggcaaggtcatcccagagctgaacg

SEQ ID NO: 162209 - DNA, 25 bp, Canis familiaris
ggcaaggtcatcccagagctgaacg

SEQ ID NO: 162210 - DNA, 25 bp, Canis familiaris
ggcaaggtcatccctgagctgaacg

SEQ ID NO: 162211 - DNA, 25 bp, Canis familiaris
ggcaaggtcatacttcagcaggagg

SEQ ID NO: 162212 - DNA, 25 bp, Canis familiaris
ggcaaggtcaacatctgctgtaaga

SEQ ID NO: 162213 - DNA, 25 bp, Canis familiaris
ggcaaagtgccatttagctgaagac

SEQ ID NO: 162214 - DNA, 25 bp, Canis familiaris
ggcaggaggctggctcatactgaaa

SEQ ID NO: 162215 - DNA, 25 bp, Canis familiaris
ggcaaggagtgcatctattttaaga

SEQ ID NO: 162216 - DNA, 25 bp, Canis familiaris
ggcaagaggtacatatatgcttttg

SEQ ID NO: 162217 - DNA, 25 bp, Canis familiaris
ggcataggggaaatgggctttttag

SEQ ID NO: 162218 - DNA, 25 bp, Canis familiaris
ggcaagtgctggaattcgcctgggt

SEQ ID NO: 162219 - DNA, 25 bp, Canis familiaris
ggcaactgctggattggcttcgata

SEQ ID NO: 162220 - DNA, 25 bp, Canis familiaris
ggcaaatgtgtgatctgtgactcgt

SEQ ID NO: 162221 - DNA, 25 bp, Canis familiaris
ggcaaatggcacaactgtccacgtg

SEQ ID NO: 162222 - DNA, 25 bp, Canis familiaris
ggcagaaggctccacgtgagaggta

SEQ ID NO: 162223 - DNA, 25 bp, Canis familiaris
ggcacgagcgctgccgtaaggaaag

SEQ ID NO: 162224 - DNA, 25 bp, Canis familiaris
ggcacgagaattccgataacgaacg

SEQ ID NO: 162225 - DNA, 25 bp, Canis familiaris
ggcaagagaaatctataaccagaga

SEQ ID NO: 162226 - DNA, 25 bp, Canis familiaris
ggcaaacctgagggcaaagccacgg

SEQ ID NO: 162227 - DNA, 25 bp, Canis familiaris
ggcaaagtgcgggcaaaggccaagt

SEQ ID NO: 162228 - DNA, 25 bp, Canis familiaris
ggcaaactcacctaaagcccatgtg

SEQ ID NO: 162229 - DNA, 25 bp, Canis familiaris
ggcaaggtctccaagaagcctaggg

SEQ ID NO: 162230 - DNA, 25 bp, Canis familiaris
ggcaaggatttcatgggcctggtgg

SEQ ID NO: 162231 - DNA, 25 bp, Canis familiaris
ggcactgggtcgattggagggtggt

SEQ ID NO: 162232 - DNA, 25 bp, Canis familiaris
ggcaccgagacaccactggagggtg

SEQ ID NO: 162233 - DNA, 25 bp, Canis familiaris
ggcaacaacacatcatcagtagggt

SEQ ID NO: 162234 - DNA, 25 bp, Canis familiaris
ggcaacagaatatcagccaagggtt

SEQ ID NO: 162235 - DNA, 25 bp, Canis familiaris
ggcacaaatatttcaggatactggg

SEQ ID NO: 162236 - DNA, 25 bp, Canis familiaris
ggcggaatattagtcgaccagaggt

SEQ ID NO: 162237 - DNA, 25 bp, Canis familiaris
ggcagaaaagtctatcgaatgcgag

SEQ ID NO: 162238 - DNA, 25 bp, Canis familiaris
ggcaaggggctgttgctcaggagag

SEQ ID NO: 162239 - DNA, 25 bp, Canis familiaris
ggcacgggctgcaagagccaaggcg

SEQ ID NO: 162240 - DNA, 25 bp, Canis familiaris
ggcatcttcctcatgacttagggta

SEQ ID NO: 162241 - DNA, 25 bp, Canis familiaris
ggcagagtcccaagtccttgaggga

SEQ ID NO: 162242 - DNA, 25 bp, Canis familiaris
ggcagagctcggagtctcatgggaa

SEQ ID NO: 162243 - DNA, 25 bp, Canis familiaris
ggcaggctatggttcatgctgcatg

SEQ ID NO: 162244 - DNA, 25 bp, Canis familiaris
ggcacacatgtgtcattctgttgat

SEQ ID NO: 162245 - DNA, 25 bp, Canis familiaris
ggcacactgtgctattgtcacactc

SEQ ID NO: 162246 - DNA, 25 bp, Canis familiaris
ggcacacatgtttgcagtacactga

SEQ ID NO: 162247 - DNA, 25 bp, Canis familiaris
ggcagcctgtcaacattcaatatga

SEQ ID NO: 162248 - DNA, 25 bp, Canis familiaris
ggcagtttcactggtcatgtatacc

SEQ ID NO: 162249 - DNA, 25 bp, Canis familiaris
ggcacctagcacagtgctttgcaca

SEQ ID NO: 162250 - DNA, 25 bp, Canis familiaris
ggcacctcacgcacattgtgatgaa

SEQ ID NO: 162251 - DNA, 25 bp, Canis familiaris
ggcacatctcaggctgactgtgctg

SEQ ID NO: 162252 - DNA, 25 bp, Canis familiaris
ggcacatctgaggttgtcactgttc

SEQ ID NO: 162253 - DNA, 25 bp, Canis familiaris
ggcagacgagctgggtcatttcacc

SEQ ID NO: 162254 - DNA, 25 bp, Canis familiaris
ggcaaccagtcaatgttggctacca

SEQ ID NO: 162255 - DNA, 25 bp, Canis familiaris
ggcacacaagtcattcgtgcaccca

SEQ ID NO: 162256 - DNA, 25 bp, Canis familiaris
ggcacacaacatagaagcagtcacc

SEQ ID NO: 162257 - DNA, 25 bp, Canis familiaris
ggcaactcacacaaaactacactaa

SEQ ID NO: 162258 - DNA, 25 bp, Canis familiaris
ggcaacagacaaaatatatacctca

SEQ ID NO: 162259 - DNA, 25 bp, Canis familiaris
ggcaaaccagaatttgacatttcga

SEQ ID NO: 162260 - DNA, 25 bp, Canis familiaris
ggcaagaccagacttttctgtcatt

SEQ ID NO: 162261 - DNA, 25 bp, Canis familiaris
ggcagggcattgcttttcttttccc

SEQ ID NO: 162262 - DNA, 25 bp, Canis familiaris
ggcaggcgcaaactcgattttctac

SEQ ID NO: 162263 - DNA, 25 bp, Canis familiaris
ggcaggctgccacacagcaaaactg

SEQ ID NO: 162264 - DNA, 25 bp, Canis familiaris
ggcacaagcagacaaaatcaacatg

SEQ ID NO: 162265 - DNA, 25 bp, Canis familiaris
ggcacacagcaagacgcacaggaca

SEQ ID NO: 162266 - DNA, 25 bp, Canis familiaris
ggcaccagagctgactgagcaggag

SEQ ID NO: 162267 - DNA, 25 bp, Canis familiaris
ggcaggcaggctgagcgtcagaaac

SEQ ID NO: 162268 - DNA, 25 bp, Canis familiaris
ggcaccagcaccagagtcagaaagc

SEQ ID NO: 162269 - DNA, 25 bp, Canis familiaris
ggcaccaaccgtacatatacaagtg

SEQ ID NO: 162270 - DNA, 25 bp, Canis familiaris
ggcaccagacccaacatatacaatg

SEQ ID NO: 162271 - DNA, 25 bp, Canis familiaris
ggcacacaaacagcacataagcacg

SEQ ID NO: 162272 - DNA, 25 bp, Canis familiaris
ggcaacgaacaggatcaggaccagt

SEQ ID NO: 162273 - DNA, 25 bp, Canis familiaris
ggcaactgaacgatcctactacttc

SEQ ID NO: 162274 - DNA, 25 bp, Canis familiaris
ggcaacgaagtgtttctcttgatct

SEQ ID NO: 162275 - DNA, 25 bp, Canis familiaris
ggcaaaccaggggcactctggatcc

SEQ ID NO: 162276 - DNA, 25 bp, Canis familiaris
ggcaaagagcaaaccctctggtgcc

SEQ ID NO: 162277 - DNA, 25 bp, Canis familiaris
ggcagaagcagaattcactctcgtg

SEQ ID NO: 162278 - DNA, 25 bp, Canis familiaris
ggcaacagcaaattccaggatcgta

SEQ ID NO: 162279 - DNA, 25 bp, Canis familiaris
ggcaaacaacagagcagggcgagca

SEQ ID NO: 162280 - DNA, 25 bp, Canis familiaris
ggcaggcaaacagctgaggagcggc

SEQ ID NO: 162281 - DNA, 25 bp, Canis familiaris
ggcagccaagcagctgaaggccgga

SEQ ID NO: 162282 - DNA, 25 bp, Canis familiaris
ggcaccaatcagggtagaccgagat

SEQ ID NO: 162283 - DNA, 25 bp, Canis familiaris
ggcactggcatcagttttcccagat

SEQ ID NO: 162284 - DNA, 25 bp, Canis familiaris
ggcacgagcacaagtttactcaact

SEQ ID NO: 162285 - DNA, 25 bp, Canis familiaris
ggcaagacatatttgttcacatttt

SEQ ID NO: 162286 - DNA, 25 bp, Canis familiaris
ggcaaatacatcctgcttataactc

SEQ ID NO: 162287 - DNA, 25 bp, Canis familiaris
ggcagaaatatgcacgttcacctct

SEQ ID NO: 162288 - DNA, 25 bp, Canis familiaris
ggcacaactgtgaactttcaccttt

SEQ ID NO: 162289 - DNA, 25 bp, Canis familiaris
ggcacacaccataaatcttggcttt

SEQ ID NO: 162290 - DNA, 25 bp, Canis familiaris
ggcagaacctctcatttgtgttgga

SEQ ID NO: 162291 - DNA, 25 bp, Canis familiaris
ggcacacacctcagatttcattgga

SEQ ID NO: 162292 - DNA, 25 bp, Canis familiaris
ggcaaattcactgtttcactgaagc

SEQ ID NO: 162293 - DNA, 25 bp, Canis familiaris
ggcaaattacttagctgttattaaa

SEQ ID NO: 162294 - DNA, 25 bp, Canis familiaris
ggctgaaagcctaagttgtttaaca

SEQ ID NO: 162295 - DNA, 25 bp, Canis familiaris
tggcgatcagggggtttgctttaaa

SEQ ID NO: 162296 - DNA, 25 bp, Canis familiaris
ggcacaagcgaggtgttgcttttta

SEQ ID NO: 162297 - DNA, 25 bp, Canis familiaris
ggcacatcagcacgatttctgttta

SEQ ID NO: 162298 - DNA, 25 bp, Canis familiaris
ggcacatcgatgtttgtgtgtgtta

SEQ ID NO: 162299 - DNA, 25 bp, Canis familiaris
ggcactcatctagtatatgctgtgt

SEQ ID NO: 162300 - DNA, 25 bp, Canis familiaris
ggcactgtctgctgaagctgcatta

SEQ ID NO: 162301 - DNA, 25 bp, Canis familiaris
ggcacagctctacgaagccagttcc

SEQ ID NO: 162302 - DNA, 25 bp, Canis familiaris
ggcacatactagccgacagcagctc

SEQ ID NO: 162303 - DNA, 25 bp, Canis familiaris
ggcaacaaatgccctagcatgcagg

SEQ ID NO: 162304 - DNA, 25 bp, Canis familiaris
ggcaacgattgaccgacatccgttc

SEQ ID NO: 162305 - DNA, 25 bp, Canis familiaris
ggcacatagcattagccatgacatc

SEQ ID NO: 162306 - DNA, 25 bp, Canis familiaris
ggcactcagcttagccaggtggaaa

SEQ ID NO: 162307 - DNA, 25 bp, Canis familiaris
ggcaccactcctacatgtgggcaaa

SEQ ID NO: 162308 - DNA, 25 bp, Canis familiaris
ggcacccttcacattggagtgaccc

SEQ ID NO: 162309 - DNA, 25 bp, Canis familiaris
ggccctcattccagtgtgagttcaa

SEQ ID NO: 162310 - DNA, 25 bp, Canis familiaris
ggcatcccttagagttcagtctgga

SEQ ID NO: 162311 - DNA, 25 bp, Canis familiaris
ggcattgcctgtagaggtttttgga

SEQ ID NO: 162312 - DNA, 25 bp, Canis familiaris
ggcagtacttaactatgttttggca

SEQ ID NO: 162313 - DNA, 25 bp, Canis familiaris
ggcaggaagtaatctggctgttcgc

SEQ ID NO: 162314 - DNA, 25 bp, Canis familiaris
ggcagaggaacaatcctgggttctg

SEQ ID NO: 162315 - DNA, 25 bp, Canis familiaris
ggcaggggaaccagaggtgtcggga

SEQ ID NO: 162316 - DNA, 25 bp, Canis familiaris
ggcagggtagaggcaaggtgttggg

SEQ ID NO: 162317 - DNA, 25 bp, Canis familiaris
ggcagctggtacgagcaagtttagc

SEQ ID NO: 162318 - DNA, 25 bp, Canis familiaris
ggcagctgggaggacgagttctcga

SEQ ID NO: 162319 - DNA, 25 bp, Canis familiaris
ggcagggtcagcaactgagttccag

SEQ ID NO: 162320 - DNA, 25 bp, Canis familiaris
ggcagggatcaggatacagctctta

SEQ ID NO: 162321 - DNA, 25 bp, Canis familiaris
ggcgaagcaactgcgagcacttagg

SEQ ID NO: 162322 - DNA, 25 bp, Canis familiaris
ggcacaaaagcccagagcacagtag

SEQ ID NO: 162323 - DNA, 25 bp, Canis familiaris
ggcacacagggtgacacagcattca

SEQ ID NO: 162324 - DNA, 25 bp, Canis familiaris
ggcacacaggggacaacagcatgca

SEQ ID NO: 162325 - DNA, 25 bp, Canis familiaris
ggcaccttgggtaatagcagcagct

SEQ ID NO: 162326 - DNA, 25 bp, Canis familiaris
ggcacagttcttaaatagcagcacc

SEQ ID NO: 162327 - DNA, 25 bp, Canis familiaris
ggcaggctgttttaggggccagcac

SEQ ID NO: 162328 - DNA, 25 bp, Canis familiaris
ggcagtgtttgtagacctggagccc

SEQ ID NO: 162329 - DNA, 25 bp, Canis familiaris
ggcagtgttacatacctggttttta

SEQ ID NO: 162330 - DNA, 25 bp, Canis familiaris
ggctgttctacagcctttttcttcc

SEQ ID NO: 162331 - DNA, 25 bp, Canis familiaris
ggcttcacggcagagtttctttctg

SEQ ID NO: 162332 - DNA, 25 bp, Canis familiaris
ggcaccagggagtcatgcttttttg

SEQ ID NO: 162333 - DNA, 25 bp, Canis familiaris
ggcaactgtggatttcttttctttt

SEQ ID NO: 162334 - DNA, 25 bp, Canis familiaris
ggcaactcttattttttgtcttttg

SEQ ID NO: 162335 - DNA, 25 bp, Canis familiaris
ggcagaattttctccagtttgtctt

SEQ ID NO: 162336 - DNA, 25 bp, Canis familiaris
ggccacagctaacaccagttttctg

SEQ ID NO: 162337 - DNA, 25 bp, Canis familiaris
ggcaccactaaaaaactacatttat

SEQ ID NO: 162338 - DNA, 25 bp, Canis familiaris
ggcatcccgagagagaaaatcctaa

SEQ ID NO: 162339 - DNA, 25 bp, Canis familiaris
ggcatccctcaagttaaaatcttaa

SEQ ID NO: 162340 - DNA, 25 bp, Canis familiaris
ggcacctcacaatgttacgacgtac

SEQ ID NO: 162341 - DNA, 25 bp, Canis familiaris
ggcactgtcaaatggttcaacgtca

SEQ ID NO: 162342 - DNA, 25 bp, Canis familiaris
ggcacttcaaagagttccttacctg

SEQ ID NO: 162343 - DNA, 25 bp, Canis familiaris
ggcacacaaaagagttccatgttct

SEQ ID NO: 162344 - DNA, 25 bp, Canis familiaris
ggcaacaaggacagcttccaagttt

SEQ ID NO: 162345 - DNA, 25 bp, Canis familiaris
ggctccttggaaacacccataggtt

SEQ ID NO: 162346 - DNA, 25 bp, Canis familiaris
ggctcccggaacaatacgtgaggtt

SEQ ID NO: 162347 - DNA, 25 bp, Canis familiaris
ggcaccacaggatcaaatgcggacg

SEQ ID NO: 162348 - DNA, 25 bp, Canis familiaris
ggcaccacggaccatcttgaaaagc

SEQ ID NO: 162349 - DNA, 25 bp, Canis familiaris
ggcacacagcggtgtcattcaaacc

SEQ ID NO: 162350 - DNA, 25 bp, Canis familiaris
ggcacagagggatatctcccacatc

SEQ ID NO: 162351 - DNA, 25 bp, Canis familiaris
ggcaaagtggatattgtcgccatca

SEQ ID NO: 162352 - DNA, 25 bp, Canis familiaris
ggcaaatatggtgcttctgctccac

SEQ ID NO: 162353 - DNA, 25 bp, Canis familiaris
ggcaaaatagtccgtcagtcatcct

SEQ ID NO: 162354 - DNA, 25 bp, Canis familiaris
ggcataaattcgggctcattctccc

SEQ ID NO: 162355 - DNA, 25 bp, Canis familiaris
ggcagaaattgccccttttggtggg

SEQ ID NO: 162356 - DNA, 25 bp, Canis familiaris
ggcacaatgtatcaacctttggtga

SEQ ID NO: 162357 - DNA, 25 bp, Canis familiaris
ggcacaaatcagcaggacctctggg

SEQ ID NO: 162358 - DNA, 25 bp, Canis familiaris
ggcaaaacccagttcaccatagaga

SEQ ID NO: 162359 - DNA, 25 bp, Canis familiaris
ggcaaaacctcatctgctatcagag

SEQ ID NO: 162360 - DNA, 25 bp, Canis familiaris
ggcaaaatccccttcatatcattgc

SEQ ID NO: 162361 - DNA, 25 bp, Canis familiaris
ggcaaatgtcccaaacatgcacttg

SEQ ID NO: 162362 - DNA, 25 bp, Canis familiaris
ggcacactgtccatcaaggacctga

SEQ ID NO: 162363 - DNA, 25 bp, Canis familiaris
ggcacttgtcaccatatagtagcct

SEQ ID NO: 162364 - DNA, 25 bp, Canis familiaris
ggcactagtctctgacaggagcctc

SEQ ID NO: 162365 - DNA, 25 bp, Canis familiaris
ggcactcagtcacagaaggggtttc

SEQ ID NO: 162366 - DNA, 25 bp, Canis familiaris
ggcacacagccttcagaggggatgt

SEQ ID NO: 162367 - DNA, 25 bp, Canis familiaris
ggcaccaccttccaggatagtgtcc

SEQ ID NO: 162368 - DNA, 25 bp, Canis familiaris
ggcagcccgtttctgataggtgcac

SEQ ID NO: 162369 - DNA, 25 bp, Canis familiaris
ggcagccaggtttggtaaggctctg

SEQ ID NO: 162370 - DNA, 25 bp, Canis familiaris
ggcacacaggagatgttccaggcca

SEQ ID NO: 162371 - DNA, 25 bp, Canis familiaris
ggcagcgtaggtagtttcaggcccc

SEQ ID NO: 162372 - DNA, 25 bp, Canis familiaris
ggcaggtgcggtgctttagcacatc

SEQ ID NO: 162373 - DNA, 25 bp, Canis familiaris
ggcactgttgggactgtttgcacct

SEQ ID NO: 162374 - DNA, 25 bp, Canis familiaris
ggcacagcttggtaaatttccctgc

SEQ ID NO: 162375 - DNA, 25 bp, Canis familiaris
ggccattctgggaaataacctcgca

SEQ ID NO: 162376 - DNA, 25 bp, Canis familiaris
ggcacattccaggacatcatacccc

SEQ ID NO: 162377 - DNA, 25 bp, Canis familiaris
ggcagatcacttcaagcaagccccc

SEQ ID NO: 162378 - DNA, 25 bp, Canis familiaris
ggcagaactgtgcacatgcttgctt

SEQ ID NO: 162379 - DNA, 25 bp, Canis familiaris
ggcagcacagtacgagcacgatcta

SEQ ID NO: 162380 - DNA, 25 bp, Canis familiaris
ggcagacattcagaccgagcgtgcc

SEQ ID NO: 162381 - DNA, 25 bp, Canis familiaris
ggcaggaatcatcattgcgggctgg

SEQ ID NO: 162382 - DNA, 25 bp, Canis familiaris
ggcactgagactctccatgaggttg

SEQ ID NO: 162383 - DNA, 25 bp, Canis familiaris
ggcacatgggccatttaagctctgg

SEQ ID NO: 162384 - DNA, 25 bp, Canis familiaris
ggcacgagggctacatgaaagcctg

SEQ ID NO: 162385 - DNA, 25 bp, Canis familiaris
ggcacgagggagaatctcatagtgc

SEQ ID NO: 162386 - DNA, 25 bp, Canis familiaris
ggcacgaggcaggaactaactggtg

SEQ ID NO: 162387 - DNA, 25 bp, Canis familiaris
ggcacaagaaggaagctggactgga

SEQ ID NO: 162388 - DNA, 25 bp, Canis familiaris
ggcatacagacaggtcgtggcctag

SEQ ID NO: 162389 - DNA, 25 bp, Canis familiaris
ggcagatcaactggactgtcctcta

SEQ ID NO: 162390 - DNA, 25 bp, Canis familiaris
ggcagtaagcatgcctgtccttttc

SEQ ID NO: 162391 - DNA, 25 bp, Canis familiaris
ggcagtaactaggccaaattttgca

SEQ ID NO: 162392 - DNA, 25 bp, Canis familiaris
ggcagtatgacctttccaactggga

SEQ ID NO: 162393 - DNA, 25 bp, Canis familiaris
ggcagaggacgctttgggatcatgg

SEQ ID NO: 162394 - DNA, 25 bp, Canis familiaris
ggcagaaggagctcttggagcagag

SEQ ID NO: 162395 - DNA, 25 bp, Canis familiaris
ggcacggtggcacctgtgagggagc

SEQ ID NO: 162396 - DNA, 25 bp, Canis familiaris
ggcactggggaccagatgagtgcga

SEQ ID NO: 162397 - DNA, 25 bp, Canis familiaris
ggcaccagggcgtgatggtgcgcat

SEQ ID NO: 162398 - DNA, 25 bp, Canis familiaris
ggcactgaggtcgcgtagtagctac

SEQ ID NO: 162399 - DNA, 25 bp, Canis familiaris
ggcacatgaggacccttcaatcagc

SEQ ID NO: 162400 - DNA, 25 bp, Canis familiaris
ggcagctgcggtccatcttggtcaa

SEQ ID NO: 162401 - DNA, 25 bp, Canis familiaris
ggcagtgtgatatcacctggcacaa

SEQ ID NO: 162402 - DNA, 25 bp, Canis familiaris
ggcttgactctaaccatggacaatg

SEQ ID NO: 162403 - DNA, 25 bp, Canis familiaris
ggcattggcctaagcctaacttcta

SEQ ID NO: 162404 - DNA, 25 bp, Canis familiaris
ggcttacacccagaagatttcatac

SEQ ID NO: 162405 - DNA, 25 bp, Canis familiaris
ggcattaaccactaaggatctctaa

SEQ ID NO: 162406 - DNA, 25 bp, Canis familiaris
ggcaaaccaagaaatagactctcaa

SEQ ID NO: 162407 - DNA, 25 bp, Canis familiaris
ggccaaccaacagactgacctagtt

SEQ ID NO: 162408 - DNA, 25 bp, Canis familiaris
ggcagaacacaatgaactagcaccg

SEQ ID NO: 162409 - DNA, 25 bp, Canis familiaris
ggcagaaccacaataaaagccctgg

SEQ ID NO: 162410 - DNA, 25 bp, Canis familiaris
ggcagaagccaggagaggaaccact

SEQ ID NO: 162411 - DNA, 25 bp, Canis familiaris
ggcagacagtcgtgtgtgcttcaca

SEQ ID NO: 162412 - DNA, 25 bp, Canis familiaris
ggctggcgccagtggtcttagcgcc

SEQ ID NO: 162413 - DNA, 25 bp, Canis familiaris
ggcggcaggagatcagccggggggc

SEQ ID NO: 162414 - DNA, 25 bp, Canis familiaris
ggcggatctgaataccaggctggag

SEQ ID NO: 162415 - DNA, 25 bp, Canis familiaris
ggcagatcctaagagaaccatggca

SEQ ID NO: 162416 - DNA, 25 bp, Canis familiaris
ggcagacctcaaaacactgttgtca

SEQ ID NO: 162417 - DNA, 25 bp, Canis familiaris
ggcagagaccatcaacatcgttact

SEQ ID NO: 162418 - DNA, 25 bp, Canis familiaris
ggcagaaggatgccacctcgtatcc

SEQ ID NO: 162419 - DNA, 25 bp, Canis familiaris
ggcagcagaggtggcacctgcctgt

SEQ ID NO: 162420 - DNA, 25 bp, Canis familiaris
ggcacagacagtgcacacagctgta

SEQ ID NO: 162421 - DNA, 25 bp, Canis familiaris
ggcagaggcaggggcaagcattcaa

SEQ ID NO: 162422 - DNA, 25 bp, Canis familiaris
ggcagaggcaggccgaatgtctcca

SEQ ID NO: 162423 - DNA, 25 bp, Canis familiaris
ggcagaccaactggacatgactcca

SEQ ID NO: 162424 - DNA, 25 bp, Canis familiaris
ggcagagccttcagagcaatctcca

SEQ ID NO: 162425 - DNA, 25 bp, Canis familiaris
ggcatgggtttccagtatatcgcgg

SEQ ID NO: 162426 - DNA, 25 bp, Canis familiaris
ggcagcggtgaaggagtttcttgag

SEQ ID NO: 162427 - DNA, 25 bp, Canis familiaris
ggcagccctagaaaattcacttact

SEQ ID NO: 162428 - DNA, 25 bp, Canis familiaris
ggcagcctctgaatgaaatgctatt

SEQ ID NO: 162429 - DNA, 25 bp, Canis familiaris
ggcagccctgggaaactcatatggt

SEQ ID NO: 162430 - DNA, 25 bp, Canis familiaris
ggcagcagccttgatgaagtatagc

SEQ ID NO: 162431 - DNA, 25 bp, Canis familiaris
ggcagcagcagctttagaagccaaa

SEQ ID NO: 162432 - DNA, 25 bp, Canis familiaris
ggcacagcacacacagagggaatca

SEQ ID NO: 162433 - DNA, 25 bp, Canis familiaris
ggcacagcactgactcaggtggact

SEQ ID NO: 162434 - DNA, 25 bp, Canis familiaris
ggcacaattgagaatgagggccttg

SEQ ID NO: 162435 - DNA, 25 bp, Canis familiaris
ggcaaattgtcttgagggcatgcct

SEQ ID NO: 162436 - DNA, 25 bp, Canis familiaris
ggcaaatttgtttcggagcactgtt

SEQ ID NO: 162437 - DNA, 25 bp, Canis familiaris
ggcagacgggtttcactgagcctgc

SEQ ID NO: 162438 - DNA, 25 bp, Canis familiaris
ggcagatcagggtggatctcaccat

SEQ ID NO: 162439 - DNA, 25 bp, Canis familiaris
ggcaaagcagtgccagtcatccacc

SEQ ID NO: 162440 - DNA, 25 bp, Canis familiaris
ggcacaggcagaagagattccccgt

SEQ ID NO: 162441 - DNA, 25 bp, Canis familiaris
ggcaccgcaagctcaatcgacttgc

SEQ ID NO: 162442 - DNA, 25 bp, Canis familiaris
ggcacctgccatcgagaaggacttc

SEQ ID NO: 162443 - DNA, 25 bp, Canis familiaris
ggcaccgaacagaaaacgctcatca

SEQ ID NO: 162444 - DNA, 25 bp, Canis familiaris
ggcacggaacgcagcaatcgactag

SEQ ID NO: 162445 - DNA, 25 bp, Canis familiaris
ggcacaggaccggctgaaggggagc

SEQ ID NO: 162446 - DNA, 25 bp, Canis familiaris
ggcacggacctgactgcagaagtgg

SEQ ID NO: 162447 - DNA, 25 bp, Canis familiaris
ggcatatcggccaccaaagtgaccc

SEQ ID NO: 162448 - DNA, 25 bp, Canis familiaris
ggcttccagtgagccaacaggaatc

SEQ ID NO: 162449 - DNA, 25 bp, Canis familiaris
ggcttaaggcggcctacagagaaaa

SEQ ID NO: 162450 - DNA, 25 bp, Canis familiaris
ggctattagggaccaaaggacaagg

SEQ ID NO: 162451 - DNA, 25 bp, Canis familiaris
ggcttccaggcgcaagaaggacgga

SEQ ID NO: 162452 - DNA, 25 bp, Canis familiaris
ggctttgaggctgagaaaccctggt

SEQ ID NO: 162453 - DNA, 25 bp, Canis familiaris
ggctttaggcatgaccacggagatg

SEQ ID NO: 162454 - DNA, 25 bp, Canis familiaris
ggcacttacttaacctcgagagatg

SEQ ID NO: 162455 - DNA, 25 bp, Canis familiaris
ggcacttactataatcagccttgca

SEQ ID NO: 162456 - DNA, 25 bp, Canis familiaris
ggcactctactgtactcattctgcc

SEQ ID NO: 162457 - DNA, 25 bp, Canis familiaris
ggcactctggaggaccagatcatcc

SEQ ID NO: 162458 - DNA, 25 bp, Canis familiaris
ggcacgctggagaactgcgtggcgc

SEQ ID NO: 162459 - DNA, 25 bp, Canis familiaris
ggcactgggagttctagggatggct

SEQ ID NO: 162460 - DNA, 25 bp, Canis familiaris
ggcactgtagagtgtgggcgcacag

SEQ ID NO: 162461 - DNA, 25 bp, Canis familiaris
ggcacgccagaaggatgccgcagac

SEQ ID NO: 162462 - DNA, 25 bp, Canis familiaris
ggcagcagccagtaggctgatccag

SEQ ID NO: 162463 - DNA, 25 bp, Canis familiaris
ggcaggccatgctaggcacattgca

SEQ ID NO: 162464 - DNA, 25 bp, Canis familiaris
ggcagggagctcagcatgctcatcc

SEQ ID NO: 162465 - DNA, 25 bp, Canis familiaris
ggcagagtggtcagaagcacgggcc

SEQ ID NO: 162466 - DNA, 25 bp, Canis familiaris
ggcagagggccctagggcttggact

SEQ ID NO: 162467 - DNA, 25 bp, Canis familiaris
ggcagcgactccgaaggtgttaact

SEQ ID NO: 162468 - DNA, 25 bp, Canis familiaris
ggcagcaaggtcgtagctgtgttaa

SEQ ID NO: 162469 - DNA, 25 bp, Canis familiaris
ggcactatggacagagttgttcaga

SEQ ID NO: 162470 - DNA, 25 bp, Canis familiaris
ggcactcattataatggttttcttc

SEQ ID NO: 162471 - DNA, 25 bp, Canis familiaris
ggcacaattctcagggttacagata

SEQ ID NO: 162472 - DNA, 25 bp, Canis familiaris
ggcacacttcatgaggcatattaaa

SEQ ID NO: 162473 - DNA, 25 bp, Canis familiaris
ggcacttttaaggcataacagggtc

SEQ ID NO: 162474 - DNA, 25 bp, Canis familiaris
ggcactttcataaccagtgtcaggg

SEQ ID NO: 162475 - DNA, 25 bp, Canis familiaris
ggcaccttcattaccaggcattatg

SEQ ID NO: 162476 - DNA, 25 bp, Canis familiaris
ggcttctttattccaggtgtgacgc

SEQ ID NO: 162477 - DNA, 25 bp, Canis familiaris
ggcattggttgacggaagtttcctg

SEQ ID NO: 162478 - DNA, 25 bp, Canis familiaris
ggcactggttatcgtagcggttctt

SEQ ID NO: 162479 - DNA, 25 bp, Canis familiaris
ggcactggttatcgtagcggttctt

SEQ ID NO: 162480 - DNA, 25 bp, Canis familiaris
ggcagtcgtgtaaaagggttgtctc

SEQ ID NO: 162481 - DNA, 25 bp, Canis familiaris
ggcatgtttgagaaacgccgtttcc

SEQ ID NO: 162482 - DNA, 25 bp, Canis familiaris
ggctgattgggtatcggcctttggc

SEQ ID NO: 162483 - DNA, 25 bp, Canis familiaris
tggaactgcaggattccccggttcc

SEQ ID NO: 162484 - DNA, 25 bp, Canis familiaris
tggcaaggagaagctcccgcggtac

SEQ ID NO: 162485 - DNA, 25 bp, Canis familiaris
tggcaaggagaagctcccgcggtac

SEQ ID NO: 162486 - DNA, 25 bp, Canis familiaris
ggcaggtgaggaggacatccgctgg

SEQ ID NO: 162487 - DNA, 25 bp, Canis familiaris
ggcactgaaggagaccctcggagcc

SEQ ID NO: 162488 - DNA, 25 bp, Canis familiaris
ggcatcttacgttaacctgcctacc

SEQ ID NO: 162489 - DNA, 25 bp, Canis familiaris
ggcatcttacgttaacctgcctacc

SEQ ID NO: 162490 - DNA, 25 bp, Canis familiaris
ggctttactgagttttctttctcct

SEQ ID NO: 162491 - DNA, 25 bp, Canis familiaris
ggcacttactggtatttacctcctg

SEQ ID NO: 162492 - DNA, 25 bp, Canis familiaris
ggcacattcattagcaagattccct

SEQ ID NO: 162493 - DNA, 25 bp, Canis familiaris
ggcactgtctgtgaaattgcacctt

SEQ ID NO: 162494 - DNA, 25 bp, Canis familiaris
ggcactgacatataattcttctcta

SEQ ID NO: 162495 - DNA, 25 bp, Canis familiaris
ggcagtgacattgcctgttttgctc

SEQ ID NO: 162496 - DNA, 25 bp, Canis familiaris
ggcacagagtttcctctttgttcac

SEQ ID NO: 162497 - DNA, 25 bp, Canis familiaris
ggcacaggctatatcttggggtcca

SEQ ID NO: 162498 - DNA, 25 bp, Canis familiaris
ggcacgggttgtaatggggcaccgg

SEQ ID NO: 162499 - DNA, 25 bp, Canis familiaris
ggcactgggttgattcatgtctgca

SEQ ID NO: 162500 - DNA, 25 bp, Canis familiaris
ggcacttgggtaattatgcttgacc

SEQ ID NO: 162501 - DNA, 25 bp, Canis familiaris
ggcacctggaagagtgatcctggcc

SEQ ID NO: 162502 - DNA, 25 bp, Canis familiaris
ggcacctggtagacgctgagatgct

SEQ ID NO: 162503 - DNA, 25 bp, Canis familiaris
ggcaccatgcagagagcctgacgtg

SEQ ID NO: 162504 - DNA, 25 bp, Canis familiaris
ggcaccatgaactcctacgagatgc

SEQ ID NO: 162505 - DNA, 25 bp, Canis familiaris
ggcatccaaattccagattcaaggc

SEQ ID NO: 162506 - DNA, 25 bp, Canis familiaris
ggcactaagtttggatcataaggag

SEQ ID NO: 162507 - DNA, 25 bp, Canis familiaris
ggcagtaggtgcaaggtcattaggg

SEQ ID NO: 162508 - DNA, 25 bp, Canis familiaris
ggcaggtgagtaagggcttcgtgaa

SEQ ID NO: 162509 - DNA, 25 bp, Canis familiaris
ggcagtgatatttggggcggaggaa

SEQ ID NO: 162510 - DNA, 25 bp, Canis familiaris
ggcatgttaatttgggacggctgga

SEQ ID NO: 162511 - DNA, 25 bp, Canis familiaris
ggcagttaaatgtaaatgcgtagat

SEQ ID NO: 162512 - DNA, 25 bp, Canis familiaris
ggcagtttaatctttgtcaatatgt

SEQ ID NO: 162513 - DNA, 25 bp, Canis familiaris
ggcagttccttgtttttacatgttc

SEQ ID NO: 162514 - DNA, 25 bp, Canis familiaris
ggcttccctattatcttcaaggccg

SEQ ID NO: 162515 - DNA, 25 bp, Canis familiaris
ggcttaaaaagcccttggaggcttg

SEQ ID NO: 162516 - DNA, 25 bp, Canis familiaris
ggcactagaaaactgcgctgggggc

SEQ ID NO: 162517 - DNA, 25 bp, Canis familiaris
ggcacgatggaatgggtgtgggcgc

SEQ ID NO: 162518 - DNA, 25 bp, Canis familiaris
ggcaggtgctaagggttgtgggcgc

SEQ ID NO: 162519 - DNA, 25 bp, Canis familiaris
ggcagcgcctgatgagggcttgggc

SEQ ID NO: 162520 - DNA, 25 bp, Canis familiaris
ggcagcagcctcaaaacgcttgggc

SEQ ID NO: 162521 - DNA, 25 bp, Canis familiaris
ggcacagcactcatcacattgtggt

SEQ ID NO: 162522 - DNA, 25 bp, Canis familiaris
ggcaccagcatgatcctgaggcaag

SEQ ID NO: 162523 - DNA, 25 bp, Canis familiaris
ggcagcaccaagtccgaatgcagat

SEQ ID NO: 162524 - DNA, 25 bp, Canis familiaris
ggcagccaaggagcagtgagcagca

SEQ ID NO: 162525 - DNA, 25 bp, Canis familiaris
ggcacctgggtggagatggacggga

SEQ ID NO: 162526 - DNA, 25 bp, Canis familiaris
ggcacctgacggggatggagggggg

SEQ ID NO: 162527 - DNA, 25 bp, Canis familiaris
ggcacctgcctgggggaggggtgcg

SEQ ID NO: 162528 - DNA, 25 bp, Canis familiaris
ggcattctgtcttggagggtaggtg

SEQ ID NO: 162529 - DNA, 25 bp, Canis familiaris
ggcagatctggttggcagtggtgag

SEQ ID NO: 162530 - DNA, 25 bp, Canis familiaris
ggcagcatggagttgggggtgatga

SEQ ID NO: 162531 - DNA, 25 bp, Canis familiaris
ggcagcaggaggctcggctgtgatg

SEQ ID NO: 162532 - DNA, 25 bp, Canis familiaris
ggcagggaggtgtctgttgctgctc

SEQ ID NO: 162533 - DNA, 25 bp, Canis familiaris
ggcactgagagctggcttcatgctt

SEQ ID NO: 162534 - DNA, 25 bp, Canis familiaris
ggcacgtcagatggctttgcatgca

SEQ ID NO: 162535 - DNA, 25 bp, Canis familiaris
ggcagcgtcagctgtacagctacac

SEQ ID NO: 162536 - DNA, 25 bp, Canis familiaris
ggcacttagctcccaagatggcatc

SEQ ID NO: 162537 - DNA, 25 bp, Canis familiaris
ggcacgttccagccaggagtgcctg

SEQ ID NO: 162538 - DNA, 25 bp, Canis familiaris
ggcagagatatccccgtgagctgcc

SEQ ID NO: 162539 - DNA, 25 bp, Canis familiaris
ggcagcaatgctggcatcgtgggga

SEQ ID NO: 162540 - DNA, 25 bp, Canis familiaris
ggcagccatgctggcctgtgcccag

SEQ ID NO: 162541 - DNA, 25 bp, Canis familiaris
ggcatgccatgaggctatttctaca

SEQ ID NO: 162542 - DNA, 25 bp, Canis familiaris
ggcaccatcactgtgttctgaacct

SEQ ID NO: 162543 - DNA, 25 bp, Canis familiaris
ggcacctgcctggcaggtctgcacc

SEQ ID NO: 162544 - DNA, 25 bp, Canis familiaris
ggcacctgccaggtgatcgtgacca

SEQ ID NO: 162545 - DNA, 25 bp, Canis familiaris
ggcacctgtcaaaacgttccaataa

SEQ ID NO: 162546 - DNA, 25 bp, Canis familiaris
ggcacctgtagaaacccttcaagat

SEQ ID NO: 162547 - DNA, 25 bp, Canis familiaris
ggcacctggagaaatgcccagcaaa

SEQ ID NO: 162548 - DNA, 25 bp, Canis familiaris
ggcaccagtggaacagcttctgcaa

SEQ ID NO: 162549 - DNA, 25 bp, Canis familiaris
ggcaggaagcgaatactctggcaat

SEQ ID NO: 162550 - DNA, 25 bp, Canis familiaris
ggcaggggggatgcctggaatggca

SEQ ID NO: 162551 - DNA, 25 bp, Canis familiaris
ggcggagctgggaaccagtggaggc

SEQ ID NO: 162552 - DNA, 25 bp, Canis familiaris
ggcagtgtggggccaccgtaagtgc

SEQ ID NO: 162553 - DNA, 25 bp, Canis familiaris
ggctttcagggccaacctgaaggcc

SEQ ID NO: 162554 - DNA, 25 bp, Canis familiaris
ggctttgagagagatacccacaggc

SEQ ID NO: 162555 - DNA, 25 bp, Canis familiaris
ggcatctggagataataaccaacca

SEQ ID NO: 162556 - DNA, 25 bp, Canis familiaris
ggcactctcagatgaatataaccat

SEQ ID NO: 162557 - DNA, 25 bp, Canis familiaris
ggcacctcaattgtcaaaacacctc

SEQ ID NO: 162558 - DNA, 25 bp, Canis familiaris
ggctcccaaaatgcagacaactcct

SEQ ID NO: 162559 - DNA, 25 bp, Canis familiaris
ggcgtctacaacggcaagaccttca

SEQ ID NO: 162560 - DNA, 25 bp, Canis familiaris
ggccattaacttgccagaagtgaca

SEQ ID NO: 162561 - DNA, 25 bp, Canis familiaris
ggcactctaactcatcagcgatgat

SEQ ID NO: 162562 - DNA, 25 bp, Canis familiaris
ggcactctcaagtttgcgtgtgaga

SEQ ID NO: 162563 - DNA, 25 bp, Canis familiaris
ggcagctccagttttcaattatgct

SEQ ID NO: 162564 - DNA, 25 bp, Canis familiaris
ggcagcttcagttgtgttcctgagc

SEQ ID NO: 162565 - DNA, 25 bp, Canis familiaris
ggcactgtacatatctatctctgag

SEQ ID NO: 162566 - DNA, 25 bp, Canis familiaris
ggcactgaaatcagctgttctcaga

SEQ ID NO: 162567 - DNA, 25 bp, Canis familiaris
ggccgagagtaaatgttccagtctg

SEQ ID NO: 162568 - DNA, 25 bp, Canis familiaris
ggccgaactcaataaccgctggttc

SEQ ID NO: 162569 - DNA, 25 bp, Canis familiaris
ggcttaagccaaggaaccgctttct

SEQ ID NO: 162570 - DNA, 25 bp, Canis familiaris
ggcttcaagctccggagacagcctt

SEQ ID NO: 162571 - DNA, 25 bp, Canis familiaris
ggcaccaactcggtgatacagcctc

SEQ ID NO: 162572 - DNA, 25 bp, Canis familiaris
ggcaccagaccagggtaagcctcac

SEQ ID NO: 162573 - DNA, 25 bp, Canis familiaris
ggcagcccatcctgcagtataggtg

SEQ ID NO: 162574 - DNA, 25 bp, Canis familiaris
ggcaccaccagatgcgtgatatgga

SEQ ID NO: 162575 - DNA, 25 bp, Canis familiaris
ggcaggggagataccatgatcacga

SEQ ID NO: 162576 - DNA, 25 bp, Canis familiaris
ggcacggtgagaatccatcacaaga

SEQ ID NO: 162577 - DNA, 25 bp, Canis familiaris
ggcactagtgacccacagtcacaaa

SEQ ID NO: 162578 - DNA, 25 bp, Canis familiaris
ggcactaccaccagcagattgaaat

SEQ ID NO: 162579 - DNA, 25 bp, Canis familiaris
ggcactgagcccatgtagactaaaa

SEQ ID NO: 162580 - DNA, 25 bp, Canis familiaris
ggcagctggcccaacaggcaaaaat

SEQ ID NO: 162581 - DNA, 25 bp, Canis familiaris
ggcactggcccaacaagagacacca

SEQ ID NO: 162582 - DNA, 25 bp, Canis familiaris
ggcagcaggcgcgcaaattacccac

SEQ ID NO: 162583 - DNA, 25 bp, Canis familiaris
ggcagcaggcgcgcaaattacccac

SEQ ID NO: 162584 - DNA, 25 bp, Canis familiaris
ggcagcaacctaatagttacccatc

SEQ ID NO: 162585 - DNA, 25 bp, Canis familiaris
ggcactgaactatacttttccatgc

SEQ ID NO: 162586 - DNA, 25 bp, Canis familiaris
ggcactatactctaacttatcgttc

SEQ ID NO: 162587 - DNA, 25 bp, Canis familiaris
ggcttcaatgtcaagacgtatctgt

SEQ ID NO: 162588 - DNA, 25 bp, Canis familiaris
ggcactattgtgttgatcctattgt

SEQ ID NO: 162589 - DNA, 25 bp, Canis familiaris
ggcacgtgatgtcatgagccctggt

SEQ ID NO: 162590 - DNA, 25 bp, Canis familiaris
ggcagaaatgcttgatgacctcatg

SEQ ID NO: 162591 - DNA, 25 bp, Canis familiaris
ggcagaaagacactgactactgtcc

SEQ ID NO: 162592 - DNA, 25 bp, Canis familiaris
ggcagcaaagacatacagcagcccc

SEQ ID NO: 162593 - DNA, 25 bp, Canis familiaris
ggcagacaaactgaacatgactcca

SEQ ID NO: 162594 - DNA, 25 bp, Canis familiaris
ggcaccaaagcttaatgtgacccaa

SEQ ID NO: 162595 - DNA, 25 bp, Canis familiaris
ggcaccaatatgatgtttgcattct

SEQ ID NO: 162596 - DNA, 25 bp, Canis familiaris
ggcagccaaacagtttttgcttcat

SEQ ID NO: 162597 - DNA, 25 bp, Canis familiaris
ggcagtgcaacatctttatcttctt

SEQ ID NO: 162598 - DNA, 25 bp, Canis familiaris
ggcagtggacacattctttattgtt

SEQ ID NO: 162599 - DNA, 25 bp, Canis familiaris
ggcactctgaacatttcctattgtg

SEQ ID NO: 162600 - DNA, 25 bp, Canis familiaris
ggctaggaacccttcctgttgatag

SEQ ID NO: 162601 - DNA, 25 bp, Canis familiaris
ggcttgtgacacgtgggcggtaatc

SEQ ID NO: 162602 - DNA, 25 bp, Canis familiaris
ggcttgtactgggaacgcgataatc

SEQ ID NO: 162603 - DNA, 25 bp, Canis familiaris
ggctttccggcagaacgcatccact

SEQ ID NO: 162604 - DNA, 25 bp, Canis familiaris
ggcttccctggtaaacattccaagg

SEQ ID NO: 162605 - DNA, 25 bp, Canis familiaris
tgccttcccagcataaccattttag

SEQ ID NO: 162606 - DNA, 25 bp, Canis familiaris
ggcaggccatcgataaccttttgct

SEQ ID NO: 162607 - DNA, 25 bp, Canis familiaris
ggcaggtgcttgaaaactctcttga

SEQ ID NO: 162608 - DNA, 25 bp, Canis familiaris
ggcagccaattgcagatatcttttg

SEQ ID NO: 162609 - DNA, 25 bp, Canis familiaris
ggcagccatgtttaatccacgattc

SEQ ID NO: 162610 - DNA, 25 bp, Canis familiaris
ggcagaagttaaatcccagataaag

SEQ ID NO: 162611 - DNA, 25 bp, Canis familiaris
ggcagaagttggtcaccacagtgac

SEQ ID NO: 162612 - DNA, 25 bp, Canis familiaris
ggcagtgccttgtaactcacaatgg

SEQ ID NO: 162613 - DNA, 25 bp, Canis familiaris
ggcaccatcttgcaagccaaggagg

SEQ ID NO: 162614 - DNA, 25 bp, Canis familiaris
ggcaccatggtgaaactgagaaaag

SEQ ID NO: 162615 - DNA, 25 bp, Canis familiaris
ggcacgctggaagactggccaaagt

SEQ ID NO: 162616 - DNA, 25 bp, Canis familiaris
ggccgtgtggacagctggcgaaact

SEQ ID NO: 162617 - DNA, 25 bp, Canis familiaris
ggcaccactgagtcattctgggaaa

SEQ ID NO: 162618 - DNA, 25 bp, Canis familiaris
ggcacgagcagacatccagagttaa

SEQ ID NO: 162619 - DNA, 25 bp, Canis familiaris
ggcaccagagatggtcaaagtaaat

SEQ ID NO: 162620 - DNA, 25 bp, Canis familiaris
ggcaccatgaatatgacaatggata

SEQ ID NO: 162621 - DNA, 25 bp, Canis familiaris
ggcatccgattcctgtcaaggagag

SEQ ID NO: 162622 - DNA, 25 bp, Canis familiaris
ggcagccaagacctggaaggaaccc

SEQ ID NO: 162623 - DNA, 25 bp, Canis familiaris
ggcagtgtaagcaagggaggacccc

SEQ ID NO: 162624 - DNA, 25 bp, Canis familiaris
ggcagagacagagcggaacgcccgc

SEQ ID NO: 162625 - DNA, 25 bp, Canis familiaris
ggcaggaaagcctggagagcccagt

SEQ ID NO: 162626 - DNA, 25 bp, Canis familiaris
ggcggtatcacgtgaaggcccaacg

SEQ ID NO: 162627 - DNA, 25 bp, Canis familiaris
ggcaggtttctgtagaagaggccaa

SEQ ID NO: 162628 - DNA, 25 bp, Canis familiaris
ggcaggtattcttctaaggcttgct

SEQ ID NO: 162629 - DNA, 25 bp, Canis familiaris
ggcagtggcttctctaaagttgaaa

SEQ ID NO: 162630 - DNA, 25 bp, Canis familiaris
ggcagtgttagctctagaatcttgt

SEQ ID NO: 162631 - DNA, 25 bp, Canis familiaris
ggcagcttctccacgaagatcttgc

SEQ ID NO: 162632 - DNA, 25 bp, Canis familiaris
ggcagctatctgcactctaaactgc

SEQ ID NO: 162633 - DNA, 25 bp, Canis familiaris
ggcagtgcagtggttctcaaattct

SEQ ID NO: 162634 - DNA, 25 bp, Canis familiaris
ggcagataacgttccacttgtattt

SEQ ID NO: 162635 - DNA, 25 bp, Canis familiaris
ggcagatgacacgtgatgtctcggt

SEQ ID NO: 162636 - DNA, 25 bp, Canis familiaris
ggcaggaaccgagtctccagtgagg

SEQ ID NO: 162637 - DNA, 25 bp, Canis familiaris
ggcagagagacagcaggctccgtgc

SEQ ID NO: 162638 - DNA, 25 bp, Canis familiaris
ggcaggagcagatcgtgtgggtcat

SEQ ID NO: 162639 - DNA, 25 bp, Canis familiaris
ggcaggtggacaaggctggtgtaga

SEQ ID NO: 162640 - DNA, 25 bp, Canis familiaris
ggcaggatcgacgcgcttctgtatg

SEQ ID NO: 162641 - DNA, 25 bp, Canis familiaris
ggcaggacaccagggtggctcaatg

SEQ ID NO: 162642 - DNA, 25 bp, Canis familiaris
ggcaggtgcaggtgtgatgggcagt

SEQ ID NO: 162643 - DNA, 25 bp, Canis familiaris
ggcagaggaagaagctacagggctg

SEQ ID NO: 162644 - DNA, 25 bp, Canis familiaris
ggcagaggagagaacccaggttccc

SEQ ID NO: 162645 - DNA, 25 bp, Canis familiaris
ggcaggagtgagatctccgggtccc

SEQ ID NO: 162646 - DNA, 25 bp, Canis familiaris
ggcagggatgagggtgcccagtgcc

SEQ ID NO: 162647 - DNA, 25 bp, Canis familiaris
ggcagtggtgacagggctgctggcc

SEQ ID NO: 162648 - DNA, 25 bp, Canis familiaris
ggcagctgtgcgccaagcaggcgct

SEQ ID NO: 162649 - DNA, 25 bp, Canis familiaris
ggcagcagtggggcaagctgtccga

SEQ ID NO: 162650 - DNA, 25 bp, Canis familiaris
ggcagcagtcgagaagtgccgcgtc

SEQ ID NO: 162651 - DNA, 25 bp, Canis familiaris
ggcagcgtgtacaaagtcagccgcc

SEQ ID NO: 162652 - DNA, 25 bp, Canis familiaris
ggcaggttcaagaagccagaactct

SEQ ID NO: 162653 - DNA, 25 bp, Canis familiaris
ggcaggcccaggccagccagtacct

SEQ ID NO: 162654 - DNA, 25 bp, Canis familiaris
ggcagccctgggaagctgcagttcc

SEQ ID NO: 162655 - DNA, 25 bp, Canis familiaris
ggcacctttgctaagctcagtgagc

SEQ ID NO: 162656 - DNA, 25 bp, Canis familiaris
ggcagccatcctcagagtagtgtgt

SEQ ID NO: 162657 - DNA, 25 bp, Canis familiaris
ggcagccccactaggtgagagagct

SEQ ID NO: 162658 - DNA, 25 bp, Canis familiaris
ggcacccccttgcaatagaatgcga

SEQ ID NO: 162659 - DNA, 25 bp, Canis familiaris
ggcacccttttgcagcataactggg

SEQ ID NO: 162660 - DNA, 25 bp, Canis familiaris
ggcacgagcttgaagctagaaccta

SEQ ID NO: 162661 - DNA, 25 bp, Canis familiaris
ggcacgagctttttagaatcttctg

SEQ ID NO: 162662 - DNA, 25 bp, Canis familiaris
ggcaggactctttgatgtaacccgt

SEQ ID NO: 162663 - DNA, 25 bp, Canis familiaris
ggcatgggccatcaagtcaagcctt

SEQ ID NO: 162664 - DNA, 25 bp, Canis familiaris
ggcatgctgagctatggacagtcga

SEQ ID NO: 162665 - DNA, 25 bp, Canis familiaris
ggcatgatacattcaaagtgctgac

SEQ ID NO: 162666 - DNA, 25 bp, Canis familiaris
ggcattcagcttcaaggctggtgaa

SEQ ID NO: 162667 - DNA, 25 bp, Canis familiaris
ggcttacatggctgatggctgaggc

SEQ ID NO: 162668 - DNA, 25 bp, Canis familiaris
ggcagtaccagcagaggcagcagtg

SEQ ID NO: 162669 - DNA, 25 bp, Canis familiaris
ggcagaacttctggggtgcagtgtt

SEQ ID NO: 162670 - DNA, 25 bp, Canis familiaris
ggcagtccctatggtggtggttatg

SEQ ID NO: 162671 - DNA, 25 bp, Canis familiaris
ggcttccagtacgggtgtgttgtcc

SEQ ID NO: 162672 - DNA, 25 bp, Canis familiaris
ggcaccaagcggcgggtgttcatca

SEQ ID NO: 162673 - DNA, 25 bp, Canis familiaris
ggcacctaggtgtgctgtggtgtcc

SEQ ID NO: 162674 - DNA, 25 bp, Canis familiaris
ggcatgccgagtgctttgtgtgtgt

SEQ ID NO: 162675 - DNA, 25 bp, Canis familiaris
ggcacctggtttcatgttgtgtgtg

SEQ ID NO: 162676 - DNA, 25 bp, Canis familiaris
ggcacctgactggcttagtcggtag

SEQ ID NO: 162677 - DNA, 25 bp, Canis familiaris
ggcacctggctggttcagtgaagtg

SEQ ID NO: 162678 - DNA, 25 bp, Canis familiaris
ggcaccaggccaggttggccagtgt

SEQ ID NO: 162679 - DNA, 25 bp, Canis familiaris
ggcacgcaggtcatgtaggcgcttg

SEQ ID NO: 162680 - DNA, 25 bp, Canis familiaris
ggcacgaggtcattttatctcactg

SEQ ID NO: 162681 - DNA, 25 bp, Canis familiaris
ggcatcagggatttttaaccgttat

SEQ ID NO: 162682 - DNA, 25 bp, Canis familiaris
ggcagagcgtgtttttacgggtatt

SEQ ID NO: 162683 - DNA, 25 bp, Canis familiaris
ggcagaggatatttttcatagggaa

SEQ ID NO: 162684 - DNA, 25 bp, Canis familiaris
ggcagaagcatctgtttcttcggga

SEQ ID NO: 162685 - DNA, 25 bp, Canis familiaris
ggcagtgagcatgttttcttgcagc

SEQ ID NO: 162686 - DNA, 25 bp, Canis familiaris
ggcagtcagcgcttctgtttgaatg

SEQ ID NO: 162687 - DNA, 25 bp, Canis familiaris
ggcagtgatcacttccgatggaagg

SEQ ID NO: 162688 - DNA, 25 bp, Canis familiaris
ggcagttgccagtgctgaggctaga

SEQ ID NO: 162689 - DNA, 25 bp, Canis familiaris
ggcatatatcaagagcatacgcatg

SEQ ID NO: 162690 - DNA, 25 bp, Canis familiaris
ggcatatgcccagtacatgacctta

SEQ ID NO: 162691 - DNA, 25 bp, Canis familiaris
ggcatgctgccaaaaaaccttcaca

SEQ ID NO: 162692 - DNA, 25 bp, Canis familiaris
ggcagccctcaagaactgctgagaa

SEQ ID NO: 162693 - DNA, 25 bp, Canis familiaris
ggcagccccacaggaactgataact

SEQ ID NO: 162694 - DNA, 25 bp, Canis familiaris
ggcacctccaacctaataagacttc

SEQ ID NO: 162695 - DNA, 25 bp, Canis familiaris
ggccccccaaatttaagcagcggca

SEQ ID NO: 162696 - DNA, 25 bp, Canis familiaris
ggccccctaaagctcagaacaagca

SEQ ID NO: 162697 - DNA, 25 bp, Canis familiaris
ggcctggcctaatattggaccaaga

SEQ ID NO: 162698 - DNA, 25 bp, Canis familiaris
ggcatattcccatacattttccaaa

SEQ ID NO: 162699 - DNA, 25 bp, Canis familiaris
ggcatagtagtatcacatttttgtg

SEQ ID NO: 162700 - DNA, 25 bp, Canis familiaris
ggcaggaagttgtgagtatattgtg

SEQ ID NO: 162701 - DNA, 25 bp, Canis familiaris
ggcagcgtggctatagaatgttctc

SEQ ID NO: 162702 - DNA, 25 bp, Canis familiaris
ggcacctggcaaaaatctatgccat

SEQ ID NO: 162703 - DNA, 25 bp, Canis familiaris
ggcagcctgaaaaagcagtatctgg

SEQ ID NO: 162704 - DNA, 25 bp, Canis familiaris
ggcagcactagaaccacatgctctc

SEQ ID NO: 162705 - DNA, 25 bp, Canis familiaris
ggcagcatgaacagctatagctcag

SEQ ID NO: 162706 - DNA, 25 bp, Canis familiaris
ggcagctggagcagctccagtgcct

SEQ ID NO: 162707 - DNA, 25 bp, Canis familiaris
ggcagcaggagcagtgtgcatggcc

SEQ ID NO: 162708 - DNA, 25 bp, Canis familiaris
ggcagatgaagcaggctcagcgccc

SEQ ID NO: 162709 - DNA, 25 bp, Canis familiaris
ggcagatgaatgacagagccccatg

SEQ ID NO: 162710 - DNA, 25 bp, Canis familiaris
ggcagctagagaggacccatatggc

SEQ ID NO: 162711 - DNA, 25 bp, Canis familiaris
ggcagctcagaggcagatagaaaac

SEQ ID NO: 162712 - DNA, 25 bp, Canis familiaris
ggcagtgcagcaaaatcaaagaccc

SEQ ID NO: 162713 - DNA, 25 bp, Canis familiaris
ggcagcatcacaaagaccagaggtt

SEQ ID NO: 162714 - DNA, 25 bp, Canis familiaris
ggcagcacctaagccaaagattgtg

SEQ ID NO: 162715 - DNA, 25 bp, Canis familiaris
ggcagccctggagccaagaactggc

SEQ ID NO: 162716 - DNA, 25 bp, Canis familiaris
ggcagcccagtgaaccaggtaaaca

SEQ ID NO: 162717 - DNA, 25 bp, Canis familiaris
ggcagctacaggaaccaagccaacc

SEQ ID NO: 162718 - DNA, 25 bp, Canis familiaris
ggcaggacgagcagctacagaaaac

SEQ ID NO: 162719 - DNA, 25 bp, Canis familiaris
ggcaggggatcattcccaaagcaac

SEQ ID NO: 162720 - DNA, 25 bp, Canis familiaris
ggcttgtggatctagcactccaatc

SEQ ID NO: 162721 - DNA, 25 bp, Canis familiaris
ggcagtggaggcagcaccaacatcc

SEQ ID NO: 162722 - DNA, 25 bp, Canis familiaris
ggcaggaagtcatgggcagaatgcc

SEQ ID NO: 162723 - DNA, 25 bp, Canis familiaris
ggcataatagtctctagatccatcc

SEQ ID NO: 162724 - DNA, 25 bp, Canis familiaris
ggcatacttggcacaagacttgccc

SEQ ID NO: 162725 - DNA, 25 bp, Canis familiaris
ggcaccttggcaaaatgggcctcca

SEQ ID NO: 162726 - DNA, 25 bp, Canis familiaris
ggcataccaggacggagaggcccca

SEQ ID NO: 162727 - DNA, 25 bp, Canis familiaris
ggcagacctggccagcaagagagcc

SEQ ID NO: 162728 - DNA, 25 bp, Canis familiaris
ggcatgatcttggagacccaggatc

SEQ ID NO: 162729 - DNA, 25 bp, Canis familiaris
ggcatgttcatgaagccaggaactc

SEQ ID NO: 162730 - DNA, 25 bp, Canis familiaris
ggcatcagcatatatccagagaccc

SEQ ID NO: 162731 - DNA, 25 bp, Canis familiaris
ggcatgcacgctgacacatagacac

SEQ ID NO: 162732 - DNA, 25 bp, Canis familiaris
ggcagcggctcaagccagagatcca

SEQ ID NO: 162733 - DNA, 25 bp, Canis familiaris
ggcagcagctccagcaatggtgcca

SEQ ID NO: 162734 - DNA, 25 bp, Canis familiaris
ggcaggcagcctcgagagcagctgc

SEQ ID NO: 162735 - DNA, 25 bp, Canis familiaris
ggcagtcagccaatgatgagacagc

SEQ ID NO: 162736 - DNA, 25 bp, Canis familiaris
ggcagccgcacactatgagcaacat

SEQ ID NO: 162737 - DNA, 25 bp, Canis familiaris
ggcagctcccagactggagatgctc

SEQ ID NO: 162738 - DNA, 25 bp, Canis familiaris
ggcagctcccacattagtggcataa

SEQ ID NO: 162739 - DNA, 25 bp, Canis familiaris
ggcagatccccttgtgagaagacag

SEQ ID NO: 162740 - DNA, 25 bp, Canis familiaris
ggcagctcccgtttatgtaaagcgc

SEQ ID NO: 162741 - DNA, 25 bp, Canis familiaris
ggcagcccttcttttggaaggcctc

SEQ ID NO: 162742 - DNA, 25 bp, Canis familiaris
ggctccctttggtttggagtctgcc

SEQ ID NO: 162743 - DNA, 25 bp, Canis familiaris
ggctccccaaggcatcatgggtggc

SEQ ID NO: 162744 - DNA, 25 bp, Canis familiaris
ggctgcagaccaggtattgcgaggt

SEQ ID NO: 162745 - DNA, 25 bp, Canis familiaris
ggcagaaacacagttcagcagtggt

SEQ ID NO: 162746 - DNA, 25 bp, Canis familiaris
tggccagaacactttaactgggttt

SEQ ID NO: 162747 - DNA, 25 bp, Canis familiaris
ggcatggaaatttaaagcaggttct

SEQ ID NO: 162748 - DNA, 25 bp, Canis familiaris
ggcaggcagtttggagattgtggtt

SEQ ID NO: 162749 - DNA, 25 bp, Canis familiaris
ggcagcggttttaatggaggctttg

SEQ ID NO: 162750 - DNA, 25 bp, Canis familiaris
ggcttcgttttgagtgacactaaga

SEQ ID NO: 162751 - DNA, 25 bp, Canis familiaris
ggcttgttttgttgggaaattaatg

SEQ ID NO: 162752 - DNA, 25 bp, Canis familiaris
ggcatggtttcgtcggagggtttga

SEQ ID NO: 162753 - DNA, 25 bp, Canis familiaris
ggcatcgggtattgggggtgtttgt

SEQ ID NO: 162754 - DNA, 25 bp, Canis familiaris
ggctcaagtgttacgttgccttttg

SEQ ID NO: 162755 - DNA, 25 bp, Canis familiaris
ggctccagcttgttacgtggattat

SEQ ID NO: 162756 - DNA, 25 bp, Canis familiaris
ggcaccaccatgtaccctggcattg

SEQ ID NO: 162757 - DNA, 25 bp, Canis familiaris
ggcattaagcaatcccttctctgcc

SEQ ID NO: 162758 - DNA, 25 bp, Canis familiaris
ggcagtaatatatccaatccatgca

SEQ ID NO: 162759 - DNA, 25 bp, Canis familiaris
ggcagctaattacccaatgaatcat

SEQ ID NO: 162760 - DNA, 25 bp, Canis familiaris
ggcagctggatttcccaggatttct

SEQ ID NO: 162761 - DNA, 25 bp, Canis familiaris
ggcagcgtgatttccaagaatttct

SEQ ID NO: 162762 - DNA, 25 bp, Canis familiaris
ggcagccggtaccagcagagaaatt

SEQ ID NO: 162763 - DNA, 25 bp, Canis familiaris
ggcagcagctggtggccaggaacac

SEQ ID NO: 162764 - DNA, 25 bp, Canis familiaris
ggcatgtggctgtgggaggaacagg

SEQ ID NO: 162765 - DNA, 25 bp, Canis familiaris
ggcatcttggtggttctttacagga

SEQ ID NO: 162766 - DNA, 25 bp, Canis familiaris
ggcttgttggggatttaagtgagaa

SEQ ID NO: 162767 - DNA, 25 bp, Canis familiaris
ggcagtgttggcagcattttatagt

SEQ ID NO: 162768 - DNA, 25 bp, Canis familiaris
ggcagctgcttctatagttttgtca

SEQ ID NO: 162769 - DNA, 25 bp, Canis familiaris
ggcagagctttttgatttgctgctc

SEQ ID NO: 162770 - DNA, 25 bp, Canis familiaris
ggcataatctgtgtggagggcttca

SEQ ID NO: 162771 - DNA, 25 bp, Canis familiaris
ggcataatctgggccacagagggat

SEQ ID NO: 162772 - DNA, 25 bp, Canis familiaris
ggcagctagtagggacagcaggggc

SEQ ID NO: 162773 - DNA, 25 bp, Canis familiaris
ggcagcttggcggtgaccaagaatg

SEQ ID NO: 162774 - DNA, 25 bp, Canis familiaris
ggctgatatcccatacccaaatggg

SEQ ID NO: 162775 - DNA, 25 bp, Canis familiaris
ggcatattcccatttcttaagtgga

SEQ ID NO: 162776 - DNA, 25 bp, Canis familiaris
ggcagttctgccttccaaaggaaga

SEQ ID NO: 162777 - DNA, 25 bp, Canis familiaris
ggcattcttgactgctcaaaccaaa

SEQ ID NO: 162778 - DNA, 25 bp, Canis familiaris
ggcagctctctttagtcaataccaa

SEQ ID NO: 162779 - DNA, 25 bp, Canis familiaris
ggcagttcttcatgtccgacaagcc

SEQ ID NO: 162780 - DNA, 25 bp, Canis familiaris
ggcagtctgctttttacgagttggc

SEQ ID NO: 162781 - DNA, 25 bp, Canis familiaris
ggcagtgctggtgtccaggactgtg

SEQ ID NO: 162782 - DNA, 25 bp, Canis familiaris
ggcagtctggctatgagcaggctat

SEQ ID NO: 162783 - DNA, 25 bp, Canis familiaris
ggcagattcttggcaacaggcttca

SEQ ID NO: 162784 - DNA, 25 bp, Canis familiaris
ggcagctgtcttggataagcgtggg

SEQ ID NO: 162785 - DNA, 25 bp, Canis familiaris
ggcagctggctgggaacatgtgtag

SEQ ID NO: 162786 - DNA, 25 bp, Canis familiaris
ggcagttgctgcttagagtggtcag

SEQ ID NO: 162787 - DNA, 25 bp, Canis familiaris
ggcatcttgatgctgaagggaccac

SEQ ID NO: 162788 - DNA, 25 bp, Canis familiaris
ggcatcttgatgctgaagggaccac

SEQ ID NO: 162789 - DNA, 25 bp, Canis familiaris
tggtttgatttgtaggtgttcccgg

SEQ ID NO: 162790 - DNA, 25 bp, Canis familiaris
ggctgtggattttacttctttccct

SEQ ID NO: 162791 - DNA, 25 bp, Canis familiaris
ggcattggttctttttgttgtcgtt

SEQ ID NO: 162792 - DNA, 25 bp, Canis familiaris
ggcatggctttatctgttttttttt

SEQ ID NO: 162793 - DNA, 25 bp, Canis familiaris
ggcatggatgttgacttgttttctc

SEQ ID NO: 162794 - DNA, 25 bp, Canis familiaris
ggcagcgattctgacagtgaggttg

SEQ ID NO: 162795 - DNA, 25 bp, Canis familiaris
ggcagtgacgtctacaggagttcga

SEQ ID NO: 162796 - DNA, 25 bp, Canis familiaris
ggcaggcaccatgagaggagtccca

SEQ ID NO: 162797 - DNA, 25 bp, Canis familiaris
ggcaggccactcaagatgggctact

SEQ ID NO: 162798 - DNA, 25 bp, Canis familiaris
ggcaggtcccaggagagctggcagc

SEQ ID NO: 162799 - DNA, 25 bp, Canis familiaris
ggcaggatttactttgctggcactg

SEQ ID NO: 162800 - DNA, 25 bp, Canis familiaris
ggcagaaatctgtcttgtctggcct

SEQ ID NO: 162801 - DNA, 25 bp, Canis familiaris
ggcagaagatctcccttcaggtgcc

SEQ ID NO: 162802 - DNA, 25 bp, Canis familiaris
ggcatgtaacatccctgtaagagca

SEQ ID NO: 162803 - DNA, 25 bp, Canis familiaris
ggcattcacagccagctttgttaat

SEQ ID NO: 162804 - DNA, 25 bp, Canis familiaris
ggcatctccatggtgttcggattag

SEQ ID NO: 162805 - DNA, 25 bp, Canis familiaris
ggcagcatctaggctttcagagtca

SEQ ID NO: 162806 - DNA, 25 bp, Canis familiaris
ggcatgaccatcgtctacaagagca

SEQ ID NO: 162807 - DNA, 25 bp, Canis familiaris
ggcatggctacagctgtggcagaca

SEQ ID NO: 162808 - DNA, 25 bp, Canis familiaris
ggcatggagatggccagctgcagcc

SEQ ID NO: 162809 - DNA, 25 bp, Canis familiaris
ggcagtgatgatggcctggagcaca

SEQ ID NO: 162810 - DNA, 25 bp, Canis familiaris
ggcatcttcctcggaagccaggaca

SEQ ID NO: 162811 - DNA, 25 bp, Canis familiaris
ggcattcctgcctgaagccaaagcc

SEQ ID NO: 162812 - DNA, 25 bp, Canis familiaris
ggcttctctccatatacctaggagc

SEQ ID NO: 162813 - DNA, 25 bp, Canis familiaris
ggctctgaacctgtccgtaagagac

SEQ ID NO: 162814 - DNA, 25 bp, Canis familiaris
tggctgggtcctgtgcccagaagga

SEQ ID NO: 162815 - DNA, 25 bp, Canis familiaris
ggcttggctccaagttcaaggaggt

SEQ ID NO: 162816 - DNA, 25 bp, Canis familiaris
ggctaggcgtcagaatcactgggag

SEQ ID NO: 162817 - DNA, 25 bp, Canis familiaris
ggctgaaagtattaatgaaggcgac

SEQ ID NO: 162818 - DNA, 25 bp, Canis familiaris
ggctttagtattaatgtgagacaac

SEQ ID NO: 162819 - DNA, 25 bp, Canis familiaris
ggcttgtagtctttcctatgtcata

SEQ ID NO: 162820 - DNA, 25 bp, Canis familiaris
ggcatggaagtttctgacatttgaa

SEQ ID NO: 162821 - DNA, 25 bp, Canis familiaris
ggcagacaggttttcacttaatgat

SEQ ID NO: 162822 - DNA, 25 bp, Canis familiaris
ggcagacagtttttcacttaatgat

SEQ ID NO: 162823 - DNA, 25 bp, Canis familiaris
ggcagactcttccttgaggtcaagg

SEQ ID NO: 162824 - DNA, 25 bp, Canis familiaris
ggcagcttttccattcgaaagtggt

SEQ ID NO: 162825 - DNA, 25 bp, Canis familiaris
ggcagcctttatattcgcattaatt

SEQ ID NO: 162826 - DNA, 25 bp, Canis familiaris
ggcagtcttactttacgtgaacatt

SEQ ID NO: 162827 - DNA, 25 bp, Canis familiaris
ggcttttactacccaaatacattat

SEQ ID NO: 162828 - DNA, 25 bp, Canis familiaris
ggcttccaaatatgccaaaagttaa

SEQ ID NO: 162829 - DNA, 25 bp, Canis familiaris
ggcttcccgtcatctggaaatgtct

SEQ ID NO: 162830 - DNA, 25 bp, Canis familiaris
ggctacccgaaaccaaattgcttca

SEQ ID NO: 162831 - DNA, 25 bp, Canis familiaris
ggcttccccaactcagagttttgca

SEQ ID NO: 162832 - DNA, 25 bp, Canis familiaris
ggctgcccgaaatgacagtttttca

SEQ ID NO: 162833 - DNA, 25 bp, Canis familiaris
ggctggttcaaatgtaggtttctgg

SEQ ID NO: 162834 - DNA, 25 bp, Canis familiaris
ggctatgtccaaaactgggtcttcg

SEQ ID NO: 162835 - DNA, 25 bp, Canis familiaris
ggctttctaaattctttgctttcca

SEQ ID NO: 162836 - DNA, 25 bp, Canis familiaris
ggcattaggtacttttagtttccag

SEQ ID NO: 162837 - DNA, 25 bp, Canis familiaris
ggctgtaactactttataactaaca

SEQ ID NO: 162838 - DNA, 25 bp, Canis familiaris
ggcagtaaactactttcctgtcaaa

SEQ ID NO: 162839 - DNA, 25 bp, Canis familiaris
ggcagttaaccgttgcgctttcaaa

SEQ ID NO: 162840 - DNA, 25 bp, Canis familiaris
tacgttaagggtcgggttcagatag

SEQ ID NO: 162841 - DNA, 25 bp, Canis familiaris
ggcttaaaggggctggtgtcgatca

SEQ ID NO: 162842 - DNA, 25 bp, Canis familiaris
ggctatcgagagtgccattggtggc

SEQ ID NO: 162843 - DNA, 25 bp, Canis familiaris
ggcattcgtggctctcagggtagcc

SEQ ID NO: 162844 - DNA, 25 bp, Canis familiaris
ggcttcgtagcaactactgagctct

SEQ ID NO: 162845 - DNA, 25 bp, Canis familiaris
ggcatccgcctggacaacgcctctg

SEQ ID NO: 162846 - DNA, 25 bp, Canis familiaris
ggctcacgcctgtaatcccagcact

SEQ ID NO: 162847 - DNA, 25 bp, Canis familiaris
ggcagcagggcatatacccatgctt

SEQ ID NO: 162848 - DNA, 25 bp, Canis familiaris
ggcatggggcacatatgcccagcaa

SEQ ID NO: 162849 - DNA, 25 bp, Canis familiaris
ggcatgggagtcattgtccacatca

SEQ ID NO: 162850 - DNA, 25 bp, Canis familiaris
ggcatgggctatactctttccatat

SEQ ID NO: 162851 - DNA, 25 bp, Canis familiaris
ggcatggagaataacttgctggatg

SEQ ID NO: 162852 - DNA, 25 bp, Canis familiaris
ggcatggcagagtatctctttgaca

SEQ ID NO: 162853 - DNA, 25 bp, Canis familiaris
ggcatggcagagtatctctttgaca

SEQ ID NO: 162854 - DNA, 25 bp, Canis familiaris
ggcatcagcagtcacttttgttttg

SEQ ID NO: 162855 - DNA, 25 bp, Canis familiaris
ggcatgaagatttttgtgttttgtt

SEQ ID NO: 162856 - DNA, 25 bp, Canis familiaris
ggcagaagtgcccttggttgtgtgc

SEQ ID NO: 162857 - DNA, 25 bp, Canis familiaris
ggcagtagtgggtcttggtgtgtgt

SEQ ID NO: 162858 - DNA, 25 bp, Canis familiaris
ggcagctgagggcagtgcagaaggt

SEQ ID NO: 162859 - DNA, 25 bp, Canis familiaris
ggcagggaggcatgcaggtactgtg

SEQ ID NO: 162860 - DNA, 25 bp, Canis familiaris
ggcagaggcaaaccaggtacttgtc

SEQ ID NO: 162861 - DNA, 25 bp, Canis familiaris
ggcagggatagacaggaagggtgga

SEQ ID NO: 162862 - DNA, 25 bp, Canis familiaris
ggcaggagataacacgagaccggcg

SEQ ID NO: 162863 - DNA, 25 bp, Canis familiaris
ggctaaatacatctataaccgggag

SEQ ID NO: 162864 - DNA, 25 bp, Canis familiaris
ggctaaatacatctataaccgggag

SEQ ID NO: 162865 - DNA, 25 bp, Canis familiaris
ggctacaaagtgccaacattgccgg

SEQ ID NO: 162866 - DNA, 25 bp, Canis familiaris
ggctacaagatcaccaattccatcg

SEQ ID NO: 162867 - DNA, 25 bp, Canis familiaris
ggctaaccatggatcttcttatagg

SEQ ID NO: 162868 - DNA, 25 bp, Canis familiaris
ggcattggctttatcctctttagag

SEQ ID NO: 162869 - DNA, 25 bp, Canis familiaris
ggctttgttttttccttgagggcag

SEQ ID NO: 162870 - DNA, 25 bp, Canis familiaris
ggcggagtgtttgtcaattaggaga

SEQ ID NO: 162871 - DNA, 25 bp, Canis familiaris
ggcaggaggcacatcaataaagagg

SEQ ID NO: 162872 - DNA, 25 bp, Canis familiaris
ggcgtagccaagacaacaccagagc

SEQ ID NO: 162873 - DNA, 25 bp, Canis familiaris
ggcagacactgctgaatttccagag

SEQ ID NO: 162874 - DNA, 25 bp, Canis familiaris
ggcagagcatcgtataactttcaag

SEQ ID NO: 162875 - DNA, 25 bp, Canis familiaris
ggcagacacagagacctggatcaga

SEQ ID NO: 162876 - DNA, 25 bp, Canis familiaris
ggctggaagtctgtccgcaaggaaa

SEQ ID NO: 162877 - DNA, 25 bp, Canis familiaris
ggcttagggtgttcccaacgtgaag

SEQ ID NO: 162878 - DNA, 25 bp, Canis familiaris
ggcattcagttttacctaacaaata

SEQ ID NO: 162879 - DNA, 25 bp, Canis familiaris
ggcttagccttctccttaatagaaa

SEQ ID NO: 162880 - DNA, 25 bp, Canis familiaris
ggcctatttatcctgccttaaaaag

SEQ ID NO: 162881 - DNA, 25 bp, Canis familiaris
ggcagctctattaccaggttttaaa

SEQ ID NO: 162882 - DNA, 25 bp, Canis familiaris
ggcagacatttagggtgtttccaaa

SEQ ID NO: 162883 - DNA, 25 bp, Canis familiaris
ggcagagattgcgctggtgtttcta

SEQ ID NO: 162884 - DNA, 25 bp, Canis familiaris
ggcaggcagtgtgctgttggtttca

SEQ ID NO: 162885 - DNA, 25 bp, Canis familiaris
ggcagacagtgatgttcatgttctt

SEQ ID NO: 162886 - DNA, 25 bp, Canis familiaris
ggcagagctttcctaatttattcac

SEQ ID NO: 162887 - DNA, 25 bp, Canis familiaris
ggcaggcttcatttttcttgattga

SEQ ID NO: 162888 - DNA, 25 bp, Canis familiaris
ggcaggcccatgtagcttggtaaga

SEQ ID NO: 162889 - DNA, 25 bp, Canis familiaris
ggcagcagcgcatttgacttgagaa

SEQ ID NO: 162890 - DNA, 25 bp, Canis familiaris
ggcagcatcgcagtcgtctatagac

SEQ ID NO: 162891 - DNA, 25 bp, Canis familiaris
ggcagagccagtcttcatcatgcct

SEQ ID NO: 162892 - DNA, 25 bp, Canis familiaris
ggcagagacactctgtcagcagcct

SEQ ID NO: 162893 - DNA, 25 bp, Canis familiaris
ggcaggaactgtgccaagctgctgc

SEQ ID NO: 162894 - DNA, 25 bp, Canis familiaris
ggcagcaaactggatggaactatgc

SEQ ID NO: 162895 - DNA, 25 bp, Canis familiaris
ggcagtaactgctataagagccact

SEQ ID NO: 162896 - DNA, 25 bp, Canis familiaris
ggcagtagcacagaaagatcacaca

SEQ ID NO: 162897 - DNA, 25 bp, Canis familiaris
ggcagtacacactaagaattgagtt

SEQ ID NO: 162898 - DNA, 25 bp, Canis familiaris
ggcaggccagattatatgtttgttt

SEQ ID NO: 162899 - DNA, 25 bp, Canis familiaris
ggcaggctagtggtattatgtatat

SEQ ID NO: 162900 - DNA, 25 bp, Canis familiaris
ggcaggcaggctagtggtattatgt

SEQ ID NO: 162901 - DNA, 25 bp, Canis familiaris
ggcagtagtgcaggggatattgagg

SEQ ID NO: 162902 - DNA, 25 bp, Canis familiaris
ggcatgttgtgagaataaatgaggt

SEQ ID NO: 162903 - DNA, 25 bp, Canis familiaris
ggcagagtgtagtacttcattcagt

SEQ ID NO: 162904 - DNA, 25 bp, Canis familiaris
ggcagagctgtaaactagcctggct

SEQ ID NO: 162905 - DNA, 25 bp, Canis familiaris
ggcaggctggaaagcatggcacacg

SEQ ID NO: 162906 - DNA, 25 bp, Canis familiaris
ggcatccaggaaagtgtcacagagc

SEQ ID NO: 162907 - DNA, 25 bp, Canis familiaris
ggcatcgtggaggtcctcactgagg

SEQ ID NO: 162908 - DNA, 25 bp, Canis familiaris
ggctttggcagcctcctaatggagg

SEQ ID NO: 162909 - DNA, 25 bp, Canis familiaris
ggcattgtagacctactgaagccag

SEQ ID NO: 162910 - DNA, 25 bp, Canis familiaris
ggcatttgcagggctcactgctgac

SEQ ID NO: 162911 - DNA, 25 bp, Canis familiaris
ggcattgtgcatgccatcttccatc

SEQ ID NO: 162912 - DNA, 25 bp, Canis familiaris
ggcattcgcaaatttcccattgttt

SEQ ID NO: 162913 - DNA, 25 bp, Canis familiaris
ggcggtgaaattgccctgtggtctt

SEQ ID NO: 162914 - DNA, 25 bp, Canis familiaris
ggcagggagagttgcccctgggact

SEQ ID NO: 162915 - DNA, 25 bp, Canis familiaris
ggcagaggaatgttgcctcctggat

SEQ ID NO: 162916 - DNA, 25 bp, Canis familiaris
ggcaggtgcaagcatcctgcctgcc

SEQ ID NO: 162917 - DNA, 25 bp, Canis familiaris
ggcagagtcaagcatgttgggcctc

SEQ ID NO: 162918 - DNA, 25 bp, Canis familiaris
ggcagagcccagcactgagagggtc

SEQ ID NO: 162919 - DNA, 25 bp, Canis familiaris
ggcagagaagggcctgaggggcact

SEQ ID NO: 162920 - DNA, 25 bp, Canis familiaris
ggcagtaacagtacttgggagcctg

SEQ ID NO: 162921 - DNA, 25 bp, Canis familiaris
ggcagtacattttttggtcacctca

SEQ ID NO: 162922 - DNA, 25 bp, Canis familiaris
ggcaggaatattcttggtcacctca

SEQ ID NO: 162923 - DNA, 25 bp, Canis familiaris
ggcaggtcaagtctggcactatctt

SEQ ID NO: 162924 - DNA, 25 bp, Canis familiaris
ggcaggtaaatgtgtgatctcagaa

SEQ ID NO: 162925 - DNA, 25 bp, Canis familiaris
tggcaagaaaatcgttacaactact

SEQ ID NO: 162926 - DNA, 25 bp, Canis familiaris
tggaatgagtccactttaaatcctt

SEQ ID NO: 162927 - DNA, 25 bp, Canis familiaris
tccagattccccatttttatcgtta

SEQ ID NO: 162928 - DNA, 25 bp, Canis familiaris
taccaaaaccgatattgtacgttca

SEQ ID NO: 162929 - DNA, 25 bp, Canis familiaris
ggcccaaatccctcttggaatgttc

SEQ ID NO: 162930 - DNA, 25 bp, Canis familiaris
ggctcgaaaccgttctaagactgct

SEQ ID NO: 162931 - DNA, 25 bp, Canis familiaris
ggcatctaccctttttagaaactag

SEQ ID NO: 162932 - DNA, 25 bp, Canis familiaris
ggcatggagccctactttaaaaata

SEQ ID NO: 162933 - DNA, 25 bp, Canis familiaris
ggcaggggacgagtttatcacgaaa

SEQ ID NO: 162934 - DNA, 25 bp, Canis familiaris
ggcatggggacggatgttttctcat

SEQ ID NO: 162935 - DNA, 25 bp, Canis familiaris
ggctacgtgaaggagtgtttcagct

SEQ ID NO: 162936 - DNA, 25 bp, Canis familiaris
ggctactgttactagtgctgttaag

SEQ ID NO: 162937 - DNA, 25 bp, Canis familiaris
ggcttctgttcatttcgtttaatta

SEQ ID NO: 162938 - DNA, 25 bp, Canis familiaris
ggctttctgctgttttacctaaata

SEQ ID NO: 162939 - DNA, 25 bp, Canis familiaris
ggcttttatgttagctcctttcaaa

SEQ ID NO: 162940 - DNA, 25 bp, Canis familiaris
ggcctttactggatccctaaagcat

SEQ ID NO: 162941 - DNA, 25 bp, Canis familiaris
ggcttttacgtgtgtgcctacggcc

SEQ ID NO: 162942 - DNA, 25 bp, Canis familiaris
ggctattgtaaggggcccagagccc

SEQ ID NO: 162943 - DNA, 25 bp, Canis familiaris
ggcttataaagcagacttcaggctc

SEQ ID NO: 162944 - DNA, 25 bp, Canis familiaris
ggcagtgtaattccaggcttcacgc

SEQ ID NO: 162945 - DNA, 25 bp, Canis familiaris
ggcagattacctccagatcctgcca

SEQ ID NO: 162946 - DNA, 25 bp, Canis familiaris
ggcagttatttgcaatcgccaccag

SEQ ID NO: 162947 - DNA, 25 bp, Canis familiaris
ggcagactattatatatctccacca

SEQ ID NO: 162948 - DNA, 25 bp, Canis familiaris
ggcagtcatatttcatgatctccaa

SEQ ID NO: 162949 - DNA, 25 bp, Canis familiaris
ggcagtgatttttgtttcaaaactt

SEQ ID NO: 162950 - DNA, 25 bp, Canis familiaris
ggcagtgatttttgctttcacaaac

SEQ ID NO: 162951 - DNA, 25 bp, Canis familiaris
ggcagttatatttgcagttcccaca

SEQ ID NO: 162952 - DNA, 25 bp, Canis familiaris
ggcggttgaaatattcccacatgtg

SEQ ID NO: 162953 - DNA, 25 bp, Canis familiaris
ggctttatgactattacaccctggg

SEQ ID NO: 162954 - DNA, 25 bp, Canis familiaris
ggcttaaaattcatgtcccaggggt

SEQ ID NO: 162955 - DNA, 25 bp, Canis familiaris
ggcttaccaatggcagtgatcccgt

SEQ ID NO: 162956 - DNA, 25 bp, Canis familiaris
ggcagtagaaagaaggtcccagata

SEQ ID NO: 162957 - DNA, 25 bp, Canis familiaris
ggcaggcgacgaaaagtcctatgac

SEQ ID NO: 162958 - DNA, 25 bp, Canis familiaris
ggcggtgaggaatcgtcacccaaca

SEQ ID NO: 162959 - DNA, 25 bp, Canis familiaris
ggcgggaagcacaggtccggaactc

SEQ ID NO: 162960 - DNA, 25 bp, Canis familiaris
ggctggtaaccacgagtatctgaaa

SEQ ID NO: 162961 - DNA, 25 bp, Canis familiaris
ggcttgtccctagagtaatgatgtt

SEQ ID NO: 162962 - DNA, 25 bp, Canis familiaris
ggcatcatgtccgtgaacggcaaga

SEQ ID NO: 162963 - DNA, 25 bp, Canis familiaris
ggcatagttcagggatcgatacaga

SEQ ID NO: 162964 - DNA, 25 bp, Canis familiaris
ggcagagtatctctttgaccagcac

SEQ ID NO: 162965 - DNA, 25 bp, Canis familiaris
ggcagtctacatcatagtgaccgcc

SEQ ID NO: 162966 - DNA, 25 bp, Canis familiaris
ggcagtgttcatgtactggctctcc

SEQ ID NO: 162967 - DNA, 25 bp, Canis familiaris
ggcagtctgttcccacatatgtgcc

SEQ ID NO: 162968 - DNA, 25 bp, Canis familiaris
ggcatgtttgtccacataattggct

SEQ ID NO: 162969 - DNA, 25 bp, Canis familiaris
ggctttttcaccaaatgggcttgca

SEQ ID NO: 162970 - DNA, 25 bp, Canis familiaris
ggcttgaccctcatatcatggggct

SEQ ID NO: 162971 - DNA, 25 bp, Canis familiaris
ggctaagtgcctgtacgggtgtttg

SEQ ID NO: 162972 - DNA, 25 bp, Canis familiaris
ggcttgttctatgtagttccttttg

SEQ ID NO: 162973 - DNA, 25 bp, Canis familiaris
ggcagtttttccattttcatttgtg

SEQ ID NO: 162974 - DNA, 25 bp, Canis familiaris
ggctaattacctgttttttctgatg

SEQ ID NO: 162975 - DNA, 25 bp, Canis familiaris
ggcccagtaagtgctttttttggca

SEQ ID NO: 162976 - DNA, 25 bp, Canis familiaris
ggctacgtaggtgcctagtcctaaa

SEQ ID NO: 162977 - DNA, 25 bp, Canis familiaris
ggctacgttggtcaatagagttagt

SEQ ID NO: 162978 - DNA, 25 bp, Canis familiaris
ggctttttggggctggatggctcag

SEQ ID NO: 162979 - DNA, 25 bp, Canis familiaris
ggcttttaggggcactatggacaga

SEQ ID NO: 162980 - DNA, 25 bp, Canis familiaris
ggcgtttagccttgggtcatgggaa

SEQ ID NO: 162981 - DNA, 25 bp, Canis familiaris
ggctgtacacgagtatcgaaatggg

SEQ ID NO: 162982 - DNA, 25 bp, Canis familiaris
ggcagtgaaggaccatcgaggcggg

SEQ ID NO: 162983 - DNA, 25 bp, Canis familiaris
ggcggcaagtgatcagtgaagccgg

SEQ ID NO: 162984 - DNA, 25 bp, Canis familiaris
ggcttccaggtagctgaaggggcag

SEQ ID NO: 162985 - DNA, 25 bp, Canis familiaris
ggctccgaaggagctcctggaagaa

SEQ ID NO: 162986 - DNA, 25 bp, Canis familiaris
ggccacaagggacttccggcaaaag

SEQ ID NO: 162987 - DNA, 25 bp, Canis familiaris
ggcccagctggaagagccgggaaaa

SEQ ID NO: 162988 - DNA, 25 bp, Canis familiaris
ggcataagttcacggccgaggacct

SEQ ID NO: 162989 - DNA, 25 bp, Canis familiaris
ggccaaattggggccccgatgcctg

SEQ ID NO: 162990 - DNA, 25 bp, Canis familiaris
ggctaatacagacaacccagacctg

SEQ ID NO: 162991 - DNA, 25 bp, Canis familiaris
ggctaatgacactaaaaacttccta

SEQ ID NO: 162992 - DNA, 25 bp, Canis familiaris
ggctaaatccgcagcaaactgccgt

SEQ ID NO: 162993 - DNA, 25 bp, Canis familiaris
ggctaaatcctcccaggttgagcaa

SEQ ID NO: 162994 - DNA, 25 bp, Canis familiaris
ggcttaaatgccaccttctgagaag

SEQ ID NO: 162995 - DNA, 25 bp, Canis familiaris
ggcttcaccaaaccactttggggag

SEQ ID NO: 162996 - DNA, 25 bp, Canis familiaris
ggctctcccaaagccacttaggagg

SEQ ID NO: 162997 - DNA, 25 bp, Canis familiaris
ggctcttccacaaaccaatttgtcg

SEQ ID NO: 162998 - DNA, 25 bp, Canis familiaris
ggctgtattaatcacgcgatgttga

SEQ ID NO: 162999 - DNA, 25 bp, Canis familiaris
ggcttaataattaggccagggcttt

SEQ ID NO: 163000 - DNA, 25 bp, Canis familiaris
ggcattagtttcaggcgaggcagct

SEQ ID NO: 163001 - DNA, 25 bp, Canis familiaris
ggcttggttggaagaaaggagcaag

SEQ ID NO: 163002 - DNA, 25 bp, Canis familiaris
ggcttggtttggccttagagagcaa

SEQ ID NO: 163003 - DNA, 25 bp, Canis familiaris
ggctctggtatccggtccggaattc

SEQ ID NO: 163004 - DNA, 25 bp, Canis familiaris
ggctttgaccgtgtccggaatgctg

SEQ ID NO: 163005 - DNA, 25 bp, Canis familiaris
ggctttcccgtccatgatcggacga

SEQ ID NO: 163006 - DNA, 25 bp, Canis familiaris
ggcttccccgtggattcacaaagac

SEQ ID NO: 163007 - DNA, 25 bp, Canis familiaris
ggcttccctccatgtaacagaaggt

SEQ ID NO: 163008 - DNA, 25 bp, Canis familiaris
ggctacctttcatgtccaaaatgtt

SEQ ID NO: 163009 - DNA, 25 bp, Canis familiaris
ggcttgggttcatgatttaggtgtc

SEQ ID NO: 163010 - DNA, 25 bp, Canis familiaris
ggcattgtggttactgtttccagtt

SEQ ID NO: 163011 - DNA, 25 bp, Canis familiaris
ggctttggccttattgtgaactttt

SEQ ID NO: 163012 - DNA, 25 bp, Canis familiaris
ggctttatgtccattttaccactgt

SEQ ID NO: 163013 - DNA, 25 bp, Canis familiaris
ggcttttgtgccataattcttcact

SEQ ID NO: 163014 - DNA, 25 bp, Canis familiaris
ggcattttggccattacttcaattg

SEQ ID NO: 163015 - DNA, 25 bp, Canis familiaris
ggcttagtggtcgagtacctgcctt

SEQ ID NO: 163016 - DNA, 25 bp, Canis familiaris
ggcattctctggaggtttctgccct

SEQ ID NO: 163017 - DNA, 25 bp, Canis familiaris
ggcttcgtgcaggggttttcattgc

SEQ ID NO: 163018 - DNA, 25 bp, Canis familiaris
ggctacactcacgaggtgtcggttt

SEQ ID NO: 163019 - DNA, 25 bp, Canis familiaris
ggctaactgcaacttggacagagtt

SEQ ID NO: 163020 - DNA, 25 bp, Canis familiaris
ggcttaatcgttatagcagcatatt

SEQ ID NO: 163021 - DNA, 25 bp, Canis familiaris
ggctctttctataaatacctattgt

SEQ ID NO: 163022 - DNA, 25 bp, Canis familiaris
ggcttctattcttaaatcctatttt

SEQ ID NO: 163023 - DNA, 25 bp, Canis familiaris
ggcattgtttggttatttctatttt

SEQ ID NO: 163024 - DNA, 25 bp, Canis familiaris
ggcttgtccagtttttacttattgt

SEQ ID NO: 163025 - DNA, 25 bp, Canis familiaris
ggctctgtccagatttttcttgtac

SEQ ID NO: 163026 - DNA, 25 bp, Canis familiaris
ggcttgggaggattttcgttgaagc

SEQ ID NO: 163027 - DNA, 25 bp, Canis familiaris
ggctttccaggctgttcttggagga

SEQ ID NO: 163028 - DNA, 25 bp, Canis familiaris
ggcatgtacctggctatggtcttgc

SEQ ID NO: 163029 - DNA, 25 bp, Canis familiaris
ggcatgtaatctggctgataatctt

SEQ ID NO: 163030 - DNA, 25 bp, Canis familiaris
ggcatgtcaattatgttaatttcag

SEQ ID NO: 163031 - DNA, 25 bp, Canis familiaris
ggcattgccttttttgacattttct

SEQ ID NO: 163032 - DNA, 25 bp, Canis familiaris
ggcatgtgactactttctacatcct

SEQ ID NO: 163033 - DNA, 25 bp, Canis familiaris
ggcatgcaggtgtctttgctacttc

SEQ ID NO: 163034 - DNA, 25 bp, Canis familiaris
ggctcaggagcagtctgttcctgcc

SEQ ID NO: 163035 - DNA, 25 bp, Canis familiaris
ggcatcactgaggaatgttcttcgc

SEQ ID NO: 163036 - DNA, 25 bp, Canis familiaris
ggcatcatcatgggcactttcaccc

SEQ ID NO: 163037 - DNA, 25 bp, Canis familiaris
ggcagtcagtggcttggcaacatcc

SEQ ID NO: 163038 - DNA, 25 bp, Canis familiaris
ggcgctcgttgaggtgcaatatccg

SEQ ID NO: 163039 - DNA, 25 bp, Canis familiaris
ggcagtttagaggctctatggccga

SEQ ID NO: 163040 - DNA, 25 bp, Canis familiaris
ggcgtattgaaggtttgaccccaga

SEQ ID NO: 163041 - DNA, 25 bp, Canis familiaris
ggcttgggacagtgtataccctaag

SEQ ID NO: 163042 - DNA, 25 bp, Canis familiaris
ggcttcaggacttcttaaactctac

SEQ ID NO: 163043 - DNA, 25 bp, Canis familiaris
ggcattagtgttcataagaccttaa

SEQ ID NO: 163044 - DNA, 25 bp, Canis familiaris
ggctaatgtgctacgtaaacctgat

SEQ ID NO: 163045 - DNA, 25 bp, Canis familiaris
ggcttgattcaacctatatcaccct

SEQ ID NO: 163046 - DNA, 25 bp, Canis familiaris
ggcattgccaaatcttgaaccctgg

SEQ ID NO: 163047 - DNA, 25 bp, Canis familiaris
ggcatccccaaactagagactactt

SEQ ID NO: 163048 - DNA, 25 bp, Canis familiaris
ggctaccctgaacagaactgctgct

SEQ ID NO: 163049 - DNA, 25 bp, Canis familiaris
ggcttcaccgaatacttcagcatgc

SEQ ID NO: 163050 - DNA, 25 bp, Canis familiaris
ggctactccagaccaatttcagcca

SEQ ID NO: 163051 - DNA, 25 bp, Canis familiaris
ggctaaccaccactgattttgcaaa

SEQ ID NO: 163052 - DNA, 25 bp, Canis familiaris
ggctcaactaccatctgactgtggg

SEQ ID NO: 163053 - DNA, 25 bp, Canis familiaris
ggcatacactgagacccacgtgagg

SEQ ID NO: 163054 - DNA, 25 bp, Canis familiaris
ggcataaatgactcccttggatgtg

SEQ ID NO: 163055 - DNA, 25 bp, Canis familiaris
ggctagagaggctgcccttggagct

SEQ ID NO: 163056 - DNA, 25 bp, Canis familiaris
ggcatgaagaaggcctaccaggaca

SEQ ID NO: 163057 - DNA, 25 bp, Canis familiaris
ggcattaaaggcatggccagaaagc

SEQ ID NO: 163058 - DNA, 25 bp, Canis familiaris
ggcatctaaaggcaggcattcaaat

SEQ ID NO: 163059 - DNA, 25 bp, Canis familiaris
ggctcgaggaagcaagcattcaagc

SEQ ID NO: 163060 - DNA, 25 bp, Canis familiaris
ggcatcgtgctaagtaaaataagtc

SEQ ID NO: 163061 - DNA, 25 bp, Canis familiaris
ggcatcgccaacatcagcgcaataa

SEQ ID NO: 163062 - DNA, 25 bp, Canis familiaris
ggcaggccattagaggatataaaga

SEQ ID NO: 163063 - DNA, 25 bp, Canis familiaris
ggcagggtctgtgagcttaaaaatg

SEQ ID NO: 163064 - DNA, 25 bp, Canis familiaris
ggctgggggtagacttaataaagag

SEQ ID NO: 163065 - DNA, 25 bp, Canis familiaris
ggcttggtagactcttaaacacctg

SEQ ID NO: 163066 - DNA, 25 bp, Canis familiaris
ggcttgtgctgagccttttgaggcc

SEQ ID NO: 163067 - DNA, 25 bp, Canis familiaris
ggcagtggtgtggcctaactaggaa

SEQ ID NO: 163068 - DNA, 25 bp, Canis familiaris
ggcaggggtgccaatagcttaggaa

SEQ ID NO: 163069 - DNA, 25 bp, Canis familiaris
ggcatgcgggtcgtgcatagctatg

SEQ ID NO: 163070 - DNA, 25 bp, Canis familiaris
ggcatggatgaggctggagagatag

SEQ ID NO: 163071 - DNA, 25 bp, Canis familiaris
ggcagggcgtgccaggcatgagagg

SEQ ID NO: 163072 - DNA, 25 bp, Canis familiaris
ggcaggggatgcccagaggagtggt

SEQ ID NO: 163073 - DNA, 25 bp, Canis familiaris
ggcaggaggctggacagggcagcgg

SEQ ID NO: 163074 - DNA, 25 bp, Canis familiaris
ggcaggaggatgtggcaggcagagg

SEQ ID NO: 163075 - DNA, 25 bp, Canis familiaris
ggcaggaggtgttggagctggcggc

SEQ ID NO: 163076 - DNA, 25 bp, Canis familiaris
ggcatgccagggcagcgtggggagc

SEQ ID NO: 163077 - DNA, 25 bp, Canis familiaris
ggcatagatgagtgaggggggcagc

SEQ ID NO: 163078 - DNA, 25 bp, Canis familiaris
ggcatgagtgtgtgagagtcccagc

SEQ ID NO: 163079 - DNA, 25 bp, Canis familiaris
ggcatcagctgcaccgaatggtacc

SEQ ID NO: 163080 - DNA, 25 bp, Canis familiaris
ggcatgcctgccatggaagggacgg

SEQ ID NO: 163081 - DNA, 25 bp, Canis familiaris
ggcatgcgcgacaggcatttggact

SEQ ID NO: 163082 - DNA, 25 bp, Canis familiaris
ggcatgggaccgagtttgtctacga

SEQ ID NO: 163083 - DNA, 25 bp, Canis familiaris
ggcagggacactatattgttaaata

SEQ ID NO: 163084 - DNA, 25 bp, Canis familiaris
ggcagggacctggtgatcagcttac

SEQ ID NO: 163085 - DNA, 25 bp, Canis familiaris
ggcaggtctcacattggaggtgacc

SEQ ID NO: 163086 - DNA, 25 bp, Canis familiaris
ggcggcttcaacgtctagaggacaa

SEQ ID NO: 163087 - DNA, 25 bp, Canis familiaris
ggcgtgattccagatccagggatcg

SEQ ID NO: 163088 - DNA, 25 bp, Canis familiaris
ggcagtgtaccagatcatcgtgaga

SEQ ID NO: 163089 - DNA, 25 bp, Canis familiaris
ggcttggatccgcatatgaagagac

SEQ ID NO: 163090 - DNA, 25 bp, Canis familiaris
ggcatgtttccgcataaatcagctc

SEQ ID NO: 163091 - DNA, 25 bp, Canis familiaris
ggctttttcaggacaattcttctgg

SEQ ID NO: 163092 - DNA, 25 bp, Canis familiaris
ggcttttgtctgttggttctgggcc

SEQ ID NO: 163093 - DNA, 25 bp, Canis familiaris
ggcttttttttactgatttctcctg

SEQ ID NO: 163094 - DNA, 25 bp, Canis familiaris
ggctgccttattagtattcgtaccc

SEQ ID NO: 163095 - DNA, 25 bp, Canis familiaris
ggcttgcttttacattgagaatccc

SEQ ID NO: 163096 - DNA, 25 bp, Canis familiaris
ggcttgtagttacgtcgggacatcg

SEQ ID NO: 163097 - DNA, 25 bp, Canis familiaris
ggcttccagttacaccgagactgta

SEQ ID NO: 163098 - DNA, 25 bp, Canis familiaris
ggcatctgtcagatactaggcgaga

SEQ ID NO: 163099 - DNA, 25 bp, Canis familiaris
ggcatgcattctatactgtcagggc

SEQ ID NO: 163100 - DNA, 25 bp, Canis familiaris
ggcatcttctgaagacctgcggggc

SEQ ID NO: 163101 - DNA, 25 bp, Canis familiaris
ggcatgcttgtgatgactctgtaac

SEQ ID NO: 163102 - DNA, 25 bp, Canis familiaris
ggcatgtagatgctggcaagtcaac

SEQ ID NO: 163103 - DNA, 25 bp, Canis familiaris
ggcatgtcttttgcatagcctaaaa

SEQ ID NO: 163104 - DNA, 25 bp, Canis familiaris
ggcattttgctgccaaaccataaaa

SEQ ID NO: 163105 - DNA, 25 bp, Canis familiaris
ggcattttcccaaagcaagcaacca

SEQ ID NO: 163106 - DNA, 25 bp, Canis familiaris
ggctttttcccagtaactagctgca

SEQ ID NO: 163107 - DNA, 25 bp, Canis familiaris
ggctttgtttccattatctgagact

SEQ ID NO: 163108 - DNA, 25 bp, Canis familiaris
ggctttcttgttactttcattacct

SEQ ID NO: 163109 - DNA, 25 bp, Canis familiaris
ggctatttcttaagtttagtgacca

SEQ ID NO: 163110 - DNA, 25 bp, Canis familiaris
ggctattctcaaaaggttagatacc

SEQ ID NO: 163111 - DNA, 25 bp, Canis familiaris
ggcttttcaagcagctttgccaagc

SEQ ID NO: 163112 - DNA, 25 bp, Canis familiaris
ggctttacccatgtgttctaggtta

SEQ ID NO: 163113 - DNA, 25 bp, Canis familiaris
ggctacttcctctggtttattataa

SEQ ID NO: 163114 - DNA, 25 bp, Canis familiaris
ggctactttctcttcgtgagacact

SEQ ID NO: 163115 - DNA, 25 bp, Canis familiaris
ggcatactttatttttatcacaatc

SEQ ID NO: 163116 - DNA, 25 bp, Canis familiaris
ggctattttatgttcctgttacatc

SEQ ID NO: 163117 - DNA, 25 bp, Canis familiaris
ggcttcttctgatatccaggtgaaa

SEQ ID NO: 163118 - DNA, 25 bp, Canis familiaris
ggcatgtttgtatatctggctgtgt

SEQ ID NO: 163119 - DNA, 25 bp, Canis familiaris
ggcatatgcttttaactggcccctt

SEQ ID NO: 163120 - DNA, 25 bp, Canis familiaris
ggcgattacaattactggcccgcgt

SEQ ID NO: 163121 - DNA, 25 bp, Canis familiaris
ggcagtgtgaaattaccccatacct

SEQ ID NO: 163122 - DNA, 25 bp, Canis familiaris
ggcagtgtcaactagagccccagat

SEQ ID NO: 163123 - DNA, 25 bp, Canis familiaris
ggcatgtgtcatggatagtcccctg

SEQ ID NO: 163124 - DNA, 25 bp, Canis familiaris
ggcatgttagtaagtgcgccctcct

SEQ ID NO: 163125 - DNA, 25 bp, Canis familiaris
ggcttgaaggaaggcatccctgccc

SEQ ID NO: 163126 - DNA, 25 bp, Canis familiaris
ggcttgaagggtcaggactctcacc

SEQ ID NO: 163127 - DNA, 25 bp, Canis familiaris
ggcttaagttacagccactcaccct

SEQ ID NO: 163128 - DNA, 25 bp, Canis familiaris
ggctctgatcctaagggaagtacct

SEQ ID NO: 163129 - DNA, 25 bp, Canis familiaris
ggctctgttcttataaaatacctat

SEQ ID NO: 163130 - DNA, 25 bp, Canis familiaris
ggcatctggtttatataactctgac

SEQ ID NO: 163131 - DNA, 25 bp, Canis familiaris
ggcattgttcctatatagcttcccg

SEQ ID NO: 163132 - DNA, 25 bp, Canis familiaris
ggcttgtgctcatttattctttccc

SEQ ID NO: 163133 - DNA, 25 bp, Canis familiaris
ggctttctttttgctttcaattggg

SEQ ID NO: 163134 - DNA, 25 bp, Canis familiaris
ggcatctatttttttgctttccata

SEQ ID NO: 163135 - DNA, 25 bp, Canis familiaris
ggcatcacttttatattttcctcag

SEQ ID NO: 163136 - DNA, 25 bp, Canis familiaris
ggcatcgtcttctaaacgttcgcac

SEQ ID NO: 163137 - DNA, 25 bp, Canis familiaris
ggcatcgtttcaaagaacttctgac

SEQ ID NO: 163138 - DNA, 25 bp, Canis familiaris
ggcatcctgtttgtgatactgttac

SEQ ID NO: 163139 - DNA, 25 bp, Canis familiaris
ggcatctattattggcttatctggt

SEQ ID NO: 163140 - DNA, 25 bp, Canis familiaris
ggcattcattctttctctaataggt

SEQ ID NO: 163141 - DNA, 25 bp, Canis familiaris
ggcattcatgttctctcgacaagag

SEQ ID NO: 163142 - DNA, 25 bp, Canis familiaris
ggcatcctgcttctgtatacataaa

SEQ ID NO: 163143 - DNA, 25 bp, Canis familiaris
ggcatcctggtgtcttaccatatca

SEQ ID NO: 163144 - DNA, 25 bp, Canis familiaris
ggcattcagtattggtagcctggca

SEQ ID NO: 163145 - DNA, 25 bp, Canis familiaris
ggcataagtatgctttctctggaga

SEQ ID NO: 163146 - DNA, 25 bp, Canis familiaris
ggctaaaaatagatcctgtgaacgg

SEQ ID NO: 163147 - DNA, 25 bp, Canis familiaris
ggctatgaaagacccgacttacaag

SEQ ID NO: 163148 - DNA, 25 bp, Canis familiaris
ggctttaatacgtgagcgtgctaaa

SEQ ID NO: 163149 - DNA, 25 bp, Canis familiaris
ggctttaatacgtgagcgtgctaaa

SEQ ID NO: 163150 - DNA, 25 bp, Canis familiaris
ggcgtttatttctgcagggctgaaa

SEQ ID NO: 163151 - DNA, 25 bp, Canis familiaris
ggcgtttcactgactactgtgacct

SEQ ID NO: 163152 - DNA, 25 bp, Canis familiaris
ggcgtgtctcggtttctagacagtg

SEQ ID NO: 163153 - DNA, 25 bp, Canis familiaris
ggcttgtcttggaggctaaatctgc

SEQ ID NO: 163154 - DNA, 25 bp, Canis familiaris
ggctctctctcaacagggtaattgg

SEQ ID NO: 163155 - DNA, 25 bp, Canis familiaris
ggcttttcagagaggctcagatgag

SEQ ID NO: 163156 - DNA, 25 bp, Canis familiaris
ggctgtttcttcgagactcgtgggc

SEQ ID NO: 163157 - DNA, 25 bp, Canis familiaris
ggcatgattcatcctggagaccggg

SEQ ID NO: 163158 - DNA, 25 bp, Canis familiaris
ggctgatctctcaaggactgacatg

SEQ ID NO: 163159 - DNA, 25 bp, Canis familiaris
ggcatgcatgcccaaaactgtattt

SEQ ID NO: 163160 - DNA, 25 bp, Canis familiaris
ggcatatccttgttactgtgatatt

SEQ ID NO: 163161 - DNA, 25 bp, Canis familiaris
ggcaggccattgtcttctgagatga

SEQ ID NO: 163162 - DNA, 25 bp, Canis familiaris
ggcaggctctgtgcaaggagctgca

SEQ ID NO: 163163 - DNA, 25 bp, Canis familiaris
ggcatggcctgtgacagtggtgcag

SEQ ID NO: 163164 - DNA, 25 bp, Canis familiaris
ggcatggccatcataagggggggct

SEQ ID NO: 163165 - DNA, 25 bp, Canis familiaris
ggcatgcccatcataatggggggct

SEQ ID NO: 163166 - DNA, 25 bp, Canis familiaris
ggcttccagcctgatgtggccaggc

SEQ ID NO: 163167 - DNA, 25 bp, Canis familiaris
ggcttcctgaccgaggaggagctgc

SEQ ID NO: 163168 - DNA, 25 bp, Canis familiaris
ggcattcctgccctggtgaagatgc

SEQ ID NO: 163169 - DNA, 25 bp, Canis familiaris
ggcatctttggcatgctcttggatg

SEQ ID NO: 163170 - DNA, 25 bp, Canis familiaris
ggcaggttgatggtgtgtgtcagtc

SEQ ID NO: 163171 - DNA, 25 bp, Canis familiaris
ggcaggaggcggatgcttcagtaga

SEQ ID NO: 163172 - DNA, 25 bp, Canis familiaris
ggcaggagcagcctgccttgcatca

SEQ ID NO: 163173 - DNA, 25 bp, Canis familiaris
ggcatgggcatccgcctggacaacg

SEQ ID NO: 163174 - DNA, 25 bp, Canis familiaris
ggcatgggagctcccaagcagacgc

SEQ ID NO: 163175 - DNA, 25 bp, Canis familiaris
ggcaggacctgcttaatgaagccga

SEQ ID NO: 163176 - DNA, 25 bp, Canis familiaris
ggcaggtgcgctgtagtgactggcc

SEQ ID NO: 163177 - DNA, 25 bp, Canis familiaris
ggcaggatgcccagatgaactgacc

SEQ ID NO: 163178 - DNA, 25 bp, Canis familiaris
ggcattatgcccagtacatggacct

SEQ ID NO: 163179 - DNA, 25 bp, Canis familiaris
ggcattatgcccagtacatgacctt

SEQ ID NO: 163180 - DNA, 25 bp, Canis familiaris
ggcttcagcgccaggcgcgaattcg

SEQ ID NO: 163181 - DNA, 25 bp, Canis familiaris
ggcatctacccaaggcaatgttaag

SEQ ID NO: 163182 - DNA, 25 bp, Canis familiaris
ggctctagctacttggactattcag

SEQ ID NO: 163183 - DNA, 25 bp, Canis familiaris
ggcttacatatacaaatgtgtcaac

SEQ ID NO: 163184 - DNA, 25 bp, Canis familiaris
ggcatttacataatgaatagcttca

SEQ ID NO: 163185 - DNA, 25 bp, Canis familiaris
ggcatggaccataatacatacctac

SEQ ID NO: 163186 - DNA, 25 bp, Canis familiaris
ggctgacgtttatgcgaccaacgac

SEQ ID NO: 163187 - DNA, 25 bp, Canis familiaris
ggcataagttgttcctgaggcagaa

SEQ ID NO: 163188 - DNA, 25 bp, Canis familiaris
ggcttggtggtgccaggagcgaaga

SEQ ID NO: 163189 - DNA, 25 bp, Canis familiaris
ggcattgatgtggagccagctgagg

SEQ ID NO: 163190 - DNA, 25 bp, Canis familiaris
ggcatcttgggctacactgaggacc

SEQ ID NO: 163191 - DNA, 25 bp, Canis familiaris
ggcatgctggagcgagactgagcca

SEQ ID NO: 163192 - DNA, 25 bp, Canis familiaris
ggcatatgcgagcaaagcattctca

SEQ ID NO: 163193 - DNA, 25 bp, Canis familiaris
ggcatgtggtagaaacctctcaagc

SEQ ID NO: 163194 - DNA, 25 bp, Canis familiaris
ggcatttgataaaacagctctcttg

SEQ ID NO: 163195 - DNA, 25 bp, Canis familiaris
ggcatctttaatttggtcatgtccc

SEQ ID NO: 163196 - DNA, 25 bp, Canis familiaris
ggctcgttgaaatacacactcgccg

SEQ ID NO: 163197 - DNA, 25 bp, Canis familiaris
ggctctgttgaacttccagcaactt

SEQ ID NO: 163198 - DNA, 25 bp, Canis familiaris
ggcttcttaagtcccagggttatgg

SEQ ID NO: 163199 - DNA, 25 bp, Canis familiaris
ggcatttaacagctccaggagtccc

SEQ ID NO: 163200 - DNA, 25 bp, Canis familiaris
ggcttgtacatatctcctgtgagtt

SEQ ID NO: 163201 - DNA, 25 bp, Canis familiaris
ggcatttgcattttctgcactgttt

SEQ ID NO: 163202 - DNA, 25 bp, Canis familiaris
ggcattgtctgaactctagcatttt

SEQ ID NO: 163203 - DNA, 25 bp, Canis familiaris
ggcatgtcatctaagttcagcacct

SEQ ID NO: 163204 - DNA, 25 bp, Canis familiaris
ggcatgtcattattttccacttgtg

SEQ ID NO: 163205 - DNA, 25 bp, Canis familiaris
ggcattgataattttgctcctttta

SEQ ID NO: 163206 - DNA, 25 bp, Canis familiaris
ggcatatgaagttgtcatggcctct

SEQ ID NO: 163207 - DNA, 25 bp, Canis familiaris
ggcatgatgaagactctcctgctgc

SEQ ID NO: 163208 - DNA, 25 bp, Canis familiaris
ggcatgacaaccgtgtcagctgcct

SEQ ID NO: 163209 - DNA, 25 bp, Canis familiaris
ggcatgaggcacctatgaggctcct

SEQ ID NO: 163210 - DNA, 25 bp, Canis familiaris
ggcatcagctgagaagaggacccaa

SEQ ID NO: 163211 - DNA, 25 bp, Canis familiaris
ggcatccatgcagaagagtccaaaa

SEQ ID NO: 163212 - DNA, 25 bp, Canis familiaris
ggctccacatcagaggcccagaaaa

SEQ ID NO: 163213 - DNA, 25 bp, Canis familiaris
ggctcacagggcggccctagaagaa

SEQ ID NO: 163214 - DNA, 25 bp, Canis familiaris
ggctacggctgtgcccagaagaaca

SEQ ID NO: 163215 - DNA, 25 bp, Canis familiaris
ggcgaagatggcggccaagaccaac

SEQ ID NO: 163216 - DNA, 25 bp, Canis familiaris
ggcgatactcactcggagtcacaac

SEQ ID NO: 163217 - DNA, 25 bp, Canis familiaris
ggctctgacccatctggaggaaaac

SEQ ID NO: 163218 - DNA, 25 bp, Canis familiaris
ggcatcatacccctatgggacaaaa

SEQ ID NO: 163219 - DNA, 25 bp, Canis familiaris
ggctctactctcatatgggtctgaa

SEQ ID NO: 163220 - DNA, 25 bp, Canis familiaris
ggctcacagctctgtcattagacca

SEQ ID NO: 163221 - DNA, 25 bp, Canis familiaris
ggcatcacactccctttagagaaac

SEQ ID NO: 163222 - DNA, 25 bp, Canis familiaris
ggcatcaacctccgttagtaaactg

SEQ ID NO: 163223 - DNA, 25 bp, Canis familiaris
ggctgaaggcccgttactatgaagg

SEQ ID NO: 163224 - DNA, 25 bp, Canis familiaris
ggctgttggcctgcctttatgaagc

SEQ ID NO: 163225 - DNA, 25 bp, Canis familiaris
ggcttcatggcctaacactttgaag

SEQ ID NO: 163226 - DNA, 25 bp, Canis familiaris
ggcttcatgtagggagcctgatgtg

SEQ ID NO: 163227 - DNA, 25 bp, Canis familiaris
ggctcctgtaattgacctgtggtgg

SEQ ID NO: 163228 - DNA, 25 bp, Canis familiaris
ggctccttcaagtatgcctgggtct

SEQ ID NO: 163229 - DNA, 25 bp, Canis familiaris
ggcgaccaatagttgcctgtgaact

SEQ ID NO: 163230 - DNA, 25 bp, Canis familiaris
ggcggcaacaagagccgcctcactc

SEQ ID NO: 163231 - DNA, 25 bp, Canis familiaris
ggcatgggaaatatccgcagtcacc

SEQ ID NO: 163232 - DNA, 25 bp, Canis familiaris
ggcatcggaaatcatctggaccatc

SEQ ID NO: 163233 - DNA, 25 bp, Canis familiaris
ggcatcctaaaaccttgaacttcac

SEQ ID NO: 163234 - DNA, 25 bp, Canis familiaris
ggctccaaaaattgtttcctttcat

SEQ ID NO: 163235 - DNA, 25 bp, Canis familiaris
ggcatcgacaaaatagtttcatcct

SEQ ID NO: 163236 - DNA, 25 bp, Canis familiaris
ggcattaaaatattgtctactcctt

SEQ ID NO: 163237 - DNA, 25 bp, Canis familiaris
ggctctttaatgtttctacttctgt

SEQ ID NO: 163238 - DNA, 25 bp, Canis familiaris
ggctattaaagctttctagattaga

SEQ ID NO: 163239 - DNA, 25 bp, Canis familiaris
ggctcttaccacttatccagaagta

SEQ ID NO: 163240 - DNA, 25 bp, Canis familiaris
ggctttcaccaataccatgcgtgtg

SEQ ID NO: 163241 - DNA, 25 bp, Canis familiaris
ggcttgtgaccctaaacttgcaggc

SEQ ID NO: 163242 - DNA, 25 bp, Canis familiaris
ggcttggaatgttcacaacttgcgt

SEQ ID NO: 163243 - DNA, 25 bp, Canis familiaris
ggctttaagttcacactgatgcctt

SEQ ID NO: 163244 - DNA, 25 bp, Canis familiaris
ggctttgacgtagcacaatgtttca

SEQ ID NO: 163245 - DNA, 25 bp, Canis familiaris
tggcggggccttgaacttgttcaag

SEQ ID NO: 163246 - DNA, 25 bp, Canis familiaris
ggcgaggggtgggcacatttgtgtc

SEQ ID NO: 163247 - DNA, 25 bp, Canis familiaris
ggcggtgggtgttctaggattgttg

SEQ ID NO: 163248 - DNA, 25 bp, Canis familiaris
ggctacatggggttccacagttggt

SEQ ID NO: 163249 - DNA, 25 bp, Canis familiaris
ggctcaggggctgtcagcacagttc

SEQ ID NO: 163250 - DNA, 25 bp, Canis familiaris
ggctagcagttctaatgtaacattc

SEQ ID NO: 163251 - DNA, 25 bp, Canis familiaris
ggcatcaggttctaagacaagcttg

SEQ ID NO: 163252 - DNA, 25 bp, Canis familiaris
ggcatgggctctgaagaatctgggc

SEQ ID NO: 163253 - DNA, 25 bp, Canis familiaris
ggcgctgtgtgctgaaaattgggga

SEQ ID NO: 163254 - DNA, 25 bp, Canis familiaris
ggctcgtttagtaatgttggagaag

SEQ ID NO: 163255 - DNA, 25 bp, Canis familiaris
ggcttcactaaggttgttggtgaag

SEQ ID NO: 163256 - DNA, 25 bp, Canis familiaris
tggttgtacaagacttgagggtaag

SEQ ID NO: 163257 - DNA, 25 bp, Canis familiaris
ggcttgggccaaacggcggtatagt

SEQ ID NO: 163258 - DNA, 25 bp, Canis familiaris
ggcttggaccaagctggaggaacga

SEQ ID NO: 163259 - DNA, 25 bp, Canis familiaris
ggcttggagcccttcatggggaaaa

SEQ ID NO: 163260 - DNA, 25 bp, Canis familiaris
ggcatctgctgaaccttctatgaga

SEQ ID NO: 163261 - DNA, 25 bp, Canis familiaris
ggcattggtagctttgcttgcgaga

SEQ ID NO: 163262 - DNA, 25 bp, Canis familiaris
ggcatatggggctctttcaggggcc

SEQ ID NO: 163263 - DNA, 25 bp, Canis familiaris
ggcatgggggccttgagagggggcc

SEQ ID NO: 163264 - DNA, 25 bp, Canis familiaris
ggcatgatgtgggacttgaaccggg

SEQ ID NO: 163265 - DNA, 25 bp, Canis familiaris
ggcgagttcgacagaacaaggttga

SEQ ID NO: 163266 - DNA, 25 bp, Canis familiaris
tgtgggcagaccgggaaccgggtca

SEQ ID NO: 163267 - DNA, 25 bp, Canis familiaris
tttccagttcgggtaaagcggccag

SEQ ID NO: 163268 - DNA, 25 bp, Canis familiaris
tttgaagttgggggaaggcctcact

SEQ ID NO: 163269 - DNA, 25 bp, Canis familiaris
tcttaagtgggccggaattgatccg

SEQ ID NO: 163270 - DNA, 25 bp, Canis familiaris
ggctgaaggggcccgatttacgtgc

SEQ ID NO: 163271 - DNA, 25 bp, Canis familiaris
ggctacagtgggtcgcatacattac

SEQ ID NO: 163272 - DNA, 25 bp, Canis familiaris
ggcttcagcgggtcgcacatattag

SEQ ID NO: 163273 - DNA, 25 bp, Canis familiaris
ggcttatcggagagcctggctatgg

SEQ ID NO: 163274 - DNA, 25 bp, Canis familiaris
ggcatgaccgttgacactagctagg

SEQ ID NO: 163275 - DNA, 25 bp, Canis familiaris
ggcatgatacgaattacaccctact

SEQ ID NO: 163276 - DNA, 25 bp, Canis familiaris
ggctctacaatgatagtccagtcaa

SEQ ID NO: 163277 - DNA, 25 bp, Canis familiaris
ggctgcggcctgagtgatgccgaaa

SEQ ID NO: 163278 - DNA, 25 bp, Canis familiaris
ggcattgcaggcccggattctgaag

SEQ ID NO: 163279 - DNA, 25 bp, Canis familiaris
ggcatctgcacctcgcagaggtaag

SEQ ID NO: 163280 - DNA, 25 bp, Canis familiaris
ggcatgctgggctagtccatgttag

SEQ ID NO: 163281 - DNA, 25 bp, Canis familiaris
ggcatctaacaaactctgctctgcc

SEQ ID NO: 163282 - DNA, 25 bp, Canis familiaris
ggcattccgagaagctgcggtcctt

SEQ ID NO: 163283 - DNA, 25 bp, Canis familiaris
ggcttttgatgttgcttagtcactt

SEQ ID NO: 163284 - DNA, 25 bp, Canis familiaris
ggcttcattgactttgtttgcacct

SEQ ID NO: 163285 - DNA, 25 bp, Canis familiaris
ggcttattgaagaggctgatgccgt

SEQ ID NO: 163286 - DNA, 25 bp, Canis familiaris
ggcttgatggacaaagggctcccca

SEQ ID NO: 163287 - DNA, 25 bp, Canis familiaris
ggcattgtgaggacgagggctgctc

SEQ ID NO: 163288 - DNA, 25 bp, Canis familiaris
ggctatctgggctcagtggcagcca

SEQ ID NO: 163289 - DNA, 25 bp, Canis familiaris
ggcatgatagggtcactgtggccca

SEQ ID NO: 163290 - DNA, 25 bp, Canis familiaris
ggcatctcagaaacactgtgggcca

SEQ ID NO: 163291 - DNA, 25 bp, Canis familiaris
ggcatccagacctcaggaggcagca

SEQ ID NO: 163292 - DNA, 25 bp, Canis familiaris
ggcatccaacacgggcgagtatgag

SEQ ID NO: 163293 - DNA, 25 bp, Canis familiaris
ggcatcacaagtgaatgcgagatat

SEQ ID NO: 163294 - DNA, 25 bp, Canis familiaris
ggcatcaccctggcatggggatgag

SEQ ID NO: 163295 - DNA, 25 bp, Canis familiaris
ggcatcagactcccatgtgtgagct

SEQ ID NO: 163296 - DNA, 25 bp, Canis familiaris
ggcatcaacattctggcgagttcga

SEQ ID NO: 163297 - DNA, 25 bp, Canis familiaris
ggcatcaacatttctggcaatttct

SEQ ID NO: 163298 - DNA, 25 bp, Canis familiaris
ggctcatatcctatagaatttctaa

SEQ ID NO: 163299 - DNA, 25 bp, Canis familiaris
ggctctccatcctatgtaaattgct

SEQ ID NO: 163300 - DNA, 25 bp, Canis familiaris
ggcttcatctcactggtttgtgctc

SEQ ID NO: 163301 - DNA, 25 bp, Canis familiaris
ggcttgaacaggctgatgctggccg

SEQ ID NO: 163302 - DNA, 25 bp, Canis familiaris
ggcttaacaacggctgctggaggat

SEQ ID NO: 163303 - DNA, 25 bp, Canis familiaris
ggcataaactactgcagctgagggt

SEQ ID NO: 163304 - DNA, 25 bp, Canis familiaris
ggctcacagactgacagccgagggc

SEQ ID NO: 163305 - DNA, 25 bp, Canis familiaris
ggcatatggacggaattctagtgga

SEQ ID NO: 163306 - DNA, 25 bp, Canis familiaris
ggcatgaccacggagatgtctaggg

SEQ ID NO: 163307 - DNA, 25 bp, Canis familiaris
ggcatgaccctggggactcaggatt

SEQ ID NO: 163308 - DNA, 25 bp, Canis familiaris
ggcatctccctttgggtgtgtttat

SEQ ID NO: 163309 - DNA, 25 bp, Canis familiaris
ggctaggccttgtggtgttattcta

SEQ ID NO: 163310 - DNA, 25 bp, Canis familiaris
ggcttttgtgtgtggcttttccata

SEQ ID NO: 163311 - DNA, 25 bp, Canis familiaris
ggcttttgtctgagccgtttaccac

SEQ ID NO: 163312 - DNA, 25 bp, Canis familiaris
ggctcttttcacaggagtttccgcc

SEQ ID NO: 163313 - DNA, 25 bp, Canis familiaris
ggctttggtttgcagattttccgcc

SEQ ID NO: 163314 - DNA, 25 bp, Canis familiaris
ggcttttgttgcacagaaggtcccc

SEQ ID NO: 163315 - DNA, 25 bp, Canis familiaris
ggctttttgtctgaggggtcatctg

SEQ ID NO: 163316 - DNA, 25 bp, Canis familiaris
ggcttctcattgtgtcaggtagtca

SEQ ID NO: 163317 - DNA, 25 bp, Canis familiaris
ggctcagccgtatctcaggaaatgc

SEQ ID NO: 163318 - DNA, 25 bp, Canis familiaris
ggctacagcttcaccaccacagctg

SEQ ID NO: 163319 - DNA, 25 bp, Canis familiaris
ggctaggctgtgatacacaaagtct

SEQ ID NO: 163320 - DNA, 25 bp, Canis familiaris
ggctatcctgttatcagattggttg

SEQ ID NO: 163321 - DNA, 25 bp, Canis familiaris
ggcattgcagccaaatatcagttgg

SEQ ID NO: 163322 - DNA, 25 bp, Canis familiaris
ggcattgctctcaatgacaactttg

SEQ ID NO: 163323 - DNA, 25 bp, Canis familiaris
ggcattaccatctaagatctctagg

SEQ ID NO: 163324 - DNA, 25 bp, Canis familiaris
ggcttgagcctgtagctttctatgc

SEQ ID NO: 163325 - DNA, 25 bp, Canis familiaris
ggcattcagcacatcagctggtcct

SEQ ID NO: 163326 - DNA, 25 bp, Canis familiaris
ggcattcattcagcagctttccatg

SEQ ID NO: 163327 - DNA, 25 bp, Canis familiaris
ggcttcactgaatgtcatctccaac

SEQ ID NO: 163328 - DNA, 25 bp, Canis familiaris
ggcttcctgcacaaattctaaacct

SEQ ID NO: 163329 - DNA, 25 bp, Canis familiaris
ggcatctgccctggaaactaaaccc

SEQ ID NO: 163330 - DNA, 25 bp, Canis familiaris
ggcattccgaggacacatctgaaaa

SEQ ID NO: 163331 - DNA, 25 bp, Canis familiaris
ggcatttcagaagagatttaatcag

SEQ ID NO: 163332 - DNA, 25 bp, Canis familiaris
ggctttcaagatctttaaatcacca

SEQ ID NO: 163333 - DNA, 25 bp, Canis familiaris
ggctaaccaattattcaattcacca

SEQ ID NO: 163334 - DNA, 25 bp, Canis familiaris
ggctagaccacagtttgtttatcca

SEQ ID NO: 163335 - DNA, 25 bp, Canis familiaris
ggctgtagccaagactgggactcca

SEQ ID NO: 163336 - DNA, 25 bp, Canis familiaris
ggcttcacatcagaaatgggaccta

SEQ ID NO: 163337 - DNA, 25 bp, Canis familiaris
ggcttacacttgaacttggactcta

SEQ ID NO: 163338 - DNA, 25 bp, Canis familiaris
ggcttaagcatttaggttgactgta

SEQ ID NO: 163339 - DNA, 25 bp, Canis familiaris
ggcttgcaagctttagaatcttctt

SEQ ID NO: 163340 - DNA, 25 bp, Canis familiaris
ggcttagcagttgagcacctgcctt

SEQ ID NO: 163341 - DNA, 25 bp, Canis familiaris
ggcatacgagttgagagcctcttgc

SEQ ID NO: 163342 - DNA, 25 bp, Canis familiaris
ggcatagcgaaaccagcagctcttt

SEQ ID NO: 163343 - DNA, 25 bp, Canis familiaris
ggcatcaggatatttcatggttttg

SEQ ID NO: 163344 - DNA, 25 bp, Canis familiaris
ggcttggaatattttgtgctgctcg

SEQ ID NO: 163345 - DNA, 25 bp, Canis familiaris
ggcatatgtattagtctgtgttctc

SEQ ID NO: 163346 - DNA, 25 bp, Canis familiaris
ggcatctgtatgagtcctgagtcct

SEQ ID NO: 163347 - DNA, 25 bp, Canis familiaris
ggcatctgttgagagcctgctgtgc

SEQ ID NO: 163348 - DNA, 25 bp, Canis familiaris
ggcatcgtggagggcctcatgacca

SEQ ID NO: 163349 - DNA, 25 bp, Canis familiaris
ggcatcgtgaagggacatcatccac

SEQ ID NO: 163350 - DNA, 25 bp, Canis familiaris
ggcattgtgcatattgacatatcca

SEQ ID NO: 163351 - DNA, 25 bp, Canis familiaris
ggcattctatgtagtgactgttcaa

SEQ ID NO: 163352 - DNA, 25 bp, Canis familiaris
ggcatttattatttcatgcatataa

SEQ ID NO: 163353 - DNA, 25 bp, Canis familiaris
ggcttgttcttctcatatcaactta

SEQ ID NO: 163354 - DNA, 25 bp, Canis familiaris
ggctggttggtctgaaatccttgca

SEQ ID NO: 163355 - DNA, 25 bp, Canis familiaris
ggctgtgtctgtgtgggacaccggc

SEQ ID NO: 163356 - DNA, 25 bp, Canis familiaris
ggctgtgccgaatgggcaacgagga

SEQ ID NO: 163357 - DNA, 25 bp, Canis familiaris
ggcttgtggatgaaggtcaatggca

SEQ ID NO: 163358 - DNA, 25 bp, Canis familiaris
ggcttatgaatatggatgacactgg

SEQ ID NO: 163359 - DNA, 25 bp, Canis familiaris
ggctttcagccattgtgagaccttc

SEQ ID NO: 163360 - DNA, 25 bp, Canis familiaris
ggcttgtgaccattgtggagacccc

SEQ ID NO: 163361 - DNA, 25 bp, Canis familiaris
ggctttgaaacctgatgaaccctat

SEQ ID NO: 163362 - DNA, 25 bp, Canis familiaris
ggctttgtgaacgacagttaccatc

SEQ ID NO: 163363 - DNA, 25 bp, Canis familiaris
ggcttcagtgtgagaactgtgaccc

SEQ ID NO: 163364 - DNA, 25 bp, Canis familiaris
ggcttctggtgcaggagagtcggca

SEQ ID NO: 163365 - DNA, 25 bp, Canis familiaris
ggcttcgcttcgacgaggacagcga

SEQ ID NO: 163366 - DNA, 25 bp, Canis familiaris
ggcttcctctggaaccagaatggca

SEQ ID NO: 163367 - DNA, 25 bp, Canis familiaris
ggcattatctcaaaaccagcagtcc

SEQ ID NO: 163368 - DNA, 25 bp, Canis familiaris
ggcttcattgcaaaatccagtcatg

SEQ ID NO: 163369 - DNA, 25 bp, Canis familiaris
ggctctgcatgaccaagatcatcgt

SEQ ID NO: 163370 - DNA, 25 bp, Canis familiaris
ggctctgatgtgtctctgacagctc

SEQ ID NO: 163371 - DNA, 25 bp, Canis familiaris
ggctagttgcatttgctgggccaac

SEQ ID NO: 163372 - DNA, 25 bp, Canis familiaris
ggctatgttgtttatgagaccaggt

SEQ ID NO: 163373 - DNA, 25 bp, Canis familiaris
ggcttgctacttgtggactgggacc

SEQ ID NO: 163374 - DNA, 25 bp, Canis familiaris
ggctgtgtattgtgtaactgggact

SEQ ID NO: 163375 - DNA, 25 bp, Canis familiaris
ggctgctggaatctgtacatttggg

SEQ ID NO: 163376 - DNA, 25 bp, Canis familiaris
ggctgcttggtcgtgtagtgattag

SEQ ID NO: 163377 - DNA, 25 bp, Canis familiaris
ggctctttgctcaatgtgggacttg

SEQ ID NO: 163378 - DNA, 25 bp, Canis familiaris
ggcttcctgctcagtgaggagtctg

SEQ ID NO: 163379 - DNA, 25 bp, Canis familiaris
ggcttcccttcctaggagtaggatc

SEQ ID NO: 163380 - DNA, 25 bp, Canis familiaris
ggctaccacatcgcaaaggaaagtc

SEQ ID NO: 163381 - DNA, 25 bp, Canis familiaris
ggctacctcacaatccaaggaaggc

SEQ ID NO: 163382 - DNA, 25 bp, Canis familiaris
ggctaatcccaggccaggcaaaggc

SEQ ID NO: 163383 - DNA, 25 bp, Canis familiaris
ggctcagaaccagctccaagaggac

SEQ ID NO: 163384 - DNA, 25 bp, Canis familiaris
ggcctgaaccaggtgtacggcccca

SEQ ID NO: 163385 - DNA, 25 bp, Canis familiaris
ggcttgataccagatatgacgtacc

SEQ ID NO: 163386 - DNA, 25 bp, Canis familiaris
ggcgaggactgcggaagtcgtcggt

SEQ ID NO: 163387 - DNA, 25 bp, Canis familiaris
ggccaggatcgtggggaggttagtc

SEQ ID NO: 163388 - DNA, 25 bp, Canis familiaris
ggctcatgccatgatggggggcatc

SEQ ID NO: 163389 - DNA, 25 bp, Canis familiaris
ggctcgtctgaagtcggcgaacaac

SEQ ID NO: 163390 - DNA, 25 bp, Canis familiaris
ggcttgcttaaccgggaacatgaat

SEQ ID NO: 163391 - DNA, 25 bp, Canis familiaris
ggctttggaaagctggcgaatgctt

SEQ ID NO: 163392 - DNA, 25 bp, Canis familiaris
ggctcgttatttctggcaattgtct

SEQ ID NO: 163393 - DNA, 25 bp, Canis familiaris
ggctctttttctctcgaatggatag

SEQ ID NO: 163394 - DNA, 25 bp, Canis familiaris
ggctaaccgtcacctctaagtgaag

SEQ ID NO: 163395 - DNA, 25 bp, Canis familiaris
ggcttacctgtacactgacttgaga

SEQ ID NO: 163396 - DNA, 25 bp, Canis familiaris
ggcttatatttacagaacttgcaca

SEQ ID NO: 163397 - DNA, 25 bp, Canis familiaris
ggcccatcgttagaagcactgaagt

SEQ ID NO: 163398 - DNA, 25 bp, Canis familiaris
ggctcggtgtttgtacattgcacag

SEQ ID NO: 163399 - DNA, 25 bp, Canis familiaris
ggcttgctgtgtagctgtgaactta

SEQ ID NO: 163400 - DNA, 25 bp, Canis familiaris
ggcttctggacactttatgcatttc

SEQ ID NO: 163401 - DNA, 25 bp, Canis familiaris
ggctttgtgacagtctctaactccc

SEQ ID NO: 163402 - DNA, 25 bp, Canis familiaris
ggcttgctgtgatgtcaggaaacct

SEQ ID NO: 163403 - DNA, 25 bp, Canis familiaris
ggctcatgttgtgatctggggaccc

SEQ ID NO: 163404 - DNA, 25 bp, Canis familiaris
ggcatagtcgctgttgaaagacaca

SEQ ID NO: 163405 - DNA, 25 bp, Canis familiaris
ggcatttcgtgccttgtaaatagca

SEQ ID NO: 163406 - DNA, 25 bp, Canis familiaris
ggcatataccttgtgtactgtgagt

SEQ ID NO: 163407 - DNA, 25 bp, Canis familiaris
ggcatatgctctttcaatgtattgc

SEQ ID NO: 163408 - DNA, 25 bp, Canis familiaris
ggcatagtgctgctcatcgtatcag

SEQ ID NO: 163409 - DNA, 25 bp, Canis familiaris
ggcatcaagctgcccaagatgacca

SEQ ID NO: 163410 - DNA, 25 bp, Canis familiaris
ggcttcacatgaccagcattgcacc

SEQ ID NO: 163411 - DNA, 25 bp, Canis familiaris
tggctattgtagcatgaccaccata

SEQ ID NO: 163412 - DNA, 25 bp, Canis familiaris
ggctatgtctcgaatcccaatataa

SEQ ID NO: 163413 - DNA, 25 bp, Canis familiaris
ggctttcccacagcacaatagcaga

SEQ ID NO: 163414 - DNA, 25 bp, Canis familiaris
ggcttgtgcctcacataagaacaga

SEQ ID NO: 163415 - DNA, 25 bp, Canis familiaris
ggctcattcctggagtagacaaaac

SEQ ID NO: 163416 - DNA, 25 bp, Canis familiaris
ggctttgccaccacagaatgaaacc

SEQ ID NO: 163417 - DNA, 25 bp, Canis familiaris
ggcttctcccacaaggtgaagagcc

SEQ ID NO: 163418 - DNA, 25 bp, Canis familiaris
ggcttctcgtaatttggaatgtgcc

SEQ ID NO: 163419 - DNA, 25 bp, Canis familiaris
ggcattttgtaatttgtgagcttct

SEQ ID NO: 163420 - DNA, 25 bp, Canis familiaris
ggcatttggtttcctggatctgcta

SEQ ID NO: 163421 - DNA, 25 bp, Canis familiaris
ggctttggtgtcattggtggcatta

SEQ ID NO: 163422 - DNA, 25 bp, Canis familiaris
ggcttatttgtggttttcgcttgtt

SEQ ID NO: 163423 - DNA, 25 bp, Canis familiaris
ggcttggtttgtattctcatgcttt

SEQ ID NO: 163424 - DNA, 25 bp, Canis familiaris
ggctctggatgtgatggtgtctact

SEQ ID NO: 163425 - DNA, 25 bp, Canis familiaris
ggcttgtgggtattgctgtcttgtt

SEQ ID NO: 163426 - DNA, 25 bp, Canis familiaris
ggctttggaacactgcagatttgct

SEQ ID NO: 163427 - DNA, 25 bp, Canis familiaris
tggttggaattccggagtttaattg

SEQ ID NO: 163428 - DNA, 25 bp, Canis familiaris
ggcttagacttccttcagttttatt

SEQ ID NO: 163429 - DNA, 25 bp, Canis familiaris
ggcattagacttgcacttttttttt

SEQ ID NO: 163430 - DNA, 25 bp, Canis familiaris
ggcttcaaagtccacatttttttct

SEQ ID NO: 163431 - DNA, 25 bp, Canis familiaris
ggctcaaattcccactgtttttttg

SEQ ID NO: 163432 - DNA, 25 bp, Canis familiaris
ggctccattttctctgatgttttgg

SEQ ID NO: 163433 - DNA, 25 bp, Canis familiaris
ggctcgaattccccgagttcgaggc

SEQ ID NO: 163434 - DNA, 25 bp, Canis familiaris
ggctagaacccaaggcatttccatg

SEQ ID NO: 163435 - DNA, 25 bp, Canis familiaris
ggcttgaatcctagaggttccatct

SEQ ID NO: 163436 - DNA, 25 bp, Canis familiaris
ggctttcatcagccaagcgttacct

SEQ ID NO: 163437 - DNA, 25 bp, Canis familiaris
ggctattaaccatggtcccagcata

SEQ ID NO: 163438 - DNA, 25 bp, Canis familiaris
ggctaataaacttcgtgctgaccta

SEQ ID NO: 163439 - DNA, 25 bp, Canis familiaris
ggctacaaagactgctacgccctga

SEQ ID NO: 163440 - DNA, 25 bp, Canis familiaris
ggcttcaagatagcgatacgacccg

SEQ ID NO: 163441 - DNA, 25 bp, Canis familiaris
ggcttcaactacggagactattctt

SEQ ID NO: 163442 - DNA, 25 bp, Canis familiaris
ggcttccctctctggatatatactc

SEQ ID NO: 163443 - DNA, 25 bp, Canis familiaris
ggcattcctccttctgatatgcaaa

SEQ ID NO: 163444 - DNA, 25 bp, Canis familiaris
ggcttttctctcttatatgtccaag

SEQ ID NO: 163445 - DNA, 25 bp, Canis familiaris
ggctgcttaaccgttatgcaaaagc

SEQ ID NO: 163446 - DNA, 25 bp, Canis familiaris
ggcttgtgaatccgctcaataaaag

SEQ ID NO: 163447 - DNA, 25 bp, Canis familiaris
ggcattgtgaagcctggacacacac

SEQ ID NO: 163448 - DNA, 25 bp, Canis familiaris
ggcattatagcatcataatctgaca

SEQ ID NO: 163449 - DNA, 25 bp, Canis familiaris
ggcttctacaccaaattactcaact

SEQ ID NO: 163450 - DNA, 25 bp, Canis familiaris
ggctcctttccaaatctttatgacc

SEQ ID NO: 163451 - DNA, 25 bp, Canis familiaris
ggcttctttccctaggtgaaacaca

SEQ ID NO: 163452 - DNA, 25 bp, Canis familiaris
ggctcacggtcctgagggagtacgc

SEQ ID NO: 163453 - DNA, 25 bp, Canis familiaris
ggctcagagctgacaacgtggtgga

SEQ ID NO: 163454 - DNA, 25 bp, Canis familiaris
ggctcaggtggaacggcttgaaagg

SEQ ID NO: 163455 - DNA, 25 bp, Canis familiaris
tggctcaggtggaacggcttgaaag

SEQ ID NO: 163456 - DNA, 25 bp, Canis familiaris
ggcttgagagcgaaccgcacgacaa

SEQ ID NO: 163457 - DNA, 25 bp, Canis familiaris
ggctttgagccctcagacaacaagt

SEQ ID NO: 163458 - DNA, 25 bp, Canis familiaris
ggctttacctgtggccacaaagagt

SEQ ID NO: 163459 - DNA, 25 bp, Canis familiaris
ggctgaaagctactcccaagaagtt

SEQ ID NO: 163460 - DNA, 25 bp, Canis familiaris
ggctgaaatattttaatgaactgct

SEQ ID NO: 163461 - DNA, 25 bp, Canis familiaris
ggctcaccttctttaagaacaggaa

SEQ ID NO: 163462 - DNA, 25 bp, Canis familiaris
ggctcctagttttgtagacagcggc

SEQ ID NO: 163463 - DNA, 25 bp, Canis familiaris
ggctcctagctgattaaaactggtc

SEQ ID NO: 163464 - DNA, 25 bp, Canis familiaris
ggctctctagcacttttcaaacaat

SEQ ID NO: 163465 - DNA, 25 bp, Canis familiaris
ggctcatcattgtgggtgtaacaat

SEQ ID NO: 163466 - DNA, 25 bp, Canis familiaris
ggctacggaggtggttatgacaact

SEQ ID NO: 163467 - DNA, 25 bp, Canis familiaris
ggcttcttgggtgtgcttgcaaacc

SEQ ID NO: 163468 - DNA, 25 bp, Canis familiaris
ggctttctgaactggcttgaatcct

SEQ ID NO: 163469 - DNA, 25 bp, Canis familiaris
ggcgtcccaatatagttgaatcttg

SEQ ID NO: 163470 - DNA, 25 bp, Canis familiaris
ggcttcccacaatatttacatgttg

SEQ ID NO: 163471 - DNA, 25 bp, Canis familiaris
ggcattccccaaagtagtggctctt

SEQ ID NO: 163472 - DNA, 25 bp, Canis familiaris
ggcttcagcccatcagtggatgctg

SEQ ID NO: 163473 - DNA, 25 bp, Canis familiaris
ggcttcacccattagctgtttgtaa

SEQ ID NO: 163474 - DNA, 25 bp, Canis familiaris
ggcttacctcactctaagtgtagac

SEQ ID NO: 163475 - DNA, 25 bp, Canis familiaris
ggctaacctcacgtcaaaggtgaag

SEQ ID NO: 163476 - DNA, 25 bp, Canis familiaris
ggctatacctcacgtcgaagtggga

SEQ ID NO: 163477 - DNA, 25 bp, Canis familiaris
ggctacagcaaccgggtggtgggac

SEQ ID NO: 163478 - DNA, 25 bp, Canis familiaris
ggctacagcaaccgggtggtggacc

SEQ ID NO: 163479 - DNA, 25 bp, Canis familiaris
ggctcaacaaggccggtgggaaccg

SEQ ID NO: 163480 - DNA, 25 bp, Canis familiaris
ggcttgacaaggaccttctggacct

SEQ ID NO: 163481 - DNA, 25 bp, Canis familiaris
ggcttgactattgcctggcattccc

SEQ ID NO: 163482 - DNA, 25 bp, Canis familiaris
ggctataatactgtgttgcctcccc

SEQ ID NO: 163483 - DNA, 25 bp, Canis familiaris
ggcttaaagctgttcgtgtcgcctc

SEQ ID NO: 163484 - DNA, 25 bp, Canis familiaris
ggctaaaggtcaaccagccagcctc

SEQ ID NO: 163485 - DNA, 25 bp, Canis familiaris
ggctcaaacttcacaagctttctcc

SEQ ID NO: 163486 - DNA, 25 bp, Canis familiaris
ggctaaaatctctccaggtatccct

SEQ ID NO: 163487 - DNA, 25 bp, Canis familiaris
ggctacttattctgccacatgtgcc

SEQ ID NO: 163488 - DNA, 25 bp, Canis familiaris
ggctagctctttgctgcaagagcca

SEQ ID NO: 163489 - DNA, 25 bp, Canis familiaris
ggctatgggttcctctcagagcgag

SEQ ID NO: 163490 - DNA, 25 bp, Canis familiaris
ggctacggtatgcacagagtcaggg

SEQ ID NO: 163491 - DNA, 25 bp, Canis familiaris
ggctccggaatggccaggaagagga

SEQ ID NO: 163492 - DNA, 25 bp, Canis familiaris
ggctatcgcggagtccggagagcac

SEQ ID NO: 163493 - DNA, 25 bp, Canis familiaris
ggctacactgaggaccaggttgtct

SEQ ID NO: 163494 - DNA, 25 bp, Canis familiaris
ggctacactgagcaccaggtggtct

SEQ ID NO: 163495 - DNA, 25 bp, Canis familiaris
ggctacactgaggaccaggtggtct

SEQ ID NO: 163496 - DNA, 25 bp, Canis familiaris
ggctctgaccaggatacagggtatt

SEQ ID NO: 163497 - DNA, 25 bp, Canis familiaris
ggcttaccagcagatcagtgaccaa

SEQ ID NO: 163498 - DNA, 25 bp, Canis familiaris
ggcttatccacagagcagcatacac

SEQ ID NO: 163499 - DNA, 25 bp, Canis familiaris
ggcttttacagtgctgatgtcagct

SEQ ID NO: 163500 - DNA, 25 bp, Canis familiaris
ggctttgttaatgctgagtcttggc

SEQ ID NO: 163501 - DNA, 25 bp, Canis familiaris
ggctttttagttgggtctctgcctt

SEQ ID NO: 163502 - DNA, 25 bp, Canis familiaris
ggctttcttaaatggaccaggttgg

SEQ ID NO: 163503 - DNA, 25 bp, Canis familiaris
ggcttgagcttataaagcatccttg

SEQ ID NO: 163504 - DNA, 25 bp, Canis familiaris
ggcttcgtgattaaaatgctcctat

SEQ ID NO: 163505 - DNA, 25 bp, Canis familiaris
ggctccgtaggttaagcatccgaat

SEQ ID NO: 163506 - DNA, 25 bp, Canis familiaris
ggctcggtttgttaagcgtctggct

SEQ ID NO: 163507 - DNA, 25 bp, Canis familiaris
ggctcaggctttgaacacgttggac

SEQ ID NO: 163508 - DNA, 25 bp, Canis familiaris
tggccaagtcctgttcacgcttgga

SEQ ID NO: 163509 - DNA, 25 bp, Canis familiaris
ggccgagatcctgagtaactggaac

SEQ ID NO: 163510 - DNA, 25 bp, Canis familiaris
ggcgtagcacgttgaaaaatgaaca

SEQ ID NO: 163511 - DNA, 25 bp, Canis familiaris
ggcttagcatctgggaaattctgaa

SEQ ID NO: 163512 - DNA, 25 bp, Canis familiaris
ggcttggagtgaagactttctcaat

SEQ ID NO: 163513 - DNA, 25 bp, Canis familiaris
ggcttaagaataccttgtctctgag

SEQ ID NO: 163514 - DNA, 25 bp, Canis familiaris
ggctaatgggacccttgcaatgcgg

SEQ ID NO: 163515 - DNA, 25 bp, Canis familiaris
ggcttcagaagagtccccaatgccc

SEQ ID NO: 163516 - DNA, 25 bp, Canis familiaris
ggcttcagagtagttcccagagtct

SEQ ID NO: 163517 - DNA, 25 bp, Canis familiaris
ggctacaactagttgccctgagtga

SEQ ID NO: 163518 - DNA, 25 bp, Canis familiaris
ggctaagattagggaccaaggacat

SEQ ID NO: 163519 - DNA, 25 bp, Canis familiaris
ggctacattttctacccaagaacat

SEQ ID NO: 163520 - DNA, 25 bp, Canis familiaris
ggctacttgctctttggacaaaaca

SEQ ID NO: 163521 - DNA, 25 bp, Canis familiaris
ggctagcttccgtggacacataaca

SEQ ID NO: 163522 - DNA, 25 bp, Canis familiaris
ggcggctcttactcgaaataaaaca

SEQ ID NO: 163523 - DNA, 25 bp, Canis familiaris
ggctaccttagctcttatcatatta

SEQ ID NO: 163524 - DNA, 25 bp, Canis familiaris
ggctcagctctctaaatctttaaat

SEQ ID NO: 163525 - DNA, 25 bp, Canis familiaris
ggctttctctaattcatcttaactt

SEQ ID NO: 163526 - DNA, 25 bp, Canis familiaris
ggcttcttccaaactgttagatgct

SEQ ID NO: 163527 - DNA, 25 bp, Canis familiaris
ggcttctcatcttctttgtatagtg

SEQ ID NO: 163528 - DNA, 25 bp, Canis familiaris
ggctgctttcattctcaagtacagt

SEQ ID NO: 163529 - DNA, 25 bp, Canis familiaris
ggctcttcctgttccagatacagaa

SEQ ID NO: 163530 - DNA, 25 bp, Canis familiaris
ggcttagcctgtgctagcaacagtc

SEQ ID NO: 163531 - DNA, 25 bp, Canis familiaris
ggcttatcgatgagctaccatatgt

SEQ ID NO: 163532 - DNA, 25 bp, Canis familiaris
ggcttcaggtcagtcgacactatgg

SEQ ID NO: 163533 - DNA, 25 bp, Canis familiaris
ggcctagggcgttggagctatgggt

SEQ ID NO: 163534 - DNA, 25 bp, Canis familiaris
ggcctagccccatggggggagtcaa

SEQ ID NO: 163535 - DNA, 25 bp, Canis familiaris
ggctctagccacaagggagggtgag

SEQ ID NO: 163536 - DNA, 25 bp, Canis familiaris
ggcttgccaagcagtggacgtgtgg

SEQ ID NO: 163537 - DNA, 25 bp, Canis familiaris
ggctagccaggggttagagtgcttg

SEQ ID NO: 163538 - DNA, 25 bp, Canis familiaris
ggcttgcgggtgttctaatgactca

SEQ ID NO: 163539 - DNA, 25 bp, Canis familiaris
ggctgttgccggttctgaatgagac

SEQ ID NO: 163540 - DNA, 25 bp, Canis familiaris
ggctttatgccctgctgaatgagtt

SEQ ID NO: 163541 - DNA, 25 bp, Canis familiaris
ggctatcttgacacctccaagtatt

SEQ ID NO: 163542 - DNA, 25 bp, Canis familiaris
ggctacgtgatcaacttccagagtt

SEQ ID NO: 163543 - DNA, 25 bp, Canis familiaris
ggcttcgctgaatcatatccgagct

SEQ ID NO: 163544 - DNA, 25 bp, Canis familiaris
ggcttctggatattttctcgatgct

SEQ ID NO: 163545 - DNA, 25 bp, Canis familiaris
ggctctcttatattttatccatgta

SEQ ID NO: 163546 - DNA, 25 bp, Canis familiaris
ggctctgcctaactgttaacattgc

SEQ ID NO: 163547 - DNA, 25 bp, Canis familiaris
ggctccctaagccctgaatatcatg

SEQ ID NO: 163548 - DNA, 25 bp, Canis familiaris
ggctttctcctggctctgagaataa

SEQ ID NO: 163549 - DNA, 25 bp, Canis familiaris
ggctttgctcgagctgtgcggaacc

SEQ ID NO: 163550 - DNA, 25 bp, Canis familiaris
ggctttcctgaagctgccagaactc

SEQ ID NO: 163551 - DNA, 25 bp, Canis familiaris
ggctttgtttcaggctggagaactg

SEQ ID NO: 163552 - DNA, 25 bp, Canis familiaris
ggctttctattcggtaatagtttct

SEQ ID NO: 163553 - DNA, 25 bp, Canis familiaris
ggctcattaaatcagttatggttcc

SEQ ID NO: 163554 - DNA, 25 bp, Canis familiaris
ggctcttaaatgtggcaatgtatct

SEQ ID NO: 163555 - DNA, 25 bp, Canis familiaris
ggctcccaatgaaaggtgtgctgat

SEQ ID NO: 163556 - DNA, 25 bp, Canis familiaris
ggctagtccatgttagagtgtgcgg

SEQ ID NO: 163557 - DNA, 25 bp, Canis familiaris
ggctcagacggttaagcgtccaact

SEQ ID NO: 163558 - DNA, 25 bp, Canis familiaris
ggctcaggattgttcaaggacccag

SEQ ID NO: 163559 - DNA, 25 bp, Canis familiaris
ggctgggatttttgggacaccccag

SEQ ID NO: 163560 - DNA, 25 bp, Canis familiaris
ggctggaatgaatatgggaccccgg

SEQ ID NO: 163561 - DNA, 25 bp, Canis familiaris
ggctcccaagaagtggagatcccgg

SEQ ID NO: 163562 - DNA, 25 bp, Canis familiaris
ggctcctaacgaggggtcaacagct

SEQ ID NO: 163563 - DNA, 25 bp, Canis familiaris
ggctcctacctggttgtaatccagt

SEQ ID NO: 163564 - DNA, 25 bp, Canis familiaris
ggctctgtaccggttgtagactact

SEQ ID NO: 163565 - DNA, 25 bp, Canis familiaris
tggctttaccagctacttgttccat

SEQ ID NO: 163566 - DNA, 25 bp, Canis familiaris
ggctcataaactctacattttccaa

SEQ ID NO: 163567 - DNA, 25 bp, Canis familiaris
ggcttacaacaccattcatttttgc

SEQ ID NO: 163568 - DNA, 25 bp, Canis familiaris
ggctcgaaacagcagagatttattc

SEQ ID NO: 163569 - DNA, 25 bp, Canis familiaris
ggctcacagaacctggaacaagatg

SEQ ID NO: 163570 - DNA, 25 bp, Canis familiaris
ggcggagacaggttggacaagatct

SEQ ID NO: 163571 - DNA, 25 bp, Canis familiaris
ggcgtcctcaggatggtccaataaa

SEQ ID NO: 163572 - DNA, 25 bp, Canis familiaris
ggctgcttctcaggagtgtctacaa

SEQ ID NO: 163573 - DNA, 25 bp, Canis familiaris
ggctgactgctacattgtgctcaaa

SEQ ID NO: 163574 - DNA, 25 bp, Canis familiaris
ggctgccatttgcagtggcaaagtg

SEQ ID NO: 163575 - DNA, 25 bp, Canis familiaris
ggctgctctccaccgtggggagagc

SEQ ID NO: 163576 - DNA, 25 bp, Canis familiaris
ggctctactatgccctgaagggagc

SEQ ID NO: 163577 - DNA, 25 bp, Canis familiaris
ggcttcactagccttagtttaataa

SEQ ID NO: 163578 - DNA, 25 bp, Canis familiaris
ggcttattacgtaaccttatgctaa

SEQ ID NO: 163579 - DNA, 25 bp, Canis familiaris
ggcttttacgatgaatgtctaccaa

SEQ ID NO: 163580 - DNA, 25 bp, Canis familiaris
tgtctgttaaagtgaatgtcatagt

SEQ ID NO: 163581 - DNA, 25 bp, Canis familiaris
tgttgtaaaatacacttcaccttta

SEQ ID NO: 163582 - DNA, 25 bp, Canis familiaris
tgtaatataaaagccttcacctaaa

SEQ ID NO: 163583 - DNA, 25 bp, Canis familiaris
tggtcattacaatccatttcccttc

SEQ ID NO: 163584 - DNA, 25 bp, Canis familiaris
tggttgtctaaatctactcctctgt

SEQ ID NO: 163585 - DNA, 25 bp, Canis familiaris
tgttttaggacgtctactcccagtt

SEQ ID NO: 163586 - DNA, 25 bp, Canis familiaris
ggcttttggaatgctgagtgcccag

SEQ ID NO: 163587 - DNA, 25 bp, Canis familiaris
ggctatagcggaatggtgcgtccca

SEQ ID NO: 163588 - DNA, 25 bp, Canis familiaris
ggctttgaagaacttggccccaata

SEQ ID NO: 163589 - DNA, 25 bp, Canis familiaris
ggctttgaagaacctgtgtccaaat

SEQ ID NO: 163590 - DNA, 25 bp, Canis familiaris
ggcttcaataaacctgtctgccctt

SEQ ID NO: 163591 - DNA, 25 bp, Canis familiaris
ggcttcaataaacctgtctgccctt

SEQ ID NO: 163592 - DNA, 25 bp, Canis familiaris
ggcttcaataaacctgtctgccctt

SEQ ID NO: 163593 - DNA, 25 bp, Canis familiaris
ggctaaacatagtgtgtccccagtt

SEQ ID NO: 163594 - DNA, 25 bp, Canis familiaris
ggctacagaccaaaggtcccaagct

SEQ ID NO: 163595 - DNA, 25 bp, Canis familiaris
ggctacgacctgtacagtgcctatg

SEQ ID NO: 163596 - DNA, 25 bp, Canis familiaris
ggctcaggactggcatactgtcact

SEQ ID NO: 163597 - DNA, 25 bp, Canis familiaris
ggcgagatgatgacctacttcctca

SEQ ID NO: 163598 - DNA, 25 bp, Canis familiaris
ggctgagcattactaaatctgcctg

SEQ ID NO: 163599 - DNA, 25 bp, Canis familiaris
ggctgagtgtagtgccttacttttc

SEQ ID NO: 163600 - DNA, 25 bp, Canis familiaris
tggctatggtcgtgatcgtgactat

SEQ ID NO: 163601 - DNA, 25 bp, Canis familiaris
ggctactgcctgtgtgtgtacaata

SEQ ID NO: 163602 - DNA, 25 bp, Canis familiaris
ggctatctgacctcattgtcaagtc

SEQ ID NO: 163603 - DNA, 25 bp, Canis familiaris
ggctatcaaggctcttgtcaagccc

SEQ ID NO: 163604 - DNA, 25 bp, Canis familiaris
ggctttgatgtctcggtgcatcacc

SEQ ID NO: 163605 - DNA, 25 bp, Canis familiaris
ggctaggtgttggcgcttatcacac

SEQ ID NO: 163606 - DNA, 25 bp, Canis familiaris
ggctaggtgtggggtaggagctcct

SEQ ID NO: 163607 - DNA, 25 bp, Canis familiaris
ggctttgttcctttagagacttcct

SEQ ID NO: 163608 - DNA, 25 bp, Canis familiaris
ggctttgttcctttgtggagctata

SEQ ID NO: 163609 - DNA, 25 bp, Canis familiaris
ggctttgtcctgcaagggagctttg

SEQ ID NO: 163610 - DNA, 25 bp, Canis familiaris
ggcttttcctcataggttctttgcc

SEQ ID NO: 163611 - DNA, 25 bp, Canis familiaris
ggctgttttctaaaggctattttct

SEQ ID NO: 163612 - DNA, 25 bp, Canis familiaris
ggctatttttaatttgctttgcttt

SEQ ID NO: 163613 - DNA, 25 bp, Canis familiaris
ggctctcttatggacacttttgttc

SEQ ID NO: 163614 - DNA, 25 bp, Canis familiaris
ggctcagcacttaagcacttttccc

SEQ ID NO: 163615 - DNA, 25 bp, Canis familiaris
ggctaggctctttccatgaatgatc

SEQ ID NO: 163616 - DNA, 25 bp, Canis familiaris
ggcttaggcattaccactagatctc

SEQ ID NO: 163617 - DNA, 25 bp, Canis familiaris
ggctttggtgctaccctaagggagg

SEQ ID NO: 163618 - DNA, 25 bp, Canis familiaris
ggctcttagtccaagggtaggggtg

SEQ ID NO: 163619 - DNA, 25 bp, Canis familiaris
ggcttctgcaggcctagggatgggg

SEQ ID NO: 163620 - DNA, 25 bp, Canis familiaris
ggcttctcgcgggaggaagcggaag

SEQ ID NO: 163621 - DNA, 25 bp, Canis familiaris
ggcggctccgtgaggaagccgaggc

SEQ ID NO: 163622 - DNA, 25 bp, Canis familiaris
ggctgtgcccttataaagctggggg

SEQ ID NO: 163623 - DNA, 25 bp, Canis familiaris
ggcttaactttttatgctggggcag

SEQ ID NO: 163624 - DNA, 25 bp, Canis familiaris
ggcttcaagggcattaggggacaca

SEQ ID NO: 163625 - DNA, 25 bp, Canis familiaris
ggcccaagtggcacctgtgggaagc

SEQ ID NO: 163626 - DNA, 25 bp, Canis familiaris
ggccaactgggagccaagggaatcc

SEQ ID NO: 163627 - DNA, 25 bp, Canis familiaris
ggctcaagtgtggagcccgggggcc

SEQ ID NO: 163628 - DNA, 25 bp, Canis familiaris
ggctcaagtctgggaacatgggctg

SEQ ID NO: 163629 - DNA, 25 bp, Canis familiaris
ggctccagtccaagaaagacgggcc

SEQ ID NO: 163630 - DNA, 25 bp, Canis familiaris
ggcttagagaacccagagaggcggc

SEQ ID NO: 163631 - DNA, 25 bp, Canis familiaris
ggctatatggaccccagggtgctgg

SEQ ID NO: 163632 - DNA, 25 bp, Canis familiaris
ggcttatatagccttccagggcaag

SEQ ID NO: 163633 - DNA, 25 bp, Canis familiaris
ggcttattgttgatccgtgccaagt

SEQ ID NO: 163634 - DNA, 25 bp, Canis familiaris
ggctctttttgttccagttatcagt

SEQ ID NO: 163635 - DNA, 25 bp, Canis familiaris
ggcttttactgttaagattctgctg

SEQ ID NO: 163636 - DNA, 25 bp, Canis familiaris
ggctttcttctgaacagcagtcctg

SEQ ID NO: 163637 - DNA, 25 bp, Canis familiaris
ggcttatttctggaagccgccgtgc

SEQ ID NO: 163638 - DNA, 25 bp, Canis familiaris
ggcttatttttactgactgccaggc

SEQ ID NO: 163639 - DNA, 25 bp, Canis familiaris
ggcttatttttgttgaccactcact

SEQ ID NO: 163640 - DNA, 25 bp, Canis familiaris
ggcttagtttagtatacaccctcag

SEQ ID NO: 163641 - DNA, 25 bp, Canis familiaris
ggcgctagttgtagataacggctcc

SEQ ID NO: 163642 - DNA, 25 bp, Canis familiaris
ggcttcatatttacaacacctcttc

SEQ ID NO: 163643 - DNA, 25 bp, Canis familiaris
ggcttcaattcagccaactctcact

SEQ ID NO: 163644 - DNA, 25 bp, Canis familiaris
ggctccatcttggcctcactgtcca

SEQ ID NO: 163645 - DNA, 25 bp, Canis familiaris
ggcttcatcattggccaagcaggca

SEQ ID NO: 163646 - DNA, 25 bp, Canis familiaris
ggcttcacacttcaaaacatactac

SEQ ID NO: 163647 - DNA, 25 bp, Canis familiaris
ggcttcagcctttaaaacacaatct

SEQ ID NO: 163648 - DNA, 25 bp, Canis familiaris
ggctatacctttcaataaagttact

SEQ ID NO: 163649 - DNA, 25 bp, Canis familiaris
ggctaacttctttttagatacttca

SEQ ID NO: 163650 - DNA, 25 bp, Canis familiaris
ggctttttctttaatagattgatat

SEQ ID NO: 163651 - DNA, 25 bp, Canis familiaris
ggctttttctctctatacatatttg

SEQ ID NO: 163652 - DNA, 25 bp, Canis familiaris
ggctttgtcccgttaacatgatcat

SEQ ID NO: 163653 - DNA, 25 bp, Canis familiaris
ggctttgctctgtggaaactgatct

SEQ ID NO: 163654 - DNA, 25 bp, Canis familiaris
ggctttgcttgatctgttgacgctt

SEQ ID NO: 163655 - DNA, 25 bp, Canis familiaris
ggcttagctggttgggtgtctgcct

SEQ ID NO: 163656 - DNA, 25 bp, Canis familiaris
ggcttcacagctcaggtgattatcc

SEQ ID NO: 163657 - DNA, 25 bp, Canis familiaris
ggctatgcacagagtaggactacct

SEQ ID NO: 163658 - DNA, 25 bp, Canis familiaris
ggctagacacttgatggagataccc

SEQ ID NO: 163659 - DNA, 25 bp, Canis familiaris
ggctaactgttggcatgaggtcccc

SEQ ID NO: 163660 - DNA, 25 bp, Canis familiaris
ggctgtccttctgatggaactcttc

SEQ ID NO: 163661 - DNA, 25 bp, Canis familiaris
ggctatccttccaattgaagctgaa

SEQ ID NO: 163662 - DNA, 25 bp, Canis familiaris
ggcttcactcccagtggggaagggc

SEQ ID NO: 163663 - DNA, 25 bp, Canis familiaris
ggctttccaccttgctgtgggagag

SEQ ID NO: 163664 - DNA, 25 bp, Canis familiaris
ggcgtggcacaggaagttggtcaac

SEQ ID NO: 163665 - DNA, 25 bp, Canis familiaris
ggctgttcgcaggaatgttattaga

SEQ ID NO: 163666 - DNA, 25 bp, Canis familiaris
ggctggtgtgcaggtcatgacattc

SEQ ID NO: 163667 - DNA, 25 bp, Canis familiaris
ggctgctgctgttggaatactgtgc

SEQ ID NO: 163668 - DNA, 25 bp, Canis familiaris
ggctttgtctgttgatgtatgatgc

SEQ ID NO: 163669 - DNA, 25 bp, Canis familiaris
ggctttgtctgtggaaactgattac

SEQ ID NO: 163670 - DNA, 25 bp, Canis familiaris
ggctttgccgctggatgggctatta

SEQ ID NO: 163671 - DNA, 25 bp, Canis familiaris
ggctcaaccagtggtggactttttc

SEQ ID NO: 163672 - DNA, 25 bp, Canis familiaris
ggctacactcagactctgaggcctt

SEQ ID NO: 163673 - DNA, 25 bp, Canis familiaris
ggctacagtgagactctgctgtccc

SEQ ID NO: 163674 - DNA, 25 bp, Canis familiaris
ggctacaggatgacacagccaccgc

SEQ ID NO: 163675 - DNA, 25 bp, Canis familiaris
ggctatcgtgaagtgtgccacaagc

SEQ ID NO: 163676 - DNA, 25 bp, Canis familiaris
ggctcttgttgaatatgcccaatgg

SEQ ID NO: 163677 - DNA, 25 bp, Canis familiaris
ggcttatttgaggcatccctcactg

SEQ ID NO: 163678 - DNA, 25 bp, Canis familiaris
ggcttattgatgggcactcttcaga

SEQ ID NO: 163679 - DNA, 25 bp, Canis familiaris
ggctatgaaagcggattcatgatga

SEQ ID NO: 163680 - DNA, 25 bp, Canis familiaris
ggcttacagacccatttgaatcata

SEQ ID NO: 163681 - DNA, 25 bp, Canis familiaris
ggctcaccagacagatccagaactg

SEQ ID NO: 163682 - DNA, 25 bp, Canis familiaris
ggctaactatcaggatccgatttca

SEQ ID NO: 163683 - DNA, 25 bp, Canis familiaris
ggctcaaaataccatagcactttca

SEQ ID NO: 163684 - DNA, 25 bp, Canis familiaris
ggctctgcaaaactatgatgccctc

SEQ ID NO: 163685 - DNA, 25 bp, Canis familiaris
ggctctcgacattgagattgccacc

SEQ ID NO: 163686 - DNA, 25 bp, Canis familiaris
ggctcaaacaaaggtgccatcattg

SEQ ID NO: 163687 - DNA, 25 bp, Canis familiaris
ggctgcaagaccacaggtatattcg

SEQ ID NO: 163688 - DNA, 25 bp, Canis familiaris
ggctactatccaaccattatgcacc

SEQ ID NO: 163689 - DNA, 25 bp, Canis familiaris
ggctacgatcccgtcattaacaggg

SEQ ID NO: 163690 - DNA, 25 bp, Canis familiaris
ggctacctgggctattgtaagcgtg

SEQ ID NO: 163691 - DNA, 25 bp, Canis familiaris
ggctaccaggtctaatgtccataat

SEQ ID NO: 163692 - DNA, 25 bp, Canis familiaris
ggctaccagcaacatcttctatgag

SEQ ID NO: 163693 - DNA, 25 bp, Canis familiaris
ggctagaaatgatgccttatctgag

SEQ ID NO: 163694 - DNA, 25 bp, Canis familiaris
ggctggagacatttccttttacaat

SEQ ID NO: 163695 - DNA, 25 bp, Canis familiaris
ggctaaacttctcagtgtatacagt

SEQ ID NO: 163696 - DNA, 25 bp, Canis familiaris
ggctgcccagttatatctgtaatca

SEQ ID NO: 163697 - DNA, 25 bp, Canis familiaris
ggctcctcgatggcttactataaag

SEQ ID NO: 163698 - DNA, 25 bp, Canis familiaris
ggctccctgccgatacaaaaggcgg

SEQ ID NO: 163699 - DNA, 25 bp, Canis familiaris
ggctcctgccgtctggcaaataagg

SEQ ID NO: 163700 - DNA, 25 bp, Canis familiaris
ggccctcatcgaccagtatttaagg

SEQ ID NO: 163701 - DNA, 25 bp, Canis familiaris
ggcgcagcgttacctttttgaaagg

SEQ ID NO: 163702 - DNA, 25 bp, Canis familiaris
ggcgcggtggaaatttgtcccaaag

SEQ ID NO: 163703 - DNA, 25 bp, Canis familiaris
ggctcagggaacactgtgacccacg

SEQ ID NO: 163704 - DNA, 25 bp, Canis familiaris
tggccgaggaccacgtgttggccgt

SEQ ID NO: 163705 - DNA, 25 bp, Canis familiaris
ggcctggagaccatcaaactggctc

SEQ ID NO: 163706 - DNA, 25 bp, Canis familiaris
ggcgcggaacatcatcaacgcggcc

SEQ ID NO: 163707 - DNA, 25 bp, Canis familiaris
ggcgcaggaacatcatcaacgcggc

SEQ ID NO: 163708 - DNA, 25 bp, Canis familiaris
ggctcaggtactgcagcaaggtgcg

SEQ ID NO: 163709 - DNA, 25 bp, Canis familiaris
ggctcaggtagcaaggagaggatgg

SEQ ID NO: 163710 - DNA, 25 bp, Canis familiaris
ggctcggtggcaagggagcgacggc

SEQ ID NO: 163711 - DNA, 25 bp, Canis familiaris
ggctgagagtaaatgtggggaccta

SEQ ID NO: 163712 - DNA, 25 bp, Canis familiaris
ggctgcaatgttgatggccgtcacc

SEQ ID NO: 163713 - DNA, 25 bp, Canis familiaris
ggctgcaatgttgatggccgtcacc

SEQ ID NO: 163714 - DNA, 25 bp, Canis familiaris
ggctgcaatgttgatggccgtcacc

SEQ ID NO: 163715 - DNA, 25 bp, Canis familiaris
ggctgcaatgttgatggccgtcacc

SEQ ID NO: 163716 - DNA, 25 bp, Canis familiaris
ggctgcaatgttgatggccgtcacc

SEQ ID NO: 163717 - DNA, 25 bp, Canis familiaris
ggctctatgtgacagccacgctgac

SEQ ID NO: 163718 - DNA, 25 bp, Canis familiaris
ggctctcaggatcccctgaggacac

SEQ ID NO: 163719 - DNA, 25 bp, Canis familiaris
ggctcatcgagctctacaaggaagc

SEQ ID NO: 163720 - DNA, 25 bp, Canis familiaris
ggctgcagggccgtagatagtcaca

SEQ ID NO: 163721 - DNA, 25 bp, Canis familiaris
ggctgcagggacttaatttataggg

SEQ ID NO: 163722 - DNA, 25 bp, Canis familiaris
ggctcgcgtcctcaatattataaac

SEQ ID NO: 163723 - DNA, 25 bp, Canis familiaris
ggctctccacctcaatggggaaaat

SEQ ID NO: 163724 - DNA, 25 bp, Canis familiaris
ggctcccaaatctaagcaagtaaaa

SEQ ID NO: 163725 - DNA, 25 bp, Canis familiaris
tggctgcacgaaacacaccggtaaa

SEQ ID NO: 163726 - DNA, 25 bp, Canis familiaris
tggcgcttgagcaccgcatcggctg

SEQ ID NO: 163727 - DNA, 25 bp, Canis familiaris
ggctctctgagcagctggatgacct

SEQ ID NO: 163728 - DNA, 25 bp, Canis familiaris
ggctgtctgatccgacgcagacgac

SEQ ID NO: 163729 - DNA, 25 bp, Canis familiaris
ggctttgttcggccagatagtcacc

SEQ ID NO: 163730 - DNA, 25 bp, Canis familiaris
ggctgttttctggctggtatgttag

SEQ ID NO: 163731 - DNA, 25 bp, Canis familiaris
ggcttatactctatgtgcttgcttc

SEQ ID NO: 163732 - DNA, 25 bp, Canis familiaris
ggctttaatctaagcacatctgttc

SEQ ID NO: 163733 - DNA, 25 bp, Canis familiaris
ggctcttcgtaaagacatctatacg

SEQ ID NO: 163734 - DNA, 25 bp, Canis familiaris
ggctttctgtagatgtgcttgaacg

SEQ ID NO: 163735 - DNA, 25 bp, Canis familiaris
tggtggtttagtggtttaagcgtct

SEQ ID NO: 163736 - DNA, 25 bp, Canis familiaris
ggctggtattaagtgctttaatgga

SEQ ID NO: 163737 - DNA, 25 bp, Canis familiaris
ggctgagtagtagtccattgtgtgt

SEQ ID NO: 163738 - DNA, 25 bp, Canis familiaris
ggctaatagagaccctgatgctgga

SEQ ID NO: 163739 - DNA, 25 bp, Canis familiaris
ggctcatcatagtggctgtgacgat

SEQ ID NO: 163740 - DNA, 25 bp, Canis familiaris
ggctgactgatggtgtgctagaact

SEQ ID NO: 163741 - DNA, 25 bp, Canis familiaris
ggctgagtgtgaagggagctcccct

SEQ ID NO: 163742 - DNA, 25 bp, Canis familiaris
ggcttattgatacaactgccacatc

SEQ ID NO: 163743 - DNA, 25 bp, Canis familiaris
ggctctgagtaaccaagcccacaca

SEQ ID NO: 163744 - DNA, 25 bp, Canis familiaris
ggctctggtaccaaatggccagcac

SEQ ID NO: 163745 - DNA, 25 bp, Canis familiaris
ggctcagcgtgtgcctaccctgcgc

SEQ ID NO: 163746 - DNA, 25 bp, Canis familiaris
ggctcacgtgtggaccacgttagca

SEQ ID NO: 163747 - DNA, 25 bp, Canis familiaris
ggctcactgctgagagcctgcttct

SEQ ID NO: 163748 - DNA, 25 bp, Canis familiaris
ggctgactatgaaaccagtgtccaa

SEQ ID NO: 163749 - DNA, 25 bp, Canis familiaris
ggctatcttgcaatcacgtattcca

SEQ ID NO: 163750 - DNA, 25 bp, Canis familiaris
ggctagctagcacacagtatatcat

SEQ ID NO: 163751 - DNA, 25 bp, Canis familiaris
ggctcacctgcacacagaacaatga

SEQ ID NO: 163752 - DNA, 25 bp, Canis familiaris
ggctctgctccaacaaactcaagag

SEQ ID NO: 163753 - DNA, 25 bp, Canis familiaris
ggctagtccaaactttgcaggctgc

SEQ ID NO: 163754 - DNA, 25 bp, Canis familiaris
ggctagatcttatgtgtctgagtcc

SEQ ID NO: 163755 - DNA, 25 bp, Canis familiaris
ggctaatattgcactgttcagtaaa

SEQ ID NO: 163756 - DNA, 25 bp, Canis familiaris
ggctgaattggttgctttttggtga

SEQ ID NO: 163757 - DNA, 25 bp, Canis familiaris
ggcgactttggagctgttggtgcca

SEQ ID NO: 163758 - DNA, 25 bp, Canis familiaris
ggctcatcttctgaacatttggctc

SEQ ID NO: 163759 - DNA, 25 bp, Canis familiaris
ggctttactccagcagatcttgcct

SEQ ID NO: 163760 - DNA, 25 bp, Canis familiaris
ggctttactccagcagatcttgcct

SEQ ID NO: 163761 - DNA, 25 bp, Canis familiaris
ggctttactccagcagatcttgcct

SEQ ID NO: 163762 - DNA, 25 bp, Canis familiaris
ggctttactccagcagatcttgcct

SEQ ID NO: 163763 - DNA, 25 bp, Canis familiaris
ggctcttagtcctgacatgctggcc

SEQ ID NO: 163764 - DNA, 25 bp, Canis familiaris
ggctttagggctgcagctgcaggcg

SEQ ID NO: 163765 - DNA, 25 bp, Canis familiaris
ggctttaggttcagagcccatggcc

SEQ ID NO: 163766 - DNA, 25 bp, Canis familiaris
ggctttagacttaggggcacgctcc

SEQ ID NO: 163767 - DNA, 25 bp, Canis familiaris
ggctgttaactttggatgtatcacc

SEQ ID NO: 163768 - DNA, 25 bp, Canis familiaris
ggctttgtcacatatgaaccatctg

SEQ ID NO: 163769 - DNA, 25 bp, Canis familiaris
ggctttgtcagcttatatatgtctt

SEQ ID NO: 163770 - DNA, 25 bp, Canis familiaris
ggctttccactctatgtgtatctgt

SEQ ID NO: 163771 - DNA, 25 bp, Canis familiaris
ggctgttagtctttttattgttttg

SEQ ID NO: 163772 - DNA, 25 bp, Canis familiaris
ggctgttagcttgttttattctttg

SEQ ID NO: 163773 - DNA, 25 bp, Canis familiaris
ggctgaccctttagttctatttagt

SEQ ID NO: 163774 - DNA, 25 bp, Canis familiaris
ggctattcttgtatgtatctattta

SEQ ID NO: 163775 - DNA, 25 bp, Canis familiaris
ggctaagcttgtaatgttttcgagt

SEQ ID NO: 163776 - DNA, 25 bp, Canis familiaris
ggccgaattggtagattttcaggct

SEQ ID NO: 163777 - DNA, 25 bp, Canis familiaris
ggctcagatattggctcttcttgta

SEQ ID NO: 163778 - DNA, 25 bp, Canis familiaris
ggctcaataagcatttttgcagcaa

SEQ ID NO: 163779 - DNA, 25 bp, Canis familiaris
ggctcacattcgaacttgcctacac

SEQ ID NO: 163780 - DNA, 25 bp, Canis familiaris
ggctgtctttgaatgtttgccacac

SEQ ID NO: 163781 - DNA, 25 bp, Canis familiaris
ggctttggtggcatcatcacacaca

SEQ ID NO: 163782 - DNA, 25 bp, Canis familiaris
ggctatctgggggtgatgcccgagt

SEQ ID NO: 163783 - DNA, 25 bp, Canis familiaris
ggctcaagggcgttgtgccttggcc

SEQ ID NO: 163784 - DNA, 25 bp, Canis familiaris
ggctaacaaggactgccctgtggac

SEQ ID NO: 163785 - DNA, 25 bp, Canis familiaris
ggctaagagaggaacgccttgcaca

SEQ ID NO: 163786 - DNA, 25 bp, Canis familiaris
ggctaagaaggcgggcacatgacta

SEQ ID NO: 163787 - DNA, 25 bp, Canis familiaris
ggctaagtggtggtggccagcatgc

SEQ ID NO: 163788 - DNA, 25 bp, Canis familiaris
ggctgtagttggtggcaggtgccag

SEQ ID NO: 163789 - DNA, 25 bp, Canis familiaris
ggctgttttgcgtagcatcgtgtgc

SEQ ID NO: 163790 - DNA, 25 bp, Canis familiaris
ggctgttcctgggacatgctttaaa

SEQ ID NO: 163791 - DNA, 25 bp, Canis familiaris
ggctttctcatggctgaactatgta

SEQ ID NO: 163792 - DNA, 25 bp, Canis familiaris
ggctccctgcaaggagactgatgtg

SEQ ID NO: 163793 - DNA, 25 bp, Canis familiaris
ggctcccatcgtgggagcgaacgtt

SEQ ID NO: 163794 - DNA, 25 bp, Canis familiaris
ggctctggtcgtggtgacagcaacc

SEQ ID NO: 163795 - DNA, 25 bp, Canis familiaris
ggctatgagcacgtgggacatccaa

SEQ ID NO: 163796 - DNA, 25 bp, Canis familiaris
ggctattgagccagagtcactaacc

SEQ ID NO: 163797 - DNA, 25 bp, Canis familiaris
ggctgcattggagcaggattctgca

SEQ ID NO: 163798 - DNA, 25 bp, Canis familiaris
ggcgcatggtgagcagacgatgcat

SEQ ID NO: 163799 - DNA, 25 bp, Canis familiaris
ggcgatgaatcagtccctgaatcct

SEQ ID NO: 163800 - DNA, 25 bp, Canis familiaris
ggctgagatatagacctaatgttga

SEQ ID NO: 163801 - DNA, 25 bp, Canis familiaris
ggctgagcgatacgacgaaatggtg

SEQ ID NO: 163802 - DNA, 25 bp, Canis familiaris
ggctactgcatataacacaaggggg

SEQ ID NO: 163803 - DNA, 25 bp, Canis familiaris
ggctcactgagaaaatgcatgccag

SEQ ID NO: 163804 - DNA, 25 bp, Canis familiaris
ggctcctgcacattgtacagccgta

SEQ ID NO: 163805 - DNA, 25 bp, Canis familiaris
ggctcccacaggatcagaggctgaa

SEQ ID NO: 163806 - DNA, 25 bp, Canis familiaris
ggctttgctgcccttgaaggcatga

SEQ ID NO: 163807 - DNA, 25 bp, Canis familiaris
ggctcttgtgccatcgaaggaggtg

SEQ ID NO: 163808 - DNA, 25 bp, Canis familiaris
ggctttctgcaggttgtagggcgct

SEQ ID NO: 163809 - DNA, 25 bp, Canis familiaris
ggctctgaggaggtggtatgttgat

SEQ ID NO: 163810 - DNA, 25 bp, Canis familiaris
ggctatgctggggattaagtatgtc

SEQ ID NO: 163811 - DNA, 25 bp, Canis familiaris
ggctgtgggggctgagagtcatgcc

SEQ ID NO: 163812 - DNA, 25 bp, Canis familiaris
ggctggggctttcaagtcagcacat

SEQ ID NO: 163813 - DNA, 25 bp, Canis familiaris
ggctagggccttaacaacgccagcc

SEQ ID NO: 163814 - DNA, 25 bp, Canis familiaris
ggctagggacgtcgacaaggaccac

SEQ ID NO: 163815 - DNA, 25 bp, Canis familiaris
ggctcagtgcgaaggaggcggtggc

SEQ ID NO: 163816 - DNA, 25 bp, Canis familiaris
ggctcaggcacaagcaacctgggct

SEQ ID NO: 163817 - DNA, 25 bp, Canis familiaris
ggctcatgaccacagtccatgccat

SEQ ID NO: 163818 - DNA, 25 bp, Canis familiaris
ggctcataccagggaccagactgac

SEQ ID NO: 163819 - DNA, 25 bp, Canis familiaris
ggctaaccgatagtacagcccacct

SEQ ID NO: 163820 - DNA, 25 bp, Canis familiaris
ggctaactagatttaaatctccatc

SEQ ID NO: 163821 - DNA, 25 bp, Canis familiaris
ggctacaataaacagatcatctccc

SEQ ID NO: 163822 - DNA, 25 bp, Canis familiaris
ggctccagcaatgtcgagatcctca

SEQ ID NO: 163823 - DNA, 25 bp, Canis familiaris
ggctcaagcagtttagcaacctgcc

SEQ ID NO: 163824 - DNA, 25 bp, Canis familiaris
ggctcagtgatttatcaccaccttc

SEQ ID NO: 163825 - DNA, 25 bp, Canis familiaris
ggctgcagtgtgttaactaccttgg

SEQ ID NO: 163826 - DNA, 25 bp, Canis familiaris
ggctcaggggctgagcccactgggc

SEQ ID NO: 163827 - DNA, 25 bp, Canis familiaris
ggctatggaggagaccatccgacgt

SEQ ID NO: 163828 - DNA, 25 bp, Canis familiaris
ggctttgagggcaacctgtgcaaca

SEQ ID NO: 163829 - DNA, 25 bp, Canis familiaris
ggctgggcagtgacaacattggcaa

SEQ ID NO: 163830 - DNA, 25 bp, Canis familiaris
ggctgttgagtccaatattgtccac

SEQ ID NO: 163831 - DNA, 25 bp, Canis familiaris
ggctctgtgaccaagatattccacc

SEQ ID NO: 163832 - DNA, 25 bp, Canis familiaris
ggctctcgacactgagagtgccact

SEQ ID NO: 163833 - DNA, 25 bp, Canis familiaris
ggctcacggacaagatggtgccgcc

SEQ ID NO: 163834 - DNA, 25 bp, Canis familiaris
ggctccggatcagtgacgatggtcc

SEQ ID NO: 163835 - DNA, 25 bp, Canis familiaris
ggctgctacagtgtgtccagtgtcc

SEQ ID NO: 163836 - DNA, 25 bp, Canis familiaris
ggctgcctatgaggtgaccagggcc

SEQ ID NO: 163837 - DNA, 25 bp, Canis familiaris
ggctacagatagtgaccagtgacca

SEQ ID NO: 163838 - DNA, 25 bp, Canis familiaris
ggctacaatcagagtgccggttctt

SEQ ID NO: 163839 - DNA, 25 bp, Canis familiaris
ggctacattcagagtgctgggtttc

SEQ ID NO: 163840 - DNA, 25 bp, Canis familiaris
ggctaatgatgctttttttgtttct

SEQ ID NO: 163841 - DNA, 25 bp, Canis familiaris
ggctcacatgtattttactttgttc

SEQ ID NO: 163842 - DNA, 25 bp, Canis familiaris
ggctataatacatttcctattttcg

SEQ ID NO: 163843 - DNA, 25 bp, Canis familiaris
ggctgctagaaatatcctccttact

SEQ ID NO: 163844 - DNA, 25 bp, Canis familiaris
ggctgaaagaatcatcccctgaagt

SEQ ID NO: 163845 - DNA, 25 bp, Canis familiaris
ggctgtaagaactcagtgctgtggg

SEQ ID NO: 163846 - DNA, 25 bp, Canis familiaris
ggctggtacaacaaagtgcttggtc

SEQ ID NO: 163847 - DNA, 25 bp, Canis familiaris
ggctgggcacagattggtgttggta

SEQ ID NO: 163848 - DNA, 25 bp, Canis familiaris
ggctcgtgatccactgtggtctagc

SEQ ID NO: 163849 - DNA, 25 bp, Canis familiaris
ggctatgtcttaaatgtggccatca

SEQ ID NO: 163850 - DNA, 25 bp, Canis familiaris
ggctatctctaaaattgatccagct

SEQ ID NO: 163851 - DNA, 25 bp, Canis familiaris
ggctacttgagaccatcctgaatgc

SEQ ID NO: 163852 - DNA, 25 bp, Canis familiaris
ggctacctgatgggtgtgcgagagc

SEQ ID NO: 163853 - DNA, 25 bp, Canis familiaris
ggctagaagagcagcgggagcagca

SEQ ID NO: 163854 - DNA, 25 bp, Canis familiaris
ggctctagtatctgtgggcagcagc

SEQ ID NO: 163855 - DNA, 25 bp, Canis familiaris
ggctccattgcaccggggagcctga

SEQ ID NO: 163856 - DNA, 25 bp, Canis familiaris
ggctgccttcgcagaagaaccagaa

SEQ ID NO: 163857 - DNA, 25 bp, Canis familiaris
ggctgctttcagctagaacatctca

SEQ ID NO: 163858 - DNA, 25 bp, Canis familiaris
ggccttccaaattaatgcccaaaag

SEQ ID NO: 163859 - DNA, 25 bp, Canis familiaris
ggctcccaaaagtttgtacaaacag

SEQ ID NO: 163860 - DNA, 25 bp, Canis familiaris
ggctctgcacaaacagtaagtcaag

SEQ ID NO: 163861 - DNA, 25 bp, Canis familiaris
ggctcatgcaaatctgttaggacag

SEQ ID NO: 163862 - DNA, 25 bp, Canis familiaris
ggctgtgcataattcatcctactga

SEQ ID NO: 163863 - DNA, 25 bp, Canis familiaris
ggctgtccataaaccatcctggaag

SEQ ID NO: 163864 - DNA, 25 bp, Canis familiaris
ggctccacaacaacactacttggca

SEQ ID NO: 163865 - DNA, 25 bp, Canis familiaris
ggctgccacatgaaccaaaacgaca

SEQ ID NO: 163866 - DNA, 25 bp, Canis familiaris
ggctgccagcagagagatcaaagga

SEQ ID NO: 163867 - DNA, 25 bp, Canis familiaris
ggctgccaagaacaactggtacccc

SEQ ID NO: 163868 - DNA, 25 bp, Canis familiaris
ggctcgcaagaagcttctggctgac

SEQ ID NO: 163869 - DNA, 25 bp, Canis familiaris
ggctcgcaagaagcttctggctgac

SEQ ID NO: 163870 - DNA, 25 bp, Canis familiaris
ggctcgcaagaagcttctggctgac

SEQ ID NO: 163871 - DNA, 25 bp, Canis familiaris
ggcccaaaagctgttgcactacctc

SEQ ID NO: 163872 - DNA, 25 bp, Canis familiaris
ggcccagaagttgctacattacctc

SEQ ID NO: 163873 - DNA, 25 bp, Canis familiaris
ggccaaaactatgtgacttgagaca

SEQ ID NO: 163874 - DNA, 25 bp, Canis familiaris
ggcccaagcccaagtatttggagca

SEQ ID NO: 163875 - DNA, 25 bp, Canis familiaris
ggcccagtccaatgtgtttggggct

SEQ ID NO: 163876 - DNA, 25 bp, Canis familiaris
ggctccagaaccttttttgttgttg

SEQ ID NO: 163877 - DNA, 25 bp, Canis familiaris
ggctgccagaacacttcatttgacg

SEQ ID NO: 163878 - DNA, 25 bp, Canis familiaris
ggctctagctacacatattactgtc

SEQ ID NO: 163879 - DNA, 25 bp, Canis familiaris
ggctcaagatcattatattccctcc

SEQ ID NO: 163880 - DNA, 25 bp, Canis familiaris
ggctccaaattcaatgttcgtctgc

SEQ ID NO: 163881 - DNA, 25 bp, Canis familiaris
ggctcgcaaatctttgatacggccg

SEQ ID NO: 163882 - DNA, 25 bp, Canis familiaris
ggctccagactatttaaacgtccgc

SEQ ID NO: 163883 - DNA, 25 bp, Canis familiaris
ggctgccagaatatgctaaaccttt

SEQ ID NO: 163884 - DNA, 25 bp, Canis familiaris
ggctgccaaggaagcaaaaaaggct

SEQ ID NO: 163885 - DNA, 25 bp, Canis familiaris
ggctgatcgggtcaaatgaaaggtg

SEQ ID NO: 163886 - DNA, 25 bp, Canis familiaris
ggccttgagcgtccacattaaacgg

SEQ ID NO: 163887 - DNA, 25 bp, Canis familiaris
ggctctgtgaggtcgacaccaaacg

SEQ ID NO: 163888 - DNA, 25 bp, Canis familiaris
ggctcagagagacaacacacacaca

SEQ ID NO: 163889 - DNA, 25 bp, Canis familiaris
ggctgcaggaacacaatcaagcaaa

SEQ ID NO: 163890 - DNA, 25 bp, Canis familiaris
ggctcaggacacacaactggggcag

SEQ ID NO: 163891 - DNA, 25 bp, Canis familiaris
ggctcaggcagcagtgcctttgggc

SEQ ID NO: 163892 - DNA, 25 bp, Canis familiaris
ggctagcagcacagtcttgtgggcg

SEQ ID NO: 163893 - DNA, 25 bp, Canis familiaris
ggctgtggctaaggctttgtggcaa

SEQ ID NO: 163894 - DNA, 25 bp, Canis familiaris
ggctgtgtgcaatgtaaggataaag

SEQ ID NO: 163895 - DNA, 25 bp, Canis familiaris
tggctggcatcttggaaaacattaa

SEQ ID NO: 163896 - DNA, 25 bp, Canis familiaris
ggctggctccctttatgaattaata

SEQ ID NO: 163897 - DNA, 25 bp, Canis familiaris
ggctgggcaccacattgttaaataa

SEQ ID NO: 163898 - DNA, 25 bp, Canis familiaris
ggcgggattccagctgtggaaataa

SEQ ID NO: 163899 - DNA, 25 bp, Canis familiaris
ggcgaagctaccatctgtgggatta

SEQ ID NO: 163900 - DNA, 25 bp, Canis familiaris
ggcgaagtacttcttgacgctctca

SEQ ID NO: 163901 - DNA, 25 bp, Canis familiaris
ggcggcgaagttgattaggcagcga

SEQ ID NO: 163902 - DNA, 25 bp, Canis familiaris
ggcggagggattaatgtggacgtga

SEQ ID NO: 163903 - DNA, 25 bp, Canis familiaris
ggcggtagcgatttgggtacgatta

SEQ ID NO: 163904 - DNA, 25 bp, Canis familiaris
ggcggtaaggaaggagctcactgag

SEQ ID NO: 163905 - DNA, 25 bp, Canis familiaris
ggcggacctgaactgtacgcaggag

SEQ ID NO: 163906 - DNA, 25 bp, Canis familiaris
ggctgagatcctggagttggccggc

SEQ ID NO: 163907 - DNA, 25 bp, Canis familiaris
ggctgagattggggttggtggccct

SEQ ID NO: 163908 - DNA, 25 bp, Canis familiaris
ggctgagatgggtggggtgcctggg

SEQ ID NO: 163909 - DNA, 25 bp, Canis familiaris
ggctgctagaggcggggcagggggt

SEQ ID NO: 163910 - DNA, 25 bp, Canis familiaris
ggctctagcgttcgaacgcactgat

SEQ ID NO: 163911 - DNA, 25 bp, Canis familiaris
ggctctacggtttcaagatccatcc

SEQ ID NO: 163912 - DNA, 25 bp, Canis familiaris
tggcttctcagattctaacgtcctt

SEQ ID NO: 163913 - DNA, 25 bp, Canis familiaris
ggcgtcatcgttcgaatcaactctt

SEQ ID NO: 163914 - DNA, 25 bp, Canis familiaris
ggccatagctttccaagcaagccaa

SEQ ID NO: 163915 - DNA, 25 bp, Canis familiaris
ggctcaggctcttgcgagagaacta

SEQ ID NO: 163916 - DNA, 25 bp, Canis familiaris
ggctctgtgctcagcatggagtttc

SEQ ID NO: 163917 - DNA, 25 bp, Canis familiaris
ggctctgcactcagctaagagtctg

SEQ ID NO: 163918 - DNA, 25 bp, Canis familiaris
ggctgcgacccagtctatgagtcga

SEQ ID NO: 163919 - DNA, 25 bp, Canis familiaris
ggctcaaactcagctgcatggtcag

SEQ ID NO: 163920 - DNA, 25 bp, Canis familiaris
ggctacacgtgaggctgtggtgcgt

SEQ ID NO: 163921 - DNA, 25 bp, Canis familiaris
ggctcacactgtttctgtgcatgta

SEQ ID NO: 163922 - DNA, 25 bp, Canis familiaris
ggctgatgatgtgacctggtgtata

SEQ ID NO: 163923 - DNA, 25 bp, Canis familiaris
ggctgctgcagatgactctggtttg

SEQ ID NO: 163924 - DNA, 25 bp, Canis familiaris
ggctgctgaagcccacggcctgcac

SEQ ID NO: 163925 - DNA, 25 bp, Canis familiaris
ggctgagagagcctgccggatgatg

SEQ ID NO: 163926 - DNA, 25 bp, Canis familiaris
ggcgagggcgccagggaaatttgtg

SEQ ID NO: 163927 - DNA, 25 bp, Canis familiaris
ggctgaggagcccttggggagtttt

SEQ ID NO: 163928 - DNA, 25 bp, Canis familiaris
ggctgggatgctgccataggagggt

SEQ ID NO: 163929 - DNA, 25 bp, Canis familiaris
ggctctggtccactctgagtgaggc

SEQ ID NO: 163930 - DNA, 25 bp, Canis familiaris
ggctcggaggctccagagtgggtgc

SEQ ID NO: 163931 - DNA, 25 bp, Canis familiaris
ggctcactgaggaccagctgtggag

SEQ ID NO: 163932 - DNA, 25 bp, Canis familiaris
ggctctgcgggtgagcgtggaggct

SEQ ID NO: 163933 - DNA, 25 bp, Canis familiaris
ggctcatcccagatggctgtggggt

SEQ ID NO: 163934 - DNA, 25 bp, Canis familiaris
ggctctctgcctatgagtcattggg

SEQ ID NO: 163935 - DNA, 25 bp, Canis familiaris
ggctcgctgcttcatgatgtatatg

SEQ ID NO: 163936 - DNA, 25 bp, Canis familiaris
ggctgagtccattaagtatctgact

SEQ ID NO: 163937 - DNA, 25 bp, Canis familiaris
ggctctgccctcaagtatacagact

SEQ ID NO: 163938 - DNA, 25 bp, Canis familiaris
ggctactgagctggagttagtgact

SEQ ID NO: 163939 - DNA, 25 bp, Canis familiaris
ggctcagtcacggtgaacgctgatt

SEQ ID NO: 163940 - DNA, 25 bp, Canis familiaris
ggctcaatcacccaagatggctgtg

SEQ ID NO: 163941 - DNA, 25 bp, Canis familiaris
ggctaaagcccaaagcggatcaaag

SEQ ID NO: 163942 - DNA, 25 bp, Canis familiaris
ggctacaagccctgaagctgtagaa

SEQ ID NO: 163943 - DNA, 25 bp, Canis familiaris
ggctcacaggccgggaggctaagtc

SEQ ID NO: 163944 - DNA, 25 bp, Canis familiaris
ggctcacgccctgggtatgaaacct

SEQ ID NO: 163945 - DNA, 25 bp, Canis familiaris
ggctgaccctgatggacatgaaatt

SEQ ID NO: 163946 - DNA, 25 bp, Canis familiaris
ggcggactgttactgagctgcgttt

SEQ ID NO: 163947 - DNA, 25 bp, Canis familiaris
ggcggactgttactgagctgcgttt

SEQ ID NO: 163948 - DNA, 25 bp, Canis familiaris
ggcgagatgtgaagaagactgggtt

SEQ ID NO: 163949 - DNA, 25 bp, Canis familiaris
ggcgatgacgacgacgacgtagggt

SEQ ID NO: 163950 - DNA, 25 bp, Canis familiaris
ggcgtaccagcagcaatgccatgag

SEQ ID NO: 163951 - DNA, 25 bp, Canis familiaris
ggctgataccatctgcaattgtggc

SEQ ID NO: 163952 - DNA, 25 bp, Canis familiaris
ggctgataccttcctgaggtggtca

SEQ ID NO: 163953 - DNA, 25 bp, Canis familiaris
ggctgacacgtccattaagggtagt

SEQ ID NO: 163954 - DNA, 25 bp, Canis familiaris
ggctcacactgtggtgtcgaaagta

SEQ ID NO: 163955 - DNA, 25 bp, Canis familiaris
ggctcacctggcagcggagaaggag

SEQ ID NO: 163956 - DNA, 25 bp, Canis familiaris
ggctctttgtgtcctgtggacagga

SEQ ID NO: 163957 - DNA, 25 bp, Canis familiaris
ggctcagtggttgatttagcagtgc

SEQ ID NO: 163958 - DNA, 25 bp, Canis familiaris
ggctcactggttgaatgtctgcgtt

SEQ ID NO: 163959 - DNA, 25 bp, Canis familiaris
ggctcagtggttgaatgtctgcctt

SEQ ID NO: 163960 - DNA, 25 bp, Canis familiaris
ggctgagtgtttaagcacctgcttt

SEQ ID NO: 163961 - DNA, 25 bp, Canis familiaris
ggctgcaataataataacctttttc

SEQ ID NO: 163962 - DNA, 25 bp, Canis familiaris
ggctgtcagacgacaaactctcttc

SEQ ID NO: 163963 - DNA, 25 bp, Canis familiaris
ggctgtgctatccctgtacgcctct

SEQ ID NO: 163964 - DNA, 25 bp, Canis familiaris
ggctgtgctatccctgtacgcctct

SEQ ID NO: 163965 - DNA, 25 bp, Canis familiaris
ggctgtgctgtccctgtatgcctct

SEQ ID NO: 163966 - DNA, 25 bp, Canis familiaris
ggctgatgtatccacatttccattg

SEQ ID NO: 163967 - DNA, 25 bp, Canis familiaris
ggctgcagctatccagataaccacg

SEQ ID NO: 163968 - DNA, 25 bp, Canis familiaris
ggctcccagacatgacagccatcat

SEQ ID NO: 163969 - DNA, 25 bp, Canis familiaris
ggctgctcgcggctgagcagcctcg

SEQ ID NO: 163970 - DNA, 25 bp, Canis familiaris
ggctcacgctggtagatgatagctc

SEQ ID NO: 163971 - DNA, 25 bp, Canis familiaris
ggctcactggtattggatagctcac

SEQ ID NO: 163972 - DNA, 25 bp, Canis familiaris
ggctgagaggtcctctgatcactcc

SEQ ID NO: 163973 - DNA, 25 bp, Canis familiaris
ggctcagagggccattgaggcgcca

SEQ ID NO: 163974 - DNA, 25 bp, Canis familiaris
ggctcaaggggaagcagttcacgtg

SEQ ID NO: 163975 - DNA, 25 bp, Canis familiaris
ggctccaggggaatgtatttgcttg

SEQ ID NO: 163976 - DNA, 25 bp, Canis familiaris
ggctccagggacattcgaagtgcaa

SEQ ID NO: 163977 - DNA, 25 bp, Canis familiaris
ggctccgaggacagcaaaatgtgaa

SEQ ID NO: 163978 - DNA, 25 bp, Canis familiaris
ggctccagggccaaaaactctgatc

SEQ ID NO: 163979 - DNA, 25 bp, Canis familiaris
ggctgcggggctcaggaaatctgaa

SEQ ID NO: 163980 - DNA, 25 bp, Canis familiaris
ggctgggctggacactgatttatga

SEQ ID NO: 163981 - DNA, 25 bp, Canis familiaris
ggctgggctactttgatgatgcttt

SEQ ID NO: 163982 - DNA, 25 bp, Canis familiaris
ggcggtaactttatgctgttccttt

SEQ ID NO: 163983 - DNA, 25 bp, Canis familiaris
ggcgggacacgtttgttgattggct

SEQ ID NO: 163984 - DNA, 25 bp, Canis familiaris
ggcgtggaacgtgatggtgttgggg

SEQ ID NO: 163985 - DNA, 25 bp, Canis familiaris
ggctgcttgatttgtgttgggttag

SEQ ID NO: 163986 - DNA, 25 bp, Canis familiaris
ggctcatgaatttttctgtttgtca

SEQ ID NO: 163987 - DNA, 25 bp, Canis familiaris
ggctcagatgatatgtgctctattt

SEQ ID NO: 163988 - DNA, 25 bp, Canis familiaris
ggctctgtgtatagctgagctaatc

SEQ ID NO: 163989 - DNA, 25 bp, Canis familiaris
ggctctttatcagcagcatgcctaa

SEQ ID NO: 163990 - DNA, 25 bp, Canis familiaris
ggccataagatcccgacttaaacgg

SEQ ID NO: 163991 - DNA, 25 bp, Canis familiaris
ggcgctactggtctattggaaacgg

SEQ ID NO: 163992 - DNA, 25 bp, Canis familiaris
ggcggacagtgctgtatttaaacag

SEQ ID NO: 163993 - DNA, 25 bp, Canis familiaris
ggcggtagtcttgatagtagaggct

SEQ ID NO: 163994 - DNA, 25 bp, Canis familiaris
ggcgggggtcaggtgagaagaggct

SEQ ID NO: 163995 - DNA, 25 bp, Canis familiaris
ggctggaggagcagttaatgaagct

SEQ ID NO: 163996 - DNA, 25 bp, Canis familiaris
ggctcgaagctgagttacaggaggc

SEQ ID NO: 163997 - DNA, 25 bp, Canis familiaris
ggctcgggctgggcagaaaggctac

SEQ ID NO: 163998 - DNA, 25 bp, Canis familiaris
ggctcggcgcagagcaagaactcaa

SEQ ID NO: 163999 - DNA, 25 bp, Canis familiaris
ggctgcgatcctacaacagacacac

SEQ ID NO: 164000 - DNA, 25 bp, Canis familiaris
ggctcttcagcttcagacaggccaa

SEQ ID NO: 164001 - DNA, 25 bp, Canis familiaris
ggctcattgtgatcgatcatcggca

SEQ ID NO: 164002 - DNA, 25 bp, Canis familiaris
ggctcattgcccagatgacagtcag

SEQ ID NO: 164003 - DNA, 25 bp, Canis familiaris
ggctgatgggccagctgagaccagc

SEQ ID NO: 164004 - DNA, 25 bp, Canis familiaris
ggctgatggcctgggcagaagccag

SEQ ID NO: 164005 - DNA, 25 bp, Canis familiaris
tggcagtgagccaggaggaggcata

SEQ ID NO: 164006 - DNA, 25 bp, Canis familiaris
ggctgctgaggatcgaggagacaag

SEQ ID NO: 164007 - DNA, 25 bp, Canis familiaris
ggctgctgcaggtcctacaaaggag

SEQ ID NO: 164008 - DNA, 25 bp, Canis familiaris
ggctctgcaggactctgatcaagcg

SEQ ID NO: 164009 - DNA, 25 bp, Canis familiaris
ggctgggtgagcatgccacatgcaa

SEQ ID NO: 164010 - DNA, 25 bp, Canis familiaris
ggctgcagggtgatgccaacaacct

SEQ ID NO: 164011 - DNA, 25 bp, Canis familiaris
ggctgtggcttgttagaaaacctca

SEQ ID NO: 164012 - DNA, 25 bp, Canis familiaris
ggcgtgtctgggatcaaaagccaat

SEQ ID NO: 164013 - DNA, 25 bp, Canis familiaris
ggcgtgggtatgaagccagaagcca

SEQ ID NO: 164014 - DNA, 25 bp, Canis familiaris
ggcggtggtgcaatacagcgggccc

SEQ ID NO: 164015 - DNA, 25 bp, Canis familiaris
ggctggaggtaaacaaggcccacct

SEQ ID NO: 164016 - DNA, 25 bp, Canis familiaris
ggctggggccagacaaagactcggc

SEQ ID NO: 164017 - DNA, 25 bp, Canis familiaris
ggctgttcctcattcaaaggttgtt

SEQ ID NO: 164018 - DNA, 25 bp, Canis familiaris
ggctccactcgctctaagagtagtt

SEQ ID NO: 164019 - DNA, 25 bp, Canis familiaris
ggctcaccacactaccaagtaaggt

SEQ ID NO: 164020 - DNA, 25 bp, Canis familiaris
ggctccgcccagaacaaatacggca

SEQ ID NO: 164021 - DNA, 25 bp, Canis familiaris
ggctgcccccatgaaagaagcgagc

SEQ ID NO: 164022 - DNA, 25 bp, Canis familiaris
ggctgccataaataaccaagtacca

SEQ ID NO: 164023 - DNA, 25 bp, Canis familiaris
ggctgccaacaacatttctaatacc

SEQ ID NO: 164024 - DNA, 25 bp, Canis familiaris
ggctgccaactcttcattattgtaa

SEQ ID NO: 164025 - DNA, 25 bp, Canis familiaris
ggctcacaactgtttctgaggaaag

SEQ ID NO: 164026 - DNA, 25 bp, Canis familiaris
ggctcagaacttgattgggctccag

SEQ ID NO: 164027 - DNA, 25 bp, Canis familiaris
ggctccaagttcaaggaggtcaaga

SEQ ID NO: 164028 - DNA, 25 bp, Canis familiaris
ggctcctgaatgtcacggggacaaa

SEQ ID NO: 164029 - DNA, 25 bp, Canis familiaris
ggctgcctgccagaagaggtgacag

SEQ ID NO: 164030 - DNA, 25 bp, Canis familiaris
ggctgcctccatcaaggagcatcac

SEQ ID NO: 164031 - DNA, 25 bp, Canis familiaris
ggctgcctttacaggccagagcagt

SEQ ID NO: 164032 - DNA, 25 bp, Canis familiaris
ggctcactttcactgaggacaagga

SEQ ID NO: 164033 - DNA, 25 bp, Canis familiaris
ggctggtttgcgaagaagacggagt

SEQ ID NO: 164034 - DNA, 25 bp, Canis familiaris
ggctgatttttgagaagaaatacac

SEQ ID NO: 164035 - DNA, 25 bp, Canis familiaris
ggctccctgttgaaaagtcgatata

SEQ ID NO: 164036 - DNA, 25 bp, Canis familiaris
ggctcggcatggtaaacactggaat

SEQ ID NO: 164037 - DNA, 25 bp, Canis familiaris
ggctgggatgcatttacccttggca

SEQ ID NO: 164038 - DNA, 25 bp, Canis familiaris
ggctgagttatctatactctcttgg

SEQ ID NO: 164039 - DNA, 25 bp, Canis familiaris
ggctgttgtaattgcagatcctgtg

SEQ ID NO: 164040 - DNA, 25 bp, Canis familiaris
ggctgccgtagagtcattccagagc

SEQ ID NO: 164041 - DNA, 25 bp, Canis familiaris
ggctgtcttgacgttttcagacttg

SEQ ID NO: 164042 - DNA, 25 bp, Canis familiaris
ggctgcttatgtgcttttcaactac

SEQ ID NO: 164043 - DNA, 25 bp, Canis familiaris
ggctgctgtgggcttcttagaacac

SEQ ID NO: 164044 - DNA, 25 bp, Canis familiaris
ggctctgatctctcttataaggaca

SEQ ID NO: 164045 - DNA, 25 bp, Canis familiaris
ggctctgttcagatgttcagggaaa

SEQ ID NO: 164046 - DNA, 25 bp, Canis familiaris
ggctcagttcatgtggatcatcagg

SEQ ID NO: 164047 - DNA, 25 bp, Canis familiaris
ggctcaggcaaggatggacatcacg

SEQ ID NO: 164048 - DNA, 25 bp, Canis familiaris
ggctgcgaagtggcagcctcaccga

SEQ ID NO: 164049 - DNA, 25 bp, Canis familiaris
ggctgcaaatgcagagcccagctcg

SEQ ID NO: 164050 - DNA, 25 bp, Canis familiaris
ggctgtttgtaggctgccagcagca

SEQ ID NO: 164051 - DNA, 25 bp, Canis familiaris
ggctcatctttgcaggcaagcagct

SEQ ID NO: 164052 - DNA, 25 bp, Canis familiaris
ggctctgctttctcatcaagcattt

SEQ ID NO: 164053 - DNA, 25 bp, Canis familiaris
ggctcattgttctccagagcgttag

SEQ ID NO: 164054 - DNA, 25 bp, Canis familiaris
ggctcttaacctccagactgagtga

SEQ ID NO: 164055 - DNA, 25 bp, Canis familiaris
ggccttgaacctccacatctggagg

SEQ ID NO: 164056 - DNA, 25 bp, Canis familiaris
ggctgataacccatcctgggatggt

SEQ ID NO: 164057 - DNA, 25 bp, Canis familiaris
ggctcataacccaattgctggcttg

SEQ ID NO: 164058 - DNA, 25 bp, Canis familiaris
ggctgcatcaactgctgcaaggtgc

SEQ ID NO: 164059 - DNA, 25 bp, Canis familiaris
ggctctcagggcctgatatgggcct

SEQ ID NO: 164060 - DNA, 25 bp, Canis familiaris
ggctctgacgtgtttgatggtgact

SEQ ID NO: 164061 - DNA, 25 bp, Canis familiaris
ggctctggagcttgttatctgtgac

SEQ ID NO: 164062 - DNA, 25 bp, Canis familiaris
ggctctggagcttgtgcatatgtgc

SEQ ID NO: 164063 - DNA, 25 bp, Canis familiaris
ggctcctggatgacagctctgatgc

SEQ ID NO: 164064 - DNA, 25 bp, Canis familiaris
ggctcctggatgacagctctgatgc

SEQ ID NO: 164065 - DNA, 25 bp, Canis familiaris
ggctcctggatgacagctctgatgc

SEQ ID NO: 164066 - DNA, 25 bp, Canis familiaris
ggctcctggcaagttcttgtccagc

SEQ ID NO: 164067 - DNA, 25 bp, Canis familiaris
ggctcctggactggaattttcactt

SEQ ID NO: 164068 - DNA, 25 bp, Canis familiaris
ggctcagtagccagaagtcttccat

SEQ ID NO: 164069 - DNA, 25 bp, Canis familiaris
ggctggtacatcccaagacttcaat

SEQ ID NO: 164070 - DNA, 25 bp, Canis familiaris
ggctgcgtctttcagaacttcaacc

SEQ ID NO: 164071 - DNA, 25 bp, Canis familiaris
ggctcgtctctttgcaaagtgtcag

SEQ ID NO: 164072 - DNA, 25 bp, Canis familiaris
ggctcagttggttgaagcatatgcc

SEQ ID NO: 164073 - DNA, 25 bp, Canis familiaris
ggctcagttggctaagtgtcagccc

SEQ ID NO: 164074 - DNA, 25 bp, Canis familiaris
ggctcagtcggtaagtgttcactct

SEQ ID NO: 164075 - DNA, 25 bp, Canis familiaris
ggctcaggcaataaagtgtctcact

SEQ ID NO: 164076 - DNA, 25 bp, Canis familiaris
ggctgaagcaaaagaggcactcacc

SEQ ID NO: 164077 - DNA, 25 bp, Canis familiaris
ggctgaaagcagacaaaccacacca

SEQ ID NO: 164078 - DNA, 25 bp, Canis familiaris
ggctgcaaaattcataccaaccaac

SEQ ID NO: 164079 - DNA, 25 bp, Canis familiaris
ggcgaaacttccacagcaaatacac

SEQ ID NO: 164080 - DNA, 25 bp, Canis familiaris
ggcgggtttcctttcatgatataca

SEQ ID NO: 164081 - DNA, 25 bp, Canis familiaris
ggccaggcttccatttcaaaagtca

SEQ ID NO: 164082 - DNA, 25 bp, Canis familiaris
ggctcgcgtcccattaggacgggca

SEQ ID NO: 164083 - DNA, 25 bp, Canis familiaris
ggctcccttccacttggagagggtg

SEQ ID NO: 164084 - DNA, 25 bp, Canis familiaris
ggctccctaccacaagagcacaagg

SEQ ID NO: 164085 - DNA, 25 bp, Canis familiaris
ggctgatctaaccagaaaagcaccg

SEQ ID NO: 164086 - DNA, 25 bp, Canis familiaris
ggcgttacagcgcaacagcagcctg

SEQ ID NO: 164087 - DNA, 25 bp, Canis familiaris
ggctgaataccctagagaggctctg

SEQ ID NO: 164088 - DNA, 25 bp, Canis familiaris
ggctccaaccacagcagtggttagc

SEQ ID NO: 164089 - DNA, 25 bp, Canis familiaris
ggctccaagatgccctttggggagc

SEQ ID NO: 164090 - DNA, 25 bp, Canis familiaris
ggctccggaggcgtaaggactcagc

SEQ ID NO: 164091 - DNA, 25 bp, Canis familiaris
ggctcccgctggataagagcagccc

SEQ ID NO: 164092 - DNA, 25 bp, Canis familiaris
ggctcttccggacggaggagctcac

SEQ ID NO: 164093 - DNA, 25 bp, Canis familiaris
ggctcagtcggaagcggagtgcaga

SEQ ID NO: 164094 - DNA, 25 bp, Canis familiaris
ggctcgataagaaccagactgcaga

SEQ ID NO: 164095 - DNA, 25 bp, Canis familiaris
ggctctgtataatccatggctgtat

SEQ ID NO: 164096 - DNA, 25 bp, Canis familiaris
ggctcttgacacttagccgctgtct

SEQ ID NO: 164097 - DNA, 25 bp, Canis familiaris
ggctgtgcaacatgtaccaggatgg

SEQ ID NO: 164098 - DNA, 25 bp, Canis familiaris
ggctgtggaaaaactcaggctggta

SEQ ID NO: 164099 - DNA, 25 bp, Canis familiaris
ggctctggaattctcaaggctggga

SEQ ID NO: 164100 - DNA, 25 bp, Canis familiaris
ggctccggtatgtgcaaggcgggct

SEQ ID NO: 164101 - DNA, 25 bp, Canis familiaris
ggctccggcctggtgaaagccggct

SEQ ID NO: 164102 - DNA, 25 bp, Canis familiaris
ggctccgagcctgggaaacaaggaa

SEQ ID NO: 164103 - DNA, 25 bp, Canis familiaris
ggctccgacctgtgtgacaaagtga

SEQ ID NO: 164104 - DNA, 25 bp, Canis familiaris
ggctccaacagttttggaaatggcc

SEQ ID NO: 164105 - DNA, 25 bp, Canis familiaris
tggatcctagggtgtctggaggccc

SEQ ID NO: 164106 - DNA, 25 bp, Canis familiaris
tgccccttgggctttcataagtccc

SEQ ID NO: 164107 - DNA, 25 bp, Canis familiaris
ggcctcttagcctgtaaagtcattt

SEQ ID NO: 164108 - DNA, 25 bp, Canis familiaris
ggcctctataaccaaaaatgacttt

SEQ ID NO: 164109 - DNA, 25 bp, Canis familiaris
ggcccttacaagtctaaggactgtg

SEQ ID NO: 164110 - DNA, 25 bp, Canis familiaris
ggcccggggagacaaggactcgagc

SEQ ID NO: 164111 - DNA, 25 bp, Canis familiaris
ggccgggggaaagctgctattctga

SEQ ID NO: 164112 - DNA, 25 bp, Canis familiaris
ggcctagggtgggagacgtttccag

SEQ ID NO: 164113 - DNA, 25 bp, Canis familiaris
ggcgcataggggcaacacagtggta

SEQ ID NO: 164114 - DNA, 25 bp, Canis familiaris
ggcgtgagcgcgggaaacgtgggag

SEQ ID NO: 164115 - DNA, 25 bp, Canis familiaris
ggcggaagccgggttggtggagaga

SEQ ID NO: 164116 - DNA, 25 bp, Canis familiaris
ggcggccccgagatggggcgaggct

SEQ ID NO: 164117 - DNA, 25 bp, Canis familiaris
ggctcccccaggaggctgggagccc

SEQ ID NO: 164118 - DNA, 25 bp, Canis familiaris
ggctccaccgtgactcggtggggct

SEQ ID NO: 164119 - DNA, 25 bp, Canis familiaris
ggctctaaggattctgcggtggggc

SEQ ID NO: 164120 - DNA, 25 bp, Canis familiaris
ggctctaaggattgccaaggatccg

SEQ ID NO: 164121 - DNA, 25 bp, Canis familiaris
ggcctacgagaagcgcgtgagcgtg

SEQ ID NO: 164122 - DNA, 25 bp, Canis familiaris
ggccaggcaaaactgccggactatt

SEQ ID NO: 164123 - DNA, 25 bp, Canis familiaris
ggctgcaggaattcggcacgaggtt

SEQ ID NO: 164124 - DNA, 25 bp, Canis familiaris
ggctgcaggaattcggcacgaggtt

SEQ ID NO: 164125 - DNA, 25 bp, Canis familiaris
ggctgcaggaattcggcacgaggtg

SEQ ID NO: 164126 - DNA, 25 bp, Canis familiaris
ggctgcaggaattcggcacgagggt

SEQ ID NO: 164127 - DNA, 25 bp, Canis familiaris
ggctgcaggaattcggcacgagcag

SEQ ID NO: 164128 - DNA, 25 bp, Canis familiaris
ggctgggatacagtgggcgtcaggg

SEQ ID NO: 164129 - DNA, 25 bp, Canis familiaris
ggcgggatgaaagatgcagtccggg

SEQ ID NO: 164130 - DNA, 25 bp, Canis familiaris
ggcgggaaacacaggcacagccgag

SEQ ID NO: 164131 - DNA, 25 bp, Canis familiaris
ggctggaacccatcgagaagcacca

SEQ ID NO: 164132 - DNA, 25 bp, Canis familiaris
ggctggaacgactggatcatcgccc

SEQ ID NO: 164133 - DNA, 25 bp, Canis familiaris
ggctcgcaatagtaggcaacatccc

SEQ ID NO: 164134 - DNA, 25 bp, Canis familiaris
ggccagatcaagactggagccccat

SEQ ID NO: 164135 - DNA, 25 bp, Canis familiaris
ggctgatccagagcatggagcccct

SEQ ID NO: 164136 - DNA, 25 bp, Canis familiaris
ggctgtgacagagctggcacggacc

SEQ ID NO: 164137 - DNA, 25 bp, Canis familiaris
ggctgtacacaggggcctgggagcc

SEQ ID NO: 164138 - DNA, 25 bp, Canis familiaris
ggctgtcactgtgttctatgggacc

SEQ ID NO: 164139 - DNA, 25 bp, Canis familiaris
ggctgtcctgctattttgagaacct

SEQ ID NO: 164140 - DNA, 25 bp, Canis familiaris
ggctgtcctggaatacttaccaggt

SEQ ID NO: 164141 - DNA, 25 bp, Canis familiaris
ggcgcccatggaaatccatgcccgg

SEQ ID NO: 164142 - DNA, 25 bp, Canis familiaris
ggctgcttctagttcatcagcatcg

SEQ ID NO: 164143 - DNA, 25 bp, Canis familiaris
ggctgctcctgagttatagcccttt

SEQ ID NO: 164144 - DNA, 25 bp, Canis familiaris
ggctgcccatacttaatgtttttga

SEQ ID NO: 164145 - DNA, 25 bp, Canis familiaris
ggctgccctgaagacatctttatgt

SEQ ID NO: 164146 - DNA, 25 bp, Canis familiaris
ggctctcagtaatatcctatttata

SEQ ID NO: 164147 - DNA, 25 bp, Canis familiaris
ggcctgagtactgacctaagaagca

SEQ ID NO: 164148 - DNA, 25 bp, Canis familiaris
ggcggtttgctctacttaagaagga

SEQ ID NO: 164149 - DNA, 25 bp, Canis familiaris
ggctgtggcttctgacttctagaag

SEQ ID NO: 164150 - DNA, 25 bp, Canis familiaris
ggctgtgaactacgactttgacgag

SEQ ID NO: 164151 - DNA, 25 bp, Canis familiaris
ggctgtgaagagtgccttgctgccg

SEQ ID NO: 164152 - DNA, 25 bp, Canis familiaris
ggctgaagctcagagatgttaagtg

SEQ ID NO: 164153 - DNA, 25 bp, Canis familiaris
ggctctagaccacgtgtccaaatgc

SEQ ID NO: 164154 - DNA, 25 bp, Canis familiaris
tggcctgagcagagtgttcctaagc

SEQ ID NO: 164155 - DNA, 25 bp, Canis familiaris
ggcctaaaaggtccctagtgtagtg

SEQ ID NO: 164156 - DNA, 25 bp, Canis familiaris
ggcctaataagtgacactatagaac

SEQ ID NO: 164157 - DNA, 25 bp, Canis familiaris
ggcccaagaacctccagaagacagc

SEQ ID NO: 164158 - DNA, 25 bp, Canis familiaris
ggccgcggggctctccagaacatca

SEQ ID NO: 164159 - DNA, 25 bp, Canis familiaris
ggccgtggggctgcccagaacatca

SEQ ID NO: 164160 - DNA, 25 bp, Canis familiaris
ggcgcggttcgtgccaagatacatc

SEQ ID NO: 164161 - DNA, 25 bp, Canis familiaris
ggctgggttagtttcatagctctga

SEQ ID NO: 164162 - DNA, 25 bp, Canis familiaris
ggctctggattaggattctcactgg

SEQ ID NO: 164163 - DNA, 25 bp, Canis familiaris
ggctggtattattgccatctactgg

SEQ ID NO: 164164 - DNA, 25 bp, Canis familiaris
ggctgtgtttatttctcagacgcac

SEQ ID NO: 164165 - DNA, 25 bp, Canis familiaris
ggctgtgtgttcactacggcatgat

SEQ ID NO: 164166 - DNA, 25 bp, Canis familiaris
ggctcgctgttcacgaggagctatt

SEQ ID NO: 164167 - DNA, 25 bp, Canis familiaris
ggctctgctgagaatatcggggctc

SEQ ID NO: 164168 - DNA, 25 bp, Canis familiaris
ggctctgctcaggtttgggaggcac

SEQ ID NO: 164169 - DNA, 25 bp, Canis familiaris
ggctctgatcaggttgtgtttcgtc

SEQ ID NO: 164170 - DNA, 25 bp, Canis familiaris
ggctctgatcggatggagttgctgg

SEQ ID NO: 164171 - DNA, 25 bp, Canis familiaris
ggctgtacgggcaagagggctgggc

SEQ ID NO: 164172 - DNA, 25 bp, Canis familiaris
ggctctacgtaggatgagggtggct

SEQ ID NO: 164173 - DNA, 25 bp, Canis familiaris
ggctctgaccgggcaaggatgtggc

SEQ ID NO: 164174 - DNA, 25 bp, Canis familiaris
ggctctccttgggtgggagttgcga

SEQ ID NO: 164175 - DNA, 25 bp, Canis familiaris
ggctccctggggttgatgatttggc

SEQ ID NO: 164176 - DNA, 25 bp, Canis familiaris
ggctgcgtcaggtatttgatgcttt

SEQ ID NO: 164177 - DNA, 25 bp, Canis familiaris
ggctctgtgcaggaagtctgatgtg

SEQ ID NO: 164178 - DNA, 25 bp, Canis familiaris
ggctctgtagctggcagacgtgggc

SEQ ID NO: 164179 - DNA, 25 bp, Canis familiaris
ggctgctctcgcgtagacgaggagc

SEQ ID NO: 164180 - DNA, 25 bp, Canis familiaris
ggctgcccgcattggaccgggcagg

SEQ ID NO: 164181 - DNA, 25 bp, Canis familiaris
ggctccctggcataccaggacggag

SEQ ID NO: 164182 - DNA, 25 bp, Canis familiaris
ggctctctagtctcacaaggacgga

SEQ ID NO: 164183 - DNA, 25 bp, Canis familiaris
ggctctctagctgtcaagatatgag

SEQ ID NO: 164184 - DNA, 25 bp, Canis familiaris
ggctgctctactggtcctataatat

SEQ ID NO: 164185 - DNA, 25 bp, Canis familiaris
ggctccttgggtgcatgtgtatagt

SEQ ID NO: 164186 - DNA, 25 bp, Canis familiaris
ggctccttgtatacctgtgaatatg

SEQ ID NO: 164187 - DNA, 25 bp, Canis familiaris
ggctcctcttgactgcttatagtaa

SEQ ID NO: 164188 - DNA, 25 bp, Canis familiaris
ggctctgctctgtcaggcaataaaa

SEQ ID NO: 164189 - DNA, 25 bp, Canis familiaris
ggctgctcgtatggccggacaaaac

SEQ ID NO: 164190 - DNA, 25 bp, Canis familiaris
ggctggagtgtccctggagaatgca

SEQ ID NO: 164191 - DNA, 25 bp, Canis familiaris
ggctgtaaatgccaagaaagatgct

SEQ ID NO: 164192 - DNA, 25 bp, Canis familiaris
ggctgacatcacaagaaggaaactc

SEQ ID NO: 164193 - DNA, 25 bp, Canis familiaris
ggctgcacagcaatacaaactacac

SEQ ID NO: 164194 - DNA, 25 bp, Canis familiaris
ggctgcacgcgcgctacactgactg

SEQ ID NO: 164195 - DNA, 25 bp, Canis familiaris
ggctccatgcagggaacctgacgtg

SEQ ID NO: 164196 - DNA, 25 bp, Canis familiaris
ggctccatgcagggaccctgatgca

SEQ ID NO: 164197 - DNA, 25 bp, Canis familiaris
ggctgctcagaggggccacagcagc

SEQ ID NO: 164198 - DNA, 25 bp, Canis familiaris
ggctgcagcacgagacgcaggagct

SEQ ID NO: 164199 - DNA, 25 bp, Canis familiaris
ggctgacaagtccagggtgaccacc

SEQ ID NO: 164200 - DNA, 25 bp, Canis familiaris
ggctgctcaagtgcaagcgtgacag

SEQ ID NO: 164201 - DNA, 25 bp, Canis familiaris
ggctgtgcacaggccagatcaagac

SEQ ID NO: 164202 - DNA, 25 bp, Canis familiaris
ggctgctgagcagggtacagataca

SEQ ID NO: 164203 - DNA, 25 bp, Canis familiaris
ggcggatcacggagatgatgtcaac

SEQ ID NO: 164204 - DNA, 25 bp, Canis familiaris
ggctgagaacgggaagcttgtcatc

SEQ ID NO: 164205 - DNA, 25 bp, Canis familiaris
ggctgagaacgggaaacttgtcatc

SEQ ID NO: 164206 - DNA, 25 bp, Canis familiaris
tggctgtgacccagcgaatctttca

SEQ ID NO: 164207 - DNA, 25 bp, Canis familiaris
tggcttgcaccctggaatgcgaagg

SEQ ID NO: 164208 - DNA, 25 bp, Canis familiaris
ggctgctgcgcaaagggaactacgc

SEQ ID NO: 164209 - DNA, 25 bp, Canis familiaris
ggctgatgccatttttgcaatctca

SEQ ID NO: 164210 - DNA, 25 bp, Canis familiaris
ggctgtgcacatttgcttgagctgt

SEQ ID NO: 164211 - DNA, 25 bp, Canis familiaris
ggctgcatcagtttgcattcctaac

SEQ ID NO: 164212 - DNA, 25 bp, Canis familiaris
ggctgccagtttttgctgatacagg

SEQ ID NO: 164213 - DNA, 25 bp, Canis familiaris
ggctccttctgttctgggaaggtct

SEQ ID NO: 164214 - DNA, 25 bp, Canis familiaris
ggctccctatgatctgaagaaagct

SEQ ID NO: 164215 - DNA, 25 bp, Canis familiaris
ggctccatttaaaacaaacaggcaa

SEQ ID NO: 164216 - DNA, 25 bp, Canis familiaris
ggctgtatttaaggacaccgcgccc

SEQ ID NO: 164217 - DNA, 25 bp, Canis familiaris
ggcgttttctgagcatacctggaaa

SEQ ID NO: 164218 - DNA, 25 bp, Canis familiaris
ggcgttttgagaccagacgggaagg

SEQ ID NO: 164219 - DNA, 25 bp, Canis familiaris
ggcgcttttaagagacacccaggga

SEQ ID NO: 164220 - DNA, 25 bp, Canis familiaris
ggccgttaaagcggctcatcccaga

SEQ ID NO: 164221 - DNA, 25 bp, Canis familiaris
ggccgaaaagcggcgtcatacccac

SEQ ID NO: 164222 - DNA, 25 bp, Canis familiaris
ggcggaagacaggacgttggccttt

SEQ ID NO: 164223 - DNA, 25 bp, Canis familiaris
ggcgtgaaggaggacttccgcctgg

SEQ ID NO: 164224 - DNA, 25 bp, Canis familiaris
ggcgtacaggtttgttaactctggt

SEQ ID NO: 164225 - DNA, 25 bp, Canis familiaris
ggctgctaatgagttctgcttatac

SEQ ID NO: 164226 - DNA, 25 bp, Canis familiaris
ggctgctcaggaattactggattct

SEQ ID NO: 164227 - DNA, 25 bp, Canis familiaris
ggctgccgaagggaccgattctggc

SEQ ID NO: 164228 - DNA, 25 bp, Canis familiaris
ggctgacaaggaaggccgattcaag

SEQ ID NO: 164229 - DNA, 25 bp, Canis familiaris
ggctgacgaggcgggcagtgtgtac

SEQ ID NO: 164230 - DNA, 25 bp, Canis familiaris
ggctgtcgcagctgaagcagttgct

SEQ ID NO: 164231 - DNA, 25 bp, Canis familiaris
ggctgccgcagtacgagcagttcat

SEQ ID NO: 164232 - DNA, 25 bp, Canis familiaris
ggctggcggtcagagatgtctctga

SEQ ID NO: 164233 - DNA, 25 bp, Canis familiaris
ggctgggccctggatgggcctgaag

SEQ ID NO: 164234 - DNA, 25 bp, Canis familiaris
ggctgagatcggggaggccctgaag

SEQ ID NO: 164235 - DNA, 25 bp, Canis familiaris
ggctgagaagggccagtgccagtgg

SEQ ID NO: 164236 - DNA, 25 bp, Canis familiaris
ggctgagtagagtgcaaccactggg

SEQ ID NO: 164237 - DNA, 25 bp, Canis familiaris
ggcgatgtagacctcaaccatttga

SEQ ID NO: 164238 - DNA, 25 bp, Canis familiaris
ggcgagtcgagcctacagtgactgt

SEQ ID NO: 164239 - DNA, 25 bp, Canis familiaris
ggctggacaagctgacagtcacctc

SEQ ID NO: 164240 - DNA, 25 bp, Canis familiaris
ggctgaacaaacttgcagtccactc

SEQ ID NO: 164241 - DNA, 25 bp, Canis familiaris
ggctgaccaagaacggtccatcctc

SEQ ID NO: 164242 - DNA, 25 bp, Canis familiaris
ggctgtccaaattaggactgcccta

SEQ ID NO: 164243 - DNA, 25 bp, Canis familiaris
ggctcggcgaatggagtgactcgct

SEQ ID NO: 164244 - DNA, 25 bp, Canis familiaris
ggctgcaccgggcagtagtgcacta

SEQ ID NO: 164245 - DNA, 25 bp, Canis familiaris
ggctcccatggggagactgcttctc

SEQ ID NO: 164246 - DNA, 25 bp, Canis familiaris
ggctccactggacgagatggttctc

SEQ ID NO: 164247 - DNA, 25 bp, Canis familiaris
ggctccctgctgggtatggagtcta

SEQ ID NO: 164248 - DNA, 25 bp, Canis familiaris
ggctccccctagtatgatgagtctt

SEQ ID NO: 164249 - DNA, 25 bp, Canis familiaris
ggcgttgtccaacatgatgcacttt

SEQ ID NO: 164250 - DNA, 25 bp, Canis familiaris
ggctgcttttctggaatgtgctctt

SEQ ID NO: 164251 - DNA, 25 bp, Canis familiaris
ggctggtttacgccgctttctgaca

SEQ ID NO: 164252 - DNA, 25 bp, Canis familiaris
ggctggtcttaaaggctttcggctt

SEQ ID NO: 164253 - DNA, 25 bp, Canis familiaris
ggctgagccattttcttttttgact

SEQ ID NO: 164254 - DNA, 25 bp, Canis familiaris
ggcgatgcctgattttattatattg

SEQ ID NO: 164255 - DNA, 25 bp, Canis familiaris
ggcgagtgtgttgtcacttaggaga

SEQ ID NO: 164256 - DNA, 25 bp, Canis familiaris
ggcgggtttcaaatgcattacgaga

SEQ ID NO: 164257 - DNA, 25 bp, Canis familiaris
ggcgggttccataggaatgcacaaa

SEQ ID NO: 164258 - DNA, 25 bp, Canis familiaris
ggcgggtcagcttcggaatggaaag

SEQ ID NO: 164259 - DNA, 25 bp, Canis familiaris
ggcggagcagcgatcggaggtgaga

SEQ ID NO: 164260 - DNA, 25 bp, Canis familiaris
ggctggacagccgtcttagggctgg

SEQ ID NO: 164261 - DNA, 25 bp, Canis familiaris
ggctggagtccaagctatttggggg

SEQ ID NO: 164262 - DNA, 25 bp, Canis familiaris
ggctgccaggcccagtatttgggac

SEQ ID NO: 164263 - DNA, 25 bp, Canis familiaris
ggcggccccaaggactttggagccg

SEQ ID NO: 164264 - DNA, 25 bp, Canis familiaris
ggcggaccgagacagtacagaagct

SEQ ID NO: 164265 - DNA, 25 bp, Canis familiaris
ggcctccttggacattaccaacatc

SEQ ID NO: 164266 - DNA, 25 bp, Canis familiaris
ggctgccatcttcgacaagtacaag

SEQ ID NO: 164267 - DNA, 25 bp, Canis familiaris
ggctgccttccatgaactcaaagag

SEQ ID NO: 164268 - DNA, 25 bp, Canis familiaris
ggctgctttgaccagaaagccaaca

SEQ ID NO: 164269 - DNA, 25 bp, Canis familiaris
ggctgatctggagacacagcgccag

SEQ ID NO: 164270 - DNA, 25 bp, Canis familiaris
ggctgcatcggtgccatcaaggagg

SEQ ID NO: 164271 - DNA, 25 bp, Canis familiaris
ggctcctgtgtgagcaccagggagg

SEQ ID NO: 164272 - DNA, 25 bp, Canis familiaris
ggccctttgtgtgctcacagggaga

SEQ ID NO: 164273 - DNA, 25 bp, Canis familiaris
ggcccaacggtctcatcagttgaac

SEQ ID NO: 164274 - DNA, 25 bp, Canis familiaris
ggcccaacggtatagtgctgccttc

SEQ ID NO: 164275 - DNA, 25 bp, Canis familiaris
tgtccgcaagttcaaagtctcctat

SEQ ID NO: 164276 - DNA, 25 bp, Canis familiaris
ggccgcatggttcacaaaatccttt

SEQ ID NO: 164277 - DNA, 25 bp, Canis familiaris
ggcctgagacttcattgcagaccct

SEQ ID NO: 164278 - DNA, 25 bp, Canis familiaris
tggcgtgaactgccatttcgacccc

SEQ ID NO: 164279 - DNA, 25 bp, Canis familiaris
tggctggaggggtataaccccctcg

SEQ ID NO: 164280 - DNA, 25 bp, Canis familiaris
ggctgaagggaatatgcaccgcctc

SEQ ID NO: 164281 - DNA, 25 bp, Canis familiaris
ggcgaagagaaggaccagccacctc

SEQ ID NO: 164282 - DNA, 25 bp, Canis familiaris
ggcgaatggagtgactcgctgacaa

SEQ ID NO: 164283 - DNA, 25 bp, Canis familiaris
ggcgcaagatgactgtcaacggagc

SEQ ID NO: 164284 - DNA, 25 bp, Canis familiaris
ggctgatagatgggtaactgctacc

SEQ ID NO: 164285 - DNA, 25 bp, Canis familiaris
ggctgaagtttgtaattcatcctct

SEQ ID NO: 164286 - DNA, 25 bp, Canis familiaris
ggctgaagtttgtaaatcaatcctt

SEQ ID NO: 164287 - DNA, 25 bp, Canis familiaris
ggcgactcttattttaaatctcttg

SEQ ID NO: 164288 - DNA, 25 bp, Canis familiaris
ggcgagtttttggtaatgatgatcc

SEQ ID NO: 164289 - DNA, 25 bp, Canis familiaris
ggctgcagtttcatgttagggtctt

SEQ ID NO: 164290 - DNA, 25 bp, Canis familiaris
ggcgaatgcttcttaatactggtat

SEQ ID NO: 164291 - DNA, 25 bp, Canis familiaris
ggctgtggcttcaataaacctgtct

SEQ ID NO: 164292 - DNA, 25 bp, Canis familiaris
ggctgggattgtattcatgactgtc

SEQ ID NO: 164293 - DNA, 25 bp, Canis familiaris
ggctccatgaagttttatgcactgt

SEQ ID NO: 164294 - DNA, 25 bp, Canis familiaris
ggctcctacgtcttttgacatgact

SEQ ID NO: 164295 - DNA, 25 bp, Canis familiaris
ggctgtctttgagttttgttgactg

SEQ ID NO: 164296 - DNA, 25 bp, Canis familiaris
ggctgtccttttaagtgtctggttt

SEQ ID NO: 164297 - DNA, 25 bp, Canis familiaris
ggctgactgccttagtagtgtctgc

SEQ ID NO: 164298 - DNA, 25 bp, Canis familiaris
ggctgtccactgcatgtagatacca

SEQ ID NO: 164299 - DNA, 25 bp, Canis familiaris
ggctgtccagttctatgatgcattc

SEQ ID NO: 164300 - DNA, 25 bp, Canis familiaris
ggctgacacgttcttggaacacatg

SEQ ID NO: 164301 - DNA, 25 bp, Canis familiaris
ggctgtcctttcttgtggggagaga

SEQ ID NO: 164302 - DNA, 25 bp, Canis familiaris
ggctgtcccacttagtaggctagaa

SEQ ID NO: 164303 - DNA, 25 bp, Canis familiaris
ggctccaccacagcagtgggtagca

SEQ ID NO: 164304 - DNA, 25 bp, Canis familiaris
ggctgccagctacggttggttagca

SEQ ID NO: 164305 - DNA, 25 bp, Canis familiaris
ggctgctcatgcagccggtgcagct

SEQ ID NO: 164306 - DNA, 25 bp, Canis familiaris
ggctgcatcatcaggagtgtgttcc

SEQ ID NO: 164307 - DNA, 25 bp, Canis familiaris
ggcgctctaggtggatggttttctc

SEQ ID NO: 164308 - DNA, 25 bp, Canis familiaris
ggcgtctagagggggtggcaatcac

SEQ ID NO: 164309 - DNA, 25 bp, Canis familiaris
ggcgtgacaggtcgggtggtacacc

SEQ ID NO: 164310 - DNA, 25 bp, Canis familiaris
ggctggacagagagggcctggaccc

SEQ ID NO: 164311 - DNA, 25 bp, Canis familiaris
ggctggagctggagagagacatgga

SEQ ID NO: 164312 - DNA, 25 bp, Canis familiaris
ggctgcagcgggtccaggacaagac

SEQ ID NO: 164313 - DNA, 25 bp, Canis familiaris
ggctgccgaggacctgtacaagaag

SEQ ID NO: 164314 - DNA, 25 bp, Canis familiaris
ggcgccagggcaattgtaaagacat

SEQ ID NO: 164315 - DNA, 25 bp, Canis familiaris
ggcgctggtggcctattaccagaaa

SEQ ID NO: 164316 - DNA, 25 bp, Canis familiaris
ggctgtactgagcaaatctctagaa

SEQ ID NO: 164317 - DNA, 25 bp, Canis familiaris
ggctgccactgaggagttcatcaag

SEQ ID NO: 164318 - DNA, 25 bp, Canis familiaris
ggctgccacgaccaagtgacagcaa

SEQ ID NO: 164319 - DNA, 25 bp, Canis familiaris
ggctcctagcaccatgaagatcaag

SEQ ID NO: 164320 - DNA, 25 bp, Canis familiaris
ggctccagctgctacaaagtcagag

SEQ ID NO: 164321 - DNA, 25 bp, Canis familiaris
ggctgccgtcaacaagctgcagggc

SEQ ID NO: 164322 - DNA, 25 bp, Canis familiaris
ggctgctctgaaaggatgctgctgc

SEQ ID NO: 164323 - DNA, 25 bp, Canis familiaris
ggctgcatctgcaaaggaggctcgg

SEQ ID NO: 164324 - DNA, 25 bp, Canis familiaris
ggccctcacaagcagtgctcttgtg

SEQ ID NO: 164325 - DNA, 25 bp, Canis familiaris
ggctgccagacactggggactttcg

SEQ ID NO: 164326 - DNA, 25 bp, Canis familiaris
ggctgacaacagcagtgatgagtat

SEQ ID NO: 164327 - DNA, 25 bp, Canis familiaris
tggctacgatcccgtcattaacagg

SEQ ID NO: 164328 - DNA, 25 bp, Canis familiaris
tggctacctgggctattgtaagcgt

SEQ ID NO: 164329 - DNA, 25 bp, Canis familiaris
ggcgaccaggactatattctcaagg

SEQ ID NO: 164330 - DNA, 25 bp, Canis familiaris
ggctgatctccgaatcatttctgca

SEQ ID NO: 164331 - DNA, 25 bp, Canis familiaris
ggctgcccagcattatattttcaag

SEQ ID NO: 164332 - DNA, 25 bp, Canis familiaris
ggctgtctacattgatttcttgaaa

SEQ ID NO: 164333 - DNA, 25 bp, Canis familiaris
ggctgacaacatccttggtagaaaa

SEQ ID NO: 164334 - DNA, 25 bp, Canis familiaris
ggctgccggggcatcagtagaaaac

SEQ ID NO: 164335 - DNA, 25 bp, Canis familiaris
ggcggcgcaaggcggctagaagaaa

SEQ ID NO: 164336 - DNA, 25 bp, Canis familiaris
ggcggcctacagagaaaaagaaaag

SEQ ID NO: 164337 - DNA, 25 bp, Canis familiaris
ggcctccccagtcaaagaaaacgag

SEQ ID NO: 164338 - DNA, 25 bp, Canis familiaris
ggccccccaggaaattacacaactg

SEQ ID NO: 164339 - DNA, 25 bp, Canis familiaris
ggcccccgaatctttgtataaactg

SEQ ID NO: 164340 - DNA, 25 bp, Canis familiaris
ggcccaccaagctttttaaattcag

SEQ ID NO: 164341 - DNA, 25 bp, Canis familiaris
tggcccccagtgttttataaactgt

SEQ ID NO: 164342 - DNA, 25 bp, Canis familiaris
ggcccgaaggatttttatctccgtg

SEQ ID NO: 164343 - DNA, 25 bp, Canis familiaris
ggcccaggaggatttcttcaaccac

SEQ ID NO: 164344 - DNA, 25 bp, Canis familiaris
ggccccgaggttgctatgcaacccg

SEQ ID NO: 164345 - DNA, 25 bp, Canis familiaris
ggcgcccagggtagtcttgaatccc

SEQ ID NO: 164346 - DNA, 25 bp, Canis familiaris
ggcgacacagggagaccattgtcca

SEQ ID NO: 164347 - DNA, 25 bp, Canis familiaris
ggcggagtgggatgactatgtgccc

SEQ ID NO: 164348 - DNA, 25 bp, Canis familiaris
ggcgggtggtaggcgtgtggccgcc

SEQ ID NO: 164349 - DNA, 25 bp, Canis familiaris
ggcggagttgctggccaatgtggcc

SEQ ID NO: 164350 - DNA, 25 bp, Canis familiaris
ggctgtcttctgtgccaatgtgtgc

SEQ ID NO: 164351 - DNA, 25 bp, Canis familiaris
ggctgtctttgatctagaaggctgg

SEQ ID NO: 164352 - DNA, 25 bp, Canis familiaris
ggcgttgtgtgctgaaaatcagtga

SEQ ID NO: 164353 - DNA, 25 bp, Canis familiaris
ggctgttgtgctaaaggactgagta

SEQ ID NO: 164354 - DNA, 25 bp, Canis familiaris
ggctgaaggctttggtgcactgcag

SEQ ID NO: 164355 - DNA, 25 bp, Canis familiaris
ggctgtaggcgtcgagaggctgcag

SEQ ID NO: 164356 - DNA, 25 bp, Canis familiaris
ggcctaaggcatcgagattccaaaa

SEQ ID NO: 164357 - DNA, 25 bp, Canis familiaris
ggcctacaagtggagctactaccag

SEQ ID NO: 164358 - DNA, 25 bp, Canis familiaris
ggccggcaagcctaagactatcacg

SEQ ID NO: 164359 - DNA, 25 bp, Canis familiaris
tggcgggaagccttacacgtacgcg

SEQ ID NO: 164360 - DNA, 25 bp, Canis familiaris
tgtccaggccccgtgaaagtcaggc

SEQ ID NO: 164361 - DNA, 25 bp, Canis familiaris
ggcccaccctcattaaagtgcatgg

SEQ ID NO: 164362 - DNA, 25 bp, Canis familiaris
ggcggccaaccaaaagcgtgtgtgg

SEQ ID NO: 164363 - DNA, 25 bp, Canis familiaris
ggcgctgcgaatcccaaaagtttgg

SEQ ID NO: 164364 - DNA, 25 bp, Canis familiaris
ggccggaatcatccagcaaggtgtt

SEQ ID NO: 164365 - DNA, 25 bp, Canis familiaris
ggctgacgagttgcgaaggcattct

SEQ ID NO: 164366 - DNA, 25 bp, Canis familiaris
ggctgcactggtggaagaagcgatc

SEQ ID NO: 164367 - DNA, 25 bp, Canis familiaris
ggcgtcatggtggggatgggtcaaa

SEQ ID NO: 164368 - DNA, 25 bp, Canis familiaris
ggctgatgctggccaggaggcgagt

SEQ ID NO: 164369 - DNA, 25 bp, Canis familiaris
ggctgtgcagaggctggaggagcag

SEQ ID NO: 164370 - DNA, 25 bp, Canis familiaris
ggcgcagcagcaactgcagcaggac

SEQ ID NO: 164371 - DNA, 25 bp, Canis familiaris
ggctgcagcagcatgtgtcagtcat

SEQ ID NO: 164372 - DNA, 25 bp, Canis familiaris
ggctggcatctttgtcagcatcgcc

SEQ ID NO: 164373 - DNA, 25 bp, Canis familiaris
ggctgagatctgagtcatttgtcac

SEQ ID NO: 164374 - DNA, 25 bp, Canis familiaris
ggctgaattgtgttcatgttctgat

SEQ ID NO: 164375 - DNA, 25 bp, Canis familiaris
ggctgagctgggaccagttgctggt

SEQ ID NO: 164376 - DNA, 25 bp, Canis familiaris
ggctgagtggagagcactgggcgag

SEQ ID NO: 164377 - DNA, 25 bp, Canis familiaris
ggcgcaaggatgagctctgacagtg

SEQ ID NO: 164378 - DNA, 25 bp, Canis familiaris
ggctgcaccttggatgccatgaagg

SEQ ID NO: 164379 - DNA, 25 bp, Canis familiaris
ggctgactttgccatgaagctcatg

SEQ ID NO: 164380 - DNA, 25 bp, Canis familiaris
ggctgactgtgtctacagctttccg

SEQ ID NO: 164381 - DNA, 25 bp, Canis familiaris
ggcgactgctgtctacgagctagac

SEQ ID NO: 164382 - DNA, 25 bp, Canis familiaris
ggcgccgtgtcctagaagtagaaaa

SEQ ID NO: 164383 - DNA, 25 bp, Canis familiaris
tggcccgtgacctgaaggcggtcaa

SEQ ID NO: 164384 - DNA, 25 bp, Canis familiaris
ggcccactgggttcaaccaggacaa

SEQ ID NO: 164385 - DNA, 25 bp, Canis familiaris
ggccacacggggcctacttgaacaa

SEQ ID NO: 164386 - DNA, 25 bp, Canis familiaris
ggccctatggtgatcgagtttaaca

SEQ ID NO: 164387 - DNA, 25 bp, Canis familiaris
ggcgtctgtttgagcagaatgttca

SEQ ID NO: 164388 - DNA, 25 bp, Canis familiaris
ggctgactgcttcaagcaatagcct

SEQ ID NO: 164389 - DNA, 25 bp, Canis familiaris
ggctgacctgtgctaaaagcatcta

SEQ ID NO: 164390 - DNA, 25 bp, Canis familiaris
ggctgtccgttattaccatgatata

SEQ ID NO: 164391 - DNA, 25 bp, Canis familiaris
ggctggccaactaatacttgcatct

SEQ ID NO: 164392 - DNA, 25 bp, Canis familiaris
ggctgacattttaatatttgtcttc

SEQ ID NO: 164393 - DNA, 25 bp, Canis familiaris
ggctgacattgtctctgattttctc

SEQ ID NO: 164394 - DNA, 25 bp, Canis familiaris
ggctgaattgtgtttgtttgtgtcc

SEQ ID NO: 164395 - DNA, 25 bp, Canis familiaris
ggctgaattttcattttgaccacac

SEQ ID NO: 164396 - DNA, 25 bp, Canis familiaris
ggctggaatcttatttggagctccc

SEQ ID NO: 164397 - DNA, 25 bp, Canis familiaris
ggctggattttactctgtgaagacc

SEQ ID NO: 164398 - DNA, 25 bp, Canis familiaris
ggctgatgatgttaaccttgcaagt

SEQ ID NO: 164399 - DNA, 25 bp, Canis familiaris
ggctgctgctgaaaaggctgtaact

SEQ ID NO: 164400 - DNA, 25 bp, Canis familiaris
ggctgtctctcattagctcagtaac

SEQ ID NO: 164401 - DNA, 25 bp, Canis familiaris
ggctgtctcacactatacactggac

SEQ ID NO: 164402 - DNA, 25 bp, Canis familiaris
ggcgtctacgtcaacacatatgggc

SEQ ID NO: 164403 - DNA, 25 bp, Canis familiaris
ggcgtctaggtggggaatgggctgt

SEQ ID NO: 164404 - DNA, 25 bp, Canis familiaris
ggccattaagttaggagagtccgct

SEQ ID NO: 164405 - DNA, 25 bp, Canis familiaris
ggccctaattaaggtgaacacctat

SEQ ID NO: 164406 - DNA, 25 bp, Canis familiaris
ggccctttcacaaaggtcacgccat

SEQ ID NO: 164407 - DNA, 25 bp, Canis familiaris
ggcctgcttaccaaatgtgtacctg

SEQ ID NO: 164408 - DNA, 25 bp, Canis familiaris
ggccatgtgatctcatatgtggaat

SEQ ID NO: 164409 - DNA, 25 bp, Canis familiaris
ggctgcaggcactgacactgagcct

SEQ ID NO: 164410 - DNA, 25 bp, Canis familiaris
ggctgtggcagctttgcttcagcct

SEQ ID NO: 164411 - DNA, 25 bp, Canis familiaris
ggctgttagttttgtcacttttagg

SEQ ID NO: 164412 - DNA, 25 bp, Canis familiaris
ggctgttagtttggtaattgcttca

SEQ ID NO: 164413 - DNA, 25 bp, Canis familiaris
ggctgttccttttataatttatctc

SEQ ID NO: 164414 - DNA, 25 bp, Canis familiaris
ggcgctgaacttcttatttttcgac

SEQ ID NO: 164415 - DNA, 25 bp, Canis familiaris
ggcgctaatgttccttttctataac

SEQ ID NO: 164416 - DNA, 25 bp, Canis familiaris
ggctgctaatgcttatgttttccta

SEQ ID NO: 164417 - DNA, 25 bp, Canis familiaris
ggctgcagactggtagattttccca

SEQ ID NO: 164418 - DNA, 25 bp, Canis familiaris
ggctgcaccagtttgcattctaacc

SEQ ID NO: 164419 - DNA, 25 bp, Canis familiaris
ggctgctacaggtctatatccacac

SEQ ID NO: 164420 - DNA, 25 bp, Canis familiaris
ggctggacaggtttaccatcagagt

SEQ ID NO: 164421 - DNA, 25 bp, Canis familiaris
ggctgggcaggtggtgacgatctgg

SEQ ID NO: 164422 - DNA, 25 bp, Canis familiaris
ggctgtggctggtttcattcaggag

SEQ ID NO: 164423 - DNA, 25 bp, Canis familiaris
ggctgtcgctggagattggggagaa

SEQ ID NO: 164424 - DNA, 25 bp, Canis familiaris
ggctgcacgggaggcaaggcggaaa

SEQ ID NO: 164425 - DNA, 25 bp, Canis familiaris
ggctgcaagggacccaggagctacc

SEQ ID NO: 164426 - DNA, 25 bp, Canis familiaris
ggctgaaggacatggcaccagtatc

SEQ ID NO: 164427 - DNA, 25 bp, Canis familiaris
ggctgaagttcatgaccttgagatc

SEQ ID NO: 164428 - DNA, 25 bp, Canis familiaris
ggctgcagctgtaaggactcttgtc

SEQ ID NO: 164429 - DNA, 25 bp, Canis familiaris
ggctgctcagtatttgagctttgtc

SEQ ID NO: 164430 - DNA, 25 bp, Canis familiaris
ggctgtctggacaggtgtgtgtgtg

SEQ ID NO: 164431 - DNA, 25 bp, Canis familiaris
ggctgtctgaagaggctgtggcttt

SEQ ID NO: 164432 - DNA, 25 bp, Canis familiaris
ggctgtctgaagttgtgcatggttt

SEQ ID NO: 164433 - DNA, 25 bp, Canis familiaris
ggctgataatctttgatgaaatttg

SEQ ID NO: 164434 - DNA, 25 bp, Canis familiaris
ggcgatgtatcctgattactttgcc

SEQ ID NO: 164435 - DNA, 25 bp, Canis familiaris
ggcgcattatcctggatacattcag

SEQ ID NO: 164436 - DNA, 25 bp, Canis familiaris
ggctgcttgactccagaatacacct

SEQ ID NO: 164437 - DNA, 25 bp, Canis familiaris
ggctgagtgctcacagttctgcacc

SEQ ID NO: 164438 - DNA, 25 bp, Canis familiaris
ggctggctgcatgctaatttgcccc

SEQ ID NO: 164439 - DNA, 25 bp, Canis familiaris
ggctgagcctcagagaactggccgc

SEQ ID NO: 164440 - DNA, 25 bp, Canis familiaris
ggctgacacaggaagaaatggaggc

SEQ ID NO: 164441 - DNA, 25 bp, Canis familiaris
ggctgaccaggccagagctggaagg

SEQ ID NO: 164442 - DNA, 25 bp, Canis familiaris
ggctgaccaactgactgaggagcag

SEQ ID NO: 164443 - DNA, 25 bp, Canis familiaris
ggctgaccaactgactgaggagcag

SEQ ID NO: 164444 - DNA, 25 bp, Canis familiaris
ggcgtccactgctgtcagaggacga

SEQ ID NO: 164445 - DNA, 25 bp, Canis familiaris
ggctgttcatcctggagaatgccct

SEQ ID NO: 164446 - DNA, 25 bp, Canis familiaris
ggctgagtccactttggaggctgcc

SEQ ID NO: 164447 - DNA, 25 bp, Canis familiaris
ggctgtgcccacgtgtgggatgcgt

SEQ ID NO: 164448 - DNA, 25 bp, Canis familiaris
ggctggccacacgtttggagtagga

SEQ ID NO: 164449 - DNA, 25 bp, Canis familiaris
ggctgtccagcaggttggggtaggt

SEQ ID NO: 164450 - DNA, 25 bp, Canis familiaris
ggcgtcctgacgaagagagcggcag

SEQ ID NO: 164451 - DNA, 25 bp, Canis familiaris
ggctgtcggccgagagcagagtgcc

SEQ ID NO: 164452 - DNA, 25 bp, Canis familiaris
ggcggcggccgcagagaaggacgcc

SEQ ID NO: 164453 - DNA, 25 bp, Canis familiaris
ggctggtgagggaggagggactgct

SEQ ID NO: 164454 - DNA, 25 bp, Canis familiaris
ggctgaggagaagcgcgagggcgcc

SEQ ID NO: 164455 - DNA, 25 bp, Canis familiaris
ggctgggggaccccatgattcagcc

SEQ ID NO: 164456 - DNA, 25 bp, Canis familiaris
ggcgttcagccacccgagattgagc

SEQ ID NO: 164457 - DNA, 25 bp, Canis familiaris
ggcgttcagccacccgagattgagc

SEQ ID NO: 164458 - DNA, 25 bp, Canis familiaris
ggcgtaaacatgcacgaatgtcccc

SEQ ID NO: 164459 - DNA, 25 bp, Canis familiaris
ggcctaagaaagtgtcagtccctca

SEQ ID NO: 164460 - DNA, 25 bp, Canis familiaris
ggccccagactagaattgtctccca

SEQ ID NO: 164461 - DNA, 25 bp, Canis familiaris
ggccctgcaactctaaagcatcttt

SEQ ID NO: 164462 - DNA, 25 bp, Canis familiaris
ggccggctgatctttgataacctga

SEQ ID NO: 164463 - DNA, 25 bp, Canis familiaris
ggcctggtacttatagatcctcatg

SEQ ID NO: 164464 - DNA, 25 bp, Canis familiaris
ggcgcaggaactgcgtgtgtcctac

SEQ ID NO: 164465 - DNA, 25 bp, Canis familiaris
ggctgcaggacttctttgattccac

SEQ ID NO: 164466 - DNA, 25 bp, Canis familiaris
ggcgatgcggcggcgttattcccat

SEQ ID NO: 164467 - DNA, 25 bp, Canis familiaris
ggctgtggggtcaaatacatcccta

SEQ ID NO: 164468 - DNA, 25 bp, Canis familiaris
ggctgtggggtcaaatacatcccta

SEQ ID NO: 164469 - DNA, 25 bp, Canis familiaris
ggctgtggggtcaatacatccctaa

SEQ ID NO: 164470 - DNA, 25 bp, Canis familiaris
ggctgtggctgacatgatcattccc

SEQ ID NO: 164471 - DNA, 25 bp, Canis familiaris
ggctgtgacgattgtgatcctcatc

SEQ ID NO: 164472 - DNA, 25 bp, Canis familiaris
ggctgtgacagcagtgcagcagtcg

SEQ ID NO: 164473 - DNA, 25 bp, Canis familiaris
ggctgtgtcacatggagctgcattg

SEQ ID NO: 164474 - DNA, 25 bp, Canis familiaris
ggctggtcagcgaggtgaagatgtc

SEQ ID NO: 164475 - DNA, 25 bp, Canis familiaris
ggctggtggcgaggcagctacaacg

SEQ ID NO: 164476 - DNA, 25 bp, Canis familiaris
ggctgtggtggaggctctgaggagc

SEQ ID NO: 164477 - DNA, 25 bp, Canis familiaris
ggcgtgagtgaagggctgctggccc

SEQ ID NO: 164478 - DNA, 25 bp, Canis familiaris
ggctgatgaagatggtcctggtcct

SEQ ID NO: 164479 - DNA, 25 bp, Canis familiaris
ggctgagagaaaagccctgtcctcc

SEQ ID NO: 164480 - DNA, 25 bp, Canis familiaris
ggctgagagaaaagccctgtcctcc

SEQ ID NO: 164481 - DNA, 25 bp, Canis familiaris
ggctggagaaatgccacagccccgc

SEQ ID NO: 164482 - DNA, 25 bp, Canis familiaris
ggctggaaagatttcactgcctaca

SEQ ID NO: 164483 - DNA, 25 bp, Canis familiaris
ggctgtacaagcttcattggtctaa

SEQ ID NO: 164484 - DNA, 25 bp, Canis familiaris
ggctgcaaacagtccattgaatgta

SEQ ID NO: 164485 - DNA, 25 bp, Canis familiaris
ggctggacaattcctggaaggaggt

SEQ ID NO: 164486 - DNA, 25 bp, Canis familiaris
ggctggtgaccttctggatgaggat

SEQ ID NO: 164487 - DNA, 25 bp, Canis familiaris
ggctggtcaacttgcatgttactga

SEQ ID NO: 164488 - DNA, 25 bp, Canis familiaris
ggcggctcaacattgcttgatgcac

SEQ ID NO: 164489 - DNA, 25 bp, Canis familiaris
ggctggctaccagctttgacacagc

SEQ ID NO: 164490 - DNA, 25 bp, Canis familiaris
ggctggcatttcggggtgacatcag

SEQ ID NO: 164491 - DNA, 25 bp, Canis familiaris
ggctgaggagatggtggggccacag

SEQ ID NO: 164492 - DNA, 25 bp, Canis familiaris
ggctgaggctgatgtggggagctgc

SEQ ID NO: 164493 - DNA, 25 bp, Canis familiaris
ggctgttgctgatgcagacgggctc

SEQ ID NO: 164494 - DNA, 25 bp, Canis familiaris
ggcgctgcgcgagcagaaggcgctc

SEQ ID NO: 164495 - DNA, 25 bp, Canis familiaris
ggcgctgcataaaggtaggctccat

SEQ ID NO: 164496 - DNA, 25 bp, Canis familiaris
ggcccgaaagcgaggccgcagtacg

SEQ ID NO: 164497 - DNA, 25 bp, Canis familiaris
ggcccagaaaaatggctccgttcaa

SEQ ID NO: 164498 - DNA, 25 bp, Canis familiaris
ggccccaaactgttagtcctggtag

SEQ ID NO: 164499 - DNA, 25 bp, Canis familiaris
ggccccaaactgactcaaggtcact

SEQ ID NO: 164500 - DNA, 25 bp, Canis familiaris
ggcccatcagaattgccgtaggtcc

SEQ ID NO: 164501 - DNA, 25 bp, Canis familiaris
ggcctccagtattgttgctagaacc

SEQ ID NO: 164502 - DNA, 25 bp, Canis familiaris
ggcccctgatgctgtcccaggggct

SEQ ID NO: 164503 - DNA, 25 bp, Canis familiaris
tggctggcacgtgttaccaggcgga

SEQ ID NO: 164504 - DNA, 25 bp, Canis familiaris
ggctgacactggggctaggagggtg

SEQ ID NO: 164505 - DNA, 25 bp, Canis familiaris
ggctgagaatgaggggagggggctt

SEQ ID NO: 164506 - DNA, 25 bp, Canis familiaris
ggcccaggacgggaggggcttgctt

SEQ ID NO: 164507 - DNA, 25 bp, Canis familiaris
ggcccttgctggctattgggtttta

SEQ ID NO: 164508 - DNA, 25 bp, Canis familiaris
ggccctcacagggtttggggggctg

SEQ ID NO: 164509 - DNA, 25 bp, Canis familiaris
ggccctcacgggcaaaggggtgcgc

SEQ ID NO: 164510 - DNA, 25 bp, Canis familiaris
ggcctgttcaggagattagtaagtc

SEQ ID NO: 164511 - DNA, 25 bp, Canis familiaris
ggccgttcagtcaggtcagtgatgg

SEQ ID NO: 164512 - DNA, 25 bp, Canis familiaris
ggcccttccttggtgtaatgcagcc

SEQ ID NO: 164513 - DNA, 25 bp, Canis familiaris
ggccggttttgtgttagcagcggaa

SEQ ID NO: 164514 - DNA, 25 bp, Canis familiaris
ggcccctttcatgtttacagagcta

SEQ ID NO: 164515 - DNA, 25 bp, Canis familiaris
ggccccttcagtcagatcttgggta

SEQ ID NO: 164516 - DNA, 25 bp, Canis familiaris
ggcctacattctgtactttgtgctg

SEQ ID NO: 164517 - DNA, 25 bp, Canis familiaris
ggccaaatggctgaatttccctggg

SEQ ID NO: 164518 - DNA, 25 bp, Canis familiaris
ggcccagatttagatttctccaagg

SEQ ID NO: 164519 - DNA, 25 bp, Canis familiaris
ggccacaagtaagtcaattgcccag

SEQ ID NO: 164520 - DNA, 25 bp, Canis familiaris
ggcccaagtattcaaggcccatccc

SEQ ID NO: 164521 - DNA, 25 bp, Canis familiaris
ggcccaagttctggtaactcttcac

SEQ ID NO: 164522 - DNA, 25 bp, Canis familiaris
ggcgagagggttcaacaccattccc

SEQ ID NO: 164523 - DNA, 25 bp, Canis familiaris
ggcggagaggtataacgcgtgtctt

SEQ ID NO: 164524 - DNA, 25 bp, Canis familiaris
ggcggaaggtacatactgtctgggt

SEQ ID NO: 164525 - DNA, 25 bp, Canis familiaris
ggcggtgggtaattagaggtcgagt

SEQ ID NO: 164526 - DNA, 25 bp, Canis familiaris
ggcggtggagtacaacatcttcgag

SEQ ID NO: 164527 - DNA, 25 bp, Canis familiaris
tggctggtagatctaacaccccgag

SEQ ID NO: 164528 - DNA, 25 bp, Canis familiaris
ggcgagaagcatctataaccgggag

SEQ ID NO: 164529 - DNA, 25 bp, Canis familiaris
ggcggaagctcttgatctagtcttg

SEQ ID NO: 164530 - DNA, 25 bp, Canis familiaris
ggcgtgagacttttgcaatgtgcag

SEQ ID NO: 164531 - DNA, 25 bp, Canis familiaris
ggctgtgagactacctattatagat

SEQ ID NO: 164532 - DNA, 25 bp, Canis familiaris
ggctgtggatcaacacacaccaaga

SEQ ID NO: 164533 - DNA, 25 bp, Canis familiaris
ggctgagctctcagaaagcaaatgt

SEQ ID NO: 164534 - DNA, 25 bp, Canis familiaris
ggctgtcactcgcaacgaaatgtgc

SEQ ID NO: 164535 - DNA, 25 bp, Canis familiaris
ggctgggctccgtggagagcagagg

SEQ ID NO: 164536 - DNA, 25 bp, Canis familiaris
ggctgggcagccccaggagaggggc

SEQ ID NO: 164537 - DNA, 25 bp, Canis familiaris
ggcgcggcatacctcagagataggc

SEQ ID NO: 164538 - DNA, 25 bp, Canis familiaris
ggcgctgagtacgtcgtggagtcca

SEQ ID NO: 164539 - DNA, 25 bp, Canis familiaris
ggctgtagaagaccgttctgtccgt

SEQ ID NO: 164540 - DNA, 25 bp, Canis familiaris
ggcgtgcagaaacacattttcattc

SEQ ID NO: 164541 - DNA, 25 bp, Canis familiaris
ggcggcaggggcaatttttgcttct

SEQ ID NO: 164542 - DNA, 25 bp, Canis familiaris
ggcgggagggaatttgctatctgac

SEQ ID NO: 164543 - DNA, 25 bp, Canis familiaris
ggcgtgggcggactagggaatgagc

SEQ ID NO: 164544 - DNA, 25 bp, Canis familiaris
ggctggggcaggacaagggctaggc

SEQ ID NO: 164545 - DNA, 25 bp, Canis familiaris
ggctgtgggaggaacagggaggcct

SEQ ID NO: 164546 - DNA, 25 bp, Canis familiaris
ggcgtgtagagcgaggaggggcgtc

SEQ ID NO: 164547 - DNA, 25 bp, Canis familiaris
ggcgctggagagggggcgctgagct

SEQ ID NO: 164548 - DNA, 25 bp, Canis familiaris
ggcgctgagctgttgggtatgaagt

SEQ ID NO: 164549 - DNA, 25 bp, Canis familiaris
ggcgcagagctgtttaggatggcaa

SEQ ID NO: 164550 - DNA, 25 bp, Canis familiaris
ggcgatctctgtactgggatgtcaa

SEQ ID NO: 164551 - DNA, 25 bp, Canis familiaris
ggcgatgccgttgcaaagtgcatgc

SEQ ID NO: 164552 - DNA, 25 bp, Canis familiaris
ggcgatgtttgagcagatgagagcg

SEQ ID NO: 164553 - DNA, 25 bp, Canis familiaris
ggcggctctcggacagatgagacac

SEQ ID NO: 164554 - DNA, 25 bp, Canis familiaris
ggctggcattgctctcaatgacaac

SEQ ID NO: 164555 - DNA, 25 bp, Canis familiaris
ggctggatttggccatatcacatat

SEQ ID NO: 164556 - DNA, 25 bp, Canis familiaris
ggcgtgaagtggccaataccttccc

SEQ ID NO: 164557 - DNA, 25 bp, Canis familiaris
ggctgagagagatccaagtccattc

SEQ ID NO: 164558 - DNA, 25 bp, Canis familiaris
tggcaaaaaacctgttcagtcagca

SEQ ID NO: 164559 - DNA, 25 bp, Canis familiaris
ggcccaaatacctgtgtcagtcacg

SEQ ID NO: 164560 - DNA, 25 bp, Canis familiaris
ggcgccaaaacgtgtggaggcccaa

SEQ ID NO: 164561 - DNA, 25 bp, Canis familiaris
ggcgcccagacagttggtctgaggc

SEQ ID NO: 164562 - DNA, 25 bp, Canis familiaris
ggcgtcacaggtgatggcggagccc

SEQ ID NO: 164563 - DNA, 25 bp, Canis familiaris
ggctggtgaggtgtggcggagggcc

SEQ ID NO: 164564 - DNA, 25 bp, Canis familiaris
tggtaggcggctgtagggggcgccc

SEQ ID NO: 164565 - DNA, 25 bp, Canis familiaris
tggggacaagggtgggggtgccctg

SEQ ID NO: 164566 - DNA, 25 bp, Canis familiaris
ggcggaggagggtgggttgtgaccg

SEQ ID NO: 164567 - DNA, 25 bp, Canis familiaris
ggcctgtggaagtttgggtctgtag

SEQ ID NO: 164568 - DNA, 25 bp, Canis familiaris
ggcctgggtagttcagtcggttgag

SEQ ID NO: 164569 - DNA, 25 bp, Canis familiaris
tggacttggcttcacgtgaggtaga

SEQ ID NO: 164570 - DNA, 25 bp, Canis familiaris
tgtactcgacgtgagccgcgttaat

SEQ ID NO: 164571 - DNA, 25 bp, Canis familiaris
tgtactcccgttttaactggcagtt

SEQ ID NO: 164572 - DNA, 25 bp, Canis familiaris
tgtccggactttcctaattggagtt

SEQ ID NO: 164573 - DNA, 25 bp, Canis familiaris
ggccggcactttgtgattgccgcgt

SEQ ID NO: 164574 - DNA, 25 bp, Canis familiaris
ggcgaagccattgtggatgctgctc

SEQ ID NO: 164575 - DNA, 25 bp, Canis familiaris
ggcgagacacttgtgaacattcgag

SEQ ID NO: 164576 - DNA, 25 bp, Canis familiaris
ggcgaggcagcttgagttaaacgaa

SEQ ID NO: 164577 - DNA, 25 bp, Canis familiaris
ggcgggcagcgcagtgaaaacaagt

SEQ ID NO: 164578 - DNA, 25 bp, Canis familiaris
ggcggccaccagaataactacaagc

SEQ ID NO: 164579 - DNA, 25 bp, Canis familiaris
ggccagccaaagatacacgacaaaa

SEQ ID NO: 164580 - DNA, 25 bp, Canis familiaris
ggccccgagacagacactaataaca

SEQ ID NO: 164581 - DNA, 25 bp, Canis familiaris
ggcccacgagatttaactagctccc

SEQ ID NO: 164582 - DNA, 25 bp, Canis familiaris
ggccgcagccacattaagaacgccc

SEQ ID NO: 164583 - DNA, 25 bp, Canis familiaris
ggccgcgaccgggaagaaagcgccg

SEQ ID NO: 164584 - DNA, 25 bp, Canis familiaris
ggcgctaaccgagcactacaaacac

SEQ ID NO: 164585 - DNA, 25 bp, Canis familiaris
ggcgtaacctgggcctgagagccca

SEQ ID NO: 164586 - DNA, 25 bp, Canis familiaris
ggctgtgagcatgctaaccggtgct

SEQ ID NO: 164587 - DNA, 25 bp, Canis familiaris
ggcgagacatcccacacagtggatg

SEQ ID NO: 164588 - DNA, 25 bp, Canis familiaris
ggcgattcctggccagcaataagct

SEQ ID NO: 164589 - DNA, 25 bp, Canis familiaris
ggcgatctactgatgccaaccatgg

SEQ ID NO: 164590 - DNA, 25 bp, Canis familiaris
ggcgttactatattaacacattctt

SEQ ID NO: 164591 - DNA, 25 bp, Canis familiaris
ggctgggacccataaaaaatatcct

SEQ ID NO: 164592 - DNA, 25 bp, Canis familiaris
ggctggtaccggtgccgagaattcc

SEQ ID NO: 164593 - DNA, 25 bp, Canis familiaris
ggctggtggcctggcaagccaaaga

SEQ ID NO: 164594 - DNA, 25 bp, Canis familiaris
ggctggtggtcggctaggacaatga

SEQ ID NO: 164595 - DNA, 25 bp, Canis familiaris
ggctggtggctggagtcaggacaca

SEQ ID NO: 164596 - DNA, 25 bp, Canis familiaris
ggctggctgagtcggttgagcatcc

SEQ ID NO: 164597 - DNA, 25 bp, Canis familiaris
ggcgagctgactggttgtgtggccg

SEQ ID NO: 164598 - DNA, 25 bp, Canis familiaris
ggctggtgagcttataggtgttctt

SEQ ID NO: 164599 - DNA, 25 bp, Canis familiaris
ggctggtgactttgggacttatctt

SEQ ID NO: 164600 - DNA, 25 bp, Canis familiaris
ggctggagagtttgacggatttgct

SEQ ID NO: 164601 - DNA, 25 bp, Canis familiaris
ggctggaggttgggctggatcctca

SEQ ID NO: 164602 - DNA, 25 bp, Canis familiaris
ggctggaggtgtgcgatggacggcc

SEQ ID NO: 164603 - DNA, 25 bp, Canis familiaris
ggcggagagtggaggctgcccgccg

SEQ ID NO: 164604 - DNA, 25 bp, Canis familiaris
tggccctgaaggaggcctcgggggc

SEQ ID NO: 164605 - DNA, 25 bp, Canis familiaris
ggccgctgatcggaaacgccgcggc

SEQ ID NO: 164606 - DNA, 25 bp, Canis familiaris
ggcccttgaatggaacccttggaag

SEQ ID NO: 164607 - DNA, 25 bp, Canis familiaris
ggccccagcgtgaaaccctgggaag

SEQ ID NO: 164608 - DNA, 25 bp, Canis familiaris
ggcccacctgggaatcccaaaggag

SEQ ID NO: 164609 - DNA, 25 bp, Canis familiaris
ggcccactgggaggacccaaaggtg

SEQ ID NO: 164610 - DNA, 25 bp, Canis familiaris
ggccaaaggtgtcgacccaaactgg

SEQ ID NO: 164611 - DNA, 25 bp, Canis familiaris
ggccaaggttgttggcctctcaacc

SEQ ID NO: 164612 - DNA, 25 bp, Canis familiaris
ggcccgggatgtaggacatctcgac

SEQ ID NO: 164613 - DNA, 25 bp, Canis familiaris
ggcccgggagtaaattctgcataga

SEQ ID NO: 164614 - DNA, 25 bp, Canis familiaris
ggcccgggagtaaattctgcataga

SEQ ID NO: 164615 - DNA, 25 bp, Canis familiaris
ggcccgggagtaaattctgcataga

SEQ ID NO: 164616 - DNA, 25 bp, Canis familiaris
ggcccgggagtaaattctgcataga

SEQ ID NO: 164617 - DNA, 25 bp, Canis familiaris
ggcccgggagtaaattctgcataga

SEQ ID NO: 164618 - DNA, 25 bp, Canis familiaris
ggcccgggagtaaattctgcataga

SEQ ID NO: 164619 - DNA, 25 bp, Canis familiaris
ggccctgtatggtctattttctaga

SEQ ID NO: 164620 - DNA, 25 bp, Canis familiaris
ggccctttcattcttgcttatagag

SEQ ID NO: 164621 - DNA, 25 bp, Canis familiaris
ggcctcatctacagcttgtttatga

SEQ ID NO: 164622 - DNA, 25 bp, Canis familiaris
ggcgtcacatacaccattgttggaa

SEQ ID NO: 164623 - DNA, 25 bp, Canis familiaris
ggcgcccatgtgggccttgggaaga

SEQ ID NO: 164624 - DNA, 25 bp, Canis familiaris
ggcccctgtcagtacgttggtagcc

SEQ ID NO: 164625 - DNA, 25 bp, Canis familiaris
ggcccactttgtttgagttgcttac

SEQ ID NO: 164626 - DNA, 25 bp, Canis familiaris
ggcccacatcatttactaattcttc

SEQ ID NO: 164627 - DNA, 25 bp, Canis familiaris
ggccgactacataacagcagcatat

SEQ ID NO: 164628 - DNA, 25 bp, Canis familiaris
ggcctgacgacactagccaaagtca

SEQ ID NO: 164629 - DNA, 25 bp, Canis familiaris
ggcctagggagccgcaccttgtcat

SEQ ID NO: 164630 - DNA, 25 bp, Canis familiaris
ggcgtaggagatctgatcccttaca

SEQ ID NO: 164631 - DNA, 25 bp, Canis familiaris
ggcggtgaggattcgtcaccaaaca

SEQ ID NO: 164632 - DNA, 25 bp, Canis familiaris
ggcgtttggtagcgcagctcaagac

SEQ ID NO: 164633 - DNA, 25 bp, Canis familiaris
ggcgggggttgtggatgccacagcc

SEQ ID NO: 164634 - DNA, 25 bp, Canis familiaris
ggcggatggcagtgttggccgccgc

SEQ ID NO: 164635 - DNA, 25 bp, Canis familiaris
ggcgggagcagaagcgttcaggcca

SEQ ID NO: 164636 - DNA, 25 bp, Canis familiaris
ggcgggcagcagtgctgtactcgac

SEQ ID NO: 164637 - DNA, 25 bp, Canis familiaris
ggcggtagctgattctggaagcaac

SEQ ID NO: 164638 - DNA, 25 bp, Canis familiaris
ggcggtagctgattctggaagcaac

SEQ ID NO: 164639 - DNA, 25 bp, Canis familiaris
ggcggtgaaatcttgccgagagacc

SEQ ID NO: 164640 - DNA, 25 bp, Canis familiaris
ggcgtggcataaatgtcagcggcga

SEQ ID NO: 164641 - DNA, 25 bp, Canis familiaris
ggcgcgtgctgtatgtcaggtgttt

SEQ ID NO: 164642 - DNA, 25 bp, Canis familiaris
ggctgtgagattgtgttggatgatt

SEQ ID NO: 164643 - DNA, 25 bp, Canis familiaris
ggcggagtctctggattggatattc

SEQ ID NO: 164644 - DNA, 25 bp, Canis familiaris
ggctgggttggccatggcaatttct

SEQ ID NO: 164645 - DNA, 25 bp, Canis familiaris
ggcgggtggacttggcagattatct

SEQ ID NO: 164646 - DNA, 25 bp, Canis familiaris
ggcggcggtgattatgggtgtgcat

SEQ ID NO: 164647 - DNA, 25 bp, Canis familiaris
ggcggcggcgtgatggtgagatcac

SEQ ID NO: 164648 - DNA, 25 bp, Canis familiaris
ggcggcgggatgaaagatgcagtcc

SEQ ID NO: 164649 - DNA, 25 bp, Canis familiaris
ggcggccgaatggaggaggtgcctc

SEQ ID NO: 164650 - DNA, 25 bp, Canis familiaris
ggcgagtctgacggagggatctcct

SEQ ID NO: 164651 - DNA, 25 bp, Canis familiaris
ggcgattctacacggaagactcacc

SEQ ID NO: 164652 - DNA, 25 bp, Canis familiaris
ggctggtcccagagaagcctgactc

SEQ ID NO: 164653 - DNA, 25 bp, Canis familiaris
ggctggggctagatgaggcctgcca

SEQ ID NO: 164654 - DNA, 25 bp, Canis familiaris
ggcgtcggctgcaaatgcagagccc

SEQ ID NO: 164655 - DNA, 25 bp, Canis familiaris
ggcgctcgcagccaacatgaagttc

SEQ ID NO: 164656 - DNA, 25 bp, Canis familiaris
ggcccagctcaaacagaaggtcatg

SEQ ID NO: 164657 - DNA, 25 bp, Canis familiaris
tgggccccaattcaaggagtgtaaa

SEQ ID NO: 164658 - DNA, 25 bp, Canis familiaris
tgggccctcaggggaaggacctgga

SEQ ID NO: 164659 - DNA, 25 bp, Canis familiaris
tgaccacccagtctggggacctggc

SEQ ID NO: 164660 - DNA, 25 bp, Canis familiaris
tggctcctccagatagcggaacaca

SEQ ID NO: 164661 - DNA, 25 bp, Canis familiaris
tggctccccggaaacgacaacaaat

SEQ ID NO: 164662 - DNA, 25 bp, Canis familiaris
tggcccaactgggataccaaacacc

SEQ ID NO: 164663 - DNA, 25 bp, Canis familiaris
tggcccagacggcaaaccaagaccc

SEQ ID NO: 164664 - DNA, 25 bp, Canis familiaris
ggccggacatggccaaaccggatca

SEQ ID NO: 164665 - DNA, 25 bp, Canis familiaris
ggccgtgacattcaggagccaggtg

SEQ ID NO: 164666 - DNA, 25 bp, Canis familiaris
ggccctgagtagaggaccaggtgtc

SEQ ID NO: 164667 - DNA, 25 bp, Canis familiaris
ggcccgtgactgagaaccagagcct

SEQ ID NO: 164668 - DNA, 25 bp, Canis familiaris
tggcccctaggaaaaccacaagctc

SEQ ID NO: 164669 - DNA, 25 bp, Canis familiaris
ggcgccctttgctggaagaaacttc

SEQ ID NO: 164670 - DNA, 25 bp, Canis familiaris
ggcgcccattcacttgtgaacagga

SEQ ID NO: 164671 - DNA, 25 bp, Canis familiaris
ggctgtgccttaattgtgggggaga

SEQ ID NO: 164672 - DNA, 25 bp, Canis familiaris
ggcgtcctctatgtcggaagcaaga

SEQ ID NO: 164673 - DNA, 25 bp, Canis familiaris
ggcgcctccttggcattataacaaa

SEQ ID NO: 164674 - DNA, 25 bp, Canis familiaris
ggcgcttcagtaacatgaaaccagt

SEQ ID NO: 164675 - DNA, 25 bp, Canis familiaris
ggcgctggcctaaaccaaacagtag

SEQ ID NO: 164676 - DNA, 25 bp, Canis familiaris
ggcgtgctccaaatatctcaagtag

SEQ ID NO: 164677 - DNA, 25 bp, Canis familiaris
ggctgtgcctacgaattacttgagt

SEQ ID NO: 164678 - DNA, 25 bp, Canis familiaris
ggctgggcaaggtattcctgcagga

SEQ ID NO: 164679 - DNA, 25 bp, Canis familiaris
ggcgggaatgtgtgtcacgatgtac

SEQ ID NO: 164680 - DNA, 25 bp, Canis familiaris
ggcgtgtggtggtagtcctttatgg

SEQ ID NO: 164681 - DNA, 25 bp, Canis familiaris
ggcggtggtggtggtatcacattct

SEQ ID NO: 164682 - DNA, 25 bp, Canis familiaris
ggcgtgttgcagctggtagccagtc

SEQ ID NO: 164683 - DNA, 25 bp, Canis familiaris
ggctggatgtccaggtcagcaggct

SEQ ID NO: 164684 - DNA, 25 bp, Canis familiaris
ggctgtgagcactgtggtagcaggc

SEQ ID NO: 164685 - DNA, 25 bp, Canis familiaris
ggctggccacaactgagacacagca

SEQ ID NO: 164686 - DNA, 25 bp, Canis familiaris
ggctggcacagcaaggagacctaca

SEQ ID NO: 164687 - DNA, 25 bp, Canis familiaris
ggctgtgcaatgtgaggcctccaac

SEQ ID NO: 164688 - DNA, 25 bp, Canis familiaris
ggcgctgcatatcagggcgcagctc

SEQ ID NO: 164689 - DNA, 25 bp, Canis familiaris
ggcccatcacttggtgacagctgtg

SEQ ID NO: 164690 - DNA, 25 bp, Canis familiaris
ggccctctttgagacgtggactcaa

SEQ ID NO: 164691 - DNA, 25 bp, Canis familiaris
ggccttctttcagcaggggacagcc

SEQ ID NO: 164692 - DNA, 25 bp, Canis familiaris
ggcccacttgtcacagattggaccc

SEQ ID NO: 164693 - DNA, 25 bp, Canis familiaris
ggccctcaagtctcatatcatggca

SEQ ID NO: 164694 - DNA, 25 bp, Canis familiaris
ggcccaagaatctcattggatgctg

SEQ ID NO: 164695 - DNA, 25 bp, Canis familiaris
ggcccaacacggtcatcgagtatgc

SEQ ID NO: 164696 - DNA, 25 bp, Canis familiaris
ggcgtcacagccagagatggtggac

SEQ ID NO: 164697 - DNA, 25 bp, Canis familiaris
ggcccatccaagccagattgctggc

SEQ ID NO: 164698 - DNA, 25 bp, Canis familiaris
ggccgggcagatggctatgtgctag

SEQ ID NO: 164699 - DNA, 25 bp, Canis familiaris
ggccgggcagatggctatgtgctag

SEQ ID NO: 164700 - DNA, 25 bp, Canis familiaris
ggccgggcagatggctatgtgctag

SEQ ID NO: 164701 - DNA, 25 bp, Canis familiaris
ggccgggcagatggctatgtgctag

SEQ ID NO: 164702 - DNA, 25 bp, Canis familiaris
ggcgcccacagtgatgatgtcgaga

SEQ ID NO: 164703 - DNA, 25 bp, Canis familiaris
ggccctgagagggtgcattcacagt

SEQ ID NO: 164704 - DNA, 25 bp, Canis familiaris
ggccggaggcagacgcttaactgct

SEQ ID NO: 164705 - DNA, 25 bp, Canis familiaris
ggcccagggatgagcttggtttcac

SEQ ID NO: 164706 - DNA, 25 bp, Canis familiaris
ggccctaggattcttagctttacca

SEQ ID NO: 164707 - DNA, 25 bp, Canis familiaris
ggcgttcagaatggttcagcgtttg

SEQ ID NO: 164708 - DNA, 25 bp, Canis familiaris
ggcggacacaatgtccagcggagtc

SEQ ID NO: 164709 - DNA, 25 bp, Canis familiaris
ggcggaccagatggagctaggagag

SEQ ID NO: 164710 - DNA, 25 bp, Canis familiaris
ggcgccaacagaggcaaagagggta

SEQ ID NO: 164711 - DNA, 25 bp, Canis familiaris
ggcggcaatcgtgcgcaatgaagtg

SEQ ID NO: 164712 - DNA, 25 bp, Canis familiaris
ggcccagaagttcgcaggaagtcgt

SEQ ID NO: 164713 - DNA, 25 bp, Canis familiaris
ggcccgaatgtctcagggcctgcac

SEQ ID NO: 164714 - DNA, 25 bp, Canis familiaris
ggccctcagattttggggcccacca

SEQ ID NO: 164715 - DNA, 25 bp, Canis familiaris
ggccctgcatctgaatgggcttccc

SEQ ID NO: 164716 - DNA, 25 bp, Canis familiaris
tggccaacatcaaaagtcggtccgg

SEQ ID NO: 164717 - DNA, 25 bp, Canis familiaris
ggccaagacttatgatcgagtaccg

SEQ ID NO: 164718 - DNA, 25 bp, Canis familiaris
ggccaagactgtcaacttttagctg

SEQ ID NO: 164719 - DNA, 25 bp, Canis familiaris
ggccaagacgtatcatcctttacca

SEQ ID NO: 164720 - DNA, 25 bp, Canis familiaris
ggccaggagcttacctttatgtaaa

SEQ ID NO: 164721 - DNA, 25 bp, Canis familiaris
ggccgtgggcgaactgttaaagagt

SEQ ID NO: 164722 - DNA, 25 bp, Canis familiaris
ggcctttggcaagagtgacgaggag

SEQ ID NO: 164723 - DNA, 25 bp, Canis familiaris
ggcccttggcagacacagatgagag

SEQ ID NO: 164724 - DNA, 25 bp, Canis familiaris
ggcgcttctacatgagcggcacagt

SEQ ID NO: 164725 - DNA, 25 bp, Canis familiaris
ggccaactacaaagggcatcctggt

SEQ ID NO: 164726 - DNA, 25 bp, Canis familiaris
ggccaacaacagttagttcactagc

SEQ ID NO: 164727 - DNA, 25 bp, Canis familiaris
ggccaggccaagttgtgttaagacc

SEQ ID NO: 164728 - DNA, 25 bp, Canis familiaris
ggccgtcgacgacttcattggcaaa

SEQ ID NO: 164729 - DNA, 25 bp, Canis familiaris
ggccctgtgcaggactactgggcac

SEQ ID NO: 164730 - DNA, 25 bp, Canis familiaris
ggcccatctcaggtttggggatccc

SEQ ID NO: 164731 - DNA, 25 bp, Canis familiaris
ggcccaagagctcgttgagggtctc

SEQ ID NO: 164732 - DNA, 25 bp, Canis familiaris
ggcctatggaggatgatggagcgtt

SEQ ID NO: 164733 - DNA, 25 bp, Canis familiaris
ggcgcttggagaacggatgtgctat

SEQ ID NO: 164734 - DNA, 25 bp, Canis familiaris
ggcgcctggtcaccagggctgcttt

SEQ ID NO: 164735 - DNA, 25 bp, Canis familiaris
ggcgcacggtgagtcagtttgttcc

SEQ ID NO: 164736 - DNA, 25 bp, Canis familiaris
ggcgacagcagataagtttttctta

SEQ ID NO: 164737 - DNA, 25 bp, Canis familiaris
ggcgatgtagatcaggatttgctct

SEQ ID NO: 164738 - DNA, 25 bp, Canis familiaris
ggcgatgcttatgatgctggttgct

SEQ ID NO: 164739 - DNA, 25 bp, Canis familiaris
ggcgtctctgaattgatgctgttct

SEQ ID NO: 164740 - DNA, 25 bp, Canis familiaris
ggcgtcttcattttcatggccatac

SEQ ID NO: 164741 - DNA, 25 bp, Canis familiaris
ggctggcttctgcaactggacaagc

SEQ ID NO: 164742 - DNA, 25 bp, Canis familiaris
ggcccaatcaggaacaggtcacagg

SEQ ID NO: 164743 - DNA, 25 bp, Canis familiaris
ggcgccgtcggaaggatgtccttcc

SEQ ID NO: 164744 - DNA, 25 bp, Canis familiaris
ggcccttcgtgagaattggcttcct

SEQ ID NO: 164745 - DNA, 25 bp, Canis familiaris
ggcccaccagtagaaccattttatt

SEQ ID NO: 164746 - DNA, 25 bp, Canis familiaris
ggcctccaacaagaacctctatttg

SEQ ID NO: 164747 - DNA, 25 bp, Canis familiaris
ggcccaaacaacaaaatatcttatt

SEQ ID NO: 164748 - DNA, 25 bp, Canis familiaris
ggcccaaataaatgaatgttccatc

SEQ ID NO: 164749 - DNA, 25 bp, Canis familiaris
ggccatcaacgaaaatgtccttcct

SEQ ID NO: 164750 - DNA, 25 bp, Canis familiaris
ggccttgagctaaaagtccctacta

SEQ ID NO: 164751 - DNA, 25 bp, Canis familiaris
ggccggagtaaggaccctgaagctt

SEQ ID NO: 164752 - DNA, 25 bp, Canis familiaris
ggccgaggaagggaccagtgatagt

SEQ ID NO: 164753 - DNA, 25 bp, Canis familiaris
ggccaagggctgggtcacaggaagg

SEQ ID NO: 164754 - DNA, 25 bp, Canis familiaris
ggcccgtcgctgagtactggaacgg

SEQ ID NO: 164755 - DNA, 25 bp, Canis familiaris
ggccggacgctgagtactggaacgg

SEQ ID NO: 164756 - DNA, 25 bp, Canis familiaris
ggcctggaccgacgtcaatggatga

SEQ ID NO: 164757 - DNA, 25 bp, Canis familiaris
ggccttcgccgacgaaataggcact

SEQ ID NO: 164758 - DNA, 25 bp, Canis familiaris
ggcctaaggaggcaaggacgcagac

SEQ ID NO: 164759 - DNA, 25 bp, Canis familiaris
ggcggaagggagcggagactgctgg

SEQ ID NO: 164760 - DNA, 25 bp, Canis familiaris
ggccagagaggaaaccgaaccgagt

SEQ ID NO: 164761 - DNA, 25 bp, Canis familiaris
ggcccatggggatacgaatctgagg

SEQ ID NO: 164762 - DNA, 25 bp, Canis familiaris
ggccaagagggctcaaggttacaat

SEQ ID NO: 164763 - DNA, 25 bp, Canis familiaris
ggccaagaggactaaggaccaaaca

SEQ ID NO: 164764 - DNA, 25 bp, Canis familiaris
ggcgcaggagtacaggagggaccca

SEQ ID NO: 164765 - DNA, 25 bp, Canis familiaris
ggcgcgtggaaaacggaggacacca

SEQ ID NO: 164766 - DNA, 25 bp, Canis familiaris
ggcggctagaagagcagcgggagca

SEQ ID NO: 164767 - DNA, 25 bp, Canis familiaris
ggcgtggaagacagcagccaggctg

SEQ ID NO: 164768 - DNA, 25 bp, Canis familiaris
ggcgcggaggacctgcagccgcgcc

SEQ ID NO: 164769 - DNA, 25 bp, Canis familiaris
ggcgcagcgggaggacgaggcgccc

SEQ ID NO: 164770 - DNA, 25 bp, Canis familiaris
ggcgcgggcggcaacaagagccgcc

SEQ ID NO: 164771 - DNA, 25 bp, Canis familiaris
ggccgagggacaggaacgagcccag

SEQ ID NO: 164772 - DNA, 25 bp, Canis familiaris
ggcggctggctgtggagacagagct

SEQ ID NO: 164773 - DNA, 25 bp, Canis familiaris
ggcggctggagctggagagagacat

SEQ ID NO: 164774 - DNA, 25 bp, Canis familiaris
ggcggaggcagcttcgaagaggtgc

SEQ ID NO: 164775 - DNA, 25 bp, Canis familiaris
ggcgacaccatgggcggagggtcga

SEQ ID NO: 164776 - DNA, 25 bp, Canis familiaris
ggcgcaccctggaggaggtggtcat

SEQ ID NO: 164777 - DNA, 25 bp, Canis familiaris
ggccgtccttctgagatggcggtac

SEQ ID NO: 164778 - DNA, 25 bp, Canis familiaris
ggccttccttctgttgaaggcccag

SEQ ID NO: 164779 - DNA, 25 bp, Canis familiaris
tggccccgtatcacttccggggcac

SEQ ID NO: 164780 - DNA, 25 bp, Canis familiaris
tggccccatgaagccttcgggggaa

SEQ ID NO: 164781 - DNA, 25 bp, Canis familiaris
ggcccctaaatcacttgcggaggaa

SEQ ID NO: 164782 - DNA, 25 bp, Canis familiaris
ggcctcctaaatgacttcctgaaga

SEQ ID NO: 164783 - DNA, 25 bp, Canis familiaris
ggcccctgagtaagacttttgccgt

SEQ ID NO: 164784 - DNA, 25 bp, Canis familiaris
ggcccagtgcaaacagacttgctct

SEQ ID NO: 164785 - DNA, 25 bp, Canis familiaris
ggcccagctagagctagctacagct

SEQ ID NO: 164786 - DNA, 25 bp, Canis familiaris
ggcgccagtggggcaggataagcct

SEQ ID NO: 164787 - DNA, 25 bp, Canis familiaris
ggcgcctctgggtcagaattcagtt

SEQ ID NO: 164788 - DNA, 25 bp, Canis familiaris
ggcgttgctggtgactttagtgatc

SEQ ID NO: 164789 - DNA, 25 bp, Canis familiaris
ggcgctctcggatatctttaggaag

SEQ ID NO: 164790 - DNA, 25 bp, Canis familiaris
ggcccacccatagaatccagaatga

SEQ ID NO: 164791 - DNA, 25 bp, Canis familiaris
ggcctgaccaaaaatcccatgagat

SEQ ID NO: 164792 - DNA, 25 bp, Canis familiaris
ggcctcctgaaaattcctagacatc

SEQ ID NO: 164793 - DNA, 25 bp, Canis familiaris
ggccccttatttaccacagtatatg

SEQ ID NO: 164794 - DNA, 25 bp, Canis familiaris
ggcctccgatttaatcccataaagt

SEQ ID NO: 164795 - DNA, 25 bp, Canis familiaris
ggccccaatttccatcatcttaggg

SEQ ID NO: 164796 - DNA, 25 bp, Canis familiaris
ggcccaccgatacacatctgaaggg

SEQ ID NO: 164797 - DNA, 25 bp, Canis familiaris
ggcccaacctgacagctaggaggtg

SEQ ID NO: 164798 - DNA, 25 bp, Canis familiaris
ggccccccataagctgagagaatgt

SEQ ID NO: 164799 - DNA, 25 bp, Canis familiaris
ggccgtaccaattgctctgggtaac

SEQ ID NO: 164800 - DNA, 25 bp, Canis familiaris
ggcctctacaagggcctgggggcca

SEQ ID NO: 164801 - DNA, 25 bp, Canis familiaris
ggcctgggattcccttgaggggcca

SEQ ID NO: 164802 - DNA, 25 bp, Canis familiaris
ggccgtggattctccagaggaggag

SEQ ID NO: 164803 - DNA, 25 bp, Canis familiaris
ggccgtcaaatcccaggaggagaac

SEQ ID NO: 164804 - DNA, 25 bp, Canis familiaris
ggcggtctctatgtgcagtggggac

SEQ ID NO: 164805 - DNA, 25 bp, Canis familiaris
ggcgttgttagcttgcagggcatag

SEQ ID NO: 164806 - DNA, 25 bp, Canis familiaris
ggcgtgtgtggaggtacggctggcc

SEQ ID NO: 164807 - DNA, 25 bp, Canis familiaris
ggcgctatgcccgtgtaaggtggct

SEQ ID NO: 164808 - DNA, 25 bp, Canis familiaris
ggcctgacccagacgcaatgggtct

SEQ ID NO: 164809 - DNA, 25 bp, Canis familiaris
ggcctacggcgtaaagcgtgttcaa

SEQ ID NO: 164810 - DNA, 25 bp, Canis familiaris
ggcctggggcaggagagggtgtggc

SEQ ID NO: 164811 - DNA, 25 bp, Canis familiaris
ggcctggaggcccagtggggagagg

SEQ ID NO: 164812 - DNA, 25 bp, Canis familiaris
ggccagccagggagcggggaagggc

SEQ ID NO: 164813 - DNA, 25 bp, Canis familiaris
ggcccacagcggtggggctgagagg

SEQ ID NO: 164814 - DNA, 25 bp, Canis familiaris
ggcccagacggacggaagccagggt

SEQ ID NO: 164815 - DNA, 25 bp, Canis familiaris
ggcctggcacggaggacacaaggag

SEQ ID NO: 164816 - DNA, 25 bp, Canis familiaris
ggcctgctttgggggatccaagtgg

SEQ ID NO: 164817 - DNA, 25 bp, Canis familiaris
ggcctttgcgggagactcaggagga

SEQ ID NO: 164818 - DNA, 25 bp, Canis familiaris
ggccgttcaggggggtcgagaggct

SEQ ID NO: 164819 - DNA, 25 bp, Canis familiaris
ggccctcaagggagcagtggacgga

SEQ ID NO: 164820 - DNA, 25 bp, Canis familiaris
ggcccatcaagacagctcaggccac

SEQ ID NO: 164821 - DNA, 25 bp, Canis familiaris
ggcccatcatgtcatagccatgtgg

SEQ ID NO: 164822 - DNA, 25 bp, Canis familiaris
ggcgtccatcatctcaaatatctgc

SEQ ID NO: 164823 - DNA, 25 bp, Canis familiaris
ggccatcgctatatccaaaaggtcc

SEQ ID NO: 164824 - DNA, 25 bp, Canis familiaris
ggccctctgtttctaaagattgcca

SEQ ID NO: 164825 - DNA, 25 bp, Canis familiaris
ggccccttctgtccaataaatatct

SEQ ID NO: 164826 - DNA, 25 bp, Canis familiaris
ggcccctatctggaaagaagtttgg

SEQ ID NO: 164827 - DNA, 25 bp, Canis familiaris
ggcccagcttctccaaacaagggct

SEQ ID NO: 164828 - DNA, 25 bp, Canis familiaris
ggcggctcttctcctgaaggagagt

SEQ ID NO: 164829 - DNA, 25 bp, Canis familiaris
ggcgggattctgacttagaggcgtt

SEQ ID NO: 164830 - DNA, 25 bp, Canis familiaris
ggcgagtgtttgtcattagaagatg

SEQ ID NO: 164831 - DNA, 25 bp, Canis familiaris
ggcgcagagatttgtcattgtcgat

SEQ ID NO: 164832 - DNA, 25 bp, Canis familiaris
ggcgaggctgtatatttgctgctgg

SEQ ID NO: 164833 - DNA, 25 bp, Canis familiaris
ggcgtacatggaccacttgtgggag

SEQ ID NO: 164834 - DNA, 25 bp, Canis familiaris
ggcctacatggcctccaaggagtaa

SEQ ID NO: 164835 - DNA, 25 bp, Canis familiaris
ggcccacatggcctccaaggagtaa

SEQ ID NO: 164836 - DNA, 25 bp, Canis familiaris
ggccgcagcagggtgtcaagagtgc

SEQ ID NO: 164837 - DNA, 25 bp, Canis familiaris
ggcgcccaggctgtgaagacatgac

SEQ ID NO: 164838 - DNA, 25 bp, Canis familiaris
ggcgatagagaggctcctggatgca

SEQ ID NO: 164839 - DNA, 25 bp, Canis familiaris
ggcgagaaggagaccatgcaggacc

SEQ ID NO: 164840 - DNA, 25 bp, Canis familiaris
ggcgcaagacggaccagagcgaaag

SEQ ID NO: 164841 - DNA, 25 bp, Canis familiaris
ggcgcacgactggcacaaatataaa

SEQ ID NO: 164842 - DNA, 25 bp, Canis familiaris
ggcggtgaccaagaatgatgggcac

SEQ ID NO: 164843 - DNA, 25 bp, Canis familiaris
ggccgtagccaaggtcatgcagaag

SEQ ID NO: 164844 - DNA, 25 bp, Canis familiaris
ggcctagcgccagggacagagaggg

SEQ ID NO: 164845 - DNA, 25 bp, Canis familiaris
ggcctatgttcaggtgccatgaggt

SEQ ID NO: 164846 - DNA, 25 bp, Canis familiaris
ggccgattattggtgcttagggatt

SEQ ID NO: 164847 - DNA, 25 bp, Canis familiaris
ggcggtgtattctttttgacaattc

SEQ ID NO: 164848 - DNA, 25 bp, Canis familiaris
ggcgtctgtttctctgtaaggattc

SEQ ID NO: 164849 - DNA, 25 bp, Canis familiaris
ggcgattgcttgtacctggaaacta

SEQ ID NO: 164850 - DNA, 25 bp, Canis familiaris
ggccctgcttgagctacagaatact

SEQ ID NO: 164851 - DNA, 25 bp, Canis familiaris
ggccctcttcccaggaaaggacaag

SEQ ID NO: 164852 - DNA, 25 bp, Canis familiaris
ggccttgttcccagaaaggcccctg

SEQ ID NO: 164853 - DNA, 25 bp, Canis familiaris
tggccttttcccaagagaacattca

SEQ ID NO: 164854 - DNA, 25 bp, Canis familiaris
ggccttttctgtgtcaaatgttaaa

SEQ ID NO: 164855 - DNA, 25 bp, Canis familiaris
ggccttccttcagttcaactggaag

SEQ ID NO: 164856 - DNA, 25 bp, Canis familiaris
ggcctttttcctcacactgaagagg

SEQ ID NO: 164857 - DNA, 25 bp, Canis familiaris
ggcctaacttcgggacagtgaaact

SEQ ID NO: 164858 - DNA, 25 bp, Canis familiaris
ggcccaacctctgttcagtgtaaat

SEQ ID NO: 164859 - DNA, 25 bp, Canis familiaris
ggcctaagcactgtttggtctagag

SEQ ID NO: 164860 - DNA, 25 bp, Canis familiaris
ggcctgaagacttcgtgtggcccgg

SEQ ID NO: 164861 - DNA, 25 bp, Canis familiaris
ggcctaaacctgctgatacgcaagg

SEQ ID NO: 164862 - DNA, 25 bp, Canis familiaris
ggcctttactgtcgctacagacaag

SEQ ID NO: 164863 - DNA, 25 bp, Canis familiaris
ggccttggacagctgcaacattgcc

SEQ ID NO: 164864 - DNA, 25 bp, Canis familiaris
ggcccagcacacagtaagcattcaa

SEQ ID NO: 164865 - DNA, 25 bp, Canis familiaris
ggcccaagacggacggatagcacag

SEQ ID NO: 164866 - DNA, 25 bp, Canis familiaris
ggccctcacaatgctcagagtagca

SEQ ID NO: 164867 - DNA, 25 bp, Canis familiaris
ggcccgagcaatgcctgaggaggag

SEQ ID NO: 164868 - DNA, 25 bp, Canis familiaris
ggcccagtataacttgtgccaagtg

SEQ ID NO: 164869 - DNA, 25 bp, Canis familiaris
ggccctgtcaggaatgttccaacgg

SEQ ID NO: 164870 - DNA, 25 bp, Canis familiaris
ggccgcattgaggttttccggagtg

SEQ ID NO: 164871 - DNA, 25 bp, Canis familiaris
ggcgtgatgagggttttctgaggtt

SEQ ID NO: 164872 - DNA, 25 bp, Canis familiaris
ggcgattgtggtatttcatcaagca

SEQ ID NO: 164873 - DNA, 25 bp, Canis familiaris
ggcgtttcagtgatatcttcactag

SEQ ID NO: 164874 - DNA, 25 bp, Canis familiaris
ggcgttccaatggtgatgctgccct

SEQ ID NO: 164875 - DNA, 25 bp, Canis familiaris
ggcgttcagagagggaccgccctac

SEQ ID NO: 164876 - DNA, 25 bp, Canis familiaris
ggcgttcagagaggccaagcgtcac

SEQ ID NO: 164877 - DNA, 25 bp, Canis familiaris
ggcgtgcctagactgctagggtcct

SEQ ID NO: 164878 - DNA, 25 bp, Canis familiaris
ggcgtcccacagggagggctttaga

SEQ ID NO: 164879 - DNA, 25 bp, Canis familiaris
tggggccacaacggtggggcttaga

SEQ ID NO: 164880 - DNA, 25 bp, Canis familiaris
tgggcaacaaggggtggcctttaag

SEQ ID NO: 164881 - DNA, 25 bp, Canis familiaris
ggcgccacaaagcgggcgcttctac

SEQ ID NO: 164882 - DNA, 25 bp, Canis familiaris
ggcctaccaatgtggggccattgac

SEQ ID NO: 164883 - DNA, 25 bp, Canis familiaris
ggcccacgccatgatggaggccttc

SEQ ID NO: 164884 - DNA, 25 bp, Canis familiaris
ggccctgaccactatggtcagcact

SEQ ID NO: 164885 - DNA, 25 bp, Canis familiaris
ggccctgatgccatgtatgtcaaat

SEQ ID NO: 164886 - DNA, 25 bp, Canis familiaris
ggccttgagccttgaagctgctctc

SEQ ID NO: 164887 - DNA, 25 bp, Canis familiaris
ggccatttctcttcaagtttagctg

SEQ ID NO: 164888 - DNA, 25 bp, Canis familiaris
ggccttcctttgtgatttcagtgtc

SEQ ID NO: 164889 - DNA, 25 bp, Canis familiaris
ggccttgcctttgtggtattgtgct

SEQ ID NO: 164890 - DNA, 25 bp, Canis familiaris
ggcctatgccaattgttggatttct

SEQ ID NO: 164891 - DNA, 25 bp, Canis familiaris
ggcgcgtgcccattatgatggtttc

SEQ ID NO: 164892 - DNA, 25 bp, Canis familiaris
ggcgcagtctcagtactatttgtcc

SEQ ID NO: 164893 - DNA, 25 bp, Canis familiaris
ggcctggaagctttcactagtctcc

SEQ ID NO: 164894 - DNA, 25 bp, Canis familiaris
ggccaggaatcttccagaaggacgc

SEQ ID NO: 164895 - DNA, 25 bp, Canis familiaris
ggcgacgagtcttccaagaggcgcc

SEQ ID NO: 164896 - DNA, 25 bp, Canis familiaris
ggccagaagcttccgacaggcctgc

SEQ ID NO: 164897 - DNA, 25 bp, Canis familiaris
tggccgggttgcaagccggccgggt

SEQ ID NO: 164898 - DNA, 25 bp, Canis familiaris
tggcccgcgttttgtcttggggcct

SEQ ID NO: 164899 - DNA, 25 bp, Canis familiaris
ggccccctacacaacttggggctct

SEQ ID NO: 164900 - DNA, 25 bp, Canis familiaris
ggcctcccagaagatttgggatcca

SEQ ID NO: 164901 - DNA, 25 bp, Canis familiaris
ggccaacgtgaacattgggagcctc

SEQ ID NO: 164902 - DNA, 25 bp, Canis familiaris
ggccaacttaaccagctaggtgcca

SEQ ID NO: 164903 - DNA, 25 bp, Canis familiaris
ggcgccatttcaacaacggggcacg

SEQ ID NO: 164904 - DNA, 25 bp, Canis familiaris
ggcgctctataaagaacggcaacac

SEQ ID NO: 164905 - DNA, 25 bp, Canis familiaris
ggcgctcttcaaggagcagcggaac

SEQ ID NO: 164906 - DNA, 25 bp, Canis familiaris
ggcgcatctatggcagcgatgagga

SEQ ID NO: 164907 - DNA, 25 bp, Canis familiaris
ggcgccatcatcgcagagaggagct

SEQ ID NO: 164908 - DNA, 25 bp, Canis familiaris
ggcctcatgctgggcatggagccag

SEQ ID NO: 164909 - DNA, 25 bp, Canis familiaris
ggccctggggattctccagtatgca

SEQ ID NO: 164910 - DNA, 25 bp, Canis familiaris
ggcccgagctgtagactcggtgctg

SEQ ID NO: 164911 - DNA, 25 bp, Canis familiaris
ggcccggataaagcggcgcagactg

SEQ ID NO: 164912 - DNA, 25 bp, Canis familiaris
ggccctgggcaaaccaggggcactc

SEQ ID NO: 164913 - DNA, 25 bp, Canis familiaris
ggccctggaggaacctgaaggcccg

SEQ ID NO: 164914 - DNA, 25 bp, Canis familiaris
ggcctgaaaggccctctgaagaccc

SEQ ID NO: 164915 - DNA, 25 bp, Canis familiaris
ggccgaaggcggcactaaactgcta

SEQ ID NO: 164916 - DNA, 25 bp, Canis familiaris
ggccaaaggccaaggccaaggctcg

SEQ ID NO: 164917 - DNA, 25 bp, Canis familiaris
ggccaaagggcaaaccgacatgtca

SEQ ID NO: 164918 - DNA, 25 bp, Canis familiaris
ggccaacttggctgaactgaagaac

SEQ ID NO: 164919 - DNA, 25 bp, Canis familiaris
ggccaacatttgatggtctaagtct

SEQ ID NO: 164920 - DNA, 25 bp, Canis familiaris
ggccaaatccataaagcctaatttc

SEQ ID NO: 164921 - DNA, 25 bp, Canis familiaris
ggccaattccagaaaccattccact

SEQ ID NO: 164922 - DNA, 25 bp, Canis familiaris
ggccatcatgttcagaaaagttact

SEQ ID NO: 164923 - DNA, 25 bp, Canis familiaris
ggccatcctgtataaacgtctcaag

SEQ ID NO: 164924 - DNA, 25 bp, Canis familiaris
ggcgcacgcttattttaggctgtca

SEQ ID NO: 164925 - DNA, 25 bp, Canis familiaris
ggcccttgtatctattcagtggtca

SEQ ID NO: 164926 - DNA, 25 bp, Canis familiaris
ggccctgggaaatttgtggtctcac

SEQ ID NO: 164927 - DNA, 25 bp, Canis familiaris
ggcctcggccaataagtcgatgtct

SEQ ID NO: 164928 - DNA, 25 bp, Canis familiaris
ggccaggacccaaaagcctgtctta

SEQ ID NO: 164929 - DNA, 25 bp, Canis familiaris
ggccaggaccctgaggtgggtgaga

SEQ ID NO: 164930 - DNA, 25 bp, Canis familiaris
ggccctgacccaggaggagggggcg

SEQ ID NO: 164931 - DNA, 25 bp, Canis familiaris
ggcccttctaccaagtgtggggtgg

SEQ ID NO: 164932 - DNA, 25 bp, Canis familiaris
ggcccctctggaaagctgtggcgtg

SEQ ID NO: 164933 - DNA, 25 bp, Canis familiaris
ggcccctctggaaagctgtggcgtg

SEQ ID NO: 164934 - DNA, 25 bp, Canis familiaris
ggcccctctgggaagatgtggcgtg

SEQ ID NO: 164935 - DNA, 25 bp, Canis familiaris
ggccctcgtaggtagcagtggctgt

SEQ ID NO: 164936 - DNA, 25 bp, Canis familiaris
ggcccggtcagggagaagacgattg

SEQ ID NO: 164937 - DNA, 25 bp, Canis familiaris
ggccgggtggaggcaaagggactgc

SEQ ID NO: 164938 - DNA, 25 bp, Canis familiaris
ggccgggccacagcaataggaaagc

SEQ ID NO: 164939 - DNA, 25 bp, Canis familiaris
ggcgccagaggatccaatgggagaa

SEQ ID NO: 164940 - DNA, 25 bp, Canis familiaris
ggcccagggaacatgtgatggacat

SEQ ID NO: 164941 - DNA, 25 bp, Canis familiaris
ggcgtcagggactttgtgctataag

SEQ ID NO: 164942 - DNA, 25 bp, Canis familiaris
ggcgcacattggtaagatgctgcta

SEQ ID NO: 164943 - DNA, 25 bp, Canis familiaris
ggcgacatgcaggttcacagtatag

SEQ ID NO: 164944 - DNA, 25 bp, Canis familiaris
ggccatagcgactcttttttcagtc

SEQ ID NO: 164945 - DNA, 25 bp, Canis familiaris
ggccaggctaaataacttgtaccag

SEQ ID NO: 164946 - DNA, 25 bp, Canis familiaris
ggccaatccgaataaacgtctcaag

SEQ ID NO: 164947 - DNA, 25 bp, Canis familiaris
ggccaagccagaactagaactctaa

SEQ ID NO: 164948 - DNA, 25 bp, Canis familiaris
ggccaagccaagattcaaactctga

SEQ ID NO: 164949 - DNA, 25 bp, Canis familiaris
ggccaagaagagattcccacaggac

SEQ ID NO: 164950 - DNA, 25 bp, Canis familiaris
ggccaacgaggtgcatcctaggaga

SEQ ID NO: 164951 - DNA, 25 bp, Canis familiaris
ggccaccgaggaactccaaaagtat

SEQ ID NO: 164952 - DNA, 25 bp, Canis familiaris
ggccaccgaggaagctccaaaggta

SEQ ID NO: 164953 - DNA, 25 bp, Canis familiaris
ggccaccgggaagctgcaaggtgtt

SEQ ID NO: 164954 - DNA, 25 bp, Canis familiaris
ggccatcgccgaccaggtgaaggcc

SEQ ID NO: 164955 - DNA, 25 bp, Canis familiaris
ggccatagtcaatagggaaagctct

SEQ ID NO: 164956 - DNA, 25 bp, Canis familiaris
ggccgagatcaaggtcgagaaagca

SEQ ID NO: 164957 - DNA, 25 bp, Canis familiaris
ggcccgacatcacgtggatgaagga

SEQ ID NO: 164958 - DNA, 25 bp, Canis familiaris
ggccctacatggggtcatcattgga

SEQ ID NO: 164959 - DNA, 25 bp, Canis familiaris
ggccccaagtgtggctacatctaga

SEQ ID NO: 164960 - DNA, 25 bp, Canis familiaris
ggcgcaaaaggagctgacaatcatg

SEQ ID NO: 164961 - DNA, 25 bp, Canis familiaris
ggccactgaaagaactacagatttt

SEQ ID NO: 164962 - DNA, 25 bp, Canis familiaris
ggccaccaggacacagaatgttctt

SEQ ID NO: 164963 - DNA, 25 bp, Canis familiaris
ggccctgcatgtgcaaagaatcatc

SEQ ID NO: 164964 - DNA, 25 bp, Canis familiaris
ggcctatctggtgcaagatctgctc

SEQ ID NO: 164965 - DNA, 25 bp, Canis familiaris
ggcctgtcggtttgcaatgtatcgc

SEQ ID NO: 164966 - DNA, 25 bp, Canis familiaris
ggccttcctgtttacttatagcatc

SEQ ID NO: 164967 - DNA, 25 bp, Canis familiaris
ggcccacctgggtgtacaggatctc

SEQ ID NO: 164968 - DNA, 25 bp, Canis familiaris
ggcctgtcgtggctcgtacaggagc

SEQ ID NO: 164969 - DNA, 25 bp, Canis familiaris
ggccttcaaggactcgttcaggacc

SEQ ID NO: 164970 - DNA, 25 bp, Canis familiaris
ggccccaaggaaggtgttgcgcaac

SEQ ID NO: 164971 - DNA, 25 bp, Canis familiaris
ggcctgccaagtttttgtgggcaga

SEQ ID NO: 164972 - DNA, 25 bp, Canis familiaris
ggccccttttatttgatggccaaag

SEQ ID NO: 164973 - DNA, 25 bp, Canis familiaris
ggcccaactttttctgagtcagaaa

SEQ ID NO: 164974 - DNA, 25 bp, Canis familiaris
tggctgccaactattttgaggatgt

SEQ ID NO: 164975 - DNA, 25 bp, Canis familiaris
ggcgccagccataggaattgagaga

SEQ ID NO: 164976 - DNA, 25 bp, Canis familiaris
ggcccagtcattgtcattggaagct

SEQ ID NO: 164977 - DNA, 25 bp, Canis familiaris
ggcccagtgatcatgtccattgaag

SEQ ID NO: 164978 - DNA, 25 bp, Canis familiaris
ggcccaggagctggtcagcttgtac

SEQ ID NO: 164979 - DNA, 25 bp, Canis familiaris
ggcccaggaggagtcctgagtagcc

SEQ ID NO: 164980 - DNA, 25 bp, Canis familiaris
ggcccgcgagacgtgactagtagac

SEQ ID NO: 164981 - DNA, 25 bp, Canis familiaris
ggcctcggaggctgacagtgaaact

SEQ ID NO: 164982 - DNA, 25 bp, Canis familiaris
ggcccgagaggctaatgggaccctt

SEQ ID NO: 164983 - DNA, 25 bp, Canis familiaris
tggccctgggcttcaggggaaccct

SEQ ID NO: 164984 - DNA, 25 bp, Canis familiaris
ggccctggttggctgtgaggcaacc

SEQ ID NO: 164985 - DNA, 25 bp, Canis familiaris
ggccctcagtggaccagggagcaga

SEQ ID NO: 164986 - DNA, 25 bp, Canis familiaris
ggcccatgtgtgaaccaaggatgaa

SEQ ID NO: 164987 - DNA, 25 bp, Canis familiaris
ggccctgtgctaagtatctggagaa

SEQ ID NO: 164988 - DNA, 25 bp, Canis familiaris
ggccggtctgatagtggctgggtac

SEQ ID NO: 164989 - DNA, 25 bp, Canis familiaris
ggccacggcataagcggggcagggc

SEQ ID NO: 164990 - DNA, 25 bp, Canis familiaris
ggcccggaaacgagccagcaggatc

SEQ ID NO: 164991 - DNA, 25 bp, Canis familiaris
ggcccctaaaagaagaagctctgca

SEQ ID NO: 164992 - DNA, 25 bp, Canis familiaris
ggccgttccaatttgaagacttcat

SEQ ID NO: 164993 - DNA, 25 bp, Canis familiaris
ggcgcgttaaattatcagactatct

SEQ ID NO: 164994 - DNA, 25 bp, Canis familiaris
ggccattttaacttcagagctcccc

SEQ ID NO: 164995 - DNA, 25 bp, Canis familiaris
ggccgtgcttatacattcgggcagc

SEQ ID NO: 164996 - DNA, 25 bp, Canis familiaris
ggccctgttgataaagctggtccct

SEQ ID NO: 164997 - DNA, 25 bp, Canis familiaris
ggcgccggcgcaagaagcatagatc

SEQ ID NO: 164998 - DNA, 25 bp, Canis familiaris
ggccgaggctgcaaagagcatcgtt

SEQ ID NO: 164999 - DNA, 25 bp, Canis familiaris
ggcctaggctgacggaaaccatttc

SEQ ID NO: 165000 - DNA, 25 bp, Canis familiaris
ggcccatggtgagggaacattgctt

SEQ ID NO: 165001 - DNA, 25 bp, Canis familiaris
ggcccagtgctttggaaatctgcgg

SEQ ID NO: 165002 - DNA, 25 bp, Canis familiaris
ggccctttataggaagaatgtgctg

SEQ ID NO: 165003 - DNA, 25 bp, Canis familiaris
ggccccatgcgttgtgaagaaattg

SEQ ID NO: 165004 - DNA, 25 bp, Canis familiaris
ggccccgcgtcatgtagcggattga

SEQ ID NO: 165005 - DNA, 25 bp, Canis familiaris
ggccccgcagccattaaagactgag

SEQ ID NO: 165006 - DNA, 25 bp, Canis familiaris
tggcccctaactatacctgaatggc

SEQ ID NO: 165007 - DNA, 25 bp, Canis familiaris
ggcccattaactttagctatcctgg

SEQ ID NO: 165008 - DNA, 25 bp, Canis familiaris
tggcccttaaaatttctttctgtgg

SEQ ID NO: 165009 - DNA, 25 bp, Canis familiaris
tggccactaatacaccttattctgg

SEQ ID NO: 165010 - DNA, 25 bp, Canis familiaris
ggccctggatatcagcctttagctg

SEQ ID NO: 165011 - DNA, 25 bp, Canis familiaris
tgtacctggttccagttttaatttg

SEQ ID NO: 165012 - DNA, 25 bp, Canis familiaris
tgttcccttaagcaaattgaatttg

SEQ ID NO: 165013 - DNA, 25 bp, Canis familiaris
ggcccttggggccaggattgaattt

SEQ ID NO: 165014 - DNA, 25 bp, Canis familiaris
ggccagcatagggggagggtctttt

SEQ ID NO: 165015 - DNA, 25 bp, Canis familiaris
ggcgcagcaaggaaggcaggtgagt

SEQ ID NO: 165016 - DNA, 25 bp, Canis familiaris
ggcgcacagaggcactacatatact

SEQ ID NO: 165017 - DNA, 25 bp, Canis familiaris
ggcccaagccgaagaaatcctggag

SEQ ID NO: 165018 - DNA, 25 bp, Canis familiaris
ggcgcacaagggtgagattccagga

SEQ ID NO: 165019 - DNA, 25 bp, Canis familiaris
ggcgcacctgggttgaaattcaagt

SEQ ID NO: 165020 - DNA, 25 bp, Canis familiaris
ggcccctgcaggtggaatattaccc

SEQ ID NO: 165021 - DNA, 25 bp, Canis familiaris
ggcgccctgggatgacaagttaccc

SEQ ID NO: 165022 - DNA, 25 bp, Canis familiaris
ggcgcaccgggttgcagaaggtaca

SEQ ID NO: 165023 - DNA, 25 bp, Canis familiaris
ggcgagcaccggaagaagaagtgga

SEQ ID NO: 165024 - DNA, 25 bp, Canis familiaris
ggcgaccactggctacaaggtcagg

SEQ ID NO: 165025 - DNA, 25 bp, Canis familiaris
tggccccacaggcaacataggttga

SEQ ID NO: 165026 - DNA, 25 bp, Canis familiaris
ggcccctaggcaaaacagcagagta

SEQ ID NO: 165027 - DNA, 25 bp, Canis familiaris
ggccccatgggcagaaacagcctga

SEQ ID NO: 165028 - DNA, 25 bp, Canis familiaris
ggcccatctcgggggatacaggcaa

SEQ ID NO: 165029 - DNA, 25 bp, Canis familiaris
ggccctggcctggggagagcaaaga

SEQ ID NO: 165030 - DNA, 25 bp, Canis familiaris
ggccaagtacctggacgacagaaac

SEQ ID NO: 165031 - DNA, 25 bp, Canis familiaris
ggccacttccctgaggacagaaact

SEQ ID NO: 165032 - DNA, 25 bp, Canis familiaris
ggcctgcttaccactggaattaacc

SEQ ID NO: 165033 - DNA, 25 bp, Canis familiaris
tggcggctataaaactaaaattcct

SEQ ID NO: 165034 - DNA, 25 bp, Canis familiaris
ggccgcttcacaaggaaagtcttcc

SEQ ID NO: 165035 - DNA, 25 bp, Canis familiaris
ggcgcccatacaaggccatagactt

SEQ ID NO: 165036 - DNA, 25 bp, Canis familiaris
ggcgacgaaaagtcctatgacgtgt

SEQ ID NO: 165037 - DNA, 25 bp, Canis familiaris
ggcgacgacctcatcctagagattg

SEQ ID NO: 165038 - DNA, 25 bp, Canis familiaris
ggcgacgacccattcgaacgtctgc

SEQ ID NO: 165039 - DNA, 25 bp, Canis familiaris
ggccaagactcctctaagaactttc

SEQ ID NO: 165040 - DNA, 25 bp, Canis familiaris
ggccaaggccccttaggaggcttgg

SEQ ID NO: 165041 - DNA, 25 bp, Canis familiaris
ggccatttcccatcgggaacgtgag

SEQ ID NO: 165042 - DNA, 25 bp, Canis familiaris
ggccaatatccctgaggaacatagt

SEQ ID NO: 165043 - DNA, 25 bp, Canis familiaris
ggccaattcggattgttgaacaaga

SEQ ID NO: 165044 - DNA, 25 bp, Canis familiaris
ggcctttcgtgtttcagaccaggac

SEQ ID NO: 165045 - DNA, 25 bp, Canis familiaris
ggcctttctggtctattccaggagt

SEQ ID NO: 165046 - DNA, 25 bp, Canis familiaris
ggcctttgctgttgtttaccaggtg

SEQ ID NO: 165047 - DNA, 25 bp, Canis familiaris
ggcctcttatttattaccattgctg

SEQ ID NO: 165048 - DNA, 25 bp, Canis familiaris
ggcctctaatgtttatgataccact

SEQ ID NO: 165049 - DNA, 25 bp, Canis familiaris
ggcgctgccgcgcagcttgaacgac

SEQ ID NO: 165050 - DNA, 25 bp, Canis familiaris
ggccagctctatttgctttaaccag

SEQ ID NO: 165051 - DNA, 25 bp, Canis familiaris
ggcccatctcaatgcctatagcacc

SEQ ID NO: 165052 - DNA, 25 bp, Canis familiaris
ggcccatggacatggccatgatcat

SEQ ID NO: 165053 - DNA, 25 bp, Canis familiaris
ggccgggaaagggctgactggggca

SEQ ID NO: 165054 - DNA, 25 bp, Canis familiaris
ggcctgggacaagatccacgtgggc

SEQ ID NO: 165055 - DNA, 25 bp, Canis familiaris
ggcctcaggaaattcacccgagtgg

SEQ ID NO: 165056 - DNA, 25 bp, Canis familiaris
ggccctggtgaagagccgatgaggc

SEQ ID NO: 165057 - DNA, 25 bp, Canis familiaris
ggccctggtggacagactgggtgcg

SEQ ID NO: 165058 - DNA, 25 bp, Canis familiaris
ggcccagtttgacatcgcggtggcc

SEQ ID NO: 165059 - DNA, 25 bp, Canis familiaris
ggcctcgtgtaaccacggaattcct

SEQ ID NO: 165060 - DNA, 25 bp, Canis familiaris
ggccatggagtacgtcaacgacttc

SEQ ID NO: 165061 - DNA, 25 bp, Canis familiaris
ggcctaggtgatcgacttcgtcaac

SEQ ID NO: 165062 - DNA, 25 bp, Canis familiaris
ggcctaccctggatctagatattat

SEQ ID NO: 165063 - DNA, 25 bp, Canis familiaris
ggccctcaccatgatttatgtttct

SEQ ID NO: 165064 - DNA, 25 bp, Canis familiaris
ggccctgagccagactgggttttgt

SEQ ID NO: 165065 - DNA, 25 bp, Canis familiaris
ggcccgagccaggaagtttggttgt

SEQ ID NO: 165066 - DNA, 25 bp, Canis familiaris
ggcgcccagccataggatttgagag

SEQ ID NO: 165067 - DNA, 25 bp, Canis familiaris
ggcccaggccagccagtacctgaga

SEQ ID NO: 165068 - DNA, 25 bp, Canis familiaris
ggcgctgatgaccccggacaccgac

SEQ ID NO: 165069 - DNA, 25 bp, Canis familiaris
ggccgagaacacatggcacaccggc

SEQ ID NO: 165070 - DNA, 25 bp, Canis familiaris
ggccgtgccaagaagggccgcggcc

SEQ ID NO: 165071 - DNA, 25 bp, Canis familiaris
ggcccccatcagagactgaaggccc

SEQ ID NO: 165072 - DNA, 25 bp, Canis familiaris
ggcccagcctggagggattggccct

SEQ ID NO: 165073 - DNA, 25 bp, Canis familiaris
ggcccacacaggaggggctgagccc

SEQ ID NO: 165074 - DNA, 25 bp, Canis familiaris
ggccgcaacagcaggggcgatatcc

SEQ ID NO: 165075 - DNA, 25 bp, Canis familiaris
ggccagccaccaaaggggtcatact

SEQ ID NO: 165076 - DNA, 25 bp, Canis familiaris
ggccagccctcgatggaggattcag

SEQ ID NO: 165077 - DNA, 25 bp, Canis familiaris
ggcgctccctgtatgaaagtatctg

SEQ ID NO: 165078 - DNA, 25 bp, Canis familiaris
ggcgctccgtggatgaagttctgcg

SEQ ID NO: 165079 - DNA, 25 bp, Canis familiaris
ggcgctccagggtatgggtctgcgc

SEQ ID NO: 165080 - DNA, 25 bp, Canis familiaris
ggcctgcacggagctgggcatccgc

SEQ ID NO: 165081 - DNA, 25 bp, Canis familiaris
ggcccagcagaaggggtctgccggg

SEQ ID NO: 165082 - DNA, 25 bp, Canis familiaris
ggccttgcggggagacttcaggagg

SEQ ID NO: 165083 - DNA, 25 bp, Canis familiaris
ggccaaggggcgagaggagggagtg

SEQ ID NO: 165084 - DNA, 25 bp, Canis familiaris
ggcgcgcgggagagagaggagagga

SEQ ID NO: 165085 - DNA, 25 bp, Canis familiaris
ggcgcctgacggggtgaggcgggac

SEQ ID NO: 165086 - DNA, 25 bp, Canis familiaris
ggccactgggaggatggagccgcgg

SEQ ID NO: 165087 - DNA, 25 bp, Canis familiaris
ggccctggaagcttggagaatctgg

SEQ ID NO: 165088 - DNA, 25 bp, Canis familiaris
ggccctggctacttggactattcag

SEQ ID NO: 165089 - DNA, 25 bp, Canis familiaris
ggccattggctgcactaactttggt

SEQ ID NO: 165090 - DNA, 25 bp, Canis familiaris
ggccatcaggagcataagactttag

SEQ ID NO: 165091 - DNA, 25 bp, Canis familiaris
ggccctcgaggaagagcactttcca

SEQ ID NO: 165092 - DNA, 25 bp, Canis familiaris
ggccctcgaggtgagagtgttgcct

SEQ ID NO: 165093 - DNA, 25 bp, Canis familiaris
ggccccaaggctgtgagatcgtggt

SEQ ID NO: 165094 - DNA, 25 bp, Canis familiaris
ggcccactaactgaagtcaaggctt

SEQ ID NO: 165095 - DNA, 25 bp, Canis familiaris
ggcccagtacctgcaagtgacgagc

SEQ ID NO: 165096 - DNA, 25 bp, Canis familiaris
ggccctgaaccctgtagacagatgc

SEQ ID NO: 165097 - DNA, 25 bp, Canis familiaris
ggccttcaaccctgagcagaggccc

SEQ ID NO: 165098 - DNA, 25 bp, Canis familiaris
ggccatctaccactttgaagggtcc

SEQ ID NO: 165099 - DNA, 25 bp, Canis familiaris
ggccattaggcctatttaggggaca

SEQ ID NO: 165100 - DNA, 25 bp, Canis familiaris
ggccatttggttatcctttgtgaca

SEQ ID NO: 165101 - DNA, 25 bp, Canis familiaris
ggcctcctggttaagcatgttttag

SEQ ID NO: 165102 - DNA, 25 bp, Canis familiaris
ggcccactgatttgaactgtattaa

SEQ ID NO: 165103 - DNA, 25 bp, Canis familiaris
ggcccagtgatttagcactgccttc

SEQ ID NO: 165104 - DNA, 25 bp, Canis familiaris
ggccgcagctgcaacaatcagtgcg

SEQ ID NO: 165105 - DNA, 25 bp, Canis familiaris
ggcccgctgcaagcagctgatctgt

SEQ ID NO: 165106 - DNA, 25 bp, Canis familiaris
ggccctggcaaggagtactgtgtct

SEQ ID NO: 165107 - DNA, 25 bp, Canis familiaris
ggcccggcaagtggtgacagggctt

SEQ ID NO: 165108 - DNA, 25 bp, Canis familiaris
ggcccgggcagtggtgacagggctg

SEQ ID NO: 165109 - DNA, 25 bp, Canis familiaris
ggcctcggatcagaggataggagca

SEQ ID NO: 165110 - DNA, 25 bp, Canis familiaris
ggccagcgagtagacgttgtagcac

SEQ ID NO: 165111 - DNA, 25 bp, Canis familiaris
ggcctgtgagtcttgtgttttaatc

SEQ ID NO: 165112 - DNA, 25 bp, Canis familiaris
tggcctctagttcagtctgtgttat

SEQ ID NO: 165113 - DNA, 25 bp, Canis familiaris
tggaccaaattcgatttgactttca

SEQ ID NO: 165114 - DNA, 25 bp, Canis familiaris
tggagacataatacactagtgcaat

SEQ ID NO: 165115 - DNA, 25 bp, Canis familiaris
tggaactaaaccatgtcacccaagg

SEQ ID NO: 165116 - DNA, 25 bp, Canis familiaris
ggccaccaaaccagatgcagtacag

SEQ ID NO: 165117 - DNA, 25 bp, Canis familiaris
ggccccaaacctcgcacagatgggg

SEQ ID NO: 165118 - DNA, 25 bp, Canis familiaris
ggcctttccctttcacagatgaggg

SEQ ID NO: 165119 - DNA, 25 bp, Canis familiaris
tggcccttccgtgtacatggatggg

SEQ ID NO: 165120 - DNA, 25 bp, Canis familiaris
ggccctctcagcagctatagggtgg

SEQ ID NO: 165121 - DNA, 25 bp, Canis familiaris
ggcctctctggcagtcagggagggg

SEQ ID NO: 165122 - DNA, 25 bp, Canis familiaris
ggcccatgtcgtagtcgagaaacgg

SEQ ID NO: 165123 - DNA, 25 bp, Canis familiaris
ggccgttgagttcaggaaccgggat

SEQ ID NO: 165124 - DNA, 25 bp, Canis familiaris
ggcctggtttgccgggagatccggt

SEQ ID NO: 165125 - DNA, 25 bp, Canis familiaris
ggccgctgctttctgaagagctggc

SEQ ID NO: 165126 - DNA, 25 bp, Canis familiaris
ggccctgcgtggcagagagtctggc

SEQ ID NO: 165127 - DNA, 25 bp, Canis familiaris
ggccctgtgctgagggatgtgaccc

SEQ ID NO: 165128 - DNA, 25 bp, Canis familiaris
ggcgcctctgtgagcgagagacacc

SEQ ID NO: 165129 - DNA, 25 bp, Canis familiaris
ggcgcgcaggtgaaggtgtgcacgc

SEQ ID NO: 165130 - DNA, 25 bp, Canis familiaris
ggcgccaggacactgcgtgtgtcct

SEQ ID NO: 165131 - DNA, 25 bp, Canis familiaris
ggcgcgggaatgtgctggtggatgc

SEQ ID NO: 165132 - DNA, 25 bp, Canis familiaris
ggccggcaagagtgctggcagcagg

SEQ ID NO: 165133 - DNA, 25 bp, Canis familiaris
ggccccactgaagggatgccagagc

SEQ ID NO: 165134 - DNA, 25 bp, Canis familiaris
ggcccggaaggaggcatgcagcacc

SEQ ID NO: 165135 - DNA, 25 bp, Canis familiaris
ggcccaaatcaggaccagcatgtcc

SEQ ID NO: 165136 - DNA, 25 bp, Canis familiaris
tggccatcacgaggcctctagctat

SEQ ID NO: 165137 - DNA, 25 bp, Canis familiaris
ggccaggcatgaggcaggcattgct

SEQ ID NO: 165138 - DNA, 25 bp, Canis familiaris
ggccatacatgagaccattcctttg

SEQ ID NO: 165139 - DNA, 25 bp, Canis familiaris
ggcccctgaggagcaccctgtgctg

SEQ ID NO: 165140 - DNA, 25 bp, Canis familiaris
ggccgccgtgaagacacagggctgg

SEQ ID NO: 165141 - DNA, 25 bp, Canis familiaris
ggccaccagtaagccaaggggtcca

SEQ ID NO: 165142 - DNA, 25 bp, Canis familiaris
ggccaaatgtggcaaaaggctggct

SEQ ID NO: 165143 - DNA, 25 bp, Canis familiaris
ggcctactgggccaagcaagggtgg

SEQ ID NO: 165144 - DNA, 25 bp, Canis familiaris
ggccttctagctcaaggctgtgagt

SEQ ID NO: 165145 - DNA, 25 bp, Canis familiaris
tggccttttgtttcctgggagtagg

SEQ ID NO: 165146 - DNA, 25 bp, Canis familiaris
ggccccttgtcatttcattgagaaa

SEQ ID NO: 165147 - DNA, 25 bp, Canis familiaris
ggccctgcttctagctgaattgaga

SEQ ID NO: 165148 - DNA, 25 bp, Canis familiaris
ggcccagttctgtaaatcgatatcg

SEQ ID NO: 165149 - DNA, 25 bp, Canis familiaris
ggccatagaccatacatacgatcag

SEQ ID NO: 165150 - DNA, 25 bp, Canis familiaris
ggccatagaccatacatacgatcag

SEQ ID NO: 165151 - DNA, 25 bp, Canis familiaris
ggcccagagctatagctggcgcagc

SEQ ID NO: 165152 - DNA, 25 bp, Canis familiaris
ggccacagagtctatgttagccacg

SEQ ID NO: 165153 - DNA, 25 bp, Canis familiaris
ggccacaaactgactgtgaccctgt

SEQ ID NO: 165154 - DNA, 25 bp, Canis familiaris
ggccagggtcttcgcatgaccctgc

SEQ ID NO: 165155 - DNA, 25 bp, Canis familiaris
ggcgccagtgtttgtcagtctcgcc

SEQ ID NO: 165156 - DNA, 25 bp, Canis familiaris
ggcctaggtgtaatcattttgtttg

SEQ ID NO: 165157 - DNA, 25 bp, Canis familiaris
ggccacgttggaaatgtctggtttg

SEQ ID NO: 165158 - DNA, 25 bp, Canis familiaris
ggccaggagcatgaaatgggggttt

SEQ ID NO: 165159 - DNA, 25 bp, Canis familiaris
ggcccagcgctggcaatataggcgg

SEQ ID NO: 165160 - DNA, 25 bp, Canis familiaris
ggccacaactgagacacagcacagg

SEQ ID NO: 165161 - DNA, 25 bp, Canis familiaris
ggccatacacattcagtccataaga

SEQ ID NO: 165162 - DNA, 25 bp, Canis familiaris
ggccttactccagatcatacagatg

SEQ ID NO: 165163 - DNA, 25 bp, Canis familiaris
ggccttgcatctcagaaggaagtgg

SEQ ID NO: 165164 - DNA, 25 bp, Canis familiaris
ggcccttctggaacggaagtgccct

SEQ ID NO: 165165 - DNA, 25 bp, Canis familiaris
ggccgtcttctcaacggaagggcct

SEQ ID NO: 165166 - DNA, 25 bp, Canis familiaris
ggccaggtgcctgacggaagaggtt

SEQ ID NO: 165167 - DNA, 25 bp, Canis familiaris
ggccggtgaccctagtgagagagtt

SEQ ID NO: 165168 - DNA, 25 bp, Canis familiaris
ggccgtgggccatgtgtagagccat

SEQ ID NO: 165169 - DNA, 25 bp, Canis familiaris
ggcctatggtggtgcttatgatgtc

SEQ ID NO: 165170 - DNA, 25 bp, Canis familiaris
ggcccacagctggaagctttttcct

SEQ ID NO: 165171 - DNA, 25 bp, Canis familiaris
ggcccaatggctttggttatctctc

SEQ ID NO: 165172 - DNA, 25 bp, Canis familiaris
ggcccaatggctaaacttcatcttt

SEQ ID NO: 165173 - DNA, 25 bp, Canis familiaris
tggaccaaggtgaaagtcaactttg

SEQ ID NO: 165174 - DNA, 25 bp, Canis familiaris
tccaccaccgtgtaaacgacgtctt

SEQ ID NO: 165175 - DNA, 25 bp, Canis familiaris
tcggctggccttgaaacaacctgat

SEQ ID NO: 165176 - DNA, 25 bp, Canis familiaris
tggtcggttccaaaagatggccttt

SEQ ID NO: 165177 - DNA, 25 bp, Canis familiaris
ggccggtagccaggaagtggctttg

SEQ ID NO: 165178 - DNA, 25 bp, Canis familiaris
ggcctggtgaccttgaagcatgtgt

SEQ ID NO: 165179 - DNA, 25 bp, Canis familiaris
ggcctgcctaattcagatccagtgc

SEQ ID NO: 165180 - DNA, 25 bp, Canis familiaris
ggccctctgatttctgatgcaagta

SEQ ID NO: 165181 - DNA, 25 bp, Canis familiaris
ggccattctggttctcatgagatgt

SEQ ID NO: 165182 - DNA, 25 bp, Canis familiaris
tggccacctcattgtccatagagtt

SEQ ID NO: 165183 - DNA, 25 bp, Canis familiaris
ggcccatctctgttgctattgatgc

SEQ ID NO: 165184 - DNA, 25 bp, Canis familiaris
ggcccatctatgttctatctgaagt

SEQ ID NO: 165185 - DNA, 25 bp, Canis familiaris
ggcccaccggtcaatgtgaattgaa

SEQ ID NO: 165186 - DNA, 25 bp, Canis familiaris
ggcctaccaggacatggacattgac

SEQ ID NO: 165187 - DNA, 25 bp, Canis familiaris
ggccttcagggtcagtgccaatctc

SEQ ID NO: 165188 - DNA, 25 bp, Canis familiaris
ggcctctgggacccagtgtatattc

SEQ ID NO: 165189 - DNA, 25 bp, Canis familiaris
ggcccgaggacggaggcgtgtatca

SEQ ID NO: 165190 - DNA, 25 bp, Canis familiaris
ggccgtgtggacggagggggcacac

SEQ ID NO: 165191 - DNA, 25 bp, Canis familiaris
ggcccttggagctaggcactgggca

SEQ ID NO: 165192 - DNA, 25 bp, Canis familiaris
ggcccctggcagaaggacgaggacg

SEQ ID NO: 165193 - DNA, 25 bp, Canis familiaris
ggcccccgaggctgaggatggaggc

SEQ ID NO: 165194 - DNA, 25 bp, Canis familiaris
ggccgccggggaagaggagagggcg

SEQ ID NO: 165195 - DNA, 25 bp, Canis familiaris
ggcccaggctgggaagcacggggac

SEQ ID NO: 165196 - DNA, 25 bp, Canis familiaris
ggccctgagcgggaagggggtactg

SEQ ID NO: 165197 - DNA, 25 bp, Canis familiaris
ggcctgggctgggacagggagcaat

SEQ ID NO: 165198 - DNA, 25 bp, Canis familiaris
ggccgaaatgaggaccagtggaaaa

SEQ ID NO: 165199 - DNA, 25 bp, Canis familiaris
ggccgagactgagaccatgtaccag

SEQ ID NO: 165200 - DNA, 25 bp, Canis familiaris
ggcccgactgagcatccgggccaga

SEQ ID NO: 165201 - DNA, 25 bp, Canis familiaris
ggcccccagaggtctggggccagct

SEQ ID NO: 165202 - DNA, 25 bp, Canis familiaris
ggcccccgaggagtcttgggagtgt

SEQ ID NO: 165203 - DNA, 25 bp, Canis familiaris
ggcccccgctagatttggagagtga

SEQ ID NO: 165204 - DNA, 25 bp, Canis familiaris
ggccgttcttagttggtggagcgat

SEQ ID NO: 165205 - DNA, 25 bp, Canis familiaris
ggccgttcttggtgagcgggagcac

SEQ ID NO: 165206 - DNA, 25 bp, Canis familiaris
ggccgtactttgtctgactacaaca

SEQ ID NO: 165207 - DNA, 25 bp, Canis familiaris
ggccgtactttgtctgactacaaca

SEQ ID NO: 165208 - DNA, 25 bp, Canis familiaris
ggccgtactttgtctgactacaaca

SEQ ID NO: 165209 - DNA, 25 bp, Canis familiaris
ggcccttctactttgattgaatccc

SEQ ID NO: 165210 - DNA, 25 bp, Canis familiaris
ggccccttcacttagtaaatggctc

SEQ ID NO: 165211 - DNA, 25 bp, Canis familiaris
ggcccctgacttcagcaaactggcc

SEQ ID NO: 165212 - DNA, 25 bp, Canis familiaris
ggccaccaactacaaccagtatgcc

SEQ ID NO: 165213 - DNA, 25 bp, Canis familiaris
ggccaccaccttcaacaggtgtgcc

SEQ ID NO: 165214 - DNA, 25 bp, Canis familiaris
ggccctggacttcaagcgcaaggcc

SEQ ID NO: 165215 - DNA, 25 bp, Canis familiaris
ggccttgacctcgcccatcaaggcc

SEQ ID NO: 165216 - DNA, 25 bp, Canis familiaris
ggcctgagaccataccttcagggcc

SEQ ID NO: 165217 - DNA, 25 bp, Canis familiaris
ggccagaagccatcaggtaaggttg

SEQ ID NO: 165218 - DNA, 25 bp, Canis familiaris
ggccagagagccagagcagtaagga

SEQ ID NO: 165219 - DNA, 25 bp, Canis familiaris
ggccctgagcctttgcaagaatgga

SEQ ID NO: 165220 - DNA, 25 bp, Canis familiaris
ggccctagcttaataaagattcacc

SEQ ID NO: 165221 - DNA, 25 bp, Canis familiaris
ggccccagctaaatcaagagactta

SEQ ID NO: 165222 - DNA, 25 bp, Canis familiaris
ggccccactgcagtaaacaggcaac

SEQ ID NO: 165223 - DNA, 25 bp, Canis familiaris
ggcccccagcatggccaaagacaac

SEQ ID NO: 165224 - DNA, 25 bp, Canis familiaris
ggccttgacaggcgcaaagacatct

SEQ ID NO: 165225 - DNA, 25 bp, Canis familiaris
ggccaataagcacatgaaaagacat

SEQ ID NO: 165226 - DNA, 25 bp, Canis familiaris
ggccgtgattgacttgaacaaccgc

SEQ ID NO: 165227 - DNA, 25 bp, Canis familiaris
ggccgctttcgttggacacggccac

SEQ ID NO: 165228 - DNA, 25 bp, Canis familiaris
tggccgtcttcgaggagatccacat

SEQ ID NO: 165229 - DNA, 25 bp, Canis familiaris
tggccgtttttccggatggatcttt

SEQ ID NO: 165230 - DNA, 25 bp, Canis familiaris
tggtcggttggtcaggatagtcccc

SEQ ID NO: 165231 - DNA, 25 bp, Canis familiaris
ggcctggtgggtacaggaatctgcc

SEQ ID NO: 165232 - DNA, 25 bp, Canis familiaris
ggccgtggtgggcggcaatgtgctc

SEQ ID NO: 165233 - DNA, 25 bp, Canis familiaris
ggccagatgtggggcgggaggaccg

SEQ ID NO: 165234 - DNA, 25 bp, Canis familiaris
ggcccaggaggccgtgtgagggcgg

SEQ ID NO: 165235 - DNA, 25 bp, Canis familiaris
ggccgccagagccagggggggcggc

SEQ ID NO: 165236 - DNA, 25 bp, Canis familiaris
ggccccagacagaggctggatggcg

SEQ ID NO: 165237 - DNA, 25 bp, Canis familiaris
ggcctccccagtggatgtggtgaag

SEQ ID NO: 165238 - DNA, 25 bp, Canis familiaris
ggccctcccactgagatgaatcatc

SEQ ID NO: 165239 - DNA, 25 bp, Canis familiaris
ggcccatgccactacgagatgaaac

SEQ ID NO: 165240 - DNA, 25 bp, Canis familiaris
ggccgtgtagctgtgaggccagcgc

SEQ ID NO: 165241 - DNA, 25 bp, Canis familiaris
ggccgatgtgaagttgaggtgctgc

SEQ ID NO: 165242 - DNA, 25 bp, Canis familiaris
ggccatgtgtgaagttcgtggcgca

SEQ ID NO: 165243 - DNA, 25 bp, Canis familiaris
ggccctgtgtgcgttcatggggcta

SEQ ID NO: 165244 - DNA, 25 bp, Canis familiaris
ggccacgttgctgttgtttcaataa

SEQ ID NO: 165245 - DNA, 25 bp, Canis familiaris
ggccaccttgctggcggtttgaaat

SEQ ID NO: 165246 - DNA, 25 bp, Canis familiaris
ggccaccgaggctggagtcgaatat

SEQ ID NO: 165247 - DNA, 25 bp, Canis familiaris
ggccaccgtgactcggttgagaagt

SEQ ID NO: 165248 - DNA, 25 bp, Canis familiaris
ggccctagctacttcagtcttgaag

SEQ ID NO: 165249 - DNA, 25 bp, Canis familiaris
ggccctgccaattaatgttaaagaa

SEQ ID NO: 165250 - DNA, 25 bp, Canis familiaris
ggcctcgaactctctgttacgagaa

SEQ ID NO: 165251 - DNA, 25 bp, Canis familiaris
ggcctcatgtaccagaagttccgga

SEQ ID NO: 165252 - DNA, 25 bp, Canis familiaris
ggcctattaccagaaatatgtggac

SEQ ID NO: 165253 - DNA, 25 bp, Canis familiaris
ggcctttccacaactaggactgaga

SEQ ID NO: 165254 - DNA, 25 bp, Canis familiaris
ggccttttgcaaactcctggtgcaa

SEQ ID NO: 165255 - DNA, 25 bp, Canis familiaris
ggccacgtatgctaagtcctggatg

SEQ ID NO: 165256 - DNA, 25 bp, Canis familiaris
ggccaccattgatattctttgagtg

SEQ ID NO: 165257 - DNA, 25 bp, Canis familiaris
ggcccattgatctcttctgattgag

SEQ ID NO: 165258 - DNA, 25 bp, Canis familiaris
ggcccattatcattactggtctgtg

SEQ ID NO: 165259 - DNA, 25 bp, Canis familiaris
ggcctcattaagtctgctgactctg

SEQ ID NO: 165260 - DNA, 25 bp, Canis familiaris
ggcctctggatttcagcaattgctg

SEQ ID NO: 165261 - DNA, 25 bp, Canis familiaris
ggcctgaggtcttcacttactcagt

SEQ ID NO: 165262 - DNA, 25 bp, Canis familiaris
ggcccatcgcgaagacggcgtggcc

SEQ ID NO: 165263 - DNA, 25 bp, Canis familiaris
ggccgccagcatgcgggaggtggac

SEQ ID NO: 165264 - DNA, 25 bp, Canis familiaris
ggccacagcacatagttagttgaac

SEQ ID NO: 165265 - DNA, 25 bp, Canis familiaris
ggcctctgcactgtttcaattaaca

SEQ ID NO: 165266 - DNA, 25 bp, Canis familiaris
ggccctgactgaatttaacacaaca

SEQ ID NO: 165267 - DNA, 25 bp, Canis familiaris
ggccctgaaatcaatacagccaacc

SEQ ID NO: 165268 - DNA, 25 bp, Canis familiaris
ggccgtggagaactccaccgacacc

SEQ ID NO: 165269 - DNA, 25 bp, Canis familiaris
ggcctgtggaagaccaaagcttacc

SEQ ID NO: 165270 - DNA, 25 bp, Canis familiaris
ggcctagagcctgaaacagcttacc

SEQ ID NO: 165271 - DNA, 25 bp, Canis familiaris
ggcctggtcctttgatccagttaac

SEQ ID NO: 165272 - DNA, 25 bp, Canis familiaris
ggccatggtggctgattccaattcc

SEQ ID NO: 165273 - DNA, 25 bp, Canis familiaris
ggccacgatagaatgtatcccttcc

SEQ ID NO: 165274 - DNA, 25 bp, Canis familiaris
ggcccgcatggaattcatcctgcgc

SEQ ID NO: 165275 - DNA, 25 bp, Canis familiaris
ggcccctggatgatcatttgcattc

SEQ ID NO: 165276 - DNA, 25 bp, Canis familiaris
ggcccctagagtagattgctatgtt

SEQ ID NO: 165277 - DNA, 25 bp, Canis familiaris
ggccgacaggagcagtttcatctct

SEQ ID NO: 165278 - DNA, 25 bp, Canis familiaris
ggccgtatgatgtgtgtggtcctct

SEQ ID NO: 165279 - DNA, 25 bp, Canis familiaris
ggccgtgacatctgtatgtggctct

SEQ ID NO: 165280 - DNA, 25 bp, Canis familiaris
ggccgtgcacaacctgaagatgttc

SEQ ID NO: 165281 - DNA, 25 bp, Canis familiaris
ggccgcgacaagcctgataggtgcc

SEQ ID NO: 165282 - DNA, 25 bp, Canis familiaris
tggcctgcagaatgcctgtgacgag

SEQ ID NO: 165283 - DNA, 25 bp, Canis familiaris
ggccatatgcagacagcctggagag

SEQ ID NO: 165284 - DNA, 25 bp, Canis familiaris
ggccagagcaatagctgaggaggaa

SEQ ID NO: 165285 - DNA, 25 bp, Canis familiaris
ggccaagaattgtggtaaatctgga

SEQ ID NO: 165286 - DNA, 25 bp, Canis familiaris
ggcctaaagatgttggaagacctaa

SEQ ID NO: 165287 - DNA, 25 bp, Canis familiaris
ggccaaccgtgaaaagatgacccag

SEQ ID NO: 165288 - DNA, 25 bp, Canis familiaris
ggccaaccgcgagaagatgacccag

SEQ ID NO: 165289 - DNA, 25 bp, Canis familiaris
ggccaaccgcgagaagatgacccag

SEQ ID NO: 165290 - DNA, 25 bp, Canis familiaris
ggccaaaccggatcagtgcctttgg

SEQ ID NO: 165291 - DNA, 25 bp, Canis familiaris
tggccagaacctggaagcggcccgg

SEQ ID NO: 165292 - DNA, 25 bp, Canis familiaris
ggccaatccttgggaacctacggat

SEQ ID NO: 165293 - DNA, 25 bp, Canis familiaris
tgtccaatcgtctggaacctacgat

SEQ ID NO: 165294 - DNA, 25 bp, Canis familiaris
tcccaattataacacaccacacgat

SEQ ID NO: 165295 - DNA, 25 bp, Canis familiaris
ggccacacttttcaagccaagcgtt

SEQ ID NO: 165296 - DNA, 25 bp, Canis familiaris
tggctccactttaaaaccaacaggc

SEQ ID NO: 165297 - DNA, 25 bp, Canis familiaris
tggctacctttcatgtccaaaatgt

SEQ ID NO: 165298 - DNA, 25 bp, Canis familiaris
ggccctcatttcagtcacaaaatcc

SEQ ID NO: 165299 - DNA, 25 bp, Canis familiaris
ggcctgtctgcttcttgtaaaaacc

SEQ ID NO: 165300 - DNA, 25 bp, Canis familiaris
ggcctgtctgcttcttgtaaaaacc

SEQ ID NO: 165301 - DNA, 25 bp, Canis familiaris
ggcctgtctgcttcttgtaaaaacc

SEQ ID NO: 165302 - DNA, 25 bp, Canis familiaris
ggcctgtctgcttcttgtaaaaacc

SEQ ID NO: 165303 - DNA, 25 bp, Canis familiaris
ggcctgtctgcttctttgtaaaaac

SEQ ID NO: 165304 - DNA, 25 bp, Canis familiaris
ggcctgtctctcctattaagtaaaa

SEQ ID NO: 165305 - DNA, 25 bp, Canis familiaris
ggcctgctcccgaattatttggaca

SEQ ID NO: 165306 - DNA, 25 bp, Canis familiaris
ggcctgtactcgatgtctgggcagg

SEQ ID NO: 165307 - DNA, 25 bp, Canis familiaris
ggccttgccaggagatctgtggatg

SEQ ID NO: 165308 - DNA, 25 bp, Canis familiaris
ggccctggcagggaatctatgaggc

SEQ ID NO: 165309 - DNA, 25 bp, Canis familiaris
ggcctgctgggcccagacaaaggtc

SEQ ID NO: 165310 - DNA, 25 bp, Canis familiaris
tggcctgcttgggaaacccaggtct

SEQ ID NO: 165311 - DNA, 25 bp, Canis familiaris
ggccatggtcctggaatcccaggat

SEQ ID NO: 165312 - DNA, 25 bp, Canis familiaris
ggccattgtctctggatctcaggcc

SEQ ID NO: 165313 - DNA, 25 bp, Canis familiaris
ggccggacatgctggacgaggaaga

SEQ ID NO: 165314 - DNA, 25 bp, Canis familiaris
ggcctgaagcatgaggaccaaacgt

SEQ ID NO: 165315 - DNA, 25 bp, Canis familiaris
ggccgagatgaccaggagccaagcc

SEQ ID NO: 165316 - DNA, 25 bp, Canis familiaris
ggcctgagtgcacagcagagctata

SEQ ID NO: 165317 - DNA, 25 bp, Canis familiaris
ggcctgtggcacgagagagcacgag

SEQ ID NO: 165318 - DNA, 25 bp, Canis familiaris
ggcctggagcacgaggcctgtgcag

SEQ ID NO: 165319 - DNA, 25 bp, Canis familiaris
ggcctgggcaattggctgcggatac

SEQ ID NO: 165320 - DNA, 25 bp, Canis familiaris
ggcctccgagtggactgggatgacc

SEQ ID NO: 165321 - DNA, 25 bp, Canis familiaris
ggccccatggcggccatgagtgcga

SEQ ID NO: 165322 - DNA, 25 bp, Canis familiaris
ggccccatgccatcaatgttggcct

SEQ ID NO: 165323 - DNA, 25 bp, Canis familiaris
ggccagccacactgaaggatggtct

SEQ ID NO: 165324 - DNA, 25 bp, Canis familiaris
ggcctcacagccttaaggggataaa

SEQ ID NO: 165325 - DNA, 25 bp, Canis familiaris
ggcctcccctggaggggtcaagcac

SEQ ID NO: 165326 - DNA, 25 bp, Canis familiaris
ggccccccaatgtgggcaacaatcc

SEQ ID NO: 165327 - DNA, 25 bp, Canis familiaris
ggccccccaagatgaggaagccgcc

SEQ ID NO: 165328 - DNA, 25 bp, Canis familiaris
ggcccctgcagctgacagagagaag

SEQ ID NO: 165329 - DNA, 25 bp, Canis familiaris
ggcctcgctgcagatgacagtgtgg

SEQ ID NO: 165330 - DNA, 25 bp, Canis familiaris
ggcctccacttctagagatgctggc

SEQ ID NO: 165331 - DNA, 25 bp, Canis familiaris
ggccccaggcatcagagatcatgag

SEQ ID NO: 165332 - DNA, 25 bp, Canis familiaris
ggccagctcggcagtggtgaactaa

SEQ ID NO: 165333 - DNA, 25 bp, Canis familiaris
ggcccgggattcagtgacatttgat

SEQ ID NO: 165334 - DNA, 25 bp, Canis familiaris
ggcccgtggattatctagtttttct

SEQ ID NO: 165335 - DNA, 25 bp, Canis familiaris
ggcctggtggaagcctggttcttac

SEQ ID NO: 165336 - DNA, 25 bp, Canis familiaris
ggcctggggaagttgtgtgtcatgc

SEQ ID NO: 165337 - DNA, 25 bp, Canis familiaris
ggccttctgagccaggtgatggttc

SEQ ID NO: 165338 - DNA, 25 bp, Canis familiaris
ggccacttgcagaggtgagaggtct

SEQ ID NO: 165339 - DNA, 25 bp, Canis familiaris
ggccctgggtccctgagagaggaaa

SEQ ID NO: 165340 - DNA, 25 bp, Canis familiaris
ggccccgtgtctgtggaaggcaaag

SEQ ID NO: 165341 - DNA, 25 bp, Canis familiaris
ggcccctagggctggaaggacagtg

SEQ ID NO: 165342 - DNA, 25 bp, Canis familiaris
ggcccctatgggtgtggagtccaat

SEQ ID NO: 165343 - DNA, 25 bp, Canis familiaris
tggccccttgggaggactttgcaag

SEQ ID NO: 165344 - DNA, 25 bp, Canis familiaris
ggcccgtcttctaagtactttggtg

SEQ ID NO: 165345 - DNA, 25 bp, Canis familiaris
ggccaggtctttaaaatatctttgt

SEQ ID NO: 165346 - DNA, 25 bp, Canis familiaris
ggccaggtttatttccatttgtttg

SEQ ID NO: 165347 - DNA, 25 bp, Canis familiaris
ggccagagtttgtaccctgtgtttt

SEQ ID NO: 165348 - DNA, 25 bp, Canis familiaris
ggccagacctgtaacacctgatgtg

SEQ ID NO: 165349 - DNA, 25 bp, Canis familiaris
ggccaataccttactgttgttgagt

SEQ ID NO: 165350 - DNA, 25 bp, Canis familiaris
ggccattgagcggtacgtgggtggt

SEQ ID NO: 165351 - DNA, 25 bp, Canis familiaris
tggcccaagtggaacgtgggcgggg

SEQ ID NO: 165352 - DNA, 25 bp, Canis familiaris
ggccaatttggagctgctgggggac

SEQ ID NO: 165353 - DNA, 25 bp, Canis familiaris
ggccaactccctgccaggcaggggc

SEQ ID NO: 165354 - DNA, 25 bp, Canis familiaris
ggccagacgtccgggaacactggcc

SEQ ID NO: 165355 - DNA, 25 bp, Canis familiaris
ggccagagcctgaggaattccgacc

SEQ ID NO: 165356 - DNA, 25 bp, Canis familiaris
ggccgcaccttggtatagtactacc

SEQ ID NO: 165357 - DNA, 25 bp, Canis familiaris
ggccttctcattgtaaggccccgcc

SEQ ID NO: 165358 - DNA, 25 bp, Canis familiaris
ggcctcccaggagtatagagcctcc

SEQ ID NO: 165359 - DNA, 25 bp, Canis familiaris
ggcctgccaagtcttggaggctctc

SEQ ID NO: 165360 - DNA, 25 bp, Canis familiaris
ggccaacgagatcctgtggggccat

SEQ ID NO: 165361 - DNA, 25 bp, Canis familiaris
ggccaaccagatgctgggcgatctc

SEQ ID NO: 165362 - DNA, 25 bp, Canis familiaris
ggccagcaccacgctgaggcgtggc

SEQ ID NO: 165363 - DNA, 25 bp, Canis familiaris
ggccacaccctgggagggtgtccct

SEQ ID NO: 165364 - DNA, 25 bp, Canis familiaris
ggccacaccaggggacatttttgct

SEQ ID NO: 165365 - DNA, 25 bp, Canis familiaris
ggccattcgggattgcctttaatgt

SEQ ID NO: 165366 - DNA, 25 bp, Canis familiaris
tgtcagaacgggagcagtttaatga

SEQ ID NO: 165367 - DNA, 25 bp, Canis familiaris
tgtcattacaggcacaggtatttga

SEQ ID NO: 165368 - DNA, 25 bp, Canis familiaris
ggccgttgatgttgacagcctcgag

SEQ ID NO: 165369 - DNA, 25 bp, Canis familiaris
ggcctgctttgaagaattctctaac

SEQ ID NO: 165370 - DNA, 25 bp, Canis familiaris
ggcctttcttagcatttttacctgc

SEQ ID NO: 165371 - DNA, 25 bp, Canis familiaris
ggcctactttctatattgttacctc

SEQ ID NO: 165372 - DNA, 25 bp, Canis familiaris
ggccttttgcacaggactttgtctc

SEQ ID NO: 165373 - DNA, 25 bp, Canis familiaris
ggccttgatcccaggactttgagat

SEQ ID NO: 165374 - DNA, 25 bp, Canis familiaris
ggccttacaccaaggagtgctctgc

SEQ ID NO: 165375 - DNA, 25 bp, Canis familiaris
ggccttaggaaggaagctgctctgg

SEQ ID NO: 165376 - DNA, 25 bp, Canis familiaris
ggcctttggagcaggtgctgcactc

SEQ ID NO: 165377 - DNA, 25 bp, Canis familiaris
ggcctgttgaacgaggagcagccct

SEQ ID NO: 165378 - DNA, 25 bp, Canis familiaris
ggccgcggagacgtgaaggccgtcc

SEQ ID NO: 165379 - DNA, 25 bp, Canis familiaris
ggcctggggaccagatggtggctcc

SEQ ID NO: 165380 - DNA, 25 bp, Canis familiaris
ggccgggcagggtgatggggccgag

SEQ ID NO: 165381 - DNA, 25 bp, Canis familiaris
tggccggactggattctggggccga

SEQ ID NO: 165382 - DNA, 25 bp, Canis familiaris
ggccggaagtgcagctctcagggcc

SEQ ID NO: 165383 - DNA, 25 bp, Canis familiaris
ggccagcccaggagcaagacggcct

SEQ ID NO: 165384 - DNA, 25 bp, Canis familiaris
ggccgccgaggagaagaagcagcag

SEQ ID NO: 165385 - DNA, 25 bp, Canis familiaris
ggccgcctcggaggacgagaacggc

SEQ ID NO: 165386 - DNA, 25 bp, Canis familiaris
ggccaggtgcggtgacctgacctgg

SEQ ID NO: 165387 - DNA, 25 bp, Canis familiaris
ggccgaggtggacacctactgcaga

SEQ ID NO: 165388 - DNA, 25 bp, Canis familiaris
ggccgaggtggacacctactgcaga

SEQ ID NO: 165389 - DNA, 25 bp, Canis familiaris
ggccgaggtggacacctactgcaga

SEQ ID NO: 165390 - DNA, 25 bp, Canis familiaris
ggccgaggtggacacggtgtgcaga

SEQ ID NO: 165391 - DNA, 25 bp, Canis familiaris
ggccgaggtggacacggtgtgcaga

SEQ ID NO: 165392 - DNA, 25 bp, Canis familiaris
ggccagcaggcttgattcaggggta

SEQ ID NO: 165393 - DNA, 25 bp, Canis familiaris
ggccagaggtccagcagtggtatca

SEQ ID NO: 165394 - DNA, 25 bp, Canis familiaris
ggccagggatggagcagtccgagac

SEQ ID NO: 165395 - DNA, 25 bp, Canis familiaris
ggccagtggggatagcgatgctgag

SEQ ID NO: 165396 - DNA, 25 bp, Canis familiaris
ggccgggcaggtgcagaggcagagg

SEQ ID NO: 165397 - DNA, 25 bp, Canis familiaris
ggccggtgcggcagagggagcggcc

SEQ ID NO: 165398 - DNA, 25 bp, Canis familiaris
ggccgagtgaggcaggtgcggcgcc

SEQ ID NO: 165399 - DNA, 25 bp, Canis familiaris
ggccggtggagacggtggagctgcc

SEQ ID NO: 165400 - DNA, 25 bp, Canis familiaris
ggccgccggaataggagcgggccca

SEQ ID NO: 165401 - DNA, 25 bp, Canis familiaris
ggcccccgaataaaagcggcgcacg

SEQ ID NO: 165402 - DNA, 25 bp, Canis familiaris
ggccaccgctggaacaaagtacgca

SEQ ID NO: 165403 - DNA, 25 bp, Canis familiaris
ggcctccctgtgtacaatagcaatc

SEQ ID NO: 165404 - DNA, 25 bp, Canis familiaris
ggcctgaccatattaaaacaaacca

SEQ ID NO: 165405 - DNA, 25 bp, Canis familiaris
ggccgacgaactcaacaagaacatg

SEQ ID NO: 165406 - DNA, 25 bp, Canis familiaris
ggccgaaaagacaaaacagacacat

SEQ ID NO: 165407 - DNA, 25 bp, Canis familiaris
ggcctgccaagaaccaaaattcaag

SEQ ID NO: 165408 - DNA, 25 bp, Canis familiaris
ggccttaacagggacaacttcacag

SEQ ID NO: 165409 - DNA, 25 bp, Canis familiaris
ggccttcaagaagactttccacagt

SEQ ID NO: 165410 - DNA, 25 bp, Canis familiaris
ggcctgacaaattaacttctacctt

SEQ ID NO: 165411 - DNA, 25 bp, Canis familiaris
ggccataagaatgtacccgaccttg

SEQ ID NO: 165412 - DNA, 25 bp, Canis familiaris
ggccaagagaaggtagcccccaggg

SEQ ID NO: 165413 - DNA, 25 bp, Canis familiaris
tgactccaacaaattacttccacgg

SEQ ID NO: 165414 - DNA, 25 bp, Canis familiaris
tggctccagacgtacggtttgccga

SEQ ID NO: 165415 - DNA, 25 bp, Canis familiaris
tggctgctcgggtaacgttagccct

SEQ ID NO: 165416 - DNA, 25 bp, Canis familiaris
ggccacacaagtaccatggtgaaaa

SEQ ID NO: 165417 - DNA, 25 bp, Canis familiaris
ggcctgtgctgagttacaccaaaat

SEQ ID NO: 165418 - DNA, 25 bp, Canis familiaris
ggcctctgtctcttataccaagacc

SEQ ID NO: 165419 - DNA, 25 bp, Canis familiaris
tggccttgctcttcaatacaaaccc

SEQ ID NO: 165420 - DNA, 25 bp, Canis familiaris
ggccgttttgaaaacacacgcacgg

SEQ ID NO: 165421 - DNA, 25 bp, Canis familiaris
ggcctggtttgcttaaaccctggag

SEQ ID NO: 165422 - DNA, 25 bp, Canis familiaris
ggccaagttgtgttaagaccgggat

SEQ ID NO: 165423 - DNA, 25 bp, Canis familiaris
tggccaagtgtccctatgggtgggg

SEQ ID NO: 165424 - DNA, 25 bp, Canis familiaris
ggccaattctacctttggaggattg

SEQ ID NO: 165425 - DNA, 25 bp, Canis familiaris
ggccagatgattcattacggagaat

SEQ ID NO: 165426 - DNA, 25 bp, Canis familiaris
tggccagctgattagttccggagac

SEQ ID NO: 165427 - DNA, 25 bp, Canis familiaris
tggctcggttagtccgtgggacgac

SEQ ID NO: 165428 - DNA, 25 bp, Canis familiaris
ggccggagtcaagcgagggagcaga

SEQ ID NO: 165429 - DNA, 25 bp, Canis familiaris
ggccggagttttgggaggagcagac

SEQ ID NO: 165430 - DNA, 25 bp, Canis familiaris
ggccgttctctcgtgggagacgcag

SEQ ID NO: 165431 - DNA, 25 bp, Canis familiaris
ggcctttcacctagggactagcatg

SEQ ID NO: 165432 - DNA, 25 bp, Canis familiaris
ggcctcttctgcactgggaggagcc

SEQ ID NO: 165433 - DNA, 25 bp, Canis familiaris
ggcctgttcgttgaggacatagccc

SEQ ID NO: 165434 - DNA, 25 bp, Canis familiaris
ggccatgtcccttccagaggaagcc

SEQ ID NO: 165435 - DNA, 25 bp, Canis familiaris
ggccttcaggtgttcaaggatacct

SEQ ID NO: 165436 - DNA, 25 bp, Canis familiaris
ggccatttgtggtacctgaccacct

SEQ ID NO: 165437 - DNA, 25 bp, Canis familiaris
ggcctgattgtggctactgttctcc

SEQ ID NO: 165438 - DNA, 25 bp, Canis familiaris
ggcctggttggcaacgatggcacgc

SEQ ID NO: 165439 - DNA, 25 bp, Canis familiaris
ggcctggggtcatgcagatggacac

SEQ ID NO: 165440 - DNA, 25 bp, Canis familiaris
ggcctggcaggagtcagagcatgga

SEQ ID NO: 165441 - DNA, 25 bp, Canis familiaris
ggccgtctgtgactcagagagatgc

SEQ ID NO: 165442 - DNA, 25 bp, Canis familiaris
ggccgtgtgctggtcaatgatgctc

SEQ ID NO: 165443 - DNA, 25 bp, Canis familiaris
ggcctggtcatgcatcagtggccag

SEQ ID NO: 165444 - DNA, 25 bp, Canis familiaris
ggcctggctcagggcaggcgtagga

SEQ ID NO: 165445 - DNA, 25 bp, Canis familiaris
ggcctacatcaggagtgcggttgta

SEQ ID NO: 165446 - DNA, 25 bp, Canis familiaris
ggcctacagcagaaatcgcagtcat

SEQ ID NO: 165447 - DNA, 25 bp, Canis familiaris
ggccttcatgctgggaccatgttga

SEQ ID NO: 165448 - DNA, 25 bp, Canis familiaris
ggccatccacgagacactgtgtgcc

SEQ ID NO: 165449 - DNA, 25 bp, Canis familiaris
ggcctcccatgtgacattggtgtgt

SEQ ID NO: 165450 - DNA, 25 bp, Canis familiaris
tggccccggaattcattggtttggg

SEQ ID NO: 165451 - DNA, 25 bp, Canis familiaris
tggccccgtgtctgtaagaattggg

SEQ ID NO: 165452 - DNA, 25 bp, Canis familiaris
tggaagccttgtccaaattaattgg

SEQ ID NO: 165453 - DNA, 25 bp, Canis familiaris
tgtgaacttttccagaacctattgt

SEQ ID NO: 165454 - DNA, 25 bp, Canis familiaris
tgaaagttattccaaagcacgaaaa

SEQ ID NO: 165455 - DNA, 25 bp, Canis familiaris
tggaaggttcccgtagactaggaat

SEQ ID NO: 165456 - DNA, 25 bp, Canis familiaris
tggaaggttccacgtagactagaaa

SEQ ID NO: 165457 - DNA, 25 bp, Canis familiaris
tggaagagctctacacgttgcagcg

SEQ ID NO: 165458 - DNA, 25 bp, Canis familiaris
tggaagagctctacacgttgcagcg

SEQ ID NO: 165459 - DNA, 25 bp, Canis familiaris
tggcaagatctccccttttgaagag

SEQ ID NO: 165460 - DNA, 25 bp, Canis familiaris
tggaaactgccccaattcaaaaggt

SEQ ID NO: 165461 - DNA, 25 bp, Canis familiaris
tggcaacagcatccccatgaaagca

SEQ ID NO: 165462 - DNA, 25 bp, Canis familiaris
ggcctccatgcccagaaaagcagac

SEQ ID NO: 165463 - DNA, 25 bp, Canis familiaris
ggcctcgcaggccaacaaggatggc

SEQ ID NO: 165464 - DNA, 25 bp, Canis familiaris
ggcctctgcaggtgacaccgagatg

SEQ ID NO: 165465 - DNA, 25 bp, Canis familiaris
ggcctgcgcaagttgccgtaattgg

SEQ ID NO: 165466 - DNA, 25 bp, Canis familiaris
ggccgcagatttcgcatcgagaaag

SEQ ID NO: 165467 - DNA, 25 bp, Canis familiaris
ggccagaatctgttatatgagaaaa

SEQ ID NO: 165468 - DNA, 25 bp, Canis familiaris
ggccaagacgttaaagatcaactct

SEQ ID NO: 165469 - DNA, 25 bp, Canis familiaris
ggccaagactgcaacttttaacttg

SEQ ID NO: 165470 - DNA, 25 bp, Canis familiaris
ggccaagtcatcactattggcaacg

SEQ ID NO: 165471 - DNA, 25 bp, Canis familiaris
ggccaaggcactacgtcggaagcca

SEQ ID NO: 165472 - DNA, 25 bp, Canis familiaris
ggccaagggctcagatggggtccca

SEQ ID NO: 165473 - DNA, 25 bp, Canis familiaris
ggccaaggcgtcgaacgaggtgccc

SEQ ID NO: 165474 - DNA, 25 bp, Canis familiaris
ggccgaactggcggcctgaggggcc

SEQ ID NO: 165475 - DNA, 25 bp, Canis familiaris
tggccgtattgggcgcctggtcacc

SEQ ID NO: 165476 - DNA, 25 bp, Canis familiaris
tggcctgtttgggtcctaatttatc

SEQ ID NO: 165477 - DNA, 25 bp, Canis familiaris
tccggagttgggtgtgaattgctga

SEQ ID NO: 165478 - DNA, 25 bp, Canis familiaris
tgcccggttgggtaggagtcctaca

SEQ ID NO: 165479 - DNA, 25 bp, Canis familiaris
tggggccttcggtgatggtttacac

SEQ ID NO: 165480 - DNA, 25 bp, Canis familiaris
tgggttttaggtctgattttcacca

SEQ ID NO: 165481 - DNA, 25 bp, Canis familiaris
tggtctttaaagcagggtttcccag

SEQ ID NO: 165482 - DNA, 25 bp, Canis familiaris
tggcatttttttcttagtttttcat

SEQ ID NO: 165483 - DNA, 25 bp, Canis familiaris
tggcttttttgtatctggttgggtc

SEQ ID NO: 165484 - DNA, 25 bp, Canis familiaris
ggccttttgttcacttgtttgtgct

SEQ ID NO: 165485 - DNA, 25 bp, Canis familiaris
ggcctacaattttagtatttttgct

SEQ ID NO: 165486 - DNA, 25 bp, Canis familiaris
ggcctacccatttctgttgtagttt

SEQ ID NO: 165487 - DNA, 25 bp, Canis familiaris
ggcctaaacaattcttagcatatgg

SEQ ID NO: 165488 - DNA, 25 bp, Canis familiaris
ggcctaacctcaacttcaaaagtga

SEQ ID NO: 165489 - DNA, 25 bp, Canis familiaris
ggccttactaagacttaaatagcag

SEQ ID NO: 165490 - DNA, 25 bp, Canis familiaris
ggccttgaacagggcttgacacaaa

SEQ ID NO: 165491 - DNA, 25 bp, Canis familiaris
ggcctatggccaggtctttaaaata

SEQ ID NO: 165492 - DNA, 25 bp, Canis familiaris
tggcctagtgccagttctgagaaac

SEQ ID NO: 165493 - DNA, 25 bp, Canis familiaris
ggcctagtgccagttctgagaaaca

SEQ ID NO: 165494 - DNA, 25 bp, Canis familiaris
ggccaagctgacgcctgaggaggaa

SEQ ID NO: 165495 - DNA, 25 bp, Canis familiaris
ggccaagctgacgcctgaggaggaa

SEQ ID NO: 165496 - DNA, 25 bp, Canis familiaris
ggccaagctgatgaacgcagaaggg

SEQ ID NO: 165497 - DNA, 25 bp, Canis familiaris
ggccaagatccattatcggaagaag

SEQ ID NO: 165498 - DNA, 25 bp, Canis familiaris
ggccgagatgctgttctgaagagga

SEQ ID NO: 165499 - DNA, 25 bp, Canis familiaris
ggccagaagcttttcgttggtgcat

SEQ ID NO: 165500 - DNA, 25 bp, Canis familiaris
ggccagaatgttttttcagtgctac

SEQ ID NO: 165501 - DNA, 25 bp, Canis familiaris
ggccatgtttggttgttgcagttaa

SEQ ID NO: 165502 - DNA, 25 bp, Canis familiaris
ggcctgtttgtgatttgcccaaata

SEQ ID NO: 165503 - DNA, 25 bp, Canis familiaris
ggcctgtattgtctattttctagaa

SEQ ID NO: 165504 - DNA, 25 bp, Canis familiaris
ggcctcataaagctttgttctcaga

SEQ ID NO: 165505 - DNA, 25 bp, Canis familiaris
ggccatgcagcatagttcttttcct

SEQ ID NO: 165506 - DNA, 25 bp, Canis familiaris
ggccatcgataaccttttgcttgcc

SEQ ID NO: 165507 - DNA, 25 bp, Canis familiaris
ggcctgtacagatcctgttcttggg

SEQ ID NO: 165508 - DNA, 25 bp, Canis familiaris
ggcctgacacaggacagctttttgg

SEQ ID NO: 165509 - DNA, 25 bp, Canis familiaris
ggccataactggactctgtttcttc

SEQ ID NO: 165510 - DNA, 25 bp, Canis familiaris
ggccatactggaatcggtgtctgtc

SEQ ID NO: 165511 - DNA, 25 bp, Canis familiaris
ggccaactgccaatttgtagtgtct

SEQ ID NO: 165512 - DNA, 25 bp, Canis familiaris
tggctgttcccaatgtttacattat

SEQ ID NO: 165513 - DNA, 25 bp, Canis familiaris
ggcctctgtccaattttgctatgta

SEQ ID NO: 165514 - DNA, 25 bp, Canis familiaris
ggcctctggtcaagtctgaaatcta

SEQ ID NO: 165515 - DNA, 25 bp, Canis familiaris
ggccttcctcaactgtgacagatat

SEQ ID NO: 165516 - DNA, 25 bp, Canis familiaris
ggcctctcacaatctgaacatcaga

SEQ ID NO: 165517 - DNA, 25 bp, Canis familiaris
ggccatctagcattccaagcaacat

SEQ ID NO: 165518 - DNA, 25 bp, Canis familiaris
ggccacttgccatatgacaacattg

SEQ ID NO: 165519 - DNA, 25 bp, Canis familiaris
ggccagatccccttatatatcattg

SEQ ID NO: 165520 - DNA, 25 bp, Canis familiaris
ggccatgatccaccagtgtgttgag

SEQ ID NO: 165521 - DNA, 25 bp, Canis familiaris
ggcctgaccaccaggccatgagctg

SEQ ID NO: 165522 - DNA, 25 bp, Canis familiaris
tggcctgagaagccgggcacatgac

SEQ ID NO: 165523 - DNA, 25 bp, Canis familiaris
tggccactgaaccaacagcagagac

SEQ ID NO: 165524 - DNA, 25 bp, Canis familiaris
tggccagcatatccggacacaggat

SEQ ID NO: 165525 - DNA, 25 bp, Canis familiaris
ggccagctgtcactgtagcactggt

SEQ ID NO: 165526 - DNA, 25 bp, Canis familiaris
ggccagaatgccttaattggttaaa

SEQ ID NO: 165527 - DNA, 25 bp, Canis familiaris
ggccaggatccaagattttgttcga

SEQ ID NO: 165528 - DNA, 25 bp, Canis familiaris
ggcctggctccagagtattgcagag

SEQ ID NO: 165529 - DNA, 25 bp, Canis familiaris
ggcctgcagcctgcgagtgaatagg

SEQ ID NO: 165530 - DNA, 25 bp, Canis familiaris
tggcccagttcatggtgcagaatgg

SEQ ID NO: 165531 - DNA, 25 bp, Canis familiaris
ggccatcagttcagggagaacaccg

SEQ ID NO: 165532 - DNA, 25 bp, Canis familiaris
ggcctggtccatggggaaaccagcc

SEQ ID NO: 165533 - DNA, 25 bp, Canis familiaris
ggcctgttgcgtggggaaaccagcc

SEQ ID NO: 165534 - DNA, 25 bp, Canis familiaris
ggccttctgcttgagggaaccaggg

SEQ ID NO: 165535 - DNA, 25 bp, Canis familiaris
ggccattctctggaggaggtcacca

SEQ ID NO: 165536 - DNA, 25 bp, Canis familiaris
ggccatctgctgcagaggttcgatg

SEQ ID NO: 165537 - DNA, 25 bp, Canis familiaris
ggcctctgcagttgtggttgaataa

SEQ ID NO: 165538 - DNA, 25 bp, Canis familiaris
ggcctcacagattttttggatcttt

SEQ ID NO: 165539 - DNA, 25 bp, Canis familiaris
ggcctctgagtgattttggatttct

SEQ ID NO: 165540 - DNA, 25 bp, Canis familiaris
ggcctcgagcggagaatgcgcattt

SEQ ID NO: 165541 - DNA, 25 bp, Canis familiaris
tgccccgagcggggccggattttgg

SEQ ID NO: 165542 - DNA, 25 bp, Canis familiaris
tgggccccgaggccggaattttgtg

SEQ ID NO: 165543 - DNA, 25 bp, Canis familiaris
tgggccccgggtggcataaagtggg

SEQ ID NO: 165544 - DNA, 25 bp, Canis familiaris
tgggtcctccggtgcaaaattccgg

SEQ ID NO: 165545 - DNA, 25 bp, Canis familiaris
tgtggtccggcggtcgccggattct

SEQ ID NO: 165546 - DNA, 25 bp, Canis familiaris
tggctggccgggacctgacggacta

SEQ ID NO: 165547 - DNA, 25 bp, Canis familiaris
tggcgggcgggagttgtttgttaca

SEQ ID NO: 165548 - DNA, 25 bp, Canis familiaris
tgtgtgagggccccgagtttttact

SEQ ID NO: 165549 - DNA, 25 bp, Canis familiaris
tgtgttagtccctacatttttcttt

SEQ ID NO: 165550 - DNA, 25 bp, Canis familiaris
tggtactctccaaaattctttattt

SEQ ID NO: 165551 - DNA, 25 bp, Canis familiaris
tggccccttcaaaactgttgtcatt

SEQ ID NO: 165552 - DNA, 25 bp, Canis familiaris
tggccccttcaaaactgttgtcatt

SEQ ID NO: 165553 - DNA, 25 bp, Canis familiaris
tggccccttcaaaactgttgtcatt

SEQ ID NO: 165554 - DNA, 25 bp, Canis familiaris
tggcctccttataacatggggtctt

SEQ ID NO: 165555 - DNA, 25 bp, Canis familiaris
ggcctgccacaaaggctggggtgtc

SEQ ID NO: 165556 - DNA, 25 bp, Canis familiaris
ggcctccaccactcatggtggtcac

SEQ ID NO: 165557 - DNA, 25 bp, Canis familiaris
ggccaccaccactggaaggacaagc

SEQ ID NO: 165558 - DNA, 25 bp, Canis familiaris
ggccattcaccctggcagggactgg

SEQ ID NO: 165559 - DNA, 25 bp, Canis familiaris
ggccttccgccggctggaggaaggc

SEQ ID NO: 165560 - DNA, 25 bp, Canis familiaris
ggccttcctccgcaagcggatgaac

SEQ ID NO: 165561 - DNA, 25 bp, Canis familiaris
ggccttcccaggcactggaagagtg

SEQ ID NO: 165562 - DNA, 25 bp, Canis familiaris
ggccttcgggggtagacacagagtg

SEQ ID NO: 165563 - DNA, 25 bp, Canis familiaris
ggccttcggtggcacaaagcgaggt

SEQ ID NO: 165564 - DNA, 25 bp, Canis familiaris
ggccttcggtggcacaaagcgaggt

SEQ ID NO: 165565 - DNA, 25 bp, Canis familiaris
ggccttcggtggcacaaagcgaggt

SEQ ID NO: 165566 - DNA, 25 bp, Canis familiaris
ggccggctggaacttccaaggaggc

SEQ ID NO: 165567 - DNA, 25 bp, Canis familiaris
ggcctcagaggacctcctgaaggag

SEQ ID NO: 165568 - DNA, 25 bp, Canis familiaris
ggcctcatgcgtgacttcgaaggca

SEQ ID NO: 165569 - DNA, 25 bp, Canis familiaris
ggcctcagtgttgctgtctgtatac

SEQ ID NO: 165570 - DNA, 25 bp, Canis familiaris
ggcctcagttgacatcatctgtgtg

SEQ ID NO: 165571 - DNA, 25 bp, Canis familiaris
tggacatcgtcgtctgacatgcgtt

SEQ ID NO: 165572 - DNA, 25 bp, Canis familiaris
ggccactgtctgtgcatttgtttca

SEQ ID NO: 165573 - DNA, 25 bp, Canis familiaris
tggctactgtctctatgtttttagt

SEQ ID NO: 165574 - DNA, 25 bp, Canis familiaris
tggctacccaaaggtttttagatct

SEQ ID NO: 165575 - DNA, 25 bp, Canis familiaris
tggccaaccaaaagtagctttaact

SEQ ID NO: 165576 - DNA, 25 bp, Canis familiaris
ggccaactcccaaaagctatgtaaa

SEQ ID NO: 165577 - DNA, 25 bp, Canis familiaris
ggccaaccccaaaatgttgggccat

SEQ ID NO: 165578 - DNA, 25 bp, Canis familiaris
ggccaacaagcgctttgttttccat

SEQ ID NO: 165579 - DNA, 25 bp, Canis familiaris
ggccaaaaggctgttgagtcttggt

SEQ ID NO: 165580 - DNA, 25 bp, Canis familiaris
ggccataaggtcctttgtgccgtgc

SEQ ID NO: 165581 - DNA, 25 bp, Canis familiaris
ggccactgaggagtttcttcctgtc

SEQ ID NO: 165582 - DNA, 25 bp, Canis familiaris
tggcccgagtgaggtgtcttgggat

SEQ ID NO: 165583 - DNA, 25 bp, Canis familiaris
tggccctggaacagccttggagtgt

SEQ ID NO: 165584 - DNA, 25 bp, Canis familiaris
ggcctctgtaacctggtatttgtgg

SEQ ID NO: 165585 - DNA, 25 bp, Canis familiaris
ggcctcattggacctggtgattctg

SEQ ID NO: 165586 - DNA, 25 bp, Canis familiaris
ggcctctgaagccctgggaacatga

SEQ ID NO: 165587 - DNA, 25 bp, Canis familiaris
ggcctctgggtcgtgggaatcaagg

SEQ ID NO: 165588 - DNA, 25 bp, Canis familiaris
ggccttgggaccttgcagcaagaaa

SEQ ID NO: 165589 - DNA, 25 bp, Canis familiaris
ggcctttgagaggcaatcaatgaag

SEQ ID NO: 165590 - DNA, 25 bp, Canis familiaris
ggccttatgagtgccatgactgtgg

SEQ ID NO: 165591 - DNA, 25 bp, Canis familiaris
ggcctgctgggattccagaattgga

SEQ ID NO: 165592 - DNA, 25 bp, Canis familiaris
ggccagctgggttccagcttttctt

SEQ ID NO: 165593 - DNA, 25 bp, Canis familiaris
ggccaattgcttaccagaatactcc

SEQ ID NO: 165594 - DNA, 25 bp, Canis familiaris
tggcgaattttgaagattgacactc

SEQ ID NO: 165595 - DNA, 25 bp, Canis familiaris
ggccttttttggactgcatagctgc

SEQ ID NO: 165596 - DNA, 25 bp, Canis familiaris
ggcctacttgtgggacattagagca

SEQ ID NO: 165597 - DNA, 25 bp, Canis familiaris
ggcctcacctgggagacttaacttc

SEQ ID NO: 165598 - DNA, 25 bp, Canis familiaris
ggccaaagctgggacaatgtaatct

SEQ ID NO: 165599 - DNA, 25 bp, Canis familiaris
ggccaatgagggacacataggacca

SEQ ID NO: 165600 - DNA, 25 bp, Canis familiaris
ggccaagggccatcaatgaagccaa

SEQ ID NO: 165601 - DNA, 25 bp, Canis familiaris
ggccacacgggccacagtgaagaag

SEQ ID NO: 165602 - DNA, 25 bp, Canis familiaris
tggcgaccaggacatcgtgcaacag

SEQ ID NO: 165603 - DNA, 25 bp, Canis familiaris
ggccaggtgtacttctgctatgacc

SEQ ID NO: 165604 - DNA, 25 bp, Canis familiaris
ggccaggaggagttcggtgccatgc

SEQ ID NO: 165605 - DNA, 25 bp, Canis familiaris
ggccaaggctacttttgatgcgatc

SEQ ID NO: 165606 - DNA, 25 bp, Canis familiaris
ggccaaggcaaccattatgtgtgca

SEQ ID NO: 165607 - DNA, 25 bp, Canis familiaris
ggccttgagcacatgtctgagttgc

SEQ ID NO: 165608 - DNA, 25 bp, Canis familiaris
ggcctagagctcaggtgtgcagtcc

SEQ ID NO: 165609 - DNA, 25 bp, Canis familiaris
ggcctagagaccgtgcggctgaagc

SEQ ID NO: 165610 - DNA, 25 bp, Canis familiaris
ggcctcagagcagagctgaacgaca

SEQ ID NO: 165611 - DNA, 25 bp, Canis familiaris
tggcccgcctgcagcagaagggcat

SEQ ID NO: 165612 - DNA, 25 bp, Canis familiaris
tggcctcgttgcctgtaaggacagc

SEQ ID NO: 165613 - DNA, 25 bp, Canis familiaris
tggccttggtctatgggatgtcagc

SEQ ID NO: 165614 - DNA, 25 bp, Canis familiaris
ggccttggtctatgggatgtcagca

SEQ ID NO: 165615 - DNA, 25 bp, Canis familiaris
ggccttggtctatgggatgtcagca

SEQ ID NO: 165616 - DNA, 25 bp, Canis familiaris
ggccttggggacctgatgagtgcga

SEQ ID NO: 165617 - DNA, 25 bp, Canis familiaris
ggccatggtgctggacctgagggcc

SEQ ID NO: 165618 - DNA, 25 bp, Canis familiaris
ggcctgaggcagcagtggctgcggc

SEQ ID NO: 165619 - DNA, 25 bp, Canis familiaris
ggcctgcgacagctggtatgagagc

SEQ ID NO: 165620 - DNA, 25 bp, Canis familiaris
ggccaggaaaatcgtgtcctgccgc

SEQ ID NO: 165621 - DNA, 25 bp, Canis familiaris
tggcaagaaaaacgctggaacccct

SEQ ID NO: 165622 - DNA, 25 bp, Canis familiaris
tggctacaaccacagctggaactcc

SEQ ID NO: 165623 - DNA, 25 bp, Canis familiaris
tggccactactaaagctcacaaagc

SEQ ID NO: 165624 - DNA, 25 bp, Canis familiaris
ggccaccagatcatcgtgcagaacg

SEQ ID NO: 165625 - DNA, 25 bp, Canis familiaris
ggccagagcagtgcctagctagacc

SEQ ID NO: 165626 - DNA, 25 bp, Canis familiaris
ggccatggagctgctcaaggtgtcc

SEQ ID NO: 165627 - DNA, 25 bp, Canis familiaris
ggccaggagctgcctctagtaggcc

SEQ ID NO: 165628 - DNA, 25 bp, Canis familiaris
ggccaggagctcctggcagctcagc

SEQ ID NO: 165629 - DNA, 25 bp, Canis familiaris
ggccagcaagctagctggtggccct

SEQ ID NO: 165630 - DNA, 25 bp, Canis familiaris
tggccctggcaaatggctagcctca

SEQ ID NO: 165631 - DNA, 25 bp, Canis familiaris
tggcaagtcactttggcaggtctca

SEQ ID NO: 165632 - DNA, 25 bp, Canis familiaris
tggcattgctctcaatgacaacttt

SEQ ID NO: 165633 - DNA, 25 bp, Canis familiaris
tggcatattcagtggaagactttcc

SEQ ID NO: 165634 - DNA, 25 bp, Canis familiaris
tggctaaagccctggcagcttatcc

SEQ ID NO: 165635 - DNA, 25 bp, Canis familiaris
tggaagctaccctgtgaggtgaccc

SEQ ID NO: 165636 - DNA, 25 bp, Canis familiaris
tgaaggcccagccaaggagggaacc

SEQ ID NO: 165637 - DNA, 25 bp, Canis familiaris
tggcaggcgttccaagggtgtacct

SEQ ID NO: 165638 - DNA, 25 bp, Canis familiaris
ggccaggtccatcagttttagcctg

SEQ ID NO: 165639 - DNA, 25 bp, Canis familiaris
ggccatgggatacagttctaagctt

SEQ ID NO: 165640 - DNA, 25 bp, Canis familiaris
tggccgggaaaactaaatcagctgt

SEQ ID NO: 165641 - DNA, 25 bp, Canis familiaris
tgtgttgggaatcggttaaccttcg

SEQ ID NO: 165642 - DNA, 25 bp, Canis familiaris
tgttggggatgccggtaaaacctct

SEQ ID NO: 165643 - DNA, 25 bp, Canis familiaris
tggcgggagtggggggaatacccag

SEQ ID NO: 165644 - DNA, 25 bp, Canis familiaris
tggaaaagggggggaatgcgccaag

SEQ ID NO: 165645 - DNA, 25 bp, Canis familiaris
tggcgagaagaggggccgtcctggc

SEQ ID NO: 165646 - DNA, 25 bp, Canis familiaris
tggcgaaagatgggttttcacatcc

SEQ ID NO: 165647 - DNA, 25 bp, Canis familiaris
tggcgcaaagagaggttgctcccgc

SEQ ID NO: 165648 - DNA, 25 bp, Canis familiaris
ggccatccaggaaatttcccacagc

SEQ ID NO: 165649 - DNA, 25 bp, Canis familiaris
ggccactatggtattagttccacgg

SEQ ID NO: 165650 - DNA, 25 bp, Canis familiaris
ggccttagattaacatcagtttcct

SEQ ID NO: 165651 - DNA, 25 bp, Canis familiaris
ggccttagctttactaggtctgcac

SEQ ID NO: 165652 - DNA, 25 bp, Canis familiaris
ggccttcgtaggacacaggggatcc

SEQ ID NO: 165653 - DNA, 25 bp, Canis familiaris
ggccaccctaggactcagaatggag

SEQ ID NO: 165654 - DNA, 25 bp, Canis familiaris
ggccacccttgacagcagaagtgca

SEQ ID NO: 165655 - DNA, 25 bp, Canis familiaris
ggccaaccttggccaagggctgtgt

SEQ ID NO: 165656 - DNA, 25 bp, Canis familiaris
ggccaatcaggtgtaggtgtgtgtg

SEQ ID NO: 165657 - DNA, 25 bp, Canis familiaris
ggcctctagcctgtgaggatctctt

SEQ ID NO: 165658 - DNA, 25 bp, Canis familiaris
tggctgctttcctgggagatgcttc

SEQ ID NO: 165659 - DNA, 25 bp, Canis familiaris
tggcgcaattcttgggggggacagt

SEQ ID NO: 165660 - DNA, 25 bp, Canis familiaris
ggccagttctcgtggagggaggttc

SEQ ID NO: 165661 - DNA, 25 bp, Canis familiaris
ggccagtgccccagggcaaggggct

SEQ ID NO: 165662 - DNA, 25 bp, Canis familiaris
tgcttcttttcctgggaaggggcct

SEQ ID NO: 165663 - DNA, 25 bp, Canis familiaris
tgcttttaactctggtaaagtggat

SEQ ID NO: 165664 - DNA, 25 bp, Canis familiaris
tgtgtttataccaagagtacctttt

SEQ ID NO: 165665 - DNA, 25 bp, Canis familiaris
tggctgttttcacaaccacacttat

SEQ ID NO: 165666 - DNA, 25 bp, Canis familiaris
tggcgtggtatacaagtccacccgc

SEQ ID NO: 165667 - DNA, 25 bp, Canis familiaris
tgaggtcgatacccaagtcaccttg

SEQ ID NO: 165668 - DNA, 25 bp, Canis familiaris
tggtgtagactaccacgtcaccttt

SEQ ID NO: 165669 - DNA, 25 bp, Canis familiaris
tggcctgaggattccacgtaacgat

SEQ ID NO: 165670 - DNA, 25 bp, Canis familiaris
tggctaaagttcccagtaaagtagg

SEQ ID NO: 165671 - DNA, 25 bp, Canis familiaris
tggctaaccgtcacctctaagtgaa

SEQ ID NO: 165672 - DNA, 25 bp, Canis familiaris
ggccaactcccaggcttcaaaggcc

SEQ ID NO: 165673 - DNA, 25 bp, Canis familiaris
ggccacaggacgagctgtaggggct

SEQ ID NO: 165674 - DNA, 25 bp, Canis familiaris
ggccatcaaggcctactgtagaggt

SEQ ID NO: 165675 - DNA, 25 bp, Canis familiaris
ggccatcaagccgtattatcagaag

SEQ ID NO: 165676 - DNA, 25 bp, Canis familiaris
ggcctcatatgcatttggcacagaa

SEQ ID NO: 165677 - DNA, 25 bp, Canis familiaris
tggcttcacattcgtgctggacaca

SEQ ID NO: 165678 - DNA, 25 bp, Canis familiaris
ggcctcttgtggacatagagcataa

SEQ ID NO: 165679 - DNA, 25 bp, Canis familiaris
tgtcgtatccggagagagctatata

SEQ ID NO: 165680 - DNA, 25 bp, Canis familiaris
tggccttcgcggaccaggtatatga

SEQ ID NO: 165681 - DNA, 25 bp, Canis familiaris
tggccttccctcacatgagaattaa

SEQ ID NO: 165682 - DNA, 25 bp, Canis familiaris
ggccatgccccagatatgatgaatc

SEQ ID NO: 165683 - DNA, 25 bp, Canis familiaris
ggcctctccacagtgcaatgattca

SEQ ID NO: 165684 - DNA, 25 bp, Canis familiaris
ggccttctcagcttatgcagatgac

SEQ ID NO: 165685 - DNA, 25 bp, Canis familiaris
ggccaggctcagttatggatgaatt

SEQ ID NO: 165686 - DNA, 25 bp, Canis familiaris
tggccagggcagtgaatcagcctta

SEQ ID NO: 165687 - DNA, 25 bp, Canis familiaris
tggccatcagtcaggaacaccgtat

SEQ ID NO: 165688 - DNA, 25 bp, Canis familiaris
ggccatcaggatggccaacccttcc

SEQ ID NO: 165689 - DNA, 25 bp, Canis familiaris
tggccatcaggatggccacccttcc

SEQ ID NO: 165690 - DNA, 25 bp, Canis familiaris
tggccatcaggatggccacccttcc

SEQ ID NO: 165691 - DNA, 25 bp, Canis familiaris
tggccatcaggatggccacccttcc

SEQ ID NO: 165692 - DNA, 25 bp, Canis familiaris
tggccatcaggatggccacccttcc

SEQ ID NO: 165693 - DNA, 25 bp, Canis familiaris
ggcctaggagttgcacatcagcccc

SEQ ID NO: 165694 - DNA, 25 bp, Canis familiaris
tggttacgaattgtctcccacagca

SEQ ID NO: 165695 - DNA, 25 bp, Canis familiaris
tggttaaacatggtctgcgtgccct

SEQ ID NO: 165696 - DNA, 25 bp, Canis familiaris
tggcttagaagggttctctggcctc

SEQ ID NO: 165697 - DNA, 25 bp, Canis familiaris
tggcttagacaagaagttggagctg

SEQ ID NO: 165698 - DNA, 25 bp, Canis familiaris
tggccaaggccaaaactatgtgact

SEQ ID NO: 165699 - DNA, 25 bp, Canis familiaris
ggccacaggccagagccaagtgtct

SEQ ID NO: 165700 - DNA, 25 bp, Canis familiaris
tggcccagagcggtggcctaaacca

SEQ ID NO: 165701 - DNA, 25 bp, Canis familiaris
tggctctaaccttggtctactatcc

SEQ ID NO: 165702 - DNA, 25 bp, Canis familiaris
tggcttgtagcaattagtgtgccta

SEQ ID NO: 165703 - DNA, 25 bp, Canis familiaris
tggctcttaacctgggcgcaaaggg

SEQ ID NO: 165704 - DNA, 25 bp, Canis familiaris
tggcttcacccctggggaaacgctg

SEQ ID NO: 165705 - DNA, 25 bp, Canis familiaris
tggcctggcccctgaagagaaaagc

SEQ ID NO: 165706 - DNA, 25 bp, Canis familiaris
tggccaggaccagcgcaaggaagag

SEQ ID NO: 165707 - DNA, 25 bp, Canis familiaris
ggccagcgacgagcgcggagagaaa

SEQ ID NO: 165708 - DNA, 25 bp, Canis familiaris
ggccacacccacagagggagacatc

SEQ ID NO: 165709 - DNA, 25 bp, Canis familiaris
ggcctaacactttgaagagagaatc

SEQ ID NO: 165710 - DNA, 25 bp, Canis familiaris
ggcctacacgtttgagagagagtct

SEQ ID NO: 165711 - DNA, 25 bp, Canis familiaris
ggcctacacgtttgagagagagtct

SEQ ID NO: 165712 - DNA, 25 bp, Canis familiaris
ggcctacagtgctgcagaggacgcc

SEQ ID NO: 165713 - DNA, 25 bp, Canis familiaris
ggccaacaggacggtggagcccaga

SEQ ID NO: 165714 - DNA, 25 bp, Canis familiaris
tggcctacaagaacgtggtcggggg

SEQ ID NO: 165715 - DNA, 25 bp, Canis familiaris
ggccaactaggggctggtaggggag

SEQ ID NO: 165716 - DNA, 25 bp, Canis familiaris
ggccaggggtgggcatggtgagtgg

SEQ ID NO: 165717 - DNA, 25 bp, Canis familiaris
ggccacgggtggctggaggaggagc

SEQ ID NO: 165718 - DNA, 25 bp, Canis familiaris
ggccttggtgatgcgtgtggggggc

SEQ ID NO: 165719 - DNA, 25 bp, Canis familiaris
ggcctatgcggagggcgtggaggac

SEQ ID NO: 165720 - DNA, 25 bp, Canis familiaris
ggcctcagggacctgcaggtgaaca

SEQ ID NO: 165721 - DNA, 25 bp, Canis familiaris
ggccatgagaggaactgaggtacaa

SEQ ID NO: 165722 - DNA, 25 bp, Canis familiaris
ggccagcagcaggcgggaggtaaga

SEQ ID NO: 165723 - DNA, 25 bp, Canis familiaris
ggccagccagtacctgagagtagga

SEQ ID NO: 165724 - DNA, 25 bp, Canis familiaris
ggccagtcagtgggcgggatggtgg

SEQ ID NO: 165725 - DNA, 25 bp, Canis familiaris
ggccattctgttggcggagtctggg

SEQ ID NO: 165726 - DNA, 25 bp, Canis familiaris
ggccactcttcccaggagtatgagc

SEQ ID NO: 165727 - DNA, 25 bp, Canis familiaris
tggccctgaccccaaagtatgagga

SEQ ID NO: 165728 - DNA, 25 bp, Canis familiaris
tggccctgtccccaggggaagtgga

SEQ ID NO: 165729 - DNA, 25 bp, Canis familiaris
tggccatcttgcaaccatgggggaa

SEQ ID NO: 165730 - DNA, 25 bp, Canis familiaris
ggccattctcaggcttgtgcgtaaa

SEQ ID NO: 165731 - DNA, 25 bp, Canis familiaris
ggccatctatgacatctgtcgtaga

SEQ ID NO: 165732 - DNA, 25 bp, Canis familiaris
ggccatgctaggcacattgcactaa

SEQ ID NO: 165733 - DNA, 25 bp, Canis familiaris
tggccatgcttgtgacaggcaccta

SEQ ID NO: 165734 - DNA, 25 bp, Canis familiaris
ggccatgcaagataaaacacagcac

SEQ ID NO: 165735 - DNA, 25 bp, Canis familiaris
ggccatcagatcttaataaccgacc

SEQ ID NO: 165736 - DNA, 25 bp, Canis familiaris
ggccatcagatcttagataaccgca

SEQ ID NO: 165737 - DNA, 25 bp, Canis familiaris
ggccaaatctcatataactgctgca

SEQ ID NO: 165738 - DNA, 25 bp, Canis familiaris
ggccaagtcacacaaatatgcagcg

SEQ ID NO: 165739 - DNA, 25 bp, Canis familiaris
tggccaagtacaaccagatcctcag

SEQ ID NO: 165740 - DNA, 25 bp, Canis familiaris
tggccaaggtgcaaactgtcttcgg

SEQ ID NO: 165741 - DNA, 25 bp, Canis familiaris
ggccaagggctcagcttcttagaac

SEQ ID NO: 165742 - DNA, 25 bp, Canis familiaris
ggccaggctggcatggtttgtacaa

SEQ ID NO: 165743 - DNA, 25 bp, Canis familiaris
ggccagtcaggtagtctcttgtaaa

SEQ ID NO: 165744 - DNA, 25 bp, Canis familiaris
tggaagccattcggttcctgtagaa

SEQ ID NO: 165745 - DNA, 25 bp, Canis familiaris
tggacaacatttccttccctaaaca

SEQ ID NO: 165746 - DNA, 25 bp, Canis familiaris
tggaaaagtgtaaatcaccaaagga

SEQ ID NO: 165747 - DNA, 25 bp, Canis familiaris
tgtaacggttcagcaacccaaaggg

SEQ ID NO: 165748 - DNA, 25 bp, Canis familiaris
tgtaaccagtaagcaatccatcgga

SEQ ID NO: 165749 - DNA, 25 bp, Canis familiaris
tgcagggccgtaacttgacccggca

SEQ ID NO: 165750 - DNA, 25 bp, Canis familiaris
tggcggtctttgcattgacctgggc

SEQ ID NO: 165751 - DNA, 25 bp, Canis familiaris
tggcctggacttcttacatgcgggc

SEQ ID NO: 165752 - DNA, 25 bp, Canis familiaris
tggccttctgttcttgatctcggcc

SEQ ID NO: 165753 - DNA, 25 bp, Canis familiaris
tggccttctgtcttttacaatcgga

SEQ ID NO: 165754 - DNA, 25 bp, Canis familiaris
tggcctttgtcatttagccaaataa

SEQ ID NO: 165755 - DNA, 25 bp, Canis familiaris
tggcctgttgcgtggggaaaccagc

SEQ ID NO: 165756 - DNA, 25 bp, Canis familiaris
tggccggtggtggggagaccccaga

SEQ ID NO: 165757 - DNA, 25 bp, Canis familiaris
tggccagtaggtctacagaccctcc

SEQ ID NO: 165758 - DNA, 25 bp, Canis familiaris
tggccaggcaggtgtccagatcggc

SEQ ID NO: 165759 - DNA, 25 bp, Canis familiaris
tggccaggcaggtgtccagatcggc

SEQ ID NO: 165760 - DNA, 25 bp, Canis familiaris
ggccagtgatggtgggcaagcttca

SEQ ID NO: 165761 - DNA, 25 bp, Canis familiaris
ggccatggcaggtatgggagccctt

SEQ ID NO: 165762 - DNA, 25 bp, Canis familiaris
ggccatcagagttgtaggtccattt

SEQ ID NO: 165763 - DNA, 25 bp, Canis familiaris
ggccagcagttattatttagctttg

SEQ ID NO: 165764 - DNA, 25 bp, Canis familiaris
ggccagcagtttatctacagcggct

SEQ ID NO: 165765 - DNA, 25 bp, Canis familiaris
ggccagccattaactgtacctgagc

SEQ ID NO: 165766 - DNA, 25 bp, Canis familiaris
ggccagctaaacatgcttcatcgtc

SEQ ID NO: 165767 - DNA, 25 bp, Canis familiaris
ggccagtacaccaacctgcacttcc

SEQ ID NO: 165768 - DNA, 25 bp, Canis familiaris
ggccagaaagtcaccatgtctattc

SEQ ID NO: 165769 - DNA, 25 bp, Canis familiaris
tggccagaagttgtcctgccagacc

SEQ ID NO: 165770 - DNA, 25 bp, Canis familiaris
ggccaagcgttcatagcgacgtcgc

SEQ ID NO: 165771 - DNA, 25 bp, Canis familiaris
ggccaactggttccagcgaggacga

SEQ ID NO: 165772 - DNA, 25 bp, Canis familiaris
tggcccctggttaacaagtgccggc

SEQ ID NO: 165773 - DNA, 25 bp, Canis familiaris
tggccccaggaccagccaagtgggg

SEQ ID NO: 165774 - DNA, 25 bp, Canis familiaris
ggccttcagtggcacacaagcgagg

SEQ ID NO: 165775 - DNA, 25 bp, Canis familiaris
ggccttcagtggcacaagcgaggtg

SEQ ID NO: 165776 - DNA, 25 bp, Canis familiaris
ggccattgaatgcgacgagtgtggg

SEQ ID NO: 165777 - DNA, 25 bp, Canis familiaris
tggctctttatgctgacgtcagtgg

SEQ ID NO: 165778 - DNA, 25 bp, Canis familiaris
tggccagccttgacaacgtcaggca

SEQ ID NO: 165779 - DNA, 25 bp, Canis familiaris
ggccactatcgttggtgtatgagca

SEQ ID NO: 165780 - DNA, 25 bp, Canis familiaris
ggccacgtcttacagattgccagcc

SEQ ID NO: 165781 - DNA, 25 bp, Canis familiaris
ggccaccaactacaatggtcacaca

SEQ ID NO: 165782 - DNA, 25 bp, Canis familiaris
ggccacctacaacatcatagtcgag

SEQ ID NO: 165783 - DNA, 25 bp, Canis familiaris
ggccacggacaacactgaggcgtcc

SEQ ID NO: 165784 - DNA, 25 bp, Canis familiaris
ggccaaggacatagggtagactgct

SEQ ID NO: 165785 - DNA, 25 bp, Canis familiaris
ggccacaagacatggtgaaagcttt

SEQ ID NO: 165786 - DNA, 25 bp, Canis familiaris
tggccaaggtcatccatgacaactt

SEQ ID NO: 165787 - DNA, 25 bp, Canis familiaris
tggccgaggtcatcaacatcatcaa

SEQ ID NO: 165788 - DNA, 25 bp, Canis familiaris
ggccagcggtgctgcagaagcatcc

SEQ ID NO: 165789 - DNA, 25 bp, Canis familiaris
ggccattgtagctcagaatgctgcg

SEQ ID NO: 165790 - DNA, 25 bp, Canis familiaris
ggccattgttgaaccaagctggaat

SEQ ID NO: 165791 - DNA, 25 bp, Canis familiaris
ggccagtgtgagtgccagcctggca

SEQ ID NO: 165792 - DNA, 25 bp, Canis familiaris
tggccaggtggctaaccctgggacc

SEQ ID NO: 165793 - DNA, 25 bp, Canis familiaris
ggccagcggtgcaaatccatgtggg

SEQ ID NO: 165794 - DNA, 25 bp, Canis familiaris
ggccagcttcatcgaacaagtagcg

SEQ ID NO: 165795 - DNA, 25 bp, Canis familiaris
tggccagcttctacaccaagtatga

SEQ ID NO: 165796 - DNA, 25 bp, Canis familiaris
ggccagttttcactaatgctcacag

SEQ ID NO: 165797 - DNA, 25 bp, Canis familiaris
ggccagtgctctgcagtttacatgc

SEQ ID NO: 165798 - DNA, 25 bp, Canis familiaris
ggccttggctctgatctataatgat

SEQ ID NO: 165799 - DNA, 25 bp, Canis familiaris
tggccttggcttgctcggataaaac

SEQ ID NO: 165800 - DNA, 25 bp, Canis familiaris
ggccttggcagtttcggtgcataga

SEQ ID NO: 165801 - DNA, 25 bp, Canis familiaris
tggcctggctgcctgttagttgatg

SEQ ID NO: 165802 - DNA, 25 bp, Canis familiaris
ggccagcattgccatctggagttga

SEQ ID NO: 165803 - DNA, 25 bp, Canis familiaris
ggccaaggcagtgggtgctgtgatt

SEQ ID NO: 165804 - DNA, 25 bp, Canis familiaris
ggccaatgatgggaaggattttgcc

SEQ ID NO: 165805 - DNA, 25 bp, Canis familiaris
ggccaactgtggccggagctttgcc

SEQ ID NO: 165806 - DNA, 25 bp, Canis familiaris
tggccaacttggaaaggccttccgg

SEQ ID NO: 165807 - DNA, 25 bp, Canis familiaris
tggccaacgtggtcaaggccttcca

SEQ ID NO: 165808 - DNA, 25 bp, Canis familiaris
tggcctacctgatcaaggcccagcc

SEQ ID NO: 165809 - DNA, 25 bp, Canis familiaris
tggcctaccaggcaattcaaactag

SEQ ID NO: 165810 - DNA, 25 bp, Canis familiaris
tggcctgtccatcaaagtcaaactt

SEQ ID NO: 165811 - DNA, 25 bp, Canis familiaris
tggcttgtgctctcaaaccaaatct

SEQ ID NO: 165812 - DNA, 25 bp, Canis familiaris
tggccatgtgcatccagagcagaca

SEQ ID NO: 165813 - DNA, 25 bp, Canis familiaris
tggccaggtacctatcggtggttac

SEQ ID NO: 165814 - DNA, 25 bp, Canis familiaris
tgtgctggtaatgcaaccctggtgt

SEQ ID NO: 165815 - DNA, 25 bp, Canis familiaris
tggctggttgcagggttctgcttgt

SEQ ID NO: 165816 - DNA, 25 bp, Canis familiaris
tggcattgcttgtagggactgagtt

SEQ ID NO: 165817 - DNA, 25 bp, Canis familiaris
tggcatctccgtggagttctgcagc

SEQ ID NO: 165818 - DNA, 25 bp, Canis familiaris
tggcctgtcgtttgttctggatggc

SEQ ID NO: 165819 - DNA, 25 bp, Canis familiaris
tggcttgtctcgcaggttgtatggc

SEQ ID NO: 165820 - DNA, 25 bp, Canis familiaris
tggctgtactcacagtgcttgtctt

SEQ ID NO: 165821 - DNA, 25 bp, Canis familiaris
tggctggaagcgccgtgaggtcttt

SEQ ID NO: 165822 - DNA, 25 bp, Canis familiaris
tggctggcatactcttggtgattta

SEQ ID NO: 165823 - DNA, 25 bp, Canis familiaris
tggctgccaggccctgggtagtttc

SEQ ID NO: 165824 - DNA, 25 bp, Canis familiaris
tggtccctggaccggtcaatataac

SEQ ID NO: 165825 - DNA, 25 bp, Canis familiaris
tggaccgctaaccttgtcgaacaat

SEQ ID NO: 165826 - DNA, 25 bp, Canis familiaris
tggcaccgtgagcgttaagaacctt

SEQ ID NO: 165827 - DNA, 25 bp, Canis familiaris
tggcccgggccgagaagaaagctgc

SEQ ID NO: 165828 - DNA, 25 bp, Canis familiaris
tggccgccggggaagaggagagggc

SEQ ID NO: 165829 - DNA, 25 bp, Canis familiaris
tggccgcggtggagacagagggggc

SEQ ID NO: 165830 - DNA, 25 bp, Canis familiaris
tggccctgggccataggagggggct

SEQ ID NO: 165831 - DNA, 25 bp, Canis familiaris
tggccgctgtgaggctctatgtgga

SEQ ID NO: 165832 - DNA, 25 bp, Canis familiaris
tggcctgggacagtcatggcggggg

SEQ ID NO: 165833 - DNA, 25 bp, Canis familiaris
tggccggggagtaagctgcagcagg

SEQ ID NO: 165834 - DNA, 25 bp, Canis familiaris
tggtgggaacgtacaatgctgctgc

SEQ ID NO: 165835 - DNA, 25 bp, Canis familiaris
tggctgtgccattcagtgtcgggtc

SEQ ID NO: 165836 - DNA, 25 bp, Canis familiaris
tggcttctgaccatgcttggcagag

SEQ ID NO: 165837 - DNA, 25 bp, Canis familiaris
tggcaacccctagttgcctgggaga

SEQ ID NO: 165838 - DNA, 25 bp, Canis familiaris
tggcaacctccattatttccggata

SEQ ID NO: 165839 - DNA, 25 bp, Canis familiaris
tggcccttccttattctgggaaaag

SEQ ID NO: 165840 - DNA, 25 bp, Canis familiaris
tggccacttcctgttcctaggaaga

SEQ ID NO: 165841 - DNA, 25 bp, Canis familiaris
tggccagtttcctgtttagtccaga

SEQ ID NO: 165842 - DNA, 25 bp, Canis familiaris
ggccagtttctggtgctaaagaaag

SEQ ID NO: 165843 - DNA, 25 bp, Canis familiaris
ggccacattttccatctaatacaac

SEQ ID NO: 165844 - DNA, 25 bp, Canis familiaris
ggccacctcttctacatgataatta

SEQ ID NO: 165845 - DNA, 25 bp, Canis familiaris
ggccacctcttgttaaagactcaac

SEQ ID NO: 165846 - DNA, 25 bp, Canis familiaris
tggccacctctttgtaacatgatgg

SEQ ID NO: 165847 - DNA, 25 bp, Canis familiaris
tggccacctctttggggcaggtgga

SEQ ID NO: 165848 - DNA, 25 bp, Canis familiaris
tggcccagtttatggtgcagaatgg

SEQ ID NO: 165849 - DNA, 25 bp, Canis familiaris
tggcctaccttgagagtcactatgt

SEQ ID NO: 165850 - DNA, 25 bp, Canis familiaris
tggcctaggctaaacttctcagtgt

SEQ ID NO: 165851 - DNA, 25 bp, Canis familiaris
tggcccaggttctcatttatttttt

SEQ ID NO: 165852 - DNA, 25 bp, Canis familiaris
tggcccaatgttaaatgttattttt

SEQ ID NO: 165853 - DNA, 25 bp, Canis familiaris
tggcaccgtctttaatttcttgggt

SEQ ID NO: 165854 - DNA, 25 bp, Canis familiaris
tggacccctttgtgttttgtgtctt

SEQ ID NO: 165855 - DNA, 25 bp, Canis familiaris
tggttcccttttctataattatcct

SEQ ID NO: 165856 - DNA, 25 bp, Canis familiaris
tggctgtgcctcttttaataccacc

SEQ ID NO: 165857 - DNA, 25 bp, Canis familiaris
tggcaacccagtcaaaacacatccc

SEQ ID NO: 165858 - DNA, 25 bp, Canis familiaris
tggaaaacagtataaaccttcctca

SEQ ID NO: 165859 - DNA, 25 bp, Canis familiaris
tggaacaaccagaaagaactttccg

SEQ ID NO: 165860 - DNA, 25 bp, Canis familiaris
tggagaagttcgtggaaccctgccg

SEQ ID NO: 165861 - DNA, 25 bp, Canis familiaris
tggaaatgagggtgggcgcctccct

SEQ ID NO: 165862 - DNA, 25 bp, Canis familiaris
tggaagacggttgtgggcaccgccc

SEQ ID NO: 165863 - DNA, 25 bp, Canis familiaris
tgtaagggtttcatgggcccctggt

SEQ ID NO: 165864 - DNA, 25 bp, Canis familiaris
tggaagggtttgataggtcgtccct

SEQ ID NO: 165865 - DNA, 25 bp, Canis familiaris
tggccagtggctgtttggccacgtg

SEQ ID NO: 165866 - DNA, 25 bp, Canis familiaris
ggccagtggctgctgaggcagcggc

SEQ ID NO: 165867 - DNA, 25 bp, Canis familiaris
ggccaggagctgcgggtctggcctc

SEQ ID NO: 165868 - DNA, 25 bp, Canis familiaris
tggactagcaggccagggtcgtcct

SEQ ID NO: 165869 - DNA, 25 bp, Canis familiaris
tggcctgaggagccagctggaggct

SEQ ID NO: 165870 - DNA, 25 bp, Canis familiaris
tggcctcaaggctctggagctgtgg

SEQ ID NO: 165871 - DNA, 25 bp, Canis familiaris
tggcctcagacccactgggagtgag

SEQ ID NO: 165872 - DNA, 25 bp, Canis familiaris
tggctcgcatcgccaagctggaaaa

SEQ ID NO: 165873 - DNA, 25 bp, Canis familiaris
tggctcgcatcgccaagctggaaaa

SEQ ID NO: 165874 - DNA, 25 bp, Canis familiaris
tggctgccttccaggtgatgacaga

SEQ ID NO: 165875 - DNA, 25 bp, Canis familiaris
tggcctgtgcccaggctggagctga

SEQ ID NO: 165876 - DNA, 25 bp, Canis familiaris
ggccatggtgccagagtggagcgag

SEQ ID NO: 165877 - DNA, 25 bp, Canis familiaris
ggccagaatgccttggtggagctgc

SEQ ID NO: 165878 - DNA, 25 bp, Canis familiaris
ggccaaaggttgctgagcagctcaa

SEQ ID NO: 165879 - DNA, 25 bp, Canis familiaris
ggccacaagtctcttagtctgaatt

SEQ ID NO: 165880 - DNA, 25 bp, Canis familiaris
ggccagacagttcttcttcatgaga

SEQ ID NO: 165881 - DNA, 25 bp, Canis familiaris
ggccaccagagccagtactgttgga

SEQ ID NO: 165882 - DNA, 25 bp, Canis familiaris
ggccactgaaccaatcactttgtat

SEQ ID NO: 165883 - DNA, 25 bp, Canis familiaris
ggccacaagacaggattttctgata

SEQ ID NO: 165884 - DNA, 25 bp, Canis familiaris
ggccagaagaacctgctcttcaaag

SEQ ID NO: 165885 - DNA, 25 bp, Canis familiaris
ggccagaattcctagtttccagagc

SEQ ID NO: 165886 - DNA, 25 bp, Canis familiaris
tggcttaaacactgaatacctggca

SEQ ID NO: 165887 - DNA, 25 bp, Canis familiaris
ggccaaggaagttgcagaaccggat

SEQ ID NO: 165888 - DNA, 25 bp, Canis familiaris
ggccagagaaagtcatcaaagccca

SEQ ID NO: 165889 - DNA, 25 bp, Canis familiaris
ggccagagctatgagagccaacccc

SEQ ID NO: 165890 - DNA, 25 bp, Canis familiaris
ggccatggcacagaagtaattcctt

SEQ ID NO: 165891 - DNA, 25 bp, Canis familiaris
ggccacaacattatgattattcctt

SEQ ID NO: 165892 - DNA, 25 bp, Canis familiaris
ggccatcagattattactcttcatc

SEQ ID NO: 165893 - DNA, 25 bp, Canis familiaris
ggccatctgattatatgttctcatc

SEQ ID NO: 165894 - DNA, 25 bp, Canis familiaris
ggccatgcttattatcgtctgcttc

SEQ ID NO: 165895 - DNA, 25 bp, Canis familiaris
ggccatgctcgtttggcattatctc

SEQ ID NO: 165896 - DNA, 25 bp, Canis familiaris
ggccagcaggattctctgctttctc

SEQ ID NO: 165897 - DNA, 25 bp, Canis familiaris
tggctgaaggttccagtcttctggt

SEQ ID NO: 165898 - DNA, 25 bp, Canis familiaris
tggctgggacgtcagcacgttggac

SEQ ID NO: 165899 - DNA, 25 bp, Canis familiaris
tggcttggatgcagcacagcggttg

SEQ ID NO: 165900 - DNA, 25 bp, Canis familiaris
tggccagtgctgagggctggttgca

SEQ ID NO: 165901 - DNA, 25 bp, Canis familiaris
tggcgcgtgcgaatctgctcgcgcc

SEQ ID NO: 165902 - DNA, 25 bp, Canis familiaris
tggctcagtgcacatggctttggcc

SEQ ID NO: 165903 - DNA, 25 bp, Canis familiaris
tggctggtagagactctttcccacc

SEQ ID NO: 165904 - DNA, 25 bp, Canis familiaris
tggctgggaaagcctagcccacatc

SEQ ID NO: 165905 - DNA, 25 bp, Canis familiaris
tggcgtgggacaggacagccgagct

SEQ ID NO: 165906 - DNA, 25 bp, Canis familiaris
tggcttaggcctagacactctggcg

SEQ ID NO: 165907 - DNA, 25 bp, Canis familiaris
tggcctggatcctagcaagtctggc

SEQ ID NO: 165908 - DNA, 25 bp, Canis familiaris
tggcagtgcgtttagctggtggact

SEQ ID NO: 165909 - DNA, 25 bp, Canis familiaris
tggcctgcctggtgtcaggctactt

SEQ ID NO: 165910 - DNA, 25 bp, Canis familiaris
ggccaccatggtggtcagattgagt

SEQ ID NO: 165911 - DNA, 25 bp, Canis familiaris
ggccatcctgcgccgacaaggatgc

SEQ ID NO: 165912 - DNA, 25 bp, Canis familiaris
ggccacctggaggagatgcgcgagc

SEQ ID NO: 165913 - DNA, 25 bp, Canis familiaris
ggccacctggaggagatgcgcgagc

SEQ ID NO: 165914 - DNA, 25 bp, Canis familiaris
ggccacctggaggagatgcgcgagc

SEQ ID NO: 165915 - DNA, 25 bp, Canis familiaris
ggccagctcgcatccagatgtggcc

SEQ ID NO: 165916 - DNA, 25 bp, Canis familiaris
ggccagctgcgagcagcagggggca

SEQ ID NO: 165917 - DNA, 25 bp, Canis familiaris
ggccactcgactagatcgtggcccc

SEQ ID NO: 165918 - DNA, 25 bp, Canis familiaris
ggccatcaagacggtgcgggtgccc

SEQ ID NO: 165919 - DNA, 25 bp, Canis familiaris
tggccactgagggctgtctggggcc

SEQ ID NO: 165920 - DNA, 25 bp, Canis familiaris
tggctcacgaagttggctggaagta

SEQ ID NO: 165921 - DNA, 25 bp, Canis familiaris
tggttggaagaaaggagcaaggcgg

SEQ ID NO: 165922 - DNA, 25 bp, Canis familiaris
tggcttaataattaggccagggctt

SEQ ID NO: 165923 - DNA, 25 bp, Canis familiaris
tggcttggaaagtcgcccagagacc

SEQ ID NO: 165924 - DNA, 25 bp, Canis familiaris
tggctgtggatcaacacacaccaag

SEQ ID NO: 165925 - DNA, 25 bp, Canis familiaris
tggcgccgacagaccgatagaacca

SEQ ID NO: 165926 - DNA, 25 bp, Canis familiaris
tggccatggatctcggaatgtacca

SEQ ID NO: 165927 - DNA, 25 bp, Canis familiaris
tggccaaaaccgttcagtcagcaat

SEQ ID NO: 165928 - DNA, 25 bp, Canis familiaris
tggccatacaacagttcagccccat

SEQ ID NO: 165929 - DNA, 25 bp, Canis familiaris
tggccacatttcaagttccttccaa

SEQ ID NO: 165930 - DNA, 25 bp, Canis familiaris
ggccactgatataaatgacccccac

SEQ ID NO: 165931 - DNA, 25 bp, Canis familiaris
ggccacagaatttacacaccttcaa

SEQ ID NO: 165932 - DNA, 25 bp, Canis familiaris
ggccacattgtttacacacctgagg

SEQ ID NO: 165933 - DNA, 25 bp, Canis familiaris
ggccaatagtggtatccatcgcatc

SEQ ID NO: 165934 - DNA, 25 bp, Canis familiaris
ggccaatatttgtacttcaatccag

SEQ ID NO: 165935 - DNA, 25 bp, Canis familiaris
ggccaagattgggaactgccccttc

SEQ ID NO: 165936 - DNA, 25 bp, Canis familiaris
ggccaagtttctaattcttcgttct

SEQ ID NO: 165937 - DNA, 25 bp, Canis familiaris
tggcctagttttggttttcttaatg

SEQ ID NO: 165938 - DNA, 25 bp, Canis familiaris
tggcctttcttggggtattcttgat

SEQ ID NO: 165939 - DNA, 25 bp, Canis familiaris
tggcccttgttggtggtttactact

SEQ ID NO: 165940 - DNA, 25 bp, Canis familiaris
tggcctgtttctttggtttgtaact

SEQ ID NO: 165941 - DNA, 25 bp, Canis familiaris
tggcgcttccatggttttttttcgc

SEQ ID NO: 165942 - DNA, 25 bp, Canis familiaris
tggcagcattccggttcttagtagg

SEQ ID NO: 165943 - DNA, 25 bp, Canis familiaris
tggcgttcagccacccgagattgag

SEQ ID NO: 165944 - DNA, 25 bp, Canis familiaris
tggctgattcaggacccatctatga

SEQ ID NO: 165945 - DNA, 25 bp, Canis familiaris
tggccttagagagcaacttgatttt

SEQ ID NO: 165946 - DNA, 25 bp, Canis familiaris
tggccttggagatcatcatctgtgc

SEQ ID NO: 165947 - DNA, 25 bp, Canis familiaris
ggccatgtgtgaccatcactgtgcc

SEQ ID NO: 165948 - DNA, 25 bp, Canis familiaris
tggccttgctgtctgagcttgagcc

SEQ ID NO: 165949 - DNA, 25 bp, Canis familiaris
tggccatgggtgcagaccgaggcat

SEQ ID NO: 165950 - DNA, 25 bp, Canis familiaris
ggccatggcctgcaaactgggaacc

SEQ ID NO: 165951 - DNA, 25 bp, Canis familiaris
tggccagtgctctgaaatctgcgga

SEQ ID NO: 165952 - DNA, 25 bp, Canis familiaris
tggctggatgctctggaatctggaa

SEQ ID NO: 165953 - DNA, 25 bp, Canis familiaris
tggcgtgagcaccttggacgcagag

SEQ ID NO: 165954 - DNA, 25 bp, Canis familiaris
ggccaggaacttgaccatagcccag

SEQ ID NO: 165955 - DNA, 25 bp, Canis familiaris
ggccaggagacttgcaatcccagac

SEQ ID NO: 165956 - DNA, 25 bp, Canis familiaris
ggccagaagaagccaggccgcagcc

SEQ ID NO: 165957 - DNA, 25 bp, Canis familiaris
ggccagcaggtacgggaatgcgcac

SEQ ID NO: 165958 - DNA, 25 bp, Canis familiaris
ggccagcttccacatggacatgggc

SEQ ID NO: 165959 - DNA, 25 bp, Canis familiaris
tggccagttcacagtgccactgggc

SEQ ID NO: 165960 - DNA, 25 bp, Canis familiaris
ggccagaagcagatgctctcgggtc

SEQ ID NO: 165961 - DNA, 25 bp, Canis familiaris
tggccaagcgcaatttccggggccc

SEQ ID NO: 165962 - DNA, 25 bp, Canis familiaris
tggacacaaccaaaccgagggtggc

SEQ ID NO: 165963 - DNA, 25 bp, Canis familiaris
tggacacataccaccgagggaggac

SEQ ID NO: 165964 - DNA, 25 bp, Canis familiaris
tggccctatccaccgagaagggggt

SEQ ID NO: 165965 - DNA, 25 bp, Canis familiaris
tggccacttcaccaggaagatgcgg

SEQ ID NO: 165966 - DNA, 25 bp, Canis familiaris
tggacagcttcctgacaaagcgcgc

SEQ ID NO: 165967 - DNA, 25 bp, Canis familiaris
tggaactatgactaagacatcagag

SEQ ID NO: 165968 - DNA, 25 bp, Canis familiaris
tggcatcatggcagctaggaaagag

SEQ ID NO: 165969 - DNA, 25 bp, Canis familiaris
tggctctggggctgtcagaagggga

SEQ ID NO: 165970 - DNA, 25 bp, Canis familiaris
tggccacatgggtgtcagaatgagt

SEQ ID NO: 165971 - DNA, 25 bp, Canis familiaris
ggccactgggatcccaaggttcttc

SEQ ID NO: 165972 - DNA, 25 bp, Canis familiaris
ggccactggggggagaggtatctgt

SEQ ID NO: 165973 - DNA, 25 bp, Canis familiaris
ggccactgctgtcaggtggtctttg

SEQ ID NO: 165974 - DNA, 25 bp, Canis familiaris
ggccacctgggaagtgctttatctc

SEQ ID NO: 165975 - DNA, 25 bp, Canis familiaris
tggctccctggttcagttttttaag

SEQ ID NO: 165976 - DNA, 25 bp, Canis familiaris
ggccaactagtttttcttctcataa

SEQ ID NO: 165977 - DNA, 25 bp, Canis familiaris
ggccagactggtgctgtttatttaa

SEQ ID NO: 165978 - DNA, 25 bp, Canis familiaris
tggctcgacttaggtttgattttta

SEQ ID NO: 165979 - DNA, 25 bp, Canis familiaris
tggccagacccaggtgtttctttga

SEQ ID NO: 165980 - DNA, 25 bp, Canis familiaris
ggccaacaccagggtgtatcctatg

SEQ ID NO: 165981 - DNA, 25 bp, Canis familiaris
tggaaaaccccaatggcactctatg

SEQ ID NO: 165982 - DNA, 25 bp, Canis familiaris
tggactttgcacacattggcctagg

SEQ ID NO: 165983 - DNA, 25 bp, Canis familiaris
tggcctgttcaggagattagtaagt

SEQ ID NO: 165984 - DNA, 25 bp, Canis familiaris
tggcctgtcgcagaactcagaatga

SEQ ID NO: 165985 - DNA, 25 bp, Canis familiaris
tggcctccagccttggcttaagaag

SEQ ID NO: 165986 - DNA, 25 bp, Canis familiaris
tggctctaggctgtccttggagtag

SEQ ID NO: 165987 - DNA, 25 bp, Canis familiaris
tggcccatcgctgggccttgaactt

SEQ ID NO: 165988 - DNA, 25 bp, Canis familiaris
tggccaatccgcagcctgcgggatg

SEQ ID NO: 165989 - DNA, 25 bp, Canis familiaris
tggctatacctcacgtcgaagtggg

SEQ ID NO: 165990 - DNA, 25 bp, Canis familiaris
tggctttctctcacagtggagtctg

SEQ ID NO: 165991 - DNA, 25 bp, Canis familiaris
tggctttattcatcaggttcatcta

SEQ ID NO: 165992 - DNA, 25 bp, Canis familiaris
tggctattcctctgtagtgtatcta

SEQ ID NO: 165993 - DNA, 25 bp, Canis familiaris
tggctgtgttcgtttacttgtcatt

SEQ ID NO: 165994 - DNA, 25 bp, Canis familiaris
tggcatgtgttttgtcttctggaat

SEQ ID NO: 165995 - DNA, 25 bp, Canis familiaris
tggccatgtctatgtcttctttgat

SEQ ID NO: 165996 - DNA, 25 bp, Canis familiaris
tggccgcccagagcgtcattaagaa

SEQ ID NO: 165997 - DNA, 25 bp, Canis familiaris
tggcaactccgagcggcaatgacgc

SEQ ID NO: 165998 - DNA, 25 bp, Canis familiaris
tgtagactcctttcggattacccta

SEQ ID NO: 165999 - DNA, 25 bp, Canis familiaris
tggacacccttgtggagtttcctat

SEQ ID NO: 166000 - DNA, 25 bp, Canis familiaris
tggaacctttgtgagattcttttta

SEQ ID NO: 166001 - DNA, 25 bp, Canis familiaris
tggaagtccggtgtttattttctcg

SEQ ID NO: 166002 - DNA, 25 bp, Canis familiaris
tggaagtctctgatgcctattattt

SEQ ID NO: 166003 - DNA, 25 bp, Canis familiaris
tggaaccgtcggtcttaatatttcg

SEQ ID NO: 166004 - DNA, 25 bp, Canis familiaris
tggcaataccttggccttaagaatt

SEQ ID NO: 166005 - DNA, 25 bp, Canis familiaris
tggctatcgccttatttattacaaa

SEQ ID NO: 166006 - DNA, 25 bp, Canis familiaris
tggctgatcctcctcataagttaga

SEQ ID NO: 166007 - DNA, 25 bp, Canis familiaris
tggcttcctgcacaaattctaaacc

SEQ ID NO: 166008 - DNA, 25 bp, Canis familiaris
tggttaaagcaatatttttacaact

SEQ ID NO: 166009 - DNA, 25 bp, Canis familiaris
tggcttaaaattgttctcctaccct

SEQ ID NO: 166010 - DNA, 25 bp, Canis familiaris
tggcttaaatttttgtctttgaact

SEQ ID NO: 166011 - DNA, 25 bp, Canis familiaris
tggcctttattccaatgttaatcca

SEQ ID NO: 166012 - DNA, 25 bp, Canis familiaris
tggactttaatttcacaaactgcca

SEQ ID NO: 166013 - DNA, 25 bp, Canis familiaris
tggacatttaacatcatactagagt

SEQ ID NO: 166014 - DNA, 25 bp, Canis familiaris
tggacttgctaacttcttgaaggtt

SEQ ID NO: 166015 - DNA, 25 bp, Canis familiaris
tggctctttaaaaatgtcaagtttt

SEQ ID NO: 166016 - DNA, 25 bp, Canis familiaris
tggctcctcaaataaaaagtttcct

SEQ ID NO: 166017 - DNA, 25 bp, Canis familiaris
tggcctctcgtatcctaaatggttc

SEQ ID NO: 166018 - DNA, 25 bp, Canis familiaris
tggccctggttagctggagcatgga

SEQ ID NO: 166019 - DNA, 25 bp, Canis familiaris
tggctgccttttttcttagtgatgc

SEQ ID NO: 166020 - DNA, 25 bp, Canis familiaris
tggccctaggagtcctgtcaggaca

SEQ ID NO: 166021 - DNA, 25 bp, Canis familiaris
tggcccccgagagggacaagtgcac

SEQ ID NO: 166022 - DNA, 25 bp, Canis familiaris
tggcccgccggaagggcaggcatat

SEQ ID NO: 166023 - DNA, 25 bp, Canis familiaris
tggcccgccggaagggcaggcatat

SEQ ID NO: 166024 - DNA, 25 bp, Canis familiaris
tggcccgccggaagggcaggcatat

SEQ ID NO: 166025 - DNA, 25 bp, Canis familiaris
tggcccgccggaagggcaggcatat

SEQ ID NO: 166026 - DNA, 25 bp, Canis familiaris
tggcttggttggaagaaaggagcaa

SEQ ID NO: 166027 - DNA, 25 bp, Canis familiaris
tggcgtggtgtgcttggtaagcaca

SEQ ID NO: 166028 - DNA, 25 bp, Canis familiaris
tggcgctggagggtatttgatggaa

SEQ ID NO: 166029 - DNA, 25 bp, Canis familiaris
tggccgtgggccatcctaggatggc

SEQ ID NO: 166030 - DNA, 25 bp, Canis familiaris
tggccttgacagattcacacagttg

SEQ ID NO: 166031 - DNA, 25 bp, Canis familiaris
tggccgtaccactggcatcgtgatg

SEQ ID NO: 166032 - DNA, 25 bp, Canis familiaris
ggccaaaacgctgggcatcgtggtc

SEQ ID NO: 166033 - DNA, 25 bp, Canis familiaris
tggccaaggccgacggcatcgtttc

SEQ ID NO: 166034 - DNA, 25 bp, Canis familiaris
ggccaagtcggcaggtgccaagtct

SEQ ID NO: 166035 - DNA, 25 bp, Canis familiaris
ggccacgggagcaaggttcaaggca

SEQ ID NO: 166036 - DNA, 25 bp, Canis familiaris
tggcctggggaggagcggttttcac

SEQ ID NO: 166037 - DNA, 25 bp, Canis familiaris
tggctgggggacggggtactagctc

SEQ ID NO: 166038 - DNA, 25 bp, Canis familiaris
tggcggggagcccaaggttgaggcc

SEQ ID NO: 166039 - DNA, 25 bp, Canis familiaris
ttgcggggcccgtgtcagggcccca

SEQ ID NO: 166040 - DNA, 25 bp, Canis familiaris
ttgccctcggggattcagtggtccc

SEQ ID NO: 166041 - DNA, 25 bp, Canis familiaris
tgtaccccgaggattcaaatgtttc

SEQ ID NO: 166042 - DNA, 25 bp, Canis familiaris
tgataaccccagcaaaaaattttca

SEQ ID NO: 166043 - DNA, 25 bp, Canis familiaris
tgaaaccccagccaaaaatttcaca

SEQ ID NO: 166044 - DNA, 25 bp, Canis familiaris
tggaaacccgaacaaaaatcatgca

SEQ ID NO: 166045 - DNA, 25 bp, Canis familiaris
tggaggccccaaaggaaaaagcaca

SEQ ID NO: 166046 - DNA, 25 bp, Canis familiaris
tggctaccaaaagggaaaagatcac

SEQ ID NO: 166047 - DNA, 25 bp, Canis familiaris
tggctaccaaaaggaattagatcac

SEQ ID NO: 166048 - DNA, 25 bp, Canis familiaris
tggccaacagacaacatgaaaagat

SEQ ID NO: 166049 - DNA, 25 bp, Canis familiaris
tggctcaaaaattgtgtccgtgggc

SEQ ID NO: 166050 - DNA, 25 bp, Canis familiaris
tggccaagaaagctcacctgtccac

SEQ ID NO: 166051 - DNA, 25 bp, Canis familiaris
tggaaagccaagttgccttcccaag

SEQ ID NO: 166052 - DNA, 25 bp, Canis familiaris
tggctgaaccaagttcgtgtcgaaa

SEQ ID NO: 166053 - DNA, 25 bp, Canis familiaris
tggctgaactagatccgttcggcgc

SEQ ID NO: 166054 - DNA, 25 bp, Canis familiaris
tggctaccaggtttcttgaaaattt

SEQ ID NO: 166055 - DNA, 25 bp, Canis familiaris
tcgtgaggctggatctcaaaaagat

SEQ ID NO: 166056 - DNA, 25 bp, Canis familiaris
tggtgggggtttctaacgatcacac

SEQ ID NO: 166057 - DNA, 25 bp, Canis familiaris
tggctggggggccttctggaagaag

SEQ ID NO: 166058 - DNA, 25 bp, Canis familiaris
tggcttgttggggatttaagtgaga

SEQ ID NO: 166059 - DNA, 25 bp, Canis familiaris
tgagttgttactttgttacttaaga

SEQ ID NO: 166060 - DNA, 25 bp, Canis familiaris
tggtttgttgaaagggatcttaagt

SEQ ID NO: 166061 - DNA, 25 bp, Canis familiaris
tggtatttggaagtagggtaagagt

SEQ ID NO: 166062 - DNA, 25 bp, Canis familiaris
tggcttttggacgtgggctggaaac

SEQ ID NO: 166063 - DNA, 25 bp, Canis familiaris
tggctgttcagctcttgatacggaa

SEQ ID NO: 166064 - DNA, 25 bp, Canis familiaris
tggctgacatagtccaggcctggga

SEQ ID NO: 166065 - DNA, 25 bp, Canis familiaris
tggcggccaacagcgagctggtgac

SEQ ID NO: 166066 - DNA, 25 bp, Canis familiaris
tggctcccaagcacgcagatggggc

SEQ ID NO: 166067 - DNA, 25 bp, Canis familiaris
tggccccagtgagccaggagggact

SEQ ID NO: 166068 - DNA, 25 bp, Canis familiaris
tggcctccgtagtttggagacagag

SEQ ID NO: 166069 - DNA, 25 bp, Canis familiaris
tggcctttggactttgcgcacaagg

SEQ ID NO: 166070 - DNA, 25 bp, Canis familiaris
tggcctttgcagtgcttggacgtga

SEQ ID NO: 166071 - DNA, 25 bp, Canis familiaris
tggcctttgcacacggcaacgtgac

SEQ ID NO: 166072 - DNA, 25 bp, Canis familiaris
tggcttttacatccccaagggacgt

SEQ ID NO: 166073 - DNA, 25 bp, Canis familiaris
tggtttataacattccaggaagact

SEQ ID NO: 166074 - DNA, 25 bp, Canis familiaris
tggagtatatattttcgttaaccta

SEQ ID NO: 166075 - DNA, 25 bp, Canis familiaris
tggcctttatttttacattgaccta

SEQ ID NO: 166076 - DNA, 25 bp, Canis familiaris
tggcctttttttttccagactgtgc

SEQ ID NO: 166077 - DNA, 25 bp, Canis familiaris
tggcccctttttctaagcaggtgca

SEQ ID NO: 166078 - DNA, 25 bp, Canis familiaris
tggtcccgttatctcttaaggtgaa

SEQ ID NO: 166079 - DNA, 25 bp, Canis familiaris
tggccctcttttgtctaattttgga

SEQ ID NO: 166080 - DNA, 25 bp, Canis familiaris
tggcctctttttgtgacacgtgttg

SEQ ID NO: 166081 - DNA, 25 bp, Canis familiaris
tggccatttggcaaggtacctgttt

SEQ ID NO: 166082 - DNA, 25 bp, Canis familiaris
ggccaatgtgagaagccttcgaagt

SEQ ID NO: 166083 - DNA, 25 bp, Canis familiaris
ggccacagcaagcaggttcgaacat

SEQ ID NO: 166084 - DNA, 25 bp, Canis familiaris
ggccacgcaagttgttctgtgatcc

SEQ ID NO: 166085 - DNA, 25 bp, Canis familiaris
tggccaagctggtgtcttgtgtccc

SEQ ID NO: 166086 - DNA, 25 bp, Canis familiaris
ggccaagctggccaagcttctggcc

SEQ ID NO: 166087 - DNA, 25 bp, Canis familiaris
ggccacatgcctgcaagttggctcc

SEQ ID NO: 166088 - DNA, 25 bp, Canis familiaris
ggccacagcgtgacctgtgtgtgcc

SEQ ID NO: 166089 - DNA, 25 bp, Canis familiaris
tggcccactgtggccagtttgcatc

SEQ ID NO: 166090 - DNA, 25 bp, Canis familiaris
tggctccatcttggcctcactgtcc

SEQ ID NO: 166091 - DNA, 25 bp, Canis familiaris
tggccactcttgagctgatttccag

SEQ ID NO: 166092 - DNA, 25 bp, Canis familiaris
tggctcctctagccaaagtcatcca

SEQ ID NO: 166093 - DNA, 25 bp, Canis familiaris
tggctactcttcctgagaaaccacc

SEQ ID NO: 166094 - DNA, 25 bp, Canis familiaris
tggctttctccccaagagaacatca

SEQ ID NO: 166095 - DNA, 25 bp, Canis familiaris
tggctaactctttcctgagaaccac

SEQ ID NO: 166096 - DNA, 25 bp, Canis familiaris
tggaaaccattatctagggcacctg

SEQ ID NO: 166097 - DNA, 25 bp, Canis familiaris
tggaataccttatacccgaagtaat

SEQ ID NO: 166098 - DNA, 25 bp, Canis familiaris
tgggaaagccaatccccaaggtcca

SEQ ID NO: 166099 - DNA, 25 bp, Canis familiaris
tggagaatgcccattcccacaaggt

SEQ ID NO: 166100 - DNA, 25 bp, Canis familiaris
tggagatgtcgggtccctacaacag

SEQ ID NO: 166101 - DNA, 25 bp, Canis familiaris
tggaattccaggaacccgagagggc

SEQ ID NO: 166102 - DNA, 25 bp, Canis familiaris
tggtatcatacattaaaccgggggc

SEQ ID NO: 166103 - DNA, 25 bp, Canis familiaris
tggcctcgcaggtataactcgggtg

SEQ ID NO: 166104 - DNA, 25 bp, Canis familiaris
tggccccatggcttacagtcaaggc

SEQ ID NO: 166105 - DNA, 25 bp, Canis familiaris
tggccccatggcttgatgtgaagac

SEQ ID NO: 166106 - DNA, 25 bp, Canis familiaris
tggcacccagcagtttagcttaatt

SEQ ID NO: 166107 - DNA, 25 bp, Canis familiaris
tggagaaccagcaattacagaatat

SEQ ID NO: 166108 - DNA, 25 bp, Canis familiaris
tggaataagcgctttgaaaagaaat

SEQ ID NO: 166109 - DNA, 25 bp, Canis familiaris
tggagcctggcctctgcaaaaaaaa

SEQ ID NO: 166110 - DNA, 25 bp, Canis familiaris
tgctgaccgggtctgaagccaaaca

SEQ ID NO: 166111 - DNA, 25 bp, Canis familiaris
tggccctggtgtccaaacgaacaca

SEQ ID NO: 166112 - DNA, 25 bp, Canis familiaris
tggtcctcagttccacacaaagacg

SEQ ID NO: 166113 - DNA, 25 bp, Canis familiaris
tggatactagatacctacaaggcat

SEQ ID NO: 166114 - DNA, 25 bp, Canis familiaris
tggtacttactgctactaggtcctt

SEQ ID NO: 166115 - DNA, 25 bp, Canis familiaris
tggtggcttacgtaaaaggaccagt

SEQ ID NO: 166116 - DNA, 25 bp, Canis familiaris
tggaggtctaggggaaagggcccag

SEQ ID NO: 166117 - DNA, 25 bp, Canis familiaris
tggcgaggcgacgggtaacttgctc

SEQ ID NO: 166118 - DNA, 25 bp, Canis familiaris
tggggacgacggtgttttgcccgat

SEQ ID NO: 166119 - DNA, 25 bp, Canis familiaris
tgtggtaaaccatggtttttccagg

SEQ ID NO: 166120 - DNA, 25 bp, Canis familiaris
tgctggtcaaaccgggttttcttgg

SEQ ID NO: 166121 - DNA, 25 bp, Canis familiaris
tcggaatcgggccgtttttccgatg

SEQ ID NO: 166122 - DNA, 25 bp, Canis familiaris
tggtttaggggggtcagttcctgtg

SEQ ID NO: 166123 - DNA, 25 bp, Canis familiaris
tggttaaaaatgtgcgctgttttgt

SEQ ID NO: 166124 - DNA, 25 bp, Canis familiaris
tggtccaaaaatgctgttgtttaaa

SEQ ID NO: 166125 - DNA, 25 bp, Canis familiaris
tgtgtcataaaaagcacttttaatt

SEQ ID NO: 166126 - DNA, 25 bp, Canis familiaris
tgttctcagatatggtcttaaaaga

SEQ ID NO: 166127 - DNA, 25 bp, Canis familiaris
tggcttgtgaatccgctcaataaaa

SEQ ID NO: 166128 - DNA, 25 bp, Canis familiaris
tggcttgcagaaaatccagaaaatg

SEQ ID NO: 166129 - DNA, 25 bp, Canis familiaris
tggctctcacactctctcagcttta

SEQ ID NO: 166130 - DNA, 25 bp, Canis familiaris
tggctctagctacttggactattca

SEQ ID NO: 166131 - DNA, 25 bp, Canis familiaris
tggccttttccaggttattaaccag

SEQ ID NO: 166132 - DNA, 25 bp, Canis familiaris
tggatcttttcgggcttttggaagg

SEQ ID NO: 166133 - DNA, 25 bp, Canis familiaris
tggtcctgtatcacctctttgagga

SEQ ID NO: 166134 - DNA, 25 bp, Canis familiaris
tggctccattattactctgttaggg

SEQ ID NO: 166135 - DNA, 25 bp, Canis familiaris
tggccgattccagactgtggaggag

SEQ ID NO: 166136 - DNA, 25 bp, Canis familiaris
tggccgagttccgtgtccgaggtgt

SEQ ID NO: 166137 - DNA, 25 bp, Canis familiaris
tggcctaggactgtaccgggtgtga

SEQ ID NO: 166138 - DNA, 25 bp, Canis familiaris
tggccacaggcatcgtatcctgggg

SEQ ID NO: 166139 - DNA, 25 bp, Canis familiaris
tggcccgccatgggtatccatggtg

SEQ ID NO: 166140 - DNA, 25 bp, Canis familiaris
tggctcacgcctgtaatcccagcac

SEQ ID NO: 166141 - DNA, 25 bp, Canis familiaris
tggccactgattataatgaccccca

SEQ ID NO: 166142 - DNA, 25 bp, Canis familiaris
tggccctgtttgtgaattgccccaa

SEQ ID NO: 166143 - DNA, 25 bp, Canis familiaris
tggccgcctttgagtttgacatcca

SEQ ID NO: 166144 - DNA, 25 bp, Canis familiaris
tggctcccatcttgaagtttatccc

SEQ ID NO: 166145 - DNA, 25 bp, Canis familiaris
tggccccacctgaagacttatggcc

SEQ ID NO: 166146 - DNA, 25 bp, Canis familiaris
tggctggaccctcaactatggtgcc

SEQ ID NO: 166147 - DNA, 25 bp, Canis familiaris
tggttaccttgtcatctttgatgtc

SEQ ID NO: 166148 - DNA, 25 bp, Canis familiaris
tggctaccccttccaattatgattc

SEQ ID NO: 166149 - DNA, 25 bp, Canis familiaris
tggctacacccttcattgattgatt

SEQ ID NO: 166150 - DNA, 25 bp, Canis familiaris
tggcataataccttgttactgtgat

SEQ ID NO: 166151 - DNA, 25 bp, Canis familiaris
tggctgaataatatttcactgtgtg

SEQ ID NO: 166152 - DNA, 25 bp, Canis familiaris
tggcaaaatttcattcagtttcatg

SEQ ID NO: 166153 - DNA, 25 bp, Canis familiaris
tggctttccttctttcaatcatact

SEQ ID NO: 166154 - DNA, 25 bp, Canis familiaris
tggcattctcctagctttaattgaa

SEQ ID NO: 166155 - DNA, 25 bp, Canis familiaris
tggctaatcctccattgtacacatg

SEQ ID NO: 166156 - DNA, 25 bp, Canis familiaris
tggccagatccccttatatatcatt

SEQ ID NO: 166157 - DNA, 25 bp, Canis familiaris
tggccgaggactttgattgcacatt

SEQ ID NO: 166158 - DNA, 25 bp, Canis familiaris
tggcctgagcacgaatctgttccat

SEQ ID NO: 166159 - DNA, 25 bp, Canis familiaris
tggcgtgatacggttgactcacggg

SEQ ID NO: 166160 - DNA, 25 bp, Canis familiaris
tggctcgaatccggtgaggcacatg

SEQ ID NO: 166161 - DNA, 25 bp, Canis familiaris
tggcggcacacagcaagacgcacag

SEQ ID NO: 166162 - DNA, 25 bp, Canis familiaris
tggcctgcatcaagctgaactctgc

SEQ ID NO: 166163 - DNA, 25 bp, Canis familiaris
tggctgcagctgacgatgtattcct

SEQ ID NO: 166164 - DNA, 25 bp, Canis familiaris
tggccaggattgtctcatttcattc

SEQ ID NO: 166165 - DNA, 25 bp, Canis familiaris
tggccagctatttctttttgctcac

SEQ ID NO: 166166 - DNA, 25 bp, Canis familiaris
tggcctgtattgtctattttctaga

SEQ ID NO: 166167 - DNA, 25 bp, Canis familiaris
tggcctgtttgtacattgtctcaat

SEQ ID NO: 166168 - DNA, 25 bp, Canis familiaris
tggccattttgcagttgcatcccta

SEQ ID NO: 166169 - DNA, 25 bp, Canis familiaris
tggcgtctttgatgtttcaacgcaa

SEQ ID NO: 166170 - DNA, 25 bp, Canis familiaris
tggcgtctttgatgtctccaacgca

SEQ ID NO: 166171 - DNA, 25 bp, Canis familiaris
tggcgtcttatgtggcgccaaccac

SEQ ID NO: 166172 - DNA, 25 bp, Canis familiaris
tggaatctgactgggggcgaacccg

SEQ ID NO: 166173 - DNA, 25 bp, Canis familiaris
tggccattctctggaggaggtcacc

SEQ ID NO: 166174 - DNA, 25 bp, Canis familiaris
tggcctgtgcacaagcaggggctga

SEQ ID NO: 166175 - DNA, 25 bp, Canis familiaris
tggcgtctgcttcagggacatgagc

SEQ ID NO: 166176 - DNA, 25 bp, Canis familiaris
tggcctcatcccgaggtaatgccac

SEQ ID NO: 166177 - DNA, 25 bp, Canis familiaris
tggcccagcctaggcttaggcatcc

SEQ ID NO: 166178 - DNA, 25 bp, Canis familiaris
tggctccagctcagagcattcctga

SEQ ID NO: 166179 - DNA, 25 bp, Canis familiaris
tggccatcgctggaagttctgctga

SEQ ID NO: 166180 - DNA, 25 bp, Canis familiaris
tggctgggctgttcagtggcagtga

SEQ ID NO: 166181 - DNA, 25 bp, Canis familiaris
tggcaggccatgctaggcacattgc

SEQ ID NO: 166182 - DNA, 25 bp, Canis familiaris
tggcgggcctgctgaagcctgccgc

SEQ ID NO: 166183 - DNA, 25 bp, Canis familiaris
tggcgaaccgctgacatggcagtca

SEQ ID NO: 166184 - DNA, 25 bp, Canis familiaris
tggccatccgggacagtgagcgaca

SEQ ID NO: 166185 - DNA, 25 bp, Canis familiaris
tggctcccagggagtgagggcctgt

SEQ ID NO: 166186 - DNA, 25 bp, Canis familiaris
tggctaccaggagtttattttcttt

SEQ ID NO: 166187 - DNA, 25 bp, Canis familiaris
tggctccagaaccttttttgttgtt

SEQ ID NO: 166188 - DNA, 25 bp, Canis familiaris
tggcaagtgacaggttttttttctt

SEQ ID NO: 166189 - DNA, 25 bp, Canis familiaris
tggaaggacagatttccatttttcc

SEQ ID NO: 166190 - DNA, 25 bp, Canis familiaris
tggcaaataaattcccgtttctatc

SEQ ID NO: 166191 - DNA, 25 bp, Canis familiaris
tggcaaataaattcccgtttctatc

SEQ ID NO: 166192 - DNA, 25 bp, Canis familiaris
tggcaaataaattcccgtttctatc

SEQ ID NO: 166193 - DNA, 25 bp, Canis familiaris
tggcataagacagacccgggttcaa

SEQ ID NO: 166194 - DNA, 25 bp, Canis familiaris
tggcatcaaccatatccgggagctt

SEQ ID NO: 166195 - DNA, 25 bp, Canis familiaris
tggacatcactgagacctggttctt

SEQ ID NO: 166196 - DNA, 25 bp, Canis familiaris
tggacatcatccacacttggtaaat

SEQ ID NO: 166197 - DNA, 25 bp, Canis familiaris
tggcattagccagcctgtaggcaaa

SEQ ID NO: 166198 - DNA, 25 bp, Canis familiaris
tggatttacattcctggagctcaaa

SEQ ID NO: 166199 - DNA, 25 bp, Canis familiaris
tggactggatcatcctgcagtgcgc

SEQ ID NO: 166200 - DNA, 25 bp, Canis familiaris
tggcagctgctggcaggtctcaagg

SEQ ID NO: 166201 - DNA, 25 bp, Canis familiaris
tggccctggaggttccaatgtgaag

SEQ ID NO: 166202 - DNA, 25 bp, Canis familiaris
tggcgccggcaggatgggcaagtgt

SEQ ID NO: 166203 - DNA, 25 bp, Canis familiaris
tggcctggggttggaagggtaagtg

SEQ ID NO: 166204 - DNA, 25 bp, Canis familiaris
tggccagggaattggtaaggtacac

SEQ ID NO: 166205 - DNA, 25 bp, Canis familiaris
tggccgacgaactcaacaagaacat

SEQ ID NO: 166206 - DNA, 25 bp, Canis familiaris
tggactatcgatccatccaaaaaaa

SEQ ID NO: 166207 - DNA, 25 bp, Canis familiaris
tggaaacgtttcaaagaaagccaca

SEQ ID NO: 166208 - DNA, 25 bp, Canis familiaris
tgtaagggtacctacagttagacaa

SEQ ID NO: 166209 - DNA, 25 bp, Canis familiaris
tgagaagggaacttgggttaagcca

SEQ ID NO: 166210 - DNA, 25 bp, Canis familiaris
tggaacttggacttgggcaccgaga

SEQ ID NO: 166211 - DNA, 25 bp, Canis familiaris
tggaatttgttaatgggaccaagac

SEQ ID NO: 166212 - DNA, 25 bp, Canis familiaris
tggaatttccatatgtcgtccttca

SEQ ID NO: 166213 - DNA, 25 bp, Canis familiaris
tggcaatctttattcttccatcctt

SEQ ID NO: 166214 - DNA, 25 bp, Canis familiaris
tggctacagttgatacccacagctt

SEQ ID NO: 166215 - DNA, 25 bp, Canis familiaris
tgacaaggttccaacagccaaggct

SEQ ID NO: 166216 - DNA, 25 bp, Canis familiaris
tgaaaagtatggtaatcctagtgga

SEQ ID NO: 166217 - DNA, 25 bp, Canis familiaris
taaaaccagggctccacagttggga

SEQ ID NO: 166218 - DNA, 25 bp, Canis familiaris
taaaaccggccgtgtctgttggcta

SEQ ID NO: 166219 - DNA, 25 bp, Canis familiaris
taataaccggctgagagacttcttg

SEQ ID NO: 166220 - DNA, 25 bp, Canis familiaris
tggaaactctgggaaaacctattga

SEQ ID NO: 166221 - DNA, 25 bp, Canis familiaris
tggaacacctgggagcacttgggag

SEQ ID NO: 166222 - DNA, 25 bp, Canis familiaris
tggaatgcccgggagttttcctggt

SEQ ID NO: 166223 - DNA, 25 bp, Canis familiaris
tggacagcagtccgaaggtttgccc

SEQ ID NO: 166224 - DNA, 25 bp, Canis familiaris
tggcgagtgaccaaagcccttgcca

SEQ ID NO: 166225 - DNA, 25 bp, Canis familiaris
tggccattggcactaagcgctttga

SEQ ID NO: 166226 - DNA, 25 bp, Canis familiaris
tggcttcatggcctaacactttgaa

SEQ ID NO: 166227 - DNA, 25 bp, Canis familiaris
tggcgtaggacaacacccggaaatt

SEQ ID NO: 166228 - DNA, 25 bp, Canis familiaris
tggcgacgaagcacgcccggaagat

SEQ ID NO: 166229 - DNA, 25 bp, Canis familiaris
tggcgaagacacatccacacgtaaa

SEQ ID NO: 166230 - DNA, 25 bp, Canis familiaris
tggctgccaggattcccattttaat

SEQ ID NO: 166231 - DNA, 25 bp, Canis familiaris
tggccacaggagtctctattttttc

SEQ ID NO: 166232 - DNA, 25 bp, Canis familiaris
tggctatcaaggttagattgtctgt

SEQ ID NO: 166233 - DNA, 25 bp, Canis familiaris
tggcttcatgacgagggtggccctg

SEQ ID NO: 166234 - DNA, 25 bp, Canis familiaris
tggcttagcaggtccctgagcagcc

SEQ ID NO: 166235 - DNA, 25 bp, Canis familiaris
tggcctatcaggtccagtgactcta

SEQ ID NO: 166236 - DNA, 25 bp, Canis familiaris
tggccaagggagtcactgcatctca

SEQ ID NO: 166237 - DNA, 25 bp, Canis familiaris
tggccaggcgggtcactttgaaggc

SEQ ID NO: 166238 - DNA, 25 bp, Canis familiaris
tggccagaagggcactttgccacca

SEQ ID NO: 166239 - DNA, 25 bp, Canis familiaris
tggccaacagagggcactggtccag

SEQ ID NO: 166240 - DNA, 25 bp, Canis familiaris
tggcaaacaggagccgcgactcagg

SEQ ID NO: 166241 - DNA, 25 bp, Canis familiaris
tggccaacatgaccaagcctaccac

SEQ ID NO: 166242 - DNA, 25 bp, Canis familiaris
tggccacaatgggtatgccagcccc

SEQ ID NO: 166243 - DNA, 25 bp, Canis familiaris
tggccacagcagcagcttggatgcc

SEQ ID NO: 166244 - DNA, 25 bp, Canis familiaris
tggccagcagacacatgaagagatg

SEQ ID NO: 166245 - DNA, 25 bp, Canis familiaris
tggcgataacagtcatgtggagatg

SEQ ID NO: 166246 - DNA, 25 bp, Canis familiaris
tggcgagaagctcatgtctgtgcgc

SEQ ID NO: 166247 - DNA, 25 bp, Canis familiaris
tggcagtagactccatgtctgggat

SEQ ID NO: 166248 - DNA, 25 bp, Canis familiaris
tggcgctcagcagatatttgaagct

SEQ ID NO: 166249 - DNA, 25 bp, Canis familiaris
tggctccaggctttctgtagatgtg

SEQ ID NO: 166250 - DNA, 25 bp, Canis familiaris
tggcccgtgtgcgtgggagtgtgac

SEQ ID NO: 166251 - DNA, 25 bp, Canis familiaris
tggcccaggacggggtgtcagagct

SEQ ID NO: 166252 - DNA, 25 bp, Canis familiaris
tggccagggcaatggggtgggctct

SEQ ID NO: 166253 - DNA, 25 bp, Canis familiaris
tggccgggatctgggtcaggggcct

SEQ ID NO: 166254 - DNA, 25 bp, Canis familiaris
tggccgtggacgtgtgcagggtggc

SEQ ID NO: 166255 - DNA, 25 bp, Canis familiaris
tggccagggcatggtcctggggtcc

SEQ ID NO: 166256 - DNA, 25 bp, Canis familiaris
tggctcagggagcttcttggcatgt

SEQ ID NO: 166257 - DNA, 25 bp, Canis familiaris
tggcttgggggctgttgaatttttt

SEQ ID NO: 166258 - DNA, 25 bp, Canis familiaris
tggcttggcagccgatcagttgtgt

SEQ ID NO: 166259 - DNA, 25 bp, Canis familiaris
tggctcgaatgctgtctgttggctc

SEQ ID NO: 166260 - DNA, 25 bp, Canis familiaris
tggctcataatgctgttgcttgtta

SEQ ID NO: 166261 - DNA, 25 bp, Canis familiaris
tggtcagtctgctttcagtagaata

SEQ ID NO: 166262 - DNA, 25 bp, Canis familiaris
tcgccagccgacttcaatcgaagca

SEQ ID NO: 166263 - DNA, 25 bp, Canis familiaris
tggcgccacggcttcaacgtggccc

SEQ ID NO: 166264 - DNA, 25 bp, Canis familiaris
tggctgccttagctgaccagtggca

SEQ ID NO: 166265 - DNA, 25 bp, Canis familiaris
tggctactgaggcgtcgcagtggca

SEQ ID NO: 166266 - DNA, 25 bp, Canis familiaris
tggctgaggagctggtggctgaaga

SEQ ID NO: 166267 - DNA, 25 bp, Canis familiaris
tggcgcagggcatgctggagcgaga

SEQ ID NO: 166268 - DNA, 25 bp, Canis familiaris
tggccagggcaactgcgaaggcctg

SEQ ID NO: 166269 - DNA, 25 bp, Canis familiaris
tggcacaggacatccgcaagttcgt

SEQ ID NO: 166270 - DNA, 25 bp, Canis familiaris
tggcaagtaccaatcctacattccc

SEQ ID NO: 166271 - DNA, 25 bp, Canis familiaris
tggaattagcatcatcactcctttc

SEQ ID NO: 166272 - DNA, 25 bp, Canis familiaris
tggaaatgtgcactgaaatagatgt

SEQ ID NO: 166273 - DNA, 25 bp, Canis familiaris
tggaaagtggagcgtaaggagggga

SEQ ID NO: 166274 - DNA, 25 bp, Canis familiaris
tggaagggaggaccggggatggaag

SEQ ID NO: 166275 - DNA, 25 bp, Canis familiaris
tggaaggaatgggggcgggtggtag

SEQ ID NO: 166276 - DNA, 25 bp, Canis familiaris
tggaaggaggggcgttcgtgtggga

SEQ ID NO: 166277 - DNA, 25 bp, Canis familiaris
tggaagggggccttccaactgtggg

SEQ ID NO: 166278 - DNA, 25 bp, Canis familiaris
tggatcggggtgccgttgaataggc

SEQ ID NO: 166279 - DNA, 25 bp, Canis familiaris
tgtacggggaagcttcactgggcat

SEQ ID NO: 166280 - DNA, 25 bp, Canis familiaris
tggagagggctacggttacgggcat

SEQ ID NO: 166281 - DNA, 25 bp, Canis familiaris
tggaggggacttccttaggtggctc

SEQ ID NO: 166282 - DNA, 25 bp, Canis familiaris
tggagtttgaggcccctaagctggc

SEQ ID NO: 166283 - DNA, 25 bp, Canis familiaris
tgtacatttgggtcctctagagtcg

SEQ ID NO: 166284 - DNA, 25 bp, Canis familiaris
tgtacttgggggccatgtcaaccag

SEQ ID NO: 166285 - DNA, 25 bp, Canis familiaris
tggactagggggcattcaaccggca

SEQ ID NO: 166286 - DNA, 25 bp, Canis familiaris
tggagccagggtgtattacgaagcc

SEQ ID NO: 166287 - DNA, 25 bp, Canis familiaris
tggagccggtgttgtttgtccaagc

SEQ ID NO: 166288 - DNA, 25 bp, Canis familiaris
tggacacggtgatatttgttgtaca

SEQ ID NO: 166289 - DNA, 25 bp, Canis familiaris
tggtccgtgtattctttgggtccag

SEQ ID NO: 166290 - DNA, 25 bp, Canis familiaris
tggatcgggtattttcggggctgca

SEQ ID NO: 166291 - DNA, 25 bp, Canis familiaris
tggacgaggaattcttccggcgggt

SEQ ID NO: 166292 - DNA, 25 bp, Canis familiaris
tggacacaccattccttcaaggtgg

SEQ ID NO: 166293 - DNA, 25 bp, Canis familiaris
tggaacccattacaagctggtgccc

SEQ ID NO: 166294 - DNA, 25 bp, Canis familiaris
tggaacccatgggtaactttcccat

SEQ ID NO: 166295 - DNA, 25 bp, Canis familiaris
tggaacgagcgggtagacctttctt

SEQ ID NO: 166296 - DNA, 25 bp, Canis familiaris
tggaacattccggatctgaccttcc

SEQ ID NO: 166297 - DNA, 25 bp, Canis familiaris
tggaactcaccggattacttcctgt

SEQ ID NO: 166298 - DNA, 25 bp, Canis familiaris
tggacactcccagggtagttaacta

SEQ ID NO: 166299 - DNA, 25 bp, Canis familiaris
tggaaacccctgatcagtttggctg

SEQ ID NO: 166300 - DNA, 25 bp, Canis familiaris
tggaaacctccttccgaatgatgga

SEQ ID NO: 166301 - DNA, 25 bp, Canis familiaris
tggaaggcaacagtccccaagggag

SEQ ID NO: 166302 - DNA, 25 bp, Canis familiaris
tggatgatgtgaaccccgaaggggg

SEQ ID NO: 166303 - DNA, 25 bp, Canis familiaris
tggcagtataaatcacgacggagag

SEQ ID NO: 166304 - DNA, 25 bp, Canis familiaris
tggaggaagaaagcagtccgacgtc

SEQ ID NO: 166305 - DNA, 25 bp, Canis familiaris
tggagcgatcaccaagggttccttg

SEQ ID NO: 166306 - DNA, 25 bp, Canis familiaris
tggaatatcccacgggatttccttc

SEQ ID NO: 166307 - DNA, 25 bp, Canis familiaris
tggcaacacaaaccggatttctctt

SEQ ID NO: 166308 - DNA, 25 bp, Canis familiaris
tgtgaataaattcgtcgtcttcctg

SEQ ID NO: 166309 - DNA, 25 bp, Canis familiaris
tggaaaaatgtttattcttgtctga

SEQ ID NO: 166310 - DNA, 25 bp, Canis familiaris
tggaaacttcctttatctctactcc

SEQ ID NO: 166311 - DNA, 25 bp, Canis familiaris
tggcatggccttccgtgttcctacc

SEQ ID NO: 166312 - DNA, 25 bp, Canis familiaris
tggcccgcgctggagtttcaatacc

SEQ ID NO: 166313 - DNA, 25 bp, Canis familiaris
tcctcatcgtgctgttttcacgacc

SEQ ID NO: 166314 - DNA, 25 bp, Canis familiaris
tggccatcgtgtttgtcatctacga

SEQ ID NO: 166315 - DNA, 25 bp, Canis familiaris
tggcttcgtgtggttgcatctgacc

SEQ ID NO: 166316 - DNA, 25 bp, Canis familiaris
tggcccgctgtgggccacagcaagc

SEQ ID NO: 166317 - DNA, 25 bp, Canis familiaris
tggcccacatgccattgacaaccac

SEQ ID NO: 166318 - DNA, 25 bp, Canis familiaris
tgtcccacatggaggcaagtgccta

SEQ ID NO: 166319 - DNA, 25 bp, Canis familiaris
tggcctacatggcctccaaggagta

SEQ ID NO: 166320 - DNA, 25 bp, Canis familiaris
tggcgcaccattggccacaagggta

SEQ ID NO: 166321 - DNA, 25 bp, Canis familiaris
tggagaccattcatccaatgcccta

SEQ ID NO: 166322 - DNA, 25 bp, Canis familiaris
tggcgatcctggtctagaatcccat

SEQ ID NO: 166323 - DNA, 25 bp, Canis familiaris
tggcgacctggaacatgagcatgct

SEQ ID NO: 166324 - DNA, 25 bp, Canis familiaris
tggctcaccgagaagcatgcacgcc

SEQ ID NO: 166325 - DNA, 25 bp, Canis familiaris
tggctcatctggtcaagcatctgcc

SEQ ID NO: 166326 - DNA, 25 bp, Canis familiaris
tggcattctctgtcaagccgcaaac

SEQ ID NO: 166327 - DNA, 25 bp, Canis familiaris
tggttcctgtcaccatcgaagtgga

SEQ ID NO: 166328 - DNA, 25 bp, Canis familiaris
tggcttccctgacatgtccatggga

SEQ ID NO: 166329 - DNA, 25 bp, Canis familiaris
tggcttcccagagacatgccactgg

SEQ ID NO: 166330 - DNA, 25 bp, Canis familiaris
tggcctcgtgggaggccagctgtcg

SEQ ID NO: 166331 - DNA, 25 bp, Canis familiaris
tggcccctgaggagcaccctgtgct

SEQ ID NO: 166332 - DNA, 25 bp, Canis familiaris
tggaacctgaggtgcaaccgcagca

SEQ ID NO: 166333 - DNA, 25 bp, Canis familiaris
tggatacagtaatccaaccccgtcc

SEQ ID NO: 166334 - DNA, 25 bp, Canis familiaris
tggcatgacatgcagaccactaccg

SEQ ID NO: 166335 - DNA, 25 bp, Canis familiaris
tggcatccgtataccaacactgcac

SEQ ID NO: 166336 - DNA, 25 bp, Canis familiaris
tggaccagatagttcccagctactt

SEQ ID NO: 166337 - DNA, 25 bp, Canis familiaris
tggctacagaacagctccaggttct

SEQ ID NO: 166338 - DNA, 25 bp, Canis familiaris
tggaccacaacggtcctggtgtccc

SEQ ID NO: 166339 - DNA, 25 bp, Canis familiaris
tggaaacccaggatcaagtcccaca

SEQ ID NO: 166340 - DNA, 25 bp, Canis familiaris
tgtgaaatactggtttccttcccca

SEQ ID NO: 166341 - DNA, 25 bp, Canis familiaris
tggaggtaactgttactgctccccc

SEQ ID NO: 166342 - DNA, 25 bp, Canis familiaris
tgaacttaaaagaggccatccccgt

SEQ ID NO: 166343 - DNA, 25 bp, Canis familiaris
tgaaattgaaagggggattctaccg

SEQ ID NO: 166344 - DNA, 25 bp, Canis familiaris
tggaatgtaatcccggtcattaaca

SEQ ID NO: 166345 - DNA, 25 bp, Canis familiaris
tggaatggaaggcctggggacagac

SEQ ID NO: 166346 - DNA, 25 bp, Canis familiaris
tggacatggaccccggggaatgcac

SEQ ID NO: 166347 - DNA, 25 bp, Canis familiaris
tggcacgatgacctccaggagggac

SEQ ID NO: 166348 - DNA, 25 bp, Canis familiaris
tggcctgagccctcagagaacagca

SEQ ID NO: 166349 - DNA, 25 bp, Canis familiaris
tggcctgaagcgcccaagaatcgac

SEQ ID NO: 166350 - DNA, 25 bp, Canis familiaris
tggctctataaccgcaagacatccc

SEQ ID NO: 166351 - DNA, 25 bp, Canis familiaris
tggccgaagacgcagcaggagtcca

SEQ ID NO: 166352 - DNA, 25 bp, Canis familiaris
tggccgaggacatcatgcggcttcg

SEQ ID NO: 166353 - DNA, 25 bp, Canis familiaris
tggccgggaagggcttgcttgggca

SEQ ID NO: 166354 - DNA, 25 bp, Canis familiaris
tggacgggaagggcctgccaggccc

SEQ ID NO: 166355 - DNA, 25 bp, Canis familiaris
tggatagggacgagggccgagacgc

SEQ ID NO: 166356 - DNA, 25 bp, Canis familiaris
tggacgcggacgtcggggaggaggg

SEQ ID NO: 166357 - DNA, 25 bp, Canis familiaris
tggcctccgggctggggagaagggc

SEQ ID NO: 166358 - DNA, 25 bp, Canis familiaris
tggcacttggggcgaggacaaaggc

SEQ ID NO: 166359 - DNA, 25 bp, Canis familiaris
tggcatctgttggtctgggatgcca

SEQ ID NO: 166360 - DNA, 25 bp, Canis familiaris
tggcattgacctagtgggtgcaccc

SEQ ID NO: 166361 - DNA, 25 bp, Canis familiaris
tggcttcaccttggtgtagaacccc

SEQ ID NO: 166362 - DNA, 25 bp, Canis familiaris
tggctttcttgactttaaacttcct

SEQ ID NO: 166363 - DNA, 25 bp, Canis familiaris
tggcattgccttttttgacattttc

SEQ ID NO: 166364 - DNA, 25 bp, Canis familiaris
tggcattccactatattaattttgc

SEQ ID NO: 166365 - DNA, 25 bp, Canis familiaris
tggcactacctaattggaaaataca

SEQ ID NO: 166366 - DNA, 25 bp, Canis familiaris
tggcctcgtccgacaggtaaagaca

SEQ ID NO: 166367 - DNA, 25 bp, Canis familiaris
tcgaatcgtgccttcaggatattaa

SEQ ID NO: 166368 - DNA, 25 bp, Canis familiaris
tggcaatgcagtccactgatagtat

SEQ ID NO: 166369 - DNA, 25 bp, Canis familiaris
tggcagacatcaacactgggcatct

SEQ ID NO: 166370 - DNA, 25 bp, Canis familiaris
tggcagacatcttgtcgcgagctgc

SEQ ID NO: 166371 - DNA, 25 bp, Canis familiaris
tggcaggatgctgggccgatgtgca

SEQ ID NO: 166372 - DNA, 25 bp, Canis familiaris
tggcagtcatggagcctgatgtggg

SEQ ID NO: 166373 - DNA, 25 bp, Canis familiaris
tggagtattgttccgggggcaactt

SEQ ID NO: 166374 - DNA, 25 bp, Canis familiaris
tggctttcttcttctagggcagcaa

SEQ ID NO: 166375 - DNA, 25 bp, Canis familiaris
tggcaatttgtcattcaggatcaga

SEQ ID NO: 166376 - DNA, 25 bp, Canis familiaris
tggcatttcttcttgtgactacagg

SEQ ID NO: 166377 - DNA, 25 bp, Canis familiaris
tggctttcatgcaatcttcatcacc

SEQ ID NO: 166378 - DNA, 25 bp, Canis familiaris
tggcatttatttgtaatcctccctc

SEQ ID NO: 166379 - DNA, 25 bp, Canis familiaris
tggcagtttatttgacaacccaccc

SEQ ID NO: 166380 - DNA, 25 bp, Canis familiaris
tggaaattagttggcccctactgcc

SEQ ID NO: 166381 - DNA, 25 bp, Canis familiaris
tggaactaatttgtccctcatcttc

SEQ ID NO: 166382 - DNA, 25 bp, Canis familiaris
tggaactacagtattcgtcctacca

SEQ ID NO: 166383 - DNA, 25 bp, Canis familiaris
tggcactggaaggccttcggcctac

SEQ ID NO: 166384 - DNA, 25 bp, Canis familiaris
tggagaggagggattcgggtacaaa

SEQ ID NO: 166385 - DNA, 25 bp, Canis familiaris
tggaaggacgaggcccgggtaggca

SEQ ID NO: 166386 - DNA, 25 bp, Canis familiaris
tggagaaaggaccacccgtttggct

SEQ ID NO: 166387 - DNA, 25 bp, Canis familiaris
tggcagaacgaacaccacattttga

SEQ ID NO: 166388 - DNA, 25 bp, Canis familiaris
tggcgaatccatatacaccatttcc

SEQ ID NO: 166389 - DNA, 25 bp, Canis familiaris
tggcagcgaacactttcaccattac

SEQ ID NO: 166390 - DNA, 25 bp, Canis familiaris
tggcagcaatactatctccatcttc

SEQ ID NO: 166391 - DNA, 25 bp, Canis familiaris
tggcatgcagtttcacttattttca

SEQ ID NO: 166392 - DNA, 25 bp, Canis familiaris
tggaagtattcatttatttagtcaa

SEQ ID NO: 166393 - DNA, 25 bp, Canis familiaris
tggacgttaacattgaaatacatta

SEQ ID NO: 166394 - DNA, 25 bp, Canis familiaris
tggaagtggaagtatggaacatttt

SEQ ID NO: 166395 - DNA, 25 bp, Canis familiaris
tggaagtatctgctatgggactatt

SEQ ID NO: 166396 - DNA, 25 bp, Canis familiaris
tggcggtattggaaagctggctcat

SEQ ID NO: 166397 - DNA, 25 bp, Canis familiaris
tggcagggcttgaattcaccctctg

SEQ ID NO: 166398 - DNA, 25 bp, Canis familiaris
tggcaggtctggtgtacaactcctc

SEQ ID NO: 166399 - DNA, 25 bp, Canis familiaris
tggatggtcgtgcggaactgctcca

SEQ ID NO: 166400 - DNA, 25 bp, Canis familiaris
tggctgtgagtgcggggaggcccat

SEQ ID NO: 166401 - DNA, 25 bp, Canis familiaris
tggcgagagctgcaggaggcgccgc

SEQ ID NO: 166402 - DNA, 25 bp, Canis familiaris
tggcgaatgcctcggtaatccggtc

SEQ ID NO: 166403 - DNA, 25 bp, Canis familiaris
tggagcaatggtccctggaccggtc

SEQ ID NO: 166404 - DNA, 25 bp, Canis familiaris
tggatcccagtgaccaggacgtggt

SEQ ID NO: 166405 - DNA, 25 bp, Canis familiaris
tggcatcgacagaaccggtggtggt

SEQ ID NO: 166406 - DNA, 25 bp, Canis familiaris
tggcaatgacagatccacgcttttg

SEQ ID NO: 166407 - DNA, 25 bp, Canis familiaris
tggctgtgacgattgtgatcctcat

SEQ ID NO: 166408 - DNA, 25 bp, Canis familiaris
tggctggagcagcatgtggcctagc

SEQ ID NO: 166409 - DNA, 25 bp, Canis familiaris
tggcatgacagccgtgctgtcgcgg

SEQ ID NO: 166410 - DNA, 25 bp, Canis familiaris
tggctcaagctcggtggtgggccac

SEQ ID NO: 166411 - DNA, 25 bp, Canis familiaris
tggctccactgggtgagatcctgac

SEQ ID NO: 166412 - DNA, 25 bp, Canis familiaris
tggctgccacggagagtcatcgagc

SEQ ID NO: 166413 - DNA, 25 bp, Canis familiaris
tggatcagcaagcaggagtacgatg

SEQ ID NO: 166414 - DNA, 25 bp, Canis familiaris
tggcaagcacgatggtgttcggcga

SEQ ID NO: 166415 - DNA, 25 bp, Canis familiaris
tggctcagcctattgtgtgactctt

SEQ ID NO: 166416 - DNA, 25 bp, Canis familiaris
tggctagttatttggcctctggaac

SEQ ID NO: 166417 - DNA, 25 bp, Canis familiaris
tggcacgcttatgatggcttctacc

SEQ ID NO: 166418 - DNA, 25 bp, Canis familiaris
tggcaagtttggtgctgtcaaccgc

SEQ ID NO: 166419 - DNA, 25 bp, Canis familiaris
tggaagttggccgcgcaaatgccgc

SEQ ID NO: 166420 - DNA, 25 bp, Canis familiaris
tggaaggtggccgcaattgacaagc

SEQ ID NO: 166421 - DNA, 25 bp, Canis familiaris
tgtaacgggggccaatgctgccctt

SEQ ID NO: 166422 - DNA, 25 bp, Canis familiaris
tggccctggagatggacattcctct

SEQ ID NO: 166423 - DNA, 25 bp, Canis familiaris
tggtccgataaatccaactctcttt

SEQ ID NO: 166424 - DNA, 25 bp, Canis familiaris
tggttatgtaagtccccagttttgc

SEQ ID NO: 166425 - DNA, 25 bp, Canis familiaris
tggagtcaaacgtatcccatttttc

SEQ ID NO: 166426 - DNA, 25 bp, Canis familiaris
tgtgaatgaaaacccttattttgcc

SEQ ID NO: 166427 - DNA, 25 bp, Canis familiaris
tggaggatacaaaccttttaacctg

SEQ ID NO: 166428 - DNA, 25 bp, Canis familiaris
tggctggtaagaagcccgttatacc

SEQ ID NO: 166429 - DNA, 25 bp, Canis familiaris
tgggcttgctggacccaagtttacc

SEQ ID NO: 166430 - DNA, 25 bp, Canis familiaris
tggcggggagtcccaagactgtacc

SEQ ID NO: 166431 - DNA, 25 bp, Canis familiaris
tggaaggaagtccccgtatgtagcc

SEQ ID NO: 166432 - DNA, 25 bp, Canis familiaris
tgtgaacggatttggccgtattggg

SEQ ID NO: 166433 - DNA, 25 bp, Canis familiaris
tgtgaacaggttgtacgtactttgt

SEQ ID NO: 166434 - DNA, 25 bp, Canis familiaris
tggaagagtttcgttcagctccttt

SEQ ID NO: 166435 - DNA, 25 bp, Canis familiaris
tggacgagcgtccgcatgctaatcg

SEQ ID NO: 166436 - DNA, 25 bp, Canis familiaris
tggcaggggaccttctcatatgcta

SEQ ID NO: 166437 - DNA, 25 bp, Canis familiaris
tggcaggggccctgtgagacacata

SEQ ID NO: 166438 - DNA, 25 bp, Canis familiaris
tggcggtttctgatggcgtcatcaa

SEQ ID NO: 166439 - DNA, 25 bp, Canis familiaris
tggcagctgattccatgtctgggat

SEQ ID NO: 166440 - DNA, 25 bp, Canis familiaris
tggcaggctcgcctctagaggatga

SEQ ID NO: 166441 - DNA, 25 bp, Canis familiaris
tggagagtcgagttgcagtgctgga

SEQ ID NO: 166442 - DNA, 25 bp, Canis familiaris
tggacgattgcatgatgactgctga

SEQ ID NO: 166443 - DNA, 25 bp, Canis familiaris
tggcaccgagcatgcatgcatgttg

SEQ ID NO: 166444 - DNA, 25 bp, Canis familiaris
tggcccagcacaggatgagcacggg

SEQ ID NO: 166445 - DNA, 25 bp, Canis familiaris
tggctgctcgaagagtgaggcccca

SEQ ID NO: 166446 - DNA, 25 bp, Canis familiaris
tggctgctgcgggcaagaaggctcc

SEQ ID NO: 166447 - DNA, 25 bp, Canis familiaris
tggcgctggtgctggcacagcgctc

SEQ ID NO: 166448 - DNA, 25 bp, Canis familiaris
tgggtcatgtcagggaaggctttct

SEQ ID NO: 166449 - DNA, 25 bp, Canis familiaris
tggatttgtcaaccagagcccttac

SEQ ID NO: 166450 - DNA, 25 bp, Canis familiaris
tggatttagacccagcagaagtata

SEQ ID NO: 166451 - DNA, 25 bp, Canis familiaris
tggacctaaccccagaatggcaata

SEQ ID NO: 166452 - DNA, 25 bp, Canis familiaris
tggcagttcaagcccaacaagccca

SEQ ID NO: 166453 - DNA, 25 bp, Canis familiaris
tggcgttacagcgcaacagcagcct

SEQ ID NO: 166454 - DNA, 25 bp, Canis familiaris
tggcacctcacatacaccagtgcct

SEQ ID NO: 166455 - DNA, 25 bp, Canis familiaris
tggctcccacgggagtgagtgcctg

SEQ ID NO: 166456 - DNA, 25 bp, Canis familiaris
tggcccgcatcttgggtatggtgtg

SEQ ID NO: 166457 - DNA, 25 bp, Canis familiaris
tggctacccggggaatggtgctgcc

SEQ ID NO: 166458 - DNA, 25 bp, Canis familiaris
tggcttccatgcggaggacagggcc

SEQ ID NO: 166459 - DNA, 25 bp, Canis familiaris
tggctccaattactggcagggccct

SEQ ID NO: 166460 - DNA, 25 bp, Canis familiaris
tggctccagaatagtgtgtgtgtgt

SEQ ID NO: 166461 - DNA, 25 bp, Canis familiaris
tggctgccagcagagtgtggaggct

SEQ ID NO: 166462 - DNA, 25 bp, Canis familiaris
tggcagatcggccaggtgcgagcac

SEQ ID NO: 166463 - DNA, 25 bp, Canis familiaris
tggagacgcgctcggtttagactca

SEQ ID NO: 166464 - DNA, 25 bp, Canis familiaris
tggagaagcccggccgtatttagcc

SEQ ID NO: 166465 - DNA, 25 bp, Canis familiaris
tggcaggagccgagggttgttcagc

SEQ ID NO: 166466 - DNA, 25 bp, Canis familiaris
tggctggaccctcagtgtggggagt

SEQ ID NO: 166467 - DNA, 25 bp, Canis familiaris
tggaggacgacccaggtggggaccg

SEQ ID NO: 166468 - DNA, 25 bp, Canis familiaris
tggcggtagaccttgggaggggcac

SEQ ID NO: 166469 - DNA, 25 bp, Canis familiaris
tggctgcagggaccttttgggggcc

SEQ ID NO: 166470 - DNA, 25 bp, Canis familiaris
tggctgcagggtctgcgtgggagcc

SEQ ID NO: 166471 - DNA, 25 bp, Canis familiaris
tggctcagtcggttgggtatctgcc

SEQ ID NO: 166472 - DNA, 25 bp, Canis familiaris
tggctcgtgggtagaacatgtgctc

SEQ ID NO: 166473 - DNA, 25 bp, Canis familiaris
tggcatcccacgatgaactggtccg

SEQ ID NO: 166474 - DNA, 25 bp, Canis familiaris
tggcttcccagttgctactgagagc

SEQ ID NO: 166475 - DNA, 25 bp, Canis familiaris
tggctctaaaattaaatgaagctag

SEQ ID NO: 166476 - DNA, 25 bp, Canis familiaris
tggcttaataatttagccaggcttc

SEQ ID NO: 166477 - DNA, 25 bp, Canis familiaris
tggcttttaatctgacctctgcctc

SEQ ID NO: 166478 - DNA, 25 bp, Canis familiaris
tgtccaatttactgaccgtacacca

SEQ ID NO: 166479 - DNA, 25 bp, Canis familiaris
tgtcctgtttacatccttggtacca

SEQ ID NO: 166480 - DNA, 25 bp, Canis familiaris
tgtccttcttacgttacatggaaaa

SEQ ID NO: 166481 - DNA, 25 bp, Canis familiaris
tggccctttaagaaatatatacaaa

SEQ ID NO: 166482 - DNA, 25 bp, Canis familiaris
tggccctttcccatatatgagcatc

SEQ ID NO: 166483 - DNA, 25 bp, Canis familiaris
tggccctgttctgggatccatggcc

SEQ ID NO: 166484 - DNA, 25 bp, Canis familiaris
tggcacccactagggagttggctca

SEQ ID NO: 166485 - DNA, 25 bp, Canis familiaris
tggccctcatctacagggttgccat

SEQ ID NO: 166486 - DNA, 25 bp, Canis familiaris
tggctctgcttcagagggtgcccag

SEQ ID NO: 166487 - DNA, 25 bp, Canis familiaris
tggttggtgcttgggcagatcctag

SEQ ID NO: 166488 - DNA, 25 bp, Canis familiaris
tggacgcggacgtgctgtccaagat

SEQ ID NO: 166489 - DNA, 25 bp, Canis familiaris
tggacttcgaagcacgttgcacgtg

SEQ ID NO: 166490 - DNA, 25 bp, Canis familiaris
tggacttcggggacaatatctttaa

SEQ ID NO: 166491 - DNA, 25 bp, Canis familiaris
tggagccaggggaccttggctttaa

SEQ ID NO: 166492 - DNA, 25 bp, Canis familiaris
tggagccggaggcacttgtttttaa

SEQ ID NO: 166493 - DNA, 25 bp, Canis familiaris
tggaccttcactctttattttaaat

SEQ ID NO: 166494 - DNA, 25 bp, Canis familiaris
tggacgcgtccgttttattgcatta

SEQ ID NO: 166495 - DNA, 25 bp, Canis familiaris
tggaaggctccaggtcatttcctta

SEQ ID NO: 166496 - DNA, 25 bp, Canis familiaris
tggaaaatcccgtattccctttgct

SEQ ID NO: 166497 - DNA, 25 bp, Canis familiaris
tggcagaagacggggaccccttcgc

SEQ ID NO: 166498 - DNA, 25 bp, Canis familiaris
tggcaaacttgccaagacctccttg

SEQ ID NO: 166499 - DNA, 25 bp, Canis familiaris
tggacaaatattccaacccagctcc

SEQ ID NO: 166500 - DNA, 25 bp, Canis familiaris
tggacgaaatttatgaccccgcgtt

SEQ ID NO: 166501 - DNA, 25 bp, Canis familiaris
tggacgaaatttatatacccctctt

SEQ ID NO: 166502 - DNA, 25 bp, Canis familiaris
tggaaggcctttttcaagacccact

SEQ ID NO: 166503 - DNA, 25 bp, Canis familiaris
tggaaggggcttttgaaccctcaag

SEQ ID NO: 166504 - DNA, 25 bp, Canis familiaris
tggaaggggactggaccagccctag

SEQ ID NO: 166505 - DNA, 25 bp, Canis familiaris
tggcaagggtgcgtaaccgatgctc

SEQ ID NO: 166506 - DNA, 25 bp, Canis familiaris
tggcatgaaggagcatacccctctc

SEQ ID NO: 166507 - DNA, 25 bp, Canis familiaris
tggcttgatggacaaagggctcccc

SEQ ID NO: 166508 - DNA, 25 bp, Canis familiaris
tggcattgttaccaactgggacgac

SEQ ID NO: 166509 - DNA, 25 bp, Canis familiaris
tggcgtcttcaccaccatggagaag

SEQ ID NO: 166510 - DNA, 25 bp, Canis familiaris
tggcttctctaccctgagttgaaga

SEQ ID NO: 166511 - DNA, 25 bp, Canis familiaris
tggctacctggccctgaggaaggcc

SEQ ID NO: 166512 - DNA, 25 bp, Canis familiaris
tggcattcctggcctcgaagaattg

SEQ ID NO: 166513 - DNA, 25 bp, Canis familiaris
tgaaataatggcccgtgcaaaagca

SEQ ID NO: 166514 - DNA, 25 bp, Canis familiaris
tgaatttacagcattggcaaatggt

SEQ ID NO: 166515 - DNA, 25 bp, Canis familiaris
tggatggtacactttgggacacttg

SEQ ID NO: 166516 - DNA, 25 bp, Canis familiaris
tggtcagttgcctgggggactaaca

SEQ ID NO: 166517 - DNA, 25 bp, Canis familiaris
tggacgactacatggaggcgcgcga

SEQ ID NO: 166518 - DNA, 25 bp, Canis familiaris
tggaaaccaatacagccgcatgcag

SEQ ID NO: 166519 - DNA, 25 bp, Canis familiaris
tggacaagaacttgaagcccatcaa

SEQ ID NO: 166520 - DNA, 25 bp, Canis familiaris
tggtcatgcagaagcccaaccacat

SEQ ID NO: 166521 - DNA, 25 bp, Canis familiaris
tggacatcaggtaccaactgcactc

SEQ ID NO: 166522 - DNA, 25 bp, Canis familiaris
tggaatgctgactgcagcttcaccc

SEQ ID NO: 166523 - DNA, 25 bp, Canis familiaris
tggaagtgccttattacccagagcc

SEQ ID NO: 166524 - DNA, 25 bp, Canis familiaris
tgtatttgccatcaacaacaccaag

SEQ ID NO: 166525 - DNA, 25 bp, Canis familiaris
tggaattcgacctcaaaccacgtga

SEQ ID NO: 166526 - DNA, 25 bp, Canis familiaris
tggattttaatcccaaacccagata

SEQ ID NO: 166527 - DNA, 25 bp, Canis familiaris
tggattactacaaccacaacctgga

SEQ ID NO: 166528 - DNA, 25 bp, Canis familiaris
tggatttctacgtgacagtcctaat

SEQ ID NO: 166529 - DNA, 25 bp, Canis familiaris
tggatacctcctgtaaatcccacat

SEQ ID NO: 166530 - DNA, 25 bp, Canis familiaris
tggaaggtgcgtgtgaactggccct

SEQ ID NO: 166531 - DNA, 25 bp, Canis familiaris
tggaattggattaccattctgggcc

SEQ ID NO: 166532 - DNA, 25 bp, Canis familiaris
tggcatatgtggtcttcgttcatcg

SEQ ID NO: 166533 - DNA, 25 bp, Canis familiaris
tggcacttggtcctgcaatatcacc

SEQ ID NO: 166534 - DNA, 25 bp, Canis familiaris
tggcacactggcaagctgaagaccc

SEQ ID NO: 166535 - DNA, 25 bp, Canis familiaris
tggcagactggctgctggagcacgc

SEQ ID NO: 166536 - DNA, 25 bp, Canis familiaris
tggctgacgagctgcgaaggcatct

SEQ ID NO: 166537 - DNA, 25 bp, Canis familiaris
tggctggggttgagatggatcatct

SEQ ID NO: 166538 - DNA, 25 bp, Canis familiaris
tggctggaggttgggctggatcctc

SEQ ID NO: 166539 - DNA, 25 bp, Canis familiaris
tggctggatgagcacacgctggtca

SEQ ID NO: 166540 - DNA, 25 bp, Canis familiaris
tggcatcgtgatggactccggtgac

SEQ ID NO: 166541 - DNA, 25 bp, Canis familiaris
tggcatggagcaggtctgggggccc

SEQ ID NO: 166542 - DNA, 25 bp, Canis familiaris
tggcaggatcaggaaggggcccgcc

SEQ ID NO: 166543 - DNA, 25 bp, Canis familiaris
tggcagagtgtgggagggggccccc

SEQ ID NO: 166544 - DNA, 25 bp, Canis familiaris
tggcaaggtgcaggtgacgcggccc

SEQ ID NO: 166545 - DNA, 25 bp, Canis familiaris
tggcactgtgggcctaagtggcgcc

SEQ ID NO: 166546 - DNA, 25 bp, Canis familiaris
tggcaggcctggaccaattggccca

SEQ ID NO: 166547 - DNA, 25 bp, Canis familiaris
tggcatccctggaacctgggacagg

SEQ ID NO: 166548 - DNA, 25 bp, Canis familiaris
tggctaccagtgggtctgaagaccg

SEQ ID NO: 166549 - DNA, 25 bp, Canis familiaris
tggctactctggggttgaggtccga

SEQ ID NO: 166550 - DNA, 25 bp, Canis familiaris
tggcacactctgtacatttgggtcc

SEQ ID NO: 166551 - DNA, 25 bp, Canis familiaris
tggaatcatctggtctttctggata

SEQ ID NO: 166552 - DNA, 25 bp, Canis familiaris
tggacatactggatacagctggtca

SEQ ID NO: 166553 - DNA, 25 bp, Canis familiaris
tggcggggagtctacagctgaatgc

SEQ ID NO: 166554 - DNA, 25 bp, Canis familiaris
tggctgtgagcatgctaaccggtgc

SEQ ID NO: 166555 - DNA, 25 bp, Canis familiaris
tggctgctgagaacgaagcctgccc

SEQ ID NO: 166556 - DNA, 25 bp, Canis familiaris
tggctgcgaaacgacagccccatcc

SEQ ID NO: 166557 - DNA, 25 bp, Canis familiaris
tggctgcaagggccacagagcccac

SEQ ID NO: 166558 - DNA, 25 bp, Canis familiaris
tggcacacagggccaggctgcagaa

SEQ ID NO: 166559 - DNA, 25 bp, Canis familiaris
tggctgttgtggcaggtcagaaacc

SEQ ID NO: 166560 - DNA, 25 bp, Canis familiaris
tggcactggaggcaagtccatctac

SEQ ID NO: 166561 - DNA, 25 bp, Canis familiaris
tggcactggtgttacccaactatcc

SEQ ID NO: 166562 - DNA, 25 bp, Canis familiaris
tggcttggttgaaccacaattcccc

SEQ ID NO: 166563 - DNA, 25 bp, Canis familiaris
tggctcgagaagaaccacatcccca

SEQ ID NO: 166564 - DNA, 25 bp, Canis familiaris
tggcacatagagcacccacaaacca

SEQ ID NO: 166565 - DNA, 25 bp, Canis familiaris
tggcacacggtgtccctgaaagcca

SEQ ID NO: 166566 - DNA, 25 bp, Canis familiaris
tggcaacagggctgcttcaggacca

SEQ ID NO: 166567 - DNA, 25 bp, Canis familiaris
tggcaacatagactatcccacgacc

SEQ ID NO: 166568 - DNA, 25 bp, Canis familiaris
tggagcattaagtcaccaacccgtc

SEQ ID NO: 166569 - DNA, 25 bp, Canis familiaris
tggatattaaactcacctacctccc

SEQ ID NO: 166570 - DNA, 25 bp, Canis familiaris
tggaactaaataaacctcgcctccg

SEQ ID NO: 166571 - DNA, 25 bp, Canis familiaris
tggcagaaagaaaagttcccccgct

SEQ ID NO: 166572 - DNA, 25 bp, Canis familiaris
tggaaattttaacttcacacctcgc

SEQ ID NO: 166573 - DNA, 25 bp, Canis familiaris
tggaaatgttttaaatcccccacat

SEQ ID NO: 166574 - DNA, 25 bp, Canis familiaris
tggaagcgtctttatattttcccac

SEQ ID NO: 166575 - DNA, 25 bp, Canis familiaris
tggatggttttttattttcatgggg

SEQ ID NO: 166576 - DNA, 25 bp, Canis familiaris
tggaattttttggttcttctcgagg

SEQ ID NO: 166577 - DNA, 25 bp, Canis familiaris
tggcttctttttcatgtttcatcta

SEQ ID NO: 166578 - DNA, 25 bp, Canis familiaris
tggcttgtttttaggttttatatag

SEQ ID NO: 166579 - DNA, 25 bp, Canis familiaris
tggcacgattttattcttttttatg

SEQ ID NO: 166580 - DNA, 25 bp, Canis familiaris
tggagctttcctggtcttttatttt

SEQ ID NO: 166581 - DNA, 25 bp, Canis familiaris
tggacttccactacctgattttaat

SEQ ID NO: 166582 - DNA, 25 bp, Canis familiaris
tggaaccacccaactgtttctaaag

SEQ ID NO: 166583 - DNA, 25 bp, Canis familiaris
tggaaacaactcccactttttacag

SEQ ID NO: 166584 - DNA, 25 bp, Canis familiaris
tggaaattaatccccttcagtaaca

SEQ ID NO: 166585 - DNA, 25 bp, Canis familiaris
tggaatgatgtatcccttccattca

SEQ ID NO: 166586 - DNA, 25 bp, Canis familiaris
tggaatgttcattctgaattcatca

SEQ ID NO: 166587 - DNA, 25 bp, Canis familiaris
tggcagtgttcactctgatacctcc

SEQ ID NO: 166588 - DNA, 25 bp, Canis familiaris
tggcagcttcatgctcattactacc

SEQ ID NO: 166589 - DNA, 25 bp, Canis familiaris
tggcagctggcaacaattacgggca

SEQ ID NO: 166590 - DNA, 25 bp, Canis familiaris
tggagcatgtgcgaattcacccgga

SEQ ID NO: 166591 - DNA, 25 bp, Canis familiaris
tggcagtggctgttggccacgtgaa

SEQ ID NO: 166592 - DNA, 25 bp, Canis familiaris
tggcagggctcagtgaccttgtagg

SEQ ID NO: 166593 - DNA, 25 bp, Canis familiaris
tggcacgggcagcaggcttgctgag

SEQ ID NO: 166594 - DNA, 25 bp, Canis familiaris
tggctcagaggcataggccctgacc

SEQ ID NO: 166595 - DNA, 25 bp, Canis familiaris
tggtcagaagcacgggccggaccag

SEQ ID NO: 166596 - DNA, 25 bp, Canis familiaris
tggcaaattccatggcaccgtcaag

SEQ ID NO: 166597 - DNA, 25 bp, Canis familiaris
tggaacattcactgtatccctgggg

SEQ ID NO: 166598 - DNA, 25 bp, Canis familiaris
tggaagattctgtgtctcgggtgtc

SEQ ID NO: 166599 - DNA, 25 bp, Canis familiaris
tggaaactgcttggctgtgggggac

SEQ ID NO: 166600 - DNA, 25 bp, Canis familiaris
tggcaacacagcatttcggtggggc

SEQ ID NO: 166601 - DNA, 25 bp, Canis familiaris
tggagagcacactcccaggtaggag

SEQ ID NO: 166602 - DNA, 25 bp, Canis familiaris
tggggctcacttgaaaggcggggcc

SEQ ID NO: 166603 - DNA, 25 bp, Canis familiaris
tggggttgcctggaaattcccggca

SEQ ID NO: 166604 - DNA, 25 bp, Canis familiaris
tggacgtcttgtcggagtacccgga

SEQ ID NO: 166605 - DNA, 25 bp, Canis familiaris
tggacctttcaggagaccacgggga

SEQ ID NO: 166606 - DNA, 25 bp, Canis familiaris
tggcaggctttaggcatgaccacgg

SEQ ID NO: 166607 - DNA, 25 bp, Canis familiaris
tggcaccgtcaaggctgagaacggg

SEQ ID NO: 166608 - DNA, 25 bp, Canis familiaris
tggcaccgtcaaggctgagaacggg

SEQ ID NO: 166609 - DNA, 25 bp, Canis familiaris
tggaccctcctggcataatttgggg

SEQ ID NO: 166610 - DNA, 25 bp, Canis familiaris
tggacctcggcgttaatctgtgggt

SEQ ID NO: 166611 - DNA, 25 bp, Canis familiaris
tggacgtcgatggggtgttcgggtc

SEQ ID NO: 166612 - DNA, 25 bp, Canis familiaris
tggaagccgcatgggggatgggggt

SEQ ID NO: 166613 - DNA, 25 bp, Canis familiaris
tggaccccaggaggctgacgggtgt

SEQ ID NO: 166614 - DNA, 25 bp, Canis familiaris
tggacacccagttcatcgacgagaa

SEQ ID NO: 166615 - DNA, 25 bp, Canis familiaris
tggaggccaagatctccacgcagtt

SEQ ID NO: 166616 - DNA, 25 bp, Canis familiaris
tggcatggtataaacctgacatcaa

SEQ ID NO: 166617 - DNA, 25 bp, Canis familiaris
tggcacgagatccaactcttctcaa

SEQ ID NO: 166618 - DNA, 25 bp, Canis familiaris
tggacaagctgcatactctgcttcc

SEQ ID NO: 166619 - DNA, 25 bp, Canis familiaris
tggacaaccacgtcaggattccggg

SEQ ID NO: 166620 - DNA, 25 bp, Canis familiaris
tggaagactacttcaacggccacgg

SEQ ID NO: 166621 - DNA, 25 bp, Canis familiaris
tggactattacttagccataaaagg

SEQ ID NO: 166622 - DNA, 25 bp, Canis familiaris
tggcagcatttacaacccctgaagt

SEQ ID NO: 166623 - DNA, 25 bp, Canis familiaris
tggcaaacacaattgaccccgaaca

SEQ ID NO: 166624 - DNA, 25 bp, Canis familiaris
tggcaaggagattgtgaccccggac

SEQ ID NO: 166625 - DNA, 25 bp, Canis familiaris
tggcaggcactgtggacacccagtt

SEQ ID NO: 166626 - DNA, 25 bp, Canis familiaris
tggcagagactgtcttcatacccga

SEQ ID NO: 166627 - DNA, 25 bp, Canis familiaris
tggcatatgatcacttctcagcctt

SEQ ID NO: 166628 - DNA, 25 bp, Canis familiaris
tggcattgtctgaactctagcattt

SEQ ID NO: 166629 - DNA, 25 bp, Canis familiaris
tggctctggatcaactctacagatc

SEQ ID NO: 166630 - DNA, 25 bp, Canis familiaris
tggctctcttcaacctgattgatac

SEQ ID NO: 166631 - DNA, 25 bp, Canis familiaris
tggctctgttctgtttattcaccca

SEQ ID NO: 166632 - DNA, 25 bp, Canis familiaris
tggcagttttttttcttcatcccat

SEQ ID NO: 166633 - DNA, 25 bp, Canis familiaris
tggcagtttacattatttttgcaaa

SEQ ID NO: 166634 - DNA, 25 bp, Canis familiaris
tggttttgaaggttgttgttaagat

SEQ ID NO: 166635 - DNA, 25 bp, Canis familiaris
tggatatttgaggccaagttgttaa

SEQ ID NO: 166636 - DNA, 25 bp, Canis familiaris
tggaattttgcctaagtctgacaca

SEQ ID NO: 166637 - DNA, 25 bp, Canis familiaris
tggaccaagtctcagagcctggacc

SEQ ID NO: 166638 - DNA, 25 bp, Canis familiaris
tggcaaaactctcatggcatcctac

SEQ ID NO: 166639 - DNA, 25 bp, Canis familiaris
tggcaaaaccagccagccaggcaga

SEQ ID NO: 166640 - DNA, 25 bp, Canis familiaris
tggaaggcactggtcagcttgtcag

SEQ ID NO: 166641 - DNA, 25 bp, Canis familiaris
tggaagacctcaccacttaaggctc

SEQ ID NO: 166642 - DNA, 25 bp, Canis familiaris
tggataacttacactatacaacctg

SEQ ID NO: 166643 - DNA, 25 bp, Canis familiaris
tggacagacttagtttttgcacata

SEQ ID NO: 166644 - DNA, 25 bp, Canis familiaris
tggcttacttgacttatttaattaa

SEQ ID NO: 166645 - DNA, 25 bp, Canis familiaris
tggcttccctagtgcatttaaatta

SEQ ID NO: 166646 - DNA, 25 bp, Canis familiaris
tggttctccaaccttttattttcag

SEQ ID NO: 166647 - DNA, 25 bp, Canis familiaris
tggattccctggtttttctttgtca

SEQ ID NO: 166648 - DNA, 25 bp, Canis familiaris
tggttctactcttactttttgtaca

SEQ ID NO: 166649 - DNA, 25 bp, Canis familiaris
tggtttagcaccactttaagccgag

SEQ ID NO: 166650 - DNA, 25 bp, Canis familiaris
tggttttaattgaccttaacggatg

SEQ ID NO: 166651 - DNA, 25 bp, Canis familiaris
tggtttccgataacctagacagttt

SEQ ID NO: 166652 - DNA, 25 bp, Canis familiaris
tggtttccgatttcactaaggaact

SEQ ID NO: 166653 - DNA, 25 bp, Canis familiaris
tgttgtccaacaataaaccggaatt

SEQ ID NO: 166654 - DNA, 25 bp, Canis familiaris
tggtgctccaaattactaccccaat

SEQ ID NO: 166655 - DNA, 25 bp, Canis familiaris
tggtatctttaaactcaccccatct

SEQ ID NO: 166656 - DNA, 25 bp, Canis familiaris
tggaactatgtaagcctaacccacc

SEQ ID NO: 166657 - DNA, 25 bp, Canis familiaris
tggagtttgtattccttgaccaccc

SEQ ID NO: 166658 - DNA, 25 bp, Canis familiaris
tggaaagttattcctgtcccaacca

SEQ ID NO: 166659 - DNA, 25 bp, Canis familiaris
tggagtccaatacttttcccaacca

SEQ ID NO: 166660 - DNA, 25 bp, Canis familiaris
tggcattaaacactttgcccacccc

SEQ ID NO: 166661 - DNA, 25 bp, Canis familiaris
tggctacacaaggacaggctccagc

SEQ ID NO: 166662 - DNA, 25 bp, Canis familiaris
tggcatagcccagcagtggatccag

SEQ ID NO: 166663 - DNA, 25 bp, Canis familiaris
tggctactgccaaagggagcccttc

SEQ ID NO: 166664 - DNA, 25 bp, Canis familiaris
tggctttctgaggtggaggcccttc

SEQ ID NO: 166665 - DNA, 25 bp, Canis familiaris
tggctctggagggtgtgggccactt

SEQ ID NO: 166666 - DNA, 25 bp, Canis familiaris
tggcacggcaggatgttggctacca

SEQ ID NO: 166667 - DNA, 25 bp, Canis familiaris
tggacggcatggacttcttcaacga

SEQ ID NO: 166668 - DNA, 25 bp, Canis familiaris
tggcactggtgacctgtctgacaat

SEQ ID NO: 166669 - DNA, 25 bp, Canis familiaris
tggagctgtggatgcagttgcacga

SEQ ID NO: 166670 - DNA, 25 bp, Canis familiaris
tggacatgaggctgcaaatgcatca

SEQ ID NO: 166671 - DNA, 25 bp, Canis familiaris
tggcacacaggggacacagcatcac

SEQ ID NO: 166672 - DNA, 25 bp, Canis familiaris
tggtgacagtggggatggctataac

SEQ ID NO: 166673 - DNA, 25 bp, Canis familiaris
tgggtcggagcctatggattaacgc

SEQ ID NO: 166674 - DNA, 25 bp, Canis familiaris
tggagtgtggtaaaggttttcgtca

SEQ ID NO: 166675 - DNA, 25 bp, Canis familiaris
tggatttggtactggttttggcaca

SEQ ID NO: 166676 - DNA, 25 bp, Canis familiaris
tggaaggagtttgggctttggagcc

SEQ ID NO: 166677 - DNA, 25 bp, Canis familiaris
tggaagttgtacgaggcctactgcc

SEQ ID NO: 166678 - DNA, 25 bp, Canis familiaris
tggaagctcttcagtggtctttggc

SEQ ID NO: 166679 - DNA, 25 bp, Canis familiaris
tggaagtcctctgtgagttctacct

SEQ ID NO: 166680 - DNA, 25 bp, Canis familiaris
tggaaggcccgagaagttacccgat

SEQ ID NO: 166681 - DNA, 25 bp, Canis familiaris
tggaaggaccaagacatgcctaccc

SEQ ID NO: 166682 - DNA, 25 bp, Canis familiaris
tggaaggaaagatggcccaacccat

SEQ ID NO: 166683 - DNA, 25 bp, Canis familiaris
tggaggcccaagaaggcccaactcc

SEQ ID NO: 166684 - DNA, 25 bp, Canis familiaris
tggacccaaagatttccaaattcca

SEQ ID NO: 166685 - DNA, 25 bp, Canis familiaris
tggacccagaaaccttacagatcat

SEQ ID NO: 166686 - DNA, 25 bp, Canis familiaris
tggcacccagcacaatgaagatcaa

SEQ ID NO: 166687 - DNA, 25 bp, Canis familiaris
tggcacacacacttcaatgtccaag

SEQ ID NO: 166688 - DNA, 25 bp, Canis familiaris
tggcacaaatataaattctcggtgt

SEQ ID NO: 166689 - DNA, 25 bp, Canis familiaris
tggagaaagtggtcttccggctgca

SEQ ID NO: 166690 - DNA, 25 bp, Canis familiaris
tggaaacttggactcccgaggagac

SEQ ID NO: 166691 - DNA, 25 bp, Canis familiaris
tggaaacggatacctttgggagccg

SEQ ID NO: 166692 - DNA, 25 bp, Canis familiaris
tggtgggggtttctaacgatcacac

SEQ ID NO: 166693 - DNA, 25 bp, Canis familiaris
tggtgggggtttctaacgatcacac

SEQ ID NO: 166694 - DNA, 25 bp, Canis familiaris
tggtgggggtttctaacgatcacac

SEQ ID NO: 166695 - DNA, 25 bp, Canis familiaris
tgagttgggagtgtcctccacggac

SEQ ID NO: 166696 - DNA, 25 bp, Canis familiaris
tggcttgggttggtcatttcagggc

SEQ ID NO: 166697 - DNA, 25 bp, Canis familiaris
tggcttttcttgctcttagctggaa

SEQ ID NO: 166698 - DNA, 25 bp, Canis familiaris
tggcatttgtatattctgtagctcc

SEQ ID NO: 166699 - DNA, 25 bp, Canis familiaris
tggcttcttcaggcattcattttcc

SEQ ID NO: 166700 - DNA, 25 bp, Canis familiaris
tggcttcttcaggctttttctggat

SEQ ID NO: 166701 - DNA, 25 bp, Canis familiaris
tggctttctcccaaatattgggagg

SEQ ID NO: 166702 - DNA, 25 bp, Canis familiaris
tggcttccgtcctcatgagggaaga

SEQ ID NO: 166703 - DNA, 25 bp, Canis familiaris
tgtctggcccccaaagtgggaagaa

SEQ ID NO: 166704 - DNA, 25 bp, Canis familiaris
tggtcctaccccagctggggagatg

SEQ ID NO: 166705 - DNA, 25 bp, Canis familiaris
tggacacacaccactagtcggggtg

SEQ ID NO: 166706 - DNA, 25 bp, Canis familiaris
tggacaccaaccaattgccggggtt

SEQ ID NO: 166707 - DNA, 25 bp, Canis familiaris
tggatccccgtaattctccgggtat

SEQ ID NO: 166708 - DNA, 25 bp, Canis familiaris
tggattgtccgatttgatctccgta

SEQ ID NO: 166709 - DNA, 25 bp, Canis familiaris
tggcatttcccatgagactggcctc

SEQ ID NO: 166710 - DNA, 25 bp, Canis familiaris
tggctatttctcagagccaggccct

SEQ ID NO: 166711 - DNA, 25 bp, Canis familiaris
tggctttttgcaaatccaacccact

SEQ ID NO: 166712 - DNA, 25 bp, Canis familiaris
tggcattttctttctcctaaaactt

SEQ ID NO: 166713 - DNA, 25 bp, Canis familiaris
tggacatttttatcctaattaccat

SEQ ID NO: 166714 - DNA, 25 bp, Canis familiaris
tggacagttttataatcagaattct

SEQ ID NO: 166715 - DNA, 25 bp, Canis familiaris
tggacaacttcctggacaaattgta

SEQ ID NO: 166716 - DNA, 25 bp, Canis familiaris
tggcacccttttctgactaagttga

SEQ ID NO: 166717 - DNA, 25 bp, Canis familiaris
tgtggcctttttctaccacttttat

SEQ ID NO: 166718 - DNA, 25 bp, Canis familiaris
tggaactttgttctagtccttttct

SEQ ID NO: 166719 - DNA, 25 bp, Canis familiaris
tggaattttgctttttgttgtttgt

SEQ ID NO: 166720 - DNA, 25 bp, Canis familiaris
tggaaactggtttttctatgccttt

SEQ ID NO: 166721 - DNA, 25 bp, Canis familiaris
tggacacaccagctacttcagatcc

SEQ ID NO: 166722 - DNA, 25 bp, Canis familiaris
tggacgaaagacgaccggatccgcg

SEQ ID NO: 166723 - DNA, 25 bp, Canis familiaris
tggaaagaagctggaagatggtccc

SEQ ID NO: 166724 - DNA, 25 bp, Canis familiaris
tggaccaggagcggctagatcggct

SEQ ID NO: 166725 - DNA, 25 bp, Canis familiaris
tggaccaggccttgaaccaggtttt

SEQ ID NO: 166726 - DNA, 25 bp, Canis familiaris
tggagcgggacttcgaccagtttat

SEQ ID NO: 166727 - DNA, 25 bp, Canis familiaris
tggattgggtcttcgaggagctttt

SEQ ID NO: 166728 - DNA, 25 bp, Canis familiaris
tggcttgtgaatttcgacgtctgtg

SEQ ID NO: 166729 - DNA, 25 bp, Canis familiaris
tggactgtatactcgatttcatgtg

SEQ ID NO: 166730 - DNA, 25 bp, Canis familiaris
tggtcttctattaaacttcacggtt

SEQ ID NO: 166731 - DNA, 25 bp, Canis familiaris
tggtattctttgaaaaaccaagtgg

SEQ ID NO: 166732 - DNA, 25 bp, Canis familiaris
tggtttcctggccaaaccctaatgt

SEQ ID NO: 166733 - DNA, 25 bp, Canis familiaris
tgcaatttccagaagcacgcaccct

SEQ ID NO: 166734 - DNA, 25 bp, Canis familiaris
tggaaacgcagcagcagccagagcc

SEQ ID NO: 166735 - DNA, 25 bp, Canis familiaris
tggaatgattgatgggccaacccaa

SEQ ID NO: 166736 - DNA, 25 bp, Canis familiaris
tggaagttagacagtctcaccccca

SEQ ID NO: 166737 - DNA, 25 bp, Canis familiaris
tggaagttaatgtttctccaccctt

SEQ ID NO: 166738 - DNA, 25 bp, Canis familiaris
tggaagaagagtcctcttctcccct

SEQ ID NO: 166739 - DNA, 25 bp, Canis familiaris
tggaataaggaatttcccctccttg

SEQ ID NO: 166740 - DNA, 25 bp, Canis familiaris
tgtaaaaaagaatccctcatcccca

SEQ ID NO: 166741 - DNA, 25 bp, Canis familiaris
tgtaacagccaagaacccttcctga

SEQ ID NO: 166742 - DNA, 25 bp, Canis familiaris
tggacaactcaaataaccctcccaa

SEQ ID NO: 166743 - DNA, 25 bp, Canis familiaris
tggacccatacaatattctagcccc

SEQ ID NO: 166744 - DNA, 25 bp, Canis familiaris
tggacggcatatctgtgaccgacct

SEQ ID NO: 166745 - DNA, 25 bp, Canis familiaris
tggaagccaggcagtgacacaatca

SEQ ID NO: 166746 - DNA, 25 bp, Canis familiaris
tggaacctgtgcacgtctttaattg

SEQ ID NO: 166747 - DNA, 25 bp, Canis familiaris
tggacccctccaggtcttgaaaatc

SEQ ID NO: 166748 - DNA, 25 bp, Canis familiaris
tggaccccttggtgcaggaaataca

SEQ ID NO: 166749 - DNA, 25 bp, Canis familiaris
tggaacggcttgaaaggacaaagaa

SEQ ID NO: 166750 - DNA, 25 bp, Canis familiaris
tggaaggcgttttgagaccagacgg

SEQ ID NO: 166751 - DNA, 25 bp, Canis familiaris
tggaacgttttgtcagactgagact

SEQ ID NO: 166752 - DNA, 25 bp, Canis familiaris
tggaacttttcaaagcctgaccctc

SEQ ID NO: 166753 - DNA, 25 bp, Canis familiaris
tggtactacttaacaccaggcctcc

SEQ ID NO: 166754 - DNA, 25 bp, Canis familiaris
tggaagtgacggacaaccaggccct

SEQ ID NO: 166755 - DNA, 25 bp, Canis familiaris
tggaaggacaagacatcctacccgc

SEQ ID NO: 166756 - DNA, 25 bp, Canis familiaris
tggaaggccagaggctactacgctc

SEQ ID NO: 166757 - DNA, 25 bp, Canis familiaris
tggactccgaattgtcagctacctc

SEQ ID NO: 166758 - DNA, 25 bp, Canis familiaris
tggactgaaatttgggctactccca

SEQ ID NO: 166759 - DNA, 25 bp, Canis familiaris
tggagcgatttgtctggttaattcc

SEQ ID NO: 166760 - DNA, 25 bp, Canis familiaris
tggaggatttggggcatctccttcc

SEQ ID NO: 166761 - DNA, 25 bp, Canis familiaris
tggagttctggaggactccctttct

SEQ ID NO: 166762 - DNA, 25 bp, Canis familiaris
tggaaactgagttacaccctttcca

SEQ ID NO: 166763 - DNA, 25 bp, Canis familiaris
tggaaatggagttctcaccttgtga

SEQ ID NO: 166764 - DNA, 25 bp, Canis familiaris
tggaaaacagtgtcattctgttaaa

SEQ ID NO: 166765 - DNA, 25 bp, Canis familiaris
tggaataaaggacgcagatttgcaa

SEQ ID NO: 166766 - DNA, 25 bp, Canis familiaris
tggacagagaatcaccaaatgtgaa

SEQ ID NO: 166767 - DNA, 25 bp, Canis familiaris
tggcaccagagatggtcaaagtaaa

SEQ ID NO: 166768 - DNA, 25 bp, Canis familiaris
tggcagctcagatagtgtacattta

SEQ ID NO: 166769 - DNA, 25 bp, Canis familiaris
tggagctttaacttgagcttctgaa

SEQ ID NO: 166770 - DNA, 25 bp, Canis familiaris
tggatgcttgatgatgccgaccttg

SEQ ID NO: 166771 - DNA, 25 bp, Canis familiaris
tggtcatggatgcatacgagcctga

SEQ ID NO: 166772 - DNA, 25 bp, Canis familiaris
tggagctgatgataagccatgctta

SEQ ID NO: 166773 - DNA, 25 bp, Canis familiaris
tggactggacccactgttaaagcct

SEQ ID NO: 166774 - DNA, 25 bp, Canis familiaris
tggagtagtcccacaacaaacaccg

SEQ ID NO: 166775 - DNA, 25 bp, Canis familiaris
tggagtggaccacaaacgttagcct

SEQ ID NO: 166776 - DNA, 25 bp, Canis familiaris
tgggttgcccaaaaattgttgccct

SEQ ID NO: 166777 - DNA, 25 bp, Canis familiaris
tggagtcgctcctgtaaagggcctt

SEQ ID NO: 166778 - DNA, 25 bp, Canis familiaris
tggatgtcgccataataccaacccg

SEQ ID NO: 166779 - DNA, 25 bp, Canis familiaris
tggaggcccaaggaagccaaccggg

SEQ ID NO: 166780 - DNA, 25 bp, Canis familiaris
tggagatcgcccagaacaacgtcga

SEQ ID NO: 166781 - DNA, 25 bp, Canis familiaris
tggagacccggggactactactgca

SEQ ID NO: 166782 - DNA, 25 bp, Canis familiaris
tggagacccgggatcgaatcccacg

SEQ ID NO: 166783 - DNA, 25 bp, Canis familiaris
tggagacccgggatcgaatcccacg

SEQ ID NO: 166784 - DNA, 25 bp, Canis familiaris
tggagacccgggatcgaatcccacg

SEQ ID NO: 166785 - DNA, 25 bp, Canis familiaris
tggagacccgggatcgaatcccacg

SEQ ID NO: 166786 - DNA, 25 bp, Canis familiaris
tggagacccgggatcgaatcccaca

SEQ ID NO: 166787 - DNA, 25 bp, Canis familiaris
tggagacccgggatcgaatcccaca

SEQ ID NO: 166788 - DNA, 25 bp, Canis familiaris
tggagtccagagggttacctcccac

SEQ ID NO: 166789 - DNA, 25 bp, Canis familiaris
tggaatccaactttatacttcagcc

SEQ ID NO: 166790 - DNA, 25 bp, Canis familiaris
tggcaaagaacctttcctctgagcc

SEQ ID NO: 166791 - DNA, 25 bp, Canis familiaris
tggcaaacgagactttctcctggcc

SEQ ID NO: 166792 - DNA, 25 bp, Canis familiaris
tggacattcctgtcttattcctgac

SEQ ID NO: 166793 - DNA, 25 bp, Canis familiaris
tggagcatcgcactgatctttttca

SEQ ID NO: 166794 - DNA, 25 bp, Canis familiaris
tggaacgcagttgtttccttcctga

SEQ ID NO: 166795 - DNA, 25 bp, Canis familiaris
tggaagcaacgttctttccattcac

SEQ ID NO: 166796 - DNA, 25 bp, Canis familiaris
tggcaaacaccaatctgcttccagt

SEQ ID NO: 166797 - DNA, 25 bp, Canis familiaris
tggcaggaaccgagtctccagtgag

SEQ ID NO: 166798 - DNA, 25 bp, Canis familiaris
tggagaaaccagagggcctctaact

SEQ ID NO: 166799 - DNA, 25 bp, Canis familiaris
tggagaaccaagagggcctctaact

SEQ ID NO: 166800 - DNA, 25 bp, Canis familiaris
tggagtttctggagtgcagcgccaa

SEQ ID NO: 166801 - DNA, 25 bp, Canis familiaris
tggcagcttgcaagttggtgacccg

SEQ ID NO: 166802 - DNA, 25 bp, Canis familiaris
tggcagctctgctgcaatggcccac

SEQ ID NO: 166803 - DNA, 25 bp, Canis familiaris
tggcagctgcagtaactctgagccc

SEQ ID NO: 166804 - DNA, 25 bp, Canis familiaris
tggcactgcatacaatctgaggcct

SEQ ID NO: 166805 - DNA, 25 bp, Canis familiaris
tggcactgtcactgctgcaggagac

SEQ ID NO: 166806 - DNA, 25 bp, Canis familiaris
tggcaatgccatttgctcaggaccc

SEQ ID NO: 166807 - DNA, 25 bp, Canis familiaris
tggaatccgcatttcaggacccaat

SEQ ID NO: 166808 - DNA, 25 bp, Canis familiaris
tggagttccaactgatgtcacaagt

SEQ ID NO: 166809 - DNA, 25 bp, Canis familiaris
tggagctttcggtcctgtacaagga

SEQ ID NO: 166810 - DNA, 25 bp, Canis familiaris
tggactcatgttgcagactgtaaaa

SEQ ID NO: 166811 - DNA, 25 bp, Canis familiaris
tggactcttctggcagtgctatatc

SEQ ID NO: 166812 - DNA, 25 bp, Canis familiaris
tggacttcttccactgagcatgaca

SEQ ID NO: 166813 - DNA, 25 bp, Canis familiaris
tggagtacttaccaggagcaactta

SEQ ID NO: 166814 - DNA, 25 bp, Canis familiaris
tggaataatccccaggagacaccct

SEQ ID NO: 166815 - DNA, 25 bp, Canis familiaris
tggaaagtccccccagaattgttgt

SEQ ID NO: 166816 - DNA, 25 bp, Canis familiaris
tggaaggatcccaaggccttttttg

SEQ ID NO: 166817 - DNA, 25 bp, Canis familiaris
tggataggatcccagatcatcctat

SEQ ID NO: 166818 - DNA, 25 bp, Canis familiaris
tggcaagttggccagtgtgcctgct

SEQ ID NO: 166819 - DNA, 25 bp, Canis familiaris
tggcaggattggtagtcactctctt

SEQ ID NO: 166820 - DNA, 25 bp, Canis familiaris
tggcagtttgtgtgcacacacacac

SEQ ID NO: 166821 - DNA, 25 bp, Canis familiaris
tggcagaagttgtgccatcctccat

SEQ ID NO: 166822 - DNA, 25 bp, Canis familiaris
tggcagtacaggtgtctctgcgcct

SEQ ID NO: 166823 - DNA, 25 bp, Canis familiaris
tggcacccagcggggtgccagccac

SEQ ID NO: 166824 - DNA, 25 bp, Canis familiaris
tggcacccagctggttggaggaacc

SEQ ID NO: 166825 - DNA, 25 bp, Canis familiaris
tggcatccagcatctttgggacacc

SEQ ID NO: 166826 - DNA, 25 bp, Canis familiaris
tggacacagctatttcgggatcggg

SEQ ID NO: 166827 - DNA, 25 bp, Canis familiaris
tgtcccctagttaggttctggccac

SEQ ID NO: 166828 - DNA, 25 bp, Canis familiaris
tggcaacctctgtgggttgggccac

SEQ ID NO: 166829 - DNA, 25 bp, Canis familiaris
tggaaccctggggccgatgagacca

SEQ ID NO: 166830 - DNA, 25 bp, Canis familiaris
tggaggccaggatggccgtagcccc

SEQ ID NO: 166831 - DNA, 25 bp, Canis familiaris
tggttccagagctcagctggggcca

SEQ ID NO: 166832 - DNA, 25 bp, Canis familiaris
tgagataccctgttcagctttggcc

SEQ ID NO: 166833 - DNA, 25 bp, Canis familiaris
tggcaaccatcgaatcgcttgggca

SEQ ID NO: 166834 - DNA, 25 bp, Canis familiaris
tggaacctctgaaatatgctgaaca

SEQ ID NO: 166835 - DNA, 25 bp, Canis familiaris
tggcactcctgtcacacattgagaa

SEQ ID NO: 166836 - DNA, 25 bp, Canis familiaris
tggcaattactattcatctgagaga

SEQ ID NO: 166837 - DNA, 25 bp, Canis familiaris
tggcacttgacctagctgcagaggc

SEQ ID NO: 166838 - DNA, 25 bp, Canis familiaris
tgagcacctgtaccactagggctcg

SEQ ID NO: 166839 - DNA, 25 bp, Canis familiaris
tggagcctaatgccactttgtgtgg

SEQ ID NO: 166840 - DNA, 25 bp, Canis familiaris
tggagcccagagcaggtcgggtgtc

SEQ ID NO: 166841 - DNA, 25 bp, Canis familiaris
tggactcgaggctggtggggttgca

SEQ ID NO: 166842 - DNA, 25 bp, Canis familiaris
tggagccgggttggtacagcagttc

SEQ ID NO: 166843 - DNA, 25 bp, Canis familiaris
tggagccgtgggcagctacaatgct

SEQ ID NO: 166844 - DNA, 25 bp, Canis familiaris
tggagttggtgtctcatgtgccatg

SEQ ID NO: 166845 - DNA, 25 bp, Canis familiaris
tggaataggttctttctctcaggct

SEQ ID NO: 166846 - DNA, 25 bp, Canis familiaris
tggaaaggccgcttctttcggccca

SEQ ID NO: 166847 - DNA, 25 bp, Canis familiaris
tggaacggaacttgttgtccaccca

SEQ ID NO: 166848 - DNA, 25 bp, Canis familiaris
tggcagagccgtggctcgaattccc

SEQ ID NO: 166849 - DNA, 25 bp, Canis familiaris
tggcaggtagttgctcacatattca

SEQ ID NO: 166850 - DNA, 25 bp, Canis familiaris
tggaagtggttcaatctggattcag

SEQ ID NO: 166851 - DNA, 25 bp, Canis familiaris
tggaaagatttcactgcctacagat

SEQ ID NO: 166852 - DNA, 25 bp, Canis familiaris
tggaatcagattactttggcaagct

SEQ ID NO: 166853 - DNA, 25 bp, Canis familiaris
tggaacatagattcttcatgtaagc

SEQ ID NO: 166854 - DNA, 25 bp, Canis familiaris
tggatggctttgccaatcagttggc

SEQ ID NO: 166855 - DNA, 25 bp, Canis familiaris
tggattccacgtccatcagtttgga

SEQ ID NO: 166856 - DNA, 25 bp, Canis familiaris
tggtttcatcaatgccaccttgtga

SEQ ID NO: 166857 - DNA, 25 bp, Canis familiaris
tggattttgaactgcagacctgtat

SEQ ID NO: 166858 - DNA, 25 bp, Canis familiaris
tggaacttgcccggatattctctga

SEQ ID NO: 166859 - DNA, 25 bp, Canis familiaris
tggaacttgtccctgtcttttggga

SEQ ID NO: 166860 - DNA, 25 bp, Canis familiaris
tggaacttcttgctgttttcctggt

SEQ ID NO: 166861 - DNA, 25 bp, Canis familiaris
tggagtcttctgaggggttcctgga

SEQ ID NO: 166862 - DNA, 25 bp, Canis familiaris
tggagtgttctgaggcactttgtta

SEQ ID NO: 166863 - DNA, 25 bp, Canis familiaris
tggacactgtgcagggcctgtgggt

SEQ ID NO: 166864 - DNA, 25 bp, Canis familiaris
tggaaatgtcctgctggctggtgaa

SEQ ID NO: 166865 - DNA, 25 bp, Canis familiaris
tggagagatgtcatcccctgtgatc

SEQ ID NO: 166866 - DNA, 25 bp, Canis familiaris
tggcagcaagatgaaccccagtcac

SEQ ID NO: 166867 - DNA, 25 bp, Canis familiaris
tggagggacagttcccacaggcaag

SEQ ID NO: 166868 - DNA, 25 bp, Canis familiaris
tggaggtgaatgaccctacacgcgt

SEQ ID NO: 166869 - DNA, 25 bp, Canis familiaris
tggagtggaggactccttctggctt

SEQ ID NO: 166870 - DNA, 25 bp, Canis familiaris
tggacatcaaggtcttgcttcctct

SEQ ID NO: 166871 - DNA, 25 bp, Canis familiaris
tgtgcattaaggacatggcgggcct

SEQ ID NO: 166872 - DNA, 25 bp, Canis familiaris
tgtgcacgaaggaggcggccagcat

SEQ ID NO: 166873 - DNA, 25 bp, Canis familiaris
tggcacctcaagaagcgtggcctga

SEQ ID NO: 166874 - DNA, 25 bp, Canis familiaris
tggacactgagactacactgggtag

SEQ ID NO: 166875 - DNA, 25 bp, Canis familiaris
tggcacctgtgggaagctgggggcc

SEQ ID NO: 166876 - DNA, 25 bp, Canis familiaris
tggaccaggaggcagggctgggccc

SEQ ID NO: 166877 - DNA, 25 bp, Canis familiaris
tggaacagggagcagggatcatgga

SEQ ID NO: 166878 - DNA, 25 bp, Canis familiaris
tggaaaggaggggggatttgagagg

SEQ ID NO: 166879 - DNA, 25 bp, Canis familiaris
tggaaaggagggaaccagcttggga

SEQ ID NO: 166880 - DNA, 25 bp, Canis familiaris
tggacaaggctggtgtagaatccgg

SEQ ID NO: 166881 - DNA, 25 bp, Canis familiaris
tggaaagaggagctgggaccgcggc

SEQ ID NO: 166882 - DNA, 25 bp, Canis familiaris
tggcaaagccagcggggaccaagca

SEQ ID NO: 166883 - DNA, 25 bp, Canis familiaris
tggcaaggagagccggggtgcccaa

SEQ ID NO: 166884 - DNA, 25 bp, Canis familiaris
tggcaagagagtaccatgttggtcc

SEQ ID NO: 166885 - DNA, 25 bp, Canis familiaris
tggcaaggctctagtatctgtgggc

SEQ ID NO: 166886 - DNA, 25 bp, Canis familiaris
tggacaagcatcgatgattttggtc

SEQ ID NO: 166887 - DNA, 25 bp, Canis familiaris
tggacaagcccacgctgcttgtgta

SEQ ID NO: 166888 - DNA, 25 bp, Canis familiaris
tggcacacagggtcctgggtgctca

SEQ ID NO: 166889 - DNA, 25 bp, Canis familiaris
tggcacccggagctaggtgccagca

SEQ ID NO: 166890 - DNA, 25 bp, Canis familiaris
tggacccccaggaaggaggcgagtg

SEQ ID NO: 166891 - DNA, 25 bp, Canis familiaris
tggacctgtctctggagggtccggc

SEQ ID NO: 166892 - DNA, 25 bp, Canis familiaris
tggacctggctggccgggacctgac

SEQ ID NO: 166893 - DNA, 25 bp, Canis familiaris
tggacttggctggccgggacctgac

SEQ ID NO: 166894 - DNA, 25 bp, Canis familiaris
tggagttggaggtcctagcaccttc

SEQ ID NO: 166895 - DNA, 25 bp, Canis familiaris
tggaatctggggattctcccattgt

SEQ ID NO: 166896 - DNA, 25 bp, Canis familiaris
tggactcctgggatttcactgtatt

SEQ ID NO: 166897 - DNA, 25 bp, Canis familiaris
tggactcctcggtaggatactacac

SEQ ID NO: 166898 - DNA, 25 bp, Canis familiaris
tggacaactggggggctatgataca

SEQ ID NO: 166899 - DNA, 25 bp, Canis familiaris
tgtgaaactcggctgtattaatcac

SEQ ID NO: 166900 - DNA, 25 bp, Canis familiaris
tggacaacaccccttatgtgaacaa

SEQ ID NO: 166901 - DNA, 25 bp, Canis familiaris
tggactacacctactactggacaca

SEQ ID NO: 166902 - DNA, 25 bp, Canis familiaris
tggaataccgcaatcccagtgacca

SEQ ID NO: 166903 - DNA, 25 bp, Canis familiaris
tggcaatagcacatgactcaagtaa

SEQ ID NO: 166904 - DNA, 25 bp, Canis familiaris
tggacagtgcacaagttaaatactt

SEQ ID NO: 166905 - DNA, 25 bp, Canis familiaris
tggacaggaacacagacacacctcc

SEQ ID NO: 166906 - DNA, 25 bp, Canis familiaris
tggcacaagacacgggactcaccat

SEQ ID NO: 166907 - DNA, 25 bp, Canis familiaris
tggcacagtgacagctgccacgcaa

SEQ ID NO: 166908 - DNA, 25 bp, Canis familiaris
tggaacgacatgcatccatcctaca

SEQ ID NO: 166909 - DNA, 25 bp, Canis familiaris
tggaactgacatttcctgcacttcc

SEQ ID NO: 166910 - DNA, 25 bp, Canis familiaris
tggaagatgagcgtgtcgtgcctac

SEQ ID NO: 166911 - DNA, 25 bp, Canis familiaris
tggaacagcatggtccagtgcctca

SEQ ID NO: 166912 - DNA, 25 bp, Canis familiaris
tggaaagctggccaagtcctgttca

SEQ ID NO: 166913 - DNA, 25 bp, Canis familiaris
tggataagtcccagagccgattcga

SEQ ID NO: 166914 - DNA, 25 bp, Canis familiaris
tggaactgccctggggccagaggga

SEQ ID NO: 166915 - DNA, 25 bp, Canis familiaris
tggaacgtggctggacgtcaacggg

SEQ ID NO: 166916 - DNA, 25 bp, Canis familiaris
tggaacagttgcggcctgacaagcc

SEQ ID NO: 166917 - DNA, 25 bp, Canis familiaris
tggaaaatgctgtgtgctgccatgg

SEQ ID NO: 166918 - DNA, 25 bp, Canis familiaris
tggaagccatggagcgcttcgggtc

SEQ ID NO: 166919 - DNA, 25 bp, Canis familiaris
tggaagccatggagcgcttcgggtc

SEQ ID NO: 166920 - DNA, 25 bp, Canis familiaris
tggagctgtaggaggttctgtgccc

SEQ ID NO: 166921 - DNA, 25 bp, Canis familiaris
tgtcgcagttggcagagtacgggcg

SEQ ID NO: 166922 - DNA, 25 bp, Canis familiaris
tgcgcaagattcccaggccaagggc

SEQ ID NO: 166923 - DNA, 25 bp, Canis familiaris
tggcaagagtgacgaggagacaggg

SEQ ID NO: 166924 - DNA, 25 bp, Canis familiaris
tggcaagctgggcatcgtgaggaga

SEQ ID NO: 166925 - DNA, 25 bp, Canis familiaris
tggagcagtttgccactgtggtgga

SEQ ID NO: 166926 - DNA, 25 bp, Canis familiaris
tggaactctatgccagtgatcctga

SEQ ID NO: 166927 - DNA, 25 bp, Canis familiaris
tggaacttatgacctgagccgaagg

SEQ ID NO: 166928 - DNA, 25 bp, Canis familiaris
tgagaacgttggacggggacggact

SEQ ID NO: 166929 - DNA, 25 bp, Canis familiaris
tggaagagtcgatcgtggggcgggc

SEQ ID NO: 166930 - DNA, 25 bp, Canis familiaris
tggaaatgtccagcgtaggagggcc

SEQ ID NO: 166931 - DNA, 25 bp, Canis familiaris
tggtaatcctgctcagtacgagagg

SEQ ID NO: 166932 - DNA, 25 bp, Canis familiaris
tggaaccgccagaaggacgagatcg

SEQ ID NO: 166933 - DNA, 25 bp, Canis familiaris
tggagacgaccgaggacgactggca

SEQ ID NO: 166934 - DNA, 25 bp, Canis familiaris
tggagccaaccaaggagccgaagta

SEQ ID NO: 166935 - DNA, 25 bp, Canis familiaris
tggacacgacacacaaacttgagta

SEQ ID NO: 166936 - DNA, 25 bp, Canis familiaris
tggtctctgcccatagactttggtt

SEQ ID NO: 166937 - DNA, 25 bp, Canis familiaris
tggacttcctactaagacttgcgtt

SEQ ID NO: 166938 - DNA, 25 bp, Canis familiaris
tggacttcctactacatgagacttt

SEQ ID NO: 166939 - DNA, 25 bp, Canis familiaris
tggacattccccacatggacattga

SEQ ID NO: 166940 - DNA, 25 bp, Canis familiaris
tggaatgaccccagtgtcagattga

SEQ ID NO: 166941 - DNA, 25 bp, Canis familiaris
tggagtgaagccactggtcagcctg

SEQ ID NO: 166942 - DNA, 25 bp, Canis familiaris
tggactggatccaccagtacgtccc

SEQ ID NO: 166943 - DNA, 25 bp, Canis familiaris
tggaagtgatttcccgtagcctcaa

SEQ ID NO: 166944 - DNA, 25 bp, Canis familiaris
tggagcctgagtatcggctaccaca

SEQ ID NO: 166945 - DNA, 25 bp, Canis familiaris
tggagactacttccgtgctacttct

SEQ ID NO: 166946 - DNA, 25 bp, Canis familiaris
tggaagccacatctcagtgttctcc

SEQ ID NO: 166947 - DNA, 25 bp, Canis familiaris
tggaagccctgaacaagtctcttgc

SEQ ID NO: 166948 - DNA, 25 bp, Canis familiaris
tggaagcccttgtacgctttgatca

SEQ ID NO: 166949 - DNA, 25 bp, Canis familiaris
tggaggggcttcgagtgtttgacaa

SEQ ID NO: 166950 - DNA, 25 bp, Canis familiaris
tggagggtcttagtttcggagcagg

SEQ ID NO: 166951 - DNA, 25 bp, Canis familiaris
tggaacgtctttgtcagcactgaga

SEQ ID NO: 166952 - DNA, 25 bp, Canis familiaris
tggatatcggtcttagctcacacga

SEQ ID NO: 166953 - DNA, 25 bp, Canis familiaris
tggattcggtcataccatctctgag

SEQ ID NO: 166954 - DNA, 25 bp, Canis familiaris
tggatttgatggagcaacagccgca

SEQ ID NO: 166955 - DNA, 25 bp, Canis familiaris
tggaacattggaaaacacctgcgtt

SEQ ID NO: 166956 - DNA, 25 bp, Canis familiaris
tggagatcttggtaaaccccgatcc

SEQ ID NO: 166957 - DNA, 25 bp, Canis familiaris
tggaatttgccagaagcctcacgtc

SEQ ID NO: 166958 - DNA, 25 bp, Canis familiaris
tggaatgttcccaacggcttggacc

SEQ ID NO: 166959 - DNA, 25 bp, Canis familiaris
tggaagaatccccacgaacgcgata

SEQ ID NO: 166960 - DNA, 25 bp, Canis familiaris
tggaaagatccctcgaatgcacatg

SEQ ID NO: 166961 - DNA, 25 bp, Canis familiaris
tggaaacataccgcagacatcaatt

SEQ ID NO: 166962 - DNA, 25 bp, Canis familiaris
tcgaaacaaccggggctcacttgtt

SEQ ID NO: 166963 - DNA, 25 bp, Canis familiaris
tggaaaatcagaagcgagtgctcct

SEQ ID NO: 166964 - DNA, 25 bp, Canis familiaris
tggaattgcagaattgcgttgccct

SEQ ID NO: 166965 - DNA, 25 bp, Canis familiaris
tggaattcagacactctggctccaa

SEQ ID NO: 166966 - DNA, 25 bp, Canis familiaris
tggaatggcataacttcctcccatg

SEQ ID NO: 166967 - DNA, 25 bp, Canis familiaris
tggtagatctaacaccccgagacac

SEQ ID NO: 166968 - DNA, 25 bp, Canis familiaris
tggtgactctagataacctcgggcc

SEQ ID NO: 166969 - DNA, 25 bp, Canis familiaris
tggtgactgctagataaccctcggg

SEQ ID NO: 166970 - DNA, 25 bp, Canis familiaris
tggaacggagaatcacccgcaggcg

SEQ ID NO: 166971 - DNA, 25 bp, Canis familiaris
tggaactgggaatgcatggccggcc

SEQ ID NO: 166972 - DNA, 25 bp, Canis familiaris
tggaattggcaggggctgacccacc

SEQ ID NO: 166973 - DNA, 25 bp, Canis familiaris
tggactgcttaggacactaccagcc

SEQ ID NO: 166974 - DNA, 25 bp, Canis familiaris
tggaatgcctgagttcaacaccact

SEQ ID NO: 166975 - DNA, 25 bp, Canis familiaris
tggaatcacatcttggtacaggacc

SEQ ID NO: 166976 - DNA, 25 bp, Canis familiaris
tggaatcatcattggaattcgggat

SEQ ID NO: 166977 - DNA, 25 bp, Canis familiaris
tggaattcaagaggtctctgggcct

SEQ ID NO: 166978 - DNA, 25 bp, Canis familiaris
tggacaatttgcactttggctctct

SEQ ID NO: 166979 - DNA, 25 bp, Canis familiaris
tggacctggtcaactatttcctttc

SEQ ID NO: 166980 - DNA, 25 bp, Canis familiaris
tggacccaatcaactaatcctgctt

SEQ ID NO: 166981 - DNA, 25 bp, Canis familiaris
tggacccaacagaagaaatttacat

SEQ ID NO: 166982 - DNA, 25 bp, Canis familiaris
tggactccccaggaagccagttaaa

SEQ ID NO: 166983 - DNA, 25 bp, Canis familiaris
tggactacccggtgagcaggatcct

SEQ ID NO: 166984 - DNA, 25 bp, Canis familiaris
tggaaacacaggccaaggagaatgc

SEQ ID NO: 166985 - DNA, 25 bp, Canis familiaris
tggagaaacctgccaagtatgatga

SEQ ID NO: 166986 - DNA, 25 bp, Canis familiaris
tggagaaatgcccagcaaatacaga

SEQ ID NO: 166987 - DNA, 25 bp, Canis familiaris
tggaacaagctccagagcctctcag

SEQ ID NO: 166988 - DNA, 25 bp, Canis familiaris
tggacgaactcggagagcttcgccg

SEQ ID NO: 166989 - DNA, 25 bp, Canis familiaris
tggaagaagctcgggcagtccctat

SEQ ID NO: 166990 - DNA, 25 bp, Canis familiaris
tggaaagagcctcatggacctccat

SEQ ID NO: 166991 - DNA, 25 bp, Canis familiaris
tggaaatcccatcaccatcttccag

SEQ ID NO: 166992 - DNA, 25 bp, Canis familiaris
tggaagggctcatgaccacagtcca

SEQ ID NO: 166993 - DNA, 25 bp, Canis familiaris
tggaaggaggcattgccacctccca

SEQ ID NO: 166994 - DNA, 25 bp, Canis familiaris
tggaagtgtaggcctcaggcatccc

SEQ ID NO: 166995 - DNA, 25 bp, Canis familiaris
tgagaagggggcccggcaaacaggg

SEQ ID NO: 166996 - DNA, 25 bp, Canis familiaris
tggaagggggcgtcggtgaactgga

SEQ ID NO: 166997 - DNA, 25 bp, Canis familiaris
tggaagggggtgtgcatgtgcctct

SEQ ID NO: 166998 - DNA, 25 bp, Canis familiaris
tggaagagcggctagggctgacccg

SEQ ID NO: 166999 - DNA, 25 bp, Canis familiaris
tggaagcaggggggcgtgagccacg

SEQ ID NO: 167000 - DNA, 25 bp, Canis familiaris
tggaaggcagggtgggaggccgtgc

SEQ ID NO: 167001 - DNA, 25 bp, Canis familiaris
tggaaggcctagactgggaaccgtc

SEQ ID NO: 167002 - DNA, 25 bp, Canis familiaris
tggaggatgcctttttggggtctgt

SEQ ID NO: 167003 - DNA, 25 bp, Canis familiaris
tggagggcctacttgtgggacatta

SEQ ID NO: 167004 - DNA, 25 bp, Canis familiaris
tggaggggctattggtgacccgtca

SEQ ID NO: 167005 - DNA, 25 bp, Canis familiaris
tggagagggctcactggatcccaat

SEQ ID NO: 167006 - DNA, 25 bp, Canis familiaris
tggaaggggcctatgatcctgcaga

SEQ ID NO: 167007 - DNA, 25 bp, Canis familiaris
tggaggatcccagtcaatacccaga

SEQ ID NO: 167008 - DNA, 25 bp, Canis familiaris
tggaggtctccaagcagaaccggca

SEQ ID NO: 167009 - DNA, 25 bp, Canis familiaris
tggagaactgtcacacaactcggcc

SEQ ID NO: 167010 - DNA, 25 bp, Canis familiaris
tggagtacgtcaacgacttcgacct

SEQ ID NO: 167011 - DNA, 25 bp, Canis familiaris
tggatctgacgtgccgcctggagaa

SEQ ID NO: 167012 - DNA, 25 bp, Canis familiaris
tggactatattaccagcctggcgga

SEQ ID NO: 167013 - DNA, 25 bp, Canis familiaris
tggttgtttatgtcccagactggag

SEQ ID NO: 167014 - DNA, 25 bp, Canis familiaris
tggtttttgcaacgacgacggtggt

SEQ ID NO: 167015 - DNA, 25 bp, Canis familiaris
tggttaattaaatcctcagactggt

SEQ ID NO: 167016 - DNA, 25 bp, Canis familiaris
tggttcaatttacgactgcctatcg

SEQ ID NO: 167017 - DNA, 25 bp, Canis familiaris
tggatgactattcacggtccactgc

SEQ ID NO: 167018 - DNA, 25 bp, Canis familiaris
tggaagtgtttcaggctctgcagcg
